United States Patent Application Publication US 2011/0183924 A1 - sequence listing, part 194

SEQ ID NO: 461049 - DNA, 5125 bp, Homo sapiens
ctctctcttttggaaaaatgcagacaaacacaaaaagagaaccccctctttcctccctctctgcaacctcccctcctctctgcaacccgctcctcccctcctttcagtagccccatctttccctcctctctgcgccccctcctcccttcctctctgcagccccctcctcccctgctcctgccggaagagcagcaagacctgcagtgacgtcatgtctgtggacgcccaaaccctgaagaagaagatgggcaagctggcctgtgacccggccgcccactccatcctcagcagcctgctgctctacgtcacgggccgcgcagaccggcccccggggacagaggccggggggagcaggcccagccaccagccccagacccaggaggccacccagcggcccacgcgcttccagctcctgcaggccaagttcctgggcactggccgggagcgctacctcaagaggaccagggaggtgggccggctgatctccaaggacaagcaggggccgggtgggggcctcgtgggtgccaccatcaacaagctcctggagaagaccaaggagccggccccaaagccctgcctcagcgagaagccccgctggggccacccggccgggaagagcaccgtgaaaaacatcctgaagatattcttggccgccgaggagaaggaggcgaaggagaaagaagcacgcgagaagccccctgtggagcggcccaaagccgccaggggcctcttgccgaagatcatgggcaagagctcggtgctgtccaagctgcgggagaagttcgagcagaacagctgcctgtgctccgaggccagtgcgctgaggctgcacacgcaggagcggaagaagaggaacctgcagaggaagaggatgcaccggccggaggtgcgcgtgctgcacacggccaccatggccagcacctgcgtcaagatgccccctgcccgctttctggcctgcacggctgagcccctgccggccctcagcatcgccaccgtcgtctgtggccccaggagctggctgtcccactgcaccaaaatcagccactcggaggcaaggcgtccacccagaggagaagccagcgtgccccctagtgccagggagacggggcccagtgggaacaaagcagtgggaaaggggcccctggaggaggagccccaaagacagccaaggccctcgaagcccgtgacaccccaggtgatggctcagagggacggccacgctgtcccctcgctggccttctcttgtgctccctgcacaggtggagtccttcctggccttgtgcctgcatcatccccactgggaccggccagcccttggggcaccggatcagccggaggtgatgggactgcagaccccaccgcagagagcaccgcaggaggcgtccaggaggtgaggggagccaggctcacgtggcctcctgggcccccaggcgagtgtgcaggggagggccctgaaatcaccatgactgtttgcagttcagaggatgaaagggaaggagcaggcttcccagacccagggagagaccccctctttgccacccagaagtatttcccagaacagaaggtgccggagcacatcccacccctgaacgctccatcggtccaggctgctcggagaacacagcctgccacggagcctccacggataactgtccaaattccagttgtccatgaaatgccagcccctcccaccaggctgcaaaatatgtcaagtggtgaaaacaaaccttgtatttgtggaggagagaatgtggttgaaaatgcccacacagaatttcccaccgtgactgagaacagaaggggtcaccgagccccagtggaactgagcaagctttcagggatgcaggcgggactcagcgcctcttcgccgcaggggccacgggcagctccgcgtctggcagcagcaagaggggctgtgggcgccgaccacagtgtcccagagacacttctgacacagagactccagacagatcctgctggcgggaaggaaaacaaaggcagctttgagaattcacacggtcccaggaatcctgacgatatttcaggagagaggacctctgagctcagagatgtgaagcatccgttgccggaatctaatgaaatatcaatgcagaagaagggctccgcaacaaatgatcctgcagcctcacaaaaccttctgaggggaaacaccagccatgcctccagcagccagcaagtgccgtccccgactgggagaaacccaacaggagcccccacgtcactggcggcatcatccaaggggcgtacggggcctgagggtgtcaccccgatgggcatgacagtgcccggtgcgctggaggaatgcagaaggccgctgctaatagagtcttctcagcccctgaaggctgccgaggaaatcaccagccatgatgttcgcgagaacccactgtcctcattaaatgaaccacccaaaccaggtatgaaagcctgtggggcgatggcagctgcagggagcgttgcgagccgcgccacgcctgcaccagcgccaggcagcacccagagccctggagaccgcacagcgggagagccagagacgctgggccagtggggaagcagagccttgtccgaaagccaccccagaggagaggctctccctcgagaccctcacagccacggcctcctggcccctgggggatccttggagcccaagagtggagcagcagggaggagcctcctgagaggcgtggccctcgtccagcacccagaggacattgcgaccctcgcccgccacccggaggatgctgcggccctcgcccggcacccagaggcggcccgattatacatttcaaacacatcagcagccagcagacatacagcagctgtaggaggcagaaaggatgtggctgtggaaggaaaccttttgggtttcagcacagagtctggaattcctgcttctgatcatcctaggccacaggcaaggagcgtggcagagtcccccagctatggccctggcctcccgccgtcgcctcctgagaacccacaggcaaagggcagggagggcgtcaggtttccccgtggggcggagcctgaccatctgcttcccgcagtgcctcccgcggaggtggacatggggtgggtaggtggcacccaccagcggggccctccccatctacaggcacacctgccccctactgctggtgacacacaggcaaagctccgggccagtgtccccgagcctaggacgcaggcaggtgaatcccaggagcgtcccctgacacaggcggacctggggaggcaacagagtcaccaggcacaggaggagaccccccagcccggggatgcggggaagagggtggcgccgtcgggctcgaaggttgtgctgaacccagcaaaagagcctcagacatggtgggcacaggatctggccggggacaaagggatggccattggggttgggggcgcctgccagcgcagtgaccaaggtcagcagcatctgcagggaccctgggaggagcgggggcggagcacggcgtggggagagggcaccagggctgccaggaacccagctgtgcctccaggggagcccgaggggccgggaagcccggcagcccaaggacaggcccagaaacaggttcaggaatgggaccggggacaggttcagggacacgctcaagaacaggcccagtggcagacccagatagaggcccaggggcaggcacaggaacaggctcagggtgggacccagggacacagtcagggacaggcccagaaacagtttcagaattgggcccagggacaggctcagggacacgctcaagaacaggcccagtggcagacccagatagaggcccaggggcaggcacaggaaccagctcagggtggggcccagggacaggttcagggacaggcccagaaatgggctcaggggcagattcagggacaggcccagaaacaggttcaaggagaggttcagaaatgggcccaggaagaggctcagggacaggcccagtggcagacccagataaaggcccagaaatgggctcaggaacagacccagaaaggggctcaggaacgggttcagggtcaggcccagaaaggggctcaggaacgggcccaggaacaggctcaggagcagacccagatagaggctcagggtcaggcccagaagggggctcaggaacgggctcgggaacaggcccagaaaggggctcaggaacgggctcgggaacaggcccagaaaggggctcaggaacgggctcgggaacaggcccagaaaggggctcaggagcgggctcgggaacaggcccagaaaggggctcaggaacgggctcgggaacaggcccagaaaggggctcaggaacgggctcgggaacaggcccagaaaggggctcaggaacgggctcaggaacagggtcgggagcagacccacatagaggctcagggtcaggcccagaaaggggctcaggaatgggctcgggatcgggctcgggatcagggctgggagcagacccagatagagactcagaggcagacccagaaaggggctcaggaacgggcttgggaacagggtcgggaacaggccttgacaagtgggatggcgcctcgggcctgggagcagcccattagtggcatagctgagggagtggatgctgctggcaggagtggggggtccagaagcccagcccccagggatggtggacagtcagggggcagtggcctgggggagcccagcgccgggtacccacccccaggaagccgccccctcaggggcaagagcattgccacctctcccctggggctgggaaagagcccaactgagcccaagcctgaggctgggggctgcgggactccccaggccccggcccaggaggggtccccagaccaccctggggctgagagggccctgcaggacaggatggaggcatcggagcccgagcgtcgcgggaggtccaggcacctggccaagtacaaagcccagagcttccgtgaccagagggccttcgatttgtccttcagaccaatgagcgtcagggccagcgacacgtctgagctcccaaagtgaggccccgagtacacaccgtggctcgcccagcactgtgacatccgcccattgagggacttcaggcattttcctgcctccaaatgcgtcttggagcatccccta

SEQ ID NO: 461050 - DNA, 1315 bp, Homo sapiens
tgagccaaaatcatgccactgcactccagcctgagcaacagacaaagaccctgtctcaaacaacatcaacaaaccaggaactcaatcatttccaactgtgtgaagggccaagaggaaaatattcagggtgagggtccatgagagtgctggctaataggctaaacatggagacacacgacggaccttctagaaaagacattccctgataaaaagcaatggtgcccattgatgcttctgctctttgttctacccttgccttcctgcctcgaatgagaatatcaagaggcccctggcatgcaggaacttgcagtataaaatgcaaaacctccttgggaacaggagaacacaaaccacatgctgtgggtggcagaacagagagaggagcctgggtcccttctggcaccaagttgaggctggagccgcctgatctgtctccctctggaattttcctcatgacagaaaaataaattcctgtttggctaaaccactatcgtggagtatttgttacatgcggctaaaaactatcctaactgagcagggagacaactggaggctaggagaccaaggaaaagccaatgtccgacagcctctggcccaggttccggcaggtgccctcctgcatctggtgcgtcagctggtccttgtcctgcaagagcctcatggagtcatccgtcagccggctggcccacagccgggaggcctcggccccacgcacctgcagctggttggactggtcccagtcgtgggggctatagcgagagaagagtgcggagcgcagtgtgggcaggatggtgggcggccgcagggtactggtgctctcgtccgggcaggtctggacaaaacctttaaggaaggcatcacacccacatcttctagcgtgggatcagaaaagcaagtgggccctggtcctcccgacgttcacaacccttacctctcaggatcttctaagatgggacgtcacatacaggaggggactacacacagaaggcagccaagaaatggacgaaaaagtttcgagtatttttttaagcactaaatggttatggtaaaatattattttggaggaagtgtagggggaggcgaggggaaaaaaggttttttgtgtaacatcaacaagtataaagtgaaatttagggtttctcatcatccttggcttcttgtagcctcctcagatataactaatattatcagatttttccagagataattcatacatatatagcatatatctagatattgtcatatataacacactatgatattaataaaatatctaaaatatttataataatatcaagtgttaacacacagtgtt

SEQ ID NO: 461051 - DNA, 1169 bp, Homo sapiens
tgcataaaccagagtgggtcacatcactgccgttgtggggatgaggcagcctgaggaaatcccaggatgctggtgaaggtcccacagcagataaggagggtgtgcacccagctggaaggcttgatggataataccgagctgcctccattcctgataagctgtcacttgctacagggaagagagaaagagaaagcctgtgttcccagctatatacccaacaaaaatgaaaacgtatgtccaaccaaaaacttgtacacaaatgttcatagtgaaattataatggccataaagtggatatcccccaaaaaatatccatcattggaatggataatggggtatattcctacaattgaacattactgggccagaaaaaggaatgaagtactaatgcatgctacaacatggacaaaccttgaaaacattatgcagaaaagtgctcattaacccaagcctttctgcatagtgtccctaccaccctgctgcctctaactaaacaaaacacggtaggtctcagtgtgagagagcgcttttgttcacataggaggctgacagctatttgcgatgaggggtttttgtttgtttgtttgttattcaaataacttttttccccctgaggaaactgaaagggaaaatgtcagaagtatgtgattaatgattttttaaaatagatgggatctccccggttgaattgaaaagtaggtactgaaaaagaatccatttctaaatggtagattttcatatgtaagtttgatattaattctttcaaaagagttgtgcctgtgagtcagataaatgacaggaaggtctgtctaaataccagcatcctcggaagggcagctgttcagaaacattctcaaatcatgaagataaatagaaccggaacactgatgattccatcaactgatggttccttttaatcagatcttaaagcaaagacagaagctgaaaacatttctagtaaataaaaagcaaagaactctgaatgcttagccgaccagaaccccggaaggagcccgcctggtactgccaggcatgactgcctttagtggatttaacaataaaaaagaagatggcgccaaatgaccaaactacatgcgactttcccttcccgcaagaaaagtgaataaaactttccactggggctgggggaggaggcaagggaccagtcc

SEQ ID NO: 461052 - DNA, 583 bp, Homo sapiens
aagtaggctagtacgaaggctgcgtgtgaatcggccgaggcctgaaaccacctgttcccaccctcttgaccgaaatttccttgtgacacagagaagggcaaaggtctgagcccagagttgacggagggagtatttcagggttcacttcaggggctcccaaagcgacaagatcgttagggagagaggcccagggtggggactgggaatttaaggagagctgggaacggatcccttaggttcaggaagcttctgtgcaagctgcgaggatggcttgggccgaagggttgctctgcccgccgcgctagctgtgagctgagcaaagccctgggctcacagcaccccaaaagcctgtggcttcagtcctgcgtctgcaccacacattcaaaaggatcgttttgttttgtttttaaagaaaggtgagattggcttggttcttcatgagcacatttgatatagctctttttctgtttttccttgctcatttcgttttggggaagaaatctgtactgtattgggattgtaaagaacatctctgcactcagacagtttacagaaataaatgttttttttgtttttcagaaaa

SEQ ID NO: 461053 - DNA, 2095 bp, Homo sapiens
  misc_feature (28)..(28): n is a, c, g, or t
  misc_feature (120)..(120): n is a, c, g, or t
agcggggaatccgccgccgcgctcgcanctcgcaggcgccgcgtagccgtcgccaccgccgccagcccgtgcgccctcggcgcgtacccgccgcgctcccatccccgccgccggccaggngcgcgctcggccgccccggacagtgtcccgctgcggctccgcggcgatggccaccaagatcgacaaagaggcttgccgggcggcgtacaacctggtgcgcgacgacggctcggccgtcatctggtaggaacttttcattcgtctccacgccccgctccccgggctcgcgcggggcctcgtgcaccgagccggcctccaggcgggacggattcgggcctcccgcgctgtcttcctcgccttattccgggacggcgtgccaggcccccgcgggcttctccgtggccagcgcgtctgttagattgtcctctgcaagcgccgcgtcgcgcggcaccagcgctgatgtgtgtgtgtttttttcttctcccaacccaaagggtgacttttaaatatgacggctccaccatcgtccccggcgagcagggagcggagtaccagcacttcatccagcagtgcacagatgacgtccggttgtttgccttcgtgcgcttcaccaccggggatgccatgagcaagaggtccaagtttgccctcatcacgtggatcggtgagaacgtcagcgggctgcagcgcgccaaaaccgggacggacaagaccctggtgaaggaggtcgtacagaatttcgctaaggagtttgtgatcagtgatcggaaggagctggaggaagatttcatcaagagcgagctgaagaaggcggggggagccaattacgacgcccagacggagtaaccccagcccccgccacaccaccccttgccaaagtcatctgcctgctccccgggggagaggaccgccggcctcagctactagcccaccagcccaccagggagaagagaagccatgagaggcagcgcccgccaccctgtgtccacagcccccaccttcccgcttcccttagaaccctgccgtgtcctatctcatgacgctcatggaacctctttctttgatcttctttttcttttctccccctcttttttgttctaaagaaaagtcattttgatgcaaggtcctgcctgccatcagatccgaggtgcctcctgcagtgaccccttttcctggcatttctcttccacgcgacgaggtctgcctagtgagatctgcatgacctcacgttgctttccagagcccgggcctattttgccatctcagttttcctgggccctgcttcctgtgtaccactgaggggcagctgggccaggagctgtgcccggtgcctgcagccttcataagcacacacgtccattccctactaaggcccagacctcctggtatctgccccgggctccctcatcccacctccatccggagttgcccaagatgcatgtccagcataggcaggattgctcggtggtgagaaggttaggtccggctcagactgaataagaagagataaaatttgccttaaaacttacctggcagtggctttgctgcacggtctgaaaccacctgttcccaccctcttgaccgaaatttccttgtgacacagagaagggcaaaggtctgagcccagagttgacggagggagtatttcagggttcacttcaggggctcccaaagcgacaagatcgttagggagagaggcccagggtggggactgggaatttaaggagagctgggaacggatcccttaggttcaggaagcttctgtgcaagctgcgaggatggcttgggccgaagggttgctctgcccgccgcgctagctgtgagctgagcaaagccctgggctcacagcaccccaaaagcctgtggcttcagtcctgcgtctgcaccacacattcaaaaggatcgttttgttttgtttttaaagaaaggtgagattggcttggttcttcatgagcacatttgatatagctctttttctgtttttccttgctcatttcgttttggggaagaaatctgtactgtattgggattgtaaagaacatctctgcactcagacagtttacagaaataaatgttttttttgtttttcagaaaa

SEQ ID NO: 461054 - DNA, 1643 bp, Homo sapiens
  misc_feature (15)..(15): n is a, c, g, or t
  misc_feature (23)..(23): n is a, c, g, or t
gggcgcgaaaactantgcgcgangacggctcggcgtcatctgggtgacttttaaatatgacggctccaccatcgtccccggcgagcagggagcggagtaccagcacttcatccagcagtgcacagatgacgtccggttgtttgccttcgtgcgcttcaccaccggggatgccatgagcaagaggtccaagtttgccctcatcacgtggatcggtgagaacgtcagcgggctgcagcgcgccaaaaccgggacggacaagaccctggtgaaggaggtcgtacagaatttcgctaaggagtttgtgatcagtgatcggaaggagctggaggaagatttcatcaagagcgagctgaagaaggcggggggagccaattacgacgcccagacggagtaaccccagcccccgccacaccaccccttgccaaagtcatctgcctgctccccgggggagaggaccgccggcctcagctactagcccaccagcccaccagggagaagagaagccatgagaggcagcgcccgccaccctgtgtccacagcccccaccttcccgcttcccttagaaccctgccgtgtcctatctcatgacgctcatggaacctctttctttgatcttctttttcttttctccccctcttttttgttctaaagaaaagtcattttgatgcaaggtcctgcctgccatcagatccgaggtgcctcctgcagtgaccccttttcctggcatttctcttccacgcgacgaggtctgcctagtgagatctgcatgacctcacgttgctttccagagcccgggcctattttgccatctcagttttcctgggccctgcttcctgtgtaccactgaggggcagctgggccaggagctgtgcccggtgcctgcagccttcataagcacacacgtccattccctactaaggcccagacctcctggtatctgccccgggctccctcatcccacctccatccggagttgcccaagatgcatgtccagcataggcaggattgctcggtggtgagaaggttaggtccggctcagactgaataagaagagataaaatttgccttaaaacttacctggcagtggctttgctgcacggtctgaaaccacctgttcccaccctcttgaccgaaatttccttgtgacacagagaagggcaaaggtctgagcccagagttgacggagggagtatttcagggttcacttcaggggctcccaaagcgacaagatcgttagggagagaggcccagggtggggactgggaatttaaggagagctgggaacggatcccttaggttcaggaagcttctgtgcaagctgcgaggatggcttgggccgaagggttgctctgcccgccgcgctagctgtgagctgagcaaagccctgggctcacagcaccccaaaagcctgtggcttcagtcctgcgtctgcaccacacattcaaaaggatcgttttgttttgtttttaaagaaaggtgagattggcttggttcttcatgagcacatttgatatagctctttttctgtttttccttgctcatttcgttttggggaagaaatctgtactgtattgggattgtaaagaacatctctgcactcagacagtttacagaaataaatgttttttttgtttttcagaaaa

SEQ ID NO: 461055 - DNA, 1407 bp, Homo sapiens
gggcctggcactgaggcaaagatcctttgtgacaggaggtcgtacagaatttcgctaaggagtttgtgatcagtgatcggaaggagctggaggaagatttcatcaagagcgagctgaagaaggcggggggagccaattacgacgcccagacggagtaaccccagcccccgccacaccaccccttgccaaagtcatctgcctgctccccgggggagaggaccgccggcctcagctactagcccaccagcccaccagggagaagagaagccatgagaggcagcgcccgccaccctgtgtccacagcccccaccttcccgcttcccttagaaccctgccgtgtcctatctcatgacgctcatggaacctctttctttgatcttctttttcttttctccccctcttttttgttctaaagaaaagtcattttgatgcaaggtcctgcctgccatcagatccgaggtgcctcctgcagtgaccccttttcctggcatttctcttccacgcgacgaggtctgcctagtgagatctgcatgacctcacgttgctttccagagcccgggcctattttgccatctcagttttcctgggccctgcttcctgtgtaccactgaggggcagctgggccaggagctgtgcccggtgcctgcagccttcataagcacacacgtccattccctactaaggcccagacctcctggtatctgccccgggctccctcatcccacctccatccggagttgcccaagatgcatgtccagcataggcaggattgctcggtggtgagaaggttaggtccggctcagactgaataagaagagataaaatttgccttaaaacttacctggcagtggctttgctgcacggtctgaaaccacctgttcccaccctcttgaccgaaatttccttgtgacacagagaagggcaaaggtctgagcccagagttgacggagggagtatttcagggttcacttcaggggctcccaaagcgacaagatcgttagggagagaggcccagggtggggactgggaatttaaggagagctgggaacggatcccttaggttcaggaagcttctgtgcaagctgcgaggatggcttgggccgaagggttgctctgcccgccgcgctagctgtgagctgagcaaagccctgggctcacagcaccccaaaagcctgtggcttcagtcctgcgtctgcaccacacattcaaaaggatcgttttgttttgtttttaaagaaaggtgagattggcttggttcttcatgagcacatttgatatagctctttttctgtttttccttgctcatttcgttttggggaagaaatctgtactgtattgggattgtaaagaacatctctgcactcagacagtttacagaaataaatgttttttttgtttttcagaaaa

SEQ ID NO: 461056 - DNA, 1189 bp, Homo sapiens
ggacgcgtgggtcgacccacgcgtcgccacgcgtccgggagaagagaagccatgagaggcagcgcccgccaccctgtgtccacagcccccaccttcccgcttcccttagaaccctgccgtgtcctatctcatgacgctcatggaacctctttctttgatcttctttttcttttctccccctcttttttgttctaaagaaaagtcattttgatgcaaggtcctgcctgccatcagatccgaggtgcctcctgcagtgaccccttttcctggcatttctcttccacgcgacgaggtctgcctagtgagatctgcatgacctcacgttgctttccagagcccgggcctattttgccatctcagttttcctgggccctgcttcctgtgtaccactgaggggcagctgggccaggagctgtgcccggtgcctgcagccttcataagcacacacgtccattccctactaaggcccagacctcctggtatctgccccgggctccctcatcccacctccatccggagttgcccaagatgcatgtccagcataggcaggattgctcggtggtgagaaggttaggtccggctcagactgaataagaagagataaaatttgccttaaaacttacctggcagtggctttgctgcacggtctgaaaccacctgttcccaccctcttgaccgaaatttccttgtgacacagagaagggcaaaggtctgagcccagagttgacggagggagtatttcagggttcacttcaggggctcccaaagcgacaagatcgttagggagagaggcccagggtggggactgggaatttaaggagagctgggaacggatcccttaggttcaggaagcttctgtgcaagctgcgaggatggcttgggccgaagggttgctctgcccgccgcgctagctgtgagctgagcaaagccctgggctcacagcaccccaaaagcctgtggcttcagtcctgcgtctgcaccacacattcaaaaggatcgttttgttttgtttttaaagaaaggtgagattggcttggttcttcatgagcacatttgatatagctctttttctgtttttccttgctcatttcgttttggggaagaaatctgtactgtattgggattgtaaagaacatctctgcactcagacagtttacagaaataaatgttttttttgtttttcagaaaa

SEQ ID NO: 461057 - DNA, 1165 bp, Homo sapiens
gggttgtgatcgtgcccctacactcttgctctgtctccctgggctggagtgcagtggcgcaatcgtggcttcccgcttcccttagaaccctgccgtgtcctatctcatgacgctcatggaacctctttctttgatcttctttttcttttctccccctcttttttgttctaaagaaaagtcattttgatgcaaggtcctgcctgccatcagatccgaggtgcctcctgcagtgaccccttttcctggcatttctcttccacgcgacgaggtctgcctagtgagatctgcatgacctcacgttgctttccagagcccgggcctattttgccatctcagttttcctgggccctgcttcctgtgtaccactgaggggcagctgggccaggagctgtgcccggtgcctgcagccttcataagcacacacgtccattccctactaaggcccagacctcctggtatctgccccgggctccctcatcccacctccatccggagttgcccaagatgcatgtccagcataggcaggattgctcggtggtgagaaggttaggtccggctcagactgaataagaagagataaaatttgccttaaaacttacctggcagtggctttgctgcacggtctgaaaccacctgttcccaccctcttgaccgaaatttccttgtgacacagagaagggcaaaggtctgagcccagagttgacggagggagtatttcagggttcacttcaggggctcccaaagcgacaagatcgttagggagagaggcccagggtggggactgggaatttaaggagagctgggaacggatcccttaggttcaggaagcttctgtgcaagctgcgaggatggcttgggccgaagggttgctctgcccgccgcgctagctgtgagctgagcaaagccctgggctcacagcaccccaaaagcctgtggcttcagtcctgcgtctgcaccacacattcaaaaggatcgttttgttttgtttttaaagaaaggtgagattggcttggttcttcatgagcacatttgatatagctctttttctgtttttccttgctcatttcgttttggggaagaaatctgtactgtattgggattgtaaagaacatctctgcactcagacagtttacagaaataaatgttttttttgtttttcagaaaa

SEQ ID NO: 461058 - DNA, 1975 bp, Homo sapiens
  misc_feature (28)..(28): n is a, c, g, or t
  misc_feature (120)..(120): n is a, c, g, or t
  misc_feature (1885)..(1885): n is a, c, g, or t
  misc_feature (1908)..(1909): n is a, c, g, or t
agcggggaatccgccgccgcgctcgcanctcgcaggcgccgcgtagccgtcgccaccgccgccagcccgtgcgccctcggcgcgtacccgccgcgctcccatccccgccgccggccaggngcgcgctcggccgccccggacagtgtcccgctgcggctccgcggcgatggccaccaagatcgacaaagaggcttgccgggcggcgtacaacctggtgcgcgacgacggctcggccgtcatctgggtgacttttaaatatgacggctccaccatcgtccccggcgagcagggagcggagtaccagcacttcatccagcagtgcacagatgacgtccggttgtttgccttcgtgcgcttcaccaccggggatgccatgagcaagaggtccaagtttgccctcatcacgtggatcggtgagaacgtcagcgggctgcagcgcgccaaaaccgggacggacaagaccctggtgaaggaggtcgtacagaatttcgctaaggagtttgtgatcagtgatcggaaggagctggaggaagatttcatcaagagcgagctgaagaaggcggggggagccaattacgacgcccagacggagtaaccccagcccccgccacaccaccccttgccaaagtcatctgcctgctccccgggggagaggaccgccggcctcagctactagcccaccagcccaccagggagaagagaagccatgagaggcagcgcccgccaccctgtgtccacagcccccaccttcccgcttcccttagaaccctgccgtgtcctatctcatgacgctcatggaacctctttctttgatcttctttttcttttctccccctcttttttgttctaaagaaaagtcattttgatgcaaggtcctgcctgccatcagatccgaggtgcctcctgcagtgaccccttttcctggcatttctcttccacgcgacgaggtctgcctagtgagatctgcatgacctcacgttgctttccagagcccgggcctattttgccatctcagttttcctgggccctgcttcctgtgtaccactgaggggcagctgggccaggagctgtgcccggtgcctgcagccttcataagcacacacgtccattccctactaaggcccagacctcctggtatctgccccgggctccctcatcccacctccatccggagttgcccaagatgcatgtccagcataggcaggattgctcggtggtgagaaggttaggtccggctcagactgaataagaagagataaaatttgccttaaaacttacctggcagtggctttgctgcacggtctgaaaccacctgttcccaccctcttgaccgaaatttccttgtgacacagagaagggcaaaggtctgagcccagagttgacggagggagtatttcagggttcacttcaggggctcccaaagcgacaagatcgttagggagagaggcccagggtggggactgggaatttaaggagagctgggaacggatcccttaggttcaggaagcttctgtgcaagctgcgaggatggcttgggccgaagggttgctctgcccgccgcgctagctgtgagctgagcaaagccctgggctcacagcaccccaaaagcctgtggcttcagtcctgcgtctgcaccacacattcaaaaggatcgttttgttttgtttttaaagaaaggtgagattggcttggttcttcatgagcacatttgatatagctctttttctgtttttccttgctcatttcgttttggggaagaaatctgtactgtattgggattgtaaagaacatctctgcactcagacagtttacagaaataaatgttttttttgtttttcagaaaaaaaacacacacacaacaacaaaaaaaaaaaacccggggggnctcttttgggggggggggaaaannggggttttgaaggggccggggccatatgttttccgggcccccttttttgtccagggggggaaaatg

SEQ ID NO: 461059 - DNA, 2673 bp, Homo sapiens
  misc_feature (28)..(28): n is a, c, g, or t
  misc_feature (120)..(120): n is a, c, g, or t
  misc_feature (1877)..(1877): n is a, c, g, or t
  misc_feature (1881)..(1881): n is a, c, g, or t
  misc_feature (1884)..(1884): n is a, c, g, or t
  misc_feature (1886)..(1886): n is a, c, g, or t
  misc_feature (1893)..(1893): n is a, c, g, or t
agcggggaatccgccgccgcgctcgcanctcgcaggcgccgcgtagccgtcgccaccgccgccagcccgtgcgccctcggcgcgtacccgccgcgctcccatccccgccgccggccaggngcgcgctcggccgccccggacagtgtcccgctgcggctccgcggcgatggccaccaagatcgacaaagaggcttgccgggcggcgtacaacctggtgcgcgacgacggctcggccgtcatctgggtgacttttaaatatgacggctccaccatcgtccccggcgagcagggagcggagtaccagcacttcatccagcagtgcacagatgacgtccggttgtttgccttcgtgcgcttcaccaccggggatgccatgagcaagaggtccaagtttgccctcatcacgtggatcggtgagaacgtcagcgggctgcagcgcgccaaaaccgggacggacaagaccctggtgaaggaggtcgtacagaatttcgctaaggagtttgtgatcagtgatcggaaggagctggaggaagatttcatcaagagcgagctgaagaaggcggggggagccaattacgacgcccagacggagtaaccccagcccccgccacaccaccccttgccaaagtcatctgcctgctccccgggggagaggaccgccggcctcagctactagcccaccagcccaccagggagaagagaagccatgagaggcagcgcccgccaccctgtgtccacagcccccaccttcccgcttcccttagaaccctgccgtgtcctatctcatgacgctcatggaacctctttctttgatcttctttttcttttctccccctcttttttgttctaaagaaaagtcattttgatgcaaggtcctgcctgccatcagatccgaggtgcctcctgcagtgaccccttttcctggcatttctcttccacgcgacgaggtctgcctagtgagatctgcatgacctcacgttgctttccagagcccgggcctattttgccatctcagttttcctgggccctgcttcctgtgtaccactgaggggcagctgggccaggagctgtgcccggtgcctgcagccttcataagcacacacgtccattccctactaaggcccagacctcctggtatctgccccgggctccctcatcccacctccatccggagttgcccaagatgcatgtccagcataggcaggattgctcggtggtgagaaggttaggtccggctcagactgaataagaagagataaaatttgccttaaaacttacctggcagtggctttgctgcacggtctgaaaccacctgttcccaccctcttgaccgaaatttccttgtgacacagagaagggcaaaggtctgagcccagagttgacggagggagtatttcagggttcacttcaggggctcccaaagcgacaagatcgttagggagagaggcccagggtggggactgggaatttaaggagagctgggaacggatcccttaggttcaggaagcttctgtgcaagctgcgaggatggcttgggccgaagggttgctctgcccgccgcgctagctgtgagctgagcaaagccctgggctcacagcaccccaaaagcctgtggcttcagtcctgcgtctgcaccacacattcaaaaggatcgttttgttttgtttttaaagaaaggtgagattggcttggttcttcatgagcacatttgatatagctctttttctgtttttccttgctcatttcgttttggggaagaaatctgtactgtattgggattgtaaagaacatctctgcactcagacagtttacagaaataaatgttttttttgtttttcagaaaaaaaaaaaaaaaaaaaaaaaaaaaaaaaaaaaanaaanaananaaaaaanaaaaaagagggggggggggggggctaaaaaattatctcccccggagggggcccaaaattttgaggcgcgtgtccccccgtttttttgtgtaaaaggggggcccctatattaggggggggggtatttaaaagaggaagagagagggggggggcgggggtgtttaaaaaaggtgtgtggtaggggggaaaagggttagggggggatatcttggtgggagaggagaaccccctcttctggcgtgcgtgcggggatcaatcttgtgtggggcaccacattcacctacagagaagaattaaagggagcccgggggaaaaataacaacttcggagggggtatgggtggtgtttaaccacgggggctcatgatcttgcgggtgagaaaatgtggtcacggggattctttttttcttgaatactttttttccggcgctgttctcataacaacacaatgagatagatgacaaacaaatagaagaaggggaacgagggaagcgacatagaggagaggaaaaaaaaaaagcaagagagtagggggaagcagaggaaggagagacaaagacgaacagcaaaagcaagagagaaagcaaacatgcacagaaagcgaaacgagagcgagacgaacaaaagaaagaggcacgagacgagaagacacactagagagacaacaggcaagcgccagaaggcatgagcccggggcagagaacagaaaagatagtcggaaagagaggaccgcgacagcaccgacggagcaggggcaccgacgggaacaaaggcgcgagtt

SEQ ID NO: 461060 - DNA, 2235 bp, Homo sapiens
  misc_feature (28)..(28): n is a, c, g, or t
  misc_feature (120)..(120): n is a, c, g, or t
  misc_feature (1903)..(1903): n is a, c, g, or t
agcggggaatccgccgccgcgctcgcanctcgcaggcgccgcgtagccgtcgccaccgccgccagcccgtgcgccctcggcgcgtacccgccgcgctcccatccccgccgccggccaggngcgcgctcggccgccccggacagtgtcccgctgcggctccgcggcgatggccaccaagatcgacaaagaggcttgccgggcggcgtacaacctggtgcgcgacgacggctcggccgtcatctgggtgacttttaaatatgacggctccaccatcgtccccggcgagcagggagcggagtaccagcacttcatccagcagtgcacagatgacgtccggttgtttgccttcgtgcgcttcaccaccggggatgccatgagcaagaggtccaagtttgccctcatcacgtggatcggtgagaacgtcagcgggctgcagcgcgccaaaaccgggacggacaagaccctggtgaaggaggtcgtacagaatttcgctaaggagtttgtgatcagtgatcggaaggagctggaggaagatttcatcaagagcgagctgaagaaggcggggggagccaattacgacgcccagacggagtaaccccagcccccgccacaccaccccttgccaaagtcatctgcctgctccccgggggagaggaccgccggcctcagctactagcccaccagcccaccagggagaagagaagccatgagaggcagcgcccgccaccctgtgtccacagcccccaccttcccgcttcccttagaaccctgccgtgtcctatctcatgacgctcatggaacctctttctttgatcttctttttcttttctccccctcttttttgttctaaagaaaagtcattttgatgcaaggtcctgcctgccatcagatccgaggtgcctcctgcagtgaccccttttcctggcatttctcttccacgcgacgaggtctgcctagtgagatctgcatgacctcacgttgctttccagagcccgggcctattttgccatctcagttttcctgggccctgcttcctgtgtaccactgaggggcagctgggccaggagctgtgcccggtgcctgcagccttcataagcacacacgtccattccctactaaggcccagacctcctggtatctgccccgggctccctcatcccacctccatccggagttgcccaagatgcatgtccagcataggcaggattgctcggtggtgagaaggttaggtccggctcagactgaataagaagagataaaatttgccttaaaacttacctggcagtggctttgctgcacggtctgaaaccacctgttcccaccctcttgaccgaaatttccttgtgacacagagaagggcaaaggtctgagcccagagttgacggagggagtatttcagggttcacttcaggggctcccaaagcgacaagatcgttagggagagaggcccagggtggggactgggaatttaaggagagctgggaacggatcccttaggttcaggaagcttctgtgcaagctgcgaggatggcttgggccgaagggttgctctgcccgccgcgctagctgtgagctgagcaaagccctgggctcacagcaccccaaaagcctgtggcttcagtcctgcgtctgcaccacacattcaaaaggatcgttttgttttgtttttaaagaaaggtgagattggcttggttcttcatgagcacatttgatatagctctttttctgtttttccttgctcatttcgttttggggaagaaatctgtactgtattgggattgtaaagaacatctctgcactcagacagtttacagaaataaatgttttttttgtttttcagaaaaaaaaaaaaaaaaaaaaaaaaaaaaatttttgggggggccttgggccctggaaaagtttncctaaaagaccaactcgcggtggggcgcgcgcgcggggcgcccagaggcgaataaggtgagacctgggcgcacagcggggttccctagaggaggaaacccggcgccaaagagacaaaggcggtcggggattctctcccccaaattaaaaaaaccgcgccgggagggggaaaccgcgagggggttcttctggacaccatattcccaaggaggggaggtcccgcgagggggccccataacgggggtatctctaccaccgcgggggggtccacacagggagagcccgatatattcaaattatagccccggctctagggggagtcaaaacaaatat

SEQ ID NO: 461061 - DNA, 1933 bp, Homo sapiens
  misc_feature (28)..(28): n is a, c, g, or t
  misc_feature (120)..(120): n is a, c, g, or t
agcggggaatccgccgccgcgctcgcanctcgcaggcgccgcgtagccgtcgccaccgccgccagcccgtgcgccctcggcgcgtacccgccgcgctcccatccccgccgccggccaggngcgcgctcggccgccccggacagtgtcccgctgcggctccgcggcgatggccaccaagatcgacaaagaggcttgccgggcggcgtacaacctggtgcgcgacgacggctcggccgtcatctgggtgacttttaaatatgacggctccaccatcgtccccggcgagcagggagcggagtaccagcacttcatccagcagtgcacagatgacgtccggttgtttgccttcgtgcgcttcaccaccggggatgccatgagcaagaggtccaagtttgccctcatcacgtggatcggtgagaacgtcagcgggctgcagcgcgccaaaaccgggacggacaagaccctggtgaaggaggtcgtacagaatttcgctaaggagtttgtgatcagtgatcggaaggagctggaggaagatttcatcaagagcgagctgaagaaggcggggggagccaattacgacgcccagacggagtaaccccagcccccgccacaccaccccttgccaaagtcatctgcctgctccccgggggagaggaccgccggcctcagctactagcccaccagcccaccagggagaagagaagccatgagaggcagcgcccgccaccctgtgtccacagcccccaccttcccgcttcccttagaaccctgccgtgtcctatctcatgacgctcatggaacctctttctttgatcttctttttcttttctccccctcttttttgttctaaagaaaagtcattttgatgcaaggtcctgcctgccatcagatccgaggtgcctcctgcagtgaccccttttcctggcatttctcttccacgcgacgaggtctgcctagtgagatctgcatgacctcacgttgctttccagagcccgggcctattttgccatctcagttttcctgggccctgcttcctgtgtaccactgaggggcagctgggccaggagctgtgcccggtgcctgcagccttcataagcacacacgtccattccctactaaggcccagacctcctggtatctgccccgggctccctcatcccacctccatccggagttgcccaagatgcatgtccagcataggcaggattgctcggtggtgagaaggttaggtccggctcagactgaataagaagagataaaatttgccttaaaacttacctggcagtggctttgctgcacggtctgaaaccacctgttcccaccctcttgaccgaaatttccttgtgacacagagaagggcaaaggtctgagcccagagttgacggagggagtatttcagggttcacttcaggggctcccaaagcgacaagatcgttagggagagaggcccagggtggggactgggaatttaaggagagctgggaacggatcccttaggttcaggaagcttctgtgcaagctgcgaggatggcttgggccgaagggttgctctgcccgccgcgctagctgtgagctgagcaaagccctgggctcacagcaccccaaaagcctgtggcttcagtcctgcgtctgcaccacacattcaaaaggatcgttttgttttgtttttaaagaaaggtgagattggcttggttcttcatgagcacatttgatatagctctttttctgtttttccttgctcatttcgttttggggaagaaatctgtactgtattgggattgtaaagaacatctctgcactcagacagtgtcgctttatccagccttattcttcattacccatgatgcagcggcctgggcatctaaaatagcgaccgctggcgtatcgcgctgatgcaaacagtgatagcaaggaacccgaatttgcggaattc

SEQ ID NO: 461062 - DNA, 1891 bp, Homo sapiens
  misc_feature (28)..(28): n is a, c, g, or t
  misc_feature (120)..(120): n is a, c, g, or t
agcggggaatccgccgccgcgctcgcanctcgcaggcgccgcgtagccgtcgccaccgccgccagcccgtgcgccctcggcgcgtacccgccgcgctcccatccccgccgccggccaggngcgcgctcggccgccccggacagtgtcccgctgcggctccgcggcgatggccaccaagatcgacaaagaggcttgccgggcggcgtacaacctggtgcgcgacgacggctcggccgtcatctgggtgacttttaaatatgacggctccaccatcgtccccggcgagcagggagcggagtaccagcacttcatccagcagtgcacagatgacgtccggttgtttgccttcgtgcgcttcaccaccggggatgccatgagcaagaggtccaagtttgccctcatcacgtggatcggtgagaacgtcagcgggctgcagcgcgccaaaaccgggacggacaagaccctggtgaaggaggtcgtacagaatttcgctaaggagtttgtgatcagtgatcggaaggagctggaggaagatttcatcaagagcgagctgaagaaggcggggggagccaattacgacgcccagacggagtaaccccagcccccgccacaccaccccttgccaaagtcatctgcctgctccccgggggagaggaccgccggcctcagctactagcccaccagcccaccagggagaagagaagccatgagaggcagcgcccgccaccctgtgtccacagcccccaccttcccgcttcccttagaaccctgccgtgtcctatctcatgacgctcatggaacctctttctttgatcttctttttcttttctccccctcttttttgttctaaagaaaagtcattttgatgcaaggtcctgcctgccatcagatccgaggtgcctcctgcagtgaccccttttcctggcatttctcttccacgcgacgaggtctgcctagtgagatctgcatgacctcacgttgctttccagagcccgggcctattttgccatctcagttttcctgggccctgcttcctgtgtaccactgaggggcagctgggccaggagctgtgcccggtgcctgcagccttcataagcacacacgtccattccctactaaggcccagacctcctggtatctgccccgggctccctcatcccacctccatccggagttgcccaagatgcatgtccagcataggcaggattgctcggtggtgagaaggttaggtccggctcagactgaataagaagagataaaatttgccttaaaacttacctggcagtggctttgctgcacggtctgaaaccacctgttcccaccctcttgaccgaaatttccttgtgacacagagaagggcaaaggtctgagcccagagttgacggagggagtatttcagggttcacttcaggggctcccaaagcgacaagatcgttagggagagaggcccagggtggggactgggaatttaaggagagctgggaacggatcccttaggttcaggaagcttctgtgcaagctgcgaggatggcttgggccgaagggttgctctgcccgccgcgctagctgtgagctgagcaaagccctgggctcacagcaccccaaaagcctgtggcttcagtcctgcgtctgcaccacacattcaaaaggatcgttttgttttgtttttaaagaaaggtgagattggcttggttcttcatgagcacatttgatatagctctttttctgtttttccttgctcatttcgttttggggaagaaatctgtactgtattgggattgtaaagaacatctctgcactcagacagtttacagaaataaatgttttttttgtttttcagaaaattttttttttttttttttttttttttttttttttttttttttttttt

SEQ ID NO: 461063 - DNA, 1742 bp, Homo sapiens
  misc_feature (28)..(28): n is a, c, g, or t
  misc_feature (120)..(120): n is a, c, g, or t
agcggggaatccgccgccgcgctcgcanctcgcaggcgccgcgtagccgtcgccaccgccgccagcccgtgcgccctcggcgcgtacccgccgcgctcccatccccgccgccggccaggngcgcgctcggccgccccggacagtgtcccgctgcggctccgcggcgatggccaccaagatcgacaaagaggcttgccgggcggcgtacaacctggtgcgcgacgacggctcggccgtcatctgggtgacttttaaatatgacggctccaccatcgtccccggcgagcagggagcggagtaccagcacttcatccagcagtgcacagatgacgtccggttgtttgccttcgtgcgcttcaccaccggggatgccatgagcaagaggtccaagtttgccctcatcacgtggatcggtgagaacgtcagcgggctgcagcgcgccaaaaccgggacggacaagaccctggtgaaggaggtcgtacagaatttcgctaaggagtttgtgatcagtgatcggaaggagctggaggaagatttcatcaagagcgagctgaagaaggcggggggagccaattacgacgcccagacggagtaaccccagcccccgccacaccaccccttgccaaagtcatctgcctgctccccgggggagaggaccgccggcctcagctactagcccaccagcccaccagggagaagagaagccatgagaggcagcgcccgccaccctgtgtccacagcccccaccttcccgcttcccttagaaccctgccgtgtcctatctcatgacgctcatggaacctctttctttgatcttctttttcttttctccccctcttttttgttctaaagaaaagtcattttgatgcaaggtcctgcctgccatcagatccgaggtgcctcctgcagtgaccccttttcctggcatttctcttccacgcgacgaggtctgcctagtgagatctgcatgacctcacgttgctttccagagcccgggcctattttgccatctcagttttcctgggccctgcttcctgtgtaccactgaggggcagctgggccaggagctgtgcccggtgcctgcagccttcataagcacacacgtccattccctactaaggcccagacctcctggtatctgccccgggctccctcatcccacctccatccggagttgcccaagatgcatgtccagcataggcaggattgctcggtggtgagaaggttaggtccggctcagactgaataagaagagataaaatttgccttaaaacttacctggcagtggctttgctgcacggtctgaaaccacctgttcccaccctcttgaccgaaatttccttgtgacacagagaagggcaaaggtctgagcccagagttgacggagggagtatttcagggttcacttcaggggctcccaaagcgacaagatcgttagggagagaggcccagggtggggactgggaatttaaggagagctgggaacggatcccttaggttcaggaagcttctgtgcaagctgcgaggatggcttgggccgaagggttgctctgcccgccgcgctagctgtgagctgagcaaagccctgggctcacagcaccccaaaagcctgtggcttcagtcctggttggcaccttcaaggtcgcggtgttagaaggggtggggggtctccctggcctttggttgcctttctgtgtccgccctcgtggggaacgcgggtggggtggacctcgccagtattg

SEQ ID NO: 461064 - DNA, 1661 bp, Homo sapiens
  misc_feature (28)..(28): n is a, c, g, or t
  misc_feature (120)..(120): n is a, c, g, or t
agcggggaatccgccgccgcgctcgcanctcgcaggcgccgcgtagccgtcgccaccgccgccagcccgtgcgccctcggcgcgtacccgccgcgctcccatccccgccgccggccaggngcgcgctcggccgccccggacagtgtcccgctgcggctccgcggcgatggccaccaagatcgacaaagaggcttgccgggcggcgtacaacctggtgcgcgacgacggctcggccgtcatctgggtgacttttaaatatgacggctccaccatcgtccccggcgagcagggagcggagtaccagcacttcatccagcagtgcacagatgacgtccggttgtttgccttcgtgcgcttcaccaccggggatgccatgagcaagaggtccaagtttgccctcatcacgtggatcggtgagaacgtcagcgggctgcagcgcgccaaaaccgggacggacaagaccctggtgaaggaggtcgtacagaatttcgctaaggagtttgtgatcagtgatcggaaggagctggaggaagatttcatcaagagcgagctgaagaaggcggggggagccaattacgacgcccagacggagtaaccccagcccccgccacaccaccccttgccaaagtcatctgcctgctccccgggggagaggaccgccggcctcagctactagcccaccagcccaccagggagaagagaagccatgagaggcagcgcccgccaccctgtgtccacagcccccaccttcccgcttcccttagaaccctgccgtgtcctatctcatgacgctcatggaacctctttctttgatcttctttttcttttctccccctcttttttgttctaaagaaaagtcattttgatgcaaggtcctgcctgccatcagatccgaggtgcctcctgcagtgaccccttttcctggcatttctcttccacgcgacgaggtctgcctagtgagatctgcatgacctcacgttgctttccagagcccgggcctattttgccatctcagttttcctgggccctgcttcctgtgtaccactgaggggcagctgggccaggagctgtgcccggtgcctgcagccttcataagcacacacgtccattccctactaaggcccagacctcctggtatctgccccgggctccctcatcccacctccatccggagttgcccaagatgcatgtccagcataggcaggattgctcggtggtgagaaggttaggtccggctcagactgaataagaagagataaaatttgccttaaaacttacctggcagtggctttgctgcacggtcggatcccttaggttcaggaagcttctgtgcaagctgcgaggatggcttgggccgaagggttgctctgcccgccgcgctagctgtgagctgagcaaagccctgggctcacagcaccccaaaagcctgtggcttcagtcctgcgtctgcaccacacattcaaaaggatcgttttgttttgtttttaaagaaaggtgagattggcttggttcttcatgagcacatttgatatagctctttttctgtttttccttgctcatttcgttttggggaagaaatctgtactgtattgggattgtaaagaacatctctgcactcagacagtttacagaaataaatgttttttttgtttttcagaaaa

SEQ ID NO: 461065 - DNA, 1992 bp, Homo sapiens
  misc_feature (28)..(28): n is a, c, g, or t
  misc_feature (120)..(120): n is a, c, g, or t
agcggggaatccgccgccgcgctcgcanctcgcaggcgccgcgtagccgtcgccaccgccgccagcccgtgcgccctcggcgcgtacccgccgcgctcccatccccgccgccggccaggngcgcgctcggccgccccggacagtgtcccgctgcggctccgcggcgatggccaccaagatcgacaaagaggcttgccgggcggcgtacaacctggtgcgcgacgacggctcggccgtcatctgggtgacttttaaatatgacggctccaccatcgtccccggcgagcagggagcggagtaccagcacttcatccagcagtgcacagatgacgtccggttgtttgccttcgtgcgcttcaccaccggggatgccatgagcaagaggtccaagtttgccctcatcacgtggatcggtgagaacgtcagcgggctgcagcgcgccaaaaccgggacggacaagaccctggtgaaggaggtcgtacagaatttcgctaaggagtttgtgatcagtgatcggaaggagctggaggaagatttcatcaagagcgagctgaagaaggcggggggagccaattacgacgcccagacggagtaaccccagcccccgccacaccaccccttgccaaagtcatctgcctgctccccgggggagaggaccgccggcctcagctactagcccaccagcccaccagggagaagagaagccatgagaggcagcgcccgccaccctgtgtccacagcccccaccttcccgcttcccttagaaccctgccgtgtcctatctcatgacgctcatggaacctctttctttgatcttctttttcttttctccccctcttttttgttctaaagaaaagtcattttgatgcaaggtcctgcctgccatcagatccgaggtgcctcctgcagtgaccccttttcctggcatttctcttccacgcgacgaggtctgcctagtgagatctgcatgacctcacgttgctttccagagcccgggcctattttgccatctcagttttcctgggccctgcttcctgtgtaccactgaggggcagctgggccaggagctgtgcccggtgcctgcagccttcataagcacacacgtccattccctactaaggcccagacctcctggtatctgccccgggctccctcatcccacctccatccggagttgcccaagatgcatgtccagcataggcaggattgctcggtggtgagaaggttaggtccggctcagactgaataagaagagataaaatttgccttaaaacttacctggcagtggctttgctgcacggtcggatcccttaggttcaggaagcttctgtgcaagctgcgaggatggcttgggccgaagggttgctctgcccgccgcgctagctgtgagctgagcaaagccctgggctcacagcaccccaaaagcctgtggcttcagtcctgcgtctgcaccacacattcaaaaggatcgttttgttttgtttttaaagaaaggtgagattggcttggttcttcatgagcacatttgatatagctctttttctgtttttccttgctcatttcgttttggggaagaaatctgtactgtattgggattgtaaagaacatctctgcactcagacagtttacagaaataaatgttttttttgtttttcagaaaaaaaaaaaaaaaaaaaaaaaaaaaaacttgtgtgtggggcggcctgtgggccttggaaaaagttttttgaacccttgtggtgtgtggggcgggggggccccagtggtggttacgtgtgaccggggccaaaaggggtgcgcccctagggagactccggggcacgtgggacaaaggggcgcgtgggactctcctcccacaattaaaaaaaccgcgcggggggacaaccggggggtgtttcgggaaacaacctccagaggggaggtccgaggggcccatacgggggactcacaccgacaggggggtccccaaggaaggctgaaatataaaataca

SEQ ID NO: 461066 - DNA, 1224 bp, Homo sapiens
gggcctggcactgaggcaaagatcctttgtgacaggaggtcgtacagaatttcgctaaggagtttgtgatcagtgatcggaaggagctggaggaagatttcatcaagagcgagctgaagaaggcggggggagccaattacgacgcccagacggagtaaccccagcccccgccacaccaccccttgccaaagtcatctgcctgctccccgggggagaggaccgccggcctcagctactagcccaccagcccaccagggagaagagaagccatgagaggcagcgcccgccaccctgtgtccacagcccccaccttcccgcttcccttagaaccctgccgtgtcctatctcatgacgctcatggaacctctttctttgatcttctttttcttttctccccctcttttttgttctaaagaaaagtcattttgatgcaaggtcctgcctgccatcagatccgaggtgcctcctgcagtgaccccttttcctggcatttctcttccacgcgacgaggtctgcctagtgagatctgcatgacctcacgttgctttccagagcccgggcctattttgccatctcagttttcctgggccctgcttcctgtgtaccactgaggggcagctgggccaggagctgtgcccggtgcctgcagccttcataagcacacacgtccattccctactaaggcccagacctcctggtatctgccccgggctccctcatcccacctccatccggagttgcccaagatgcatgtccagcataggcaggattgctcggtggtgagaaggttaggtccggctcagactgaataagaagagataaaatttgccttaaaacttacctggcagtggctttgctgcacggtcggatcccttaggttcaggaagcttctgtgcaagctgcgaggatggcttgggccgaagggttgctctgcccgccgcgctagctgtgagctgagcaaagccctgggctcacagcaccccaaaagcctgtggcttcagtcctgcgtctgcaccacacattcaaaaggatcgttttgttttgtttttaaagaaaggtgagattggcttggttcttcatgagcacatttgatatagctctttttctgtttttccttgctcatttcgttttggggaagaaatctgtactgtattgggattgtaaagaacatctctgcactcagacagtttacagaaataaatgttttttttgtttttcagaaaa

SEQ ID NO: 461067 - DNA, 1370 bp, Homo sapiens
  misc_feature (28)..(28): n is a, c, g, or t
  misc_feature (120)..(120): n is a, c, g, or t
agcggggaatccgccgccgcgctcgcanctcgcaggcgccgcgtagccgtcgccaccgccgccagcccgtgcgccctcggcgcgtacccgccgcgctcccatccccgccgccggccaggngcgcgctcggccgccccggacagtgtcccgctgcggctccgcggcgatggccaccaagatcgacaaagaggcttgccgggcggcgtacaacctggtgcgcgacgacggctcggccgtcatctgggtgacttttaaatatgacggctccaccatcgtccccggcgagcagggagcggagtaccagcacttcatccagcagtgcacagatgacgtccggttgtttgccttcgtgcgcttcaccaccggggatgccatgagcaagaggtccaagtttgccctcatcacgtggatcggtgagaacgtcagcgggctgcagcgcgccaaaaccgggacggacaagaccctggtgaaggaggtcgtacagaatttcgctaaggagtttgtgatcagtgatcggaaggagctggaggaagatttcatcaagagcgagctgaagaaggcggggggagccaattacgacgcccagacggagtaaccccagcccccgccacaccaccccttgccaaagtcatctgcctgctccccgggggagaggaccgccggcctcagctactagcccaccagcccaccagggagaagagaagccatgagaggcagcgcccgccaccctgtgtccacagcccccaccttcccgcttcccttagaaccctgccgtgtcctatctcatgacgctcatggaacctctttctttgatcttctttttcttttctccccctcttttttgttctaaagaaaagtcattttgatgcaaggtcctgcctgccatcagatccgaggtgcctcctgcagtgaccccttttcctggcatttctcttccacgcgacgaggtctgcctagtgagatctgcatgacctcacgttgctttccagagcccgggcctattttgccatctcagttttcctgggccctgcttcctgtgtaccactgaggggcagctgggccaggagctgtgcccggtgcctgcagccttcataagcacacacgtccattccctactaaggcccagacctcctggtatctgcccggtcctattccactcatcggagtgccagatggcatgtcgcatagacgatggccggggagaaggaaggcgtccgacgaaaaagagtaaatgctaaactaacgagggtgtggcggtgaaccgtcacctgcggagtttgggaaaggagtgcccggagggaggatgggcaggcccacacatggagcgggggggaagaggacaaataagggagggggtgcatatagtgttg

SEQ ID NO: 461068 - DNA, 1028 bp, Homo sapiens
  misc_feature (28)..(28): n is a, c, g, or t
  misc_feature (120)..(120): n is a, c, g, or t
agcggggaatccgccgccgcgctcgcanctcgcaggcgccgcgtagccgtcgccaccgccgccagcccgtgcgccctcggcgcgtacccgccgcgctcccatccccgccgccggccaggngcgcgctcggccgccccggacagtgtcccgctgcggctccgcggcgatggccaccaagatcgacaaagaggcttgccgggcggcgtacaacctggtgcgcgacgacggctcggccgtcatctgggtgacttttaaatatgacggctccaccatcgtccccggcgagcagggagcggagtaccagcacttcatccagcagtgcacagatgacgtccggttgtttgccttcgtgcgcttcaccaccggggatgccatgagcaagaggtccaagtttgccctcatcacgtggatcggtgagaacgtcagcgggctgcagcgcgccaaaaccgggacggacaagaccctggtgaaggaggtcgtacagaatttcgctaaggagtttgtgatcagtgatcggaaggagctggaggaagatttcatcaagagcgagctgaagaaggcggggggagccaattacgacgcccagacggagtaaccccagcccccgccacaccaccccttgccaaagtcatctgcctgctccccgggggagaggaccgccggcctcagctactagcccaccagcccaccagggagaagagaagccatgagaggcagcgcccgccaccctgtgtccacagcccccaccttcccgcttcccttagaaccctgccgtgtcctatctcatgacgctcatggaacctctttctttgatcttctttttcttttctccccctcttttttgttctaaagaaaagtcattttgatgcaaggtcctgcctgccatcagatccgaggtgcctcctgcagtgaccccttttcctggcatttctcttccacgcgacgaggtctgcctagtgagatctgcatgacctcacgttgctttccagagcccggcgcagtctgtgataaggatcctgctagagtga

SEQ ID NO: 461069 - DNA, 1651 bp, Homo sapiens
  misc_feature (28)..(28): n is a, c, g, or t
  misc_feature (120)..(120): n is a, c, g, or t
agcggggaatccgccgccgcgctcgcanctcgcaggcgccgcgtagccgtcgccaccgccgccagcccgtgcgccctcggcgcgtacccgccgcgctcccatccccgccgccggccaggngcgcgctcggccgccccggacagtgtcccgctgcggctccgcggcgatggccaccaagatcgacaaagaggcttgccgggcggcgtacaacctggtgcgcgacgacggctcggccgtcatctggtaggaacttttcattcgtctccacgccccgctccccgggctcgcgcggggcctcgtgcaccgagccggcctccaggcgggacggattcgggcctcccgcgctgtcttcctcgccttattccgggacggcgtgccaggcccccgcgggcttctccgtggccagcgcgtctgttagattgtcctctgcaagcgccgcgtcgcgcggcaccagcgctgatgtgtgtgtgtttttttcttctcccaacccaaagggtgacttttaaatatgacggctccaccatcgtccccggcgagcagggagcggagtaccagcacttcatccagcagtgcacaggctggagtgcagtggtacaatctcagctaactgcaacctccgtctcccgggttcaagagattctcctgcctcagcctcctgagtagctgggattacaggcgcccacgaccacgcctggctaattttttgtaattttagtagagatgggggtttcaccattttggccaggctggtctctaacttctgaccttaggtgatctgcccaccttggcctctcaaagtgctgggattacaggcgtgagccactgcgcccggccgacggtgtgggttcgaatccctgaacggctgcttcctggctgtgtggtttggaacgagttccttaatctctgggggtcttggtttcctcacctgcactctcacagtgctgttgcgaggataagtgagtcagtatgtataaaatgctcagaacagtgcctgtacaagctacatgattgtttgcgaaataaataaaaagtacaaaattgtgccagggatcatggacaatggactcaacactggcactggctggatagcagtcaccacgctcgacgtgccttatcttggtcatacctcagaacagcctggtgtggcagctcttcccctgtgccgcgctggcctgccttcccgcttccctaggcctgtggactctcttccctctgcctgcactgtcttcatctgtttcgccttcctggaggactcctacacacccgtcaaggcccggtgtgaatgttccctctgctcggatgccctccttgtctttgtggtgttggtgtcccgtgtggtggtcgtgtgcatgtctgtttcttcaactccttggcgaagtcctcctggagagagggactttgtccctttggtggtgtattggcagcgctgggaacagtacctggcagcctgcacagatgttgttgagtaggcaaatgagtgacagtccatgtagatgtctgagagctaagctcacacaggagggcccgccgtcccctcctccaaagtaacagcccagtggcccacaaggctcccggccgctaccactggccatgtgactgctctggccccaggcctcttactccagagcccaggcatcgccaccttcctctc

SEQ ID NO: 461070 - DNA, 1108 bp, Homo sapiens
  misc_feature (8)..(8): n is a, c, g, or t
  misc_feature (12)..(12): n is a, c, g, or t
  misc_feature (16)..(16): n is a, c, g, or t
  misc_feature (20)..(20): n is a, c, g, or t
  misc_feature (24)..(24): n is a, c, g, or t
  misc_feature (26)..(26): n is a, c, g, or t
  misc_feature (28)..(28): n is a, c, g, or t
tttatttnaganagantctncctntntngcccaggctggagtgcagtggtacaatctcagctaactgcaacctccgtctcccgggttcaagagattctcctgcctcagcctcctgagtagctgggattacaggcgcccacgaccacgcctggctaattttttgtaattttagtagagatgggggtttcaccattttggccaggctggtctctaacttctgaccttaggtgatctgcccaccttggcctctcaaagtgctgggattacaggcgtgagccactgcgcccggccgacggtgtgggttcgaatccctgaacggctgcttcctggctgtgtggtttggaacgagttccttaatctctgggggtcttggtttcctcacctgcactctcacagtgctgttgcgaggataagtgagtcagtatgtataaaatgctcagaacagtgcctgtacaagctacatgattgtttgcgaaataaataaaaagtacaaaattgtgccagggatcatggacaatggactcaacactggcactggctggatagcagtcaccacgctcgacgtgccttatcttggtcatacctcagaacagcctggtgtggcagctcttcccctgtgccgcgctggcctgccttcccgcttccctaggcctgtggactctcttccctctgcctgcactgtcttcatctgtttcgccttcctggaggactcctacacacccgtcaaggcccggtgtgaatgttccctctgctcggatgccctccttgtctttgtggtgttggtgtcccgtgtggtggtcgtgtgcatgtctgtttcttcaactccttggcgaagtcctcctggagagagggactttgtccctttggtggtgtattggcagcgctgggaacagtacctggcagcctgcacagatgttgttgagtaggcaaatgagtgacagtccatgtagatgtctgagagctaagctcacacaggagggcccgccgtcccctcctccaaagtaacagcccagtggcccacaaggctcccggccgctaccactggccatgtgactgctctggccccaggcctcttactccagagcccaggcatcgccaccttcctctc

SEQ ID NO: 461071 - DNA, 1844 bp, Homo sapiens
  misc_feature (28)..(28): n is a, c, g, or t
  misc_feature (120)..(120): n is a, c, g, or t
agcggggaatccgccgccgcgctcgcanctcgcaggcgccgcgtagccgtcgccaccgccgccagcccgtgcgccctcggcgcgtacccgccgcgctcccatccccgccgccggccaggngcgcgctcggccgccccggacagtgtcccgctgcggctccgcggcgatggccaccaagatcgacaaagaggcttgccgggcggcgtacaacctggtgcgcgacgacggctcggccgtcatctgggtgacttttaaatatgacggctccaccatcgtccccggcgagcagggagcggagtaccagcacttcatccagcagtgcacagatgacgtccggttgtttgccttcgtgcgcttcaccaccggggatgccatgagcaagaggtccaagtttgccctcatcacgtggatcggtgagaacgtcagcgggctgcagcgcgccaaaaccgggacggacaagaccctggtgaaggaggtcgtacagaatttcgctaaggagtttgtgatcagtgatcggaaggagctggaggaagatttcatcaagagcgagctgaagaaggcggggggagccaattacgacgcccagacggagtaaccccagcccccgccacaccaccccttgccaaagtcatctgcctgctccccgggggagaggaccgccggcctcagctactagcccaccagcccaccagggagaagagaagccatgagaggcagcgcccgccaccctgtgtccacagcccccaccttcccgcttcccttagaaccctgccgtgtcctatctcatgacgctcatggaacctctttctttgatcttctttttcttttctccccctcttttttgttctaaagaaaagtcattttgatgcaaggtcctgcctgccatcagatccgaggtgcctcctgcagtgaccccttttcctggcatttctcttccacgcgacgaggtctgcctagtgagatctgcatgacctcacgttgctttccagagcccgggcctattttgccatctcagttttcctgggccctgcttcctgtgtaccactgaggggcagctgggccaggagctgtgcccggtgcctgcagccttcataagcacacacgtccattccctactaaggcccagacctcctggtatctgccccgggctccctcatcccacctccatccggagttgcccaagatgcatgtccagcataggcaggattgctcggtggtgagaaggttaggtccggctcagactgaataagaagagataaaatttgccttaaaacttacctggcagtggctttgctgcacggtctgaaaccacctgttcccaccctcttgaccgaaatttccttgtgacacagagaagggcaaaggtctgagcccagagttgacggagggagtatttcagggttcacttcaggggctcccaaagcgacaagatcgttagggagagaggcccagggtggggactgggaatttaaggagagctgggaacggatcccttaggttcaggaagcttctgtgcaagctgcgaggatggcttgggccgaagggttgctctgcccgccgcgctagctgtgagctgagcaaagccctgggctcacagcaccccaaaagcctgtggcttcagtcctgcgtctgcaccacacattcaaaaggatcgttttgttttgtttttaaagaaaggtgagattggcttggttcttcatgagcacatttgatatagctctttttctgtttttccttgctcatttcgttttggggaagaaatctgtactgtattgggattgtaaagaacatctctgcactcagacagtttacagaaataaatgttttttttgtttttcagaaaa

SEQ ID NO: 461072 - DNA, 1394 bp, Homo sapiens
ttcgtacttggcgtcccctcgccttctcgctcgctcttgatgacatcttcctccagctccttccgatcactgatcacggagactccttagcgaaattctgtacgaccgcctccaccagggtcttgtccgtcccggttttggcgcgctgcagcccccgccacaccaccccttgccaaagtcatctgcctgctccccgggggagaggaccgccggcctcagctactagcccaccagcccaccagggagaagagaagccatgagaggcagcgcccgccaccctgtgtccacagcccccaccttcccgcttcccttagaaccctgccgtgtcctatctcatgacgctcatggaacctctttctttgatcttctttttcttttctccccctcttttttgttctaaagaaaagtcattttgatgcaaggtcctgcctgccatcagatccgaggtgcctcctgcagtgaccccttttcctggcatttctcttccacgcgacgaggtctgcctagtgagatctgcatgacctcacgttgctttccagagcccgggcctattttgccatctcagttttcctgggccctgcttcctgtgtaccactgaggggcagctgggccaggagctgtgcccggtgcctgcagccttcataagcacacacgtccattccctactaaggcccagacctcctggtatctgccccgggctccctcatcccacctccatccggagttgcccaagatgcatgtccagcataggcaggattgctcggtggtgagaaggttaggtccggctcagactgaataagaagagataaaatttgccttaaaacttacctggcagtggctttgctgcacggtctgaaaccacctgttcccaccctcttgaccgaaatttccttgtgacacagagaagggcaaaggtctgagcccagagttgacggagggagtatttcagggttcacttcaggggctcccaaagcgacaagatcgttagggagagaggcccagggtggggactgggaatttaaggagagctgggaacggatcccttaggttcaggaagcttctgtgcaagctgcgaggatggcttgggccgaagggttgctctgcccgccgcgctagctgtgagctgagcaaagccctgggctcacagcaccccaaaagcctgtggcttcagtcctgcgtctgcaccacacattcaaaaggatcgttttgttttgtttttaaagaaaggtgagattggcttggttcttcatgagcacatttgatatagctctttttctgtttttccttgctcatttcgttttggggaagaaatctgtactgtattgggattgtaaagaacatctctgcactcagacagtttacagaaataaatgttttttttgtttttcagaaaa

SEQ ID NO: 461073 - DNA, 1988 bp, Homo sapiens
  misc_feature (28)..(28): n is a, c, g, or t
  misc_feature (120)..(120): n is a, c, g, or t
agcggggaatccgccgccgcgctcgcanctcgcaggcgccgcgtagccgtcgccaccgccgccagcccgtgcgccctcggcgcgtacccgccgcgctcccatccccgccgccggccaggngcgcgctcggccgccccggacagtgtcccgctgcggctccgcggcgatggccaccaagatcgacaaagaggcttgccgggcggcgtacaacctggtgcgcgacgacggctcggccgtcatctgggtgacttttaaatatgacggctccaccatcgtccccggcgagcagggagcggagtaccagcacttcatccagcagtgcacagatgacgtccggttgtttgccttcgtgcgcttcaccaccggggatgccatgagcaagaggtccaagtttgccctcatcacgtggatcggtgagaacgtcagcgggctgcagcgcgccaaaaccgggacggacaagaccctggtgaaggaggtcgtacagaatttcgctaaggagtttgtgatcagtgatcggaaggagctggaggaagatttcatcaagagcgagctgaagaaggcggggggagccaattacgacgcccagacggagtaaccccagcccccgccacaccaccccttgccaaagtcatctgcctgctccccgggggagaggaccgccggcctcagctactagcccaccagcccaccagggagaagagaagccatgagaggcagcgcccgccaccctgtgtccacagcccccaccttcccgcttcccttagaaccctgccgtgtcctatctcatgacgctcatggaacctctttctttgatcttctttttcttttctccccctcttttttgttctaaagaaaagtcattttgatgcaaggtcctgcctgccatcagatccgaggtgcctcctgcagtgaccccttttcctggcatttctcttccacgcgacgaggtctgcctagtgagatctgcatgacctcacgttgctttccagagcccgggcctattttgccatctcagttttcctgggccctgcttcctgtgtaccactgaggggcagctgggccaggagctgtgcccggtgcctgcagccttcataagcacacacgtccattccctactaaggcccagacctcctggtatctgccccgggctccctcatcccacctccatccggagttgcccaagatgcatgtccagcataggcaggattgctcggtggtgagaaggttaggtccggctcagactgaataagaagagataaaatttgccttaaaacttacctggcagtggctttgctgcacggtctgaaaccacctgttcccaccctcttgaccgaaatttccttgtgacacagagaagggcaaaggtctgagcccagagttgacggagggagtatttcagggttcacttcaggggctcccaaagcgacaagatcgttagggagagaggcccagggtggggactgggaatttaaggagagctgggaacggatcccttaggttcaggaagcttctgtgcaagctgcgaggatggcttgggccgaagggttgctctgcccgccgcgctagctgtgagctgagcaaagccctgggctcacagcaccccaaaagcctgtggcttcagtcctgcgtctgcaccacacattcaaaaggatcgttttgttttgtttttaaagaaaggtgagattggcttggttcttcatgagcacatttgatatagctctttttctgtttttccttgctcatttcgttttggggaagaaatctgtactgtattgggattgtaaagaacatctctgcactcagacagtttacagaaataaatgttttttttgtttttcagaaaaaaaaaaaaaaaaaaaaaaaaacttgcggaggcatttatgggcggggggcgggaaaaagcggggtattggaattgggccattgggccaataacggttgttctcttggacccagtttttttggtccaaggggggaaatttgcgcgg

SEQ ID NO: 461074 - DNA, 2430 bp, Homo sapiens
  misc_feature (28)..(28): n is a, c, g, or t
  misc_feature (120)..(120): n is a, c, g, or t
agcggggaatccgccgccgcgctcgcanctcgcaggcgccgcgtagccgtcgccaccgccgccagcccgtgcgccctcggcgcgtacccgccgcgctcccatccccgccgccggccaggngcgcgctcggccgccccggacagtgtcccgctgcggctccgcggcgatggccaccaagatcgacaaagaggcttgccgggcggcgtacaacctggtgcgcgacgacggctcggccgtcatctgggtgacttttaaatatgacggctccaccatcgtccccggcgagcagggagcggagtaccagcacttcatccagcagtgcacagatgacgtccggttgtttgccttcgtgcgcttcaccaccggggatgccatgagcaagaggtccaagtttgccctcatcacgtggatcggtgagaacgtcagcgggctgcagcgcgccaaaaccgggacggacaagaccctggtgaaggaggtcgtacagaatttcgctaaggagtttgtgatcagtgatcggaaggagctggaggaagatttcatcaagagcgagctgaagaaggcggggggagccaattacgacgcccagacggagtaaccccagcccccgccacaccaccccttgccaaagtcatctgcctgctccccgggggagaggaccgccggcctcagctactagcccaccagcccaccagggagaagagaagccatgagaggcagcgcccgccaccctgtgtccacagcccccaccttcccgcttcccttagaaccctgccgtgtcctatctcatgacgctcatggaacctctttctttgatcttctttttcttttctccccctcttttttgttctaaagaaaagtcattttgatgcaaggtcctgcctgccatcagatccgaggtgcctcctgcagtgaccccttttcctggcatttctcttccacgcgacgaggtctgcctagtgagatctgcatgacctcacgttgctttccagagcccgggcctattttgccatctcagttttcctgggccctgcttcctgtgtaccactgaggggcagctgggccaggagctgtgcccggtgcctgcagccttcataagcacacacgtccattccctactaaggcccagacctcctggtatctgccccgggctccctcatcccacctccatccggagttgcccaagatgcatgtccagcataggcaggattgctcggtggtgagaaggttaggtccggctcagactgaataagaagagataaaatttgccttaaaacttacctggcagtggctttgctgcacggtctgaaaccacctgttcccaccctcttgaccgaaatttccttgtgacacagagaagggcaaaggtctgagcccagagttgacggagggagtatttcagggttcacttcaggggctcccaaagcgacaagatcgttagggagagaggcccagggtggggactgggaatttaaggagagctgggaacggatcccttaggttcaggaagcttctgtgcaagctgcgaggatggcttgggccgaagggttgctctgcccgccgcgctagctgtgagctgagcaaagccctgggctcacagcaccccaaaagcctgtggcttcagtcctgcgtctgcaccacacattcaaaaggatcgttttgttttgtttttaaagaaaggtgagattggcttggttcttcatgagcacatttgatatagctctttttctgtttttccttgctcatttcgttttggggaagaaatctgtactgtattgggattgtaaagaacatctctgcactcagacagtttacagaaataaatgttttttttgtttttcagaaaaaaaaaaaaaaaaaaaaaaaaatcggggttttttttgttttttttgttaatggtggggaagccctttttgagaagaaccgtggggaattttggtaaaaaaaaaaaggggggaaaacaaactcgtcgtgtggggagaaaacaaggcccccagaaagtactcgacaaggaggagccacaccccaaggcacgaacagtgggagaaacgcccacatggaaggaggcgtagaaactacacaacacaccacacttaataaggggaagaaaggagaacgaatagagacgtagagacgaacggcccatttaagtacaaaaaggtccaaacgcgaataccacataagtggacggagaacacctgggaaaagggggcacactgccaaaagaaggagccgccaaaagaatacacacagagccctggtaccaacccgggtaaaccagggggcgccaaaacccgggcgcgagaagcagaacccctggagaaaaagcgatagcaaaaggaaccctgcacaaggcttggcacaggcaaagtgccagcggagacgggagcccccgggaagtccccaaagagtgaggcagatcggaacgaacgg

SEQ ID NO: 461075 - DNA, 2652 bp, Homo sapiens
  misc_feature (28)..(28): n is a, c, g, or t
  misc_feature (120)..(120): n is a, c, g, or t
  misc_feature (1856)..(1856): n is a, c, g, or t
  misc_feature (1860)..(1860): n is a, c, g, or t
  misc_feature (1863)..(1863): n is a, c, g, or t
  misc_feature (1865)..(1865): n is a, c, g, or t
  misc_feature (1872)..(1872): n is a, c, g, or t
agcggggaatccgccgccgcgctcgcanctcgcaggcgccgcgtagccgtcgccaccgccgccagcccgtgcgccctcggcgcgtacccgccgcgctcccatccccgccgccggccaggngcgcgctcggccgccccggacagtgtcccgctgcggctccgcggcgatggccaccaagatcgacaaagaggcttgccgggcggcgtacaacctggtgcgcgacgacggctcggccgtcatctgggtgacttttaaatatgacggctccaccatcgtccccggcgagcagggagcggagtaccagcacttcatccagcagtgcacagatgacgtccggttgtttgccttcgtgcgcttcaccaccggggatgccatgagcaagaggtccaagtttgccctcatcacgtggatcggtgagaacgtcagcgggctgcagcgcgccaaaaccgggacggacaagaccctggtgaaggaggtcgtacagaatttcgctaaggagtttgtgatcagtgatcggaaggagctggaggaagatttcatcaagagcgagctgaagaaggcggggggagccaattacgacgcccagacggagtaaccccagcccccgccacaccaccccttgccaaagtcatctgcctgctccccgggggagaggaccgccggcctcagctactagcccaccagcccaccagggagaagagaagccatgagaggcagcgcccgccaccctgtgtccacagcccccaccttcccgcttcccttagaaccctgccgtgtcctatctcatgacgctcatggaacctctttctttgatcttctttttcttttctccccctcttttttgttctaaagaaaagtcattttgatgcaaggtcctgcctgccatcagatccgaggtgcctcctgcagtgaccccttttcctggcatttctcttccacgcgacgaggtctgcctagtgagatctgcatgacctcacgttgctttccagagcccgggcctattttgccatctcagttttcctgggccctgcttcctgtgtaccactgaggggcagctgggccaggagctgtgcccggtgcctgcagccttcataagcacacacgtccattccctactaaggcccagacctcctggtatctgccccgggctccctcatcccacctccatccggagttgcccaagatgcatgtccagcataggcaggattgctcggtggtgagaaggttaggtccggctcagactgaataagaagagataaaatttgccttaaaacttacctggcagtggctttgctgcacggtctgaaaccacctgttcccaccctcttgaccgaaatttccttgtgacacagagaagggcaaaggtctgagcccagagttgacggagggagtatttcagggttcacttcaggggctcccaaagcgacaagatcgttagggagagaggcccagggtggggactgggaatttaaggagagctgggaacggatcccttaggttcaggaagcttctgtgcaagctgcgaggatggcttgggccgaagggttgctctgcccgccgcgctagctgtgagctgagcaaagccctgggctcacagcaccccaaaagcctgtggcttcagtcctgcgtctgcaccacacattcaaaaggatcgttttgttttgtttttaaagaaaggtgagattggcttggttcttcatgagcacatttgatatagctctttttctgtttttccttgctcatttcgttttggggaagaaatctgtactgtattgggattgtaaagaacatctctgcactcagacagtttacagaaataaatgttttttttgtttttcagaaaaaaaaaaaaaaanaaanaananaaaaaanaaaaaagagggggggggggggggctaaaaaattatctcccccggagggggcccaaaattttgaggcgcgtgtccccccgtttttttgtgtaaaaggggggcccctatattaggggggggggtatttaaaagaggaagagagagggggggggcgggggtgtttaaaaaaggtgtgtggtaggggggaaaagggttagggggggatatcttggtgggagaggagaaccccctcttctggcgtgcgtgcggggatcaatcttgtgtggggcaccacattcacctacagagaagaattaaagggagcccgggggaaaaataacaacttcggagggggtatgggtggtgtttaaccacgggggctcatgatcttgcgggtgagaaaatgtggtcacggggattctttttttcttgaatactttttttccggcgctgttctcataacaacacaatgagatagatgacaaacaaatagaagaaggggaacgagggaagcgacatagaggagaggaaaaaaaaaaagcaagagagtagggggaagcagaggaaggagagacaaagacgaacagcaaaagcaagagagaaagcaaacatgcacagaaagcgaaacgagagcgagacgaacaaaagaaagaggcacgagacgagaagacacactagagagacaacaggcaagcgccagaaggcatgagcccggggcagagaacagaaaagatagtcggaaagagaggaccgcgacagcaccgacggagcaggggcaccgacgggaacaaaggcgcgagtt

SEQ ID NO: 461076 - DNA, 1836 bp, Homo sapiens
  misc_feature (28)..(28): n is a, c, g, or t
  misc_feature (120)..(120): n is a, c, g, or t
agcggggaatccgccgccgcgctcgcanctcgcaggcgccgcgtagccgtcgccaccgccgccagcccgtgcgccctcggcgcgtacccgccgcgctcccatccccgccgccggccaggngcgcgctcggccgccccggacagtgtcccgctgcggctccgcggcgatggccaccaagatcgacaaagaggcttgccgggcggcgtacaacctggtgcgcgacgacggctcggccgtcatctgggtgacttttaaatatgacggctccaccatcgtccccggcgagcagggagcggagtaccagcacttcatccagcagtgcacagatgacgtccggttgtttgccttcgtgcgcttcaccaccggggatgccatgagcaagaggtccaagtttgccctcatcacgtggatcggtgagaacgtcagcgggctgcagcgcgccaaaaccgggacggacaagaccctggtgaaggaggtcgtacagaatttcgctaaggagtttgtgatcagtgatcggaaggagctggaggaagatttcatcaagagcgagctgaagaaggcggggggagccaattacgacgcccagacggagtaaccccagcccccgccacaccaccccttgccaaagtcatctgcctgctccccgggggagaggaccgccggcctcagctactagcccaccagcccaccagggagaagagaagccatgagaggcagcgcccgccaccctgtgtccacagcccccaccttcccgcttcccttagaaccctgccgtgtcctatctcatgacgctcatggaacctctttctttgatcttctttttcttttctccccctcttttttgttctaaagaaaagtcattttgatgcaaggtcctgcctgccatcagatccgaggtgcctcctgcagtgaccccttttcctggcatttctcttccacgcgacgaggtctgcctagtgagatctgcatgacctcacgttgctttccagagcccgggcctattttgccatctcagttttcctgggccctgcttcctgtgtaccactgaggggcagctgggccaggagctgtgcccggtgcctgcagccttcataagcacacacgtccattccctactaaggcccagacctcctggtatctgccccgggctccctcatcccacctccatccggagttgcccaagatgcatgtccagcataggcaggattgctcggtggtgagaaggttaggtccggctcagactgaataagaagagataaaatttgccttaaaacttacctggcagtggctttgctgcacggtctgaaaccacctgttcccaccctcttgaccgaaatttccttgtgacacagagaagggcaaaggtctgagcccagagttgacggagggagtatttcagggttcacttcaggggctcccaaagcgacaagatcgttagggagagaggcccagggtggggactgggaatttaaggagagctgggaacggatcccttaggttcaggaagcttctgtgcaagctgcgaggatggcttgggccgaagggttgctctgcccgccgcgctagctgtgagctgagcaaagccctgggctcacagcaccccaaaagcctgtggcttcagtcctgcgtctgcaccacacattctgagcacatttgatatagctctttttctgtttttccttgctcatttcgttttggggaagaaatctgtactgtattgggattgtaaagaacatctctgcactcagacagtttacagaaataaatgttttttttgtttttcagaaaattttttttttttttttttttttttttttttttttttttttttttttt

SEQ ID NO: 461077 - DNA, 1689 bp, Homo sapiens
  misc_feature (28)..(28): n is a, c, g, or t
  misc_feature (120)..(120): n is a, c, g, or t
agcggggaatccgccgccgcgctcgcanctcgcaggcgccgcgtagccgtcgccaccgccgccagcccgtgcgccctcggcgcgtacccgccgcgctcccatccccgccgccggccaggngcgcgctcggccgccccggacagtgtcccgctgcggctccgcggcgatggccaccaagatcgacaaagaggcttgccgggcggcgtacaacctggtgcgcgacgacggctcggccgtcatctgggtgacttttaaatatgacggctccaccatcgtccccggcgagcagggagcggagtaccagcacttcatccagcagtgcacagatgacgtccggttgtttgccttcgtgcgcttcaccaccggggatgccatgagcaagaggtccaagtttgccctcatcacgtggatcggtgagaacgtcagcgggctgcagcgcgccaaaaccgggacggacaagaccctggtgaaggaggtcgtacagaatttcgctaaggagtttgtgatcagtgatcggaaggagctggaggaagatttcatcaagagcgagctgaagaaggcggggggagccaattacgacgcccagacggagtaaccccagcccccgccacaccaccccttgccaaagtcatctgcctgctccccgggggagaggaccgccggcctcagctactagcccaccagcccaccagggagaagagaagccatgagaggcagcgcccgccaccctgtgtccacagcccccaccttcccgcttcccttagaaccctgccgtgtcctatctcatgacgctcatggaacctctttctttgatcttctttttcttttctccccctcttttttgttctaaagaaaagtcattttgatgcaaggtcctgcctgccatcagatccgaggtgcctcctgcagtgaccccttttcctggcatttctcttccacgcgacgaggtctgcctagtgagatctgcatgacctcacgttgctttccagagcccgggcctattttgccatctcagttttcctgggccctgcttcctgtgtaccactgaggggcagctgggccaggagctgtgcccggtgcctgcagccttcataagcacacacgtccattccctactaaggcccagacctcctggtatctgccccgggctccctcatcccacctccatccggagttgcccaagatgcatgtccagcataggcaggattgctcggtggtgagaaggttaggtccggctcagactgaataagaagagataaaatttgccttaaaacttacctggcagtggctttgctgcacggtcgactgggaatttaaggagagctgggaacggatcccttaggttcaggaagcttctgtgcaagctgcgaggatggcttgggccgaagggttgctctgcccgccgcgctagctgtgagctgagcaaagccctgggctcacagcaccccaaaagcctgtggcttcagtcctgcgtctgcaccacacattcaaaaggatcgttttgttttgtttttaaagaaaggtgagattggcttggttcttcatgagcacatttgatatagctctttttctgtttttccttgctcatttcgttttggggaagaaatctgtactgtattgggattgtaaagaacatctctgcactcagacagtttacagaaataaatgttttttttgtttttcagaaaa

SEQ ID NO: 461078 - DNA, 1337 bp, Homo sapiens
  misc_feature (28)..(28): n is a, c, g, or t
  misc_feature (120)..(120): n is a, c, g, or t
agcggggaatccgccgccgcgctcgcanctcgcaggcgccgcgtagccgtcgccaccgccgccagcccgtgcgccctcggcgcgtacccgccgcgctcccatccccgccgccggccaggngcgcgctcggccgccccggacagtgtcccgctgcggctccgcggcgatggccaccaagatcgacaaagaggcttgccgggcggcgtacaacctggtgcgcgacgacggctcggccgtcatctgggtgacttttaaatatgacggctccaccatcgtccccggcgagcagggagcggagtaccagcacttcatccagcagtgcacagatgacgtccggttgtttgccttcgtgcgcttcaccaccggggatgccatgagcaagaggtccaagtttgccctcatcacgtggatcggtgagaacgtcagcgggctgcagcgcgccaaaaccgggacggacaagaccctggtgaaggaggtcgtacagaatttcgctaaggagtttgtgatcagtgatcggaaggagctggaggaagatttcatcaagagcgagctgaagaaggcggggggagccaattacgacgcccagacggagtaaccccagcccccgccacaccaccccttgccaaagtcatctgcctgctccccgggggagaggaccgccggcctcagctactagcccaccagcccaccagggagaagagaagccatgagaggcagcgcccgccaccctgtgtccacagcccccaccttcccgcttcccttagaaccctgccgtgtcctatctcatgacgctcatggaacctctttctttgatcttctttttcttttctccccctcttttttgttctaaagaaaagtcattttgatgcaaggtcctgcctgccatcagatccgaggtgcctcctgcagtgaccccttttcctggcatttctcttccacgcgacgaggtctgcctagtgagatctgcatgacctcacgttgctttccagagcccgggcctattttgccatctcagttttcctgggccctgcttcctgtgtaccactgaggggcagctgggccaggagctgtgcccggtgcctgcagccttcataagcacacacgtccattccctactaaggcccagacctcctggtatctgccccgggctccctcatcccacctccatccggagttgcccaagatgcatgtccagcataggcaggattgctcggtggtgagaaggttaggtccggctcagactgaataagaagagataaaatttgccttaaaacttacctggcagtggctttgctgcacggtcacgacgattccggtcaggatcctgctagagtcac

SEQ ID NO: 461079 - DNA, 1166 bp, Homo sapiens
  misc_feature (28)..(28): n is a, c, g, or t
  misc_feature (120)..(120): n is a, c, g, or t
agcggggaatccgccgccgcgctcgcanctcgcaggcgccgcgtagccgtcgccaccgccgccagcccgtgcgccctcggcgcgtacccgccgcgctcccatccccgccgccggccaggngcgcgctcggccgccccggacagtgtcccgctgcggctccgcggcgatggccaccaagatcgacaaagaggcttgccgggcggcgtacaacctggtgcgcgacgacggctcggccgtcatctgggtgacttttaaatatgacggctccaccatcgtccccggcgagcagggagcggagtaccagcacttcatccagcagtgcacagatgacgtccggttgtttgccttcgtgcgcttcaccaccggggatgccatgagcaagaggtccaagtttgccctcatcacgtggatcggtgagaacgtcagcgggctgcagcgcgccaaaaccgggacggacaagaccctggtgaaggaggtcgtacagaatttcgctaaggagtttgtgatcagtgatcggaaggagctggaggaagatttcatcaagagcgagctgaagaaggcggggggagccaattacgacgcccagacggagtaaccccagcccccgccacaccaccccttgccaaagtcatctgcctgctccccgggggagaggaccgccggcctcagctactagcccaccagcccaccagggagaagagaagccatgagaggcagcgcccgccaccctgtgtccacagcccccaccttcccgcttcccttagaaccctgccgtgtcctatctcatgacgctcatggaacctctttctttgatcttctttttcttttctccccctcttttttgttctaaagaaaagtcattttgatgcaaggtcctgcctgccatcagatccgaggtgcctcctgcagtgaccccttttcctggcatttctcttccacgcgacgaggtctgcctagtgagatctgcatgacctcacgttgctttccagagcccgggcctattttgccatctcagttttcctgggccctgcttcctgtgtaccactgaggggcagctgggccaggagctgtgcccggtgcctgcagccttcataagcacacacgtccaggatatgcgtcccgaatatgcgtgtatactcaggaatcgactatgcacccaatacgat

SEQ ID NO: 461080 - DNA, 1130 bp, Homo sapiens
  misc_feature (28)..(28): n is a, c, g, or t
  misc_feature (120)..(120): n is a, c, g, or t
agcggggaatccgccgccgcgctcgcanctcgcaggcgccgcgtagccgtcgccaccgccgccagcccgtgcgccctcggcgcgtacccgccgcgctcccatccccgccgccggccaggngcgcgctcggccgccccggacagtgtcccgctgcggctccgcggcgatggccaccaagatcgacaaagaggcttgccgggcggcgtacaacctggtgcgcgacgacggctcggccgtcatctgggtgacttttaaatatgacggctccaccatcgtccccggcgagcagggagcggagtaccagcacttcatccagcagtgcacagatgacgtccggttgtttgccttcgtgcgcttcaccaccggggatgccatgagcaagaggtccaagtttgccctcatcacgtggatcggtgagaacgtcagcgggctgcagcgcgccaaaaccgggacggacaagaccctggtgaaggaggtcgtacagaatttcgctaaggagtttgtgatcagtgatcggaaggagctggaggaagatttcatcaagagcgagctgaagaaggcggggggagccaattacgacgcccagacggagtaaccccagcccccgccacaccaccccttgccaaagtcatctgcctgctccccgggggagaggaccgccggcctcagctactagcccaccagcccaccagggagaagagaagccatgagaggcagcgcccgccaccctgtgtccacagcccccaccttcccgcttcccttagaaccctgccgtgtcctatctcatgacgctcatggaacctctttctttgatcttctttttcttttctccccctcttttttgttctaaagaaaagtcattttgatgcaaggtcctgcctgccatcagatccgaggtgcctcctgcagtgaccccttttcctggcatttctcttccacgcgacgaggtctgcctagtgagatctgcatgacctcacgtgatctgcctgcctcagcctcccaaagtgctgggattacaggcgtgagccaccgcatcccacctagtatatgcattttaaagatagaccaacccacccttgaaagcagcaagtaccccagccccggtcacactgcagagaagagctgaaccc

SEQ ID NO: 461081 - DNA, 1109 bp, Homo sapiens
aagaagaaaaatatggctgtttttgcccaaccctgcaggcagtcagaccttatggttgtcttcccttgttccctaaaattgctgttattctgttctttttcaaggtgcactgatttcatattgttcaaacacacatgttttacaatcaatttgtacagttaatacaattgtcatagtggtcctgaggtgacgtacatccttcagcttatgaagataacacgattaagagattaaactccagccggtccctctgttcggggtccctgacttcctgcaacaggtcctccaatatgctgcccaaaacaggctctttctggctgtcaggagggcggaggtatctggagggggtgcagcctccatagggtacaggtcccaaagcctccaagactagcagctgtgccctggggtctccatgcctccatcctgcccaaacacttattcatattgataagatttcaaatttatataataactttcaaataaagaatttgactttttaatgaaaatttccatgtcttctttacccctctatattatttcctccccacggcacacagctgcttgtgctcaagtcctgccagttgacagaaagctcccttgtcttgtgactactgcattaggcagaaggagcaaagaaagggcacaacggaccacgggcaagaaagcagaaaagggggttcctgatgtaaaaagtaaagaactatcatctgaagaaggccacacctactggaaaaatatatgtcagccccagaaaattgtgggcaagatgaggcaagtcctgagcaacacaggaaactgccctcctccttttctggccccgcttccactcttcatcatggcctatgaacagccaaagggtaaaatgatcagaaaactggacagtttttgacagtcttgttaagacttaaagggtaaatggctctttgataaagagagatcataaaaaagtaagatccacacagcttaacctcccagggggcaattaagatgctttaatgtgaagtgaatgacgacgtggtagagtttgatgtgaatgtaatagcataggaaggccggagggcatgggggcctctcaacctcattctctgtactagatgcggcatctggag

SEQ ID NO: 461082 - DNA, 3047 bp, Homo sapiens
gtcatcacctaagccagctgtcgggcactgactctctgggctacattctcccgtgggttctctttaacccgcttggtttcaccgcaggggaatgctgaagagacacaagtgtttttgttttctctcttaaaaaatacagaaactgtaatctgttttacatctgggtctgactgcagacaagcaagagcgggcggaatggagtgatgggcaatccagctgcaagaagaggtgcatacccctctgtagacagcacatctgtgcaggtgtctaacagccgcctcatggaaggagtcatggaagacgttaggcccctccagttgggatcaagcaactgatgcaagctttggaccaaatgaaacatttcaagaactcagattgtaaaatcacaatcagctggaggaattcggatctgcatctggcccagaagaacatttttgaggatcttttgaaagtatcactaagagcaaggctggtgaattgaattactgccattattccccaaggaaagaaggattcatttcattcctaactgcaaggcattcagcaggttaactggcaagtggaaaagagcctaaccaaattatcccttgggaccatcaaaacatttaataaaccaagacacaaatgcctcccaaaaattccatctgcaagaaacattttctgcatcaagaagcacaaaggagataagtgttctattcatccacgcaggcaacgctgtcacccaggaagtgttgctcagggggccttactccacagctggcctccgatgtgtaggcaggcctggaacagaatcaattgcaaaaaaaaaaaaaaaaaaacagaaaaaaaaaagaaaaaaaacagcatcgtctgtgggattctccctcaatgtctgttccgtgaaagatgcattttgtcctctggagcctggtgttggaaataaacttggctgcacagcttcatccatgtccctgcaaaggacatgaactcatccttttttatggatgcatagtattccttggtgtatatataccacattttcttaatccagtctatcattgatggacatttgggttggttccaagtctttgctattgtgaatagtgacacaataaacatacgtgtgcatgtgtctttatcatagaatgatttataatcctttgggtatacacccagtaatggtattgctgagtcaaatggtatttctagttctagatctttgaggaattgccacactgtcttccacaatggttgaactaatttacactccaacagtgtaaaagtgttcctatttttccacaacctctgcagcatctgttgtttcctgacaaaatttttaatgatcgccattctaactggcataagatggtatctcattgtggctttgatttgcatttctctaatgaacagtcatgatgatgagccttttttcgtatttctgttggctgcataaatgtcttcttttgagaaatgtctgttcatatcctttgcccattttttgatggggtttttgtttttttcttgtaaatttgtttaagttctttgtagattctggatattagccctttgtcagatggatagattgcaaaaattttctgccattctgtaggtttcctgttccctctaatgataatttcttttgctgtgcagaagctctttagtttaattggatcccatttgtcaactttggcttttgttgccattgcttttggtgttttagacatgaagtctttgcccatgtctatgtcctgaatggagggattgcctaggttttcttctaggatttttacggtcctaggtcttacattttaagtctttgatccatcttgagttgacttttgtataaggtataaggaaagggtccagtttcagtcttctgcatatccctagccagttttcccaacaccatttattaaatagggaatcttttcctcattgcttgtgtgtgtcaggtttgtcaaagatcagatggttgtagacgtgtggtgttatttctgaggcctcccttctgttccattggtctatatatctgttttggtaccagtaccatgctgttttgattactgtagccttgtagtacagactgaagtcaggtagcgtgatgcctccagctttggtcttgtccaggattgtcttggcaatgcaggctcttttttggttccatatgaactttaaagtagttttttccaattccgtgaagaaagtcagtggtagtttgacggggatagtattgaatctataaattacttcgggcagtatggccattttcacaatattgatttttcctattcatgagcatggaacgtttttccatttgtttgtgtcctctcttatttccttgagcagtggtttgtagttctctctgaagaggtccttcacatcccttgtaagtcggattcctaggtattttattctctttgaagcaattgtgaatgggagttcactaatgatttggctccctgtttgtctgttattggtgtataggaatgcttgtgatgtttgcacattgattttttatcctgagactttgctgaagttgcttatcagcttaaggagattttggggtgagacgatggggttttctaaatatacaatcatgtcatctgcaaacagaggctatttgatttcctctctttctattcagataccctttattgctttctcttgcctgattgccctggccagaacttccaatactatgttgaataggagtgacttctcctcctggctcagtgtggatctaccaggaaacttcaggttaaatctacagtgggcaaatgtgttttccaaacctgttcttattaatctatgggtaggatccctgaatggagtgcagggagaaggaaaagagaaggaggcggcgcccttcacaggaggaccttttggttgctgctggaacatgagaaatgttgcctctcaagaatttcaacagtaattcaatgctacggctgaagaaaacaaggaacaagcttctcccttcctctgccgttcctcccctcttggcgtgtaagcctgtgttcagagctcttgcttttgaagcataagtgattacaacttggcaatggtgt

SEQ ID NO: 461083 - DNA, 1997 bp, Homo sapiens
tctgagagaggaagatggctacaggacgtagcaagttgaaatggaccaacgagcaatggcctgagcaaataactttgatcgagccatcactggtgacaggacttgaacacatttctggaagcatgagtatgccatccaggaggagagagaagtcatccacacaaatgcctgcgattccgaataatgcgttctatgtcaataggaaggtaccaacaaactgtgatgtgagagatcaagggggcttcacaagagaagagctgcggaagctgcttggaggaggagaaagagcattcatccctttgcagacaaacaccagaggtcctcagtgtcacatgccagccaagctcagagcatctcaacaatgccagggagtcttggcatggggctgggccatgggcttggttctgactcagagaagtcggaaccacctactgagtcatttgcaggagctgtggtttcctgggaggtttcccaaccagttacccaccccgccaaatcgctgaatgatgggctagagctctaccatctaaaatggtagccgctagccacatggctatataaatttcaataaattaaaattaaatactattaagaaattccattcctctctcacactagccacatttcaagggcccaacagccacaagagactagtggctgcagtattaagtaacacaaatagagagcatttccatcattgcagaaagttcagaggcatgcaccagagactctaagcagcacgtgttgatccaaaatgtgctccataaaccatatgcgtctgaaggcaagaacagaggcgagcttgtcaaagtgcacattcctgggctcctccctagacttcccaggtccgtatctctgggggctggaggggaggcctgggaatcagtattttggcaagcactcccagatggctattatgcaaactcacacttcaggatgagcactccaagggaagccagaagttgaagagcgaagcgggaaaacctcctgatatggcgattctgggcatatcagatgtcttgtagcactttctactccactgtaagatttcccaaccaaacattttcaagagaatgcgactggagcctccagactgacagctaagtgcgcatctcagtaaagtcctggctgttcttccatcaagtaaaccaggaggatggaaataacctcgttgctccccttgagtgtgtttgaatcacaagtaccttccctctaacataaatttatttcccgctgccttcctctcaacaaagaccagccagtgatgaataccagacttcatagcttatttgtcaaagcagcacacctgtgaggattccctgtgaaagataaattttgatagggggagggagggctggaggaggagggacctggccaggaataaatcttaacatgttgcaccagactgtgaatgagcgcttgcctcacaaagcttgccgtcttgacaaggtatgataaattaccctctttgttgacaccttcattgggttatttatggctcattaattgaaccaaaaaggggccttgtagacccagcaggggcaccatacaatgctcctccaatggacccagctcaaagaaaagaacaaaggagggaagagtgggagcggggcacacaagtgtgtctgctccttggcttgagacactcttcaccaaacaattcaagattaaaaaaagaagaagaagaaagaaagaaaagaaaaaaaccctttggaagctcagggaaaagatatgggcagggcagttcagtgttccagagagattctctagtgccagggaatgtgacctggagaagatgggaggatgggaggaaaatcttgcttgatgactgttgcagtagtccaaacaagagaaagcacgggccccaaacaagggcatggctgtgaggaagaaatgaagctgcagaggcaaagtatatgcacattttaaagtttgcagcatattatagccaaataccctctctgagaagatgtaccactgtgcttaaaatgtcattc

SEQ ID NO: 461084 - DNA, 1943 bp, Homo sapiens
tctgagagaggaagatggctacaggacgtagcaagttgaaatggaccaacgagcaatggcctgagcaaataactttgatcgagccatcactggtgacaggacttgaacacatttctggaagcatgagtatgccatccaggaggagagagaagtcatccacacaaatgcctgcgattccgaataatgcgttctatgtcaataggaaggtaccaacaaactgtgatgtgagagatcaagggggcttcacaagagaagagctgcggaagctgcttggaggaggagaaagagcattcatccctttgcagacaaacaccagaggtcctcagtgtcacatgccagccaagctcagagcatctcaacaatgccagggagtcttggcatggggctgggccatgggcttggttctgactcagagaagtcggaaccacctactgagtcatttgcaggagctgtggtttcctgggaggtttcccaaccagttacccaccccgccaaatcgctgaatgatgggctagagctctaccatctaaaatggtagccgctagccacatggctatataaatttcaataaattaaaattaaatactattaagaaattccattcctctctcacactagccacatttcaagggcccaacagccacaagagactagtggctgcagtattaagtaacacaaatagagagcatttccatcattgcagaaagttcagaggcatgcaccagagactctaagcagcacgtgttgatccaaaatgtgctccataaaccatatgcgtctgaaggcaagaacagaggcgagcttgtcaaagtgcacattcctgggctcctccctagacttcccaggtccgtatctctgggggctggaggggaggcctgggaatcagtattttggcaagcactcccagatggctattatgcaaactcacacttcaggatgagcactccaagggaagccagaagttgaagagcgaagcgggaatccactgtaagatttcccaaccaaacattttcaagagaatgcgactggagcctccagactgacagctaagtgcgcatctcagtaaagtcctggctgttcttccatcaagtaaaccaggaggatggaaataacctcgttgctccccttgagtgtgtttgaatcacaagtaccttccctctaacataaatttatttcccgctgccttcctctcaacaaagaccagccagtgatgaataccagacttcatagcttatttgtcaaagcagcacacctgtgaggattccctgtgaaagataaattttgatagggggagggagggctggaggaggagggacctggccaggaataaatcttaacatgttgcaccagactgtgaatgagcgcttgcctcacaaagcttgccgtcttgacaaggtatgataaattaccctctttgttgacaccttcattgggttatttatggctcattaattgaaccaaaaaggggccttgtagacccagcaggggcaccatacaatgctcctccaatggacccagctcaaagaaaagaacaaaggagggaagagtgggagcggggcacacaagtgtgtctgctccttggcttgagacactcttcaccaaacaattcaagattaaaaaaagaagaagaagaaagaaagaaaagaaaaaaaccctttggaagctcagggaaaagatatgggcagggcagttcagtgttccagagagattctctagtgccagggaatgtgacctggagaagatgggaggatgggaggaaaatcttgcttgatgactgttgcagtagtccaaacaagagaaagcacgggccccaaacaagggcatggctgtgaggaagaaatgaagctgcagaggcaaagtatatgcacattttaaagtttgcagcatattatagccaaataccctctctgagaagatgtaccactgtgcttaaaatgtcattc

SEQ ID NO: 461085 - DNA, 2052 bp, Homo sapiens
tctgagagaggaagatggctacaggacgtagcaagttgaaatggaccaacgagcaatggcctgagcaaataactttgatcgagccatcactggtgacaggacttgaacacatttctggaagcatgagtatgccatccaggaggagagagaagtcatccacacaaatgcctgcgattccgaataatgcgttctatgtcaataggaaggtaccaacaaactgtgatgtgagagatcaagggggcttcacaagagaagagctgcggaagctgcttggaggaggagaaagagcattcatccctttgcagacaaacaccagaggtcctcagtgtcacatgccagccaagctcagagcatctcaacaatgccagggagtcttggcatggggctgggccatgggcttggttctgactcagagaagtcggaaccacctactgagtcatttgcaggagctgtggtttcctgggaggtttcccaaccagttacccaccccgccaaatcgctgaatgatgggctagagctctaccatctaaaatggtagccgctagccacatggctatataaatttcaataaattaaaattaaatactattaagaaattccattcctctctcacactagccacatttcaagggcccaacagccacaagagactagtggctgcagtattaagtaacacaaatagagagcatttccatcattgcagaaagttcagaggcatgcaccagagactctaagcagcacgtgttgatccaaaatgtgctccataaaccatatgcgtctgaaggcaagaacagaggcgagcttgtcaaagtgcacattcctgggctcctccctagacttcccaggtccgtatctctgggggctggaggggaggcctgggaatcagtattttggcaagcactcccagatggctattatgcaaactcacacttcaggatgagcactccaagggaagccagaagttgaagagcgaagcgggaaaacctcctgatatggcgattctgggcatatcagatgtcttgtagcactttctactccactgtaagatttcccaaccaaacattttcaagagaatgcgactggagcctccagactgacagctaagtgcgcatctcagtaaagtcctggctgttcttccatcaagtagtaaaaactgaagaaagtggctgtcctagcattatctccttcttgccttttgcagaaccaggaggatggaaataacctcgttgctccccttgagtgtgtttgaatcacaagtaccttccctctaacataaatttatttcccgctgccttcctctcaacaaagaccagccagtgatgaataccagacttcatagcttatttgtcaaagcagcacacctgtgaggattccctgtgaaagataaattttgatagggggagggagggctggaggaggagggacctggccaggaataaatcttaacatgttgcaccagactgtgaatgagcgcttgcctcacaaagcttgccgtcttgacaaggtatgataaattaccctctttgttgacaccttcattgggttatttatggctcattaattgaaccaaaaaggggccttgtagacccagcaggggcaccatacaatgctcctccaatggacccagctcaaagaaaagaacaaaggagggaagagtgggagcggggcacacaagtgtgtctgctccttggcttgagacactcttcaccaaacaattcaagattaaaaaaagaagaagaagaaagaaagaaaagaaaaaaaccctttggaagctcagggaaaagatatgggcagggcagttcagtgttccagagagattctctagtgccagggaatgtgacctggagaagatgggaggatgggaggaaaatcttgcttgatgactgttgcagtagtccaaacaagagaaagcacgggccccaaacaagggcatggctgtgaggaagaaatgaagctgcagaggcaaagtatatgcacattttaaagtttgcagcatattatagccaaataccctctctgagaagatgtaccactgtgcttaaaatgtcattc

SEQ ID NO: 461086 - DNA, 1363 bp, Homo sapiens
tctgagagaggaagatggctacaggacgtagcaagttgaaatggaccaacgagcaatggcctgagcaaataactttgatcgagccatcactggtgacaggacttgaacacatttctggaagcatgagtatgccatccaggaggagagagaagtcatccacacaaatgcctgcgattccgaataatgcgttctatgtcaataggaaggtaccaacaaactgtgatgtgagagatcaagggggcttcacaagagaagagctgcggaagctgcttggaggaggagaaagagcattcatccctttgcagacaaacaccagaggtcctcagtgtcacatgccagccaagctcagagcatctcaacaatgccagggagtcttggcatggggctgggccatgggcttggttctgactcagagaagtcggaaccacctactgagtcatttgcaggagctgtggtttcctgggaggtttcccaaccagttacccaccccgccaaatcgctgaatgatgggctagagctctaccatctaaaatggtagccgctagccacatggctatataaatttcaataaattaaaattaaatactattaagaaattccattcctctctcacactagccacatttcaagggcccaacagccacaagagactagtggctgcagtattaagtaacacaaatagagagcatttccatcattgcagaaagttcagaggcatgcaccagagactctaagcagcacgtgttgatccaaaatgtgctccataaaccatatgcgtctgaaggcaagaacagaggcgagcttgtcaaagtgcacattcctgggctcctccctagacttcccaggtccgtatctctgggggctggaggggaggcctgggaatcagtattttggcaagcactcccagatggctattatgcaaactcacacttcaggatgagcactccaagggaagccagaagttgaagagcgaagcgggaaaacctcctgatatggcgattctgggcatatcagatgtcttgtagcactttctactccactgtaagatttcccaaccaaacattttcaagagaatgcgactggagcctccagactgacagctaagtgcgcatctcagtaaagtcctggctgttcttccatcaagtagtaaaaactgaagaaagtggctgtcctagcattatctccttcttgccttttgcagaaccaggaggatggaaataacctcgttgctccccttgagtgtgtttgaatcacaagtaccttccctctaacataaatttatttcccgctgccttcctctcaccaccttgtagcatccctgggcaagatcaaatttcattgggcaagctagggcttctcccct

SEQ ID NO: 461087 - DNA, 3470 bp, Homo sapiens
ggctggctgtcctacagcctgtgttttggggtcaaagacacgtcattcacatgcggaggaaacaccttctttggcctagacatctgctggtgacaactcaggatgaccaaggatacctcggctacctggaggaggtgcctctgtccatggtcaccgtcgacacgtgctatggggacctcagaggcatcatgaggctggacgaccttgcgtacgaaatcaaacccctccaggattcccgcaggtttgaacatgttgtttttcagatagtggccgagcccaacgcaacagggcccacatttagagatgatgacaatgagacagaccccctgttctctgaagcaaatgacagcatgaatcccaggatatctaattcgctgtatagttctcatagaggcaatataaaaggccacgttcaatgttccaattcatattatcgcatatatggcaatattacaacttgttccaaagaggtggtccagatgttcagtctcattgacagcattgctcaaaatattgatctgcggtactatatttatcttttgaccatatataataatcgtgacccagcccctgtgaatgaatatcgaattcagagtgcaatgtttacctattttaaaacaactttttttgatacttttcatgttcattcatccacactacttattaaatacgtgccacatgaatctaactatgaacctgaaaggtataacttctgttcccgtatagccctgttacacattggtactccaggcagacattatttattggtagccgtcataataacccagacacagatgagaagtattggtctggagtatgatgataactactgcacatgtcagagaagggcctcctgcattatgcagcgatttcctgggatgacagatgcgttcagtaactgttcttatggacatgcacaaaattgttttatacattcaggccggtgtgtttttgaaacacttgctcctgtgtataacgaaaccatgacaacggttcgctgtggaaacctcatagtggaggggagggaggaatgtgactgtggctccttcaagcagtgttatgccagttattgctgccaaagtgactgtcacttaacaccggggagcatctgccatataggagagtgctgtacaaactgcagcttctccccaccagggactctctgcagacctatccaaaatatatgtgaccttccagagtactgtcacgggaccaccgtgacatgtcccgcaaacgtttatatgcaagatggaaccccgtgcactgaagaaggctactgctatcgtgggaactgcactgatcgcaatgtgctctgcaaggcgatctttggtgtcagtgctgaggatgctcccgaggtctgctatgacataaatcttgaaagctaccgatttggacattgtattagacaacaaacatatctcagctaccaggcttgtgcaggaatagataagttttgtggaagactgcagtgtaccaatgtgacccatcttccccggctgcaggaacgtgtttcattccatcactcagtgagaggagggtttcagtgttttggactggatgaacaccatgcaacagacacgactgatgttgggcgtgtgatagatggcactccttgtgttcatggaaacttctgtaataacacccagtgcaatgtgactatcacttcactgggctacaactgccaccctcagaagtgcggtcatagaggagtctgcaacaacagaaggaactgccattgccatataggctgggatcctccactgtgcctaagaagaggtgctggtgggagtgtcaacagcgggccacctccaaaaagaacacgttccgtcaaacaaagccagcaatcagtgatgtatctgagagtggtctttggtcgtatttacgccttcataattgcactgctctttgggacagccaaaaatgtgcgaactatcaggaccaccaccgttaaggaagggacagttactaaccctgaataacactaattcagcctcccgatccctgtaaagatacagagaatataacagcaaaatctatgaaacaggatcaggggaagggatggcaaagctcaagtccacatttcttgaagtccacaggaagcacagggtcctgtttcacatcacagggaaacgggaggcattggcttctgtcccaggttcttgtaggtcgctgatgctcactctgaaataaatcttcaaaaacacacattggtgccttccacattttcttagactcctctgggagcccaaacttggccagaacctcttgcctggagagacatgaatgagcatctggctcttgtcctgaggtctctggtcccagaattaacggaagttgccaccagctccttacagggaacattcatgacatttctccagaagagagctccagagcaatgagcttcctcattccccaggtaatctgtccttctctaaacccgaagtcagtttagggtgatccagggctactccctgttccctgtctgttcctcacgggggtgctgtgggctttgcagtgagagggacttgggttcaaatcccccaccaagcaaatccccctacctggggccgagcttcccgtatgtgggaaaatgaatccctgaggtcgattgctgcatgcaatgaaattcaactagaaaaataggtagacgtgaggggcaagctgtctgtcatttagtgtgagctctgtgagtggcagctgccccctttcttcctgcccccacatttccttgaactgaaacaggaagggaagctgagtaagtcgtgatgaggaagagaaaccaggcttgtagcagcacaggctggtccgggtggaaaacagggctaggtgtatcactgagttattgtaaaggaaaatggaagttaaatgtataaataactgaatgagataacattttattttaacttaaaattcacactaatattgacttttaaaatgcagtgtagatatgtcagagagaatttcaaaggcaaagcccaccgacggaagaaatcacccttcccataccatccacagaaaactgttggtattctagggtagtactgagatctagcatttttctgaatacatctgtggttctagatgtcctgcttccatagatattgtttagaattcccacccctttctccaaacacagcttgatatcctttctctgaacctgttagaaatttcctccattcagctgtcataaagatgcgagcaatccattcctgtgcctctgtcagtgtgttctattattttgtggctgaacgctaatggacagttaagtgtgaggtcagtgaatacagtgccctccctctatgtgtccttcgggtgtgaggggttttgctgatagagcagcaggccccatcccaccctttatgcatctccgccccccacctcacgctccagctgacctctcccctgtggcctggggcgttccccagggggaatgacctctcctctctccagggcccacccactcagtgccc

SEQ ID NO: 461088 - DNA, 410 bp, Homo sapiens
  misc_feature (387)..(387): n is a, c, g, or t
gtgctgcaagaaaagtcacagccttggggtttcagtgaagagacagcccaaatgctcttgaagtagtcagaaaagtctacaggtgtgactcccttatgccgctctctcctgccatttgggcaacagccaacttccgaggccaaccttgtttctggagaagcattcttcccacatgggaaaggcaaggatggtgctgagcctgtctgcctctgtgttccctggacaactccattccagtgcaagattctcatggttgaattcatcagaaatgtaaaattaacaaggaattgttcacctgatgaaaaggaacatggagagatggttcttgaatctgaataggaggagatcgtgcctggacacactaggaggagggggctacatgatttnggggggaagcagggatttatata

SEQ ID NO: 461089 - DNA, 413 bp, Homo sapiens
gtgctgcaagaaaagtcacagccttggggtttcagtgaagagacagcccaaatgctcttgaagtagtcagaaaagtctacaggtgtgactcccttatgccgctctctcctgccatttgggcaacagccaacttccgaggccaaccttgtttctggagaagcattcttcccacatgggaaaggcaaggatggtgctgagcctgtctgcctctgtgttccctggacaactccattccagtgcaagattctcatggttgaattcatcagaaatgtaaaattaacaaggaattgttcacctgatgaaaaggaacatggagagatggttcttgaatctgaataggaggagatcgtgcctggacacactaggaagaatcttctgcattgatttgattaaaaaacaactatgtaaatacc

SEQ ID NO: 461090 - DNA, 1409 bp, Homo sapiens
gtgctgcaagaaaagtcacagccttggggtttcagtgaagagacagcccaaatgctcttgaagtagtcagaaaagtctacaggtgtgactcccttatgccgctctctcctgccatttgggcaacagccaacttccgaggccaaccttgtttctggagaagcattcttcccacatgggaaaggcaaggatggtgctgagcctgtctgcctctgtgttccctggacaactccattccagtgcaagattctcatggttgaattcatattttaagtgctgtttgtggggttttgagcagttgccattctgaggaggagcagaggagcatggctttgccaaagtgtctcccaattatgagcaccatctgcaagagtccacttggaaaatactcaagagtgggcttctatgacttctgccttgccctggaggtccaatacaggaccagcaagttatttctgtgtggacagcccagtcccagaaggagcttgggaatacagcagcaggctttaaagcttgcctgtctttcgcctacgcttctggaatcctcaagttgtgttgacccacctgggaacactgctggttccagaatgccaagctccagtaattgtataaaataaaattaaaataccagaaggatgtatttgcaaacaaactatagagctttaagattatacagcagttaagaaagtatgagtgaattttatattatgtatattgtaccatggaaaagaatgagaaggagcaggaggaggaggaaaagaaggagaagaacagcaagaagaaagaagaagaggaggaggaagaaggaggaggagaagaagaagaagaagaaggagaaggaggagaagaagaagaagaagaagaagaagaagaagaagaagaagaagaagaagaagaagaagaagaagaagaaaagaagaagaagaagaagaagaagaagaagaagaagaagaagaagaagaagaagaagaagaagaggaagaagaagaagaaagaagaagaagaaaaagtagtggaggaggaggatgaattcatttggtttttgggaaactctctctatttcccttctttttctcattttgcctcagatctgattttctggctgtggtcacagcaggccagcatgtggacaaagggaaacgcctggtgtgaaggtgttagttttgacagtgaattccaagtagagaagatgaaggggaaaggagacttcgtgtgaactcgatgatcatggatttcacttcaaatacaaaccatgtccagctaattgtggccaggtgaggggactggccgcaggtgaccaggtctaaaaccctttcaaacgaagttggaaatgtgtttttttatataaaaggccgtgtttgaaaatattaccaactacttcaatgtttctttttaaaattatctggggggcc

SEQ ID NO: 461091 - DNA, 1054 bp, Homo sapiens
gtgctgcaagaaaagtcacagccttggggtttcagtgaagagacagcccaaatgctcttgaagtagtcagaaaagtctacaggtgtgactcccttatgccgctctctcctgccatttgggcaacagccaacttccgaggccaaccttgtttctggagaagcattcttcccacatgggaaaggcaaggatggtgctgagcctgtctgcctctgtgttccctggacaactccattccagtgcaagattctcatggttgaattcatattttaagtgctgtttgtggggttttgagcagttgccattctgaggaggagcagaggagcatggctttgccaaagtgtctcccaattatgagcaccatctgcaagagtccacttggaaaatactcaagagtgggcttctatgacttctgccttgccctggaggtccaatacaggaccagcaagttatttctgtgtggacagcccagtcccagaaggtaaaaccattcttaactatagtaaggaccatcacactcagctgacctaagagcctaacaacctgctctttgggggcagtaggacaatggggtaggaactccatcctcgctgccgcgccttcatggtacggtagatgcgctttttctctcccttgctagacagggccgccttgggaccctgtgggctattggatggcgattgctccaacttttttgcattcaacatgagcagcttcctggcaagagtactgggaaactatagcctgaactttcctcttaacagggaccctttattttttccgcacaggagcttgggaatacagcagcaggctttaaagcttgcctgtctttcgcctacgcttctggaatcctcaagttgtgttgacccacctgggaacactgctggttccagaatgccaagctccacagaaatgtaaaattaacaaggaattgttcacctgatgaaaaggaacatggagagatggttcttgaatctgaataggaggagatcgtgcctggacacactaggaagaatcttctgcattgatttgattaaaaaacaactatgtaaatacc

SEQ ID NO: 461092 - DNA, 1716 bp, Homo sapiens
gtgctgcaagaaaagtcacagccttggggtttcagtgaagagacagcccaaatgctcttgaagtagtcagaaaagtctacaggtgtgactcccttatgccgctctctcctgccatttgggcaacagccaacttccgaggccaaccttgtttctggagaagcattcttcccacatgggaaaggcaaggatggtgctgagcctgtctgcctctgtgttccctggacaactccattccagtgcaagattctcatggttgaattcatattttaagtgctgtttgtggggttttgagcagttgccattctgaggaggagcagaggagcatggctttgccaaagtgtctcccaattatgagcaccatctgcaagagtccacttggaaaatactcaagagtgggcttctatgacttctgccttgccctggaggtccaatacaggaccagcaagttatttctgtgtggacagcccagtcccagaaggtaaaaccattcttaactatagtaaggaccatcacactcagctgacctaagagcctaacaacctgctctttgggggcagtaggacaatggggtaggaactccatcctcgctgccgcgccttcatggtacggtagatgcgctttttctctcccttgctagacagggccgccttgggaccctgtgggctattggatggcgattgctccaacttttttgcattcaacatgagcagcttcctggcaagagtactgggaaactatagcctgaactttcctcttaacagggaccctttattttttccgcacaggagcttgggaatacagcagcaggctttaaagcttgcctgtctttcgcctacgcttctggaatcctcaagttgtgttgacccacctgggaacactgctggttccagaatgccaagctccagtaattgtataaaataaaattaaaataccagaaggatgtatttgcaaacaaactatagagctttaagattatacagcagttaagaaagtatgagtgaattttatattatgtatattgtaccatggaaaagaatgagaaggagcaggaggaggaggaaaagaaggagaagaacagcaagaagaaagaagaagaggaggaggaagaaggaggaggagaagaagaagaagaagaaggagaaggaggagaagaagaagaagaagaagaagaagaagaagaagaagaagaagaagaagaagaagaagaagaagaagaaaagaagaagaagaagaagaagaagaagaagaagaagaagaagaagaagaagaagaagaagaagaggaagaagaagaagaaagaagaagaagaaaaagtagtggaggaggaggatgaattcatttggtttttgggaaactctctctatttcccttctttttctcattttgcctcagatctgattttctggctgtggtcacagcaggccagcatgtggacaaagggaaacgcctggtgtgaaggtgttagttttgacagtgaattccaagtagagaagatgaaggggaaaggagacttcgtgtgaactcgatgatcatggatttcacttcaaatacaaaccatgtccagctaattgtggccaggtgaggggactggccgcaggtgaccaggtctaaaaccctttcaaacgaagttggaaatgtgtttttttatataaaaggccgtgtttgaaaatattaccaactacttcaatgtttctttttaaaattatctggggggcc

SEQ ID NO: 461093 - DNA, 1194 bp, Homo sapiens
cttatccccaatttacaaatgaagaaatggaagtcaagacttttcccaaggccaccaaactggttaagtggcaagtacttaaggctcccaagttcagcaatgtttctaatagacttctgcctctgtgttccctggacaactccattccagtgcaagattctcatggttgaattcatagtgggcttctatgacttctgccttgccctggaggtccaatacaggaccagcaagttatttctgtgtggacagcccagtcccagaaggagcttgggaatacagcagcaggctttaaagcttgcctgtctttcgcctacgcttctggaatcctcaagttgtgttgacccacctgggaacactgctggttccagaatgccaagctccagtaattgtataaaataaaattaaaataccagaaggatgtatttgcaaacaaactatagagctttaagattatacagcagttaagaaagtatgagtgaattttatattatgtatattgtaccatggaaaagaatgagaaggagcaggaggaggaggaaaagaaggagaagaacagcaagaagaaagaagaagaggaggaggaagaaggaggaggagaagaagaagaagaagaaggagaaggaggagaagaagaagaagaagaagaagaagaagaagaagaagaagaagaagaagaagaagaagaagaagaagaaaagaagaagaagaagaagaagaagaagaagaagaagaagaagaagaagaagaagaagaagaagaggaagaagaagaagaaagaagaagaagaaaaagtagtggaggaggaggatgaattcatttggtttttgggaaactctctctatttcccttctttttctcattttgcctcagatctgattttctggctgtggtcacagcaggccagcatgtggacaaagggaaacgcctggtgtgaaggtgttagttttgacagtgaattccaagtagagaagatgaaggggaaaggagacttcgtgtgaactcgatgatcatggatttcacttcaaatacaaaccatgtccagctaattgtggccaggtgaggggactggccgcaggtgaccaggtctaaaaccctttcaaacgaagttggaaatgtgtttttttatataaaaggccgtgtttgaaaatattaccaactacttcaatgtttctttttaaaattatctggggggcc

SEQ ID NO: 461094 - DNA, 1815 bp, Homo sapiens
tctgagtcaaccctccatacgtccttcatgtcagggtgggatccaggactgtcgagccaagtgccggcctgtgggtgtcctgctgtgtgcacgagaaaacagggcatccttagccacatccccacaccccactgttcccagagaatgcacacagggcagaggaaaaaaaatgaaaacaagagctcggcaaaaccaccacaaaaaagggacaaatcctcaacacaagcaagaatctctaacacacttggctcagaaaatgacagaaccgtcataacacaagtaaaacatatgataggactgaatatcactattgagacgctgatgtacagcgcatataccaggatgtgcagaatgaagattctattactgaagaagccaccacttgcaaccctgagacaaccacgagcagaagctactcagatccagaccacaggctgtttttttcagccccaaacccacatgaagaacttatttccagacagctcctactcttatggtggctccagaccctgccccatgcagaaggcacttctcaagttccaggaccagggcttcagccacagcactcgcaaaaccccacagatacagtgccaatgacagaaattaagattaactgggggcgacacagatttctgtgaatgccagtgctgtcagatgcttcctgatagtactttctagagtaaaagaacttcgggaaaagtaaaagcagcaaatggtaacaccctcatggagatctcagggctgcagaacaagcactttgagtgctgaagacttctcccatctccacgtccctaactgtccccatgcagattccaggatccacacatcagaggcatctgccactgagctgggtgtgaaatctgaagaccagggtgtagaggcaagcactgaaggcccatgatcagccgtgggagccacgggaatcaattgcttccagtacgactggatgcatcggaaagagcctggggcaaggctggaggccacaagaggagctgccaggccacataagcagggaacaaagccgatgatcacacgcccatcagtgagccaacttggtgaagggaaatgcccaagttctcagcacctgcagagcctaagacataacaagcagcatgccctgacgctcaccaaggccaggtgctgtggtgagtgctctacctgtttctgtacagaagagaaatcagaatgccagagacatgaagaaacttctccagggtcatgtaatcaccaaataatgtctgcttcgaccatctctgcattttgtgctacaccaagatttaagcagctgttcaaaggaactgtagaacagatgtcacagatgtaactattcttgaaaggaagtcagatttcatagatggaaagactgcccttttccatttgcctcctccagacccataactttggataggggggttttattgtccgtgaggcttatgcatatgtcagaagaatgtccaagcagaggaatctaagtggcagaccccccaggataggaaagaagaaggacgctcgtgctgacacttccagaacactcttcacgttttgtgacatatgtgcttgtcgagtgatcttaagacagctggatgtccgaaccatgcagtaatagcagagaacctgcggaaggagaagcttcccaggacgttctgagggcttatgccgggtgcaggctttccttcccgcaacatccctgagtccagagaagaaataatcccctgccctgtgggccaagcacttacagcaacagcactttgagtttgctgtgcttagattcacttgtggaacttgttaaaaatataaaattccagaccccacctc

SEQ ID NO: 461095 - DNA, 1482 bp, Homo sapiens
ccagcatcaccacagacatgtgagtaatgtgttgtgctacattgccttatgatggctgcgatgtcactaagtgtctcaatgagatcttggagtcagcagatgcacccttagaagtcactgaaggattcattcagtcaatttccctgtcagttccatggggctctttactgcaggataattgtgcactggaagtgagaggattagaaatggtcttccggcctagacctcgcccagcaactggttctgagcctatgtattggtcaagttttatgaccagcagtatgcaattggcaaaagaatgtcttagccagaaactaacagatgaacaaggagaaggatcccagccttttgaaggacttgaaaagtttgctgaaaccattgaaacagtactaagaagagtaaaagtcacttttatagatactgttttgagaattgaacatgtgccagaaaattccaaaactggaactgcacttgaaattcgaatagaaagaactgtgtactgtgatgaaactgctgacgaatcctcaggaattaatgtgcatcaacccactgcttttgctcacaagttacttcagctctctggagtgtctctcttctgggatgagttttctgcatcagccaaatcttccccagtgtgttcaactgcaccagtggaaactgagccaaagctctcacctagctggaaccccaaaattatttatgagccacacccacagctaactagaaatttaccagagatagcaccttctgacccagtgcagattggacggttaattggtaggttggagttgagtctcacgttgaaacagaatgaagtgcttcctggagctaaggtcagtgtttgtttcactttctgtagtaaaaccaaaataaaagtacaagtattctttattctatgcagtgattcactgattgattactgcagattatcctgtaactagtgtactgctgtcaccgagttagcatttttactctcagttgatgcttctatcctaggtcacaaaatttatgtgaggactgcctttgccctactgttgcagctcaagttttataaagagttgccttctacactcactctccctccattatatacctctgtatgttttgcattctcatagcttagctcccacttataagtgagaacatatggtatttggttttccattcctaagttccttaacttagaataatggcctccagttccatccaagttgctgcaaaagacattattttgttcctttttatggctgagtggtatttcactgtgtgtaaatatatatacatatatttgtatatggtgtatatatatgtggtgtatatgtgtatgtggtgtgtatgtataccacataaatatacaccatatatatatacacgcaccacatacatatatacacatgtgtgtatatacaccacatacatatatatgtgtgtatatatatgtttgtgtatatatgtgtatatatgtgtgtgtatatatgtata

SEQ ID NO: 461096 - DNA, 583 bp, Homo sapiens
tctaatggaaatgacttcgttcagctggtgaacattttggaagattccagaaaaacatgaacaagtgtttgagtgctcttaaggggattgtctaatatcttggctcctgactcatccttagaagtcttccagccaccttgtacccatttcaagcccaagggctctttaacgtaaatgagttactgagcagagtgttgctggagatggccactggagaggctgagtcaaatcaatctcctcacctgaggacttcctaagaccagcgcactgaaggaccagcagcaacaacaacaataatgctaatgctcccttatggacaagactgcaattctctgcctgctgaagctcagctatgaccacgtgacttgccttggccaatgaaagaggaagagtatgtaacactgctgaatggaagcaagtggcccctgcccctgctgcagagattctagacatgtgtgccatgctggagcaaggagacagggagtcctggagaaaggagacatggaacagagctcccagcccagtcaatatgtaacatgagtgagaaataaataacactttgttgctagaagttttttttaaa

SEQ ID NO: 461097 - DNA, 649 bp, Homo sapiens
tctaatggaaatgacttcgttcagctggtgaacattttggaagattccagaaaaacatgaacaagtgtttgagtgctcttaaggggattgtctaatatcttggctcctgactcatccttagaagtcttccagccaccttgtacccatttcaagcccaagggctctttaacgtaaatgagttactgagcagttttctctccaggaaaaatggcttttcatgacagtttgagtattgcacatgaagcatctagcaaagcctcaagcacatgaaaagaacagagaaagatccagtgcaaaaactcataggaaatgatcaattcatgccaagtgatgagaactagagaagagagatgagagcattgttcatacacgatggtctaggtctcctaccccaagagaacttgcaacaaagcccaaagtacaacagccacgtttaaagagaagattccatttcagccagacaacatgattcatcatatttatttaatattgttaatttgaattttattagatctgtactgatgtttgtatttaatttctaatttgttttggtttcataattgactaaaacaataagcacaaagagtttctatctgactttatatattaacattttaataaaagtcttttatatactcattgggatcca

SEQ ID NO: 461098 - DNA, 1111 bp, Homo sapiens
tctccctcatcatcatcaccagcactaccaatttctctgcactatggatctagatggtattgtctccctgacatccaaatatcttcaatcatataaccaagccatggttcccatcactcttcaaacccctgagcattcaagcaacccaaggaagtcagagctctggaatcttccaggaatcacagtctctaaggcagatggaatcttagaagaagtagaggatcctatgtggtgtttgaaagttcctccttctctctctttctccctcctgctgccttgtgaagaagatccttccttccccttcatctttgccgtgactgtaaacattaaacagcactgcacatggaaagaagccaaagtgtttgataattcatcagcagcagcaaacctgagtgtttctgtgcaatgcaaattgctttggcttccacacagctcctgtcgcttcaagtgcggatggtaaatagccttccttgggattactatcaagtattcattttaacaacattaatttacaacgtgctatcccactttacattgtgctacatgacttattcacagagccagcccttcggcgcctgatgttgattcattctaatcaccgcacttgcctatgatttttaggttaatgggacctggactggaaaaggattgtttgtgtgggaatcattcatggcaaaggcagtgacacctccttcaaaaacctgtgtctttctggcagagtgttgctggagatggccactggagaggctgagtcaaatcaatctcctcacctgaggacttcctaagaccagcgcactgaaggaccagcagcaacaacaacaataatgctaatgctcccttatggacaagactgcaattctctgcctgctgaagctcagctatgaccacgtgacttgccttggccaatgaaagaggaagagtatgtaacactgctgaatggaagcaagtggcccctgcccctgctgcagagattctagacatgtgtgccatgctggagcaaggagacagggagtcctggagaaaggagacatggaacagagctcccagcccagtcaatatgtaacatgagtgagaaataaataacactttgttgctagaagttttttttaaa

SEQ ID NO: 461099 - DNA, 812 bp, Homo sapiens
  misc_feature (3)..(3): n is a, c, g, or t
  misc_feature (5)..(5): n is a, c, g, or t
  misc_feature (7)..(8): n is a, c, g, or t
  misc_feature (10)..(11): n is a, c, g, or t
tgntncnnanngtccaggaaactttaaagtacagatttctcccacatcttaccaaattggctgtgtctcccaagaagttatatgcgggctaataaagcaaacagtgccgagagcatcccccatgtggtcagccacacagacaagcacaatcgtaagctctgcccagcctctgagcctgtcagctcctttcagttactgcactgtgaacattacaaacttgccaagcatcacgcacagctgtgcagctggcccataccaaggcaggatgccaacccctggacatgggttggggaaaggtgggaagaggctcaaagcatgtatgatgttagctcctataagcctccaaacatggactaccttacccttgtgtcacccacccgaccacgccagacacatcgttggtattcaataagaacacccatgatggtgtccttaaacatgatgctcttctggctgaatcacatagggacaggccctgcactgaggttcaagcgctggtgtgccatcggggcagggatccctctgacagggcctgtcagggattgtgaaattggaaaaagtcacaatagtgttgcttgttccccagctcgctcagtaaatactttacaatgtgggcacacatggataccttggagacttgatggggaacatggccggggaatcctgcccttcagggagctgagacattatcagcacacacttcctacttcctcagaaccatccagtgatccggaagaaaagttctcagaacttacgtcattggtagagtaagctttttgacaaaagctggaggaagaaaactattgtgggga

SEQ ID NO: 461100 - DNA, 1237 bp, Homo sapiens
actatgtcatgtgaaaagtagcttgatttggggtcactgctattcagtggaaaatttaaccttgggatggataatgcagcccaaatttgaactctgaaagactattcactggattggaagaccaatagataccaataaattaaaagtaattgctgtttatccttcatcaaaattaccattattctacaaggtggccctccagagttagtgaactgtgacctccacatgggatttggacatgcgtgccctacatctggaatgcagaaacactcttcacagaactctgatagcccaggaatatttatgtaaatctctgtcctggtaaggcacatgttgatgtacttgggcttaagctcataaaccaagaggaacagtttcctacatcccccttctaatgactaaagccaacgggctgagccaaatgggacaatttagacaaagagagactggcgaaaagcaaatgaatgtctgcttccttctagcattctaggaaaaataccaagcggctgtgccaatgtgcactgcttgcctttgttaggagaatacactcaaaatcaggggaatcagtcagtaccaggttcaggaaagatgtatgcaagagagactccctgatgaggaaaaatcgactacagaaacacagcatgcacccagctcagcacaaacacagcttaaaaatccaaggaattaggatgaagtgtagaatcccgaggttctcattcttactagactgtgatctggaacacgaatccaaaagaaccacacaagttgtttttgattactatgtgcagatcgatcaacatgctgattactcgaccggtcatcagcacctcttaccttccaatattttgttaataaatgttgtacagcagcacagcgtcagaaagaacttcattaaaggacaccccccgaacaaaagaaatgtccagcccagaacgcccccttctttcgtgagaactatctgcaacacaagaggtgaggggcagaagtatcggtcctgctttgaagatactcaggggagttgcgaagaaaatgcaaaggagaccgtaactctgcacactgtgatgccagttgcatcacattctgtgcttgatcatcccactcttataacccctggattttgcaccaacttggggccctggatgcagtgatttccgtcagagatgaccaaaggagtgctcattcattcattcagtatgtagggaacgccttttaaacgctgtcgttggtcagctctcct

SEQ ID NO: 461101 - DNA, 411 bp, Homo sapiens
actatgtcatgtgaaaagtagcttgatttggggtcactgctattcagtggaaaatttaaccttgggatggataatgcagcccaaatttgaactctgaaagactattcactggattggaagaccaatagataccaataaattaaaagtaattgctgtttatccttcatcaaaattaccattattctacaaggtggccctccagagttagtgaactgtgacctccacatgggatttggacatgcgtgccctacatctggaatgcagaaacactcttcacagaactctgatagcccaggaatatttatgtaaatctctgtcctgatgagaaaatgtaggccacaaaactttcctgacgctcccaaagtcatccagcaagaagtaccagaatcaaaatcttcttatccttgcaaa

SEQ ID NO: 461102 - DNA, 1064 bp, Homo sapiens
gcaaaatcgggtgcagtaaacccgaaaagggggcgaggaggcccgcgaagagagcgggggaggaggcggggaggggcgaggaggggcggggagggccgagcgaggaggaggcggctctgggggccgggcggcgcgcctgacagaggaggggaagcctgggggcgcaagcgtcgcagccgaggggccggcgcggggaggcgggcgccaggcgggggtttgcagggccgccgcgcgtgacgtagcgccgggcagggcgttatcagctgccgggccgcggcgagggacgcgcggcgacagcggacggcgctgcccgggccgggacagcagcagccggcggtcgcgcgcaggactcgagggcttctagccaccgtccccgccagcgccgcgccccgccacagggcggcatgagcccacccgcggccgcagccctagcgccctgctcctccgcctgggcggcccggctgcggtgacggctctcgctgcccgactgggggccatgaagccgagtccggccgggacggcgaaggagctggagcctccggcgccggcccgaggcgagcagcgcacggcggagcccgaggggcgctggcgggagaagggcgaggcagacaccgagcggcagcgcacccgggagcggcaggaggccacgctggccgggctggcggagctggagtacctgcgccagcgccaagagctgctggtcaggggcgccctgcgcggcgccgggggtgcgggagccgctgcgccccgcgctggggagctactgggggaggcggcgcagcgcagtcgcctggaggagaagttcttggaggagaacatcttgctgctaagaaagcaattgaactgtttgaggcgaagagatgctggtttgttgaatcagttgcaagagcttgacaagcagataagtgacctgagactggatgtagaaaagacatctgaagagcacctggagacagacagtcggcctagctcaggtgagtgattgagcacaaggacagaattctgcactcttgagttgtatctcagccccttgtggttaacattcccagacctgcaaatggcaa

SEQ ID NO: 461103 - DNA, 339 bp, Homo sapiens
cttcctgttgcctccctcagccccgcattcagtcccgtcaggagtgcagctgggctccagtccgccacatcccctcgcggagcccccagtgccttatctagaaaatggaggtaaatcgtccctacttggggggcaggacgagttcaataaaatgggacacgtcgggcgtctaaacatagcgtggggcccacagtagagcccggcgagtccaaccagtcagcctcgcactgagagggaagcgcgcgccaggccccgtttccagcctcctgtaagtcctctctcacgcacggttcaccgtatcaccatgagtatctgccaagtcatgtatgcctgcgatga

SEQ ID NO: 461104 - DNA, 403 bp, Homo sapiens
taaacatagcgtggggcccacagtagagcccggcgagtccaaccagtcagcctcgcactgagagggaagcgcgcgccaggccccgtttccagcctcctgtaagtcctcccggaagaccagttcacagctcattggaagatcaaccaggattgacaggttcccagcccaatggctggccgagcccgagaatggctcgggagcaggtggtcggccccttcccctctctggggcctctacctgcggaaggcagggcggggggcctggtttccacaagctgcctgtgtcagcctgtggggccggccgccccactgatgactcaggtctcctccccacccttccccttcaggaagaggccctgtcataatcgcagttgtactacataaaaatagcttcgtttcacagt

SEQ ID NO: 461105 - DNA, 982 bp, Homo sapiens
cttcctgttgcctccctcagccccgcattcagtcccgtcaggagtgcagctgggctccagtccgccacatcccctcgcggagcccccagtgccttatctagaaaatggaggtaaatcgtccctacttggggggcaggacgagttcaataaaatgggacacgtcgggcgtctaaacatagcgtggggcccacagtagagcccggcgagtccaaccagtcagcctcgcactgagagggaagcgcgcgccaggccccgtttccagcctcctgtaagtcctcccggaagaccagttcacagctcattggaagatcaaccaggattgacaggttcccagcccaatggctggccgagcccgagaatggctcgggagcaggtggtcggccccttcccctctctggggcctctacctgcggaaggcagggcggggggcctggtttccacaagctgcctgtgtcagcctgtggggccggccgccccactgatgactcaggtctcctccccacccttccccttcaggaagaggccctgtcataatcgcaggaagaggaaggcagtttccccctacgcgttccccgggtccctcttcaaaagcggatcctcgggtgggggcttcacacttctcagcaatagcttcatcagcggcttcctccccggcttcggcgctgaaggctttttttaccgctttgcgaccagcttctcaccttttcttatttggccctcacgaaagtactgtggccacagccagggcaccaagaaaaaggagaggcgaggaaggctggacggaacacagatgtgaggggcaagacattcatgcaacaaacatttgtctggccggacccaaggccacaggctggaaggaaatggaggtgggaggggcccagaaaagctgactaggctggaaggctggttgggagggaggaagcacagaaaggccagcccagcaatttgggcaaagctggcaaggctgccttggcatctctgc

SEQ ID NO: 461106 - DNA, 921 bp, Homo sapiens
atcccacgaggtaggcatcaatatgcccattttagagaagaggtcactgaggtccagaacagctaagtatctgcaaaagcagagattgagatttgtatctttaagctacaattcaaaactttgtcttattcttaaaacacatgataatatacaatcacctccagtggagccacctaagcccccagctgccccagctacttccatactttcgtctcccaactctgagtctccacaatgtttgcctcctacatcagatcccaagttactcaggatttatagaactctcaggaaagcagtgaatctctaccccttcccctacctgcagagaggcgtcctccagcaaggaagaccagcttgtgccaaggcccagcggagacaagacacaatggggtatttccggagctgcttatacttcagcatgacacagcctgacaggacaagccggaccaacatgcagggaaaggtgaccacaaagccaggtgtgtgaagggaatgaggaaggggattgggcaggtgctcactgaagaaagacatctccacaggggccagcccaccaacgaacaccttcttcctgattccagctgagccttggaagccagaaaagtgtagggggcagaggaaaacttcccctttactctctgattgttcactgaaaatcaacagaccaaaggcagattaagagaagaaaagggagaaagccctaagacctgtgaaaatgaagatgtgctgtctgactccctcagcctgcccacagaagcaattcaaaggcctcaaataattgtctcaaaagaagcaatttggagaaagtacattacaggaggaaagaaaattgcctaatcctcattctgctgagtcctcaatttgcaaaagctcggaatcaaaataatgaggaaataaacatgagggccgttccagggctgg

SEQ ID NO: 461107 - DNA, 2063 bp, Homo sapiens
agtgggaaattgtggatgagatgctggaagcccacaaaggcaaaggcaagtcctcacttgctgagaaaacaaggaatagtgagagttctctggtccctgggagctatggtgggaaagctcataggatgaatgctaagactcagctcctgtgggctgcgtgtgttctgactggtggtcctggactggtctcatggggactactcttccttttaaagcacatttctcagatttatccccaactcctgctccatgttccctcagatccccacagttcatcatccttcctctcccctagagacagcaggaaagactttttctgtaaataccaccaggaatgtggagaatgggaaagagggaaacattttcattttcatttcttttacatctttatttgtatgataaacaaagagaaaaaaattcacattgccctattaaagcattattcttatctcgtatttggaacctaactctaagggaacctacataataatacaccttgacacaatgcgcaccaaaattctgtgctttcatgtgtaagaatggtatgcagatgctccaagaagtgggaatattttactataaagctgccccatgcagctttgtgcaaacagcaattgtgtgcacttatacaattagtcataatgctataagatgaaaactttcctctcattttttttaaagaaactgtcttagtgacaatgcagaatactgtcgaaagcagtacctaaattgagcagactctcagactcaataccttttgtaagattcagtgaaatttttctgctcttactttggggagaagaaattggaaaattactgttagctgacaaagaaggaaaataacagtgtgtcttagccattagcatactaccaaatcaaggtgtttatttcaaaagagtcagaacatctagttctaaaagttaggcttttttgaaaaaaagtagaatcttcaaagacaataatatatgtgttcacagcctgcatcttagtgatgcatttgtgggcacgttcctatcatgttaatgaggcttttgccactgcatggccccagtgacagttggatccacgaacagcagttcatcaattgattgcaggtgtttccccttggaaaataaatactgcgtgttcataccaggaggtgagggaaaatcgattttcaacagccacacaatctggtgagttctgaaatatggctttgggaagcaaattctcttgctgctggtttcatacataaatacattctatttatgaaatttagagccaaagacagcaatagtaataaggattcataaactgaaaattaactgcagtacacctagaaagggacaaaaccttatttcctaattaatagataataaaatctgaaaatattaaatgtcagtatccataattatccttttggaagtcatttatatccacattgtattaagttcctctctaaaatattctttatcatcaatagaagaacaattcaatgaaaaagatgcctaatttcaatttaggagcctgcccagtaatgacaagccatgaagggtttgttcattattccatgtcatttggattttatgcagagtctttgtaaaagtgacgtgaagagattttcatgttggaaagatgactaactgcatcgtagaattaatgtgaaagggtggcccaaggaagcaagtttcttcacagctattgcaataaacagggtctactggagaccttggctttttatttccctgacacaacttcacactgctggagcaatgcttggattgctctggaaacactggcaaatctcaagatgcagttcaggcttctccatgatgagtgtgagtccctaggctgtctctcaaactaaagattccccagccaggcaactctaaagagtcttcgacaaggcaacacaattactctgtgtgcttagaagaagaggggtcataaatgtcagctgttgctctttgagtcctgctaattcattcattgattcactcatctttcccacaggcatgtgctgtgcgtttactgtactgcatgacactgtggaggttataaagaaataaaatatttggggctta

SEQ ID NO: 461108 - DNA, 1415 bp, Homo sapiens
ctcctcaagcgcggccagagtgggagccaaggccgaggaggcgccgagagcgagcgagggctgtgagggttgccagcaggctgtcacctttcactatgagaccagtcagtcatcccttgtgacattaataataacttctaatccagtggcacttgatggtaaaggtgcctgccccttgcacagcccagaggttatcgactggaaagcggcattgcgagtctggtttaattttccgccgcattaatattaataggaaacagttggctctgggtgcagatgtggagaagatgcacaggaacaaaggctgcctgcagttcagaaggttcaacgaaaccgttaacgtaaaacctttagcacattgtcgatgttcgttacaggtagctatttcaacatctggaagtgtgtgtagaaggaagccatggcctgagtgtggccagcaagttcttgtgatcagccaggtcctgaacatggctggagggcagggggagcagaaacaagcactggggacaggaaaaggaatctactcatatgtgaggggtatccggtttgctggggctgctctcgaccgcaatcagtgttcatcatctgggcatttgtggcatcctagccggggatgaggtgctccagataggtcccagggccaactggggtcagtcgcattccttgactgagggtctttgctcctgctttatgaccctgcactcacaggtttctctgtgtccagattttgataattgctccctcctcctcacccctccaggcctaaggggacatgctacagtaccaggtgttatcaataccaactcacattcctttccttatttgaaaaaaagactagctctctagctcattacagacaccccttcccctttcccctctctcttacgtgcccatcttatctaaagaaagttcaaatgtttagccaaccagaactagtttagattgcatttattcgtgcagggtagtgaagatacaaaataggcacaacttctgactgtgagaaacacagcagtcttcaagccatccttctgggctgaataactctgtgtgctttactcccttgggaacgggcttggaaatggtgacttgtaagccctcctcactgtgagaataaatgacccagctcagcaaacatttaccaaaccccgactgtgctggaccaagacagacggaagggctcagagtcacaggaaaatagccacagctaactttggaatctcattccttatttaacattatatttacagcgataacttgggaggcaaataaagctgcaggagaaagcaagaactgtggatcagcctcaccgatttcagctccagggcccccactggcaccctacccgaacttgcggaatgcccttataccccagaggaattttctcatctgtaaaatgaatataacaagaaaggaaa

SEQ ID NO: 461109 - DNA, 2004 bp, Homo sapiens
acaccatatctgctcctcctctgctcacaggattggtgagcagcgagtggccccgagccatgagccacctgagtaggagacctggagtcggccttgcctccccctcctcctctcctccgcctcctcctcgcctccctctcctcctcgcctccccctcctcctcaccttgccctcatggccatccagttttgtggcttccacctgcccaaggtccctcagagcgctgcctctacttctgtcgcccacctcctcttctcttcctgaactagtgcaacagcctcctttctggtcttcacaccacctacaggataaagactccaagtacctccatgaccaaagtcccgccttctccccagccttgtctccagtctcctgcacttattccagtggccccaaacagtcctgatcccagaaaggactctgtcctctcacctgccagcctgcatctcaaacatcgcctcctctgagaagcggccccatgcacctcccgcaatgttcccatacgagccagtgcagccatcatcagggcacttgccaccggaggtgtggagggagaggcacgagcaggaacccgggctgcgcgcggcgcttgtgggccagctggagttccgggtgggcgtgggcttggcgggccgcactcggagcagccagctggccctgccggccccaggcaatgaaggacttagcacacgggccagcggctgcagagggtgtactgggtcccccagcagtgccagcccacaggcgctgtgctcgatttctcaccgggccttagctgccttcccgcggggcagggctggggacctgcagcccgccatgcctgagcctcccacctgctccatgggctcctatgcagcccgagcctccccgatgagtgccgccccctgctccacagcgcccagtcccatcgatcacccaagggctgaggagtgcgagcgcactgcgcgggactggcaggcagctccacctgcagccctggtgcgggatccactgggtgaagccagctgggctcctgagtctggtggggcggtggagaacctttatgtctagctcagggattgtaaatacaccaatcggcactctgtatctagctcaaggggagtgggcatcagctcagaaagaggatcccatgggaactgactttgctggtgaccaaggccctaccaccagggcaccctgcccatgtatcccaagcagagggagcagaaccagcggtgtaactactgtgcttgacacccagggcaggtctttttttaactcaccgatcttccatgcaacaaaattgttttctgtgaaaagcaggaaatgaataacaacagcgtaggtactccacttcaaatttcccaagaaattcagaagaattgtgaacaagttgctggtttcacaatactgcaagacactgcaagttattccaagttcctacaggacaacgatgcacaattatttacttacttatgtttaaatatacctatcagtttgactttcatcctttggtgacattctaataatttatgtaaataattattcagagaccaatgagaggattttaataagtgcaaaatgttagcagacggtacaacattgataaatctatggtctgtattttgttctgccatttcaaaataattaaaaagtaagtttcaatttaaaaacattattgaaattcagtaaaatatttcaagcatgaactaaaatatacacttactaaacacaaatattacatctcacatttcatactctgtttcattgttttaaattttaaacagaaataactccaccggccacatagaatgatcaaatcaggcaactcaagttactttgtttcatcttcacaatcactgtgctatcattgttcattttgaatctactttttaaaagcaagaatatttgataccagataccagacacaaattatacctgaaaaggatgtcattttaggatttgtgtcccacctaaaggatacaattctgtaccctgacaatgttattctagaaataaatgcct

SEQ ID NO: 461110 - DNA, 715 bp, Homo sapiens
ttattaacccgggtcttctgcgcccaaagactcagcctcattcaggaccatattatgttcatacttctgctgcgtccaaggagtgttgacgaaaaagtggggccttggaggggtagaggccaagggacagtttcccctctgccctttgaagttcacgatcttccatgcaacaaaattgttttctgtgaaaagcaggaaatgaataacaacagcgtaggtgcgttggctatgtccggtggcatttcttcagaattttcattaatgacacctgattttggaggcattgtatatttttaaatacatccagatgttgtttcagttgcttcctctttggttctttttgcttttcgttgttgagcgtcacttaaattcgtgtcatttcatgttggcgggtactccacttcaaatttcccaagaaattcagaagaattgtgaacaagttgctggtttcacaatactgcaagacactgcaagttattccaagttcctacaggacaacgatgcacaattatttacttacttatgtttaaatatacctatcagtttgactttcatcctttggtgacattctaataatttatgtaaataattattcagagaccaatgagaggattttaataagtgcaaaatgttagcagacggtacaacattgataaatctatggtctgtattttgttctgccatttcaaaataattaaaaagtaagtttcaattt

SEQ ID NO: 461111 - DNA, 1647 bp, Homo sapiens
acaccatatctgctcctcctctgctcacaggattggtgagcagcgagtggccccgagccatgagccacctgagtaggagacctggagtcggccttgcctccccctcctcctctcctccgcctcctcctcgcctccctctcctcctcgcctccccctcctcctcaccttgccctcatggccatccagttttgtggcttccacctgcccaaggtccctcagagcgctgcctctacttctgtcgcccacctcctcttctcttcctgaactagtgcaacagcctcctttctggtcttcacaccacctacaggataaagactccaagtacctccatgaccaaagtcccgccttctccccagccttgtctccagtctcctgcacttattccagtggccccaaacagtcctgatcccagaaaggactctgtcctctcacctgccagcctgcatctcaaacatcgcctcctctgagaagcggccccatgcacctcccgcaatgttcccatacgagccagtgcagccatcatcagggcacttgccaccggaggtgtggagggagaggcacgagcaggaacccgggctgcgcgcggcgcttgtgggccagctggagttccgggtgggcgtgggcttggcgggccgcactcggagcagccagctggccctgccggccccaggcaatgaaggacttagcacacgggccagcggctgcagagggtgtactgggtcccccagcagtgccagcccacaggcgctgtgctcgatttctcaccgggccttagctgccttcccgcggggcagggctggggacctgcagcccgccatgcctgagcctcccacctgctccatgggctcctatgcagcccgagcctccccgatgagtgccgccccctgctccacagcgcccagtcccatcgatcacccaagggctgaggagtgcgagcgcactgcgcgggactggcaggcagctccacctgcagccctggtgcgggatccactgggtgaagccagctgggctcctgagtctggtggggcggtggagaacctttatgtctagctcagggattgtaaatacaccaatcggcactctgtatctagctcaaggggagtgggcatcagctcagaaagaggatcccatgggaactgactttgctggtgaccaaggccctaccaccagggcaccctgcccatgtatcccaagcagagggagcagaaccagcggtgtaactactgtgcttgacacccagggcaggtctttttttaactcaccgatcttccatgcaacaaaattgttttctgtgaaaagcaggaaatgaataacaacagcgtaggtactccacttcaaatttcccaagaaattcagaagaattgtgaacaagttgctggtttcacaatactgcaagacactgcaagttattccaagttcctacaggacaacgatgcacaattatttacttacttatgtttaaatatacctatcagtttgactttcatcctttggtgacattctaataatttatgtaaataattattcagagaccaatgagaggattttaataagtgcaaaatgttagcagacggtacaacattgataaatctatggtctgtattttgttctgccatttcaaaataattaaaaagtaagtttcaattt

SEQ ID NO: 461112 - DNA, 4961 bp, Homo sapiens
tgcaaagggagacactgagtttcagacagctgcttttgcacagtatgaggcagcatcagctctcagagccagcccccgcctaccacagaatcacacccaccattaccaattttgctttgcgtttgtataaagagctggcagcagacgcccccggaaacatcttcttctcgccagtgagcatctccaccaccctggccctgctctctcttggggcccaagctaacacctcagctctgatcctggagggcctgggattcaacctcacagaaacccctgaagccgacatccaccagggcttccggagcctcctccacacccttgccctgcccagccccaaactcgaactaaaagtaggaaactccctgttcctagacaagcgactaaagcctcggcagcactatttggacagcatcaaggagctttatggagcttttgctttttctgccaacttcacagattctgttacaactgggaggcagattaatgactatttgagaaggcaaacatacgggcaagtcgtggactgcctcccggagttcagccaggacacgttcatggttcttgccaattacatcttcttcaaagccaagtggaagcaccctttcagtcgctaccagacccagaagcaggaaagtttctttgtggatgagaggacttctctccaggtccccatgatgcaccaaaaggaaatgcacagattcctctatgaccaggatttggcttgcaccgtcctccagatagaatacagaggaaatgccttggcgctgctggtcctccctgacccggggaaaatgaagcaggtggagctgctctgcagccacagaccctgagaaaatggggccaattgctcctgcccagtctgttggatttgcacttgccaaggttttcaatttctggaacatataacctggaagacatacttccccaaattggtctcaccaacatactcaacttagaagctgacttctcaggagtcactgggcagctcaacaaaaccatctccaaggtgtcacacaaggcgatggtggacatgagtgagaaggggaccgaggccggggctgcttcaggcctcctctcccagcccccatctctgaacaccatgtcagacccacatgcccacttcaacaggcctttcctcttgctcctttgggaggtcaccacccagagcttactcttcctgggaaaagttgtcaacccagttgcagggtaaccatggtgggaggccaggagttatcttatctcatcctggaccaaacagataggccagaaccagcctgcatcctggggctgctatgtggttcagttaatcagtgtgccaagattctaataaagttgaccttgggttctgtgaacactaaggagcaatccttacaagggaggaacagcttctagccactcattcacaattgtcccatatctggtgttagttgtgcttagaaagttgaagatgagaacgaccctcatgttacagcctcccaggagatgtccaccgctgctgccaccattgtagatatttgttgagcatcctttgggtaagctttaaataaagagaaaagggtaggatagtctgggagagggcaggggagagatgcgatcggcaaaagcaatgggtaaagagaggaaaaggtatgccccaataaaatgagagaaaaccagctttgcagccatggaaagttcagacaccattataagcagttgacagatgtcaataaactttctatttccaacagtcatgagagggaggcactgctacatctttatcttacaggtggggaaactgaagcaaaatgtgctagcatgtgcagagcctggatttgaacccaggctgttcatctccacagcccacatgtttcatctctatgccacacttcttttgtgagcacaactcaaaagcccttcagccacgcctcattggctgccataccacaaggatccaactcccagggtcataggaagtgggagagggaagaagccacatgagcagtagcatctggggaagactttctagggaaagacccagaagcatggatggaaagttggtggtttaagaagcactgattgaggacagggatgtgccctttgttgtttatttctgtattctagtacagagactggcataggataagtaaaaaaaccttttctaccttaatgctgtgaggggaagttgtgtcacatggcagaattccatgacaaagactcagaggcaggaaagaaagcaccctggtgaaggacatgatataaaggtgcactaagttttgggagaaaacttagtgggagaggccccgctctactccaagctgtgtagacagcactctctctctctttggcctcttcccttcctttctccttgggaagccagttgaggcaggctccctggactctagtaacatcttacacccttcagctggctggacaaccttggacacattgctcaacccctctgtgcctcaagttcttctgcaaaatggaacatgcaaaccttgctttaaagaattgtggaaatcaaatgaatacataaatgtgaaacattaagcacttgaaatccactaggtgctcaatgaagcttccttctggccccatcttttggctcctccaaccgtcaagggtgctcttcaagggtgctctttcctcccacagagcagagttccgtaccaggtaatgccaaaatccccccagtggtcactggccacataactacctcccagcgaaaccatgaaggctgcacatcaaaacacaaatgtgttgatggagaggcctcaggggccttatctgggcactaaaagtgacatctgcaaaacagaaccattcttgctgcaggaacattagctatgacactgtggcactaagtgggggaacgctggcccagggatcagggctgaaattgcagaggctcacgtgaaggagagccacatgattttctctagaaaagcatcattgttagattgttcactgggtttcttctcctttttctccctaagataactccttcagtcatctgtgaattaggtaagagtctccctaagcgtacatttcagatgtatttacactccaaaccaaccttttaaccacctagaagaatggaccattttcaagataagtcaacagccatctaaaatttatattttcagagatcttgcgatgctctctgtggtggaattgaaccatctttgtaacgccatagagtcccaggtatatttattttgaccctggaatggaggtaaatggctttcaatgttgggactaatgccctggccagttacagccaatatgaacacacaggtccaagtaatgaaaatatcactagggacactggtgtctgtcactccacctcaaggttccatgtgtatcatagagaccatgaaaatattcataaaatttctattccctttattctggccatgaacagagctgagacctttaaagttttctatgtatgggtgggtctgtttctagactgtcatttacaattctattgaatgatttgtctttccttgtgtcaatactacgctgtcttatttaacctagctttataagtcttgatattatgtcaagtcctccagctttgtttatagaagtattttatttgcttatgttgttttgttttgctttcaatgtttgttttttatcctgcccactccaccaattctggttacagtggctggtgactctgtttctccagctgccccaccccttctcttcccacacttatataagcctcaagtcctatgttaaaactttttatttcacgaagtatttggagtgtctctgttttcctaacccatatgaaaacatctttgttctgccttcatgcttgaaggatattttcactgggcacacaattttagatagccagatgttctctttcagtgttataaagatgtcacccattttgactttcattatctgagttaaaaagttatctataattactattattatcctttgcaagtgatccacttttccttttggctgctttaacatttttctctttgtttttgtctttcaattgttttcaaatgatattcctaggtatagttttccatgtatgaatcctaattaatcttaatcttaattaatcctaattaatattagggttcatacaccttcctgaatatgtgacttgatgtctgttttggaaaatagatactatctctttaaaaattgcttctattccattttctcttctttctctgggacaatcaaacatatatcagacgtcttcatcatgtgtcatgtctccttcacacttttctgcattttctattcttttttctttccgtgtgtaatctggatgctttctgcatgcctatcttaaacttctagtcttttctgctatgtttgatctgcttttaaataaatctatcaaattcttaatttcagttcttttgatttttagtgctcgggtttttattttactctttttatgcatttttgttctctatgaaattctttatattttgttccatcttattacacagaatgatcaaggttgttttaaaccctgtgtttgataactccaatatctggatcacctgtgaatctgtacattctattctatgtttttctcttggtgtttaatcagtttttctgttacctggaatgcctggtcattttcactgaatgccacaaagtgtgtatcaaaaattatgtggctttgggtaatactatcttcctcaagaggagaatttattttcttctcaggcagatagagtataaaaagactactttgattcagccaaggatggatttcagtcctttgggggtctggtttatttcttttgggccttacccctataatgttgtctttgggagatgtcaactaagagcctgggctatttgtgagggctcctccccgttaacatgtttatataccaatttttgtctcttcccttctgtgaggctgctaaaatctctgctcttctagcaggtggcttttgcatgattatttgctgtctcattcc

SEQ ID NO: 461113 - DNA, 667 bp, Homo sapiens
agaataccatgatggtggatatgtcgtttttgtaagaccatggatgatagttttggcagaatcactgtacacgaggaaagcaaatccatatccagattatttattctgttgtccttattgacgggaatagaggaaaaggcacctgccagctcaatagctgcataccagagatatctggagggagagcatccagatggaagggacagaccagacaaaggccttagacaagagactgctggtgcatttgaggacagcaaaaaggccctgcagctggagcacccaaagtgcctaactcatagaaagagctcattagatgctggccatgatggtagtgatgataatgacagtgaccagagaggcaaatttaccttaaagagcagctggtgcttaatggaaaattttgagaaagttgtcgttatgaaccaattcaatggctggagcatttcctgcaaaggctcttatctggagaaagaggatttcaggattgtctgcatgtcaggacaaagcaaagaagaattcagcaactgctgcttaaaaactcattcactactttagaaatcgagacaaagtgaaagacatggatggaatgaattcagcccctcctcctattgtttctctagcaagaaggtgaccaaagctataaatgtttgtttcctgaaaactaaag

SEQ ID NO: 461114 - DNA, 599 bp, Homo sapiens
cgccgttgtgccgcgcctgccgtcaggccggggatttggagcagggatggggggaatattccagggcggcccgggagctgggagccgccggcccccaagcactgtgctgggccaggagagtgcgcatgcgcgcggcgacctgtgcgctcgggttctgtgccggcttttaccccagctgaataacctggtggtcacaagaaagcaaagggatttttatgtgacatcatcttggcaagaagctcccttaccaaccttgacctccaggtctccatggcaactgctgctgggacatcattggcaccagattgtgtcccttaaaggccacactgcagcaagggcagataaacaatttcatggcaacaaaccttcaatatgggacacttgctctagaaatcagccaccatcctgtgagaagtccaagccacagagtgaggccagaaatagttgctgcagtcaagagccccagctgagctctcagccaacattcagcatcactgccagccatgggaatttccaagaacccttcaccctcttatgagaaaaagaagcactgaccaggctatatctgtggctaagacctagaggaaaagacttgggtt

SEQ ID NO: 461115 - DNA, 1677 bp, Homo sapiens
ctgttgtgaaacgattcatactgcaagccgcctaaatgcagggcttttgatgatattccccgccaacaaggcatgaaggtggggcttgcctccatctggctctcctgccactttcaacaacacaccccacatccgatcctgcttagagtcgaagatgaatctggcataatacaaacagcactggactggaagcatgaagtttctcttatctgtgccttggtttcctcatgtggaaaatgaaaatgttgacataaataatcacacaggtctctgttagtaccattttgtgattttatatcgtgcttaccacacctagaaacaggggccatcattccagccagctaacagagaaaaagacgatacataatcaggcttgggaaaataaatttcagagaccaagtaaacaaagacaacaatctagtataagggttataactgggggatgaggggttgcaaatggagatctgccacagtcaactctatttggattcccctgttctcaacaggcaacagcaatcataatgggcttggagcaccagtcccacaacatcacaggacatccagacataattgcattaataatgttgtgcataatcgcacaactctctggttattcagcatcgtccaatatgtgaataaagctctgaggaaaaattaatgcttgcttaatgctttgacacatttccctttacaaagcaaagatccctactcctctcactttctcacatggagaaaaaattaaaagaagcaggccacttacagacaagccacaatccatggcagcccctgcagaagcggctgcctctcagagaggatgagcgtggaccactggcccctaatcccaggctgacagatgcagcaaatgcgccacccaaagttcccagcacccaacacgcttgtgggcagcacagccacaagagggaagctcagaaccgtaaatcagaacatctaatgtttgctgcccactcagaacgtgctaagcaccattctaggatcttggcaaatattagaatggtcactcctgaagacaaccctccatccccacattcacagcagaggaaacagaggaacacagaagtaaattttccaagatcacacaactgggacatggcactaacagtctccagcacatctgatgtcacagagtcaataacatccggagatgaacaaaaactcagggcacgtctattcaacccccagatcacagatgaggaaactgaggttcaaagggaaatgtatgaatgaggccagagagtcagtaaaaaaaagcaggagcattactcataagacccataaatactttaaatattccacaaggatataagagctacaaatgttaaaacaatctgagaccgcatctttggactctacaatgagccagataaagatggtgcccttttctccactatcagtttactacataaatgagaagacataaagtagttttagatttaattaaagtaattgactggattgcattttgtagtcctgatcgtcattaacattcttgacctctctgtcacacagatgtgccggagaatttttccgatggatatttattatgaatattatcatcaataagcaccatcaacatattaaaattaattttaacttctttatggaagactgaaagcacaaccagcttttgaaaccatccgctctaaatcattttttatc

SEQ ID NO: 461116 - DNA, 1775 bp, Homo sapiens
ctgttgtgaaacgattcatactgcaagccgcctaaatgcagggcttttgatgatattccccgccaacaaggatgagtcaaggcctgccttgatgttgctctgtgtcctaccagcaattcttcctggaatcgtctgttcacatggatgtctaaatgtttaagcacccatgcatgaaggtggggcttgcctccatctggctctcctgccactttcaacaacacaccccacatccgatcctgcttagagtcgaagatgaatctggcataatacaaacagcactggactggaagcatgaagtttctcttatctgtgccttggtttcctcatgtggaaaatgaaaatgttgacataaataatcacacaggtctctgttagtaccattttgtgattttatatcgtgcttaccacacctagaaacaggggccatcattccagccagctaacagagaaaaagacgatacataatcaggcttgggaaaataaatttcagagaccaagtaaacaaagacaacaatctagtataagggttataactgggggatgaggggttgcaaatggagatctgccacagtcaactctatttggattcccctgttctcaacaggcaacagcaatcataatgggcttggagcaccagtcccacaacatcacaggacatccagacataattgcattaataatgttgtgcataatcgcacaactctctggttattcagcatcgtccaatatgtgaataaagctctgaggaaaaattaatgcttgcttaatgctttgacacatttccctttacaaagcaaagatccctactcctctcactttctcacatggagaaaaaattaaaagaagcaggccacttacagacaagccacaatccatggcagcccctgcagaagcggctgcctctcagagaggatgagcgtggaccactggcccctaatcccaggctgacagatgcagcaaatgcgccacccaaagttcccagcacccaacacgcttgtgggcagcacagccacaagagggaagctcagaaccgtaaatcagaacatctaatgtttgctgcccactcagaacgtgctaagcaccattctaggatcttggcaaatattagaatggtcactcctgaagacaaccctccatccccacattcacagcagaggaaacagaggaacacagaagtaaattttccaagatcacacaactgggacatggcactaacagtctccagcacatctgatgtcacagagtcaataacatccggagatgaacaaaaactcagggcacgtctattcaacccccagatcacagatgaggaaactgaggttcaaagggaaatgtatgaatgaggccagagagtcagtaaaaaaaagcaggagcattactcataagacccataaatactttaaatattccacaaggatataagagctacaaatgttaaaacaatctgagaccgcatctttggactctacaatgagccagataaagatggtgcccttttctccactatcagtttactacataaatgagaagacataaagtagttttagatttaattaaagtaattgactggattgcattttgtagtcctgatcgtcattaacattcttgacctctctgtcacacagatgtgccggagaatttttccgatggatatttattatgaatattatcatcaataagcaccatcaacatattaaaattaattttaacttctttatggaagactgaaagcacaaccagcttttgaaaccatccgctctaaatcattttttatc

SEQ ID NO: 461117 - DNA, 1742 bp, Homo sapiens
aaagtttcagaccaaggtgccagtagatccagtgtctgataaggatccactttctggttcatagacagtgccttcccactatgtcctcacatgttgtaagaggaagtattccagaagaaggcactgttatcataggagatgacagctccgtgcatgttattgcatctaaacaccttccagtggcacaagatgtggagttagaagacagtgatacagatgatcctgaccctgtctgttggagtttgctagaggtccacttcagaacctatttgcctgggtatcaccaggggaggctgcagaacagcaaatattgctgcttggtccttcctctggatgcttcgtcccagaggggcacccgcctgtatgaggtgtctgtcggcccctactgggaggtgtctcccagtcaggctacacgggtgaggcgacaccctgccctgcttcagctcaccctccatgggctgcacccactgtccaaccagtcccaatgagatgaaccagattttgtgatagcatattttgcatttatatcacaatgtatcaaaatagatggtttttctgttctttcatactctgagctcctagagagcagaaaccgtggtcatgtttatgaatccatagcacctttcatagagtgtgatatataataggcacttggtaaatgtttaaatgaaatcaaatttaaaaatatagtatttaaaataaatgtcactagttgtgcttaacagcagcatattggagatgaaggaagagtcagttcacttaaagataaatcaataaaaagtatccaatctaaagaacagaggaaagtggggaaagcctgtaataaaacagacagaagctcaggagtctaattatgtgtaattatcatccccaaagggaaagaggaagaacatgaagttggaaaaaatatttgaaaaaataatgacctaaactttccaattttggtgaaagacataaattataaatttatgtctttcaagcttagcaaacccaatcaggataaatatgaagaaaattttgtctagggtcattacagttaaagtgctgcaaactaaaaagaataagaaaatcttgaaaacagagaaaaataaattatagaattacataaagggacatcaatgtaaatgatgactcacttctcatcagaaataatgaaggccagaagacacggaaacggtattttttaaatgccaaaagaaaaaagctgtcaactctgaaatacaaatccagtgaagatattattaaagaacagtggagaaataaaaacatttccagaaaaaagaaaactaaggggattacttaccagcatacctaacactgtaagaaatgccaagaaaattctacagactgaaaagaaataaaaccagcttgaatttcagctcttcaagaaggaatgaagaacatgagaaatagtaaatatgtgggttgaagcatatgaagaaaatccatcctcacacatatatatagttggaaatggaggagaattttaatagacttttcagataattgtggatatcttctttaatactacaccaaaactcagaagtggaggtttcttaaaggttagttgccatgtggaatataaaaccatattggtgaactttttgtcctctccattggtcaatcttgcatttgaatcattttgtaacatcgcgcattaatcatttggaaaagaatggtcctagatcttcaaaatgttgatacatttcattagacaatattcaaaagcatgtgttaattat

SEQ ID NO: 461118 - DNA, 1122 bp, Homo sapiens
tccgagttgccctcccagaggagaaagcatatgctgctgggaccgactgcagctcctcatggatgcacctgccaccagaaaattgttgttcagtctgggattgctttctcttcccaaagcacaatctcacatgcagtcatgagcccagtccagcctctgggacagaagatttcgtgcttttataaaccaacagcactgcaggtgctgcacaaggaatggaaaatcaatctgagtgtcattaagagcatattccctgaagaagattgctgatgacagtggatttgtcacccagctcagtgtcttttcctgagcaataggaatttcttccatggggaatgaaacctagtgttgtttccctgtctgaatccaggcctttcactgacctgccaagttttcattccattgtctcactgtcattggctgatctgatctctacattgattaattagtttcaagccccttcatattgatctaataaaattggcttgtttaatttgtgtcaagaaatttctgagaatgtttcatttagactctgataagcttggacccaagctgggggccacaggggtctcctgccttcttattaggctgggagtggggcagcttctcaatgagaggctacagtggtttgccggggctgatgtaacaaagtaccacacactaggtggcttgaacagcagaaatctattgtctcagttctggagccacaacattctcttaacccaaagcctaatccagagcaagaccctaactctcttcaattctatgaagactgagagagaggaggaagctgtggaaaagttggaaactaacaaaggttggcttacgaggtttaaggaaagaagccatcttcataacatgaaagtgcaaggtgaagcagcaagtgctgatatagaagctgcagcaagttatccagacgatctagaaatttccacagccatcccatcctttagtaaccaccaccctgatgagtcagcagccatcaacatagaggcaagactctccaccagcaaaaagattatggttcactgaaggctcagatgatagttaacatgttttagcaataaggtatttttaaatttaaggtatgtacatttaagcatttatcggggacaatggaga

SEQ ID NO: 461119 - DNA, 1178 bp, Homo sapiens
  misc_feature (2)..(3): n is a, c, g, or t
  misc_feature (5)..(5): n is a, c, g, or t
  misc_feature (7)..(7): n is a, c, g, or t
  misc_feature (12)..(14): n is a, c, g, or t
tnngngnctttnnngcagttgcacacgcatggtacctggaggcaggctgcccccaaagacaagaatccagtgtgtcctcagtgacctgcagcagtgtgatggagaaaatgaaacatctggctgcctctgggggcgcacagaaaggccaggtgctctacaacccaagcaataatggcttggccatcacacttacgtttgagaagaatgaggccaaggcaaaccggacagatgccgaagcgtacaactgccggatcgtgtggggcaagaacctgagactctgggctgtggattcagcaagggctcgccgacctagaatgggtgctggcgatgtggatttttccaagtggtcctggtaccacaattttagcagcagatttctataccagggcctagcaaagggccaagtgcccaatgagaaatgcatacatatctacgaattgagtgatgagtttccactcttcttcagtgtcatgaacagatcaacttgcccacagcaaaagtgacatccatcgatgcaggaaccaaaagccccagcttcaggctcctctcactagctgtgagacaggaggaaaggttgggagatatttttttcccctttcctacaaccatgcattgatcttaaatgagttccaaatagatgagttctgccaagtcttcttgaagtacatttctgtaccttacactataacctgcttcgaaatgttaagtgttttaaaaacaactttccacataattaaatattccttaccattatttttatttattgactgctcagtatttcacattttaagcaatattctgtgggaaagcatttgcgttgctttctttttgcaaactgctaaacatagttgcacatatatcttagagcccaaatccacatattgtcttgaaataaatacctgaatagggcaacttctgtgtagaaaggcaagctcattaagatagattgcccgccatgaattttagagtcctaccagaagagcatgatggtaagtgcttttatcaaaggtttttgaagaggaatttagagagagagggagaaaaaaaataaatctttttaaggatgattattatgccaagtggaataaggatacagaaatgtgagaggggacaaagaaatctttgtgcatctaactgttgctgtgaggacttagctgtagaattcaattttctaaaat

SEQ ID NO: 461120 - DNA, 1118 bp, Homo sapiens
ggcctcccgcaggacgcgcccccttcgccggcctgggcctgccgtgggaaggaaaggccccgggccggcccggagccactgggaaaaagcggaagcccggcagagccgccgagggccctgccgaccggaccccgggcccctcctcaccctcgtagacctgccatgctggagaagcccatgtgacaaagacctgaggctgggccccagttgacatccggctacaactgaggctatcagtccaacagccttgaaggattgaatcctgccagcaactgtgtgagcttcaaagtggatccttcctcagtggaacattcagatgagacctcagccctggctgacatcctgatcacagccctgtgagagtcccagaagcagaggccccagttaagctgtgcccagacttctcccccaacagcccaacagctcttgagtgagtgagacagagctgacttgagtcctggggtcacagatgcttacagggtctgtgactttggcatgtcctgagagggctgcctacctctgaaccttggaaccaggccgcagatggaggcagaccctgggagtcaccaagcggctttatgatgtgcagatggtgtttccgcggagcccctcgcttttcatgtcggtggcctctgggagctgggccagcccagatgtccctgatcgtgagaaagcctcccctggcaaggctggtgcaggatgccagtgacggggcctctggccagttctggtgtgggttgtctgagtgctcagacaaggctcagaggatgtcgagagctgaaaagagtcctgctgaccatcctaggggcgggcaaatttcagcctggactcggaagacctgcccttgcccaaagcacctgaggagagtgggatcagtgtcagccacagcaggttccagagagacacaggtgaggaagactgttgtgagatgtatggaccctggacagagtttgttttgtgacctgctacataacccaacttctggctctgggcttggttcccaacaagagttcagtgatgacgagtgaataaatgaatgaacgaagacctggttcctgtccttgagaaactcaactcttctaaggaagaaatgaagcccacttctcttgggtgcctct

SEQ ID NO: 461121 - DNA, 2435 bp, Homo sapiens
tatatttgatagagactggcttgggttaagtgagtaggggacagacattctaagtgagactgtccacatcatctaggaaaatggtggccctgtccttaaagatttgtgtgcgccactgcaacgtggtgaagaccatgcagtttgaaccatctacagctgtgtacgatgcgtgtcgagtcattcgggaacgggtgcctgaggcacaaactgggcaagtatttgacaggcagttgagaaattggatcccttccaaatcagatattttggaatataaaaagaaacagagacctcagaaaatccggatgctggatggatctgtgaagacagtgatggtggatgattccaagactgtgggggagctcctggtcactatttgtagcagaataggaataacaaattatgaagaatactccttaatccaagaaactattgaagaaaagaaagaggaaggaacgggcacactcaaaaaagacaggacactgttacgagatgagaggaaaatggagaagttgaaggccaagctgcacacagatgatgacctaaattggctggatcacagccgaacattcagagaacaaggagtagatgaaaacgaaacgttgctgcttagacggaagttcttttactctgatcagaatgtagattcgagagaccccgtgcagctgaacttgctttatgttcaggcacgggatgacatcctgaatggctctcaccctgtctccttcgagaaagcttgtgagtttggtggatttcaagcccagatacaatttggacctcatgtggaacataaacacaaacctggatttttagagtaaatgacattttgtttctcttttttctcttttctcctgtcttctttctctttcagctttttatttttgagctaggtgtctaagatcataccctaatttcaatcatttgtgagaatgctagcttttcttccatcgagtagatgaccaaatttgcagattttggggaaagcaagagaaattcagaagtttcttttgctgaatagaaattcagtgatctgtgtccccctccaccccctttttttccttctacttcgtcttagtgaagaggaaagtaaaaaaaaaaaccaaaaaaaaaaccgctccagtagggccaaggtgtgaacgccagtgtgggggttgtggggaggacatgagctttcctgtaggatgtgccagtcagcatgagatgtgtccagcaggccattcttggtattgtgcattcattgtattgtttcaagtgtattgcagggagaggataacggagaggcttctttggcccttgaccccagtttcactttggtggaaagtagttgggaccagagtatgcctttgagtaagaagaaaacttaacttttcttctggtggcagagaatgcctggccaatatgctgtttggtctatactgagttgttaaccccccaaaaagcaaacctctgcccttgggttagcgaatcccagggaacctttacaaggtgacgccgtgtcctgcagtgtgccacacattgtgagcctgaggctgaggacggctctgagcagtttctaccacctacttagttctgtattctccaaatgagtcatactgccgggtgttcctcagggcctgcttttaccccaccagtctggcttccttcctcaggaacctcgggaagcttccccttctcttccgccacctatcgaaggccatgtgcacaagttcctttagcagtttccacgttcccaccttctagcctcacggctggcccctcagatacaactgatgtcatcagcctgaggattatggccacggatattgaggaataaacaccaagagctagaggggccttggaggaaacaacattttgtttctgttgctagagtgactggtgacaaatagaaaatggagggaagattgatgaattttaaaaaatggaaataaaacgtttacctatttttaggcatttgtagctgtgaatctatgtctccctgtcatataatgaattcatatggaatagcattaggcagcagtattctcagtggctaggaaatgtgctttggaaaagaaagacttcagtttggatcccggctttgccacttagtagtttgatcttggataagttaccttacctttcatctctaagcttcagtttgttcacctataaaattgtgactttttatgaggtttaaataagttaatacagaaaaagggactgcctcatataaatctccataaatgggagctgtaaatgtctacattcttccttctttcattgccttcttttgcatttcatcatgatctgctacaccaaaaccccacaagcaacagtaaggcatttcccatgaccagcataaaatcttgttttattccagaaaatcacgtgtaacccttctcacttccaaatttgcctttgaaaactttttgcagacttacccagagccttgaggtgtt

SEQ ID NO: 461122 - DNA, 3655 bp, Homo sapiens
  misc_feature (1)..(1): n is a, c, g, or t
  misc_feature (3)..(4): n is a, c, g, or t
  misc_feature (6)..(6): n is a, c, g, or t
  misc_feature (843)..(843): n is a, c, g, or t
  misc_feature (1650)..(1650): n is a, c, g, or t
ntnntnttttggtaaattccctttaattaacaggaaaaataaacacagttctcttatatgtcttgttgtgttgcagtaaattggctggatcacagccgaacattcagagaacaaggagtagatgaaaacgaaacgttgctgcttagacggaagttcttttactctgatcagaatgtagattcgagagaccccgtgcagctgaacttgctttatgttcaggtacagtatttactgctcagacactgaggttggtgagattgcaggaagctcctggctgtatcttgtggcgagcaggagggcggcgctggcttctgccacatttatggcgtcgtttccagcaggcgctgctcgtgggtccccgcatgtgtttggttgtggtgcaggttgatattctggatgagcagctgaccatccggagtagggcctccctatggcttcccagattgtgtcctggtagccaacactgtgtccctctctgccgggctttgagggacagttgtatttcacttaactggctcaccatttcaagtgcactaaaggtttcttagctggcatcttagaatgcaagagaatgttggtcagaaatcaggactctcattaactggaagatatcctctcaataacctttcatgtctttacccttaactaattgttaaaactgacaagtcatttaacatatctgagttgcggtttcccagtatgtaagatgtggattgcactagattgtccccaaggtttcttgtggctcaaggaaaacatcatccatctttgtcctctcctaccagcttcctttcttcctttccttccctccctccctttcctctcgttatttatccatctatntgcccatagaaataatgtaggggttggcaaactacagtcatgccttttgcctgtacttgtcaataaagttgtattggaacacagcttatgtattcaagtattacatattgataaatccccttgagggttatgtaattgttacacatatcttctgtggctgttctcgcattctggtgacagaactcagtgacagagactgtgtggcccaggaggtttgaaatgtttactatttggcctttagagaagtttcctgacccctgagttagtggacggaaggatggcatggaaagagggctgagaggaaagaagtggggaggccaaaaggagagagatagcagggcagtgaaaagatgcttgttggcttaaggcttagagtgatagcttggagtgtccatcttagggtgatctgggggtcatttagagaaaggaaaggctgaaaaggtgggggggggaagcaacagcagtgatggatggagaaactgggaggaggaggagttcagacacaacaagctccccattttaggatgcattcgcttgtcatttcccctgctgtcttgagtattgagttcttgtctgtgtgtgtgtgtgcctatcgcctttctttctcttcctctattacattggtttttatctggggatgggggttgggttgattttacctctagatatttgattagctagctttgtgatttaggattgtaaaaagtacactgtatttgtcttttggcctctttgaagctgatcatttcatatgagtttcctttgcctctttttataatcacttctgcctttctggactgtcatcanactttgcttttgctgtactggacacctctaatgttttccatctacaggccattttggacaaaagtttgtttttcttttgccttagttttctcccatgcggtgatcatccactgtgtcctgcacatgtcaccgtgggttggctggcactgtcccctgctccacagagggtgtactgggccatgggaatgcgtcagtggagagaacgtgtcactccccgaagcctctgatgcttttccttcctcttgtgtttcaggcacgggatgacatcctgaatggctctcaccctgtctccttcgagaaagcttgtgagtttggtggatttcaagcccagatacaatttggacctcatgtggaacataaacacaaacctggatttttagagtaaatgacattttgtttctcttttttctcttttctcctgtcttctttctctttcagctttttatttttgagctaggtgtctaagatcataccctaatttcaatcatttgtgagaatgctagcttttcttccatcgagtagatgaccaaatttgcagattttggggaaagcaagagaaattcagaagtttcttttgctgaatagaaattcagtgatctgtgtccccctccaccccctttttttccttctacttcgtcttagtgaagaggaaagtaaaaaaaaaaaccaaaaaaaaaaccgctccagtagggccaaggtgtgaacgccagtgtgggggttgtggggaggacatgagctttcctgtaggatgtgccagtcagcatgagatgtgtccagcaggccattcttggtattgtgcattcattgtattgtttcaagtgtattgcagggagaggataacggagaggcttctttggcccttgaccccagtttcactttggtggaaagtagttgggaccagagtatgcctttgagtaagaagaaaacttaacttttcttctggtggcagagaatgcctggccaatatgctgtttggtctatactgagttgttaaccccccaaaaagcaaacctctgcccttgggttagcgaatcccagggaacctttacaaggtgacgccgtgtcctgcagtgtgccacacattgtgagcctgaggctgaggacggctctgagcagtttctaccacctacttagttctgtattctccaaatgagtcatactgccgggtgttcctcagggcctgcttttaccccaccagtctggcttccttcctcaggaacctcgggaagcttccccttctcttccgccacctatcgaaggccatgtgcacaagttcctttagcagtttccacgttcccaccttctagcctcacggctggcccctcagatacaactgatgtcatcagcctgaggattatggccacggatattgaggaataaacaccaagagctagaggggccttggaggaaacaacattttgtttctgttgctagagtgactggtgacaaatagaaaatggagggaagattgatgaattttaaaaaatggaaataaaacgtttacctatttttaggcatttgtagctgtgaatctatgtctccctgtcatataatgaattcatatggaatagcattaggcagcagtattctcagtggctaggaaatgtgctttggaaaagaaagacttcagtttggatcccggctttgccacttagtagtttgatcttggataagttaccttacctttcatctctaagcttcagtttgttcacctataaaattgtgactttttatgaggtttaaataagttaatacagaaaaagggactgcctcatataaatctccataaatgggagctgtaaatgtctacattcttccttctttcattgccttcttttgcatttcatcatgatctgctacaccaaaaccccacaagcaacagtaaggcatttcccatgaccagcataaaatcttgttttattccagaaaatcacgtgtaacccttctcacttccaaatttgcctttgaaaactttttgcagacttacccagagccttgaggtgtt

SEQ ID NO: 461123 - DNA, 1263 bp, Homo sapiens
ccagaagcattccagcctgaaggaaacctcccagagctcctcccttctaggagacacaggaagggaagttctattttctttgccttcttggaaacccaggagtctgcccaggttctcacctgatgtcattccaagagagtctcagagtgactctggcacctagcatgagtcaaccccagggctcgatttctcttaaggctggagattagcagaggcctgcctggtctaaacccctcactgatacaaagactggggccatctggagggctctagggatggctctcaactcagctctgacggaagtcgattgtcccccttgcccagtaccttcatgccccagccctttctccccaggctactacagtgccctggctgcccccagcacggaaccccaccaccctgtccctactgtggagcctgccttccttgggcagcaccccaaattccagacctttcatggcttcttcagcacctcccagtttgggacactgtggcaagttagtgttctggcttggcctcagggtcccgtggagacaggtccagcggtgcttcagccctgggctcaagctgtggcagggagagaggcagtccagcggcagcaaggatgggaagagcagctggacactcagagcatcgtcaccacagcagaaggcaaactccagccctgccgctcccctctcctccactttgctaaaacaagccagagaagaactgcaggccttcccagaggaccctcacctgccagcctctctagcaagtctgaatggaggcccctccctgtctacttagccctctccagtggtccggcactacattcctcgctctataatttcttctaccttgatctttaagcgttttcttgcctgtgtaatcatttcacctttcatgcctgttagtgctgtttctgaaagaaaagggactgtgtcatagtcatagctgcaccccgggtaatatccacagacacatagtagatctcaggaaatgcttgttctgagagtggctgggcagggtaagttagaacccaccccggtgctccctgctctttccccacgctgctaccaaagcaccagccctcccaccatcaccttctctgtttccctgcctctctgcactgagagtcctggagtcagcactcctgtccactcacattggaatcctccttgcctagcatggtggctggcacataactgttattggtattcactcatttcacatttattccacgccttccatcatgtatgtcttagaatgctttctacacaa

SEQ ID NO: 461124 - DNA, 1081 bp, Homo sapiens
taaatgacatcttgagtctccaaatctgtgctatggagacttctttattttgaggtgctcattctggttgagtatatttagtgtttaagaaagcaattcaaaagttaaaaactatgtttgtttgttttttttcattgagtccctctgtctggacaaggaagactccttctaataccctttctggtgctgcagactttcaatttctacttacagtgtttgtggatggcaatggaaaatgtatttcctgctgagcctgaactggaaataaaattttggagaactttgggaaaaactggcaaagattccaccaaggtgcacatccaagggggctcaaatagttgcagatatccccttggtatggggaaccacggatatagaaaatacatgtcatgtcttttggtgcttgttgtggagagtcaatgcccacaaccaatgtgtcttaggttgggaaaggaagaagttgcagctgatcaagcccccgggtggtgggaaggtgatagtgcttggagtgggggtgtcagggacacagatgctcaggaggaggcctgggctaagctcttgaaagctctggcagtaaacacagctgctggactcacctctagcacacattctaagacaatgtcaatggctcccatgtccttttatggaaatctgagagtcaatggccttagtcaaacatatgcagatatttttcttgaagggtgtggctgcagccacacagacctaactgtacaagaagcaaggcttcagtatctgcatctggtgagggctttagtccgcttccactcatggtggaaggtgaaggggaggtggcctgcagagatcacagggcaggaggtcctagacagtgcaatacacaaaagaaatatgagctataattattggaatgaagaaactgtcatgattacagatcaattatcccaaaagtaatctaaaactttaattaaaactccaacagatttttttcttcacagagctagtcagttcatgtggaactagttaattcatctggaagaatcaagaaccccaaatagctcaaaatagtgattttgaagagggagagtaaagaaaaagcacatgc

SEQ ID NO: 461125 - DNA, 733 bp, Homo sapiens
cgttaagccagcccaggggacggcagagcagcctgagggagcaagaactgtcaccacggtctgcccgcgaagcactgaggtgatgctggggttgcagtgagctgtcaaactagatgtgtcagaaatgagaaaggagatgagagaacaaattagaatacagagtgatcgacactttgatgaaggaagtaagtggagcctggggtccatgaaacccactgccaaaccaacccagacagactcagtgtgacattacaagcatcctgggtggaactgcaagacatagttatttcaagattatgaagagtgtggtagccaaactccaagatggccgcatgatccctcctccaggtactcgtgcccttgtatggtatgctcccacagtcttccgaggattccgttgtatgactgatcgaatacagcagaggcgatggcataggacatctgaggctacatcatctaagggatacacaggaattcactcccatcctcccatgtggcttctactttgctcttaatctctcagatctctcaccctggcagacaccatccaccatgtcctgaggacactcaagcagctctgtggcctcctgacaatagctgttaggtgaaacaccttgggtgcagaccctctagccccactccagccttcagaagacagcagccccagctcacatgggaccctgagccagaccaccaagcaaaccactcccagattcctgacccacagaaactg

SEQ ID NO: 461126 - DNA, 1858 bp, Homo sapiens
cgttaagccagcccaggggacggcagagcagcctgagggagcaagaactgtcaccacggtctgcccgcgaagcactgaggtgatgctggggttgcagtgagctgtcaaactagatgtgtcagaaatgagaaaggagatgagagaacaaattagaatacagagtgatcgacactttgatgaaggaagtaagtggagcctggggtccatgaaacccactgccaaaccaacccagacagagacaaagtatccctatgtttcccaggctgatctcaaactcctggcctgaactgacctcctgcctcaaccgacctcctgcctcaacctccaaagcactgggattaacagcataagccactgtgcccagcctaatttttacttttcaactttgtacgttgcggtgtttttaatacccctgccaagaccacagttttaggtaaaccgccatcctgcctatacccatgtccctgttccctttcctagctgtgtgaccttgggaagttcccttgcctcacgaggcatcaacttgctcttctgttaaacggggacaacagaaccccgtgagacactctgacaatcacatgaagctatgtgaataaaacatgggcctagtacatagcgagtgtacagcagctgctcactagtctttcaacaagtagcgactgagagtctattacatgcaggcacaggcataggtgctggggatacaagaatgagcaaaacactggtaatgggacagactgatggtaacgggacagactgctggcatattggaaattcagaaaactccctgccctcccagtggcaggaggtacagcaagccggcaagtaagtaaaatacactggatgtcagagggtggtgctcagtgttgtgtgagcatcaaagcaaagaaaagaagaagggtgctaagcagggcttagacatttaaataaagccatcaaggaaaacgttgcagagaagataatatttgaataaaaactcaaagagggtaagagtacaaattatgctgatgtcggttttgtcttccaccccgcccccaccgtctctgcacagtcctctgctccccacccccacctaccctctccgcagctcctagaacagtgctctgcacaaagtaggtggccgataaaaaatattatgagattaacaagtcttagggaaaagcatttgtggtcaggggaacagcatgtgtaaaggacacaaggcatgaggaccatgaaaaacagtcaagctgaaagtgagggtaacaacaaccacacttgcccccggggtgttatgacaattcacaagaagccagagcagaaaggacaagcaaacctgcctcaaactggcgtcaaacctgagtcaatgctcagcggaaatgaaggccggcttggtgagaacctaagcagagaacccagttcagctgtgtccagacctatgaccaatcgaagcaataagatgactcagtgtgacattacaagcatcctgggtggaactgcaagacatagttatttcaagattatgaagagtgtggtagccaaactccaagatggccgcatgatccctcctccagaagtcactaagttcagtgtaactgtcacgggcaagagacagccaatacaatactttcgtgcttcatacatcatttttccatctatccaaaatgggaagaatacttcacagacttgatgtgaagctgcaagactcctggtactccactgatgcaggtgggtcagaggatgagggatacacgggaattcactgccatcatcccaggttatgtaccccagtgactccaagcccaatgccatgatgcaggaccccagagcactcagtaagcattcctgtccttactaggaagacaacccaatgacattc

SEQ ID NO: 461127 - DNA, 7580 bp, Homo sapiens
tggcccggcaggcttctgcattggttgctccgagtgctagagagccaggaggagagcgggatggaggaggtggagaggcaggggccaggtaggcagaggccgagtctgccttgtgtagctatagtgccttacagaccaagaaaaatgggtctgatggtgagtgaaaatgaatcaaatggaggagaaaataaatacagcgagaaaacaatcacaggaatgaaggtggttgtagcagaagggtacaaggtacaaggtagaatgggaggaggcccactgagtgatggtttgagcagggctggatctggaagtccttcggtgccatgttgcagaatggcattctgcagagaaatgtactatgatgggttccatcgttccttttgtgatacagacgacctggaaacagtccatgaaagcgactgcatttttgcctttgagactcccgaaatatttaggcctgaaggaattctcagtcaaagagggctcctcttcttttgctctaccccagtggttattaatgcatcagtattacctgggaactggttagaaatgcaaattcttggtccctactccacaccgagtaaaggagaaactctggtaaacaagccctttagagctcaaatgccatgctgggagaaccactgctctcttcaaagctgtcagacaaggacctttaagtctgcagaagctgtctgctgccttttgttcagctatgccctgcccacagaggtggagtctatagaggcagcaggccttgctgagctgtacagtctgtcacagcttcccttggctaggaaagggaaatcccccgaccccttgagcttcccgggaattcatttaaacaacaacctaaaccacttgaaatttggcttggattatcatagactgtcttctcctacacaaacagcagcaaagcaggggaaaatggattctcccacatcaagagcaggcagcgacaagattgtcctgttggtgtgtaaccgagcctgcactgggcaacaagggaaaagatttggactgccttttgtgctgcacttagagaagacaatagcttgggaccttctgcagaaggaaatcttggagaagatgaagtatttcttgaggcccacggtttgcattcaggtgtgtccattcagcttgcgtgtggtcagtgttgttggaataacatatttgctgccccaggaggagcagcccttgtgccacccaatagtagaaagggcattaaaatcttgtggaccaggtggcactgctcatgtgaaattagtagtcgagtgggacaaggagacaagagatttcttatttgtaaatactgaggatgagtatattcctgatgcagaaagtgttcgtctgcaaagggagcgtcatcatcagcctcaaacctgcactttatcccagtgtttccaactgtacaccaaagaggagcggcttgcccccgatgatgcctggcgttgcccacactgtaagcagctgcagcagggaagcattacgttaagcctctggactctgcctgatgtgcttattatacatctaaagagatttcggcaggaaggagacaggcgcatgaaacttcagaacatggtcaaattccccttgactggcctggacatgacacctcacgtggttaagaggagccagagcagctggagtttgccatcgcattggtccccgtggagacggccctatggactcgggagggaccctgaggactacatctatgacctgtatgctgtgtgcaatcaccatggcaccatgcaaggggggcactacacagcgtactgtaagaactctgtggacggcctctggtactgcttcgatgacagcgatgtgcagcagctgtcagaagatgaggtctgcacgcagacagcatacatcctcttctaccagaggcggacagccatcccgtcatggtcagccaacagctcggtggcaggctccacaagttcttccctgtgtgaacactgggtgagccggctcccgggcagcaagccagccagcgtgacctctgcagcttcctccagacgcacctccctggcgtcgctctctgagtccgtggagatgactggagaaaggagtgaagatgatggaggcttttcaactcgaccatttgtgagaagtgtccagcgtcagagtttgtcatccagatcttctgtcaccagccccttggccgtcaatgaaaattgcatgagaccttcatggtccctgtctgctaagctgcagatgcgctccaattctccatcccgattttcaggggattcgccaattcacagctctgcttccaccttggagaagattggggaggcagcagatgacaaggtctccatctcttgctttggtagcttgcggaacctttctagcagttaccaggaaccaagcgacagtcatagtcgccgtgagcacaaggctgtgggccgggcccctctggctgtcatggaaggcgtgttcaaagacgaatcggacacccgcagattgaactccagtgtcgtagatacacagagcaaacattcagcacaaggggaccgcctgcccccgctctctggtccatttgataacaataatcagatcgcttatgtggatcagagcgactccgtagacagctctccagtcaaagaggtgaaagcccccagccacccaggctcactcgcaaagaaaccagagagcacaactaagagatcccccagttccaaaggcacttctgagccagagaaaagcttgcggaaggggagaccagccttggcaagccaggagtcatccctttcaagtacatccccttcttctcctcttcctgtaaaagtctctctaaagccctcccgctcccgcagcaaagcagattcttcttccaggggcagtggacggcattcatcccctgcccctgcccaacccaaaaaggagtcatccccgaaatctcaggactccgtgtcatctccttcgccacagaagcagaagtcagcctcggccctcacctacactgcttcctccacatctgccaaaaaggcctcgggccctgccacaaggagccctttcccacctgggaagagcaggacttcagaccacagcttgagtagagagggctccagacaaagcttgggttctgacagagccagcgccacctccacctccaaacccaattcccctcgggtgagccaggcccgagcaggggagggcaggggggccgggaagcacgtgcggagctcctccatggccagcctgcgctcccccagcacaagcatcaagtctggtttgaagagggacagcaagtctgaggacaaggggctgtccttcttcaaatcagccttgagacagaaggaaacccggcgctcgacggatcttggcaagacagccttgctctctaaaaaggctggtgggagctctgttaagtctgtctgtaagaacaccggggacgacgaggcagagagaggccaccagcctccagcttcccagcagccaaatgcaaatacaacgggaaaagagcagcttgtcaccaaggaccctgcttctgccaaacattccctgctgtccgctcgcaaatccaagtcttcccaactagactctggagttccctcgtctccgggtggcaggcagtctgcagagaaatcctcaaaaaagttatcttctagcatgcaaacctctgcacggccttctcaaaaacctcagtgatatttctgcaatcgaagtgttttatctgtaaagatgtttatttatttagaacccctgccctcccaccaaagcctcctgtgcttttgttttgtacttttttgagtcacgtgcccgactgtgtgtgtgtgtgtgagtgtatgcgtgtgtgtgtctaattcaattgcaaattgttcaaagcgtcgccttattctgccattgaaccaaataacagccataggcaaaacattgacaccaagctaactggaataattgtagacgatacccaggacggtccctttagcaattgtacatatttctttctagagaactctaatgactttctttggatatgagggttttgaaacctgtgaaccagaaaagctaccattagtgcgtagaaggaggaaggagctgactcgtgtttcttctgagcaggacttgtccttactgtggattgtgggtggcaccaggagctctaaaaactgtgactctaacaacgaaacaaatcgagggaaaaactcttgctttctgcactttcgccccatctaccagtctttgtaaagggcaatattttaacactaatgtttctcaggtatatactcagctagtctaggatggttgcacaccagtaaatggattaaagaggaaggtgccatgtgggtgactgtgtcatttctcctactgccacagatagacattttcgaggtagaaatgaagcctttcaccaccttcctatctgtggtgacatgtgcaccaaaacctgtcttgactcttgggataggtcctaggaagtggcagattggatagccagaaagccagtcactcgtttaattttttttccttctgaaattactagctaaggctcttggaattttgcactgtagtagagcagttaacacctttgacagattcctggaaaaaacttctagattctaaactgggtgaaagactggacatcattttccttgtcaggtgttgcatttttccgttagaggtgggaagctccacgatgccctgtgtctgtgggctcatgttccctcatcttgtagcttggagaggaaagaagttgccttctgccaaaagccaatggtggtatgttgaagcgttgtgtgatcaagtgttacatatgcacttcagatcctgtctgtcagtctctgttagggctgcctttcagtaactcatttattatttcttctttgttcttaagatttcatctcatgcccagaactcacaagcaggttttggagtgtgttccatctggccgtgtcagtgcaaattgcatttcttacaaaggagaacctcaccaaaaaaaacctcacagataagcaaagtatatagttttgcaagctttttcaaggtctcctggcaatactttcctgctcaatttttagcttttcttttttttttaaatgtcaagagagtgaaggtcttgattctctctgaatagcatttgtcactttgccagtaaatacagcatgctaagtttatgtgcttttaaatattagcgtttttcgtcagactcttcaagttcttcttgaacccttggtgcacagatccatatataacctcccttttcagtattgctgtgtgtgaattaactacaacacatatgcatgcatagctgtgaattctgcactactttttttttcttttttccccccaagaatatctcttgggaaaagtttttagtacgttacttaactttattttgctgctaatttgcgcattagccggtaacttgcaagtctggagaccacttactgttgagggtagctggaattttagacccttggcagtatttaagatttagacatttagccttgtgaaagttaccacagtgctccatgtgattcattgactgtgagcctgttgtccattgcactcagccctgtactcacttcttcactcgctgtcctggttttactgttcagattttggtgggttctcaaagcagtaccactctcatctgctcagtacatctgcggcaactggctgccttcgatgctgtcattgcgttcagcccagcacatcacagccccatcagtgtgtagccaccgctctcgtttttctgtatcgcttttatctcctgaaaaagatgcaccaaataagagatcatctatatcaggaattgaatgtctaactcaaacctctcatttttgtttaataggtagatctcatttgaagtctcctatctgaatctctgaaacaattatagtttgattagacaaaggtttttaataacacttcttttttgctgtagtcaagcattaatagaaactagtttaattttcacagtggtaaatatttttattcttgagttatctaggaatggattttccacgatgtctagtgacttaaaaaaaaaaaggaaaaacgtttctacaaatccctttggttttccatgggatctggaataaaatgtcagtgtctataaactgtatgtcatggagtttagtccttgtttcaggtttaatagaaaaaatcaggaagtatcatggcattgtctagacatcatgaagctattttatttccatagttggtaaacagtgaaaatttcattatctccaactactaggtacaactttaggccacaggaaaggttatttggcccgaaagtttggaggtgctccttgaggtgggaagtatcttgtgggaaagtagttacttgattcaatttagttcattggtagggttggggacttggtgttggtttctttctttcttttctttttttttttttttttaattttcccagcaatatttagcacaatgagcgtgtatgtgctttggggttaaaaattatctgctagggatgataggcctgggtttctcgttgacatctagatgggcctgattagagcagtcatctcctggtaggcacaaaataatcaccaacagtaatgttgtatctgtaatgtttgtttgctttttaaagttttattcttgatttcttgtaaacatccattgcactgaggccgtatcattccttaagacagccctacatcttgccttggtaatcccttagataatgtggaaactcaaaccgttaggctccagtcatcttagaccatttcccatccgttttgtattttctcgtcctgaaagcagctgaactgaaagtaagtaataatatgctggaccagtgggaacggatgtgggagtatttgtggtgtgctaaaatactgtaattatctgtgaggctgcctgacacgcttttgcaatcttgttttcatcattcattctgcaaacgtttatggagggccttctttgagcacagaggcaaaactgaaagcttcagggatttgctgtagctgaggagccctgggagcacagcccatcaagcaagggatgtgatggtgtcctaaatggagtgacagttctcctgggaaaagagatcacgtggattccggtcaaatcggctaaggcttgtggttctcttgagcaagtctgttccttctggaaaccaaaagtgcccttcatctttagagacattttactcttccatccaccttttcagactgagctgtctctactatttaggggttgaaaatccattacacagtcactttacgttaacattgggtcatcttatgtttgtatgagacggatgtgggatttgaggggaacattgtcattcccttaaaataactatcatgaaaaaaatagcaacagtatgtaaagggaccaagagtggcagcctttagggaaaatggagcagagaagagctgtgaacaaagctcatttatttgaaataagcgtgctttatttcacatagaggggcatcagacgttacatttcattcggacaaattactgaacagccgaagtgattgtttccaatgtaggttattataattattggatacaaagatttaactagtgtttctgggttggatttttgaaatagtatgcaagtcataagcacagtttcaataaaacacgtattctgga

SEQ ID NO: 461128 - DNA, 1958 bp, Homo sapiens
tggcccggcaggcttctgcattggttgctccgagtgctagagagccaggaggagagcgggatggaggaggtggagaggcaggggccaggtaggcagaggccgagtctgccttgtgtagctatagtgccttacagaccaagaaaaatgggtctgatggtgagtgaaaatgaatcaaatggaggagaaaataaatacagcgagaaaacaatcacaggaatgaaggtggttgtagcagaagggtacaaggtacaaggtagaatgggaggaggcccactgagtgatggtttgagcagggctggatctggaagtccttcggtgccatgttgcagaatggcattctgcagagaaatgtactatgatgggttccatcgttccttttgtgatacagacgacctggaaacagtccatgaaagcgactgcatttttgcctttgagactcccgaaatatttaggcctgaaggaattctcagtcaaagagggctcctcttcttttgctctaccccagtggttattaatgcatcagtattacctgggaactggttagaaatgcaaattcttggtccctactccacaccgagtaaaggagaaactctggtaaacaagccctttagagctcaaatgccatgctgggagaaccactgctctcttcaaagctgtcagacaaggacctttaagtctgcagaagctgtctgctgccttttgttcagctatgccctgcccacagaggtggagtctatagaggcagcaggccttgctgagctgtacagtctgtcacagcttcccttggctaggaaagggaaatcccccgaccccttgagcttcccgggaattcatttaaacaacaacctaaaccacttgaaatttggcttggattatcatagactgtcttctcctacacaaacagcagcaaagcaggggaaaatggattctcccacatcaagagcaggcagcgacaagattgtcctgttggtgtgtaaccgagcctgcactgggcaacaagggaaaagatttggactgccttttgtgctgcacttagagaagacaatagcttgggaccttctgcagaaggaaatcttggagaagatgaagtatttcttgaggcccacggtttgcattcaggtgtgtccattcagcttgcgtgtggtcagtgttgttggaataacatatttgctgccccaggaggagcagcccttgtgccacccaatagtagaaagggcattaaaatcttgtggaccaggtggcactgctcatgtgaaattagtagtcgagtgggacaaggagacaagagatttcttatttgtaaatactgaggatgagtatattcctgatgcagaaagtgttcgtctgcaaagggagcgtcatcatcagcctcaaacctgcactttatcccagtgtttccaactgtacaccaaagaggagcggcttgcccccgatgatgcctggcgttgcccacactgtaagcagctgcagcagggaagcattacgttaagcctctggactctgcctgatgtgcttattatacatctaaagagatttcggcaggaaggagacaggcgcatgaaacttcagaacatggtcaaattccccttgactggcctggacatgacacctcacgtggttaagaggagccagagcagctggagtttgccatcgcattggtccccgtggagacggccctatggactcgggagggaccctgaggactacatctatgacctgtatgctgtgtgcaatcaccatggcaccatgcaaggggggcactacacaggtctgcagtgtgagaggctgcgtgtctgtgctggcgagtccttcagacgggtttgcttgtggcagggtgacttgactttagagcctcatttcccctccggtaggcagtgtgccaactgtgagggcagtttccatcctctggatctctgcccaagagcaaataaacgaacattcttcctccttttcctgag

SEQ ID NO: 461129 - DNA, 512 bp, Homo sapiens
aatatggtattaaacagcatggaatcgggcggggcgcagtggctcatgcctgtaatcctagcactttgggaggccaaggcgggtggatcacctgaggtccgggggttcgagaccagcctgaccaacatggagaaaccccatctctactaaaaatacaaaattagaccggatgtgggatttgaggggaacattgtcattcccttaaaataactatcatgaaaaaaatagcaacagtatgtaaagggaccaagagtggcagcctttagggaaaatggagcagagaagagctgtgaacaaagctcatttatttgaaataagcgtgctttatttcacatagaggggcatcagacgttacatttcattcggacaaattactgaacagccgaagtgattgtttccaatgtaggttattataattattggatacaaagatttaactagtgtttctgggttggatttttgaaatagtatgcaagtcataagcacagtttcaataaaacacgtattctgga

SEQ ID NO: 461130 - DNA, 1259 bp, Homo sapiens
tggcccggcaggcttctgcattggttgctccgagtgctagagagccaggaggagagcgggatggaggaggtggagaggcaggggccaggtaggcagaggccgagtctgccttgtgtagctatagtgccttacagaccaagaaaaatgggtctgatggtgagtgaaaatgaatcaaatggaggagaaaataaatacagcgagaaaacaatcacaggaatgaaggtggttgtagcagaagggtacaaggtacaaggtagaatgggaggaggcccactgagtgatggtttgagcagggctggatctggaagtccttcggtgccatgttgcagaatggcattctgcagagaaatgtactatgatgggttccatcgttccttttgtgatacagacgacctggaaacagtccatgaaagcgactgcatttttgcctttgagactcccgaaatatttaggcctgaaggaattctcagtcaaagagggctcctcttcttttgctctaccccagtggttattaatgcatcagtattacctgggaactggttagaaatgcaaattcttggtccctactccacaccgagtaaaggagaaactctggtaaacaagccctttagagctcaaatgccatgctgggagaaccactgctctcttcaaagctgtcagacaaggacctttaagtctgcagaagctgtctgctgccttttgttcagctatgccctgcccacagaggtggagtctatagaggcagcaggccttgctgagctgtacagtctgtcacagcttcccttggctaggaaagggaaatcccccgaccccttgagcttcccgggaattcatttaaacaacaacctaaaccacttgaaatttggcttggattatcatagactgtcttctcctacacaaacagcagcaaagcaggggaaaatggattctcccacatcaagagcaggcagcgacaagattgtcctgttggtgtgtaaccgagcctgcactgggcaacaagggaaaagatttggactgccttttgtgctgcacttagagaagacaatagcttgggaccttctgcagaaggaaatcttggagaagatgaagtatttcttgaggcccacggtttgcattcaggtgtgtccattcagcttgcgtgtggtcagtgttgttggaataacatatttgctgccccaggaggagcagcccttgtgccacccaatagtagaaaggcataaatctacgtggcaattaccgtggcaattacgtggcaatct

SEQ ID NO: 461131 - DNA, 8133 bp, Homo sapiens
tggcccggcaggcttctgcattggttgctccgagtgctagagagccaggaggagagcgggatggaggaggtggagaggcaggggccaggtaggcagaggccgagtctgccttgtgtagctatagtgccttacagaccaagaaaaatgggtctgatggtgagtgaaaatgaatcaaatggaggagaaaataaatacagcgagaaaacaatcacaggaatgaaggtggttgtagcagaagggtacaaggtacaaggtagaatgggaggaggcccactgagtgatggtttgagcagggctggatctggaagtccttcggtgccatgttgcagaatggcattctgcagagaaatgtactatgatgggttccatcgttccttttgtgatacagacgacctggaaacagtccatgaaagcgactgcatttttgcctttgagactcccgaaatatttaggcctgaaggaattctcagtcaaagagggctcctcttcttttgctctaccccagtggttattaatgcatcagtattacctgggaactggttagaaatgcaaattcttggtccctactccacaccgagtaaaggagaaactctggtaaacaagccctttagagctcaaatgccatgctgggagaaccactgctctcttcaaagctgtcagacaaggacctttaagtctgcagaagctgtctgctgccttttgttcagctatgccctgcccacagaggtggagtctatagaggcagcaggccttgctgagctgtacagtctgtcacagcttcccttggctaggaaagggaaatcccccgaccccttgagcttcccgggaattcatttaaacaacaacctaaaccacttgaaatttggcttggattatcatagactgtcttctcctacacaaacagcagcaaagcaggggaaaatggattctcccacatcaagagcaggcagcgacaagattgtcctgttggtgtgtaaccgagcctgcactgggcaacaagggaaaagatttggactgccttttgtgctgcacttagagaagacaatagcttgggaccttctgcagaaggaaatcttggagaagatgaagtatttcttgaggcccacggtttgcattcaggtgtgtccattcagcttgcgtgtggtcagtgttgttggaataacatatttgctgccccaggaggagcagcccttgtgccacccaatagtagaaagggcattaaaatcttgtggaccaggtggcactgctcatgtgaaattagtagtcgagtgggacaaggagacaagagatttcttatttgtaaatactgaggatgagtatattcctgatgcagaaagtgttcgtctgcaaagggagcgtcatcatcagcctcaaacctgcactttatcccagtgtttccaactgtacaccaaagaggagcggcttgcccccgatgatgcctggcgttgcccacactgtaagcagctgcagcagggaagcattacgttaagcctctggactctgcctgatgtgcttattatacatctaaagagatttcggcaggaaggagacaggcgcatgaaacttcagaacatggtcaaattccccttgactggcctggacatgacacctcacgtggttaagaggagccagagcagctggagtttgccatcgcattggtccccgtggagacggccctatggactcgggagggaccctgaggactacatctatgacctgtatgctgtgtgcaatcaccatggcaccatgcaaggggggcactacacagcgtactgtaagaactctgtggacggcctctggtactgcttcgatgacagcgatgtgcagcagctgtcagaagatgaggtctgcacgcagacagcatacatcctcttctaccagaggcggacagccatcccgtcatggtcagccaacagctcggtggcaggctccacaagttcttccctgtgtgaacactgggtgagccggctcccgggcagcaagccagccagcgtgacctctgcagcttcctccagacgcacctccctggcgtcgctctctgagtccgtggagatgactggagaaaggagtgaagatgatggaggcttttcaactcgaccatttgtgagaagtgtccagcgtcagagtttgtcatccagatcttctgtcaccagccccttggccgtcaatgaaaattgcatgagaccttcatggtccctgtctgctaagctgcagatgcgctccaattctccatcccgattttcaggggattcgccaattcacagctctgcttccaccttggagaagattggggaggcagcagatgacaaggtctccatctcttgctttggtagcttgcggaacctttctagcagttaccaggaaccaagcgacagtcatagtcgccgtgagcacaaggctgtgggccgggcccctctggctgtcatggaaggcgtgttcaaagacgaatcggacacccgcagattgaactccagtgtcgtagatacacagagcaaacattcagcacaaggggaccgcctgcccccgctctctggtccatttgataacaataatcagatcgcttatgtggatcagagcgactccgtagacagctctccagtcaaagaggtgaaagcccccagccacccaggctcactcgcaaagaaaccagagagcacaactaagagatcccccagttccaaaggcacttctgagccagagaaaagcttgcggaaggggagaccagccttggcaagccaggagtcatccctttcaagtacatccccttcttctcctcttcctgtaaaagtctctctaaagccctcccgctcccgcagcaaagcagattcttcttccaggggcagtggacggcattcatcccctgcccctgcccaacccaaaaaggagtcatccccgaaatctcaggactccgtgtcatctccttcgccacagaagcagaagtcagcctcggccctcacctacactgcttcctccacatctgccaaaaaggcctcgggccctgccacaaggagccctttcccacctgggaagagcaggacttcagaccacagcttgagtagagagggctccagacaaagcttgggttctgacagagccagcgccacctccacctccaaacccaattcccctcgggtgagccaggcccgagcaggggagggcaggggggccgggaagcacgtgcggagctcctccatggccagcctgcgctcccccagcacaagcatcaagtctggtttgaagagggacagcaagtctgaggacaaggggctgtccttcttcaaatcagccttgagacagaaggaaacccggcgctcgacggatcttggcaagacagccttgctctctaaaaaggctggtgggagctctgttaagtctgtctgtaagaacaccggggacgacgaggcagagagaggccaccagcctccagcttcccagcagccaaatgcaaatacaacgggaaaagagcagcttgtcaccaaggaccctgcttctgccaaacattccctgctgtccgctcgcaaatccaagtcttcccaactagactctggagttccctcgtctccgggtggcaggcagtctgcagagaaatcctcaaaaaagttatcttctagcatgcaaacctctgcacggccttctcaaaaacctcagtgatatttctgcaatcgaagtgttttatctgtaaagatgtttatttatttagaacccctgccctcccaccaaagcctcctgtgcttttgttttgtacttttttgagtcacgtgcccgactgtgtgtgtgtgtgtgagtgtatgcgtgtgtgtgtctaattcaattgcaaattgttcaaagcgtcgccttattctgccattgaaccaaataacagccataggcaaaacattgacaccaagctaactggaataattgtagacgatacccaggacggtccctttagcaattgtacatatttctttctagagaactctaatgactttctttggatatgagggttttgaaacctgtgaaccagaaaagctaccattagtgcgtagaaggaggaaggagctgactcgtgtttcttctgagcaggacttgtccttactgtggattgtgggtggcaccaggagctctaaaaactgtgactctaacaacgaaacaaatcgagggaaaaactcttgctttctgcactttcgccccatctaccagtctttgtaaagggcaatattttaacactaatgtttctcaggtatatactcagctagtctaggatggttgcacaccagtaaatggattaaagaggaaggtgccatgtgggtgactgtgtcatttctcctactgccacagatagacattttcgaggtagaaatgaagcctttcaccaccttcctatctgtggtgacatgtgcaccaaaacctgtcttgactcttgggataggtcctaggaagtggcagattggatagccagaaagccagtcactcgtttaattttttttccttctgaaattactagctaaggctcttggaattttgcactgtagtagagcagttaacacctttgacagattcctggaaaaaacttctagattctaaactgggtgaaagactggacatcattttccttgtcaggtgttgcatttttccgttagaggtgggaagctccacgatgccctgtgtctgtgggctcatgttccctcatcttgtagcttggagaggaaagaagttgccttctgccaaaagccaatggtggtatgttgaagcgttgtgtgatcaagtgttacatatgcacttcagatcctgtctgtcagtctctgttagggctgcctttcagtaactcatttattatttcttctttgttcttaagatttcatctcatgcccagaactcacaagcaggttttggagtgtgttccatctggccgtgtcagtgcaaattgcatttcttacaaaggagaacctcaccaaaaaaaacctcacagataagcaaagtatatagttttgcaagctttttcaaggtctcctggcaatactttcctgctcaatttttagcttttcttttttttttaaatgtcaagagagtgaaggtcttgattctctctgaatagcatttgtcactttgccagtaaatacagcatgctaagtttatgtgcttttaaatattagcgtttttcgtcagactcttcaagttcttcttgaacccttggtgcacagatccatatataacctcccttttcagtattgctgtgtgtgaattaactacaacacatatgcatgcatagctgtgaattctgcactactttttttttcttttttccccccaagaatatctcttgggaaaagtttttagtacgttacttaactttattttgctgctaatttgcgcattagccggtaacttgcaagtctggagaccacttactgttgagggtagctggaattttagacccttggcagtatttaagatttagacatttagccttgtgaaagttaccacagtgctccatgtgattcattgactgtgagcctgttgtccattgcactcagccctgtactcacttcttcactcgctgtcctggttttactgttcagattttggtgggttctcaaagcagtaccactctcatctgctcagtacatctgcggcaactggctgccttcgatgctgtcattgcgttcagcccagcacatcacagccccatcagtgtgtagccaccgctctcgtttttctgtatcgcttttatctcctgaaaaagatgcaccaaataagagatcatctatatcaggaattgaatgtctaactcaaacctctcatttttgtttaataggtagatctcatttgaagtctcctatctgaatctctgaaacaattatagtttgattagacaaaggtttttaataacacttcttttttgctgtagtcaagcattaatagaaactagtttaattttcacagtggtaaatatttttattcttgagttatctaggaatggattttccacgatgtctagtgacttaaaaaaaaaaaggaaaaacgtttctacaaatccctttggttttccatgggatctggaataaaatgtcagtgtctataaactgtatgtcatggagtttagtccttgtttcaggtttaatagaaaaaatcaggaagtatcatggcattgtctagacatcatgaagctattttatttccatagttggtaaacagtgaaaatttcattatctccaactactaggtacaactttaggccacaggaaaggttatttggcccgaaagtttggaggtgctccttgaggtgggaagtatcttgtgggaaagtagttacttgattcaatttagttcattggtagggttggggacttggtgttggtttctttctttcttttctttttttttttttttttaattttcccagcaatatttagcacaatgagcgtgtatgtgctttggggttaaaaattatctgctagggatgataggcctgggtttctcgttgacatctagatgggcctgattagagcagtcatctcctggtaggcacaaaataatcaccaacagtaatgttgtatctgtaatgtttgtttgctttttaaagttttattcttgatttcttgtaaacatccattgcactgaggccgtatcattccttaagacagccctacatcttgccttggtaatcccttagataatgtggaaactcaaaccgttaggctccagtcatcttagaccatttcccatccgttttgtattttctcgtcctgaaagcagctgaactgaaagtaagtaataatatgctggaccagtgggaacggatgtgggagtatttgtggtgtgctaaaatactgtaattatctgtgaggctgcctgacacgcttttgcaatcttgttttcatcattcattctgcaaacgtttatggagggccttctttgagcacagaggcaaaactgaaagcttcagggatttgctgtagctgaggagccctgggagcacagcccatcaagcaagggatgtgatggtgtcctaaatggagtgacagttctcctgggaaaagagatcacgtggattccggtcaaatcggctaaggcttgtggttctcttgagcaagtctgttccttctggaaaccaaaagtgcccttcatctttagagacattttactcttccatccaccttttcagactgagctgtctctactatttaggggttgaaaatccattacacagtcactttacgttaacattgggtcatcttatgtttgtatgagacggatgtgggatttgaggggaacattgtcattcccttaaaataactatcatgaaaaaaatagcaacagtatgtaaagggaccaagagtggcagcctttagggaaaatggagcagagaagagctgtgaacaaagctcatttatttgaaataagcgtgctttatttcacatagaggggcatcagacgttacatttcattcggacaaattactgaacagccgaagtgattgtttccaatgtaggttattataattattggatacaaagatttaactagtgtttctgggttggatttttgaaatagtatgcaagtcataagcacagtttcaataaaacacgtattctggaggtgcgtggaactttgtattatttgtagttgagaaaggcaaactttgctgacaaaccagtacctatcacaaacgaacacaaaaagtagctgttactgtgcaggctgtctttaactttcatttcataaagggtacattattgttaaactctactacatggtttggggagaaatccagtggttttatttaaatgaacactctcacactgccttttgatcaactttcaaagtattttgcagatgcattttgagcatgaccatttttttccccaagtaaaaacaattgtgcgtggcctccatataactcagaaagcatgctcttactacctatgcaagcaaacaataaaacatatagacatgaaatgttaagtcttaaaaaaaaaaggcaacaattatggagctctatttttaaatttgtgattttcaaaatatggcttactcatcattgtgtagaagagcatgaatgcgatttcttgttttgctctgcatatatttctctgctgtttttctgatcattggcgagattgtaaagtattttgcaagcagaagtggaat

SEQ ID NO: 461132 - DNA, 7526 bp, Homo sapiens
tggcccggcaggcttctgcattggttgctccgagtgctagagagccaggaggagagcgggatggaggaggtggagaggcaggggccaggtaggcagaggccgagtctgccttgtgtagctatagtgccttacagaccaagaaaaatgggtctgatggtgagtgaaaatgaatcaaatggaggagaaaataaatacagcgagaaaacaatcacaggaatgaaggtggttgtagcagaagggtacaaggtacaaggtagaatgggaggaggcccactgagtgatggtttgagcagggctggatctggaagtccttcggtgccatgttgcagaatggcattctgcagagaaatgtactatgatgggttccatcgttccttttgtgatacagacgacctggaaacagtccatgaaagcgactgcatttttgcctttgagactcccgaaatatttaggcctgaaggaattctcagtcaaagagggctcctcttcttttgctctaccccagtggttattaatgcatcagtattacctgggaactggttagaaatgcaaattcttggtccctactccacaccgagtaaaggagaaactctggtaaacaagccctttagagctcaaatgccatgctgggagaaccactgctctcttcaaagctgtcagacaaggacctttaagtctgcagaagctgtctgctgccttttgttcagctatgccctgcccacagaggtggagtctatagaggcagcaggccttgctgagctgtacagtctgtcacagcttcccttggctaggaaagggaaatcccccgaccccttgagcttcccgggaattcatttaaacaacaacctaaaccacttgaaatttggcttggattatcatagactgtcttctcctacacaaacagcagcaaagcaggggaaaatggattctcccacatcaagagcaggcagcgacaagattgtcctgttggtgtgtaaccgagcctgcactgggcaacaagggaaaagatttggactgccttttgtgctgcacttagagaagacaatagcttgggaccttctgcagaaggaaatcttggagaagatgaagtatttcttgaggcccacggtttgcattcaggtgtgtccattcagcttgcgtgtggtcagtgttgttggaataacatatttgctgccccaggaggagcagcccttgtgccacccaatagtagaaagggcattaaaatcttgtggaccaggtggcactgctcatgtgaaattagtagtcgagtgggacaaggagacaagagatttcttatttgtaaatactgaggatgagtatattcctgatgcagaaagtgttcgtctgcaaagggagcgtcatcatcagcctcaaacctgcactttatcccagtgtttccaactgtacaccaaagaggagcggcttgcccccgatgatgcctggcgttgcccacactgtaagcagctgcagcagggaagcattacgttaagcctctggactctgcctgatgtgcttattatacatctaaagagatttcggcaggaaggagacaggcgcatgaaacttcagaacatggtcaaattccccttgactggcctggacatgacacctcacgtggttaagaggagccagagcagctggagtttgccatcgcattggtccccgtggagacggccctatggactcgggagggaccctgaggactacatctatgacctgtatgctgtgtgcaatcaccatggcaccatgcaaggggggcactacacagcgtactgtaagaactctgtggacggcctctggtactgcttcgatgacagcgatgtgcagcagctgtcagaagatgaggtctgcacgcagacagcatacatcctcttctaccagaggcggacagccatcccgtcatggtcagccaacagctcggtggcaggctccacaagttcttccctgtgtgaacactgggtgagccggctcccgggcagcaagccagccagcgtgacctctgcagcttcctccagacgcacctccctggcgtcgctctctgagtccgtggagatgactggagaaaggagtgaagatgatggaggcttttcaactcgaccatttgtgagaagtgtccagcgtcagagtttgtcatccagatcttctgtcaccagccccttggccgtcaatgaaaattgcatgagaccttcatggtccctgtctgctaagctgcagatgcgctccaattctccatcccgattttcaggggattcgccaattcacagctctgcttccaccttggagaagattggggaggcagcagatgacaaggtctccatctcttgctttggtagcttgcggaacctttctagcagttaccaggaaccaagcgacagtcatagtcgccgtgagcacaaggctgtgggccgggcccctctggctgtcatggaaggcgtgttcaaagacgaatcggacacccgcagattgaactccagtgtcgtagatacacagagcaaacattcagcacaaggggaccgcctgcccccgctctctggtccatttgataacaataatcagatcgcttatgtggatcagagcgactccgtagacagctctccagtcaaagaggtgaaagcccccagccacccaggctcactcgcaaagaaaccagagagcacaactaagagatcccccagttccaaaggcacttctgagccagagaaaagcttgcggaaggggagaccagccttggcaagccaggagtcatccctttcaagtacatccccttcttctcctcttcctgtaaaagtctctctaaagccctcccgctcccgcagcaaagcagattcttcttccaggggcagtggacggcattcatcccctgcccctgcccaacccaaaaaggagtcatccccgaaatctcaggactccgtgtcatctccttcgccacagaagcagaagtcagcctcggccctcacctacactgcttcctccacatctgccaaaaaggcctcgggccctgccacaaggagccctttcccacctgggaagagcaggacttcagaccacagcttgagtagagagggctccagacaaagcttgggttctgacagagccagcgccacctccacctccaaacccaattcccctcgggtgagccaggcccgagcaggggagggcaggggggccgggaagcacgtgcggagctcctccatggccagcctgcgctcccccagcacaagcatcaagtctggtttgaagagggacagcaagtctgaggacaaggggctgtccttcttcaaatcagccttgagacagaaggaaacccggcgctcgacggatcttggcaagacagccttgctctctaaaaaggctggtgggagctctgttaagtctgtctgtaagaacaccggggacgacgaggcagagagaggccaccagcctccagcttcccagcagccaaatgcaaatacaacgggaaaagagcagcttgtcaccaaggaccctgcttctgccaaacattccctgctgtccgctcgcaaatccaagtcttcccaactagactctggagttccctcgtctccgggtggcaggcagtctgcagagaaatcctcaaaaaagttatcttctagcatgcaaacctctgcacggccttctcaaaaacctcagtgatatttctgcaatcgaagtgttttatctgtaaagatgtttatttatttagaacccctgccctcccaccaaagcctcctgtgcttttgttttgtacttttttgagtcacgtgcccgactgtgtgtgtgtgtgtgagtgtatgcgtgtgtgtgtctaattcaattgcaaattgttcaaagcgtcgccttattctgccattgaaccaaataacagccataggcaaaacattgacaccaagctaactggaataattgtagacgatacccaggacggtccctttagcaattgtacatatttctttctagagaactctaatgactttctttggatatgagggttttgaaacctgtgaaccagaaaagctaccattagtgcgtagaaggaggaaggagctgactcgtgtttcttctgagcaggacttgtccttactgtggattgtgggtggcaccaggagctctaaaaactgtgactctaacaacgaaacaaatcgagggaaaaactcttgctttctgcactttcgccccatctaccagtctttgtaaagggcaatattttaacactaatgtttctcaggtatatactcagctagtctaggatggttgcacaccagtaaatggattaaagaggaaggtgccatgtgggtgactgtgtcatttctcctactgccacagatagacattttcgaggtagaaatgaagcctttcaccaccttcctatctgtggtgacatgtgcaccaaaacctgtcttgactcttgggataggtcctaggaagtggcagattggatagccagaaagccagtcactcgtttaattttttttccttctgaaattactagctaaggctcttggaattttgcactgtagtagagcagttaacacctttgacagattcctggaaaaaacttctagattctaaactgggtgaaagactggacatcattttccttgtcaggtgttgcatttttccgttagaggtgggaagctccacgatgccctgtgtctgtgggctcatgttccctcatcttgtagcttggagaggaaagaagttgccttctgccttcagatcctgtctgtcagtctctgttagggctgcctttcagtaactcatttattatttcttctttgttcttaagatttcatctcatgcccagaactcacaagcaggttttggagtgtgttccatctggccgtgtcagtgcaaattgcatttcttacaaaggagaacctcaccaaaaaaaacctcacagataagcaaagtatatagttttgcaagctttttcaaggtctcctggcaatactttcctgctcaatttttagcttttcttttttttttaaatgtcaagagagtgaaggtcttgattctctctgaatagcatttgtcactttgccagtaaatacagcatgctaagtttatgtgcttttaaatattagcgtttttcgtcagactcttcaagttcttcttgaacccttggtgcacagatccatatataacctcccttttcagtattgctgtgtgtgaattaactacaacacatatgcatgcatagctgtgaattctgcactactttttttttcttttttccccccaagaatatctcttgggaaaagtttttagtacgttacttaactttattttgctgctaatttgcgcattagccggtaacttgcaagtctggagaccacttactgttgagggtagctggaattttagacccttggcagtatttaagatttagacatttagccttgtgaaagttaccacagtgctccatgtgattcattgactgtgagcctgttgtccattgcactcagccctgtactcacttcttcactcgctgtcctggttttactgttcagattttggtgggttctcaaagcagtaccactctcatctgctcagtacatctgcggcaactggctgccttcgatgctgtcattgcgttcagcccagcacatcacagccccatcagtgtgtagccaccgctctcgtttttctgtatcgcttttatctcctgaaaaagatgcaccaaataagagatcatctatatcaggaattgaatgtctaactcaaacctctcatttttgtttaataggtagatctcatttgaagtctcctatctgaatctctgaaacaattatagtttgattagacaaaggtttttaataacacttcttttttgctgtagtcaagcattaatagaaactagtttaattttcacagtggtaaatatttttattcttgagttatctaggaatggattttccacgatgtctagtgacttaaaaaaaaaaaggaaaaacgtttctacaaatccctttggttttccatgggatctggaataaaatgtcagtgtctataaactgtatgtcatggagtttagtccttgtttcaggtttaatagaaaaaatcaggaagtatcatggcattgtctagacatcatgaagctattttatttccatagttggtaaacagtgaaaatttcattatctccaactactaggtacaactttaggccacaggaaaggttatttggcccgaaagtttggaggtgctccttgaggtgggaagtatcttgtgggaaagtagttacttgattcaatttagttcattggtagggttggggacttggtgttggtttctttctttcttttctttttttttttttttttaattttcccagcaatatttagcacaatgagcgtgtatgtgctttggggttaaaaattatctgctagggatgataggcctgggtttctcgttgacatctagatgggcctgattagagcagtcatctcctggtaggcacaaaataatcaccaacagtaatgttgtatctgtaatgtttgtttgctttttaaagttttattcttgatttcttgtaaacatccattgcactgaggccgtatcattccttaagacagccctacatcttgccttggtaatcccttagataatgtggaaactcaaaccgttaggctccagtcatcttagaccatttcccatccgttttgtattttctcgtcctgaaagcagctgaactgaaagtaagtaataatatgctggaccagtgggaacggatgtgggagtatttgtggtgtgctaaaatactgtaattatctgtgaggctgcctgacacgcttttgcaatcttgttttcatcattcattctgcaaacgtttatggagggccttctttgagcacagaggcaaaactgaaagcttcagggatttgctgtagctgaggagccctgggagcacagcccatcaagcaagggatgtgatggtgtcctaaatggagtgacagttctcctgggaaaagagatcacgtggattccggtcaaatcggctaaggcttgtggttctcttgagcaagtctgttccttctggaaaccaaaagtgcccttcatctttagagacattttactcttccatccaccttttcagactgagctgtctctactatttaggggttgaaaatccattacacagtcactttacgttaacattgggtcatcttatgtttgtatgagacggatgtgggatttgaggggaacattgtcattcccttaaaataactatcatgaaaaaaatagcaacagtatgtaaagggaccaagagtggcagcctttagggaaaatggagcagagaagagctgtgaacaaagctcatttatttgaaataagcgtgctttatttcacatagaggggcatcagacgttacatttcattcggacaaattactgaacagccgaagtgattgtttccaatgtaggttattataattattggatacaaagatttaactagtgtttctgggttggatttttgaaatagtatgcaagtcataagcacagtttcaataaaacacgtattctgga

SEQ ID NO: 461133 - DNA, 1778 bp, Homo sapiens
ggaggctgagaagtcccaagatctacatttggcaagttggagacccaggagagtcgatgttgtgttccagtctgaaagcctgaagtcttgagacccagccaataattcagttcaagtctgaaggcaggaagagacaaattccaacacaagcaatcaggcaggaggagttccctcttacttgagggagggtcagcctttttgttctattctggccttaagctgattggatgatgcccacccaccttgaggagggccgtctgctttattcagtctactgattccaatgttaatcttgtccagaaacaccctcaaagacacacatattattaccagaataatgcttgaccaaatatctgggcaccctatgacccagtgaagttgacacataaaattaatcactgcaatatctttctgacatctatccatttttctgagtactcaaacacataacctaccatttgcattttgctttttcttggaggcctcctacccttagtcttccaccctcctactccagtctggactagttgtgttctaggctgggagcatagctagcatcctctattgtggtggcccctgtctaccacatcctgctttcttggttactgaaagcacatcctctaatagcttctcaagaaagggtgcgagggaagtattgttttagcttctgcatatctaaaatgtgttgattgcaccctagacttgacataattaaaccagttttggaaatcagtgttggaaatcatttgtttcttagagttctgaaggtattccaccattgtcttccagcattctgcttgtggtaagaccaatgccatcctgatgctctttgttttgtgtgtgattgaattttgcctctggatgcttttcaggtcttcggttgatttctggcattccgctcagttaccaggagtccctgtgaatgacacccacaggtccctcaaagaagtcagatttctcttggacctgataaagcaaacaaaatgtgacccaagcaggctgagttggacgggtcccttcttaccttcgccctctgccatgttgacattcttatctgatggcacaggctgggagttcaggatccacttagatggggtccgttcaggggataccagcgttcacatttttccttttaagaaagggtcttggcctgaatgttccccatccggacacaggctgcatgtctctgggcattctttcataatcagaaaaagaaatgtagaagcaccaaattgtatcatgagcattcacaaagatttcttgtgcctacttccacggatgtacaaggtctactcaacaaatgtggcctttgcctgccagcatctttggggccgtgggaaggattttgaaaatggtgtactctccatgtctgtgtctcaggtccagatcgtgagatctgccaaggtgggagatgccctttagatatgatgacagaaaagtgagccaagaattctgagtatgtatgacacgatgtttcaagcttgtattttaccagtcctagccctggaatcagccatttttccaaggagccctcgtccattttttttggagaatagtatttacaagccaaaatctggacaataaatgtacctgttgctcttgtggtgttgctgctcctagacccttgcagtcaaacagagctgggcaatgcgtcttatgtatttgtaactctcttctctggccatgagaaatctaggttccattatcttttatatttttactgtgtactccgtcaccctgaatgtaatcaatttcacatcaccactgtccccctgccc

SEQ ID NO: 461134 - DNA, 1015 bp, Homo sapiens
ctgacgcgatatgcctctcctgcgtgggcgctgtcctgcccgccgccactaccgccgcttggccctgctcggcctgcagcccgctccccgcttcgcccactcggggcccccgcgccagcggcccctgtctgccgcggaaatggctgttggacttgtggtgttttttacgaccttcttaacaccagctgcatatgtgctaggcaacctgaagcagttcagaaggaattagatggaagatgatgttgaacagctgttaacgtccaaaaaactttcagaaaaagctgtgtttttgttaacgagcaaaattgcctagttgagttgatgcaaccattgtggtattcactttcctcatgtttatgatgaatattttgcacttttttagtactgtgcattatatagatgtatagtcaaaaatgttctgcttaagtgttaaataaaacggaaacacttattcgtgcttggtaatatgtgtgcagattattttctaaacatcgtgaaagctgatgaaaatttaccgagaactgctgtgaaagatccctttgtactctgggctccaatctctgtttcctcacccacgagagactgtcaaaagcacttctcaggcacttcttccagaattgccgaatgcagggctctcttgatctctgtatttcaccagtgtctggcctggaaggaccccactacactaccaacaatttctgctgttcatctttttcccatccttccccacggagacatccagccttttaccagggtaactgtgcactggggaaagggaaatgatcagacattttggggattactggataccggatctgagctgatgttgattccaggggactcaaaacatcattgtggtcctccagttaaagtagggacttatggagaggtccctactccaccattttcaatgatgtcttctccataattattaagagcttggttgtgtagtagtacttcactagaaaaaaagtctggctgttctgttttacaagatataggtatattgaagcat

SEQ ID NO: 461135 - DNA, 1148 bp, Homo sapiens
agcttagcaaacaataaaaggtttggcttgtgagccaacaccatttgattgttgaaagaaagaaaaaaggaaggaagaaaggaggaagaggcaggcacaagacaaaatgaatctctccgctgtgcacatggagccttagctctgattccagttgagcaaaattatgaagaagatgattccccatatggatgacagataaacaccctgtggcgagtcactcactcccgaaaggccctctgaaggatcgcgcatgtcctgactgcacagcctgctcctccacggtcctttcaaagtcactgcctttggatgtaagtttctcagagagaatgagccttgtgtccaatgcctggaaagcaacagcatttggccaccaagttcctcttcatcctcatcaagcagcttttcctgttttgtttttagctccaaccttaggacaatggacaagtcaatcagtccagattaccctgcaccagggaagagaggcacctgacagctatacccttcaccaagtccacggggacaaaggcacaagagtaatagaagctgcagggagaatgcaattctcatcaacccttggggttgccgcattgtttttgctctgttttccagaaagtctttaacggaggagaaagggtgtggaggaagggagggccttgcctattagcagatatttcaatgcagtcatcaccctcccgccattcaatgtcagggatcagcccttgcaaaggagcagtcattggacaatgggcacaatcagggctctgggtttttctgtcctgctgcacattcgacccgccttcctctgctgaaaaggctgcttttccactaggcatgccctatgtatggaaaaaacttctacctctggtttgctttcgtttgtacccacccactgcaaactaaaattgcatgaagcagaggctaagatggttttcctagtacaacgaatatctgccaactctaaatagaaagacttagatcaatgatgactagttaattaagcaaacttgagaaaggggactattcatttattccttacctttcactgagcagtttagaggctttcattggaaatatcattaatcacctgaaatgccttgcaataataactggtatccccattttacagtttatcatgtactaggctctgc

SEQ ID NO: 461136 - DNA, 1108 bp, Homo sapiens
  misc_feature (24)..(24): n is a, c, g, or t
caggctggtactggcggggagtanggatggaaggaagaaaggaggaagaggcaggcacaagacaaaatgaatctctccgctgtgcacatggagccttagctctgattccagttgagcaaaattatgaagaagatgattccccatatggatgacagataaacaccctgtggcgagtcactcactcccgaaaggccctctgaaggatcgcgcatgtcctgactgcacagcctgctcctccacggtcctttcaaagtcactgcctttggatgtaagtttctcagagagaatgagccttgtgtccaatgcctggaaagcaacagcatttggccaccaagttcctcttcatcctcatcaagcagcttttcctgttttgtttttagctccaaccttaggacaatggacaagtcaatcagtccagattaccctgcaccagggaagagaggcacctgacagctatacccttcaccaagtccacggggacaaaggcacaagagtaatagaagctgcagggagaatgcaattctcatcaacccttggggttgccgcattgtttttgctctgttttccagaaagtctttaacggaggagaaagggtgtggaggaagggagggccttgcctattagcagatatttcaatgcagtcatcaccctcccgccattcaatgtcagggatcagcccttgcaaaggagcagtcattggacaatgggcacaatcagggctctgggtttttctgtcctgctgcacattcgacccgccttcctctgctgaaaaggctgcttttccactaggcatgccctatgtatggaaaaaacttctacctctggtttgctttcgtttgtacccacccactgcaaactaaaattgcatgaagcagaggctaagatggttttcctagtacaacgaatatctgccaactctaaatagaaagacttagatcaatgatgactagttaattaagcaaacttgagaaaggggactattcatttattccttacctttcactgagcagtttagaggctttcattggaaatatcattaatcacctgaaatgccttgcaataataactggtatccccattttacagtttatcatgtactaggctctgc

SEQ ID NO: 461137 - DNA, 861 bp, Homo sapiens
ctcctctcttgtctatctctctttaggagcaggacccgtggtaccattggccctggcaagtatggctatggctgcggaggcccccatctaccagctacctttgacccatgatcaaggctaccctgcagcttcaagtctctttcacagcccagaaacaagcaacaaccacggtgtggggacccatggggcaactcagagcttctctcagcctgcccgatctacagcaatctcatgcatcggggcctatcggcagtacaagctgtgcaacaccaacgtatgtccagaaagcagtagaagtatccgggaggtacagtgtgcatcctacaacaacaagccattcatgggccggttttatgagtgggaaccatttgcagaaggtaagaatagacccagccctgtccatagaagttactttagtctgttttccattcttgttgacttctgattgatgttggaggtattggtgtgatcctggctggggtgtcaataggggagaaagtgtgactccagggcaaagagaagcctgcatgggtctttaccaaaggtagcatagctcaggtgacgcctggaccatcttcggcatgagtcagatggatgaggcactgatggaaacaagcaacatccaaggatggcagggtgagggggacagaacagggttcaaggaatcagttggagaagaggttcaaacataaagttgtgagccccctatgcaaaccacaaagaaaactttgctaatgttttcatgtattacatgtgaatgcctgctgttgtctggcttatgtatgggtctactttttctgttatttttttcccctctgatttgtgctagactttaagacctggaagaacttattttttgaa

SEQ ID NO: 461138 - DNA, 1065 bp, Homo sapiens
  misc_feature (5)..(5): n is a, c, g, or t
  misc_feature (7)..(7): n is a, c, g, or t
  misc_feature (12)..(13): n is a, c, g, or t
tcccnantttgnngatagagagtggggtgtaggcaggcgttaagcaatttgtccaaggacacaacagcagaagactgaattccctgagcgccaaggtgcgaaaggacaaagtcatggcagccaggaacatcagggaaatgtctccaaggagaggtattgggccacatttaagctacggcctgaagactgagaagggccaagctgtgaccagtggggagaagagaagagaggagaccatggtgagcagaggtggcagtgtgttcagaagcccgggggaggaaggagagggctctgcacatcctgagaacagcaaggtggccagcgtgcctggggtgactaactccggctttgagagtaaatgcgaagtatatcaggtcaaattaagtctcagagtgaaaagtgagtttgtgttcgtgaatgccctggtgacaagagtctctttttccccgaagaaagagattcacgtatggctgaaatttcccggagaacacaggagggggggaaatattgcaataaatcaaatgtcttttggaaatgaaggtggctctgaaggaagatcaaaacaaaagccaaattcaccattcagataatgtacatttcacaactgaagcccactcagagatcaattttcaccacttaaagagcatttagccatgattccaggaatagaaaatgtatcctgagacccataatgacttgatgagagaataaaggatcatttgttatgcagcaagtataaaattataacaacatccccctatgtttacagatgaaggacattctggctcaggaagtggggaggattctccaactttctgacataaatgattggatgctgttctttcccactctgtttgttgtcttggaaacaaatataggatacattgtttaaaaaaatagctgtattgcctcagttggatcatatctgtttttcctcaggaatgtttctgaaactatgaacaatatggaacatgttgtcaataagggtattttcacagatgcgtttttgtcacacagtgtttattgccagagaagtatgattagtcatgttctctgatgtgattt

SEQ ID NO: 461139 - DNA, 1042 bp, Homo sapiens
  misc_feature (4)..(4): n is a, c, g, or t
  misc_feature (19)..(19): n is a, c, g, or t
  misc_feature (37)..(37): n is a, c, g, or t
  misc_feature (50)..(50): n is a, c, g, or t
  misc_feature (65)..(65): n is a, c, g, or t
tcanaagctgtttcccccngaattcaggggccagaanagttcagtccatngaaccccaagagganggaagttccacacagttacccccagaagaactgaaacccaggaagggaacatcttacaggagcagagatttacactgtttttcccagggctgccctgggtcttaaggcacaattccttctcccagaaaacccatctttgccctgaagaacttcaatggattcactgaagcccacccatatttttcaagagtgaaaagtgagtttgtgttcgtgaatgccctggtgacaagagtctctttttccccgaagaaagagattcacgtatggctgaaatttcccggagaacacaggagggggggaaatattgcaataaatcaaatgtcttttggaaatgaaggtggctctgaaggaagatcaaaacaaaagccactagaggcctcctgcatgccttggctcgtggccccttcttccatcttcaaagccagcattgcctgctgcaagtccagcttaaaggaaggaaagttctaataaattgaaaatgttaactctgtggactagacatcttcacgtgcttcgtgttcaacatgttataacttcaccataatacaaattaccatcatgagtttatttttgtatatggtgtaaggaagaggtccagttacagtcttctgcatatggctagtcagttatcccagtaccatttattgaatagggaatcctttccccattgcttatttttgtcaactttgtcgaagatcagatggttattggtgtgtggcattatttctgggccctctgttctgttccattggtctttgtgtctgtttttgtatcagtagtgccatgctgttttggttactgtagccttgtagtatagtttgaagttgggtaacttgatggttagaatgttctatttgcttaggattgccttgactattcaggctcttttttggttctatatgaatttaaaaatagtgttttttaattcctatggtgggaagaaagtgtggataaaaaactgcctatcagatgctatg

SEQ ID NO: 461140 - DNA, 927 bp, Homo sapiens
  misc_feature (4)..(4): n is a, c, g, or t
  misc_feature (19)..(19): n is a, c, g, or t
  misc_feature (37)..(37): n is a, c, g, or t
  misc_feature (50)..(50): n is a, c, g, or t
  misc_feature (65)..(65): n is a, c, g, or t
tcanaagctgtttcccccngaattcaggggccagaanagttcagtccatngaaccccaagagganggaagttccacacagttacccccagaagaactgaaacccaggaagggaacatcttacaggagcagagatttacactgtttttcccagggctgccctgggtcttaaggcacaattccttctcccagaaaacccatctttgccctgaagaacttcaatggattcactgaagcccacccatatttttcaagagtgaaaagtgagtttgtgttcgtgaatgccctggtgacaagagtctctttttccccgaagaaagagattcacgtatggctgaaatttcccggagaacacaggagggggggaaatattgcaataaatcaaatgtcttttggaaatgaaggtggctctgaaggaagatcaaaacaaaagccaaattcaccattcagataatgtacatttcacaactgaagcccactcagagatcaattttcaccacttaaagagcatttagccatgattccaggaatagaaaatgtatcctgagacccataatgacttgatgagagaataaaggatcatttgttatgcagcaagtataaaattataacaacatccccctatgtttacagatgaaggacattctggctcaggaagtggggaggattctccaactttctgacataaatgattggatgctgttctttcccactctgtttgttgtcttggaaacaaatataggatacattgtttaaaaaaatagctgtattgcctcagttggatcatatctgtttttcctcaggaatgtttctgaaactatgaacaatatggaacatgttgtcaataagggtattttcacagatgcgtttttgtcacacagtgtttattgccagagaagtatgattagtcatgttctctgatgtgattt

SEQ ID NO: 461141 - DNA, 1567 bp, Homo sapiens
aagctctaccgcctgtgtggtgctgggtgtgagtcggagctagcctgggtttacctgagttgcagggtcacccctcatcgcacccttgtcagtcctcaaataggggtgcaactgttccatgaaagggaacaaagagactgagctactagacaccaagctgtttaggactgaacccattcctgtccaaacggaagtgatccagagggactctgaatattacagaagtcaagagatttcatcatctttattcaaagaaaggggtttgtttgttgattttttggattttttttttggaccacagctctatctactccctgaagagtaaggattattaagtaaatcagatggaaaaagaatcgcaaataagcataatgtgaagagcatgagctttggaataagcaagcctggaattacaattttcttttattagctctgtggctgtaatactcaacttttgcaagcttcagtttcctcgtctgtgaaatggaataatagcacttacctcattggctgttgtatggattaaatgagaccatgactatggatgtatggcatttggtacccaataacccctcaataatcggcagctataattattcataataataatggtggtagcaacaaacccagcccaaacatctgaaggaccgatcactaaaaagaagatgaactcagtcctacgtagtaacaagaatgtgacatctatgttgttgccaaaagtctggaggagttgccaggaccagagagaaggaggtggtgaggccggcctggaagagggaggggacagatgtcaaggaccccaatcttgaggtggaaagttctgtgattaacccagatgaatgtctctaacctccaactcttctgttctcagagttttaatggggcacaccgtgtgctgggcattgacatagatgggaaaagcatgacctaaaataagggctggaagccaagactgggaggaagggcaaagggagcaggcagcctggcaccaggaccctgtggcacacggggtgccctgcaagtcagcctgaggaaaaacacacaccgccccagctctgatttccggaggggccgggggcgacgcgaagcaggcaccagctcctaccacagcagcttaatgcgagtgccccgtgtgctgctggaccccaagggacagggttggcaggcagcacttcagtgcttcattagacagaccatgcacagcacttggtccagcccagtggcccaccaggggcatatgggtgtccagggcccgagcgacgggtgcagacaagttgcaagggtgggttttcttctcttactttctgacccaagccagaaagaagcgatttcactgcagctggttccaaattggagctctcaaaatatttattctgttgctgcagcagttgagctgcacagacctgtccctggaacattcagcagacagatccggcccgtggagaattcagggcattctgggctccacacacattttagaacaaaaggaaaggagcatggtattagggaagcgggagcctaggagagccagagtgccgccattttaaaatcagcttcatcttaaaac

SEQ ID NO: 461142 - DNA, 370 bp, Homo sapiens
ggtaccccgtactgactacgcggctcgatctgattacgcggctctgggtccagtgtagcctggctctgagagaaggtggtgagcatgtggagaaggttccatagtccactcttaggggaaccagcaaagcctcatggcagttggctccatctggacctcccatggtcactacaggatggtggagcagggggcatcttttagcctccccccgccaccacatccaggccctctcaggcacctcctgcctcagcccacacctgcctcacccattgccaaacctctaaaattgtaaacatgactcttagctggagggccacctgtggggcaggagtgtgccatgatttggcccatactttgtttggatttactt

SEQ ID NO: 461143 - DNA, 235 bp, Homo sapiens
ggatttgctggtgcagtacaactaggcttaatagggacatgcccacctgcctgaccctccactgcccctggaagcaaagtgcctatcagcagcgttgcgtcctctggggcccccggtcgggggggagggggtgtgggctaaccttggccaccaccacaaaaggaatgtgccagaatgctgaaccttcttgttaatgctatgaccgtgccttgaataaacaagtcctcccaacctc

SEQ ID NO: 461144 - DNA, 4966 bp, Homo sapiens
gacaggcgcgatgtgggatgtggagggcacatcagaagtaaaggactgtgtgagccagtttgttgcagagatgatggtggccacgctggctcctgaggcacgtccttgtctgtgtgtctcttccagggacgaggatctgattaacaagtgtggggacgacgcgcgcatctacatcgtgttccagtaccacctcatcatctttgtgctcatcatctgtatcccctccctgggcatcattttgcccatcaactatactggatctgttctggactggagcagtcactttgctcggaccaccattgtcaatgtctccacagagagcaagctcctgtggctgcatagcctgctgtccttcttctacttcatcaccaacttcatgttcatggctcatcactgcctggggtttgcgcccaggaatagccaaaaggtcacaaggacactaatgatcacctatgtgcccaaggacattgaagacccagaactcatcattaagcattttcacgaggcctatccaggcagtgtcgtgacaagagtccacttctgctacgacgtcaggaacctgatcgacttggacgatcagaggcgccatgccatgcggggccggcttttctatacagccaaggccaagaagactgggaaggtgatgatcaggatccacccctgtgcccgcctgtgcttctgcaagtgctggacctgcttcaaggaggtggatgcagagcagtattacagcgagctagaggagcagctaacggacgagttcaacgccgagctcaaccgcgtgccgctcaagcggctggacctgatctttgtcaccttccaggactccaggatggccaagcgtgtccgtaaggattacaagtatgtccagtgtggtgtgcaaccccagcagtcctcagtgaccaccatcgtcaaatcatattactggagggtcactatggccccacaccccaaagacattatttggaaacacctgtctgtccgccgcttcttttggtgggcccgctttatcgcaatcaacaccttcctcttcttcctcttcttctttctcaccacgcctgccatcatcatgaacactatcgacatgtacaacgtcacccgccccatcgagaagctgcagaacccaattgtgacccagttcttcccctctgtgatgctctggggcttcacagtgatactgcctctgattgtctacttctccgccttcctcgaggcccactggaccagatcaagtcagaatctggtcatggtgcacaagtgctacatctttctggtgttcatggtagtcattctgccctctatgggactgaccagtttggatgtctttctccgctggctctttgacatctactatctagagcaagcatccatcaggttccagtgtgtgttcctgccagacaacggcgccttctttgtcaactacgtgatcacggcagctttacttggcacaggcatggagctgctgcgtctggggtcactcttctgctacagcacccgcctcttcttctctagatcagagccagagagagtcaacatcagaaagaaccaggccatagacttccagtttgggcgtgagtatgcgtggatgatgaacgtgttcagcgtggtgatggcgtacagcatcacttgccccatcattgtgccttttgggttgctctacctgtgcatgaagcacttgacggatcgctataacatgtactactcctttgcacccaccaaactgaacgagcagatccacatggctgccgtctcccaggccatctttgcgccactcttgggtctgttctggatgctgttcttctccatcctgcggttgggttctctccacgccatcaccatcttttccctgtccaccctcctcattgccatggtgattgcctttgttggcatttttctggggaagcttcggatggttgccgactacgagcccgaggaggaggagatccagacagtgtttgacatggagccaagcagcacctcctccacgcccacctccctcctgtatgtggccaccgtgctgcaagaaccggagttgaatctgacccccgcctcctccccagccaggcacacctatggcaccatgaacaaccagccggaagagggagaagaagagagtggtctgaggggctttgcgagggagctagactcggcccagttccaggaagggctggaactggagggccagaaccagtaccactgaccgggacctgaggcctccactggcgacttgttgaggggtcaggggagggcctggcaaggggaggcaggagggtggcctggacctccccactacctcctgcagactttgagaagcccacagtggagacatccaccaccccagccatgggccatacgggggtcctgacctgctgcccggctggaactggggctgctcggcagtgctgaaggagcctgggaagggatgggaggatacaggcaagcacatgtcttgagagaggtggctggagccccggcacagagactgaacgctggggtcccttcctgggaccaagatggagaaggtgttcctaagggaggagacagaaggaggctgccgaaggctctgtggggtcatcaccactctgcatcagctgcccttaaaaggagcttctgctgctgctcctcctcccagccccggcccattcctcccctgcagtctgaggaggcaaaggtatgtgcacggggcacattgacaggacacggaggaccacctcatcacagggttccctgcatggggatctgtaaagagaaagtttctgcacccaccagagcaagagccaactgaaagcgtagacctgagaagaggtaactcagccccttcctgctcctctgccctcatcagatgtccccaggagcagcagggcagaggcccttctttctattcttacaagggtagctagagcgtgatcactcagggctcatcaaatgagactcgtgtgcatttttcagaaggaaaccttggttagtccttgctgggtaacacaaagtggggtgagacgacagaagccgaattcatggaaggggggtcttctccccaaaactctgtgtggtgggaaaccagctatacctccccaagccccagggcctaaagagaagaccccctaagccaaagatgtggccacttaaaagcgtctcctgcctcctacccaactgagtgcctgggcccccagcttggccaagatgggcagtacgttagggtaagaaccccatgcttcaaacttaaggactgaccatcacctgcgtcccaagtaggacccttcctcccttctcggggctgcccctgcaccctgccttgaagaccacccaagcggcctccagtgtgggcctggtccagacattgcagatgcttcaaccgtgatgtcgccccaggcctgccaggggtgtggtggaggggaaggccacgtgctccagggagaagccctttctggagaagcaaggctgtcctcccagggctgccactaccagagacctgggggagctgaattccgaacagtgatggtgacactcagcacctttgccacagccggggggaaccggcttctgcctctgggatgggctctcatcaggaccaccgtgcagcccagccagggaggacatgagaagggccagtgggggcctcaatgaaccagaacaagccaagctgaatggggtctgtgtgctccagggccctcttcagccccctcccccaaaggtctgggtccctgccaccaacctactgaaggccggcccccggctcacctcacctgagcacctgcaccaggccccaggcacatggctgccctgaactcagatcacctagaccttgtccctgccccacctttgccccatcctagccccagaagctccaagcttcaccgcaggtgagaaattgtgctcaatgggcagaaactgctatacccccagggcatggcccacattttggcatgagggtgtctttccagagagcttgggttggctggagagaggctgtctttcccattccttgtccagctaggaataaaggggaaatggtcctagcctggcccctacacacccaggtcccacaggccccctccccactggaatttcaccaaccaacaaggggaaagtacgctgttacagcatagcggtcaggcccagcaggagcttggcacatgatggggaggtggccagctccaggccctgcccgaccccatcatgtgtatttggtgtatggggtgtggggggtcacaccagaagctggcctggggtctcttctttgctggacacagctccctggcccctgcccccagcccctgcagcccctgccggactgtggaagccacatatgggaaaagtcctggcagacaatgtggcgggatgactgggggcttctccctctgaacctgggtccagtgtagcctggctctgagagaaggtggtgagcatgtggagaaggttccatagtccactcttaggggaaccagcaaagcctcatggcagttggctccatctggacctcccatggtcactacaggatggtggagcagggggcatcttttagcctccccccgccaccacatccaggccctctcaggcacctcctgcctcagcccacacctgcctcacccattgcccccctccccccacctactgccatcccactcctctgccagccacttcccagccgccccaccccactccatccaccaaatcacctcctgacttaatcctttctggaaggagctgccgcccaggaaccggtattgcctagagcctccaggaggggccctcctcaggcctccagtggccccatgcccacctgcctgaccctccactgcccctggaagcaaagtgcctatcagcagcgttgcgtcctctggggcccccggtcgggggggagggggtgtgggctaaccttggccaccaccacaaaaggaatgtgccagaatgctgaaccttcttgttaatgctatgaccgtgccttgaataaacaagtcctcccaacctc

SEQ ID NO: 461145 - DNA, 613 bp, Homo sapiens
agcagggggcatcttttagcctccccccgctccaccatcctgtagtgaccaggggaggtccagatggagccaactggcatgaggctttgctggttcccctaagagtggactatggaaccttctcccatggtcactacaggatggtggagcagggggcatcttttagcctccccccgccaccacatccaggccctctcaggcacctcctgcctcagcccacacctgcctcacccattgcccccctccccccacctactgccatcccactcctctgccagccacttcccagccgccccaccccactccatccaccaaatcacctcctgacttaatcctttctggaaggagctgccgcccaggaaccggtattgcctagagcctccaggaggggccctcctcaggcctccagtggccccatgcccacctgcctgaccctccactgcccctggaagcaaagtgcctatcagcagcgttgcgtcctctggggcccccggtcgggggggagggggtgtgggctaaccttggccaccaccacaaaaggaatgtgccagaatgctgaaccttcttgttaatgctatgaccgtgccttgaataaacaagtcctcccaacctc

SEQ ID NO: 461146 - DNA, 6029 bp, Homo sapiens
gacaggcgcgatgtgggatgtggagggcacatcagaagtaaaggactgtgtgagccagtttgttgcagagatgatggtggccacgctggctcctgaggcacgtccttgtctgtgtgtctcttccagggacgaggatctgattaacaagtgtggggacgacgcgcgcatctacatcgtgttccagtaccacctcatcatctttgtgctcatcatctgtatcccctccctgggcatcattttgcccatcaactatactggatctgttctggactggagcagtcactttgctcggaccaccattgtcaatgtctccacagagagcaagctcctgtggctgcatagcctgctgtccttcttctacttcatcaccaacttcatgttcatggctcatcactgcctggggtttgcgcccaggaatagccaaaaggtcacaaggacactaatgatcacctatgtgcccaaggacattgaagacccagaactcatcattaagcattttcacgaggcctatccaggcagtgtcgtgacaagagtccacttctgctacgacgtcaggaacctgatcgacttggacgatcagaggcgccatgccatgcggggccggcttttctatacagccaaggccaagaagactgggaaggtgatgatcaggatccacccctgtgcccgcctgtgcttctgcaagtgctggacctgcttcaaggaggtggatgcagagcagtattacagcgagctagaggagcagctaacggacgagttcaacgccgagctcaaccgcgtgccgctcaagcggctggacctgatctttgtcaccttccaggactccaggatggccaagcgtgtccgtaaggattacaagtatgtccagtgtggtgtgcaaccccagcagtcctcagtgaccaccatcgtcaaatcatattactggagggtcactatggccccacaccccaaagacattatttggaaacacctgtctgtccgccgcttcttttggtgggcccgctttatcgcaatcaacaccttcctcttcttcctcttcttctttctcaccacgcctgccatcatcatgaacactatcgacatgtacaacgtcacccgccccatcgagaagctgcagaacccaattgtgacccagttcttcccctctgtgatgctctggggcttcacagtgatactgcctctgattgtctacttctccgccttcctcgaggcccactggaccagatcaagtcagaatctggtcatggtgcacaagtgctacatctttctggtgttcatggtagtcattctgccctctatgggactgaccagtttggatgtctttctccgctggctctttgacatctactatctagagcaagcatccatcaggttccagtgtgtgttcctgccagacaacggcgccttctttgtcaactacgtgatcacggcagctttacttggcacaggcatggagctgctgcgtctggggtcactcttctgctacagcacccgcctcttcttctctagatcagagccagagagagtcaacatcagaaagaaccaggccatagacttccagtttgggcgtgagtatgcgtggatgatgaacgtgttcagcgtggtgatggcgtacagcatcacttgccccatcattgtgccttttgggttgctctacctgtgcatgaagcacttgacggatcgctataacatgtactactcctttgcacccaccaaactgaacgagcagatccacatggctgccgtctcccaggccatctttgcgccactcttgggtctgttctggatgctgttcttctccatcctgcggttgggttctctccacgccatcaccatcttttccctgtccaccctcctcattgccatggtgattgcctttgttggcatttttctggggaagcttcggatggttgccgactacgagcccgaggaggaggagatccagacagtgtttgacatggagccaagcagcacctcctccacgcccacctccctcctgtatgtggccaccgtgctgcaagaaccggagttgaatctgacccccgcctcctccccagccaggcacacctatggcaccatgaacaaccagccggaagagggagaagaagagagtggtctgaggggctttgcgagggagctagactcggcccagttccaggaagggctggaactggagggccagaaccagtaccactgaccgggacctgaggcctccactggcgacttgttgaggggtcaggggagggcctggcaaggggaggcaggagggtggcctggacctccccactacctcctgcagactttgagaagcccacagtggagacatccaccaccccagccatgggccatacgggggtcctgacctgctgcccggctggaactggggctgctcggcagtgctgaaggagcctgggaagggatgggaggatacaggcaagcacatgtcttgagagaggtggctggagccccggcacagagactgaacgctggggtcccttcctgggaccaagatggagaaggtgttcctaagggaggagacagaaggaggctgccgaaggctctgtggggtcatcaccactctgcatcagctgcccttaaaaggagcttctgctgctgctcctcctcccagccccggcccattcctcccctgcagtctgaggaggcaaaggtatgtgcacggggcacattgacaggacacggaggaccacctcatcacagggttccctgcatggggatctgtaaagagaaagtttctgcacccaccagagcaagagccaactgaaagcgtagacctgagaagaggtaactcagccccttcctgctcctctgccctcatcagatgtccccaggagcagcagggcagaggcccttctttctattcttacaagggtagctagagcgtgatcactcagggctcatcaaatgagactcgtgtgcatttttcagaaggaaaccttggttagtccttgctgggtaacacaaagtggggtgagacgacagaagccgaattcatggaaggggggtcttctccccaaaactctgtgtggtgggaaaccagctatacctccccaagccccagggcctaaagagaagaccccctaagccaaagatgtggccacttaaaagcgtctcctgcctcctacccaactgagtgcctgggcccccagcttggccaagatgggcagtacgttagggtaagaaccccatgcttcaaacttaaggactgaccatcacctgcgtcccaagtaggacccttcctcccttctcggggctgcccctgcaccctgccttgaagaccacccaagcggcctccagtgtgggcctggtccagacattgcagatgcttcaaccgtgatgtcgccccaggcctgccaggggtgtggtggaggggaaggccacgtgctccagggagaagccctttctggagaagcaaggctgtcctcccagggctgccactaccagagacctgggggagctgaattccgaacagtgatggtgacactcagcacctttgccacagccggggggaaccggcttctgcctctgggatgggctctcatcaggaccaccgtgcagcccagccagggaggacatgagaagggccagtgggggcctcaatgaaccagaacaagccaagctgaatggggtctgtgtgctccagggccctcttcagccccctcccccaaaggtctgggtccctgccaccaacctactgaaggccggcccccggctcacctcacctgagcacctgcaccaggccccaggcacatggctgccctgaactcagatcacctagaccttgtccctgccccacctttgccccatcctagccccagaagctccaagcttcaccgcaggtgagaaattgtgctcaatgggcagaaactgctatacccccagggcatggcccacattttggcatgagggtgtctttccagagagcttgggttggctggagagaggctgtctttcccattccttgtccagctaggaataaaggggaaatggtcctagcctggcccctacacacccaggtcccacaggccccctccccactggaatttcaccaaccaacaaggggaaagtacgctgttacagcatagcggtcaggcccagcaggagcttggcacatgatggggaggtggccagctccaggccctgcccgaccccatcatgtgtatttggtgtatggggtgtggggggtcacaccagaagctggcctggggtctcttctttgctggacacagctccctggcccctgcccccagcccctgcagcccctgccggactgtggaagccacatatgggaaaagtcctggcagacaatgtggcgggatgactgggggcttctccctctgaacctgggtccagtgtagcctggctctgagagaaggtggtgagcatgtggagaaggttccatagtccactcttaggggaaccagcaaagcctcatggcagttggctccatctggacctcccatggtcactacaggatggtggagcagggggcatcttttagcctccccccgccaccacatccaggccctctcaggcacctcctgcctcagcccacacctgcctcacccattgcccccctccccccacctactgccatcccactcctctgccagccacttcccagccgccccaccccactccatccaccaaatcacctcctgacttaatcctttctggaaggagctgccgcccaggaaccggtattgcctagagcctccaggaggggccctcctcaggcctccagtggccccatgcccacctgcctgaccctccactgcccctggaagcaaagtgcctatcagcagcgttgcgtcctctggggcccccggtcgggggggagggggtgtgggctaaccttggccaccaccacaaaaggaatgtgccagaatgctgaaccttcttgttaatgctatgaccgtgccttgaataaacaagtcctcccaacctctcctggcccctgcctctctgcctgtgcatctgggccagcctggccttgctccgctgtgcagtggagagaactttctggtccttgagctacccaggaagccagcagggcagccccgaggagcagcagaagtctctggtgagtgctgagccccatgagcaggccactgggctaggctagtggccagacttcaaaacacacagatttcaggtgaggccccaggaagagcggcagacagggctcaggtctgcaagaggatgagggtgggggacttgggggatgggggaggtggaggagaggttgggtggaggagaggttggcacgagggaagtgtgtggggcagccaggtgggataagaaacacccgttagcaaaggctgttataactgtggcaaggagacaacagttccctgccctggcggacacatctcagggtcaggagactggttctgtcccttcctccagcagctgcatgacccaggctggtcacctcatccagacagtagggctgggaggacatgaggcggactgttctgcttcgtgactgagcagagcagatttgagggcagaagatgggaatcttgtgggtgtgttgagtagggggagacttcctcccgcagtgctccctatggggacagaggatgacagtctcagggtggctgcctaaggactctttcctgcgtcatcctcgctgggtcctctccgcaaacttctacggtccatccgtggccactgactcaaagtctaccaaggtgtgggcctgggcgtgggatcaagacccgtccacttgtcccctctccccctcaaaacaattattttccaagtcaagtcagcccttaaaatccacaagggctgcttcgcaggagagaagccatgaagactccctgactggacgggacggggctgcgccctgctgctgcctctcatggtcccctcccaggggccggcagctccagggtccccagatggcaggcctgggacactctgtggttcagcagacctttcgagggccttttatcaggcagagactgagaaagagacagaaaaacaagccgaagagggagggc

SEQ ID NO: 461147 - DNA, 1356 bp, Homo sapiens
gcagagccgaggggccggccagcacctggccctgaccacccccaggccacgcattccttgttacttcacctcctggcggatggcaaccgtcccagcttcgtggactgtcagggtcaccgagagtccagggtggtgggagtcccccacacgagccactggcacactccctgaagcagaagccacggcgccaaggctgtgggctcagggaacttgcccattacctggcagccccgcatctgtgccaaaataagacacaactcagcccagcggagtggacagtgtctgcggccagctctgggatccagggccagctgatgctgggaacagccgtccttgccctgtgcctctccacactgcgagagcccctgcagcccagaggggctccacctcccctgcaatggggctcaaaagacaatccttctacggggctggcaggacagacgtgacaggaacaacgatggcctgctcctcccggaaggtggcttcaagagcactcaggaggtgacagatgctgtcaagaccggcccagggaaggcacagggcaggtttcccagcacccaccacgcgccagcgagcacagagccttcgcctgaaccatccaggcaccgcgccctccccctccgcacacacaggagcccagctgcgattccctctgctccacaggagatgcagcgagcaccaaagagccttcctccaggatcaagcctgatgcagaagtggttacactgactacggcaagcctcctcaacgtgaaaacccggaggacgaaagccattcgtggagacccgctgctgctgcgcgaggcttaagtctattttctcctcatgatctcagtattttcacctgagccctgccggctgttgtgcgctccgtggaaagggagaagcacggtctccagcggctgcgtcaggagtggtgccttgtgcacacctcacagggagagaagtctccaacggactgagcggaggcaaaaagaaaaaacgagaaaaggaaaaagagctgcatacctggcaggcctactgtgtgcaaagcccttgagtgacacaccctatgacccacagcactgtggcaatcccagcaccgagagcgcgttcagcattactggcctctgctttgcccctcagacacatgcttggtcactgggctgtggaacatacaggagccccgtgctccggaacacggaccacccgacaggagcacggacacagcagtcggggcgacgtgggtgcctcacagaagagggaaaaagccaggagggcggcacgtgggcgcaaagttctcagcttcgttagtcatcaagaaaatgcaaactaaaaccaaggggtcttggcctcctagaggaaggagggccccatc

SEQ ID NO: 461148 - DNA, 1146 bp, Homo sapiens
gcagagccgaggggccggccagcacctggccctgaccacccccaggccacgcattccttgttacttcacctcctggcggatggcaaccgtcccagcttcgtggactgtcagggtcaccgagagtccagggtggtgggagtcccccacacgagccactggcacactccctgaagcagaagccacggcgccaaggctgtgggctcagggaacttgcccattacctggcagccccgcatctgtgccaaaataagacacaactcagcccagcggagtggacagtgtctgcggccagctctgggatccagggccagctgatgctgggaacagccgtccttgccctgtgcctctccacactgcgagagcccctgcagcccagaggggctccacctcccctgcaatggggctcaaaagacaatccttctacggggctggcaggacagacgtgacaggaacaacgatggcctgctcctcccggaaggtggcttcaagagcactcaggaggtgacagatgctgtcaagaccggcccagggaaggcacagggcaggtttcccagcacccaccacgcgccagcgagcacagagccttcgcctgaaccatccaggcaccgcgccctccccctccgcacacacaggagcccagctgcgattccctctgctccacaggagatgcagcgagcaccaaagagccttcctccaggatcaagcctgatgcagaagtggttacactgactacggcaagcctcctcaacgtgaaaacccggaggacgaaagccattcgtggagacccgctgctgctgcgcgaggcttaagtctattttctcctcatgatctcagtattttcacctgagccctgccggctgttgtgcgctccgtggaaagggagaagcacggtctccagcggctgcgtcaggagtggtgccttgtgcacacctcacagggagagaagtctccaacggactgagcggaggcaaaaagaaaaaacgagaaaaggaaaaagagctgcatacctggcaggcctactgtgtgcaaagcccttgagtgacacaccctatgacccacagcactgtggcaatcccagggccgcaccagctctctctccttcccctcctcagggccacaccaactgtggggttccagctatcactc

SEQ ID NO: 461149 - DNA, 1551 bp, Homo sapiens
  misc_feature (1)..(1): n is a, c, g, or t
  misc_feature (4)..(5): n is a, c, g, or t
  misc_feature (9)..(11): n is a, c, g, or t
nttnnattnnnacagagctgcctgcaacttgagatgcaaactccaacactcttaatctctgggcacagctgctgtgagcacacagtccctgggactcatatcttgccctgctcctggcctgatgacaagactgggaggaactgtgggcaggtaaggccaaagggaacctcagaccaatatttctctggagggcagagggacaaacagaatccagaggttgggatctaccttggggacaatgtctcagagtccaatggttgcaatgagatgtgttgtgagtcagagctagggagggaaacagcaggcacaggggatgttgaaagttttctggtgaaaaatgattccattggaaattttatatcagaacaagttgaagggaaactcgagggcccggagagaacaactgggctggcagccacggcggggagaagaaaaggaaacacacgatcataaagaactaatcatgaaaaatggaaaataatactttacaaattaaatgttgttggtcttttatttgggggatgccttattagctttttaaaaattagtttttaatagcagcatttgtttaagaaggaagaaaaaatgcttggtggtaccttctggaaggtacattaatcttgttaatgacaccacagttcatggttggcaaaacaggacttttgaatcaacctgtattgtgtgtgtgaatgtgtatgtgcttgagaaagaaggccagggcactaaagatacatgagaagtgcatgaagacaggatgcaggatttcctatgattttatgttgttcttaattaggaagcatattggcagcaaatgctaacatgtgttaggatgtttagctgaagccaaataaatgttttctattacaactctgaattccatgcctggtcggaacccgtgcttttctgctcatggcttacaaaatcccgttaaaagtcatctcaagggccaattttctgttggctcacagagcaaaatgactttcaccacatgttttcctgaagggttatctacaactccgggtggaagtcaaagattggaagaggatgacctctgatcctggaactgcattgcttggtggtcaggaggggttcttagtaagcaaactcagtttaatcccagagtcggaagtgggtgtcaacaagccaaagcaacatcctttcagctctgctgcttttttgtcttggtggaggaatagccaatggaagaagatggagagtccggaccaaaaaaaaaaaaaaaagatgagactaatcttatgctcaatatggaagataatcataactcatcactctggattataactgcttacatatgtctttcttatgagataatgcaccttgaaggcgcagaaggaacacaaagacaaagacaaatggttcttgggtcctgccctcaaggcacttacagtccagtttcagttttagaagttcaaccaagaacatggctaatggctggtagagattgtactgactattataccacttctcctaaaatattattttggttgaaataataaaatgtagattctaaacaaaataaaataatatttt

SEQ ID NO: 461150 - DNA, 2266 bp, Homo sapiens
taaacacctgctaaagaaatgtgaaaagagtggaaacgtgctatttggaggttattttcctagtcgacatccaggagatctccagagatctatttcagccccacctgttgatttcatcatgaaaaggaggaagctcaaactgaagtgagttaaaaacttcatctcctagagaggactgtggctcggcctgagttgagtttttttatgtttatgtgcaagcgcaatgaagaagaacaccagcaagactaccatgaggatcaataagcaagatgctctctgcaccccacactcccatgatccgagagatcttcaaaatatgttggatggaggagagtatgccccttttgtatctcctcccatgttagagagcaattttatccaggtcaacagaagaggtgaatccatttaccttcataaccgagccaactgggtgaccgtaggcatctgtttttccagctccacccacaagatccccaatgtgatgctactggcccatctgacacctggtgcccaaaaagatacagaaaccctgtttaaaagtctcctgacatctcctcctgcagagaaactagtgctcaccaggtttctccctctgcagtttgtgactctttctgtgcatgatgcggagaacatgagcctgaaagtaaagctggtgagtggtcgagcctactacttacagctctgcacctctgcatataaacaggacaccttgttttctcaatgggtggccctcatctccctcttgaatcaggagaaagccaaagtttccaaagtgtcggaggtttcaagtctctcaggaattacgaatagcacagacatcacaggctccatggatgtgacggatgtcaccacgttcacagccatcctgaccccgtacatgtatgcaggtacaggccctgaacatgtcagggacagcatagatttcccagaattcacagacatcaccgacatcacagatgtcacagatcttccagaaaatgaggtcccagaggtcccggatgtaagaattgtcacagaagtcatagaagtcagagaagccacggaagtcacagacagctctgatattacaaactgctcgggagtcacagtggtgtttgaaaacaatgacttaatcagggccaagcaagaggagaaggagcttgagaactgaatcaaacacttcaggcttgtatagtttttcagtttttcccctgattagcatttctttccccattttcactctcctctaaatcacctgttccccttccatacacttttactctcacttaacaccctgtaccccaagaaaagcaaagactggctgaatcttaatacctcattttattaaatgtaattggagtacaaattaaaaatgagtccttctctcccctcatatcaaatctccttctaatttcctcaaacttgtgcctcatctgtctgcccctttctcaagggaatgaatgtgaggaaagaaaagtaaaacagaaaaagacaaagttgatggaaaaacatgtaagacaaactaaagatgctgtctcaaaaaaaaaaaaaaaagaaaaaaaagaaaaatttgctcccaaatccttatattttgaattgctgatatatgggaaaaggtagattttttttaatggtagaaaaagttagttactaatacagacttcatattattacaaataatgtgaaagacttcatcttattacaactgaagtaatgtgaaagttatttggactcttatttactatagcatattatgatgtttgtaggtcttatgaccaaatcttaggactcagtacagcacagattaagaacttgcaaataattcaatagcagacatttgaattaaatgaactgacttctccacctttttttaaaatcagatacaaactactaaactaaaaagcaaacacagctcagggaaagacaatcagtgcaagaggaaaaccaagcagtgtcttctacgtggcagaaataaagcctatgactaatcattacgaattcaaatccatgtcaacctaatttcataaatcttaactattttaattgtgggtatctattttaaaggaagctagaggattatgcaaaacggtaagattttcaattcataaactcagtttttatggatggggtttcttttctttgggattgatggaaaaatttgttattctcttggtttcacttttctcatttgtatattagtccaacactgttttgtttctaacattggagaatgtgaggtcattcaagctagatctgcagtccttacctgaagatgattttgctcatt

SEQ ID NO: 461151 - DNA, 353 bp, Homo sapiens
gtaaaagatattttcaaactaccttgaccccagtagaaagtgaggcaaatacatccaaggagatgaaggataagacctctgaagaaaagatgcctgattttcagagcacagctctcaaggctgaagaatccaggagcttgagaactgaatcaaacacttcagtgagcccaaattatgggcttatctctgattctttgatattttttccaagatgaaaagagacaaaggatagagattcaagaaaagaagagaaagaaaaatcacataaaatattgggagtttccttcctacccttacccatctttcttttccatgttcctcttaaatattacaaaccaaattccttggaatcc

SEQ ID NO: 461152 - DNA, 480 bp, Homo sapiens
accagcaagactaccatgaggatcaataagcaagatgctctctgcaccccacactcccatgatccgagagatcttcaaaatatgttggatggaggagagtatgccccttttgtatctcctcccatgttagagagcaattttatccaggtaaatcatattcaaggcctgagttaagttccaataacttcagtaattttctcaaagaaaactgaaaaggatggtaggagaattgttttaaatgtgccgagggaatgtgtgatactacaaaagagaacagtttgggaactttaaaaaacctgaaataattacaatgttaaaggacatttacttcaaatgtccccaaaactcttgtgaaggacttctgtcttaactctaccataattgccattccatcataatcttcccaaaattacatgaagccgtttttggcatttcccgccacagggaaacatacagataacttctttcttaggcgtagaa

SEQ ID NO: 461153 - DNA, 2192 bp, Homo sapiens
taaacacctgctaaagaaatgtgaaaagagtggaaacgtgctatttggaggttattttcctagtcgacatccaggagatctccagagatctatttcagccccacctgttgatttcatcatgaaaaggaggaagctcaaactgaagtgagttaaaaacttcatctcctagagaggactgtggctcggcctgagttgagtttttttatgtttatgtgcaagcgcaatgaagaagaacaccagcaagactaccatgaggatcaataagcaagatgctctctgcaccccacactcccatgatccgagagatcttcaaaatatgttggatggaggagagtatgccccttttgtatctcctcccatgttagagagcaattttatccagctccacccacaagatccccaatgtgatgctactggcccatctgacacctggtgcccaaaaagatacagaaaccctgtttaaaagtctcctgacatctcctcctgcagagaaactagtgctcaccaggtttctccctctgcagtttgtgactctttctgtgcatgatgcggagaacatgagcctgaaagtaaagctggtgagtggtcgagcctactacttacagctctgcacctctgcatataaacaggacaccttgttttctcaatgggtggccctcatctccctcttgaatcaggagaaagccaaagtttccaaagtgtcggaggtttcaagtctctcaggaattacgaatagcacagacatcacaggctccatggatgtgacggatgtcaccacgttcacagccatcctgaccccgtacatgtatgcaggtacaggccctgaacatgtcagggacagcatagatttcccagaattcacagacatcaccgacatcacagatgtcacagatcttccagaaaatgaggtcccagaggtcccggatgtaagaattgtcacagaagtcatagaagtcagagaagccacggaagtcacagacagctctgatattacaaactgctcgggagtcacagtggtgtttgaaaacaatgacttaatcagggccaagcaagaggagaaggagcttgagaactgaatcaaacacttcaggcttgtatagtttttcagtttttcccctgattagcatttctttccccattttcactctcctctaaatcacctgttccccttccatacacttttactctcacttaacaccctgtaccccaagaaaagcaaagactggctgaatcttaatacctcattttattaaatgtaattggagtacaaattaaaaatgagtccttctctcccctcatatcaaatctccttctaatttcctcaaacttgtgcctcatctgtctgcccctttctcaagggaatgaatgtgaggaaagaaaagtaaaacagaaaaagacaaagttgatggaaaaacatgtaagacaaactaaagatgctgtctcaaaaaaaaaaaaaaaagaaaaaaaagaaaaatttgctcccaaatccttatattttgaattgctgatatatgggaaaaggtagattttttttaatggtagaaaaagttagttactaatacagacttcatattattacaaataatgtgaaagacttcatcttattacaactgaagtaatgtgaaagttatttggactcttatttactatagcatattatgatgtttgtaggtcttatgaccaaatcttaggactcagtacagcacagattaagaacttgcaaataattcaatagcagacatttgaattaaatgaactgacttctccacctttttttaaaatcagatacaaactactaaactaaaaagcaaacacagctcagggaaagacaatcagtgcaagaggaaaaccaagcagtgtcttctacgtggcagaaataaagcctatgactaatcattacgaattcaaatccatgtcaacctaatttcataaatcttaactattttaattgtgggtatctattttaaaggaagctagaggattatgcaaaacggtaagattttcaattcataaactcagtttttatggatggggtttcttttctttgggattgatggaaaaatttgttattctcttggtttcacttttctcatttgtatattagtccaacactgttttgtttctaacattggagaatgtgaggtcattcaagctagatctgcagtccttacctgaagatgattttgctcatt

SEQ ID NO: 461154 - DNA, 2876 bp, Homo sapiens
ggtgaaagcaggagagacccctctgactggaacctcttacctcccagaagccttggctgcgcggagggcgcgggggtggggcccggggcggagcggcccggggcggagggcgcgggctccgagccgtccacctgtggctccggcttccgaagcggctccggggcgggggcggggcctcactctgcgatataactcgggtcgcgcggctcgcgcaggccgccaccgtcgtccgcaaagcctgagtcctgtcctttctctctccccggacagcatgagcttcaccactcgctccaccttctccaccaactaccggtccctgggctctgtccaggcgcccagctacggcgcccggccggtcagcagcgcggccagcgtctatgcaggcgctgggggctctggttcccggatctccgtgtcccgctccaccagcttcaggggcggcatggggtccgggggcctggccaccgggatagccgggggtctggcaggaatgggaggcatccagaacgagaaggagaccatgcaaagcctgaacgaccgcctggcctcttacctggacagagtgaggagcctggagaccgagaaccggaggctggagagcaaaatccgggagcacttggagaagaagggaccccaggtcagagactggagccattacttcaagatcatcgaggacctgagggctcagatcttcgcaaatactgtggacaatgcccgcatcgttctgcagattgacaatgcccgtcttgctgctgatgactttagagtcaagtatgagacagagctggccatgcgccagtctgtggagaacgacatccatgggctccgcaaggtcattgatgacaccaatatcacacgactgcagctggagacagagatcgaggctctcaaggaggagctgctcttcatgaagaagaaccacgaagaggcaagcaggggccactggccaggccagggattgaggggccaagagaagtctgggtcggagaatagacaagacaaaccaactgcaagtagccttgctaagacgtttagaaatagcagcctgggctcttcttaaataagactgttctgatgaagagcattctcagggggtcgagtacaccctggctcacctgaattacaggtcaaaatgatatgggttagaaaatgagatgagaacagaagtagaagcagctaacactaggagctgggggtgataaaggaatgacagcagatggagttggcagcgcttcctaaaagatggtagaaggagcaggtttgtgaaggggagggtggataaaggaacagggtgaagttacagagaaaccatcagtgagtgggtggcatttctacccactggagtagaaaggccagaactggcattgccctgagtgcaagccaaggggttcctcctgtctcttctccaactgtaggcctcctagaagaggcaatcacagaagaaaggccttgttggagctctgaccctgaaccctcctcacttttgcccctgtcacctttaggaagtaaaaggcctacaagcccagattgccagctctgggttgaccgtggaggtagatgcccccaaatctcaggacctcgccaagatcatggcagacatccggggcccaatatgacgagctggctcggaagaaccgagaggagctagacaagtactggtctcagcaggtgcgtgaggggaggggatggctgccaaggtgtgggagggaggcagacggaatgaggggcctgatggactgtccccatcctgcagattgaggagagcaccacagtggtcaccacacagtctgctgaggttggagctgctgagacgacgctcacagagctgagacgtacagtccagtccttggagatcgacctggactccatgagaaatctgaaggccagcttggagaacagcctgagggaggtggaggcccgctacgccctacagatggagcagctcaacgggatcctgctgcaccttgagtcagagctggcacagacccgggcagagggacagcgccaggcccaggagtatgaggccctgctgaacatcaaggtcaagctggaggctgagatcgccacctaccgccgcctgctggaagatggcgaggactttaatcttggtgatgccttggacagcagcaactccatgcaaaccatccaaaagaccaccacccgccggatagtggatggcaaagtggtgtctgagaccaatgacaccaaagttctgaggcattaagccagcagaagcagggtaccctttggggagcaggaggccaataaaaagttcagagttcattggatgtcactttgtcttcttttggctgttttcattgtgcacaaatgccctaacccaacagtcccatccctgatccagcagaaaccacctctgacccctgagggtttcatatagattggggtgtagaaggaagagggatctgtattcttggaaacacttctgagagacagaggagggagcagtagatgtgatgggtcacaggctgtggggatccctacaagggaattgtggaatctttgccttgaagcgatctggtgttcaaaaggtccctgactgatcattagcagaaatctgaaccagaggaggaaattaggccaaagacagaggacagaggagacagggagacacatctggccctcccctaccctgctgctttatgcccttggcccactgcccagggcttcccacccacagttttttcctccaaccccaggccatactcatcctccaaacctatggtgccctcaactctgttcattcactcaacggagatatgatttttagggtgctagaggtctggctagaagttgagtaaatgatcatggaagttcccatctaggaaagaggtgcccctgagtaagcacccatatag

SEQ ID NO: 461155 - DNA, 977 bp, Homo sapiens
  misc_feature (910)..(910): n is a, c, g, or t
aaactaggctaggtacgaggctgggtgtgaatcggccgaggcaaagcctgagtcctgtcctttctctctccccggacagcatgagcttcaccactcgctccaccttctccaccaactaccggtccctgggctctgtccaggcgcccagctacggcgcccggccggtcagcagcgcggccagcgtctatgcaggcgctgggggctctggttcccggatctccgtgtcccgctccaccagcttcaggggcggcatggggtccgggggcctggccaccgggatagccgggggtctggcaggaatgggaggcatccagaacgagaaggagaccatgcaaagcctgaacgaccgcctggcctcttacctggacagagtgaggagcctggagaccgagaaccggaggctggagagcaaaatccgggagcacttggagaagaagggaccccaggtcagagactggagccattacttcaagatcatcgaggacctgagggctcagatcttcgcaaatactgtggacaatgcccgcatcgttctgcagattgacaatgcccgtcttgctgctgatgactttagagtcaagtatgagacagagctggccatgcgccagtctgtggagaacgacatccatgggctccgcaaggtcattgatgacaccaatatcacacgactgcagctggagacagagatcgaggctctcaaggaggagctgctcttcatgaagaagaaccacgaagaggaagtaaaaggcctacaagcccagattgccagctctgggttgaccgtggaggtagatgcccccaaatctcaggacctcgccaagatcatggcagacatccggggcccaatatgacgagctggctcggaagaaccgagaggagctagacaagtactggtctcagcagatgaganagcccccagggtccaccagtgggaggtgggctgtaaaaaacgtcacaaattgagacagccaccttga

SEQ ID NO: 461156 - DNA, 216 bp, Homo sapiens
aagggaaggccaggccaggagttgagcctgtgaacattatcttggtgatgccttggacagcagcaactccatgcaaaccatccaaaagaccaccacccgccggatagtggatggcaaagtggtgtctgagaccaatgacaccaaagttctgaggcattaagccagcagaagcagggtaccctttggggagcaggaggccaataaaaagttcagagt

SEQ ID NO: 461157 - DNA, 291 bp, Homo sapiens
gacagggttgagagctttacagaggaagtggacagcatggagggaggtaaggaaaggcctgtaaagaggaggagacactggctctggcggaatggggactattggagggttaagcggatgtggctaaggctgagtcatctaggagtaaacaagaggccttcctttgggaggagccaatccagggtgtagggggcccagagtgaccaggtgcactagggaaaaaatgccaggagagggccaggaagaggaccaacgttgatccggccgcgaatttagtagtagtagtcgacc

SEQ ID NO: 461158 - DNA, 524 bp, Homo sapiens
actcctatcccttatcccagtacttggcacatagcaggtgcccaaaaaagtttccaaaagtgaagggatgagcagtcctgggactctgggctcaccctgcccctcctctctgtgcccctgcagaaggccagcttggagaacagcctgagggaggtggaggcccgctacgccctacagatggagcagctcaacgggatcctgctgcaccttgagtcagagctggcacagacccgggcagagggacagcgccaggcccaggagtatgaggccctgctgaacatcaaggtcaagctggaggctgagatcgccacctaccgccgcctgctggaagatggcgaggactttaatcttggtgatgccttggacagcagcaactccatgcaaaccatccaaaagaccaccacccgccggatagtggatggcaaagtggtgtctgagaccaatgacaccaaagttctgaggcattaagccagcagaagcagggtaccctttggggagcaggaggccaataaaaagttcagagt

SEQ ID NO: 461159 - DNA, 2217 bp, Homo sapiens
ggtgaaagcaggagagacccctctgactggaacctcttacctcccagaagccttggctgcgcggagggcgcgggggtggggcccggggcggagcggcccggggcggagggcgcgggctccgagccgtccacctgtggctccggcttccgaagcggctccggggcgggggcggggcctcactctgcgatataactcgggtcgcgcggctcgcgcaggccgccaccgtcgtccgcaaagcctgagtcctgtcctttctctctccccggacagcatgagcttcaccactcgctccaccttctccaccaactaccggtccctgggctctgtccaggcgcccagctacggcgcccggccggtcagcagcgcggccagcgtctatgcaggcgctgggggctctggttcccggatctccgtgtcccgctccaccagcttcaggggcggcatggggtccgggggcctggccaccgggatagccgggggtctggcaggaatgggaggcatccagaacgagaaggagaccatgcaaagcctgaacgaccgcctggcctcttacctggacagagtgaggagcctggagaccgagaaccggaggctggagagcaaaatccgggagcacttggagaagaagggaccccaggtcagagactggagccattacttcaagatcatcgaggacctgagggctcagatcttcgcaaatactgtggacaatgcccgcatcgttctgcagattgacaatgcccgtcttgctgctgatgactttagagtcaagtatgagacagagctggccatgcgccagtctgtggagaacgacatccatgggctccgcaaggtcattgatgacaccaatatcacacgactgcagctggagacagagatcgaggctctcaaggaggagctgctcttcatgaagaagaaccacgaagaggaagtaaaaggcctacaagcccagattgccagctctgggttgaccgtggaggtagatgcccccaaatctcaggacctcgccaagatcatggcagacatccggggcccaatatgacgagctggctcggaagaaccgagaggagctagacaagtactggtctcagcagattgaggagagcaccacagtggtcaccacacagtctgctgaggttggagctgctgagacgacgctcacagagctgagacgtacagtccagtccttggagatcgacctggactccatgagaaatctgaaggccagcttggagaacagcctgagggaggtggaggcccgctacgccctacagatggagcagctcaacgggatcctgctgcaccttgagtcagagctggcacagacccgggcagagggacagcgccaggcccaggagtatgaggccctgctgaacatcaaggtcaagctggaggctgagatcgccacctaccgccgcctgctggaagatggcgaggactttaatcttggtgatgccttggacagcagcaactccatgcaaaccatccaaaagaccaccacccgccggatagtggatggcaaagtggtgtctgagaccaatgacaccaaagttctgaggcattaagccagcagaagcagggtaccctttggggagcaggaggccaataaaaagttcagagttcattggatgtcactttgtcttcttttggctgttttcattgtgcacaaatgccctaacccaacagtcccatccctgatccagcagaaaccacctctgacccctgagggtttcatatagattggggtgtagaaggaagagggatctgtattcttggaaacacttctgagagacagaggagggagcagtagatgtgatgggtcacaggctgtggggatccctacaagggaattgtggaatctttgccttgaagcgatctggtgttcaaaaggtccctgactgatcattagcagaaatctgaaccagaggaggaaattaggccaaagacagaggacagaggagacagggagacacatctggccctcccctaccctgctgctttatgcccttggcccactgcccagggcttcccacccacagttttttcctccaaccccaggccatactcatcctccaaacctatggtgccctcaactctgttcattcactcaacggagatatgatttttagggtgctagaggtctggctagaagttgagtaaatgatcatggaagttcccatctaggaaagaggtgcccctgagtaagcacccatatag

SEQ ID NO: 461160 - DNA, 1621 bp, Homo sapiens
ggtgaaagcaggagagacccctctgactggaacctcttacctcccagaagccttggctgcgcggagggcgcgggggtggggcccggggcggagcggcccggggcggagggcgcgggctccgagccgtccacctgtggctccggcttccgaagcggctccggggcgggggcggggcctcactctgcgatataactcgggtcgcgcggctcgcgcaggccgccaccgtcgtccgcaaagcctgagtcctgtcctttctctctccccggacagcatgagcttcaccactcgctccaccttctccaccaactaccggtccctgggctctgtccaggcgcccagctacggcgcccggccggtcagcagcgcggccagcgtctatgcaggcgctgggggctctggttcccggatctccgtgtcccgctccaccagcttcaggggcggcatggggtccgggggcctggccaccgggatagccgggggtctggcaggaatgggaggcatccagaacgagaaggagaccatgcaaagcctgaacgaccgcctggcctcttacctggacagagtgaggagcctggagaccgagaaccggaggctggagagcaaaatccgggagcacttggagaagaagggaccccaggtcagagactggagccattacttcaagatcatcgaggacctgagggctcagatcttcgcaaatactgtggacaatgcccgcatcgttctgcagattgacaatgcccgtcttgctgctgatgactttagagtcaagtatgagacagagctggccatgcgccagtctgtggagaacgacatccatgggctccgcaaggtcattgatgacaccaatatcacacgactgcagctggagacagagatcgaggctctcaaggaggagctgctcttcatgaagaagaaccacgaagaggaagtaaaaggcctacaagcccagattgccagctctgggttgaccgtggaggtagatgcccccaaatctcaggacctcgccaagatcatggcagacatccggggcccaatatgacgagctggctcggaagaaccgagaggagctagacaagtactggtctcagcagattgaggagagcaccacagtggtcaccacacagtctgctgaggttggagctgctgagacgacgctcacagagctgagacgtacagtccagtccttggagatcgacctggactccatgagaaatctgaaggccagcttggagaacagcctgagggaggtggaggcccgctacgccctacagatggagcagctcaacgggatcctgctgcaccttgagtcagagctggcacagacccgggcagagggacagcgccaggcccaggagtatgaggccctgctgaacatcaaggtcaagctggaggctgagatcgccacctaccgccgcctgctggaagatggcgaggactttaatcttggtgatgccttggacagcagcaactccatgcaaaccatccaaaagaccaccacccgccggatagtggatggcaaagtggtgtctgagaccaatgacaccaaagttctgaggcattaagccagcagaagcagggtaccctttggggagcaggaggccaataaaaagttcagagt

SEQ ID NO: 461161 - DNA, 2147 bp, Homo sapiens
ggtgaaagcaggagagacccctctgactggaacctcttacctcccagaagccttggctgcgcggagggcgcgggggtggggcccggggcggagcggcccggggcggagggcgcgggctccgagccgtccacctgtggctccggcttccgaagcggctccggggcgggggcggggcctcactctgcgatataactcgggtcgcgcggctcgcgcaggccgccaccgtcgtccgcaaagcctgagtcctgtcctttctctctccccggacagcatgagcttcaccactcgctccaccttctccaccaactaccggtccctgggctctgtccaggcgcccagctacggcgcccggccggtcagcagcgcggccagcgtctatgcaggcgctgggggctctggttcccggatctccgtgtcccgctccaccagcttcaggggcggcatggggtccgggggcctggccaccgggatagccgggggtctggcaggaatgggaggcatccagaacgagaaggagaccatgcaaagcctgaacgaccgcctggcctcttacctggacagagtgaggagcctggagaccgagaaccggaggctggagagcaaaatccgggagcacttggagaagaagggaccccaggtcagagactggagccattacttcaagatcatcgaggacctgagggctcagatcttcgcaaatactgtggacaatgcccgcatcgttctgcagattgacaatgcccgtcttgctgctgatgactttagagtcaagtatgagacagagctggccatgcgccagtctgtggagaacgacatccatgggctccgcaaggtcattgatgacaccaatatcacacgactgcagctggagacagagatcgaggctctcaaggaggagctgctcttcatgaagaagaaccacgaagaggaagtaaaaggcctacaagcccagattgccagctctgggttgaccgtggaggtagatgcccccaaatctcaggacctcgccaagatcatggcagacatccggggcccaatatgacgagctggctcggaagaaccgagaggagctagacaagtactggtctcagcagattgaggagagcaccacagtggtcaccacacagtctgctgaggttggagctgctgagacgacgctcacagagctgagacgtacagtccagtccttggagatcgacctggactccatgagaaatctgaaggccagcttggagaacagcctgagggaggtggaggcccgctacgccctacagatggagcagctcaacgggatcctgctgcaccttgagtcagagctggcacagacccgggcagagggacagcgccaggcccaggagtatgaggccctgctgaacatcaaggtcaagctggaggctgagatcgccacctaccgccgcctgctggaagatggcgaggactttaatcttggtgatgccttggacagcagcaactccatgcaaaccatccaaaagaccaccacccgccggatagtggatggcaaagtggtgtctgagaccaatgacaccaaagttctgaggcattaagccagcagaagcagggtaccctttggggagcaggaggccaataaaaagttcagagtaaaaaaaaaaaaaaaaactcgagttttttatgttctttttttaaaccccagaaaaacgtttttttaccccaggggggaaactggaaattggtggggggccccctaggggtgtacaacaaggggggggcccccggggggaaaccccgctccaacttggtgttggggggacctccacaccaacgtgtgtgtgtcggggtcaggaaaggcgatccggggcgcccgattggtgtgtaacaccaggagcggccccccaaaagggggttttccgggacattgagaagccaattcggacactcgtgctaagcccccttagaggagacagtaggctccccaacaggagggtttccccgggtcaaaagaggcaggagcggtggctactggaccccttaacaaagcgtacaataaagtggggggtccatataacaggcacccacggacgtgatcgtacgatgggaacacaggacgcagaccgtagatggcaagggagcacgattaactcaacacagacacgggtacagcacatgag

SEQ ID NO: 461162 - DNA, 2025 bp, Homo sapiens
ggtgaaagcaggagagacccctctgactggaacctcttacctcccagaagccttggctgcgcggagggcgcgggggtggggcccggggcggagcggcccggggcggagggcgcgggctccgagccgtccacctgtggctccggcttccgaagcggctccggggcgggggcggggcctcactctgcgatataactcgggtcgcgcggctcgcgcaggccgccaccgtcgtccgcaaagcctgagtcctgtcctttctctctccccggacagcatgagcttcaccactcgctccaccttctccaccaactaccggtccctgggctctgtccaggcgcccagctacggcgcccggccggtcagcagcgcggccagcgtctatgcaggcgctgggggctctggttcccggatctccgtgtcccgctccaccagcttcaggggcggcatggggtccgggggcctggccaccgggatagccgggggtctggcaggaatgggaggcatccagaacgagaaggagaccatgcaaagcctgaacgaccgcctggcctcttacctggacagagtgaggagcctggagaccgagaaccggaggctggagagcaaaatccgggagcacttggagaagaagggaccccaggtcagagactggagccattacttcaagatcatcgaggacctgagggctcagatcttcgcaaatactgtggacaatgcccgcatcgttctgcagattgacaatgcccgtcttgctgctgatgactttagagtcaagtatgagacagagctggccatgcgccagtctgtggagaacgacatccatgggctccgcaaggtcattgatgacaccaatatcacacgactgcagctggagacagagatcgaggctctcaaggaggagctgctcttcatgaagaagaaccacgaagaggaagtaaaaggcctacaagcccagattgccagctctgggttgaccgtggaggtagatgcccccaaatctcaggacctcgccaagatcatggcagacatccggggcccaatatgacgagctggctcggaagaaccgagaggagctagacaagtactggtctcagcagattgaggagagcaccacagtggtcaccacacagtctgctgaggttggagctgctgagacgacgctcacagagctgagacgtacagtccagtccttggagatcgacctggactccatgagaaatctgaaggccagcttggagaacagcctgagggaggtggaggcccgctacgccctacagatggagcagctcaacgggatcctgctgcaccttgagtcagagctggcacagacccgggcagagggacagcgccaggcccaggagtatgaggccctgctgaacatcaaggtcaagctggaggctgagatcgccacctaccgccgcctgctggaagatggcgaggactttaatcttggtgatgccttggacagcagcaactccatgcaaaccatccaaaagaccaccacccgccggatagtggatggcaaagtggtgtctgagaccaatgacaccaaagttctgaggcattaagccagcagaagcagggtaccctttggggagcaggaggccaataaaaagttcagagtaaaaaaaaaaaaaaaaacaaacaacaaaaaaactttgttcgggcgcggcttagggcctctagagaaaaggtcttttatagaaccacttcgcggtgggagggggcgcggggccccattgtcggttcttgtacaccctgtgggcacatagctgggtccaccaaggagagaacccgcggggaccatgagacaagggggcggcggagagcttcctccacccatatataaaaaagggcccggggggggcacccccaggacgcggtttctgagcaaaacaaccctcacaaatgggagagctccccaagggagggcacaacaaaagggggagcccctataacaaagcggaggagtgccaaaagcgaggcccgcgaattttaaaattaagcccgccgcccggggggggaagc

SEQ ID NO: 461163 - DNA, 2026 bp, Homo sapiens
aaactaggctaggtacgaggctgggtgtgaatcggccgaggcaaagcctgagtcctgtcctttctctctccccggacagcatgagcttcaccactcgctccaccttctccaccaactaccggtccctgggctctgtccaggcgcccagctacggcgcccggccggtcagcagcgcggccagcgtctatgcaggcgctgggggctctggttcccggatctccgtgtcccgctccaccagcttcaggggcggcatggggtccgggggcctggccaccgggatagccgggggtctggcaggaatgggaggcatccagaacgagaaggagaccatgcaaagcctgaacgaccgcctggcctcttacctggacagagtgaggagcctggagaccgagaaccggaggctggagagcaaaatccgggagcacttggagaagaagggaccccaggtcagagactggagccattacttcaagatcatcgaggacctgagggctcagatcttcgcaaatactgtggacaatgcccgcatcgttctgcagattgacaatgcccgtcttgctgctgatgactttagagtcaagtatgagacagagctggccatgcgccagtctgtggagaacgacatccatgggctccgcaaggtcattgatgacaccaatatcacacgactgcagctggagacagagatcgaggctctcaaggaggagctgctcttcatgaagaagaaccacgaagaggaagtaaaaggcctacaagcccagattgccagctctgggttgaccgtggaggtagatgcccccaaatctcaggacctcgccaagatcatggcagacatccggggcccaatatgacgagctggctcggaagaaccgagaggagctagacaagtactggtctcagcagattgaggagagcaccacagtggtcaccacacagtctgctgaggttggagctgctgagacgacgctcacagagctgagacgtacagtccagtccttggagatcgacctggactccatgagaaatctgaaggccagcttggagaacagcctgagggaggtggaggcccgctacgccctacagatggagcagctcaacgggatcctgctgcaccttgagtcagagctggcacagacccgggcagagggacagcgccaggcccaggagtatgaggccctgctgaacatcaaggtcaagctggaggctgagatcgccacctaccgccgcctgctggaagatggcgaggactttaatcttggtgatgccttggacagcagcaactccatgcaaaccatccaaaagaccaccacccgccggatagtggatggcaaagtggtgtctgagaccaatgacaccaaagttctgaggcattaagccagcagaagcagggtaccctttggggagcaggaggccaataaaaagttcagagttcattggatgtcactttgtcttcttttggctgttttcattgtgcacaaatgccctaacccaacagtcccatccctgatccagcagaaaccacctctgacccctgagggtttcatatagattggggtgtagaaggaagagggatctgtattcttggaaacacttctgagagacagaggagggagcagtagatgtgatgggtcacaggctgtggggatccctacaagggaattgtggaatctttgccttgaagcgatctggtgttcaaaaggtccctgactgatcattagcagaaatctgaaccagaggaggaaattaggccaaagacagaggacagaggagacagggagacacatctggccctcccctaccctgctgctttatgcccttggcccactgcccagggcttcccacccacagttttttcctccaaccccaggccatactcatcctccaaacctatggtgccctcaactctgttcattcactcaacggagatatgatttttagggtgctagaggtctggctagaagttgagtaaatgatcatggaagttcccatctaggaaagaggtgcccctgagtaagcacccatatag

SEQ ID NO: 461164 - DNA, 2000 bp, Homo sapiens
ggtgaaagcaggagagacccctctgactggaacctcttacctcccagaagccttggctgcgcggagggcgcgggggtggggcccggggcggagcggcccggggcggagggcgcgggctccgagccgtccacctgtggctccggcttccgaagcggctccggggcgggggcggggcctcactctgcgatataactcgggtcgcgcggctcgcgcaggccgccaccgtcgtccgcaaagcctgagtcctgtcctttctctctccccggacagcatgagcttcaccactcgctccaccttctccaccaactaccggtccctgggctctgtccaggcgcccagctacggcgcccggccggtcagcagcgcggccagcgtctatgcaggcgctgggggctctggttcccggatctccgtgtcccgctccaccagcttcaggggcggcatggggtccgggggcctggccaccgggatagccgggggtctggcaggaatgggaggcatccagaacgagaaggagaccatgcaaagcctgaacgaccgcctggcctcttacctggacagagtgaggagcctggagaccgagaaccggaggctggagagcaaaatccgggagcacttggagaagaagggaccccaggtcagagactggagccattacttcaagatcatcgaggacctgagggctcagatcttcgcaaatactgtggacaatgcccgcatcgttctgcagattgacaatgcccgtcttgctgctgatgactttagagtcaagtatgagacagagctggccatgcgccagtctgtggagaacgacatccatgggctccgcaaggtcattgatgacaccaatatcacacgactgcagctggagacagagatcgaggctctcaaggaggagctgctcttcatgaagaagaaccacgaagaggaagtaaaaggcctacaagcccagattgccagctctgggttgaccgtggaggtagatgcccccaaatctcaggacctcgccaagatcatggcagacatccggggcccaatatgacgagctggctcggaagaaccgagaggagctagacaagtactggtctcagcagattgaggagagcaccacagtggtcaccacacagtctgctgaggttggagctgctgagacgacgctcacagagctgagacgtacagtccagtccttggagatcgacctggactccatgagaaatctgaaggccagcttggagaacagcctgagggaggtggaggcccgctacgccctacagatggagcagctcaacgggatcctgctgcaccttgagtcagagctggcacagacccgggcagagggacagcgccaggcccaggagtatgaggccctgctgaacatcaaggtcaagctggaggctgagatcgccacctaccgccgcctgctggaagatggcgaggactttaagtgagtggggctctcctacccacacgtgctgggatcaggagatcacttctccccaaagtctgagcttttggaagcaccccatgtgtctgttcactggtatccactgagcactgggccgttgctccgtgggtgctcctgtgtcttcaagggagtaacagttacagaggtctcccccttgaagaaagcaaactaagtattgtccctagctgtacttagtatgcaaatgaagtttggccttgagtttcccttttctggaggaagaggctgagggtgatttggagataaaggtagaggtcaggaggctttttccctctacctttcttgtctcccttctactccacggggctgtttataacttgggcttggtcttctgttacagtcttggtgatgccttggacagcagcaactccatgcaaaccatccaaaagaccaccacccgccggatagtggatggcaaagtggtgtctgagaccaatgacaccaaagttctgaggcattaagccagcagaagcagggtaccctttggggagcaggaggccaataaaaagttcagagt

SEQ ID NO: 461165 - DNA, 2017 bp, Homo sapiens
tatgctaggtacgagctgggttaaatggcgagcaaagcctgagtcctgtcctttctctctccccggacagcatgagcttcaccactcgctccaccttctccaccaactaccggtccctgggctctgtccaggcgcccagctacggcgcccggccggtcagcagcgcggccagcgtctatgcaggcgctgggggctctggttcccggatctccgtgtcccgctccaccagcttcaggggcggcatggggtccgggggcctggccaccgggatagccgggggtctggcaggaatgggaggcatccagaacgagaaggagaccatgcaaagcctgaacgaccgcctggcctcttacctggacagagtgaggagcctggagaccgagaaccggaggctggagagcaaaatccgggagcacttggagaagaagggaccccaggtcagagactggagccattacttcaagatcatcgaggacctgagggctcagatcttcgcaaatactgtggacaatgcccgcatcgttctgcagattgacaatgcccgtcttgctgctgatgactttagagtcaagtatgagacagagctggccatgcgccagtctgtggagaacgacatccatgggctccgcaaggtcattgatgacaccaatatcacacgactgcagctggagacagagatcgaggctctcaaggaggagctgctcttcatgaagaagaaccacgaagaggaagtaaaaggcctacaagcccagattgccagctctgggttgaccgtggaggtagatgcccccaaatctcaggacctcgccaagatcatggcagacatccggggcccaatatgacgagctggctcggaagaaccgagaggagctagacaagtactggtctcagcagattgaggagagcaccacagtggtcaccacacagtctgctgaggttggagctgctgagacgacgctcacagagctgagacgtacagtccagtccttggagatcgacctggactccatgagaaatctgaaggccagcttggagaacagcctgagggaggtggaggcccgctacgccctacagatggagcagctcaacgggatcctgctgcaccttgagtcagagctggcacagacccgggcagagggacagcgccaggcccaggagtatgaggccctgctgaacatcaaggtcaagctggaggctgagatcgccacctaccgccgcctgctggaagatggcgaggactttaatcttggtgatgccttggacagcagcaactccatgcaaaccatccaaaagaccaccacccgccggatagtggatggcaaagtggtgtctgagaccaatgacaccaaagttctgaggcattaagccagcagaagcagggtaccctttggggagcaggaggccaataaaaagttcagagttcattggatgtcactttgtcttcttttggctgttttcattgtgcacaaatgccctaacccaacagtcccatccctgatccagcagaaaccacctctgacccctgagggtttcatatagattggggtgtagaaggaagagggatctgtattcttggaaacacttctgagagacagaggagggagcagtagatgtgatgggtcacaggctgtggggatccctacaagggaattgtggaatctttgccttgaagcgatctggtgttcaaaaggtccctgactgatcattagcagaaatctgaaccagaggaggaaattaggccaaagacagaggacagaggagacagggagacacatctggccctcccctaccctgctgctttatgcccttggcccactgcccagggcttcccacccacagttttttcctccaaccccaggccatactcatcctccaaacctatggtgccctcaactctgttcattcactcaacggagatatgatttttagggtgctagaggtctggctagaagttgagtaaatgatcatggaagttcccatctaggaaagaggtgcccctgagtaagcacccatatag

SEQ ID NO: 461166 - DNA, 1481 bp, Homo sapiens
ggtgaaagcaggagagacccctctgactggaacctcttacctcccagaagccttggctgcgcggagggcgcgggggtggggcccggggcggagcggcccggggcggagggcgcgggctccgagccgtccacctgtggctccggcttccgaagcggctccggggcgggggcggggcctcactctgcgatataactcgggtcgcgcggctcgcgcaggccgccaccgtcgtccgcaaagcctgagtcctgtcctttctctctccccggacagcatgagcttcaccactcgctccaccttctccaccaactaccggtccctgggctctgtccaggcgcccagctacggcgcccggccggtcagcagcgcggccagcgtctatgcaggcgctgggggctctggttcccggatctccgtgtcccgctccaccagcttcaggggcggcatggggtccgggggcctggccaccgggatagccgggggtctggcaggaatgggaggcatccagaacgagaaggagaccatgcaaagcctgaacgaccgcctggcctcttacctggacagagtgaggagcctggagaccgagaaccggaggctggagagcaaaatccgggagcacttggagaagaagggaccccaggtcagagactggagccattacttcaagatcatcgaggacctgagggctcagatcttcgcaaatactgtggacaatgcccgcatcgttctgcagattgacaatgcccgtcttgctgctgatgactttagagtcaagtatgagacagagctggccatgcgccagtctgtggagaacgacatccatgggctccgcaaggtcattgatgacaccaatatcacacgactgcagctggagacagagatcgaggctctcaaggaggagctgctcttcatgaagaagaaccacgaagaggaagtaaaaggcctacaagcccagattgccagctctgggttgaccgtggaggtagatgcccccaaatctcaggacctcgccaagatcatggcagacatccggggcccaatatgacgagctggctcggaagaaccgagaggagctagacaagtactggtctcagcagattgaggagagcaccacagtggtcaccacacagtctgctgaggttggagctgctgagacgacgctcacagagctgagacgtacagtccagtccttggagatcgacctggactccatgagaaatctgaaggccagcttggagaacagcctgagggaggtggaggcccgctacgccctacagatggagcagctcaacgggatcctgctgcaccttgagtcagagctggcacagacccgggcagagggacagcgccaggcccaggagtatgaggccctgctgaacatcaaggtcaagctggaggctgagatcgccacctaccgccgcctgctggaagatggcgaggactttaatcttgtgatagccttgaccagcaaccccgagctgtgt

SEQ ID NO: 461167 - DNA, 1502 bp, Homo sapiens
ggtgaaagcaggagagacccctctgactggaacctcttacctcccagaagccttggctgcgcggagggcgcgggggtggggcccggggcggagcggcccggggcggagggcgcgggctccgagccgtccacctgtggctccggcttccgaagcggctccggggcgggggcggggcctcactctgcgatataactcgggtcgcgcggctcgcgcaggccgccaccgtcgtccgcaaagcctgagtcctgtcctttctctctccccggacagcatgagcttcaccactcgctccaccttctccaccaactaccggtccctgggctctgtccaggcgcccagctacggcgcccggccggtcagcagcgcggccagcgtctatgcaggcgctgggggctctggttcccggatctccgtgtcccgctccaccagcttcaggggcggcatggggtccgggggcctggccaccgggatagccgggggtctggcaggaatgggaggcatccagaacgagaaggagaccatgcaaagcctgaacgaccgcctggcctcttacctggacagagtgaggagcctggagaccgagaaccggaggctggagagcaaaatccgggagcacttggagaagaagggaccccaggtcagagactggagccattacttcaagatcatcgaggacctgagggctcagatcttcgcaaatactgtggacaatgcccgcatcgttctgcagattgacaatgcccgtcttgctgctgatgactttagagtcaagtatgagacagagctggccatgcgccagtctgtggagaacgacatccatgggctccgcaaggtcattgatgacaccaatatcacacgactgcagctggagacagagatcgaggctctcaaggaggagctgctcttcatgaagaagaaccacgaagaggaagtaaaaggcctacaagcccagattgccagctctgggttgaccgtggaggtagatgcccccaaatctcaggacctcgccaagatcatggcagacatccggggcccaatatgacgagctggctcggaagaaccgagaggagctagacaagtactggtctcagcagattgaggagagcaccacagtggtcaccacacagtctgctgaggttggagctgctgagacgacgctcacagagctgagacgtacagtccagtccttggagatcgacctggactccatgagaaatctgaaggccagcttggagaacagcctgagggaggtggaggcccgctacgccctacagatggagcagctcaacgggatcctgctgcaccttgagtcagagctggcacagacccgggcagagggacagcgccaggcccaggagtatgaggccctgctgaacatcaaggtcaagctggaggctgagatcgcctacaaaacgcgggcgtggtgaagaaattcatgactatatatagttgtgagctaggacagcagcagacccgagctgtgtaggtaccgagctgattgt

SEQ ID NO: 461168 - DNA, 1577 bp, Homo sapiens
ggtgaaagcaggagagacccctctgactggaacctcttacctcccagaagccttggctgcgcggagggcgcgggggtggggcccggggcggagcggcccggggcggagggcgcgggctccgagccgtccacctgtggctccggcttccgaagcggctccggggcgggggcggggcctcactctgcgatataactcgggtcgcgcggctcgcgcaggccgccaccgtcgtccgcaaagcctgagtcctgtcctttctctctccccggacagcatgagcttcaccactcgctccaccttctccaccaactaccggtccctgggctctgtccaggcgcccagctacggcgcccggccggtcagcagcgcggccagcgtctatgcaggcgctgggggctctggttcccggatctccgtgtcccgctccaccagcttcaggggcggcatggggtccgggggcctggccaccgggatagccgggggtctggcaggaatgggaggcatccagaacgagaaggagaccatgcaaagcctgaacgaccgcctggcctcttacctggacagagtgaggagcctggagaccgagaaccggaggctggagagcaaaatccgggagcacttggagaagaagggaccccaggtcagagactggagccattacttcaagatcatcgaggacctgagggctcagatcttcgcaaatactgtggacaatgcccgcatcgttctgcagattgacaatgcccgtcttgctgctgatgactttagagtcaagtatgagacagagctggccatgcgccagtctgtggagaacgacatccatgggctccgcaaggtcattgatgacaccaatatcacacgactgcagctggagacagagatcgaggctctcaaggaggagctgctcttcatgaagaagaaccacgaagaggaagtaaaaggcctacaagcccagattgccagctctgggttgaccgtggaggtagatgcccccaaatctcaggacctcgccaagatcatggcagacatccggggcccaatatgacgagctggctcggaagaaccgagaggagctagacaagtactggtctcagcagattgaggagagcaccacagtggtcaccacacagtctgctgaggttggagctgctgagacgacgctcacagagctgagacgtacagtccagtccttggagatcgacctggactccatgagaaatctgaaggccagcttggagaacagcctgagggatcctgctgcaccttgagtcagagctggcacagacccgggcagagggacagcgccaggcccaggagtatgaggccctgctgaacatcaaggtcaagctggaggctgagatcgccacctaccgccgcctgctggaagatggcgaggactttaatcttggtgatgccttggacagcagcaactccatgcaaaccatccaaaagaccaccacccgccggatagtggatggcaaagtggtgtctgagaccaatgacaccaaagttctgaggcattaagccagcagaagcagggtaccctttggggagcaggaggccaataaaaagttcagagt

SEQ ID NO: 461169 - DNA, 1193 bp, Homo sapiens
ggtgaaagcaggagagacccctctgactggaacctcttacctcccagaagccttggctgcgcggagggcgcgggggtggggcccggggcggagcggcccggggcggagggcgcgggctccgagccgtccacctgtggctccggcttccgaagcggctccggggcgggggcggggcctcactctgcgatataactcgggtcgcgcggctcgcgcaggccgccaccgtcgtccgcaaagcctgagtcctgtcctttctctctccccggacagcatgagcttcaccactcgctccaccttctccaccaactaccggtccctgggctctgtccaggcgcccagctacggcgcccggccggtcagcagcgcggccagcgtctatgcaggcgctgggggctctggttcccggatctccgtgtcccgctccaccagcttcaggggcggcatggggtccgggggcctggccaccgggatagccgggggtctggcaggaatgggaggcatccagaacgagaaggagaccatgcaaagcctgaacgaccgcctggcctcttacctggacagagtgaggagcctggagaccgagaaccggaggctggagagcaaaatccgggagcacttggagaagaagggaccccaggtcagagactggagccattacttcaagatcatcgaggacctgagggctcagatcttcgcaaatactgtggacaatgcccgcatcgttctgcagattgacaatgcccgtcttgctgctgatgactttagagtcaagtatgagacagagctggccatgcgccagtctgtggagaacgacatccatgggctccgcaaggtcattgatgacaccaatatcacacgactgcagctggagacagagatcgaggctctcaaggaggagctgctcttcatgaagaagaaccacgaagaggaagtaaaaggcctacaagcccagattgccagctctgggttgaccgtggaggtagatgcccccaaatctcaggacctcgccaagatcatggcagacatccggggcccaatatgacgagctggctcggaagaaccgagaggagctagacaagtactggtctcagcagattgaggagagcaccacagtggtcaccacacagtctgctgaggttggagctgctgagacgacgctcacagagctgaggaccatcgttggggtacggagc

SEQ ID NO: 461170 - DNA, 1169 bp, Homo sapiens
ggtgaaagcaggagagacccctctgactggaacctcttacctcccagaagccttggctgcgcggagggcgcgggggtggggcccggggcggagcggcccggggcggagggcgcgggctccgagccgtccacctgtggctccggcttccgaagcggctccggggcgggggcggggcctcactctgcgatataactcgggtcgcgcggctcgcgcaggccgccaccgtcgtccgcaaagcctgagtcctgtcctttctctctccccggacagcatgagcttcaccactcgctccaccttctccaccaactaccggtccctgggctctgtccaggcgcccagctacggcgcccggccggtcagcagcgcggccagcgtctatgcaggcgctgggggctctggttcccggatctccgtgtcccgctccaccagcttcaggggcggcatggggtccgggggcctggccaccgggatagccgggggtctggcaggaatgggaggcatccagaacgagaaggagaccatgcaaagcctgaacgaccgcctggcctcttacctggacagagtgaggagcctggagaccgagaaccggaggctggagagcaaaatccgggagcacttggagaagaagggaccccaggtcagagactggagccattacttcaagatcatcgaggacctgagggctcagatcttcgcaaatactgtggacaatgcccgcatcgttctgcagattgacaatgcccgtcttgctgctgatgactttagagtcaagtatgagacagagctggccatgcgccagtctgtggagaacgacatccatgggctccgcaaggtcattgatgacaccaatatcacacgactgcagctggagacagagatcgaggctctcaaggaggagctgctcttcatgaagaagaaccacgaagaggaagtaaaaggcctacaagcccagattgccagctctgggttgaccgtggaggtagatgcccccaaatctcaggacctcgccaagatcatggcagacatccggggcccaatatgacgagctggctcggaagaaccgagaggagctagacaagtactggtctcagcagatgaggaaagcccgtggtccccaccacctgccgggttgggcgtgagaagcccacagataagacatccctctgatc

SEQ ID NO: 461171 - DNA, 1981 bp, Homo sapiens
aaataaggctaggtacgaggctgggtgggcggaacatgagcttcaccactcgctccaccttctccaccaactaccggtccctgggctctgtccaggcgcccagctacggcgcccggccggtcagcagcgcggccagcgtctatgcaggcgctgggggctctggttcccggatctccgtgtcccgctccaccagcttcaggggcggcatggggtccgggggcctggccaccgggatagccgggggtctggcaggaatgggaggcatccagaacgagaaggagaccatgcaaagcctgaacgaccgcctggcctcttacctggacagagtgaggagcctggagaccgagaaccggaggctggagagcaaaatccgggagcacttggagaagaagggaccccaggtcagagactggagccattacttcaagatcatcgaggacctgagggctcagatcttcgcaaatactgtggacaatgcccgcatcgttctgcagattgacaatgcccgtcttgctgctgatgactttagagtcaagtatgagacagagctggccatgcgccagtctgtggagaacgacatccatgggctccgcaaggtcattgatgacaccaatatcacacgactgcagctggagacagagatcgaggctctcaaggaggagctgctcttcatgaagaagaaccacgaagaggaagtaaaaggcctacaagcccagattgccagctctgggttgaccgtggaggtagatgcccccaaatctcaggacctcgccaagatcatggcagacatccggggcccaatatgacgagctggctcggaagaaccgagaggagctagacaagtactggtctcagcagattgaggagagcaccacagtggtcaccacacagtctgctgaggttggagctgctgagacgacgctcacagagctgagacgtacagtccagtccttggagatcgacctggactccatgagaaatctgaaggccagcttggagaacagcctgagggaggtggaggcccgctacgccctacagatggagcagctcaacgggatcctgctgcaccttgagtcagagctggcacagacccgggcagagggacagcgccaggcccaggagtatgaggccctgctgaacatcaaggtcaagctggaggctgagatcgccacctaccgccgcctgctggaagatggcgaggactttaatcttggtgatgccttggacagcagcaactccatgcaaaccatccaaaagaccaccacccgccggatagtggatggcaaagtggtgtctgagaccaatgacaccaaagttctgaggcattaagccagcagaagcagggtaccctttggggagcaggaggccaataaaaagttcagagttcattggatgtcactttgtcttcttttggctgttttcattgtgcacaaatgccctaacccaacagtcccatccctgatccagcagaaaccacctctgacccctgagggtttcatatagattggggtgtagaaggaagagggatctgtattcttggaaacacttctgagagacagaggagggagcagtagatgtgatgggtcacaggctgtggggatccctacaagggaattgtggaatctttgccttgaagcgatctggtgttcaaaaggtccctgactgatcattagcagaaatctgaaccagaggaggaaattaggccaaagacagaggacagaggagacagggagacacatctggccctcccctaccctgctgctttatgcccttggcccactgcccagggcttcccacccacagttttttcctccaaccccaggccatactcatcctccaaacctatggtgccctcaactctgttcattcactcaacggagatatgatttttagggtgctagaggtctggctagaagttgagtaaatgatcatggaagttcccatctaggaaagaggtgcccctgagtaagcacccatatag

SEQ ID NO: 461172 - DNA, 2162 bp, Homo sapiens
ggtgaaagcaggagagacccctctgactggaacctcttacctcccagaagccttggctgcgcggagggcgcgggggtggggcccggggcggagcggcccggggcggagggcgcgggctccgagccgtccacctgtggctccggcttccgaagcggctccggggcgggggcggggcctcactctgcgatataactcgggtcgcgcggctcgcgcaggccgccaccgtcgtccgcaaagcctgagtcctgtcctttctctctccccggacagcatgagcttcaccactcgctccaccttctccaccaactaccggtccctgggctctgtccaggcgcccagctacggcgcccggccggtcagcagcgcggccagcgtctatgcaggcgctgggggctctggttcccggatctccgtgtcccgctccaccagcttcaggggcggcatggggtccgggggcctggccaccgggatagccgggggtctggcaggaatgggaggcatccagaacgagaaggagaccatgcaaagcctgaacgaccgcctggcctcttacctggacagagtgaggagcctggagaccgagaaccggaggctggagagcaaaatccgggagcacttggagaagaagggaccccaggtcagagactggagccattacttcaagatcatcgaggacctgagggctcagatcttcgcaaatactgtggacaatgcccgcatcgttctgcagattgacaatgcccgtcttgctgctgatgactttagagtcaagtatgagacagagctggccatgcgccagtctgtggagaacgacatccatgggctccgcaaggtcattgatgacaccaatatcacacgactgcagctggagacagagatcgaggctctcaaggaggagctgctcttcatgaagaagaaccacgaagagatgcccccaaatctcaggacctcgccaagatcatggcagacatccggggcccaatatgacgagctggctcggaagaaccgagaggagctagacaagtactggtctcagcagattgaggagagcaccacagtggtcaccacacagtctgctgaggttggagctgctgagacgacgctcacagagctgagacgtacagtccagtccttggagatcgacctggactccatgagaaatctgaaggccagcttggagaacagcctgagggaggtggaggcccgctacgccctacagatggagcagctcaacgggatcctgctgcaccttgagtcagagctggcacagacccgggcagagggacagcgccaggcccaggagtatgaggccctgctgaacatcaaggtcaagctggaggctgagatcgccacctaccgccgcctgctggaagatggcgaggactttaatcttggtgatgccttggacagcagcaactccatgcaaaccatccaaaagaccaccacccgccggatagtggatggcaaagtggtgtctgagaccaatgacaccaaagttctgaggcattaagccagcagaagcagggtaccctttggggagcaggaggccaataaaaagttcagagttcattggatgtcactttgtcttcttttggctgttttcattgtgcacaaatgccctaacccaacagtcccatccctgatccagcagaaaccacctctgacccctgagggtttcatatagattggggtgtagaaggaagagggatctgtattcttggaaacacttctgagagacagaggagggagcagtagatgtgatgggtcacaggctgtggggatccctacaagggaattgtggaatctttgccttgaagcgatctggtgttcaaaaggtccctgactgatcattagcagaaatctgaaccagaggaggaaattaggccaaagacagaggacagaggagacagggagacacatctggccctcccctaccctgctgctttatgcccttggcccactgcccagggcttcccacccacagttttttcctccaaccccaggccatactcatcctccaaacctatggtgccctcaactctgttcattcactcaacggagatatgatttttagggtgctagaggtctggctagaagttgagtaaatgatcatggaagttcccatctaggaaagaggtgcccctgagtaagcacccatatag

SEQ ID NO: 461173 - DNA, 2153 bp, Homo sapiens
ggtgaaagcaggagagacccctctgactggaacctcttacctcccagaagccttggctgcgcggagggcgcgggggtggggcccggggcggagcggcccggggcggagggcgcgggctccgagccgtccacctgtggctccggcttccgaagcggctccggggcgggggcggggcctcactctgcgatataactcgggtcgcgcggctcgcgcaggccgccaccgtcgtccgcaaagcctgagtcctgtcctttctctctccccggacagcatgagcttcaccactcgctccaccttctccaccaactaccggtccctgggctctgtccaggcgcccagctacggcgcccggccggtcagcagcgcggccagcgtctatgcaggcgctgggggctggccaccgggatagccgggggtctggcaggaatgggaggcatccagaacgagaaggagaccatgcaaagcctgaacgaccgcctggcctcttacctggacagagtgaggagcctggagaccgagaaccggaggctggagagcaaaatccgggagcacttggagaagaagggaccccaggtcagagactggagccattacttcaagatcatcgaggacctgagggctcagatcttcgcaaatactgtggacaatgcccgcatcgttctgcagattgacaatgcccgtcttgctgctgatgactttagagtcaagtatgagacagagctggccatgcgccagtctgtggagaacgacatccatgggctccgcaaggtcattgatgacaccaatatcacacgactgcagctggagacagagatcgaggctctcaaggaggagctgctcttcatgaagaagaaccacgaagaggaagtaaaaggcctacaagcccagattgccagctctgggttgaccgtggaggtagatgcccccaaatctcaggacctcgccaagatcatggcagacatccggggcccaatatgacgagctggctcggaagaaccgagaggagctagacaagtactggtctcagcagattgaggagagcaccacagtggtcaccacacagtctgctgaggttggagctgctgagacgacgctcacagagctgagacgtacagtccagtccttggagatcgacctggactccatgagaaatctgaaggccagcttggagaacagcctgagggaggtggaggcccgctacgccctacagatggagcagctcaacgggatcctgctgcaccttgagtcagagctggcacagacccgggcagagggacagcgccaggcccaggagtatgaggccctgctgaacatcaaggtcaagctggaggctgagatcgccacctaccgccgcctgctggaagatggcgaggactttaatcttggtgatgccttggacagcagcaactccatgcaaaccatccaaaagaccaccacccgccggatagtggatggcaaagtggtgtctgagaccaatgacaccaaagttctgaggcattaagccagcagaagcagggtaccctttggggagcaggaggccaataaaaagttcagagttcattggatgtcactttgtcttcttttggctgttttcattgtgcacaaatgccctaacccaacagtcccatccctgatccagcagaaaccacctctgacccctgagggtttcatatagattggggtgtagaaggaagagggatctgtattcttggaaacacttctgagagacagaggagggagcagtagatgtgatgggtcacaggctgtggggatccctacaagggaattgtggaatctttgccttgaagcgatctggtgttcaaaaggtccctgactgatcattagcagaaatctgaaccagaggaggaaattaggccaaagacagaggacagaggagacagggagacacatctggccctcccctaccctgctgctttatgcccttggcccactgcccagggcttcccacccacagttttttcctccaaccccaggccatactcatcctccaaacctatggtgccctcaactctgttcattcactcaacggagatatgatttttagggtgctagaggtctggctagaagttgagtaaatgatcatggaagttcccatctaggaaagaggtgcccctgagtaagcacccatatag

SEQ ID NO: 461174 - DNA, 1888 bp, Homo sapiens
tatgctaggtacgagctgggttaaatggcgagcaaagcctgagtcctgtcctttctctctccccggacagcatgagcttcaccactcgctccaccttctccaccaactaccggtccctgggctctgtccaggcgcccagctacggcgcccggccggtcagaatgggaggcatccagaacgagaaggagaccatgcaaagcctgaacgaccgcctggcctcttacctggacagagtgaggagcctggagaccgagaaccggaggctggagagcaaaatccgggagcacttggagaagaagggaccccaggtcagagactggagccattacttcaagatcatcgaggacctgagggctcagatcttcgcaaatactgtggacaatgcccgcatcgttctgcagattgacaatgcccgtcttgctgctgatgactttagagtcaagtatgagacagagctggccatgcgccagtctgtggagaacgacatccatgggctccgcaaggtcattgatgacaccaatatcacacgactgcagctggagacagagatcgaggctctcaaggaggagctgctcttcatgaagaagaaccacgaagaggaagtaaaaggcctacaagcccagattgccagctctgggttgaccgtggaggtagatgcccccaaatctcaggacctcgccaagatcatggcagacatccggggcccaatatgacgagctggctcggaagaaccgagaggagctagacaagtactggtctcagcagattgaggagagcaccacagtggtcaccacacagtctgctgaggttggagctgctgagacgacgctcacagagctgagacgtacagtccagtccttggagatcgacctggactccatgagaaatctgaaggccagcttggagaacagcctgagggaggtggaggcccgctacgccctacagatggagcagctcaacgggatcctgctgcaccttgagtcagagctggcacagacccgggcagagggacagcgccaggcccaggagtatgaggccctgctgaacatcaaggtcaagctggaggctgagatcgccacctaccgccgcctgctggaagatggcgaggactttaatcttggtgatgccttggacagcagcaactccatgcaaaccatccaaaagaccaccacccgccggatagtggatggcaaagtggtgtctgagaccaatgacaccaaagttctgaggcattaagccagcagaagcagggtaccctttggggagcaggaggccaataaaaagttcagagttcattggatgtcactttgtcttcttttggctgttttcattgtgcacaaatgccctaacccaacagtcccatccctgatccagcagaaaccacctctgacccctgagggtttcatatagattggggtgtagaaggaagagggatctgtattcttggaaacacttctgagagacagaggagggagcagtagatgtgatgggtcacaggctgtggggatccctacaagggaattgtggaatctttgccttgaagcgatctggtgttcaaaaggtccctgactgatcattagcagaaatctgaaccagaggaggaaattaggccaaagacagaggacagaggagacagggagacacatctggccctcccctaccctgctgctttatgcccttggcccactgcccagggcttcccacccacagttttttcctccaaccccaggccatactcatcctccaaacctatggtgccctcaactctgttcattcactcaacggagatatgatttttagggtgctagaggtctggctagaagttgagtaaatgatcatggaagttcccatctaggaaagaggtgcccctgagtaagcacccatatag

SEQ ID NO: 461175 - DNA, 1303 bp, Homo sapiens
  misc_feature (1)..(1): n is a, c, g, or t
  misc_feature (7)..(8): n is a, c, g, or t
  misc_feature (15)..(15): n is a, c, g, or t
  misc_feature (26)..(26): n is a, c, g, or t
nttggcnntgagcgngtttttacacnaccagcgacatgattgccagctctgggttgaccgtggaggtagatgcccccaaatctcaggacctcgccaagatcatggcagacatccggggcccaatatgacgagctggctcggaagaaccgagaggagctagacaagtactggtctcagcagattgaggagagcaccacagtggtcaccacacagtctgctgaggttggagctgctgagacgacgctcacagagctgagacgtacagtccagtccttggagatcgacctggactccatgagaaatctgaaggccagcttggagaacagcctgagggaggtggaggcccgctacgccctacagatggagcagctcaacgggatcctgctgcaccttgagtcagagctggcacagacccgggcagagggacagcgccaggcccaggagtatgaggccctgctgaacatcaaggtcaagctggaggctgagatcgccacctaccgccgcctgctggaagatggcgaggactttaatcttggtgatgccttggacagcagcaactccatgcaaaccatccaaaagaccaccacccgccggatagtggatggcaaagtggtgtctgagaccaatgacaccaaagttctgaggcattaagccagcagaagcagggtaccctttggggagcaggaggccaataaaaagttcagagttcattggatgtcactttgtcttcttttggctgttttcattgtgcacaaatgccctaacccaacagtcccatccctgatccagcagaaaccacctctgacccctgagggtttcatatagattggggtgtagaaggaagagggatctgtattcttggaaacacttctgagagacagaggagggagcagtagatgtgatgggtcacaggctgtggggatccctacaagggaattgtggaatctttgccttgaagcgatctggtgttcaaaaggtccctgactgatcattagcagaaatctgaaccagaggaggaaattaggccaaagacagaggacagaggagacagggagacacatctggccctcccctaccctgctgctttatgcccttggcccactgcccagggcttcccacccacagttttttcctccaaccccaggccatactcatcctccaaacctatggtgccctcaactctgttcattcactcaacggagatatgatttttagggtgctagaggtctggctagaagttgagtaaatgatcatggaagttcccatctaggaaagaggtgcccctgagtaagcacccatatag

SEQ ID NO: 461176 - DNA, 1216 bp, Homo sapiens
caattcagctcggtacctgtaacatccggggcccaatatgacgagctggctcggaagaaccgagaggagctagacaagtactggtctcagcagattgaggagagcaccacagtggtcaccacacagtctgctgaggttggagctgctgagacgacgctcacagagctgagacgtacagtccagtccttggagatcgacctggactccatgagaaatctgaaggccagcttggagaacagcctgagggaggtggaggcccgctacgccctacagatggagcagctcaacgggatcctgctgcaccttgagtcagagctggcacagacccgggcagagggacagcgccaggcccaggagtatgaggccctgctgaacatcaaggtcaagctggaggctgagatcgccacctaccgccgcctgctggaagatggcgaggactttaatcttggtgatgccttggacagcagcaactccatgcaaaccatccaaaagaccaccacccgccggatagtggatggcaaagtggtgtctgagaccaatgacaccaaagttctgaggcattaagccagcagaagcagggtaccctttggggagcaggaggccaataaaaagttcagagttcattggatgtcactttgtcttcttttggctgttttcattgtgcacaaatgccctaacccaacagtcccatccctgatccagcagaaaccacctctgacccctgagggtttcatatagattggggtgtagaaggaagagggatctgtattcttggaaacacttctgagagacagaggagggagcagtagatgtgatgggtcacaggctgtggggatccctacaagggaattgtggaatctttgccttgaagcgatctggtgttcaaaaggtccctgactgatcattagcagaaatctgaaccagaggaggaaattaggccaaagacagaggacagaggagacagggagacacatctggccctcccctaccctgctgctttatgcccttggcccactgcccagggcttcccacccacagttttttcctccaaccccaggccatactcatcctccaaacctatggtgccctcaactctgttcattcactcaacggagatatgatttttagggtgctagaggtctggctagaagttgagtaaatgatcatggaagttcccatctaggaaagaggtgcccctgagtaagcacccatatag

SEQ ID NO: 461177 - DNA, 1244 bp, Homo sapiens
  misc_feature (871)..(871): n is a, c, g, or t
  misc_feature (900)..(900): n is a, c, g, or t
ggtgaaagcaggagagacccctctgactggaacctcttacctcccagaagccttggctgcgcggagggcgcgggggtggggcccggggcggagcggcccggggcggagggcgcgggctccgagccgtccacctgtggctccggcttccgaagcggctccggggcgggggcggggcctcactctgcgatataactcgggtcgcgcggctcgcgcaggccgccaccgtcgtccgcaaagcctgagtcctgtcctttctctctccccggacagcatgagcttcaccactcgctccaccttctccaccaactaccggtccctgggctctgtccaggcgcccagctacggcgcccggccggtcagcagcgcggccagcgtctatgcaggcgctgggggctctggttcccggatctccgtgtcccgctccaccagcttcaggggcggcatggggtccgggggcctggccaccgggatagccgggggtctggcaggaatgggaggcatccagaacgagaaggagaccatgcaaagcctgaacgaccgcctggcctcttacctggacagagtgaggagcctggagaccgagaaccggaggctggagagcaaaatccgggagcacttggagaagaagggaccccaggtcagagactggagccattacttcaagatcatcgaggacctgagggctcagatcttcgcaaatactgtggacaatgcccgcatcgttctgcagattgacaatgcccgtcttgctgctgatgactttagagtcaagtatgagacagagctggccatgcgccagtctgtggagaacgacatccatgggctccgcaaggtcattgaattttggaaccaccaatatcacacgacttgncaaaggcagtgggggagacagagatcganggggctcctcaaaaggaggagctggcatcctttcatgaaacgcaacagaaccaacgaaaacgcaggaagtaaacaacaaacggggccctaaaccaaaaaggccccagatttggccccaaggctttcctgggggcctttgggaacccgggtggccaggcttaagcaacttttggccccccctctagaacaacttcccttccaagcgggaaaaaccccatattcgaaccccaaaaaaggaaattccacttggggggccatatcggaaaccaatttccccggtgggcccccaaaagtacttggaaacggaagactgtggcccttccggcggcaaggaaaacccgaag

SEQ ID NO: 461178 - DNA, 978 bp, Homo sapiens
aaactaggctaggtacgaggctgggtgtgaatcggccgaggcaaagcctgagtcctgtcctttctctctccccggacagcatgagcttcaccactcgctccaccttctccaccaactaccggtccctgggctctgtccaggcgcccagctacggcgcccggccggtcagcagcgcggccagcgtctatgcaggcgctgggggctctggttcccggatctccgtgtcccgctccaccagcttcaggggcggcatggggtccgggggcctggccaccgggatagccgggggtctggcaggaatgggaggcatccagaacgagaaggagaccatgcaaagcctgaacgaccgcctggcctcttacctggacagagtgaggagcctggagaccgagaaccggaggctggagagcaaaatccgggagcacttggagaagaagggaccccaggtcagagactggagccattacttcaagatcatcgaggacctgagggctcagatcttcgcaaatactgtggacaatgcccgcatcgttctgcagattgacaatgcccgtcttgctgctgatgactttagagtcaagtatgagacagagctggccatgcgccagtctgtggagaacgacatccatgggctccgcaaggtcattgatgacaccaatatcacacgactgcagctggagacagagatcgaggctctcaaggaggagctgctcttcatgaagaagaaccacgaagaggaagtaaaaggcctacaagcccagattgccagctctgggttgaccgtggaggtagatgcccccaaatctcaggacctcgccaagatcatggcagacatccggggcccaatatgacgagctggctcggaagaaccgagaggagctagacaagtactggtctcagcagatgaggaaagcccgtggtccccaccacctgccgggttgggcgtgagaagcccacagataagacatccctctgatc

SEQ ID NO: 461179 - DNA, 244 bp, Homo sapiens
attcgtggtgctgctcggcgaattcgtggtgctgctcggcgaattcgtggtgctgctcggcgaattcgtggtgctgctcggcgaattcgtggtgctgctcggcgaattcgtggtgctgctgagacgacgctcacagagctgagacgtacagtccagtccttggagatcgacctggactccatgagaaatctggtgagtgccttcacatcagctgcccagctcctccttcacttggcctcagacc

SEQ ID NO: 461180 - DNA, 1724 bp, Homo sapiens
ggtgaaagcaggagagacccctctgactggaacctcttacctcccagaagccttggctgcgcggagggcgcgggggtggggcccggggcggagcggcccggggcggagggcgcgggctccgagccgtccacctgtggctccggcttccgaagcggctccggggcgggggcggggcctcactctgcgatataactcgggtcgcgcggctcgcgcaggccgccaccgtcgtccgcaaagcctgagtcctgtcctttctctctccccggacagcatgagcttcaccactcgctccaccttctccaccaactaccggtccctgggctctgtccaggcgcccagctacggcgcccggccggtcagcagcgcggccagcgtctatgcaggcgctgggggctctggttcccggatctccgtgtcccgctccaccagcttcaggggcggcatggggtccgggggcctggccaccgggatagccgggggtctggcaggaatgggaggcatccagaacgagaaggagaccatgcaaagcctgaacgaccgcctggcctcttacctggacagagtgaggagcctggagaccgagaaccggaggctggagagcaaaatccgggagcacttggagaagaagggaccccaggtcagagactggagccattacttcaagatcatcgaggacctgagggctcagatcttcgcaaatactgtggacaatgcccgcatcgttctgcagattgacaatgcccgtcttgctgctgatgactttagagtcaagtatgagacagagctggccatgcgccagtctgtggagaacgacatccatgggctccgcaaggtcattgatgacaccaatatcacacgactgcagctggagacagagatcgaggctctcaaggaggagctgctcttcatgaagaagaaccacgaagaggaagtaaaaggcctacaagcccagattgccagctctgggttgaccgtggaggtagatgcccccaaatctcaggacctcgccaagatcatggcagacatccggggcccaatatgacgagctggctcggaagaaccgagaggagctagacaagtactggtctcagcagattgaggagagcaccacagtggtcaccacacagtctgctgaggttggagctgctgagacgacgctcacagagctgagacgtacagtccagtccttggagatcgacctggactccatgagaaatctgaaggccagcttggagaacagcctgagggaggtggaggcccgctacgccctacagatggagcagctcaacgggatcctgctgcaccttgagtcagagctggcacagacccgggcagagggacagcgccaggcccaggagtatgaggccctgctgaacatcaaggtcaagctggaggctgagatcgccacctaccgccgcctgctggaagatggcgaggactttaatcttggtgatgccttggacagcagcaactccatgcaaaccatccaaaagaccaccacccgccggatagtggatggcaaagtggtgtctgagaccaatgacaccaaagttctgaggcattaagccagcagaagcagggtaccctttggggagcaggaggccaataaaaagttcagagtaaaaaaaaaggggagataccatgatcacgaaggtggttttcccagggcgaggcttatccattgcactccggatgtgctgacccctgcgatttcccgtcgacgc

SEQ ID NO: 461181 - DNA, 2140 bp, Homo sapiens
ggtgaaagcaggagagacccctctgactggaacctcttacctcccagaagccttggctgcgcggagggcgcgggggtggggcccggggcggagcggcccggggcggagggcgcgggctccgagccgtccacctgtggctccggcttccgaagcggctccggggcgggggcggggcctcactctgcgatataactcgggtcgcgcggctcgcgcaggccgccaccgtcgtccgcaaagcctgagtcctgtcctttctctctccccggacagcatgagcttcaccactcgctccaccttctccaccaactaccggtccctgggctctgtccaggcgcccagctacggcgcccggccggtcagcagcgcggccagcgtctatgcaggcgctgggggctctggttcccggatctccgtgtcccgctccaccagcttcaggggcggcatggggtccgggggcctggccaccgggatagccgggggtctggcaggaatgggaggcatccagaacgagaaggagaccatgcaaagcctgaacgaccgcctggcctcttacctggacagagtgaggagcctggagaccgagaaccggaggctggagagcaaaatccgggagcacttggagaagaagggaccccaggtcagagactggagccattacttcaagatcatcgaggacctgagggctcagatcttcgcaaatactgtggacaatgcccgcatcgttctgcagattgacaatgcccgtcttgctgctgatgactttagagtcaagtatgagacagagctggccatgcgccagtctgtggagaacgacatccatgggctccgcaaggtcattgatgacaccaatatcacacgactgcagctggagacagagatcgaggctctcaaggaggagctgctcttcatgaagaagaaccacgaagaggaagtaaaaggcctacaagcccagattgccagctctgggttgaccgtggaggtagatgcccccaaatctcaggacctcgccaagatcatggcagacatccggggcccaatatgacgagctggctcggaagaaccgagaggagctagacaagtactggtctcagcagattgaggagagcaccacagtggtcaccacacagtctgctgaggttggagctgctgagacgacgctcacagagctgagacgtacagtccagtccttggagatcgacctggactccatgagaaatctgaaggccagcttggagaacagcctgagggaggtggaggcccgctacgccctacagatggagcagctcaacgggatcctgctgcaccttgagtcagagctggcacagacccgggcagagggacagcgccaggcccaggagtatgaggccctgctgaacatcaaggtcaagctggaggctgagatcgccacctaccgccgcctgctggaagatggcgaggactttaatcttggtgatgccttggacagcagcaactccatgcaaaccatccaaaagaccaccacccgccggatagtggatggcaaagtggtgtctgagaccaatgacaccaaagttctgaggcattaagccagcagaagcagggtaccctttggggagcaggaggccaataaaaagttcagagttaaaaagtttccagagttcaaaaaaaaaaaaaaaaaaaaaaaaaaaaaaaaaaaaaaaaaaaaaaaaaaaaaaaaaaaaaaaaaaagagagggggggcgcgcgccaaaaaatcccccggggggcccaaaaaaaaagcggacccccatttttgggaaaaaaggggggcccaccaaagggaggagaggagaatatatatataagacgagagagagcggggggccgggaaataaacaacagggtggaacagaggcgagaacaaacaaaaaggagcgcaaaaaaacgagagcagaacacacacaaaacaacaaccgaagacgcaacaaacaaagacacccacaacaccaaccacaaaaaaaaacaaagcgcaagagaaaggagacaccagcagaggccgagaaaccaaaaaacaaaccgcgaggagagaaacaacacaacaacgcacaaccagaccaaacccccaccaaagacaaagcgacagaacagacagaacaacacaaacaagacaacaaaaaagacaa

SEQ ID NO: 461182 - DNA, 2302 bp, Homo sapiens
ggtgaaagcaggagagacccctctgactggaacctcttacctcccagaagccttggctgcgcggagggcgcgggggtggggcccggggcggagcggcccggggcggagggcgcgggctccgagccgtccacctgtggctccggcttccgaagcggctccggggcgggggcggggcctcactctgcgatataactcgggtcgcgcggctcgcgcaggccgccaccgtcgtccgcaaagcctgagtcctgtcctttctctctccccggacagcatgagcttcaccactcgctccaccttctccaccaactaccggtccctgggctctgtccaggcgcccagctacggcgcccggccggtcagcagcgcggccagcgtctatgcaggcgctgggggctctggttcccggatctccgtgtcccgctccaccagcttcaggggcggcatggggtccgggggcctggccaccgggatagccgggggtctggcaggaatgggaggcatccagaacgagaaggagaccatgcaaagcctgaacgaccgcctggcctcttacctggacagagtgaggagcctggagaccgagaaccggaggctggagagcaaaatccgggagcacttggagaagaagggaccccaggtcagagactggagccattacttcaagatcatcgaggacctgagggctcagatcttcgcaaatactgtggacaatgcccgcatcgttctgcagattgacaatgcccgtcttgctgctgatgactttagagtcaagtatgagacagagctggccatgcgccagtctgtggagaacgacatccatgggctccgcaaggtcattgatgacaccaatatcacacgactgcagctggagacagagatcgaggctctcaaggaggagctgctcttcatgaagaagaaccacgaagaggaagtaaaaggcctacaagcccagattgccagctctgggttgaccgtggaggtagatgcccccaaatctcaggacctcgccaagatcatggcagacatccggggcccaatatgacgagctggctcggaagaaccgagaggagctagacaagtactggtctcagcaggtgcgtgaggggaggggatggctgccaaggtgtgggagggaggcagacggaatgaggggcctgatggactgtccccatcctgcagattgaggagagcaccacagtggtcaccacacagtctgctgaggttggagctgctgagacgacgctcacagagctgagacgtacagtccagtccttggagatcgacctggactccatgagaaatctgaaggccagcttggagaacagcctgagggaggtggaggcccgctacgccctacagatggagcagctcaacgggatcctgctgcaccttgagtcagagctggcacagacccgggcagagggacagcgccaggcccaggagtatgaggccctgctgaacatcaaggtcaagctggaggctgagatcgccacctaccgccgcctgctggaagatggcgaggactttaatcttggtgatgccttggacagcagcaactccatgcaaaccatccaaaagaccaccacccgccggatagtggatggcaaagtggtgtctgagaccaatgacaccaaagttctgaggcattaagccagcagaagcagggtaccctttggggagcaggaggccaataaaaagttcagagttcattggatgtcactttgtcttcttttggctgttttcattgtgcacaaatgccctaacccaacagtcccatccctgatccagcagaaaccacctctgacccctgagggtttcatatagattggggtgtagaaggaagagggatctgtattcttggaaacacttctgagagacagaggagggagcagtagatgtgatgggtcacaggctgtggggatccctacaagggaattgtggaatctttgccttgaagcgatctggtgttcaaaaggtccctgactgatcattagcagaaatctgaaccagaggaggaaattaggccaaagacagaggacagaggagacagggagacacatctggccctcccctaccctgctgctttatgcccttggcccactgcccagggcttcccacccacagttttttcctccaaccccaggccatactcatcctccaaacctatggtgccctcaactctgttcattcactcaacggagatatgatttttagggtgctagaggtctggctagaagttgagtaaatgatcatggaagttcccatctaggaaagaggtgcccctgagtaagcacccatatag

SEQ ID NO: 461183 - DNA, 2021 bp, Homo sapiens
aacataggtcagtacaggccgggttatcgtcgcaagcaaagcctgagtcctgtcctttctctctccccggacagcatgagcttcaccactcgctccaccttctccaccaactaccggtccctgggctctgtccaggcgcccagctacggcgcccggccggtcagcagcgcggccagcgtctatgcaggcgctgggggctctggttcccggatctccgtgtcccgctccaccagcttcaggggcggcatggggtccgggggcctggccaccgggatagccgggggtctggcaggaatgggaggcatccagaacgagaaggagaccatgcaaagcctgaacgaccgcctggcctcttacctggacagagtgaggagcctggagaccgagaaccggaggctggagagcaaaatccgggagcacttggagaagaagggaccccaggtcagagactggagccattacttcaagatcatcgaggacctgagggctcagatcttcgcaaatactgtggacaatgcccgcatcgttctgcagattgacaatgcccgtcttgctgctgatgactttagagtcaagtatgagacagagctggccatgcgccagtctgtggagaacgacatccatgggctccgcaaggtcattgatgacaccaatatcacacgactgcagctggagacagagatcgaggctctcaaggaggagctgctcttcatgaagaagaaccacgaagaggaagtaaaaggcctacaagcccagattgccagctctgggttgaccgtggaggtagatgcccccaaatctcaggacctcgccaagatcatggcagacatccggggcccaatatgacgagctggctcggaagaaccgagaggagctagacaagtactggtctcagcagattgaggagagcaccacagtggtcaccacacagtctgctgaggttggagctgctgagacgacgctcacagagctgagacgtacagtccagtccttggagatcgacctggactccatgagaaatctgaaggccagcttggagaacagcctgagggaggtggaggcccgctacgccctacagatggagcagctcaacgggatcctgctgcaccttgagtcagagctggcacagacccgggcagagggacagcgccaggcccaggagtatgaggccctgctgaacatcaaggtcaagctggaggctgagatcgccacctaccgccgcctgctggaagatggcgaggactttaatcttggtgatgccttggacagcagcaactccatgcaaaccatccaaaagaccaccacccgccggatagtggatggcaaagtggtgtctgagaccaatgacaccaaagttctgaggcattaagccagcagaagcagggtaccctttggggagcaggaggccaataaaaagttcagagttcattggatgtcactttgtcttcttttggctgttttcattgtgcacaaatgccctaacccaacagtcccatccctgatccagcagaaaccacctctgacccctgagggtttcatatagattggggtgtagaaggaagagggatctgtattcttggaaacacttctgagagacagaggagggagcagtagatgtgatgggtcacaggctgtggggatccctacaagggaattgtggaatctttgccttgaagcgatctggtgttcaaaaggtccctgactgatcattagcagaaatctgaaccagaggaggaaattaggccaaagacagaggacagaggagacagggagacacatctggccctcccctaccctgctgctttatgcccttggcccactgcccagggcttcccacccacagttttttcctccaaccccaggccatactcatcctccaaacctatggtgccctcaactctgttcattcactcaacggagatatgatttttagggtgctagaggtctggctagaagttgagtaaatgatcatggaagttcccatctaggaaagaggtgcccctgagtaagcacccatatag

SEQ ID NO: 461184 - DNA, 1958 bp, Homo sapiens
ggtgaaagcaggagagacccctctgactggaacctcttacctcccagaagccttggctgcgcggagggcgcgggggtggggcccggggcggagcggcccggggcggagggcgcgggctccgagccgtccacctgtggctccggcttccgaagcggctccggggcgggggcggggcctcactctgcgatataactcgggtcgcgcggctcgcgcaggccgccaccgtcgtccgcaaagcctgagtcctgtcctttctctctccccggacagcatgagcttcaccactcgctccaccttctccaccaactaccggtccctgggctctgtccaggcgcccagctacggcgcccggccggtcagcagcgcggccagcgtctatgcaggcgctgggggctctggttcccggatctccgtgtcccgctccaccagcttcaggggcggcatggggtccgggggcctggccaccgggatagccgggggtctggcaggaatgggaggcatccagaacgagaaggagaccatgcaaagcctgaacgaccgcctggcctcttacctggacagagtgaggagcctggagaccgagaaccggaggctggagagcaaaatccgggagcacttggagaagaagggaccccaggtcagagactggagccattacttcaagatcatcgaggacctgagggctcagatcttcgcaaatactgtggacaatgcccgcatcgttctgcagattgacaatgcccgtcttgctgctgatgactttagagtcaagtatgagacagagctggccatgcgccagtctgtggagaacgacatccatgggctccgcaaggtcattgatgacaccaatatcacacgactgcagctggagacagagatcgaggctctcaaggaggagctgctcttcatgaagaagaaccacgaagaggaagtaaaaggcctacaagcccagattgccagctctgggttgaccgtggaggtagatgcccccaaatctcaggacctcgccaagatcatggcagacatccggggcccaatatgacgagctggctcggaagaaccgagaggagctagacaagtactggtctcagcagattgaggagagcaccacagtggtcaccacacagtctgctgaggttggagctgctgagacgacgctcacagagctgagacgtacagtccagtccttggagatcgacctggactccatgagaaatctgaaggccagcttggagaacagcctgagggaggtggaggcccgctacgccctacagatggagcagctcaacgggatcctgctgcaccttgagtcagagctggcacagacccgggcagagggacagcgccaggcccaggagtatgaggccctgctgaacatcaaggtcaagctggaggctgagatcgccacctaccgccgcctgctggaagatggcgaggactttaagtgagtggggctctcctacccacacgtgctgggatcaggagatcacttctccccaaagtctgagcttttggaagcaccccatgtgtctgttcactggtatccactgagcactgggccgttgctccgtgggtgctcctgtgtcttcaagggagtaacagttacagaggtctcccccttgaagaaagcaaactaagtattgtccctagctgtacttagtatgcaaatgaagtttggccttgagtttcccttttgtcaggaggctttttccctctacctttcttgtctcccttctactccacggggctgtttataacttgggcttggtcttctgttacagtcttggtgatgccttggacagcagcaactccatgcaaaccatccaaaagaccaccacccgccggatagtggatggcaaagtggtgtctgagaccaatgacaccaaagttctgaggcattaagccagcagaagcagggtaccctttggggagcaggaggccaataaaaagttcagagt

SEQ ID NO: 461185 - DNA, 1480 bp, Homo sapiens
ggtgaaagcaggagagacccctctgactggaacctcttacctcccagaagccttggctgcgcggagggcgcgggggtggggcccggggcggagcggcccggggcggagggcgcgggctccgagccgtccacctgtggctccggcttccgaagcggctccggggcgggggcggggcctcactctgcgatataactcgggtcgcgcggctcgcgcaggccgccaccgtcgtccgcaaagcctgagtcctgtcctttctctctccccggacagcatgagcttcaccactcgctccaccttctccaccaactaccggtccctgggctctgtccaggcgcccagctacggcgcccggccggtcagcagcgcggccagcgtctatgcaggcgctgggggctctggttcccggatctccgtgtcccgctccaccagcttcaggggcggcatggggtccgggggcctggccaccgggatagccgggggtctggcaggaatgggaggcatccagaacgagaaggagaccatgcaaagcctgaacgaccgcctggcctcttacctggacagagtgaggagcctggagaccgagaaccggaggctggagagcaaaatccgggagcacttggagaagaagggaccccaggtcagagactggagccattacttcaagatcatcgaggacctgagggctcagatcttcgcaaatactgtggacaatgcccgcatcgttctgcagattgacaatgcccgtcttgctgctgatgactttagagtcaagtatgagacagagctggccatgcgccagtctgtggagaacgacatccatgggctccgcaaggtcattgatgacaccaatatcacacgactgcagctggagacagagatcgaggctctcaaggaggagctgctcttcatgaagaagaaccacgaagaggaagtaaaaggcctacaagcccagattgccagctctgggttgaccgtggaggtagatgcccccaaatctcaggacctcgccaagatcatggcagacatccggggcccaatatgacgagctggctcggaagaaccgagaggagctagacaagtactggtctcagcagattgaggagagcaccacagtggtcaccacacagtctgctgaggttggagctgctgagacgacgctcacagagctgagacgtacagtccagtccttggagatcgacctggactccatgagaaatctgaaggccagcttggagaacagcctgagggaggtggaggcccgctacgccctacagatggagcagctcaacgggatcctgctgcaccttgagtcagagctggcacagacccgggcagagggacagcgccaggcccaggagtatgaggccctgctgaacatcaaggtcaagctggaggctgagatcgccacctaccgccgcctgctggaagatggcgaggactttaatcattggtgatgccttgacagcagctcgcacaagag

SEQ ID NO: 461186 - DNA, 1224 bp, Homo sapiens
  misc_feature (1147)..(1150): n is a, c, g, or t
  misc_feature (1152)..(1152): n is a, c, g, or t
  misc_feature (1157)..(1157): n is a, c, g, or t
ggtgaaagcaggagagacccctctgactggaacctcttacctcccagaagccttggctgcgcggagggcgcgggggtggggcccggggcggagcggcccggggcggagggcgcgggctccgagccgtccacctgtggctccggcttccgaagcggctccggggcgggggcggggcctcactctgcgatataactcgggtcgcgcggctcgcgcaggccgccaccgtcgtccgcaaagcctgagtcctgtcctttctctctccccggacagcatgagcttcaccactcgctccaccttctccaccaactaccggtccctgggctctgtccaggcgcccagctacggcgcccggccggtcagcagcgcggccagcgtctatgcaggcgctgggggctctggttcccggatctccgtgtcccgctccaccagcttcaggggcggcatggggtccgggggcctggccaccgggatagccgggggtctggcaggaatgggaggcatccagaacgagaaggagaccatgcaaagcctgaacgaccgcctggcctcttacctggacagagtgaggagcctggagaccgagaaccggaggctggagagcaaaatccgggagcacttggagaagaagggaccccaggtcagagactggagccattacttcaagatcatcgaggacctgagggctcagatcttcgcaaatactgtggacaatgcccgcatcgttctgcagattgacaatgcccgtcttgctgctgatgactttagagtcaagtatgagacagagctggccatgcgccagtctgtggagaacgacatccatgggctccgcaaggtcattgatgacaccaatatcacacgactgcagctggagacagagatcgaggctctcaaggaggagctgctcttcatgaagaagaaccacgaagaggaagtaaaaggcctacaagcccagattgccagctctgggttgaccgtggaggtagatgcccccaaatctcaggacctcgccaagatcatggcagacatccggggcccaatatgacgagctggctcggaagaaccgagaggagctagacaagtactggtctcagcagtgggggacccccgggtccccccagctgtgagtgggtggtggaaaacccaaacnnnnanaacanctgggaaacggagcgaaattaggccttgaaccaggggggccgacccaagaagaaagatcgcttaagg

SEQ ID NO: 461187 - DNA, 1171 bp, Homo sapiens
  misc_feature (1104)..(1104): n is a, c, g, or t
ggtgaaagcaggagagacccctctgactggaacctcttacctcccagaagccttggctgcgcggagggcgcgggggtggggcccggggcggagcggcccggggcggagggcgcgggctccgagccgtccacctgtggctccggcttccgaagcggctccggggcgggggcggggcctcactctgcgatataactcgggtcgcgcggctcgcgcaggccgccaccgtcgtccgcaaagcctgagtcctgtcctttctctctccccggacagcatgagcttcaccactcgctccaccttctccaccaactaccggtccctgggctctgtccaggcgcccagctacggcgcccggccggtcagcagcgcggccagcgtctatgcaggcgctgggggctctggttcccggatctccgtgtcccgctccaccagcttcaggggcggcatggggtccgggggcctggccaccgggatagccgggggtctggcaggaatgggaggcatccagaacgagaaggagaccatgcaaagcctgaacgaccgcctggcctcttacctggacagagtgaggagcctggagaccgagaaccggaggctggagagcaaaatccgggagcacttggagaagaagggaccccaggtcagagactggagccattacttcaagatcatcgaggacctgagggctcagatcttcgcaaatactgtggacaatgcccgcatcgttctgcagattgacaatgcccgtcttgctgctgatgactttagagtcaagtatgagacagagctggccatgcgccagtctgtggagaacgacatccatgggctccgcaaggtcattgatgacaccaatatcacacgactgcagctggagacagagatcgaggctctcaaggaggagctgctcttcatgaagaagaaccacgaagaggaagtaaaaggcctacaagcccagattgccagctctgggttgaccgtggaggtagatgcccccaaatctcaggacctcgccaagatcatggcagacatccggggcccaatatgacgagctggctcggaagaaccgagaggagctagacaagtactggtctcagcagatgggggagncccagggggcacaacagctgccgaggtgggagaccggaaggaagccaaagggaggagaaagcaagcg

SEQ ID NO: 461188 - DNA, 1357 bp, Homo sapiens
ggtgaaagcaggagagacccctctgactggaacctcttacctcccagaagccttggctgcgcggagggcgcgggggtggggcccggggcggagcggcccggggcggagggcgcgggctccgagccgtccacctgtggctccggcttccgaagcggctccggggcgggggcggggcctcactctgcgatataactcgggtcgcgcggctcgcgcaggccgccaccgtcgtccgcaaagcctgagtcctgtcctttctctctccccggacagcatgagcttcaccactcgctccaccttctccaccaactaccggtccctgggctctgtccaggcgcccagctacggcgcccggccggtcagcagcgcggccagcgtctatgcaggcgctgggggctctggttcccggatctccgtgtcccgctccaccagcttcaggggcggcatggggtccgggggcctggccaccgggatagccgggggtctggcaggaatgggaggcatccagaacgagaaggagaccatgcaaagcctgaacgaccgcctggcctcttacctggacagagtgaggagcctggagaccgagaaccggaggctggagagcaaaatccgggagcacttggagaagaagggaccccaggtcagagactggagccattacttcaagatcatcgaggacctgagggctcagatcttcgcaaatactgtggacaatgcccgcatcgttctgcagattgacaatgcccgtcttgctgctgatgactttagagtcaagtatgagacagagctggccatgcgccagtctgtggagaacgacatccatgggctccgcaaggtcattgatgacaccaatatcacacgactgcagctggagacagagatcgaggctctcaaggaggagctgctcttcatgaagaagaaccacgaagaggaagtaaaaggcctacaagcccagattgccagctctgggttgaccgtggaggtagatgcccccaaatctcaggacctcgccaagatcatggcagacatccggggcccaatatgacgagctggctcggaagaaccgagaggagctagacaagtactggtctcagcaggtgcgtgaggggaggggatggctgccaaggtgtgggagggaggcagacggaatgaggggcctgatggactgtccccatcctgcagattgaggagagcaccacagtggtcaccacacagtctgctgaggttggagctgctgagacgacgctcacagagctgagacgtacagtccagtccttggagatcgacctggactccatgagaaatctggtgagtgccttcacatcagctgcccagctcctccttcacttggcctcagacc

SEQ ID NO: 461189 - DNA, 1960 bp, Homo sapiens
cgacaaatatgcagtcgggctgtgtatcggcgaggcccttctccaccaactaccggtccctgggctctgtccaggcgcccagctacggcgcccggccggtcagcagcgcggccagcgtctatgcaggcgctgggggctctggttcccggatctccgtgtcccgctccaccagcttcaggggcggcatggggtccgggggcctggccaccgggatagccgggggtctggcaggaatgggaggcatccagaacgagaaggagaccatgcaaagcctgaacgaccgcctggcctcttacctggacagagtgaggagcctggagaccgagaaccggaggctggagagcaaaatccgggagcacttggagaagaagggaccccaggtcagagactggagccattacttcaagatcatcgaggacctgagggctcagatcttcgcaaatactgtggacaatgcccgcatcgttctgcagattgacaatgcccgtcttgctgctgatgactttagagtcaagtatgagacagagctggccatgcgccagtctgtggagaacgacatccatgggctccgcaaggtcattgatgacaccaatatcacacgactgcagctggagacagagatcgaggctctcaaggaggagctgctcttcatgaagaagaaccacgaagaggaagtaaaaggcctacaagcccagattgccagctctgggttgaccgtggaggtagatgcccccaaatctcaggacctcgccaagatcatggcagacatccggggcccaatatgacgagctggctcggaagaaccgagaggagctagacaagtactggtctcagcagattgaggagagcaccacagtggtcaccacacagtctgctgaggttggagctgctgagacgacgctcacagagctgagacgtacagtccagtccttggagatcgacctggactccatgagaaatctgaaggccagcttggagaacagcctgagggaggtggaggcccgctacgccctacagatggagcagctcaacgggatcctgctgcaccttgagtcagagctggcacagacccgggcagagggacagcgccaggcccaggagtatgaggccctgctgaacatcaaggtcaagctggaggctgagatcgccacctaccgccgcctgctggaagatggcgaggactttaatcttggtgatgccttggacagcagcaactccatgcaaaccatccaaaagaccaccacccgccggatagtggatggcaaagtggtgtctgagaccaatgacaccaaagttctgaggcattaagccagcagaagcagggtaccctttggggagcaggaggccaataaaaagttcagagttcattggatgtcactttgtcttcttttggctgttttcattgtgcacaaatgccctaacccaacagtcccatccctgatccagcagaaaccacctctgacccctgagggtttcatatagattggggtgtagaaggaagagggatctgtattcttggaaacacttctgagagacagaggagggagcagtagatgtgatgggtcacaggctgtggggatccctacaagggaattgtggaatctttgccttgaagcgatctggtgttcaaaaggtccctgactgatcattagcagaaatctgaaccagaggaggaaattaggccaaagacagaggacagaggagacagggagacacatctggccctcccctaccctgctgctttatgcccttggcccactgcccagggcttcccacccacagttttttcctccaaccccaggccatactcatcctccaaacctatggtgccctcaactctgttcattcactcaacggagatatgatttttagggtgctagaggtctggctagaagttgagtaaatgatcatggaagttcccatctaggaaagaggtgcccctgagtaagcacccatatag

SEQ ID NO: 461190 - DNA, 2052 bp, Homo sapiens
agctttctacactcatccgtaaggccgcgagtcctgtgctttgttctttgccccgggtcgtatctgtttcctcaagtacgattctggctttcttgcactacgatgcttgcgattcctctgcgactctgatccacgggccccgcggctacgggagccgctgtctcgggatcaagatccagcatggcagtctctcgtaatgtctatgcagctgggatctcatctaggtgcgccgtcctctccgatgctccagtatcaaattacttccacggcgggcggcatggggtccgggggcctggccaccgggatagccgggggtctggcaggaatgggaggcatccagaacgagaaggagaccatgcaaagcctgaacgaccgcctggcctcttacctggacagagtgaggagcctggagaccgagaaccggaggctggagagcaaaatccgggagcacttggagaagaagggaccccaggtcagagactggagccattacttcaagatcatcgaggacctgagggctcagatcttcgcaaatactgtggacaatgcccgcatcgttctgcagattgacaatgcccgtcttgctgctgatgactttagagtcaagtatgagacagagctggccatgcgccagtctgtggagaacgacatccatgggctccgcaaggtcattgatgacaccaatatcacacgactgcagctggagacagagatcgaggctctcaaggaggagctgctcttcatgaagaagaaccacgaagaggaagtaaaaggcctacaagcccagattgccagctctgggttgaccgtggaggtagatgcccccaaatctcaggacctcgccaagatcatggcagacatccggggcccaatatgacgagctggctcggaagaaccgagaggagctagacaagtactggtctcagcagattgaggagagcaccacagtggtcaccacacagtctgctgaggttggagctgctgagacgacgctcacagagctgagacgtacagtccagtccttggagatcgacctggactccatgagaaatctgaaggccagcttggagaacagcctgagggaggtggaggcccgctacgccctacagatggagcagctcaacgggatcctgctgcaccttgagtcagagctggcacagacccgggcagagggacagcgccaggcccaggagtatgaggccctgctgaacatcaaggtcaagctggaggctgagatcgccacctaccgccgcctgctggaagatggcgaggactttaatcttggtgatgccttggacagcagcaactccatgcaaaccatccaaaagaccaccacccgccggatagtggatggcaaagtggtgtctgagaccaatgacaccaaagttctgaggcattaagccagcagaagcagggtaccctttggggagcaggaggccaataaaaagttcagagttcattggatgtcactttgtcttcttttggctgttttcattgtgcacaaatgccctaacccaacagtcccatccctgatccagcagaaaccacctctgacccctgagggtttcatatagattggggtgtagaaggaagagggatctgtattcttggaaacacttctgagagacagaggagggagcagtagatgtgatgggtcacaggctgtggggatccctacaagggaattgtggaatctttgccttgaagcgatctggtgttcaaaaggtccctgactgatcattagcagaaatctgaaccagaggaggaaattaggccaaagacagaggacagaggagacagggagacacatctggccctcccctaccctgctgctttatgcccttggcccactgcccagggcttcccacccacagttttttcctccaaccccaggccatactcatcctccaaacctatggtgccctcaactctgttcattcactcaacggagatatgatttttagggtgctagaggtctggctagaagttgagtaaatgatcatggaagttcccatctaggaaagaggtgcccctgagtaagcacccatatag

SEQ ID NO: 461191 - DNA, 2163 bp, Homo sapiens
ggtgaaagcaggagagacccctctgactggaacctcttacctcccagaagccttggctgcgcggagggcgcgggggtggggcccggggcggagcggcccggggcggagggcgcgggctccgagccgtccacctgtggctccggcttccgaagcggctccggggcgggggcggggcctcactctgcgatataactcgggtcgcgcggctcgcgcaggccgccaccgtcgtccgcaaagcctgagtcctgtcctttctctctccccggacagcatgagcttcaccactcgctccaccttctccaccaactaccggtccctgggctctgtccaggcgcccagctacggcgcccggccggtcagcagcgcggccagcgtctatgcaggcgctgggggctctggttcccggatctccgtgtcccgctccaccagcttcaggggcggcatggggtccgggggcctggccaccgggatagccgggggtctggcaggaatgggaggcatccagaacgagaaggagaccatgcaaagcctgaacgaccgcctggcctcttacctggacagagtgaggagcctggagaccgagaaccggaggctggagagctacttcaagatcatcgaggacctgagggctcagatcttcgcaaatactgtggacaatgcccgcatcgttctgcagattgacaatgcccgtcttgctgctgatgactttagagtcaagtatgagacagagctggccatgcgccagtctgtggagaacgacatccatgggctccgcaaggtcattgatgacaccaatatcacacgactgcagctggagacagagatcgaggctctcaaggaggagctgctcttcatgaagaagaaccacgaagaggaagtaaaaggcctacaagcccagattgccagctctgggttgaccgtggaggtagatgcccccaaatctcaggacctcgccaagatcatggcagacatccggggcccaatatgacgagctggctcggaagaaccgagaggagctagacaagtactggtctcagcagattgaggagagcaccacagtggtcaccacacagtctgctgaggttggagctgctgagacgacgctcacagagctgagacgtacagtccagtccttggagatcgacctggactccatgagaaatctgaaggccagcttggagaacagcctgagggaggtggaggcccgctacgccctacagatggagcagctcaacgggatcctgctgcaccttgagtcagagctggcacagacccgggcagagggacagcgccaggcccaggagtatgaggccctgctgaacatcaaggtcaagctggaggctgagatcgccacctaccgccgcctgctggaagatggcgaggactttaatcttggtgatgccttggacagcagcaactccatgcaaaccatccaaaagaccaccacccgccggatagtggatggcaaagtggtgtctgagaccaatgacaccaaagttctgaggcattaagccagcagaagcagggtaccctttggggagcaggaggccaataaaaagttcagagttcattggatgtcactttgtcttcttttggctgttttcattgtgcacaaatgccctaacccaacagtcccatccctgatccagcagaaaccacctctgacccctgagggtttcatatagattggggtgtagaaggaagagggatctgtattcttggaaacacttctgagagacagaggagggagcagtagatgtgatgggtcacaggctgtggggatccctacaagggaattgtggaatctttgccttgaagcgatctggtgttcaaaaggtccctgactgatcattagcagaaatctgaaccagaggaggaaattaggccaaagacagaggacagaggagacagggagacacatctggccctcccctaccctgctgctttatgcccttggcccactgcccagggcttcccacccacagttttttcctccaaccccaggccatactcatcctccaaacctatggtgccctcaactctgttcattcactcaacggagatatgatttttagggtgctagaggtctggctagaagttgagtaaatgatcatggaagttcccatctaggaaagaggtgcccctgagtaagcacccatatag

SEQ ID NO: 461192 - DNA, 1239 bp, Homo sapiens
ttaaacgaggcgtctaggttggtcggcggtggtcggcggcgctctggaacaggaggaagctcagccgatgcagccggtgccgggaggtgtcccaattcgactcgccagactgcgaatggcattgcggtgtcgaaacgagagacaacgtcgtcacgatggaagacaagggtacaacagtcgtgagtgagctgcggagaccccgagcggacgtcgtccgtctggaacgctgacccagagaatctaaggccagcttggagaacagcctgagggaggtggaggcccgctacgccctacagatggagcagctcaacgggatcctgctgcaccttgagtcagagctggcacagacccgggcagagggacagcgccaggcccaggagtatgaggccctgctgaacatcaaggtcaagctggaggctgagatcgccacctaccgccgcctgctggaagatggcgaggactttaatcttggtgatgccttggacagcagcaactccatgcaaaccatccaaaagaccaccacccgccggatagtggatggcaaagtggtgtctgagaccaatgacaccaaagttctgaggcattaagccagcagaagcagggtaccctttggggagcaggaggccaataaaaagttcagagttcattggatgtcactttgtcttcttttggctgttttcattgtgcacaaatgccctaacccaacagtcccatccctgatccagcagaaaccacctctgacccctgagggtttcatatagattggggtgtagaaggaagagggatctgtattcttggaaacacttctgagagacagaggagggagcagtagatgtgatgggtcacaggctgtggggatccctacaagggaattgtggaatctttgccttgaagcgatctggtgttcaaaaggtccctgactgatcattagcagaaatctgaaccagaggaggaaattaggccaaagacagaggacagaggagacagggagacacatctggccctcccctaccctgctgctttatgcccttggcccactgcccagggcttcccacccacagttttttcctccaaccccaggccatactcatcctccaaacctatggtgccctcaactctgttcattcactcaacggagatatgatttttagggtgctagaggtctggctagaagttgagtaaatgatcatggaagttcccatctaggaaagaggtgcccctgagtaagcacccatatag

SEQ ID NO: 461193 - DNA, 922 bp, Homo sapiens
tcatctagaggatcccgcaggtttaagggctaccgggcagagggacagcgccaggcccaggagtatgaggccctgctgaacatcaaggtcaagctggaggctgagatcgccacctaccgccgcctgctggaagatggcgaggactttaatcttggtgatgccttggacagcagcaactccatgcaaaccatccaaaagaccaccacccgccggatagtggatggcaaagtggtgtctgagaccaatgacaccaaagttctgaggcattaagccagcagaagcagggtaccctttggggagcaggaggccaataaaaagttcagagttcattggatgtcactttgtcttcttttggctgttttcattgtgcacaaatgccctaacccaacagtcccatccctgatccagcagaaaccacctctgacccctgagggtttcatatagattggggtgtagaaggaagagggatctgtattcttggaaacacttctgagagacagaggagggagcagtagatgtgatgggtcacaggctgtggggatccctacaagggaattgtggaatctttgccttgaagcgatctggtgttcaaaaggtccctgactgatcattagcagaaatctgaaccagaggaggaaattaggccaaagacagaggacagaggagacagggagacacatctggccctcccctaccctgctgctttatgcccttggcccactgcccagggcttcccacccacagttttttcctccaaccccaggccatactcatcctccaaacctatggtgccctcaactctgttcattcactcaacggagatatgatttttagggtgctagaggtctggctagaagttgagtaaatgatcatggaagttcccatctaggaaagaggtgcccctgagtaagcacccatatag

SEQ ID NO: 461194 - DNA, 1654 bp, Homo sapiens
cacttataaatgggcatcagaggttctattaaccagtgggagcttcccctttattttcctggggcagtctttactggaatctttgcagctgaaatggtattaaaactgattgccatggatccatatgagtatttccaagtaggctggaatatttttgacagccttattgtgactttaagtttagtggagctctttctagcagatgtggaaggattgtcagttctgcgatcattcagactgctccgagtcttcaagttggcaaaatcctggccaacattgaacatgctgattaagatcattggtaactcagtaggggctctaggtaacctcaccttagtgttggccatcatcgtcttcatttttgctgtggtcggcatgcagctctttggtaagagctacaaagaatgtgtctgcaagatcaatgatgactgtacgctcccacggtggcacatgaacgacttcttccactccttcctgattgtgttccgcgtgctgtgtggagagtggatagagaccatgtgggactgtatggaggtcgctggtcaagctatgtgccttattgtttacatgatggtcatggtcattggaaacctggtggtatgtaaccagatgttcatgcattttaatttctctgtggaaattattttgtgatgatgtgatctattatttttataattttataattaattatatctacaattattaattgcaaaagaatagtgataattttaatacaagaaagaacaggaaagagaacgaaattttgtattagttttcctagccaaataacccatatttatatttttcaaaatcactgcctattcattttaaggcaaaggtttctatctttttctctaattttgaaagtgatggcatatgctctcttgaagctatactagtaaataaaatataattaagttaataataacaaaaatgaagttaataatggaccaaggcaaatgaaaggactggtcccgcaccttatagccatgtgtaagactagcctctatagcaaggatcagcacctatgccccacagaccaaagccagtccaatgcctgttattgtgtggccctgggagctaagaatgatttttacatttttaagtggttaaaataatcaaaagaagaataaatgacacatgcacattatatgaaatgcaaattttagtgttcataaactttattcaaacataggaatgtcaattcatttacgtatcttctatgactgcttttacattacagtggcagaggtgaatagctgccatagaaatcgtatgcccaataaagtctaaaatatttatcatttggccctttacgaaaaagttttccagccactggcctatagcatcgcgtggacatagcaatctgcctactttttgaattagtgttttcttggcttgtactttttttttattttttttcttccttatactgattagtgaaaactttcaagcttacaagcaggagaaaattgggataaaatgctcttctatgagccactcatctcaattctcaaatctgccacgttgacttgtcacagttggtcagcttgacatcaaatctctcatcaggtatccagaaggtgggatatggtaacagccatatggtaagtgccttcacttcccactgagttgaaaaaaattactaaaatat

SEQ ID NO: 461195 - DNA, 1158 bp, Homo sapiens
tgccgtgattgtaagctagcgatggatgaagaggtgttgggtgctgaaacagcagctgaatggctgctgggcttagcatggctgaggtggcatcatgagagagaggctggggatgatgtgacatggaccttccccgccggaaatcagtcccgcatcaatcccgctgagcccggcagcttcacttgctgtgaactgaggacagctgcaggaaaccttggaaagaaggtggcctggcacgggggtgccaggtggctggctgtggctgtggccgcacatgcttacagcatcaagccttggaaccgcaggtgcagcgggctggcaggtgaggaggaaggacgagctgtggggctgtcctgccagggcctttcaggcctctggctgtgctccgacttgaccattctgctacctgctggtcttgagccccgggcattcagtggaatgcttaacttgtacatcagcaaggatgaagcagggagcgacccatcccttggtcagactgcatctgcacagatgccctgtcagaaaacttgttatgccctggtaaaaagttaagaattataggcatcaactgtttcctgccacataactgtcccatgatggcatgggtacttcttgggttaataatcaggtgttggctttcctgcaaaggctgattatcacttgtcaaattatcactgctgaattgtttaatcaatggtggcttttgagcttgagcctgctgcatgcacagcagtgttctaggacttccaagaggaacagagggtgaccaaggagccatttttaccctcaagaagagttatctagaaggagggtgtgtctgcacagcttaggggtcagcgtccccacagcagctgcataggcagatagatgcacatagcctggcccaggggaggtgctcaggaaacacttgttgatgattgaggaaagaatgggttatttctctattaatttttggctctgggactcagggaaggcaccagagagaaggtgacattgatctgggatggtcggatttcagaggtgaaactggcctgaaaggaaatgccacatcaccatgtgcatctcattagaagtaaaaggagacatgtaggaaaccttagatttgtttttggtgaagtgaaagagagaagttgctctaaaaggttggaaaccagcccc

SEQ ID NO: 461196 - DNA, 1084 bp, Homo sapiens
agctcgccctcgggctctggggaccgctccacagcggggcctcccggaattccctgccggtctccgcgggcacacttggctggctgctgcgaccaaaactaccttcgcgtggcagggtcctccctcctcctcacagacaccccgacatcaccctcaaaactggaagggacaaccccgagtgatctaggcgatggtggatacctgaaagccacccatggaaaaggtgaagaaagtgccccctggttctcagaagagccactgctgctgttgtgagcagatatcggatggtgtctctggctgcatcattcgtcaaccacacatattcatatgagtgttaccctccagcactgtgccttccaaaagcccctggctgaggaagcactgcttctgagccacagagacagctgatttatggaccattttatcaccgcttctaaactgtggctctaaacctaacacagagggtaatggtagtgctgtatccattcattcacccaataaatatttgctgagcaccatctgcatatcagggaatgagaccacccatgaagaatgcccaggtggacatgagaagagggcagaaccctggagaacaacacttagaaagggacagcaaagaacaagaacccctgaaggagacaaagaaaatggtcatccaggaacgaggagggcctggagtatatgacgttgaggagtcctttgccatggtccacacaagcatttcccaaattcttgggcctcctgagaagctcatgaagcccatggtggtgaaattgagttggctgtccctactccgatgccccagccagcagcactcagccatcacccaccaggatgaattcctccacaccagcttctgcttcactggaacagtttgccctagggtcaattcctctctctcccaccagagaccagtgaggcagggcaggagacactcagcagtttccctcgtgcgggatctctaataagaggctggcagaaaagttcctgtgcttcccatcctctgcccagctctagggtctcaggtgagagaatatctggcctgtctggttcactcttttttttttttttttttttgatagag

SEQ ID NO: 461197 - DNA, 820 bp, Homo sapiens
  misc_feature (13)..(13): n is a, c, g, or t
  misc_feature (23)..(23): n is a, c, g, or t
ccctagtaacatngaccaacggngagaaaagggctacattatggcacataactagacaagctatatagatgcatgtgaaggctggtaccacaaataaaaaggaaaaaaaactcagtttgatgaggcaggataccatgctgtggagacccatttggcaagaaactaaaggcagccaccatccaaatgctaggaaaaagctacagctttctgtctgatggcaaaggagacactgaatccagtcaacaataacaggagtttgatggaagatccattccccagtggagcctcagataacacctcaagtctggccaacattctgactgtaaacttatgagagaccctgaagcagagaattcagctaatccatgcctgggtttctgactctcaaaaattctgagataataaatgcatgttgttttatgcctttaagttgtggtaatttgttatgcagctgtagatgacatgcagattcaagtatctgaaaatgaggggctgctctgaaaacactacaaatgtgggagtggctttataatgagacagtgaacagaagataaacaatttttgaaaagcaaaccgctgacaccgaatccagggataaccccacgacaaacttttaccaaaatacactaaacggccaaccacctgaacaagccacttactagaatatttacaaaatctacacccagtaaaaacaatcccctcccccccttcaccacgggggggattatccgacgccttctttatggggggggttgctaacgaatttcttttaaccctactaggtgcggattacctctacaagccacccgccatcctttct

SEQ ID NO: 461198 - DNA, 1177 bp, Homo sapiens
ctcacctcatcctgccaactatgccaaatgtcagacgtataactagactaaattcctggcaagcgtctagaggagacctccagtctttcaccaaggtaactgtgcactggggaaagggaaattatcaaacattgtggggacaactgtacactggctctgagctgacattgattccaggggacccaaaacattattgtggtcctccagttaaggtaggggttcatggaggtcagataattaatggagttttagctcaggtccaacttacagtgggtccagtggattcctggactcatcctgtggtcatgtcaccagtgccagaatgcataattggcatagacatacttagcagctggcagaaactccacattggcttcctcagtgaacatgtcaaggggaaaggcaattatgccatactgcaagcaaatgagctgtgaagctggtccagaaataaaaaggaaaaaaaaatcagtttgatgaggcaggataccatgctgtggagacccatttggcaagaaactaaaggcagccaccatccaaatgctaggaaaaagctacagctttctgtctgatggcaaaggagacactgaatccagtcaacaataacaggagtttgatggaagatccattccccagtggagcctcagataacacctcaagtctggccaacattctgactgtaaacttatgagagaccctgaagcagagaattcagctaatccatgcctgggtttctgactctcaaaaattctgagataataaatgcatgttgttttatgcctttaagttgtggtaatttgttatgcagctgtagatgacatgcagattcaagtatctgaaaatgaggggctgctctgaaaacactacaaatgtgggagtggctttataatgagacagtgaacagaagataaacaatttttgaaaagcaaaccgctgacaccgaatccagggataaccccacgacaaacttttaccaaaatacactaaacggccaaccacctgaacaagccacttactagaatatttacaaaatctacacccagtaaaaacaatcccctcccccccttcaccacgggggggattatccgacgccttctttatggggggggttgctaacgaatttcttttaaccctactaggtgcggattacctctacaagccacccgccatcctttct

SEQ ID NO: 461199 - DNA, 1477 bp, Homo sapiens
gatgctatgcgaccacggaggcaggaactggagggatgtggctacaagccaaggaacatcaagactgctggcaacacaaagagctcagggacaggcatggaaccagttctccccaaggacattcggagatgtggccctgctgccactgcaatcttggacttctgcctccagaactgtgctgatgcagagtctcagggtgaaactaacatgggccaggctacccaccttaataagccggtcactgttggcacagttgttgatgatggacagggactgctggaatctggttcccccaatgccaacaacatcttgcagtatctttatgacaaggaagtagagcagctgggaggcctccgtcctgatggagctcagcttggagttacagcacttgagaatctcgtaacacagagccgcacacatgtccgctctcccttcatagaatgttgagggaaactagacaggatgagaggaagcagcagataaaccacagacaggtcagtgctcggtaatgtacccttcaattccgggggaagaaggaaaacatctaaccactgcccatgaagcaacttaccttataaattaaggaccttaaggcagtgaagacattttttaaagccgtttcagactgatgtttttgaagaaaacacaggtagacatcaaaaacttttttcatgagaggattatgtccatggtcggccaggagctggttcttaaaacacacattgacggctttgttagacataccagtcacctctagtaggtttcacacaatttcaggctcaagaattacattttctaagtattaagacaacttatactttaaacaaactctgccttgaatcctctaggaaagtacagaattcttttgtagaacaagcaaatctatcaatacatttatgttttggggatgaacctcccagcaaactaacagagttgaaaggaacacttgcttagtactgactgggcttctatttattaatatgtactcatttttactgtccaccagcagctgatacagaggtgccatttgtgacatcttaattccaacagagaagtgccatcacaggtccagtgaattgtgaatctatcacagctggcagaacacctggaattcacagtgatctttctatcatgaaatactaagatgcttgccaatcactaagacgacctaagcctcatgtgtctgccgaccaggctcattgttgtgcaaagcagatcacaagctgcctcgcaagcctccggtgcccatgtgctcctccctgtcttggttcctattgctcctgattatgtgttagtcctcactgtgcagttcaaatcaagaagaggcactaaaaatggaactgctaaaaacacatttccagattaaatctgtgaacacattaaaaatattataaactacttgaagtccagcattggtttgggattgtgttaataatagacattagaaaaaccagatttttctgcatgtgacaacctg

SEQ ID NO: 461200 - DNA, 1255 bp, Homo sapiens
cagccactggcaccccatgcccagcaaggaagtgggcttcaagcagcctcaagaggagtctttcccatggcaggactccccaggagagaggcttcctcctcacgccactttgtcctctggcagcaacaagtctcaggggctgagctgcctcccacccctctgggggccactctcctgctgacacccagctcggcacaactgttccaccaagacggtgtccacaaatgcatccccaaacgacaatgcagctttcaagttctctagggactgctgtattttctcatgactggagaatcactgcacctttctgggccccattgagtgacagaagatcggaatggatagtcacatgcctgccccagcgtggaaggagaagagcctatacttccatccattctggcctcttccaagttcccctcatttttctctctaagatcaaataaataaacatgttgttattctttttatacatttaatatatgctcatgaaagaaaagtagcaagggccagggctttgtgcagcctcagctgagagccctggagatgagggtgaagggagggcggcagccacagggagctgggcgggtgggactctgccagggcaacggggggtgggcagcagagagggcgggctccagcttgactctgccctcacctctgggaggctggtgcctcttgtcagctgcccttccctccccccatcccccagcctctaaggcagcgaccacgtggggaggaactagggctcaggcgcagctgctgtgtgccaagaacttcgatgcgttttcttactgcgtcttcacaacagccccaggagggcggtgctgttttcattatccccattttacagaggtggacacggcggcgcagcgagcgtcttgctcaagggcaaagaataaggaggtaagccgaatgctcagggagggtcaggaactcagacatctcctggcttactggaagcttatgcagcagggagctggaagccaagctcgggtgtttgtgagaagcaggtgacccaggactttgtggctggtacctgccctgagttcttccagttgcactgtcctggataacccttctggaaccttccaaagaggcagaaactggtcgctgtgctggaggagtgaggagtgggtgtgcatgcagcctgaacaatctccttgtcccccagctgctgaagcctgtcacctttctaaggagttagtgcccaggaaccagcttttccttaataaaagaactcaaatgtattgagagc

SEQ ID NO: 461201 - DNA, 1957 bp, Homo sapiens
gacaccaggaggacatgcctgaactgggactgtcccagcaccaggcccaacttctagcctgttcccactgcggcacttctgcctacaccccccttctttgcatggctggcccaggtctcagcatgaatctgcactccccagaacagcagcagctgccactagataggaaggaccccacctctggtgtccttggggaaaggggccttgcataggcggtgacacaagccacttggtcccagctgcgggtgaggggaggggctaacacttccagaagaccctgaactctggcaggcctgattgctttgctccagggctggtctcagctgctatcatggatccctgggagcagctggagggaagagagatggcatccagcgccgatcgatcgtgggaagaagctggcccctttgggagcctccttgtgggaaaagtccatcagcccttagggagggccgggcatcacctggagctggcgctagggagagaggccaaggcagtcaatgaagagccttgccagcagggtatgcatgattgtctccattttatggatgaggaaactgaggctcagagaggcgtggccaaacttgtcgtcagcagagttggggctgagccagacctcgcttgtctgacagtccacgtgtccccatggcttccttcacccccagcccagttgctgctgccatcatgggtgttggatggggttatccagctgaacctgtactcagctagcctggtgggcttcaagcagcctcaagaggagtctttcccatggcaggactccccaggagagaggcttcctcctcacgccactttgtcctctggcagcaacaagtctcaggggctgagctgcctcccacccctctgggggccactctcctgctgacacccagctcggcacaactgttccaccaagacggtgtccacaaatgcatccccaaacgacaatgcagctttcaagttctctagggactgctgtattttctcatgactggagaatcactgcacctttctgggccccattgagtgacagaagatcggaatggatagtcacatgcctgccccagcgtggaaggagaagagcctatacttccatccattctggcctcttccaagttcccctcatttttctctctaagatcaaataaataaacatgttgttattctttttatacatttaatatatgctcatgaaagaaaagtagcaagggccagggctttgtgcagcctcagctgagagccctggagatgagggtgaagggagggcggcagccacagggagctgggcgggtgggactctgccagggcaacggggggtgggcagcagagagggcgggctccagcttgactctgccctcacctctgggaggctggtgcctcttgtcagctgcccttccctccccccatcccccagcctctaaggcagcgaccacgtggggaggaactagggctcaggcgcagctgctgtgtgccaagaacttcgatgcgttttcttactgcgtcttcacaacagccccaggagggcggtgctgttttcattatccccattttacagaggtggacacggcggcgcagcgagcgtcttgctcaagggcaaagaataaggaggtaagccgaatgctcagggagggtcaggaactcagacatctcctggcttactggaagcttatgcagcagggagctggaagccaagctcgggtgtttgtgagaagcaggtgacccaggactttgtggctggtacctgccctgagttcttccagttgcactgtcctggataacccttctggaaccttccaaagaggcagaaactggtcgctgtgctggaggagtgaggagtgggtgtgcatgcagcctgaacaatctccttgtcccccagctgctgaagcctgtcacctttctaaggagttagtgcccaggaaccagcttttccttaataaaagaactcaaatgtattgagagc

SEQ ID NO: 461202 - DNA, 1415 bp, Homo sapiens
tctgaactcattgttctcctgtctgaaatccttcagtgcctccctgtcatctccttgtgatgaagtccaagttccttaggaggatagcagctgctaaatccatgaggagaaatgttgataagtctcaacccctgatcaatcgtagcaacacgaaaagagggacatctgacattgaatgcatcactacgatagattcttaccagaataatgaacctgaatttgatcatgcctctgacataactaccagtttccaggaaatacagaggatagaggagatgttaaataaaaccataatacagcaaccagccaagaccagaatgtttgaagtgtgtgctatgcatagtgacgtccttccaaagagtcgtatgggaaagcagggaaaaaagagaaactttacagtgaagaaagctaacaagcactacttcatccaggggatcaagggaaccgcctccaagaaacttcatgctccagcaagaactcataaaatcaaagatgtgcttccatatgcaataacttacccagaacaagtgatgaaagcttccttcccattaatcactggaagtgcagacattgcaaagcccatctcccttcagaactaaagccacccctctgatagctgcatccctcctagggagaaagaactccagtggctgccaagagcccctgccagatgctcctccccaccaccctggcatcttgtgcatagtagatctcgggaaatgcctccatcatgactgctattggaaaggaaggccaatctcctgtttgttgcccagagtgctggctgtgagtcacctggagtttcctagaggtgggatttcgccaggttgcccatgctggtcttgaactcctggactcaagtgatccacctgccctggcctcccaaagtgctgggattacaggctatatattgctaaagaaagaaaaagcaccaatggctgaagctagagagaccttgctgaggaaaagggaaccaaaaatgggaaatagcggcctggtaaagaggtgtggccagaggacagcatggagcacagccaggagaaactgctctgggtgaagagccagatctgctctggaatgcagcaaagagctccttcctgctttctcagcccctgcagcagctcctgcttcactccaagaaaatgccagccccctaagaacctgtccctttggaacagtggatccaaaagctgacccaagagaccttgaacttaacacctctgtgtcatgggctccttaatgatagaaagaagattgctttagaagactggtttgcaaaccagtctgctgggcactagaagccttgggaagatttgaaaaataaatcttattggcctcaccatttcacattctgacttagagggtgtgggctctctaatctgattgtgtttttttctgtttttgtttttgttttt

SEQ ID NO: 461203 - DNA, 1382 bp, Homo sapiens
tctgaactcattgttctcctgtctgaaatccttcagtgcctccctgtcatctccttgtgatgaagtccaagttccttaggaggatagcagctgctaaatccatgaggagaaatgttgataagtctcaacccctgatcaatcgtagcaacacgaaaagagggacatctgacattgaatgcatcactacgatagattcttaccagaataatgaacctgaatttgatcatgcctctgacataactaccagtttccaggaaatacagaggatagaggagatgttaaataaaaccataatacagcaaccagccaagaccagaatgtttgaagtgtgtgctatgcatagtgacgtccttccaaagagtcgtatgggaaagcagggaaaaaagagaaactttacagtgaagaaagctaacaagcactacttcatccaggggatcaagggaaccgcctccaagaaacttcatgctccagcaagaactcataaaatcaaagatgtgcttccatatgcaataacttacccagaacaagtgatgaaagcttccttcccattaatcactggaagtgcagacattgcaaagcccatctcccttcagaactaaagccacccctctgatagctgcatccctcctagggagaaagaactccagtggctgccaagagcccctgccagatgctcctccccaccaccctggcatcttgtgcatagtagatctcgggaaatgcctccatcatgactgctattggaaaggaaggccaatctcctgtttgttgcccagagtgctggctgtgagtcacctggagtttcctagaggtgggatttcgccaggttgcccatgctggtcttgaactcctggactcaagtgatccacctgccctggcctcccaaagtgctgggattacaggctatatattgctaaagaaagaaaaagcaccaatggctgaagctagagagaccttgctgaggaaaagggaaccaaaaatgggaaatagcggcctggtaaagaggtgtggccagaggacagcatggagcacagccaggagaaactgctctgggtgaagagccagatctgctctggaatgcagcaaagagctccttcctgctttctcagcccctgcagcagctcctgcttcactccaagaaaatgccagccccctaagaacctgtccctttggaacagtggatccaaaagctgacccaagagaccttgaacttaacacctctgtgtcatgggctccttaatgatagaaagaagattgctttagaagactggtttgcaaaccagtctgctgggcactagaagccttgggaagatttgaaaaataaatcttattggccccaaaaaaaatataaaactgggcctcgttggcctaaacggttgaac

SEQ ID NO: 461204 - DNA, 1682 bp, Homo sapiens
tcgtgccgaattcggcacgagagaacatcagtaaacagataagaagtaggagacaggattggcattatatctatggtcatgtcgaggagggacaagattgagtggtgagaagattagaatttggatagattctaaggccctggcatgactctacagggaaccagggaagtgatgtgtctcttcttcagtgcgattctctctccgaagatagctttggcagcccccgccggcgcactcgacctacaggaaagttgctcccgagctgtggaggggcgtcatcgcctcctagcaacgctcctagcaaccgggtaacatctgctccctgtggtccaatgcgagctgagaacagctgcgcgcccgcctagcgctgcgaacccggagtgagaggcgcttcagagactggagggacggacctgcaggagccagggctgcccgccgagctgcagttgccgctactgccgctgtcagcgcccgactgaagagtgacagccgcaaaagcaggagtgagcaccgaaccccgcgcttctacctaacaggtgcatgcgccgatctgatctcaggtaaccattcatgagcctgaggctgtgagaaatgctcgctgtgcaaaggggaactctcaccagattttctgaaactgttctagaaatacacttttcggattgattcagcattaccagcttatccaacaaaagtattaacatatacattaacaacgtcgaaagtagcctactttaagagaaaatatgcagaagaagaagatttacatcaagattaccatgggtattttccaaaacacctgatattacctgaggacagaacttgcattctcaaactttctctggagaagctcaggtttcttgaagacccagaaacctacttaagaaggtctgtgttaattaacaatttgctgaggaagatacatctagagacggagaaagagagctatgaatactttaaagaagctccctgttataagactgcatattctgatacaagaaaacggctgaagtttatggtacaggaatgctgttctcagtctctctattatgaagagctgcattcgtatcatattgtgccttatgcttcggagaatgccatttatgaaatgggctacactagcagccacttggagcaaaattctcagttgcttatttataaaatgaattaaagtaactgttaagtccattgatactttgtttctaaatgcttgaactgtttatagtgaagatgttaatataaggcactcattaccagtgcacttgatatcaaagatgagatgcatgctgaactgattggagagagcaatggttattactcagcagtccttagaatcatcaaattgaatagaaaatatgttcacatatgataaagcggtcaattagtgctttagaagcaaagattttttttaaacataagatgtgtaggaaggggcctacgttaaacaattacacagatgaaaaattttcttttatgccttgatttccaaattctgccactcttactggaaagtaatgaaatgatatttgttaatatgcttttttaaaaaagtgtctgccttgaaactggtaattaaaaaatatctcctagggcatttaattatttttcccaataaacaactcatagataacgggttgactaatgttatctttatttagaaaatttgtatgtaaactgtgtaaact

SEQ ID NO: 461205 - DNA, 3230 bp, Homo sapiens
ggacaagtaagctctcggctggatttaaaggtttagggcaggaagacaagtacttattggctcatgacttatggatttgagctttctcaactgcacagaaatgacttaatgctgggaatatttgagtcaccaaggggagatcctctgggtctcgcaaaggaaagagtcaacagctttggggatgacgaagagctgtccacatcttctgacagtgacgaggaggtgatcaaacaatttgagatttccgtgtcccggtcccagagtttccgttcagtgacatctgagaaaggaaagcagacaggattggagcagaaaccaaaattcagccgttcgttgttgacacacggagaagatggcacagaagtatctgcctgcgaagatttggatggagccagccaacggcgttattctgagaatctctcctacggtgaagatgaccacatccctgctcactcacagtccccatgtgaaagaggggatgccaaacaccacggcacatctcaccaagagtccagtgtggtccaaagcctcaggcgccaatccacagagggcagcttggagatggagacagcttttaatagccggggatttgaagattcctatgccactgacagctcctccatgaccaatttgcaggtgccatccggggtctcagagcccatctcaaagtgtggtgacctagatgtcatctttgaatatagagccgccagccagaagctcacagtgaccattgtgagggcacagggcctcccagataaggaccgaagtggtgtcaactcctggcaagttcatgtagtgctgctgcctggtaagaaacacaggggcaggacgaacatacagagagggcccaaccccgtcttcagggagaaggtcacctttgccaagctggagcccagagatgtggctgcctgtgctgtccgcttccgcctgtacgctgcccggaagatgacccgagagagaatgatgggagagaaactattctatctcagccacctgcacccagaaggggaaatgaaagtgactctggttctggagccaagaagtaatataagcagtggagggtctccgctcagcccatctgcggtttctcacagtgatagtacttcatccacgcagtcgctgtctcatggaggggcgccagagctgttggtggggctctcgtacaatgccacaacggggcgattatctgtggaaatgatcaaaggcagccatttccgaaacctcgctgttaaccgagcacctgatacatatggaaaactctttctcctcaattctgtgggtcaagagatgtcccgttgcaagacgtccattcggcgtggtcagcccaatcctgtctataaggagacctttgttttccaggtggccctctttcagctgtctgatgtcacgttgatgatttccgtttataacaggcgtactatgaagcgtaaagagatgattggctggattgccctgggccagaacagcagtggagaggaggaacaagatcactgggaggagatgaaggaaaccaaaggccagcagatctgcagatggcacactttgctggaatcctagtaaacagataagaagtaggagacaggattggcattatatctatggtcatgtcgaggagggacaagattgagtggtgagaagattagaatttggatagattctaaggccctggcatgactctacagggaaccagggaagtgatgtgtctcttcttcagtgcgattctctctccgaagatagctttggcagcccccgccggcgcactcgacctacaggaaagttgctcccgagctgtggaggggcgtcatcgcctcctagcaacgctcctagcaaccgggtaacatctgctccctgtggtccaatgcgagctgagaacagctgcgcgcccgcctagcgctgcgaacccggagtgagaggcgcttcagagactggagggacggacctgcaggagccagggctgcccgccgagctgcagttgccgctactgccgctgtcagcgcccgactgaagagtgacagccgcaaaagcaggagtgagcaccgaaccccgcgcttctacctaacaggtgcatgcgccgatctggtgagtggacccagctcacaagatctcaggtaaccattcatgagcctgaggctgtgagaaatgctcgctgtgcaaaggggaactctcaccagattttctgaaactgttctagaaatacacttttcggattgattcagcattaccagcttatccaacaaaagtattaacatatacattaacaacgtcgaaagtagcctactttaagagaaaatatgcagaagaagaagatttacatcaagattaccatgggtattttccaaaacacctgatattacctgaggacagaacttgcattctcaaactttctctggagaagctcaggtttcttgaagacccagaaacctacttaagaaggtctgtgttaattaacaatttgctgaggaagatacatctagagacggagaaagagagctatgaatactttaaagaagctccctgttataagactgcatattctgatacaagaaaacggctgaagtttatggtacaggaatgctgttctcagtctctctattatgaagagctgcattcgtatcatattgtgccttatgcttcggagaatgccatttatgaaatgggctacactagcagccacttggagcaaaattctcagttgcttatttataaaatgaattaaagtaactgttaagtccattgatactttgtttctaaatgcttgaactgtttatagtgaagatgttaatataaggcactcattaccagtgcacttgatatcaaagatgagatgcatgctgaactgattggagagagcaatggttattactcagcagtccttagaatcatcaaattgaatagaaaatatgttcacatatgataaagcggtcaattagtgctttagaagcaaagattttttttaaacataagatgtgtaggaaggggcctacgttaaacaattacacagatgaaaaattttcttttatgccttgatttccaaattctgccactcttactggaaagtaatgaaatgatatttgttaatatgcttttttaaaaaagtgtctgccttgaaactggtaattaaaaaatatctcctagggcatttaattatttttcccaataaacaactcatagataacgggttgactaatgttatctttatttagaaaatttgtatgtaaactgtgtaaact

SEQ ID NO: 461206 - DNA, 1002 bp, Homo sapiens
tgcaaatgagtccgcgtgatggggacgtggcaactgactgacgggctttctctgaagtggagaaggacatctgtgttttccatattgcggaacaccggatctttccaagtcacacatttgggaagacagctgaattgccttcaagttcctcctgttatggtacaaatacccacctggtgtgcaaacatgagagacgcagctttacactagaaccaatgaaagcaaatttgagaaaacccaactctttaggaatggagactacagatgtatgaggggatcttaataattaaaagaagaaaatatgtaaacaggaaaaatatccaactgtcacaaaactctacactaaatcaaactgcaaagttttgtctttttaaaaatatagtcatgtgccacatgacaacgtttcaatcaaggaggggctgcatacacgacaatggaggaattccagaagaaagcattgttatcataggagatgacagctccatgcgtgttattgcccctgaagaccttccagtgggagaagatgtgcaggtgaaagacagtgatatcgatgatcctgatcctgatccattacacgggaagaattccgctgaagacaccacaacatttattgagaacatcttagagcaggactcaaactgcgaacaaaatggaaaatgtctcaaagagctcccaaaattaattataaaaattaaaagaaccctgaaagaaaagctgctgtgtggagaagatggaagctcagaggtaaacccactggaaagtggttaaaggtacagcattaaaagttactaatcgggggtgggggaaaaaaagcccatagatgaagaaacatgttaggccatcttgaacgtaaatgcgagcttctaaaagaaggttaaggaacacagctttggaaatgcatactttttttccgttggttttctttgacaaaatctggcgacctgtgccaacaagacctgccaggcagtgtcagattgaggaccatggaaacttttaatgatt

SEQ ID NO: 461207 - DNA, 7180 bp, Homo sapiens
  misc_feature (7)..(7): n is a, c, g, or t
  misc_feature (9)..(10): n is a, c, g, or t
  misc_feature (12)..(13): n is a, c, g, or t
  misc_feature (15)..(15): n is a, c, g, or t
caggatncnntnnanccagtggagatatgctgaaaggaaccagttcagtcagtagggatgttcgagttggagttactcagccttgcgtcaccgtcacaccctaaagccacccaaactcagatcgatgccgtctgctgtcgccgttgtgtttcatttattcttcgaactactataggtggtcttcttggagaaaaggctcagcttgctgctgtaaaggatatttgccaggccatctggaagctaaagaaagttatggatgccgtaatgagtgatggtaatttggaaacccggcttggttccacagatgtagccgctagccaacatatgctggtttgtgctttacaagaacttggaaatctcatacacaatcttggcaccacagcggcacctttgctacaggattcaagtacaggtctccttgacagtatcttgtcagttattcttcatcctagcatttctgttcgactagcagcagcttggtgtttacactgcattgccgtggcattaccctcctacctaacaccactcttggatcgttgccttgaacggcttactggacataagtcttcacctgaagcagtgactggcttcagttttgctgtagcagctttgttgggagcagtaaaacattgtcctttaggaattcctcatggaaaaggcaagattattatgacattagcagaggatttgctgtgttctgctgctcaaaacagtcgcctttcagctcagcgcacacaagctggatggttgctgatttctgctctgatgacattaggtcctgcagttgttagccatcaccttgctcgagttctgctgttgtggaagtgtgtctttccagcatctcctaaagatctagaaacagaaaagagccgaggagattcgtttacatggcaggtgaccctggaaggacgagctggtgcactgtgtgctatcaagagctttgtttcccactgtggtgatcttcttactgaggaagtaactcagcgtcttcttccaccacttccttgtgctgtggatttgctaactcagctttcttcaatactaaaaatgtatggaagtcctttgaaaacaccgtcagtggtttatagacaaagactttatgaactgttgattttattacctcctgagacctatgaaggaaacctctgtgctatcctcagagagctggctgctgacttgactgcccctgatattcaggtggcagcatctacatttttacttccacccctctgtcatcaggatgatcttttgatactaagtcctttcctacaagagactgaccatagatttattgaagaacagctcctgcttggtaatggtgttgcttgcggaagtcttgaatatgacccttattcgatttatgagaaagatgtagagggagattcagtgcctaagcccttacctccagcactatcagttattagttctgcatccaagctctttggggttgtatgcgctcatgtgggagaaactcaaaggcttcttatattggaacagcttttggacagtataaagcacacaaaaggagctcgtcagcaagtggttcagttacatgttgtttcttcagtttctagtttcttgaagtacgtggctggctccaagggatgtttaggtccagaagaaatgaaaagatttgccttaacattagttatgggagccctagaaagccccaaccccttgctgagatgtgcagctgcagagtcatgggctagattagcccaagtggtagatgatggagcttttactgctggattagctcaagttagctttgacaaattgaaatcagcaagggatgtggttaccagaacaggacactcattggccttggggtccctacataggtatttaggaggaataagttcttctcaacacctaaattcttgtattggaatcctttatactttggcgcaggacagcacttctcctgatgtgcagacctgggcattacattctctatcattgatcattgattctgctggcccactctattatgtgcatgtggaacctaccctttctcttattataatgttgttgttaaatgtgcctcctactcatgctgaagttcaccaaagccttggtcgctgtttgaatgcccttattaccacgttaggtccagagctacaaggtaacagtacttcaatttctaccttaaggacttcctgtctactgggttgtgcagtaatgcaagataacccagactgccttgttcaagctcaggccatctcttgccttcagcagcttcatatgtttgctccacgacatgtcaacttgtctagcctggttagctgcctctgtgtgaatctttgtagcccctacttgttactgagaagagcagtactggcttgcttacgtcagcttgtacaaagagaagcagctgaagtttcagaacatgctgttatgcttgctaaggatagcagagaagagttgactccagatgctaacatcagagaagttggccttgagggggcattgttgatcttactagacaaggagacagatgagagattatgccatgatatcaaagagactttaaattatatgcttacatctatggcagtggaaaaactctccctgtggttaaagctttgtaaagatgtacttgctgcatcagctgattttacagctgtaacttgtgtggatacaatgcaagaagaagaaggagataaaggggatgatgcctcagtcctgaccaccagacgtgatgaaaaatcccatccttttaccaatccccgatgggctactagagtctttgctgctgaatgtgtctgtaggataattaaccaatgtgagaatgctaacagtgcacattttgacattgctttagcacaagaaatgaaaaaaagagattcaagaaatgactttttggtactgcatcttgctgacttaattcgcatggcttttatggctgccacagatcacagtgaccagctccgtctttctggccttgaaatgctgttagttgttattcggcgatttgcaactgttccagaaccagagtttccaggtcatgtgattctggaacagtatcaagccaatgtaggagcagcgcttagaccagccttcacttcagagacaccacctgatgtcactgccaaagcatgtcaggtttgcagtgcctggatagcaagtggagttgtaagtgaccttaatgatctccgaagagttcatcagttgcttgtttcatcgttaactaaaatacaggctggaaaagaagctctaagtcacttatataatgaaagtgcttctaccatggagatcttagctgtgcttaaagcctgggcagaggtctacataattgctgtgcaaagacataaaaaccacagacaacctttgaagactaccacctgtttagaagacggtatcagaaatggatcatgttcatcagatggactgcttgacttagtctatgcagatcttggcacactaagcagactctggcttgctgcacttcaggattttgctcttttaactttgccttcagaatttgcctcccaacttcctgctgaaggtggtgctttctacacagcagagactagtgaaaatgcaaaattgcattattacaactcctgggcacttatcctccatgctacagcattgtggcttacaagcacgggttttgttgttgctgacccagatgaaggagcatctaatctctccaggcctgtaacaccaacttccatgtgtcagggttcatcatctggggctaccataaagtcccctgaggatgtctacactgatagattccatcttattttaggaatcagcgtggaatttctatgttccttacgttcagatgcaaccatggaaagcataactgcttgtttacatgcattgcaagcacttctagatgtaccttggcccagatcaaaaattggcagtgatcaggacttgggtatagaattgctgaatgttctacatcgagtaattttaaccagagaatcaccttccattcagttggcttcacttgaagtggtaaggcagattatctgtgctgctcaagaacatgtgaaggaaaaaagacgaagtgcagaagttgatgatggggctgctgaaaaggaaactctgccagagtttggagagggaaaggacaccggaggacttgtgcctggaaagtctttggtctttgcaacactggaattgtgtgtatgcattctagttagacagctcccagaattaaaccctaaattgacaggtagcccaggagtaaaagctacgaagccacagatactattagaagatggaagtagattggtttcagctgcattggttatcctttccgaacttcctgcagtgtgctctcctgaaggaagcatctcaattctccctactatattgtacctcacaatcggggtcctcagagagactgctgtgaagttacctgggggccagttatcttcgacagttgcagcttccctacaggctctaaaaggaatattatcttctcccatggcccgggcagaaaagagccgtactgcttggactgaccttctccgaagtgccttaacaacaattcttgactgttgggatccagttgatgaaacacaccaagaacttgatgaagtcagtctacttactgctatcacagtgtttattttgtctaccagtccagaagtaactaccatcccatgccttcagaagcgctgtattgataaatttaaagctactcttgagataaaagatcctgtggtacaaatcaagacctaccagctcctacattccatctttcagtatccaaatccagctgtttcctacccatacatttactctttagcatcctgtatcatggaaaaactgcaggaaatagacaagagaaaacctgaaaacactgctgagcttgagatcttccaagaaggcataaaggtcttagaaacactggttactgttgctgaagaacaccatcgcgctcagctggtggcctgtcttttgcccatcctcatttccttccttttggatgaaaattctctgggatcagcaacttccataatgagaaatttacatgactttgctctacaaaatctcatgcaaattggacctcagtattcatctgtttttaaaagtttagtggcttcttctccagccctaaaagcccgccttgaggctgctataaagggcaatcaggaaagtgtcaaagtcaagataccaacatctaaatatactaagagtcctggaaaaaactcaagcatccaattaaagaccagtttcctctgattttttttttggaatagtaagcaccttaatataataaatacttgatcattgcctttggtgacaaaagggacattgtagacacaagtgcccttagaggtctagttgattgttttaccttaaatagctgtgactcttcaaagtaacagcatacttaacatttttgtgtgtgtgcgtggggtttgtgttttgttttgttttgtttttctatttaaaaagacaatggagctaacttgccaggaattttaagaaagtgctaaagaactaaacttactaaacaatccactgctttaaaaatgaaatgaatttcttctaacagtccatacatatgtggtatacttaatactgtgacagatataaatatgactctagtgtaaattatctgcactaatattgtatcccaattgctgatttaaaattctgctttggcccggcacagtggctcatccctgtaattccagcactttggaaggccaaggcgggcggatcacgaggtcgggagtttgagaccagcctgaccaacatggtgaaaccccgtctctactaaaaatacaaaaattagccgggtgtggtggcacacacctgtaatcccagctactcaggaggccgaggcaggaaaatcgcttgaacctggcaggcagaggttgcagtgagccaagattgtgccactgcactccagcctgggcgacagagtgagactccatctaaaaaaaaaaaaaaaaaattctgccttattcagtaattgtattaaactttctctgatttctccaagaagataaaatgattggagagctatttaggaaacctggtctaggattatccagtatacaatagtacaaattacttacagccttacagtgcaacataagatttggtgtctatatcatggttttccaccatcttttggtttagtttatattgggttcagaaattgagtcttactcattttaaatagaataagccatttccactatttttcaaatggatttttctgtttacctctgttcttaccaattttgttcattttcatttgtggcaaacatttgtatcaatgagttttaacctaggttcatatctacattgtatttagatcaactatgggtttatataaatgccaaatttagtacaacaaatttaggtcatcaggtgaatacaagtattttttttaacaggaaacattttattatagaaaaaagattaatgataaagtcatattggttgaaaaatattttttaactgtgttcatgattgttgattctccttctacttcagtgttatactgtgtgaatcaagcactgtgtcaaaacagagcatttccctcttaaaaattacaaaccgaagtgatagaagcatgtcagaattgagaagacattttgaagcaagaacaatgtgatgtacctattttattatgtttgtatataaatactattgtaaattgttcagagtgaaaacatttgacaaactctaacactacaatcattttttctaaattacataaataaagctaattttcattatcattcttgtatttttaaattattttaccaacaaaagatggcagtttctatgggaatagattatatgcttagatattaatgagtctagttgtaataaagcagttgcatattaattagcttggtaacgttacaaattaaaaatgttgattagcaacttggatgaaaccatcaaaatggtataatatttgtcttgagcttaattttttttctaagaggagaaatagagacaaagctactagttaagtcattctatttagcccattgcttaaaagcttatgtaaaataacactggatataacacctttctgttaataaaatattgagtctaaattttatataaaacaaacttcaccgtcaacttaagggaacattaaggcccttgaaaagatataagtaactactataaaagaggtatgatggtgaggtttgggcttaaaatttatttatttaaaaaaaaa

SEQ ID NO: 461208 - DNA, 2898 bp, Homo sapiens
  misc_feature (7)..(7): n is a, c, g, or t
  misc_feature (9)..(10): n is a, c, g, or t
  misc_feature (12)..(13): n is a, c, g, or t
  misc_feature (15)..(15): n is a, c, g, or t
caggatncnntnnanccagtggagatatgctgaaaggaaccagttcagtcagtagggatgttcgagttggagttactcagccttgcgtcaccgtcacaccctaaagccacccaaactcagatcgatgccgtctgctgtcgccgttgtgtttcatttattcttcgaactactataggtggtcttcttggagaaaaggctcagcttgctgctgtaaaggatatttgccaggccatctggaagctaaagaaagttatggatgccgtaatgagtgatggtaatttggaaacccggcttggttccacagatgtagccgctagccaacatatgctggtttgtgctttacaagaacttggaaatctcatacacaatcttggcaccacagcggcacctttgctacaggattcaagtacaggtctccttgacagtatcttgtcagttattcttcatcctagcatttctgttcgactagcagcagcttggtgtttacactgcattgccgtggcattaccctcctacctaacaccactcttggatcgttgccttgaacggcttactggacataagtcttcacctgaagcagtgactggcttcagttttgctgtagcagctttgttgggagcagtaaaacattgtcctttaggaattcctcatggaaaaggcaagattattatgacattagcagaggatttgctgtgttctgctgctcaaaacagtcgcctttcagctcagcgcacacaagctggatggttgctgatttctgctctgatgacattaggtcctgcagttgttagccatcaccttgctcgagttctgctgttgtggaagtgtgtctttccagcatctcctaaagatctagaaacagaaaagagccgaggagattcgtttacatggcaggtgaccctggaaggacgagctggtgcactgtgtgctatcaagagctttgtttcccactgtggtgatcttcttactgaggaagtaactcagcgtcttcttccaccacttccttgtgctgtggatttgctaactcagctttcttcaatactaaaaatgtatggaagtcctttgaaaacaccgtcagtggtttatagacaaagactttatgaactgttgattttattacctcctgagacctatgaaggaaacctctgtgctatcctcagagagctggctgctgacttgactgcccctgatattcaggtggcagcatctacatttttacttccacccctctgtcatcaggatgatcttttgatactaagtcctttcctacaagagactgaccatagatttattgaagaacagctcctgcttggtaatggtgttgcttgcggaagtcttgaatatgacccttattcgatttatgagaaagatgtagagggagattcagtgcctaagcccttacctccagcactatcagttattagttctgcatccaagctctttggggttgtatgcgctcatgtgggagaaactcaaaggcttcttatattggaacagcttttggacagtataaagcacacaaaaggagctcgtcagcaagtggttcagttacatgttgtttcttcagtttctagtttcttgaagtacgtggctggctccaagggatgtttaggtccagaagaaatgaaaagatttgccttaacattagttatgggagccctagaaagccccaaccccttgctgagatgtgcagctgcagagtcatgggctagattagcccaagtggtagatgatggagcttttactgctggattagctcaagttagctttgacaaattgaaatcagcaagggatgtggttaccagaacaggacactcattggccttggggtccctacataggtatttaggaggaataagttcttctcaacacctaaattcttgtattggaatcctttatactttggcgcaggacagcacttctcctgatgtgcagacctgggcattacattctctatcattgatcattgattctgctggcccactctattatgtgcatgtggaacctaccctttctcttattataatgttgttgttaaatgtgcctcctactcatgctgaagttcaccaaagccttggtcgctgtttgaatgcccttattaccacgttaggtccagagctacaaggtaacagtacttcaatttctaccttaaggacttcctgtctactgggttgtgcagtaatgcaagataacccagactgccttgttcaagctcaggccatctcttgccttcagcagcttcatatgtttgctccacgacatgtcaacttgtctagcctggttagctgcctctgtgtgaatctttgtagcccctacttgttactgagaagagcagtactggcttgcttacgtcagcttgtacaaagagaagcagctgaagtttcagaacatgctgttatgcttgctaaggatagcagagaagagttgactccagatgctaacatcagagaagttggccttgagggggcattgttgatcttactagacaaggagacagatgagagattatgccatgatatcaaagagactttaaattatatgcttacatctatggcagtggaaaaactctccctgtggttaaagctttgtaaagatgtacttgctgcatcagctggtaagtattggacattatcagttaaaataataaaattgaaatttgaaactttacataaaattgtttaccactgagaattcatcagtcttgtctaactagctggattctgactgtctgattgttgcttttcttcaaatgaagattgtatttctagtgttttagaattctctgtaatttgaacaatataaatccaatacttaagcctgctctttttccctttggctgtcttagatgactttcctatataaaacaaattaaaaagtaaagttattgtttatgcccta

SEQ ID NO: 461209 - DNA, 1483 bp, Homo sapiens
  misc_feature (7)..(7): n is a, c, g, or t
  misc_feature (9)..(10): n is a, c, g, or t
  misc_feature (12)..(13): n is a, c, g, or t
  misc_feature (15)..(15): n is a, c, g, or t
caggatncnntnnanccagtggagatatgctgaaaggaaccagttcagtcagtagggatgttcgagttggagttactcagccttgcgtcaccgtcacaccctaaagccacccaaactcagatcgatgccgtctgctgtcgccgttgtgtttcatttattcttcgaactactataggtggtcttcttggagaaaaggctcagcttgctgctgtaaaggatatttgccaggccatctggaagctaaagaaagttatggatgccgtaatgagtgatggtaatttggaaacccggcttggttccacagatgtagccgctagccaacatatgctggtttgtgctttacaagaacttggaaatctcatacacaatcttggcaccacagcggcacctttgctacaggattcaagtacaggtctccttgacagtatcttgtcagttattcttcatcctagcatttctgttcgactagcagcagcttggtgtttacactgcattgccgtggcattaccctcctacctaacaccactcttggatcgttgccttgaacggcttactggacataagtcttcacctgaagcagtgactggcttcagttttgctgtagcagctttgttgggagcagtaaaacattgtcctttaggaattcctcatggaaaaggcaagattattatgacattagcagaggatttgctgtgttctgctgctcaaaacagtcgcctttcagctcagcgcacacaagctggatggttgctgatttctgctctgatgacattaggtcctgcagttgttagccatcaccttgctcgagttctgctgttgtggaagtgtgtctttccagcatctcctaaagatctagaaacagaaaagagccgaggagattcgtttacatggcaggtgaccctggaaggacgagctggtgcactgtgtgctatcaagagctttgtttcccactgtggtgatcttcttactgaggaagtaactcagcgtcttcttccaccacttccttgtgctgtggatttgctaactcagtaagcatcgactgtttagatttgatagttgccctctgattatgtaatattccttaagtacattaataaggcaaatttctgtagttggtgaatgattttatggaggaaggcaatcagttagttatatgatttttttttaggctaggatcttgaaagaaattacatattaaaagggaaggaaaattttaggggaataatctaccttacatacaggcagatttaacaagaaattaactattaagcctcttaaccttttcagctatgcattttattggtttgttagagtattctgtgttcgtgagaaccagatgcttctaacagtttcagttttttgtttgtttatatttttcataagtttgagttatacgtatatgattagaacatatagagaaaagccagtatataatgtgagcacttgtaatttccaaattaataaaacatgtgaaagttctttg

SEQ ID NO: 461210 - DNA, 7153 bp, Homo sapiens
  misc_feature (7)..(7): n is a, c, g, or t
  misc_feature (9)..(10): n is a, c, g, or t
  misc_feature (12)..(13): n is a, c, g, or t
  misc_feature (15)..(15): n is a, c, g, or t
caggatncnntnnanccagtggagatatgctgaaaggaaccagttcagtcagtagggatgttcgagttggagttactcagccttgcgtcaccgtcacaccctaaagccacccaaactcagatcgatgccgtctgctgtcgccgttgtgtttcatttattcttcgaactactataggtggtcttcttggagaaaaggctcagcttgctgctgtaaaggatatttgccaggccatctggaagctaaagaaagttatggatgccgtaatgagtgatggtaatttggaaacccggcttggttccacagatgtagccgctagccaacatatgctggtttgtgctttacaagaacttggaaatctcatacacaatcttggcaccacagcggcacctttgctacaggattcaagtacaggtctccttgacagtatcttgtcagttattcttcatcctagcatttctgttcgactagcagcagcttggtgtttacactgcattgccgtggcattaccctcctacctaacaccactcttggatcgttgccttgaacggcttactggacataagtcttcacctgaagcagtgactggcttcagttttgctgtagcagctttgttgggagcagtaaaacattgtcctttaggaattcctcatggaaaaggcaagattattatgacattagcagaggatttgctgtgttctgctgctcaaaacagtcgcctttcagctcagcgcacacaagctggatggttgctgatttctgctctgatgacattaggtcctgcagttgttagccatcaccttgctcgagttctgctgttgtggaagtgtgtctttccagcatctcctaaagatctagaaacagaaaagagccgaggagattcgtttacatggcaggtgaccctggaaggacgagctggtgcactgtgtgctatcaagagctttgtttcccactgtggtgatcttcttactgaggaagtaactcagcgtcttcttccaccacttccttgtgctgtggatttgctaactcagctttcttcaatactaaaaatgtatggaagtcctttgaaaacaccgtcagtggtttatagacaaagactttatgaactgttgattttattacctcctgagacctatgaaggaaacctctgtgctatcctcagagagctggctgctgacttgactgcccctgatattcaggtggcagcatctacatttttacttccacccctctgtcatcaggatgatcttttgatactaagtcctttcctacaagagactgaccatagatttattgaagaacagctcctgcttggtaatggtgttgcttgcggaagtcttgaatatgacccttattcgatttatgagaaagatgtagagggagattcagtgcctaagcccttacctccagcactatcagttattagttctgcatccaagctctttggggttgtatgcgctcatgtgggagaaactcaaaggcttcttatattggaacagcttttggacagtataaagcacacaaaaggagctcgtcagcaagtggttcagttacatgttgtttcttcagtttctagtttcttgaagtacgtggctggctccaagggatgtttaggtccagaagaaatgaaaagatttgccttaacattagttatgggagccctagaaagccccaaccccttgctgagatgtgcagctgcagagtcatgggctagattagcccaagtggtagatgatggagcttttactgctggattagctcaagttagctttgacaaattgaaatcagcaagggatgtggttaccagaacaggacactcattggccttggggtccctacataggtatttaggaggaataagttcttctcaacacctaaattcttgtattggaatcctttatactttggcgcaggacagcacttctcctgatgtgcagacctgggcattacattctctatcattgatcattgattctgctggcccactctattatgtgcatgtggaacctaccctttctcttattataatgttgttgttaaatgtgcctcctactcatgctgaagttcaccaaagccttggtcgctgtttgaatgcccttattaccacgttaggtccagagctacaaggtaacagtacttcaatttctaccttaaggacttcctgtctactgggttgtgcagtaatgcaagataacccagactgccttgttcaagctcaggccatctcttgccttcagcagcttcatatgtttgctccacgacatgtcaacttgtctagcctggttagctgcctctgtgtgaatctttgtagcccctacttgttactgagaagagcagtactggcttgcttacgtcagcttgtacaaagagaagcagctgaagtttcagaacatgctgttatgcttgctaaggatagcagagaagagttgactccagatgctaacatcagagaagttggccttgagggggcattgttgatcttactagacaaggagacagatgagagattatgccatgatatcaaagagactttaaattatatgcttacatctatggcagtggaaaaactctccctgtggttaaagctttgtaaagatgtacttgctgcatcagctgattttacagctgtaacttgtgtggatacaatgcaagaagaagaaggagataaaggggatgatgcctcagtcctgaccaccagacgtgatgaaaaatcccatccttttaccaatccccgatgggctactagagtctttgctgctgaatgtgtctgtaggataattaaccaatgtgagaatgctaacagtgcacattttgacattgctttagcacaagaaatgaaaaaaagagattcaagaaatgactttttggtactgcatcttgctgacttaattcgcatggcttttatggctgccacagatcacagtgaccagctccgtctttctggccttgaaatgctgttagttgttattcggcgatttgcaactgttccagaaccagagtttccaggtcatgtgattctggaacagtatcaagccaatgtaggagcagcgcttagaccagccttcacttcagagacaccacctgatgtcactgccaaagcatgtcaggtttgcagtgcctggatagcaagtggagttgtaagtgaccttaatgatctccgaagagttcatcagttgcttgtttcatcgttaactaaaatacaggctggaaaagaagctctaagtcacttatataatgaaagtgcttctaccatggagatcttagctgtgcttaaagcctgggcagaggtctacataattgctgtgcaaagacataaaaaccacagacaacctttgaagactaccacctgtttagaagacggtatcagaaatggatcatgttcatcagatggactgcttgacttagtctatgcagatcttggcacactaagcagactctggcttgctgcacttcaggattttgctcttttaactttgccttcagaatttgcctcccaacttcctgctgaaggtggtgctttctacacagcagagactagtgaaaatgcaaaattgcattattacaactcctgggcacttatcctccatgctacagcattgtggcttacaagcacgggttttgttgttgctgacccagatgaaggagcatctaatctctccaggcctgtaacaccaacttccatgtgtcagggttcatcatctggggctaccataaagtcccctgaggatgtctacactgatagattccatcttattttaggaatcagcgtggaatttctatgttccttacgttcagatgcaaccatggaaagcataactgcttgtttacatgcattgcaagcacttctagatgtaccttggcccagatcaaaaattggcagtgatcaggacttgggtatagaattgctgaatgttctacatcgagtaattttaaccagagaatcaccttccattcagttggcttcacttgaagtggtaaggcagattatctgtgctgctcaagaacatgtgaaggaaaaaagacgaagtgcagaagttgatgatggggctgctgaaaaggaaactctgccagagtttggagagggaaaggacaccggaggacttgtgcctggaaagtctttggtctttgcaacactggaattgtgtgtatgcattctagttagacagctcccagaattaaaccctaaattgacaggtagcccaggagtaaaagctacgaagccacagatactattagaagatggaagtagattggtttcagctgcattggttatcctttccgaacttcctgcagtgtgctctcctgaaggaagcatctcaattctccctactatattgtacctcacaatcggggtcctcagagagactgctgtgaagttacctgggggccagttatcttcgacagttgcagcttccctacaggctctaaaaggaatattatcttctcccatggcccgggcagaaaagagccgtactgcttggactgaccttctccgaagtgccttaacaacaattcttgactgttgggatccagttgatgaaacacaccaagaacttgatgaagtcagtctacttactgctatcacagtgtttattttgtctaccagtccagaagtaactaccatcccatgccttcagaagcgctgtattgataaatttaaagctactcttgagataaaagatcctgtggtacaaatcaagacctaccagctcctacattccatctttcagtatccaaatccagctgtttcctacccatacatttactctttagcatcctgtatcatggaaaaactgcaggaaatagacaagagaaaacctgaaaacactgctgagcttgagatcttccaagaaggcataaaggtcttagaaacactggttactgttgctgaagaacaccatcgcgctcagctggtggcctgtcttttgcccatcctcatttccttccttttggatgaaaattctctgggatcagcaacttccataatgagaaatttacatgactttgctctacaaaatctcatgcaaattggacctcagtattcatctgtttttaaaagtttagtggcttcttctccagccctaaaagcccgccttgaggctgctataaagggcaatcaggaaagtgtcaaagtcaagataccaacatctaaatatactaagagtcctggaaaaaactcaagcatccaattaaagaccagtttcctctgattttttttttggaatagtaagcaccttaatataataaatacttgatcattgcctttggtgacaaaagggacattgtagacacaagtgcccttagaggtctagttgattgttttaccttaaatagctgtgactcttcaaagtaacagcatacttaacatttttgtgtgtgtgcgtggggtttgtgttttgttttgttttgtttttctatttaaaaagacaatggagctaacttgccaggaattttaagaaagtgctaaagaactaaacttactaaacaatccactgctttaaaaatgaaatgaatttcttctaacagtccatacatatgtggtatacttaatactgtgacagatataaatatgactctagtgtaaattatctgcactaatattgtatcccaattgctgatttaaaattctgctttggcccggcacagtggctcatccctgtaattccagcactttggaaggccaaggcgggcggatcacgaggtcgggagtttgagaccagcctgaccaacatggtgaaaccccgtctctactaaaaatacaaaaattagccgggtgtggtggcacacacctgtaatcccagctactcaggaggccgaggcaggaaaatcgcttgaacctggcaggcagaggttgcagtgagccaagattgtgccactgcactccagcctgggcgacagagtgagactccatctaaaaaaaaaaaaaaaaaattctgccttattcagtaattgtattaaactttctctgatttctccaagaagataaaatgattggagagctatttaggaaacctggtctaggattatccagtatacaatagtacaaattacttacagccttacagtgcaacataagatttggtgtctatatcatggttttccaccatcttttggtttagtttatattgggttcagaaattgagtcttactcattttaaatagaataagccatttccactatttttcaaatggatttttctgtttacctctgttcttaccaattttgttcattttcatttgtggcaaacatttgtatcaatgagttttaacctaggttcatatctacattgtatttagatcaactatgggtttatataaatgccaaatttagtacaacaaatttaggtcatcaggtgaatacaagtattttttttaacaggaaacattttattatagaaaaaagattaatgataaagtcatattggttgaaaaatattttttaactgtgttcatgattgttgattctccttctacttcagtgttatactgtgtgaatcaagcactgtgtcaaaacagagcatttccctcttaaaaattacaaaccgaagtgatagaagcatgtcagaattgagaagacattttgaagcaagaacaatgtgatgtacctattttattatgtttgtatataaatactattgtaaattgttcagagtgaaaacatttgacaaactctaacactacaatcattttttctaaattacataaataaagctaattttcattatcaaaaaaaaaaaaaaaaaaaaaaaaaaaaaaaaaaagaagaaaaaaaaaaaaaaaaagaagaggaagaggaaaggaggggagggtgaagcttcgccgtttggttcgggcgcttctcgttcttgtttcgctgttcgctctctatgttcgtcgtttgtcttcgtggctgtcgtctgtttctctgcgtcctttgtcttgtgtgcttctcgtgccgggtcccgtggtgctgttgcttgttgcctttccctctggtcgtgttctgttgctttctgtccttcttccgctgctgtgctctcgtcgttcttgtcttcttcgcttttgtgttccctcggctgcggtggtctttcccgctttctctgtgcttctgtcttgctctctcccgatgcgcgcgtgggcctgcttggctttccgccttgtcgacgggtcgtgtcc

SEQ ID NO: 461211 - DNA, 1413 bp, Homo sapiens
ctgtcacagcccagaggagcccagtgagacatgtggagtgcaatggcacgatctcggctcaccacaacctctgcctcctgggttcaagcaattctcctgcctcagcctccgggtagctgggattacaggtgtgagcaccatgcaccacaactcctggctaatattgtatttttagtagagacggggtttctccatgttggccaggctggtctcaaactcctgatctcaggtgatccacccggctcagcctcccaaagtgctgcgatgacaggcacgagccgccaccgtgcccagccctttttttttttttttttttttgagacaaggtctcgctctgtcacccaggctggagtgcagcggcacaatcacagctcactgcagcctcaacttccctgggctcaggtgattgtcccacctcaggctcccaagtagctgggactacagatttatgatgtcaataaagcccattatgatcacaccctgctgttgaaaaatgggatggcagggaactgacaggctgtttttaggtcaccgtcttacacaataccaaccgcccatcaggttgtttcaaaggctttcagccactgactaatagaaaaagagactgcatacaacgtttcattcatgttttgctaggctagatacatttgttgtagcggtctcatatttgtaagtccgtggaaaaacctgaaagtatttttttcttgaaaatttttttgaaaaaaaagtaaaatgtcattaggagtgagaatcaggaatgatggattcacggtctagttgcaagactcatcacaggccattaacctctgaaaagcctttatctgcttcgctttgttacatatcagacgcggatattacttacgagtattgaatgatcccctcagtaaacaccagctatgcaggaggtgctaccttagcaataggagcttcagtctgggaggagagtgggacatataagcaaataaatacatcacgtttcccacagggcgcgtattttgtgttcatcttcgtcccactggatctgtccaaacttttcatttttgacagataaggaaaatgaagttcagatgcttgagtgacacagctaattagtggcaaggctgagacttttgaccagacagcctgacttttagtttctaccatgcatgttaactcctcctaaaccccatttattttctcatttcagacaactgcgcaataacactgctaagataaaagcactctgattaataaacactgaaattaagcaggttaagaaatatctattgtccttttctcagagtgataattttaaaaactgaaattggtcttttgcactcgcagttttctcttgcttccttaaacatttgcgaaatatgagaacaatataaataggttctcaagctctgagcaaacccttaaccatgtaaataa

SEQ ID NO: 461212 - DNA, 1418 bp, Homo sapiens
gcatggaaaataaccacgattcagacagagctggcacttaaccactcatacaagctcaggcaagctacccagtgtgccaaacctcagtttcctcatcagaaaaaatggaggggtccatacagcgtcgttctggattcccgtcgtaacttaaagggaaactttcacaatgtctggagcgcttgatgtcctgcaaatgaaggaggaggatgtccttaagttccttgtagcaggaacccacttaggtggcaccaatcttgacttccagatggaacagtacatctataaaaggaaaagtgatggcatctatatcataaatctgaagaggacctgggagaagcttctgctggcagctcgtgctattattgctattgaaaaccctgctgatgtcagtgttatatcctccaggaatactggccagagggctgtgctgaagtttgctgctgccactgaagccactccaattgctggtcacttcactcctggaaccttcactaaccagatccaggcagacttctgggagccaaggcttcttgtggttactgaccccagggctgaccaccagcctctcacggaggcatcttatgttaacctacctaccattgctctgtgtaacacagattctcctctgcgctatgtggacattgccattccatgcaacaaccagggagctcgctcagtgggtttgatgtggtggacgctggctcgggaagttctgcgcatgcgtggcaccatttctcgtgaacacctatgggaggtcatgcctgatctctacttctacagagatcctgaagagattgaaaaagaagagcaggctgctactgaaaaggcagtgaccaaggaggaatttcagggtgaatggactgctccagctcctgagttcactgctactaagcctgaggttgcagactggtctgaaggtgtacaggtgccctctgtgcctattcagtagttccctactgaagacaggagtgctcagcctgccatggaagactggtctgcagctcccactgctcaggccactgaatgggtaggagcaaccactgactggtcttaagctgttcttgcataggctcttaagcaacacggaaaaatgattggcggaaaataaacatcagtttcttaaaaaaaaaaaaaaaagaaaagaaaagataacaatgtccttctttgcaaggcttctgtgaattcagtcctttctcccagtttcacaggcaaataaggacagggactcagttgaggtgactaatcctcggagccacagccccccaattccaggggcttggaaatgctgggatcacaattaaaggctttgaacttccaccagacaccaccaccagagctcactccatccgcaaatgctatgtacattcttggccacaaaaacacttccaggacaaaaaaatgtttcagagttcagaact

SEQ ID NO: 461213 - DNA, 1002 bp, Homo sapiens
gactagcattggaatcactgtagaacacatagatttggcgtgagatggcttcattgtgaacgagttcccgtttattgtgtcaaagtcaagccattgagcagccaggtacggatgggccaactgccgagccacggtggagaaggtggagaagagcgatggagttctcagcgaaatcagagctgcctcggtggatggagctgaattcctgaggaaaagctcaactcagttatggacggatcttgttcctccctatcaggggatccccaaggagaacgcttggcgtgtcctcctttggtccagcctgggttgcagcttcgatgctccctctgtgcaggggggaaggtacctgcagattgcccatctgtaccccaggatttaggggacacctgatgaggtatttgtgtttaatcatcatcttgatgcggacgcttttaggaacaaggactgagactgggagggattataaataaacactcaaatgacaggaaatcttcagcttggccgccatgccggagtcctctgagagccaagacctacccccagcccaggccagcgtgctcggcacaagccatgcccccaactcacccacggtcttccctggactccctgcccccgccctgggagaccaccagtgggatggggtatggcaggaccagccctgctcagggaggggccgccccctaccaacatgggcccagccctgggaccagaatgaacctgagcacagttcacatctgagacgcgtccccgggacgggggctgcggtccatggtttggcaaggggccggggctacagagggaatggcttccggtacagagccttggacacaagcctggtgttgtgtgttttctcagatgcggcatttgtccatttggcatccattaatcacagggccgaactaacagctacattgtttctatcttccctgccctccagaacctgcctctgaaccacctccttatctaactctcacaccacaagctcatgtcccctgccctcag

SEQ ID NO: 461214 - DNA, 2261 bp, Homo sapiens
ccaggtagtttgggaaagaaacaaactcttctgcctttgagactaccctcaattaattgtgagctcgtgaaggatggtacgtgatgctcttgtttcccttgccgataggaagttctttgctggtggagtgtgtagaacaaatgtgcagcttcctggcaaggtagtggtgatcactggcgccaacacgggcattggcaaggagacggccagagagctcgctagccgaggagcccgagtctatattgcctgcagagatgtactgaagggggagtctgctgccagtgaaatccgagtggatacaaagaactcccaggtgctggtgcggaaattggacctatccgacaccaaatctatccgagcctttgctgagggctttctggcagaggaaaagcagctccatattctgatcaacaatgcgggagtaatgatgtgtccatattccaagacagctgatggctttgaaacccacctgggagtcaaccacctgggaaataccagggagaagaatgtcattcttggatggggcagtggcagtacaaggcttgccaggcagggccagacctggggttatgcaggcatctgggcttggctggaggggtcacatctacatgatggccaaccaagccatgggttggtccacggaggccacttcctcctcacctacctgctcctggagcggctaaaggtgtctgcccctgcacgggtggttaatgtgtcctcggtggctcaccacattggcaagattcccttccacgacctccagagcgagaagcgctacagcaggggttttgcctattgccacagcaagctggccaatgtgctttttactcgtgagctggccaagaggctccaagaaatgataaagataccactgtcaatgattgatactactcactacatgttgtcatgtttattagtagtactaaagccacagtataaaaacgacattgaaatagaaggacctcgaaccaggcactccttttggaacatagaaggctgagaaggctatagatctttctgaaagatcaattcattcctgttcaaattccgcctggccaggagtggtacctgctgaatcctggggttatgtttcctgagtccctccttctcacttgtgtattttgctgcaggagataagctgttttcctgggctcagagtgtgtccctgatctaattgtgccctctttgtcccaggcaccggggtcaccacctacgcagtgcacccaggcgtcgtccgctctgagctggtccggcactcctccctgctctgcctgctctggcggctcttctccccctttgtcaagacggcacgggagggggcgcagaccagcctgcactgcgccctggctgagggcctggagcccctgagtggcaagtacttcagtgactgcaagaggacctgggtgtctccaagggcccgaaataacaaaacagctgagcgcctatggaatgtcagctgtgagcttctaggaatccggtgggagtagctggtggaagagctgcagctttatcaggcccaatccatgccataatgaacagggaccaaggagaaggccaaccctaaaggattgtcctcttggccagctggtgctgcgaatcctgcctgctctgatcctcttgacccttctgggaatgtttgcacacctgacactcttgtgagactggcttatggcatgagttgtggacacctatagagtgttcttctctaagacctggaaagtcagcaaccctctgggggcagcaggactgggcagatcccaggctgggcatgggggtggcagaagagcccgagaaattgggtcagttccctcatcagcaccagaggctcagctgaggcaagaagagcaccatcactgcctatttctaggggctatacactccaactcttggttgatctctttctttttaaaaatatttgccaccaccctggagtctagaccaacacacaaagatcctggctaaccctggcctatttagattccttcctctcacctggaccttcccatttcaatcatgcagatggtttctttttgtaaagagttccgtttgcctttcaatttttagagaaaataaagactgcattcatctcattgtcttatttattttctcagggcagcaagggagagaaatggaacaaatcaggaaaccagcctgctagtttagtgagtagcatttcaccctacccagccacgggaattgggaatagcaagggagcaggcctaggcctagaactcagggcaaagacagcagctggaatgtaa

SEQ ID NO: 461215 - DNA, 481 bp, Homo sapiens
cttgtagttgtctttggttacttactgtggttctgattttacagaaataagtctgagacgaagtcctcgaatcaagcagttgtcatttagcaggacacattctgcctccttctattctgtgtctcagccgaagtctcgaagtgtgcaaagagtccactctttccagcaagataagtcaggtaacatacgggcccctctgccttcacaagtccgtgctgacttggtgagaagtgtttttgggaaaagaagcaagaaatttgacattttctttcttgacattggagaagtagaatagtttgcttaaaatgttcactttgcttaaagctctatagactccccgtccgctaaagcaaggctttaagttttcctaagtggaactcttgggttcaaaaataatcacctttgtttggaaactcagtaaattgcttggaggttgggaaagacatagagctctggagaagggtctgaaaaccatagatct

SEQ ID NO: 461216 - DNA, 1144 bp, Homo sapiens
aatccagcatacaacgacttgagaagaaatcatgatgtttaacagcatccctggctcctacatactagatggccagcagccacccccgcccccaccaccatcagtcatgacaatccagacaaggccaaatgttccctgcaaggaaatattttccccagtggacaacaactggcctaatgctcgtagatcagtgtcaggcagccctgaatctgatgaactgcaggaacttcgtaccagatcagccaagaagagaaggaaaaatgcattaataagacataaaagcattgctgaggtttcacagaatcttcgacaaattgaaattcctaaagtgtcaaagagagctacgaaaaaagagaactctcaccctgctcctcagcagccttcccagccagtgaaagatacagtgcaagaagtgaccaaagttcgaagaaatcttttcaaccaggaattgctttccccttcaaagagatcactaaagcgggggttgcctagaagccattctgtgtcagctgtggatggtctagaggataaacttgacaacttcaagaagaacaaaggttatcacaaactgctgactaagagtgtggccgagactccagtgcataagcagatctccaaaaggctgctgcacagacaaatcaagggcaggtcctctgatcctggtcctgatattggtgttgttgaagagtcccctgaaaaaggagatgaaataagtctgagacgaagtcctcgaatcaagcagttgtcatttagcaggacacattctgcctccttctattctgtgtctcagccgaagtctcgaagtgtgcaaagagtccactctttccagcaagataagtcaggtaacatacgggcccctctgccttcacaagtccgtgctgacttggtgagaagtgtttttgggaaaagaagcaagaaatttgacattttctttcttgacattggagaagtagaatagtttgcttaaaatgttcactttgcttaaagctctatagactccccgtccgctaaagcaaggctttaagttttcctaagtggaactcttgggttcaaaaataatcacctttgtttggaaactcagtaaattgcttggaggttgggaaagacatagagctctggagaagggtctgaaaaccatagatct

SEQ ID NO: 461217 - DNA, 1437 bp, Homo sapiens
ctacttgcccagttcccgaagcgaagcgcaggctgcgagccagccgggccgagtccacaactttgcagcctcgggcagggcgagagccggcgtccggggctcctcttgtcggcgaccagagctcggaatgtaatcgaggatgctggccctgcggctgctcaacgtggtggcccccgcctacttcttgtgcatctccctggtgaccttcgtgctgcagctcttcctcttcctgcccagcatgcgcgaggaccccgcggccgcccggctcttctcgcccgccctgctccacggggcgctcttcctattcctctcggccaacgccctgggcaattacgtccttgtcatccagaactccccagacgacctgggggcctgccagggggcctcggccaggaagactccatgcccctcacctagcacccacttctgccgagtgtgcgccagagtcaccctgaggcacgaccatcactgtttcttcaccggcaactgcatcggcagcaggaacatgcgcaacttcgtcctgttctgcctctacacctccctggcctgcctctactccatggtggccggcgtggcctacatctccgctgtcctttccatctccttcgcccaccccttggccttcctcacgctcctgcccacctccatcagccagttcttctccgtgccaggaaaaaaccctgtgggaaatggcttccatccacccaggcttgttcctggggcagtgttgcaaggcaggcccaagcttgacagctctgatgttctcacatcccagcttgagggccacctttgcctgtcagcattcctcacgccaaagagcaccatggacctgggatcctccatcccccacatggctgcccaagctaatctgtgccgacatggaagaaaggaggtgatagggttgccctacagggaaccaaaggctaaggaatactttcgaattaactccagggtccagtgccctggctgctgggtaggtcaaggagctgtcctgggttctgaaatgttcgtcatcctcatgctctacctctggttcgccatcggcctggcctgcgccggcttctgctgccaccagctgctgttgatcctccgcgggcagacccgccaccaggtgcggaagggggtggcagtgagggcccggccctggcgcaagaacttacaagaggtcttcggaaagaggtggctgctgggcctgctggtccccatgttcaatgtcggaagtgagagctccaagcagcaggataagtaaagacaggtgaggaaaagagtgaagagagtccctctgctgctcctccacagacagagccagcttctcctagggatcagtcaggccccctgccctctcaggccctgcaacatctggaggtctcaggcttcccagccctggggacagttgggagggtgttgagcctttcaggcagtgggccctgagcagac

SEQ ID NO: 461218 - DNA, 1564 bp, Homo sapiens
ggggtgaggctcaaagaagaagctccaagttcaagctctgtgtctggataaactcccattgtctttccttctctcaaatcagagctgcccgtgggtcccagggtgatgctgggctgtgtagaggctgagtgcaggagcattaatgctagaaccagatgaggaaactggaatctaagatcacactggaatttacagacgaagaaactggaatctgagatctcacagtagtgaatggtgaatattcaaacccaggaatgtaatcgaggatgctggccctgcggctgctcaacgtggtggcccccgcctacttcttgtgcatctccctggtgaccttcgtgctgcagctcttcctcttcctgcccagcatgcgcgaggaccccgcggccgcccggctcttctcgcccgccctgctccacggggcgctcttcctattcctctcggccaacgccctgggcaattacgtccttgtcatccagaactccccagacgacctgggggcctgccagggggcctcggccaggaagactccatgcccctcacctagcacccacttctgccgagtgtgcgccagagtcaccctgaggcacgaccatcactgtttcttcaccggcaactgcatcggcagcaggaacatgcgcaacttcgtcctgttctgcctctacacctccctggcctgcctctactccatggtggccggcgtggcctacatctccgctgtcctttccatctccttcgcccaccccttggccttcctcacgctcctgcccacctccatcagccagttcttctccgtgccaggaaaaaaccctgtgggaaatggcttccatccacccaggcttgttcctggggcagtgttgcaaggcaggcccaagcttgacagctctgatgttctcacatcccagcttgagggccacctttgcctgtcagcattcctcacgccaaagagcaccatggacctgggatcctccatcccccacatggctgcccaagctaatctgtgccgacatggaagaaaggaggtgatagggttgccctacagggaaccaaaggctaaggaatactttcgaattaactccagggtccagtgccctggctgctgggtaggtcaaggagctgtcctgggttctgaaatgttcgtcatcctcatgctctacctctggttcgccatcggcctggcctgcgccggcttctgctgccaccagctgctgttgatcctccgcgggcagacccgccaccaggtgcggaagggggtggcagtgagggcccggccctggcgcaagaacttacaagaggtcttcggaaagaggtggctgctgggcctgctggtccccatgttcaatgtcggaagtgagagctccaagcagcaggataagtaaagacaggtgaggaaaagagtgaagagagtccctctgctgctcctccacagacagagccagcttctcctagggatcagtcaggccccctgccctctcaggccctgcaacatctggaggtctcaggcttcccagccctggggacagttgggagggtgttgagcctttcaggcagtgggccctgagcagac

SEQ ID NO: 461219 - DNA, 577 bp, Homo sapiens
ggggctggggggtgcccagctgccatccccgccgcttcctggcccttactcgctggcgcccaagtgggaagccagcagctgcccgctccctcctccccacatccccgctacttgcccagttcccgaagcgaagcgcaggctgcgagccagccgggccgagtccacaactttgcagcctcgggcagggcgagagccggcgtccggggctcctcttgtcggcgaccagagctcggtgagttgatttcctcacccctctgcgacggcggcagtgcggcggcggcggcgcggggggcggcttcccgtgcgtccgggaggcagtggccgagaagcccgcggctgccggcgctgccggtctttccaaggctccggctgtgccgccctctgccgcgggcgaggcgggcgccagggctgaacggacagctccctacaccccggggccccacgggcggtctctgctgtcccttctcccgcgcagggccagggctgaggctgcctgccgagcgcccctcactcccctagcccctgtccttcgccgccttcccagcgctgcggcgcatctggctgctcccgcgccccc

SEQ ID NO: 461220 - DNA, 1833 bp, Homo sapiens
agggcggtgaccccaactggatggtcagacccagtgtggcctctgccgtgggggttcagctgcgtgtttctcggtctggaggccccagcagggcctacgcaagctgtggggaggaggctcccctgctggggattctttgacagggtgttgggtgtcagaggcccagggccagagcaccaggggccccagtgggaggagccaggtgtagggatgccaccaaccagcccagcagcaactgcaggaggcccgcggagcctaaataacccctgtattaaaatcacagtgaccagacacacatgccctggctgggggatcacacatgcgaacctgcagacaattccagatacccaaggccaggaaggcccacgtgaggatgtcactcaccctggaggagacttggatggggtggcaaatttctatttggaggaagagggtttccaggatggcagatgccagaagatggtcctgatgtctgaggaagggccacctagtttgacaggatgccctcgagtgcaatgtccacaaagcaacaagttcaaactttccaagtcgatgcaaagaatcctgagacgggtgcatgagaacagtagacctgcagttgggggattgcagatgccatgaggaattgcagacttttgtccattggattcttgagatgtgtaaggttccttttgtatgtggggctctacatggtatatgagaaaaggcccagtgttcaccggaagaaggggagatgggaactattcccagccactcttctctcaagaactgatggggagtcatgggtccctgccccacttgtccatgtgagagggaagcaggtgtgcttttaccagaaagagttctcgaggggttagcaccccaggaatgcatctatgctgactctgcttatcatgactccccaccttcaaaatacatcttagggtcaccgcacatcccagaaagtggcaacacaggggcacccctcgatgtgccgagtatccagagtcacgttcttggaaggcgtgaccagcgtgtaatttaagcaaatggaatctttcccaaatgtcttcttttacaactgaaaaaacaaattaagcaacagaggaaaaacaaatccagagaaatagcctcttccggggaagtctgacctccctgtctagaagagaatgtggaaaatacagaaaagtataagcagaagcataaaaattattcacagttgcacccttggagggagctgtcctataaatcttggtgaatttgctgcccttcttttttctgtggatctgtctattacatgtgatagtttttaaagctgatgtcatgttattgatgtagttttgcttcttgctttatccattgaagactataatgtgagaaatttcctcgctggggctcttcccaaacctgatatttactgaccacaccaatattcaattgaatgagggagtgtcataattcaatcacttatagtttccagaaacgttgtgctcatttacattttccttagcagcatatgagggtgcatgaatcccatcatcacaacgcaatggaattagggagaaatgccagtgaaagatgaagagagatgaggcaggactagcaggagcgcctcagaccctcatttctgcaggcaagaaaggaaaggatcctgtggaagggtctcccactgctgtgtgattctaaaagctttgggcaggggatagggagtctccaaaccaaagcctggtggccattctgtgacaggcaggagtgggctgctatgaggaccctggtcatgttgaagctttggcggggggtcaccaagaggtggatagctggagctgtcagtcaactctgcttcccaggggcaga

SEQ ID NO: 461221 - DNA, 918 bp, Homo sapiens
tgcaaccaggattgggaaccagttgtcaggaggaatggagttttctgagggagacagaatcaacttggcattccctggtggaacattctgccctgcagaaagagaatgtggacatgaacgagctcctaagggaaaggaagaaagaaggcaggagaaatcttggggagggactgttttggggcaagctttcaagcctgtctttgcactgaactgtgggcagtcaggtctctgtgggctgccagcttcagtagactgcttggagtgtggatttattggagaggagtcctccccaactttagcagactttggaagcgacccctcaggccttgccttgcaggttctatttggtggcaggcaagactcagcagcctgtagtaaatgcagtcaggcctcaggccatgatgagtggcttcttcgctgtgccttcttattggctccagggaggcgaggctgctcctgggttagtgcgtggtggggtgatgacactggaatatactgtgttttaaacaaatgtgcgttttgttgggtccggccatctctgtaaacttcagactgttttgcaccgtctacaaacggggtttaaaatgagctagcgccatctactgggcgaatgccgtaaggtcggttgtgaggtcccggaatctgcaaaggaatgaatgaattacaaatctgtggctttatggggggaatgtcgagaatcgggcacacgctgaagtgtgagaaccactgccattatggagaagaggcttcccgccccctcacctgccactctagaaatccagagaagagattccacttggattaagacttgcataagtggggagttgagtccagtctctttcccccactgcaataccctgttgcggtgacatgtaataataataaaaagacttgcatgaactcctttctgtgcaaatg

SEQ ID NO: 461222 - DNA, 2828 bp, Homo sapiens
cggcgccaacatgggtctgagtaacaaaagacgcctgtccagggggagcggcggcatggaggctctcaccactcagctggggccggggcgcgagggcagttcctcgcccaactccaagcaggagctgcagccgtactcgggctccagcgctctcaaacccaaccaggtgggcgagacgtcgctgtacggggtgcccattgtgtcgctggtcatcgacggccaggagcgcctatgcctggcgcagatctccaacaccctcctcaagaactacagctataatgagatccacaaccgccgcgtggccctgggcatcacgtgcgtgcagtgcacgccggtacagctggagattctgcgtcgggccggggccatgcccatctcgtcgcgccgctgcggcatgatcactaagcgagaggccgaacgcctgtgcaagtcgttcctgggcgagcacaaaccacccaagctgcccgagaacttcgccttcgatgtggtgcacgagtgcgcgtggggctcgcgtggtagcttcatccctgcgcgttacaacagctctcgtgccaagtgcatcaagtgcggctactgcagcatgtacttctcgcccaacaagttcatcttccactcgcaccgaacacccgacgccaagtacacgcagcccgatgccgccaacttcaactcctggcgtcgtcacctcaaactcagtgacaagtcggccacagacgaactgagccatgcttgggaggacgtcaaggccatgtttaatggcggcacgcgcaagcggaccttctccctacaaggaggcggcggaggcggtgccaatggcgggtcgggtgggcaggggaagggtggtgctggcggcggtggcggcggtggcccagggtgcggtgcagagatggccccaggcccgccgccccacaaaagcctgcgctgtggcgaagatgaggctgccgggcctccggggccacctccaccccacccgcagcgcggacttggcctggcgactggagctagtggcccggcgggcccaggagggcccggtggcggcgccggcgtacgaagctacccggtgatcccggtgcccagcaaaggctttgggctcctgcaaaagctgcccccaccacttttcccccatccttacggcttccctacggccttcggcctatgccccaaaaaggacgacccggttttaggcgcgggcgagccaaagggcggtcctggcactgggagcggcggcggcggcgcggggacaggcgggggtgcggggggcccgggagccagccacttgcccccgggggcaggggcgggcccgggcggcggcgccatgttctgggggcatcaaccctccggggcagccaaggacgcagcggcagtggctgcagcggccgccgccgccactgtgtacccgacgtttcccatgttctggccagcagcaggcagcctcccggtaccgtcctaccccgctgctcagagccaagccaaggccgtggcggcagccgtggcggcggcagcggcggcggcagcggcagctgctggcagcggtgccccagagcccctggacggtgccgagccagccaaagagagtggcctcggcgcggaggagcgctgcccgagcgctctgtcccgcgggcccctggacgaagacggcacggacgaggcgctgccaccgcccctggccccgttgcccccgccgcccccgccgcccgcacgcaaaggctcctacgtgtcggccttccggccggtggtcaaggacaccgagagcatcgctaagctctacgggagcgcccgggaggcgtacggcgcggggcctgctcgggggccgggacccggcgctgggagcggcggctacgtgagcccggactttctgagcgagggcagctccagctacaattccgcctcgcccgacgtggacaccgcggacgagcccgaggtggacgtggaatccaaccgcttccccgacgacgaggacgcccaagaggagaccgagcccagcgcacccagcgcagggggcggcccagacggtgaacagcccactggacccccttccgccacctcctctggcgcggacggtcccgcaaactctcccgacggcggcagcccccgcccccggcgccgcctcgggccacccccagctggccggcccgcatttggggacttggcagccgaagacttggtgcggagacctgagaggagcccgccaagcggcggcggcggctacgagctgcgagagccttgcgggcccctaggaggccccgcgccggccaaggtgagccccgcgcccgccccgccagtggcgccttcccacctaccctgtgcgcggcagggctgcggggccgggcggagaacgggaattttgttccgcgcaggcgtgggagcagcaggcctcggccactctccgcaggcccagccttgggcgcgctgcgaaaccgggcccacccgcaccctccagtgagggtttcgaagggaagggaagctgggggcggcgggaggactggggaacttgtgtgctttgtttttgttgatgggaatggggaggagaccggctgagactgccagacacagagacagaaaaggggtgtggagaaagaaagaggaggtaagaaaggaacccagagccagagaaaagcgctcgcccgggtgggcatcagagccccaaggaagaggagaagagaggacagtgtggcctctccctgagtcgggccccagcagtaccgggtccccggaatctcccaccaccccaactcgcagttttccgagtctcttcgcactcccgccttgggaaccacagggttcgttgctgggaagctgtctcgggaccgcgtgcggagcgggaggggggc

SEQ ID NO: 461223 - DNA, 2863 bp, Homo sapiens
cggagagccggcggatccggactccgccgccgctctccgcggcacctgcggcacgtcgccggctccaggcgccgcgcactgagcggcggcatggaggctctcaccactcagctggggccggggcgcgagggcagttcctcgcccaactccaagcaggagctgcagccgtactcgggctccagcgctctcaaacccaaccaggtgggcgagacgtcgctgtacggggtgcccattgtgtcgctggtcatcgacggccaggagcgcctatgcctggcgcagatctccaacaccctcctcaagaactacagctataatgagatccacaaccgccgcgtggccctgggcatcacgtgcgtgcagtgcacgccggtacagctggagattctgcgtcgggccggggccatgcccatctcgtcgcgccgctgcggcatgatcactaagcgagaggccgaacgcctgtgcaagtcgttcctgggcgagcacaaaccacccaagctgcccgagaacttcgccttcgatgtggtgcacgagtgcgcgtggggctcgcgtggtagcttcatccctgcgcgttacaacagctctcgtgccaagtgcatcaagtgcggctactgcagcatgtacttctcgcccaacaagttcatcttccactcgcaccgaacacccgacgccaagtacacgcagcccgatgccgccaacttcaactcctggcgtcgtcacctcaaactcagtgacaagtcggccacagacgaactgagccatgcttgggaggacgtcaaggccatgtttaatggcggcacgcgcaagcggaccttctccctacaaggaggcggcggaggcggtgccaatggcgggtcgggtgggcaggggaagggtggtgctggcggcggtggcggcggtggcccagggtgcggtgcagagatggccccaggcccgccgccccacaaaagcctgcgctgtggcgaagatgaggctgccgggcctccggggccacctccaccccacccgcagcgcggacttggcctggcgactggagctagtggcccggcgggcccaggagggcccggtggcggcgccggcgtacgaagctacccggtgatcccggtgcccagcaaaggctttgggctcctgcaaaagctgcccccaccacttttcccccatccttacggcttccctacggccttcggcctatgccccaaaaaggacgacccggttttaggcgcgggcgagccaaagggcggtcctggcactgggagcggcggcggcggcgcggggacaggcgggggtgcggggggcccgggagccagccacttgcccccgggggcaggggcgggcccgggcggcggcgccatgttctgggggcatcaaccctccggggcagccaaggacgcagcggcagtggctgcagcggccgccgccgccactgtgtacccgacgtttcccatgttctggccagcagcaggcagcctcccggtaccgtcctaccccgctgctcagagccaagccaaggccgtggcggcagccgtggcggcggcagcggcggcggcagcggcagctgctggcagcggtgccccagagcccctggacggtgccgagccagccaaagagagtggcctcggcgcggaggagcgctgcccgagcgctctgtcccgcgggcccctggacgaagacggcacggacgaggcgctgccaccgcccctggccccgttgcccccgccgcccccgccgcccgcacgcaaaggctcctacgtgtcggccttccggccggtggtcaaggacaccgagagcatcgctaagctctacgggagcgcccgggaggcgtacggcgcggggcctgctcgggggccgggacccggcgctgggagcggcggctacgtgagcccggactttctgagcgagggcagctccagctacaattccgcctcgcccgacgtggacaccgcggacgagcccgaggtggacgtggaatccaaccgcttccccgacgacgaggacgcccaagaggagaccgagcccagcgcacccagcgcagggggcggcccagacggtgaacagcccactggacccccttccgccacctcctctggcgcggacggtcccgcaaactctcccgacggcggcagcccccgcccccggcgccgcctcgggccacccccagctggccggcccgcatttggggacttggcagccgaagacttggtgcggagacctgagaggagcccgccaagcggcggcggcggctacgagctgcgagagccttgcgggcccctaggaggccccgcgccggccaaggtgagccccgcgcccgccccgccagtggcgccttcccacctaccctgtgcgcggcagggctgcggggccgggcggagaacgggaattttgttccgcgcaggcgtgggagcagcaggcctcggccactctccgcaggcccagccttgggcgcgctgcgaaaccgggcccacccgcaccctccagtgagggtttcgaagggaagggaagctgggggcggcgggaggactggggaacttgtgtgctttgtttttgttgatgggaatggggaggagaccggctgagactgccagacacagagacagaaaaggggtgtggagaaagaaagaggaggtaagaaaggaacccagagccagagaaaagcgctcgcccgggtgggcatcagagccccaaggaagaggagaagagaggacagtgtggcctctccctgagtcgggccccagcagtaccgggtccccggaatctcccaccaccccaactcgcagttttccgagtctcttcgcactcccgccttgggaaccacagggttcgttgctgggaagctgtctcgggaccgcgtgcggagcgggaggggggc

SEQ ID NO: 461224 - DNA, 764 bp, Homo sapiens
  misc_feature (694)..(694): n is a, c, g, or t
cactcgctgctgaccaggctctgccggctccttcggcctcgccgcaggaacttgctactaccagcaccatgccctaccaatatccagcactgaccccggagcagaagaaggagctgtctgacatcgctcaccgcatcgtggcacctggcaagggcatcctggctgcagatgagtccactgggagcattgccaagcggctgcagtccattggcaccgagaacaccgaggagaaccggcgcttctaccgccagctgctgctgacagctgacgaccgcgtgaacccctgcattgggggtgtcatcctcttccatgagacactctaccagaaggcggatgatgggcgtcccttcccccaagttatcaaatccaagggcggtgttgtgggcatcaaggtagacaagggcgtggtccccctggcagggacaaatggcgagactaccacccaagggttggatgggctgtctgagcgctgtgcccagtacaagaaggacggagctgacttcgccaagtggcgttgtgtgctgaagattggggaacacaccccctcagccctcgccatcatggaaaatgccaatgttctggcccgttatgccagtatctgccagcagaatggcattgtgcccatcgtggagcctgagatcctccctgatggggaccatgacttgaagcgctgccagtatgtgaccgagaaggngtggtggtgtctacaggctctggtggtccccacttttcctcgggaggccttgtgggcccatgtgcccccg

SEQ ID NO: 461225 - DNA, 1807 bp, Homo sapiens
catcgctaggtacgaggctgggtgagcttccgaggctaaatcggctgcgttcctctcggaacgcgccgcagaaggggtcctggtgacgagtcccgcgttctctccttgaatccactcgccagcccgccgccctctgccgccgcaccctgcacacccgcccctctcctgtgccaggaacttgctactaccagcaccatgccctaccaatatccagcactgaccccggagcagaagaaggagctgtctgacatcgctcaccgcatcgtggcacctggcaagggcatcctggctgcagatgagtccactgggagcattgccaagcggctgcagtccattggcaccgagaacaccgaggagaaccggcgcttctaccgccagctgctgctgacagctgacgaccgcgtgaacccctgcattgggggtgtcatcctcttccatgagacactctaccagaaggcggatgatgggcgtcccttcccccaagttatcaaatccaagggcggtgttgtgggcatcaaggtagacaagggcgtggtccccctggcagggacaaatggcgagactaccacccaagggttggatgggctgtctgagcgctgtgcccagtacaagaaggacggagctgacttcgccaagtggcgttgtgtgctgaagattggggaacacaccccctcagccctcgccatcatggaaaatgccaatgttctggcccgttatgccagtatctgccagcagaatggcattgtgcccatcgtggagcctgagatcctccctgatggggaccatgacttgaagcgctgccagtatgtgaccgagaaggtgctggctgctgtctacaaggctctgagtgaccaccacatctacctggaaggcaccttgctgaagcccaacatggtcaccccaggccatgcttgcactcagaagttttctcatgaggagattgccatggcgaccgtcacagcgctgcgccgcacagtgccccccgctgtcactgggatcaccttcctgtctggaggccagagtgaggaggaggcgtccatcaacctcaatgccattaacaagtgccccctgctgaagccctgggccctgaccttctcctacggccgagccctgcaggcctctgccctgaaggcctggggcgggaagaaggagaacctgaaggctgcgcaggaggagtatgtcaagcgagccctggccaacagccttgcctgtcaaggaaagtacactccgagcggtcaggctggggctgctgccagcgagtccctcttcgtctctaaccacgcctattaagcggaggtgttcccaggctgcccccaacactccaggccctgccccctcccactcttgaagaggaggccgcctcctcggggctccaggctggcttgcccgcgctctttcttccctcgtgacagtggtgtgtggtgtcgtctgtgaatgctaagtccatcaccctttccggcacactgccaaataaacagctatttaagggggagtcggccgtccgtgtcttgtggtgtctaatgcaggggagggcctggggaggagatggaattagagagggcttcttagtctcctttgggctgtggaatcccataaaaaccttgaattgtttccaatacccccttggtaatgcagatacagaagttaagctgtagagctcaggctccaggtgaagaactgtgtctctgtagctgctgctttccatgaagctagaatgagcgtgccatgccattactttgagcctttccccaatgacccaggctggggtgtacagtaactacatcagctctctggacctagagaatct

SEQ ID NO: 461226 - DNA, 1763 bp, Homo sapiens
gggtgcctcaaccacactccgtccacggactctccgttattttaggaggtccctggccaaagatttatttctcttgacaaccaagggcctccgtctggatttccaaggaagaatttcctctgaagcaccggaacttgctactaccagcaccatgccctaccaatatccagcactgaccccggagcagaagaaggagctgtctgacatcgctcaccgcatcgtggcacctggcaagggcatcctggctgcagatgagtccactgggagcattgccaagcggctgcagtccattggcaccgagaacaccgaggagaaccggcgcttctaccgccagctgctgctgacagctgacgaccgcgtgaacccctgcattgggggtgtcatcctcttccatgagacactctaccagaaggcggatgatgggcgtcccttcccccaagttatcaaatccaagggcggtgttgtgggcatcaaggtagacaagggcgtggtccccctggcagggacaaatggcgagactaccacccaagggttggatgggctgtctgagcgctgtgcccagtacaagaaggacggagctgacttcgccaagtggcgttgtgtgctgaagattggggaacacaccccctcagccctcgccatcatggaaaatgccaatgttctggcccgttatgccagtatctgccagcagaatggcattgtgcccatcgtggagcctgagatcctccctgatggggaccatgacttgaagcgctgccagtatgtgaccgagaaggtgctggctgctgtctacaaggctctgagtgaccaccacatctacctggaaggcaccttgctgaagcccaacatggtcaccccaggccatgcttgcactcagaagttttctcatgaggagattgccatggcgaccgtcacagcgctgcgccgcacagtgccccccgctgtcactgggatcaccttcctgtctggaggccagagtgaggaggaggcgtccatcaacctcaatgccattaacaagtgccccctgctgaagccctgggccctgaccttctcctacggccgagccctgcaggcctctgccctgaaggcctggggcgggaagaaggagaacctgaaggctgcgcaggaggagtatgtcaagcgagccctggccaacagccttgcctgtcaaggaaagtacactccgagcggtcaggctggggctgctgccagcgagtccctcttcgtctctaaccacgcctattaagcggaggtgttcccaggctgcccccaacactccaggccctgccccctcccactcttgaagaggaggccgcctcctcggggctccaggctggcttgcccgcgctctttcttccctcgtgacagtggtgtgtggtgtcgtctgtgaatgctaagtccatcaccctttccggcacactgccaaataaacagctatttaagggggagtcggccgtccgtgtcttgtggtgtctaatgcaggggagggcctggggaggagatggaattagagagggcttcttagtctcctttgggctgtggaatcccataaaaaccttgaattgtttccaatacccccttggtaatgcagatacagaagttaagctgtagagctcaggctccaggtgaagaactgtgtctctgtagctgctgctttccatgaagctagaatgagcgtgccatgccattactttgagcctttccccaatgacccaggctggggtgtacagtaactacatcagctctctggacctagagaatct

SEQ ID NO: 461227 - DNA, 1890 bp, Homo sapiens
catcgctaggtacgaggctgggtgagcttccgaggctaaatcggctgcgttcctctcggaacgcgccgcagaaggggtcctggtgacgagtcccgcgttctctccttgaatccactcgccagcccgccgccctctgccgccgcaccctgcacacccgcccctctcctgtgccaggaacttgctactaccagcaccatgccctaccaatatccagcactgaccccggagcagaagaaggagctgtctgacatcgctcaccgcatcgtggcacctggcaagggcatcctggctgcagatgagtccactggtgcgggcaggagacagaatgggtggagggtgcagggttgggagtggcaggctgatcccctaattcccatgtgacactcccagggagcattgccaagcggctgcagtccattggcaccgagaacaccgaggagaaccggcgcttctaccgccagctgctgctgacagctgacgaccgcgtgaacccctgcattgggggtgtcatcctcttccatgagacactctaccagaaggcggatgatgggcgtcccttcccccaagttatcaaatccaagggcggtgttgtgggcatcaaggtagacaagggcgtggtccccctggcagggacaaatggcgagactaccacccaagggttggatgggctgtctgagcgctgtgcccagtacaagaaggacggagctgacttcgccaagtggcgttgtgtgctgaagattggggaacacaccccctcagccctcgccatcatggaaaatgccaatgttctggcccgttatgccagtatctgccagcagaatggcattgtgcccatcgtggagcctgagatcctccctgatggggaccatgacttgaagcgctgccagtatgtgaccgagaaggtgctggctgctgtctacaaggctctgagtgaccaccacatctacctggaaggcaccttgctgaagcccaacatggtcaccccaggccatgcttgcactcagaagttttctcatgaggagattgccatggcgaccgtcacagcgctgcgccgcacagtgccccccgctgtcactgggatcaccttcctgtctggaggccagagtgaggaggaggcgtccatcaacctcaatgccattaacaagtgccccctgctgaagccctgggccctgaccttctcctacggccgagccctgcaggcctctgccctgaaggcctggggcgggaagaaggagaacctgaaggctgcgcaggaggagtatgtcaagcgagccctggccaacagccttgcctgtcaaggaaagtacactccgagcggtcaggctggggctgctgccagcgagtccctcttcgtctctaaccacgcctattaagcggaggtgttcccaggctgcccccaacactccaggccctgccccctcccactcttgaagaggaggccgcctcctcggggctccaggctggcttgcccgcgctctttcttccctcgtgacagtggtgtgtggtgtcgtctgtgaatgctaagtccatcaccctttccggcacactgccaaataaacagctatttaagggggagtcggccgtccgtgtcttgtggtgtctaatgcaggggagggcctggggaggagatggaattagagagggcttcttagtctcctttgggctgtggaatcccataaaaaccttgaattgtttccaatacccccttggtaatgcagatacagaagttaagctgtagagctcaggctccaggtgaagaactgtgtctctgtagctgctgctttccatgaagctagaatgagcgtgccatgccattactttgagcctttccccaatgacccaggctggggtgtacagtaactacatcagctctctggacctagagaatct

SEQ ID NO: 461228 - DNA, 1728 bp, Homo sapiens
aacggctaggtacgaggctgggtgttgaatcggccgaggctgaaaccaagggcctccgtctggatttccaaggaagaatttcctctgaagcaccggaacttgctactaccagcaccatgccctaccaatatccagcactgaccccggagcagaagaaggagctgtctgacatcgctcaccgcatcgtggcacctggcaagggcatcctggctgcagatgagtccactgggagcattgccaagcggctgcagtccattggcaccgagaacaccgaggagaaccggcgcttctaccgccagctgctgctgacagctgacgaccgcgtgaacccctgcattgggggtgtcatcctcttccatgagacactctaccagaaggcggatgatgggcgtcccttcccccaagttatcaaatccaagggcggtgttgtgggcatcaaggtagacaagggcgtggtccccctggcagggacaaatggcgagactaccacccaagggttggatgggctgtctgagcgctgtgcccagtacaagaaggacggagctgacttcgccaagtggcgttgtgtgctgaagattggggaacacaccccctcagccctcgccatcatggaaaatgccaatgttctggcccgttatgccagtatctgccagcagaatggcattgtgcccatcgtggagcctgagatcctccctgatggggaccatgacttgaagcgctgccagtatgtgaccgagaaggtgctggctgctgtctacaaggctctgagtgaccaccacatctacctggaaggcaccttgctgaagcccaacatggtcaccccaggccatgcttgcactcagaagttttctcatgaggagattgccatggcgaccgtcacagcgctgcgccgcacagtgccccccgctgtcactgggatcaccttcctgtctggaggccagagtgaggaggaggcgtccatcaacctcaatgccattaacaagtgccccctgctgaagccctgggccctgaccttctcctacggccgagccctgcaggcctctgccctgaaggcctggggcgggaagaaggagaacctgaaggctgcgcaggaggagtatgtcaagcgagccctggccaacagccttgcctgtcaaggaaagtacactccgagcggtcaggctggggctgctgccagcgagtccctcttcgtctctaaccacgcctattaagcggaggtgttcccaggctgcccccaacactccaggccctgccccctcccactcttgaagaggaggccgcctcctcggggctccaggctggcttgcccgcgctctttcttccctcgtgacagtggtgtgtggtgtcgtctgtgaatgctaagtccatcaccctttccggcacactgccaaataaacagctatttaagggggagtcggccgtccgtgtcttgtggtgtctaatgcaggggagggcctggggaggagatggaattagagagggcttcttagtctcctttgggctgtggaatcccataaaaaccttgaattgtttccaatacccccttggtaatgcagatacagaagttaagctgtagagctcaggctccaggtgaagaactgtgtctctgtagctgctgctttccatgaagctagaatgagcgtgccatgccattactttgagcctttccccaatgacccaggctggggtgtacagtaactacatcagctctctggacctagagaatct

SEQ ID NO: 461229 - DNA, 1542 bp, Homo sapiens
ggacgcgtgggtcgacccacgcgtccgcggacgcgtgggctgggagcattgccaagcggctgcagtccattggcaccgagaacaccgaggagaaccggcgcttctaccgccagctgctgctgacagctgacgaccgcgtgaacccctgcattgggggtgtcatcctcttccatgagacactctaccagaaggcggatgatgggcgtcccttcccccaagttatcaaatccaagggcggtgttgtgggcatcaaggtagacaagggcgtggtccccctggcagggacaaatggcgagactaccacccaagggttggatgggctgtctgagcgctgtgcccagtacaagaaggacggagctgacttcgccaagtggcgttgtgtgctgaagattggggaacacaccccctcagccctcgccatcatggaaaatgccaatgttctggcccgttatgccagtatctgccagcagaatggcattgtgcccatcgtggagcctgagatcctccctgatggggaccatgacttgaagcgctgccagtatgtgaccgagaaggtgctggctgctgtctacaaggctctgagtgaccaccacatctacctggaaggcaccttgctgaagcccaacatggtcaccccaggccatgcttgcactcagaagttttctcatgaggagattgccatggcgaccgtcacagcgctgcgccgcacagtgccccccgctgtcactgggatcaccttcctgtctggaggccagagtgaggaggaggcgtccatcaacctcaatgccattaacaagtgccccctgctgaagccctgggccctgaccttctcctacggccgagccctgcaggcctctgccctgaaggcctggggcgggaagaaggagaacctgaaggctgcgcaggaggagtatgtcaagcgagccctggccaacagccttgcctgtcaaggaaagtacactccgagcggtcaggctggggctgctgccagcgagtccctcttcgtctctaaccacgcctattaagcggaggtgttcccaggctgcccccaacactccaggccctgccccctcccactcttgaagaggaggccgcctcctcggggctccaggctggcttgcccgcgctctttcttccctcgtgacagtggtgtgtggtgtcgtctgtgaatgctaagtccatcaccctttccggcacactgccaaataaacagctatttaagggggagtcggccgtccgtgtcttgtggtgtctaatgcaggggagggcctggggaggagatggaattagagagggcttcttagtctcctttgggctgtggaatcccataaaaaccttgaattgtttccaatacccccttggtaatgcagatacagaagttaagctgtagagctcaggctccaggtgaagaactgtgtctctgtagctgctgctttccatgaagctagaatgagcgtgccatgccattactttgagcctttccccaatgacccaggctggggtgtacagtaactacatcagctctctggacctagagaatct

SEQ ID NO: 461230 - DNA, 1294 bp, Homo sapiens
gtcgactctacagatcctccgctggccaatggcaggacaaatggcgagactaccacccaagggttggatgggctgtctgagcgctgtgcccagtacaagaaggacggagctgacttcgccaagtggcgttgtgtgctgaagattggggaacacaccccctcagccctcgccatcatggaaaatgccaatgttctggcccgttatgccagtatctgccagcagaatggcattgtgcccatcgtggagcctgagatcctccctgatggggaccatgacttgaagcgctgccagtatgtgaccgagaaggtgctggctgctgtctacaaggctctgagtgaccaccacatctacctggaaggcaccttgctgaagcccaacatggtcaccccaggccatgcttgcactcagaagttttctcatgaggagattgccatggcgaccgtcacagcgctgcgccgcacagtgccccccgctgtcactgggatcaccttcctgtctggaggccagagtgaggaggaggcgtccatcaacctcaatgccattaacaagtgccccctgctgaagccctgggccctgaccttctcctacggccgagccctgcaggcctctgccctgaaggcctggggcgggaagaaggagaacctgaaggctgcgcaggaggagtatgtcaagcgagccctggccaacagccttgcctgtcaaggaaagtacactccgagcggtcaggctggggctgctgccagcgagtccctcttcgtctctaaccacgcctattaagcggaggtgttcccaggctgcccccaacactccaggccctgccccctcccactcttgaagaggaggccgcctcctcggggctccaggctggcttgcccgcgctctttcttccctcgtgacagtggtgtgtggtgtcgtctgtgaatgctaagtccatcaccctttccggcacactgccaaataaacagctatttaagggggagtcggccgtccgtgtcttgtggtgtctaatgcaggggagggcctggggaggagatggaattagagagggcttcttagtctcctttgggctgtggaatcccataaaaaccttgaattgtttccaatacccccttggtaatgcagatacagaagttaagctgtagagctcaggctccaggtgaagaactgtgtctctgtagctgctgctttccatgaagctagaatgagcgtgccatgccattactttgagcctttccccaatgacccaggctggggtgtacagtaactacatcagctctctggacctagagaatct

SEQ ID NO: 461231 - DNA, 334 bp, Homo sapiens
tatacttagagtcgaggcgtaccccgctggccaatggcagtatctgccagcagaatggcattgtgcccatcgtggagcctgagatcctccctgatggggaccatgacttgaagcgctgccagtatgtgaccgagaaggtgctggctgctgtctacaaggctctgagtgaccaccacatctacctggaaggcaccttgctgaagcccaacatggtcaccccaggccatgcttgcactcagaagttttctcatgaggagattgccatggcgtgggccagcgggcctgttggcccagtctggattgggtgcaagaaggggttggtgccattgggccc

SEQ ID NO: 461232 - DNA, 1533 bp, Homo sapiens
catcgctaggtacgaggctgggtgagcttccgaggctaaatcggctgcgttcctctcggaacgcgccgcagaaggggtcctggtgacgagtcccgcgttctctccttgaatccactcgccagcccgccgccctctgccgccgcaccctgcacacccgcccctctcctgtgccaggaacttgctactaccagcaccatgccctaccaatatccagcactgaccccggagcagaagaaggagctgtctgacatcgctcaccgcatcgtggcacctggcaagggcatcctggctgcagatgagtccactgggagcattgccaagcggctgcagtccattggcaccgagaacaccgaggagaaccggcgcttctaccgccagctgctgctgacagctgacgaccgcgtgaacccctgcattgggggtgtcatcctcttccatgagacactctaccagaaggcggatgatgggcgtcccttcccccaagttatcaaatccaagggcggtgttgtgggcatcaaggtagacaagggcgtggtccccctggcagggacaaatggcgagactaccacccaagggttggatgggctgtctgagcgctgtgcccagtacaagaaggacggagctgacttcgccaagtggcgttgtgtgctgaagattggggaacacaccccctcagccctcgccatcatggaaaatgccaatgttctggcccgttatgccagtatctgccagcagaatggcattgtgcccatcgtggagcctgagatcctccctgatggggaccatgacttgaagcgctgccagtatgtgaccgagaaggtgctggctgctgtctacaaggctctgagtgaccaccacatctacctggaaggcaccttgctgaagcccaacatggtcaccccaggccatgcttgcactcagaagttttctcatgaggagattgccatggcgaccgtcacagcgctgcgccgcacagtgccccccgctgtcactgggatcaccttcctgtctggaggccagagtgaggaggaggcgtccatcaacctcaatgccattaacaagtgccccctgctgaagccctgggccctgaccttctcctacggccgagccctgcaggcctctgccctgaaggcctggggcgggaagaaggagaacctgaaggctgcgcaggaggagtatgtcaagcgagccctggccaacagccttgcctgtcaaggaaagtacactccgagcggtcaggctggggctgctgccagcgagtccctcttcgtctctaaccacgcctattaagcggaggtgttcccaggctgcccccaacactccaggccctgccccctcccactcttgaagaggaggccgcctcctcggggctccaggctggcttgcccgcgctctttcttccctcgtgacagtggtgtgtggtgtcgtctgtgaatgctaagtccatcaccctttccggcacactgccaaataaacagctatttaagggaatcgaatttccgcggccgcatggggcgggagcatgcgacgtcg

SEQ ID NO: 461233 - DNA, 1793 bp, Homo sapiens
gggagattagagaaggagccaggagggtggcagggaggccacgtgatccgagtcccctcacccctttccttcccacaggtccctggccaaagatttatttctcttgacaaccaagggcctccgtctggatttccaaggaagaatttcctctgaagcaccggaacttgctactaccagcaccatgccctaccaatatccagcactgaccccggagcagaagaaggagctgtctgacatcgctcaccgcatcgtggcacctggcaagggcatcctggctgcagatgagtccactgggagcattgccaagcggctgcagtccattggcaccgagaacaccgaggagaaccggcgcttctaccgccagctgctgctgacagctgacgaccgcgtgaacccctgcattgggggtgtcatcctcttccatgagacactctaccagaaggcggatgatgggcgtcccttcccccaagttatcaaatccaagggcggtgttgtgggcatcaaggtagacaagggcgtggtccccctggcagggacaaatggcgagactaccacccaagggttggatgggctgtctgagcgctgtgcccagtacaagaaggacggagctgacttcgccaagtggcgttgtgtgctgaagattggggaacacaccccctcagccctcgccatcatggaaaatgccaatgttctggcccgttatgccagtatctgccagcagaatggcattgtgcccatcgtggagcctgagatcctccctgatggggaccatgacttgaagcgctgccagtatgtgaccgagaaggtgctggctgctgtctacaaggctctgagtgaccaccacatctacctggaaggcaccttgctgaagcccaacatggtcaccccaggccatgcttgcactcagaagttttctcatgaggagattgccatggcgaccgtcacagcgctgcgccgcacagtgccccccgctgtcactgggatcaccttcctgtctggaggccagagtgaggaggaggcgtccatcaacctcaatgccattaacaagtgccccctgctgaagccctgggccctgaccttctcctacggccgagccctgcaggcctctgccctgaaggcctggggcgggaagaaggagaacctgaaggctgcgcaggaggagtatgtcaagcgagccctggccaacagccttgcctgtcaaggaaagtacactccgagcggtcaggctggggctgctgccagcgagtccctcttcgtctctaaccacgcctattaagcggaggtgttcccaggctgcccccaacactccaggccctgccccctcccactcttgaagaggaggccgcctcctcggggctccaggctggcttgcccgcgctctttcttccctcgtgacagtggtgtgtggtgtcgtctgtgaatgctaagtccatcaccctttccggcacactgccaaataaacagctatttaagggggagtcggccgtccgtgtcttgtggtgtctaatgcaggggagggcctggggaggagatggaattagagagggcttcttagtctcctttgggctgtggaatcccataaaaaccttgaattgtttccaatacccccttggtaatgcagatacagaagttaagctgtagagctcaggctccaggtgaagaactgtgtctctgtagctgctgctttccatgaagctagaatgagcgtgccatgccattactttgagcctttccccaatgacccaggctggggtgtacagtaactacatcagctctctggacctagagaatct

SEQ ID NO: 461234 - DNA, 1680 bp, Homo sapiens
cactcgctgctgaccaggctctgccggctccttcggcctcgccgcaggaacttgctactaccagcaccatgccctaccaatatccagcactgaccccggagcagaagaaggagctgtctgacatcgctcaccgcatcgtggcacctggcaagggcatcctggctgcagatgagtccactgggagcattgccaagcggctgcagtccattggcaccgagaacaccgaggagaaccggcgcttctaccgccagctgctgctgacagctgacgaccgcgtgaacccctgcattgggggtgtcatcctcttccatgagacactctaccagaaggcggatgatgggcgtcccttcccccaagttatcaaatccaagggcggtgttgtgggcatcaaggtagacaagggcgtggtccccctggcagggacaaatggcgagactaccacccaagggttggatgggctgtctgagcgctgtgcccagtacaagaaggacggagctgacttcgccaagtggcgttgtgtgctgaagattggggaacacaccccctcagccctcgccatcatggaaaatgccaatgttctggcccgttatgccagtatctgccagcagaatggcattgtgcccatcgtggagcctgagatcctccctgatggggaccatgacttgaagcgctgccagtatgtgaccgagaaggtgctggctgctgtctacaaggctctgagtgaccaccacatctacctggaaggcaccttgctgaagcccaacatggtcaccccaggccatgcttgcactcagaagttttctcatgaggagattgccatggcgaccgtcacagcgctgcgccgcacagtgccccccgctgtcactgggatcaccttcctgtctggaggccagagtgaggaggaggcgtccatcaacctcaatgccattaacaagtgccccctgctgaagccctgggccctgaccttctcctacggccgagccctgcaggcctctgccctgaaggcctggggcgggaagaaggagaacctgaaggctgcgcaggaggagtatgtcaagcgagccctggccaacagccttgcctgtcaaggaaagtacactccgagcggtcaggctggggctgctgccagcgagtccctcttcgtctctaaccacgcctattaagcggaggtgttcccaggctgcccccaacactccaggccctgccccctcccactcttgaagaggaggccgcctcctcggggctccaggctggcttgcccgcgctctttcttccctcgtgacagtggtgtgtggtgtcgtctgtgaatgctaagtccatcaccctttccggcacactgccaaataaacagctatttaagggggagtcggccgtccgtgtcttgtggtgtctaatgcaggggagggcctggggaggagatggaattagagagggcttcttagtctcctttgggctgtggaatcccataaaaaccttgaattgtttccaatacccccttggtaatgcagatacagaagttaagctgtagagctcaggctccaggtgaagaactgtgtctctgtagctgctgctttccatgaagctagaatgagcgtgccatgccattactttgagcctttccccaatgacccaggctggggtgtacagtaactacatcagctctctggacctagagaatct

SEQ ID NO: 461235 - DNA, 1499 bp, Homo sapiens
cacccaggcgcacttctgcacccaggcgcacttctgcacccaggcgcacttctgcacccaggcgcacttctgcacccaggcgcacttctgcacccaggcgcacttctggtagagtgtcatcctcttccatgagacactctaccagaaggcggatgatgggcgtcccttcccccaagttatcaaatccaagggcggtgttgtgggcatcaaggtagacaagggcgtggtccccctggcagggacaaatggcgagactaccacccaagggttggatgggctgtctgagcgctgtgcccagtacaagaaggacggagctgacttcgccaagtggcgttgtgtgctgaagattggggaacacaccccctcagccctcgccatcatggaaaatgccaatgttctggcccgttatgccagtatctgccagcagaatggcattgtgcccatcgtggagcctgagatcctccctgatggggaccatgacttgaagcgctgccagtatgtgaccgagaaggtgctggctgctgtctacaaggctctgagtgaccaccacatctacctggaaggcaccttgctgaagcccaacatggtcaccccaggccatgcttgcactcagaagttttctcatgaggagattgccatggcgaccgtcacagcgctgcgccgcacagtgccccccgctgtcactgggatcaccttcctgtctggaggccagagtgaggaggaggcgtccatcaacctcaatgccattaacaagtgccccctgctgaagccctgggccctgaccttctcctacggccgagccctgcaggcctctgccctgaaggcctggggcgggaagaaggagaacctgaaggctgcgcaggaggagtatgtcaagcgagccctggccaacagccttgcctgtcaaggaaagtacactccgagcggtcaggctggggctgctgccagcgagtccctcttcgtctctaaccacgcctattaagcggaggtgttcccaggctgcccccaacactccaggccctgccccctcccactcttgaagaggaggccgcctcctcggggctccaggctggcttgcccgcgctctttcttccctcgtgacagtggtgtgtggtgtcgtctgtgaatgctaagtccatcaccctttccggcacactgccaaataaacagctatttaagggggagtcggccgtccgtgtcttgtggtgtctaatgcaggggagggcctggggaggagatggaattagagagggcttcttagtctcctttgggctgtggaatcccataaaaaccttgaattgtttccaatacccccttggtaatgcagatacagaagttaagctgtagagctcaggctccaggtgaagaactgtgtctctgtagctgctgctttccatgaagctagaatgagcgtgccatgccattactttgagcctttccccaatgacccaggctggggtgtacagtaactacatcagctctctggacctagagaatct

SEQ ID NO: 461236 - DNA, 1125 bp, Homo sapiens
tatacttagagtcgaggcgtaccccgctggccaatggcagtatctgccagcagaatggcattgtgcccatcgtggagcctgagatcctccctgatggggaccatgacttgaagcgctgccagtatgtgaccgagaaggtgctggctgctgtctacaaggctctgagtgaccaccacatctacctggaaggcaccttgctgaagcccaacatggtcaccccaggccatgcttgcactcagaagttttctcatgaggagattgccatggcgaccgtcacagcgctgcgccgcacagtgccccccgctgtcactgggatcaccttcctgtctggaggccagagtgaggaggaggcgtccatcaacctcaatgccattaacaagtgccccctgctgaagccctgggccctgaccttctcctacggccgagccctgcaggcctctgccctgaaggcctggggcgggaagaaggagaacctgaaggctgcgcaggaggagtatgtcaagcgagccctggccaacagccttgcctgtcaaggaaagtacactccgagcggtcaggctggggctgctgccagcgagtccctcttcgtctctaaccacgcctattaagcggaggtgttcccaggctgcccccaacactccaggccctgccccctcccactcttgaagaggaggccgcctcctcggggctccaggctggcttgcccgcgctctttcttccctcgtgacagtggtgtgtggtgtcgtctgtgaatgctaagtccatcaccctttccggcacactgccaaataaacagctatttaagggggagtcggccgtccgtgtcttgtggtgtctaatgcaggggagggcctggggaggagatggaattagagagggcttcttagtctcctttgggctgtggaatcccataaaaaccttgaattgtttccaatacccccttggtaatgcagatacagaagttaagctgtagagctcaggctccaggtgaagaactgtgtctctgtagctgctgctttccatgaagctagaatgagcgtgccatgccattactttgagcctttccccaatgacccaggctggggtgtacagtaactacatcagctctctggacctagagaatct

SEQ ID NO: 461237 - DNA, 625 bp, Homo sapiens
gaattcggcacgaggatttttttcataatttactttttctctggagcatagattcaaaatgccctgaatatatgctctctacttcattcttttaataactatacagtttgctaatgttacactggagtatcccagtgcttaaaaatataatacacttggctgggtgcagtggctcacgcccgtaatcccagcactttggtaggccaaggtaggaaggcagccttatccccaggagatgattgaaaatgtaagaactattctgagcctgcaggccatagccaaagaggacctactgttaagttttcaagaccacccagaaagaaatttgaagttgggtttatatccttaatccctcagttagaaaaaaaagaaaagtgaagaaactgcatctccaagatcctgctatatcaacttcagttttttgaagttaaatttgatttttaaatcccttggctgatgagacctgtgtgggtttttttttgttgtttttttgttttgttttgttttgttttatcattgtacctctattttaaaaatagagacttgtggttctttttccaaaagcagtccaacagaaagtgaatggtggtcaatgcataataaaatgagagttaccttttgactt

SEQ ID NO: 461238 - DNA, 1066 bp, Homo sapiens
cacaccgaatccactgaacagatctctttgggttttggaataacaaaaaagggactgtacatggatatttccaagctggaaccgaggcactttctagacgaaggcagccttatccccaggagatgattgaaaatgtaagaactattctgagcctgcaggccatagccaaagaggtaccggctgtattttgtccatgggcaggagcttgtgactgctggtctaggtcattccaggtcaaccaggggcctctcccagagtgagaaccactggtgattccccagagtgggaccaagtgaaagcacttggctggatcagagggataggagcctggctgctcctaaaacaagacactacttgcctttgatgttcaagtcatttaagaacgcaattgcttcctactcaatttttcaaaaccaaaataacaaatacgatatgagccataacttagcaaaattacgtgttttaaacagtctctttcaaaaaacaatagattaaaaagtgcaatatttttaccccctcttaaattggaatcatgacaccactggataagaaatttgagggagtaccccgaataaacaaacattcacaatcattcacaatcattcagcattacctcccattctacagggggataatccattttaaattaattctgaattcatcaaaatacagttcacagaataattatactggtaatgattcaggagacactttaaaagagtattatagctttattgtgatatatatagttcaaatacattttgcccatttaaaacgtacaatgtttggtaagtttcagtacaatcgcagatatatgcaaaccgtcaccacagtcgagagaagtcaagataaaacaagagaacaggaagagaaagaaaaacaaagagaaggagagaaggaaaagagaagagatttggaggtacatattccagggtgagttcttggggtctttattgttttaggacttctcagtattcgtcgtggtaacagagctttatctgcctggttgccaaataatgtcttcccaaataatatgagagagaaagcaaaagagaactgttcattc

SEQ ID NO: 461239 - DNA, 1714 bp, Homo sapiens
  misc_feature (8)..(9): n is a, c, g, or t
  misc_feature (18)..(18): n is a, c, g, or t
gtgccacnncactccagnctgggtgacagaaacggcaaaaatccaaaacactgacaataccaaatgccggcaagaatatggagcaagaactctcattccttgatgtgctgctgccgaccgggcacggcgctgggcctgcatttgcgctttcctggagcctcagtgtctcatctgtacaacgttgataatcgtcggcagcacctctttcccagggttgctctgaagggttttctttggggtgaaccgccaggcggtcggcctcccaggagcggggggagacgccttccttacgcgacgcacttccgtgcgcgaggagggaagatcgtggctgagtgcgggtggcctgggcggaaggctcagcggggacagccacggcgccaagcaagctggacgtgcgtgcatgagcgcgctcggactgacagggaagcgaaaagggggccagggcgcaccatagaaaagccgcggcagaaacgtacgacacagcccgaggcggcgggggcgagagctccggggcagggacggcgacgcggcgtacccggtttggcgcccctgcgcggcggtcggccgtcccgcagcgccccaggtggccgccggcggggtcgccgccgggggagtggatttgctccgcctccgccgggctcggctgccctcggcagcttccccgcctggctctccctcgaccctcctcccctccccctcccggttcgcgatggactgggcctccccgccgcgccgccgccgccgtcgcccgcagcaccgcgcgggcctctgagttgcagggcctgaggagccgcgtgctggggactggacgtccgctggctgctgccgcacgcgagaacctctcgcttccctgtcaccaggtcctcgcggaggaaggggagggacgaggcgcggcttttcctgtgccgcctgcccggttcgacctgcgcggcctgcggcttcttgggaactctagggccgcggccgggcctggctctgccggcggcctgttgggagctggatcggagcggtttggaacgacaagcccgacaaagagacttttaaaaaaccatggcagatgtggacccagatacattgctggaatggctacagatgggacagggagatgaaagggacatgcaactaatagcccttgaacagctatgcatgctgcttttgatgtctgacaacgtggatcgttgttttgaaacgctttattcatatatagtatgatgtaatttttaagagactggggcctcactatgttgcccagtctggcctcgagctcctgggttcaagcgattctcctgcctcggcctcttcagtagctgggactataggctgtgccaccacacctggctttataatgtaattttaaggaaatgaacctaaagttaagtcagatatgatttactatatgaagatacaagagtatttcaagttgaaggggttagccgtgtttggggtagtgtaccagtaacctccaaaaactagacatttggtttaattttgtgactgttttgtttttaaacattagtttgcttttcattctatagccagattttcttgttgttacaagggaaaattgtcctggttccttcttgaaactagtgagggaggcatagagagagttacaatggataagaagaaataaaatataaattctaaagagaaaaaaacaggtctgtttggggtagttagggaatgtagtctaaaagtctaggaggtgacattt

SEQ ID NO: 461240 - DNA, 1891 bp, Homo sapiens
cggacgcccggcgagtggcggaaagcgagaccccggcgccgagtgaggtcggccaggctgctgccgacttccccgctggcccctttgttcccctcccggggccctgccggcggcgggtcccggttgcccgcgccagagcctcaggccggctccttttgcccttgagaagggttcgctgccaggccttcgagttccgggcgcagctcccgggagagccggcgccctgcctggcccggcggcctcctctcgggcacgaaggcttgctgctgcttctccagaacttcccttcctcgtagacacagcaaagagacttttaaaaaaccatggcagatgtggacccagatacattgctggaatggctacagatgggacagggagatgaaagggacatgcaactaatagcccttgaacagctatgcatgctgcttttgatgtctgacaacgtggatcgttgttttgaaacatgtcctcctcgcactttcttaccagccctttgcaaaatttttcttgatgaaagtgctccagacaatgtattagaggtgacagcccgtgccataacatactacctggatgtatctgcggaatgtacccgaaggattgttggggtagatggagctataaaagcactttgtaatcgtttggttgtagttgaacttaacaacaggactagcagagacttagctgaacagtgtgtaaaggtattagaactgatatgtactcgtgagtcaggagcagtctttgaggctggtggtttgaattgtgtgcttaccttcattcgtgacagtggacatctagttcataaagacaccttgcactctgctatggctgtggtatcaagactctgtggcaaaatggagcctcaagattcttctttagaaatttgtgtagaatctctgtctagtttattaaagcatgaagatcatcaggtttcagatggagctctgcgatgctttgcatcactggctgaccgatttacccgtcgtggtgttgacccagctccattagccaagcatggattaactgaggagctgttatctcgaatggctgctgctggtggtactgtttcaggaccatcatcagcatgcaaaccaggtcgcagcaccacaggagctccatccaccactgcagattccaaattgagtaatcaggtgtcaacaattgtaagtctgctctcaacactttgcagaggctctccggtagtaacacatgatcttctgaggtcggagcttccagattcaattgaaagtgcattgcagggtgatgaaagatgtgtgcttgatactatgcgtttggttgaccttctcttggtgctattatttgaaggacgaaaagctttgccaaagtctagtgctggatctacaggcagaatcccaggactccggagattagatagttctggggagcgctcacatcggcagcttatagattgtattcgaagtaaagataccgatgcacttatagatgcaattgacacaggagcctttgaagtaaattttatggatgatgtaggtcagactctattaaactgggcctctgcttttggaactcaggaaatggtagaatttctttgtgagagaggtgcagatgttaatagaggtcaaaggtcatcatcattacattatgctgcatgttttggaagacctcaagtagcaaagactctgttacggcatggtgcaaatccagatctgagagatgaagatgggaaaactccattagataaagctcgagaaaggggccatagtgaagtggtagctattcttcagtctccaggtgattggatgtgtccagttaataaaggagatgatataagctacatttgaagaataccacagcagtggtttaacatttttgaattgactagtcagaatgggctttgggaccggctcgatca

SEQ ID NO: 461241 - DNA, 817 bp, Homo sapiens
cggacgcccggcgagtggcggaaagcgagaccccggcgccgagtgaggtcggccaggctgctgccgacttccccgctggcccctttgttcccctcccggggccctgccggcggcgggtcccggttgcccgcgccagagcctcaggccggctccttttgcccttgagaagggttcgctgccaggccttcgagttccgggcgcagctcccgggagagccggcgccctgcctggcccggcggcctcctctcgggcacgaaggcttgctgctgcttctccagaacttcccttcctcgtagacacagcaaagagacttttaaaaaaccatggcagatgtggacccagatacattgctggaatggctacagatgggacagggagatgaaagggacatgcaactaatagcccttgaacagctatgcatgctgcttttgatgtctgacaacgtggatcgttgttttgaaacatgtcctcctcgcactttcttaccagccctttgcaaaatttttcttgatgaaagtgctccagacaatgtattagaggtgacagcccgtgccataacatactacctggatgtatctgcggaatgtacccgaaggattgttggggtagatggagctataaaagcactttgtaatcgtttggttgtagttgaacttaacaacaggactagcagagacttagctgaacagtgtgtaaaggtaagtattacttattggctcattacttatttttctcagacctctcagggatgagtattggctcatttaaacatcacttagagactgaaaaatgtatttactaaaaaaaaaaaatttct

SEQ ID NO: 461242 - DNA, 433 bp, Homo sapiens
gaaagttgaaaaactgcattaagcactcttacgtccaaacgtacttaggagtcttttttaattgctaggaggacactatgaaaatttggttctagcagatgtaaaggaagaaaaatttaagcccaagctgttcagtcccggaatttaaaggacttttctccctttacttttcaaatttaagcaaagagacttttaaaaaaccatggcagatgtggacccagatacattgctggaatggctacagatgggacagggagatgaaagggacatgcaactaatagcccttgaacagctatgcatgctgcttttgatgtctgacaacgtggatcgttgttttgaaacgtaagtacattccttcatcatgttcctttgggttactgtagtgacatctgttttcaaccatttgctgacttcagtttgtgtagaaatttct

SEQ ID NO: 461243 - DNA, 1589 bp, Homo sapiens
cggacgcccggcgagtggcggaaagcgagaccccggcgccgagtgaggtcggccaggctgctgccgacttccccgctggcccctttgttcccctcccggggccctgccggcggcgggtcccggttgcccgcgccagagcctcaggccggctccttttgcccttgagaagggttcgctgccaggccttcgagttccgggcgcagctcccgggagagccggcgccctgcctggcccggcggcctcctctcgggcacgaaggcttgctgctgcttctccagaacttcccttcctcgtagacacagcaaagagacttttaaaaaaccatggcagatgtggacccagatacattgctggaatggctacagatgggacagggagatgaaagggacatgcaactaatagcccttgaacagctatgcatgctgcttttgatgtctgacaacgtggatcgttgttttgaaacatgtcctcctcgcactttcttaccagccctttgcaaaatttttcttgatgaaagtgctccagacaatgtattagaggtgacagcccgtgccataacatactacctggatgtatctgcggaatgtacccgaaggattgttggggtagatggagctataaaagcactttgtaatcgtttggttgtagttgaacttaacaacaggactagcagagacttagctgaacagtgtgtaaaggtattagaactgatatgtactcgtgagtcaggagcagtctttgaggctggtggtttgaattgtgtgcttaccttcattcgtgacagtggacatctagttcataaagacaccttgcactctgctatggctgtggtatcaagactctgtggcaaaatggagcctcaagattcttctttagaaatttgtgtagaatctctgtctagtttattaaagcatgaagatcatcaggtttcagatggagctctgcgatgctttgcatcactggctgaccgatttacccgtcgtggtgttgacccagctccattagccaagcatggattaactgaggagctgttatctcgaatggctgctgctggtggtactgtttcaggaccatcatcagcatgcaaaccaggtcgcagcaccacaggagctccatccaccactgcagattccaaattgagtaatcaggtgtcaacaattgtaagtctgctctcaacactttgcagaggctctccggtagtaacacatgatcttctgaggtcggagcttccagattcaattgaaagtgcattgcagggtgatgaaagatgtgtgcttgatactatgcgtttggttgaccttctcttggtgctattatttgaaggacgaaaagctttgccaaagtctagtgctggatctacaggcagaatcccaggactccggagattagatagttctggggagcgctcacatcggcagcttatagattgtattcgaagtaaagataccgatgcacttatagatgcaattgacacaggaggtcagaaaatatttttttaaatataaaaagaaagttgtgagataaccatataggcagtttctagttttcggacagtactcttagaaatccagataacaaagtggcacccc

SEQ ID NO: 461244 - DNA, 9402 bp, Homo sapiens
gcgacgagtaacggcgccaggacgagccctgcgccttctttttcgatatgtacccgaattggggccggtatggcgggagcagccactatccgccgccaccggtcccaccgccgccgccagtggcgcttcctgaggcctcgccggggcccgggtactcgagctcgacgactcccgcggccccctcctcctcgggcttcatgagcttccgcgaacagcacttggcgcagctccagcagctgcagcagatgcaccagaagcaaatgcagtgcgtgcttcagccccaccaccttcctccgccccctctgccgcccccgccagtgatgccggggggcggctacggagactggcagccgccaccgccaccgatgcccccgccacccgggccggccctcagctatcagaagcagcagcagtacaaacaccagatgctccaccaccaacgagacgggcctcctggtttggttccaatggagctggaatccccccctgaatctccccctgtgccgcctgggtcctatatgcccccatctcagtcttacatgcccccacctcagccgccaccctcttactaccccccgacctcatctcagccctacctgcctcctgctcagccgtccccttcgcagtccccaccttcccaatcctacctggcgcccaccccttcttactcatcctcctcctcttcctcgcaatcctatttgagccattcccagtcctacttgccctcttctcaggcatctccttcccgcccctcccagggccattctaaatcccaactactagctccaccaccaccgtccgccccccctggaaataagacaactgtccagcaagagcctttggagagtggggccaaaaacaagagtactgaacagcagcaagccgcccctgagccagatccctctacgatgactccacaggaacagcagcagtattggtatcgacagcacttgcttagtttgcaacagaggacaaaagttcatttgccaggacacaaaaagggtcctgtggtagcaaaggatacaccagagccggtaaaagaagaagttacagtacctgccaccagtcaagttccagaatctccttcttctgaggagcccccattgccacctccaaatgaggaagtgccacctcctctcccacctgaggaaccccagtctgaggacccagaagaagatgccaggttaaagcagttgcaggctgcagcagcacactggcagcagcaccagcagcatcgagtcggtttccagtatcagggaataatgcagaagcacactcagttacagcagattctacaacagtatcagcagattatacagcccccaccacatatacaggcaaatatgcagctgcggcattatgagatgcagcagcaacagtttcaacatctttaccaagaatgggagcgagagtttcagctatgggaggaacaactccattcctatcctcataaagatcagcttcaggagtatgagaagcagtggaaaacatggcagggacatatgaaagccactcagagctatctccaggagaaagtcaattcatttcagaacatgaagaaccagtatatggggaacatgtcaatgccacctccttttgttccatattctcagatgcctccacctctacctacaatgccccctccagtgttgcctccttcattgccaccaccagtgatgccccctgccctccctgctacagtgccaccacctggcatgcccccacctgttatgccaccttctctaccaacctctgttcccccaccagggatgcctccttctctctcttctgcagggccaccaccagttctccccccaccttccctgtcttctgcagggccaccaccagttcttcccccaccatctctctcttcaacagcacctccacctgtcatgcccctcccaccattgtcttcagctacacctcctccaggaatacctccccctggagttccacaagggatacctcctcagttaacagcagccccagttccaccagcctccagttcacagagctcgcaagttccagagaaacctagaccagcactgcttcctactcctgtgtcttttggttctgccccaccgacaacttaccatcctccgttgcaatcagctggtccatcagaacaagtgaattcaaaagctcctttgagcaagtctgctctgccatacagttcattctcatctgatcaaggacttggggagtcttcagctgctccatctcagccaatcactgcagtgaaggacatgccagtgagatcaggtggcctgcttccagatcctcctagaagtagttacttggaaagtccaagaggcccaagatttgatggtcctcgaagatttgaggatttagggtcaaggtgtgaaggaccgagacccaaagggcctcgttttgaaggaaatcgccccgatgggccaagacccagatatgaaggtcacccagcagagggcactaaaagcaagtggggaatgattccccgggggccagcatctcaattttatattacccccagtacatccctaagtcctcgacagagtggaccacagtggaaaggccccaaaccagcttttggacagcagcatcagcagcaacctaagtcacaagcagaacctctttcaggaaacaaagaaccattagcagacaccagtagtaaccagcagaagaattttaaaatgcaatcagctgcattttccattgctgcagatgtaaaggatgtcaaggcggctcagtcaaatgagaatctaagcgactctcaacaagagccacctaaaagtgaagtctcggaagggcccgtagagccctctaattgggaccagaatgttcaaagtatggagactcaaatcgacaaagcccaagctgttactcagcctgtaccccttgcgaataagcctgtacctgctcaatctacttttccttcaaaaacaggggggatggagggaggaacagcagtagcaacatcatcattaacagcagataatgattttaaacctgtgggtattggtctaccccattcagaaaacaaccaagataaaggcctgcctcggccagataatagagataatagattagaaggcaatagaggcaacagctcatcttacagaggtcctgggcaaagcagaatggaagacacacgggataaaggtctagtaaacagaggtcgcggccaggcaatcagtcgaggcccaggattggtcaagcaagaagactttcgggataagatgatgggtagaagagaagatagtcgagagaagatgaacagaggagaaggtagccgggacagagggttggtgaggcctggaagcagtcgggagaaagtgccaggtggtcttcaagggagccaggacaggggtgcagctggcagccgagaaaggggaccacctcggagggctggcagtcaggagaggggacctcttcgaagggctgggagtagagagagaataccaccccgaagagctgggagcagggagagaggaccacctcgagggcctggcagtcgagaaaggggactgggaagatcagattttggtcgtgatagaggtccattcagaccagaaccaggagatggtggggaaaaaatgtatccatatcaccgggatgagcctcctagggctccatggaaccatggagaagagcgagggcatgaagagtttccattagatggtagaaatgctccaatggaacgagaaagactcgatgactgggatagagagagatactggagagaatgtgaacgtgactatcaagatgatacactagagctctataacagagaggacaggttctcagcaccaccatctcggtctcatgatggagataggcgaggcccttggtgggatgattgggagagagaccaggatatggatgaggactacaatagggaaatggaaagggacatggacagggatgtggatcggatttcaagacctatggatatgtatgatagaagtttggataatgagtgggacagagattatgggagaccactggatgaacaagaatcacagtttcgtgaacgggatattccatctcttccacctttaccgcccctcccacctcttccacctttggatagatatcgggatgatagatggagagaagaaagaaatcgagagcatgggtatgatcgagatttccgtgataggggtgagttgaggattcgagagtatccagaaagaggagatacatggcgggaaaagcgagattatgttcctgacagaatggactgggaaagagaacggttgtcagacagatggtacccatctgatgtggatagacattcccccatggcggaacatatgccctcctcacatcattcctcagaaatgatggggtccgatgcaagcttagactctgaccaaggccttggaggggtaatggttctcagtcagaggcagcatgaaatcattttgaaagctgcacaagaactgaaaatgcttcgggaacagaaagaacagcttcaaaagatgaaagacttcgggtctgagccacagatggctgaccatctaccacctcaggaatcaagattgcagaatacatcttcaagacctggaatgtatccgcctccagggtcgtatagacctccccctcctatgggcaaaccaccaggttcaattgtaagaccctctgctccaccagcaagatcatctgttcctgtgaccaggccacctgtcccaataccaccacctccacctcctccacctctacctcctcctcctccagtgataaagccacaaacttcagctgtagaacaggaacgatgggatgaagattctttctatgggctctgggatacaaatgatgaacaaggactgaattcagaatttaagtcagaaactgcagcaattccatctgctccagtattaccacccccacctgttcactcttccattccccctcctggcccagtgcctatgggtatgccaccaatgtccaagccaccaccagtacaacagactgttgattatggccatggccgagatatatccactaataaagttgaacagataccttatggagaaagaataactctacgcccagatccactacctgaaagatcaacttttgagacaggccaacgtgatcgttatgatagagaaagagatcgtgagccttattttgatcgtcaaagtaatgtcatagcagatcatcgagattttaaaagggatcgtgagacacatagagatcgagaccgggatcgtggtgttattgactatgaccgggatcgatttgacagagaacgccgaccccgagatgatagagctcagtcatatcgagacaaaaaagaccattcctcatccagaagagggggttttgataggccatcctatgaccggaagtctgaccgaccagtctatgaaggaccatccatgtttggaggagaacgaaggacttatcctgaggagcgaatgcctctgccagctccttcactgagccaccagcctcctccagctccacgagtcgagaagaagcctgaatcaaagaatgtggacgatattttgaaaccaccgggccgggagagcagacctgagagaattgttgttataatgagaggattacctggcagtggaaagacacatgttgcaaaacttattcgagataaggaggtagaatttggaggacctgcacccagagttctaagcctggatgattacttcatcactgaagtggaaaaagaagaaaaagatccagattctggaaagaaagtgaaaaagaaggtaatggaatatgaatatgaagctgagatggaggagacttaccgcaccagcatgttcaaaactttcaaaaagactctggatgatggcttttttcccttcatcatcctggatgccatcaatgacagagttaggcattttgaccagttttggagtgcagcaaaaaccaagggatttgagatggctgatcactgggaaactgcacctcgtcacatgatgcgtctagatattcgttctttgctgcaagatgctgctattgaagaggaagatcactctggcagcatgaatctggagcgggtgagtacagacaggaagactaggtagagattagtgctttgctttcaggtgaaaaaaaaatgaggtcagtgaattattaaataaaaaggaatggcagaggagaaagagaggacaggattgagctgaactgttcaggagctggaatggttaggacttggattgtccagagagttttctctttgtgacttaaaatatatggcttttcccagttttcctgggttagtttttaattttttaaacttgcggtttcaaatgagtcattctaccccttagactgtccagagagggagggggctctttgcatatttatttttcctaaagctcagcctaatgctatgttctttttaggtcagatgggcagacctggaagagaagaaggatgcagataggaaaagggccataggttttgtggtcggacagactgattgggagaagatcacagatgaaagtggtcacctggctgaaaaagccctcaatcgaaccaaatatatatgagacttagtttttgaacggagtcattattcctctaaggtggttcgctttgaggtggtctgaagccaaggcctcgcggagcttctttgtgtgtcaccttgcttccacgtttcagttcttgttttgtttctactgctttagttttttttaaagttctccagtgtccccaagaggtattagaatcttgctgtacccaagcaagacgttaatttttcttttaactgttttggggagggagggagtgatagcttaactgctgaagccaggcgggggtctgctggaggattccaacagagagtatttcctccactgtacaatgtcacagactatctctatcatcattgctttgtggctgtttctgttttttactgtatgtaactggtagctgattgtactaggattaaaaacaataaactttcatgataaagccgatgagattcatgggctatacagcatgggcccttttctcttgttttcttaattttatttttaattgctttttaaatatggtatgtcctaattaaatgctagctgaacatcccaaaacctttttttcattgaatattatatggctcaatgattccgtagcacatgttgtaaaacacagggttcaaatgatgttcaaaacactcatctttgttttatagctgatttctctatctttgtgtcttgaagactgaccaagttcaaatattcatcagttccctggagcatatccattctgtaacatgatgctttatttaaaaattttttttgatcctctctctgttcttccctctcttctttccttccttcttcttttcactttctgcctttatgctgttaggtttttattttttcctgatctggctttgaattctggtagacagaactgatgtattctgtggaactcaagcttgttgccttcatttgaacttgaattgtggatttttaaatgaagattgcagggaaagagtataaagatgcagagcactctggcatgtaacctttaagcctgtcaggttttcaagttcttgccagattgttcattactggaaagcatggccttctgcacagaatttcctctcttgtggttaataccaggtggaacccagaaacatacagagataaaacccaaatattatttctatgtaaacacagaaaagggactcttccctttttcatcctgcaaagaaaaaagtcatcttttagcatgaaagaagatgagagagccttcttcctcaagcataatttgcattttgtaatccaactcagtaatttgtaaatgtgttcactgaagacttcaatattttgaaatattctctttcaggccacagatgaaaatcctttacttttatgacctacattaaagactgtatgaatagagctaatagttactagcatttgaatagtatcactttgggttcaacaaattgatattatagtactgaatacccctaatttaatggaaattctaacaactttctgtacttttatcttccctgaaaatctgaatttttaagcaagtgactttaagttcattaagtcaatattgaatgtataaattgctacattaaataacttctgctgtttgtagtatttaataagctattttcattgcttattggcctacaatacatttctgtgtactgacctttctcagcagcctttattatgtagagtgaagatatgtcgcaaaaatagccaaatagaattattgtttgtacaaagactcatttactactttctaaagccacccaatgcctattatcaaaaacaaaacttccataatgtgttctctagttcagatgaaatggaggccgatatgttcttctgcaggatgctttatttcagttgtccttaaccttgtgatgttctgacagtagttagaatgccaatgaaatgagtggtgattatccgtgagtcacttggaatcatgggtaattttgcatatgtgtgttttcaccttacagccatggctttatgtctgtgctcttataccagggcagggtgggaagctggggaagagttaacatagtcagaaacggcctctgccaattttcagaagatatagattacgtgaccttagagaatgaacatagagtgctcctactttagaaaatgggtataacaaccttcatgcaaggagattaatgaaaaaagatttggcaccaaaaagagtaatagagacagccagctgataattgattttgctagtccaatgtgggacttaacaaaattcttgcacttacattactattagaagcagtatcgtataggaagcccaaggtatcttgaagaagaaatttggtgtgggtagaaaatgccttgataatacaaatattttaagtttgttaagaggtgtcctggaaatgcagaggactaattttggattccattatttgctagcattttattttaattttattaacattgtcttctcttagaaagttgctggtttaaatcatatgagttttattttaaatcttttgtggtgtcatgttacttaaaataatcttatgttgggaaaggtttctgataccttggtgggtatttcagctttttttttttttttgtcagctctgtaaaggatgatttcagacattttaaactgaaagtgaaatctctcacttaagtgatctaactttacttgtaaacttcctgtgtgaggaattcagtagacgagacccagaaatgtttctgtttgagaatatttagagttaagtgccgtatttgaaatattcagggactgattgtagaatcagaagtcattaataataatacacaagtagtctattgacagttgattcatataattttctagaagtttgagtttgattcagatatcagtgttaaatccagaagtttattgacaaagataaaatcttaaattttctggttggatttgttttcctcgtgaaag

SEQ ID NO: 461245 - DNA, 1428 bp, Homo sapiens
gcgacgagtaacggcgccaggacgagccctgcgccttctttttcgatatgtacccgaattggggccggtatggcgggagcagccactatccgccgccaccggtcccaccgccgccgccagtggcgcttcctgaggcctcgccggggcccgggtactcgagctcgacgactcccgcggccccctcctcctcgggcttcatgagcttccgcgaacagcacttggcgcagctccagcagctgcagcagatgcaccagaagcaaatgcagtgcgtgcttcagccccaccaccttcctccgccccctctgccgcccccgccagtgatgccggggggcggctacggagactggcagccgccaccgccaccgatgcccccgccacccgggccggccctcagctatcagaagcagcagcagtacaaacaccagatgctccaccaccaacgagacgggcctcctggtttggttccaatggagctggaatccccccctgaatctccccctgtgccgcctgggtcctatatgcccccatctcagtcttacatgcccccacctcagccgccaccctcttactaccccccgacctcatctcagccctacctgcctcctgctcagccgtccccttcgcagtccccaccttcccaatcctacctggcgcccaccccttcttactcatcctcctcctcttcctcgcaatcctatttgagccattcccagtcctacttgccctcttctcaggcatctccttcccgcccctcccagggccattctaaatcccaactactagctccaccaccaccgtccgccccccctggaaataagacaactgtccagcaagagcctttggagagtggggccaaaaacaagagtactgaacagcagcaagccgcccctgagccagatccctctacgatgactccacaggaacagcagcagtattggtatcgacagcacttgcttagtttgcaacagaggacaaaagttcatttgccaggacacaaaaagggtcctgtggtagcaaaggatacaccagagccggtaaaagaagaagttacagtacctgccaccagtcaagttccagaatctccttcttctgaggagcccccattgccacctccaaatgaggaagtgccacctcctctcccacctgaggaaccccagtctgaggacccagaagaagatgccaggttaaagcagttgcaggctgcagcagcacactggcagcagcaccagcagcatcgagtcggtttccagtatcagggaataatgcagaagcacactcagttacagcagattctacaacagtatcagcagattatacagcccccaccacatatacaggcaatgtcagtagtgatgcaggagaggttccgggtccaggaggtagtgatactgatctacgcaggctcatcacgggtacacgcaccacact

SEQ ID NO: 461246 - DNA, 912 bp, Homo sapiens
  misc_feature (2)..(4): n is a, c, g, or t
  misc_feature (6)..(6): n is a, c, g, or t
gnnncncaggaagccgactgagcaaagactgcgtccaggccccgcccccatgagcccggccacgccccctggagcccagccccgcctcccggccgcccgcgcgcaggtagggaagaggcggagcgccgccgccccgcccccgaggagccaccgcccagccgctcgcaggcgccgcacggagttgcgtcccggggacttggggccgcagggaggtgagcgcggggcgacgagcggggcaggactcacggccgcccagccgcaggcgccggaagggtcccgaggttgtgcccgagcctgccctggagcggtggtgcgcggccaggaagggtgcccagtgcccggtgcccgccctgcggagcgcctgggtcccacgtgggctcggctggaggcccgggctggctcagacggcgccggcggggccgctggacccggtctgctggcccctagggctcggctcggacaggacgcctaaggggtccctgggcgacggggcgccagatgtaggggcaagacgattgggcagagatttaaacctccggaggaagagaggagactgcgcagggcagtcccgcctgcgtcccagaagtgcctgcagttcagacccttctctcccctccactttctcccggggcacggaacagcccacataacgaggaattatccagcccaaggtgttgggctgtgctgaggctgagaaaccctgcgcagcagctggtccatcaggttccttctcaatgatgctccctcactggggaaactacctcagttttccagagtggttaggggaggaacttggaataaacctgaatgagatgagggaatggaagagacgctaatgtcaccctggaaggtgttttgaagggtaatgtgtgtaaagggccaaacaaggccccgcacagttaaggacttaaa

SEQ ID NO: 461247 - DNA, 2445 bp, Homo sapiens
agccgtgctgtcatgagatggagctgctgagtgccctggtcctcgccctctgagagtggaagggtgggggtggcggcccgacgttcctggctgggagcccagaggagtcttttgtaatcacaacatgatctcgtgtgctgagcagcgaagccggcagggagaggccggcagaggcccggctccggtggctccagctttcctcccactctggctccccaggggctgctctggaattctctcggtgcccgccgttgccatgcactcggctgtgagtggcagtctgcctttggcagggggcttcttgggactgggagggggctgggataccaggcagccaccctctgggggcagctggggacagctggggctgggaggaagaaggctgtgactagggtcacaacagagaacctgcatccagacagagaggaacctggaatcttgatgcagagacatggcttgcccagggtgactcctgggctggggccgccaggggagctggctctctccgccccgactaccagcagctttcggcctggagaggctgggcccctgggagcggctctttcctccaggctgggcacaggcctaggtgcggggtccagggcctgagagcccaggacggagccagggcctctcctttttctctggttgtggatctgggagccaaacagctcccccctcgacctcccgaatcccctggcagcttcccagtcacggcaggttccgctgccagagccatttataactcccattccaggctctgctcggcagtgaagctccctggagagctgggggaggggcaccccactgctgggagctgtggcttggggtatgaggccctgacctgagccccctgaggaggcagggacaggcagacgggcctagctggaatgggggcttggggccttatttgggccatctccctaagcaatccccttccttcctgggtgaccttagctgtgggtctgggatctcttccttgggtggtgaaaatgtgaaagctggggactggtgagagggggacccggaagtcaggagcttgggttccctgcctctgcagggaactcccagagccgagtcccccatgagcaggcaggagaaggacgcagagctggatcggaggatagttgccctgcgcaagaagaaccaggccttgctccgcaggtaccaggagatccaggaggaccgtcggcaggcagagcagggggggatggctgtgaccacaccagcactcctccagcctgatggcctcaccgttaccatcagccaggttcccggtgtaagcctcaccctgggagacagggctcgtagcaaggaggtggaggcccagaccattccacagccctgcgcctatgccacaaagcacaggccactcctaaacctcaagccccaggggctaaaaccctgcaggaagtgggggacagagaagttggggctgaatgccaggagcagtgaaaagcgggtggttagcaggaactgggcaaggggtacctgtggacccagagtgaccaacgagatgcttgaggatgaggatgctgaggaccacgggggtactttctgcttaggggagctggtggagctggctgtgaccatggagaacaaagcagagggcaaacggattgtaagtgaaaagcctaccagagcaaggaaccaaggcatagaggggtcacctggagggcgtgtgacccgaagcccccccacgcaggtggccatcagctcagattctgcacggaagggttcttgggagccctggagccggccggtgggggagcccccggaggcgggctgggactatgcccagtggaagcaggagcgggagcagatcgacctagcccgcctcgcccggcacagagacgcacagggtgactggcgccgcccgtgggacctggacaaggccaagtccacgtgggtggctgggttgggcaggttgcctgtggtgcgggatggagctggcttcgggcactgctgggagggctgcagggaccctcctcggggttgagaggaccttgctgggcattctggtcgagcccagggttcaaggctctgggtctcccatctttcttgggcccaccatctccctgctgccttcaattctgggcctgggcttcggggaggggggtgtcagggtggggcccgcggcagcttctgtgcaccagcaacctgactccctctgtctacacaggctacaggactgcagccagctgaggggagaaggcccggccagggcaggcagcagaaggggtgagcccacacctacctcatccctcccctccttggctttgttcatctttcacccccttgtcctctcttttctctgtctcttagtctcttattttcagagctgaaaggaagcgttggagaacatcttccttcctctccctcactatcagaggagggcaccaagacctcccatcctcccctctgagcccacagctcttgtccagg

SEQ ID NO: 461248 - DNA, 1204 bp, Homo sapiens
ctctaactgcagcactgtaactggaagactgcagccacctcactatctgcctctacctctccctctatctgatgggctccagaggcttcatccaggcaagaaaaatgtgcagatgctgcggcagctttgatccaggccacttgacctacataagccccagacctcagccatcttggaggaattatgaggtgtatgagatccagagttccgtcagtctctccccagccacaggccgtataatcccctcatccttttggggtcccaggaagtccttcttctggacccagagtccacccactttagagttggtcctgggatctgtcatcctgctcagaatctgggaggaagtgtttatacctagaggaggccaggagggcattgcatctcccactctgtgggcgtgccttgctttcgatgtctccagtgaggatctgactccctggatagaatggagttgaggcccaggggttggcatctgctttgtttgttaaaatatgctagtcatctataaaagtgcctgcacaaagtaaatgcttaacatatgtgtgtttagtgaatgaacaccaaccagaaccttcctagataactgagcgtgcctggggcctctcttctagcacgcagggacttgtattcatagactgtataaagagcattatcccagcaaatcctcaaaaacacaccctcattttagaaatgagcaaacacaggcttttggatgtaagaaggcagctccaaaactgctcacgggaactactgtgtgactttccctctcaactccccgaggcttggtctgcgctgacacggaggaaaaggacctggggaggccttgtttcctcctctgttttagagacagtgacacaggaaaaaactagaagaaccctttggacttaaagccaataactgcttctttgtttaacataaaggcagtcttgagaaacagctaccgcaattgcagacccggcaaagggcccaatgccaggagactcattgggtgggagaaagagcccatcacagtgccacggatctgagcgatgactcagggaggagaaaatccaagtggggactatacagccgaaaggtgacacacacatatcagcagggaagctggaaatgaaaggatcaatggaattttatttgtcacgcagacaccggattgacaaaatattagaagacttgacacccaggggtggctggatgctgggaa

SEQ ID NO: 461249 - DNA, 1292 bp, Homo sapiens
gaggtccccacccctgggacgaggggaagtgggactaaaacgtctacagccccacccggctcccgcggctaccagtgacccagaaggtgcaactgaccaaacgcagcgactcaaccgactgtgctctccccagactcgcagctatggcaacttgaactagccgcccagccacagcaagagtacaggaccccgctgccgccgcttggccgtctgggagttgtagtccatctcggcctcatgatcaaggaattaccaagggagagagtcccgaaaaggaactgcaaatcccaggatgccatatagctggccttcgggtaactttcccggataaaagcctgatcccttggccgcgccctcttgccctgctctattttttttttttgttaaaggaccagcctcctttgtaggaggcaaactccagttagaaagtgaataaaaatgcttccttggccttgactgtaattttactccttgggggacaaaaggagtcccccaggactacggtaagatggggaagtagaaaaagggcaagggagcggtgggaggacagggaaagacaatttctagcactgaaatgtaaaaatccccttaataccagggtccagtatattgttccaaagactcacaaattcttagaagcggacgggaacagagaagattatgtaggccaacctgtttggcctggaaagagtaagggacttgcctaagatcatatggcttattcacggcacaccaaaagtagatatttaccctcccaccagaattataccaaaaaaacaggcaagatatacgaagcaatgcttttcaaggcagcggctatcataccaagaaagaccatgatccctgaaagacaggaaacaaataaagcaagccttatgattgccacaacttactgccttgagagagtttccaagtcatggtgcaaggagagcgaacccaggcagagtccagtggattctttaattggggagacaaagctgagagtttggaaagatgcaggtaggtggagtttgcaggacaaactacgggagtctgatgaaaaccataaacacacaaatccaagaatctcaaaataccccaagcacaggaaacttgaagaaaagtacatcaaggcacattacagtgaaattgctctcaacaagtgacaaaatctgaaaagcatcccgagtaagaaaaaaaaaaaaaaaaaagcagattataaaggagcaaagaaaactttgacataagatttgtccttgtaaacaatgcaagcaacaagaaaatgaagcaatgtttttaaagtactgaaagtt

SEQ ID NO: 461250 - DNA, 736 bp, Homo sapiens
acgtaggctgcatgcactcagccacctgcctggaaggacacgagagccacggcaaaggacgagcaagagcagcaggaaagagaagggccacgggagggccgatgtcccccagccacagaccccctctgctgggcctgcctgggctcccccatcaggtttttcttcagctaaggcagaaagagcctctggaaaatgagaagcatccacctggctgcagaacctgggcaccaaccgctgagaatcttcaggagagaaaattccgatggcagttgagagcaacggtggagcagcgaagcccacaggcagcagagcacacagacctgggaggggtgcagaggtggcatcagcgctatgagggcgtgcaggggaaagctgatgggagggaaagggcaggagttacggctgcctctggtgctgaacggtggacactgtgaatcaagaccaaattcgtgacaaactcacacatttttaaaagaagcaaatcagcaactgccaagtccaaaggagctggccaaagataagaccaaggtcccatgagctatactgataatgacaatggtgatagcaactttggaagccagttaatattggaatatggcaaagccactatcagcctgtttcctgagggaacgcatagagccgaactttctccctgcgcctactccaacaatctggaatgtctgccttggaatattatgtgagaaagaaataaacatctcttgtgtttgaaccatta

SEQ ID NO: 461251 - DNA, 1075 bp, Homo sapiens
acgtaggctgcatgcactcagccacctgcctggaaggacacgagagccacggcaaaggacgagcaagagcagcaggaaagagaagggccacgggagggccgatgtcccccagccacagaccccctctgctgggcctgcctgggctcccccatcaggtttttcttcagctaaggcagaaagagcctctggaaaatgagaagcatccacctggctgcagaacctgggcaccaaccgctgagaatcttcaggagagaaaattccgatggcagttgagagcaacggtggagcagcgaagcccacaggcagcagagcacacagacctgggaggggtgcagaggtggcatcagcgctatgagggcgtgcaggggaaagctgatgggagggaaagggcaggagttacggctgcctctggtgctgaacggtggacactgtgaatcaagaccaaattcgtgacaaactcacacatttttaaaagaagcaaatcagcaactgccaagtccaaaggagctggccaaagataagaccaaggtgcgggtgtgtagaagagatgtccgtgcacaggtgtgcttccgcgtggccatccaattgtggacatggtgatggtgcactgagccccagagagcctgccaaacatttcccattcaggatgcctttgggatctcagtaatgctttgcagtgcccctaaactaaaagaaataactagtagttctgttaatacatagttaggtccaaacaactcaacacctggtatctgacagatgccactgttgccactttgaaattttttaaatattctttggcagttctgtgagcttgctgcagtgtcctagcggcatatcagtgcaaaatttgagaaccacaaactgtggattaggaaccctggttgagtacggcaccccttactccctactaccaaagtgagagatggcagacatgtttgtctccaattttaatagagtaaaatttgtttaaaagagccaatggagtttctgagttgctttatttctccagctatatactaaccagccttctcagaaatctttgtccatgaagaataatctgactcaagtccac

SEQ ID NO: 461252 - DNA, 2773 bp, Homo sapiens
tttaaatgtagcctcccccgctgcagaactgcagagcctgctgaattctggctgaccagggcagtcaccagagctccagacaatgtctgtctccttcctcatcttcctgcccgtgctgggcctcccatggggtgtcctgtcacaggtacagctgcagcagtcaggtccaggactggtgaagccctcgcagaccctctcactcacctgtgccatctccggggacagtgtctctagcaacagtgctgcttggaactggatcaggcagtccccatcgagaggccttgagtggctgggaaggacatactacaggtccaagtggtataatgattatgcagtatctgtgaaaagtcgaataaccatcaacccagacacatccaagaaccagttctccctgcagctgaactctgtgactcccgaggacacggctgtgtattactgtgcaagagacacagtgaggggaagtcagtgtgagcccagacacaaacctccctgcagggatgctcaggaccccagaaggcacccagcactaccagcgcagggcccagaccaggagcaggtgtggagttaagcaaaaatggaacttcttgctgtgtcttaaactgttgttgttttttttttttttttggctcagcaacagagatcatagaaaaccctttttcatatttttgaaatctgttcttagtctaatggagattctctaatatgtgacaatgtttttctcttgctgtttttggaattctttgtctttgacttttgacaacttgacttttgacagtgtgcctcaaagaagttctattttgggttctgtgaacctcctggatctgggaagttttcagctatgatttcattaaacgtgttttctacaccatttccctactcttttggaatacccataatgcaaatatttgttcacttaattgtgtcccataaatgctggggattttcttcattcctttttactctttttttctttttattcatctgcctgaattatttcaaaagatctgtcttcaacttcagaaactcttttgcttggcctagtctaatcttgaaggtctcaattgtacttttaatttcattcattgaattcttcaactctggaatttctgttggttcttttttatgatacttatctctttgttgaattcctcattcaaatgataaattgttttcctgatttcactgaattttctatctgtacactattgtatctccctgagtttcttagagattatccttttgaattatttttctgacattctgtatatttccttatgattggggtctgctactggagaatgactgttgtctttttcaggtgtcgtgtttcctggccttttcatgttttatgtgttcctacgttgatttctacacatctggcggaccagtcatcccttgcaatttaatggagtaggttttgcaggaaaagacttcctagtacagacgggtctcagggtgtcagtgtggcggggcgtgctggctttagttctaggttgacgcagtagcgtagtctccatgtcgtttcttcagctgccgtccacattggtgacgcttctctaagttcttcatccatcttgctgatgtcattctccatccaggcatgggtttttaagaagtagtgaatactgaaatttcagcagaggacacctctataaaaattctgcaactggaaaacctccttaaattggctgattgtcattacaattggaggaaaactgccaataatttcaaatttagaaggctgagactctataaacaaagactaacaatatgttttctgatatttttccccaaaataatacttttccaagacgaaaatttttccagggtatataagcacatgtgctccaatgatacaacaaatacttactaatcataagcaaataccttaaatgtcttataacatctttcacacaaaagctgttgcatgtctattagctaaaaattcttatgtctcgtccagatcatgcagcatgagcaaagggatttttgaccttcaaaagtctcagtactaactgaggactttacacaaattggaaatggtcacctgcatttcatggtggtggtggggagcttttgcactggaaaatccttctgtagagaagattccattatcttggtaaaattacatagttttattttgcagattgggattaccaactgataaagggttactgatgtggaagttttcctactttattctcctattaggttcctatgtgatatggtttggctctgtgtccccaccccaatctcatctccaattgtaattcccatgtgtccagggagggtccaggtgggagtgattagatcaagggtggtttttcccaggctgttttcatgatagggtgttatcatgagatatgatggtttaaaagtggcaggttcccctgctctctctctcgcctgctgccacataagacgtgccttgctttcccttcaccttctgccatgattgtaagtttcctgaggcctccccagccatgcggaactatgagtcaattaaacctcctctctttataaattacccagtctcaggtagtatctttatagcggtgtgaaaatggactaatacactatggctttgaattaataatttaaaatttgtcagcttggcaataaaacatcctgttgacatttattttttaggtaatattttaaattggcagtttcattcatgtttttacaaattcttattttcagggtgtttaaggcctttgctttgaacttggtggttccttacactccatgctgttagtgaagagggaccagg

SEQ ID NO: 461253 - DNA, 776 bp, Homo sapiens
  misc_feature (1)..(1): n is a, c, g, or t
  misc_feature (4)..(6): n is a, c, g, or t
  misc_feature (8)..(8): n is a, c, g, or t
  misc_feature (12)..(14): n is a, c, g, or t
nttnnntncctnnnagagttatcatgagaattaaaggaaagaatgcccctaaagttttcagcttgtgcctgacacacagtaaacgtacaataaatgctagctactattactactgcgattacacagtgcaatggactctcttgttcctattcttaattgataccaagtccagaagagaagaagggtgctgcaacgtgaggaaaaaaagagatgcagtccccactgtcatgaaatacagccatataatcaaagaatcccacaattctaccacgagaagtactgtgatcgagagatacataatgccgagagcatttacgagaggatgtggcctgtccaggaggccatatgaggacacagcaagacagccacaagccaggagagaagcccttaccagaacctgcccttgctggcttcctgatgtcagacttccagcctctggaactgtgagaaaatcaatgtctgttgtttcagccatccagtctatggcatttgttatggcagtccaagctaagacagtcagtttagcaagaagttccttgcctttgatgtccctcctcagtaattttctatcccctgaccccctcaccctactgcttggctgtaaatccccacttatccttgctgtatttggagctgagctcaatctctctctcctattacgatacttctattgcaacaatcttaaataaagtcttccttaccattttaacaagcttctgaatatatttttctttagcaagcaaacatgcagggtctctttgtctctttgtacctgg

SEQ ID NO: 461254 - DNA, 1495 bp, Homo sapiens
tttttttgagatggtgttttgctgttgttgcccaggctggagtgcaatagcacaatcttggctcaccgcaacctccgcctcccaggttcaagcgattctcctgcctcagcctcccaagaagctgggattacaggtgcctgccaccatgcccagctaatttttgtattttcagtaaagtcagggtttcatcatgttggccaggctggtctctcgtactcctgacttcaggtgatccgcctgcctcagcctcccaaagtgctgggattataggcctgagccaccgcgcccagccgaagctcagctttacacctggcagcaaatggggaaggaagccctcgggtgggggtgacactagttaacaggatgacgggggtcaggtggctgagccaccgagcccggccctcaagtaggcccttctgtcaggcagcagagacatcgtctcaatgagctgcagtttctcatacatgtcacgggaggaatgagacatataaagatcacaggagtctcaagaggagtgagaccaagacagacactgcggtcccttcttatcttttggatttttccatagttctctggaagcaagggctggttcagataagctggttgcccgtgcttatctacctgcaaaagagcgtttccacctgggcaggccctaagttctctctgatgacatgcttggcctgagactccttgccatagtccttaactactatacaactgcaaccaaccactttacggggtttcccctctctgtcaatttgacagagacctacccattcccccagtttcttttgtcatcaaccttaattaggttgatttggtgctcagcacaaagggcttccaccaacttgacatacacagtctcatcaccgttggatgcaagcacacaaagatgggcttggcgcttgtctaaggctttggtagctttgcgaattccatgtgctaggccatcgtggatgagggctgtcttcaacagctcttgtaaagcagcattaatgtccattacccctccagcagcaatgccttcctcggccatggcagtggaggatgaacatgctggtatatccagatatgccccaaaagttgtgcaagtttagcgctctcctgggttggcacagaggtatttcaacaccagctggatgtgggttgtgctgaaggcagagcagaaccagtgaagggcaggcagggagaggcatggtccagccccatgcagaggaggttcttcaggcaaaggaggactttgaaaaggctgaatcaggagcacttaataactgggctataattaagcaggacccctggtaatgacctccaatcagctcctgggggccttgctttgtcttttctaccagggcaggcactaagcctgacaaggcttggcacctagcagagggcctgcataccaccagtgtgcacaaaaatggatgcaaataacctcaccaagcaaggctggcagggggtttctagcacaccagagcagaagctacctttttactac

SEQ ID NO: 461255 - DNA, 4447 bp, Homo sapiens
tcccagtcagtccagaggctgcggctgtggagaagactgggactgctgagatgtcctctattcttaaagagcatgttcttggagctgatacctctgctgaccttgaagaaactgggcatgtcttaagtattggtgatgtgaagaggacaggaaccattgtggacgttccagtcggtgaggagctgttgggtcgtgtagttgatgcccttggtaatgctattgatggaaagggtccaatgggttccaagacccataaaatcattcctcgaacttcagtgtgggaaccaatgccgactggcattaaggctgtggatagcttggtgccaattggtcgtggtcagcatgagctcattattggtgaccgaaggactgggaaaacctcaattgctattgacacaatcattaaccagaaacatttcaatgatagatctgaagaaaagaagaagctgtactgtatctatgttgctattggtcgaaagagatccactgttgctcagttggtgaagagacttacagatgcagatgccgtgaagtacaccactgtggtgtcagctatggcctcagatgctgccctacttcagtacctggctccttactctgactgttccatgggagagtattttagagacgatggcaaatatactttgatcatctatgacgacttatccaaacaggctgcctgtcctggtgatgtgttttacctatactcccggttgctggagagagcagccaaaatgaatgatgcttttggtggtggctccttgactgctttgctagtcatagaaacacaggccgatgatgtgtctgcttacattccaacaaatgtcatttccatcactgacagacagatcttggaaacagaattgttctacaaagatatccgctctgccattaacattgggtctgtctgtgtcttgtgttggatctgctgcccaaaccaggactatgaagcaggcggcagactctctttggctcatgtataccttcaattgcataagggagagaatatagaggacattccaaaggaagtgctgacagactgcgcccaccttgtgaaggccaatagcactcaaggctgcaagaacaacgttaatgtggtaaatactccacggtctaacctgaagaaaacagctgacgtggatgtgaggcagataggctttcacaggcagaaggatgtaaaaattgtgacaatggagaagaaagtaaatgagatcctgaaccgattagaaaaaaccaaacttaacagatttcaatgcagctttgaggaagcacagcattactgtcatgtgcagagaggattcctagctcatatttggaacaaggaagttcaagatctcatccgggactatctggaagaaggaaagaagtggtggattgggcaaaatgtaatgccattgaaaaagcatcaagacaacaaatacccagcagacgttgcagccaacgggcccccaaagcccctcagctgcacctacctgtccagaaacttcattcggatctcatccaaaggggacaagtgcttactgaaatactatttcatttgccagactggtgactttttggacggagatgcccattatgaaagaaatggaaataattcccatttgtaccagagacacaagaagacaaaaagaggagttgcaatagcaagagacaaaatgcccccagtggattcggatgaaaccggtgataaaatcagaaacaacttcaagcccaaaggaagaaggtcatccgaataccttcacctcttatctacaagtgtcattgcagaaggcatctggtcaggtaaacatgggaaattcaagtcacaggtcatagatgagatagcagggaacttcagcagagcagttcatggtttgcaagctcttaacaaactacaggaagcttgtgagttcctccagaaactaacagccttaaccccaagattttctaagccagctcagaacaacaacagtctgggcttcaaagttcctccaactgtctgcccctttcattccctcaacaatgtcaccaaagctggagaaggaagttggctggaatccaagcgtcatactgagccggtagaagacatcctggaaatgtccttggtggagtttgggaatatcggggaagcatttctagagcagaaccagtctcccgagtcttcagtgactttgacctctgccaatgctactctgctgctgagcagacaaaacatatcaactttaccgctgagctcttacactctgggtcacccagcccctgtgaggctaggctttccgtcggctttagctttgaaggagctcttgaataaacatccaggagttaatgtccaaataacaggactagctttcaatcccttcaaggatttggacaacagaaacattgttggaagcattggaagtgtgttactaagcgctaatcgtaaattgctccaagtccatgatttaatggaggacattgagatcatgctctggagaaatgttagcttggaaacccatcccaccagcctcaacatgagcacacatcagcttacaatcacagtgaacgtcacttccttggagaaatccttgatagtgagcatagatcctgacagtccccttttaatgacactctacctggggttccagtatcagcctaactgcactcacttccacctgaacatcacccttccaaaggataaggtgtggcaaaaagatgaggagtacacgtgggtgctgaatccagagcatctgcagcacgggattggcacctactatataacagctgtgctgagtgagaggcaggagggtgctcagcagacacccagcttggtctcggtcatcaccgccgtcactcagtgttactactgggagatccacaaccagacatggagcagcgccggatgccaagttgggccacagagcacaattctgaggacacagtgtctctgtaaccacctgaccttctttgccagcgacttctttgtcgtgcccaggaccgtgaatgttgaagacacgatcaaactgttccttcgcgtgaccaacaatcctgttggggtgtcactgctggccagccttttaggattttatgtgatcacagttgtgtgggctcggaaaaaggatcaagcagatatgcagaaggtgaaggtcactgtcctggctgataatgaccccagcgctcaatttcactaccttattcaggtctacaccggatatcgaagaagcgctgctacaacagctaaggttgtcatcaccctctatggatcagagggacggagtgagccccatcacctctgtgacccccagaagacagtctttgaacgagggggcctggatgtcttccttctcaccacttggacctctctagggaacctgcacagccttcggctctggcatgacaattctggcgtcagtccctcctggtatgtcagccaggtaattgtctgtgacatggcagttaagaggaagtggcatttcctgtgcaattgctggctggctgtggacctcggagactgtgagcttgaccgggtcttcatcccagtttcaaagagagagctcttttcctttaggtactgttggaaaattactattaacagtgaatattgatgttcactattaattgaattgttcacgattgaattgtttttaatgcaaattaacattttattaatgtattatttcaaacatacataagcattactgttgtggttgtaactggtgtaaccattaccttaaaaatcagaaggaagacaaaaagagattcgaagtataaaaattataaatattgcccttattttctgaaactgtttacctagagaatcatttataaatttactaagatatctaggaataaaagaatcactcagatcaatggaatataaaaaggataccactacttcgatgatacaaatatttatgagaacaaaatataaaaataaaggaaagtattagagggctgtagccttcaactgactttcaaagacactagtaaactggccaggcacctgaatcatttttagtttcagttactgtacaaaagtcaaactcccacttttgtactaccttcctccaggtctggagctcagtaatcctgtggcttctacctcactctgaccaccttgttttctcattctgcttctcttcctcagaaaaggtttattttgtgtttaagcccagcaaagtctttttggttctttctttttatatattatttatagttcctccatatttggagtagagaaagtgctcagagtatgaatttaccaaactattttgagcagaagtttaatgtaaacttttgaagagtaaaaaattcatcaaaactcttataaagctaaaacaaccatttttaattttaaactcgcatagcatataaattatcctcaacaaccttttatcctaaaacaacaaaagaatcttacatggacacattcgggtgatggtaaaagaatttaaaataaaaaaagaattaaaatatctgaaagcttatt

SEQ ID NO: 461256 - DNA, 1817 bp, Homo sapiens
acaacctacccatctgcatgatcctgctagaggtttgagcatccaggcacctaagaagcaagccacacccccatcgcacacccttctaggggcacaaagtctcccttattcatgggacctgcctgggtccaggaccccttgacaggtgctctctggctgcctgtcctctgggcactcttgtcccaggtctattgttttcatgacccaccaggatggcgcttcacttcctcagaaattgtgatccccaggaaagtgccccacaggaggggtggagttgagatgccagaccagctctcttacagcatgcatttccggggccgaagacacgtgattcacatgaagctcaagaagaacatgatgcccagacatttacctgtttttactaataatgaccaaggggccatgcaggagaactacccttttgtcccacgagactgttactacgattgctacctggaaggggttcctgggtctgtggccacattggacacctgccgtggaggtctgcgtggcatgctgcaggtggatgacctgacttatgaaatcaaacccctggaggctttttccaaatttgagtatgtagtatctctgcttgtgtcagaagaaagaccaggagaggtcagtagatgtaagactgaaggggaagagatagatcaagaatctgaaaagtgctccaaattttccatacctaattttccatacgtagctcctcgttgtggagacaatatcaaaaatcagagggaagaatgtgactgtggctcccttaaagattgtgccagtgatagatgttgtgagacctcttgtaccctttctcttggcagtgtttgcaatacaggactttgctgccataagtgtaaatatgctgcccctggagtggtttgcagagacttgggtggtatatgtgatctaccaaaatactgtgatgggaaaaaggaagagtgtccaaatgacatctacatccaggatggaaccccatgttcagcagtatctgtttgtataagaggaaactgcagtgaccgtgatatgcagtgtcaagccctttttggctaccaagtgaaagacggttccccagcgtgctatcaaaaattgaataggattgctgagcacactacatttcgtaatatattagtacacgacataaaagaagaaaaatgctttggctatgaagcacaccaggggacagacttgccagaaatggggctggtagtggatggtgcaacctgtggcccagggagctactgtcttaaacacaattgtacttcttatcaagacctgcattttgagtgtgatcttaaaacatgcaattacaaaggagtatgtaacaacaaaaaacattgtcactgtctgcatgggtggcaaccaccaacatgtgaactgagaggaaaaggaggtagtatagatagtggccctccacctgacaaacaatatcgtattacagccagcacacttgcgaatataaactgagcactacttttaatatttactcgttgcatcctttttctggtttcacttctctttggtggcttttcacaagcaatagaatttatggaagagaaaataatgaaaactactgaacctaatgagtaaatactaatggaagcccacacaatggagaaaatcacgttgacacttactgggagttataatcaatagtcactctgacggttacatcaccttttagcaattctgatgtcatcttgaagtaaaatcacttggcaatttaaaaagggtctgtgtgtttaaatttacttcacatttcatgtgtggtcgtattctcaatacttctatagatgacggcagaaactcttagattcact

SEQ ID NO: 461257 - DNA, 2505 bp, Homo sapiens
aaatggttgttacaattgcatggaaggtaaactgaggcccagaggccccaacaccacagagccacgtctactcaccagcccccagcccccaccactccccgcacagtgtcctccatcatgctgtggggagctggggtcctgccgtgcagacacactgggggaccaggtctgcagggactcgctgcagaaccaggagtcccagggcacacgagcctccctgcccaggttgctggcaagcccctggggcaaggtggaagcccatttggcagctgaggccctggtgcctgaggccatcaagggaggtcagaagggacaaaggccacggctcggccgagaggagggtgccgtccgctctgctcaggcactgggccgggtgccagcagcaccacgttcccacgctctatggtgccaatcttggcaccccagccctgccccacccttgccttgcagggaccagggcaccgggaatgtggctgtggattccgccccctggggccacggattcctgtctcagtgggcgggggtggaggacggctttccaccctttgatccttgccaggagaaggcgctaaaggtgagcgccggctgcagggcggaggactctggcctctgcggggccgagccacggagccacctggcttgcggggatccctgggacccagccttgttctactgcccacttgacgcggcgggcaccctccttcctggtggccaggaacgctccctggaggagggggcccggaagctccctggctgcaagagtggattcctgagcaaaagctccgcgggtggagaaagagagtatggcgggggccacgggggtccgagtcccgacacgcggctgcgcactcgctcccctgcaccgcgggcggggctggggccggagacgcgcgcggcggcctcggattcctgcgcggtgggacaagcccgcgcctgcgcccgcccggacagggcacgtcgcccgcgagtggggtggcgggcccaggaggaggggaccccgacagcccctcaccgcctgccggggcgggccgccacgctggacgggggcagcgcggggcggggtcggggggcggcagaaggcgcctttgtgcgtcgcgtccccgagcgtgtcgcggcgggcccggcaccggccccgctccagcgcccgcccccggcccgcgccccgggccccgcgcgcatacctggcgaggccacgaggggattctgcgggccgagccccgccgtggctgcgcgccgcaggcgggagaggctgaggattcttttgggaagcccctccgccggctgtggctgccgcggcgatgtgggcggcttgcgtgtggccgatcgggagtttggccagcttcacgctccatcagtggtctcaccatagaccttctaatcttgattgtgttggctggtgtctattttctaatggtgtttggttttggaacctgcatttctttgaaaaagagtgagcatgtgcattttcccagatgcctggtatccaactgcacttctccatgtgtgcattgtcccctgagctggcaagaagatcctactagttggtctgcatgccatgccagctcggccttgcaccctgggggcccaggtaactagctctcaccaacagaaagagatgtgatggacatcacctgaggccagaccctaagacctctgtgtgccccctccgtgtctcctgtctgcagctgttgtccacaccaagggtggcctacagagggaagtgaggaccttgggacttcctccaggacagccctcgctgtccaaatctccacctgctgcagagctgcctccagtcaagcccttgtttccagctttctgtgccctaaataaacttctgctgggattgagccatcagcattctgtggtgggcgtcgctgctgcgaggttgccctcgtgcacacaagctcctcacaggacttccaggatgatatggaagagtgactgagagcagccgcccggtgcttcccaaccttagagggaggtcacgggcagtctccctgcgatgctggccacaggtggtctcgctgtgtcgcccaggctggagggcagtggtgtgatctggactcactgcagcctcgacctgttgggctcaagtgatcctctcacgtcagcctccaagtagccaagaccacaggcaggcgtcaccatgcccagcccccatgatgactttacttttcttcttgaacctggtgaatttctgtgttaacatgtctgatttgaacccttctgatattcctgagataaactttatgtgaccttggtattctgttggattttggttagctgatacttcaagatttttataaaactgggttgcaatttatttgtgttcccgtttctagctgtctatgagcttcatcaaatgggcaggaccactttcccttaacttctccttttctggaacaacggacatatcctgtggattatctgttccccacaggtttgggatatgggtgctgtgaatgccactgtgctgggggctttgggaagtgtgtgtttgttttc

SEQ ID NO: 461258 - DNA, 1876 bp, Homo sapiens
cggggtggcgctcggacagaggctgcaatctcagcacttctgggaggccaaggcaggcggctgggaggtgtaggttgtagtgagctgagatcacgctactgcactccagcctgggcaccattgagcactgagtgaaccagactccgtctgcaatcccggcacctcgggaggccgaggctggcagatcactcgcgattaggagctggagaccagcccggccaacaaagcaaaaccccgtctccaccgaaaccagtcaggcgtggcagcgcgtgcctgcaatcgcaggcactcggcaggctgaggcaggagaatcaggcagggaggttgcagtgagcctgagccgagatggcagcagtacagtccagcttcggctccgcatgagagggagactggcgaggccacgaggggattctgcgggccgagccccgccgtggctgcgcgccgcaggcgggagaggctgaggattcttttgggaagcccctccgccggctgtaaccccagggccgtgccaccctcctgatcaccgcaagcatggaccccccagcacgctgcgggtgggacaggcagggcccctgtggggtggcttgactggcctggagttggggacgaagtccccgggcttggtcccccgagggcttggttgggcgtcccggggtggctgccgcggcgatgtgggcggcttgcgtgtggccgatcgggagtttggccagcttcacgctccatcagtggtctcaccatagaccttctaatcttgattgtgttggctggtgtctattttctaatggtgtttggttttggaacctgcatttctttgaaaaagagtgagcatgtgcattttcccagatgcctggtatccaactgcacttctccatgtgtgcattgtcccctgagctggcaagaagatcctactagttggtctgcatgccatgccagctcggccttgcaccctgggggcccaggtaactagctctcaccaacagaaagagatgtgatggacatcacctgaggccagaccctaagacctctgtgtgccccctccgtgtctcctgtctgcagctgttgtccacaccaagggtggcctacagagggaagtgaggaccttgggacttcctccaggacagccctcgctgtccaaatctccacctgctgcagagctgcctccagtcaagcccttgtttccagctttctgtgccctaaataaacttctgctgggattgagccatcagcattctgtggtgggcgtcgctgctgcgaggttgccctcgtgcacacaagctcctcacaggacttccaggatgatatggaagagtgactgagagcagccgcccggtgcttcccaaccttagagggaggtcacgggcagtctccctgcgatgctggccacaggtggtctcgctgtgtcgcccaggctggagggcagtggtgtgatctggactcactgcagcctcgacctgttgggctcaagtgatcctctcacgtcagcctccaagtagccaagaccacaggcaggcgtcaccatgcccagcccccatgatgactttacttttcttcttgaacctggtgaatttctgtgttaacatgtctgatttgaacccttctgatattcctgagataaactttatgtgaccttggtattctgttggattttggttagctgatacttcaagatttttataaaactgggttgcaatttatttgtgttcccgtttctagctgtctatgagcttcatcaaatgggcaggaccactttcccttaacttctccttttctggaacaacggacatatcctgtggattatctgttccccacaggtttgggatatgggtgctgtgaatgccactgtgctgggggctttgggaagtgtgtgtttgttttc

SEQ ID NO: 461259 - DNA, 1715 bp, Homo sapiens
aaatggttgttacaattgcatggaaggtaaactgaggcccagaggccccaacaccacagagccacgtctactcaccagcccccagcccccaccactccccgcacagtgtcctccatcatgctgtggggagctggggtcctgccgtgcagacacactgggggaccaggtctgcagggactcgctgcagaaccaggagtcccagggcacacgagcctccctgcccaggttgctggcaagcccctggggcaaggtggaagcccatttggcagctgaggccctggtgcctgaggccatcaagggaggtcagaagggacaaaggccacggctcggccgagaggagggtgccgtccgctctgctcaggcactgggccgggtgccagcagcaccacgttcccacgctctatggtgccaatcttggcaccccagccctgccccacccttgccttgcagggaccagggcaccgggaatgtggctgtggattccgccccctggggccacggattcctgtctcagtgggcgggggtggaggacggctttccaccctttgatccttgccaggagaaggcgctaaaggtgagcgccggctgcagggcggaggactctggcctctgcggggccgagccacggagccacctggcttgcggggatccctgggacccagccttgttctactgcccacttgacgcggcgggcaccctccttcctggtggccaggaacgctccctggaggagggggcccggaagctccctggctgcaagagtggattcctgagcaaaagctccgcgggtggagaaagagagtatggcgggggccacgggggtccgagtcccgacacgcggctgcgcactcgctcccctgcaccgcgggcggggctggggccggagacgcgcgcggcggcctcggattcctgcgcggtgggacaagcccgcgcctgcgcccgcccggacagggcacgtcgcccgcgagtggggtggcgggcccaggaggaggggaccccgacagcccctcaccgcctgccggggcgggccgccacgctggacgggggcagcgcggggcggggtcggggggcggcagaaggcgcctttgtgcgtcgcgtccccgagcgtgtcgcggcgggcccggcaccggccccgctccagcgcccgcccccggcccgcgccccgggccccgcgcgcatacctggcgaggccacgaggggattctgcgggccgagccccgccgtggctgcgcgccgcaggcgggagaggctgaggattcttttgggaagcccctccgccggctgtaaccccagggccgtgccaccctcctgatcaccgcaagcatggaccccccagcacgctgcggctgttgtccacaccaagggtggcctacagagggaagtgaggaccttgggacttcctccaggacagccctcgctgtccaaatctccacctgctgcagagctgcctccagtcaagcccttgtttccagctttctgtgccctaaataaacttctgctgggatttgaaaaaacacgaaaaaaagaaaaaactacagggagagatcaaatgtcgagagatgcagaaacaaaagagggtactagaacagtggcgcaattggtaaatagcagagtaacaagagaaccagagattttatagaacgaaaggtgataaactaggggtatcccaataagagagcagaataaattcagaagcagtgtactgatataatggc

SEQ ID NO: 461260 - DNA, 1474 bp, Homo sapiens
cggggtggcgctcggacagaggctgcaatctcagcacttctgggaggccaaggcaggcggctgggaggtgtaggttgtagtgagctgagatcacgctactgcactccagcctgggcaccattgagcactgagtgaaccagactccgtctgcaatcccggcacctcgggaggccgaggctggcagatcactcgcgattaggagctggagaccagcccggccaacaaagcaaaaccccgtctccaccgaaaccagtcaggcgtggcagcgcgtgcctgcaatcgcaggcactcggcaggctgaggcaggagaatcaggcagggaggttgcagtgagcctgagccgagatggcagcagtacagtccagcttcggctccgcatgagagggagactggcgaggccacgaggggattctgcgggccgagccccgccgtggctgcgcgccgcaggcgggagaggctgaggattcttttgggaagcccctccgccggctgtaaccccagggccgtgccaccctcctgatcaccgcaagcatggaccccccagcacgctgcgggtgggacaggcagggcccctgtggggtggcttgactggcctggagttggggacgaagtccccgggcttggtcccccgagggcttggttgggcgtcccgggctgttgtccacaccaagggtggcctacagagggaagtgaggaccttgggacttcctccaggacagccctcgctgtccaaatctccacctgctgcagagctgcctccagtcaagcccttgtttccagctttctgtgccctaaataaacttctgctgggattgagccatcagcattctgtggtgggcgtcgctgctgcgaggttgccctcgtgcacacaagctcctcacaggacttccaggatgatatggaagagtgactgagagcagccgcccggtgcttcccaaccttagagggaggtcacgggcagtctccctgcgatgctggccacaggtggtctcgctgtgtcgcccaggctggagggcagtggtgtgatctggactcactgcagcctcgacctgttgggctcaagtgatcctctcacgtcagcctccaagtagccaagaccacaggcaggcgtcaccatgcccagcccccatgatgactttacttttcttcttgaacctggtgaatttctgtgttaacatgtctgatttgaacccttctgatattcctgagataaactttatgtgaccttggtattctgttggattttggttagctgatacttcaagatttttataaaactgggttgcaatttatttgtgttcccgtttctagctgtctatgagcttcatcaaatgggcaggaccactttcccttaacttctccttttctggaacaacggacatatcctgtggattatctgttccccacaggtttgggatatgggtgctgtgaatgccactgtgctgggggctttgggaagtgtgtgtttgttttc

SEQ ID NO: 461261 - DNA, 1503 bp, Homo sapiens
gcaaaaagggtaccgctccccactccacactgccccagtccagttcacagcactgagatgttgacctgggaggcagtgaggccagacctggatggccagccctggcagatgtcctctgttccttcacgtgagctgggaaacagggaaatgggaccttgcttgcccaggcccacagactcagctctcttggcctcagctaacttatgtgggtttgagttggtgcttggtatgactgtcacagcctccatcaccagggggctctggaacatcctggccttgggcagatcagggaggatcatttcaaatgctgtcacatcagcagctgcttataccaccatcaggaaacacgcttcccacacaaacctcaccaccgtccacccaggctcctgcagactggccagggcaccagatgctaccagttcactggaaagtacactgaccttggagtccatagccctgggttggagtctcccctctgccatcgactatctgtctgattctagtttccagttcaagttcaccttgactgagattcaggatggagtggtgatttggccccagccccgagacattgcaatgctagcactgactacgccacttgtgaaggcttgtaaaacctctgaagccccagcccagcacgggcctgagctgctccagcaaccacgggccgtgagcaggtattgaattatgaatggatgttgcccagaaataattgcaaacattattgccccccatacatgtgtgtcctccgcggggctacagcaatagattttgttgctttaacactccagcctgggcaaaagagtaagactctgtctcaaaaacaaaaacaaaaacagaaaaaaacacaatcagattagagagcccacaccctctaagtcagaatgtgaaatggtgaggccaataagatttatttttcaaatcttcccaaggcttctagtgcccagcagactggtttgcaaaccagtcttctaaagcaatcttctttctatcattaaggagcccatgacacagaggtgttaagttcaaggtctcttgggtcagcttttggatccactgttccaaagggacaggttcttagggggctggcattttcttggagtgaagcaggagctgctgcaggggctgagaaagcaggaaggagctctttgctgcattccagagcagatctggctgtgaataaacgagaaagagctttagtgtaagctgggctgaatggataattaaacagatagcaaaatggaatgcagttgcacacacctcccgggagctggctggggggagataatatgccttcctgtcgtcagaaggcacaggaggaaaaacaactgggcctggccgttggccatttaacaatattgcttttgtaaacaagttgaaaaatccaataactgtaaaacttatggcatgtccttaaaagcctgttgctgttttccctataaatggatgagcgtttccgactgaaggtgttctaattaaacagtccgcatccccaaggactgc

SEQ ID NO: 461262 - DNA, 294 bp, Homo sapiens
aatggatgttgcccagaaataattgcaaacattattgccccccatacatgtgtgtcctccgcggggctacagcaatagattttgttgctttaacactccaggttcattataaattagagctaacacattaacagtgggtcagggtacatggggagagggaatcccgtttgcaagctctaaaagggacagatccctcaacggcacacgttggttactctcaactgttcctttcttttgatctattccacccatccctattaaataactaattatttaacatcttttaaagctttg

SEQ ID NO: 461263 - DNA, 1206 bp, Homo sapiens
  misc_feature (1170)..(1170): n is a, c, g, or t
gcaaaaagggtaccgctccccactccacactgccccagtccagttcacagcactgagatgttgacctgggaggcagtgaggccagacctggatggccagccctggcagatgtcctctgttccttcacgtgagctgggaaacagggaaatgggaccttgcttgcccaggcccacagactcagctctcttggcctcagctaacttatgtgggtttgagttggtgcttggtatgactgtcacagcctccatcaccagggggctctggaacatcctggccttgggcagatcagggaggatcatttcaaatgctgtcacatcagcagctgcttataccaccatcaggaaacacgcttcccacacaaacctcaccaccgtccacccaggctcctgcagactggccagggcaccagatgctaccagttcactggaaagtacactgaccttggagtccatagccctgggttggagtctcccctctgccatcgactatctgtctgattctagtttccagttcaagttcaccttgactgagattcaggatggagtggtgatttggccccagccccgagacattgcaatgctagcactgactacgccacttgtgaaggcttgtaaaacctctgaagccccagcccagcacgggcctgagctgctccagcaaccacgggccgtgagcaggtattgaattatgaatggatgttgcccagaaataattgcaaacattattgccccccatacatgtgtgtcctccgcggggctacagcaatagattttgttgctttaacactccagcctgggcaaaagagtaagactctgtctcaaaaacaaaaacaaaaacagaaaaaaacacaatcagattagagagcccacaccctctaagtcagaatgtgaaatggtgaggccaataagatttatttttcaaatcttcccaaggcttctagtgcccagcagactggtttgcaaaccagtcttctaaagcaatcttctttctatcattaaggagcccatgacacagaggtgttaagttcaaggtctcttgggtcagcttttggatccactgttccaaagggacaggttcttagggggctggcattttcttggagtgaagcaggagctgctgcaggggctgagaaagcaggaaggagctctttgctgcattccagagcagatnctgctgagtggtatttgtattctttaatattaaaca

SEQ ID NO: 461264 - DNA, 1015 bp, Homo sapiens
tgtgtcaaaacacataaattttattgttagtagagtataactaaatttaagaagcccttactatgtgcaaagtacaaattctgtgtgggatacaaacaaggccttgttcatatctttagggatcctggaatctcgggaggtgacagaccagtgcacgtattgcaaccaattgaggtgtaagagacaatatgaaattgctatgagcaagttgattcagtcactcaacaagtattcacaggcactgtgtgaactctaaaagcaaattacttctctctgaggcaggcgaggcaaggtcacagaagctttatggaactgagcatttgggctggtgtttgaagaagaggttaaaatttgtcaggcagagcagaagggaggcaggtgtgacaaaggtcatgtgggagtcaaaggcgtgggaaagtatagggtgtgcttgggaaataagaactcagtgcagtacctctcttctgcagaccagggtcgtgtctgtttacttcatttccagtgtcaaatctgtcatctggaaagggtgtgaaattcatcctgaagaacagccagctgagtacccacttggatattggcatcttctgggttacaagagccttgcaattaaggatgagccaacagacctagccctcaacactcagctgaccaacaagcaaagaaagagcaaggaggcccacatggtgtactttaggggccgggcctggaaggggtatatcccacctccatcccatgggccattggccgggactcagtcacatgatcccacttacatgcaagatagcatatgtgctttggtagtgtagaaagaagagaaaggaagaagaagagagagattggtgaacagtagcatctatatacacccaaagggggtaaagaattcctatcagttggatgttggacctgctagaacaggagtaagcaagttttttggtaaagggccagagatttattttctgttctctgcattatttctctttctgtttgtctatttttgtttcctttcattcagagg

SEQ ID NO: 461265 - DNA, 1121 bp, Homo sapiens
aacaaaaggcttccacttctgaaaagaaagtttgaaaacctttgatggggagctacagatttcaagcacaggagtgcttaaagaagtaactattctgaagtgttctagttctttgaggaatgctgatgtatggataaagtatggtggagcaaagaacactggaccagaagttggggaggtcgccttagctccaccactgtgtctcaccgttaaattcatctacagggatcctggaatctcgggaggtgacagaccagtgcacgtattgcaaccaattgaggtgtaagagacaatatgaaattgctatgagcaagttgattcagtcactcaacaagtattcacaggcactgtgtgaactctaaaagcaaattacttctctctgaggcaggcgaggcaaggtcacagaagctttatggaactgagcatttgggctggtgtttgaagaagaggttaaaatttgtcaggcagagcagaagggaggcaggtgtgacaaaggtcatgtgggagtcaaaggcgtgggaaagtatagggtgtgcttgggaaataagaactcagtgcagtacctctcttctgcagaccagggtcgtgtctgtttacttcatttccagtgtcaaatctgtcatctggaaagggtgtgaaattcatcctgaagaacagccagctgagtacccacttggatattggcatcttctgggttacaagagccttgcaattaaggatgagccaacagacctagccctcaacactcagctgaccaacaagcaaagaaagagcaaggaggcccacatggtgtactttaggggccgggcctggaaggggtatatcccacctccatcccatgggccattggccgggactcagtcacatgatcccacttacatgcaagatagcatatgtgctttggtagtgtagaaagaagagaaaggaagaagaagagagagattggtgaacagtagcatctatatacacccaaagggggtaaagaattcctatcagttggatgttggacctgctagaacaggagtaagcaagttttttggtaaagggccagagatttattttctgttctctgcattatttctctttctgtttgtctatttttgtttcctttcattcagagg

SEQ ID NO: 461266 - DNA, 831 bp, Homo sapiens
gcctgcgatggtttcaacatatgacccgaaaagtattatgttgaaacctaatcattggtgtgatggtattaggaggccctcaccagatattggatccactggcaccttgatcttggaattcccagcccccagaaccatgagaagtaaatgcacatgcacgcacacacatatcttgttaaatgaaaacagcaacacactctacatgctgttctgtaacctgcttgtgtctttcacttacattatgagaatgttcccctgtcaagaaatggaagtcaaggactcagcagtccaaggcagcccttctgaagcaacttcaggggctcagcaaatatttgttgagaacctcctctgtgcctggctggatcagggtggggctgtagagctgcacatcatagtctgcatccgggtcagccctgaatctcaggcactggaaggttaccctgatgggcaggacccactcccatcactaagagaacatcaaaagggcaggtgtgggggtggataggaagatcaggatctctgaaaggattggtcttttgagatgtttttcagaaatttgcattgtggtaacctacagactccacctggacccatgattcatgactcaaccagtccacccagaagctgactcagagcataaggagcattttccacacccctaggatttcatctccaaccaatcagcattccccattctctagcccctgtccaccaaactattctttaaaaaccttagctctaagctttatttatttatttaagtaatacactcctgtcttccacttagctggttctgtatttattaaactctttctctactgccataccgct

SEQ ID NO: 461267 - DNA, 781 bp, Homo sapiens
gcctgcgatggtttcaacatatgacccgaaaagtattatgttgaaacctaatcattggtgtgatggtattaggaggccctcaccagatattggatccactggcaccttgatcttggaattcccagcccccagaaccatgagaagtaaatgcacatgcacgcacacacatatcttgttaaatgaaaacagcaacacactctacatgctgttctgtaacctgcttgtgtctttcacttacattatgagaatgttcccctgtcaagaaatggaagtcaaggactcagcagtccaaggcagcccttctgaagcaacttcaggggctcagcaaatatttgttgagaacctcctctgtgcctggctggatcagggtggggctgtagagctgcacatcatagtctgcatccgggtcagccctgaatctcaggcactggaaggttaccctgatgggcaggacccactcccatcactaagagaacatcaaaagggcaggtgtgggggtggataggaagatcaggatctctgaaaggactccacctggacccatgattcatgactcaaccagtccacccagaagctgactcagagcataaggagcattttccacacccctaggatttcatctccaaccaatcagcattccccattctctagcccctgtccaccaaactattctttaaaaaccttagctctaagctttatttatttatttaagtaatacactcctgtcttccacttagctggttctgtatttattaaactctttctctactgccataccgct

SEQ ID NO: 461268 - DNA, 806 bp, Homo sapiens
gcctgcgatggtttcaacatatgacccgaaaagtattatgttgaaacctaatcattggtgtgatggtattaggaggccctcaccagatattggatccactggcaccttgatcttggaattcccagcccccagaaccatgagaagtaaatgcacatgcacgcacacacatatcttgttaaatgaaaacagcaacacactctacatgctgttctgtaacctgcttgtgtctttcacttacattatgagaatgttcccctgtcaagaaatggaagtcaaggactcagcagtccaaggcagcccttctgaagcaacttcaggggctcagcaaatatttgttgagaacctcctctgtgcctggctggatcagggtggggctgtagagctgcacatcatagtctgcatccgggtcagccctgaatctcaggcactggaaggttaccctgatgggcaggacccactcccatcactaagagaacatcaaaagggcaggtgtgggggtggataggaagatcaggatctctgaaaggaaatttgcattgtggtaacctacagactccacctggacccatgattcatgactcaaccagtccacccagaagctgactcagagcataaggagcattttccacacccctaggatttcatctccaaccaatcagcattccccattctctagcccctgtccaccaaactattctttaaaaaccttagctctaagctttatttatttatttaagtaatacactcctgtcttccacttagctggttctgtatttattaaactctttctctactgccataccgct

SEQ ID NO: 461269 - DNA, 3237 bp, Homo sapiens
cgtgtttttcttccgagcatacaaatatttgcaatgaggttgcaccgcagactccacagccattgtggcacctggggctctgtgacttgggaggcagaggagatggaatgccggggccaccggcatccttcggctcatggcctcttcctccatcttaaaagccagcttctgcaaattcctgctgtgggtgcctggaaaccctattggactaggactggccccggcaaaaaacaagtgttatagctgcccagtgtcctctgagtggatgctggtgattctggtatggagcccagatgtaaggcagcaggtggtccagaaggcaccagaagaggtctcctgtcaaagtcagggccagagaagaaggcacagggaacctactgcacgagactttcacttgcaacgagcaacccatgatgaggagggaggattcctgggggcattgagtcccccagacacaaggacccaagaccttcttgcttggaaagtgaattcctcagaattccgagatgatgccagtcttggaggaagatgacatgaggacccaaaaccttcttgcttggaaagtgaattcctgagaattccgagatgatgccagtcttggagaaagatgacatgaggacccaaaaccttcttgcttggaaagtgaattcggccagactgaagggacagtggccattgcatcaagtcagagaacggatctgacccatctagtagaagcttattgttttggcagaagcacaagctcttagaggtgcagctgcagggtgtgacctattggggacattgagctcagtgaccatgggccctgagagtctgaaatcctggaatttctcccaaaacgaagtccatgtagggaagccaaagtgtgagtcttacccggctggtttacaactgactgacatttgctgcctgggcagctgttgtgggtgcctggaaaccctattggactaggactggccccggcaaaaaacaagtgttatagctgcccagtgtcctctgagtggatgctggtgattctggtatggagcccagatgtaaggcagcaggtggtccagaaggcaccagaagaggtctcctgtcaaagtcagggccagagaagaaggcacagggaacctactgcacgagactttcacttgcaacgagcaacccatgatgaggagggaggattcctgggggcattgagtcccccagacacaaggacccaagaccttcttgcttggaaagtgaattcctcagaattccgagatgatgccagtcttggaggaagatgacatgaggacccaaaaccttcttgcttggaaagtgaattcctgagaattccgagatgatgccagtcttggagaaagatgacatgaggacccaaaaccttcttgcttggaaagtgaattcctcaaaactccacaaagactccagtcttggaggaagatgacatgaggacccaaaaccttcttgcttggaaagtgaattcctcagaactccacgaagactccagtcttggaggaagacgaggtgttgagagatagctgggatccctgaggaaggcagccccagtctccggtggagaattaagaggggcccaagcagatggttggtggtggaaacgtcacctcagtatagtactatggagtttcctttcacccccaacagccgacggtttccaggggcgaagagtgaaaattgaagcaaggtgtctactgtccagcggtagacaaggaggcagtgcgcctgccacccccaaggaagagtcagttcagaagcacagcagctgctggaaacccaggaggtttccagttcgttcctgctgggacctggcaagaactgcactgtcaaggctgcaagaggctcctgacggcttctgacatgtacagaatggaataagagaacctagcagaaatggaagcagaggcaagaggtctggaggccaggaaaatgtcaatggaaagcagctagcatgaagaccccacagtgttcctccctctagtagtctggtattatttggagctgagatgctcccaatatggttgggacatttgtcccctccaaatctcatgtgagaatttgatcccccattttggggatggggtctaatgggaggagtttgggtcatgacgggggacccctcaagaatggctttgtgccctgctcaccaggaatgaatgagctctcactctactagttcactggagagctggttttttaaagagcctggcgtctccccaactttctctcttgctcccccttctcactgtgtgatatacctgctcccctttgccatccatcatgagtggaagcttcttgaagcctccacctaaagcagatgccgacactatgcttcctgcacagcctgccataccatgagccaataaacctgttttctttgtaaattacccagcctcaagtattcatttgtaacaatgcaaaatggacaaacagaaaattggtactgaggagtggggctttgctataaagatagctgaatatgtggaagcagctttggaaatgagtaaattggcagatattggaagaatgtggagggcttagaagaagacaggaagatgagggaaactttgaaactgtcaaccaaaggatgatgaggttcataaatgtggaaaggagagctgtatttcttataaatggttgcagcctgcagggtggccattccgagtgtctgcgaagcatagcctctggccagaagccagaaacaggcacttggagtgtcagaagaataaaacaaggatttgtgctgaatgaggtggccaaatatatattcagcaagttataggaggagccatgaatatttacgaaagaagaaacacatgtgcagttgacctcccagccccttcatgggttcgcatgttaaaaaaatggtagtattagcaagatgtgagggggcagtttttgggtctctgacttcaaaagatgaagcagtggacacaaaacccgtcagtcagtgcacagcctccctagactgactagaacctctcagtggttggtggtctcttatcaggaaggaatgctgcttggttgttctgttgaaactgcaaaagggagggacagcatcaggtggttggttgaaatcagtggtgaggtgactcttttgaaagggctggttccaacccaaatgctcatcagtgatagactggataaagaaaatgtggcacatgtataccatactatgcagccataaaaaagagtaagttcatgtcctttgcagggacatggatgaagctggaaacc

SEQ ID NO: 461270 - DNA, 2050 bp, Homo sapiens
ctgagcaccgaggattcaccatggaactggggctccgctgggttttccttgttgctattttagaaggtgtccagtgtgaggtgcagctggtggagtctgggggaggcctggtcaagcctggggggtccctgagactctcctgtgcagcctctggattcaccttcagtagctatagcatgaactgggtccgccaggctccagggaaggggctggagtgggtctcatccattagtagtagtagtagttacatatactacgcagactcagtgaagggccgattcaccatctccagagacaacgccaagaactcactgtatctgcaaatgaacagcctgagagccgaggacacggctgtgtattactgtgcgagagacacagtgaggggaagtcagtgtgagcccagacacaaacctccctgcagggtccccaggaccaccaggggcgcccgggacactgtgcacgggtctgtctccagggcaggtgcagttcctgctgagggctggcttcctgtcatggcctgcggcgccctcattgtcaaatttccccagggaacttctccagatttacaattctgtactgacatttcatgtctctaaatgtaaaacttttttgtcctttttgtttctttgtttttgtaacaggaggacacaccctcacctccacagaaaccacagtgtcactttgggggcagatgatccttctgtggtcagcaggatgaaagttccgaggaatctcaggggaacccgaagagtgtttgccagttagactcagggcagcgacctccacgggaatctctgattagaacaggctttgagttctgataggagccaagagagacgctcacacagggtcagggtccttaaagcctgatggttttcacagctatcccccctggtcttgtaaaactgtgtacatatgactcagactgattcacttgaccccctttctgctaatccattttccttctctgcatacttgattctcacaattccctttcttctcttccccgaaaactgaggatgtgttttctgtagtctaaattccagggctcaggtctgcaggacctgggtaggctacggggactttctcactcaccattgtctggactctcctgttgtcgtctgtgaacggatgtttggaagatgaagtggacattagtcatgaagggaataatactagttttctccaatgggatactggatgtagagctgatcttgtgcttctcacactgtcacagagtttggactctcacccgtgactttgaggagagctgaggatggacactccattgtgctgtgagctctgggtaacaatagtagggccctggctaggcagcctaaggtcaatactgctggccttcaggaaagacaggctggaattcctgggaagacctgcatctgccgtccaccatggagtcccatcgtcttctattatgccctgattgaatcagccccacctaggttatctagaacactcttcgtgacttacgaaaaaataatgggaggctctactaacacctgtgttatgccatgggagcaacacctaagctagtgtgtgattgagtagatgagactgtggtctagtcaaggtgacacataaaattaattgttgccattataatattttattatatatttggcaatatagtcgtgctcatattataaatacttttgctacgttgttgttatgtcagaagcttttgaataagaacagcttcatcttgaataggggctaggaaaaataagactgagacctgctgggctacgttcccagtaagctaaggcgttcttagtcacaggatgagataggaggtctgcacaggatccaggtcataaagaccttgctgatgaaggttacagtaaagaagctggccacagcccaccaaaaccaagacagtcacgaaagtgatctctattcatcctcactactcattatatgcttattgtattgccttaacatgctaaaagacactccccctagtgcatgaccgtttacacatgtcatggtaacatcaggaagtttccctgcatggtctacaaaggaggggagg

SEQ ID NO: 461271 - DNA, 1330 bp, Homo sapiens
aattcgcggccgcgtcgacacggcgagaagacgacagaaggggagactcagggcagcgacctccacgggaatctctgattagaacaggctttgagttctgataggagccaagagagacgctcacacagggtcagggtccttaaagcctgatggttttcacagctatcccccctggtcttgtaaaactgtgtacatatgactcagactgattcacttgaccccctttctgctaatccattttccttctctgcatacttgattctcacaattccctttcttctcttccccgaaaactgaggatgtgttttctgtagtctaaattccagggctcaggtctgcaggacctgggtaggctacggggactttctcactcaccattgtctggactctcctgttgtcgtctgtgaacggatgtttggaagatgaagtggacattagtcatgaagggaataatactagttttctccaatgggatactggatgtagagctgatcttgtgcttctcacactgtcacagagtttggactctcacccgtgactttgaggagagctgaggatggacactccattgtgctgtgagctctgggtaacaatagtagggccctggctaggcagcctaaggtcaatactgctggccttcaggaaagacaggctggaattcctgggaagacctgcatctgccgtccaccatggagtcccatcgtcttctattatgccctgattgaatcagccccacctaggttatctagaacactcttcgtgacttacgaaaaaataatgggaggctctactaacacctgtgttatgccatgggagcaacacctaagctagtgtgtgattgagtagatgagactgtggtctagtcaaggtgacacataaaattaattgttgccattataatattttattatatatttggcaatatagtcgtgctcatattataaatacttttgctacgttgttgttatgtcagaagcttttgaataagaacagcttcatcttgaataggggctaggaaaaataagactgagacctgctgggctacgttcccagtaagctaaggcgttcttagtcacaggatgagataggaggtctgcacaggatccaggtcataaagaccttgctgatgaaggttacagtaaagaagctggccacagcccaccaaaaccaagacagtcacgaaagtgatctctattcatcctcactactcattatatgcttattgtattgccttaacatgctaaaagacactccccctagtgcatgaccgtttacacatgtcatggtaacatcaggaagtttccctgcatggtctacaaaggaggggagg

SEQ ID NO: 461272 - DNA, 3431 bp, Homo sapiens
gcactgggcctcctgaaaaaagcaattactggctccgcggtttcaaagcggcccaaggccgcttgatgaaaggagataagctggggaccgtttccaggatccccgcgggccgaccggggcagcccgggagccgaggtgcggcggagagcccgcggatcaaaggaatctggagagaaaggggaagcgggcggccggccccggccggccttcccccccgcaggccacgccgacctggggtggggggctgcgggccgcgggcggggactccgggatttcccgcctgcctgagtcggggcctacgccggcgcccgcttcgggcggctcggcccggaggggagctccggagagcccggggctcgcaggtaagcaccggcgctccgcgggccgggccggggacgcaggacaaggcgcggggcccaccccggctggctcgggagtggcggtcgcgcgggcccggctcccgtctccggcgtctcccggctccggcggccgggaccccccgcggccgagcccctggccaggccccaggccggcgccttcggaagcgacgtctggcgggccgcggggcacgagggggagagccgggaagcgtaaatccccgaagcgcgcggagatccgattagcgcgcggctattcattaggctgggggcgattgaattaggtccctgggcgcggtcgccggctggggcacagagacctccctcaactggagggcagcagcagctcacccccaccccagaatcagtgttccagaggacagctgggggcagggggttaggaacaatcccactccctcctggaagaggtcctgaccccccaccccacccatctgcctgtacgggtccctctgctatcgactggggcgagttcttttcatgagggccttgcctggtgcctggagggaacagggtgtgggggaaaggtctgtgtgttcccccctcacctcccctgctcagcggtgtggcctctggctctggggaggatcgggaagccccagggtccgtgccttggagtggggggacagccttttctctgccacagcttctgcctttgggggcttacccttcctaggagcagaactgttgtggaggggaagaggacggtgaaggttccgaagggaagggggctgcccccactgaaaacgaagcttccagtcacagccccttcattatttatcaggacccaggggatgaggtggcaggggagggggctgcatggagggagtgccctcaccctcgtccccagcgcctgccccctcccgaccaggcctgggctgaggcccagggtaagggggctgaggcaggccacagaggagcaagacttgtcaggggccagacctgggtaggaggattgtcctccaggcacacacggcccccagccccccagcctgtcgaactgggctctcccagaaggtccccggctccagcccaagcagggagccaggttgggggtgtgggaaggcagaagtcccagggatcctgggggaggctcaggttgtacctgcaggccacagtctcctcgacagacctcggacgaggttgtaagtgttttaaagaaactagagcagcagagaagagagactcagaagcccgtggcacggctttctcggcgtcccctccagcgagggggtctccattgctgcagttgccggttttgtccaaccaggtcaggaggctgcccggccccctccccactctcaaagttgcttgttaaacacagagtcgtaatttgtggctaaatataactagtgtgttctcacggaaagtataattcagggtgctcattgtatgaggttatcaacaagacccatctgggttaaattaaagtgattttcataaagggcagaagcgcccctttgcctggtttcccctgcctttttattagtgacagtgttattgttgcaattattagaggggatcaaggaaggtgggagttgccagggacccccaggctgaggagggagcctcccagcccccctccactcaccattgtcctgctgcccctccagccccctggtcactgtcacctctgcggctggagggctggagaaaggcccaggagcccagggaacctccaccatgccaggctgccttccctaaaggccggctccttccccccaggcagccagtctgggggtggacctggaggagcagggttctctgggaatctctgggccaagggatgcgctttggggatctgctggaataaagagtaatcggttttccttgcaggaggttgacccgaaacagccctccgtcttcctgcccatgaggatgaggacaggaagccagacccgggagagaaagcccagatcagacagatgggggttgggagggcctagtggctgaaactgccctgcttggggacaatgctcaggcaggaccaatccaaacgagggcactgcttatgtggtccttccggagcatcctccaaggcagagcctggcttcgggccctccctgcaaggacacctgcctccactccctgccagaccaggcctggctgcagaggcggaggggcggcagggctgcctgtctccactgtttggcggtgtttacacgtgtcgctgtcagggtgtctggacagtgggggtcgggggcctcccgggcccagacttccccaggcctattctcacactggtgagagggccctaggggaagggtgtgggctgggtggcggggccaggccagctgagacctacaggaccgtggagcatttaggtctcccacccaactccacccggtcctctgagcatcagttacagagcccaggcagcaggagggcagggcccagccccttatcacccatcctcaaggcaggcaggaaccctgaaggcagcttccaccaggggttcccttagcccccaccctccaaaagccccagaccctgccaggcctcaccctgccagcatcgtggccccagctgacggctcccaagggcaggtgctggcaacacaagcaggagccctcggggcatcccgcagggcacacaccaggtcgccgtgggctccccaagcacctcccagacccagcccttgggtgggtcgtggcccacaaacccccacgccgtgcccatgagatgagccccaccgcccacgtgccctccagccgtggagacctttctcccccttggccatggctcccatggggaggctgcaggccctccctgggctggaccagaggggacagactgtctctcccctgcgacttctgggggcactggagtccttggcctggttaccttcagcatttatagccctccagtgagttatacctcggagttctcacagagcagcatgcgcctgcggcaaagccctcacctccagcccctggaccacctgactgctgcctcccgcctggcgccaaacacggccaccgcctcttttgttaacaggacagttgatccattaaattaaaaatcattcaatagatt

SEQ ID NO: 461273 - DNA, 575 bp, Homo sapiens
ggggatctaagatggttcacagcacagagacctccctcaactggagggcagcagcagctcacccccaccccagaatcagtgttccagaggacagctgggggcagggggttaggaacaatcccactccctcctggaagaggtcctgaccccccaccccacccatctgcctgtacgggtccctctgctatcgactggggcgagttcttttcatgagggccttgcctggtgcctggagggaacagggtgtgggggaaaggtctgtgtgttcccccctcacctcccctgctcagcggtgtggcctctggctctggggaggatcgggaagccccagggtccgtgccttggagtggggggacagccttttctctgccacagcttctgcctttgggggcttacccttcctaggagcagaactgttgtggaggggaagaggacggtgaaggttccgaagggaagggggctgcccccactgaaaacgaagcttccagtcacagccccttcattatttatcaggacccaggggatgaggtggcaggggagggggctgcatggagggagtgccctcaccctcgtcc

SEQ ID NO: 461274 - DNA, 470 bp, Homo sapiens
cccccagccccccagcctgtcgaactgggctctcccagaaggtccccggctccagcccaagcagggagccaggttgggggtgtgggaaggcagaagtcccagggatcctgggggaggctcaggttgtacctgcaggccacagtctcctcgacagacctcggacgaggttgtaagtgttttaaagaaactagagcagcagagaagagagactcagaagcccgtggcacggctttctcggcgtcccctccagcgagggggtctccattgctgcagttgccggttttgtccaaccaggtcaggaggctgcccggccccctccccactctcaaagttgcttgttaaacacagagtcgtaatttgtggctaaatataactagtgtgttctcacggaaagtataattcagggtgctcattgtatgaggttatcaacaagacccatctgggttaaattaaagtgattttcataaagg

SEQ ID NO: 461275 - DNA, 2865 bp, Homo sapiens
gcactgggcctcctgaaaaaagcaattactggctccgcggtttcaaagcggcccaaggccgcttgatgaaaggagataagctggggaccgtttccaggatccccgcgggccgaccggggcagcccgggagccgaggtgcggcggagagcccgcggatcaaaggaatctggagagaaaggggaagcgggcggccggccccggccggccttcccccccgcaggccacgccgacctggggtggggggctgcgggccgcgggcggggactccgggatttcccgcctgcctgagtcggggcctacgccggcgcccgcttcgggcggctcggcccggaggggagctccggagagcccggggctcgcaggtaagcaccggcgctccgcgggccgggccggggacgcaggacaaggcgcggggcccaccccggctggctcgggagtggcggtcgcgcgggcccggctcccgtctccggcgtctcccggctccggcggccgggaccccccgcggccgagcccctggccaggccccaggccggcgccttcggaagcgacgtctggcgggccgcggggcacgagggggagagccgggaagcgtaaatccccgaagcgcgcggagatccgattagcgcgcggctattcattaggctgggggcgattgaattaggtccctgggcgcggtcgccggctggggcacagagacctccctcaactggagggcagcagcagctcacccccaccccagaatcagtgttccagaggacagctgggggcagggggttaggaacaatcccactccctcctggaagaggtcctgaccccccaccccacccatctgcctgtacgggtccctctgctatcgactggggcgagttcttttcatgagggccttgcctggtgcctggagggaacagggtgtgggggaaaggtctgtgtgttcccccctcacctcccctgctcagcggtgtggcctctggctctggggaggatcgggaagccccagggtccgtgccttggagtggggggacagccttttctctgccacagcttctgcctttgggggcttacccttcctaggagcagaactgttgtggaggggaagaggacggtgaaggttccgaagggaagggggctgcccccactgaaaacgaagcttccagtcacagccccttcattatttatcaggacccaggggatgaggtggcaggggagggggctgcatggagggagtgccctcaccctcgtccccagcgcctgccccctcccgaccaggcctgggctgaggcccagggtaagggggctgaggcaggccacagaggagcaagacttgtcaggggccagacctgggtaggaggattgtcctccaggcacacacggcccccagccccccagcctgtcgaactgggctctcccagaaggtccccggctccagcccaagcagggagccaggttgggggtgtgggaaggcagaagtcccagggatcctgggggaggctcaggttgtacctgcaggccacagtctcctcgacagacctcggacgaggttgtaagtgttttaaagaaactagagcagcagagaagagagactcagaagcccgtggcacggctttctcggcgtcccctccagcgagggggtctccattgctgcagttgccggttttgtccaaccaggaggttgacccgaaacagccctccgtcttcctgcccatgaggatgaggacaggaagccagacccgggagagaaagcccagatcagacagatgggggttgggagggcctagtggctgaaactgccctgcttggggacaatgctcaggcaggaccaatccaaacgagggcactgcttatgtggtccttccggagcatcctccaaggcagagcctggcttcgggccctccctgcaaggacacctgcctccactccctgccagaccaggcctggctgcagaggcggaggggcggcagggctgcctgtctccactgtttggcggtgtttacacgtgtcgctgtcagggtgtctggacagtgggggtcgggggcctcccgggcccagacttccccaggcctattctcacactggtgagagggccctaggggaagggtgtgggctgggtggcggggccaggccagctgagacctacaggaccgtggagcatttaggtctcccacccaactccacccggtcctctgagcatcagttacagagcccaggcagcaggagggcagggcccagccccttatcacccatcctcaaggcaggcaggaaccctgaaggcagcttccaccaggggttcccttagcccccaccctccaaaagccccagaccctgccaggcctcaccctgccagcatcgtggccccagctgacggctcccaagggcaggtgctggcaacacaagcaggagccctcggggcatcccgcagggcacacaccaggtcgccgtgggctccccaagcacctcccagacccagcccttgggtgggtcgtggcccacaaacccccacgccgtgcccatgagatgagccccaccgcccacgtgccctccagccgtggagacctttctcccccttggccatggctcccatggggaggctgcaggccctccctgggctggaccagaggggacagactgtctctcccctgcgacttctgggggcactggagtccttggcctggttaccttcagcatttatagccctccagtgagttatacctcggagttctcacagagcagcatgcgcctgcggcaaagccctcacctccagcccctggaccacctgactgctgcctcccgcctggcgccaaacacggccaccgcctcttttgttaacaggacagttgatccattaaattaaaaatcattcaatagatt

SEQ ID NO: 461276 - DNA, 1847 bp, Homo sapiens
gcactgggcctcctgaaaaaagcaattactggctccgcggtttcaaagcggcccaaggccgcttgatgaaaggagataagctggggaccgtttccaggatccccgcgggccgaccggggcagcccgggagccgaggtgcggcggagagcccgcggatcaaaggaatctggagagaaaggggaagcgggcggccggccccggccggccttcccccccgcaggccacgccgacctggggtggggggctgcgggccgcgggcggggactccgggatttcccgcctgcctgagtcggggcctacgccggcgcccgcttcgggcggctcggcccggaggggagctccggagagcccggggctcgcaggtaagcaccggcgctccgcgggccgggccggggacgcaggacaaggcgcggggcccaccccggctggctcgggagtggcggtcgcgcgggcccggctcccgtctccggcgtctcccggctccggcggccgggaccccccgcggccgagcccctggccaggccccaggccggcgccttcggaagcgacgtctggcgggccgcggggcacgagggggagagccgggaagcgtaaatccccgaagcgcgcggagatccgattagcgcgcggctattcattaggctgggggcgattgaattaggtccctgggcgcggtcgccggctggggcacagagacctccctcaactggagggcagcagcagctcacccccaccccagaatcagtgttccagaggacagctgggggcagggggttaggaacaatcccactccctcctggaagaggtcctgaccccccaccccacccatctgcctgtacgggtccctctgctatcgactggggcgagttcttttcatgagggccttgcctggtgcctggagggaacagggtgtgggggaaaggtctgtgtgttcccccctcacctcccctgctcagcggtgtggcctctggctctggggaggatcgggaagccccagggtccgtgccttggagtggggggacagccttttctctgccacagcttctgcctttgggggcttacccttcctaggagcagaactgttgtggaggggaagaggacggtgaaggttccgaagggaagggggctgcccccactgaaaacgaagcttccagtcacagccccttcattatttatcaggacccaggggatgaggtggcaggggagggggctgcatggagggagtgccctcaccctcgtccccagcgcctgccccctcccgaccaggcctgggctgaggcccagggtaagggggctgaggcaggccacagaggagcaagacttgtcaggggccagacctgggtaggaggattgtcctccaggcacacacggcccccagccccccagcctgtcgaactgggctctcccagaaggtccccggctccagcccaagcagggagccaggttgggggtgtgggaaggcagaagtcccagggatcctgggggaggctcaggttgtacctgcaggccacagtctcctcgacagacctcggacgaggttgtaagtgttttaaagaaactagagcagcagagaagagagactcagaagcccgtggcacggctttctcggcgtcccctccagcgagggggtctccattgctgcagttgctggttaccttcagcatttatagccctccagtgagttatacctcggagttctcacagagcagcatgcgcctgcggcaaagccctcacctccagcccctggaccacctgactgctgcctcccgcctggcgccaaacacggccaccgcctcttttgttaacaggacagttgatccattaaattaaaaatcattcaatagatt

SEQ ID NO: 461277 - DNA, 956 bp, Homo sapiens
  misc_feature (10)..(10): n is a, c, g, or t
  misc_feature (12)..(12): n is a, c, g, or t
  misc_feature (14)..(14): n is a, c, g, or t
tcaggatagnangnaggcctgcgccgagtcaagcagcctactgacaaccacctccttctccctatcttcttttctcaataaatatgaagggagctagaaactcaaagcccttgttcactagaagtaaggagccccctgaccccttcaaccaaaaatactcttttgtctttgtctttattcccgcgttcatccccctttgttcagtccaacagggattgggaccatgctgggccactgtcaacactgcccccatagcctctgtgctggcagtagggcggggaccacccctagccacagtggcagtgatgtttgttattgcagatctccttcatattgcagaggaatgtctctcacattctcacattgaactctcccacaaaagacatcagagatatgacattttagtggggccctcatcttgtacgtgcatcaggcccaaaaacttaatttcacctctgactgtgatcaacatattgatgaagactggctatgtggatgctggaagatggggaaaacttgtttcaagctgaacattatccttgccattagcttgcctaaagaggctggattcatctgggcagttttcactgctgcaagttaggcaccttatttcgcaaggtgcaagtagcatggaagagaaaagcaaagttcatagacagaacttccaagaacaaagatctctgaattgggatgaaattctaactgccagatttgctccctgtgtctctcttgatatgttttctacttattatggagtgacagttgttgtggatgggaggattgaaaatgggaagaactaatcaaagatataatgttgtggaaaggactgataagctacacaaacctgtgtcatattattctttttcttggagctcagcatgagagcaggcaataacaggagaataacttcaaaaaaatctttaaaaccagactcattgtcttcattcctaggactt

SEQ ID NO: 461278 - DNA, 1916 bp, Homo sapiens
ggacccattcagtcagaggcagccagcgggacctgcttcaccgagcgcagcgaagccgagacccgggctggcccctctgctgcccccggagcgggccatgccgccgcgggagctgagcgaggccgagccgccccgctccgggccccgacccctcccccgcggcggcgtagcgcgcccccagagctgggcatcaagtgcgtgctggtgggcgacggcgccgtgggcaagagcagcctcatcgtcagctacacctgcaatgggtaccccgcgcgctaccggcccactgcgctggacaccttctctgtgcaagtcctggtggatggagctccggtgcgcattgagctctgggacacagcgggacaggaggattttgaccgacttcgttccctttgctacccggataccgatgtcttcctggcgtgcttcagcgtggtgcagcccagctcctttcaaaacatcacagagaaatggctgcccgagatccgcacgcacaacccccaggcgcctgtgctgctggtgggcacccaggccgacctgagggacgatgtcaacgtactaattcagctggaccaggggggccgggagggccccgtgccccaaccccaggctcagggtctggccgagaagatccgagcctgctgctaccttgagtgctcagccttgacgcagaagaacttgaaggaagtatttgactcggctattctcagtgccattgagcacaaagcccggctggagaagaaactgaatgccaaaggtgtgcgcaccctctcccgctgccgctggaagaagttcttctgcttcgtttgagcagctatggctgcatagcaagtagtaggcaggaggccaaagacttctgagacctggggcacccgggcctttgcggcagctactggcagggcctggccacctcataggactcagttcccttctgaacactcgggggacatgggcctctaactgcccactctgatatgcctgggtgagcctaggagggaaggctctgatttggatttctccagtcaaagctcacagaaaaaaacctggcactttgatcatccctttcctcaaggtcacacagcctagaagctagagcagtgcagagtctgcaaataaaaccttaagtctgtgaaggcgtgcgttgtctctgtcatttcctggagcccactcctccctcagaaccctcctcaaggcctaactgcctggctagagacagattggggaccaaaggactgaggctagattgaaaggtgggggctggactgggggtgggggcagtgtaatgggaactggactgtggggatgccccatttctcctcatgataaccagctttcaatacctccctcctccagaacagatgcttacctgtatcagtgtcttcactgctcccttggcacactgaggacactgggcgttctgcgactgactcagcctgcatcttcccagctaaatgaagagagagagagagccacgtttaagttccttttgctcccacaaggtctggggctcaggcaatgtttgctgctgaccctgaaatgcttaggaataaaaagccagccagtgagccctggagaggctgggaggattaagtttagctccagatttggagcttgaagactgaggcctaatgtcaacagcttgctggaaaggacctctaaggctctggccccaagcctgtgcaggacaagagggattcgcttctgcttccgaatccactggttctctttggttctgtctctttctctagaatatggtacctacttttctggggtagtttttttgtttttatctctctgtctgtttccttggcctcttttcccttttctctgctcttttaaattatatttaaaggaatatttattatatgaattggataaaattatatgtttcttacatatacattcttacatatgtcctt

SEQ ID NO: 461279 - DNA, 2437 bp, Homo sapiens
ggacccattcagtcagaggcagccagcgggacctgcttcaccgagcgcagcgaagccgagacccgggctggcccctctgctgcccccggagcgggccatgccgccgcgggagctgagcgaggccgagccgccccgctccgggccccgacccctcccccgcggcggcgtagcgcgcccccagagctgggcatcaagtgcgtgctggtgggcgacggcgccgtgggcaagagcagcctcatcgtcagctacacctgcaatgggtaccccgcgcgctaccggcccactgcgctggacaccttctctgtgcaagtcctggtggatggagctccggtgcgcattgagctctgggacacagcgggacaggaggattttgaccgacttcgttccctttgctacccggataccgatgtcttcctggcgtgcttcagcgtggtgcagcccagctcctttcaaaacatcacagagaaatggctgcccgagatccgcacgcacaacccccaggcgcctgtgctgctggtgggcacccaggccgacctgagggacgatgtcaacgtactaattcagctggaccaggggggccgggagggccccgtgccccaaccccaggctcagggtctggccgagaagatccgagcctgctgctaccttgagtgctcagccttgacgcagaagaacttgaaggaagtatttgactcggctattctcagtgccattgagcacaaagcccggctggagaagaaactgaatgccaaaggtgtgcgcaccctctcccgctgccgctggaagaagttcttctgcttcgtttgagcagctatggctgcatagcaagtagtaggcaggaggccaaagacttctgagacctggggcacccgggcctttgcggcagctactggcagggcctggccacctcataggactcagttcccttctgaacactcgggggacatgggcctctaactgcccactctgatatgcctgggtgagcctaggagggaaggctctgatttggatttctccagtcaaagctcacagaaaaaaacctggcactttgattttcatgggatggtcctaacagggtcagtcacctccgagcagtttgggaacccagtttcttgtcctgggccctcaggtcagcctggctgaattaggacccttccttggcacaggggtgagaaagagcttggggaacgcttggcattatggagggctggaaggggctcaaccccgatttggagagaagtttgggatggagtgggcgagagattgagagagcgagcaggaaaagaggtcttggagcctgggactgatggtggataaggcctggaaagaagatgacgaggaggaggagagagggaagtggggtggatgaggagcaggctgacacctgggctgccctcaatccccaaggccagggagggcggggctggcccctgggaagaactgggtctctgggctccctaggcactgcccaaactggctgagccaggagtggggcaggaagtgagagtcaaggcccagcaaaaggagggggaggagctgcaaattagaacctgaaggaggaccgggttggggatcatccctttcctcaaggtcacacagcctagaagctagagcagtgcagagtctgcaaataaaaccttaagtctgtgaaggcgtgcgttgtctctgtcatttcctggagcccactcctccctcagaaccctcctcaaggcctaactgcctggctagagacagattggggaccaaaggactgaggctagattgaaaggtgggggctggactgggggtgggggcagtgtaatgggaactggactgtggggatgccccatttctcctcatgataaccagctttcaatacctccctcctccagaacagatgcttacctgtatcagtgtcttcactgctcccttggcacactgaggacactgggcgttctgcgactgactcagcctgcatcttcccagctaaatgaagagagagagagagccacgtttaagttccttttgctcccacaaggtctggggctcaggcaatgtttgctgctgaccctgaaatgcttaggaataaaaagccagccagtgagccctggagaggctgggaggattaagtttagctccagatttggagcttgaagactgaggcctaatgtcaacagcttgctggaaaggacctctaaggctctggccccaagcctgtgcaggacaagagggattcgcttctgcttccgaatccactggttctctttggttctgtctctttctctagaatatggtacctacttttctggggtagtttttttgtttttatctctctgtctgtttccttggcctcttttcccttttctctgctcttttaaattatatttaaaggaatatttattatatgaattggataaaattatatgtttcttacatatacattcttacatatgtcctt

SEQ ID NO: 461280 - DNA, 3209 bp, Homo sapiens
ttcaagatcttttgaaaatcagccgaaagatgaggaaccgcctgccaccaagaggcactgatttcactgggagcatccctaagttggtttggtccctccagtgtataacgctctgaggctaccctgatagtcctcagagacccaaagcccttccagaacaccctgggaatcctctctcaacacaccccaccaggcagaaaacttaaatcggatcttaaagcagaaaacaaattaaactggcttcaataataaggggattatctcatgtaaaatgagtccacaagcggagcagccactggagaggctcaaagatgcctaggacctaggcgtccccttttttctcagccccagctcacttccttctctgtgctgacgctgctgtagccattctaagcatcgtgttcaggcaggatctccagaggcagaaaaggataatgagaatctccctagaggtggaacttcccaatagggaagaaggagacttgctggtggtatacacaggtctaacatttgccaactatggaaatggaggacaagccacaggtcaagctagcctagctatactgaagatagttgtgctttctgaggatgggactgaatgcaaacgagtgatattctataagaaaaagagatgtacgttacttttgacaaacttcatctgtacttatttcaggaaaaacaaaattaagcagcgaagctctttagagcaacagaggcttttaaagagagttctctcagatacaagcagaataataacagtcaaaagaatccagttgtattcacatttggacacagaacaaataaaaagggattggcaatgtagttccaagtggaaaacatcacaaagaagaaagctagagaatatacatttctggagagattctggcaaaagctaagatattctgcttcccatgatctaacagataagatataattttgcttctcctttccattttcaaaatacttcctcatttgtaatcatttattgccaataaatgggatctatccatctatctatatatttatttataaacatgtagccaatcacatagggtgaggttgaacaaggaaggctgacatagaaacacagactaagagagagaaataggtgacaaaatgcattagaggagaggattacccttgggtttgttttcatcattttttttgtctgttgactaaaataacatttttctgtcttgaatataagaccttgtctgggggtcacagctgtatttctttctagtttaagtgacatattcacttttatttcttattttaagttgacctggaatcttataacactcctatttacaggaaattgtaaaatcaaacacagaaagctcttttgtttgctattgatacaaacttattcaaagcatcatttggtggcattttaaacatccagttattatttttaatataactgtatatttttaatataactctatatttttaataatatgctccttggaaatagatgctttttttttttcaagtttggaaacatacaagatatttacctggaactcttctgaaggatcttggttttcaatttgataatgtactgaatcatactgggcatctgcacactactgacaaaagaaaacattagagcactctcatttcaggatagttctgactattgcccttcagagacattttggagacacaataatggtgtctaataatttcagccaaactaggtatttatcacagcttcaaacaggcagtaattcacttatatttattttctcagaatgtaacactggtctgaattaaacattatgatacatacctgtactgctataaactattttttcaaattttcctagtcaagatttctttctcaaagaagaaaattagataggtgcagcacaccaaatgagatgaactttgtcctcaaagaaaattggtttttccttttcaatttcatttcaaagagatctgacaagtgtggctttgaacaaactttaacagcacaatatcctttgttgtcaaacgttcatgtagagacaacttaaatgcaaagtggataaggttacagaataagtccatgcccaatttaattacagcattttgattaacacagattgtaagtagtttgaactaagaattttaagttgttcatcttgaatattacaaaggctaaccagagacgaagtataactttaactcagaaactgccagaaaacactctgattaaccaatttagatgtactatccaattaaggatctaaatatctttggatcacagaaattcatgtttattgataagataaaatatttattacccagagagctgaattagcaaagagaacagctctaatcaggtactaactttcagaaaaaagaagaatgttggttgaaattaaaagtgtgatacttacgagcaaacctggcttgtttattcaaaggttatgcttcttgccagcaaagtcagtatctttgaaagcttggagttaataaagtctgtggctaagtttctaaatgggttcaatagataatgactgtccatagcaatagctaattgagaataatgactgggcaagaaagggcgggcatagagcagagatggaagaaaacttccctgaagtaaaggcctgaaaatacctgcaagggcaatggggaaaaaccccaaagcctttgtatttactgaatggtcattagctgcccaaattttttatttttttctctttggatgaatgtaatgttgtttctcttaaaaatataaggaaggcaaggaaacattagaggctcttgtaatgtattttctagtacttggaaaaatgcctatacagagtaaacaatcaatggatttagaacttctccatcttaaaaagcatgaaaatggaggctattccaatttttctttgtaagatttaattttctattaatttgtttttggggttatttgaggcatctcaaatagatataaaatcaggtctaagctatgcaaaggttgagagtaacagtaaggtgattgttatttttcatttgtaaaaattttaaatcattgtaaatacaaagttttgtactcatggattttaataggtagaatataatgtttgatatagtaaagttgtatgaaagagcatgctatattttacccatttaatgttatcaaagacaacgaagtttcaataccttttcaaaatgggattagtcagatagaaccacttgcctgttggcaattttatttaaataattat

SEQ ID NO: 461281 - DNA, 4124 bp, Homo sapiens
ccaaggctgtaggagttctggagctgctggctggagaggagggtggacgaagctctctccagaaagacatcctgagaggacttggcaggcctgaacatgcattggctgcgaaaagttcagggactttgcaccctgtggggtactcagatgtccagccgcactctctacattaatagtaggcaactggtgtccctgcagtggggccaccaggaagtgccggccaagtttaactttgctagtgatgtgttggatcactgggctgacatggagaaggctggcaagcgactcccaagcccagccctgtggtgggtgaatgggaaggggaaggaattaatgtggaatttcagagaactgagtgaaaacagccagcaggcagccaacgtcctctcgggagcctgtggcctgcagcgtggggatcgtgtggcagtggtgctgccccgagtgcctgagtggtggctggtgatcctgggctgcattcgagcaggtctcatctttatgcctggaaccatccagatgaaatccactgacatactgtataggttgcagatgtctaaggccaaggctattgttgctggggatgaagtcatccaagaagtggacacagtggcatctgaatgtccttctctgagaattgctactggtgtctgagactcatcactgtgtggagctggctgaacttcaagaaactactaaatgaggcatccaccactcatcactgtgtggagactggaagccaggaagcatctgccatctacttcactagtgggaccagtggtcttcccaagatggcagaacattcctactcgagcctgggcctcaaggccaagatggatgctggttacaagttcccccatctacagaactgcgtcactgtaggggagtcccttcttccagaaactctggagaactggagggcccagacaggactggacatccgagaatcctatggccagacagaaacgggattgacttgcatggtttccaagacaatgaaaatcaaaccaggatacatgggaacggctgcttcctgttatgatgtacagatcatagatgataagggcaacgtcctgccccccggcacagaaggagacattggcatcagggtcaaacccatcaggcctataggcatcttctctggctatgtggtgagaaactgtgctcctcctcctctgttccccagtgaggatgggagcactaaacgggatgagggaggccaaatggcaggggatttaggctttgcaggcacaatgactctgtctttctgtggtcaccaggacaatcccgacaagacagcagccaacattcgaggagacttttggctccttggagaccggggaatcaaagatgaagatgggtatttccagtttatgggacgggcagatgatatcattaactccagcgggtaccggattggaccctcggaggtagagaatgcactgatggagcaccctgctgtggttgagacggctgtgatcagcagcccagaccccgtccgaggagaggtgatggggaagcagtagcctgggggtgaacacatatgaacacaagggcagtgtagtgatggacaccccaagtatcctaacttgataattaccatatttgcgtgtaacaaaatgtcacttgtacccaatacatatgtacaaatattatgaaatgataaaaacttttagaaagtaaagtgcttggttgggaggctgaggcagatggatcacgaggtcaggagtccaagaccagcctggccaagatggtgaaaccccatctctactaaaaatacaaaaattggccaggcacggtggcaggcatctgtaatcccagctactcaagaggctgcggcaggagaatcacatgaacccggggggcggagtttgcagtgagccgagatcgtgcccctgcactctagcctgggtgacagagtgagactctgtctcaaaaaaaaaaaaaaaaaaaaagaaagaaagaaaaagaaaaaaagaaagtgaagtgcttggaacaaggcctagcacatagtaagtactatataatgtctattttgatgaggctggaaggattctatcctgctgtttggtatttgaatcagagtctgattcccgaccagaagaacagaggagggatttgagccaaaggacagagcccgtgtgccacagagttcgcagtgaaaataaagggaaaaagaaagacccctataaagccaggcttatagaaataggctcagatggggtctagtggactttgatgtgtgtgtaggaaaatattaaggtgggatgtgtggatcagtgtcctagcacattcccgcagggtgtaagcctggcactatcatacctctggtacgtacagaatacatcatacagaaaattatgggaaccactgagcagtgaggccatgggggaacccctgctgagaaaatcctgtgtgcccagctctgagctagccctgctgtatatgatttcattttatttaccgtaagttaaatttggcaattttatccccactttacagatgggaacactgaagtttggagaagttaacacattgtttagggttatggttttcagtctatttttctcttttctccccctgtatcttctttctccttatctgtctctattgttattggagtatgaggtgagcctagtctcaatcttttgtccacctgctcctccaataaatgacttcagagagagctgtaacctcattcatgtccccagttttctccttttcccttgacctggatcaccgggggtgcaaatgaggagatacaagggtgatggaagtcttaatgccaatttcacattattccaggagatgactacacactctaatcccttctctctggccttcatcttttttgcaggtggtgaaggcatttgtggtcctggccttgcagttcctgtcccatgacccagaacagctcaccaaggagctgcagcagcatgtgaagtcagtgacagccccatacaagtacccaagaaagatagagtttgtcttgaacctgcccaagactgtcacagggaaaattcaacgagccaagcttcgagacaaggagtggaagatgtccggaaaagcccgtgcgcagtgagacatctaagagacattcatttggattcccctcttctttctctttcttttccctttgggcccttggccttcctatgatgatatgagattctttatggaagaacatgaatataagttttgtcttgccttggttattagcacaaaactttaccatgttagatgttgaaagaagaaagggaaggaatgagagagagtgaaaaggagagggtaacagaaaaaaaggaaagaaaagtaagtcagggaaatattaaaactgcaagggaaagcaattgaaaaagaaataaagtagggaaagaaggagagaggaagcaagggaaggaggaagaaaggaaagaggagatgaaagggggagaaaagatagaagaaaaataattgaagggagaatcagaaaaataaagagaagaaaggaaagaaataaagagagaaagagaaagaagaaagagcaaaagaacacaagaaagaaagagagggagaaagagagggagaaagggagagaaaaaaattgtaaaaataaaaatagtaaaagaaactgataaagaaaagtaatggaagacaggaagaaaagaagagaaggaagtaaagaggaaaacttataaatattcccacagatagacaaagtcaagcataaaactggagcttgagaaggaaatgaaaggccgtggcaccttcttataccctagaagaagacctccatacaggaagacttgtgtgtggggttgggacattagaatcatccacaagtcaccccaaaccttggaactgtcagggtcagaggggaaccaccatttattaagcatttgccatgtgccaggcactaacccagatgcattataaataccacgttgtttcacctgtgtgtggcatctacagaccttagatcatagctgtgagaacaacgtaagcactgccaaagttatcagctacccatatctcatgtttttgatgttatctactcttcctagaatcaaatattaaaataattttaaaaccaagatcctgacaatagtctttgggaaaaacaaagaaaggcagggatgaggtaagtgtac

SEQ ID NO: 461282 - DNA, 316 bp, Homo sapiens
agttctgctgggaaggttggaacagaaaaagggggcaggagccaagggagacatagagtccaaggagagttcttaaggatggaaaatgctgagaggaagaaagaagaataaactgatgctacagaagaaggaggaggtaattacaggagcaaagtccatgagaaggctgcaggcaatagagtccagaacaaaagtgcggagctcgctggcctgagagagcaggagggacagttcattcattgaaaaatggacgaggaaagggtggggcggtgacgtagagggtgatggtagatgtggcgggttttaggggctcttt

SEQ ID NO: 461283 - DNA, 2131 bp, Homo sapiens
agttctgctgggaaggttggaacagaaaaagggggcaggagccaagggagacatagagtccaaggagagttcttaaggatggaaaatgctgagaggaagaaagaagaataaactgatgctacagaagaaggaggaggtaattacaggagcaaagtccatgagaaggctgcaggcaatagagtccagaacaaaagtgcggagctcgctggcctgagagagcaggagggacagttcattcattgaaaaatggacgaggaaagggtggccatcaacgtggggctcacgtcactggatctgagctggaataacttccacacaaggggagctgtggccttgtgcaatggtctccggggtaatgtgaccctgacaaagctggatctctccatgaatggctttgggaatgaggtggctctggccctaggggaagtcctccgactcaaccgctgcctggtctacctggatatcggtggcaatgacatcggcaatgaaggggcctccaaaatcagcaaaggactggaatccaatgaaagcctcagagttctgaagcttttcctgaatcccataaatatggatggggctattttacttatcctggctatcaagaggaaccccaaatccaggatggaagagcttgatatttccaacgtgctggtgtccgagcagttcatgaaaacgttggacggagtgtatgccgttcacccgcagctggacgtggtattcaaggcagtacaaggcctctctcccaagaaaaccatcttcttgttgacaaaccccatgaaactgatccagagctatgcagaccaacacaaaatcacgatcgtggacttcttcaagagcttgaaccccactgggacaatgaagatgtctgtggatgagttccagaaagtgatgatagagcaaaacaaggtccccctgaaccagtaccaggtcagggaggtgataaagaagctcgatgagaagacaggcatggtgaacttcagtttcttgaacacgatgaagccatagcaacaagtctggtctagaaagaagtctcggcgagaggagtcctcgcaagtcggatggtggcagggaggagagcaagaggtggctgaaatctcgatggacagatgctgtggcaggggctgggcacaagcaaataaagtctggcttggttctgggtgtcttgggctgctggtggtgtgcccgtcaccagggggccaccttctgcttttagtgaccaccaggggacatgtcaatgcagcctcattaagagctgcacagacaaattgggaacgtgatggggttgctaggcagcagggaaagagcctcagggagcaggtcagagcatgagggcagttgtcacagtgattagaacctgagtccaggggagacttccttggtgggaggcagtgacagggggaacagatgctgagggaatgagggcaggggcctttaaaaagcaaagaaatgctgtggggtcacaaggagggagccaggacaggagaccaagagagtgggcatctcatcctggccacatgaccttggatccccagtggctccccttgaaaatggagcagctgaaataaagccttcccagtccggtctaggagtctatcattctgcatttcacctttaaattccttgagaaactggggagacaggaacagcttagcgaaggaataaaaggaatagccaagaacagcattcactgattaagtgggtggaacaggcacctttgggagttttgattgatcttaccagacaccattgtagattagcaaggcaggaactttcttgtgcccctctgcagccccatgtagtgcttggcacatagtagatgctcaataaacacctgtgaaatgaacgagcacattcaccggtgattgtttggggtaagtggtggaaagttgggaaagtttagggggcgagggaaggctgatatttggtaacccacgctttggcgcagcagcgaagggtctaggaaccaagtcactatctcttgtgtttcacttggcttcaccaagggtggaggtgaacaccaagacccctctgcacatgcagcggaattattggaaataatttatgtccccactcatgtgccgtattccccccctttctcttccttattaaaatcttagcctttatgaggttt

SEQ ID NO: 461284 - DNA, 1338 bp, Homo sapiens
cgcctcctgcgtggaaaagagaaggaagcccgaggtggtggcgctgcgtctctcagttgcagtgtgaggtatgagacaccacacctagccctgaagctgctcttggttgggggtcatcccacacctaagaaagaaagatgatggctctaaagaagatgaaaaagtcattggtgtcaatcaactctaggctccaactcattatgaaaggcagaaagtaggctgggcaccgtggctcacgcctgtaatcccagcactttgggaggccgaggcaggtggatcatgaggtcaagagatcgaaaccatcctggccaatgtggtgaaacaccatctccactaaaaatacaaaaataagctgggcggggtgaaggggcggccgggcagaggcgcccccccacctcccggatggggcggcagccaggcggaggcgccccccacctccctccctgacggggtggctggccgggcaggggttgccccccccacctcccggacggggtggctgccaggcggaggggctcctcacttgtcagacggggcggctgccgggcagaggggctcctcacttctcagacggggtggccgggcagagatgctcctcacctcccagacggggtcgcggccgggcagaggcgctcctcacatcccagatggggtggcggggcagaggcgctccccacatctcagacgatgggcggccgggcagagacgctcctcacttcctagacgggatggcggccgggaagaggcgctcctcacttcccagactgggcagccgggcagaggggctcctcacatcccagacgatgggcggccaggcagagacgctcctcacttcccagatgggtttggagggctcagaggaagacaagaagatgtgggaaagtttggaactaactagagacttgttcaatggctttgacgatagtgatatggacaatgaagtccaggctgaggtggtctcagatggagacaagttccagtaccttcttcctcagttccatctaagatattgtcagaatggcatttaccatccatatttttaccagtattctgatcacaaccacctaactaatccctatgatttagaatctctcaaaagctcagcttcttctgagccctcactagaattgcctttaaaactccattcatggaaatctaagctctttctaacctgcttctccaaattcttacagcctctacccattactcagtttgaaagtcacttgcttattttggggtatttattataacaacaatcctacttctaataccaattttctcatttagtccattttgggatgcaataacaggatgcctgagactaaggaatttataaag

SEQ ID NO: 461285 - DNA, 1172 bp, Homo sapiens
ccccaggtggaggtgcttaccagccccgcgccgtgcgcccgcactcctcagcccttgggcggttgatgggaccaggcgccttggagcaggaggcggcgttcgtccgggagactcaggccgcgcaggagcccacggcgtcgtcggggcggggagactcaggcatggcaggctacaggtcccaagccctgccccgcgggggagcagctaaggcccagcgagaaatcgagcgcagcgccgctgctggccaggatgctaagcccctcactaccaggggccggcagggccggctggccgctccgagtgcgcggcccgccaagcccacgcccacccggaactctagctggcccgcaagcgcagcacgcagccccggttcccgcccgtgcctctccctccacacctccctgcaggctgagggagccggctccggtctcggccatcccaggaaggggctcccacagtgcagcggcgggctgaagggctcctcaagcgtggccagagtgggcgccaaggccgaggaggcgccaagagggagcgagggctgtgaggactgacagcacgctgtcacctcgtctctacttaggtgaatgatgcctttggcctgcttatgtcttccatagccacaatgaatacagttgcagaaactctcactctttatggaaaatagaagggaatatgtacaagaaacaattactgtatgcagataaggcagatggtgtctttgacatttcatcaaggcagcagcatctgaaagtttttcaagaaactgccaaactgttctccagagtatttgtaccattttacgtttccaccagcaatatacaagtggatctcactctgtcacccaagctggagtgcactggcatgatattggctcactgcaacctctgccttctgggttcaggtgattctcctacctcagcctccccagtagctggaactacaggcatgcaccaatttttgtatttttagtagagacggggtttttccatgatgcccaggctgttggcttttactttgcctttccataatcatcttgtatgtgtgagatacatacatatatatgtgtatatatgtatacataattgtatatgtctatatatataaccttattatatataattttataatataatcttcatctaattttgatggaaattacattaaacttgtgt

SEQ ID NO: 461286 - DNA, 2227 bp, Homo sapiens
gtcttttaccattttattccaaagcaaatagatgaagtctggcgtgaaatgagatggatcatggatgctctacagtatgcaagatacaaacaaccagtttctggcttgcccatcactaagctgatagacccctcagatgagcagagcctaaagaagatcaattctacatcatcatcacatatagactgtcttccatccccacccccatccccagagatgcacagaagaaagacagtgagtgattcacagccctgctctgatgaagaagcctgctcagaagtcttcctccccaccaacagtgactacgactccagcgatgccctgagccccagagacctggacctggtctacctatcatctcacgacattgcgcagcagacccttagcggcctaagcggcagcgcccccgacgtcctgcaagtgcacgacgtgaaaacccctctggggccgggccaggatccccagggcgagggcccaaatcccgatcactcatgtgccgagtttctccatagcctgaccctcacggggttcacacccaagaaccacgccaagactgtgtccggtgggcggcccccgctaggcttcctgggaaagcggaagccaggcaagcacccccactatggcggcttcagccgccatcatcgctggttgcgcatccacagcgagacccagtcgctatcgctctctgagggcatttatacacagcacctgtcccaggcctgtggtctggcccaggagcccaaggaggccaagcgggccggccctgcccttgatgatcccaggggcctaactctggcccacgctgccagccttcctgaggagcggaacagcagtctccaggacgcgaggccttccgtccgccgcctctacgtggagccctacgcagcggccgtggtggcccaggacgaaaaaccatgggcaagcttgagcccgccctctggaggccgcatcaccctgcccagccccactggccccgatgtgagtcaggagggccccaccgcctctcccatgtcagaaatactcagcagcatgctttagggaggcccatcccggctgtccacccctccatggctgctacctgcgttttacatcacccttacccccatcctgccccactgtgtacccactcattttcaagcgttttgaatgttataaatacaaaggttacaagttcaaggtcctctttttttggaacagagtggtgggtggaggccagagttgccagtgccattcccacttcagcctagaaagggcatgggggagttgtgtcaacatggaatacgacatacagtgactcaaacatgccaccctgttggtggcacctatgactgaagctggccatcccaaagagagaccctctgttctgcagctggttctgtaatctgacccctagtttagggctctttcatgaatttgtgattgatgaagagaagttctataaatgaaaataagattagcatcatttctccctccattccaaaccttaagaagagtttgagggaaagacaccaggttgtgtctctagggcacggggtcaggtgggcttgaccttggttccctttctccaagagaaggtatgtctgcaacgcatttaagttgcctagttatgtcaacaagacacagaattcactggcttctgaaaatgtacacatgttaggaaggtgatgacatttttctacagctctctcaacttcgtatgtagcagagctacagcaaagagtgtgtatttcttggtatatgtgcttattaagctatcacataccaattagagaaggtagctgtagattaacaaaggaacactctctgagaatttaaactgttgcatggtcactttacaaagtctaaatatttttccagatgatttaatgaagcaaacctggacttttttcttcaaggtcgtatcttcaaggaaatttttaaaatagctatttggaaagcaatggtatctcttcataggtaatagggtgagcaaggaaaaaaactgttttctttgctggtcacctctcataagatgttcaaacacatggcttatgactgttaagctaaacttcaatgcggccttacaaacaacaagggtagtgtatttgaaaccatgttgtaccacttggaaacttattctaagatcttaattcagactttttctgaggtgttgaactttgccattagcaaaaagtatttttagaaaaatccattgactgtttatgaagcactgattttgccatatttc

SEQ ID NO: 461287 - DNA, 2248 bp, Homo sapiens
gagtgccctagacaagccggagctgggaccggcaatcgggcgttgatccttgtcacctgtcgcagaccctcatccctcccgtgggagccccctttggacactctatgaccctggaccctcgggggacctgaacttgatgcgatgggaggctgtgcaggctcgcggcggcgcttttcggattccgagggggaggagaccgtcccggagccccggctccctctgttggaccatcagggcgcgcattggaagaacgcggtgggcttctggctgctgggcctttgcaacaacttctcttatgtggtgatgctgagtgccgcccacgacatccttagccacaagaggacatcgggaaaccagagccatgtggacccaggcccaacgccgatcccccacaacagctcatcacgatttgactgcaactctgtctctacggctgctgtgctcctggcggacatcctccccacactcgtcatcaaattgttggctcctcttggccttcacctgctgccctacaggtctggcccccgggttctcgtcagtgggatttgtgctgctggaagcttcgtcctggttgccttttctcattctgtggggaccagcctgtgtggtgtggtcttcgctagcatctcatcaggccttggggaggtcaccttcctctccctcactgccttctaccccagggccgtgatctcctggtggtcctcagggactgggggagctgggctgctgggggccctgtcctacctgggcctcacccaggccggcctctcccctcagcagaccctgctgtccatgctgggtatccctgccctgctgctggccagctatttcttgttgctcacatctcctgaggcccaggaccctggaggggaagaagaagcagagagcgcagcccggcagcccctcataagaaccgaggccccggagtcgaagccaggctccagctccagcctctcccttcgggaaaggtggacagtgttcaaggttcggatgatggctgggggtctgctgtggtacattgttcccttggtcgtagtttactttgccgagtatttcattaaccagggactttttgaactcctctttttctggaacacttccctgagtcacgctcagcaataccgctggtaccagatgctgtaccaggctggcgtctttgcctcccgctcttctctccgctgctgtcgcatccgtttcacctgggccctggccctgctgcagtgcctcaacctggtgttcctgctggcagacgtgtggttcggctttctgccaagcatctacctcgtcttcctgatcattctgtatgaggggctcctgggaggcgcagcctacgtgaacaccttccacaacatcgccctggagaccagtgatgagcaccgggagtttgcaatggcggccacctgcatctctgacacactggggatctccctgtcggggctcctggctttgcctctgcatgacttcctctgccagctctcctgatactcgggatcctcaggacgcaggtcacattcacctgtgggcagagggacaggttatcaatagtctggctgtctatcgtcatcgtgagactgactttggtgtaggagttcgagaccaccctggccaacatggcaaaaccccatctccacaaaaattggataatttgataattatcattattgggtttctgagacgttacacatttaacgttctcttctgcacaagttgcctttgtgtgagtatactaactttctgtagaggtatacttgtaatcacaaataagaataaattatataaaacaattcacgtttctggacttcattatgaatatgtggttttacccaaaaaatcagggaaatgatttattagcataagaattatgaaaatgtctgccatttacattatgaaaattaaatagagaatcaatgaaaagtgtgtctgggcagggtaattttgaatgacatcattcaaagtgcatgttcccacttgcaactggagagagatcagtatgtcaaaagtctgtacttggtaagaatttggctgctaagttgtgccataatttgtcttttgagccttttttcctttggggctgaggtccatttgtatgcacacaaagaaaagagtttcttcctttcgaggaaataaaattggcctgaaagacgtcattactctacggaggcatgtggaaacaaaagttagagctaaaatccgtaagaggaagctgctcgggaggctgaggcaggagaatcacttgaacccgggaggc

SEQ ID NO: 461288 - DNA, 975 bp, Homo sapiens
ctcggcggacagcgatgctcagctggctgcggccgagtcatcgcctagcgctggcagggccgctgaccgaccgacggaggcgccgattggccgattgtccactgcgcagaaggagcagctgctccgcgccccgccgcgccgcgctgaggccgagccgagggctgccggagaaccctgcaggtgtcactcgggacgcggaagtgcgcttgccgaggtttgccttacaatacgcttgagactccccgacaagcgtaatttggtcgagttcgacgggaaagtactctccccaccccagcgccggccgcgtagtccgaggttactgtccccggcgcgtcctctgttgccccagtccagaggctgcccttgaacccgggcgcgcacgagcgcagggcatccgaggcgacagcccctggcacggcccgacctgtacccagcctggcaggaagactgtaatcgtgggaatacagctacctacccaggcaatatgaagattttatttgtagaacctgccattttccttagtgcatttgctatgactttgaccggtccactgacaacgcaatatgtttatcggagaatatgggaagaaactggcaactacactttttcatctgatagcaatatttctgagtgtgaaaaaaacaaaagcagcccaatttttgcattccaggaggtaagaaattacaatatccatagtatttaataaaatgggaatgtataccgggctttgagttaaagaggaccgtgaactcatcatccattggtctctctagggcggccatcaaagtcctaaatcccaaacctaatggcctttactgggaactcacctcatttgaagtttcctgacacctttcaaatctgcctcttcttcttaaaacaccctcctgctctgtgacactagctcttctcctttctctcggaaaatttcaccacagtgtcatctcttctgtggctgtctccttgctttgtcctaaa

SEQ ID NO: 461289 - DNA, 3484 bp, Homo sapiens
  misc_feature (1144)..(1144): n is a, c, g, or t
  misc_feature (1146)..(1146): n is a, c, g, or t
  misc_feature (1148)..(1148): n is a, c, g, or t
  misc_feature (1156)..(1156): n is a, c, g, or t
ctcggcggacagcgatgctcagctggctgcggccgagtcatcgcctagcgctggcagggccgctgaccgaccgacggaggcgccgattggccgattgtccactgcgcagaaggagcagctgctccgcgccccgccgcgccgcgctgaggccgaggtccgcagggccgcggggaagccgagggctgccggagaaccctgcaggtgtcactcgggacgcggaagtgcgcttgccgaggtttgccttacaatacgcttgagactccccgacaagcgtaatttggtcgagttcgacgggaaagtactctccccaccccagcgccggccgcgtagtccgaggttactgtccccggcgcgtcctctgttgccccagtccagaggctgcccttgaacccgggcgcgcacgagcgcagggcatccgaggcgacagcccctggcacggcccgacctgtacccagcctggcaggaagactgtaatcgtgggaatacagctacctacccaggcaatatgaagattttatttgtagaacctgccattttccttagtgcatttgctatgactttgaccggtccactgacaacgcaatatgtttatcggagaatatgggaagaaactggcaactacactttttcatctgatagcaatatttctgagtgtgaaaaaaacaaaagcagcccaatttttgcattccaggaggaagttcagaaaaaagtgtcacgttttaatctgcagatggacataagtggattaattcctggtctagtgtctacattcatacttttgtctattagtgatcactacggacgaaaattccctatgattttgtcttccgttggtgctcttgcaaccagcgtttggctctgtttgctttgctattttgcctttccattccagcttttgattgcatctaccttcattggtgcattttgtggcaattataccacattttggggagcttgctttgcctatatagttgatcagtgtaaagaacacaaacaaaaaacaattcgaatagctatcattgactttctacttggacttgttactggactaacaggactgtcatctggctattttattagagagctaggttttgagaatggctatgaccgcgtttgccagtacaacactgatgatgtttttagngntnccaaggtnagccagggtgccgttccttttcactattgtgccattctctgttctacggtccatgttgtcaaaagtggttcgttcgactgaacaagctgtcacttgccagactgaggaacagataagaaggttttctttacctttcaaaaggctcttgcaggaagcattgcttgttaggagccatcctgtgctttcaggtgtcacagattagcatggggttggagggtgggagacagcatcctgaagagcaggggtaggtgtggctttgcctggggctgtggcagagaggagagacatgcagttatcaaaagagtcagctgcactgtctttttagctttgccctgtggacactggaactcagctatttggagtttccaacatctctcacatcaagtccaaggagaacctttcccttagtttcctcagctgcagaatgggctgctgacttctcagggactttgagggaataactttcatttcattcacccagcagtgccctcatgtttactgttttcaatgagtaacagttgtctccattagtttgtgtttgttgttttgtaattctgccttttttttttcctctctctctatccctactccaaacaggtaccctgtttgcttgtattgctttcttagaaacacttggaggagtcactgcagtttctacttttaatggaatttactcagccactgttgcttggtaccctggcttcactttcctgctgtctgctggtctgttactacttccagccatcagtctatgtgttgtcaagtgtaccagctggaatgagggaagctatgaacttcttatacaagaagaatccagtgaagatgcttcagacaggtgactgtgatttaaacaaacaaaaaaaatctatgaatgcacatatcatataccatgacttctgaagactataaatgaattccacaatcagtgcttcactgagaaccaattttacctatcttttcttctaaactgaacagtcagagagacagctcctggctttagcttcttgtggtaccacgcactttgagcactttgtgcgtatcatgcaatatacttgcaatacacagaacaaatttcaaatacgcctcacttttagacttagaagagaaacattaaaacttaagggtgtaaggagggatcaagaaacttgataaggtcaaaagcaataatctctctgacatattccaggctcttacactgagaccaaagagaaatctttacctcagtttcttcatcagcagaatgggtttctggcctctctcagggataattttgaaggcataatgaaaattatgatgaatcactcattggtaggaaaataatgatataagtttcaaatatgtatgattttacctatacttggtaatgctttattttatagagcctgttaagctgctattgatagtcggagcttatatactgtgacttctgaagactatacatgaattccacaatcagtgctttgttgatacaaaatccttaaaagggaggcactttaaagaatatgtatttttcacttttcttaatatgtttcatcggtgacaggcatgataatatttctatatgtaatgggtaattgggaaaaaatagatgataaataaaattgctctaaagaagttaaaaaactgaatgaacagctaatactggtataaagtaactaatgtttggagccaacatttgttccttgtgtcagcaaaaggatattcacattccatgatccctggctgagaattctgcctctagtctttcttacccagctgttgtctatccttgttcaattataaatactgctaagggcatttttaaaatacgatcttgtactccttaaatttgaatccgtcaacacggtcactcataggaaaatgatcaaacaagcaagccagtcatgatttgactccttcccatctcatttcttactgccttacgctcatcctgaggtccaccttggtctctaaaaacaccatgtgttctcatgcctccatgtcttttcacacactgttccatttgctcttcctcccacattacattgaaactttcaagcctcagtcgaaacattgcttcttctggatagcagccttcttgacatccctcctcactccccagtccctacagggcttccatagctctttgtgtgcacttcgatcccagcattttccatcgacttgtaattgtttctgctacctgacaatcatcgccttgagtactgggacaacctttgattactcattatatcctcaataaatatttgttgaactaaactaaatgactacaaaattttatttttacttgtaaaaatcatttagagctatatatttaatgccttatgagag

SEQ ID NO: 461290 - DNA, 464 bp, Homo sapiens
gagaatgttttctgcagaaacagcctggggtttcaggaaggcaggcccagttcaggggtgccttgggagcaaaggtcctgtcattccaacactaaggaattagacctttacgagaagcacagttttgtcttcagtttcctctccccccacccggaatggcctgagccgaagccagctccctccgagaagtcattaccgcctgacttgcgtttgatatttagacaccttggtcacaacatcttgcattctctcgggatgctgatttctaactgctctttggcctttcctgcattggtcctcctcaggcaggggatccctgctcttctatattaatgctggctccccgtcccctgtccaccatgagtcaaagcaatgtgagtccctcaccagatgcaactgcccagtcttggactttccagcgaccagaatcatgagccaaataaacctcttttctttatgaatta

SEQ ID NO: 461291 - DNA, 850 bp, Homo sapiens
cttcccagccttcagaaattgccggtctgggagttgggggcaaggagaagatcctgcaacccagtgattccatggaaagcagaaagaaggacataaagaaacggatacttggtgacatctttgactcactggatcaaaccttgcctgaagctcacatttctgaaatttccagatacaagaacaaatacttcctctttattgttttactagatttgagacaagctttaagtttctcagactcttcctcttcctaacagatttatcagaagctgaaagctctgatcttgttgggatgcggatcgtgtcaggagaaggcttactttgcacgcttttcttagtctggttgcctaactcaagaacctcggcatggctctgttacttctctactcagacaagcatccctgcagacactcactaggctaactctgtctttatttttagaattagacctttacgagaagcacagttttgtcttcagtttcctctccccccacccggaatggcctgagccgaagccagctccctccgagaagtcattaccgcctgacttgcgtttgatatttagacaccttggtcacaacatcttgcattctctcgggatgctgatttctaactgctctttggcctttcctgcattggtcctcctcaggcaggggatccctgctcttctatattagtgagaaaaccaaggctcagagaaactgtggattttctaaggatgctggctccccgtcccctgtccaccatgagtcaaagcaatgtgagtccctcaccagatgcaactgcccagtcttggactttccagcgaccagaatcatgagccaaataaacctcttttctttatgaatta

SEQ ID NO: 461292 - DNA, 374 bp, Homo sapiens
aggagaagatcctgacaggaacataatctcatgcaatttattgcagtcctctccccccacccggaatggcctgagccgaagccagctccctccgagaagtcattaccgcctgacttgcgtttgatatttagacaccttggtcacaacatcttgcattctctcgggatgctgatttctaactgctctttggcctttcctgcattggtcctcctcaggcaggggatccctgctcttctatattaatgctggctccccgtcccctgtccaccatgagtcaaagcaatgtgagtccctcaccagatgcaactgcccagtcttggactttccagcgaccagaatcatgagccaaataaacctcttttctttatgaatta

SEQ ID NO: 461293 - DNA, 678 bp, Homo sapiens
cttcccagccttcagaaattgccggtctgggagttgggggcaaggagaagatcctgcaacccagtgattccatggaaagcagaaagaaggacataaagaaacggatacttggtgacatctttgactcactggatcaaaccttgcctgaagctcacatttctgaaatttccagatacaagaacaaatacttcctctttattgttttactagatttgagacaagctttaagtttctcagactcttcctcttcctaacagatttatcagaagctgaaagctctgatcttgttgggatgcggatcgtgtcaggagaaggcttactttgcacgcttttcttagtctggttgcctaactcaagaacctcggcatggctctgttacttctctactcagacaagcatccctgcagacactcactaggctaactctgtctttatttttagaattagacctttacgagaagcacagttttgtcttcagtttcctctccccccacccggaatggcctgagccgaagccagctccctccgagaagtcattaccgcctgatgctggctccccgtcccctgtccaccatgagtcaaagcaatgtgagtccctcaccagatgcaactgcccagtcttggactttccagcgaccagaatcatgagccaaataaacctcttttctttatgaatta

SEQ ID NO: 461294 - DNA, 363 bp, Homo sapiens
actcatgttgaaatttgatcccccatgtagcagtgttgggaggtggggttgggtgggaggtgtttgtgtcatcggggcagatccctcatgaatagattaatgccatcttgtgagggtgagcatgttctcagtcttacaggaatggattagttaccctgagaacaggttgttacaaagagtttggcttcctcggttgctttctctgtttctctctcatcatgtgatctctttgcagatgctggctccccgtcccctgtccaccatgagtcaaagcaatgtgagtccctcaccagatgcaactgcccagtcttggactttccagcgaccagaatcatgagccaaataaacctcttttctttatga

SEQ ID NO: 461295 - DNA, 424 bp, Homo sapiens
cttcccagccttcagaaattgccggtctgggagttgggggcaaggagaagatcctggaattagacctttacgagaagcacagttttgtcttcagtttcctctccccccacccggaatggcctgagccgaagccagctccctccgagaagtcattaccgcctgacttgcgtttgatatttagacaccttggtcacaacatcttgcattctctcgggatgctgatttctaactgctctttggcctttcctgcattggtcctcctcaggcaggggatccctgctcttctatattaatgctggctccccgtcccctgtccaccatgagtcaaagcaatgtgagtccctcaccagatgcaactgcccagtcttggactttccagcgaccagaatcatgagccaaataaacctcttttctttatgaatta

SEQ ID NO: 461296 - DNA, 1047 bp, Homo sapiens
aagtactgcctggttactgctaatgctcattcaaggcccaagggctcttcagccagcttgtggtgaatgctgccaaacctgggactctcccttcaaggcagtgggctcccctctggcccagggcaggtccagaaatgccatccaagagctgaggcctggaatttgggaccccaacagcatagttggtgctctaccccactgtgaccaagctagtacctacgctgatttttggttcttaagaaggtgtttttgtcaacccagtgattccatggaaagcagaaagaaggacataaagaaacggatacttggtgacatctttgactcactggatcaaaccttgcctgaagctcacatttctgaaatttccagatacaagaacaaatacttcctctttattgttttactagatttgagacaagctttaagtttctcagactcttcctcttcctaacagatttatcagaagctgaaagctctgatcttgttgggatgcggatcgtgtcaggagaaggcttactttgcacgcttttcttagtctggttgcctaactcaagaacctcggcatggctctgttacttctctactcagacaagcatccctgcagacactcactaggctaactctgtctttatttttagaattagacctttacgagaagcacagttttgtcttcagtttcctctccccccacccggaatggcctgagccgaagccagctccctccgagaagtcattaccgcctgacttgcgtttgatatttagacaccttggtcacaacatcttgcattctctcgggatgctgatttctaactgctctttggcctttcctgcattggtcctcctcaggcaggggatccctgctcttctatattagtgagaaaaccaaggctcagagaaactgtggattttctaaggatgctggctccccgtcccctgtccaccatgagtcaaagcaatgtgagtccctcaccagatgcaactgcccagtcttggactttccagcgaccagaatcatgagccaaataaacctcttttctttatgaatta

SEQ ID NO: 461297 - DNA, 6186 bp, Homo sapiens
ctgggcctggggagcagaggtgagaaccctgcatggtctggtagcaaggagccgggctgttctcatgtgttcttggtggagctggtttgggtccacatcagcgagcctgagctccatccctaaatgcagaatcaagtgggcctgccttgctgccgccgccgccgctgctgccgctgccggagcaggaagtggtgggtcccagatgtgactcactctcattaggtagcgtggaaggagccttcggatgggtgagcctgggcgcgtctgaggaagggcaggcgggggccgggccacctccctgcagaccctggccggctgctggggccggggaggagagccaggggagcctggttgattgcttagtcagttgataaacactgttgcctgaacacccgctgtgtgcagagacctagcagataccctggttggggcagtgctaaggattctgccttctgggagctcatttcctgagcagaattccctcttggtacctggcctggcacctggtgcacagaaggcatgagtgcacatctgctgaagagctgaggaactgcgtgtggagtcagcccagtctggatgcacaggaggatgctggcggcacagtgagtgaggcctggtgccagagctgtgcggaccccttgttggccatggagcagcaggcccagaggccctctccccagccctgcttgcctgcctcggagaggacagaggcctaggcccacgggggagggtgttggcagacagatgccctccaggccctggggcctccttaacggccccttaacgacacgcgtgccaagggtggaggatgccagccaaggggcgctacttcctcaacgagggcgaggagggccctgaccaagatgcgctctacgagaagtaccagctcaccagccagcatgggccgctgctgctcacgctcctgctggtggccgccactgcctgcgtggccctcatcatcattgccttcagccagggggacccctccagacaccaggccattctgggcatggcgttcctggtgctggcggtgtttgcggccctctctgtgctgatgtacgtcgagtgtctcctgcggcgctggctcagggccttggcgctgctcacctgggcctgcttggtggcgctgggctatgtgctggtgttcgacgcatggacaaaggcggcctgtgcgtgggagcaggtgcccttcttcctgttcattgtcttcgtggtgtacacactactgcccttcagcatgcggggcgctgtcgccgttggggccgtctccactgcctcccacctcctggtgctcggttctttgatgggaggcttcacgacacccagtgtccgggtggggctgcagctgctggccaacgcagtcatcttcctgtgtgggaacctgacaggcgccttccacaagcaccaaatgcaggatgcgtcccgggacctcttcacctacactgtgaagtgcatccagatccgccggaagctgcgcatcgagaagcgccagcaggagaacctgctgctgtcagtgcttccggcccacatctccatgggcatgaagctggccatcatcgaacggctcaaggagcatggtgaccgtcgctgcatgcctgacaacaacttccacagcctctacgtcaagaggcaccagaatgtcagcatcctctatgcggacatcgtgggcttcacgcagctggccagcgactgttctcccaaggagctggtggtggtgctgaatgagctctttggcaagttcgaccagatcgccaaggccaacgagtgcatgcgaatcaagatcctcggcgactgctactactgtgtatcgggcctgcccgtgtcgctgcctacccacgcccggaactgcgtgaagatggggctggacatgtgccaggccatcaagcaggtgcgggaggccacgggcgtggacatcaacatgcgtgtgggcatacactcggggaatgtgctgtgcggggtcatcgggctgcgcaagtggcagtatgacgtgtggtcccacgacgtgtccctggccaaccggatggaggcagccggagtacccggccgggtgcacatcacggaggccacgctaaagcacctggacaaggcgtacgaggtggaggatgggcacgggcagcagcgggacccctacctcaaggagatgaacatccgcacctacctggtcatcgacccccggtcctgtctggccaccccaactggcgaaggcctcaggcatgtgttcttggatcggggtgggggtctcaggcccaagggggacgcggccctgaagatgcgggcgtcagtgcgcatgacccggtacctcgagtcctggggggcggcacggccctttgcacatctcaaccaccgtgagagcgtgagcagtggtgagacccacgtccccaacgggcggaggcctaagagcgttccccagcgccaccgccggaccccagacaggaaccagagtttcctggcccctggcccttctgcatggccacatgatggagcacctgttgtatggtgccctggcggggtcagtggagtcggtggaagggaaggagatgactgtgggtgtcctggtccccatgccaatcccgggggtgtagccgaagatgccttagactggggctcgggtctgccctctgcctctggcttggctgctggccagctgggccatgctgggccatgctgggtcctcactcgccctctctgggcctcagtgggacccacccattccttcaccatcccacctgaggttctgggaccccactggtgtctacgtccacaccctcctctgggagagttggaggtggtcgctgtgctgatgcagttgtgggtatctgattccagaagcatgtcccccaaggggcggtcggaggatgactcgtacgatgacgagatgctgtcagccattgaggggctcagctccacgagcccccatctcaccgcagctgcccccgcccacaggccctgctgctccaagtccgatgacttctacacctttgggtccatcttcctggagaagggctttgagcgcgagtaccgcctggcacccatcccccgggcccgccacgactttgcctgcgccagcctgatcttcgtctgcatcctgctcgtccatgtcctgctcatgcccaggacggcggcactgggtgtgtccttcgggctggtggcctgtgtactggggctggtgctgggcctgtgctttgccaccaagttctcgaggtgctgcccagctcgggggacgctctgcactatctctgagagggtggagacacagcccctgctgaggctgaccctggccgtcctgaccatcggcagcctgctcactgtggccatcatcaacctggtgggtcccgtggtggggaggcaggcctccggggtagagggagacctccagatttgggacgcctacaatgtggccttaaaagctgcctctggttgtcctctcccccgagctcagcagcccctgatgcctttccaagttccagagctgcctgttggcaatgagacaggcctactggccgcgagcagcaagacaagagccctgtgtgagcccctcccgtactacacctgcagctgtgtcctgggcttcatcgcctgctcggtcttcctgaggatgagcctggagccaaaggttgtgctgctgacagtggccctggtggcctacctggtgctcttcaacctctccccatgctggcagtgggactgctgcggccaaggcctgggcaacctcaccaagcccaacggcaccaccagtggcacccctagctgttcctggaaggacctgaagaccatgaccaatttctacctggtcctgttctacatcaccctgcttacactctccagacagattgactattactgccgcttggactgcctatggaagaagaagttcaagaaggagcacgaggagtttgagaccatggagaacgtgaaccgccttcttctggagaacgtcctgccagcccacgtggctgcccactttatcggtgacaagaggtgaagtggtgtaaggtccggtttcttcccatccaggactggtaccatcagtcctatgactgcgtctgtgtcatgtttgcctccgtgccggacttcaaagtgttctacacagagtgcgatgtcaacaaagaagggctggagtgcctacgcctgctcaatgagatcattgccgacttcgacgagctcctactgaagcccaagttcagcggcgtggagaagatcaagaccatcggcagcacgtacatggcagctgcagggctcagcgtcgcctcagggcacgagaaccaggagctggagcggcagcatgcccacattggtgtcatggtggagttcagcatcgccctgatgagtaagctggacggcatcaacaggcactccttcaactccttccgcctccgcgtcggcataaaccatgggcctgtgattgctggagtgattggggcccgaaaacctcagtatgacatctggggaaacactgtcaatgtggccagccgaatggaaagcactggagaacttgggaaaatccaggtgttcttcccgcctctgaagacaacaggtctctcttccttttcaggttaccgaggagacctgcaccatcctccagggcctcgggtactcttgtgaatgccgtggcctgatcaacgtcaaaggcaaaggcgagctgaggacttactttgtctgtacggacactgccaagtttcaggggctggggctgaactgagggctcctgctggattccgaaaaggccgggaagccagtctccttccctgaagcaagcccaggagaagactctccgccccacgccaatcccaaaggcatgcagatggctgtgcatgttggcttctttggacctgcactggaggatttctcagacacatgcaccagattctggctcgaagcagccactgagccataatgcgcaggggaggccagaagctctgtgcctggtctgtaacagtttccaggccagctggagaatgttcactggttcggggctgactttgagatctttgttccctgaggtgccaggcaggcaactttagcacatgatgaaaacagacttccacctcagtggcctgtgggcacgcacaagtgaggtctgtttttctagacaccaagggggagtaagctgagctgtctagcacggattggagactccctctccctggtgggcctggcaatgacagcatttctcacagaggcattctggtaaatgaagctgaaaggggtgttttacatctgtaaacggtttcaaacaggtagagagaaaaacaccacaattaacactgttactttttgccttgtctggcatgtttgttttaaatgaatacattaatggggtttttatccttttgaatgacttttcagacactagacataaatctcttccctccagtgtatgctctgcctttttaaccactgacatgtaaggaggactactgtctagcatcagcttatggggtcagctggctgtggggatagagtcctgaggaatgtggtcacagcaagaaggcggggagcagcagagccttgcctttgaatgaggcagcttgtgaggcaagcattctggagagaggtgctttgaaagtaaggtgcggcctttcacctcttccttgattactcacacatctttgcgttctcccctgccgtccttcaactgtatcttacttttcttaccagaaaggaatggagtctgtttagagacaacttggacaacctgtgagtgcatctcttctttcctttagtcttcacagctaactctggagagcttcaaaactagaaggatctactccgcatgggtgcatgcagaggctcctggatctgggaagcccgccccctcacaaatgctgagccgttcttgctctgaaactgcgtgagtcaaggcaaatgcaaaaagccaggttttggggatgtgtcttactgtgcttcaacttcccaaggaattgaaagtcaacctaactgtaacaacagggtgagaaatgaccaaactgcccgtgactttttctgaatggacttcataaccggaagacttaaccggtggcctcatcaccagagcatcgccaggatttctaatgcactcagtttccctacatagcagggattcttagctaggtgtccccatgaaccccgtaaagttctacacaaagtcttgcatacaggagcctttacaagatgattatacagggttgcagattgggtgactgacca

SEQ ID NO: 461298 - DNA, 5450 bp, Homo sapiens
ctgggcctggggagcagaggtgagaaccctgcatggtctggtagcaaggagccgggctgttctcatgtgttcttggtggagctggtttgggtccacatcagcgagcctgagctccatccctaaatgcagaatcaagtgggcctgccttgctgccgccgccgccgctgctgccgctgccggagcaggaagtggtgggtcccagatgtgactcactctcattaggtagcgtggaaggagccttcggatgggtgagcctgggcgcgtctgaggaagggcaggcgggggccgggccacctccctgcagaccctggccggctgctggggccggggaggagagccaggggagcctggttgattgcttagtcagttgataaacactgttgcctgaacacccgctgtgtgcagagacctagcagataccctggttggggcagtgctaaggattctgccttctgggagctcatttcctgagcagaattccctcttggtacctggcctggcacctggtgcacagaaggcatgagtgcacatctgctgaagagctgaggaactgcgtgtggagtcagcccagtctggatgcacaggaggatgctggcggcacagtgagtgaggcctggtgccagagctgtgcggaccccttgttggccatggagcagcaggcccagaggccctctccccagccctgcttgcctgcctcggagaggacagaggcctaggcccacgggggagggtgttggcagacagatgccctccaggccctggggcctccttaacggccccttaacgacacgcgtgccaagggtggaggatgccagccaaggggcgctacttcctcaacgagggcgaggagggccctgaccaagatgcgctctacgagaagtaccagctcaccagccagcatgggccgctgctgctcacgctcctgctggtggccgccactgcctgcgtggccctcatcatcattgccttcagccagggggacccctccagacaccaggccattctgggcatggcgttcctggtgctggcggtgtttgcggccctctctgtgctgatgtacgtcgagtgtctcctgcggcgctggctcagggccttggcgctgctcacctgggcctgcttggtggcgctgggctatgtgctggtgttcgacgcatggacaaaggcggcctgtgcgtgggagcaggtgcccttcttcctgttcattgtcttcgtggtgtacacactactgcccttcagcatgcggggcgctgtcgccgttggggccgtctccactgcctcccacctcctggtgctcggttctttgatgggaggcttcacgacacccagtgtccgggtggggctgcagctgctggccaacgcagtcatcttcctgtgtgggaacctgacaggcgccttccacaagcaccaaatgcaggatgcgtcccgggacctcttcacctacactgtgaagtgcatccagatccgccggaagctgcgcatcgagaagcgccagcaggagaacctgctgctgtcagtgcttccggcccacatctccatgggcatgaagctggccatcatcgaacggctcaaggagcatggtgaccgtcgctgcatgcctgacaacaacttccacagcctctacgtcaagaggcaccagaatgtcagcatcctctatgcggacatcgtgggcttcacgcagctggccagcgactgttctcccaaggagctggtggtggtgctgaatgagctctttggcaagttcgaccagatcgccaaggccaacgagtgcatgcgaatcaagatcctcggcgactgctactactgtgtatcgggcctgcccgtgtcgctgcctacccacgcccggaactgcgtgaagatggggctggacatgtgccaggccatcaagcaggtgcgggaggccacgggcgtggacatcaacatgcgtgtgggcatacactcggggaatgtgctgtgcggggtcatcgggctgcgcaagtggcagtatgacgtgtggtcccacgacgtgtccctggccaaccggatggaggcagccggagtacccggccgggtgcacatcacggaggccacgctaaagcacctggacaaggcgtacgaggtggaggatgggcacgggcagcagcgggacccctacctcaaggagatgaacatccgcacctacctggtcatcgacccccggtcctgtctggccaccccaactggcgaaggcctcaggcatgtgttcttggatcggggtgggggtctcaggcccaagggggacgcggccctgaagatgcgggcgtcagtgcgcatgacccggtacctcgagtcctggggggcggcacggccctttgcacatctcaaccaccgtgagagcgtgagcagtggtgagacccacgtccccaacgggcggaggcctaagagcgttccccagcgccaccgccggaccccagacaggaaccagagtttcctggcccctggcccttctgcatggccacatgatggagcacctgttgtatggtgccctggcggggtcagtggagtcggtggaagggaaggagatgactgtgggtgtcctggtccccatgccaatcccgggggtgtagccgaagatgccttagactggggctcgggtctgccctctgcctctggcttggctgctggccagctgggccatgctgggccatgctgggtcctcactcgccctctctgggcctcagtgggacccacccattccttcaccatcccacctgaggttctgggaccccactggtgtctacgtccacaccctcctctgggagagttggaggtggtcgctgtgctgatgcagttgtgggtatctgattccagaagcatgtcccccaaggggcggtcggaggatgactcgtacgatgacgagatgctgtcagccattgaggggctcagctccacgagcccccatctcaccgcagctgcccccgcccacaggccctgctgctccaagtccgatgacttctacacctttgggtccatcttcctggagaagggctttgagcgcgagtaccgcctggcacccatcccccgggcccgccacgactttgcctgcgccagcctgatcttcgtctgcatcctgctcgtccatgtcctgctcatgcccaggacggcggcactgggtgtgtccttcgggctggtggcctgtgtactggggctggtgctgggcctgtgctttgccaccaagttctcgaggtgctgcccagctcgggggacgctctgcactatctctgagagggtggagacacagcccctgctgaggctgaccctggccgtcctgaccatcggcagcctgctcactgtggccatcatcaacctggtgggtcccgtggtggggaggcaggcctccggggtagagggagacctccagatttgggacgcctacaatgtggccttaaaagctgcctctggttgtcctctcccccgagctcagcagcccctgatgcctttccaagttccagagctgcctgttggcaatgagacaggcctactggccgcgagcagcaagacaagagccctgtgtgagcccctcccgtactacacctgcagctgtgtcctgggcttcatcgcctgctcggtcttcctgaggatgagcctggagccaaaggttgtgctgctgacagtggccctggtggcctacctggtgctcttcaacctctccccatgctggcagtgggactgctgcggccaaggcctgggcaacctcaccaagcccaacggcaccaccagtggcacccctagctgttcctggaaggacctgaagaccatgaccaatttctacctggtcctgttctacatcaccctgcttacactctccagacagattgactattactgccgcttggactgcctatggaagaagaagttcaagaaggagcacgaggagtttgagaccatggagaacgtgaaccgccttcttctggagaacgtcctgccagcccacgtggctgcccactttatcggtgacaagaggtgaagtggtgtaaggtccggtttcttcccatccaggactggtaccatcagtcctatgactgcgtctgtgtcatgtttgcctccgtgccggacttcaaagtgttctacacagagtgcgatgtcaacaaagaagggctggagtgcctacgcctgctcaatgagatcattgccgacttcgacgagctcctactgaagcccaagttcagcggcgtggagaagatcaagaccatcggcagcacgtacatggcagctgcagggctcagcgtcgcctcagggcacgagaaccaggagctggagcggcagcatgcccacattggtgtcatggtggagttcagcatcgccctgatgagtaagctggacggcatcaacaggcactccttcaactccttccgcctccgcgtcggcataaaccatgggcctgtgattgctggagtgattggggcccgaaaacctcagtatgacatctggggaaacactgtcaatgtggccagccgaatggaaagcactggagaacttgggaaaatccaggtgttcttcccgcctctgaagacaacaggtctctcttccttttcaggttaccgaggagacctgcaccatcctccagggcctcgggtactcttgtgaatgccgtggcctgatcaacgtcaaaggcaaaggcgagctgaggacttactttgtctgtacggacactgccaagtttcaggggctggggctgaactgagggctcctgctggattccgaaaaggccgggaagccagtctccttccctgaagcaagcccaggagaagactctccgccccacgccaatcccaaaggcatgcagatggctgtgcatgttggcttctttggacctgcactggaggatttctcagacacatgcaccagattctggctcgaagcagccactgagccataatgcgcaggggaggccagaagctctgtgcctggtctgtaacagtttccaggccagctggagaatgttcactggttcggggctgactttgagatctttgttccctgaggtgccaggcaggcaactttagcacatgatgaaaacagacttccacctcagtggcctgtgggcacgcacaagtgaggtctgtttttctagacaccaagggggagtaagctgagctgtctagcacggattggagactccctctccctggtgggcctggcaatgacagcatttctcacagaggcattctgtgtatgctctgcctttttaaccactgacatgtaaggaggactactgtctagcatcagcttatggggtcagctggctgtggggatagagtcctgaggaatgtggtcacagcaagaaggcggggagcagcagagccttgcctttgaatgaggcagcttgtgaggcaagcattctggagagaggtgctttgaaagtaagaaaggaatggagtctgtttagagacaacttgactacctgcgacctatgagggatcctctagatcacc

SEQ ID NO: 461299 - DNA, 4046 bp, Homo sapiens
gcccgctgccactggggcggccactcgggcggcggtggagcgggagcgcgcagcagctgctggccaacgcagtcatcttcctgtgtgggaacctgacaggcgccttccacaagcaccaaatgcaggatgcgtcccgggacctcttcacctacactgtgaagtgcatccagatccgccggaagctgcgcatcgagaagcgccagcaggagaacctgctgctgtcagtgcttccggcccacatctccatgggcatgaagctggccatcatcgaacggctcaaggagcatggtgaccgtcgctgcatgcctgacaacaacttccacagcctctacgtcaagaggcaccagaatgtcagcatcctctatgcggacatcgtgggcttcacgcagctggccagcgactgttctcccaaggagctggtggtggtgctgaatgagctctttggcaagttcgaccagatcgccaaggccaacgagtgcatgcgaatcaagatcctcggcgactgctactactgtgtatcgggcctgcccgtgtcgctgcctacccacgcccggaactgcgtgaagatggggctggacatgtgccaggccatcaagcaggtgcgggaggccacgggcgtggacatcaacatgcgtgtgggcatacactcggggaatgtgctgtgcggggtcatcgggctgcgcaagtggcagtatgacgtgtggtcccacgacgtgtccctggccaaccggatggaggcagccggagtacccggccgggtgcacatcacggaggccacgctaaagcacctggacaaggcgtacgaggtggaggatgggcacgggcagcagcgggacccctacctcaaggagatgaacatccgcacctacctggtcatcgacccccggagccagcagccacccccgcccagccaacacctccccaggcccaagggggacgcggccctgaagatgcgggcgtcagtgcgcatgacccggtacctcgagtcctggggggcggcacggccctttgcacatctcaaccaccgtgagagcgtgagcagtggtgagacccacgtccccaacgggcggaggcctaagagcgttccccagcgccaccgccggaccccagacagaagcatgtcccccaaggggcggtcggaggatgactcgtacgatgacgagatgctgtcagccattgaggggctcagctccacgaggccctgctgctccaagtccgatgacttctacacctttgggtccatcttcctggagaagggctttgagcgcgagtaccgcctggcacccatcccccgggcccgccacgactttgcctgcgccagcctgatcttcgtctgcatcctgctcgtccatgtcctgctcatgcccaggacggcggcactgggtgtgtccttcgggctggtggcctgtgtactggggctggtgctgggcctgtgctttgccaccaagttctcgaggtgctgcccagctcgggggacgctctgcactatctctgagagggtggagacacagcccctgctgaggctgaccctggccgtcctgaccatcggcagcctgctcactgtggccatcatcaacctgcccctgatgcctttccaagttccagagctgcctgttggcaatgagacaggcctactggccgcgagcagcaagacaagagccctgtgtgagcccctcccgtggcacccctagctgttcctggaaggacctgaagaccatgaccaatttctacctggtcctgttctacatcaccctgcttacactctccagacagattgactattactgccgcttggactgcctatggaagaagaagttcaagaaggagcacgaggagtttgagaccatggagaacgtgaaccgccttcttctggagaacgtcctgccagcccacgtggctgcccactttatcggtgacaaggactggtaccatcagtcctatgactgcgtctgtgtcatgtttgcctccgtgccggacttcaaagtgttctacacagagtgcgatgtcaacaaagaagggctggagtgcctacgcctgctcaatgagatcattgccgacttcgacgagctcctactgaagcccaagttcagcggcgtggagaagatcaagaccatcggcagcacgtacatggcagctgcagggctcagcgtcgcctcagggcacgagaaccaggagctggagcggcagcatgcccacattggtgtcatggtggagttcagcatcgccctgatgagtaagctggacggcatcaacaggcactccttcaactccttccgcctccgcgtcggcataaaccatgggcctgtgattgctggagtgattggggcccgaaaacctcagtatgacatctggggaaacactgtcaatgtggccagccgaatggaaagcactggagaacttgggaaaatccaggttaccgaggagacctgcaccatcctccagggcctcgggtactcttgtgaatgccgtggcctgatcaacgtcaaaggcaaaggcgagctgaggacttactttgtctgtacggacactgccaagtttcaggggctggggctgaactgagggctcctgctggattccgaaaaggccgggaagccagtctccttccctgaagcaagcccaggagaagactctccgccccacgccaatcccaaaggcatgcagatggctgtgcatgttggcttctttggacctgcactggaggatttctcagacacatgcaccagattctggctcgaagcagccactgagccataatgcgcaggggaggccagaagctctgtgcctggtctgtaacagtttccaggccagctggagaatgttcactggttcggggctgactttgagatctttgttccctgaggtgccaggcaggcaactttagcacatgatgaaaacagacttccacctcagtggcctgtgggcacgcacaagtgaggtctgtttttctagacaccaagggggagtaagctgagctgtctagcacggattggagactccctctccctggtgggcctggcaatgacagcatttctcacagaggcattctggtaaatgaagctgaaaggggtgttttacatctgtaaacggtttcaaacaggtagagagaaaaacaccacaattaacactgttactttttgccttgtctggcatgtttgttttaaatgaatacattaatggggtttttatccttttgaatgacttttcagacactagacataaatctcttccctccagtgtatgctctgcctttttaaccactgacatgtaaggaggactactgtctagcatcagcttatggggtcagctggctgtggggatagagtcctgaggaatgtggtcacagcaagaaggcggggagcagcagagccttgcctttgaatgaggcagcttgtgaggcaagcattctggagagaggtgctttgaaagtaaggtgcggcctttcacctcttccttgattactcacacatctttgcgttctcccctgccgtccttcaactgtatcttacttttcttaccagaaaggaatggagtctgtttagagacaacttggacaacctgtgagtgcatctcttctttcctttagtcttcacagctaactctggagagcttcaaaactagaaggatctactccgcatgggtgcatgcagaggctcctggatctgggaagcccgccccctcacaaatgctgagccgttcttgctctgaaactgcgtgagtcaaggcaaatgcaaaaagccaggttttggggatgtgtcttactgtgcttcaacttcccaaggaattgaaagtcaacctaactgtaacaacagggtgagaaatgaccaaactgcccgtgactttttctgaatggacttcataaccggaagacttaaccggtggcctcatcaccagagcatcgccaggatttctaatgcactcagtttccctacatagcagggattcttagctaggtgtccccatgaaccccgtaaagttctacacaaagtcttgcatacaggagcctttacaagatgattatacagggttgcagattgggtgactgacca

SEQ ID NO: 461300 - DNA, 2712 bp, Homo sapiens
cccgcctggggggaacatacattacacagaatataaaggtacacatttctttttcattctgttttatgcagcaaataattcgttggcatcttctctgtgatgggcagcttgctaagattagactcaggccccttagcttcatttccaactaagcccacgctatcaaccaagccaaacagaggaaatcagtttgggttgaattctttgctggagacaaagaatctacattcctgtgtagataatgctgtgtttgctctgtgcagacacagatggaagggaagagggagacagtgtggggacggagacaacaggaagagcaggagccgccaagggccatgtcctcaccatgcttagtcatgcgctcagctggcagggcagccatgagacgtgtgtgcgagaggcggcgatgggtggagggaaccccacacccttcctgagaagcaggggcagcctggctgcggctatggagtggcggctgcttcaccgcttccttcttgcctgcagctcctactgaagcccaagttcagcggcgtggagaagatcaagaccatcggcagcacgtacatggcagctgcagggctcagcgtcgcctcagggcacgagaaccaggtactcaagcccaagaggtgaaattcagctgactgtcctcacttaaaggtgacctgtcaccttacttaaagggtgtgcccttatctcgtcctgggggaggggcacaggtacttgtagggctcagccaggattttagtggtggggatcctcaacaagagtggcgcgccagggcccactaggtctgggggctctggagatgcaaggatctgacccacagcctgtcccgcaggagctggagcggcagcatgcccacattggtgtcatggtggagttcagcatcgccctgatgagtaagctggacggcatcaacaggcactccttcaactccttccgcctccgcgtcggcataaaccatgggcctgtgattgctggagtgattggggcccgaaaacctcagtatgacatctggggaaacactgtcaatgtggccagccgaatggaaagcactggagaacttgggaaaatccaggttaccgaggagacctgcaccatcctccagggcctcgggtactcttgtgaatgccgtggcctgatcaacgtcaaaggcaaaggcgagctgaggacttactttgtctgtacggacactgccaagtttcaggggctggggctgaactgagggctcctgctggattccgaaaaggccgggaagccagtctccttccctgaagcaagcccaggagaagactctccgccccacgccaatcccaaaggcatgcagatggctgtgcatgttggcttctttggacctgcactggaggatttctcagacacatgcaccagattctggctcgaagcagccactgagccataatgcgcaggggaggccagaagctctgtgcctggtctgtaacagtttccaggccagctggagaatgttcactggttcggggctgactttgagatctttgttccctgaggtgccaggcaggcaactttagcacatgatgaaaacagacttccacctcagtggcctgtgggcacgcacaagtgaggtctgtttttctagacaccaagggggagtaagctgagctgtctagcacggattggagactccctctccctggtgggcctggcaatgacagcatttctcacagaggcattctggtaaatgaagctgaaaggggtgttttacatctgtaaacggtttcaaacaggtagagagaaaaacaccacaattaacactgttactttttgccttgtctggcatgtttgttttaaatgaatacattaatggggtttttatccttttgaatgacttttcagacactagacataaatctcttccctccagtgtatgctctgcctttttaaccactgacatgtaaggaggactactgtctagcatcagcttatggggtcagctggctgtggggatagagtcctgaggaatgtggtcacagcaagaaggcggggagcagcagagccttgcctttgaatgaggcagcttgtgaggcaagcattctggagagaggtgctttgaaagtaaggtgcggcctttcacctcttccttgattactcacacatctttgcgttctcccctgccgtccttcaactgtatcttacttttcttaccagaaaggaatggagtctgtttagagacaacttggacaacctgtgagtgcatctcttctttcctttagtcttcacagctaactctggagagcttcaaaactagaaggatctactccgcatgggtgcatgcagaggctcctggatctgggaagcccgccccctcacaaatgctgagccgttcttgctctgaaactgcgtgagtcaaggcaaatgcaaaaagccaggttttggggatgtgtcttactgtgcttcaacttcccaaggaattgaaagtcaacctaactgtaacaacagggtgagaaatgaccaaactgcccgtgactttttctgaatggacttcataaccggaagacttaaccggtggcctcatcaccagagcatcgccaggatttctaatgcactcagtttccctacatagcagggattcttagctaggtgtccccatgaaccccgtaaagttctacacaaagtcttgcatacaggagcctttacaagatgattatacagggttgcagattgggtgactgacca

SEQ ID NO: 461301 - DNA, 2234 bp, Homo sapiens
accattgagagttttaataatacgtaactacagaaaatggagaaccaaaattattgtctgtaaacaggtgaccttaaaatatagagaaggaagcaaagttactaaacctaaatagttgcgggcctgcgctcaaagccaggcctttgttaatacttttaacaaagtattctttgttaaaagagagattagcagatacaagtgttaacatcaaacccagacttctgagtctgaaaaagagctggccggggaatgccctcctcataccccaagcccgactgcaacgcagtgactctgggaagcaacccagccttcactctagttgttttgtccccgcatcctgtgctggggtatggattctctggcctcctctaagggcagaagcttgaggctttgcctgcacgcttgggtaactgtaaacatcatcttcaggcataaaccatgggcctgtgattgctggagtgattggggcccgaaaacctcagtatgacatctggggaaacactgtcaatgtggccagccgaatggaaagcactggagaacttgggaaaatccaggtgttcttcccgcctctgaagacaacaggtctctcttccttttcaggttaccgaggagacctgcaccatcctccagggcctcgggtactcttgtgaatgccgtggcctgatcaacgtcaaaggcaaaggcgagctgaggacttactttgtctgtacggacactgccaagtttcaggggctggggctgaactgagggctcctgctggattccgaaaaggccgggaagccagtctccttccctgaagcaagcccaggagaagactctccgccccacgccaatcccaaaggcatgcagatggctgtgcatgttggcttctttggacctgcactggaggatttctcagacacatgcaccagattctggctcgaagcagccactgagccataatgcgcaggggaggccagaagctctgtgcctggtctgtaacagtttccaggccagctggagaatgttcactggttcggggctgactttgagatctttgttccctgaggtgccaggcaggcaactttagcacatgatgaaaacagacttccacctcagtggcctgtgggcacgcacaagtgaggtctgtttttctagacaccaagggggagtaagctgagctgtctagcacggattggagactccctctccctggtgggcctggcaatgacagcatttctcacagaggcattctggtaaatgaagctgaaaggggtgttttacatctgtaaacggtttcaaacaggtagagagaaaaacaccacaattaacactgttactttttgccttgtctggcatgtttgttttaaatgaatacattaatggggtttttatccttttgaatgacttttcagacactagacataaatctcttccctccagtgtatgctctgcctttttaaccactgacatgtaaggaggactactgtctagcatcagcttatggggtcagctggctgtggggatagagtcctgaggaatgtggtcacagcaagaaggcggggagcagcagagccttgcctttgaatgaggcagcttgtgaggcaagcattctggagagaggtgctttgaaagtaaggtgcggcctttcacctcttccttgattactcacacatctttgcgttctcccctgccgtccttcaactgtatcttacttttcttaccagaaaggaatggagtctgtttagagacaacttggacaacctgtgagtgcatctcttctttcctttagtcttcacagctaactctggagagcttcaaaactagaaggatctactccgcatgggtgcatgcagaggctcctggatctgggaagcccgccccctcacaaatgctgagccgttcttgctctgaaactgcgtgagtcaaggcaaatgcaaaaagccaggttttggggatgtgtcttactgtgcttcaacttcccaaggaattgaaagtcaacctaactgtaacaacagggtgagaaatgaccaaactgcccgtgactttttctgaatggacttcataaccggaagacttaaccggtggcctcatcaccagagcatcgccaggatttctaatgcactcagtttccctacatagcagggattcttagctaggtgtccccatgaaccccgtaaagttctacacaaagtcttgcatacaggagcctttacaagatgattatacagggttgcagattgggtgactgacca

SEQ ID NO: 461302 - DNA, 1704 bp, Homo sapiens
gcccgctgccactggggcggccactcgggcggcggtggagcgggagcgcgcagcagctgctggccaacgcagtcatcttcctgtgtgggaacctgacaggcgccttccacaagcaccaaatgcaggatgcgtcccgggacctcttcacctacactgtgaagtgcatccagatccgccggaagctgcgcatcgagaagcgccagcaggagaacctgctgctgtcagtgcttccggcccacatctccatgggcatgaagctggccatcatcgaacggctcaaggagcatggtgaccgtcgctgcatgcctgacaacaacttccacagcctctacgtcaagaggcaccagaatgtcagcatcctctatgcggacatcgtgggcttcacgcagctggccagcgactgttctcccaaggagctggtggtggtgctgaatgagctctttggcaagttcgaccagatcgccaaggccaacgagtgcatgcgaatcaagatcctcggcgactgctactactgtgtatcgggcctgcccgtgtcgctgcctacccacgcccggaactgcgtgaagatggggctggacatgtgccaggccatcaagcaggtgcgggaggccacgggcgtggacatcaacatgcgtgtgggcatacactcggggaatgtgctgtgcggggtcatcgggctgcgcaagtggcagtatgacgtgtggtcccacgacgtgtccctggccaaccggatggaggcagccggagtacccggccgggtgcacatcacggaggccacgctaaagcacctggacaaggcgtacgaggtggaggatgggcacgggcagcagcgggacccctacctcaaggagatgaacatccgcacctacctggtcatcgacccccggagccagcagccacccccgcccagccaacacctccccaggcccaagggggacgcggccctgaagatgcgggcgtcagtgcgcatgacccggtacctcgagtcctggggggcggcacggccctttgcacatctcaaccaccgtgagagcgtgagcagtggtgagacccacgtccccaacgggcggaggcctaagagcgttccccagcgccaccgccggaccccagacagaagcatgtcccccaaggggcggtcggaggatgactcgtacgatgacgagatgctgtcagccattgaggggctcagctccacgaggccctgctgctccaagtccgatgacttctacacctttgggtccatcttcctggagaagggctttgagcgcgagtaccgcctggcacccatcccccgggcccgccacgactttgcctgcgccagcctgatcttcgtctgcatcctgctcgtccatgtcctgctcatgcccaggacggcggcactgggtgtgtccttcgggctggtggcctgtgtactggggctggtgctgggcctgtgctttgccaccaagttctcgaggtgctgcccagctcgggggacgctctgcactatctctgagagggtggagacacagcccctgctgaggctgaccctggccgtcctgaccatcggcagcctgctcactgtggccatcatcaacctgcccctgatgcctttccaagttccagagctgcctgttggcaatgagacaggcctactggccgcgagcagcaagacaagagccctgtgtgagcccctcccgcacctgcatactgttttttcccgtt

SEQ ID NO: 461303 - DNA, 2153 bp, Homo sapiens
gcccgctgccactggggcggccactcgggcggcggtggagcgggagcgcgcagcagctgctggccaacgcagtcatcttcctgtgtgggaacctgacaggcgccttccacaagcaccaaatgcaggatgcgtcccgggacctcttcacctacactgtgaagtgcatccagatccgccggaagctgcgcatcgagaagcgccagcaggagaacctgctgctgtcagtgcttccggcccacatctccatgggcatgaagctggccatcatcgaacggctcaaggagcatggtgaccgtcgctgcatgcctgacaacaacttccacagcctctacgtcaagaggcaccagaatgtcagcatcctctatgcggacatcgtgggcttcacgcagctggccagcgactgttctcccaaggagctggtggtggtgctgaatgagctctttggcaagttcgaccagatcgccaaggccaacgagtgcatgcgaatcaagatcctcggcgactgctactactgtgtatcgggcctgcccgtgtcgctgcctacccacgcccggaactgcgtgaagatggggctggacatgtgccaggccatcaagcaggtgcgggaggccacgggcgtggacatcaacatgcgtgtgggcatacactcggggaatgtgctgtgcggggtcatcgggctgcgcaagtggcagtatgacgtgtggtcccacgacgtgtccctggccaaccggatggaggcagccggagtacccggccgggtgcacatcacggaggccacgctaaagcacctggacaaggcgtacgaggtggaggatgggcacgggcagcagcgggacccctacctcaaggagatgaacatccgcacctacctggtcatcgacccccggagccagcagccacccccgcccagccaacacctccccaggcccaagggggacgcggccctgaagatgcgggcgtcagtgcgcatgacccggtacctcgagtcctggggggcggcacggccctttgcacatctcaaccaccgtgagagcgtgagcagtggtgagacccacgtccccaacgggcggaggcctaagagcgttccccagcgccaccgccggaccccagacagaagcatgtcccccaaggggcggtcggaggatgactcgtacgatgacgagatgctgtcagccattgaggggctcagctccacgaggccctgctgctccaagtccgatgacttctacacctttgggtccatcttcctggagaagggctttgagcgcgagtaccgcctggcacccatcccccgggcccgccacgactttgcctgcgccagcctgatcttcgtctgcatcctgctcgtccatgtcctgctcatgcccaggacggcggcactgggtgtgtccttcgggctggtggcctgtgtactggggctggtgctgggcctgtgctttgccaccaagttctcgaggtgctgcccagctcgggggacgctctgcactatctctgagagggtggagacacagcccctgctgaggctgaccctggccgtcctgaccatcggcagcctgctcactgtggccatcatcaacctggtgggtcccgtggtggggaggcaggcctccggggtagagggagacctccagatttgggacgcctacaatgtggccttaaaagctgcctctggttgtcctctcccccgagctcagcaggtggatgtggggggttcccctttgtacactcagggctcctcacctttgggttctcaaatgcggactttgggggcccagagagcttgtgtggccagctccaggaggatgtgatgccttgagccaccacatcctgacatcccattcattcttcacggcccttctgagactcagtttcccctctcagggatgaacccttgctcctctgctggggctcagaggctcagtgctgcagaaagcagcctgcgggacacttgtccacctctctcccagaccccgcatcctgggctagggcctctccctcacctctctgccccggaccctgggtttttggaatgtgttcctgtgaccacctccctcagggtcacctggggaggctgaaaatgttggtcccggcccctccccctggctgctgccgctctgggggtgtctgcaccctcatctcctagcccctctgcc

SEQ ID NO: 461304 - DNA, 2471 bp, Homo sapiens
ctgggcctggggagcagaggtgagaaccctgcatggtctggtagcaaggagccgggctgttctcatgtgttcttggtggagctggtttgggtccacatcagcgagcctgagctccatccctaaatgcagaatcaagtgggcctgccttgctgccgccgccgccgctgctgccgctgccggagcaggaagtggtgggtcccagatgtgactcactctcattaggtagcgtggaaggagccttcggatgggtgagcctgggcgcgtctgaggaagggcaggcgggggccgggccacctccctgcagaccctggccggctgctggggccggggaggagagccaggggagcctggttgattgcttagtcagttgataaacactgttgcctgaacacccgctgtgtgcagagacctagcagataccctggttggggcagtgctaaggattctgccttctgggagctcatttcctgagcagaattccctcttggtacctggcctggcacctggtgcacagaaggcatgagtgcacatctgctgaagagctgaggaactgcgtgtggagtcagcccagtctggatgcacaggaggatgctggcggcacagtgagtgaggcctggtgccagagctgtgcggaccccttgttggccatggagcagcaggcccagaggccctctccccagccctgcttgcctgcctcggagaggacagaggcctaggcccacgggggagggtgttggcagacagatgccctccaggccctggggcctccttaacggccccttaacgacacgcgtgccaagggtggaggatgccagccaaggggcgctacttcctcaacgagggcgaggagggccctgaccaagatgcgctctacgagaagtaccagctcaccagccagcatgggccgctgctgctcacgctcctgctggtggccgccactgcctgcgtggccctcatcatcattgccttcagccagggggacccctccagacaccaggccattctgggcatggcgttcctggtgctggcggtgtttgcggccctctctgtgctgatgtacgtcgagtgtctcctgcggcgctggctcagggccttggcgctgctcacctgggcctgcttggtggcgctgggctatgtgctggtgttcgacgcatggacaaaggcggcctgtgcgtgggagcaggtgcccttcttcctgttcattgtcttcgtggtgtacacactactgcccttcagcatgcggggcgctgtcgccgttggggccgtctccactgcctcccacctcctggtgctcggttctttgatgggaggcttcacgacacccagtgtccgggtggggctgcagctgctggccaacgcagtcatcttcctgtgtgggaacctgacaggcgccttccacaagcaccaaatgcaggatgcgtcccgggacctcttcacctacactgtgaagtgcatccagatccgccggaagctgcgcatcgagaagcgccagcaggagaacctgctgctgtcagtgcttccggcccacatctccatgggcatgaagctggccatcatcgaacggctcaaggagcatggtgaccgtcgctgcatgcctgacaacaacttccacagcctctacgtcaagaggcaccagaatgtcagcatcctctatgcggacatcgtgggcttcacgcagctggccagcgactgttctcccaaggagctggtggtggtgctgaatgagctctttggcaagttcgaccagatcgccaaggccaacgagtgcatgcgaatcaagatcctcggcgactgctactactgtgtatcgggcctgcccgtgtcgctgcctacccacgcccggaactgcgtgaagatggggctggacatgtgccaggccatcaagcaggtgcgggaggccacgggcgtggacatcaacatgcgtgtgggcatacactcggggaatgtgctgtgcggggtcatcgggctgcgcaagtggcagtatgacgtgtggtcccacgacgtgtccctggccaaccggatggaggcagccggagtacccggccgggtgcacatcacggaggccacgctaaagcacctggacaaggcgtacgaggtggaggatgggcacgggcagcagcgggacccctacctcaaggagatgaacatccgcacctacctggtcatcgacccccgggaccccacggtggaggaggcagttccactgccctggccaggtggggcccgccttggcctgtctgctgcccgaccctggcctgcttcagggagtccggcacgtctggccacttctctgtgaatcatccatgaggcttgctcaagaatgtcggcccagccagcgagtggctcctttcactctggtcctcgctatgccttggggctggcccgactgccagaccctgggggaccaagggctggcctgtgagcctccctacacatctgctggcctcactctgcccccagcacccccagtg

SEQ ID NO: 461305 - DNA, 363 bp, Homo sapiens
atgtgtagcaagttttctagataggaaacggaggcccagtgagaatgaagacctcccgttaccctccactactgcagaggttctcaccccatgtgtacatggaaacacccatggtgcttctgtgagcaaaaaccaacctgagcctgaccctccctggccacccaattcttaatcacccggtaacagccaccagatgaaactcatgcagcccgcccccctccccactccccgaaagctgggctgggcagttcagcagtgccatctgctcctgaggccttgccactcttcctgtcccctcaagaggtgaagtggtgtaaggtccggtttcttcccatccaggactggtaccatcagtcctatgac

SEQ ID NO: 461306 - DNA, 517 bp, Homo sapiens
ttgagctagaggatcccctaggtggaacagcgaggtgtccctgcaacggatggaggcagcggagtacccggccgggtgcacatcacggaggccacgctaaagcacctggacaaggcgtacgaggtggaggatgggcacgggcagcagcgggacccctacctcaaggagatgaacatccgcacctacctggtcatcgacccccgggtcccctggtggctccaggaccccacggtggaggaggcagttccactgccctggccaggtggggcccgccttggcctgtctgctgcccgaccctggcctgcttcagggagtccggcacgtctggccacttctctgtgaatcatccatgaggcttgctcaagaatgtcggcccagccagcgagtggctcctttcactctggtcctcgctatgccttggggctggcccgactgccagaccctgggggaccaagggctggcctgtgagcctccctacacatctgctggcctcactctgcccccagcacccccagtg

SEQ ID NO: 461307 - DNA, 4357 bp, Homo sapiens
gcccgctgccactggggcggccactcgggcggcggtggagcgggagcgcgcagcagctgctggccaacgcagtcatcttcctgtgtgggaacctgacaggcgccttccacaagcaccaaatgcaggatgcgtcccgggacctcttcacctacactgtgaagtgcatccagatccgccggaagctgcgcatcgagaagcgccagcaggagaacctgctgctgtcagtgcttccggcccacatctccatgggcatgaagctggccatcatcgaacggctcaaggagcatggtgaccgtcgctgcatgcctgacaacaacttccacagcctctacgtcaagaggcaccagaatgtcagcatcctctatgcggacatcgtgggcttcacgcagctggccagcgactgttctcccaaggagctggtggtggtgctgaatgagctctttggcaagttcgaccagatcgccaaggccaacgagtgcatgcgaatcaagatcctcggcgactgctactactgtgtatcgggcctgcccgtgtcgctgcctacccacgcccggaactgcgtgaagatggggctggacatgtgccaggccatcaagcaggtgcgggaggccacgggcgtggacatcaacatgcgtgtgggcatacactcggggaatgtgctgtgcggggtcatcgggctgcgcaagtggcagtatgacgtgtggtcccacgacgtgtccctggccaaccggatggaggcagccggagtacccggccgggtgcacatcacggaggccacgctaaagcacctggacaaggcgtacgaggtggaggatgggcacgggcagcagcgggacccctacctcaaggagatgaacatccgcacctacctggtcatcgacccccggagccagcagccacccccgcccagccaacacctccccaggcccaagggggacgcggccctgaagatgcgggcgtcagtgcgcatgacccggtacctcgagtcctggggggcggcacggccctttgcacatctcaaccaccgtgagagcgtgagcagtggtgagacccacgtccccaacgggcggaggcctaagagcgttccccagcgccaccgccggaccccagacagaagcatgtcccccaaggggcggtcggaggatgactcgtacgatgacgagatgctgtcagccattgaggggctcagctccacgaggccctgctgctccaagtccgatgacttctacacctttgggtccatcttcctggagaagggctttgagcgcgagtaccgcctggcacccatcccccgggcccgccacgactttgcctgcgccagcctgatcttcgtctgcatcctgctcgtccatgtcctgctcatgcccaggacggcggcactgggtgtgtccttcgggctggtggcctgtgtactggggctggtgctgggcctgtgctttgccaccaagttctcgaggtgctgcccagctcgggggacgctctgcactatctctgagagggtggagacacagcccctgctgaggctgaccctggccgtcctgaccatcggcagcctgctcactgtggccatcatcaacctggtgggtcccgtggtggggaggcaggcctccggggtagagggagacctccagatttgggacgcctacaatgtggccttaaaagctgcctctggttgtcctctcccccgagctcagcagcccctgatgcctttccaagttccagagctgcctgttggcaatgagacaggcctactggccgcgagcagcaagacaagagccctgtgtgagcccctcccgtactacacctgcagctgtgtcctgggcttcatcgcctgctcggtcttcctgaggatgagcctggagccaaaggttgtgctgctgacagtggccctggtggcctacctggtgctcttcaacctctccccatgctggcagtgggactgctgcggccaaggcctgggcaacctcaccaagcccaacggcaccaccagtggcacccctagctgttcctggaaggacctgaagaccatgaccaatttctacctggtcctgttctacatcaccctgcttacactctccagacagattgactattactgccgcttggactgcctatggaagaagaagttcaagaaggagcacgaggagtttgagaccatggagaacgtgaaccgccttcttctggagaacgtcctgccagcccacgtggctgcccactttatcggtgacaaggactggtaccatcagtcctatgactgcgtctgtgtcatgtttgcctccgtgccggacttcaaagtgttctacacagagtgcgatgtcaacaaagaagggctggagtgcctacgcctgctcaatgagatcattgccgacttcgacgagctcctactgaagcccaagttcagcggcgtggagaagatcaagaccatcggcagcacgtacatggcagctgcagggctcagcgtcgcctcagggcacgagaaccaggagctggagcggcagcatgcccacattggtgtcatggtggagttcagcatcgccctgatgagtaagctggacggcatcaacaggcactccttcaactccttccgcctccgcgtcggcataaaccatgggcctgtgattgctggagtgattggggcccgaaaacctcagtatgacatctggggaaacactgtcaatgtggccagccgaatggaaagcactggagaacttgggaaaatccaggttaccgaggagacctgcaccatcctccagggcctcgggtactcttgtgaatgccgtggcctgatcaacgtcaaaggcaaaggcgagctgaggacttactttgtctgtacggacactgccaagtttcaggggctggggctgaactgagggctcctgctggattccgaaaaggccgggaagccagtctccttccctgaagcaagcccaggagaagactctccgccccacgccaatcccaaaggcatgcagatggctgtgcatgttggcttctttggacctgcactggaggatttctcagacacatgcaccagattctggctcgaagcagccactgagccataatgcgcaggggaggccagaagctctgtgcctggtctgtaacagtttccaggccagctggagaatgttcactggttcggggctgactttgagatctttgttccctgaggtgccaggcaggcaactttagcacatgatgaaaacagacttccacctcagtggcctgtgggcacgcacaagtgaggtctgtttttctagacaccaagggggagtaagctgagctgtctagcacggattggagactccctctccctggtgggcctggcaatgacagcatttctcacagaggcattctggtaaatgaagctgaaaggggtgttttacatctgtaaacggtttcaaacaggtagagagaaaaacaccacaattaacactgttactttttgccttgtctggcatgtttgttttaaatgaatacattaatggggtttttatccttttgaatgacttttcagacactagacataaatctcttccctccagtgtatgctctgcctttttaaccactgacatgtaaggaggactactgtctagcatcagcttatggggtcagctggctgtggggatagagtcctgaggaatgtggtcacagcaagaaggcggggagcagcagagccttgcctttgaatgaggcagcttgtgaggcaagcattctggagagaggtgctttgaaagtaaggtgcggcctttcacctcttccttgattactcacacatctttgcgttctcccctgccgtccttcaactgtatcttacttttcttaccagaaaggaatggagtctgtttagagacaacttggacaacctgtgagtgcatctcttctttcctttagtcttcacagctaactctggagagcttcaaaactagaaggatctactccgcatgggtgcatgcagaggctcctggatctgggaagcccgccccctcacaaatgctgagccgttcttgctctgaaactgcgtgagtcaaggcaaatgcaaaaagccaggttttggggatgtgtcttactgtgcttcaacttcccaaggaattgaaagtcaacctaactgtaacaacagggtgagaaatgaccaaactgcccgtgactttttctgaatggacttcataaccggaagacttaaccggtggcctcatcaccagagcatcgccaggatttctaatgcactcagtttccctacatagcagggattcttagctaggtgtccccatgaaccccgtaaagttctacacaaagtcttgcatacaggagcctttacaagatgattatacagggttgcagattgggtgactgacca

SEQ ID NO: 461308 - DNA, 4275 bp, Homo sapiens
gcccgctgccactggggcggccactcgggcggcggtggagcgggagcgcgcagcagctgctggccaacgcagtcatcttcctgtgtgggaacctgacaggcgccttccacaagcaccaaatgcaggatgcgtcccgggacctcttcacctacactgtgaagtgcatccagatccgccggaagctgcgcatcgagaagcgccagcaggagaacctgctgctgtcagtgcttccggcccacatctccatgggcatgaagctggccatcatcgaacggctcaaggagcatggtgaccgtcgctgcatgcctgacaacaacttccacagcctctacgtcaagaggcaccagaatgtcagcatcctctatgcggacatcgtgggcttcacgcagctggccagcgactgttctcccaaggagctggtggtggtgctgaatgagctctttggcaagttcgaccagatcgccaaggccaacgagtgcatgcgaatcaagatcctcggcgactgctactactgtgtatcgggcctgcccgtgtcgctgcctacccacgcccggaactgcgtgaagatggggctggacatgtgccaggccatcaagcaggtgcgggaggccacgggcgtggacatcaacatgcgtgtgggcatacactcggggaatgtgctgtgcggggtcatcgggctgcgcaagtggcagtatgacgtgtggtcccacgacgtgtccctggccaaccggatggaggcagccggagtacccggccgggtgcacatcacggaggccacgctaaagcacctggacaaggcgtacgaggtggaggatgggcacgggcagcagcgggacccctacctcaaggagatgaacatccgcacctacctggtcatcgacccccggagccagcagccacccccgcccagccaacacctccccaggcccaagggggacgcggccctgaagatgcgggcgtcagtgcgcatgacccggtacctcgagtcctggggggcggcacggccctttgcacatctcaaccaccgtgagagcgtgagcagtggtgagacccacgtccccaacgggcggaggcctaagagcgttccccagcgccaccgccggaccccagacagaagcatgtcccccaaggggcggtcggaggatgactcgtacgatgacgagatgctgtcagccattgaggggctcagctccacgaggccctgctgctccaagtccgatgacttctacacctttgggtccatcttcctggagaagggctttgagcgcgagtaccgcctggcacccatcccccgggcccgccacgactttgcctgcgccagcctgatcttcgtctgcatcctgctcgtccatgtcctgctcatgcccaggacggcggcactgggtgtgtccttcgggctggtggcctgtgtactggggctggtgctgggcctgtgctttgccaccaagttctcgaggtgctgcccagctcgggggacgctctgcactatctctgagagggtggagacacagcccctgctgaggctgaccctggccgtcctgaccatcggcagcctgctcactgtggccatcatcaacctgcccctgatgcctttccaagttccagagctgcctgttggcaatgagacaggcctactggccgcgagcagcaagacaagagccctgtgtgagcccctcccgtggcacccctagctgttcctggaaggacctgaagaccatgaccaatttctacctggtcctgttctacatcaccctgcttacactctccagacagattgactattactgccgcttggactgcctatggaagaagaagttcaagaaggagcacgaggagtttgagaccatggagaacgtgaaccgccttcttctggagaacgtcctgccagcccacgtggctgcccactttatcggtgacaaggactggtaccatcagtcctatgactgcgtctgtgtcatgtttgcctccgtgccggacttcaaagtgttctacacagagtgcgatgtcaacaaagaagggctggagtgcctacgcctgctcaatgagatcattgccgacttcgacgagctcctactgaagcccaagttcagcggcgtggagaagatcaagaccatcggcagcacgtacatggcagctgcagggctcagcgtcgcctcagggcacgagaaccaggtactcaagcccaagaggtgaaattcagctgactgtcctcacttaaaggtgacctgtcaccttacttaaagggtgtgcccttatctcgtcctgggggaggggcacaggtacttgtagggctcagccaggattttagtggtggggatcctcaacaagagtggcgcgccagggcccactaggtctgggggctctggagatgcaaggatctgacccacagcctgtcccgcaggagctggagcggcagcatgcccacattggtgtcatggtggagttcagcatcgccctgatgagtaagctggacggcatcaacaggcactccttcaactccttccgcctccgcgtcggcataaaccatgggcctgtgattgctggagtgattggggcccgaaaacctcagtatgacatctggggaaacactgtcaatgtggccagccgaatggaaagcactggagaacttgggaaaatccaggttaccgaggagacctgcaccatcctccagggcctcgggtactcttgtgaatgccgtggcctgatcaacgtcaaaggcaaaggcgagctgaggacttactttgtctgtacggacactgccaagtttcaggggctggggctgaactgagggctcctgctggattccgaaaaggccgggaagccagtctccttccctgaagcaagcccaggagaagactctccgccccacgccaatcccaaaggcatgcagatggctgtgcatgttggcttctttggacctgcactggaggatttctcagacacatgcaccagattctggctcgaagcagccactgagccataatgcgcaggggaggccagaagctctgtgcctggtctgtaacagtttccaggccagctggagaatgttcactggttcggggctgactttgagatctttgttccctgaggtgccaggcaggcaactttagcacatgatgaaaacagacttccacctcagtggcctgtgggcacgcacaagtgaggtctgtttttctagacaccaagggggagtaagctgagctgtctagcacggattggagactccctctccctggtgggcctggcaatgacagcatttctcacagaggcattctggtaaatgaagctgaaaggggtgttttacatctgtaaacggtttcaaacaggtagagagaaaaacaccacaattaacactgttactttttgccttgtctggcatgtttgttttaaatgaatacattaatggggtttttatccttttgaatgacttttcagacactagacataaatctcttccctccagtgtatgctctgcctttttaaccactgacatgtaaggaggactactgtctagcatcagcttatggggtcagctggctgtggggatagagtcctgaggaatgtggtcacagcaagaaggcggggagcagcagagccttgcctttgaatgaggcagcttgtgaggcaagcattctggagagaggtgctttgaaagtaaggtgcggcctttcacctcttccttgattactcacacatctttgcgttctcccctgccgtccttcaactgtatcttacttttcttaccagaaaggaatggagtctgtttagagacaacttggacaacctgtgagtgcatctcttctttcctttagtcttcacagctaactctggagagcttcaaaactagaaggatctactccgcatgggtgcatgcagaggctcctggatctgggaagcccgccccctcacaaatgctgagccgttcttgctctgaaactgcgtgagtcaaggcaaatgcaaaaagccaggttttggggatgtgtcttactgtgcttcaacttcccaaggaattgaaagtcaacctaactgtaacaacagggtgagaaatgaccaaactgcccgtgactttttctgaatggacttcataaccggaagacttaaccggtggcctcatcaccagagcatcgccaggatttctaatgcactcagtttccctacatagcagggattcttagctaggtgtccccatgaaccccgtaaagttctacacaaagtcttgcatacaggagcctttacaagatgattatacagggttgcagattgggtgactgacca

SEQ ID NO: 461309 - DNA, 2591 bp, Homo sapiens
gcccgctgccactggggcggccactcgggcggcggtggagcgggagcgcgcagcagctgctggccaacgcagtcatcttcctgtgtgggaacctgacaggcgccttccacaagcaccaaatgcaggatgcgtcccgggacctcttcacctacactgtgaagtgcatccagatccgccggaagctgcgcatcgagaagcgccagcaggagaacctgctgctgtcagtgcttccggcccacatctccatgggcatgaagctggccatcatcgaacggctcaaggagcatggtgaccgtcgctgcatgcctgacaacaacttccacagcctctacgtcaagaggcaccagaatgtcagcatcctctatgcggacatcgtgggcttcacgcagctggccagcgactgttctcccaaggagctggtggtggtgctgaatgagctctttggcaagttcgaccagatcgccaaggccaacgagtgcatgcgaatcaagatcctcggcgactgctactactgtgtatcgggcctgcccgtgtcgctgcctacccacgcccggaactgcgtgaagatggggctggacatgtgccaggccatcaagcaggtgcgggaggccacgggcgtggacatcaacatgcgtgtgggcatacactcggggaatgtgctgtgcggggtcatcgggctgcgcaagtggcagtatgacgtgtggtcccacgacgtgtccctggccaaccggatggaggcagccggagtacccggccgggtgcacatcacggaggccacgctaaagcacctggacaaggcgtacgaggtggaggatgggcacgggcagcagcgggacccctacctcaaggagatgaacatccgcacctacctggtcatcgacccccggagccagcagccacccccgcccagccaacacctccccaggcccaagggggacgcggccctgaagatgcgggcgtcagtgcgcatgacccggtacctcgagtcctggggggcggcacggccctttgcacatctcaaccaccgtgagagcgtgagcagtggtgagacccacgtccccaacgggcggaggcctaagagcgttccccagcgccaccgccggaccccagacagaagcatgtcccccaaggggcggtcggaggatgactcgtacgatgacgagatgctgtcagccattgaggggctcagctccacgaggccctgctgctccaagtccgatgacttctacacctttgggtccatcttcctggagaagggctttgagcgcgagtaccgcctggcacccatcccccgggcccgccacgactttgcctgcgccagcctgatcttcgtctgcatcctgctcgtccatgtcctgctcatgcccaggacggcggcactgggtgtgtccttcgggctggtggcctgtgtactggggctggtgctgggcctgtgctttgccaccaagttctcgaggtgctgcccagctcgggggacgctctgcactatctctgagagggtggagacacagcccctgctgaggctgaccctggccgtcctgaccatcggcagcctgctcactgtggccatcatcaacctgcccctgatgcctttccaagttccagagctgcctgttggcaatgagacaggcctactggccgcgagcagcaagacaagagccctgtgtgagcccctcccgtggcacccctagctgttcctggaaggacctgaagaccatgaccaatttctacctggtcctgttctacatcaccctgcttacactctccagacagattgactattactgccgcttggactgcctatggaagaagaagttcaagaaggagcacgaggagtttgagaccatggagaacgtgaaccgccttcttctggagaacgtcctgccagcccacgtggctgcccactttatcggtgacaaggactggtaccatcagtcctatgactgcgtctgtgtcatgtttgcctccgtgccggacttcaaagtgttctacacagagtgcgatgtcaacaaagaagggctggagtgcctacgcctgctcaatgagatcattgccgacttcgacgagctcctactgaagcccaagttcagcggcgtggagaagatcaagaccatcggcagcacgtacatggcagctgcagggctcagcgtcgcctcagggcacgagaaccaggtactcaagcccaagaggtgaaattcagctgactgtcctcacttaaaggtgacctgtcaccttacttaaagggtgtgcccttatctcgtcctgggggaggggcacaggtacttgtagggctcagccaggattttagtggtggggatcctcaacaagagtggcgcgccagggcccactaggtctgggggctctggagatgcaaggatctgacccacagcctgtcccgcaggagctggagcggcagcatgcccacattggtgtcatggtggagttcagcatcgccctgatgagtaagctggacggcatcaacaggcactccttcaactccttccgcctccgcgtcggtgagcccgggtgatggagcggggtggggagcccctgcctctaggccagtccacccagtctgtgtggcacagctg

SEQ ID NO: 461310 - DNA, 2165 bp, Homo sapiens
gcccgctgccactggggcggccactcgggcggcggtggagcgggagcgcgcagcagctgctggccaacgcagtcatcttcctgtgtgggaacctgacaggcgccttccacaagcaccaaatgcaggatgcgtcccgggacctcttcacctacactgtgaagtgcatccagatccgccggaagctgcgcatcgagaagcgccagcaggagaacctgctgctgtcagtgcttccggcccacatctccatgggcatgaagctggccatcatcgaacggctcaaggagcatggtgaccgtcgctgcatgcctgacaacaacttccacagcctctacgtcaagaggcaccagaatgtcagcatcctctatgcggacatcgtgggcttcacgcagctggccagcgactgttctcccaaggagctggtggtggtgctgaatgagctctttggcaagttcgaccagatcgccaaggccaacgagtgcatgcgaatcaagatcctcggcgactgctactactgtgtatcgggcctgcccgtgtcgctgcctacccacgcccggaactgcgtgaagatggggctggacatgtgccaggccatcaagcaggtgcgggaggccacgggcgtggacatcaacatgcgtgtgggcatacactcggggaatgtgctgtgcggggtcatcgggctgcgcaagtggcagtatgacgtgtggtcccacgacgtgtccctggccaaccggatggaggcagccggagtacccggccgggtgcacatcacggaggccacgctaaagcacctggacaaggcgtacgaggtggaggatgggcacgggcagcagcgggacccctacctcaaggagatgaacatccgcacctacctggtcatcgacccccggagccagcagccacccccgcccagccaacacctccccaggcccaagggggacgcggccctgaagatgcgggcgtcagtgcgcatgacccggtacctcgagtcctggggggcggcacggccctttgcacatctcaaccaccgtgagagcgtgagcagtggtgagacccacgtccccaacgggcggaggcctaagagcgttccccagcgccaccgccggaccccagacagaagcatgtcccccaaggggcggtcggaggatgactcgtacgatgacgagatgctgtcagccattgaggggctcagctccacgaggccctgctgctccaagtccgatgacttctacacctttgggtccatcttcctggagaagggctttgagcgcgagtaccgcctggcacccatcccccgggcccgccacgactttgcctgcgccagcctgatcttcgtctgcatcctgctcgtccatgtcctgctcatgcccaggacggcggcactgggtgtgtccttcgggctggtggcctgtgtactggggctggtgctgggcctgtgctttgccaccaagttctcgaggtgctgcccagctcgggggacgctctgcactatctctgagagggtggagacacagcccctgctgaggctgaccctggccgtcctgaccatcggcagcctgctcactgtggccatcatcaacctggtgggtcccgtggtggggaggcaggcctccggggtagagggagacctccagatttgggacgcctacaatgtggccttaaaagctgcctctggttgtcctctcccccgagctcagcagcccctgatgcctttccaagttccagagctgcctgttggcaatgagacaggcctactggccgcgagcagcaagacaagagccctgtgtgagcccctcccgtactacacctgcagctgtgtcctgggcttcatcgcctgctcggtcttcctgaggatgagcctggagccaaaggttgtgctgctgacagtggccctggtggcctacctggtgctcttcaacctctccccatgctggcagtgggactgctgcggccaaggcctgggcaacctcaccaagcccaacggcaccaccagtgtgaaaggttataacctgagtctcagttccatcatctgcaaaatggggacaaatataacagctcaccttgctgttgtgaggacaacatgggatcatggggggacagggtgctggacacagaaagagtaaccagcacatgggtgccaacgatggccataaccatccccactcccg

SEQ ID NO: 461311 - DNA, 1706 bp, Homo sapiens
gtctgggaggtgtacccaacagctcattgagaacgggccgggatgacaatggcggttttgtggaatagaaagggggaaaagatgagattgaaattgagccagtacgacagagcagcgataaaatgctctactgtgaggccgaatccccgccgactgttgaaaaagtgaaaccagcccgggagaattcggaaacagacctggagattgaaggcgagcatgggcatttgggggcagtcagggcagcttctcctcagaaactggagaaatctggtttccaggagctgtcatctcactcctttccagagtctgccctgcggatggcctgtggaggaaatgtggcagaaaggcctgctcgattttgcctggagtcctcctccgggctggcaggggagagcagctgcagcttcccacgcttgtcacctgcctcaggagcagtgccctcacgtcgtcttgttaaaagcggaatcaatacacaaacaagtttccccaagaagggaagcaccgaaagagaacacttgtgaagcaagagaatgacgctggttccatctgacagggtcagcctcaaacttcccaggccaagcctagcccagtcacccttcctcccctgcatccttgcagctggctggtgggcagtgattcacaggcagcagagatggaggaaggccagttctgccaaattaaactgtgaagttcatctgcatagagtcagtttataaacctccccaccatggtcaacatacaacatacatcttcacccttctacgcagacctcctccccgctgacccccaggcagcttgttgctctttttctggcttcttgtccacttcaagtctgttgttaacgttgcttctaacacccaacttcattcacatggttggagaagatgatgagaaatttttcaccactggacaaaaggagctgtacctggaggcctgcaagctgatgggtgtagtgcctgtctcctacttcattcggaacatggaggagtcctacgtgaacctcaaccaccacggcctgggccccaggggtaccaaggctattgctatagccctggtgtccaacatggctgttaccaaactggagctggaagacaattgcatcatggaggagggcgtcttgagcctggtggagatgctacaagagaactactacctccaggagatggtactgtgcccccctgtgctggctcttaccatcatccctggggattcacaacccactggagacaagccagaggccctgccaggacccaggctgcctccaggctcctgcccgcccctgcccttcccacacgacttcttagaggagggccacatcacaggactcaagtaaaccacaaaagacatcattttttcatgagggccctttggtgagcttttttacataccgaagtgttttcttgccttttagaatatttccaacaatcaccttggtttggagggggccagaatcatctcagatttctttgagagaaacagttcttctatctggagccttgagctttcagaccaattaccaaattaaaaagctggatctcagtcacaaccaattctctgatgtaggaggggagcacctgggccagatgctgggtgagtctccctggaggaagggacagcaaaggggagggatagggaagaatcacttggcagagcggaatctcccttttaaacatgatttttaaatgttgtgattataaaagtgatgt

SEQ ID NO: 461312 - DNA, 1772 bp, Homo sapiens
gtctgggaggtgtacccaacagctcattgagaacgggccgggatgacaatggcggttttgtggaatagaaagggggaaaagatgagattgaaattgagccagtacgacagagcagcgataaaatgctctactgtgaggccgaatccccgccgactgttgaaaaagtgaaaccagcccgggagaattcggaaacagacctggagattgaaggcgagcatgggcatttgggggcagtcagggcagcttctcctcagaaactggagaaatctggtttccaggagctgtcatctcactcctttccagagtctgccctgcggatggcctgtggaggaaatgtggcagaaaggcctgctcgattttgcctggagtcctcctccgggctggcaggggagagcagctgcagcttcccacgcttgtcacctgcctcaggagcagtgccctcacgtcgtcttgttaaaagcggaatcaatacacaaacaaggttttctaatcttctaaatgtttccacgtggggcatcctatgcaatctttgcaatagtcctaggagtttccccaagaagggaagcaccgaaagagaacacttgtgaagcaagagaatgacgctggttccatctgacagggtcagcctcaaacttcccaggccaagcctagcccagtcacccttcctcccctgcatccttgcagctggctggtgggcagtgattcacaggcagcagagatggaggaaggccagttctgccaaattaaactgtgaagttcatctgcatagagtcagtttataaacctccccaccatggtcaacatacaacatacatcttcacccttctacgcagacctcctccccgctgacccccaggcagcttgttgctctttttctggcttcttgtccacttcaagtctgttgttaacgttgcttctaacacccaacttcattcacatggttggagaagatgatgagaaatttttcaccactggacaaaaggagctgtacctggaggcctgcaagctgatgggtgtagtgcctgtctcctacttcattcggaacatggaggagtcctacgtgaacctcaaccaccacggcctgggccccaggggtaccaaggctattgctatagccctggtgtccaacatggctgttaccaaactggagctggaagacaattgcatcatggaggagggcgtcttgagcctggtggagatgctacaagagaactactacctccaggagatggtactgtgcccccctgtgctggctcttaccatcatccctggggattcacaacccactggagacaagccagaggccctgccaggacccaggctgcctccaggctcctgcccgcccctgcccttcccacacgacttcttagaggagggccacatcacaggactcaagtaaaccacaaaagacatcattttttcatgagggccctttggtgagcttttttacataccgaagtgttttcttgccttttagaatatttccaacaatcaccttggtttggagggggccagaatcatctcagatttctttgagagaaacagttcttctatctggagccttgagctttcagaccaattaccaaattaaaaagctggatctcagtcacaaccaattctctgatgtaggaggggagcacctgggccagatgctgggtgagtctccctggaggaagggacagcaaaggggagggatagggaagaatcacttggcagagcggaatctcccttttaaacatgatttttaaatgttgtgattataaaagtgatgt

SEQ ID NO: 461313 - DNA, 2903 bp, Homo sapiens
aaaactgtacagtaaaaatggtgataactgtgtagtttcttatgatgctctcgtggacaagatggaggcacacacagtggctgcagggactggtgggaagaggggtgcctgaggagtgctgatcagatgagcattgtggaagcattgcgggatcacatccttttggcaccgggggctgctgttttgtcccctgctgtgttctgctaacattggtgtcgatgaatgacaccagactgcatggcaagcagccccaccaaagggttgacaatgagcgtcccagtggctcctaagaaatcatgttacactcagttgcgggacaacagaaatgcagcaagaaataataatgaaagcatcttaagtctgggagatacgaatgccaatcaaatcatgttggaggtcagctcctctcatgacgagtccaagacatgtgacctgggagatgaaattggaaatacaaattcaagtgagccagaaaaccgtacccatttccataaggaatttcaccaacttcagggctttgggaaaggctctcaggctggctctgccagcctgaaagattttagactttcttcaaccattcagagggaactcaatgaagagcacacagtggagagaggcacagatagcctgcagaccacgcggagtattcagggaccaagtctgtcgagttggaggaatgtgatgagtgaggccagtctagacgttttggctaaaagggatgctgaaattccccggcatgttcccaaggataaactggcaaagacccttgacaatgaggaactgaggaggcattctttggaaagagcaagcagctctgtagctgcagtcgggagcctgactccgcagcatccacagcctctatccctcgactcccgggaagcacggggtcagatacctgggggtggggaggggccacagaagacattgccagaccacgctgtcccggcagctttccctgcaactgacagtacctcagagggaaagagtgtgcgtcatcctaaaccatctacctcagaaagcaagcagagcactccctcagagacccaaacagtgggggcacatgtactgcaggtgtgcagtgagcacacatcacattccgcccatccagagcctgctctgaatttgactttggcatcgaaggaaatcccaagtaaactggaagcacaattaggtcagggaaagggagaggccaagctggatctgaaatatgttcctcccaggagagttgaacaggagggaaaggcagcccaggaagggtatctgggatgccacaaggaagagaatctgtcagccttggagggaagggatccatgtggggaagcacacccggaagccaccgatgcacttggccatctgctgaacagtgacctccaccaccttggggtgggaagaggcaactgtgaagagaagagaggagtcaacccaggggagcaggattctctccacaccacccccaaacagggctctgcttccttaggaggggctgataatcagcccactggcaaaatttcaccatgtgcaggtgagaagttgggtgaaaggacatccagcagcttttcaccaggtgacagtcatgtggcttttattcctaataatctgactgacagcaagcccttggatgtcattgaggaggaaaggcggttgggcagtgggaataaggacagtgttatggttttggtgttcaatccttctgttggagagaacaagacggaggtgcctgagcccctggaccctcaaagtggccgctcagaagcacgggaaagcaaagaggtcaccacatctgttgctgaaaacaggaaccttctagagaatgcagataagattgaaagcacctcagcaagagcagattcagttctcaatattccagcacccctccacccagagacaactgtgaacatgacctaccagcctacaacacccagtagcagttttcaggatgttagcgtgttcggtatggatgcggggtcccccttggtagttccaccccctactgatagtgcacgcttgttgaacacgtcccccaaagtgcctgacaagaacacttgccccagtgggatccccaagcctgtcttcacacattccaaggacacaccttcctcgcaggagggaatggagaactatcaggttgaaaaaacagaggagaggacagaaactaagcccatcattatgcccaagcccaagcatgtgaggcccaagatcatcacctacatcaggaggaatccccaggccctgggccaggtggacgcctcgctggttccagtggggcttccatatgccccgcccacatgtaccatgcctcttccccacgaagagaaggcagcaggtggtgacctgaagccatctgccaacctctatgagaaattcaagccagacctgcagaagccaagggtcttcagttccggattgatggtgtctggaatcaagcccccgggacatcctttcagtcaaatgagtgaaaagtttttgcaggaggtaagagaatgtcattatgatatggtctataagttgactgtcccaatatctgtgacatattttcaatgagttatgaaagtaaaatgtcctctttaagtgaattacagattttcatggatacacttgtgaagaaatggagtttttgactagaggagattgtctagagaaatgaccatttttaactagaagagtctgattatcttaataagatgtacccaatatctaaggagacccatttaaatttcacttgctataattcatatgaaattagatgagtatgccttaaataggcttccatgtttaaataagtgaatataatataatataagccaggttaaaggaagaaagaatgcaaaattactgtgttcttcaaatagatcagactcattcctcaatggggagtattttctacctgggagtatctcttattc

SEQ ID NO: 461314 - DNA, 2000 bp, Homo sapiens
caccacagggctcatgctagttttctctttctgtattttcagttctcttttccttcaattcagacctagggaatgtggggggtcgttcatttagccagaaatggggcaagggatttgagagttttgctcatagaagccctttgcaaaatttttcttgatgaaagtgctccagacaatgtattagaggtgacagcccgtgccataacatactacctggatgtatctgcggaatgtacccgaaggattgttggggtagatggagctataaaagcactttgtaatcgtttggttgtagttgaacttaacaacaggactagcagagacttagccgaacagtgtgtaaaggtattagaactgatatgtactcgtgagtcaggagcagtctttgaggctggtggtttgaattgtgtgcttaccttcattcgtgacagtggacatctagttcataaagacaccttgcactctgctatggctgtggtatcaagactctgtggcaaaatggagcctcaagattcttctttagaaatttgtgtagaatctctgtctagtttattaaagcatgaagatcatcaggtttcagatggagctctgcgatgctttgcatcactggctgaccgatttacccgtcgtggtgttgacccagctccattagccaagcatggattaactgaggagctgttatctcgaatggctgctgctggtggtactgtttcaggaccatcatcagcatgcaaaccaggtcgcagcaccacaggagctccatccaccactgcagattccaaattgagtaatcaggtgtcaacaattgatcttctgaggtcggagcttccagattcaattgaaagtgcattgcagggtgatgaaagatgtgtgcttgatactatgcgtttggttgaccttctcttggtgctattatttgaaggacgaaaagctttgccaaagtctagtgctggatctacaggcagaatcccaggactccggagattagatagttctggggagcgctcacatcggcagcttatagattgtattcgaagtaaagataccgatgcacttatagatgcaattgacacaggagcctttgaagtaaattttatggatgatgtaggtcagactctattaaactgggcctctgcttttggaactcaggaaatgactctgttacggcatggtgcaaatccagatctgagagatgaagatgggaaaactccattagataaagctcgagaaaggggccatagtgaagtggtagctattcttcagtctccagagggttgatgaatccagaagctctgtgaaataatttttggaacgaagtggagtatccaaaattatcttcttaatttgttattgagcacattgaagttactagtgctctttagtattcttataagcatcattgaaacaatgttctaatttcagtgtatttgttaattagagataattattatttgaagttggatatatcttaaggtttttttccttgaaagcaaaagtttccaaaaaagtatttctttaaaaaatatttgtctgtaggtgattggatgtgtccagttaataaaggagatgataagaaaaagaaagatacaaacaaagatgaagaagaatgtaatgagcccaaaggagatccggaaatggcacccatatacttgaaaaggttattgccagtgtttgcacaaacatttcagcaaactatgctgccttcaataaggaaagcaagtcttgctctaattcgaaaaatgattcatttttgctctgaagcactgttaaaagaagtttgtgattctgatgttggtcacaatttgcctacaatactagtggaaatcactgcaactgtcctggatcaagagactgcaaatttaaatataccttttctgtgtctagtggttcccagcaagatttatttctaatatttagtgaatgcttactgtgtgttaataacagggtagtaatatttttgaaaaaaatggtggtatatgagttaataattgtagaatccc

SEQ ID NO: 461315 - DNA, 2371 bp, Homo sapiens
aggtgagtcagctaggccccttcctcctccagtgcctgtctacctatgtttgatgcttggggctagaaagactgaccttgtagcccctcaccttctctccccaatgcactgggctggttcagcagctgaccaatgagggtcatgcttgcatactggccttgggtgagtggctcaggaacagtttgcaagaccgtgttgaagctacttgtaactagaccattttcccagcttgaccatgagcttcttcaaggcatctcttctcagtctccactgtagctctgtggggatgctaaccctggcttccaaggatctgaagaggaagctgcggctgtgactgtcccttttcggtctgtcttcatcctgcctgactcacgggtctcctgtcctcctgcatagcttgcggtggtgaggtgatggcagccatggacacaggccagagagctgacccaagcaatcctggtgacaaggaaggggaccttcaagggctgtggcaggaactctaccagctccaggctaagcagaagaagctcaagagagaagtcgagaagcacaagctttttgaagactatctgattaaggtccttgagaaaatccccgagggtatgtacacagcttcctcggaaagccctttctctccacagccacctactggctgcaggactgcgacaccgtgtgtggcctcatggagccacgagctgctcatctacagaatgggaatccacaaaggccaaccccacagtagtggggaagggctcaggcagccgagtctgactgcttggtcccaactccagctccactgtcgctaacagtgtggcctctggcaagttctcaaggccttgattttcttatctgtacaatgggaacagcaataattatgtggactagatgaagtcatcctttataagcacagcacagggccccacatttagctagtacctggtaaacgttggccattattattattattttgtttgtctttggttttgtgtttttgtgttgctattattaactaagagtataaggacatctgagatgaggttttctgtgttgttttatgagtactggaaactcattggaaaagggaaggggagtcacacatatttattgttatcattattatttcaacaccatcaataataattattaccatttattaaatatgtaccctgtgctaagctctttagcaaatcttttttacccctcctatgagctttgcactactgtgtcactcaggctcagagagggctgctccaagcagcaacatctccttgagggcagtctcccgcctcgctcggggcacccacccatcccgccatggcgctgtctccgtaggctgcacgggatgggaggagccggaggaggtgctggtggaggccacggtgaagcactacgggaagctcttcacagccagccaggacacgcagaagcgcctcgaggccttctgccagatgatccaggctgtccaccggagcctggagtctctggaggaggaccacagggctctcatgttgagcctcaagatccggctgtgtcagctgcagaagaagtgctaccgcaagcaggagcagtggtggcagctgaagcacagcatcacttaccagaaggacattgactttgacacacacaccagcagcagctataatgatcagctgctcggctacatgcaaatgaccatcaccaacatggcccggcagtgctgcccctctgcccacggcgtgcccaagagcatggatctcttctccaagctcgatctgattaaggactcagtcatgcatgggatgctgcattcacagatccaagagagggagcctcatccccacctgctctccagcaccatgaacagtgcacatgctgagggcaggagccctgtgtcctttatctccaactccctgtgcctaccggggggctggcacaaagcaggtggtgctcggtgttgaaggaacaggtgcgtgtgtgcatgaacaagggagttaggttcctcacggggtaccagaatgctgcttactggctaccgtgcatccctgagttgtccccgcaacctgtgagccagaaagtttttcctaatccccttttataggaggaaactgcagctcagtgtgaaaatgtgccttgtctgaggctacacagacagtcagtggttgagcctggacatgaattcaagtgcattgggctccaaattgaaccactgtcactgtcacaggacagttcagtagtaaaggaactgtaagaacaagagctcacgtgtgggatgcttgctggatgctaagctcattacagcttaggcagctttccctgcaggagtgtttatcccattgtacagatgaggctcagacagtttaaaagctttcccaaggtcacatagccatcatgt

SEQ ID NO: 461316 - DNA, 251 bp, Homo sapiens
tatgacttcttccatcatttatttgaagccagcacttgttgaaagttcccaggcatcttggtggccaggaactgaagacttgggggtgatggggctgtaccagttatagggccgcaagtgaaacaaggcccctgcagaatggcaccctcaacctctccagagctggggatgcagcccgaagaccttggacttgggatttaatgagccctgggtcctcatccagtcctgccagatgaccttaagctgctcac

SEQ ID NO: 461317 - DNA, 824 bp, Homo sapiens
aggtgagtcagctaggccccttcctcctccagtgcctgtctacctatgtttgatgcttggggctagaaagactgaccttgtagcccctcaccttctctccccaatgcactgggctggttcagcagctgaccaatgagggtcatgcttgcatactggccttgggtgagtggctcaggaacagtttgcaagaccgtgttgaagctacttgtaactagaccattttcccagcttgaccatgagcttcttcaaggcatctcttctcagtctccactgtagctctgtggggatgctaaccctggcttccaaggatctgaagaggaagctgcggctgtgactgtcccttttcggtctgtcttcatcctgcctgactcacgggtctcctgtcctcctgcatagcttgcggtggtgaggtgatggcagccatggacacaggccagagagctgacccaagcaatcctggtgacaaggaaggggaccttcaagggctgtggcaggaactctaccagctccaggctaagcagaagaagctcaagagagaagtcgagaagcacaagctttttgaagactatctgattaaggtccttgagaaaatccccgagggctgcacgggatgggaggagccggaggaggtgctggtggaggccacggtgaagcactacgggaagctcttcacagccagccaggacacgcagaagcgcctcgaggccttctgccagatgatccaggctgtccaccggagcctggagtctctggaggaggaccacagggctctcatgttggtaacagctgcttgaagtctgctccattccccgtggcccagggag

SEQ ID NO: 461318 - DNA, 415 bp, Homo sapiens
gtcctcatccagtcctgccagatgaccttaagctgctcacagcccctttctgaacctctgtctccttttctgtgaggtggggatgctaaccctggcttccaaggatctgaagaggaagctgcggctgtgactgtcccttttcggtctgtcttcatcctgcctgactcacgggtctcctgtcctcctgcatagcttgcggtggtgaggtgatggcagccatggacacaggccagagagctgacccaagcaatcctggtgacaaggaaggggaccttcaagggctgtggcaggaactctaccagctccaggctaagtatgtgttgtcccacccctgccccagccccagccccagtgcttccccagtgggctaagtggctggacttagcaaacatgtccccgaggaggccaggacagg

SEQ ID NO: 461319 - DNA, 792 bp, Homo sapiens
aacctctgtctccttttctgtgaggtggggatgctaaccctggcttccaaggatctgaagaggaagctgcggctgtgactgtcccttttcggtctgtcttcatcctgcctgactcacgggtctcctgtcctcctgcatagcttgcggtggtgaggtgatggcagccatggacacaggccagagagctgacccaagcaatcctggtgacaaggaaggggaccttcaagggctgtggcaggaactctaccagctccaggctaaataccttctttgctgcctgggagatgctgctatgggcgtttatttgatctgcttgtggctcagtttgctcagcagtgaaatgaaggtgcagagactcctaagtctatggccaactgataaagtggcagaagaagctcaagagagaagtcgagaagcacaagctttttgaagactatctgattaaggtccttgagaaaatccccgagggctgctccaagcagcaacatctccttgagggcagtctcccgcctcgctcggtggtcttgatccagaatccctgtctcagtctctggctgaactttccaaggctgcacgggatgggaggagccggaggaggtgctggtggaggccacggtgaagcactacgggaagctcttcacagccagccaggacacgcagaagcgcctcgaggccttctgccagatgatccaggctgtccaccggagcctggagtctctggaggaggaccacagggctctcatgttggtaacagctgcttgaagtctgctccattccccgtggcccagggag

SEQ ID NO: 461320 - DNA, 585 bp, Homo sapiens
tcactgatcctgtgaagtaagaaaatgtacagctctttcagacacttggaaaaatcaacagagccacaagagccagataaagaagatgacagctctgcccaacagcagagacataggaacattagccaggaaaatgcatcacagaagaaaacagttactcaggttgtcactcatactttgcagataaggaaactgaggctcaaagtcatattaacaagtggtgcagcaaaagcagacaccttggtcctctggtttccagtctcaggtggccctcacccaggatgtgattccagcagcatggattattgcaaaaatcaagatgcagacaaaatggcaaatctgagaagagatggacaggcaaaatggagcacaacggagtcactactgctacgtcagtgtggagtcgcaccttgagccatagtgttacttaaccatgttccttgatggcacacagaatgttatactgtaatatagatgtaaatattaatataatatagaagcatatagtatatatatcatactgtaatatagaaataaatattatacttctggaattctggaaatagttctgtctgtgatgtcatc

SEQ ID NO: 461321 - DNA, 5587 bp, Homo sapiens
gcctcctctggctcagtcgcacagctacctggtaggtgactggaggtgttgatcagtgcttggtgggattttgctgatgtggccccaagcccgcctccctccccaccctgcgatggcagaagaaactcgacaaagtaaattggcagcagccaagagaaaggtaaaaacacaccaggtcacggacccccaacccagccatagatcctctccaacgacaagactgctgccagagtccataccactcccgaggttcaccggactgggacccccacaccggtgcctctgggctacccccaccaaagttttgccagtcagccccaccccttcagcaagcagcccagtctctgccctcaccaatcaccccagggtgactttgggcaggtgaatcctggggatccccgctcctttactgggccctcatctcctgccaccccaagcttgacctcccagggctttttgggctcacatctccaaggacctgggtcccacagccccagaccccaccctcaccagtcatccctgggtgactttaggctggtgaatcctggggctccctgctgctgactcttcccttccctcctgctgcctcaaggtggacctccctaggctgtgtgcactggtgtctccaaggacctgggtcccagctctgtttttccctcccctatcatggagcgatgactcggacatcatgctgatgtggtccctccccctcaccaggaagagtggaatgtagtgattcagcaacaggtatccacggggagagccctacatcatctgctaccctgaaggatctggaggtaagaggctctgggcagaggtgcagtgaccctgcagggcagccctccaacctcctcctccagagcccgtgccaagaactagcagtagtcccagactcgaggaaaagaaagcaaacaacgagaaacagaaagctgaaagggggctagagcacttgcttggcttttctcccaaaggttcaaatccagagattgaacatacagaaagggaaactaaatacggacctgtaccacacgaaacgttctctcagatactttgaagaagagtccaaggatctggccgtccgtctgcaacattcattgcagcgtaaaggagagttagagcgggctctctctgctgtcaccgccacacagaagaagaaggcggagagggtgagtccaaccacctgccgcgtcccctggtagcctggcttcacagacagaggagtgagcctaaaggtcccttctgcaggatggagtgtcctgcccagaaggcagcatggccatttctcactgcttttttgtatggttgttagcggcagcttgggactgagtcagctgctgtggcagttctccagccgcagtaaagcacgtatggagtggaagttagagcagtccatgcgggagcaggcactgctgaaagcgcagctgacacagttgaaggagtcacttaaagaagtccagctagagagggatgaatatgctgaacatctaaaaggagagagggcccggtggcagcagaggatgagaaaaatgtcgcaggaggtttgctcgttgaagaaggagaagaagcatgataaatatcgggtagagacgctggagaggagcttgtccaaactcaaacaccagatgggtaagatggggctggcgtgacctggcagcaggactggcatcagagggctgtgagggtggcttggagtgccccagcgaggtgggtggatgggaagggctttgaggcagagggaaagaggtctgtgccaggagacggcaagtcttgtcatctcaatgagcctcagtgtccccatcagcaaagagggcccgttgtcagccacccgcagtgctctttctctgaaagtggtttggaagactggctaccatctggctgaacccttgcccccggagcccccagcagtgccctctgaggtggagctgcagcacctgaggaaggaactagagagagtggcaggagcgctccaggcccaggtggagtacaatcagcgcataagtctcctgaatgaggggcaaaaggagagacttcgggagcaggaggagaggcttcaggagcagcaggagaggcttcgggagcaggaggagaggcttcagcagctggccgagccacagaacagcttcaaggagctgaacaatgagaacaagagcgtactacagttggagcagcaagtaaaggagctgcaggagaagctaggcaaggtgaaggagacggtaacctccaccccatccaagaaggtctgggaggtggagctgaagagccaagaggctcagagtctgcagcagcagccagaccattacctgggtcacctgcagcagtacgtggccacctatcagcagcaggagcgcctggaagctgccagccagcagaaacagcagctaacggcccagttgagcctcatggctctccctggggaaggacacggaggagaacatctggacagtgagggggaggaggcacctcggcccatgccgagtgtcccagaggacctggagagcagggaggccatggtggcatttttcaagtccgctggagctagtgcccaggagaagcaggcacagttacaagagcaggtgaaagagcagagggtgtgctgccagcgcctggctcacccggtggcctcggcccagaaggagccagaggcagcggtcccagccccagggcctgggggcgagtctagcggctttatggaccacctggaggagaaggcagacctgagtgagctggtggagaaagaagaacttggattcttccagtactacagagagagatgccatcagaaagtttatcaccctataacaaagccagggggcagtgccaaagatgcagcaccgggaggaggacaccatcaggctggccctggacagggaggagatgaaggtagagtgtgcaacatctctgcgggggtgggggtggctgtgacggtgagcgctggcagcagcgtgacagctgagcacccctccctccaggtgaagctgctggagctgcaggagatggtgttgcagctgcgtggagcctgtgcaaggagaggccagggagggttctccccacgacaagcctactgcacagccgatcgtgcaggaccaccaggagcacccaggcttgggcagcaactgctgtgtgccattcttttgctgggcttggccgccaagaagaaggagataaacatgaccatctgagctcttcattagcacaatatgtggtttgccccaagtgtgcactatttaatactttgtaatatgccaccaagagtactgacatttagagttgtttaaaggccgagaactggaaacagcctttccctcattttctgtgtattggtgatgggagtaataacattttgggggagctttttaaatttcacagaagaggaaagttgcctgctctggcaggtatgtgcaagatagagtgtgtttcatttgttctgttgccaagaattagtgctgtactattgtagttcctttaggatttgtatgtgctctgggctcatgaagatattgcatcatgagctgcagcagttgtactcttttttgatgacctaaaaagggcttatttctgaggaatgaaaggttcccatcattgactatggatgtggaaaacctttcctagcttagagcatttgtatctatattttaaagtcagagttcatgttacctgttttaatcacatgactgcatgtcccagtacacaaaagggcactggttggcattcttcttaatgtatttagtaaagatcagaagaaatcctttaagagtttaaatgtccctggaacacgcatacaggctctagtcaagaatgaattagagtgaaggaaagctgtgtgacacctggcattcctctgttcatggagcttctttgaggcttgaagattgattttaccatctagaccactctgcctattcttcaaccaccttggttactttgacataggaattgacttcttttccttgaatggaaaacactttgaaataataataaacattgttataaactaatatatgtgagagtgcttagttgaaacaaaaaggagttttagtagacagtattatactatctttgaaaatcaaggagaagtttatgcaacttaaaatgtgtacaaactgcagtgcaatctactgttggtgaatgtcagtgtattatcaggaaacatgtctatacaatcacagagttatatttcctcacaaacttctttgtgaagagtgaaatgtgtttctgtacctctgggtttcacttacgggcatattttgtgcagtagttatgtgattgtgcctatgcatgatgaatgaatgaatttcagttgtacattgcctaaatcataacttgatgatgcttgggaaagactcaacagttaaaacttcatgaagttctaatgtctgtgttccaaaacacatcacattattaggatgtagggagatatgtatgtgtgctccctggggtggggatttctagttactagaccatctccatttttagcatttggcatcctcatgatacttttataaatacgacattaacaggagagcagcagtacgattttgccgatggaataacagatttgccggcaatcactgaaagagtgcaaatatcgggtccttgtgacttcaacggactcttccaaattgtatgaatgtatcaatgtattagataaacccagtttcagaatgataaagaaaaaatgttagaccaaataatgcggctagttaacagtggtacgatttctagcccgtggctttaaaatgcacttaaagtcctgtccttgccttttattttctgaacttgatgtttttgcattctttgagttcagtttaaagacaactacgagcatctgtaaccaatctgacaataatgtgttcatcaggtgcctatggattaaatcacatactggcatatttaagctgaatgtcaatctggaaaataaattgactgtattaacagaaataccactctttgtgtagatatttgtcgtatatttaagaaaaagctaaaaagaatggaaatcgcatgactataacttaagtctttcttcaaagtgcatgcagtcttttgcgatacctcattcagccaagtattggtattcttcctcattcggtataaggcagctttcaatttgcttagaaggcaacattggaaggttagagttcatcagaaacagaattctaaaatgtgagttcaattcaataaatttgaatttctgtaggaagaatcaaatcaccgatttaaagagtgcaatatataataatcatttttaaagtattggattaaatctgataggttttccagaaatgaacaaaaatcagctctaaaaccaaagctgatttttagaaaatttgaaaatgtaaatcagccctatccatactatagtttctctaaaactttatctgaaagagtcattttaaaataactattaaacaatgtaactgctatcttaatgttctgaaataagttaaaacattttaaaatatgaatactgtaaaggaaataaatggtgggaaggaaaagtagagaaagaaatgccaattccagtccaaagctttatttgccaagttttcttagaatgaattttaccaatttatgaattcttgtaagc

SEQ ID NO: 461322 - DNA, 1074 bp, Homo sapiens
gggctctggaagcttggcgctcactcagctcccagaagttctcagagggtgagggtcccacatctcctgcaggacaggccctagctaccgagtcacagaaacccagggccgaagcaaagtcccaatcccagagaggctggggcacacctacaactgaaaggaggcttagaaatccttcagagaccaccctatcggttctcctccacctggacaggatgagccagcaacacagaaggaagaggccttcctccgaaaggtatatttgtaagccgagttgaatgctttgtggagagagatcccattcaggagggctaagcttgaatccaggacttactgaggagcaatcacacagaaaaggacagacacttcgagggaagtacctcagaatgagagccttgcattcatttactttggctcagtagctcctactcctatagcatttgggaaggaagaatgattgcctccatcccatgtaacacagctcatattatacagaaggagaatgcaaacttccttctctcaagcctctaaaggtggaagcaaacctaccttacaaacagcaggcttgctcctaatcagtgccgtgaagggaccaatgctgcctggtacatggagtcagtaggaggatgggcagatggccactagcatcagtgacaatgcagcctggagtggattcaacagacaacacagacttcccttcactctcatctctgcccccaccagaggcactgagtcactggcttaactgagtcactgaacctggaagggaccacgtcctccttcattcactcattatctcagtcagcatatacctctatgtgtcaggcactgtcatggccgctgctccagcaatagataggacagggcccctgccctcaaggagcttccagtccagtcagggctaccccttcaatgccacccccctgctggagagcctggatcttgggtaaggttccacatctgttactgctgtaacctggtgatgtcacttactcctctgtgtcttggtttctttatctgatatgaaagtctcatgacttgctgaataaatgtcataacatttcatttaactca

SEQ ID NO: 461323 - DNA, 901 bp, Homo sapiens
gggctctggaagcttggcgctcactcagctcccagaagttctcagagggtgagggtcccacatctcctgcaggacaggccctagctaccgagtcacagaaacccagggccgaagcaaagtcccaatcccagagaggctggggcacacctacaactgaaaggaggcttagaaatccttcagagaccaccctatcggttctcctccacctggacaggatgagccagcaacacagaaggaagaggccttcctccgaaagacaggtttctaagacagccaccgatgggtcctacctcctcgtattcacatcctatgtaatctcctccccagtgtgggctggacctggtgacttgcttccagtgaatagaatatagcaaaagtgattgatgtcacctccaagattcagctatagaagactatgactatgactttcctcttggctagcattctcgctaacccttcctgcttgcttgtactgagctgccctatgaagaggcccatgtagggtggcctgggtgggggtgatctgtggccaacagccagcaaggaactaaatcctgtttacaaccacatgagcttggaaggagatccttccccagtaaagccaggagatgaatacagccccagcctccagcttcattgcagcatcgtgagacacccacaagcaggactcagctaagccacagccagaattctgtcccacagaacttcaagacaactagtgctgttgcttttcagctgcagagttttgacataatttgttgtatagcaatagccagctagttatcaataaccactattgctcctattgtttctcaccacatatccatatagtcatgaggaaacctctttaaatgagacaaagaatcagaactaataaaagataagcaaattcctttaaata

SEQ ID NO: 461324 - DNA, 2015 bp, Homo sapiens
gggctctggaagcttggcgctcactcagctcccagaagttctcagagggtgagggtcccacatctcctgcaggacaggccctagctaccgagtcacagaaacccagggccgaagcaaagtcccaatcccagagaggctggggcacacctacaactgaaaggaggcttagaaatccttcagagaccaccctatcggttctcctccacctggacaggatgagccagcaacacagaaggaagaggccttcctccgaaagaaaaagcacaagaaagatggacacatggcagagtcttaaagtcaaagaagtattctgtaagcataattcttcctatgaatgccttctctataaagaggttgaagcaaggtatagaggccagaagaggtcattgtctccaaatagcaagcaagacctctccgaggctaactttgtgcagtctgtaggtgtattcatgccgtggctcaaatctttaaatccaactttaaagatatttttatccttattcaaaaaacatatccaaaattaaaaatatatatgtgctttttttttaacttagaaaactcttatatccctacttaaacatgtgcaaagtacaaaactttaaaaagacaaagttataatcagaactgcccctcaaatgtaaattgcacctctccttgaagacatgcagcagctctgggagcctcgagatcactgctgcccggtcatagtgtccccaacgatgggtgagcgccctgggaggtttcctcagaggaccgtgcaggcagtctggaggcagtggtccacattgcggtgtggcctctgtggctttgccttctactccagacataaaatccgagggcttcttgcatgggctgatccggggcaccgcctaccttgccggctgggcagctacaacctgaaacacctggaatctgagtccccagccttgccccccgcagctgccagcttcttctgtcctgttggtccccgcgggaactggttggggaggggacggggcggtggtactggagggctgggccagtcgccagcggtgctagagaatgagttccggtcctgccccgcaccgggctggcactgggcacagggacaggccttggaccccgcgaggaccccactgctgaaaccgccccagccgccgccctccctgagtgttcactcagctggactaaagacctgaatctgaaaagcaaaatttgaaacaataaaggagaaaacataaaaatataatttaaaaagtaaaaagtaaattggaaaaaaatcaaaatatatctttcctacattctgaactcaaggaggtttgtagacacaaaactgctctgatatcctatattcattacttcccagtgagtaagtctgaaataattgacttggtaccgggagtggttaccaacctctgattgattggttaattagtgtggatagggctaacagtaacaacccacaaaatatctaaagatgggatatagcaggctaaagtcagcaagacaaccttcttaattattaccagaagagtcctttaaccattcaacaaaatggagcaacagttaaaaatctgctacaacaaaaagaaaaggccaataccattctctgacagttttcaccaaacatgcatagaataaattattttaatcttatacaaagttcatcaaagaatagaaattagagaaaatggtccccaatttgtactataaggctaaccatgtttggcaaggttagtattatctactggtgcattagttaatagataagtagataaattagttatctactggtacataacaaattagcccaaaacttaggagatatgggatcaattgcaaagtattcaacattttaaaataaaatttggaactaaacatgtggttatgtttatctctcaacataatcttcatgaattaataagccagaaaatttgcataccaattgttaagcattaagagatttttttgaaaagtttagtgattatataatggcatacttagaaaactaaaatgaaaatttgaataatgtggct

SEQ ID NO: 461325 - DNA, 661 bp, Homo sapiens
gggctctggaagcttggcgctcactcagctcccagaagttctcagagggtgagggtcccacatctcctgcaggacaggccctagctaccgagtcacagaaacccagggccgaagcaaagtcccaatcccagagaggctggggcacacctacaactgaaaggaggcttagaaatccttcagagaccaccctatcggttctcctccacctggacaggatgagccagcaacacagaaggaagaggccttcctccgaaagacaggtttctaagacagccaccgatgggtcctacctcctcgtattcacatcctatgtaatctcctccccagtgtgggctggacctggtgacttgcttccagtgaatagaatatagcaaaagtgattgatgtcacctccaagattcacatcgtgagacacccacaagcaggactcagctaagccacagccagaattctgtcccacagaacttcaagacaactagtgctgttgcttttcagctgcagagttttgacataatttgttgtatagcaatagccagctagttatcaataaccactattgctcctattgtttctcaccacatatccatatagtcatgaggaaacctctttaaatgagacaaagaatcagaactaataaaagataagcaaattcctttaaata

SEQ ID NO: 461326 - DNA, 2599 bp, Homo sapiens
cgccctggttctcagggccgtgaccaccaccatgaccggcagacttcagggcggaggggcggccgtcggtcccgagtcccccaccccatcctggacacccccacgcgcgcacacccatggcggggcaccggctgaccgggtgggcatttggagggccccatgggagcgggtcccgggccgcgccggtgtgctccttaacccgcggcgacacatggttcgagcacgtgagcatgctggtaatcatgctcaactgcgtgaccctgggcatgttccggccctgtgaggacgttgagtgcggctccgagcgctgcaacatcctggaggcctttgacgccttcattttcgccttttttgcggtggagatggtcatcaagatggtggccttggggctgttcgggcagaagtgttacctgggtgacacgtggaacaggctggatttcttcatcgtcgtggcgggcatgatggagtactcgttggacggacacaacgtgagcctctcggctatcaggaccgtgcgggtgctgcggcccctccgcgccatcaaccgcgtgcctagcatgcggatcctggtcactctgctgctggatacgctgcccatgctcgggaacgtccttctgctgtgcttcttcgtcttcttcattttcggcatcgttggcgtccagctctgggctggcctcctgcggaaccgctgcttcctggacagtgcctttgtcaggaacaacaacctgaccttcctgcggccgtactaccagacggaggagggcgaggagaacccgttcatctgctcctcacgccgagacaacggcatgcagaagtgctcgcacatccccggccgccgcgagctgcgcgtgccctgcaccctgggctgggaggcctacacgcagccgcaggccgagggggtgggcgctgcacgcaacgcctgcatcaactggaaccagtactacaacgtgtgccgctcgggtgactccaacccccacaacggtgccatcaacttcgacaacatcggctacgcctggatcgccatcttccaggtgatcacgctggaaggctgggtggacatcatgtactacgtcatggacgcccactcattctacaacttcatctatttcatcctgctcatcatcgtgggctccttcttcatgatcaacctgtgcctggtggtgattgccacgcagttctcggagacgaagcagcgggagagtcagctgatgcgggagcagcgggcacgccacctgtccaacgacagcacgctggccagcttctctgagcctggcagctgctacgaagagctgctgaagtacgtgggccacatattccgcaaggtcaagcggcgcagcttgcgcctctacgcccgctggcagagccgctggcgcaagaaggtggaccccagtgctgtgcaaggccagggtcccgggcaccgccagcgccgggcaggcaggcacacagcctcggtgcaccacctggtctaccaccaccatcaccaccaccaccaccactaccatttcagccatggcagcccccgcaggcccggccccgagccaggcgcctgcgacaccaggctggtccgagctggcgcgcctccctcgccaccttccccaggccgcggaccccccgacgcagagtctgtgcacagcatctaccatgccgactgccacatagaggggccgcaggagagggcccgggtggcacatgccgcagccactgccgctgccagcctcaggctggccacagggctgggcaccatgaactaccccacgatcctgccctcaggggtgggcagcggcaaaggcagcaccagccccggacccaaggggaagtgggccggtggaccgccaggcaccggggggcacggcccgttgagcttgaacagccctgatccctacgagaagatcccgcatgtggtcggggagcatggactgggccaggcccctggccatctgtcgggcctcagtgtgccctgccccctgcccagccccccagcgggcacactgacctgtgagctgaagagctgcccgtactgcacccgtgccctggaggacccggagggtgagctcagcggctcggaaagtggagactcagatggccgtggcgtctatgaattcacgcaggacgtccggcacggtgaccgctgggaccccacgcgaccaccccgtgcgacggacacaccaggcccaggcccaggcagcccccagcggcgggcacagcagagggcagccccgggcgagccaggctggatgggccgcctctgggttaccttcagcggcaagctgcgccgcatcgtggacagcaagtacttcagccgtggcatcatgatggccatccttgtcaacacgctgagcatgggcgtggagtaccatgagcagcccgaggagctgactaatgctctggagatcagcaacatcgtgttcaccagcatgtttgccctggagatgctgctgaagctgctggcctgcggccctctgggctacatccggaacccgtacaacatcttcgacggcatcatcgtggtcatcaggcactacggggtgcgcacctgttaggtcagctgcgtctcagatgtttctagaaactagcggagctgttccctgcaggaacaaag

SEQ ID NO: 461327 - DNA, 2426 bp, Homo sapiens
cggccgcgcagctggtgcctccggctggtctgcaacccatggttcgagcacgtgagcatgctggtaatcatgctcaactgcgtgaccctgggcatgttccggccctgtgaggacgttgagtgcggctccgagcgctgcaacatcctggaggcctttgacgccttcattttcgccttttttgcggtggagatggtcatcaagatggtggccttggggctgttcgggcagaagtgttacctgggtgacacgtggaacaggctggatttcttcatcgtcgtggcgggcatgatggagtactcgttggacggacacaacgtgagcctctcggctatcaggaccgtgcgggtgctgcggcccctccgcgccatcaaccgcgtgcctagcatgcggatcctggtcactctgctgctggatacgctgcccatgctcgggaacgtccttctgctgtgcttcttcgtcttcttcattttcggcatcgttggcgtccagctctgggctggcctcctgcggaaccgctgcttcctggacagtgcctttgtcaggaacaacaacctgaccttcctgcggccgtactaccagacggaggagggcgaggagaacccgttcatctgctcctcacgccgagacaacggcatgcagaagtgctcgcacatccccggccgccgcgagctgcgcgtgccctgcaccctgggctgggaggcctacacgcagccgcaggccgagggggtgggcgctgcacgcaacgcctgcatcaactggaaccagtactacaacgtgtgccgctcgggtgactccaacccccacaacggtgccatcaacttcgacaacatcggctacgcctggatcgccatcttccaggtgatcacgctggaaggctgggtggacatcatgtactacgtcatggacgcccactcattctacaacttcatctatttcatcctgctcatcatcgtgggctccttcttcatgatcaacctgtgcctggtggtgattgccacgcagttctcggagacgaagcagcgggagagtcagctgatgcgggagcagcgggcacgccacctgtccaacgacagcacgctggccagcttctctgagcctggcagctgctacgaagagctgctgaagtacgtgggccacatattccgcaaggtcaagcggcgcagcttgcgcctctacgcccgctggcagagccgctggcgcaagaaggtggaccccagtgctgtgcaaggccagggtcccgggcaccgccagcgccgggcaggcaggcacacagcctcggtgcaccacctggtctaccaccaccatcaccaccaccaccaccactaccatttcagccatggcagcccccgcaggcccggccccgagccaggcgcctgcgacaccaggctggtccgagctggcgcgcctccctcgccaccttccccaggccgcggaccccccgacgcagagtctgtgcacagcatctaccatgccgactgccacatagaggggccgcaggagagggcccgggtggcacatgccgcagccactgccgctgccagcctcaggctggccacagggctgggcaccatgaactaccccacgatcctgccctcaggggtgggcagcggcaaaggcagcaccagccccggacccaaggggaagtgggccggtggaccgccaggcaccggggggcacggcccgttgagcttgaacagccctgatccctacgagaagatcccgcatgtggtcggggagcatggactgggccaggcccctggccatctgtcgggcctcagtgtgccctgccccctgcccagccccccagcgggcacactgacctgtgagctgaagagctgcccgtactgcacccgtgccctggaggacccggagggtgagctcagcggctcggaaagtggagactcagatggccgtggcgtctatgaattcacgcaggacgtccggcacggtgaccgctgggaccccacgcgaccaccccgtgcgacggacacaccaggcccaggcccaggcagcccccagcggcgggcacagcagagggcagccccgggcgagccaggctggatgggccgcctctgggttaccttcagcggcaagctgcgccgcatcgtggacagcaagtacttcagccgtggcatcatgatggccatccttgtcaacacgctgagcatgggcgtggagtaccatgagcagcccgaggagctgactaatgctctggagatcagcaacatcgtgttcaccagcatgtttgccctggagatgctgctgaagctgctggcctgcggccctctgggctacatccggaacccgtacaacatcttcgacggcatcatcgtggtcatcaggcactacggggtgcgcacctgttaggtcagctgcgtctcagatgtttctagaaactagcggagctgttccctgcaggaacaaag

SEQ ID NO: 461328 - DNA, 566 bp, Homo sapiens
cggccgcgcagctggtgcctccggctggtctgcaacccatggttcgagcacgtgagcatgctggtaatcatgctcaactgcgtgaccctgggcatgttccggccctgtgaggacgttgagtgcggctccgagcgctgcaacatcctggaggcctttgacgccttcattttcgccttttttgcggtggagatggtcatcaagatggtggccttggggctgttcgggcagaagtgttacctgggtgacacgtggaacaggctggatttcttcatcgtcgtggcgggcatgatggagtactcgttggacggacacaacgtgagcctctcggctatcaggaccgtgcgggtgctgcggcccctccgcgccatcaaccgcgtgcctagtaagtgaccggccccgactgggcttgagatcaacaggcttgcgtgtccgccagccctgcagagctctcaaaagggcccccaggagcacaggactgggaaatgaaggttaccaggcactccggccccagcccagaccccagcagtggggtggcccctgccgctatccgcgggccttgtacatgt

SEQ ID NO: 461329 - DNA, 1750 bp, Homo sapiens
ccacctcaggcagacccgataccgcgtacccctaagcatgagtctcactctgtcgctcatgctggagtacagtggaaacacccaggtctccctggcaatcttccccttaagcttcagacagacggctgctgatggggccatctggatggagacttgggactcgggcttgtgttttccaggctgtttgtctctgaagggccccggctctgtgactggcactgcgggggactctctgacagtgtggtgtcagtatgagagcatgtacaagggatataacaagtactggtgccgaggacagtacgacacgtcatgtgagagcattgtggagaccaagggagaagagaaggtggagaggaatggccgcgtgtccatcagagaccacccggaggctctcgccttcactgtgaccatgcagaacctcaatgaagatgatgctggatcttactggtgcaaaattcagacagtgtgggtcctggattcatggtcacgcgatccctcggacctggttagggtgtatgtttccccagcaattacaaccccaaggaggaccacacatccagccacacctcccatcttcctggtggtgaaccctgggcgaaacctcagcaccggggaggtgttgacccaaaattcagggtaagcacgcagggcctggaggccatggagggagcaaccctggggtggaagctggggggtgggggtggcgcacctgtctttcaatggtgatgtattatataactgtaggacaagacccaaaccaggaaaccagcattgttacaatactgttagctagactgcagactttgttcagttttcaccgtttttaacatacattggtttatggatatgtttgtgtagagttccatgcaattttacagatccaggtaactaccacccccgtcaaaatacagaaccaatccatcatcacaaggatctccctcatgctgtcccttgtatttgcacccttatcccattcctgtcccctggaaaccactaatctgttctccatctctacagtgtcatccttttgaggacaaatgaaattatgcagtatgtaatattttgagattgactttttaattcactgagccttgagatccatacaagtggttgcacttaccacaaccaatagctgattccttcctattgctcagcaggatttcattgcatgggtgtaaaataatttgtttaaccattcacccactgaacccaaacaagacatgtctgtgcaagtaatggctgctggactgtgacctctgagtaaaggataggtgtttcagggcctcatttttattcttgggaccatatggtgcccccagcaggcttgggaagtgaccttctaaagtgcacagatgggcctgcagggatgctgtgtgggccagctccaggctgccattcagaggcagaatcaactctgctctctggccttgtgactggggaccaggtggcttcaccccttcacgtcccgctattcttatatgtgacatgaaggcgctacattatgattcttccacaaggcagtttaaaaacatggctgcaaatttcttgatactccttccatgaagagttgtggcttaggtcccctccccttgggtctggctgggttgtgactgtttcaacttgtggactagaacagtgtttctcaacattttttcattgttatcctaagataacaatgaatatccctaaaaaaagaatatccctaaatatctcccctcatgaaatgttaataccaaagatgtattgtaca

SEQ ID NO: 461330 - DNA, 1615 bp, Homo sapiens
gaacatgtggctgctcccagctctactccttctctgcctctcaggctgtttgtctctgaagggccccggctctgtgactggcactgcgggggactctctgacagtgtggtgtcagtatgagagcatgtacaagggatataacaagtactggtgccgaggacagtacgacacgtcatgtgagagcattgtggagaccaagggagaagagaaggtggagaggaatggccgcgtgtccatcagagaccacccggaggctctcgccttcactgtgaccatgcagaacctcaatgaagatgatgctggatcttactggtgcaaaattcagacagtgtgggtcctggattcatggtcacgcgatccctcggacctggttagggtgtatgtttccccagcaattacaaccccaaggaggaccacacatccagccacacctcccatcttcctggtggtgaaccctgggcgaaacctcagcaccggggaggtgttgacccaaaattcagggtaagcacgcagggcctggaggccatggagggagcaaccctggggtggaagctggggggtgggggtggcgcacctgtctttcaatggtgatgtattatataactgtaggacaagacccaaaccaggaaaccagcattgttacaatactgttagctagactgcagactttgttcagttttcaccgtttttaacatacattggtttatggatatgtttgtgtagagttccatgcaattttacagatccaggtaactaccacccccgtcaaaatacagaaccaatccatcatcacaaggatctccctcatgctgtcccttgtatttgcacccttatcccattcctgtcccctggaaaccactaatctgttctccatctctacagtgtcatccttttgaggacaaatgaaattatgcagtatgtaatattttgagattgactttttaattcactgagccttgagatccatacaagtggttgcacttaccacaaccaatagctgattccttcctattgctcagcaggatttcattgcatgggtgtaaaataatttgtttaaccattcacccactgaacccaaacaagacatgtctgtgcaagtaatggctgctggactgtgacctctgagtaaaggataggtgtttcagggcctcatttttattcttgggaccatatggtgcccccagcaggcttgggaagtgaccttctaaagtgcacagatgggcctgcagggatgctgtgtgggccagctccaggctgccattcagaggcagaatcaactctgctctctggccttgtgactggggaccaggtggcttcaccccttcacgtcccgctattcttatatgtgacatgaaggcgctacattatgattcttccacaaggcagtttaaaaacatggctgcaaatttcttgatactccttccatgaagagttgtggcttaggtcccctccccttgggtctggctgggttgtgactgtttcaacttgtggactagaacagtgtttctcaacattttttcattgttatcctaagataacaatgaatatccctaaaaaaagaatatccctaaatatctcccctcatgaaatgttaataccaaagatgtattgtaca

SEQ ID NO: 461331 - DNA, 3061 bp, Homo sapiens
gactcctacattattattacaggaaatcttcgctgctttggagactaaaagagcccaaaggcaggtaggtgagccgcggatacaagcctccctgtctccctgttgttgcatacaggtctcacaggaaactaagtgaggagtagggagggcagtgggttaggaacagcgatggccagcagatggcgccaggccccaaggcatgacccgctggccgcaggcgcgcctaggagtggccgcgaagctagtccccaaacaaagctggagccaatgcgctctctgggagtccagagctccccggggtccgccctgacccgtggctccgcctcgcctcgctcccgcgcccagagcggcgctcacagggccccggtggctgacgattgtgtcctgcgtgggataatcgaaagtgtgcacaagtcactcactgatcagacgtcccagggagaccgaggggtggagctgccgcaggacctgcctcattcagatggaaagcaaatggcactggaagaacgtttcatctcctgcatctgtgggatcagccccagtacaggcaaaaatctcatgctttcataccagcccctctggggctttcatctctgctccaaaaaaatggacagcttcaaaaattcaaaaatcaattggaatggagccagctctgtccagcgggttattaatggccctggagctgactaatcctatttgcacagccttttggtaaacagcttcaacaacaactagggtggaaaagaaaacacacaccccatccaatcaagacaaacttcaagtattgatttcactgcctccttctcccctgctgccacttttgaaacaaatttagaatgtttttgtctcctatttgactatgttgtcaccctagtggttgagactgaggacactgtctagggtccactatccaaataatgacaatggggaagggatgcctcacatgagcagattcccatagtgtttgtcatgaacggaattgcatagagtttgttatgagcagatttgcatagttttttgtcatgagcagaatcacatagtgtttgtcatgagcataattgcatagtgtttgtcatgagcagattcacataatgtttattgtgagctgatttgcatagcatttgtcacgagccgatttgcacagtatttgtcatgagcagaatcgcatcgcatttgtcatgagcagaatcacatcatatttgtcatgagtggatttgcatagtgtttgctgtgagcggaatcacatagtgtttgccgtgagcggaatcgcatagtgtttgtcatgaatggattcgcatagtatttgtcatgagcagatttgcatagtatttgccacgagtggaatcacatcatatttttcatgaatggattcgcatagtgtttgctgtgagtgaaatcgcatagtatttgccgtgagcagcatcgcatagtgtttgccgtgagcgaaatcgcatagtgtttgccgcgagcggcatcacatagtgtttgttgtgaatagattcacatagtatttgtcatgagtggaatcacatcgtatttgtcatgagtggaatcgcatagtgtttgctgtgagtgaaatcgcatagtgtttgctgtgagtgaaatcgcatagtgtttgtcgtgaatggattcacatagtatttgtcatgagtagaatcacacagtatttgtcatgagcgggtttgcatagtatttgccatgagtggaattgcatagtatttgccatgagcagaatcgtatagtatttgtcatgctgtgacggaagaagtttagcagaggattatggagatggtctcagcaacaagactgcctggatttccatcctagttcctgccccaggtggcttaacctctctgcagttccgtttcttcacctgtaaaatagggataagaattctgttggaagaattaaataagctaagaagtatggagtacttggaacaaggtaccaggtggatacttgagtgctaagctggttgtccttgggcccttcatgccaggctcccagaggccctgcactctgaacatcaggcaatgcctctctatgatacatagctttaatcagcagcaaaataaaatggggctcattgaataaggcttacaaagatgatgagctcctgcctgggtttgcactgcctgctgtgcggacgagccgcatctgtggactcctccttagtcagaccaagctgccatctttaccttggctccaaaggtgacctatgagctgccacacctactctaggaatgcccagcaaagtcctgacttggcaacagggaccagggatagagactttgacacatctccggtgactcttctggaaaggagtggaagatctgccggtgagcaatagaagcgtcacaccccggttcccaaacccagccctagacattctggtgccaagaggtgtcacttcctggcaaaggtgaagggagggtcagtttctccctgctgttcctgattccatcagctcttgacccacagagcaaacatgtgcccagcctctgcagcgacaaccaggtgttctcctggactcaccctggcccagatccgctcggtggagttggcatctgctgtgagcctcccatttgatttgacggtttccatttagtaggtatttgtagatgcagccagtcctttgaagaattattatgctcataaagtgcagagaaaatggtatagccctgcctacttctcagttttctgaggctcaggaatcagcacgttgttttcctgatttcgctctaggctttcttcactcccgtaatgagcagtaggggtcactgtgtagccacagaacgcctccacgaggctccagaaatctaactccacctacctctgggctggaccagaacacttggatgaaacggccacgtcaccacatcttcacaaagtcaggggacacatttagcaggatcttttctgattgaaatgatcaatggctatttctatgttgctgaagtgaaaatgaatatagtggtttgggttggaatcactatgttgatataatacatatatagtgatataaatgactatattgatataaatgatattgccaccaact

SEQ ID NO: 461332 - DNA, 1651 bp, Homo sapiens
gtgaccttgacaaggacccagagataaagatccttcccacatggctccgaagcccctcccttcctgctcacaccgcatgcctctcccagagaactagaggctgcagcggcagcagttggagcatctcactgcggggctcgggaaggaggaaaggagtgagcatgtcctgctcctgcatgtccctgcttaagctcaggactggcccttccaggccaaggaccccagcatagaccccaggacagggccccaaggatccctggctcatgagagcggcttgctgggctgccccaagagagcctgaaggaaacacattgttgagctgagctgacgtcgctgtttcttccagactgctctctaaagtgggcagggtagcgaccggccggctccgatggtgacgtcccactgccaaggggtgggagtggggagagtctccacagagcttcggagaagctgctaagatggaaaagtggaaacttggcagacagatccagcctccctggccactggcccatgctcgtggctcctggatggcgctgccacgttctgagcagcttgggacaggtggagatcaggactggcagctgcaaggacacaccagagccacagaaactaaagagaatttccaaaaggagtctatggtgaagtctctgaggatgcaaagaagacaaggagaatgaaaatccaatgaaagcctgattgtatttgttgaccttaaggaaagtgattttatggtacagcctctctggaagggagggtgtgttcgctcacagaatgcaaataccctttgaccccctaatctttcttctaggagtttctcctacagataaacttagaagggtgctcaaataagtaagttcaaggatatcctctgaagcattgccgtagtataaaaaaagcacagataccctcaaaggacatcattaggggcctggtaaaataaattccacacagtggaacaccgtgtagctctttagagaataaacagctctctatatgtgatctggaacaatctccaagctatattgtgaagtgaaaattacaaacccttactgaaaagcactaaagaaaatccaaagaaatggaaaagcaaagcgtggtcttagatagaagactcaatatcattaaaaaaaaaaaaaaactcataatcaggcaaggagaagacactgattaccatcagattggcaaaattaagccatctgatgatgtctgtggagctgttactggaaagggtcccaaaccagaccccaagagagggttctttgatcttgagcaagaaagaatttgggataagtccacagggaatgtggcccagcaggtctcagcatcattttacccagcccctattcaagttaaagttgctctgcttccaatgcctctgacatatttcccccctcctttttacaagaggaccactaatcctaagggttgtagagaaagcatcagcatactgacggccattcataactctgagttccaacaaaaggtgatatctggaagactggcaaatgttcaatttaagaaaacggcgagtaagcttattctgcattcctacacaacgagtacaacaggaatatattccacaatagtaaagcaaaataagtaaaattatctgatatggtttgcatctgtgtccccaccaaatctcatgtcc

SEQ ID NO: 461333 - DNA, 1584 bp, Homo sapiens
ccttgagagggccagggcactgggccaggaaggaggcagaagcctgcaggagaggcctgtggaggggcttcgggcctcagacaagcccctctctggtgtccttggagcccaggatacctggctgatgccatcacctcagcggttggcctgtgaggccggagcgctggcacacagtggctacggtggcaccatgtttggtggtcatgggacctcaggaccttcctgcgcgctgctggcactcatctccccaccttggcgactactccatagtcaagtcccacaacgacaagaacaagaagctggaggaaggcagccccgggtacaacccccctgaagaggcgccagtgaagtctgtggggcggagggtcctggacgggctgaagcactgttaccacagcttcagccttctctggatggacaccaggacagccacacactcgctctgggggattctcagtggccatatgctgacccaccgggagcacaggcagtttgtccgtgtccgtgctgacctcttttgcctggtcccgctcctcatctttgcagtggtgcttttcatggagttgctaagatccgagagacaggaaagacctaacaatgaagaaatcatgcgctttcccaaattatttgaggatgagctgaccttggataacctcacctgccagcagctgctcaaatccaccttgcagactcttccagagacagtggtgaagggagcccaggtgaaagtggacaaggttaaggaagctatcccaagaaacgaagtggaagaagccacccctgagaggccagtggctgaccagcagccagaagtgcctgatgttatcctgccctcagaggccctgaaggacactgcccctgtgctggagatcttgaaggaggagaaaataactaaagaagaaatgggtgtacttagcgatgcgtgttctaaactgaaggagcaaaataagtccctaaccaaggagaaggaggagctggagctgctgaaggaggatgtccaggacgatagtgatgacttgcaagagatcaagaaggaagtttcaaagaccagcaaagaaaaatatgtggaaaaatctaaagccagcaagacactgacaaagagagttcagcagatgatctggtggatagacagcttgatcgcacagctggagatggatcagaggcctggcaagctgggccaggcagaggactcagggggagcgggagagaaagtcatcggtatcactgagctcatcagtaccatgaagcaaatcaagaacattccagaaaacaagctgatcagcttggcctcaacactggataaaagtaagaatggcaaggtcaacactgacaagctcattaaggtgattgagcttgtggacaaagatgttcacatctctaccagtcaggtggctgagattgtagcaatgctggagaaggaggagaggtggaggagaagaagaaggctaagggaaaggctgaggaggaggctgcagaagtgaagaattagggctggtttttgctctcaggcatgttggtggcccgacaggtgtctgcctccatcctgcttcactagctgttgtggtaatgaccataataataatc

SEQ ID NO: 461334 - DNA, 2214 bp, Homo sapiens
cgcccagcggcagagcccacaaaactgccactggccgccaccgggttcctccacctccttcccgatctcaggctggagaagtggtgcaggggtcgctgcgaaaggagaggagcgtgtatgacgccacatccggcgcgcggcggaactggcctcctttgcttccgcggcggggccggaagtaggagcggcggcggcggcggcggcggcggtcgaaagcggagtgaaagagggaggcagggagccggagagccggaaccggagtcgcagcggcggagacccctgtgcggtgcggagggggcggcggccccgactctgacccgcgccgggggtgggccatggcggagatcagcgacctggaccggcagatcgagcagctgcgtcgctgcgagctcatcaaggagagcgaagtcaaggccctgtgcgctaaggccagagagatcttggtagaggagagcaacgtgcagagggtggactcgccagtcacagtgtgcggcgacatccatggacaattctatgacctcaaagagctgttcagagtaggtggcgacgtccctgagaccaactacctcttcatgggggactttgtggaccgtggcttctatagcgtcgaaacgttcctcctgctgctggcacttaaggttcgctatcctgatcgcatcacactgatccggggcaaccatgagagtcgccagatcacgcaggtctatggcttctacgatgagtgcctgcgcaagtacggctcggtgactgtgtggcgctactgcactgagatctttgactacctcagcctgtcagccatcatcgatggcaaggtaagccagcccagggctccatgggacagggagaggaggggggcttcaggcctcagccccgtcctctttccctgctctcccctgtagatcttctgcgtgcacgggggcctctccccctccatccagacctggatcagattcggacaatcgaccgaaagcaagaggtgcctcatgatgggcccatgtgtgacctcctctggtctgacccagaagacaccacaggctggggcgtgagcccccgaggagccggctacctatttggcagtgacgtggtggcccagttcaacgcagccaatgacattgacatgatctgccgtgcccaccaactggtgatggaaggttacaagtggcacttcaatgagacggtgctcactgtgtggtcggcacccaactaactgctaccgctgtgggaatgtggcagccatcttggagctggacgagcatctccagaaagatttcatcatctttgaggctgctccccaagagacacggggcatcccctccaagaagcccgtggccgactacttcctgtgaccccgcccggcccctgccccctccaacccttctggccctcgcaccactgtgactctgccatcttcctcagacggaggctgggcgtgggggggggctgtcctggctctgctgtcccccaagagggtgcttcgagggtgaggacttctctggagaggcctggagacctagctccatgttcctcctcctctctccccacttgaaccatgaagtttccaataatttttttttctttttttccttcttttttctgtttgtttttagataaaaattttgagaaaaaaaatgaaaaaattctaataaaagaagaaaaatggtttttgggtttgtgccagacttggttgggaatgcacagggttgctggcctgggacctggggtggacgtcagggccttgactgcctcagggccccgacctgccaagagggccaggctcaggccagtcagcttgcccagggcctccaggggccgctgcctgctggcttccccagccctagggagagggctctgttctcatgggcagccttatcttattaacagcatacacacacaggcacacacagaatcacaggattctgatttctccattttcctgaagaggagatgggcctagagggccagtggattttgtgctaggtcaggcagctggaaacacaggtctagatctgggcctgggtctcctagcaaagcctttgctcacccagccccgcccagggccaaacacaggagcccaatgtttcctgagcatggatggcttttgagttttattaacaaaaatactctggtcccagaacaacagaactggtgtgggctgcaaccagtgtgtgtgggggggtggggattgagcccctccaagaagcccatggggaggcc

SEQ ID NO: 461335 - DNA, 2127 bp, Homo sapiens
cgcccagcggcagagcccacaaaactgccactggccgccaccgggttcctccacctccttcccgatctcaggctggagaagtggtgcaggggtcgctgcgaaaggagaggagcgtgtatgacgccacatccggcgcgcggcggaactggcctcctttgcttccgcggcggggccggaagtaggagcggcggcggcggcggcggcggcggtcgaaagcggagtgaaagagggaggcagggagccggagagccggaaccggagtcgcagcggcggagacccctgtgcggtgcggagggggcggcggccccgactctgacccgcgccgggggtgggccatggcggagatcagcgacctggaccggcagatcgagcagctgcgtcgctgcgagctcatcaaggagagcgaagtcaaggccctgtgcgctaaggccagagagatcttggtagaggagagcaacgtgcagagggtggactcgccagtcacagtgtgcggcgacatccatggacaattctatgacctcaaagagctgttcagagtaggtggcgacgtccctgagaccaactacctcttcatgggggactttgtggaccgtggcttctatagcgtcgaaacgttcctcctgctgctggcacttaaggttcgctatcctgatcgcatcacactgatccggggcaaccatgagagtcgccagatcacgcaggtctatggcttctacgatgagtgcctgcgcaagtacggctcggtgactgtgtggcgctactgcactgagatctttgactacctcagcctgtcagccatcatcgatggcaagatcttctgcgtgcacgggggcctctccccctccatccagacctggatcagattcggacaatcgaccgaaagcaagaggtgcctcatgatgggcccatgtgtgacctcctctggtctgacccagaagacaccacaggctggggcgtgagcccccgaggagccggctacctatttggcagtgacgtggtggcccagttcaacgcagccaatgacattgacatgatctgccgtgcccaccaactggtgatggaaggttacaagtggcacttcaatgagacggtgctcactgtgtggtcggcacccaactaactgctaccgctgtgggaatgtggcagccatcttggagctggacgagcatctccagaaagatttcatcatctttgaggctgctccccaagagacacggggcatcccctccaagaagcccgtggccgactacttcctgtgaccccgcccggcccctgccccctccaacccttctggccctcgcaccactgtgactctgccatcttcctcagacggaggctgggcgtgggggggggctgtcctggctctgctgtcccccaagagggtgcttcgagggtgaggacttctctggagaggcctggagacctagctccatgttcctcctcctctctccccacttgaaccatgaagtttccaataatttttttttctttttttccttcttttttctgtttgtttttagataaaaattttgagaaaaaaaatgaaaaaattctaataaaagaagaaaaatggtttttgggtttgtgccagacttggttgggaatgcacagggttgctggcctgggacctggggtggacgtcagggccttgactgcctcagggccccgacctgccaagagggccaggctcaggccagtcagcttgcccagggcctccaggggccgctgcctgctggcttccccagccctagggagagggctctgttctcatgggcagccttatcttattaacagcatacacacacaggcacacacagaatcacaggattctgatttctccattttcctgaagaggagatgggcctagagggccagtggattttgtgctaggtcaggcagctggaaacacaggtctagatctgggcctgggtctcctagcaaagcctttgctcacccagccccgcccagggccaaacacaggagcccaatgtttcctgagcatggatggcttttgagttttattaacaaaaatactctggtcccagaacaacagaactggtgtgggctgcaaccagtgtgtgtgggggggtggggattgagcccctccaagaagcccatggggaggcc

SEQ ID NO: 461336 - DNA, 1411 bp, Homo sapiens
agcgtgggtcaacaaggggctcacaggacacaacgacgtgcttagtaaaccgggggacactcacaaccaccgggggtactcaggacaccagggggtgcccaggaaaccagggagcactgaggacaccactgctcccttaggaggcagctccacatcagaatcaggaaaagtttgtcttttaagctcttcacagttgttaacaattgagtatggtatactttactgataaaaaaataaaaacataatatcttcttatttacataatttctccaaaatttggaaactgtgttccctcccacacctccaatagtctccactattatcatcatcttctagatcttctgcgatgccctggagattaaggatttgattccatgacagagaggaggtgcatttcgatggaactttggtgaaaaccttggtctttatcccatttcctctggggctccaccagtgcctctggaatcatggtttcagtggcttgcccctgcatggtgtgcaccctcaagagtgtacgagtggttgaggtatggctgctggaattggccaagactccgctgttgttacaggcgcatgctccgaagttggcttttcaatctcgtccacctattcagagaataaaaactagtctaaagaaatatgaaaacatcagtacttttataaagaaatggtagaagaaaaggagaaaaacaaaaatatatctataaaagagcaagaggaattctgaggtgtccagtgtgaggtgcagctggtggagtctgggggaggcttggtacagcctggggggtccctgagactctcctgtgcagcctctggattcaccttcagtagctacgacatgcactgggtccgccaagctacaggaaaaggtctggagtgggtctcagctattggtactgctggtgacacatactatccaggctccgtgaagggccgattcaccatctccagagaaaatgccaagaactccttgtatcttcaaatgaacagcctgagagccggggacacggctgtgtattactgtgcaagagacacagtgaggggaatgttcctgctccctgtaaagtggggatgtggctcttgctgccaaagctccaggtctcaagcccattccctgcagctcaggtggggctcaggctgtggctcctgcagccacgtggaagaggctgatgggactttcctctctcccattgctcagcaccctccagtgtgtcacgtggagactcacctgcgaatggaagtggccaacagtagtgaaggggatgagcttgtgtggacaaaatgggatgtggatgtgaaatttatcctgtgctgtgcaaagtagcacagagtgagtcaccttcctcaccagtagtgttagaaagagggtgtgaaagttgtcagaatcaaaatagatccacttgtgttaaaa

SEQ ID NO: 461337 - DNA, 1242 bp, Homo sapiens
ctcaactccaaaattgatctaatgaactttcccaaaccacattcccttcttgcatttctgagagaatggattcccattcatctgactacagtgctaccctgaaagcagatccagagactaagattcacctgcaggtgattcatttgggtctcaactcaagcattcctttctcaagaagccttttatggtatgaagagtgagacagagttccctgcgccacctccattgaatcatgttaggccttaatgtacctttcctttataacacttactgaatgattaatttggcatttatttacctggctattttattcagtgtttaggatttatactagattgtaagctcctcaagagtgttccaggtctagtttaggtcaccatgtatccctgattagtaccacacatcccagtgcaccatggttctcaacaaataacatgttatataaatcaataaatgacaggaacaaagatgtttttcaatttgtattacaatgttttctactatctggcagaatcttaatgatactggatttaggactgaaaatgtaagagaaaggggttctatgaagtccaaggatataaagacagaagtcagttatggcaaagaatttacaaaacgcttcaaaggcttatctatctcttcccttctttctacaattctgcacatgtgccagccccaaggattctgtacttatgttgagatttttggatcaatatctgttttacaaggtaagctgtcatcagttggaggtaagcagaagacagtagagagtacagagccctggactgtgactcagaggatgagcaccagatccagtttgctgtgccacagtgctcagcatgatgtaaactccactgcggacagatgcagccaagaagacaggtcaccttctaccaactcccaccagaggaaactcttccccaggacccagtacgttggccctctgaccctgcacacagcacatgatgctgaggttcagtgctgaacaagagctactgagagccagagattcacttcttccatggagccccactcatggatggaggctctgtcccgggtccagtgccactgggaacactgggtctctggtttctagctctgtcctatggcagaggttccaccccacaataaccgaagtgctgagaaggtgggaagctcctgcccgaccctccactgagagctcagctcctaggctgaggaataaaacagctcaactttgtctacacctgcagaaccttgttt

SEQ ID NO: 461338 - DNA, 1008 bp, Homo sapiens
gagtacagcctcttcgcctccaccatgctgtatgtcatgtggaagaatgtgggtagattcctggcctccacccctggccacagccacaccccaacccctgtcagcctcttccgggagaccttttttgctggcccggttctgggcctgctgctcttcgtggtggggctggctgtcttcatcatctacgaggttcaagtgagcggggacgggagccgcaccaggcaggccctggtcatctactacagcttcaacattgtctgcttgggactcaccaccttggtcagcctgagcggctccatcatctaccgttttgaccgccgggccatggaccaccataagaaccccacgcgcactctggacgtggccctgctgatgggtgccgccctgggtcagtacgccatctcttactactccatcgtggctgtggtggcgggcacaccccaggacctgctggcagggctcaacctcacccatgcactgctcatgatcgcccagcacaccttccagaacatgtttatcatcgagagccttcaccgaggaccgcccggggctgagcctcacagtacccaccccaaggagccctgccaagacctcaccttcaccaacctggatgccctccacacgttgtccgcctgcccacccaaccccgggctggttagccccagcccttcagaccagcgggaagcagtggccatcgtctcaacccccagaagccagtggagacgccagtgcctaaaagacatttctctgtttctcctactctgcaatgtcattctgtggatcatgcctgccttcggggcccgccctcatttcagcaacacagtggaggtggatttctacggctactccctctgggcggtcatcgtcaacatctgcctccctttcggcatcttctaccgcatgcacgctgtgtccagcctgctggaggtctacgtgctgtcctgaggcctccaacagaggcatggggggcaggaagagggggctcagctcatgtgcccactcagacac

SEQ ID NO: 461339 - DNA, 249 bp, Homo sapiens
atcgctcggcccgatttcactggttgatacatataaaacacagaaccaggcccaagcattgttagtgtttattacaggccagcactttggatttagaagacatgggcagagaggcttggagagattcatcagtccaattgctgcccatgcaggtccaggaactcaagttcagagaggcccagagcctgtgtaaagccagtttggtgacaggctcagagaagactctgactctttgtggacagtggacat

SEQ ID NO: 461340 - DNA, 908 bp, Homo sapiens
gcacagacaaccctgacttttggaaaggctgcagaaatgcagcagcagctgacttgttgaatgaatgcgtgtttacttctctccctgaagtttttcaacaatccttacagtaaagagaaggggaccagtctccaatggacaattggtgctagaagtattcattgtttaccacctgttcaatatgtcgagaaactgcaattcctattaagaacacttgactgtttactcagcacgagaacgtcagccccagcctgcatcaatctaaatgcgtttcgagacgtcaggcccccgaaaagtgcagacggaagaaatcagtctcagagagttcaagagaactttcgcagactcacagagcaaaaaagaggagaaaaatccaaacctatgtttcttgatgggaagcaaactgagtgtggtggaaagaacacaaactttagaatcagtctcccccggaccaaccctgggttggttctgatgacactagcacacttctgcaagtctcagttctgcgtgtgccaagcagagttggaattctggctcggccacttcctggttgtgaccttggatgaattccttaaattcttggtaccccacctgtttcctcacctgtcaagtggagagattcctcaccaaatgaagagactaacgctacatatctccctgggtgttgtgagggttaagtgagttgatacatataaaacacagaaccaggcccaagcattgttagtgtttattacaggccagcactttggatttagaagacatgggcagagaggcttggagagattcatcagtccaattgctgcccatgcaggtccaggaactcaagttcagagaggcccagagcctgtgtaaagccagtttggtgacaggctcagagaagactctgactctttgtggacagtggacat

SEQ ID NO: 461341 - DNA, 1779 bp, Homo sapiens
ttggagattattggacttcttagctagaaaaggccttgtggagagcgtgttcaacatatgttaatttcaggagctcataacaaaagctgttacaaaaaagctcactcataaaactgtccaaagaaacttaatatttttgtctttgctgtgggctgtgtttctcaactcctgtgtatgtgtgcgtgtgtgtgcgggtacgcgcgtgtgcacactttcaagttgagagtctggtttgaccctgaacctatgtgaatgtcaagcgtttgcttttcgtatttgatttggttatatataaccttgctcctgtggaatcaagtagcagccttctttttgacaagtcctgagatctgactcaagtctcagtgtttacagtgtaaagatatgacatttattgattttccactctgtgtgccagtccttgtgaagaatgaagcctggcatccaatataggaggaggggcacgaaacccccaggaaactgtttgtgatgagccctggcacaggtgtgggacgatcatcaaactgacatgtttagagaccaagggttctggtgatagcagtgctactgcccctggcttgtaaaacagcagaagtgctaaacatgctgaaggaaagcaaagcagacatctttgttgacccggtacttcatactgcttgtgccctggacattaaacaccactgcgcagccatcacccctggccgcgggcgtcaaatgtcctgtctcatggaagcactggaggataagcgggtgaggttacagcccgagtgcaaaaagcgcctcaatgaccggattgagatgtggagttacgcagcaaaggtggccccagcagatggcttctctgatcttgccatgcaagtaatgacgtctccatctaagaactacattctctctgtgatcagtgggagcatctgtatattgttcctgattggcctgatgtgtggacggatcaccaagcgagtgacacgagagctcaaggacagaagcaccttggggcctcgccagggccgtggtcttcaccgaggcgtgggtgggcagccgttccccaggctgtgtggggtcctgctttcttctgctgagacagtgacgctttccagtttccaccctaatcagccactgctggtcacagccccacagccatgggtacttgctaacagttatagcagctgggtcactgtcatctggacttaccagttcatgccagtgtccctgtgacttatgcatagtgtgcgccacagccctctagaggtacctggagcccggactgccaggctggaggctctggggtactgaagtgagtcactcagctggccagggtggggatgcatcctggtgaagagacagctttccctgaagatgctacagaaagttactgtcagatttcatttgtttctgtttcctgagatcaactaacagaagaatctaatggtgagagtgtcttcattcatgttttacgttttatcaaggcacactggaaagggaattatgtggctgacttcccttggccttcccaagagaagattctgttcttatgtcagtgtggcttctggaagtgtctcctatcctcccatcctccaggcctgtggtgtgacttctgccccgaagttcctactatagtgagtcatctggggagaggccactgaaaagaggccttcccttcccatttcctcccctgcctccttagaacacactctaagtcagaacttaatctaagaagaaggaagctggaccaggaaccttggaagtcagccagccctagaacagtcagcctaaattttggcc

SEQ ID NO: 461342 - DNA, 1470 bp, Homo sapiens
gcattgtagataagacagaagggtggacttcgtgagaacctggcttgctttcccattcccaaccagaagtgacttggagggaagccctgagtctggagctgcataaccaataaggagctgaaggagaaaaatgccgaactacaagaaaaacttcgactggtagaaactgaaaagtctgagatccagctccacatcaaggagctaaaaaggaaactggagacggacaaaatcccgctgccacaggttcaaaccaacactttgcaggagaagatgtggaggcaggaggaggagctacgggatcaggaggagctacgggatcaggagaagctacggaagcacgaggagaagatgtggagacaggagcagaggctgcgggaccaggagaaggagctgcgggagcaggagcagcagatgcaggagcaggaggagcagatgcggaagcaggaggagcagatgcggaagcaggaggagcagatgcggaagcaggaggagcagatgcggaagcaggaggagcagatgcggaagcaggaggagcagatgcggaagcaggaggagcagatggggaagcaggaggagcagatgggggagcaggaggagcagatgcggaagcaggagaagcagatgctgaagcagaaggagcagatgcggaagcaggaggagcagatgtggaagcaggaggagcagataggggagcaggaggagcagatgcggaagcaggaggagcagatgtggaagcaggaggagcagataggggagcaggaggagcagatgcgaaagcaggaggagcagatgtggaagcaggaggagcagatgggggagcagatgaggaagcaggaggagcagatgggggagcaggaggagcagatccggaagcaggaggagcagatgggggagcaggaggagcagatgcggaagcaggaggagcagatgggggagcaggaggagcagatgcggaagcaggaggagcagatgggggagcaggaggagcagatgaggaagcaggaggagcagatgggggagcaggaggagcagatgggggagcaggaggagcagatgcggaagcaggtggagaggctgcaattcaaggaggagaggctgtgggatgagtatgagaagatgcaggaggaggaggagaagatccggaggcaggtggagaagaggcgggagaagaaggagaggatgggagagcaggagaagacgcaggaggagcggtgctcagagccctgcctccctccctccaaatatccttctgatatgagccaccctggcagcctggagcctgcacgagaggccgggaagggttattcccatgacaaccgcactgcacagatcatgcagctgccccctggaatgaagaacgcccaggagcgcccaggcttaggcagcacctcctgcatcccattcttctacggaggagacaagaaaaagatcaagatcatcagtatctaaaaagaacggtcaacaaggcct

SEQ ID NO: 461343 - DNA, 1872 bp, Homo sapiens
aacatggtttctttctttgctcacgacatgaccgctgggtttggggggcactcagatgtagaggccccagtctccacttgcttttcttgtctcccaaaggcccaggatcataccatacgaatccttatgtgtcagaaaactgaactggagacagcgctccatgacagccaggatgctgccaggaaatttgaagaagattccaaggatctggcagcccgcctgcatcattcctggcactttgcaggagagttacagcgggctctctctgctatgtccgcagagcacgagagggcggacaaggatgcagtgtcctgcccagaagacagcatgggccatttcttgctgcttttgtgcgtggttgttagaggcaggttggggctgagtcagctgctgtggctgctcctctgcctgctgtatcctgacttgacctttctctgtttgcagtacatcaaggagttaacaaaggagagggaagccatgagtctggagctgttcaggaacatcataaccaataaggagctgaaggagaaaaatgccgaactacaagaaaaacttcgactggtagaaactgaaaagtctgagatccagctccacatcaaggagctaaaaaggaaactggagacggacaaaatcccgctgccacaggttcaaaccaacactttgcaggagaagatgtggaggcaggaggaggagctacgggatcaggaggagctacgggatcaggagaagctacggaagcacgaggagaagatgtggagacaggagcagaggctgcgggaccaggagaaggagctgcgggagcaggagcagcagatgcaggagcaggaggagcagatgcggaagcaggaggagcagatgcggaagcaggaggagcagatgcggaagcaggaggagcagatgcggaagcaggaggagcagatgcggaagcaggaggagcagatgcggaagcaggaggagcagatggggaagcaggaggagcagatgggggagcaggaggagcagatgcggaagcaggagaagcagatgctgaagcagaaggagcagatgcggaagcaggaggagcagatgtggaagcaggaggagcagataggggagcaggaggagcagatgcggaagcaggaggagcagatgtggaagcaggaggagcagataggggagcaggaggagcagatgcgaaagcaggaggagcagatgtggaagcaggaggagcagatgggggagcagatgaggaagcaggaggagcagatgggggagcaggaggagcagatccggaagcaggaggagcagatgggggagcaggaggagcagatgcggaagcaggaggagcagatgggggagcaggaggagcagatgcggaagcaggaggagcagatgggggagcaggaggagcagatgaggaagcaggaggagcagatgggggagcaggaggagcagatgggggagcaggaggagcagatgcggaagcaggtggagaggctgcaattcaaggaggagaggctgtgggatgagtatgagaagatgcaggaggaggaggagaagatccggaggcaggtggagaagaggcgggagaagaaggagaggatgggagagcaggagaagacgcaggaggagcggtgctcagagccctgcctccctccctccaaatatccttctgatatgagccaccctggcagcctggagcctgcacgagaggccgggaagggttattcccatgacaaccgcactgcacagatcatgcagctgccccctggaatgaagaacgcccaggagcgcccaggcttaggcagcacctcctgcatcccattcttctacggaggagacaagaaaaagatcaagatcatcagtatctaaaaagaacggtcaacaaggcct

SEQ ID NO: 461344 - DNA, 2129 bp, Homo sapiens
gggacacaacctctctctggtcacctccaaggctaaagaaggtggcagatttagcctccaaccacaagattgtccatcctgaccaggaagtgacatgtcacagagggtggagcagcccatgtggtaggaaatggcccagcttggctctgccttctgcagtgtgagtaacacactgaagccagaagctgtgggctgtggggaagtggctgcatcgccacccaagggaccctggactttgccagacgtcagggttgagaggagccactagcaccatcccagagctgtcagcaccggcctcagcccaggcggctctctccctgagcttcctgtaccctgaccctctccagcctcagacctgagacagggctggacaaggaagcagagagcagaagaaaagcagaagcgaagctcagatctgctgggaggagattacattttgtcccctcctggggtcttgcacagtggcaggtgacattcgtgttacaggaatgactgccagggcctgggcctcgtggcggtcttcagctctgctcctcctgcttgtcccaggctattttcctctgagccaccccatgaccgtggcgggccccgtggggggatccctgagtgtgcagtgtcgctatgagaaggaacacaggaccctcaacaaattctggtgcagaccaccacagattctccgatgtgacaagattgtggagaccaaagggtcagcagggaaaaggaatggccgagtgtccatcagggacagtcctgcaaacctcagcttcacagtgaccctggagaatctcacagaggaggacgcaggcacctactggtgtggggtggatacaccgtggctccgagactttcatgatcccattgtcgaggttgaggtgtccgtgttcccggccgggacgaccacagcctccagcccccagagctccatgggcacctcaggtcctcccacgaagctgcccgtgcacacctggcccagcgtgaccagaaaggacagccccgaacccagcccacaccctggctccctgttcagcaatgtccgcttcctgctcctggtcctcttggagctgcccctgctcctgagcatgctgggtgccgtcctctgggtgaacagacctcagagaagctctagaagcaggcagaattggcccaagggtgagaaccagtagcatctgctgtccatcaaggccctgtgctgcaacagagcccctctgggggactggaatgacctcctgaccactccctcccgggctgctctctccacatctcctggaatcctttgtgagcctccttcagccttttccctgtgcccgatcctcatgtgtcacatgtgaacctgacggacatggacgccctgagctgtgagtccacgtctcatgtgcacgccccggccagctaagcctcgggccgtcagcaatacctctgagtgcccggatgccctccctgcacccttccatttctccaggagcctggcactgcttcctccaccgttttcacagggagaagcaggtctaggactcccctgcacctttgccaccataatggcccacactccctgggtccaggagtgtagaatatgcggctgcttccatttgctgagtgtgtcgattcaatgatgctttcaaactttaataaatgacaatgtgtaggtttgggatgtatcaggcccactcagtcagacctgagtgagaaatccattgttccctgatttccacaggcctttgctgagaatagtggaccaagccccatgttaggcctctcggaatgggggtccctgcagaaaaggatccagaatttcccccaaagcctgactattccctccttcaggtagacacatcctggccagtgtctttaggtccctctgggagagctggtagaagattctcagtgtgaactgtggtagcataaccaggcctacccttcctccttcttcaaggggacctgacctctccttcattccagggctgtgggttttaactggtgcaaatttggaaacggatggagggctatgactccttgatgtggtagttaaatgcttatgggagcttttggtgtatcagacactgacctggcattggagtccagccgtgaacacccaggcaaggagctctgtttacactgagcccatattccag

SEQ ID NO: 461345 - DNA, 908 bp, Homo sapiens
gggacacaacctctctctggtcacctccaaggctaaagaaggtggcagatttagcctccaaccacaagattgtccatcctgaccaggaagtgacatgtcacagagggtggagcagcccatgtggtaggaaatggcccagcttggctctgccttctgcagtgtgagtaacacactgaagccagaagctgtgggctgtggggaagtggctgcatcgccacccaagggaccctggactttgccagacgtcagggttgagaggagccactagcaccatcccagagctgtcagcaccggcctcagcccaggcggctctctccctgagcttcctgtaccctgaccctctccagcctcagacctgagacagggctggacaaggaagcagagagcagaagaaaagcagaagcgaagctcagatctgctgggaggagattacattttgtcccctcctggggtcttgcacagtggcaggtgacattcgtgttacaggaatgactgccagggcctgggcctcgtggcggtcttcagctctgctcctcctgcttgtcccaggctattttcctctgagccaccccatgaccgtggcgggccccgtggggggatccctgagtgtgcagtgtcgctatgagaaggaacacaggaccctcaacaaattctggtgcagaccaccacagattctccgatgtgacaagattgtggagaccaaagggtcagcagggaaaaggaatggccgagtgtccatcagggacagtcctgcaaacctcagcttcacagtgaccctggagaatctcacagaggaggacgcaggcacctactggtgtggggtggatacaccgtggctccgagactttcatgatcccattgtcgaggttgaggtgtccgtgttcccgggtgagcccctccttttctca

SEQ ID NO: 461346 - DNA, 1114 bp, Homo sapiens
ccggtcttctttgggtttgttggctcaggaacccaatctgcatgatcttgtttatagccagctacaaacattttgcagcgttttactaaacgtttgtgaagtgttgtcatataaaacatctcttatgatacttacagaagtcccgaggtagacagaagacttacctagtatactctttttatggacaagaaaacggagaaagtttaaagagacttgacccagcttaacaaaaaagcagataaagccaatgcaagagagaagaagaaagtagatcataagagatcatgttaccatagaggaaagggagaagagctgcactggttcataacttttcagttcctggttccagttcataatgaggttcaaccggacttcctatccttagggtctgatggaaggctttctcatttcacagctgacagcactggagacagagcaggatcacagaagaagaaaataatgagaccctcaactggctctgagaaagcaagctatcatcttgtgaaatgccctgtggaaaagcccatgtagcaaaggacagccaatagccaacagaaagctgatgccctcagtccaacagcctgcaagaaactgaattctgccagcaaccatgtgagattggaagcagattcttccgtgcagtcttgtgagagattatgaagcaaaggactcaagttgtgcccagattcctgacccacagataccgtgtgataataaatgcatattgtcttaaaccaccaagtttcctgggcaatggaagtgagaccgtcaaaaaaaaaaaagagggagaagaaggagaaggaggaggaggaagaggaggagcaggaggaggaagagaaggaggagaaggaggagaggaagagaggaagaaggagaaggagaaagagaagaagttgatatggtttggatttgtgtatccacccaaatctcacgttgagttattcaatgcaaaccctatcaaaataccaataacattcttcacagaaatagaaaaaacaatcctaaaatttatatggaaccacaaaggaaccagaatagccaaagcaatcataagcaaaaagaacaaagctagaggcatcaaattatattacaaagccacctgacttcaaatcat

SEQ ID NO: 461347 - DNA, 875 bp, Homo sapiens
aagcatctgctgcagaagcatgttaagaagcactgatattttcatgggcacagccacctcctaatatgtggttttgcttctctgcaagcatggaatcccctctgcagttatgtttgcctgtgcatctccggcagctggaggacttatcacatcaggctgatgagtgtgtcacgctcttcatcccccaagagctgtgatgaagaccaagacaaacagtagattaacagtgctaccttttataaggctgattagttcctaaaatatgctgaaaggaaacaaaaccaaaaagaaaaaagagtggaaaggggggctggccgacgcagttacagatgttgagggaccagtgataaacaagatgtgtccctctaacatagaaatgagaacactgaccagcaaaaaagttatggggactgaggaagaacagaaccagagtgtgaagctgtttgtaattctgcagcccatactatgcctttacactgtgcagcttctcttgcctggaaagatctttgacttcacttgtgaggtggaagacactggcatttctagactaaggagtgacatgacatgtgccggagccttggaaatgcaagttcaatggctggttggttatttggcttcttgggtgtcacaggcacaagtgcacccctacacccctctaggcaaccacaagactctttctctggccagaattaattattgggaagacaacaccctagattaggagaaagtgaacaggccttacagcataaataatttctaaacttagtcttgactagactttatatctccttaaagaaaattattgatagcataaattagatctcccaaacatacagattatttggcagtgaattagatgatctggggagataatc

SEQ ID NO: 461348 - DNA, 1190 bp, Homo sapiens
aagcatctgctgcagaagcatgttaagaagcactgatattttcatgggcacagccacctcctaatatgtggttttgcttctctgcaagcatggaatcccctctgcagttatgtttgcctgtgcatctccggcagctggaggacttatcacatcaggctgatgagtgtgtcacgctcttcatcccccaagtgagtgcactcccaggcccacctttctggaaaatgttctttggtgcagggtgcatggtgggccagggaattgtctgggcttcccattaatctcagaggatgggagggtaatcccttcacaaatatgggaatgggggctgctctgaggctggcaaataataaacaatgagggtttcttttttttctttttaatcctggattcctccagccctcctctctgtagtcctcagcaataacttagcccttgtcttcctctctgaaggatttaaatggaatgaccttaattctcgctttgtttgcactctatctcttaaggagctgtgatgaagaccaagacaaacagtagattaacagtgctaccttttataaggctgattagttcctaaaatatgctgaaaggaaacaaaaccaaaaagaaaaaagagtggaaaggggggctggccgacgcagttacagatgttgagggaccagtgataaacaagatgtgtccctctaacatagaaatgagaacactgaccagcaaaaaagttatggggactgaggaagaacagaaccagagtgtgaagctgtttgtaattctgcagcccatactatgcctttacactgtgcagcttctcttgcctggaaagatctttgacttcacttgtgaggtggaagacactggcatttctagactaaggagtgacatgacatgtgccggagccttggaaatgcaagttcaatggctggttggttatttggcttcttgggtgtcacaggcacaagtgcacccctacacccctctaggcaaccacaagactctttctctggccagaattaattattgggaagacaacaccctagattaggagaaagtgaacaggccttacagcataaataatttctaaacttagtcttgactagactttatatctccttaaagaaaattattgatagcataaattagatctcccaaacatacagattatttggcagtgaattagatgatctggggagataatc

SEQ ID NO: 461349 - DNA, 2724 bp, Homo sapiens
  misc_feature (4)..(4): n is a, c, g, or t
  misc_feature (6)..(8): n is a, c, g, or t
  misc_feature (11)..(11): n is a, c, g, or t
cgtntnnntcncagcaccgtgctttgggaatcgagtgatggtgctgagtgaacccctgagtgaacatctgtggcttcctcccacctcgtctctggatgcactcctgttcgaatgggtgtctgtacatgcttgtcccctccccacggtggcgtgctcaatggtggctccccacagatatgtccgtgtcctaattcccggagcctttgggtctcatgtagccaatgatgtgaaaaagtgaaggatgctgagaggagatcatccagatgtcttagaggataaaaatgagcgggcagatgaagagatactcagggtgaggtttggaaggtgcaccaggcccaccccatggatgtggctcagagagcctgggaaacctgggatgtcgctgctgcttctcttcgtggtggaggagttggaggcttgcgcgtttagagtgcaggtggggcagctgaggctctatgaggacgaccagcggacgaaggtggttgagatcgtccgtcacccccagtacaacgagagcctgtctgcccagggcggtgcggacatcgccctgctgaagctggaggccccggtgccgctgtctgagctcatccacccggtctcgctcccgtctgcctccctggacgtgccctcggggaagacctgctgggtgaccggctggggtgtcattggacgtggagaactactgccctggcccctcagcttgtgggaggcgacggtgaaggtcaggagcaacgtcctctgtaaccagacctgtcgccgccgctttccttccaaccacactgagcggtttgagcggctcatcaaggacgacatgctgtgtgccggggacgggaaccacggctcctggccaggcgacaacgggggccccctcctgtgcaggcggaattgcacctgggtccaggtggaggtggtgagctggggcaaactctgcggccttcgcggctatcccggcatgtacacccgcgtgacgagctacgtgtcctggatccgccaggtcctcctggtcccacaagatgtggccctgagagcagcgccgctgcccccggcccccgacctgcaagaggccgaggtccccatcatgaggacccgagcttgcgagaggatgtatcacaaaggccccactgcccacggccaggtcaccatcatcaaggctgccatgccgtgtgcagggaggaaggggcagggttcctgccaggggaagtggtcgtggcaggtcagcctgaggatctatagctaccactgggcctcctgggtgcccatctgcgggggctccctcatccacccccagtgggtgctgaccgccgctcactgcattttccggaaggacaccgacccgtccacctaccggattcacaccagggatgtgtatctgtacgggggccgggggctgctgaatgtcagccagatctccctggagttcactgacagtgacaactgctggaacacaggctggggcatggtcggcttgttggatatgctgccgcctccttaccgcccgcagcaggtgaaggtcctcacactgagcaatgcagactgtgagcggcagacctacgatgcttttcctggtgctggagacagaaagttcatccaggatgacatgatctgtgccggccgcacgggccgccgcacctggaagggtgactcaggcggccccctggtctgcaagaagaagggtacctggctccaggcgggagtagtgagctggggattttacagtgatcggcccagcattggcgtctacacgcccttcacccacgtcacctgctacccgacggccatccccaggcccttcacccatgtcacctgctacctgatggctgtccccagcaccctcacccacgtcacctgctacccgacggccgtccccaggcccttcacccatgtcacctgctacctgatggctgtccccagcaccctcacccacatcacctgctacatgatggccgtccccaggccctttacccacatcacctgctacccaatggctgtccccagcacccttacccacgccttcaaccacgccacctgctacacgacggccatccccagcaccctcacccacgtcacctgctacacgatggccgtccccaggcccatcacccatgtcacctgctacacgatagctgcccacggatgcgtcctgtacctgtccctggagaatgacctggtgggcattgtggggggccacaatgcccccccggggaagtggccgtggcaggtcagcctgagggtctacagctaccactgggcctcctgggcgcacatctgtgggggctccctcatccacccccagtgggtgctgactgctgcccactgcattttctggaaggacaccgacccgtccatctaccggatccacgctggggacgtgtatctctacgggggccgggggctgctgaacgtcagccggatcatcgtccaccccaactatgtcactgcggggctgggtgcggatgtggccctgctccagctgtcgctgccgccgccctaccgcctgcagcaggcgagtgtgcaggtgctggagaacgccgtctgtgagcagccctaccgcaacgcctcagggcacactggcgaccggcagctcatcctggatgacatgctggccgagactcctgctacgtgagtgcccccggcccgccctgcctgcctgccctgctcccaccgcagagctcagcggtgacccctttccttcccttcctcagggtgactccggcggccctctgg

SEQ ID NO: 461350 - DNA, 4679 bp, Homo sapiens
  misc_feature (3)..(3): n is a, c, g, or t
  misc_feature (6)..(7): n is a, c, g, or t
ctnacnnggtcagatccaggtggacgtgaacgcagtctttagcagagacccagagaaagtaggtctgtatggagagacattgcccacttcaccctccggtcctcctggtcctccctagggagcctctcgccctcgtatgtcaatctgcactctgcaactcctgcgagagccctagcctgcagctccctgttgtgcccaccctacctcgcccccacctcccctggcacctcggagccagatggggccagcgtgcgcgtcccggtagggtaccgcgcaggggcagcgcacggttcggaggaggtagaagaggatccagagcgttgccagcagcatcatcgcagtgagcagcgcgaacacgtcggtgtcgtacacggccaccttgttgaaggctccgccgctgatgagcgtgcaggcgaggagcagcacgttcaccgccagcagcaccgacagcaggcggccacccttcttccacacctccctggggcccgcacgcggcgccggggggctctccttggggccctgggccagctcctcggacatggcggaggcgactggagaaggctagagggatcactgtaggggaggagcggacaaaactccaggtcaaccctgacggctctccttcccccatctcatccctagacttggggactagggagttcctgacccgcagggttggggcttcgggtgctggaggaagcgctgggaaaggggaagagaaaatgcggaacctgcccctctcgctggatgggaagaaaggagaagcggcagcacccggttggacccctccaaggtccccactccccaagtccgactgccctccggcccggggcacccacctggctgggcttggagccggcgctgagctgggggtcaggggacggcgagcgtctcctctctcccacgccgagatggacaggcgctttatacccaggaggacagggtgatttacagctgcgggagtttggctccataaagctctcagtcccgctcacatgatccatctttctccaaggctcgggcgcggccccgcactgcggcacctagagggcaccccgcccctggtgcccaccgcgccctggcgcgcagcattccaggcgcccagagccccgagagctaagctcaagagacgtccaaaaagcctgcgggcaccctgacgccctccagccgcggcgcaccctgaatcctgtgctcctgtgctcctgcctgggatggcaaccccagttcccctctcccccacggtcctcgcagtgatccaagctcccctttcctctatcccaccgccctgcccgcccccgccgccggcccgcgctccgttggactccggggcttgggtgcgaagttccacgcggcacgcggagccgctgccagtcctccagcgccccctgctggagtgcggtcgagggactccgttcaggcggcggcggcctggcccgtcccactcgctgaccgaaccgcggtcggtcacggtgccccttcttaggtccactgtcctggggctcaggacggctcccccaccccgccctccggcacccctccccagctctcggttcgttccactgacaggtggagaaatacggagccacagcgccccaggctctagtgaggacagatctctgactgtccccggactgggcgtcacagtgcgcggccccggggtgggcacttttgaagaggaggacagggccttgcgtgggtcaccctcgtgtattgaggtgcatgcagggtgtttaggacccaggggaagaccgggggcggctccctggacagcgggagatttcgtcccccgccccctccgcccccgcccccgggtgagcgtttcagatgtcttggtagtcgcggctctggcgctccgcaccctccgtctgcggcagcgggggctggcggccccggcccctgcccggccccgtcctccaacctcatgcctcagccctaataccgccgccctcccctgcggggggcctttctccgtgtcccccgcccgccccgtccacttcgggcgccatgaacgaccagtaccaccgggcagcccgggatggctacctggagctcctcaaggaggccacccgaaaggagctgaatgcccccgacgaggatggcatgacccccactctctgggctgcctaccatggcaacctcgagtcgctgcgtctcattgtgagccgcgggtactgcccagtgcctgaacatgtagtaggtgctggagacccctccttcttgccctctccttgggctgctccttgggcccagcatcagtcctggctgcccccacactcccctccccgcccagccaaggcccgacacctcctctcacactcgggcttgccagggctggccctgctccctgcagacacggccctgcctgctgacatgcaagcccacacttcacacacgctcatcccgggctggggcccggcacacaccacccactgccaggactcgtcactcgtccctcctgaatgctttccctgcaggggtgacccggacaagtgtgacatctggggcaacacacccctgcatctggcagcttccaatggccacttgcactgcctgtccttcctggtgtccttcggagccaacatctggtgcctagacaacgactaccacacgccgctggacatggctgccatgaagggccacatggaatgcgtgcgctacctggactccatcgcggccaagcagagcagcctcaaccccaagctggtgggtaagctgaaggacaaggccttccgcgaggcggagcggcgcattcccgagtgcgccaagctgcagcggaggcaccacgaacgcatggagcggcgataccggcgcgagctggccgagcgttccgacaccctcagcttctccagcctcacgtccagcaccctgagccgccggctgcagcatctggcgctgggcagccacctgccgtactctcaggccacgctgcacggcacggccaggggcaagaccaagatgcagaagaagctggagcggcgcaagcagggcggcgaaggcaccttcaaggtctccgaggatgggcgcaagcgccgctcgctctcgggcctgcagctgggcagcgacgtgatgttcgtgcgccagggcacctacgccaatcccaaggagtggggccgagccccgctccgggacatgttcctctcggacgaggacagcgtctcccgtgccacgctggcggccgagcctgcccactcggaggtcagcaccgactcaggccacgactccctgtttacccgccccggcctgggcaccatggtgttccgcagaaattacttgagcagtgggctgcacggactgggccgcgaggatgggggtctggatggggtgggagcgccgcggggtcggctgcagagctcccccagcctggacgatgacagcctgggcagtgccaacagcctgcaggaccgcagctgtggggaggagctgccctgggatgagctcgatttaggcttggacgaggacctggagcccgagactagcccgctggagaccttcctggcctctctgcacatggaggactttgccgccctcctgcggcaggagaagatcgacctcgaggctttgatgctgtgctctgacctcgacctccgcagcatcagcgtcccactggggccccgaaagaagatcttgggggccgtgaggaggcggcggcaggcgatggagcgccgccggccctggaggacacagagctataaccgggggctcctctccccagaccaaaatgaattgcaagttgccacaacctatggtggggtctcgaggtcctcacagttgccagccctgcagcccccttccccaggagcaaggaccagttggggcgactcctttgaaagtctgtctgcaccttgaagctgagggtgtggcctggaggcaccagaggggcaagagaatgttccggaactccagttctgaggggtcttgaaggccctgagccacccattctgagcagccgtaaaggacatgtagacttgggggaggcctgccccagagggagggcaggggcatcggaactggatgagagtgtgggaggtcaccagggctgtgtgcgtgtgcatgtttgtgtgcatgtatgcgtgtgtgcatgcatgtgtgtgtaagtatgtggtatgtgtgagcacgggtgtgtgcttgggtgtgtgtgttcttgcatacatgtgtgcgtgtgtgtgcacgtgaacgcgtgcgtgtttgtgtgtgtgcatgcatgtgtgtgcatgtgtgtgtgtgcatgcatgtgtgtgtgtgtgcatgtgtgcgtgtgtgcacactcacgttgggtggtgtttggtaggtttccctccaggtctgagccccaggtgctgccccttctctcctgttcctcgtccgtttactgccgcagcccctcctggttcttctggtgctggggtggagcaggctctgtgctcccaccactgtaccccgaatccctcctgcagctcattgccacttttgtagagaatgttctctatcagtatcgtacctgtcttgtcctttaatgctttggggatagagtgaagagtggaagggtgggggtgggggcgggagggggtctgctctgcgcttgggtgagtctcctccataagctggtgcctagtgggctctgttttctcagtcaggtctgaggaagggccctggagtcatcttgctccattgcctaagctgctgggccagtttcttctgcc

SEQ ID NO: 461351 - DNA, 257 bp, Homo sapiens
gtctgaatcacgctgatgtggccccaaccccacctccctccccaccccatgatgtcagaaaaaaccagacagaacaaattggctgaggccaagaaaaagtttacagactatcgtcagtggaacattgctggtgttggtaccagagcaactgacaccaaaaagaagaaaataaataatggcactaaccctgagacaaccacttcggagggttgccattcacctgaggatacacaacagaaccgagcgcagctgaaaga

SEQ ID NO: 461352 - DNA, 2499 bp, Homo sapiens
gtctgaatcacgctgatgtggccccaaccccacctccctccccaccccatgatgtcagaaaaaaccagacagaacaaattggctgaggccaagaaaaagtttacagactatcgtcagtggaacattgctggtgttggtaccagagcaactgacaccaaaaagaagaaaataaataatggcactaaccctgagacaaccacttcggagggttgccattcacctgaggatgtgggtcttggctggccggtctcctgaggacaaggggcacaaggggaggtcgagggaaaagaaggcaagccaccaacatcaggaagccctaaggcgggagatagaggagagtccaaggatctcgccggccgcttgcatcattcctggcactttgcaggagagttacagcgggctctctctgctgtgtccacatggcacaagaaggcagacaggcataaccaatgaggagctgaagaagaaaaatgccgaactacaagaaaaacttcgacttgcagaatctgaaaagtctgagatccagctcaacgtgaaggagctaaaaaggaaactggagagggccaagttcctgctgccacaggaggagatgtggaggcaggaggaggagctacgggagcaggaaaagaagatacggaagcaggaggagaagatgtggagacaggaggagagactgcgggagcaggaggggaagatgcgggagcaggaggagaagatgcggagacaggagaagaggctgcgagagcaggagaaggagctgcgggagcaggagaaggagctgcgggagcagaagaagctgcgggagcaggaggagcagatgcaggagcaggaggagaagatgtgggagcaggaggagaagatgcgggagcaggaagagaagatgtggagacaggaggagaggctgtgggagcaggagaagcagatgcgggagcaggagcagaagatgcgggaccaagaggagaggatgtgggagcaggacgagaggctacgggagaaggaggagaggatgcgggagcaggagaagatgtgggagcaggtggagaagatgcgggaggagaagaagatgcaggagcaggagaagaagacgcgggaccaggaggagaagatgcaagaggaggagaggatacgggagcgggagaagaagatgcgggaagaggaggagacgatgcgggagcaggaggagaagatgcagaagcaggaggagaatatgtgggagcaggaagagaaggagtggcagcagcagaggctgccggaacagaaggagaagctgtgggaacaggagaagatgcaggagcaggaggagaagatatgggagcaggaggagaagatacgggaccaggaggagatgtgggggcaggagaagaagatgtggcggcaggagaagatgcgggagcaggaagatgagcaggagaagcagatgtgggagcaggaggagaagatgcgggatcaggagcagaagatgtgggaccaggaggagaggatgtgggagcaggacgagaggctgcgggagaaggaggagagaatgcgggagcagaagaagatgtggcagcaggtggagaagatgcgggaggagaagaagacgcaggagcaggagaagaagacatgggaccaggaggagaagatgcgagaggaggagaggatgcgggagcgggagaagaagatgcgggaggaggaggagatgatgcgggagcaggaggagaagatgcaggagcaggaagagaagatgcgggagcaggaggagaagatgtgggagcaggaagagaagatgcaggagcaggaggagaagatgtgggagcaggaggagaagatgtgggagcaggaagagaagatgtgggagcagcagaggctgccggaacagaaggagaagctgtgggaacacgagaagatgcaggagcaggagatcaggagcagaagatgtgggaccagaaggagaggatgtgggagcaggacgagaggctgcgggagaaggaggagagaatgcgggagcagaagatgtggcagcaggtggagaagatgcgggagaagaagaagacgcaggaggagaagatgcaggaggggagcaggaggagaagatgtgggagcaggaggagaagatgcgggagcaggaggagaagatgctggagcacggaggagaagatgcagggccaggaggagaagatgcgggagcaggaggagaagatgcagggccaggaggagaagatgctgggagcaggaggagaagatgcggggccaggaggagaatatgtggggccaggaggagaagatgtgggggcaggaggagaagatgtgggggcaggaggagatgcgagagaaggaggagaggatactagatcataaagagaagatgcaggagaggttgccagagcacgaggagcgcagtgcccaggattaggcagtacctcctgcatcccattcttctaccgaggagacaagagaaagatgaagatcatcaatatctaaaagttggcactgtcaacaaggcctacagaagcataagcc

SEQ ID NO: 461353 - DNA, 1985 bp, Homo sapiens
  misc_feature (3)..(3): n is a, c, g, or t
tcnccttagctactcttgcctgaaggaaacccccagccagctgcaaacagcccagtgtcccgcaatggactttgctcctcagaactgctaacttggtgggtgtccccctacaggtagagtgccataggctggaaggctgccctgccccttctctcccatccgaggcatgtggcttctgcccttgctctgctctcgataaatggggaacactgtcttctctccctgggacctggcttggccctctgagctggcagaacaccgcccagggtgaggatcagactcttgtctgtccatcttcagcttggttacttgaaaccaaaataaactgacagcaagaggcagccagggctgggagccaggacgccaggatcgcaggggtgcttattttagcggatgatgttccattgctgggctggagtccgcccaggacttggcgttgactcacagctcagctcccgggggctcttggctggctcttcctcctccactctccttccctccttctggaagaggtgtcactgtcacagaaacatgtgctggtcttggttccccctagacccgactaggctcgagtcagatgcttgaacgctgtccctgcctttgtcaggagagtgtctgtgctttaggacatcagcgtctgatcccatggggcatggttcccactggcatggctttcaatgtgtgaattattctgcccccaaattgccaggtgatctcagagaaggcacagaacctcttggggcctgaactagtaaatgagggctctgaacaccaggatagccaagagtccctccagttagagggaccacaattcccctgtaagacagaatctcagccaaaaggagcttctggtctgataaacccaagaactgggaaatgacttgggactacattcttttgtaaagagtgaggtaaaaaaaaatttagtttgaatctgtttttcttcttttaaatggaaacaaagacaagtggaaagtcagaaaaaagttcacgggtagcacacgagagctgaggagcatgcagctgagaccgcagtgaatatttgtgcaacctccaaacaggaaatctgagatgtataacatcttatagtttggcttgtcaacgttggtcatgcggtggccccaaaataaactccctgcttcaaaggacagcgtttcagaactgcctggcagagcagccagaagcttggggccagggcagaaggaaaactcggggagcatgttctgaattaagacactttcaagaaaatcctttgtattacccctgaattgtacccttgtttcagagcctaacagggttttctgatttgctgttccctcctccccactgggtgtctgttctggaggccagggtgagaggtggaggaggatggccacgcagatcagcactcggggcagccagtgtaccattgggcaggaggagtacagcctgtacagcagcctgagcgaggatgaactggtgcagatggccatcgagcagagcctagcggacaagacaaggggcccaaccactgctgaggccaccgcgtctgcatgtaccaaccgccaacctgcccatttctacccatggaccagccccacctcatcctctcagtcacaggactttctaaagcagcgccatccagatatgacaccacccacaactgcaatgcacggatgcaattttaaaggttccaacagccaaaaaagtaaagagaaacagctcgtattgacctccccggccctgtctgagtgctccagcaccaatctcatgatggcctctgcttcacagacaagcttcttgggtcttcctgggacaccctcctgagagtgttcccaactagactgtgacctcctaggggacagagagctgagctgatactgtttatttatttatttatttatttatttatttatttatctccagtgcccagcttagagcctggatcattgtagctacctaataaatgtttttaaacaaataaatacctttgaaaccaataaaaa

SEQ ID NO: 461354 - DNA, 2994 bp, Homo sapiens
ggagggagcggactgtcgcgttcaaagtgtgctcaggtttaatcgagagtttagaggaaccacgcccttatggctttatctggggcaacccttaatgcaactctcacagtgcggactccagaggttaagagctcagtcacgcaagactgctctccacttcagataccagtgacatgtagcgggtcctcagattatccacacttctatccgacttggctacaaattgggagttcccacgacccctcctcaggaatggatggaggtgctttaactgatacaagtctcacagattcctattttagcaccagctttattggagtcaatggatttggaagccctgtagaaacaaaatatcccctgatgcagacagggtcttgctgtgtcacccaggctgaagtacagtggcgcaatcatggcccactgcagcttcaaccttctaggcacaagcaatactcctctcttgcctcagcctcctgaatatgcactctaagggttgtttataaagaaacatgcacagccatatatagaaatggttatgttttatgaacaatataactagtttaatgcatagttataccttattttaactgcctgtgagccacaatttcaggtactttttaatatatatttttgtattaaaattacctcaggagcttagcttttttcttctcttttaaaattatgcagacattaaataagaagttgagtaaacagattcaggactctagaattaaagccagagctagaaattcttaacttataatttttaaggcattgagttagaagttacatatgagacaaggatttgtgggcatgggatgaagggccttacaggatggagagaccatacaggctatggagtgagtctagaaagcatagaacgtgtttagagaacagaaaatacctaattttataagctctataaggtgtatgaatggtagtacaaatggagaaagggtattagagcatttactcattttattcatagtcaacgggtaccctcttcagtggatattggaatttatgttttacagacaaggaaacttagttatgtgttttgcccaggctaataagttatggaagcacaattcaaaataggtctgtagctttggctttgaatacctgggtagtgagtaaaattttcatttcatgtggtggtttttacatagttgtaatccaagcagtaacacttacaggaagattagattgtcagtaatgtgaacagtagattggaggggaagaagcaaagagagccagtcttaattggttggatacttttatttctgtattcctcagtgatgttataaataaatattttgtttttcagagaatgactaatagtagcagctccccaagccttctaaatgacagtgccaagccatattcagcccatgatcctctaacatcacctgcttcatccttgtttaatgactttggtgccctcaacatctctcagagacgaaagagattttgtgtgaagggatgaaatcctgcttatttttgttcagtttatttatctcaatgtattctgttcttaagataacatctaatttaatgttaagttgctgttaatgtgacccattgtaagcatgttaatcatgtttaaactttattttttgatggctttatctaaatttcaaaaattcttccctaatttactcctgattacaaggcaaacttaaaattttcaacatttcataatgggcccaacaatttaaaaagttgaaaatctcttcacattagaaatttaattttatttggaatttagattgatagaccatgtatggatttttgaagtattttataaggactgatgttgtgacaagttgaataatttgatgcctttgagtcttaatgagaatcttgttaatactaataatcatctagagaagatagtcttttttggttaggatcagcaacagctaaagatgttaaagaggttctaaatcttggtggaagttattataaagttataacattgtttcctaagtaatggaagaaagacccaaaatttaatgagagtaataaatgtaaaattaactaaagctcagaaatgaagataaaatatttcaacatatctcattaatattaattttagaataactgatatgaacttaagatacttttaagaaggatctgatcagcagatagtataaaatgaaattcaagaagactgtggtggtgttggcttcacggtgtatagttatccccaaactcgttgagttgtatacattaaatatgtatagcgttttacatgtcaatcagacctcaataaagtggtttaaaaaattcagaaagactagattttcttaagagaaaaaaaagttatgaagactgatataaattatgttaaaacctcatgtacctaatgttatttccattttgagacatggatgagaataagaaggtaattacaaaatgctttttagcaactagaattgatagactaaaatctgtgggtttaatggatttccttataggctcttatcatggataaatttaccctgctttacatacttctcttataaactggaatacttggtttctaaatccgtatgttagcagtgtaataatagagttggacagaaacagacccaggacaatagacaaagcctaacaatgtggaagcaagcagtaaaatgctgaaaagcgaatacaacctggaaatcaagttatctggagctttttatgggaaaacagaaagtctttaaattttcttagataattcactgctcattgctgttgcctagtcactcccagtggcatggatagaaataattgtattggagaaatatttatgtaaaatagactgtgacttggtgcttcaaagatgtgggcattatcaaaaggacagttagttgaactgtgcgtgtgacatgatttatctttttaggaaagagattgtaaggaaagcacaacaaaacttgaaaaaccgactttataagaaagtagattgaattgctcacaagttatttgaaatggtatttgtagatc

SEQ ID NO: 461355 - DNA, 2590 bp, Homo sapiens
tcctgggcgttgctctcccaccccggccgtgacgcaatctctccgcgccgggggcgggacgagcttgacgccatctccgggcgcccggctgtggggggcgctgggtgtggggcggctccggggccggggatggcggcggccgcggttgcggcggctccgggacgagtgagtggatcctgggaagcgctgtgaaatgggctggctcccgagccagccgggaggacacttactacagctgctcagaagcaccactggaaactcagatgtgggcgccccagccagaagcagagaggggtacagggaagctacagagaagccccttctgatgccccagggagcaagtcgactccttccaggctccaggaacaccacaaagcaatatgaaacctgttcatgaaaggagtcaggaatgccttccaccaaagaaacgagacctccccgtgaccagcgaggatatggggagaactaccagctgctccactaaccacacaccctccagtgatgcttctgaatggtcccgaggggttgtggtggctgggcagagccaggcaggagccagagtcagcctggggggtgatggagctgaggccatcaccggtctgacagtggaccagtatggcatgctgtataaggtggctgtgccgcctgccaccttttcaccaactggactcccatctgtggtgaatatgagtcccttgcccccaacgtttaatgtagcgtcttcactaattcaacatccaggcatccactatcctccactccactatgctcagctcccatccacctcgctgcagttcattgggtctccttatagccttccctatgctgtgccacctaatttcctaccgagtcccctcctatctccttctgccaaccttgccacctctcaccttccacactttgtgccatatgcctcacttctggctgaaggagccactcctcccccacaggctccctccccggcccactcatttaacaaagctccctctgccacctccccatctgggcaattgccacatcattcaagtactcagccgctggaccttgctccaggtcggatgcccatttattatcagatgtccaggctacctgctgggtatactttgcatgaaacccctccagcaggtgccagcccagttcttacccctcaggagagccagtctgctctggaagcagctgctgcaaatggaggacagagaccacgagagcgaaatttagtaagacgggaaagtgaagcccttgactcccccaacagcaagggtgaaggccagggactggtgccagtggtagaatgtgtggtggatggacagttgttttcaggttctcagactccacgggtagaggtagcagcaccagcacaccgggggaccccggacactgaccttgaggtccagcgggtggttggcgctttagcttctcaggactatcgtgtggtggcagctcagaggaaggaggaacccagccccctcaacctatcccatcatacccccgaccatcagggtgaggggcgagggtcagccaggaaccctgcagagctggcagagaaaagtcaggcccgtgggttctaccctcagtcccatcaggaaccagtaaaacatagacctttacccaaagcaatggttgtagccaatggcaacctggtgcccactggaactgactcaggcctgctgcctgtgggctcggagatcctggtagcatcaagtctggacgtgcaggccagagccaccttcccagacaaggagccaacgccgccccccattacctcctctcacttgccttcccatttcatgaaaggcgccatcatccagctggctacgggagagctgaagcgggtggaggacctccagacccaggattttgtgcgcagtgccgaagtgagcggggggctgaagattgactctagcacggtcgtggacattcaggagagccaatggcctggatttgtcatgctgcattttgtggttggtgagcagcagagcaaagtgagcatcgaagtgccccccgagcaccccttctttgtatatggccagggttggtcctcttgcagccctgggcggacgacacaactcttctctctgccctgccatcggctacaggtgggagatgtctgcatctctatcagtttacagagcttgaacagtaactcagtttctcaggccagctgtgctcccccaagccagctgggtcccccccgagaaaggcctgagaggacggtcttgggatccagagagctatgtgacagtgaggggaagagccagccggcaggagagggctcccgtgtggtagagccttcccagcctgagtccggtgctcaggcctgctggccagccccgagcttccaaagatacagcatgcaaggggaggaggcacgggctgcgctgctccgtccctctttcattccacaggaggtgctccctccacccaataccatttcttaccctctaatcctacctgatctttaacaaagcattaataattctaaggataatctctattttgttgtgcttttttgtaactgttttaaataaatcaatttgtactgtatatttgtacttttgtgagatcctttttgctgttttaccattttaag

SEQ ID NO: 461356 - DNA, 2210 bp, Homo sapiens
cagtcccgcgtcggcccgcccctcgggccgcgagaggcgccgggatcgcgggcgccggctgagccagcggctcttgggaggctgcgtccgcacgccggcggggcgaggcggcccggccctgcgcgtcaggcctgagacctgggaggaagctggagaaaagatgccctctgaatctttgtgtttggctgcccgggctcgcctcgactccaaatggttgaaaacagatatacagatggagtcttgctctgttgcccaggctggagtgcagtggtgccatcttggctcactgcaagctctgcctcctgggttcatgccattgtcctgcctcagcctcctgagtagctggaactatagacgtccaccatcatacctggtgaatttttgtatttttagtagagacggggttttaccatgttagccaagatggtctccatcttctgacctcgtgatccacccacctcggcctcttagagtgcttgggattacaggcgtaagccaccactcccggccgatatattgctttatgaaaattatactggatctgttacagatgatagtgttgaaccaagtggaacaaagaaagaagatctggatgacagagagaaaaaagatgaaactcctgcacgtcgcttcgttcctgcatccactgttttcatttcagggatgttcacggaataccaggcactaaagggccagaatcatccccctacaggaccagcacttggccctggccatcctgctggagctggctgtgcagagaggcatgctgagctgtgggacagcggggcacaggagactgacaatgagcgttccgcccagggcaccagcgccccgcttttgcccttgctgcaaaggttccagagcatcatttgcaggaaggatgcaccccactccgagggcgacatgcacatgagacaggtgtgggaggccacttgtttgtggagaagactcagatcagtgcgcgccgacttccttgtcagcacagaaccaagcttgaaacatgcacttttaaatcaataccagaaaagaacaacgaaaatagtggcttgctttgttggcccttcctttgtactgggctctgtgcagggcatgtcacctgagctgtcactgtgtttagtaccagccccccccttaataggtgtggacgtcttcctgaacagcctgaagcagacggtggtgaccctggcaagcagcgcagacgtgctgagcaccgagcagtcggcctcccaggccatgctgcagagcggctggtccatgctgttgcccaccgctgagaagcaggcccgggcactctgctctcctgccctgcggagtttcaggcaatgaagtgagcataagtccaggtcatcgattggtgattgatcttctggtgggcagcttgatggctgctggagggttggagtcagccttacacgcagccattactgcagagatccaggtatggccttggaggcacacgtgacctggtggtgggctgagatcggaaataccacactcacacatgtgaagaataactgaaaacagtaaaacactaaacttatatccaagtatttttttaaattaaaattcttttttgtgctaattttaaaaattactgagatgatttaattgtgataaaatactgcatgttgtctgtttcagtgaagttaacaggtaacctgttcctcatgtagaccattcccgtcacccggaaagatccctgtgctccttggcacttgcagccaggatactcccctgccctgagattagattcatttttcctgctctgagtgtcgcagcaatataactgtatagtatgcactctttcctgctttgccttggagaatgattttcagattcgctcactgttgtgtgtattgcgacttcgtttttattattgggaagttttccattttataggtgtagtactgtttgttagttcattttcctattgaaggacatgtaattgtttttggtttttgttttctttttttttttttttttttttttttgagacagggtcttgctctgtcacccaggctgtatacagtgacctgatgttggctcactgcagccttgtactcctaggctcaaatgatcctcccacctcagcctcctgtgttgcagggaccacatacatgtcaccatgtccggctagttttttgatttttttgtagagacaaggtttcactgtgttgcaaggctggtcttcaactcctgggctccagtga

SEQ ID NO: 461357 - DNA, 2829 bp, Homo sapiens
cagtcccgcgtcggcccgcccctcgggccgcgagaggcgccgggatcgcgggcgccggctgagccagcggctcttgggaggctgcgtccgcacgccggcggggcgaggcggcccggccctgcgcgtcaggcctgagacctgggaggaagctggagaaaagatgccctctgaatctttgtgtttggctgcccgggctcgcctcgactccaaatggttgaaaacagatatacagatggagtcttgctctgttgcccaggctggagtgcagtggtgccatcttggctcactgcaagctctgcctcctgggttcatgccattgtcctgcctcagcctcctgagtagctggaactatagacgtccaccatcatacctggtgaatttttgtatttttagtagagacggggttttaccatgttagccaagatggtctccatcttctgacctcgtgatccacccacctcggcctcttagagtgcttgggattacaggcgtaagccaccactcccggccgatatattgctttatgaaaattatactggatctgttacaggtacgattgatgtattttatttttaagttgtcaaacgttcagttaatgatgtgtgttgtaacttttcggggagggacatttgcagagactgacagatggtatggcattctgaaaagcggttacagattaaaaaaattttaattctgcagatgatagtgttgaaccaagtggaacaaagaaagaagatctggatgacagagagaaaaaagatgaaactcctgcacctgtatatggggccaagtcaattctggagagctgggtatggagtaagcaaccaggtaatctttgatcagagatagaaattagtgtagacattttgcctccagatcctcaagtggttttagaaattggttctctaattctgtgggagaaggttgatactggtatagtcttacacgtcattgaaactggaaaagatagctagatattctcctactcatgttttggataatgagataaattattttatgcttcacacacttggagtatgtcatctactgtaatatagtatctgaatgaatactttaaataaaatacatttctgtaaattaattgtatactttaaaaatctgtgaataaatttgagtagcaagtctcagaagcttgattctaaatattaaagatacatccttccttgggagggagcatgtagcaaatgtgttactgtgattgtaagcatgctgtctttctggaggtcgcttcgttcctgcatccactgttttcatttcagggatgttcacggaataccaggcactaaagggccagaatcatccccctacaggaccagcacttggccctggccatcctgctggagctggctgtgcagagaggcatgctgagctgtgggacagcggggcacaggagactgacaatgagcgttccgcccagggcaccagcgccccgcttttgcccttgctgcaaaggttccagagcatcatttgcaggaaggatgcaccccactccgagggcgacatgcacatgagacaggtgtgggaggccacttgtttgtggagaagactcagatcagtgcgcgccgacttccttgtcagcacagaaccaagcttgaaacatgcacttttaaatcaataccagaaaagaacaacgaaaatagtggcttgctttgttggcccttcctttgtactgggctctgtgcagggcatgtcacctgagctgtcactgtgtttagtaccagccccccccttaataggtgtggacgtcttcctgaacagcctgaagcagacggtggtgaccctggcaagcagcgcagacgtgctgagcaccgagcagtcggcctcccaggccatgctgcagagcggctggtccatgctgttgcccaccgctgagaagcaggcccgggcactctgctctcctgccctgcggagtttcaggcaatgaagtgagcataagtccaggtcatcgattggtgattgatcttctggtgggcagcttgatggctgctggagggttggagtcagccttacacgcagccattactgcagagatccaggtatggccttggaggcacacgtgacctggtggtgggctgagatcggaaataccacactcacacatgtgaagaataactgaaaacagtaaaacactaaacttatatccaagtatttttttaaattaaaattcttttttgtgctaattttaaaaattactgagatgatttaattgtgataaaatactgcatgttgtctgtttcagtgaagttaacaggtaacctgttcctcatgtagaccattcccgtcacccggaaagatccctgtgctccttggcacttgcagccaggatactcccctgccctgagattagattcatttttcctgctctgagtgtcgcagcaatataactgtatagtatgcactctttcctgctttgccttggagaatgattttcagattcgctcactgttgtgtgtattgcgacttcgtttttattattgggaagttttccattttataggtgtagtactgtttgttagttcattttcctattgaaggacatgtaattgtttttggtttttgttttctttttttttttttttttttttttttgagacagggtcttgctctgtcacccaggctgtatacagtgacctgatgttggctcactgcagccttgtactcctaggctcaaatgatcctcccacctcagcctcctgtgttgcagggaccacatacatgtcaccatgtccggctagttttttgatttttttgtagagacaaggtttcactgtgttgcaaggctggtcttcaactcctgggctccagtga

SEQ ID NO: 461358 - DNA, 1840 bp, Homo sapiens
accaaggttgctctgacagcaagaggaccttgatgcctctaaacccctttcccattggcactgtccccaccagctggaataaagagcaaggaccctgtctctgtggatacagccctcctgcggggcccccaaagacaacggatgcttcgtatggtgcaggcctggggacagctcgcctctccctcgcaatacacccacctggggttggctcaaactcctttttgtctgttgctgcagagagtggtggaaagctacagagaatggacaaaactcacagaccatctgttcatcttctgtgttttgtgaatttattttcaaatgttaagcattcgatagcagtcgtcaggcatcatctcaaaacttaccatttggggaaaggcattcttttaaaaatctacaagaatcactcatagaccagtgagagtcagggtttggaataggggctacttgagccaatcgattgctatcctttttttcccttgaattaaaccaatttgaagtgcattttctgccacttgcaactgaaacaaagcctaaatgatactacctggatccaaataccagctctaccattttcacaaaccatactctttcaggccctaagaagaagacagatgaggcttttgcacttgtactccagcatagcaaacaggtatcctaaacatgtgcttgttaccttatgcaacaacatggctgatctgactccaccattaagtcctagttccgggtaggaagaaagccaagagcaaaaggtgtcacctacgtgctagcaaagtctgtccaaaaacctgctgggaggagattttacagaaaacccacagaacaagtttggttttccctttcttaaattttggtaaaatatatataatatttgccattgtaaatgtttgtaagcatacaattcagtggcattaatcacattcacaaggttatgcaatcatcacctctatttctaaaattgtttcatatatctaacaaaaattctgtaactattaagcaataactcctcattcctgtctcctctcagcccctgataaactctaatctactgtctgtctctgtgcacttgcctgtttacgtacctcatataaatggaatcatgccatatttgtccttttgcatcgggcttattttgcttagcacaatgtcttcaagattcatccatgttgtgacatgtatctgaacttcactctttttatggctgaataatattccactctatgtatataccacattatgtttatccatttgtctgttgacgaatacttgggttgttctcaccttttagccattatctacactgcaatttttgattacattgtatcagtcagaattttatgacaaaaccatcctactctgtgaggaaaactgaacaatgtaactttatttcagctagagagagtgtccccagtcacaattggagtcttatgtaagaagaaataaggaaagcctactgggttgaatctaaaagtagaaaactcataacaaggctatgtgtgaacatcaagagagaattcaagatggcggggatgacactctttagtccatgtgtgcctggttttcatcatctccttgacttacacacatgtgggtgcctttacctctgaagactttttctcttctaactgatgatgctccattctcttctgacaaaagctccctgccaaggcctgattgaacctctgccctgtggttccttgaaacatcgtcatattcttgtactaaattccccattttcttaagctagctctggtaagtttttgccatttacagtcaaagtgaactcactaataaaatattcccaactgcataatcttctccctgggggatgggaatcata

SEQ ID NO: 461359 - DNA, 2191 bp, Homo sapiens
ggcagctactgccatggtgagtgccaaggggatacaggatgcgtgtgcaatgcgcacaccactcaaagggcacacagtggcacgcagtcctccagcagaaatgattcacagccaaatacagaagccggctgagcacagaatccaaagacagtggggctccaagccggctgtgctagcggcacaccagctctcctgccttcgtttcctgggtctcataacacactgtggggacttgggccccgtcgcagacaatgaaagagtcccagccagccagcactggagaaaaggagactgcaaatgcagacaaaccttgccaagcttcctccctctctgggtcacagtttccttctgtgcaaatcagagactgagactgaaagagggatgtgctgacagaactaacccagagtgaagattgggtaggcaggagcgctctaactttcaattacagtgtcacaccaaatggaactccgcagctctctctctactctggggtgtatttgactttgaatcaagcgacctcctgaacatatagacacagagaggagtggcttgttcctgctcactcaccccaccaggctgccatgggacataagccacagcccatcgtttacacacaggcttattaaagcaaataggatttggcctagattgcaaacaggttctcctctggacccacctctgcaatctgaaccactttcatttaaggaaacccaaagtcatgatctgttttctaggaaagtcagagccaaagacatgaacagaaaagaaaaaaaatgctgacaagtctcagtgggccaggacctgaaaatcaatttgacacatcaattttttggatttaataactcatgctcccatggaatcaagacctcccctttttaaacttctctgccctcaaattggatggacgctcttggatcatctgctcgaatgtcacgttttcaatgaagccttccctggtctccttatatattaataccccatttacagatgatcttggatcatttacagatccaagatcatctgtaaatggggtattaatccctttctcaaataactgttgagtgagtttaacaatatgattcatctaaaggtgctttgaaatggtacgagtgttacttggtctaattcagtctcagacttctggttgtggaatgcctgccctttatttccatagtctcatatagtgagtccagctgtacactcagggacttgtgtccccatctccacaataacctgcccaggcctgaccccacattccaactctggattttcatcgtgcatggactccttgtatgagcccagcctagttttccaactcacctgtgctccaccctcccaattgctctcttccaactggagagcccacgtgggcccaaggaaggcagggaggaaagtgacattgttgagccctgtgcccggtgaagtacgcatgtgagctcatccaatctgcagccactccaggaggagggcatcattatcctcaataaacagatgagcaaacagaggctcatggagggtcagcgacgtgtccaaggtcactgactcatcagaaggctactttgttctcactccatcaggtggcccaaggagaaagggtggttcacatccaatgattgatccatggaaagacattgaggcctgagcccctttccccagtctggaacaactctgaaggctcattccatttcacatttcccatggcatcagcagtcatttgtacaagtctggagttattttcagtggttaccacctggggattttgctactggcatccaatgggtagaggccaggggtgctgctgaacattctacaatgcacaggatactcccacccacagcaaagaattatctggcttaaaatgccagtaatgcccaggttgagaagccctctgtttgtgctggcaagcttgggccctggcagcatgtgtccatgctgtctgttcttgttgtcactagttctggttttcagaccttttcatgctcttttctattttggtttctaacaagggacacaggcacacacatgctcagaacaaatgcacagccttccttccccataacccctttctggctgcaatcatattcactgaggattagtcagccctctccaatggaggggagtggacactcaccttgacatcctgtgggcgcctgcagatgctggctctttctctcctcccagggataagacc

SEQ ID NO: 461360 - DNA, 523 bp, Homo sapiens
tgcttttagtattatgtctggcaatagtctcctatcccaaaattatgtcaatatatacttatgttttctttcagtatgtttatgatgttattttttaaaacatttaattctttagtccaggtggaatttattttgattgtggtaggaattgaacctttccctcaaattgttaagcagtcccaatcactgattttaaaaacattttccctaaatgtttaacatttctccagttaaaccttagattgacttgggtctgtttctgagttgttctcctccattggttcgtgagtggcttctgctgctggctccatactgttcccacgactgtcttggaggcacattttagggtctggtaaggcaagtaccccccacattacttcacaagttttctgactattttcactcgtttattcttccagatgaaatttagaatcaagttcaaaacaaaaaactctttggaattttgattgtgattttgcttaaaattagagattactttggggagaatagtggtctttgcaat

SEQ ID NO: 461361 - DNA, 346 bp, Homo sapiens
ggtgggattacaagtgatctttattttccttacatttaaaaaaattcaatgtatttttacaaataataaaatatgttttaaacaatcattaatacctttttagaaaaacaggatgaagttgtctattacgatccatgtgaaagtccagaggaacttagtcattgactgtggtggggctgcaggacgataagaattcggaagtgaaagaactcagaaggcagtgccagcagctggagtctattaaacggggcaggatctgtgtcaaaagagcttctctccagagtagaaaggtgggtacgctcagagcagctttcttttcttttctcttccagagatttattcttgt

SEQ ID NO: 461362 - DNA, 1940 bp, Homo sapiens
agcgaggccgggccgccggcgtttgaccgcgcttgggtggcctgggacccggtgggaggcttccccggcgccgagagccctggctgacggctgatggggaggagccggcgggcggagaaggccacgggctccccagtaccctcacctgcgcgggatcgctgcgggaaaccagggggagcttcggcagggcctgcagagaggacaagcgaagttagagcctagtgtacttgccgctgggagctgggctaggcccccaacctttgccctgaagatgctggcagagcaggatgttgtaacgggaaatgccagaaatactgcaagcaaaactgaaaacaacccatccatgtaggaaagaataacacggactacacgttattcaaggacaccgaaaagccaacaccatggtagcattaatgaaagtttaccaagaggaagatgaagcctaccaggaattagttaccgtggcaaccacgttcttccagtacttactgcagccatttagggctatgcgagaagttgcaactttataagtccttggatgaggatgacctaggtcctagaagggtagttgccctggagaaagaagctgaagaatggaccagacgggctggagaagctgtcgtctctattcaagatatcacagtgaattattttaaggagacagtaaaagcattagcaggaatgcaaaaagaaatggaacaggatgtgaagagacttggccaggctgcctgggccacagcaattcccaggttggaaaaacttaagctaatgctagctcaagagactctgcaactcatgagagcgaaagaattgtatttaaattgcaaaagagctgaaattcagggaaagatggaagatcttccagaacaagaaaaaaatataaatgttgtagatgaattagaaatacaattttatgaaattcagttagaactatatgaagttaaatttgagatattaaaaaacaaagaaatactgcttactacacagttggactctcttgaaagacttataaaagttaaaccttagattgacttgggtctgtttctgagttgttctcctccattggttcgtgagtggcttctgctgctggctccatactgttcccacgactgtcttggaggcacattttagggtctggtaagaaaaacaggatgaagttgtctattacgatccatgtgaaagtccagaggaacttagtcattgactgtggtggggctgcaggacgataagaattcggaagtgaaagaactcagaaggcagtgccagcagctggagtctattaaacggggcaggatctgtgtcaaaagagcttctctccagagtagaaaggatcagtgcaaagaaaatcattggctcagattgcaacaggctgaagaaagcataagatattctcgtcagcatcacagtattcagatggtgagtgtcctccgaaggaaaatgttctatgtttgtgtagcgtgacatgcaggcctagacttgtggaaactggagttgcgctgccctggacctgcagctgtcagccaattcacctccaggcctgcagtctggttgcagtcttggggtggtaatgttggggtacagcctctttctttgtcaagacatttttattgtatgccacgacatttttgtaatgttgagcaatttacaaatatacatctgcttaaatatagaaaagagacaagataaaaaggagcaaaagaaaaaagaatgggtcaaccaagaacgtcaaacactccaacgattgagagcatttaaagatcagttactgataccttgccattgaaggggaggatagatgcccacagcccctctccttcaaccacatatgtccaagtaaaactagtatttcttctttttaaaaagatagacataattattttccgtattattgaatacatttctgttgtaacctcagttctactcttcagaatcctttgttc

SEQ ID NO: 461363 - DNA, 776 bp, Homo sapiens
actctcatcatagactgtggaggagagtaccattgggccgcaccagaactaatattaatgaatgccttacactacgcccaaatgcagtgctttcttcttttaaccttttatgctataccagggtaacactaaaaaccatgtaggtgatttgtattattccaccaggatcagtgcaaagaaaatcattggctcagattgcaacaggctgaagaaagcataagatattctcgtcagcatcacagtattcagatggtgagtgtcctccgaaggaaaatgttctatgtttgtgtagcgtgacatgcaggcctagacttgtggaaactggagttgcgctgccctggacctgcagctgtcagccaattcacctccaggcctgcagtctggttgcagtcttggggtggtaatgttggggtacagcctctttctttgtcaagacatttttattgtatgccacgacatttttgtaatgttgagcaatttacaaatatacatctgcttaaatatagaaaagagacaagataaaaaggagcaaaagaaaaaagaatgggtcaaccaagaacgtcaaacactccaacgattgagagcatttaaagatcagttactgataccttgccattgaaggggaggatagatgcccacagcccctctccttcaaccacatatgtccaagtaaaactagtatttcttctttttaaaaagatagacataattattttccgtattattgaatacatttctgttgtaacctcagttctactcttcagaatcctttgttc

SEQ ID NO: 461364 - DNA, 334 bp, Homo sapiens
aatgccagaaatactgcaagcaaaactgaaaacaacccatccatgtaggaaagaataacacggactacacgtaagcaattccaagtctgtgtctgcggggacgtcgcaagtgggataaaatggtttaaaggaagaaatggcttttaggagttagggtgttttgttttaagtaatacagacttggtcaaatggaaagccggtagaaagtgagctttattcatcagtttagaataaccgcattagtgcccttttaagcttgaaagaggtagtttgagagagtaattatttgagtggtaaacttactgaacttaaggggacggggaagtgcatgttc

SEQ ID NO: 461365 - DNA, 366 bp, Homo sapiens
tacctcattgccatttatgtttctcaaaacctaaatgtttttctctgtttcaaggatgggataaagtattagcatcactagatgaaatgaaaaagtgtttctttcctatttgctcttttatatttagtacggaacaaggaatagaaaatagctagaatgcttctaaagtttgtttttaatatactatttgttttaacttatttttcttttttctatgaaaataagatggaagatcttccagaacaagaaaaaaatataaatgttgtagatgaattagaaatacaattttatgaaattcagttagaactatatgaagttaaatttgagatattaaaaaacaaagaaatactgcttactacacagttg

SEQ ID NO: 461366 - DNA, 1813 bp, Homo sapiens
agcgaggccgggccgccggcgtttgaccgcgcttgggtggcctgggacccggtgggaggcttccccggcgccgagagccctggctgacggctgatggggaggagccggcgggcggagaaggccacgggctccccagtaccctcacctgcgcgggatcgctgcgggaaaccagggggagcttcggcagggcctgcagagaggacaagcgaagttagagcctagtgtacttgccgctgggagctgggctaggcccccaacctttgccctgaagatgctggcagagcaggatgttgtaacgggaaatgccagaaatactgcaagcaaaactgaaaacaacccatccatgtaggaaagaataacacggactacacgttattcaaggacaccgaaaagccaacaccatggtagcattaatgaaagtttaccaagaggaagatgaagcctaccaggaattagttaccgtggcaaccacgttcttccagtacttactgcagccatttagggctatgcgagaagttgcaactttataagtccttggatgaggatgacctaggtcctagaagggtagttgccctggagaaagaagctgaagaatggaccagacgggctggagaagctgtcgtctctattcaagatatcacagtgaattattttaaggagacagtaaaagcattagcaggaatgcaaaaagaaatggaacaggatgtgaagagacttggccaggctgcctgggccacagcaattcccaggttggaaaaacttaagctaatgctagctcaagagactctgcaactcatgagagcgaaagaattgtatttaaattgcaaaagagctgaaattcagggaaagatggaagatcttccagaacaagaaaaaaatataaatgttgtagatgaattagaaatacaattttatgaaattcagttagaactatatgaagttaaatttgagatattaaaaaacaaagaaatactgcttactacacagttggactctcttgaaagacttataaaagaaaaacaggatgaagttgtctattacgatccatgtgaaagtccagaggaacttagtcattgactgtggtggggctgcaggacgataagaattcggaagtgaaagaactcagaaggcagtgccagcagctggagtctattaaacggggcaggatctgtgtcaaaagagcttctctccagagtagaaaggatcagtgcaaagaaaatcattggctcagattgcaacaggctgaagaaagcataagatattctcgtcagcatcacagtattcagatggtgagtgtcctccgaaggaaaatgttctatgtttgtgtagcgtgacatgcaggcctagacttgtggaaactggagttgcgctgccctggacctgcagctgtcagccaattcacctccaggcctgcagtctggttgcagtcttggggtggtaatgttggggtacagcctctttctttgtcaagacatttttattgtatgccacgacatttttgtaatgttgagcaatttacaaatatacatctgcttaaatatagaaaagagacaagataaaaaggagcaaaagaaaaaagaatgggtcaaccaagaacgtcaaacactccaacgattgagagcatttaaagatcagttactgataccttgccattgaaggggaggatagatgcccacagcccctctccttcaaccacatatgtccaagtaaaactagtatttcttctttttaaaaagatagacataattattttccgtattattgaatacatttctgttgtaacctcagttctactcttcagaatcctttgttc

SEQ ID NO: 461367 - DNA, 1918 bp, Homo sapiens
agcgaggccgggccgccggcgtttgaccgcgcttgggtggcctgggacccggtgggaggcttccccggcgccgagagccctggctgacggctgatggggaggagccggcgggcggagaaggccacgggctccccagtaccctcacctgcgcgggatcgctgcgggaaaccagggggagcttcggcagggcctgcagagaggacaagcgaagttagagcctagtgtacttgccgctgggagctgggctaggcccccaacctttgccctgaagatgctggcagagcaggatgttgtaacgggaaatgccagaaatactgcaagcaaaactgaaaacaacccatccatgtaggttattcaaggacacggaaaagccaacaccatggtagcattaatgaaagtttaccaagaggaagatgaagcctaccaggaattagttaccgtggcaaccacgttcttccagtacttattgcggccatttagggctatgcgagaagttgcaactttataagtccttggatgaggatgacctaggtcctagaagggtagttgccctggagaaagaagctgaagaatggaccagacgggctggagaagctgtcgtctctattcaagatatcacagtgaattattttaaggagacagtaaaagcattagcaggaatgcaaaaagaaatggaacaggatgtgaagagacttggccaggctgcctgggccacagcaattcccaggttggaaaaacttaagctaatgctagctcaagagactctgcaactcatgagagcgaaagaattgtatttaaattgcaaaagagctgaaattcagggaaagatggaagatcttccagaacaagaaaaaaatataaatgttgtagatgaattagaaatacaattttatgaaattcagttagaactatatgaagttaaatttgagatattaaaaaacaaagaaatactgcttactacacagttggactctcttgaaagacttataaaagttaaaccttagattgacttgggtctgtttctgagttgttctcctccattggttcgtgagtggcttctgctgctggctccatactgttcccacgactgtcttggaggcacattttagggtctggtaagaaaaacaggatgaagttgtctattacgatccatgtgaaagtccagaggaacttagtcattgactgtggtggggctgcaggacgataagaattcggaagtgaaagaactcagaaggcagtgccagcagctggagtctattaaacggggcaggatctgtgtcaaaagagcttctctccagagtagaaaggatcagtgcaaagaaaatcattggctcagattgcaacaggctgaagaaagcataagatattctcgtcagcatcacagtattcagatggtgagtgtcctccgaaggaaaatgttctatgtttgtgtagcgtgacatgcaggcctagacttgtggaaactggagttgcgctgccctggacctgcagctgtcagccaattcacctccaggcctgcagtctggttgcagtcttggggtggtaatgttggggtacagcctctttctttgtcaagacatttttattgtatgccacgacatttttgtaatgttgagcaatttacaaatatacatctgcttaaatatagaaaagagacaagataaaaaggagcaaaagaaaaaagaatgggtcaaccaagaacgtcaaacactccaacgattgagagcatttaaagatcagttactgataccttgccattgaaggggaggatagatgcccacagcccctctccttcaaccacatatgtccaagtaaaactagtatttcttctttttaaaaagatagacataattattttccgtattattgaatacatttctgttgtaacctcagttctactcttcagaatcctttgttc

SEQ ID NO: 461368 - DNA, 1216 bp, Homo sapiens
gattcacaaacagacctggaatgaatccttctcgctcttcatacactgagacaggttgaaatctaagaccatggcagggagaagccgcacgcggagtcgcactgtcaggatccaggatcgatcttaatcagattgcaagttcttcaggcttggaaccatatcaccacaatgaacagccaagtataaagggtccctggggaaaccccaaccggcctgcgccctgggagaatggggtggagccacggaagttcacgcgctttgcagaggggaggagcctggcctctcctgatcctggatagtacctgagattcaatcgctgaggcgggaaaacccgctagcaggactgttgctttgctgagagtccctgtttccctttttttccttttggcccgataaattccatttttctcacccttcaaaatctctgtgaccctaatctctcatggccatgtgacatgggccctaaagagaaagtcctacaacaatagctttcatatgataatatcagtgataagctgtcgtttacaatggacgcctctcaggaaggtcataaccgaagaaaaccgctgtcagcagtttgggagggaaggactgggtctgaacacacagacaaattatagcaagagccaccaaggtggacgttgcttacccagtgctcatggagtgagtcagagcccaaagtattcttcccctgagcaaagccatctctattgtcagatgcagaagccccagccaggggcccggagatgcctggattcttctaaatcctgcaggtcttcgaggcctcttgcaactgtaattgagtttcctgtcaaagctttagcatgcagcagctcttcgccaggtcttatgccaggccctggggatgaaaggacgaacaagataaccctgccctcagggagcttccagtccaaagaaacccaggaggctcaacacaatgtgatgatttctgtgacgtggttaagtccggggggccataaaaagcggggcctctaaccaggtctgtgggcaggcgagcactggagaaagtttctatgaagagacagcgtatctggatgaaagcacacagaagagtgtaaattagtcaggaatattttttctccaagaagttgtcaccagaaacttaagaaaaagcctttttattgaaatatgcatttaaaaagtgcacaaatgaaaattttacagcttgacaaggccccagagtcagcccatgatg

SEQ ID NO: 461369 - DNA, 1055 bp, Homo sapiens
tgctccagtgcagatcaggaaggagcagggggtgaaatgttacaaattctagaactcagagagctgaagggctgaggtccatttgtatgcacacaaagaaaagagtttcttcctttcgaggaaataaaattggcctgaaagacgtcattactctacggaggcatgtggaaacaaaagttagagctaaaatccgtaagaggaaggtgacaacgaaaatcaaccgtcatgacaaaatcaatggaaagaggaagaccgccagaaaacagaaaatgtttcaacgtgcgcaagagttgcggcggcgggcagaggactaccacaaatgcaaaatccccccttctgcaagaaagcctctttgcaactgggtcagaatggtggcagcggagcatcgtcattcttcaggattgccctactggccctacctcacagctgaaactttaaaaaacaggatgggccgccagccacctcctccaactcaacaacattctataactgataactccctgagcctcaagacacctactgagtgtctgctcactccccttccaccctcagtggatgataatatcaaggagtgtcctcttgctcctcttccaccctctcctcttccaccctcagtggatgataatctgaaggaatgtctctttgtcccgcttccaccctctcctcttccaccctcagtggatgataatctcaagactcctcccttagctactcaggaggccgaggtggaaaaaccacccaaacccaagaggtggagggtggatgaggtggaacaatcaccgaaacccaagaggcggagggtggatgaggtggaacaatcgcccaagcccaagaggcagagggaggccgaggcacaacaattacccaaacccaagaggcggaggttgagtaagctgagaacacgccattgcactcaagcctgggcaataagaataaatccgtaggtcgaaaaaaagaaaaaattcaaaaacaaacaaaacccacgctccaaaaacaaactaacgaagaataaataaataatataaaaataaaataaatactgcagtccttatgtt

SEQ ID NO: 461370 - DNA, 762 bp, Homo sapiens
ctacaggtcagaatggcggcagcggagcatcgtcattcttcaggattgccctactggctctacctcacagctgaaactttaaaaaacaggatgggccgccagccacctcctccaactcaacaacattctataactgataactccctgagcctcaagacacctcctgagtgtctgctcactccccttccaccctcagtggatgataatatcaaggagtgtcctcttgctcctcttccaccctctcctcttccaccctcagtggatgataatctgaaggaatgtctctttgtcccgcttccaccctctcctcttccaccctcagtggatgataatctgaaggaatgtctctttgtcccacttccaccctctcctcttccaccctcagtggatgataatctcaagactcctcccttagctactcaggaggccgaggtggaaaaaccacccaaacccaagaggtggagggtggatgaggtggaacaatcaccgaaacccaagaggcggagggtggatgaggtggaacaatcgcccaagcccaagaggcagagggaggccgaggcacaacaattacccaaacccaagaggcggaggttgagtaagctgagaacacgccattgcactcaagcctgggcaataagaataaatccgtaggtcgaaaaaaagaaaaaattcaaaaacaaacaaaacccacgctccaaaaacaaactaacgaagaataaataaataatataaaaataaaataaatactgcagtccttatgtt

SEQ ID NO: 461371 - DNA, 642 bp, Homo sapiens
tgctccagtgcagatcaggaaggagcagggggtgaaatgttacaaattctagaactcagagagctgaagggctgaggtccatttgtatgcacacaaagaaaagagtttcttcctttcgaggaaataaaattggcctgaaagacgtcattactctacggaggcatgtggaaacaaaagttagagctaaaatccgtaagaggaaggtgacaacgaaaatcaaccgtcatgacaaaatcaatggaaagaggaagaccgccagaaaacagaaaatgtttcaacgtgcgcaagagttgcggcggcgggcagaggactaccacaaatgcaaaatccccccttctgcaagaaagcctctttgcaactgggtaagtttgtttgttttccttgcttttgaacatagtctgccaggtcaggacatggatacatttttctccctacagctctgtgctcaagccctgcagagggagatggcagagaggaaggctgcctacaggcatcacagtcccatccctgttggtaaccgtgttgtgcaaaaacaccttcatccccacccagtggggcccctgatctaaattcaaagtgtcagaggttccatatttgtaatagcaaatgggccctgactgtaaattagtgaagagtgaatgt

SEQ ID NO: 461372 - DNA, 1060 bp, Homo sapiens
agggacatttcgtggcctctggatgtgggcagacattataacaaacactgtgacagagggatttctgtaccccggggtttcttgccttggtgtactggaagaagcaaatcacacgtgggcttggagaatgagtgtaaaattttattgcgtggaggtagctctcagcggacggaggatccacaagggagctcttctcaacgaccagctgcttgtgtcttcttcagccgacgtgctccttttgatgtgtggctgcccgctaggatgtgtgtgtggtacggggcggggggtgggggtggagaacggttattataggtacaggatggggcgtggcaggccagggtggtgtcgggaaatgcaacagttgggcaggaaatgtctgtcctcacctaggaaagttacttctggttttgtcaacagttccatcgctgcccagctgacactggtggtcagctgctaatgacccttccgctggagagaagaggaagtgggcttggctctaacttgccctgatccccttccagcctgacatttctatgcacagagaactaatggagtcagaccagactgcaaattcccatgctgccatgcagaagccaggagtatgaaatcaaggtgtcagaggggctgtactccctccgaaggctgcaggagaaaatctattgcttgcctcttctaccttttggtggttccaggagttccttggcttgtgatcacatcactgaaatcttaacctacctggtcatactgctgcctcttcttctctctcaaaacttctcctgcctctcttcatacttgtgattgcatttagggtccatctgggtactccaggaaaaactcctactgtcaagatttaacttaatcatatcttatgtcatataaagtcatgttcaatattttacaacataaaataatagtcacagtttctggagataaggacatgggcgtgtcttttgggggatcatccttcaatccattgcatctatctatcagtgatcaccccaacccaaataaacccgcataatattttcaggtatccatttttcctttttccagggtccct

SEQ ID NO: 461373 - DNA, 912 bp, Homo sapiens
ctgaaggatccctgtggtgtcaggcaggaatggcctgcttgggaagctcacaggtactttgctgctgcttcctctacccctgtatttcactcggctctctaaattgacttggctccagttaaggttggaatcttctgcaaactaggccttgagtttctccagtaggagtgtgtgtttggttaaggaggatttccctttcccacttccacagtttggtcacagtatttggggtgcctcctgggtcctgcgtgagcaatccacttccttaagaggatctgtggatcctatcgggttttctgatttattcctgtggtcgttttggagttaaaattcacaatacggacctcctcacgctgctgtattcatccgtgtcacagctgcaatcttgtcctgcctcccatctgccatgatggaatgcaatctctttatttactattattattattattttcaattttttattttaagttcagaggtacatgtgcaggatgtgcaggtttgttacagagacaagctcaggggctacatgaagaacagcaggttacagcagcagtcaggaccatcagctgcaaatcagttggagtttgctggcggtccactccagaccctttttgcctgggtatcaccagtggaggttgcagaacagcaaatattgcagaacggcaaatgttgctgcctgatccttcctgtggaagcttcgtctcagaggggcaccaggctgtatgaggtgtcagtcggcccctactgggaggtgtctcccaggaacttttacttatgtctaaagatgcagttcaaaagcagccatttccttgaaatgtaaggacttcttctgggttcccataaagttaatatatggattatatcacattgctatgattatttatttgcatattcttttctgttctaaactct

SEQ ID NO: 461374 - DNA, 794 bp, Homo sapiens
tatagatgtatgtcactgtgtttaacatattactattttattttaataaatggatctatagatgccacgcggactatgccccaagtgaacatttcaggggtgcatctgcttttgtggattggtgggatctacatcccatctgttagttctgaccactcattgatggtgcataatgaaatctttctaatatggtttggctgtgttcccacccaaatttcacatggtagctcccataattcctatgggaaggaatcagtgggagagagtccccgcctctctcttgcctgctgccatgtaagacctgactttgccataattgtgaggcctcctcagccacgtggaactggtctcactctgtacccaggctggagtgcagtagagcaatcacggctcactgtagcctcaatctctggggttcaagcaatcctcccatctcagcctcctgagtagctgggaatgcagcaacatggaagcagctggaggctactatcctgaatgaaatactgcagaaacagaaaagcaaatatcacatgttctcacttataagtgggagataaccttgagtacacaaggacttaaagatgggaacaatagacactggggactccagaagacgggaagatgggaggaggaaggaaagggctggaaaactgcccatcttgtactactattatctggatgacgggatcaatagatgcccaaacgtcagcatctctcaatatatccttgtaacaaatctgcacatgcaccccctgaatctaaaattaaaattaaaaagaacattggtaacagaa

SEQ ID NO: 461375 - DNA, 2234 bp, Homo sapiens
ctcccctggggtcttgcccagttcctgctcaccagaaggaccatagccgaggtcctcctcccagggcccggggctggggagcggaagccatcagtgggctcggaggacactgtcccagccaggacacggccatcggtcactaatctgcagcaccggaatgtccccaggccaatcagcgggcccccctcttttgtccaccagcccagcctgactcctggagattgtgaatagctccatccagcctgagaaacaagccgggtggctgagccaggctgtgcacggagcgcctgacgggcccaacagacccatgctgcatccagagacctcccctggccgggggcatctcctggctgtgctcctggccctccttggcaccacctgggcagaggtgtggccaccccagctgcaggagcaggctccgatggccggagccctgaacaggaaggagagtttcttgctcctctccctgcacaaccgcctgcgcagctgggtccagccccctgcggctgacatgcggaggctggactggagtgacagcctggcccaactggctcaagccagggcagccctctgtggaatcccaaccccgagcctggcgtccggcctgtggcgcaccctgcaagtgggctggaacatgcagctgctgcccgcgggcttggcgtcctttgttgaagtggtcagcctgtggtttgcagaggggcagcggtacagccacgcggcaggagagtgtgctcgcaacgccacctgcacccactacacgcagctcgtgtgggccacctcaagccagctgggctgtgggcggcacctgtgctctgcaggccagacagcgatagaagcctttgtctgtgcctactcccccggaggcaactgggaggtcaacgggaagacaatcatcccctataagaagggtgcctggtgttcgctctgcacagccagtgtctcaggctgcttcaaagcctgggaccatgcaggggggctctgtgaggtccccaggaatccttgtcgcatgagctgccagaaccatggacgtctcaacatcagcacctgccactgccactgtccccctggctacacgggcagatactgccaagtgaggtgcagcctgcagtgtgtgcacggccggttccgggaggaggagtgctcgtgcgtctgtgacatcggctacgggggagcccagtgtgccaccaaggtgcattttcccttccacacctgtgacctgaggatcgacggagactgcttcatggtgtcttcagaggcagacacctattacagagccaggatgaaatgtcagatcaagagccagaaagtgcaggacatcctcgccttctatctgggccgcctggagaccaccaacgaggtgattgacagtgacttcgagaccaggaacttctggatcggtgagtgcccagctgattgggggaaccctgggccatggcggctgccagcagatggcaagggtgtgttgagggcctggagcccagagcggggccagctgctcaccccctttcccggggagggcccaggtagggagcacatgggggctgccagcgctgggaagaggggccagaaaggcagctggcagcagactccagggtctgagtgggccaaccttgactaccccggcccagggctcacctacaagaccgccaaggactccttccgctgggccacaggggagcaccaggccttcaccagttttgcctttgggcagcctgacaaccacgggtttggcaactgcgtggagctgcaggcttcagctgccttcaactggaacgaccagcgctgcaaaacccgaaaccgttacatctgccagtttgcccaggagcacatctcccggtggggcccagggtcctgaggcctgaccacatggctccctcgcctgccctgggagcaccggctctgcttacctgtctgcccacctgtctggaacaagggccaggttaagaccacatgcctcatgtccaaagaggtctcagaccttgcacaatgccagaagttgggcagagagaggcagggaggccagtgagggccagggagtgagtgttagaagaagctggggcccttcgcctgcttttgattgggaagatgggcttcaattagatggcgaaggagaggacaccgccagtggtccaaaaaggctgctctcttccacctggcccagaccctgtggggcagcggagcttccctgtggcatgaaccccacggggtattaaattatgaatcagctgaacctg

SEQ ID NO: 461376 - DNA, 613 bp, Homo sapiens
gtgcatgtgtgtccaggggaagatctgcagaattggagggagcacggagtgtgcacacgtgttctcggggagcagagagtgtgtttgtgtgtccaggggaagatctgcagaattggagggagacggagttgtgcatgtgtgttcctggggaacagagagtgtgcacgtgtgtccaggggaagatctgcagaattggagagagacggagtgtgcacgtgtgccccgggggagcatggagtgggcacgcatgtcccaggggaacatctgtccaaggcaaagaggaaggagcaaaccccagcaactgtgtcactttccataacggaggctctgatgctcgtctccgggaagaaaagctccctcagtggagccttctcccaacattaaacattggaaacagaggggagggccaggccctgcacctgcaccccggtgtgtccacgcaccgtgtagtcttgagggagtggctcagcctctctgggcctcacaatataacctctctcaagatgattccccctctcagtaagtgagggttattattattagctcttagcaaaaatgaaacaaagaaagaacaatgggacttttatgctgggaaaaggacactgaagaaaca

SEQ ID NO: 461377 - DNA, 2484 bp, Homo sapiens
gttttgttacttaaaaaattcagcttcaaagaatattgtatagaaattgtgaggccaatccacgcagccctctatgctatacaagttggcggcagagccaatggttgtgccgagactcgccgctgcccgggctgctgggtcttgagtgtcacctacactgccatggatgccaccggacgctgacagacctgtggagagtcgggttgtgcctcccgggccttatcgggccaccaagctgtggaatgaagttaccacatcttttcgagcaggaatgcctctaagaaaacacagacaacactttaaaaaatatggcaattgtttcacagcaggagaagcaggggattggctttatgacctattaagaaataatagcaattttggtcctgaagttacaaggcaacaactgttgaggaaatttcttaagaatcgtataattgaagatatcaaagggaggtggggatcagaaaatgttgatgataacaaccagctcttcagatttcctgcaacgttgccacttaaaactctaccacgaaggcatccagaattgagaaaaaacagcatagagaacttttccaaagataaagatagtatttttaaattacaaaacttatctcgtagaactgctgaaaagcatggattacatttatctcaggaaaatgccgagaaaataaaacatgaaataataaatgaagatcaagaaaatgcagttgatgatagagaactaagccaggaagacgttgaagaagtttggagatattttattctgatctacctgcaaactattttagaagtggaccttgatgagcttcttgctggaagattagtttctttcttaatggatcatgatcaggaaattcttcaagtaccctcttacttgcagactgcagtggaaaaacatcttgactacttaaaaaggggacatattgaaagtcctggagatggactatttgctcctttgccaacttactcatacgaagatgaggatgtaaaagaagtataaggcaatcatatattcattcaaaagatatttatttagcaactgctatgtgcctttcattattccagatatgcggagacaatgataaataaaacatataatctcttccataagatgtacattgtgcaaatattttctcccattctgtaggttgcctttccatattcttgatagtgttctttgagaaaaaactataaatatttgtaattttgatgaagttcaatttatctgttcttttgttgattgtacttttgttattgtacctacaaaattattgcctaactcaagattacaaagatttactgctatgttttcttctaagtgttgttatgctattgtctcttaggtttaggaggctcatgatcaatcttgtcttaatttttgtgtacagtgtgaagtaaggatagaactttattcattcacttgtggatactaagttgcccgaccattatttgttaaaaaaacaaaaaaacaaaaaaacccaaaaaaacctgttctttccccacaaaattatcttgctgctcttgtaaagaatcaaccagacataaatgcaagggtttatgccaataccatactatcttaattattgtggatttatcataaattttaaagtcagaaaatgtgagtcctcctttgtttttcgagattatcctggctattctcaatcccttgaatttccatatgaattttagggtcagcttgtcaatttctgaaaaaaaagccagctggaattttgaaagggattgggttgaatctgtacattaatctaaggagtattgccatcttagcaacattgcattttctggcccatgaatatgggatatcttttaacagcaacactgggaactggaagacaacggaagataacttcaatgtgttcaatacaaaaccctgcaaaactaaaattctaattccagtgaaagtatctttataaaatgaagggagaagaagtgagcatttggtgacagagagtatagataaatcttcaaagattgttgctataaaggacagcataaaaaggattggtagctggagggagatatgaagttgatttttaagatgagcaacttaaaaacatctcatatagagaagaaggaagtgatgaaacagtggaaatcagggctaattggaaggatgatgtcccttagtaacttttagcaggtgaggagggtagcatccaaagggaggtaaggtgagagaaggatgaaggatgagggtacagaagctgaagaataatgatagggaagatcaagagttctccattagaccactgtgtggagtaggtagcaaagttataagggagactgaagggaaagagtttgttggaaatttgagaaaaacagaaaagtatgaaattgtcatcttggggaataacaaagtgaaatttccatgaaaataaaacaatttagcagttttcagtgcctatatgatataaatttgaagacagcctagtcatcagagttctaagatttttttccagtgatgtt

SEQ ID NO: 461378 - DNA, 2685 bp, Homo sapiens
tacggtacgttaatcagactcacgaacagcagctggtcatttcgatatttccagcagtgagccaggcacctggtcactttgcagcctccaccaagggcccatcggtcttccccctggcaccctcctccaagagcacctctgggggcacagcggccctgggctgcctggtcaaggactacttccccgaaccggtgacggtgtcgtggaactcaggcgccctgaccagcggcgtgcacaccttcccggctgtcctacagtcctcaggactctactccctcagcagcgtggtgaccgtgccctccagcagcttgggcacccagacctacatctgcaacgtgaatcacaagcccagcaacaccaaggtggacaagaaagttgcacctgaactcctggggggaccgtcagtcttcctcttccccccaaaacccaaggacaccctcatgatctcccggacccctgaggtcacatgcgtggtggtggacgtgagccacgaagaccctgaggtcaagttcaactggtacgtggacggcgtggaggtgcataatgccaagacaaagccgcgggaggagcagtacaacagcacgtaccgtgtggtcagcgtcctcaccgtcctgcaccaggactggctgaatggcaaggagtacaagtgcaaggtctccaacaaagccctcccagcccccatcgagaaaaccatctccaaagccaaagggcagccccgagaaccacaggtgtacaccctgcccccatcccgggatgagctgaccaagaaccaggtcagcctgacctgcctggtcaaaggcttctatcccagcgacatcgccgtggagtgggagagcaatgggcagccggagaacaactacaagaccacgcctcccgtgctggactccgacggctccttcttcctctacagcaagctcaccgtggacaagagcaggtggcagcaggggaacgtcttctcatgctccgtgatgcatgaggctctgcacaaccactacacgcagaagagcctctccctgtccccggagctgcaactggaggagagctgtgcggaggcgcaggacggggagctggacgggctgtggacgaccatcaccatcttcatcacactcttcctgttaagcgtgtgctacagtgccaccgtcaccttcttcaaggtgaagtggatcttctcctcggtggtggacctgaagcagaccatcatccccgactacaggaacatgatcggacagggggcctagggccaccctctgcggggtgtccagggccgcccagaccccacacaccagccatgggccatgctcagccaccacccaggccacacctgcccccgacctcaccgccctcaaccccatggctctctggcctcgcagttgccctctgaccctgacacacctgacacgccccccttccagaccctgtgcatagcaggtctaccccagacctccgctgcttggtgcatgcagggcactgggggccaggtgtcccctcagcaggacgtccttgccctccggaccacaaggtgctcacacaaaaggaggcagtgaccggtatcccaggcccccacccaggcaggagctggccctggagccaaccccgtccacgccagcctcctgaacacaggcgtggtttccagatggtgagtgggagcatcagccgccaaggtagggaagccacagcaccatcaggccctgttggggaggcttccgagagctgcgaaggctcactcagacggccttcctcccagcccgcagccagccagcctccattccgggcactcccgtgaactcctgacatgaggaatgaggttgttctgatttcaagcaaagaacgctgctctctggctcctgggaacagtctcggtgccagcaccaccccttggctgcctgcccacactgctggattctcgggtggaactggacccgcagggacagccagccccagagtccgcactggggagagaaggggccaggcccaggacactgccacctcccacccactccagtccaccgagatcactcagagaagagcctgggccatgtggccgctgcaggagccccacagtgcaagggtgaggatagcccaaggaagggctgggcatctgcccagacaggcctcccagagaaggctggtgaccaggtcccaggcgggcaagactcagccttggtggggcctgaggacagaggaggcccaggagcatcggggagagaggtggagggacaccgggagagccaggagcgtggacacagccagaactcatcacagaggctggcgtccagccccgggtcacgtgcagcaggaacaagcagccactctgggggcaccaggtggagaggcaagacgacaaagagggtgcccgtgttcttgcgaaagcagggctgctggccacgagtgctggacagaggcccccacgctctgctgcccccatcacgccgttccgtgactgtcacgcagaatctgcagacaggaagggagactcgagcgggagtgcggccagcgcctgcctcggccgtcagggaggactcctgggctcactcgaaggaggtgccaccatttcagctttggtagcttttcttcttcttttaaattttctaaagctcattaattgtctttgatgtttcttttgtgatgacaataaaatatcctttttaagtcttgtacttcgtgatgggagccgccttcctgtgt

SEQ ID NO: 461379 - DNA, 2873 bp, Homo sapiens
agagtcttatccccggctctgggtagggctggaggtttctcaggtattagtagtagtggttataacacatactactgacaaactacgagatagggccgcgtcaccagtctccacgagataattacaaaaacacgctgaatatgctgaatgaacatactagagagccgagaacacggccgtatgattactgtgacgagaatagggtacggtgacctcagtgagtctgactactgcgtgcagggagccctgctcgaccgtgtcctcagttgcagcctccaccaagggcccatcggtcttccccctggcaccctcctccaagagcacctctgggggcacagcggccctgggctgcctggtcaaggactacttccccgaaccggtgacggtgtcgtggaactcaggcgccctgaccagcggcgtgcacaccttcccggctgtcctacagtcctcaggactctactccctcagcagcgtggtgaccgtgccctccagcagcttgggcacccagacctacatctgcaacgtgaatcacaagcccagcaacaccaaggtggacaagaaagttgcacctgaactcctggggggaccgtcagtcttcctcttccccccaaaacccaaggacaccctcatgatctcccggacccctgaggtcacatgcgtggtggtggacgtgagccacgaagaccctgaggtcaagttcaactggtacgtggacggcgtggaggtgcataatgccaagacaaagccgcgggaggagcagtacaacagcacgtaccgtgtggtcagcgtcctcaccgtcctgcaccaggactggctgaatggcaaggagtacaagtgcaaggtctccaacaaagccctcccagcccccatcgagaaaaccatctccaaagccaaagggcagccccgagaaccacaggtgtacaccctgcccccatcccgggatgagctgaccaagaaccaggtcagcctgacctgcctggtcaaaggcttctatcccagcgacatcgccgtggagtgggagagcaatgggcagccggagaacaactacaagaccacgcctcccgtgctggactccgacggctccttcttcctctacagcaagctcaccgtggacaagagcaggtggcagcaggggaacgtcttctcatgctccgtgatgcatgaggctctgcacaaccactacacgcagaagagcctctccctgtccccggagctgcaactggaggagagctgtgcggaggcgcaggacggggagctggacgggctgtggacgaccatcaccatcttcatcacactcttcctgttaagcgtgtgctacagtgccaccgtcaccttcttcaaggtgaagtggatcttctcctcggtggtggacctgaagcagaccatcatccccgactacaggaacatgatcggacagggggcctagggccaccctctgcggggtgtccagggccgcccagaccccacacaccagccatgggccatgctcagccaccacccaggccacacctgcccccgacctcaccgccctcaaccccatggctctctggcctcgcagttgccctctgaccctgacacacctgacacgccccccttccagaccctgtgcatagcaggtctaccccagacctccgctgcttggtgcatgcagggcactgggggccaggtgtcccctcagcaggacgtccttgccctccggaccacaaggtgctcacacaaaaggaggcagtgaccggtatcccaggcccccacccaggcaggagctggccctggagccaaccccgtccacgccagcctcctgaacacaggcgtggtttccagatggtgagtgggagcatcagccgccaaggtagggaagccacagcaccatcaggccctgttggggaggcttccgagagctgcgaaggctcactcagacggccttcctcccagcccgcagccagccagcctccattccgggcactcccgtgaactcctgacatgaggaatgaggttgttctgatttcaagcaaagaacgctgctctctggctcctgggaacagtctcggtgccagcaccaccccttggctgcctgcccacactgctggattctcgggtggaactggacccgcagggacagccagccccagagtccgcactggggagagaaggggccaggcccaggacactgccacctcccacccactccagtccaccgagatcactcagagaagagcctgggccatgtggccgctgcaggagccccacagtgcaagggtgaggatagcccaaggaagggctgggcatctgcccagacaggcctcccagagaaggctggtgaccaggtcccaggcgggcaagactcagccttggtggggcctgaggacagaggaggcccaggagcatcggggagagaggtggagggacaccgggagagccaggagcgtggacacagccagaactcatcacagaggctggcgtccagccccgggtcacgtgcagcaggaacaagcagccactctgggggcaccaggtggagaggcaagacgacaaagagggtgcccgtgttcttgcgaaagcagggctgctggccacgagtgctggacagaggcccccacgctctgctgcccccatcacgccgttccgtgactgtcacgcagaatctgcagacaggaagggagactcgagcgggagtgcggccagcgcctgcctcggccgtcagggaggactcctgggctcactcgaaggaggtgccaccatttcagctttggtagcttttcttcttcttttaaattttctaaagctcattaattgtctttgatgtttcttttgtgatgacaataaaatatcctttttaagtcttgtacttcgtgatgggagccgccttcctgtgt

SEQ ID NO: 461380 - DNA, 2655 bp, Homo sapiens
tgaggatcccggataggggagtcgtgctggtgctaagggatacgtgctggtgcttaaacgaactgtggctgtccatttgcaaaaaaagtgagttcttggcattcacctctgggggcacagcggccctgggctgcctggtcaaggactacttccccgaaccggtgacggtgtcgtggaactcaggcgccctgaccagcggcgtgcacaccttcccggctgtcctacagtcctcaggactctactccctcagcagcgtggtgaccgtgccctccagcagcttgggcacccagacctacatctgcaacgtgaatcacaagcccagcaacaccaaggtggacaagaaagttgcacctgaactcctggggggaccgtcagtcttcctcttccccccaaaacccaaggacaccctcatgatctcccggacccctgaggtcacatgcgtggtggtggacgtgagccacgaagaccctgaggtcaagttcaactggtacgtggacggcgtggaggtgcataatgccaagacaaagccgcgggaggagcagtacaacagcacgtaccgtgtggtcagcgtcctcaccgtcctgcaccaggactggctgaatggcaaggagtacaagtgcaaggtctccaacaaagccctcccagcccccatcgagaaaaccatctccaaagccaaagggcagccccgagaaccacaggtgtacaccctgcccccatcccgggatgagctgaccaagaaccaggtcagcctgacctgcctggtcaaaggcttctatcccagcgacatcgccgtggagtgggagagcaatgggcagccggagaacaactacaagaccacgcctcccgtgctggactccgacggctccttcttcctctacagcaagctcaccgtggacaagagcaggtggcagcaggggaacgtcttctcatgctccgtgatgcatgaggctctgcacaaccactacacgcagaagagcctctccctgtccccggagctgcaactggaggagagctgtgcggaggcgcaggacggggagctggacgggctgtggacgaccatcaccatcttcatcacactcttcctgttaagcgtgtgctacagtgccaccgtcaccttcttcaaggtgaagtggatcttctcctcggtggtggacctgaagcagaccatcatccccgactacaggaacatgatcggacagggggcctagggccaccctctgcggggtgtccagggccgcccagaccccacacaccagccatgggccatgctcagccaccacccaggccacacctgcccccgacctcaccgccctcaaccccatggctctctggcctcgcagttgccctctgaccctgacacacctgacacgccccccttccagaccctgtgcatagcaggtctaccccagacctccgctgcttggtgcatgcagggcactgggggccaggtgtcccctcagcaggacgtccttgccctccggaccacaaggtgctcacacaaaaggaggcagtgaccggtatcccaggcccccacccaggcaggagctggccctggagccaaccccgtccacgccagcctcctgaacacaggcgtggtttccagatggtgagtgggagcatcagccgccaaggtagggaagccacagcaccatcaggccctgttggggaggcttccgagagctgcgaaggctcactcagacggccttcctcccagcccgcagccagccagcctccattccgggcactcccgtgaactcctgacatgaggaatgaggttgttctgatttcaagcaaagaacgctgctctctggctcctgggaacagtctcggtgccagcaccaccccttggctgcctgcccacactgctggattctcgggtggaactggacccgcagggacagccagccccagagtccgcactggggagagaaggggccaggcccaggacactgccacctcccacccactccagtccaccgagatcactcagagaagagcctgggccatgtggccgctgcaggagccccacagtgcaagggtgaggatagcccaaggaagggctgggcatctgcccagacaggcctcccagagaaggctggtgaccaggtcccaggcgggcaagactcagccttggtggggcctgaggacagaggaggcccaggagcatcggggagagaggtggagggacaccgggagagccaggagcgtggacacagccagaactcatcacagaggctggcgtccagccccgggtcacgtgcagcaggaacaagcagccactctgggggcaccaggtggagaggcaagacgacaaagagggtgcccgtgttcttgcgaaagcagggctgctggccacgagtgctggacagaggcccccacgctctgctgcccccatcacgccgttccgtgactgtcacgcagaatctgcagacaggaagggagactcgagcgggagtgcggccagcgcctgcctcggccgtcagggaggactcctgggctcactcgaaggaggtgccaccatttcagctttggtagcttttcttcttcttttaaattttctaaagctcattaattgtctttgatgtttcttttgtgatgacaataaaatatcctttttaagtcttgtacttcgtgatgggagccgccttcctgtgt

SEQ ID NO: 461381 - DNA, 2926 bp, Homo sapiens
gatggccagagctgaggccaagctagaggccctggactgtgctgactcccggcagacacagagcgctgacctggctgccgagccccgcctcctaggctgcaggggtgcctgcagaagggcaccacagggccaccggtcctgcaagctttctggggcaggccgggcctgaccttggctttggggcagggggtgggctaaggtgacgcaggtggcgccagccaggcgcacacccaatgcccgtgagcccagacactggacgctgaacctcgcggacagttaagaacccaggggcctctgcgccctgggcccagctctgtcccacaccgcggtcacatggcaccacctctcttgcagcctccaccaagggcccatcgcacctctgggggcacagcggccctgggctgcctggtcaaggactacttccccgaaccggtgacggtgtcgtggaactcaggcgccctgaccagcggcgtgcacaccttcccggctgtcctacagtcctcaggactctactccctcagcagcgtggtgaccgtgccctccagcagcttgggcacccagacctacatctgcaacgtgaatcacaagcccagcaacaccaaggtggacaagaaagttgcacctgaactcctggggggaccgtcagtcttcctcttccccccaaaacccaaggacaccctcatgatctcccggacccctgaggtcacatgcgtggtggtggacgtgagccacgaagaccctgaggtcaagttcaactggtacgtggacggcgtggaggtgcataatgccaagacaaagccgcgggaggagcagtacaacagcacgtaccgtgtggtcagcgtcctcaccgtcctgcaccaggactggctgaatggcaaggagtacaagtgcaaggtctccaacaaagccctcccagcccccatcgagaaaaccatctccaaagccaaagggcagccccgagaaccacaggtgtacaccctgcccccatcccgggatgagctgaccaagaaccaggtcagcctgacctgcctggtcaaaggcttctatcccagcgacatcgccgtggagtgggagagcaatgggcagccggagaacaactacaagaccacgcctcccgtgctggactccgacggctccttcttcctctacagcaagctcaccgtggacaagagcaggtggcagcaggggaacgtcttctcatgctccgtgatgcatgaggctctgcacaaccactacacgcagaagagcctctccctgtccccggagctgcaactggaggagagctgtgcggaggcgcaggacggggagctggacgggctgtggacgaccatcaccatcttcatcacactcttcctgttaagcgtgtgctacagtgccaccgtcaccttcttcaaggtgaagtggatcttctcctcggtggtggacctgaagcagaccatcatccccgactacaggaacatgatcggacagggggcctagggccaccctctgcggggtgtccagggccgcccagaccccacacaccagccatgggccatgctcagccaccacccaggccacacctgcccccgacctcaccgccctcaaccccatggctctctggcctcgcagttgccctctgaccctgacacacctgacacgccccccttccagaccctgtgcatagcaggtctaccccagacctccgctgcttggtgcatgcagggcactgggggccaggtgtcccctcagcaggacgtccttgccctccggaccacaaggtgctcacacaaaaggaggcagtgaccggtatcccaggcccccacccaggcaggagctggccctggagccaaccccgtccacgccagcctcctgaacacaggcgtggtttccagatggtgagtgggagcatcagccgccaaggtagggaagccacagcaccatcaggccctgttggggaggcttccgagagctgcgaaggctcactcagacggccttcctcccagcccgcagccagccagcctccattccgggcactcccgtgaactcctgacatgaggaatgaggttgttctgatttcaagcaaagaacgctgctctctggctcctgggaacagtctcggtgccagcaccaccccttggctgcctgcccacactgctggattctcgggtggaactggacccgcagggacagccagccccagagtccgcactggggagagaaggggccaggcccaggacactgccacctcccacccactccagtccaccgagatcactcagagaagagcctgggccatgtggccgctgcaggagccccacagtgcaagggtgaggatagcccaaggaagggctgggcatctgcccagacaggcctcccagagaaggctggtgaccaggtcccaggcgggcaagactcagccttggtggggcctgaggacagaggaggcccaggagcatcggggagagaggtggagggacaccgggagagccaggagcgtggacacagccagaactcatcacagaggctggcgtccagccccgggtcacgtgcagcaggaacaagcagccactctgggggcaccaggtggagaggcaagacgacaaagagggtgcccgtgttcttgcgaaagcagggctgctggccacgagtgctggacagaggcccccacgctctgctgcccccatcacgccgttccgtgactgtcacgcagaatctgcagacaggaagggagactcgagcgggagtgcggccagcgcctgcctcggccgtcagggaggactcctgggctcactcgaaggaggtgccaccatttcagctttggtagcttttcttcttcttttaaattttctaaagctcattaattgtctttgatgtttcttttgtgatgacaataaaatatcctttttaagtcttgtacttcgtgatgggagccgccttcctgtgt

SEQ ID NO: 461382 - DNA, 1390 bp, Homo sapiens
ttgggtttggtggccttgtcacttccaaggggctgagcacagcacatgtaccagccatcttggaagccacctcatgtgccagaccagatgggccacacccctgtctccactgagagtgagcttgctgtctccagaggaaaagagaaccttggcccacaatttctgcagcaagcagcacatgaagccaaaccaaacctctgtggcaatgggcccagaatggtcagggctctgtcaatcctggtcagcttccctattgttgactactgcttccaactcaacacccatgaaagaaagccaaatatgctcctaatgcaatcacataagatctctaggggaagccagctgccatgttgtggggatgctcaaggagccctgaggagaggcccatgtgatgaggagctgagaggacttgggccaaaagccagtggagaattgaggtctcctgtcagtagccatataagcaagtattctggaagcacatcctccattcccagtcaatatcttaacttcaacctcatgaaagaccttgagcctagctcagccactcccagactcctgacccacagatactgtgtgagacaccttgaatcacagatagttggagatgaaaaggaccttagaaaccatgagaaacaccatgggcgaggagactggggagctctggagccataaacctggcttcaggtcccagttctgccactcaccaactgagtggccaaggacggcatttttcagagaacaggagggagctgcttccttaagtatcgcctgggatcacattcagactggagatgttgccagaagcaaatccacctcggtggggattctggttgacccaggagaccctctgctcctgagggaactgctgaggggcttgggctatgactccaggaccaagagttttgggagagactttccttccctggacaaggaaaaggaagtggagctaccagctgctgctctgggaggctagaggctcatctctctaccatgcaccctttccgaagctctgttctctgagggcttctggaaatacccgctttaatcagagttaagccggatttgaaggttgcgatgattagatgtgtcaaaaaaattttacatctaataacacccaacgctgtcaagaatgtggaaaaaaacagacatgtatgcattgttgatgcgagtgtcaattggtacccattttttggagggagtttgctagtatcattagaatgtgaaatagatatgctttcagactcaacatttccacttctaagagtcaattctagagaaatatgtgcacatggacacaaagagtcgggcatgaagatgtttgcagaaatgttgtttgcaactgcaaaaaacagtaaaataaaaagccaccaaatcaaaaaaccaaacacct

SEQ ID NO: 461383 - DNA, 1755 bp, Homo sapiens
tggagcctgcagctgagaggggccccggcttagcccctgtggggggacccccacctccaccaatcccgcccactggcttggctgtgatgagaacgatcattccttcctctgactcatcaaccttttgtgctcctatggccagcatccaccttacacagcagcagagactcaggttctcatgccctcagctggggatccctgagcatccgggtcttctgaaatggactgctgcaaatgctaagttctgcagcaactggggagaagagtgttggagggagttgcacagaaaggaccatccactgaatgttccagaaggcagcagagtacagtagttaagagcacaagatcttcaacctgattgcccgggttcaaatacagcttcacctcttactagctaagtgacttggggcagattacttaacttctctggacctcagctgcctcacttgaaaaagggaggtagagtgcctacttcagggtgttgttctgaggacagagtggccacatataagtgccctgaggacaggctggtgcacggtcagtgctaagcaagtgtgtgctgccattattatcagcgaagccccaagaagggaattcccagtcctgggggagggctgacaggggctggcataggcacagcccccagactatagccactttccgggtccgtttcccatgtgcttttggaagatacgcagggcagacaatcagccccattctgcagatgaggaactgagcttccttcagatcaagtgccagtgagggaatggtaaagacgccagagctcctcagccctggaccatggctcctttctcttcaccagaccgtcactgtgcacctgttgagcaggctcccacggcagccaccccttcccagccccccatgccggagggcctacgcgcagcccccatgcaacgcgctcatcacagacacgcaaacccatccatcgccctcttcaccactggaccacacctcagcagggccacagaaatgggacccagacgtgacgccttctgactcaaaggcccacaaccgccccctccaaaagggcacatacactgcatcctggcaccctccgcaacacatacagcatgccagctctgcagaaaacagcgatcgcgtcccacggccgcccctcgctcggacgccataccagggcccccttagtcgccccccagcgtcgtgcgcgcccgggggcggggccaggctcagcccccgacccctgcgcccccaggtcaaccccaaaggagagcggtctgggcgcggggcgcggtcggggctcccgcagcgccgggcagcggagagggggcctggcagttggctccggtccgccctggccctgcccatccgcctgcccccccagcgcctgccccggcccggccccgtgccgccgccgccgccgccgctgacatcatcggctccccccgccccggtcctacccccacccccacccccggaaacagtccccccccagcgccgccgccgccgccgccgagaggaggccggcgcagcgcagccgacaccgacacaaagctccgagcgcccgacggccttccccaggactgatccccgcggcatgacactgcgccgcgctgggccaccgggcgggctctcagggtgcagacatgacatggcagactcataatcaggcccggtgggactcacagacccagggaatgcgcaggaaagctcagcaggccgcggaaaaagaaggccctggccctgcatacggggcacacacgaacgaccaccagc

SEQ ID NO: 461384 - DNA, 691 bp, Homo sapiens
ttcaaacacacagtactcagcgtgagccaggcgtgatggcagatacccatagtcccagctactcaggaggctgcagctagaggattgcttgagcccaggagtttgagtccagcctgggcaatatattgagacccagtttctaaacaaatgaacaaaaccccagacacccagtgtgctctccagcttctacatgacccacaccttcatgcctttgcctgtgctggcttgttctgccagaaatgctctttccccaagcttgtcaaaatccctccaaaacgttaagatctgactccaaggccacctccttcttggccctccctgatccacaggatgagaacgatcattccttcctctgactcatcaaccttttgtgctcctatggccagcatccaccttacacagcagcagagactcaggttctcatgccctcagctggggatccctgagcatccgggtcttctgaaatggactgctgcaaatgctaagttctgcagcaactggggagaagagtgttggagggagttgcacagaaaggaccatccactgaatgttccagaaggcagcagagtacagtagttaagagcacaagatcttcaacctgattgcccgggttcaaatacagcttcacctcttactagctaagtgacttggggccagctggagggggatcctctaagcgccgcagaacctt

SEQ ID NO: 461385 - DNA, 1999 bp, Homo sapiens
ttcaaacacacagtactcagcgtgagccaggcgtgatggcagatacccatagtcccagctactcaggaggctgcagctagaggattgcttgagcccaggagtttgagtccagcctgggcaatatattgagacccagtttctaaacaaatgaacaaaaccccagacacccagtgtgctctccagcttctacatgacccacaccttcatgcctttgcctgtgctggcttgttctgccagaaatgctctttccccaagcttgtcaaaatccctccaaaacgttaagatctgactccaaggccacctccttcttggccctccctgatccacaggatgagaacgatcattccttcctctgactcatcaaccttttgtgctcctatggccagcatccaccttacacagcagcagagactcaggttctcatgccctcagctggggatccctgagcatccgggtcttctgaaatggactgctgcaaatgctaagttctgcagcaactggggagaagagtgttggagggagttgcacagaaaggaccatccactgaatgttccagaaggcagcagagtacagtagttaagagcacaagatcttcaacctgattgcccgggttcaaatacagcttcacctcttactagctaagtgacttggggcagattacttaacttctctggacctcagctgcctcacttgaaaaagggaggtagagtgcctacttcagggtgttgttctgaggacagagtggccacatataagtgccctgaggacaggctggtgcacggtcagtgctaagcaagtgtgtgctgccattattatcagcgaagccccaagaagggaattcccagtcctgggggagggctgacaggggctggcataggcacagcccccagactatagccactttccgggtccgtttcccatgtgcttttggaagatacgcagggcagacaatcagccccattctgcagatgaggaactgagcttccttcagatcaagtgccagtgagggaatggtaaagacgccagagctcctcagccctggaccatggctcctttctcttcaccagaccgtcactgtgcacctgttgagcaggctcccacggcagccaccccttcccagccccccatgccggagggcctacgcgcagcccccatgcaacgcgctcatcacagacacgcaaacccatccatcgccctcttcaccactggaccacacctcagcagggccacagaaatgggacccagacgtgacgccttctgactcaaaggcccacaaccgccccctccaaaagggcacatacactgcatcctggcaccctccgcaacacatacagcatgccagctctgcagaaaacagcgatcgcgtcccacggccgcccctcgctcggacgccataccagggcccccttagtcgccccccagcgtcgtgcgcgcccgggggcggggccaggctcagcccccgacccctgcgcccccaggtcaaccccaaaggagagcggtctgggcgcggggcgcggtcggggctcccgcagcgccgggcagcggagagggggcctggcagttggctccggtccgccctggccctgcccatccgcctgcccccccagcgcctgccccggcccggccccgtgccgccgccgccgccgccgctgacatcatcggctccccccgccccggtcctacccccacccccacccccggaaacagtccccccccagcgccgccgccgccgccgccgagaggaggccggcgcagcgcagccgacaccgacacaaagctccgagcgcccgacggccttccccaggactgatccccgcggcatgacactgcgccgcgctgggccaccgggcgggctctcagggtgcagacatgacatggcagactcataatcaggcccggtgggactcacagacccagggaatgcgcaggaaagctcagcaggccgcggaaaaagaaggccctggccctgcatacggggcacacacgaacgaccaccagc

SEQ ID NO: 461386 - DNA, 872 bp, Homo sapiens
ataaaactacttagaatcccaagatggcaactgtagagcatttaaacccaagcatgactctcttctgcacatctgcacatgaagttctgtgcaactgcactagccacaaacccaaaattgccttgcctcttcactttcaatacttactgtctacccttgagaaaaaaaaaaaatactccctgagcctctatctatatgaactccctctcaattttgttgtggggttaaatcaaataattttcaggattttaacttgctatacctgttgtgaattatcatccattattattctggtggatcttagagggatgattggagaggtagatctggaggaagatagtccatttgacagcgtaaggaccataactcagacgcaagatcactcagatattcaaggtaggggctaaagggaagtgggctcaatataaaatcttgaataataccaacatttaaagtctggctgatgaagactatcagaagaaagaaatcaggaaatggtggcaagagttttcttttctacccccttgaaaagacatggttaaaagactgatgtctgttaaaaaatggattaaaacttggagatgaataaatacagtgcctcagctatatggagcttatgctatgagctggtatgtgagcttggattcaagcctaagtcactgactccatgattcatgctcattactgatgctggagagaaaaaagaaatggattctgcagctcattgctcattgtcttaaagagggagtggtattccttgtttttgtttttaatgaaatggttttttaaaataaaatataattttctcattttcataagcctaagcctatagtctaagttcttactcatgatttagaatgattgttattgac

SEQ ID NO: 461387 - DNA, 1977 bp, Homo sapiens
accgggcgaggccgagtccatgcggtccgggctgggcgccgcgcttgggggcagcgggcctgggccccagacgaggcgtggacctgctggcccggcccgcctgcccctgggctcctcggctgctgcgggcctgggccacccgtgtcagcgcggccctgctgacagcgcagttcacacccggggcggccgcggcaggtgcagtgcgaggggcgccacctgtaggctggtgtgggcactgcctagaggttgctgtggcgccgtctggaggttgccgtggctctcgttggcgcccagcgccgcgcccggggcttcatggctgtgtcgctgctgccccctcccagggccgcagggcccgggttccacttggcggcgtcttctcgcgagtcgctttcgctgctccaagaagtcggcggtgcagcaactgacgccgctgctgctccggtcgccgcaggtcgccatattcctcgcgggggccggccgggctctcggctcaggccgcccaccctgctccggccgccgccgcctctccgttcccgcagccagaggaggcgagggagcgacctccaggcactgggcgcccgccgcttccccagcagccggcggggcggggaagaaagacgccaggaagcggaaggcccccgccggcccgagggtcgcccggggctgtgccccatggttcctggcccgcgagcagctgctgggacccccccttgccaagttgctccccgaaaagctctaaggttctcaggcctgcagggagtgacagtttccccctgactgtaacgtaaggctgcaaactcgaagccaggaattttctgcatattcttaaatagaatgtttcagtcaaagccttgataatataaccaatctttctgattgtagcctgcttataaagagaacatatgtttcaggcacagaactgtatatccaataatagtgaaatggatcccactaattatgacagaaatgatgatacatttaaatgacttggatgttttataggtatgatctcgtgaaaccttgagagaaactgaatgacgaatgaaactattgttcctgtttcacacagaagaaaactgaggttggcactcatgatgagcccctgttctcattctgcaaatggtgaagctctctattgtcctgaccccacagttcctgtcgcatgaccagagccagttcaccaaggagctgcagcagcatgtaaagtcagtgacatgcccatgcgagtacctgaggaaggttatcaatagtctggctgtctatcgtcatcgtgagactgactttggtgtaggagttcgagaccaccctggccaacatggcaaaaccccatctccacaaaaattggataatttgataattatcattattgggtttctgagacgttacacatttaacattctcttctgcacaagttgcctttgtgtgagtatactaactttctgtagaggtatacttgtaatcacaaataagaataaattatataaaacaattcacgtttctggacttcattatgaatatgtggttttacccaaaaaatcagggaaatgatttattagcataagaattatgaaaatgtctgccatttacattatgaaaattaaatagagaatcaatgaaaagtgtgtctgggcagggtaattttgaatgacatcattcaaagtgcatgttcccacttgcaactggagagagatcagtatgtcaaaagtctgtacttggtaagaatttggctgctaagttgtgccataatttgtcttttgagccttttttcctttgggtaagttgagctctacattttgtcttgccattcatgacagtaaaaatgtggttgtctgggggctgaacctccttctgaacaatgatccaagataaaagtactaataccacaatgcttttttatattcaagggaagaggaagtatgtttcagttttaccacctagataattacacgtcatttggcactgcctttcaagatatgt

SEQ ID NO: 461388 - DNA, 1009 bp, Homo sapiens
aaaattcgggaaaaggtttccccctgcctggaaagtatgatctcgtgaaaccttgagagaaactgaatgacgaatgaaactattgttcctgtttcacacagaagaaaactgaggttggcactcatgatgagcccctgttctcattctgcaaatggtgaagctctctattgtcctgaccccacagttcctgtcgcatgaccagagccagttcaccaaggagctgcagcagcatgtaaagtcagtgacatgcccatgcgagtacctgaggaaggttatcaatagtctggctgtctatcgtcatcgtgagactgactttggtgtaggagttcgagaccaccctggccaacatggcaaaaccccatctccacaaaaattggataatttgataattatcattattgggtttctgagacgttacacatttaacattctcttctgcacaagttgcctttgtgtgagtatactaactttctgtagaggtatacttgtaatcacaaataagaataaattatataaaacaattcacgtttctggacttcattatgaatatgtggttttacccaaaaaatcagggaaatgatttattagcataagaattatgaaaatgtctgccatttacattatgaaaattaaatagagaatcaatgaaaagtgtgtctgggcagggtaattttgaatgacatcattcaaagtgcatgttcccacttgcaactggagagagatcagtatgtcaaaagtctgtacttggtaagaatttggctgctaagttgtgccataatttgtcttttgagccttttttcctttgggtaagttgagctctacattttgtcttgccattcatgacagtaaaaatgtggttgtctgggggctgaacctccttctgaacaatgatccaagataaaagtactaataccacaatgcttttttatattcaagggaagaggaagtatgtttcagttttaccacctagataattacacgtcatttggcactgcctttcaagatatgt

SEQ ID NO: 461389 - DNA, 963 bp, Homo sapiens
ccgcgtgtcctgttgcttccctgatcttctccgtgacctgtagctaaaccttccaccagcgcttgagaacttaatttgaaccggaatcctttcccagacccctttcttcttctcctcctcctcctccacctcctccagggcaccctgaaaggatcatgacatgcgctgcgcttttggctcctcatttggctcctgctgggatttatcagccatcagcccacccctgttatcaatagtctggctgtctatcgtcatcgtgagactgactttggtgtaggagttcgagaccaccctggccaacatggcaaaaccccatctccacaaaaattggataatttgataattatcattattgggtttctgagacgttacacatttaacattctcttctgcacaagttgcctttgtgtgagtatactaactttctgtagaggtatacttgtaatcacaaataagaataaattatataaaacaattcacgtttctggacttcattatgaatatgtggttttacccaaaaaatcagggaaatgatttattagcataagaattatgaaaatgtctgccatttacattatgaaaattaaatagagaatcaatgaaaagtgtgtctgggcagggtaattttgaatgacatcattcaaagtgcatgttcccacttgcaactggagagagatcagtatgtcaaaagtctgtacttggtaagaatttggctgctaagttgtgccataatttgtcttttgagccttttttcctttgggtaagttgagctctacattttgtcttgccattcatgacagtaaaaatgtggttgtctgggggctgaacctccttctgaacaatgatccaagataaaagtactaataccacaatgcttttttatattcaagggaagaggaagtatgtttcagttttaccacctagataattacacgtcatttggcactgcctttcaagatatgt

SEQ ID NO: 461390 - DNA, 1113 bp, Homo sapiens
aaagtcaggatgtggtgcagatcggtccattttcaatacaagctctttctaccacgacaggttattttgcacttggggacagtttttaactttccattctcaactcctatcctagctcctggcacagaacatgtcatccaagttaggcatcatcgtcgcctgctcttggtgaagttttcttttgcgtactgcggagagatgcgctcattaccagctggcggtggagtcgctgaaacgcaaatggatttgagactgagcgactcccatctctatggttggtatgtgacccatctatcctctggaggactcagcaaggactaccagtcaccagacaactttacgcgcacgtggtcgcaaggtgaacttgctattggttaatggcagtaaagcccgcccatcagcgctggtctgctcctttaaaagaacgccatcgacgctcccctgtctttcagcgcctgcaggttccgggaggtcagctcccagccgaggacgtcggatgtcatcgtccttgctgctttgccaccccattcccgtcaataaagtggtttgaacccaaaaaaaaaaaaagaacacagaaacctatacacaaaactcgtttggtgggacgctgggcatggagcactatcggaatatagatcttctctgtagaacaccctattggctttgtggtgcgcacggggggtccgcactttctctgtctcacctgggagaacttatgtgtgcgacccgaattcgcggtttggttcaccactaggtgggagagaaggctccccctgggggcgtcactgagggcatttacggcggcgctgggggcggttatcttctccgcccctttctctttaggacataacatccgcccgcccgagtgggggagacggtaaattccccgcggcgattgcggtcttttcgtcgggagaccccccagttctactccttccagttacgcggagtgagtcttcccacaaggaggggcggcgcccccatttttcgcgggggaggggaatatgcttttttgtttctaccacccttggggaagaggtttgtctcggcttaacccgcagtggagacgccggccattagcccctttctggcctttttttcccagcgcgcccg

SEQ ID NO: 461391 - DNA, 120 bp, Homo sapiens
aaaaaaaaaaaaatcccggccgcgtcgaccgggaggtcagctcccagccgaggacgtcggatgtcatcgtccttgctgctttgccaccccattcccgtcaataaagtggtttgaacccaa

SEQ ID NO: 461392 - DNA, 1298 bp, Homo sapiens
aaagtcaggatgtggtgcagatcggtccattttcaatacaagctctttctaccacgacaggttattttgcacttggggacagtttttaactttccattctcaactcctatcctagctcctggcacagaacatgtcatccaagttaggcatcatcgtcgcctgctcttggtgaagttttcttttgcgtactgcggagagatgcgctcattaccagctggcggtggagtcgctgaaacgcaaatggatttgagactgagcgactcccatctctatggttggtatgtgacccatctatcctctggaggactcagcaaggactaccagtcaccagacaactttacgcgcacgtggtcgcaaggtgaacttgctattggttaatggcagtaaagcccgcccatcagcgctggtctgctcctttaaaagaacgccatcgacgctcccctgtctttcagcgcctgcaggttccgggaggtcaggttgtattcctggcgggtcgtctggctgggtgggccccggaggtcgtggctcgggagcagggaggcgtaggggggccggcctgctgtgatgacattccaattaaagcacgtgttagactgctgacgcgggtgatgcgaactggagtctgagcctgcccgagcggagctgggagggggctggcgggcgggcgcgcgcacacccgctgatctatcactctcgttcttgtagctcccagccgaggacgtcggatgtcatcgtccttgctgctttgccaccccattcccgtcaataaagtggtttgaacccaaccctggtgtcggtgtgtgtcgttggcgacgcgctgtctttgagcccccgccgagcttcctcgtggcgccgggggtcaatctgcagcgctagagcatgtgcttgcgcataactggggccgcctggcctcccgcgggcggcctttttaaccgcgagcgacaagaagtaacctgactgtccggctgctaggctgggcaattttccagctgttttgccacgacaggcctcaatccgtaataccaaggctggaatggcgtgttaggggggcggtggctgacggggatacgcggactcttgatgcgtaaggagtgcccctctgctcccatacgttccccagcccagccttccctgagtgtatcgcgcgcgctgtgccttcgccgtgagttcgacataagtcccaggctgtcgcgtctgccatcagacgcgcagatttagttgaaggcagcgtggaatggcgtctgcagggctgttgtgtacttgacataaacagattcggtgtggaactgaagagttaa

SEQ ID NO: 461393 - DNA, 747 bp, Homo sapiens
aaagtcaggatgtggtgcagatcggtccattttcaatacaagctctttctaccacgacaggttattttgcacttggggacagtttttaactttccattctcaactcctatcctagctcctggcacagaacatgtcatccaagttaggcatcatcgtcgcctgctcttggtgaagttttcttttgcgtactgcggagagatgcgctcattaccagctggcggtggagtcgctgaaacgcaaatggatttgagactgagcgactcccatctctatggttggtatgtgacccatctatcctctggaggactcagcaaggactaccagtcaccagacaactttacgcgcacgtggtcgcaaggtgaacttgctattggttaatggcagtaaagcccgcccatcagcgctggtctgctcctttaaaagaacgccatcgacgctcccctgtctttcagcgcctgcaggttccgggaggtcaggttgtattcctggcgggtcgtctggctgggtgggccccggaggtcgtggctcgggagcagggaggcgtaggggggccggcctgctgtgatgacattccaattaaagcacgtgttagactgctgacgcgggtgatgcgaactggagtctgagcctgcccgagcggagtgatctatcactctcgttcttgtagctcccagccgaggacgtcggatgtcatcgtccttgctgctttgccaccccattcccgtcaataaagtggtttgaacccaa

SEQ ID NO: 461394 - DNA, 556 bp, Homo sapiens
aaagtcaggatgtggtgcagatcggtccattttcaatacaagctctttctaccacgacaggttattttgcacttggggacagtttttaactttccattctcaactcctatcctagctcctggcacagaacatgtcatccaagttaggcatcatcgtcgcctgctcttggtgaagttttcttttgcgtactgcggagagatgcgctcattaccagctggcggtggagtcgctgaaacgcaaatggatttgagactgagcgactcccatctctatggttggtatgtgacccatctatcctctggaggactcagcaaggactaccagtcaccagacaactttacgcgcacgtggtcgcaaggtgaacttgctattggttaatggcagtaaagcccgcccatcagcgctggtctgctcctttaaaagaacgccatcgacgctcccctgtctttcagcgcctgcaggttccgggaggtcagctcccagccgaggacgtcggatgtcatcgtccttgctgctttgccaccccattcccgtcaataaagtggtttgaacccaa

SEQ ID NO: 461395 - DNA, 785 bp, Homo sapiens
aaagtcaggatgtggtgcagatcggtccattttcaatacaagctctttctaccacgacaggttattttgcacttggggacagtttttaactttccattctcaactcctatcctagctcctggcacagaacatgtcatccaagttaggcatcatcgtcgcctgctcttggtgaagttttcttttgcgtactgcggagagatgcgctcattaccagctggcggtggagtcgctgaaacgcaaatggatttgagactgagcgactcccatctctatggttggtatgtgacccatctatcctctggaggactcagcaaggactaccagtcaccagacaactttacgcgcacgtggtcgcaaggtgaacttgctattggttaatggcagtaaagcccgcccatcagcgctggtctgctcctttaaaagaacgccatcgacgctcccctgtctttcagcgcctgcaggttccgggaggtcaggttgtattcctggcgggtcgtctggctgggtgggccccggaggtcgtggctcgggagcagggaggcgtaggggggccggcctgctgtgatgacattccaattaaagcacgtgttagactgctgacgcgggtgatgcgaactggagtctgagcctgcccgagcggagctgggagggggctggcgggcgggcgcgcgcacacccgctgatctatcactctcgttcttgtagctcccagccgaggacgtcggatgtcatcgtccttgctgctttgccaccccattcccgtcaataaagtggtttgaacccaa

SEQ ID NO: 461396 - DNA, 1767 bp, Homo sapiens
aaagtcaggatgtggtgcagatcggtccattttcaatacaagctctttctaccacgacaggttattttgcacttggggacagtttttaactttccattctcaactcctatcctagctcctggcacagaacatgtcatccaagttaggcatcatcgtcgcctgctcttggtgaagttttcttttgcgtactgcggagagatgcgctcattaccagctggcggtggagtcgctgaaacgcaaatggatttgagactgagcgactcccatctctatggttggtatgtgacccatctatcctctggaggactcagcaaggactaccagtcaccagacaactttacgcgcacgtggtcgcaaggtgaacttgctattggttaatggcagtaaagcccgcccatcagcgctggtctgctcctttaaaagaacgccatcgacgctcccctgtctttcagcgcctgcaggttccgggaggtcaggttgtattcctggcgggtcgtctggctgggtgggccccggaggtcgtggctcgggagcagggaggcgtaggggggccggcctgctgtgatgacattccaattaaagcacgtgttagactgctgacgcgggtgatgcgaactggagtctgagcctgcccgagcggagctgggagggggctggcgggcgggcgcgcgcacacccgctgatctatcactctcgttcttgtagctcccagccgaggacgtcggatgtcatcgtccttgctgctttgccaccccattcccgtcaataaagtggtttgaacccaaccctggtgtcggtgtgtgtcgttggcgacgcgctgtctttgagcccccgccgagcttcctcgtggcgccgggggtcaatctgcagcgctagagcatgtgcttgcgcataactggggccgcctggcctcccgcgggcggcctttttaaccgcgagcgacaagaagtaaaaaaaaaaaaaaaaaaaaaaaaaaaaaaaaaaaaaaaaaaaaaaaaaaaaaaaaaaaaaaaaaaaaaaaaaaaaaaaaaaaaaaaaaaaaaaaaaaaaaaaaaaaaaaaaaaaaagaaaaaaaaaaaacaagaaaagaagagagagagagggcgcgacggggggcaaagatatgaaagaggaggggacacgtgcccagcccacgtacagcgggagaaagggaagcacatggaagagaggggaaggagaagcgtagatgaggagaagaggacgcgacgaagagagagcagacaagagatcacacgagaaggaagggcgaagagtggagcaggtagaggaacggagaacaacaacacaggcacagaggcaatcaaaaagggcatcagaagaagggtgacgatagagtagagaggacacgcagaaaaaaagaaaaacaccactcgagactaggctatctagacaacgtaaagacgaagcggaggtgcgagaaatcagaaagcaattacaaactgagaggcaagagaagagagacgatgacaccacaacacaagggaagagaaaaaaggaacagagaagagagcgggggtgcggagggaggggaggaggatgctggaaagagtggaggagggggtggaggagccgcgcagtgtgagctgtagcgccgaagcaaagcgaatggcgtgatacaccatccggctgcagggaagtacagggcgtggagtggagccaccgcatcatcgacccgtacgacagcgggcgcaaaacccgacacgtaacacacgacaggccacagctgtccacccgccaagaagacac

SEQ ID NO: 461397 - DNA, 960 bp, Homo sapiens
  misc_feature (831)..(831): n is a, c, g, or t
tacacgacaccacggacgtgccacgtacccgccatcgggaccaaggaccactgagaaaccatgaaggccatgcagcgactgtggtggcaggaccgtcaggaggccataggtgccacggctcccctctggtggttcacctgcccacctgtagctggggtggcccctccagtgcgctccccagagcagaacaccccccaggcaacacgtctgatgaaggccaacagcgtcagtcctctggtgtttggtgacatcaaagctgtgccgaaaggccttccctcactgctaacacttgaagggcttctgtccggtgtggaccctctgatggcgaatgtggtctgtcttatgcttaaagatccacctccattaactgcactcttagggtttcttcctctgaaaaggaatgaacacgggaaccccctcaaaggcatttttaaatgaagcgtggaaggcatcaaagatgtgctcttcttcaggactcaggcttctccatcattctctgttccttggaagcgtgagggctaaggagctgctgacttctctctcttggccccacttcaagaaaggcttgcttcccacacacctctccacgctcccagtgcgggactgacactctgcaccgggaggccaagggccaccatcgtcttgctgggagcaaggtgtgacgtttcttggtcataggagggagtgtgatcctgacaccagaggacttaataataacattgccagtgttaacatcttcaactggcagattcatggactttcccccttccttgaatgcatttcaacaccttgacattgaacgatgcctcatgtctctgcagggtgggacangagctctaactctctgaagctgagtttggacaggttgaaccattccacagtctatcttgaccttgaatcaagtctccgagtgacagtgtttacgatcatattgccaagtcctgggtgaaatgagagagc

SEQ ID NO: 461398 - DNA, 1117 bp, Homo sapiens
tgggacggtgaagattttgggggatggtatggacagataatcggcgatgtttctcagggctgcttccggcaggattaggggcagcatgggaacctagagtgggagagattaagctgaaggaagattctgtgtttgtgattttgagggcctctaaaagtattagggcagcagcagctgctgcacggagacatgatggccagcctaaaacagtaaggtcaagttgtttggacaaaaaggctacaggatgccatcctggtccttgtgtaagaattccaactgcacagccctgcacttcggctgtgtgtaatgaaaagggttgggatgagtcagggagagctagagtgggggcagtctctaaagctgtcttcaaggaatggaaagaggagtggggaaaggatttaggatctatagggtcagctaggtttccttttgtgagtttatataatggttttgttaggaatgcaaaaccaggtatccaaaggcgaaagtatccaaccatgcccaggaaggaaaggagttgttgttttgtagaaggggttggggtttgagagattagttgaacacgatcggcagggagagaacgtgtgtttttatgaagaattatgccgagaagattcaaaggagggactacaaagaagaaggtcatgaatatattgaataaggtgagaagcggaggggtggaaagaaagtaaatcatgagaaagagcttggctgaagtaaagaggactgtccctgaaaccttgcggcagcacagcccagaagtgaggaaactgcatccagtcagtgcaggtcattaaactcaagcaaaagttcactgaagcaaagacacctattgtttatctcacaaaataactggagggttttccagagagagtggagcacaaggtaaagggctgttcttagcaaccagagctaaagagctgtgtgggcttacccatgaagagtactgaaaattcaagttgtgttattagaagtgaagttatatcctgtgccatccatgtcccttcctacttccccatgacagacgtaagggtaagacttctggctaagggaaaggtgtacagactgtgctcctaaaataaaattaaattaaacactgcctatgagaaatgatttc

SEQ ID NO: 461399 - DNA, 998 bp, Homo sapiens
tcttaagaagagccctccaaaatgcaaaacaggtatgcgatgtgtcgatctggtttaagcagggatttgcagactcctggatctaccagcttcacctctttcttaccccctgcaacaggccccgagacatcacagatcacatccagtcagcagattcattcatttactcacttgcctttttatgaattcattagaccggtggttattgagcactcagtatgttccaggcactgtgctaggtataagggatggtatacggcacaggagagggattcagtcctcgacttcatgggtattacattctggtggaggactcctgcatggaacaaggagtcacagctgaggctctatccagcaaagatattgaaatcagccattaaaaaagtacacaatgacagggcccagttcctggattcaggggttgggcacttggggcaggcagtgaagtcccaggcaggaaactgagggagactttcatctgagctgcagcaacttggaatattggggcagtctgcactattttcacacacaacacttcttgctctaaatgtacttagagatccaggagatgaactcaagagcagcccgttgcctgcagtggctgacatgaagcctttctgcgtcatcggtgtcttgtctgatgcttccccagtggaatttcctgctgtgttcctgggaaacccaagcaaccagaagttcatccaattatttatttgcttcgagtcatccggatgtaaaagtatgcagctatcatatactggtgaagactccttccatgtaaacatccacatactctggggaaacctgctgccaaagtaggaggattccaaaggacctagaggaagaaaaagctacaatatggaagacacctgagtttctgaaggactgtgtggagcacttccttctgctgatgaacatgtgctatgaaaaataaacttattttgtttagcaactaagatttctgaattacttgttacagcagttagtatatcctgatt

SEQ ID NO: 461400 - DNA, 2390 bp, Homo sapiens
ctgaggcacactggactgggccccccaaccccagccctcctccctagcccgccaggcctttgtttccccacctgtaaaatggggcagtgtagccctcacatgaaatggtacttctaaggcacctgtgagccggagccctgctctgatggctgtgggagagaggggatgatttttctaacctccctccacccttcccagtgctatgggaggcagacaccaagttctggggtctccagttgcagcgggtggctgctgattgcttctctctgtccagaacgagaacaagagcgcactgcagttggagcagcaagtaaaggagctgcaggagaagctgggctagctgaaggggacggtaacctccgacccgtccaagaaggtctgggaggcgggcaccagcctctggggaggggaggtgccaggccagaggcagctgcagcctgggggcaggtgaccccagcaccctccagggcagtcctatgactgtttcttgcttcctgccctctgacttttagaggcctggagcaaggggccaggggcctgggcaggccacagagccccacagtgccctcactaccctattaatgggccaggaatctggaagccagccaccagctgccctcatgcccagggacttccagcaggtggagctgaagagccaagaggctcagagtctgcagcagcagcgaggccagtacctgggtcacctgaagcaacccggctcattggaccagctgcagcagcaggaagctcagggcaaagcagtggctaagatggcccgccaaaagttgcaggagacccaggggagggagttgctgaggacggggccccaagagggacaacctggcaacctctgtgccttctcaccctctttcctggcatctcaggagcacctggaagctaccagccagcagaaccagcaactacaggcccagttgagcctcatggctctccctggggaaggggacctggagagccgggagacggtggtggcatttttcaactccgctggaaccagtgcccaggaggagcaaaggatgtgctgccagcccctggctcacccagtggcctcgtcccagaagaagccagaagcagcagccccagccccagggactgggggaaagtacatcaccccatatgggagccaggggacagtgccaaagatgcggcaccgggaggaggaggagatcgtcaggctggcccaggaccgggaggagatgaaggtgaacctgctggagatgcaggggcaggtgttgcggcttgtgagagaccacaatgagggacatggcaagttcctggccactgcccagaaccctgctgatgagcccactctaggagccccagccccccaagagcttgtgtgtgctgacaagcaggatggccagtagaaccttcaggcagggtgagcaggcaggagcaggggaggctcgcatggcgctccgatcccctcctccctctctccgaagatctttgtgaggtgagcctcactgacagcgtggagcccgcaccaggagaggccagggagggttctccccacgacaaccccactgcacagcagatcatgcagctgcttcctgtaacgcaggactccccaggagcacccaggcttgggcagcaatctctgcatgcctttcttttcgagctgccgagaacagggagataaacaccaccatcatctaagagctggtcaagaaattaaaaaaaaaaaaaagttaaggggttaatctcctacacaattcatttacttcatttgaatgttagagccactcatgtttatttgtgtttctaatttatagtttaaattttatttgtaaaaagttaaaggagagtgggtcttttcctcatgttcactctggcatcctttagcatgtttcttttttaatttgataattgtaggaaaagtgtctgtacaatcacagagtcctacttcctccgaaagttctttacgaagagtgaaatatgtttttgtacctttcagtttcagttagaggcatattttgtgcaatatttatgtgaatgcgcctatatattatgaatgaattatttcagtcatatgttgcctaaatcataacttgatgatgcttgggaaagaatcaacagttaaaacctcatgaagttctaatgtctgtattccaaaatacatcacattattaggatgtagggagagatgtatgtgcgctccctggtgtggggatttgtagttactagaccgtctccatttggcatcctcatgatacttttataaatatgacattaataggaaagcagtattatttttcagacaaaataactgatttgcctggattcacggaaaaaaatgcaaatattgggtccttgtgacttcaactgactcttccaaattgtatgaatttattaatgtattagatagaatt

SEQ ID NO: 461401 - DNA, 3535 bp, Homo sapiens
aagatatttaaagatatttttaccttttccattttatctaatggtaggggctgaaataaggaggtaatgtaaaataggaatgcataagggatgatttccccctgacatttgctaactgaaaactggaattcatagacttactagttcagttagattattttttaaaaacactgtaccagactccctcccaattttttgtttattgggaaaaagtaaaactagtttggagtctaaaaaatagacatatggccacagaccatacagcatgagttactgaggtaaaatgttcatttcccccaggtttcagaaggatcccacttggtcagagactggagaccgttatctgttgaaactctttagggatcatctttttcatcaggtgacagaagcaggtgctccctggattgacctcagtcatataatttcttgtcttaacaagctagatgctggtgtgccagaaaaaataagcctgatttccagagatgagaagagtgtacttgtggtgacctacagtgacttaaagcgctgctttgaaaatacttttcaagaactgattgcagctgcaaatggtcagttgtagtatttgctaaaaaagcacgcaggacatggctaaagaccttaaccaatagcaaattgcactacagctgaacttttcatcatctcattcacatttgggaaacgaacaggagatgagcaaagctgcttgcacttcagtcaggtacactgttacttgaaaggaagaatgtttcacttacccaagagctatggctgccattggaggctgttatctgtgaagaatttattttagatttaggagcaccatcaggtgaatgatgttcctgcttttgttttttccacttgtatatgcactaattttaattttttaaagactttttctgatctttgaacttttgccacattgtatacttataatgggaaactttgcaaggacatttttgggaagcaatgctgggcagcgtttttgccattgagggttgcagaatttgctctttttgggatgggttgccctgaataacattacggaccaggtaaataatttcatagaagttcagtatagtacgtaattcttgtaagagtatcgtatgcaagctctctgtatgccacccactgttagttcaaattgagatttttgttttgttttgttcttaagaacataccaagaaaataccagtgaattgttggatatgaattccctgttagttgatttaaatcctttctgaataaagatcagataaacagtaactgaaggagcatgtatagctctttccttcaaattcaactagagcctttttaaaaagacatttgcctgctagtcagatacatttacatttatgcaaattttttaaataggagaaaattaagaaattgtgttaaaggcctaaagttcaggagtgtattactttaggttctttccagtttgctggtttttttttttttttttttttttttttttgggcgggggggaggtttatgaagttttgctctttgaaccacagctttattatggtcctttacactggagacagacacagagacactgttcagaagatgaactaaactcagcagtggtctggtatcaagagctttctgatgttttacagcctgaatttggagggataacgatctgctgtgcctttgcagtcactgcttagcccaaagtaatagtacttttgataataactcactctgtgcgatattcctgaataagtccatctcaaaagtttgggattttcctcctcttaactttcttaatatttggacatgcagttgtcgccaaacttgggtattcatggaatttctagtaaatgaaatacctatactttgatactgaagactgccaaatacataggaattttctttcttaaaaaacagtaatgaagactatatctcctttcccagcactgaatgttttactagcactgggtgctcaccatgcaactgaagaaaatgtggaaactcaaaaggtcaggacagacttccaagcacttgcaactgatgttactgtcttcaattttaataattacacatatttgtatatttcagagaagtttttaatatttctctgtccactttttataagctttaaaatgattttctctgccttgagatttgcatcaagaaaaagcacctctcttcacctgaaagctttgaagactagagacacgctttacacgttttaacaagtatattgagtccacgtttggtagcatcagttgttgagttaaaaagaaaattattgcatttgatctggatggattttaaaagaatataatgttcaatattaaaaggataattcacatttgccaccataatgttcttttttatgtaaaaagaagaacttggagacattaacatgaaaaagtcttttatcattagctcatgtatttgaggaagagcagctgtctttttatatgttttttgacaaatcatattgtattcttttgtacaaaaaagaactacttgtattctagaagaaatatgaaatgcttaatttataagcgggctggagattttttccaatattgttttctttgaaaatgaaaggggatcatctattttagttttggggtctgggaactttttgaaaatttaatttgtggaccaatgttttgtgaaagctaaagagggcaggggttaaaatagggcttgaatttctcattctgtatagaccagcaaacttccctgtgcaaggcaagtttacatcacaaatccaagaatgtttgcatcctaaatgctagtttgcttcagcccctagttaacctcaggacttggtttgcatataaaaggtagacagctgatatgttttcatgaataaatattgtcagccagaaaaggttggtgtcaggtaatgcatatttttttaagctttgttttatatttatttttcatttagtttttattgggaatggttttcaaagaactctcagttctgcctaggtgtttttgggggagccctgttttccatagtgtaattccatttaagaggttgtctaaaagtctttttaattaatagaaagattttaatatccaagagtagtcaaattaaggatataaactttccacaccttcctgtcgtgacagataaaagcacagaaaggacaacccttgaaatcatgtaacgttggtcatttcaatattttgtacctgttttaaattctgttagtgtatttacttcattgtaaatatttttgagggtacctttgtattttgcttttgaccttggttctgtgatttggatgtcaacaacttccctaaaaagcaccagtgtgttaggttctaatgtcatgacccaatttgtgttattcatctttaatcctgttttcagtctctatgtgtacagcagtatttttaataaagaattacagagataaatttgtccttttcttgcacgtgttcatataacaagatgatgattatcttatgattggattttaaaagattggttatttcctctgtattttggaggaatttttgtatttggatgaaatggcagcagatttattcattaatttat

SEQ ID NO: 461402 - DNA, 3774 bp, Homo sapiens
cccacccaatgagaatctctggtagagaggctcgaagtcgtctttttaataagctccaggttattctgagaatcaccagtatttgaggaccctgcctgcagcttatttataatgatgctttttccatttaggcagtagtgtcagtgtattaaatgagtacctgtgaaatgaaaattaaaagttatatttattctttcatgtcagcaagcagatctgatatcattaggaaaagttgtgttggctttggcttgcaactctttggcaggaattcagcgagagaatttacagaaagccatggaactggtgacaatcaactattcctctgacctgaagaatctgattttgtatttgttgactgaccaaaacaggatgcgaagtgtaaatgacatcatgcccatgattggtgctcgattttatactcaattggatgctgctcaaatgagaaatgatgtcatagaggaagaccttgcaaaggaggttcaaaatggaagactgtttaggctcctagcaaaattgggaacaatcaatgagaggccggagtttcagaaggatcccacttggtcagagactggagaccgttatctgttgaaactctttagggatcatctttttcatcaggtgacagaagcaggtgctccctggattgacctcagtcatataatttcttgtcttaacaagctagatgctggtgtgccagaaaaaataagcctgatttccagagatgagaagagtgtacttgtggtgacctacagtgacttaaagcgctgctttgaaaatacttttcaagaactgattgcagctgcaaatggtcagttgtagtatttgctaaaaaagcacgcaggacatggctaaagaccttaaccaatagcaaattgcactacagctgaacttttcatcatctcattcacatttgggaaacgaacaggagatgagcaaagctgcttgcacttcagtcaggtacactgttacttgaaaggaagaatgtttcacttacccaagagctatggctgccattggaggctgttatctgtgaagaatttattttagatttaggagcaccatcaggtgaatgatgttcctgcttttgttttttccacttgtatatgcactaattttaattttttaaagactttttctgatctttgaacttttgccacattgtatacttataatgggaaactttgcaaggacatttttgggaagcaatgctgggcagcgtttttgccattgagggttgcagaatttgctctttttgggatgggttgccctgaataacattacggaccaggtaaataatttcatagaagttcagtatagtacgtaattcttgtaagagtatcgtatgcaagctctctgtatgccacccactgttagttcaaattgagatttttgttttgttttgttcttaagaacataccaagaaaataccagtgaattgttggatatgaattccctgttagttgatttaaatcctttctgaataaagatcagataaacagtaactgaaggagcatgtatagctctttccttcaaattcaactagagcctttttaaaaagacatttgcctgctagtcagatacatttacatttatgcaaattttttaaataggagaaaattaagaaattgtgttaaaggcctaaagttcaggagtgtattactttaggttctttccagtttgctggtttttttttttttttttttttttttttttgggcgggggggaggtttatgaagttttgctctttgaaccacagctttattatggtcctttacactggagacagacacagagacactgttcagaagatgaactaaactcagcagtggtctggtatcaagagctttctgatgttttacagcctgaatttggagggataacgatctgctgtgcctttgcagtcactgcttagcccaaagtaatagtacttttgataataactcactctgtgcgatattcctgaataagtccatctcaaaagtttgggattttcctcctcttaactttcttaatatttggacatgcagttgtcgccaaacttgggtattcatggaatttctagtaaatgaaatacctatactttgatactgaagactgccaaatacataggaattttctttcttaaaaaacagtaatgaagactatatctcctttcccagcactgaatgttttactagcactgggtgctcaccatgcaactgaagaaaatgtggaaactcaaaaggtcaggacagacttccaagcacttgcaactgatgttactgtcttcaattttaataattacacatatttgtatatttcagagaagtttttaatatttctctgtccactttttataagctttaaaatgattttctctgccttgagatttgcatcaagaaaaagcacctctcttcacctgaaagctttgaagactagagacacgctttacacgttttaacaagtatattgagtccacgtttggtagcatcagttgttgagttaaaaagaaaattattgcatttgatctggatggattttaaaagaatataatgttcaatattaaaaggataattcacatttgccaccataatgttcttttttatgtaaaaagaagaacttggagacattaacatgaaaaagtcttttatcattagctcatgtatttgaggaagagcagctgtctttttatatgttttttgacaaatcatattgtattcttttgtacaaaaaagaactacttgtattctagaagaaatatgaaatgcttaatttataagcgggctggagattttttccaatattgttttctttgaaaatgaaaggggatcatctattttagttttggggtctgggaactttttgaaaatttaatttgtggaccaatgttttgtgaaagctaaagagggcaggggttaaaatagggcttgaatttctcattctgtatagaccagcaaacttccctgtgcaaggcaagtttacatcacaaatccaagaatgtttgcatcctaaatgctagtttgcttcagcccctagttaacctcaggacttggtttgcatataaaaggtagacagctgatatgttttcatgaataaatattgtcagccagaaaaggttggtgtcaggtaatgcatatttttttaagctttgttttatatttatttttcatttagtttttattgggaatggttttcaaagaactctcagttctgcctaggtgtttttgggggagccctgttttccatagtgtaattccatttaagaggttgtctaaaagtctttttaattaatagaaagattttaatatccaagagtagtcaaattaaggatataaactttccacaccttcctgtcgtgacagataaaagcacagaaaggacaacccttgaaatcatgtaacgttggtcatttcaatattttgtacctgttttaaattctgttagtgtatttacttcattgtaaatatttttgagggtacctttgtattttgcttttgaccttggttctgtgatttggatgtcaacaacttccctaaaaagcaccagtgtgttaggttctaatgtcatgacccaatttgtgttattcatctttaatcctgttttcagtctctatgtgtacagcagtatttttaataaagaattacagagataaatttgtccttttcttgcacgtgttcatataacaagatgatgattatcttatgattggattttaaaagattggttatttcctctgtattttggaggaatttttgtatttggatgaaatggcagcagatttattcattaatttat

SEQ ID NO: 461403 - DNA, 4642 bp, Homo sapiens
tgttgcatccaggtttgctgagctgaagtctggtgatgccgccattgttgatatagttcctggcaagcccatgtgtgctgagagcttctcagaccatcctcttctgagttgttttgctgttggtgatgtgagacagacagttgctgtgggtgtcatcaaagcagtggacaagaaggctgctggagctggcaaggtcaccaggaaactgaggcgagacgtttatggcgcagagagggatgtggctgctgcagctggcttggagacctgtcaggtgtttccaaactatcatatttatcctccaactgcacctcacgttgcttatatgcaaccgaaagcaaacgcaccttccttcttcatggctgatgaactccgacaggagctgatcaacagacatttaataacaatggctcaaattgatcaagcagatatgccagcagttcctacagaggttgacagctaccatagcctattccctctagaaccactgccacctcccaaccggatacagaaatcaagtaattttggatatattacatcttgctacaaagctgtaaacagcaaagatgatctgccatattgccttcggaggatacatggttttcgtcttgttaacacaaagtgcatggtgttggtcgacatgtggaagaaaattcaacactcaaatatcgtaactttgcgtgaagtatttaccactaaagcatttgctgagccctctcttgtgtttgcatatgatttccatgctggaggagaaactatgatgagcagacactttaatgaccctaatgctgatgcctacttcaccaagagaaagtggggtcagcacgagggaccattgcccaggcagcatgctggattattgccagaatctcttatttgggcatatattgtccaactaagttctgcattgcgtaccattcatacagcaggtttggcatgtcgagttatggatccaacaaagattctgataactggcaaaacaaggttgcgagtaaattgtgttggagtttttgatgttttaacatttgataacagtcaaaataataatccattggcattaatggcccagtaccagcaagcagatctgatatcattaggaaaagttgtgttggctttggcttgcaactctttggcaggaattcagcgagagaatttacagaaagccatggaactggtgacaatcaactattcctctgacctgaagaatctgattttgtatttgttgactgaccaaaacaggatgcgaagtgtaaatgacatcatgcccatgattggtgctcgattttatactcaattggatgctgctcaaatgagaaatgatgtcatagaggaagaccttgcaaaggaggttcaaaatggaagactgtttaggctcctagcaaaattgggaacaatcaatgagaggccggagtttcagaaggatcccacttggtcagagactggagaccgttatctgttgaaactctttagggatcatctttttcatcaggtgacagaagcaggtgctccctggattgacctcagtcatataatttcttgtcttaacaagctagatgctggtgtgccagaaaaaataagcctgatttccagagatgagaagagtgtacttgtggtgacctacagtgacttaaagcgctgctttgaaaatacttttcaagaactgattgcagctgcaaatggtcagttgtagtatttgctaaaaaagcacgcaggacatggctaaagaccttaaccaatagcaaattgcactacagctgaacttttcatcatctcattcacatttgggaaacgaacaggagatgagcaaagctgcttgcacttcagtcaggtacactgttacttgaaaggaagaatgtttcacttacccaagagctatggctgccattggaggctgttatctgtgaagaatttattttagatttaggagcaccatcaggtgaatgatgttcctgcttttgttttttccacttgtatatgcactaattttaattttttaaagactttttctgatctttgaacttttgccacattgtatacttataatgggaaactttgcaaggacatttttgggaagcaatgctgggcagcgtttttgccattgagggttgcagaatttgctctttttgggatgggttgccctgaataacattacggaccaggtaaataatttcatagaagttcagtatagtacgtaattcttgtaagagtatcgtatgcaagctctctgtatgccacccactgttagttcaaattgagatttttgttttgttttgttcttaagaacataccaagaaaataccagtgaattgttggatatgaattccctgttagttgatttaaatcctttctgaataaagatcagataaacagtaactgaaggagcatgtatagctctttccttcaaattcaactagagcctttttaaaaagacatttgcctgctagtcagatacatttacatttatgcaaattttttaaataggagaaaattaagaaattgtgttaaaggcctaaagttcaggagtgtattactttaggttctttccagtttgctggtttttttttttttttttttttttttttttgggcgggggggaggtttatgaagttttgctctttgaaccacagctttattatggtcctttacactggagacagacacagagacactgttcagaagatgaactaaactcagcagtggtctggtatcaagagctttctgatgttttacagcctgaatttggagggataacgatctgctgtgcctttgcagtcactgcttagcccaaagtaatagtacttttgataataactcactctgtgcgatattcctgaataagtccatctcaaaagtttgggattttcctcctcttaactttcttaatatttggacatgcagttgtcgccaaacttgggtattcatggaatttctagtaaatgaaatacctatactttgatactgaagactgccaaatacataggaattttctttcttaaaaaacagtaatgaagactatatctcctttcccagcactgaatgttttactagcactgggtgctcaccatgcaactgaagaaaatgtggaaactcaaaaggtcaggacagacttccaagcacttgcaactgatgttactgtcttcaattttaataattacacatatttgtatatttcagagaagtttttaatatttctctgtccactttttataagctttaaaatgattttctctgccttgagatttgcatcaagaaaaagcacctctcttcacctgaaagctttgaagactagagacacgctttacacgttttaacaagtatattgagtccacgtttggtagcatcagttgttgagttaaaaagaaaattattgcatttgatctggatggattttaaaagaatataatgttcaatattaaaaggataattcacatttgccaccataatgttcttttttatgtaaaaagaagaacttggagacattaacatgaaaaagtcttttatcattagctcatgtatttgaggaagagcagctgtctttttatatgttttttgacaaatcatattgtattcttttgtacaaaaaagaactacttgtattctagaagaaatatgaaatgcttaatttataagcgggctggagattttttccaatattgttttctttgaaaatgaaaggggatcatctattttagttttggggtctgggaactttttgaaaatttaatttgtggaccaatgttttgtgaaagctaaagagggcaggggttaaaatagggcttgaatttctcattctgtatagaccagcaaacttccctgtgcaaggcaagtttacatcacaaatccaagaatgtttgcatcctaaatgctagtttgcttcagcccctagttaacctcaggacttggtttgcatataaaaggtagacagctgatatgttttcatgaataaatattgtcagccagaaaaggttggtgtcaggtaatgcatatttttttaagctttgttttatatttatttttcatttagtttttattgggaatggttttcaaagaactctcagttctgcctaggtgtttttgggggagccctgttttccatagtgtaattccatttaagaggttgtctaaaagtctttttaattaatagaaagattttaatatccaagagtagtcaaattaaggatataaactttccacaccttcctgtcgtgacagataaaagcacagaaaggacaacccttgaaatcatgtaacgttggtcatttcaatattttgtacctgttttaaattctgttagtgtatttacttcattgtaaatatttttgagggtacctttgtattttgcttttgaccttggttctgtgatttggatgtcaacaacttccctaaaaagcaccagtgtgttaggttctaatgtcatgacccaatttgtgttattcatctttaatcctgttttcagtctctatgtgtacagcagtatttttaataaagaattacagagataaatttgtccttttcttgcacgtgttcatataacaagatgatgattatcttatgattggattttaaaagattggttatttcctctgtattttggaggaatttttgtatttggatgaaatggcagcagatttattcattaatttat

SEQ ID NO: 461404 - DNA, 3469 bp, Homo sapiens
gtctgggaggtgtacccaacagctcattgagaacgggccatgatgacaatggcggttttcaaggcagaaacagcagcagctggaagtcaagaggagtgctctgtggaggaacacacccacaggcaccagcatgccggcaggccactgactggcaaaacaacgcggtgtttggctggggcagtcggaggagcgctcgggccgccaagcagaccgactccagggaaaaccatctcccttctggctcccccatctgctaagagttgtgatgattgtactatgaatatgcaggatgttaccattggaggaagctggattaaggggaagaaaacgagtttttatggtgtcaccagccatgggatctctggggacccagtgtcaccaattctgcctccctccttagcgttttggtggggctttcctgttcttgtgggtgtcctccaggggagactggtcctacagggggcccagggctgtgggagataatgctgaaattaacatctttggatatacaattctctgcttctgaagaatgaaaagataaataacagagctaagaaagggactgatgaaacttacaacagcaggtctcaaatttttggtctcaggacccctttatgctcttaaaaatgattgacagcctccaagagcttttgttcatgctttggtaaggctgtgagagcacagagctgaattagggatcttggacttcaagttactgactagccccagcactcgccaagctcacaaagaagacagaaacgaggcaggtccttcaggaggtattccagaagtcactgttatcataggaggacagctccatgtgtgttattgcccctgaagacagtgggacaagatgtggaggtagaagacagtgatactggtgatcctgaccctaacgtgtgtaatgtgtgtgttcgtgtcttcattctaagaaaacgttttgtacagatgtacagtgtgtttgagtttaagctaagtgttatttcaagagtcaaaaagttaaaaaaataaaaaaagtttatatggtaaaaaaagttacacatctgctttatataagtgtaatgtgtactatctccaccgaaggacaaccactatcttgacttctcatcttgcacattaatgatttgcatgttttgtctttaaataaatggaatcacatagcatgtatgctttttggttctgacttattttattcagcgtaatttttgtaagactcattcatattgttgcatgtagttatagattgttcattctcagtgctgtattgaatcccgttgtgtttatatgctacaatttatttatcccatctactgttgatggacttgtgggtagttttgagtggtgtgctattacagagctgctacgggaattcttgtgtgtatcctttggtgcatatttgtatgcatgtctcctgggcattaacctaggagtggagttgctgggttgcaggtggcaatcaacttttgatgtctcactcttaaatatgaacagacagccaaggtcacccagcatttgaggaatgccctctgcgtaaaataaagacacaagcaaacacacactcagcaaacaaaccaacaaatatgagtgtgcttagtcccaaggagcctcaccctttccctcgcctgatactcctgttaccttcctcacatgtcgctataagaataaacatcgtagtggctccagtcaccatagctggactcatagattggatgggatgtacagttgggtcatcagacaggtttgtctcatttctccacttttgaaccagacgctggcatacttttcctttttggccttggtgtcatacatggagacttttctcagctttggtacacactgtcctggttacatccattacaccacatgccacgaaggcagtgctggctgcagagccaaatgggcggtttcccagaggagggacaactgggaggtggacttgttggttttggccaagatgatgttacttctggcttctccagttggatgtatgacctagaggcctgattcatcaagagagaagtccaaatcttgctaggaggaagaagtatagggaaaatcatggttataagctgcatttggctataggctagtttggaccttgttggaggtaatatttacccagcacatgttgttggaattgatgcagttataataaagctggttcttgttcttggccattaattccagagctctgtcctgaattaacagacctgtagagattgtgccacggaactgttttaatctggtgtagtctttgtaaaaagaatatttaaggactatggggaaagaatcaatgcttttccaatactgaacctttggcctggttccagggaggggtccttgccccaacctccatctttgaagggatggtgtagagaacaaaagcgtggctgaagctgatgatgccttcattagcacaggatcctgagggctgggaaaggaatggattgagtcagagacacagtgcccagctggggacatggagctggcccgtggtgagttctaaaggtatgaggaaggaagccaaccagtgaccactctatctcgggtggagaaaactttgggaaaggaaactctaaaactttacttttggggtgcccattccctggagtcccctcaccttgggctcttgttgggttattgtattaatctggcagggctgctgtaacacgataccacagactggatgacttaaacaacagaaatttactcacagttctggaggctagaagtccaagatcgaggtgtcagcagttttggttttttccaaggcctctgtccttggcttgtagatggcctttcctctgtcttcacgaggtgagtcctcatcactcaatctctgttaaaatgtcccttccttcctgaccacccagcagtgtggctccccaggaagtcagttttaaggttttaatggggtccccttggccacaaggggatccattcagtcaatgggggggcttaggatttcaagtttataccccaaagaacaaggcagattctagtttcttaaggctcacaaaatggaaagagcccttccttattcagctcttctactgctgtgttagtccgttctcacattgctatcaagaactacctcttctctgtccccatcagcggttagcacgctatctatcctccagcacctgctacgctgaatcgggcccagggtctggactggggagggtggctagcttctgaatccccagaacaggccaagctgcctcctcttctgacctcctctactccagcctagcaggctgggacacaagacactctggaacggctggaaggactggttctcctggggacatcctccacttcaagtacatactgaagcaggtcctggccaccagcgtgtacctcaacctcctcgccaggcccctcaactccaaggctggggggctgctggcagcttcaaattcattcccaagtacaagatgaaaattcagtctaggaagatggctccccc

SEQ ID NO: 461405 - DNA, 3017 bp, Homo sapiens
cagatacaacagtggtctcataagattgcagtggagctgaattacatagcctagtgaggtcatagctgtggcaacgtcatagctcaatgcattactcacaggtttgcggtcatgctgatgtaaactaacctactgcgctgccaggcttataaacgtctagcacatacaattacatacagtgcataatatacttaataacaaatgactatatgactcctttgtgtatttactatactatacttttcattgtcattttagaatgtatttcttctacttacaaaataaaaaagttaactgtaaaatggccttaggcaggtccttcaggaggtattccagaagtcactgttatcataggaggacagctccatgtgtgttattgcccctgaagacagtgggacaagatgtggaggtagaagacagtgatactggtgatcctgaccctaacgtgtgtaatgtgtgtgttcgtgtcttcattctaagaaaacgttttgtacagatgtacagtgtgtttgagtttaagctaagtgttatttcaagagtcaaaaagttaaaaaaataaaaaaagtttatatggtaaaaaaagttacacatctgctttatataagtgtaatgtgtactatctccaccgaaggacaaccactatcttgacttctcatcttgcacattaatgatttgcatgttttgtctttaaataaatggaatcacatagcatgtatgctttttggttctgacttattttattcagcgtaatttttgtaagactcattcatattgttgcatgtagttatagattgttcattctcagtgctgtattgaatcccgttgtgtttatatgctacaatttatttatcccatctactgttgatggacttgtgggtagttttgagtggtgtgctattacagagctgctacgggaattcttgtgtgtatcctttggtgcatatttgtatgcatgtctcctgggcattaacctaggagtggagttgctgggttgcaggtggcaatcaacttttgatgtctcactcttaaatatgaacagacagccaaggtcacccagcatttgaggaatgccctctgcgtaaaataaagacacaagcaaacacacactcagcaaacaaaccaacaaatatgagtgtgcttagtcccaaggagcctcaccctttccctcgcctgatactcctgttaccttcctcacatgtcgctataagaataaacatcgtagtggctccagtcaccatagctggactcatagattggatgggatgtacagttgggtcatcagacaggtttgtctcatttctccacttttgaaccagacgctggcatacttttcctttttggccttggtgtcatacatggagacttttctcagctttggtacacactgtcctggttacatccattacaccacatgccacgaaggcagtgctggctgcagagccaaatgggcggtttcccagaggagggacaactgggaggtggacttgttggttttggccaagatgatgttacttctggcttctccagttggatgtatgacctagaggcctgattcatcaagagagaagtccaaatcttgctaggaggaagaagtatagggaaaatcatggttataagctgcatttggctataggctagtttggaccttgttggaggtaatatttacccagcacatgttgttggaattgatgcagttataataaagctggttcttgttcttggccattaattccagagctctgtcctgaattaacagacctgtagagattgtgccacggaactgttttaatctggtgtagtctttgtaaaaagaatatttaaggactatggggaaagaatcaatgcttttccaatactgaacctttggcctggttccagggaggggtccttgccccaacctccatctttgaagggatggtgtagagaacaaaagcgtggctgaagctgatgatgccttcattagcacaggatcctgagggctgggaaaggaatggattgagtcagagacacagtgcccagctggggacatggagctggcccgtggtgagttctaaaggtatgaggaaggaagccaaccagtgaccactctatctcgggtggagaaaactttgggaaaggaaactctaaaactttacttttggggtgcccattccctggagtcccctcaccttgggctcttgttgggttattgtattaatctggcagggctgctgtaacacgataccacagactggatgacttaaacaacagaaatttactcacagttctggaggctagaagtccaagatcgaggtgtcagcagttttggttttttccaaggcctctgtccttggcttgtagatggcctttcctctgtcttcacgaggtgagtcctcatcactcaatctctgttaaaatgtcccttccttcctgaccacccagcagtgtggctccccaggaagtcagttttaaggttttaatggggtccccttggccacaaggggatccattcagtcaatgggggggcttaggatttcaagtttataccccaaagaacaaggcagattctagtttcttaaggctcacaaaatggaaagagcccttccttattcagctcttctactgctgtgttagtccgttctcacattgctatcaagaactacctcttctctgtccccatcagcggttagcacgctatctatcctccagcacctgctacgctgaatcgggcccagggtctggactggggagggtggctagcttctgaatccccagaacaggccaagctgcctcctcttctgacctcctctactccagcctagcaggctgggacacaagacactctggaacggctggaaggactggttctcctggggacatcctccacttcaagtacatactgaagcaggtcctggccaccagcgtgtacctcaacctcctcgccaggcccctcaactccaaggctggggggctgctggcagcttcaaattcattcccaagtacaagatgaaaattcagtctaggaagatggctccccc

SEQ ID NO: 461406 - DNA, 1163 bp, Homo sapiens
  misc_feature (1029)..(1029): n is a, c, g, or t
  misc_feature (1070)..(1070): n is a, c, g, or t
  misc_feature (1084)..(1084): n is a, c, g, or t
  misc_feature (1109)..(1109): n is a, c, g, or t
  misc_feature (1123)..(1123): n is a, c, g, or t
gtctgggaggtgtacccaacagctcattgagaacgggccatgatgacaatggcggttttcaaggcagaaacagcagcagctggaagtcaagaggagtgctctgtggaggaacacacccacaggcaccagcatgccggcaggccactgactggcaaaacaacgcggtgtttggctggggcagtcggaggagcgctcgggccgccaagcagaccgactccagggaaaaccatctcccttctggctcccccatctgctaagagttgtgatgattgtactatgaatatgcaggatgttaccattggaggaagctggattaaggggaagaaaacgagtttttatggtgtcaccagccatgggatctctggggacccagtgtcaccaattctgcctccctccttagcgttttggtggggctttcctgttcttgtgggtgtcctccaggggagactggtcctacagggggcccagggctgtgggagataatgctgaaattaacatctttggatatacaattctctgcttctgaagaatgaaaagataaataacagagctaagaaagggactgatgaaacttacaacagcaggtctcaaatttttggtctcaggacccctttatgctcttaaaaatgattgacagcctccaagagcttttgttcatgctttggtaaggctgtgagagcacagagctgaattagggatcttggacttcaagttactgactagccccagcactcgccaagctcacaaagaagacagaaacgaggcaggtccttcaggaggtattccagaagtcactgttatcataggaggacagctccatgtgtgttattgcccctgaagacagtgggacaagatgtggaggtagaagacagtgatactggtgatcctgaccctaacgtgtgtaatgtgtgtgttcgtgtcttcattctaagaaaacgttttgtacagatgtacagtgtgtttgagtttaagctaagtgttatttcaagagtcaaaaagttaaaaaaataaaaaaagaagcggcccttncctttagggagggtaatctgatcctccttcctgctcctgcnctcggcgtcggtgngggacggtttacttcctcaaggggnattccggtttcccnaatcggggataccccgaaaaactttgaccaaggccccaat

SEQ ID NO: 461407 - DNA, 436 bp, Homo sapiens
tcattgggagcacctgataaaaatgccacggattctttgtagtcaaagaagatggccacggagacagcagcgtggtcagagtggtaggagccggccatcagcgagagctgctccatgcctggctgctgggtgctacagcctgtggcccactggcttgcctcactgtggttggtggtggcggtgacagagactgcagcacgaccaaagtggcttttctggctttgcccgcccagctgctccatgccaggaggaggaggagacacctagagcctgcgacaccacggctcgcctcgctgcgggagggtggcatcaacggagactgcagtgcaccagagtggagggcaggtggctgcagccagggttgggggtcaggcttacagcaatggacgggctgcagcagtggccaggtggtaggagccttgtagggagggctggc

SEQ ID NO: 461408 - DNA, 447 bp, Homo sapiens
agctgaaggcggcgggagaccgagtcgccgccagcgtcggcgccgctttgtagtcaaagaagatggccacggagacagcagcgtggtcagagtggtaggagccggccatcagcgagagctgctccatgcctggctgctgggtgctacagcctgtggcccactggcttgcctcactgtggttggtggtggcggtgacagagactgcagcacgaccaaagtggcttttctggctttgcccgcccagctgctccatgccaggaggaggaggagacacctagagcctgcgacaccacggctcgcctcgctgcgggagggtggcatcaacggagactgcagtgcaccagagtggagggcaggtggctgcagccagggttgggggtcaggcttacagcaatggacgggctgcagcagtggccaggtggtaggagccttgtagggagggctggc

SEQ ID NO: 461409 - DNA, 2068 bp, Homo sapiens
tgataagggaagaaggcctcgagtgagcatgcatacaacttcagaaaacactgatcgtgcggctcctcccaagtgctggcaggccactgtgcatgtggacagcccaccccaagggaagaatcaggggagaaaggtgcactccacccgcctgggaagcatgctgatgtataaaaccccaaggattgtgaggcctcctcagccatgtggaactattcctgagcttggaactctgaacacacattcagctgtgtctgccatacagggtcattctcagagtatgctgaagttattgctgtcaggtgcgtttgccatatactcagggacctgggtcccttccttcttagtctccatcttctccaggagccagaaaaaaaggagagagagagcatcaggtggcactgtttatgggcctttcatggaagtgacacctggggttacttctgcttatgttcctttggacagaattcagttgaatggtcatactagaggcattgtgccaggctttgcaggataaaaagaagttagagacagggactttggatccaagtcctccctgactcaaaacccagagaggcagaggatgcttgccacctttgactagtcctatctcctccaaagggtccttttgatttattagcaagaagccatcttctgaccacaaagacaagatttcaaagttctcacccagttcctagctaaagatgtccaaagagacttctaagccaatgattttcaacaaggaaattgaagttgtatgctttgaagagaggggcttgattgggtggcatcttatgcttaagtgtgcatggaagagccatcctacatgcagcatgtgatgggcccccagggactgaggacttgtgtatgactgggagtctacgcagcttggcttcatatcagttcttgccatctcggatccaaatgctctccaggcatgaagtcatttcctccaagagatttgaagatgccccagaagaatcttaggctaaggtcactattcttaagctaaggtcactattcttattcctctgagaaaggtgaaaggtgggttgggtgcagtggctcacgcctgtaatcccagcactttaggaggtcgaggtgggtggatcacgaggtcaagagatcgagaccatcctggccaacacggtgaaaccctgcctctactaaaaatacaaaacttagctgggcatggtggcacgtgcctgtagtcccagctacttgggaggctgaggcaggagtcgcttgaacccaggaggctgaggttgcagtgagctgagatcgcaccactgcgctccagcctggtaacagagtgagactccacctcaacaacaacaacaacaaaaaggtgaaaggtgtttgatggatgaaaatagagctgaaccctaacttgtaaccactcaattttaactagaggttgtcaccaagtaagagatgcccatcgaccttgtgcacaaagctggcgctagtctatgaactgttggtgaagtcacactatgaaacaacgtctctaccacccattcccataccatcagccatcctgctctggcatatgagcaggggaattcttttccgtcctctctgaaggaacgaatagtctgaaatattgaattggaaaaatgctcaaggcatccattctactctcgtgggccccatgtagttatctgttgaaggcctcggatgtgccagagacaattcatttgttgtcattagttccccccacaaccctcagaagtgagtataccttcatgtcacagatgagattatgttcaaaacggtttagaagctgctcaaggtcacatacccactaggtgacagatttgaatccagaattgtactcctcaacacagagcccccttctcactatgccggagatgctgagtttcttggcctgggctgcagccccacacagccggttttgagctccccaggtgaatctactgggctccctgggctgagaaccactgctctacatcagccttcttacatgaatcaggggttttattccgccttgcatcacaggttcctttagggaagtaaaaaaaaaaaaaaaaaaaaaaaaagctacaag

SEQ ID NO: 461410 - DNA, 865 bp, Homo sapiens
cgtccccatgacgacatggcaatgagtcttccccagcaggcagatgccagatgcagtggtgaccacacctgccatctgggaggattccaggcagactctcactctgctgcccaggctagagtgcagtggtgtgattatagctcactgcagcttcaaacccctgggcttaaatgatcctcctacctcagcaacccaagaagctgggacaacaggtgcacccccagcccaggcgacatcaacggccagccccatacgcgtgaggattgcggcaccaggggcgctcaggattgggccgggctgcttctcagaagaggggacattgagcccaagcaggctgcactcctgcttggacggaaggtgcatgggtggggagggtaatcacaccaatagagacatggatggacttgtgcagaacataaatactctctttgcttatgtctatgttactcaaaggaaccatggaaataacaaattcccaattacaatgcagtaaactttaagaggagcagagtgagcttcgctcttttatggttggtgtatttccaaaaaacactttcttcttctttcccaattctttttctagtttctcctaaattggtgtttctttagatggaagccgtgtctcagaccataaaacactaaacctatttgaagcacttacgttaattattctattcataaaatctaggttgatccatctcatagcaaaatccgttagtataattttaccttcttctttttaaaaagccaacaaactataagtggtgcttctatgtagaaatatataagtagaactgagtttttacttatagaacttatatcaaatgatgataagcaaagtatttttattctataacctggattt

SEQ ID NO: 461411 - DNA, 787 bp, Homo sapiens
tgggacagccctccccctccccctgggactccatggcctgtgctgtcctcctgcccaagaagcttccctctgaggcatctcgggtccgggtccgtcctgctcacccagggccaggagcccccaggaggcccacggtgcacccccagcccaggcgacatcaacggccagccccatacgcgtgaggattgcggcaccaggggcgctcaggattgggccgggctgcttctcagaagaggggacattgagcccaagcaggctgcactcctgcttggacggaaggtgcatgggtggggagggtaatcacaccaatagagacatggatggacttgtgcagaacataaatactctctttgcttatgtctatgttactcaaaggaaccatggaaataacaaattcccaattacaatgcagtaaactttaagaggagcagagtgagcttcgctcttttatggttggtgtatttccaaaaaacactttcttcttctttcccaattctttttctagtttctcctaaattggtgtttctttagatggaagccgtgtctcagaccataaaacactaaacctatttgaagcacttacgttaattattctattcataaaatctaggttgatccatctcatagcaaaatccgttagtataattttaccttcttctttttaaaaagccaacaaactataagtggtgcttctatgtagaaatatataagtagaactgagtttttacttatagaacttatatcaaatgatgataagcaaagtatttttattctataacctggattt

SEQ ID NO: 461412 - DNA, 3159 bp, Homo sapiens
tgtgcctctgtggtatcgaatagtcagggtgcagggatcacagagatgtagtcgaaatggcgagcgatggtgcagtagcgtgattgtcgttgacctcagcgtctcttgctacatgagtggtagatctcgcgggtctccctatagtgagtcctgattacatctcgataacggcaggtaaagtctgcggttaatgaactcggttcggacagcgagtccgagtcgtccttgtccggggaggagctcgtcaccaaacctgtcggaggcaactatggcaaacagccattgttgctgagcgaggatgaagaagataccaagagagttgtccgcagtgccaaggacaagaggtttgaggagctgaccaaccttatccggaccatccgtaatgccatgaagattcgtgatgtcaccaagtgcctggaagagtttgagctcctgggaaaagcatatgggaaggccaaaagcattgtggacaaagaaggtgtcccccggttctatatccgcatcctggctgacctagaggactatcttaatgagctttgggaagataaggaagggaagaagaagatgaacaagaacaatgccaaggctctgagcaccttgcgtcagaagatccgaaaatacaaccgtgatttcgagtcccatatcacaagctacaagcagaaccccgagcagtctgcggatgaagatgctgagaaaaatgaggaggattcagaaggctcttcagatgaggatgaggatgaggacggagtcagtgctgcaactttcttgaagaagaaatcagaagctccttctggggagagtcgcaagttcctcaaaaagatggatgatgaagatgaggactcagaagattccgaagatgatgaagactgggacacaggttccacatcttccgattccgactcagaggaggaagaagggaaacaaaccgcgctggcctcaagatttcttaaaaaggcacccaccacagatgaggacaagaaggcagccgagaagaaacgggaggacaaagctaagaagaagcacgacaggaaatccaagcgcctggatgaggaggaggaggacaatgaaggcggggagtgggaaagggtccggggcggagtgccgttggttaaggagaagccaaaaatgtttgccaagggaactgagatcacccatgctgttgttatcaagaaactgaatgagatcctacaggcacgaggcaagaagggaactgatcgtgctgcccagattgagctgctgcaactgctggttcagattgcagcggaaaacaacctgggagagggcgtcattgtcaagatcaagttcaatatcatcgcctctctctatgactacaaccccaacctggcaacctacatgaagccagagatgtgggggaagtgcctggactgcatcaatgagctgatggatatcctgtttgcaaatcccaacatttttgttggagagaatattctggaagagagtgagaacctgcacaacgctgaccagccactgcgtgtccgtggctgcatcctaactctggtggaacgaatggatgaagaatttaccaaaataatgcaaaatactgaccctcactcccaagagtacgtggagcacttgaaggatgaggcccaggtgtgtgccatcatcgagcgtgtgcagcgctacctggaggagaagggcactaccgaggaggtctgccgcatctacctgctgcgcatcctgcacacctactacaagtttgattacaaggcccatcagcgacagctgaccccgcctgagggctcctcaaagtctgagcaagaccaggcagaaaatgagggcgaggactcggctgtgttgatggagagactgtgcaagtacatctacgccaaggaccgcacagaccggatccgcacatgtgccatcctctgccacatctaccaccatgctctgcactcgcgctggtaccaggcccgcgacctcatgctcatgagccacttgcaggacaacattcagcatgcagacccgccagtgcagatcctttacaaccgcaccatggtgcagctgggcatctgtgccttccgccaaggcctgaccaaggacgcacacaacgccctgctggacatccagtcgagtggccgagccaaggagcttctgggccagggcctgctgctgcgcagcctgcaggagcgcaaccaggagcaggagaaggtggagcggcgccgtcaggtccccttccacctgcacatcaacctggagctgctggagtgtgtctacctggtgtctgccatgctcctggagatcccctacatggccgcccatgagagcgatgcccgccgacgcatgatcagcaagcagttccaccaccagctgcgcgtgggcgagcgacagcccctgctgggtccccctgagtccatgcgggaacatgtggtcgctgcctccaaggccatgaagatgggtgactggaagacctgtcacagttttatcatcaatgagaagatgaatgggaaagtgtgggaccttttccccgaggctgacaaagtccgcaccatgctggttaggaagatccaggaagagtcactgaggacctacctcttcacctacagcagtgtctatgactccatcagcatggagacgctgtcagacatgtttgagctggatctgcccactgtgcactccatcatcagcaaaatgatcattaatgaggagctgatggcctccctggaccagccaacacagacagtggtgatgcaccgcactgagcccactgcccagcagaacctggctctgcagctggccgagaagctgggcagcctggtggagaacaacgaacgggtgtttgaccacaagcagggcacctacgggggctacttccgagaccagaaggacggctaccgcaaaaacgagggctacatgcgccgcggtggctaccgccagcagcagtctcagacggcctactgagctctccactctgtttcccgcctgggccatccaaccttgaagtcctaaaccacacctcagtcactaaaggtctgtttaaagttgttctggttgattgcttgttgccacaaaggtgtgttgagcccattcatttgctgattatatttctgagctgctaccacatgacagacacaaggctcagatgaagaggtgaattgaacacgttcctgacctcaaagagcctgctgctttttgacattt

SEQ ID NO: 461413 - DNA, 2738 bp, Homo sapiens
cgatggtcctcagtcctcaaacctcttgtccttggcactgcggacaactctctgggtatcttcttcatcctcgctcagcaacaagggctgacctagaggactatcttaatgagctttgggaagataaggaagggaagaagaagatgaacaagaacaatgccaaggctctgagcaccttgcgtcagaagatccgaaaatacaaccgtgatttcgagtcccatatcacaagctacaagcagaaccccgagcagtctgcggatgaagatgctgagaaaaatgaggaggattcagaaggctcttcagatgaggatgaggatgaggacggagtcagtgctgcaactttcttgaagaagaaatcagaagctccttctggggagagtcgcaagttcctcaaaaagatggatgatgaagatgaggactcagaagattccgaagatgatgaagactgggacacaggttccacatcttccgattccgactcagaggaggaagaagggaaacaaaccgcgctggcctcaagatttcttaaaaaggcacccaccacagatgaggacaagaaggcagccgagaagaaacgggaggacaaagctaagaagaagcacgacaggaaatccaagcgcctggatgaggaggaggaggacaatgaaggcggggagtgggaaagggtccggggcggagtgccgttggttaaggagaagccaaaaatgtttgccaagggaactgagatcacccatgctgttgttatcaagaaactgaatgagatcctacaggcacgaggcaagaagggaactgatcgtgctgcccagattgagctgctgcaactgctggttcagattgcagcggaaaacaacctgggagagggcgtcattgtcaagatcaagttcaatatcatcgcctctctctatgactacaaccccaacctggcaacctacatgaagccagagatgtgggggaagtgcctggactgcatcaatgagctgatggatatcctgtttgcaaatcccaacatttttgttggagagaatattctggaagagagtgagaacctgcacaacgctgaccagccactgcgtgtccgtggctgcatcctaactctggtggaacgaatggatgaagaatttaccaaaataatgcaaaatactgaccctcactcccaagagtacgtggagcacttgaaggatgaggcccaggtgtgtgccatcatcgagcgtgtgcagcgctacctggaggagaagggcactaccgaggaggtctgccgcatctacctgctgcgcatcctgcacacctactacaagtttgattacaaggcccatcagcgacagctgaccccgcctgagggctcctcaaagtctgagcaagaccaggcagaaaatgagggcgaggactcggctgtgttgatggagagactgtgcaagtacatctacgccaaggaccgcacagaccggatccgcacatgtgccatcctctgccacatctaccaccatgctctgcactcgcgctggtaccaggcccgcgacctcatgctcatgagccacttgcaggacaacattcagcatgcagacccgccagtgcagatcctttacaaccgcaccatggtgcagctgggcatctgtgccttccgccaaggcctgaccaaggacgcacacaacgccctgctggacatccagtcgagtggccgagccaaggagcttctgggccagggcctgctgctgcgcagcctgcaggagcgcaaccaggagcaggagaaggtggagcggcgccgtcaggtccccttccacctgcacatcaacctggagctgctggagtgtgtctacctggtgtctgccatgctcctggagatcccctacatggccgcccatgagagcgatgcccgccgacgcatgatcagcaagcagttccaccaccagctgcgcgtgggcgagcgacagcccctgctgggtccccctgagtccatgcgggaacatgtggtcgctgcctccaaggccatgaagatgggtgactggaagacctgtcacagttttatcatcaatgagaagatgaatgggaaagtgtgggaccttttccccgaggctgacaaagtccgcaccatgctggttaggaagatccaggaagagtcactgaggacctacctcttcacctacagcagtgtctatgactccatcagcatggagacgctgtcagacatgtttgagctggatctgcccactgtgcactccatcatcagcaaaatgatcattaatgaggagctgatggcctccctggaccagccaacacagacagtggtgatgcaccgcactgagcccactgcccagcagaacctggctctgcagctggccgagaagctgggcagcctggtggagaacaacgaacgggtgtttgaccacaagcagggcacctacgggggctacttccgagaccagaaggacggctaccgcaaaaacgagggctacatgcgccgcggtggctaccgccagcagcagtctcagacggcctactgagctctccactctgtttcccgcctgggccatccaaccttgaagtcctaaaccacacctcagtcactaaaggtctgtttaaagttgttctggttgattgcttgttgccacaaaggtgtgttgagcccattcatttgctgattatatttctgagctgctaccacatgacagacacaaggctcagatgaagaggtgaattgaacacgttcctgacctcaaagagcctgctgctttttgacattt

SEQ ID NO: 461414 - DNA, 2373 bp, Homo sapiens
ctaccgatggtaattgatttgattgatcttctatgtatatgtattttctctgtaatgtattgtattgaattgacttggtgtacatctatgtgttccacatcttccgattccgactcagaggaggaagaagggaaacaaaccgcgctggcctcaagatttcttaaaaaggcacccaccacagatgaggacaagaaggcagccgagaagaaacgggaggacaaagctaagaagaagcacgacaggaaatccaagcgcctggatgaggaggaggaggacaatgaaggcggggagtgggaaagggtccggggcggagtgccgttggttaaggagaagccaaaaatgtttgccaagggaactgagatcacccatgctgttgttatcaagaaactgaatgagatcctacaggcacgaggcaagaagggaactgatcgtgctgcccagattgagctgctgcaactgctggttcagattgcagcggaaaacaacctgggagagggcgtcattgtcaagatcaagttcaatatcatcgcctctctctatgactacaaccccaacctggcaacctacatgaagccagagatgtgggggaagtgcctggactgcatcaatgagctgatggatatcctgtttgcaaatcccaacatttttgttggagagaatattctggaagagagtgagaacctgcacaacgctgaccagccactgcgtgtccgtggctgcatcctaactctggtggaacgaatggatgaagaatttaccaaaataatgcaaaatactgaccctcactcccaagagtacgtggagcacttgaaggatgaggcccaggtgtgtgccatcatcgagcgtgtgcagcgctacctggaggagaagggcactaccgaggaggtctgccgcatctacctgctgcgcatcctgcacacctactacaagtttgattacaaggcccatcagcgacagctgaccccgcctgagggctcctcaaagtctgagcaagaccaggcagaaaatgagggcgaggactcggctgtgttgatggagagactgtgcaagtacatctacgccaaggaccgcacagaccggatccgcacatgtgccatcctctgccacatctaccaccatgctctgcactcgcgctggtaccaggcccgcgacctcatgctcatgagccacttgcaggacaacattcagcatgcagacccgccagtgcagatcctttacaaccgcaccatggtgcagctgggcatctgtgccttccgccaaggcctgaccaaggacgcacacaacgccctgctggacatccagtcgagtggccgagccaaggagcttctgggccagggcctgctgctgcgcagcctgcaggagcgcaaccaggagcaggagaaggtggagcggcgccgtcaggtccccttccacctgcacatcaacctggagctgctggagtgtgtctacctggtgtctgccatgctcctggagatcccctacatggccgcccatgagagcgatgcccgccgacgcatgatcagcaagcagttccaccaccagctgcgcgtgggcgagcgacagcccctgctgggtccccctgagtccatgcgggaacatgtggtcgctgcctccaaggccatgaagatgggtgactggaagacctgtcacagttttatcatcaatgagaagatgaatgggaaagtgtgggaccttttccccgaggctgacaaagtccgcaccatgctggttaggaagatccaggaagagtcactgaggacctacctcttcacctacagcagtgtctatgactccatcagcatggagacgctgtcagacatgtttgagctggatctgcccactgtgcactccatcatcagcaaaatgatcattaatgaggagctgatggcctccctggaccagccaacacagacagtggtgatgcaccgcactgagcccactgcccagcagaacctggctctgcagctggccgagaagctgggcagcctggtggagaacaacgaacgggtgtttgaccacaagcagggcacctacgggggctacttccgagaccagaaggacggctaccgcaaaaacgagggctacatgcgccgcggtggctaccgccagcagcagtctcagacggcctactgagctctccactctgtttcccgcctgggccatccaaccttgaagtcctaaaccacacctcagtcactaaaggtctgtttaaagttgttctggttgattgcttgttgccacaaaggtgtgttgagcccattcatttgctgattatatttctgagctgctaccacatgacagacacaaggctcagatgaagaggtgaattgaacacgttcctgacctcaaagagcctgctgctttttgacattt

SEQ ID NO: 461415 - DNA, 3342 bp, Homo sapiens
accccccacctccctccacatatacgtatccacatatacgcttgtccccgcccccttgtggcgcgaaggccactgggagttgtagtctcccagtgtagttagtcggcgcttcccggaagtgacgcgaggacccgccttctctctcggcgtttccgctgtcagggcctgcggtgtgactcgcgggctcagctggttggtattttttgggcctcgtgcttcgtggtgggagacccaggtcgaggtccgggtggggccggtgaggggttgggcgtcgggaggtgttggctcgggcctcttcgcgtggccggtgacgccttggctcccccgcaggtccggccgtagcacctccgcgccgtcgccatgtcgcggtttttcaccaccggttcggacagcgagtccgagtcgtccttgtccggggaggagctcgtcaccaaacctgtcggaggcaactatggcaaacagccattgttgctgagcgaggatgaagaagataccaagagagttgtccgcagtgccaaggacaagaggtttgaggagctgaccaaccttatccggaccatccgtaatgccatgaagattcgtgatgtcaccaagtgcctggaagagtttgagctcctgggaaaagcatatgggaaggccaaaagcattgtggacaaagaaggtgtcccccggttctatatccgcatcctggctgacctagaggactatcttaatgagctttgggaagataaggaagggaagaagaagatgaacaagaacaatgccaaggctctgagcaccttgcgtcagaagatccgaaaatacaaccgtgatttcgagtcccatatcacaagctacaagcagaaccccgagcagtctgcggatgaagatgctgagaaaaatgaggaggattcagaaggctcttcagatgaggatgaggatgaggacggagtcagtgctgcaactttcttgaagaagaaatcagaagctccttctggggagagtcgcaagttcctcaaaaagatggatgatgaagatgaggactcagaagattccgaagatgatgaagactgggacacaggttccacatcttccgattccgactcagaggaggaagaagggaaacaaaccgcgctggcctcaagatttcttaaaaaggcacccaccacagatgaggacaagaaggcagccgagaagaaacgggaggacaaagctaagaagaagcacgacaggaaatccaagcgcctggatgaggaggaggaggacaatgaaggcggggagtgggaaagggtccggggcggagtgccgttggttaaggagaagccaaaaatgtttgccaagggaactgagatcacccatgctgttgttatcaagaaactgaatgagatcctacaggcacgaggcaagaagggaactgatcgtgctgcccagattgagctgctgcaactgctggttcagattgcagcggaaaacaacctgggagagggcgtcattgtcaagatcaagttcaatatcatcgcctctctctatgactacaaccccaacctggcaacctacatgaagccagagatgtgggggaagtgcctggactgcatcaatgagctgatggatatcctgtttgcaaatcccaacatttttgttggagagaatattctggaagagagtgagaacctgcacaacgctgaccagccactgcgtgtccgtggctgcatcctaactctggtggaacgaatggatgaagaatttaccaaaataatgcaaaatactgaccctcactcccaagagtacgtggagcacttgaaggatgaggcccaggtgtgtgccatcatcgagcgtgtgcagcgctacctggaggagaagggcactaccgaggaggtctgccgcatctacctgctgcgcatcctgcacacctactacaagtttgattacaaggcccatcagcgacagctgaccccgcctgagggctcctcaaagtctgagcaagaccaggcagaaaatgagggcgaggactcggctgtgttgatggagagactgtgcaagtacatctacgccaaggaccgcacagaccggatccgcacatgtgccatcctctgccacatctaccaccatgctctgcactcgcgctggtaccaggcccgcgacctcatgctcatgagccacttgcaggacaacattcagcatgcagacccgccagtgcagatcctttacaaccgcaccatggtgcagctgggcatctgtgccttccgccaaggcctgaccaaggacgcacacaacgccctgctggacatccagtcgagtggccgagccaaggagcttctgggccagggcctgctgctgcgcagcctgcaggagcgcaaccaggagcaggagaaggtggagcggcgccgtcaggtccccttccacctgcacatcaacctggagctgctggagtgtgtctacctggtgtctgccatgctcctggagatcccctacatggccgcccatgagagcgatgcccgccgacgcatgatcagcaagcagttccaccaccagctgcgcgtgggcgagcgacagcccctgctgggtccccctgagtccatgcgggaacatgtggtcgctgcctccaaggccatgaagatgggtgactggaagacctgtcacagttttatcatcaatgagaagatgaatgggaaagtgtgggaccttttccccgaggctgacaaagtccgcaccatgctggttaggaagatccaggaagagtcactgaggacctacctcttcacctacagcagtgtctatgactccatcagcatggagacgctgtcagacatgtttgagctggatctgcccactgtgcactccatcatcagcaaaatgatcattaatgaggagctgatggcctccctggaccagccaacacagacagtggtgatgcaccgcactgagcccactgcccagcagaacctggctctgcagctggccgagaagctgggcagcctggtggagaacaacgaacgggtgtttgaccacaagcagggcacctacgggggctacttccgagaccagaaggacggctaccgcaaaaacgagggctacatgcgccgcggtggctaccgccagcagcagtctcagacggcctactgagctctccactctgtttcccgcctgggccatccaaccttgaagtcctaaaccacacctcagtcactaaaggtctgtttaaagttgttctggttgattgcttgttgccacaaaggtgtgttgagcccattcatttgctgattatatttctgagctgctaccacatgacagacacaaggctcagatgaagaggtgaattgaacacgttcctgacctcaaagagcctgctgctttttgacattt

SEQ ID NO: 461416 - DNA, 2698 bp, Homo sapiens
  misc_feature (186)..(186): n is a, c, g, or t
  misc_feature (188)..(188): n is a, c, g, or t
gaatcgagttggtaccgtaacattcgtgtcaccccagacagtccatcccccagacgagccacaaagaaggacgtgcagttgtacttgaactggagagcaagaagtggagagtggaaaatcaggaaaatgtttccaacctggtgattgaggacacgaatgttcatgaacattcgtgtcccatatcanangctacaagcagaaccccgagcagtctgcggatgaagatgctgagaaaaatgaggaggattcagaaggctcttcagatgaggatgaggatgaggacggagtcagtgctgcaactttcttgaagaagaaatcagaagctccttctggggagagtcgcaagttcctcaaaaagatggatgatgaagatgaggactcagaagattccgaagatgatgaagactgggacacaggttccacatcttccgattccgactcagaggaggaagaagggaaacaaaccgcgctggcctcaagatttcttaaaaaggcacccaccacagatgaggacaagaaggcagccgagaagaaacgggaggacaaagctaagaagaagcacgacaggaaatccaagcgcctggatgaggaggaggaggacaatgaaggcggggagtgggaaagggtccggggcggagtgccgttggttaaggagaagccaaaaatgtttgccaagggaactgagatcacccatgctgttgttatcaagaaactgaatgagatcctacaggcacgaggcaagaagggaactgatcgtgctgcccagattgagctgctgcaactgctggttcagattgcagcggaaaacaacctgggagagggcgtcattgtcaagatcaagttcaatatcatcgcctctctctatgactacaaccccaacctggcaacctacatgaagccagagatgtgggggaagtgcctggactgcatcaatgagctgatggatatcctgtttgcaaatcccaacatttttgttggagagaatattctggaagagagtgagaacctgcacaacgctgaccagccactgcgtgtccgtggctgcatcctaactctggtggaacgaatggatgaagaatttaccaaaataatgcaaaatactgaccctcactcccaagagtacgtggagcacttgaaggatgaggcccaggtgtgtgccatcatcgagcgtgtgcagcgctacctggaggagaagggcactaccgaggaggtctgccgcatctacctgctgcgcatcctgcacacctactacaagtttgattacaaggcccatcagcgacagctgaccccgcctgagggctcctcaaagtctgagcaagaccaggcagaaaatgagggcgaggactcggctgtgttgatggagagactgtgcaagtacatctacgccaaggaccgcacagaccggatccgcacatgtgccatcctctgccacatctaccaccatgctctgcactcgcgctggtaccaggcccgcgacctcatgctcatgagccacttgcaggacaacattcagcatgcagacccgccagtgcagatcctttacaaccgcaccatggtgcagctgggcatctgtgccttccgccaaggcctgaccaaggacgcacacaacgccctgctggacatccagtcgagtggccgagccaaggagcttctgggccagggcctgctgctgcgcagcctgcaggagcgcaaccaggagcaggagaaggtggagcggcgccgtcaggtccccttccacctgcacatcaacctggagctgctggagtgtgtctacctggtgtctgccatgctcctggagatcccctacatggccgcccatgagagcgatgcccgccgacgcatgatcagcaagcagttccaccaccagctgcgcgtgggcgagcgacagcccctgctgggtccccctgagtccatgcgggaacatgtggtcgctgcctccaaggccatgaagatgggtgactggaagacctgtcacagttttatcatcaatgagaagatgaatgggaaagtgtgggaccttttccccgaggctgacaaagtccgcaccatgctggttaggaagatccaggaagagtcactgaggacctacctcttcacctacagcagtgtctatgactccatcagcatggagacgctgtcagacatgtttgagctggatctgcccactgtgcactccatcatcagcaaaatgatcattaatgaggagctgatggcctccctggaccagccaacacagacagtggtgatgcaccgcactgagcccactgcccagcagaacctggctctgcagctggccgagaagctgggcagcctggtggagaacaacgaacgggtgtttgaccacaagcagggcacctacgggggctacttccgagaccagaaggacggctaccgcaaaaacgagggctacatgcgccgcggtggctaccgccagcagcagtctcagacggcctactgagctctccactctgtttcccgcctgggccatccaaccttgaagtcctaaaccacacctcagtcactaaaggtctgtttaaagttgttctggttgattgcttgttgccacaaaggtgtgttgagcccattcatttgctgattatatttctgagctgctaccacatgacagacacaaggctcagatgaagaggtgaattgaacacgttcctgacctcaaagagcctgctgctttttgacattt

SEQ ID NO: 461417 - DNA, 2719 bp, Homo sapiens
ggcactcaggctcctggaggctggtacagggcatcactccctgttccgcactcaacattgccctttcctgctgtggcgtttgtcacatgccaggcctcggggctcccgggccggtgactaactgtggcttctcctctccagtatggaatgctcctttaccagaattaccgaatccctcagcaggtgaaatgggaaagtccatttcacctgctacaagcagaaccccgagcagtctgcggatgaagatgctgagaaaaatgaggaggattcagaaggctcttcagatgaggatgaggatgaggacggagtcagtgctgcaactttcttgaagaagaaatcagaagctccttctggggagagtcgcaagttcctcaaaaagatggatgatgaagatgaggactcagaagattccgaagatgatgaagactgggacacaggttccacatcttccgattccgactcagaggaggaagaagggaaacaaaccgcgctggcctcaagatttcttaaaaaggcacccaccacagatgaggacaagaaggcagccgagaagaaacgggaggacaaagctaagaagaagcacgacaggaaatccaagcgcctggatgaggaggaggaggacaatgaaggcggggagtgggaaagggtccggggcggagtgccgttggttaaggagaagccaaaaatgtttgccaagggaactgagatcacccatgctgttgttatcaagaaactgaatgagatcctacaggcacgaggcaagaagggaactgatcgtgctgcccagattgagctgctgcaactgctggttcagattgcagcggaaaacaacctgggagagggcgtcattgtcaagatcaagttcaatatcatcgcctctctctatgactacaaccccaacctggcaacctacatgaagccagagatgtgggggaagtgcctggactgcatcaatgagctgatggatatcctgtttgcaaatcccaacatttttgttggagagaatattctggaagagagtgagaacctgcacaacgctgaccagccactgcgtgtccgtggctgcatcctaactctggtggaacgaatggatgaagaatttaccaaaataatgcaaaatactgaccctcactcccaagagtacgtggagcacttgaaggatgaggcccaggtgtgtgccatcatcgagcgtgtgcagcgctacctggaggagaagggcactaccgaggaggtctgccgcatctacctgctgcgcatcctgcacacctactacaagtttgattacaaggcccatcagcgacagctgaccccgcctgagggctcctcaaagtctgagcaagaccaggcagaaaatgagggcgaggactcggctgtgttgatggagagactgtgcaagtacatctacgccaaggaccgcacagaccggatccgcacatgtgccatcctctgccacatctaccaccatgctctgcactcgcgctggtaccaggcccgcgacctcatgctcatgagccacttgcaggacaacattcagcatgcagacccgccagtgcagatcctttacaaccgcaccatggtgcagctgggcatctgtgccttccgccaaggcctgaccaaggacgcacacaacgccctgctggacatccagtcgagtggccgagccaaggagcttctgggccagggcctgctgctgcgcagcctgcaggagcgcaaccaggagcaggagaaggtggagcggcgccgtcaggtccccttccacctgcacatcaacctggagctgctggagtgtgtctacctggtgtctgccatgctcctggagatcccctacatggccgcccatgagagcgatgcccgccgacgcatgatcagcaagcagttccaccaccagctgcgcgtgggcgagcgacagcccctgctgggtccccctgagtccatgcgggaacatgtggtcgctgcctccaaggccatgaagatgggtgactggaagacctgtcacagttttatcatcaatgagaagatgaatgggaaagtgtgggaccttttccccgaggctgacaaagtccgcaccatgctggttaggaagatccaggaagagtcactgaggacctacctcttcacctacagcagtgtctatgactccatcagcatggagacgctgtcagacatgtttgagctggatctgcccactgtgcactccatcatcagcaaaatgatcattaatgaggagctgatggcctccctggaccagccaacacagacagtggtgatgcaccgcactgagcccactgcccagcagaacctggctctgcagctggccgagaagctgggcagcctggtggagaacaacgaacgggtgtttgaccacaagcagggcacctacgggggctacttccgagaccagaaggacggctaccgcaaaaacgagggctacatgcgccgcggtggctaccgccagcagcagtctcagacggcctactgagctctccactctgtttcccgcctgggccatccaaccttgaagtcctaaaccacacctcagtcactaaaggtctgtttaaagttgttctggttgattgcttgttgccacaaaggtgtgttgagcccattcatttgctgattatatttctgagctgctaccacatgacagacacaaggctcagatgaagaggtgaattgaacacgttcctgacctcaaagagcctgctgctttttgacattt

SEQ ID NO: 461418 - DNA, 886 bp, Homo sapiens
aggaggacctcaaagctccctctggccagagacccaacagacactgggaattttggctttaagaatatgctggacacccgagtggagggagatgtggatgtaccaaagacggtgaaggtgaagggaacggcagggctctcgcagaacagcactctggaggtccagacactcagtgtggctcccaaggccctggagaccgtgcaggagaggaagctggcagcagaccacccattcctgaaggagatgcaagatcaaggggagaacctgtatgtggtgaatggaggtggtggagacggtgcaggagacaagggacatgaagtgaccctggaggcactcccaaaagatgtcctgctatcaaaggagaccgtgggcgccatcctctatttcgttggagccctaacagagctaagtgaagcccaacagaagctgctggtgaaatccatggagaaaaagatcctacccgtggagagcacgatggaacagaacttcctgctggataaagagggtgttttccccctgcaacctgagctgctctcctcccttggggacgaggagctgaccctcacggaggctctagtcgggctgagtggcctggaagtgcagagatcgggcccccaatatatgtggcacccagacaccctccctcgcctctgtgctctttatgcaggcctctctctccttcagcagcttaccaaggcctcctaatttgccttttacgtctgcttcatgactccctaatgccttcccaacctcgtggtgctgtgtccttaccacctaagggcatttcagagccatcagctgaagacatctgaaatctcagctggtcacccatgataaccaacttccacctgcccaaccatatatcaccccctacccctccacgtcc

SEQ ID NO: 461419 - DNA, 2028 bp, Homo sapiens
ttcacacaaccattcacaacccatggtctggaagctctctaacctaggatgtgttgcgggtgctggaaagttttaccagcaggagactgcatatgactattatctagacacaaatatgccactccctcctgtcaggtcttcccaaggtctgaggccctcaaccctttgctttttgaatgcagctgacttttcagacacattcacagcattttcatccaccctctgtcatgcacagtccaccacaatcctacactcaaaggagcacactcacctcttagggacccagtcgttagctcacagatgtagcaaatctgaggaggagctgactggcctccttacggctgggttgctgtcgtgctggttgaaatgtttgcactgggccggcggggagtggggcctttcaggactccctcattgtcctctggtgctctacagactcccatgggcagtgtgggaggcactgcccaagcggccctgggaacacctgcaagctccttcacagcctgaactgctcatcaactgctcagacctcctcaaagcataacttagttctagatactctggagtgttaaactaatactgtttttctttcctgaggagcaacgtggatgaacagaggctagattccagagcccagagacgttaatggatgtgcaggagatggagaaatagaatctacaaggaaagtgaaacgaacaagcttggaaagcaggaacgcttcaagaatttgatgtacagcaagatggttatttatcaaaaagagaaaagggcaagaaaaagttggggaagccaagttcaaatgtgctttatttatttggttattccttggtaataaattcatagcaataacccgtggtgtgttgataaatgtttggcaaacagctgtccaggaaaataaagaagccctgattagcagcagtcgccaatttctatggtgtaactgatcacatcatggctgttttccagctaccaagatgatacccctcactgaagagggttaagacatgatgtgcacaactagcttttgtgagctggtcaaagctgtctccagcataccctgaaataactagtatttatcatgattgcatgtcgcagggcaggattttgcagggtggaccctgagtctatgatttggatgcacttgatttattaagggcatgtttccatggggtcttgtgaggcagggagagaacaggacagagatgggaaggcaggcaggcaggggagtgatgccgaaggttgcttcctttgggagacttgggaggacaaactatgcctctgggttttcccaggtcttgcacagaaagttcttcaggatgtcacctattctggttgggagccctagcggtgtgctctaaagagctaacgtttatcttaactgttttgaattcagctcagtaggagatctcactgaaggaacaggcaaacagcgcaacttcctctgataaggctggagtgcagtggcgtgatctcggctcgctaaaacctccacctcccagccgcctgccttggcctcccaaagtgcccagattgcagcctctgcccggccgccatcccgtctgggaagtgaggagcgtctctgcctggccgcccatcgtctgggacgtgaggagcccctctgcccggccgcccagtctgggaagtgaggagcacctcttcccggccgccatcccgtctaggaagtgaggagcgtctctgcccggctgcccatcgtctgagatgtggggagcacctctgccccgccaccccgtctgggatgtgaggagtgcctctgcccggccgccccgtctgggatgtgaggagtgcctctgcccaactgccaccccgtctgggaggtgaggagtgtctctgcccggccaccctgtcccagaagtgaggagcccctccgcccagcagccaccccgtctgggaagtgaggagcgtctctgcctggtcacccatcgtctgggaagtgaggagcgtctccgcccggcagccgccccgtccaggaggtggggggcagccctcgcccggccagctgccccatcc

SEQ ID NO: 461420 - DNA, 2024 bp, Homo sapiens
ctgggcccaggtggaaggtgagtgcggtgcccgcactgtggtcatcctagatgtgtatgtttagcatgacattcttcagcagactggcagaaaagcgtctggaggaaggagtgcctttgctgattcttacaagggtatcctatggcctagcaccggtgctgcaggtgctccaggcagggcagctagagcagggtgtggcccgggcttgggtcccacctgaggagcacagcccagacactgtccgaggcctagaggctgccctgcagtaccagccacggagctgggccatccagggtttctccgtggaactgggcaagccggggctgctgcgggataccgtggaaggagtgggcaatccctgtcctgtaccctggcatgggggcggcctcctcatccctgggcaggtacaggccacagtagctgccgggcagcagccagagtgtgagccccagagctggcttcctggaggaggcagacgtgcagagagagaagcaacgctccgaggtggaggggtgcaggagttcttcctgtggtacctcccacccttaggaagcagaacgcattggctccgtttcacagatgccaccactgaggcttggagggggcagatccctctttgatcatgtttttgtgacctttgtaaaaggcaatttaaattctaattgtccttcccaccctttctgagcctcaaagatatctataagacaaggatgaaaattatgataatgttatatattatcctcttgtaaggattatgtaatatgtgtaaagtccccagagcagggcctgcttcattttctgtgtctataaaatggcgcaaaaaaaccttgctcttggacacgtttatcagcagttgtctacgtgcaatgtcgggggcgggggcgcttgttaagacaataagaaataaaggagaaaaacgtgatcaaaggaagtcacattcaccttgcatttagcgggggatttgtacccctcttttccaggccagcaaaccaaggctcagagagagctgggggtaaaactcaccccttgcccgagcaattgaggctccatcccaccagccagttagctccctgtccctgccacacagccacagcctagccagttccctttctgcctgcaactaccattgttgtgcaagaaaccaccccaaaatatagtggcacaaaacactgaccattttcttctgttcatggagtctgcggggctccagtcccctgggcatgctgccatccacttccaggtgtttgcacaagctgctccctagaattggaacacctctcatggccctcacctggagagggtctgttcctcctcacagcgccatccagtagacttttctggacaatggaaatgttccatttctgcactattcgacatgctgtccactagccaattgaaatgtggccagacaccaccatacctcctgctctgtctgggatggggtcttccacccaaccatgccagggtctgagagaggaaacaagccagtttcctgccctcaaggagttcccacctttctgttctgtcctcagttccctacgatctccttaaaaagcagaaccttagaattacgcactggacaaattcttagaggcctgatccaatttcccattgcacagagagagagactgaggtctggggaatgaactggacttagccacacagaacaggggaaaagagcctcaagccctccatcctcagtctgggattctggacaccacatccccccaccgcctaccccgactccctctacccccatttcctgtacctggctgccacactggtgctccctgactccctcttgggcacagactggtgactaaccaccctcagctgtgcccacggtgttcaaggaggactcgtatttaagaaatgaggggagacttcacccctttgccaggcagtcaacagttccccccacagggatgtaataattaccaagccaggcagcagaactttccctggagcctcgcccaacaattctcttgctcatatctcattggccacccctggctgcaggggtc

SEQ ID NO: 461421 - DNA, 914 bp, Homo sapiens
acgaggaagtggctcagatgattataaagcctgacaagcccccaagatctgcagttcacaaggaggctgatggtgtaaatccagttcaaattcaaagtcctgggcatgagaagagctatttttttagttccagtctaaagacagggaaaatgaaaattcctccttactcaggggaaggtgagcctttttgttctattcaggccttcaacagattggatcaaatctctatctcagtccaccaactcagtcaacccagaaacaccctctcagacacagccagaatgttgtaccaaatatgtgagcatctcgcaaatctcagagatattgccagctcagttccaggccacagcaacaaagcaaatattgcaataaaaatgaatgttgtgttagcaggcatgaaaacaatattaatctctttgaacatctccatcgaacttcttgggtgaccaggtgcattgccaataagcagtaatattttgagaggaatcttcatttctgggcatcgagtcccaatagtgggcttaaaatactcagcaaaccatgctgactatagaaaagtgacttgaaacagacatatgaaaatcacttgcacattgtgattacttacttcctcttgatgctcttggagccctacaactctgtgaagaagcccaagcaagcctgctggataacaaagggcatatggtccagatggctttgttgccctgatcaacagccaactagacactagacacatggaaaagacttcctggattatccaaccaccagccaacctaaaagcagactaaggatgcttgaaagagctccacagagattagctgagctcatgcagataagaactgcctagctgacccaaatcatagactaaataaagtgttgttgtttgaggccattaacttttggggtcatttgtt

SEQ ID NO: 461422 - DNA, 1662 bp, Homo sapiens
cagccccggctctgacccgccagccctcggaagaagcagaccctggccggtccatggcagtggcccgaggggcaccagcgcggagcaccagcgacccccaaggaacgacgttgcagatgatgctctaccaagagttggaaggactccccagggaatcccacaagacactgcgcttcctatgcctcctttccctcgtttaaaaaatggggataagaaggttggctactgctccgacagccctcacaatggaagagtagcacttcatttgtgggttaacaaagggcaacgctgaaatctccacttccactattgaatggaactgtgtcataatatctgttagaggcgtgcaaactcggccacaaggtcatggtcatacgttattgttggtcaaaagccgcagccctacctgaggctttgagagatatgaacaccaatgacttttcttttcctgactcccgaaataccaagaaaaagcaacttccccaaatggacagaaacagaaagtacccttggttgaacacagaggcctggttccagccatcgttagacgtgggaaggaactcagaccccctctcctacctcatccccaaccccttccccacacgtcaccctttcacagagaaggaaccagagccaccaagggctgagagaggacttgataaggattccagtcttctgtctcccctgtccccactttttccaccacaaaaatatggacatttggaagaagaggagaagagggaaggtacacactgtgcaaaggaagaaaatggcagaaatgctctggaatcaggaattcaggagcaagaatgacactgtgtgccagatggaaatgttggattaggagagcacttggaaaggcaaataatctgccagagaaattatgggatgcctgccttctgaaaatggaggaaaactgcaaaagagtggctcattggtgctcactcctagggctctgagcatcccaagaagccaacttggtcccatcgtacatcccctcagaagtaggcattctcctctccacctacagctgtggcccagatgtggagcctgcatgttatgccacgccgtcaacactgagttctgtctgcgtctccctgtcacagatctgatcagcacctgacacctatccattctccatttcccacctccccaaagctgctggaaaaactctgaaaggtgggagcatgcaccagtgaaacctgagttctttctgttcacatgaggtaatcttcccactggctggaagacacttcatttatacaaacagcgattactgtaaaagtgtattcatgttgttcatcacatgaataggacatgggagaaaaactatataattatcctgagaaaatgccccctaatgcaaattctctgtggttaggaataaaaggagactttgtcaacatgataaatgatatctatctcaatccagcagacaatgtgatagctaatgatgacttggaatgaagggacagatacggtccttaataacagaagaattcctataaaacaagggtgcccacaacttgaatagtttcaacaatattgtgaaattcaaagcaaaaagataagagagtcagaaatttgggaagcaaaagtcaagttcatcattatttgtaagtgatatgattgtctacctgagaaaccttagataagggactg

SEQ ID NO: 461423 - DNA, 1619 bp, Homo sapiens
  misc_feature (2)..(3): n is a, c, g, or t
  misc_feature (6)..(7): n is a, c, g, or t
  misc_feature (9)..(9): n is a, c, g, or t
  misc_feature (13)..(13): n is a, c, g, or t
  misc_feature (15)..(16): n is a, c, g, or t
gnnatnncnttantnnaggattttaaacaagctgcactgataagccggactaacgggagcctttgtcacgccactgccatgtgccatcacagaattaatgagtttgaagaagctgtcaatttctttacttgggctcttaaaattaacccatgttttctggatgcttatgttggacggggaaattcttacatggaatacggtcatgatgaagccaccaagcaagcacagaaagactttctgaaagcactgcatattaatccagcatacataaaagccagaattagttttggctataatttgcaggcccaaggaaaattccagaaagcttggaaccactttaccattgccatagatactgatccaaagaactacctagcctatgaaggaagagctgtggtctgtcttcagatgggtaataattttgctgcaatgcaggatattaatgctgccatgaagatcagtactacagcagaattcttaacaaatcgtggggtgattcatgagtttatgggccacaaacagaatgcaatgaaagactaccaagatgcaattactctaaaccccaagtactcgctggcttactttaatgcaggaaatatctactttcaccacaggcagttttcccaggccagtgactacttctcaaaagctttaaaatttgatccagaaaatgaatatgttctcatgaatcgagctattacaaatacaatattaaagaaatatgaagaagcaaaagaagattttgcaaatgtaattgaaagctgtcccttttgggctgcagtatattttaatagagcacatttctactactgcttaaagcaatatgaactagctgaggaagaccttaataaagccctgtctttgaagcctaatgatgctctagtatataattttagagcaaaagttcgtggtaaaataggtctgattgaggaagctatggctgactataaccaagcacttgatcttgaagactatgcctcagttatatgattacatagactgtggttgctatagtagtttacacagctgttctctctgaaacggaaacatatttgttgtctaaaaggttctaccattttcattattgtattcgttatgcttagtcttccatataaccttctatgcattttaataaaatgtttgttatacattaattataaaacatatatcatttgctgcatatttggaataccttgagaactgaatttttccaaggttgcagaatctcaaggaaaatgtttcttaaggaattaaataggaatgtctcttaacatttaaaatattttctttaattctttttgaaataatactatacattgtagaaaaagtgtcactgaccttttcatcaatccttgctgacaatgtattaaacagtatacagattaaaaaataaaccgatgactataaaaaactgaactcaaaggttctggaattccagacctaggcatcccctgacaaaatcagatggggtgtattgactgggaaccaattttcatttggggttgggcaggcttaacaagtggctagttcccttctctgtcagctgtaacactggcacatgaacacagaagatttaaaggggtctatacctcacagtactataaccttgaatgtgaagg

SEQ ID NO: 461424 - DNA, 1150 bp, Homo sapiens
  misc_feature (2)..(3): n is a, c, g, or t
  misc_feature (6)..(7): n is a, c, g, or t
  misc_feature (9)..(9): n is a, c, g, or t
  misc_feature (13)..(13): n is a, c, g, or t
  misc_feature (15)..(16): n is a, c, g, or t
gnnatnncnttantnnaggattttaaacaagctgcactgataagccggactaacgggagcctttgtcacgccactgccatgtgccatcacagaattaatgagtttgaagaagctgtcaatttctttacttgggctcttaaaattaacccatgttttctggatgcttatgttggacggggaaattcttacatggaatacggtcatgatgaagccaccaagcaagcacagaaagactttctgaaagcactgcatattaatccagcatacataaaagccagaattagttttggctataatttgcaggcccaaggaaaattccagaaagcttggaaccactttaccattgccatagatactgatccaaagaactacctagcctatgaaggaagagctgtggtctgtcttcagatgggtaataattttgctgcaatgcaggatattaatgctgccatgaagatcagtactacagcagaattcttaacaaatcgtggggtgattcatgagtttatgggccacaaacagaatgcaatgaaagactaccaagatgcaattactctaaaccccaagtactcgctggcttactttaatgcaggaaatatctactttcaccacaggcagttttcccaggccagtgactacttctcaaaagctttaaaatttgatccagaaaatgaatatgttctcatgaatcgagctattacaaatacaatattaaagaaatatgaagaagcaaaagaagattttgcaaatgtaattgaaagctgtcccttttgggctgcagtatattttaatagagcacatttctactactgcttaaagcaatatgaactagctgaggaagaccttaataaagccctgtctttgaagcctaatgatgctctagtatataattttagagcaaaagttcgtggtaaaataggtctgattgaggaagctatggctgactataaccaagcacttgatcttgaagactatgcctcagttatatgattacatagactgtggttgctatagtagtttacacagctgttctctctgaaacggaaacatatttgttgtctaaaaggttctaccattttcattattgtattcgttatgcttagtcttccatataaccttctatgcattttaataaaatgtttgttataca

SEQ ID NO: 461425 - DNA, 1197 bp, Homo sapiens
ttctcccgtgcgcgggagaatgtcgctgggcagggcgtgactctaaactcaagccgcacgaggcttctcagaggttcctctcaccacaaagccccatcacagtacagaaggctttttgcaaaacagtgatttctcagcttttccgaagaggttcctaaatgtggctgtaaccctgacgtgagagtcgctcccgcccctacctacatcccacacatttcaggagtcccctacgtattctacaaaacacagaacgaccatatgagccacttcagtccttctcagcattaggtgactgatttacatcagaataaaacaagagtttcttgctggttttaatgtaattaaaatgcaccatccctgtatgttcccaaaggagtgggaggaaaagtgtttggacaggggactgatcgtcagtaggttttcacagcgtggtttataaaatcacttttaagctctcttccacctagctgtcactgagaattcggtttgagaggaaatgactttctagacgatttttcatctagatgatttttcatcatattcaaccaagagtctttctcatcctctagctctctgaatgtccagaaatgtaatagaaactctgcattgatttccaaaggtctaatttccggaggagccctaactgtcctgtcctgcctacattgcctgccctctaacatcctgggaatgggaagtaacactgggatcggtggcggcagaactgcggaccctaacaacttcagattgttgaaagggggaggggagaatggaagagaggaatggaaaggcaaaagaaaaaacatttgtctcggtgcaccccgtcgcacgctttgcacactcattaaaacgattattcacgacctgtcgagtgttttcgggttcattcacaggaaaggcttggaacgagggacagcaattcaagtcaacactgtccactacccctatgcacgtgaggacgagttgctgcgtgcctataagtcccgttcatccgatgctctggaatctcaatctcgacagaatgccaagaatgcttggtcctacaaggaccacgtcgtcgctacgttaacttcaagggcttggcacaagacaaaaaaaaaaaaaggaaaataaaataaataaactcaaaactctccctctgctcctcttttcaaccttctgcaaaactttttaagtcccaggactcgcccaccttctgtc

SEQ ID NO: 461426 - DNA, 1822 bp, Homo sapiens
acccggattgcgggaggaagggggtgacatttcaagatgatgtgagaggacgttttgtttggttgctgagcaacccagaatgcctctcacctcagtgcgcagggaacaatggtttttcagctcagggcttgagaagggcaaagagggaatccaaaagcagaaatatgggcaacccttcagaatgggccattgttcagctgggagcagaaagggatttgcaacagacaaaaagagaagtgtgacagccaaaaaagtgtctccagatattgctaaatgtcccctaaaggaaaaagagtctccgtgttcattcccaatgagaaaagaggactcagctgtctcccagcagcaaaagaccctctgtttctctggtttgctttcatttgtcattgaatttgggtcaccagcttatgcacatgccattattgaacgagggttcaagacaatggcttatgtgccagttcctctaactggttcagaaaggagaagaggagaaaaatcctcaaatgaaaacaagagctggtactggaagaaggtggaatcatttttggaaggtcaaacaacagaagcctgcttctctaacctagaatatatttataaaaaaagttcttagagacttaataatgggatggccacattttataaatgaagacatcaggtctcaaggatcttgagagaagcaacaactatagtttgtagcagagaccaaacactaaccaaaatttagctaccaagttttagatgacggaatccaaatttccaatattcaatgagtgatgacatttatactggactcaaagaaaagtgaaaacattttcttacacattcctaggatcattttgttttatacctgttgtttatttttaaatcttacttgatcaaaaagcaacctgtggtgcttgcaagaaaaacagattctcaagttactctcccatcgattaaaacttacaatgccaggggtatggtgaagaaatctgttattctgttatttagctagtttgtggaacaatgcatatgtcagcagttcacggcctcaggtgaatattaaaattacctggggagctgacgatgactggtctctcaactcagatcaattaaatcagaaccacctggaaacaggacttggattttttttttttccctctccttttttaaattctcaggtgattccaatatgcagccaagtttgagaacaagcatcttgtgtcatagagcagtggttctggagaactcgatataataaatacaggagcttagttcctaccctacttcactgcttttgctgctaataaatcctgcctgtgatatcacaatgcattgtagcagctggctcagagtcaagacatcaacacatgaatcagacaggatgagaggaggataaggctaaagacagaggctccagctaccttggtgacaaggaatggaggagaaaaggaacaggaaattttaataagattaggagggcttgcttttctgccaagtgagccgctttcacaggagcgataaattggaaatgttatctggcttgatatgccagtttttctgagaaaatcactctgccagtggtgacagaatggaagagctgaaaacatcttcttttttcaaagtcatatgtcacgaaccaaggagactccaaaaaataaattatggaagattatgaccactgctgccaaggatacagtgaaataggctgcatttgtaaccaagccgtggtccttttcattgcatcttgccagaatgaagaagagctgatctctccagttcctgttattccccttacattgcccacatttattgctcaataaaccacagaaatccttctgta

SEQ ID NO: 461427 - DNA, 3604 bp, Homo sapiens
acccggattgcgggaggaagggggtgacatttcaagatgatgtgagaggacgttttgtttggttgctgagcaacccagaatgcctctcacctcagtgcgcagggaacaatggtttttcagctcagggcttgagaagggcaaagagggaatccaaaagcagaaatatgggcaacccttcagaatgggccattgttcagctgggagcagaaagggatttgcaacagacaaaaagagaagtgtgacagccaaaaaagtgtctccagatattgctaaatgtcccctaaaggaaaaagagtctccgtgttcattcccaatgagaaaagaggactcagctgtctcccagcagcaaaagaccctctgtttctctggtttgctttcatttgtcattgaatttgggtcaccagcttatgcacatgccattattgaacgagggttcaagacaatggcttatgtgccagttcctctaactggttcagaaaggagaagaggagaaaaatcctcaaatgaaaacaagagctggtactggaagaaggtggaatcatttttggaaggtcaaacaacagaagcctgcttctctaacctagaatatatttataaaaaaagttcttagagacttaataatgggatggccacattttataaatgaagacatcaggtctcaaggatcttgagagaagcaacaactatagtttgtagcagagaccaaacactaaccaaaatttagctaccaagttttagatgacggaatccaaatttccaatattcaatgagtgatgacatttatactggactcaaagaaaagtgaaaacattttcttacacattcctaggatcattttgttttatacctgttgtttatttttaaatcttacttgatcaaaaagcaacctgtggtgcttgcaagaaaaacagattctcaagttactctcccatcgattaaaacttacaatgccaggggtatggtgaagaaatctgttattctgttatttagctagtttgtggaacaatgcatatgtcagcagttcacggcctcaggtgaatattaaaattacctggggagctgacgatgactggtctctcaactcagatcaattaaatcagaaccacctggaaacaggacttggattttttttttttccctctccttttttaaattctcaggtgattccaatatgcagccaagtttgagaacaagcatcttgtgtcatagagcagtggttctggagaactcgatataataaatacaggagcttagttcctaccctacttcactgcttttgctgctaataaatcctgcctgtgatatcacaatgcattgtagcagctggctcagagtcaagacatcaacacatgaatcagacaggatgagaggaggataaggctaaagacagaggctccagctaccttggtgacaaggaatggaggagaaaaggaacaggaaattttaataagattaggagggcttgcttttctgccaagtgagccgctttcacaggagcgataaattggaaatgttatctggcttgatatgccagtttttctgagaaaatcactctgccagtggtgacagaatggaagagctgaaaacatcttcttttttcaaagtcatatgtcacgaaccaaggagactccaaaaaataaattatggaagattatgaccactgctgccaaggatacagtgaaataggtacatcttgtatgcccagtaatgttgaaaattaatataaccttatttaaaaagcaatttggagatgttgaaagaaagcctgaagattaccaccatgcttcatgattctatccaggtgtcccacatatgagagccaattccaaagaaataactacaacttggaaaaaactatatgcataaagatgttcattatggtgttagctatagcagcaaaacaaaaaaaaaaaacacagaaaatgtttgcaagaattcccaaatagaaaattattaagtcagctatgacattttcccagtaggatattctgcagcacttaatatgaaagtcactaagtttacatggaaaaatacctgaagcataatcttaagttaaaataaatctaaatatacttatatgctatagttgcactttttaaaaaatatgacagacagcatgaaatatccagaataggcaaattcatagagaccaaaagacaggcatagtggttgccacaggctggaggaagaaaagaatgtggagtgactgctaatgcataaaatgggtttccttttggggtgataaaaatgttccagaacaagatatgggtgatggttgcacaacattgtaataatataataataacttgtagctaatggaataccataagaaaagaaaataagaggtatacagatgggaaggaagaaataaattatctttgtttgcagattatattattgcctatgtagaaaatcccaaagaactggacaaaaaaatccagaactaataaattattatggcaaaatcaaagaatgtaaggtcattatacaaacatcaatttgcccccaatatggtagcaatgaacaactgaagtttgaaattaaaagtaagatataatttgcatcagcaccaaaaaaagatctcacaaaatgtgtgtaggatctatatgagaaaaactataaaactctgatggatgacatcaaagatcatttaaataaagaggtgttcattttccttgatagaaagacttgatatagttaagatatcaattcctcacaactttacaatctgtagactcagcacaattactaccaaaatatcaccaagttattttgtgaatattgacaatttgattctaaagtttatatagaaaggcaaaagaaacaactatataactcaagactgaagaataaaaaagtcagagaactaatgctatcggatattaagacttaccacaaaatgacaacaatcatgttaacaaggtattggtgaaagaatagatgaatgataaatggaagagaatagagtacccagatgtagacccacacaaatatagccaactaatctttgacaaatgagcaacaataagacaatggagaaaggatagtcttttcaagaaatggtactgaaacttctggactttggtatgcaaaaaaaagagaatcttttataaaaattagctcaaaatagatgttacacataaattgcaaaattacaaaacttctataaggtaatgtaggagaaacctgaggtgaccttgggtttggtggtgagtttttagattcaacatcaaaagcacactcagtaacagaaacacaatacaagtcatgtatctgttaaagaacttttatccaaaatgtacaaagaactcttaaaactcaacagtaagaaaacaaataacctgattaaaaatgaacaaaagatttgaaagacacctgaaaaacatatacagagagcaaataagcacacaaaaagatgctcagtcccatatgtcattagcctttagaggttctctcagcaagcatctctttggtagtaaattctcctagtcttttcatggtctttaatagaattttttggggtaatttttgcctgtgtgcttgctttcagcaggagttggtattaacagcagtcgtgcacgtgcctaggtttaggaggactcct

SEQ ID NO: 461428 - DNA, 1274 bp, Homo sapiens
cccaccccaatacacatccaaacccaaacagtagctgaagagtaacttcaaccatagactctctttccaggcccacgctcccaccggtgagtgcatgtagtcatctgggcacctaccgtgtgctccttggatcccaggatgagcagtgaagaaaggatggcgggggatgaaagagatcccctcccaccctcatcccactctcaaggctctagctggaaggcagaggcaacactgcagatgaagttctgaaagtgagatggtgggcaggtaaaggagctgccagccccatggtgccatggctgtggggttttaagcagcacccaccgagtcagccagaaacctctgattccacctagaaaaataagggaagagttacaccaggaagcaagataatgaaactcatcttgaagcttaaacgtggacggagtggttcctcagtgccagacagctccccgcaagcacataggagtttaatagctgtttattcttccatatagactaaaactacattcatcagaaaaaggggagtaattcatttcctatcccaattatggatatagcagactgaagaatattttcaaagaaatacagtttattatgatcacaaacttgacctagagtaaactaagatgtaaatggatatttacactggatagtaattgttttcaagttataaaaatacttaagtttacaatggacatttactacaaaacaacctaatgccacagtgccaagttgttctgtttttattgggtcttttactcctatgatcctatttctaaatgtttatatgttctaatttgtgatatgtctgaattcactgaatgggatgacatatgaggaacatctagtgccatgtctggtccctattaagcgctcaataaacatcagctatactattattaattacacattcctgttgtgggtttctctttcattccacccatataacattcccggggatgcctggagccatacaccacctagtggttcccagctcaacaccagcaataaggcacctccaaccaagatagaagagccctctcctccaggacaccttagactgaggaaacaagaaataaaaggcccagcaggagtctttccagaggagatagtgattaacaggagtcggtactcatctcctatgctcattaaagagctagatcaccaaagtattgttaccgcaacaccaagacaagttgacaccaagcaaggattatctttcatctaacaaaaacaaacctgatggcaggccggcaagttttctcctctct

SEQ ID NO: 461429 - DNA, 727 bp, Homo sapiens
cccaccccaatacacatccaaacccaaacagtagctgaagagtaacttcaaccatagactctctttccaggcccacgctcccaccggtgagtgcatgtagtcatctgggcacctaccgtgtgctccttggatcccaggatgagcagtgaagaaaggatggcgggggatgaaagagatcccctcccaccctcatcccactctcaaggctctagctggaaggcagaggcaacactgcagatgaagttctgaaagtgagatggtgggcaggtaaaggagctgccagccccatggtgccatggctgtggggttttaagcaggtgaggtacacagatggtgacacagggagggggtgtgctgagcacagtggcagggtacagtcaagtccagtcttggggtgggatacagaccaggtgagctgggctgaaaggatccaaatgtgagtgggaagtgatgggaagtgaggtggagcgtccagtgagatttggttgctgggacaataaacagagagccatgatgggttttttcaaataagaaaatgccatgtccaatgctggatttcagaaagaggcttagggaagataccaataggattactttggggaggaaagacttggaatccaaaggctggggccccttgtggttatcccagcttgttctacaaaagccgacacgagaggggtgactcggagaagggagggaaaggatcaaatggaaaattgctgtggag

SEQ ID NO: 461430 - DNA, 2970 bp, Homo sapiens
cgtggcaaccaccaagactagctgaaaaccaagggtgactcctttcattagcctttcccctgagccttatctgccccagctaccagccagaacacaaaagctacatgtctgattagagtatacttagctaatagggaaccccctctcacagagaagttctatggggatcaccaggtctctcttacccctcagctgcccctaaggcagggaatttctccagaaggccaccagccagcagaattaagtgttattccagtgcctacccaggcctgacaacatcatgctcccaggacagcagtgacaacactcatcaccccaggggcccacagaagatgcctagagactgaaataggagctctcatagcataagaagacaaggcaaatttcatctgcaacactgaggacaaacaaaggcagttcctgcagaaacgtcacagctacctgggagcctaagtctgaagcaattaggcagggctcccagggaaggctctgatttttcaggtcaggccctagggtctcctggagggtccaaaggtagactcccctgcccacagaacctggcccatccctacagggagaactatttttagaacacttggagaattttcagagcttttacaggttgaagatggttcttggggggagcttctgggagaagctgtctctgactctgagggtgtggggattgttctttcttcccgctcccatagtcccctgagccttggccaccctggattcagagcactgtgaggccactgccttatttcttgtctatcttcctcttttccacagactgtgggctcccaaagagccaggcttatgttcttcttgcacccccaacagagcacactgagctgggggctgcgatgctgaaggcagctgtccacatcacttgctctctgcgcgggccggtcagctccagaggaattcatctggggcaggcccaactcggcccgctgaattagcctccacgatccccgggcctccccggcgccagggggcgctgtaaacgttccgtccctgcccctgcggccgcagtcgtcggccccatccgcgcgatgggctctgaggcggcgcagctgctggaggctgccgacttcgcggctcgcaagcaccggcagcagcggcggaaggaccccgaggggaccccctacatcaaccaccccatcggtgtggcacggatcctgacccacgaggcgggaatcactgacattgtggtgttacaggcggccctgctccatgacacggtggaggacacagacaccaccctggatgaggtggagctacactttggggcacaagtgcggcgcctggtggaggaggtaacagatgacaagactctgcccaagctggagagaaagaggctgcaggtggagcaagcgccccacagtagccccggggccaaactggtgaagctggcagacaagctgtacaatctgagggacctgaatcgctgcaccccagagggtacgctttcgtatgggctgtaagggaaaagggagggggatgccgccttctgaagacacatgttggtcagttcccctgaaaaaccctgggcattcttaattcccaaattaatcctactggaccactctttgatcttctttcatacagtaaaaatacaatagctgggccaaggggaagttttcaggacagctcattgcatcaggaactcatggccttgaaccaagcttgccaggaagtggggaaaaggcagtgctttccttgacatcacgctagcaagtttctgtcgactcttatgcaggatggtcagaacatcgagtccaggaatacttcgagtgggcagcgcaggtggtgaaggggcttcagggaacaaaccggcaactggaagaggctctaaagcatctgttcaagcagcgggggctgacaatctgatcagtgcttgaagctatccagaggcacaactccagcctcgttcaggccggacaggattcatacgccatcttttctgtgtctcctgagctccctccatccttcccagatattagaggccaaaaaaagacttgcattttttctcagtctgaaggtctcctgctaactaagctgagccccgcgtggtgggaatcagatgtacccatccatttctgatgcactcaccgcctctccccaagtcttgggtctgtttgctattttgcatggtggggtctctggcccctcagggacttgagattatttaagtactagttcctaacacgttctggaaaataaaaataactctgggttaaggtttaagctgctgctgctccttctccagcctccgactggtgggctgcatatctttccttcagcaaagcaggactaattgtgtgtcccggagtcacctccctcaggttgcgggcctcaacccctccgaacctggcttccttgtcagtgacatgggttgtgtaattatcaggttagactgtgacgtgcctgatggagcctgacacataggtgctcaagaaatggtagcagcctttcccgttaagaaagttggaagggggccaggcgcggtgtctctcgcctgtaatcccagcactctgggagaccgaggcgggcggatcacttgaggtcaggagttcaagaccagcctggccagcatggcgaggccccgtctctactaaaaatacaaaaaaaaattagccgggcgcagtggctcgcgcctgtaatcccagctactcaggaggctgaggcaggagactcgcttgaacccgggaggcggagtttgtactgagccgagatcgcgccactgcactccagcttgggtgacacagcgagactccgtctcaaaaatgaaaaaagaaaagacgtatcggaagggagtgccgcccgcttactgacaaccactgctgggcaccggagagaccccagcagcaacatgattgggccggtgggggattccggttccccagtacctcaagccgcgcgggaaactcggtgactcgcaatcccctcgcccttccgcattgc

SEQ ID NO: 461431 - DNA, 2324 bp, Homo sapiens
cgggcgcacctaagctgtccccgcagagacctgcagggagctcgcggcggaggacccagagggaggcctgcggtggctccagcccagactccggccccgaccgcagcagaagtgcacgaggtctacggtcatcagggtcacaaccaactgtgggctcccaaagagccaggcttatgttcttcttgcacccccaacagagcacactgagctgggggctgcgatgctgaaggcagctgtccacatcacttgctctctgcgcgggccggtcagctccagaggaattcatctggggcaggcccaactcggcccgctgaattagcctccacgatccccgggcctccccggcgccagggggcgctgtaaacgttccgtccctgcccctgcggccgcagtcgtcggccccatccgcgcgatgggctctgaggcggcgcagctgctggaggctgccgacttcgcggctcgcaagcaccggcagcagcggcggaaggaccccgaggggaccccctacatcaaccaccccatcggtgtggcacggatcctgacccacgaggcgggaatcactgacattgtggtgttacaggcggccctgctccatgacacggtggaggacacagacaccaccctggatgaggtggagctacactttggggcacaagtgcggcgcctggtggaggaggtaacagatgacaagactctgcccaagctggagagaaagaggctgcaggtggagcaagcgccccacagtagccccggggccaaactggtgaagctggcagacaagctgtacaatctgagggacctgaatcgctgcaccccagagggtacgctttcgtatgggctgtaagggaaaagggagggggatgccgccttctgaagacacatgttggtcagttcccctgaaaaaccctgggcattcttaattcccaaattaatcctactggaccactctttgatcttctttcatacagtaaaaatacaatagctgggccaaggggaagttttcaggacagctcattgcatcaggaactcatggccttgaaccaagcttgccaggaagtggggaaaaggcagtgctttccttgacatcacgctagcaagtttctgtcgactcttatgcaggatggtcagaacatcgagtccaggaatacttcgagtgggcagcgcaggtggtgaaggggcttcagggaacaaaccggcaactggaagaggctctaaagcatctgttcaagcagcgggggctgacaatctgatcagtgcttgaagctatccagaggcacaactccagcctcgttcaggccggacaggattcatacgccatcttttctgtgtctcctgagctccctccatccttcccagatattagaggccaaaaaaagacttgcattttttctcagtctgaaggtctcctgctaactaagctgagccccgcgtggtgggaatcagatgtacccatccatttctgatgcactcaccgcctctccccaagtcttgggtctgtttgctattttgcatggtggggtctctggcccctcagggacttgagattatttaagtactagttcctaacacgttctggaaaataaaaataactctgggttaaggtttaagctgctgctgctccttctccagcctccgactggtgggctgcatatctttccttcagcaaagcaggactaattgtgtgtcccggagtcacctccctcaggttgcgggcctcaacccctccgaacctggcttccttgtcagtgacatgggttgtgtaattatcaggttagactgtgacgtgcctgatggagcctgacacataggtgctcaagaaatggtagcagcctttcccgttaagaaagttggaagggggccaggcgcggtgtctctcgcctgtaatcccagcactctgggagaccgaggcgggcggatcacttgaggtcaggagttcaagaccagcctggccagcatggcgaggccccgtctctactaaaaatacaaaaaaaaattagccgggcgcagtggctcgcgcctgtaatcccagctactcaggaggctgaggcaggagactcgcttgaacccgggaggcggagtttgtactgagccgagatcgcgccactgcactccagcttgggtgacacagcgagactccgtctcaaaaatgaaaaaagaaaagacgtatcggaagggagtgccgcccgcttactgacaaccactgctgggcaccggagagaccccagcagcaacatgattgggccggtgggggattccggttccccagtacctcaagccgcgcgggaaactcggtgactcgcaatcccctcgcccttccgcattgc

SEQ ID NO: 461432 - DNA, 2273 bp, Homo sapiens
cgggcgcacctaagctgtccccgcagagacctgcagggagctcgcggcggaggacccagagggaggcctgcggtggctccagcccagactccggccccgaccgcagcagaagtgcacgaggtctacggtcatcagggtcacaaccaagcacactgagctgggggctgcgatgctgaaggcagctgtccacatcacttgctctctgcgcgggccggtcagctccagaggaattcatctggggcaggcccaactcggcccgctgaattagcctccacgatccccgggcctccccggcgccagggggcgctgtaaacgttccgtccctgcccctgcggccgcagtcgtcggccccatccgcgcgatgggctctgaggcggcgcagctgctggaggctgccgacttcgcggctcgcaagcaccggcagcagcggcggaaggaccccgaggggaccccctacatcaaccaccccatcggtgtggcacggatcctgacccacgaggcgggaatcactgacattgtggtgttacaggcggccctgctccatgacacggtggaggacacagacaccaccctggatgaggtggagctacactttggggcacaagtgcggcgcctggtggaggaggtaacagatgacaagactctgcccaagctggagagaaagaggctgcaggtggagcaagcgccccacagtagccccggggccaaactggtgaagctggcagacaagctgtacaatctgagggacctgaatcgctgcaccccagagggtacgctttcgtatgggctgtaagggaaaagggagggggatgccgccttctgaagacacatgttggtcagttcccctgaaaaaccctgggcattcttaattcccaaattaatcctactggaccactctttgatcttctttcatacagtaaaaatacaatagctgggccaaggggaagttttcaggacagctcattgcatcaggaactcatggccttgaaccaagcttgccaggaagtggggaaaaggcagtgctttccttgacatcacgctagcaagtttctgtcgactcttatgcaggatggtcagaacatcgagtccaggaatacttcgagtgggcagcgcaggtggtgaaggggcttcagggaacaaaccggcaactggaagaggctctaaagcatctgttcaagcagcgggggctgacaatctgatcagtgcttgaagctatccagaggcacaactccagcctcgttcaggccggacaggattcatacgccatcttttctgtgtctcctgagctccctccatccttcccagatattagaggccaaaaaaagacttgcattttttctcagtctgaaggtctcctgctaactaagctgagccccgcgtggtgggaatcagatgtacccatccatttctgatgcactcaccgcctctccccaagtcttgggtctgtttgctattttgcatggtggggtctctggcccctcagggacttgagattatttaagtactagttcctaacacgttctggaaaataaaaataactctgggttaaggtttaagctgctgctgctccttctccagcctccgactggtgggctgcatatctttccttcagcaaagcaggactaattgtgtgtcccggagtcacctccctcaggttgcgggcctcaacccctccgaacctggcttccttgtcagtgacatgggttgtgtaattatcaggttagactgtgacgtgcctgatggagcctgacacataggtgctcaagaaatggtagcagcctttcccgttaagaaagttggaagggggccaggcgcggtgtctctcgcctgtaatcccagcactctgggagaccgaggcgggcggatcacttgaggtcaggagttcaagaccagcctggccagcatggcgaggccccgtctctactaaaaatacaaaaaaaaattagccgggcgcagtggctcgcgcctgtaatcccagctactcaggaggctgaggcaggagactcgcttgaacccgggaggcggagtttgtactgagccgagatcgcgccactgcactccagcttgggtgacacagcgagactccgtctcaaaaatgaaaaaagaaaagacgtatcggaagggagtgccgcccgcttactgacaaccactgctgggcaccggagagaccccagcagcaacatgattgggccggtgggggattccggttccccagtacctcaagccgcgcgggaaactcggtgactcgcaatcccctcgcccttccgcattgc

SEQ ID NO: 461433 - DNA, 1548 bp, Homo sapiens
  misc_feature (449)..(449): n is a, c, g, or t
  misc_feature (451)..(451): n is a, c, g, or t
  misc_feature (455)..(455): n is a, c, g, or t
ccacctcccaacaccagcagccggaagctctgtccctgggggctatgagaatgcagtgtgaacctaccagcaggctcttgctgcacacacgaggccagcagggcttccgtgctattggcaaactgctaagtgcttccatcaacccagtgcccagtggggaaccagcgcctgttacttacgccatcagctgtccagtaattccgaaccttgatcttggccagatggaagtcccccagctgtcttgtatggaaaaacccaaaccaggggacttttctcagccccagccgcctcctcttggctttctacaatacctattcactctccagtgggacaaaactcacagctgctcccaaacgcgtccacgctggctcgacccagtgccttggcacaggctgggcctctgcttgcttgcaattctcttcttaaccttctcaatctggggaattcantnaaanccaagagggaggaggtggcttttgttaagggggaacgatgagttcaaggggttctgacttattctggcaagtttctccagctctacaagaacttctagtgctctgggcagctgcgaggggtcaagaaaccacatccccaaatccagcgggatctcagagagaaaggctgatgggaagctgcccagggctgacctggcacatgctgggaaaacccctcggtgccagggcaggaggcagagcgtctgcagctcctccctccccaacacaggggagacagggttttgccttgttgcccaggctggtcttgaactcctgacctcaaatgatccgcctgcctcagcctcccaaagtgctgggattacaggtgtgagcctctgtacctggccagattttgttgttcttcccctccctccactcatacccttaacacagatttaccaagggcagagaaaatgcatgggaatacacagccaagaagcaatccagtgccccttccactcacagctaagttcctgttgacgaggcggcccagctccccaggcgtggctgtgttccggatatccacatcgtggggcgacacataaagctttgtgtcattcaagtcaaagaactcgacttctgtgagacccacccaccacgagttgccccagttggacaggatctccatggtcacgtagatggcatctttgatctcgtctgccctcattctctgtttgtccttaaagaagagaaaaataacaccaaaggattaagtcatgacaggcttgaattcggctctgcctctgccaccactgccttcaaaaagttagttaaccttcagggtctcagtctctccatctgtacaatgaggataagaatagcacccactacctatggttattacaatgattaaatgaattcatactgtaaagcattcaaaatagaggccctgtgtaactggcactctgtgagcattctgtttgaaagtttacaaataaataaaaatgtctaaaaagcattgaattctgcctgaacatgcacgtctctcccccactactcagtgttcggtacccagaagcttgtcacgacatctgctgaattgagtaggtgttac

SEQ ID NO: 461434 - DNA, 641 bp, Homo sapiens
ctgctgttaccgcccttggttcatggcttctttcacttggaaaccccaggagctaagttcctgttgacgaggcggcccagctccccaggcgtggctgtgttccggatatccacatcgtggggcgacacataaagctttgtgtcattcaagtcaaagaactcgacttctgtgagacccacccaccacgagttgccccagttggacaggatctccatggtcacgtagatggcatctttgatctcgtctgccctcattctctgtttgtccttaaagaagagaaaaataacaccaaaggattaagtcatgacaggcttgaattcggctctgcctctgccaccactgccttcaaaaagttagttaaccttcagggtctcagtctctccatctgtacaatgaggataagaatagcacccactacctatggttattacaatgattaaatgaattcatactgtaaagcattcaaaatagaggccctgtgtaactggcactctgtgagcattctgtttgaaagtttacaaataaataaaaatgtctaaaaagcattgaattctgcctgaacatgcacgtctctcccccactactcagtgttcggtacccagaagcttgtcacgacatctgctgaattgagtaggtgttac

SEQ ID NO: 461435 - DNA, 2465 bp, Homo sapiens
gagttattctgttgaagattggagacagtgttgaaaggatcatggggatgagcacatggcttcctgacaatgtcacctttgaggaaggcgccctgattgatccactttctgtggggatccatgcctgcaggagaggcggagttaccctgggacacaaggtccttgtgtgtggagctggggcaatcggggtagtcactttgctcgtggccaaggcaatgggagcagctcaagtagtggtgactgatctgtctgctacccgattgtccaaagccaaggagattggggctgatttagtcctccagatctccaaggagagccctcaggaaatcgccaggaaagtagaaggtctgctggggtgcaagccggaagtcaccatcgagtgcacgggggcagaggcctccatccaggcgggcatctacggtcacagctgactactgcttgttttgtctcccagacctaggaacagataagctgccaatgcctgattcgcccctcagcgacccaccagccacttatgggaagttggcaggaattgcccagcggccttgggagctgaggaagcagtgggggagagggaggagcgggtgccaccttggcagtgtcgtgagtttcagctggagtccgccagccctctgcttcactgtcataggcagtggtcgccatgtgggaaggggcaaaaagaagccgaagctcagagaggaacaatggatctgtgtgtgattgatctacccatggccactcgctctggtgggaccctcgtgcttgtggggctgggctctgagatgaccaccgtacccctactgcatgcagccatccgggaggtggatatcaagggcgtgtttcgatactgcaacacgtggccagtggcgatttcgatgcttgcgtccaagtctgtgaatgtaaaacccctcgtcacccataggtttcctctggagaaagctctggaggcctttgaaacatttaaaaagggattggggttgaaaatcatgctcaagtgtgaccccagtgaccagaatctctgatgttaatgggctctgccctcatccccacagtctcgggatctcagggcacaacggatggacacgagtgggctctgatgcagaactttctcttttgaatgttaagaataactaatacaattcattgtgaacagaagtccttacgcagaggaattggtgtgccttaaagatacaatctgggatagtttgggggaacttgtagccagaatgccctgttcatgctgagcaaagttcagcaagtagagcagagtttggcaggcaggtgccaggaactccccttcttcctggagtgccttcattgaggaaggaaatctggcccttgggtttcctggttccactgctactgacccagaggggaatgagggctgagttatgaaaagataacttcatgaagacttaactggcccagaagctgattttcatgaaaatctgccactcagggtctgggatgaaggcttgtcagcacttccagtttagaacgcaatgtttctagagacatattggctgtttgttttgatgataaaaggagaataagaaaaggcatcactttcctggatccaggataatttttaaaccaatcaaatgaaaaaaacaaacaaacaaaaaaggaaatgtcatgtgaggttaaaccagtttgcattcccctaatgtggaaaaagtaagaggactactcagcactgtttgaagattgcctcttctacagcttctgagaattgtgttatttcacttgccaagtgaaggaccccctccccaacatgccccaccccacccctaagtacggtcccttgtcaccaggcaaccaggaaactgctacttgtggacctcaccagagaccaggagggtttggttagctcacaggacttcccccaccccagaagattagcatcccatactagactcatactcaactcaactaggctcatactcaattgatggttattagacaattccatttctttctggttattataaacagaaaatctttcctcttctcattaccagtaaaggctcttggtatctttctgttggaatgatttctatgaacttgtcttattttaatggtgggttttttttctggtaagatttggacctaaatcgcatcatgccaacttgtgactttgagactattcatcaagaatgaggatatagtagccatgacatagcttgagctatagcctttaattccttactttggctatgggtggagggtgagtttgaagaggttctgattttcttgtaacctgggaaagccatgaccttgtgcccgattctttcagattgctttgggtaataaatattggtggtggtatctgactcatgctgctgtttatggtcctgtttagtggggaatggacttagattacccatttcccagagggaaggatcccaggatttttgaaggttacatattttctgtaccaaatataatttcattgacatgaatta

SEQ ID NO: 461436 - DNA, 2185 bp, Homo sapiens
  misc_feature (95)..(95): n is a, c, g, or t
  misc_feature (104)..(104): n is a, c, g, or t
gcatgtgcatgctgcaatgcatgctgagtagactcatgaggatccctccatactggaccgacagccctctgtactgacggtaaccctcgtgccgncttcgtatnacctcaatgcacaccttaagttacaacgcattcctgacgctgtcatctttgatgaatgcgccctgatcgagccacttacatgtggggttccatgcctgcaagagaggcagatttaccctgtcacacaacgtcctcgtatgtggagcatcgccaatcgtcatggtcacttcgttcgtgcgcgaaggcaatgcggacgcagctcaagtatctgtgtgcatctgatctgtctgctacccgattgtccaaagccaaggagattggggctgatttagtcctccagatctccaaggagagccctcaggaaatcgccaggaaagtagaaggtctgctggggtgcaagccggaagtcaccatcgagtgcacgggggcagaggcctccatccaggcgggcatctacgccactcgctctggtgggaccctcgtgcttgtggggctgggctctgagatgaccaccgtacccctactgcatgcagccatccgggaggtggatatcaagggcgtgtttcgatactgcaacacgtggccagtggcgatttcgatgcttgcgtccaagtctgtgaatgtaaaacccctcgtcacccataggtttcctctggagaaagctctggaggcctttgaaacatttaaaaagggattggggttgaaaatcatgctcaagtgtgaccccagtgaccagaatctctgatgttaatgggctctgccctcatccccacagtctcgggatctcagggcacaacggatggacacgagtgggctctgatgcagaactttctcttttgaatgttaagaataactaatacaattcattgtgaacagaagtccttacgcagaggaattggtgtgccttaaagatacaatctgggatagtttgggggaacttgtagccagaatgccctgttcatgctgagcaaagttcagcaagtagagcagagtttggcaggcaggtgccaggaactccccttcttcctggagtgccttcattgaggaaggaaatctggcccttgggtttcctggttccactgctactgacccagaggggaatgagggctgagttatgaaaagataacttcatgaagacttaactggcccagaagctgattttcatgaaaatctgccactcagggtctgggatgaaggcttgtcagcacttccagtttagaacgcaatgtttctagagacatattggctgtttgttttgatgataaaaggagaataagaaaaggcatcactttcctggatccaggataatttttaaaccaatcaaatgaaaaaaacaaacaaacaaaaaaggaaatgtcatgtgaggttaaaccagtttgcattcccctaatgtggaaaaagtaagaggactactcagcactgtttgaagattgcctcttctacagcttctgagaattgtgttatttcacttgccaagtgaaggaccccctccccaacatgccccaccccacccctaagtacggtcccttgtcaccaggcaaccaggaaactgctacttgtggacctcaccagagaccaggagggtttggttagctcacaggacttcccccaccccagaagattagcatcccatactagactcatactcaactcaactaggctcatactcaattgatggttattagacaattccatttctttctggttattataaacagaaaatctttcctcttctcattaccagtaaaggctcttggtatctttctgttggaatgatttctatgaacttgtcttattttaatggtgggttttttttctggtaagatttggacctaaatcgcatcatgccaacttgtgactttgagactattcatcaagaatgaggatatagtagccatgacatagcttgagctatagcctttaattccttactttggctatgggtggagggtgagtttgaagaggttctgattttcttgtaacctgggaaagccatgaccttgtgcccgattctttcagattgctttgggtaataaatattggtggtggtatctgaaaaaaaacccaccattaaaataagacaagttcatagaaatcattccaacagaaagataccaagagcctttactggtaatgtcgga

SEQ ID NO: 461437 - DNA, 1845 bp, Homo sapiens
ggttgagcagttcagcagtttatacaaatcacattctcaggaatttttggatgctcagctgatgcaaccagaagatacttgtgtgatgacaatatgttattgtaagtgggaagtcagtatttcttatcttctgagctttcttgtttttacctcctttacaggccactcgctctggtgggaccctcgtgcttgtggggctgggctctgagatgaccaccgtacccctactgcatgcagccatccgggaggtggatatcaagggcgtgtttcgatactgcaacacgtggccagtggcgatttcgatgcttgcgtccaagtctgtgaatgtaaaacccctcgtcacccataggtttcctctggagaaagctctggaggcctttgaaacatttaaaaagggattggggttgaaaatcatgctcaagtgtgaccccagtgaccagaatctctgatgttaatgggctctgccctcatccccacagtctcgggatctcagggcacaacggatggacacgagtgggctctgatgcagaactttctcttttgaatgttaagaataactaatacaattcattgtgaacagaagtccttacgcagaggaattggtgtgccttaaagatacaatctgggatagtttgggggaacttgtagccagaatgccctgttcatgctgagcaaagttcagcaagtagagcagagtttggcaggcaggtgccaggaactccccttcttcctggagtgccttcattgaggaaggaaatctggcccttgggtttcctggttccactgctactgacccagaggggaatgagggctgagttatgaaaagataacttcatgaagacttaactggcccagaagctgattttcatgaaaatctgccactcagggtctgggatgaaggcttgtcagcacttccagtttagaacgcaatgtttctagagacatattggctgtttgttttgatgataaaaggagaataagaaaaggcatcactttcctggatccaggataatttttaaaccaatcaaatgaaaaaaacaaacaaacaaaaaaggaaatgtcatgtgaggttaaaccagtttgcattcccctaatgtggaaaaagtaagaggactactcagcactgtttgaagattgcctcttctacagcttctgagaattgtgttatttcacttgccaagtgaaggaccccctccccaacatgccccaccccacccctaagtacggtcccttgtcaccaggcaaccaggaaactgctacttgtggacctcaccagagaccaggagggtttggttagctcacaggacttcccccaccccagaagattagcatcccatactagactcatactcaactcaactaggctcatactcaattgatggttattagacaattccatttctttctggttattataaacagaaaatctttcctcttctcattaccagtaaaggctcttggtatctttctgttggaatgatttctatgaacttgtcttattttaatggtgggttttttttctggtaagatttggacctaaatcgcatcatgccaacttgtgactttgagactattcatcaagaatgaggatatagtagccatgacatagcttgagctatagcctttaattccttactttggctatgggtggagggtgagtttgaagaggttctgattttcttgtaacctgggaaagccatgaccttgtgcccgattctttcagattgctttgggtaataaatattggtggtggtatctgaaaaaaaacccaccattaaaataagacaagttcatagaaatcattccaacagaaagataccaagagcctttactggtaatgtcgga

SEQ ID NO: 461438 - DNA, 1254 bp, Homo sapiens
ggaacttcagggtgttggtaccgggaatcccggccgcgtccacgggggaacttgtagccagaatgccctgttcatgctgagcaaagttcagcaagtagagcagagtttggcaggcaggtgccaggaactccccttcttcctggagtgccttcattgaggaaggaaatctggcccttgggtttcctggttccactgctactgacccagaggggaatgagggctgagttatgaaaagataacttcatgaagacttaactggcccagaagctgattttcatgaaaatctgccactcagggtctgggatgaaggcttgtcagcacttccagtttagaacgcaatgtttctagagacatattggctgtttgttttgatgataaaaggagaataagaaaaggcatcactttcctggatccaggataatttttaaaccaatcaaatgaaaaaaacaaacaaacaaaaaaggaaatgtcatgtgaggttaaaccagtttgcattcccctaatgtggaaaaagtaagaggactactcagcactgtttgaagattgcctcttctacagcttctgagaattgtgttatttcacttgccaagtgaaggaccccctccccaacatgccccaccccacccctaagtacggtcccttgtcaccaggcaaccaggaaactgctacttgtggacctcaccagagaccaggagggtttggttagctcacaggacttcccccaccccagaagattagcatcccatactagactcatactcaactcaactaggctcatactcaattgatggttattagacaattccatttctttctggttattataaacagaaaatctttcctcttctcattaccagtaaaggctcttggtatctttctgttggaatgatttctatgaacttgtcttattttaatggtgggttttttttctggtaagatttggacctaaatcgcatcatgccaacttgtgactttgagactattcatcaagaatgaggatatagtagccatgacatagcttgagctatagcctttaattccttactttggctatgggtggagggtgagtttgaagaggttctgattttcttgtaacctgggaaagccatgaccttgtgcccgattctttcagattgctttgggtaataaatattggtggtggtatctgaaaaaaaacccaccattaaaataagacaagttcatagaaatcattccaacagaaagataccaagagcctttactggtaatgtcgga

SEQ ID NO: 461439 - DNA, 703 bp, Homo sapiens
ctaggttttgtggacagaaacaaagtgtttgggagagattatggccagtggtcaagcgcgccccccgtttgaggaggagagcccccagcctagcacaacggtacggtcccccgaggtggtggtggatgatgaagtgccaggaccatcagacgaatccgaggaggagctggaggaggagctggagttggagcgcgcccctgagcccgaggacacctgggtggtggagacgctgtgtgggctcaagatgaagctgaagcgaaagcgagcatcctccgtgctccctgagcaccacgaggccttcaacaggctccttggggatcctgtcgttcaaaaattcctggcctgggacaaagacctgagggtgtcagacaagtatctcctggctatggtcatagcgtattttagccgtgccggcctcttctcgtggcaataccaacgcattcatttcttcctggctctgtgagtagtttgcttcttcccatctgtcaatatccaacaccctgggacagtggacgaagtgggattccaaccttccatctatttttttaccctacttctcctctttactctgtatataaaaacgataagattatactatggtgttcttagtctgttctttctaaaaacaaacacaaatgcagttgacaaatagtagaatcaaacaaaaggaaacataaacccgtcctaaggggaaaggaaagcc

SEQ ID NO: 461440 - DNA, 710 bp, Homo sapiens
gagttagtgggtgcagcacaccagcatggcacatgtatatgtatggctgctccctgttctaccacatgtcctgcaaacgtctactccactgagcacaacgcattttgaatgtgtagtcactcatctgtctctaccaccagaagtctggttcagagcctggtacacaaaaagtgccctgtggatatttgtgtcaatcaatccatgggcccagggtgacttacttgtaggacaaagcaaggagctcctgctttgggacctgaatttatcacctctgccaaatctgggacttcacactgctgggaagaagggacagcttagaagagcgtgctctgtgatccctcctctggatgctgctcctgactctccccctccatcgtcctctgcccacaggcccatgctagcctccggcatcttccagttacttagaatccatgtcagcaaatgcgtgcagactatggaggggtccacagaagagctgagcctcctcctagcagccaacaccagcttgccggcgatgtgagcggctgccttggaagtggaccccctgccccagcccagccttcagatgatgcagtgccagctgacagcccaactacaaccccatgggagaccctgagctagagggttccagccaagccacatgtggatcctgacccagaggaagtatgtaagataataaatggttgttttaagctgctgaattttggggt

SEQ ID NO: 461441 - DNA, 1061 bp, Homo sapiens
ggcgtcagtcgaggagtcaaggcagcaatgaatcgtgtcttgtgtgccccggcggccggggccgtccgggcgctgaggctcataggctgggcttcccgaagccttcatccgttgcccggttcccgggatcgggcccaccctgccgccgaggaagaggacgaccctgaccgccccattgagttttcctccagcaaagccaaccctcaccgctggtcggtgggccataccatgggaaagggacatcagcggccctggtggaaggtgctgcccctcagctgcttcctcgtggcgctgatcatctggtgctacctgagggaggagagcgaggcggaccagtggttgagacaggtgtggggagaggtgccagagcccagtgatcgttctgaggagcctgagactccagctgcctacagagcgagaacttgacggggtgcccgctggggctggcaggaagggagccgacagccgcccttcggatttgatgtcacgtttgcccgtgactgtcctggctatgcgtgcgtcctcagcactgaaggacttggctggtggatggggcacttggctatgctgattcgcgtgaaggcggagcagaatctcagcagatcggaaactgctcctcgcctggctcttgatgtccaaggattccatcggcaagacttctcagatccttggggaaggtttcagttgcactgtatgctgttggatttgccaagtctttgtataacataatcatgtttccaaagcacttctggtgacacttgtcatccagtgttagtttgcaggtaatttgctttctgagatagaatatctggcagaagtgtgaaactgtattgcatgctgcggcctgtgcaaggaacacttccacatgtgagttttacacaacaacaaatgaaaataaattttaattttataatatgggattagatgattccctttttttgcatctagtttttaaaaagggggtatttgggcagctattgttttttattttaatctcttcttgtttaccagagcacgtaagttagttgcaccagcagctatttttaaaagtttccttttcc

SEQ ID NO: 461442 - DNA, 915 bp, Homo sapiens
ggcgtcagtcgaggagtcaaggcagcaatgaatcgtgtcttgtgtgccccggcggccggggccgtccgggcgctgaggctcataggctgggcttcccgaagccttcatccgttgcccggttcccgggatcgggcccaccctgccgccgaggaagaggacgaccctgaccgccccattgagttttcctccagcaaagccaaccctcaccgctggtcggtgggccataccatgggaaagggacatcagcggccctggtggaaggtgctgcccctcagctgcttcctcgtggcgctgatcatctggtgctacctgagggaggagagcgaggcggaccagtggttgagacaggtgtggggagaggtgccagagcccagtgatcgttctgaggagcctgagactccagctgcctacagagcgagaacttgacggggtgcccgctggggctggcaggaagggagccgacagccgcccttcggatttgatgtcacgtttgcccgtgactgtcctggctatgcgtgcgtcctcagcactgaaggacttggctggtggatggggcacttggctatgctgattcgcgtgaaggcggagcagaatctcagcagatcggaaactgctcctcgcctggctcttgatgtccaaggattccatcggcaagacttctcagatccttggggaaggtttcagttgcactgtatgctgttggatttgccaagtctttgtataacataatcatgtttccaaagcacttctggtgacacttgtcatccagtgttagtttgcaggtaatttgctttctgagatagaatatctggcagaagtgtgaaactgtattgcatgctgcggcctgtgcaaggaacacttccacatgtgagttttacacaacaacaaatgaaaataaattttaattttataata

SEQ ID NO: 461443 - DNA, 994 bp, Homo sapiens
ggcgtcagtcgaggagtcaaggcagcaatgaatcgtgtcttgtgtgccccggcggccgggtgagctcctcaaggtctcggagggccgagggcagacaccggcgggcgggcggagcgcttactgctctctctcttccagggccgtccgggcgctgaggctcataggctgggcttcccgaagccttcatccgttgcccggttcccgggatcgggcccaccctgccgccgaggaagaggacgaccctgaccgccccattgagttttcctccagcaaagccaaccctcaccgctggtcggtgggccataccatgggaaagggacatcagcggccctggtggaaggtgctgcccctcagctgcttcctcgtggcgctgatcatctggtgctacctgagggaggagagcgaggcggaccagtggttgagacaggtgtggggagaggtgccagagcccagtgatcgttctgaggagcctgagactccagctgcctacagagcgagaacttgacggggtgcccgctggggctggcaggaagggagccgacagccgcccttcggatttgatgtcacgtttgcccgtgactgtcctggctatgcgtgcgtcctcagcactgaaggacttggctggtggatggggcacttggctatgctgattcgcgtgaaggcggagcagaatctcagcagatcggaaactgctcctcgcctggctcttgatgtccaaggattccatcggcaagacttctcagatccttggggaaggtttcagttgcactgtatgctgttggatttgccaagtctttgtataacataatcatgtttccaaagcacttctggtgacacttgtcatccagtgttagtttgcaggtaatttgctttctgagatagaatatctggcagaagtgtgaaactgtattgcatgctgcggcctgtgcaaggaacacttccacatgtgagttttacacaacaacaaatgaaaataaattttaattttataata

SEQ ID NO: 461444 - DNA, 922 bp, Homo sapiens
aggctagtcgggctgggtgtgactcggcaccgaggaatgaatcgtgtcttgtgtgcccggcggcggggccgtccgggcgctgaggctcataggctgggcttcccgaagccttcatccgttgcccggttcccgggatcgggcccaccctgccgccgaggaagaggacgaccctgaccgccccattgagttttcctccagcaaagccaaccctcaccgctggtcggtgggccataccatgggaaagggacatcagcggccctggtggaaggtgctgcccctcagctgcttcctcgtggcgctgatcatctggtgctacctgagggaggagagcgaggcggaccagtggttgagacaggtgtggggagaggtgccagagcccagtgatcgttctgaggagcctgagactccagctgcctacagagcgagaacttgacggggtgcccgctggggctggcaggaagggagccgacagccgcccttcggatttgatgtcacgtttgcccgtgactgtcctggctatgcgtgcgtcctcagcactgaaggacttggctggtggatggggcacttggctatgctgattcgcgtgaaggcggagcagaatctcagcagatcggaaactgctcctcgcctggctcttgatgtccaaggattccatcggcaagacttctcagatccttggggaaggtttcagttgcactgtatgctgttggatttgccaagtctttgtataacataatcatgtttccaaagcacttctggtgacacttgtcatccagtgttagtttgcaggtaatttgctttctgagatagaatatctggcagaagtgtgaaactgtattgcatgctgcggcctgtgcaaggaacacttccacatgtgagttttacacaacaacaaatgaaaataaattttaattttataata

SEQ ID NO: 461445 - DNA, 1340 bp, Homo sapiens
tacttgtggttaagttggtcttgtgcagcttttttttttcaaggggtttgagatttgtctatgtttgtgaggttggtaaagcagactcagtgtctgggtgtgtccctgaagacagctatttatgacaagaacaaccaaaataacgaaggaatttcacatcgcaaatccctaagaatttccgatgggcaagacaagggcatctttgcaattgtgtgtaaggagcaagttctggatgggctgttagattcgcccaaaatgaggacttccctgcaggcagtggcactctggggacagaaggcccctccccacagcatcactgccatcatgatcactgatgaccagcgaacgattgtgactggaagtcaagagggtcagctctgtctctggaatctctcacatgaactaaagactggaaagggattaaatgcacagggatatgcacccctgagtgtgatgacagggaaagatagtatgttgttctctgagatggaaccttctggacttctcaggaaaaagatttcagcgaaagaactcctatttggtcattcagcttcggtaacatgtttggcaagagcaagggacttctctaaacagccctacattgttagtgctgctgaaaatggggagatgtgtgtttggaatgtcaccaatggacagtgcatggagaaggctacacttccttacaggcacactgcaatctgttattaccactgctcattccggatgacaggagaaggctggcttctttgttgtggagaatatcaagatgtccttataattgatgccaaaactttggctgttgttcacagttttagatcatctcagtttcctgactggatcaactgcatgtgcattgttcactccatgagaattcaagaagattctctcttggtggtatcagtagctggtgagctcaaagtatgggatctttcctcatctatcaacagcattcaggttggcttgggaaccctactcttttttccttacaatttcaagcatattcattaaaatttataaattttaaggctattacatgtttattgtcaaaagttcaaataacatagaagtgtataaattctacttccatatatttcccccatccatcttcccagggagctttcagtgtaatcagggaaaacttgtacctttgaaacaatttgaaaaaatataaagcaacatataagaaagtggcatatggaatatactaaagtgtccaagtgtactgataagtattcctgtggggagagttttatgacttgttcccatagcacagtgcacttcacctctcataattacatttctggggttaacatctgtctttctcactaatctgaaaacat

SEQ ID NO: 461446 - DNA, 3185 bp, Homo sapiens
tgccacatttcttttaatttttgagacagaggttccgggttacctagaggggaggccgggcaggagcagcaggagcagcaggagcagcaggagcagcagcaggagcagcaggagcagcagcaggagcagcagagactctctctgcccagactctggccagggtgggggccctggaactctggctttatccctggccggcgcctcccggccaatcccagctgaggctgcctgtgtgtcacaatggggcgcctgtggcgtcacgctggcccgccccaccccgtgtgctcgtctggaaccgcccgtcctacttgctgccccatcgcgagagtccttcctctccagttcggtccaccacctgcccccatgctcgatcctctgtggaaccaggagctgtcccacaccttatagaggcatacctgggatgacggacaatgacttgcccgggatcactttgccaattggaaaggaggaaaagtcccacacccgtggcgctgtctccggagggtgctgcgtccaagaggcccacccgcagggatgagcctgagtgcgcgaatccaagcacgagaagggagctgggaatctcccggtggctggggacccctgctccttctagagcctctgcctctaggtctttaataaagtatatacaatgtggctacagctggcatatgcctttaaatcctttcgacaaacactgctgggaaggtggttccaatgctgaaagttctgagggcgatgaaacaaaggcaagcctctgagtcagtccctctggttgctgccagactggtcgaaaaatacaaccacagctttttgagaacaaggaccttattggcctctctggcacaagcaagctgcccaaggaatgtgggccaccatctccatagctgctttctgaactggggattgagaggtggcgatcacagggcacgccctaagaaacctgcacactaacctccctctcagacactgcttctggagagcccaacctgtgaccgctgggtcaggaggggtctgaggaagaagatgctaagatgggattctggctctggatcacccactgcctagctgctgataaggatccttttgctgggggtagatggagcgggtacatgcccccgcacagagcagagtgccacctgcccagaaccgctccacggtccatggagatcggtttacttctcttttcgcctgcttccgcagccaagactcaactccctcccatccatgagttctcttggagtatctttgtgtaaacaaggtctcagtaactaaatcctgtttccatctccctgcatcagtgttctctggctgggtgggcggagctcctttggctcggtcctgctgatgtccttaaaggcctcagcccgtggagtcaaagcctggggccagcggctgcaggattctaaacactgtgagtgctcagttgcgcagctgggtgtgggactgtgtgacggcaagaagcatccaaaggtggacgtggccagggatgggaggagccatcggagaggtggtaaggacagcgaccgagttccccgagagaggcgagtcttagtaattcgggaattcagcccccacgactgtggaccaatggcatataaccagatccccacatactcaacttccacagtcagccctgccaaacctccttgcaggaaaagtcaacactctgtaaatgtgggctttgcatcccatgaatactgtatttttcatcctcattcggttgaaaaagagctgcgtgggaagttctgtcaaccctggcctgctttgggacaccagtggacctccccagagctggtggtgaaaattcctggagatagatcctccgaatgaggaacaatgtattcttcttttctcctaattctcctaaaaaatccacttgggagatacctgctgcaaaacttaaaggcaaccatattctgtacttagatgaagtgtttgtcaagctccctggaaaagagaatcaaaggaccctgacttgtttactctgccttctggaagaaaaaagtgatgagagagagtggcaatctcacaccatgctgaaaagcgccccccaactaactcagatccatgcgtccctttgggccctgaggaataatactgctggtttaattcaagatataaaaccaataaaaatggtttacctaaaggatatgccacaatggccgtatgtgaaacaatatcctttgtcctgagctcggtttgagagaatcaaacccattataaaagaattagaaaaacaagggatacttctataaaaggtagcctcaccttgtcatactcccatacttccagtaagcaaggaaagtaaatttggtaaagatggttgaccattgtgtagatttgtacaagatctttgagaagtaaatgaatttgtagttcctaatcctgcaactattttgactttgtttctgttgtctgtaatgtgttctgctttttcttcctgttcctgtccaaacccttgtttgcttttacctacaaaggagttcaatacttaacttagtaaagaatttctcaaggatttcaggactctcctactcttttctctagcaatttacaggaaatattagggaaatttgtcccaccagagaaatttataattatccttatttctttatagcagagtaagaacagcctaacacaaatggtaataaaagaagacactgggctccaatgtgatttatctgacttttctgttaaaaattcagctttgacctgttaaataaaatttataggatgcaattagtctggagtgagcttctgcactaggccgaacagaccaaaccaaaatagggttcttcatgctgaagttccacaccaacaagccaaaactaaattgtttatctgaccttccagggaatcaggacacacagggataatagccaaatccccaaacaggccagttttagccagcatgataggacatcccctctgctttaaactttgcagatgctcccaataaacccatcctaaattaaaaatattacaaattaagtcattttaagttggggaccatcatacaaggaaagtcactttgaaaccactcatctgctttttgttctctgtttctgctttccacagcccttttctgcctatcaagccaaacctcctcgttcagctcatcggaacactcattctgttttacaagaatgagttattgcccaattcttgagtcacaaataaaagcc

SEQ ID NO: 461447 - DNA, 2720 bp, Homo sapiens
  misc_feature (2)..(2): n is a, c, g, or t
  misc_feature (6)..(7): n is a, c, g, or t
gntccnntagattactgcatcttcgtcccctacacttagccacaaaccgccaggcaggtgcccaagcaccgcccgcgctgcgcgggtcccgagccgttctcgacatcggtggcagcctcagccgcgctcacctgcatctccccggaacgcccaccagagggcgctgttggacagcgcgcagagccaagcttatggggcggaagagctgcgaggtcagcaccgccgactggagcactcggggcgggtgggcaggacgagcggaggccgtgggttggagcgtgggagaccttcaggagctcctacgtcctctaagaggcttggcgtagtccggcgaggtctcgggggtgcgcggacaccagcctcctcagcctcaggtctggaatccggcgggatgggggactgggcgacggcattgtgagggctcggcggaggcgccagggggcgctagctggctcctcgcagccgatccaggccgcggcggttccacgaggtccggcgccccgcgccccgcgacccgcggtcctggccaagctgtcagggaaggtgcggcggagaccacccgttcctcttctccctccctccctccctcttcggccggcggggagtggcgcccaccatccagcctgcgcctctgcgccctgcacccccatccgcaccctttctccggccaagtttccctgcgcccccgttcctggtacccgcgccggcctccgtggctcctccacggctctctcctggaattaagcttccgggaagggtttggccgattctcagactggagaaggcgggccccagcagaggcccgagtgatttcgagaagccccgtggctgggcgtcgatgttcgccctggactcagtgacccagtaaccccacagcaggaggaacaggctcgctacggggttagggaaccttcaggcgccgagaaaaagatacgcaacggcaagccatacttttctggacactggctctgggggcgctgctcctctgaacctcgactttccccaggcacgcacctcagagctgagccccctggggactcccaagctctgcgtctccctgagtcctgaggcaggagaggaggaggcttcaggggcggactgagcctcctccccctagccgtaccctgtcaccctgggagcctggaacgtgcatctgaggccagagcgactcttgcctcttttccagtgagctgggggaaagtcaccctcctgaggagaccagccttcgagggcgtcatgagcgcgtgtttggggcaggaaccggccggccctccctgctgtgctaccccctgaaactggatggcccccctttcattcccccagctcaggagaggcttgaccctactggaagctcgagggcgcaggcctggaggaaagagaggaacagaaatccgggctgtgggggagcagctggaaagctggagaagctggaggaaggatgttgctggctgttcttcccccacccccattcctgagtttggggctgcagcccccacaaaatctgccctgcaggtccaagtagtacccagcagccaagcagtagaatttgggcagcaccccggaagaggcttgcaggataggacacagcccacaagaatcatccgaggctgcaccgtgaccagcccctcaagacagagcgagacccaaataacccccgcgggcggacccgcagcgttctgtgactccaccgcggagtccaaaaggcagctgagggtgggagcggaggggaagggaggggggccacaggcgctcgggcgagggaggcgcgtcaatgggccgcaggggccggatcggtggcctaatggattcaggcctgcacggcagaggcgcacccggcggcctgcccgcgctctcaatagcggacaatggagtcccggggtgacctgaacaaagaatttggaagtagttaaactgcagaacacgttctcggcctgggtgcctcctttcaaaaggagcgctgggagaagaaaagaaagcactggggggtgaagggagtgagaaaatgcccaggggaaaagttggtaggtcgccctagttgccgccagctaccagacgccaggaattcaataggaaatgggggagggggtggcccaagtctaccagaccgcaaggagaatcagataaagttctccaggagatggctggggttccggagcagaactgagctttcgcccagggcagagagcacctccccccacaacacacacacgcacacatacacacacacggtcaaggccaggagaagcttccctagggctttggagctagaacaggaaccagtgagtggagggggtgtctgggcccctgtgtctagccctacatggcgctgcttccctccttggctcctctaacaggaggatagggctccctctttgagccctttcgcagagcttttgtttttccttccccatccagttcagaaagactgggttctctctctccaccccttcttcactccccaccccgcacaaccagcaatctaggttcttctatgagaatatatagtttgtattttaaagtcaggcctctaggtgtaaaatatagggccaattattattttatttcattttttcaaaattttctaatgtttccacaatgaacacagccacaacgtaggaaaagaagacatttaaaaggcagtcagttatactggtatcaaactaacttagaagagaaggaacttgaaagactgtggaaaccaaaagtgtaaataaaatgac

SEQ ID NO: 461448 - DNA, 1119 bp, Homo sapiens
accacaacaaacctacaacatatgtacttggctttccagatttctcataacatagctctgccctgcctattcgtaagcatttcccaatatttccccaaacccactggggccacttgggcttggcaggctatggtgacaatgtatccacaatcacgtcagaagtctacggctaaatttagcagaacaattgtcagccagcttccctgtttgaaggtgagagctcacggggacagcaagctcccagcgggtcttcatttactgcttcatgacaagaggttccatgctgacagcatctggggaaacctcgctgggcctcggaggtccttcctatgggtgatatgccacccaccctgggtcgagagtcagagaagcgcggccggtcccactgctggcttcgcctgcctgtttcccacagcttccctctagtcatccacctacacctgctgcccagttccctagaaacctgcctagtgtaaaaggaagcaactctggagaacagaatgagaaatcagaaagcaaggccctgtcctctgagttctgtcctggatggggactgaggaagttttatgtggtccagagaggctgcatcagtctcaggcccctaagccttgcctggttcaacagtattatttcactcacgctggtcaccccattgttagaaagagcaaggaaaggaggatgagaaaggaagagagggagggagaaaattgtccccaagaaaaggaaactattgtctggtaagattcagcccacttttcttgttaaatgatgtgaattcaaattgttgatatatatcaccaacttgacatgtgaaactattgtctcaaagcatattataaaatactatatatgaaaacattgacaaatatactgtagttgatgagtaccagatatgattattgttcttttcatgtgtgattacaggtgatggacagatggtttcctcaatttatataatttaagatacagatcattcccaatacaacttagaatctcattagtcagtacaattttctgaagattttgcccatttctgtctcatactgctgataggcaactgagaggccctgaagacagggtgttctaaaaaaaaaagttgttcttcccccaaatctatga

SEQ ID NO: 461449 - DNA, 3069 bp, Homo sapiens
caactcagcagtctataatccaactcgccttctccacaatgccaaaaggggcaaattttggaattattttaaaatcagtctgatgcctcacacatcacggctgctaaacttgggtatttgtttttcagtgcaatgagcttcatgctgaatactgatttgaagtgtggttcaccacacagacttaaattgtccttcccacaactttatctgagaagcatgacaacggtgacaatcacaggactagttttattggtcaggatgtggtgttactatattaaagcgcttcaagttttcatagcgctcgtcaaacagagacctcggaacgctctgcagacattaattaatgttcgctccggccctggaagccatttcaccaatggaaattccgatgagaaaggaagaaacgaggggttcaaggccgcgccgttgtgagtccgctgcggaactaggaactgaaaccccgtggttcccaatgagccagcgaaagtctgtcgaagtattgagcacccctattgaagactgtgggagttttggcggcttaatgggattgtgttcggtccttcaggctctcctttaaaagattccatggcaccaacgagactccaataaaagggcctctctaattgctttctgactttctatgaaactttctaagctatgctgacatcctcgaatacaactatggaattaaagaggagagaaaggcgaggcacagtgggtgcgcaaagaaaaagaggttctcagcggagcgtgtgtgaggcggggggttacgggggaggggagacggggcgggtgtgaagtctgtgccgggaaaagaaaaatatgagtgttctcttttgtgtgcgcacaaacagccgagcgcggggaggtcgggcccggggtcacgcggctccgggctgcagctgccgccgtggggcggggggtcccaggcggccaccgggcgtcgcggccgcctgcggcatcagcattccggcggcgcgggcggccgctgtcctcgcgcgaccccagcccgtccagagcgcgccccggcaccgaccctcggggcgaggcgagcgcagcccccgctggccaacaaggtaagcgcggcgcggggagcggtggccgggagcctgggcgccaggcgacccctcgacagggcgcacggaccggttctccgccgcgcgggtcgatgaccgacggggaggcccgagtctggccccgacgccctggcccggtgtccccgacgcgcctggagcccgggagggaggcgcgggcctggcctgggcccaggaggatggagcccgactcagggccgtctctccccgcttgggggtgctcaggagggcccagggtacctgcgcgggcaccttggcggcgggtcaccctccctccgagccactccgtccgtgggcagcggccttaccaggtccgagccggacgctcagcgttgccctccgcgagcccccagcctcccctcgagcgccgcgggagccccaggtgcacacacgcaggcctgggccgggcctccaggcctctgtccttcgggcgggctgggaggtggcctggcgatgcccgccgaggggtggagagggcgaagccagggcggcgtcggcgaggccatcaaaggccgggggtggcggcccgccgcgttgcccatgaccaggccgagggcatgaaaggatctttatcctccagtgacattgccaggccggcgcttttctgcggcctccccctcccgcggccctaattggggccggctgctaatgtgattaaaggccagttaaacgtttctccgagcagggggtgggaagaggccgagacccctgccccctccccagggtcacgccaggcccgtggtcgggggtcggcgacggtgccagcctgggacggcctggccaggtgcctgccgattgttcacccccaggcgggcgggccggcgggctcccggggctttatgtaagccggtgggctttgggcccgaccggatttagggattcttttcgcacagtttccattttctggcctttggaactgcgccctaagccctcggggccctccccctccggtgcccggcgctggcggggcccagccacgggggcgggctgggggtgccaggctttgggggtctggagggcctgaagcaggtcgcgttgggggtctcactacctaagacagtgactcaggacagtgggacctgggtgctgtgctgcggccaggcagagcctgcgacccgcggcgccccccgcggcctcggcgacagcccggttcccacgtcggcgacggcgtgggtggtcccgcccgcccgggagggctccgagtcttggccgcccggggcgcggggcctgagagcgagtgtctgcgccgcgctgcccgccgcgccagtttccgaggtcgcccgcgggctcatgccctgcgccctggggccccggggaccttctccaagccggcctgacctggtggaggctgtgcgctgcgctcggggaaggccgggctggtgccgggggcagcgggtcccagctctgaagtgccagcgccggcgccccactccccgcctgctacggtgctctcgcccggaaaggcccgaggccctggaaggagccccgcgggggggcgccgtctggagcagccctcaggggcgccgggctgccgcgacgcagtggctgtaattgcttcggggtacctggggatcgatggcgtggcccagccgggtgtctgcgcctctgaggttgcaaatctggaaccagttaggatgcgggaggcagataataaaaagccaaatgggcgccaggtggaggagtgagctccgcacgttccatcaggtggcccgggccgcgcgctcgggcggcggcagagtctctggggcactcggggcgggcggcagcaggtgggacccgcggcccgacccgcgctagggccgcccaccccctcggaccccggccgggtctctccacagcctccgtgcgcgtcccagaaggaaaatgctagcaaaccggaaggccgcacggggccgagccggcctcagcccggccaggagaggccgtcggtgccccgaggaggaaggggacccggcccgggacggccgccccgcgg

SEQ ID NO: 461450 - DNA, 872 bp, Homo sapiens
agaaggaatgtatgagtgaaaaagaagcaatttgtaaatttactctcttgccttcgtggggatcttcaaattgtttaccctgcttttattccctctgtggtgctgccacgggtgcgcgggctgagcaggccgcccttctccccacttggagaactctgaaacctgagggcctctgccggaagctgctgttcggcccatccgggttcccagaggagccacttttcctcctactagcccggggattgcaaagtatctggatccttaaattctctatcccatatgcccaagacttaagagccagacccagatgtggggcccaactgggggaaagtaggggaacccagggtacagctggggcccacccgaccaatgctggcaggcaccacagacacctcggtccacctttccaatattttgctcaatgtttggggtacccaaggggcagcgtgcccgcatgttgatgcaagtgtgacccctgtggctggaacgccggacagggctttcctaaggccctgcattccgcgcactgacttttcctatcaatgggagagacgcaggctattgacccaacggcctcctcctcgccgcctattgtcgcggctcaatcgcgcacttaccggaagaaaagcgagtttatcttagcttggaggagcctcgtgttgcgagtgtgtgtgtgtgtgtgtgtgtgtgtgtgtgtgtgtgtgtgtgtctcaagggtgaggggaattctgcaaccagaactgcgcagatgggttgtggatagacaatttcagaaaagggccaatttccccttcacaatgagcgctaagtacctgataaatggggttggtgtttattcatgagcaggtacttggagacggcgattagaacag

SEQ ID NO: 461451 - DNA, 1632 bp, Homo sapiens
ccaaatctgcctcgatctccccaggaacctcacagcaaatgaaaagtatgaaatgttcttgaatcaagccaggaaaaacacagacaaagagtataacaaatgtgaaatgctcgatcactttgacgtaataactgaggaagtgccagaagacgagcctgctgaggtaagtgctcatctccagatggaggtagaaagacttatagtccaaagctatgtcctagaacatcagaaaacaaccacccctgatcctatggatgacccctgcttcagccatcggagtcgccgcaaactggccaaaatccagctaccagagtacatcctggactttggctacatcatccttggcgaagtccgaacccacatcatcaagatcatcaacaccagtcactttccagtgtcattccatgcagacaagcgtgtccttcatgagacaggattcagtactgagctagatcgtgtaaagaatctgcctcattgtgaaacggaaatatttgaagtgagatttgacccacagggggccaatcttcctgttggaagcaaagaagtcattctgcccatcaaggtggttggagggccaacagttcacatctgtctccaagccaaggtgaccattccaaccatgactctctctcgtggaaaagtggactttgccacaattcagtgtggacagtgcctggtggaaactattcagctttccaatcatctccaagtcccttgtgaatggttcgtccagagccaaaagcctgttgacaagctggagaaacacatgccgaagtacttaagacagaaactacgcgctgaattaaagccaaagacacggatcttcgaaatccagcccatttctggagtcttggatcctggtgagaagtccaacgtgcaagtgaaattcatgccaaaagaagagaaattctacagccaaaccctggtgtttcagattgcccagagtgctcaaaagcttaccctcctggcacgtgggcaaggtctagagccacgcctggaatttagtccttcagtcctggatctggggccactgctactttgtgcacctggagacgaggccgaggtgatagtgaagaatccctgcaacttccccattgagttttattccttagaatttgatcagcagtatctcatagaagaaaagcagatcttgcggaagctgaagggctatgattcctacaacaccctgctgctgcctccccacaaccctggggagaagctgcccccagaactgtacgagtacttcaaagagataaagaagtcaaaagaggagcagatgagggcgaaatatctggagaatctggcacaggagaatgaaactggtgccctaaaagcagggggtgggcattcacacaagcagaagacgagcccctccatagtcctcaggccaaactccaatcgcagagctgtcctgtgctctcagaattgtgccctttctggcccaccacccctgagttatcccatcatctgcccaggggctcttgtgtgcttggccataaaggttcctcgctgacttgtgggactgtgtcacttatgaggatgcatcttctctttcctgcttctctgtaacctcatcctagaaatgtacccaccttgtttttacttgctttcatctgtgtaacagtcatacac

SEQ ID NO: 461452 - DNA, 1726 bp, Homo sapiens
cctgaattcaaacctacgagccccactccgaagcaggagctgagggtctgtgtttgcgacatcattcatatttttctgaccttcctgattctgctctccttccaacccccactccccaccctggtacagcaaatgaaaagtatgaaatgttcttgaatcaagccaggaaaaacacagacaaagagtataacaaatgtgaaatgctcgatcactttgacgtaataactgaggaagtgccagaagacgagcctgctgaggtaagtgctcatctccagatggaggtagaaagacttatagtccaaagctatgtcctagaacatcagaaaacaaccacccctgatcctatggatgacccctgcttcagccatcggagtcgccgcaaactggccaaaatccagctaccagagtacatcctggactttggctacatcatccttggcgaagtccgaacccacatcatcaagatcatcaacaccagtcactttccagtgtcattccatgcagacaagcgtgtccttcatgagacaggattcagtactgagctagatcgtgtaaagaatctgcctcattgtgaaacggaaatatttgaagtgagatttgacccacagggggccaatcttcctgttggaagcaaagaagtcattctgcccatcaaggtggttggagggccaacagttcacatctgtctccaagccaaggtgaccattccaaccatgactctctctcgtggaaaagtggactttgccacaattcagtgtggacagtgcctggtggaaactattcagctttccaatcatctccaagtcccttgtgaatggttcgtccagagccaaaagcctgttgacaagctggagaaacacatgccgaagtacttaagacagaaactacgcgctgaattaaagccaaagacacggatcttcgaaatccagcccatttctggagtcttggatcctggtgagaagtccaacgtgcaagtgaaattcatgccaaaagaagagaaattctacagccaaaccctggtgtttcagattgcccagagtgctcaaaagcttaccctcctggcacgtgggcaaggtctagagccacgcctggaatttagtccttcagtcctggatctggggccactgctactttgtgcacctggagacgaggccgaggtgatagtgaagaatccctgcaacttccccattgagttttattccttagaatttgatcagcagtatctcatagaagaaaagcagatcttgcggaagctgaagggctatgattcctacaacaccctgctgctgcctccccacaaccctggggagaagctgcccccagaactgtacgagtacttcaaagagataaagaagtcaaaagaggagcagatgagggcgaaatatctggagaatctggcacaggagaatgaaactggtgccctaaaagcagggggtgggcattcacacaagcagaagacgagcccctccatagtcctcaggccaaactccaatcgcagagctgtcctgtgctctcagaattgtgccctttctggcccaccacccctgagttatcccatcatctgcccaggggctcttgtgtgcttggccataaaggttcctcgctgacttgtgggactgtgtcacttatgaggatgcatcttctctttcctgcttctctgtaacctcatcctagaaatgtacccaccttgtttttacttgctttcatctgtgtaacagtcatacac

SEQ ID NO: 461453 - DNA, 1026 bp, Homo sapiens
cgggaatttgtcactgaaatggtgacaggagcctacaggtggcagatgagaactctcaacacagttgtgttagaagaaggatttcctagagagaccctgactcaatgatgatacatggctgaagcattgcatggaaaacgtcgtgggacccagtactctactcgctgctatcaagaacttggatattttagatcctacatgcagatgacatcgtgaagcatttgtctttcggcatctggcttattccacttagcaccatgtcctctagctccatccgtgttgttgcaaatgtcagaatttcctttttttttttgaaagccaaatgaaattcagtttatatatatacattttctttatacagtcatcaatctatggtcattaaattctttcacaaatctacactattataaataatcttgcaattaacatgtatttgacatcataattttatttcctttgacgatataacaagaagtgggatcaccaggtcatatgatagctttatttttcaatttattgactaaccaatcttaccatacgatataaggataccctcttcaccacattcttgccaacatttgttatcttttgtcttgctgataataaccattttaagtggtgtgaggtgatatctcattgggctttttatttgaattcccctgataattaggaatgttgagtacctttttaggatctgtttttcatctgtgggtcttctgaaaaaaaatctaaccaggtttttgccctctgtattaggtcagttgatatttgctgttgagttgtatggttaatttatatatttgggtggaacttcttgttagatatataattgcacatagttttttttactgtgcttgcttttggtattaaattcaaataatttctgaatcaatgacgaatatttttccatgttgtctatgatttatggtttcaggttatgttcatttttagttgatttttgtatatggtgttagagaaggtctagtttcatttcattttttttttgcacatgcatgaccattttct

SEQ ID NO: 461454 - DNA, 2024 bp, Homo sapiens
  misc_feature (5)..(5): n is a, c, g, or t
  misc_feature (7)..(8): n is a, c, g, or t
  misc_feature (10)..(10): n is a, c, g, or t
  misc_feature (14)..(15): n is a, c, g, or t
gtgtnannantcanngaagtagatggagaatacaactcaagtgtccatcgactgccagagggatgaagacgccgcggtgcgtctgtaacccacagggatgaagacgccgcggtgcgtctgtgcatctgtaacccacagggatgaagacgccgcggtgcgtctgtaacccacagggatgaagacgccgcggtgcgtctgtaacccacagggatgaagacgctgtggtgctttaaaaaggagtgaagcactgacataggctgcaactcggatgggccttgtaaacattggactctcctgtgcagcctctggattcacctttgatgattataccatgcactgggtccgtcaagctccggggaagggtctggagtgggtctctcttattagttgggatggtggtagcacatactatgcagactctgtgaagggccgattcaccatctccagagacaacagcaaaaactccctgtatctgcaaatgaacagtctgagaactgaggacaccgccttgtattactgtgcaaaagatacacaggacccagtgactcccagcagtggctctgctcagatcagcgcagagcttgttcgtctcctgagagtggagcacaggacgtggctccaacaccagccatggcatggaagacagagagcagccctgggtgcctgggtcaggtgcattgtgctccctgcaggtggagggagggaagtgctgactcagggcccagagactgtgggttctatacagaacatacacttttacttcatttctgtggatgacatagaaacaaacatgcagtctgtaaacaatggtgattcctacatttgccccaattgctttattccttaattctgcagaatgtcctggcacagaattgcctttctcatgtggaattgtgtcgtgtgttgtggatgtggcttcactccttgtgccttttgtctttacttattttaaattgtatcatttttctgtaataaactgttcctgtgaatagaacagttatgagtcctgtgtttttactgatttttcagcctacaggtggcagatgagaactctcaacacagttgtgttagaagaaggatttcctagagagaccctgactcaatgatgatacatggctgaagcattgcatggaaaacgtcgtgggacccagtactctactcgctgctatcaagaacttggatattttagatcctacatgcagatgacatcgtgaagcatttgtctttcggcatctggcttattccacttagcaccatgtcctctagctccatccgtgttgttgcaaatgtcagaatttcctttttttttttgaaagccaaatgaaattcagtttatatatatacattttctttatacagtcatcaatctatggtcattaaattctttcacaaatctacactattataaataatcttgcaattaacatgtatttgacatcataattttatttcctttgacgatataacaagaagtgggatcaccaggtcatatgatagctttatttttcaatttattgactaaccaatcttaccatacgatataaggataccctcttcaccacattcttgccaacatttgttatcttttgtcttgctgataataaccattttaagtggtgtgaggtgatatctcattgggctttttatttgaattcccctgataattaggaatgttgagtacctttttaggatctgtttttcatctgtgggtcttctgaaaaaaaatctaaccaggtttttgccctctgtattaggtcagttgatatttgctgttgagttgtatggttaatttatatatttgggtggaacttcttgttagatatataattgcacatagttttttttactgtgcttgcttttggtattaaattcaaataatttctgaatcaatgacgaatatttttccatgttgtctatgatttatggtttcaggttatgttcatttttagttgatttttgtatatggtgttagagaaggtctagtttcatttcattttttttttgcacatgcatgaccattttct

SEQ ID NO: 461455 - DNA, 881 bp, Homo sapiens
aatgagggctttgccctcaggctggctgttctcatgatcataaggtactaattagagaagtttcagatgccacatccagacatactttgtagaggaataaaaaaggtgacacaagtgtctccagggtacctgaagaggctgattgtgcaagtgttgaaaaacccgtggactgaattcagccagctgctgcctcagggaaagaactgctgctgccagggtgaagaagcgtatcttatccagacagtgaaccaatccaaaacacaagcagatacacagaaccccacagcgggaggggatggaggcaatccaggaggtcaacatggagaggagtggtttccagtggagggtaggaagatggttaaagctcaacctaggagaaggctgggcagctcagccaaggtggtcatttgcgtggttccaatcagataaaggagcacagaagaactctcagggaggcacactgagctacgtggtcagcctccaatctcctttgagcaagagatggccaagtttggaatgagtttagcaacatgaatcctacacgagctaggagtgaatccagaagcagagaggagggtcactcttggacacaggacctcaaattatcctgttcaaatgacccaagggagtacagaaacaccttggagggtctcctaaattcacctgttcatagatacaaaacgcttatcactgaaacatactctaaaccactagctgttaattcctcaggacataataaattttttttaattgtgcttgtggatttcaaactaaccaaattggttgacagaactgttctacctttgatgtcaattcagttccccaactactgtttgaaatggttaaaataaaaacaacaacaaaaataataaagagtcctt

SEQ ID NO: 461456 - DNA, 457 bp, Homo sapiens
aattcaattttcaagggaagtggtacaggttaagccagatggttagaaaaattgctttcattgttatcttgggaattttcctcctccaacagatggttaaagctcaacctaggagaaggctgggcagctcagccaaggtggtcatttgcgtggttccaatcagataaaggagcacagaagaactctcagggaggcacactgagctacgtggtcagcctccaatctcctttgagcaaggtgagtgctgtcctgacccactttaaagccagctcattagatatattcccattcaaatctaagtctaagttcatgtctgtctctcatcagtctgtttcatctctctctctcatacacacacacacacacacacatctacccctaaagatgttccatgtctctttctcttcctttccatagaaaactgaggcctgattacagtggtattagtcagttacat

SEQ ID NO: 461457 - DNA, 3124 bp, Homo sapiens
acccaattgtggccagacctattaatcctgactaaagcagatataagaggtaatgaatacaagaggaatgaaagcctcaagctcagattctttcctccgctgtgtccagtctatgggtaagcccatgaagggcaacactggaggacactgctgttttatacagttggacaagaatgtcgtagcagtgaaagctcagatctgtccaaagcgttgtgtctgtcagattttgtctcctaatcttgcaaccctttgtgccaagaaagggcttttatttgttccaccaaacattgacagaagaactgtggaactgcggttggcagacaattttgttacaaatattaaaaggaaagattttgccaatatgaccagcttggtggacctgactctatccaggaatacaataagttttattacacctcatgctttcgctgacctacgaaatttgagggctttgcatttgaatagcaacagattgactaaaattacaaatgatatgttcagtggtctttccaatcttcatcatttgatactgaacaacaatcagctgactttaatttcctctacagcgtttgatgatgtcttcgcccttgaggagctggatctgtcctataataatctagaaaccattccttgggatgctgttgagaagatggttagcttgcatacccttagtttggatcacaatatgattgataacattcctaaggggaccttctcccatttgcacaagatgactcggttagatgtgacatcaaataaattgcagaagctaccacctgaccctctctttcagcgagctcaggtactagcaacctcaggaatcataagcccatctacttttgcattaagttttggtggaaaccccttgcattgcaattgtgaattgttgtggttgaggcgtctgtccagagaagatgacttagagacctgtgcttctcctccacttttaactggccgctacttttggtcaattcctgaagaagagtttttgtgtgagcctcctctcattactcgtcatacacatgagatgagagtcctggagggacaaagggcaacactgaggtgcaaagccaggggagaccctgagcctgcaattcactggatttctcctgaagggaagcttatttcaaatgcaacaagatctctggtgtatgataacggaacacttgacattcttatcacaactgtaaaggatacaggtgcttttacctgcattgcttccaatcctgctggggaagcaacacaaatagtggatcttcatataattaagctccctcacttactaaatagtacaaaccatatccatgagcctgatcctggttcttcagatatctcaacttctaccaagtcaggttctaatacaagcagtagtaatggtgatactaaattgagtcaagataaaattgtggtggcagaagctacatcatcaacggcactacttaaatttaattttcaaagaaatatccctggaatacgtatgtttcaaatccagtacaatggtacttatgatgacacccttgtttacagaatgatacctcctacgagcaaaacttttctggtcaataatctggctgctggaactatgtatgacttgtgtgtcttggccatatatgatgatggcatcacttccctcactgccacaagagtcgtgggttgcatccagtttactacggaacaggattatgtgcgttgccatttcatgcagtctcagtttttgggaggcaccatgattattattattggtggaatcattgtagcatctgtgctggtattcatcattattctgatgatccggtataaggtttgcaacaataatgggcaacacaaggtcaccaaggttagcaatgtttattcccaaactaacggggctcaaatacaaggctgtagtgtaacgctgccccagtccgtgtccaaacaagctgtgggacacgaagagaatgcccagtgttgtaaagctaccagtgacaatgtgattcaatcttcagaaacttgttcgagtcaggactcctctaccactacctctgctttgcctccttcctggacttcaagcacttctgtgtcccaaaagcagaaaagaaagactggcacaaagccaagtacagaaccacagaatgaagccgtcacaaatgttgaatcccaaaacactaacaggaacaactcaactgccttgcagttagctagccgtcctcccgattctgtcacagaggggcccacgtctaaaagagcacatataaagccaaatgctttgctgactaatgttgaccagattgtccaggaaacacagaggctggagttaatctgaagagcaccacttctcctctctctcctgaaaaaatttgccactgatatttttactggataaaattcaaaaatgtttcaattcacaaaggctaattgttgaactggtgtcgtagaagaaattgtctacaggagccaaggtgaaagtctctgatgacggcggaactggctccattagaccatggttcatcctcttttaaaaccaaatttttttttcttctggcctacaagtattttttttttaaaaaagaaaaaaagcctacattggcatcaagttctgtatcaatccatcttacattgccatccatgatttaacagactgtagaatcttgaataatctatatcactttaacaaataaatgttttactatgacagaatttgcacattgcctgatttgtgaaagtacccattgcttcaagtgtgagtggtgaaataattattgcaagaacaaatactactcttttacatgtaggccgtgcaaaaaccttaagagattacaagcggctttataatattggaaatatttcttccatgattcagtgcacccagttctttgggagagcagtacagctatttaagcaagtttatactaattttatgcctcagtataggatagaaagtgataaaggctctcttctcctagtaaaacttccaaaatgatcaagataggaatattataatgaatccaaattgattcattgcttttctagggagccggggcaaaagaggttttaataattacaagccttaagtgcacatttctccaattttgcacaagttcagagtaagaacaaagaatatgcatctgctttactaccagcatac

SEQ ID NO: 461458 - DNA, 2064 bp, Homo sapiens
  misc_feature (2040)..(2040): n is a, c, g, or t
acccaattgtggccagacctattaatcctgactaaagcagatataagaggtaatgaatacaagaggaatgaaagcctcaagctcagattctttcctccgctgtgtccagtctatgggtaagcccatgaagggcaacactggaggacactgctgttttatacagttggacaagaatgtcgtagcagtgaaagctcagatctgtccaaagcgttgtgtctgtcagattttgtctcctaatcttgcaaccctttgtgccaagaaagggcttttatttgttccaccaaacattgacagaagaactgtggaactgcggttggcagacaattttgttacaaatattaaaaggaaagattttgccaatatgaccagcttggtggacctgactctatccaggaatacaataagttttattacacctcatgctttcgctgacctacgaaatttgagggctttgcatttgaatagcaacagattgactaaaattacaaatgatatgttcagtggtctttccaatcttcatcatttgatactgaacaacaatcagctgactttaatttcctctacagcgtttgatgatgtcttcgcccttgaggagctggatctgtcctataataatctagaaaccattccttgggatgctgttgagaagatggttagcttgcatacccttagtttggatcacaatatgattgataacattcctaaggggaccttctcccatttgcacaagatgactcggttagatgtgacatcaaataaattgcagaagctaccacctgaccctctctttcagcgagctcaggtactagcaacctcaggaatcataagcccatctacttttgcattaagttttggtggaaaccccttgcattgcaattgtgaattgttgtggttgaggcgtctgtccagagaagatgacttagagacctgtgcttctcctccacttttaactggccgctacttttggtcaattcctgaagaagagtttttgtgtgagcctcctctcattactcgtcatacacatgagatgagagtcctggagggacaaagggcaacactgaggtgcaaagccaggggagaccctgagcctgcaattcactggatttctcctgaagggaagcttatttcaaatgcaacaagatctctggtgtatgataacggaacacttgacattcttatcacaactgtaaaggatacaggtgcttttacctgcattgcttccaatcctgctggggaagcaacacaaatagtggatcttcatataattaagctccctcacttactaaatagtacaaaccatatccatgagcctgatcctggttcttcagatatctcaacttctaccaagtcaggttctaatacaagcagtagtaatggtgatactaaattgagtcaagataaaattgtggtggcagaagctacatcatcaacggcactacttaaatttaattttcaaagaaatatccctggaatacgtatgtttcaaatccagtacaatggtacttatgatgacacccttgtttacagaatgatacctcctacgagcaaaacttttctggtcaataatctggctgctggaactatgtatgacttgtgtgtcttggccatatatgatgatggcatcacttccctcactgccacaagagtcgtgggttgcatccagtttactacggaacaggattatgtgcgttgccatttcatgcagtctcagtttttgggaggcaccatgattattattattggtggaatcattgtagcatctgtgctggtattcatcattattctgatgatccggtataaggtttgcaacaataatgggcaacacaaggtcaccaaggttagcaatgtttattcccaaactaacggggctcaaatacaaggctgtagtgtaacgctgccccagtccgtgtccaaacaagctgtgggacacgaagagaatgcccagtgttgtaaagctaccagtgacaatgtgattcaatcttcagaaacttgttcgagtcaggactctacatacctgttgctctccggctcagatctggnccaagagaagagctgaaagcagca

SEQ ID NO: 461459 - DNA, 3366 bp, Homo sapiens
ggagaagaggccaggcttttgcatcttagagaacattaagcagggagcgcttggagtcttctttgggtccccaccttgagctagacgtgaagttgacccctgggctgcagcatggctgtcgccctcgactctcagatcgacgcgcccctggaggttgagggatgcctaataatgaaggtggaaaaggaccctgagtgggcatcagagcccattctggaaggatcggatagctctgagaccttccgcaaatgcttcaggcaattctgttatgaggatgtgactggaccccatgaagctttcagtaaactctgggaactttgctgccggtggctgaagccagaaatgcgttccaaggagcaaatacttgagctgctggtgattgagcagtttctcaccattttacccgagaagattcaggcttgggcacagaagcagtgtccgcaaagtggagaggaagcggtggccctggtagtgcatttggagaaagagactggaagactaagacagcaggtcagcagtcccgtgcaccgggagaagcactccccacttggagcagcgtgggaggtggcagacttccagccagagcaggtggagacccaacccagggcggtgtctcgggaggaacctggaagcctccactcaggacaccaggaacagctgaaccgaaagcgagaacgtcggcccttacccaagaatggtctgcattcctctaacaagagaagtatcctacgaagcaactacgtcaaggaaaagtcagttcatgctattcaggtccctgcaaggagtgcaggaaaaacatggagagagcagcagcagtggggtttagaagatgaaaagatagcaggtgtgcattggagctatgaggaaacaaagactttcctggcaattctcaaagagtctcgcttttatgaaacacttcaggcctgtccccgaaatagccaagtgtatggtgctgtggctgaatggttgcgagaatgtggcttccttagaaccccagaacagtgtcgaaccaagttcaaaagtctccagaaaagctatcgaaaggtgagaaatggccacatgctagaaccctgcgccttctttgaggacatggatgctttgttgaaccctgcagcccgtgctccgtccactgataaaccaaaggagatgatacctgtccccagactgaagagaattgccatcagtgctaaggaacacatcagcttggtggaggaggaggaagctgcagaagattctgatgatgatgaaataggcatcgaatttatccgcaagtctgaaatccatggtgcccctgtcttgtttcagaatctcagtggcgtgcactggggctatgaagaaaccaagacttttcttgatatcctccgtgagactcggttttatgaagcgcttcaagcctgtcatcggaagagcaaattgtatggggctgtagctgaacagcttcgagagtgcggcttcctccggacaccagaacagtgccgaaccaagttcaaaagccttcagaagagttaccgcaaggtgaaaaatggccacgtgctagagtcctgcgcgttctacaaggagatggatgccctgattaactctcgggcatctgctccttcccccagcaccccagaggaagtcccatcaccttcaaggcaagaaagagggggtattgaggttgaaccccaggaacctacaggctgggaacctgaagagacctcacaggaggcagtaatagaagactcttgcagtgagagaatgagcgaggaggaaattgtgcaagagccagagttccagggacctccaggtctactgcagagcccaaatgattttgaaatcggaagtagcatcaaggaggatccaacacagatagtatataaggacatggaacagcatagggcattaatagaaaagtctaaaagagttgtttcccagagtaccgaccccagcaaatatcgcaaaagggaatgcatctcaggaagacaatgggaaaatcttcaaggaattagacagggaaagccgatgtctcagcctagagatttagggaaagccgttgtgcatcagaggccttttgtggggaagagaccctacagacttctcaaatatggagaaagctttggaaggagcactcgtctgatgtgccggatgacccaccacaaggagaatccttacaagtgtggtgtctgtgggaagtgctttggtagaagcaggagcctgatcagacaccaaagaatccacacaggcgaaaaaccttttaaatgtcttgactgtggaaaaagctttaatgactcctcaaattttggtgcccaccagagaatccacacaggagagaaaccctacagatgcggagagtgtggaaaatgctttagtcagagctctagtcttattatacatcagagaacgcacaccggtgagaagccctatcagtgtggagagtgtgggaaaagtttcaccaacagttctcatttcagcgcccaccggagagttcacactggggagaatccctacaaatgtgtggactgtgaaaaaagtttcaataactgtacgagatttcgagaacatcggagaatacacactggagagaagccctatggatgtgcccagtgtggcaaacgtttcagtaagagttctgttcttaccaaacatcgggaagttcatgtgagagaaaagcctctgccacaccctccatctctgtattgccctgagaacccacataagggaaagactgatgaatttaggaaaactttttgatgatgatcttctcttcctaaatgcccccttagccattttaccctaatctcattcttggaagcaatcttttcttagctatgaagtgtaatttccaagataaacttgagaatataaataaactaaacactttcatcctgttctcacctctgcctctaacttcatcagtctgttcctcctcttctgtgtgtctcagcttctcctttaagaatgtggcgaagatacattgtccgagttcagaatgaaatacccttcagtacattgaggccactgcaactggattgctaagttcggcaacattcaagatcttccatatgggtgagagttgtcttcaaggatataaaaaatgccaaaagtttttttgttgttattacctactccgtgagatcctggatgaaacttgataacagattttcacatttagatagaactttgaggagtctgatcggaactacatcaaatccatcttggttttgaagagatccacaaaagaagagtgaagattttatagctttcctcagaagtctgttacagtgtacctttttttttttttttgtcaagaagttgatccaaatagctagggcagaatccctgtattgtcactgaaatcctgttactaatgccttgccctccatggag

SEQ ID NO: 461460 - DNA, 1004 bp, Homo sapiens
ccccttctaatgtgacttatgaactttatcggtatgaggattcaacaccttttcaacaggtccacgaagaacccaataattctgaaagaaacatcgaaggctggaaaaacatgtcagatgattgtcaggagaatatatgttgcacatctcagtggtgcccatgtaagctgcctatatgccaggtatgacctggtgtctgccagctccacacctgcccttctctgctcagtcatgctggggcttggagtctgtgaactacccttcccaggctcccctgccagctggcttcctgttatgttctgccaaaataaggcactgtcaggagttcagaaagcaagaagagggaagggaaaaaaaggtcttcaattttgcaaaagggcagccatggtacaccactcagttgttcattcacggtcttcaacccactttaaaaggcataatggaaatgacaagaaaacagatacaaaagataagttataccagccaaaatatcaacaaaatggtgaaaaatcttaattccctgtctgcaagaaaaaaaatatttattagtgttaaaaaaaaaaaaaaaaagactgtagaaatccaaaagtcattttgaaagcaacgaccgttttaagggccaaaagagaaatacgggctgtttcgagcgtgaatcaaagtgtcaaagaacatttggaggctgctcggtagacatgcactctctcaaggacaactgagatgcatgcctgactgagtcacggctgagcacccagcgctcagcagtcagctccagagctgcagaaagtaacccagtgagacccgcggtgccggctacaggtccctgacagctgatacccaacttcaatacaaagatcaatttgctgctagtccagagaaattgaccttcgtgttcagactcatgggcagaaaaagtcaacagtgatttaaaaatgaaccccaaatcaattattctaaggaatttaacgctggttcaatgactgaaaattgtcattgcctggctctga

SEQ ID NO: 461461 - DNA, 3056 bp, Homo sapiens
cgccggcggcgcggacctccttgtcaatgggagcgcggggccgggctgcccgcaggacggtcaggtgggccccccagctcgctgccagcgcggcctctgtccctctcgggccggctctccatcttgtcgcccgtagcccgccttctccgtggctctccagccgctggggccgcagagccgaggccgggttacctcaggaaacgcgatgtggtagtgggtcggaataaacccgcgcgccccagaattcgccttgggggcgtaaggacagattcggacttttcgtttcctatgtccacatttattgagcacctaatatgtgacacccgaggctgtaagaagaggaacgcagcgggcggagaaaagccagagctttttctctgtgagccgctgcctccagggccatagccgaccctgctccgagatcccagccgccgctctccgtgcaggaggggtgcccaccctggggaggccagggtgcccggagtggagggacagggcttcaagcgaccgggagtttccagcaaacccctgatccctgagcagtttattttaaaagcttttgcaaatgttggacggtttcgtttggtggaggccgtctttgcactaaattctcctgtcctcccccttcgaaacgcacaaaatgaattttgaacagattttggatgagaggttttcttccttttttcatcttctgaaacatttccccctcatttcttctcagataaagacccagaaacccgggacagttactcggtgtacagctagtcaaatactgaggaaaccaggtcacgaacagttattctccttactactacctgtaagtagtaagccagtgctcctttcacatgtttgtggactatctgagaaactgcatgctatatgcacatataaagtgtgcttcccagacttacagaaagcatacaaccccagaacccactcatattcaggttcccccaaaggacagtattttatatactctctaaaagaaacaacggcaaagccctttactgcatgtggctcctggatctggagggcaattcattatatcaataagattccccagctctgacttacagaatgtgggctctgattagtttgtatctggcattaatgagggaaggtgctgatcaatttttttatgtccctaaaagatgagtcttctattcagcatttccctaactcatacttgtgcacatctctcagacctaccagagtggtggttctcaaatgttgtgcacaagaattacccaagatgctttttaaagagcagatttctgggtttaatccctagaatttctgaatcagtaagtttgaggctaagcttaggaatcttcatttttacattcataccttctccctaagtactcaggtactttgggaaaacattagtaaactgtaaactccttttaggggacagagttgtcttattactttgtatatatccccaaaggtcaaggatggcccactgcccataagtcatcagtttcaatatttgttaactaaacaagggctgatttagcaagggctaaatcagacaatgtgacaaagctcttcccacctctgagacttttttatttttgtggtagaattttttttacttgattattctagaaaatgcttaggattggatgagttcaaaaaggtaatggcttgtcttcaagtaaggctctgaaaaatgaaatgatacagattttaaacaaacaaatgggagatttataggcctatgccagcttgtgagaagagtgtttgccaggtgtttttgacattcccgtcagaaaattttttgctcaattttgtgtcccattttgttattttgtagaattcatgaaaaattagttttcttatttataattttagggataagagatgtcataagaagaaataaaggttttgtgtacttttaagtgaagggattttcatgaaggagcagattaaggtttataggtaattgaattgagctcttaagttattgaagtccattatgtggtcactgttgacaacataatttgttgagtgttctttgatggttgaagaaccccaaagagggtgtgctttgtgattttttttttcaatttaggatagctagagaatcccacagggatgcctttggcttgaatagagtgaaaagttggagggggccaagactagtgctttcacattgacaataaaatggaccaagagctgaaattgaagtcagaagcttggcttaatatgaaagcgttacctaaagtcatggattccaattggaattttcttggaaaacttttcattagaaactaagattcttatttgttttgatgggagtaatagtccttttcaacctacctgggctggagttgacagaaaagattagcaggaacatatttgtaaaatatttatttaatacttattatatcctccagaagacaggagctttcctgacacaaagcatctgctccctcaaaggtgaaaaccagaaattggcagtagatgatatgcaactattaaatataatgtgaagctttagtctcaataggtttggacaaataataaatgaaagtaattttcaaaactgaagggaagtaataccaagaaagtcagcagagtgaaaagaacactggatagaatgaagagacaagactcttagtctctggccaactttgggagacttaattcactttccaggcctcagtttcctcaatcaagaaattggattttaggcatcttttatccgtaattctaaatccgagttgcgaggacagagaacctggaggactgacactgggaagattacagaaggcagagctccagagggcaaagcaagaaaatgttacaaatctatttattcagtccttgaatctgagtatatctgttccactatcaaaatggttccctttacttttttcttccctttaagtcaagcatgaatttttcatatttcgtatagtgtttgctttagaaatataacaccttgtaaacgtaacaagccaatagtatgaaaagactatggattgactttgattttcccacttagaagtgacaccactcctagatatactggaatatttttttagccc

SEQ ID NO: 461462 - DNA, 5303 bp, Homo sapiens
  misc_feature (1)..(1): n is a, c, g, or t
  misc_feature (3)..(3): n is a, c, g, or t
ncnatcagcaccgactcccccgctctcggcgaggcgcctccagctcccgggaatgagaaatgtgcccgccgcagcaggggcccacaggaatgaagggccccggcgctgcgtaggcccaacagttccccgcgctctcgcccccggcccagccccgcctttcttcccccgcctcggcagaatggactcaccagggggcgaagaactcgacgagcatgaggcccgcagagcccgtgtcggagatgcgactctcgaagttgtcgtccgtgagttctagcacgtcggaggcagcggcgaggcgggccgcggcaagaagcagcgccacacccgggaacagcgctaggcggcggaggcgcatggcggcgaggtggggtggggacggccggaagggtcgcggctcggctgggactgcggaggtcgggcgcgcgaccactaacccgctgcttgcgctcgcgcgtctggcccaggcggacctgcagccggaggtcccaacccccaaacccggcttgggccgctgtgtggcagccgctgattggctgcgcgtcgccttcgtcgggcgggcgggaccaactcgttaccgccgagtggccggagcgcggggcggggccgaggcggcgagtgtctgggcgagcgtggctgggcccggtcctgggctgggggcaggggctagggccgggtcccggggtgagccgaaacctgggggtcgggcggggcgggaaatggggcgcagtgaggctgggagccggccctgagctcgtcctgcgtaggggtagccgggctcagggggcgcctgagctggaggtggaagcgtgaagtcaggactgagtgggcgaagagaacctgggctgaggatttaccagctcttacccagcttttacaaatctagacatgcttttctgaagcattcctccctataggtcatttggactgggaaactcttgtgcacgagaatctgcccaggctaatggaaatggatcaggatgaccgtgtttggcccagagactcactcttccgatattttgagttgctagaaaagcttcagtgtaacctagaggagcataagaagttacaagagtttgcagtgcaggcactgatgaacttggaagacaagtaaagcaatggatggcttcaatatccttgggcccagcaaaagataatgaagggaattgttggaaatagagaattgaaaatataaacattcagatagaacaatatctgttcattaaaattaaaaagtataagtgtctaggccgggcgcggtggctcacgcctgtaatcccagcactttgggacaccgaggcggatagatcacctgagttcgggagttcaagaccagcctggccagcatggtgaaaccctgtctctgctaaaaaatacaaaaaaaaaatttagccaggtgagaataaccagaactcacctccggtaccagtgttcacttggaaacatggctctcagcctctggcccctgctgctgctgctgctgctgctgctgctgctgtcctttgcagtgactctggcccctactgggcctcattccctggaccctggtctctccttcctgaagtcattgctctccactctggaccaggctccccagggctccctgagccgctcacggttctttacattcctggccaacatttcttcttcctttgagcctgggagaatgggggaaggaccagtaggagagcccccacctctccagccgcctgctctgcggctccatgattttctagtgacactgagaggtagccccgactgggagccaatgctagggctgctaggggatatgctggcactgctgggacaggagcagactccccgagatttcctggtgcaccaggcaggggtgctgggtggacttgtggaggtgctgctgggagccttagttcctgggggcccccctaccccaactcagcccccatgcacccgtgatgggccgtctgactgtgtcctggctgctgactggttgccttctctgctgctgttgttagagggcacacgctggcaagctctggtgcaggtgcagcccagtgtggaccccaccaatgccacaggcctcgatgggagggaggcagctcctcactttttgcagggtctgttgggtttgcttaccccaacaggggagctaggctccaaggaggctctttggggcggtctgctacgcacagtgggggcccccctctatgctgcctttcaggaggggctgctccgtgtcactcactccctgcaggatgaggtcttctccattttggggcagccagagcctgataccaatgggcagtgccagggaggtaaccttcaacagctgctcttatggggcgtccggcacaacctttcctgggatgtccaggcgctgggctttctgtctggatcaccacccccaccccctgccctccttcactgcctgagcacgggcgtgcctctgcccagagcttctcagccgtcagcccacatcagcccacgccaacggcgagccatcactgtggaggccctctgtgagaaccacttaggcccagcaccaccctacagcatttccaacttctccatccacttgctctgccagcacaccaagcctgccactccacagccccatcccagcaccactgccatctgccagacagctgtgtggtatgcagtgtcctgggcaccaggtgcccaaggctggctacaggcctgccacgaccagtttcctgatgagtttttggatgcgatctgcagtaacctctccttttcagccctgtctggctccaaccgccgcctggtgaagcggctctgtgctggcctgctcccaccccctaccagctgccctgaaggcctgccccctgttcccctcaccccagacatcttttggggctgcttcttggagaatgagactctgtgggctgagcgactgtgtggggaggcaagtctacaggctgtgccccccagcaaccaggcttgggtccagcatgtgtgccagggccccaccccagatgtcactgcctccccaccatgccacattggaccctgtggggaacgctgcccggatgggggcagcttcctggtgatggtctgtgccaatgacaccatgtatgaggtcctggtgcccttctggccttggctagcaggccaatgcaggataagtcgtgggggcaatgacacttgcttcctagaagggctgctgggcccccttctgccctctctgccaccactgggaccatccccactctgtctgacccctggccccttcctccttggcatgctatcccagttgccacgctgtcagtcctctgtcccagctcttgctcaccccacacgcctacactatctcctccgcctgctgaccttcctcttgggtccaggggctgggggcgctgaggcccaggggatgctgggtcgggccctactgctctccagtctcccagacaactgctccttctgggatgcctttcgcccagagggccggcgcagtgtgctacggacgattggggaatacctggaacaagatgaggagcagccaaccccatcaggctttgaacccactgtcaaccccagctctggtataagcaagatggagctgctggcctgctttagtgcgtacctgcatatgcccccagaaaacctccagcagctggtgctttcagcagagagggaggctgcacagggcttcctgacactcatgctgcaggggaagctgcaggggaagctgcaggtaccaccatccgaggagcaggccctgggtcgcctgacagccctgctgctccagcggtacccacgcctcacctcccagctcttcattgacctgtcaccactcatccctttcttggctgtctctgacctgatgcgcttcccaccatccctgttagccaacgacagtgtacagcagggctacagagggtcagaggaaaacagtttggaggaagacaaagggttaagacccatgactcctcgcagcctggctgccatccgggattacagcccaggaatgaggcctgaacagaaggaggctctggcaaagcgactgctggcccctgaactgtttggggaagtgcctgcctggccccaggagctgctgtgggcagtgctgcccctgctcccccacctccctctggagaactttttgcagctcagccctcaccagatccaggccctggaggatagctggccagcagcaggtctggggccagggcatgcccgccatgtgctgcgcagcctggtaaaccagagtgtccaggatggtgaggagcaggtacgcaggcttgggcccctcgcctgtttcctgagccctgaggagctgcagagcctagtgcccctgagtgatccaacggggccagtagaacgggggctgctggaatgtgcagccaatgggaccctcagcccagaaggacggctatccctggaggaactctgctccttgcaccttctgctaccaggcctcagcccccagacactccaggccatccctaggcgagtcctggtcggggcttgttcctgcctggcccctgaactgtcacgcctctcagcctgccagaccgcagcactgctgcagacctttcggcagcctattcccaccacctggccagactgcctgcttcccctgctcccattaaagctgctacaactggattccttggctcttctggcaaatcgaagacgctactgggagctgccctggtctgagcagcaggcacagtttctctggaagaagatgcaagtacccaccaacctgaccctcaggaatctacaggctctgggcaccctggcaggaggcatgtcctgtgagtttctgcagcagatcaactccatggtagacttccttgaagtggtgcacatgatctatcagctgcccactagagttcgagggagcctgagggcctgtatctgggcagagctacagcggaggatggcaatgccagaaccagaatggacaactgtagggccagaactgaacgggctggatagcaagctactcctggacttaccgatcaaatgagataacacctgaaagaactttgtaaattgtatagcacgtacaaacaagaagggacctcttcacaagcagaggaagggtggtcctgtggaaaaaaacgggaattgggagtgagagacctcaacatttgatctctgtgaacctcagttttttaatctataaaatggggaaatgttaatggtacttaatatttggagcttttgagtccattagatcagcttgatggtgggaattggccctggagctgtttactgtcagttcctgtccagcttcactaaatttggtctggggtcacatcttagctggggactgtggggttctgtggtcccttctc

SEQ ID NO: 461463 - DNA, 1125 bp, Homo sapiens
ggcctcccaaagtgctgggattacaggcgtgagccaccaggcctggcctgttttgttttgttttgttttgttttgaagacagtatctcattctattgcccaggctagatgcaatagcacgatctcggctcactacaacttctgcctcctgggttcaagcgattctcctgcctcagcctcctgagtagctgggattatgggcatgcaccaccatgcctggctaatttttgtacttatagtagagacggggttttgccgtgttggtcaggctggtcttgaactcgtgacatcaggtgatccacctgcctcggcctcttaaagtgctgggattataggcgtgagccactgtgcccagctagtgacatcttactttctacacaatcttatctgataattctgaataaatctgaacattcatgtaccaacatccccaactacctttttatttttggataaaacaaagtttcttagaactactgctgttatcagtagaactaacttccttcttgcgtttttgtctccaaactctgcttcgttccacggcctgctggcatttgtcatgtgctcttccgccacgtgtgctcttctgccggcatgctcctctcaacgccctctcgaggtccagccgctgtgtcttcttctgccaatgtgttcctctagaagtccagccgcttgtgtgtctgcctgctaggatggagtcccctgtttccacaccagcagtgctgccaatacaccttttggtgccagtggtcaacaatgacatctcatctccctgtgagcagatcatggttcgtacccgatcagttggggtcaacacatgtgatgtggctctggccacagagcctgagtgcttgggcccctgtgaacctggaactagcgtcaaccttgaaggcatcgtgtggcaggaaacagaagatgcaaactacactgtcttcaaacagaaaagtccttacagctcagagagaagctgtgaatgcttggcctctgaggggaatggaggacactgaggtccctgtagaactgagccaccttgctgagaacaggtttctggttttggaagactcgtacgtaatttgacccttccttacagtcagatccatgaattgaggatgaatggtttgccagg

SEQ ID NO: 461464 - DNA, 1731 bp, Homo sapiens
caccgtggatcctccttccatacagaaatgatactctaggatccctgaaatttaggaaatgatactctaggacatggttagagtggacagtgtcctaaaagaagtgcagatgaaatgctctgaagcttccaagggagggagaatttcttccggtgggaagataggccagtggtttgtgacattgccgaagaagccctacagtgccccagtgtcccagatggagtccatcccagcaacctcagaggctgccagcccaccagcaatcctagttacagtagagtcccccgagatggatttaaatgattttgttaaaatcccccttacgtttgggggtgtggtagagggagaagaggaagacagggctgttatgcacctgagactgtgtggcgatgacagcccaatgagtgaatctctgcatttcattaaacttcctaggactgtccttgtggatgaagatgccaggcctgaagaaaaagaactaagaaaaacgaaagcttccagtgtgatctcagatgaaataaaaattagctctactgaaatagaaagaatatactcaagccagagccaggtggaggatcaggaatccctacagacctgtgaacagaatgagatgctttccattgggatagaagaagtgtttgatattttgcccctgtttggagtgttgcagccacacagtagccaccaaatatcgttcaccttctatggacacgctaacatcattgcacaagctaaagctctgtgtgaagtggaagaaggacccacctacgaaataacactgaagggagaggcgtccctggtcaactattcctttgacaccaaggatattcactacggattacagctgtttgaccatgtcacagagagggaaatcacgctgacgaacatggggaaagttggctttgagttcaaggttctgactgaccaccagtcttctccagacaaccttctccctggagtgccactaatcctgcctgtgtctgtaagtaaatggtgggaggggcccgaattcaaacctacgagccccactccgaagcagtaatttaatgagttgaacctgtactgtagcacattcgttttcccttttctggtctttctaccgcgtagggctttatcagttcacatcaagagcaggtattaaaagtttactacctacctggagtacctgaggtctttaaaaggagtttccagatacagatcgcccacctggacccagaaaatatcactctgagcggagagggaatctttccccaaatctgcctcgatctccccaggaacctcacaggtagtacttcacactggagtagttccccactggggacaaaacaagcattttagctttgcttattggaagattgctggctacttactttatttgcttggaaatgccctgtggttctcttccacgttattctgcaattgccaaattggtgacctgagtttactgcgacaagaaatcgtctatggcagccccaagtgaagaaccctggccaatttggccattattgaattactgacagagggatcaggaaatttacctccaaaagcttttcctcccccatgcactttccttctggccccagtctttccccgagctgtcctttccctgtgacattctcctagatgccactgggaaggtaagagccaatgagcttccaggagtagaattctcaaagtataaactgcacagaaaggcggacacagattctgagcccttattttggcattaca

SEQ ID NO: 461465 - DNA, 936 bp, Homo sapiens
ccatacgggtggcctccgtggatatggagctccttcattttgttccaaaaagagctctgccaggctttaccattgccctggaggtgcacaggcgcccgtatactcgagcacaaccatgggctcaccccaagcgcgcacacctgcacccacgcgtggaaactcctcacatctcctttctttcctctgctccccctctctgcccctggtactccggatccaatccttggcttaggaatccactcaagccacgtctggctgctttgttccagaggagcgcagctccgagactgcacttcagcggtgcagcctccctccaggaagaccacagaaataaaccaaagggacaccgcggacagatgtaccagaggacaccactgaagtccaggagaatctccaccaaaaccatcagcgttttccttgtagctttctgtccctcgaagtggaaagttgaggtttctgagaagtccacggagagaacctgcagcaaactgaagccacagactccgaaggcatagggagaaaaaatgcttccatccccctttcactttaaacttgatcgcttctgggacttcactggagggcggtggagttgcaccaacctggagtacaggcagatcccagcgagcacttccaagtactttaggacgtgggggtgactcttttttcttcaggattgtcccacttgccaccctttccagctgagctgataggaaccaatgaaagtctaggcgatgaggattttccgttacctcagggatcaaagtataaaatgttgaatgagaaacccgaagaccttgcatcgctgggctgaataacttgttttcttttttatggtgtccagactgaggtagggaggggacacactgacctagctgtaagaagtcaagggttgggacaaaacaaagttcaaatatatactggaatttgtgtgtgtgt

SEQ ID NO: 461466 - DNA, 1920 bp, Homo sapiens
ccatacgggtggcctccgtggatatggagctccttcattttgttccaaaaagagctctgccaggctttaccattgccctggaggtgcacaggcgcccgtatactcgagcacaaccatgggctcaccccaagcgcgcacacctgcacccacgcgtggaaactcctcacatctcctttctttcctctgctccccctctctgcccctggtactccggatccaatccttggcttaggaatccactcaagccacgtctggctgctttgttccagaggagcgcagctccgagactgcacttcagcggtgcagcctccctccaggaagaccacagaaataaaccaaagggacaccgcggacagatgtaccagaggacaccactgaagtccaggagaatctccaccaaaaccatcagcgttttccttgtagctttctgtccctcgaagtggaaagttgaggtttctgagaagtccacggagagaacctgcagcaaactgaagccacagactccgaaggcatagggagaaaaaatgcttccatccccctttcactttaaacttgatcgcttctgggacttcactggagggcggtggagttgcaccaacctggagtacaggcagatcccagcgagcacttccaagtactttaggacgtgggggtgactcttttttcttcaggattgtcccacttgccaccctttccagctgagctgataggaaccaatgaaagtctaggcgatgaggattttccgttacctcagggatcaaagtataaaatgttgaatgagaaacccgaagaccttgcatcgctgggctgaataacttgttttcttttttatggtgtccagactgagcaaagaaacatatattggggaaaggatactgtattcagtaaattgtgctggaaaaagtggtaagccacatgtagaagaatgaaactggatccccagctctcacctaatacaaaaatcgactcaagatgcatcaaagacttaaatataaaacctgaaaccttgaaaattctagaagataacaccagaaaaactcttctaaatgttggcttacgcaaagaattcatgactaagacaccaaaagaaaatgcaacaaaaacaaaaataaataaatgggactcaattaaactgaaaagattttgcacaccaaataaataatcagaagaataaacagaaaacccacagaatggaagaaaatattcaccaactatgcatctgacaaaggactagtatccagaatttacaaggaactcaaacaaataaatgaattcaaatatcccattaaaaagtgtgcaaaggacatgaatagacaattgtcaaaagaagatatacaaacagccaataaacataaaaaaaaatacagcatcgctagtcaccagggaaatgcaaattaaaaccacagtgagattccaccttactcccgcaagaatgtccacaattaaaaagtcagaaaacaatagatgttggcatggatttggtgaaaatcacatcagtgaatacagatttgggaagaaatgtgcataactggtttcagctagccaacacgctggtcccagtataccactggctacggcattctaaaagtgtcctcatatgtatctattaaatattcaagaactttgaccaatatattctctgccaaatgctctcaagaaatcttggtggagatggtgtcgggggtgaataatttgtttctttatgcactgactattacagagggtataaaaagaggtgtttttactaatatgcacaatgtttttatataaaatgttgctataccatgcagtaatgtgtgaaaacaatgaatgtgacaatattcagttaagagaagttctgtttctgagacaattcttttttatttatttagctatctatttatctatctatctatctatttatttattttactttaagtt

SEQ ID NO: 461467 - DNA, 857 bp, Homo sapiens
  misc_feature (1)..(1): n is a, c, g, or t
  misc_feature (4)..(4): n is a, c, g, or t
  misc_feature (8)..(8): n is a, c, g, or t
  misc_feature (10)..(11): n is a, c, g, or t
  misc_feature (13)..(13): n is a, c, g, or t
  misc_feature (16)..(17): n is a, c, g, or t
  misc_feature (19)..(19): n is a, c, g, or t
ngtntctntnnanccnnancagaagcacactgttgctaaatccatcagctttaatattcgagactgaataagagtgttggagcaccagtgtgagagacaggagggagcccaggctctcaccttcctccaaagaccaagcatggagctgatcagccacaaaattccatccagcatatcagtgtccctgcaggtgacacgcttaggattgaaaatgcagcacaattatcatttccctactcctagaggtagtttttctttcaggcagagagaaaagcctgtgggaaggcccagtgggagcgaggaaggaaaatcgttcaggtgggaagagcagcgtggagaaggaagcaaaggggacagccccctcctggagataaggccagtgccaccgagagcagggcagcactgccctggtggcacctctggggccgccggcctgggctccctggctcctcctgttcctgctactcatgctcccatcgccattggctttacttggaattctcctcctgctactcccaggggctactacggagagaacttgcttctgttcctgggacctaagatcaaaggagccttttctgtcagcgccttcataccttggactcttccagaacttattcttggttaaagccccaaggctttctcatgagagctgctatctggctgcccttgtgcagccgccgcttgggttgactcaggctgcaggccctgagcgtgttgtttaagccttttgtttgttttagtctgtctttccagcatgtcgaagtctttctggtctctgattctgccatcctgtggactttctatagctcccgcttccaatgatccacaaatacggtaaacgtgccttctgggtc

SEQ ID NO: 461468 - DNA, 1938 bp, Homo sapiens
cacacgctccctccctccgcgctctacccctcgcccgcccgccgcgcacgcagccggccccggctcccggcgccccgcgcccgcgccccgcgccccgccaccgccgccgccgagcaaagccgggctgggcttggagctgctcatggagaaagtgccaggcgagatggagatcgagcgcagggagcggaagcgaggagctgtccgaggcggagaggaaggcggtgcaggctatgtgggcccggctctatgccaactgcgaggacgtgggggtggccatcctggtgaggttctttgtgaacttcccctcggccaagcagtacttcagccagttcaagcacatggaggatcccctggagatggagcggagcccccagctgcggaagcacgcctgccgagtcatgggggccctcaacactgtcgtggagaacctgcatgaccccgacaaggtgtcctctgtgctcgcccttgtggggaaagcccacgccctcaagcacaaggtggaaccggtgtacttcaagatcctctctggggtcattctggaggtggtcgccgaggaatttgccagtgacttcccacctgagacgcagagagcctgggccaagctgcgtggcctcatctacagccacgtgaccgctgcctacaaggaagtgggctgggtgcagcaggtccccaacgccaccaccccaccggccacactgccctcttcggggccgtaggacccctaactccacccccctccctggcagcacctcgagcagaaggccgagttctgaagaccctccttgacgctccatttctgggtgccaaggaagctggaggaatccctgactcaacttccccgaaggaggcctctgtggcggccagggtccccccctggagctgctgggaggcggcgctggctgcctggatgctgaccccagcgcggcgggcagagcggggcccactcttcttagcttttctactcactgttagagagagacctagctgagcggctggcaggaagcgggacaggtctaggagtcccttagggaataaaccagccccgtttctatcagcccggccagcatgcaggtctccacatcaccatctagagtatcacgcacacatctaccatatatacagatatattctatatacgagctatatataaatatatatatacatatatatatacacacatacatatctagaatgtgtatccgcggcgcccagaagcctcggtttggcccacctgtgagtggggcagggaggggttccggttgtgcagagaacagagtgttctggcaaagaggaaatcccacagcagcgcagaggacctgggcctggaggggcagggctggggcaacccggcttggcggcaaagcccagccccttctcagaccagctccccacattcctgaattccacttccaggcagaaaggagtgggctccccctactccctcagaggaactgactcaccggctgtcctagaatgggcaggggcagagcgaagttctgggtgggatgaccgcactgggggaggggcctcagtccagaaacctcgaccgctagctccacctgccttggccaccagggcagccccgggggatccgggctgctgggcagcaggtcggcgggaccacatgcctgggtctcaccctcagctccgagggccgagggctttccccaccccaccctcctcctggccggcagtcggccctgtctattcatctgcgtcaggcttgccaggggggccccccgtgtgtgccccttggtcacgtgtgtcgtcttcaaggatgttttgctgctgtggctcctgctgtgtcccctcctggcccatcctcatcctcatcttcatcctcatcctcatctgtgcaaccgcccgtcctccttttctagtttctgatgtttgtaaccagacccagctgtgtcattaaacagacccgttcttgctgta

SEQ ID NO: 461469 - DNA, 1863 bp, Homo sapiens
  misc_feature (15)..(15): n is a, c, g, or t
  misc_feature (22)..(22): n is a, c, g, or t
ggctggtacggtccnggagtcnttgggatcgccgccgagcaaagccgggctgggcttggagctgctcatggagaaagtgccaggcgagatggagatcgagcgcagggagcggaagcgaggagctgtccgaggcggagaggaaggcggtgcaggctatgtgggcccggctctatgccaactgcgaggacgtgggggtggccatcctggtgaggttctttgtgaacttcccctcggccaagcagtacttcagccagttcaagcacatggaggatcccctggagatggagcggagcccccagctgcggaagcacgcctgccgagtcatgggggccctcaacactgtcgtggagaacctgcatgaccccgacaaggtgtcctctgtgctcgcccttgtggggaaagcccacgccctcaagcacaaggtggaaccggtgtacttcaagatcctctctggggtcattctggaggtggtcgccgaggaatttgccagtgacttcccacctgagacgcagagagcctgggccaagctgcgtggcctcatctacagccacgtgaccgctgcctacaaggaagtgggctgggtgcagcaggtccccaacgccaccaccccaccggccacactgccctcttcggggccgtaggacccctaactccacccccctccctggcagcacctcgagcagaaggccgagttctgaagaccctccttgacgctccatttctgggtgccaaggaagctggaggaatccctgactcaacttccccgaaggaggcctctgtggcggccagggtccccccctggagctgctgggaggcggcgctggctgcctggatgctgaccccagcgcggcgggcagagcggggcccactcttcttagcttttctactcactgttagagagagacctagctgagcggctggcaggaagcgggacaggtctaggagtcccttagggaataaaccagccccgtttctatcagcccggccagcatgcaggtctccacatcaccatctagagtatcacgcacacatctaccatatatacagatatattctatatacgagctatatataaatatatatatacatatatatatacacacatacatatctagaatgtgtatccgcggcgcccagaagcctcggtttggcccacctgtgagtggggcagggaggggttccggttgtgcagagaacagagtgttctggcaaagaggaaatcccacagcagcgcagaggacctgggcctggaggggcagggctggggcaacccggcttggcggcaaagcccagccccttctcagaccagctccccacattcctgaattccacttccaggcagaaaggagtgggctccccctactccctcagaggaactgactcaccggctgtcctagaatgggcaggggcagagcgaagttctgggtgggatgaccgcactgggggaggggcctcagtccagaaacctcgaccgctagctccacctgccttggccaccagggcagccccgggggatccgggctgctgggcagcaggtcggcgggaccacatgcctgggtctcaccctcagctccgagggccgagggctttccccaccccaccctcctcctggccggcagtcggccctgtctattcatctgcgtcaggcttgccaggggggccccccgtgtgtgccccttggtcacgtgtgtcgtcttcaaggatgttttgctgctgtggctcctgctgtgtcccctcctggcccatcctcatcctcatcttcatcctcatcctcatctgtgcaaccgcccgtcctccttttctagtttctgatgtttgtaaccagacccagctgtgtcattaaacagacccgttcttgctgta

SEQ ID NO: 461470 - DNA, 2275 bp, Homo sapiens
gttcggcacaggccaggctcctgccctgctctgctgccaaagatgagtttgtttacagccaggacacaagacttcctgcttccagagaaaagggcttttttacaagggccaagagagacccagtgaatcagaaacacatggcccaagttccccagcacgctgcccgtcctgccctccccaccctgccctagggactaagatctctccaaaccccaaacattttgaaacggccgaagtctcctcctccgcccacttctgctccttgtggactgaatggagatgggctaccgtggaaactggcaccccatgggggttactcccagctgtcaagtggtggggtggtcccctcatccctttacaccctctagcccacccctagtgtccctggcctgagcctgcagagcctccctgctgccagggtccccatgggctcgagggtaggatggagttacagagtagagtcctagaaggccctcgcccaacttctcttatcagggaagcaggggtgggccaggcgccactgtttattgagccgtctctgctccagggtgtgcgcctttgcgtgggtggggggtggggggggggcgcaatgactgcagggggcgctgtgtgtaccgagaatacgagaatacagatgggtggcccgaggagggacgagacaggccggacagaatgcgccacgtttcagaattaatggaaaaagagctcacattggtatcgtgctttgcagtttgtgaaacacttttttacccagtttatgtcacaagacagacattattcacattttagagaaaaagatccggagctcccatgggccagtagacttgcctgagatcacacagcacgttcgtagcaggacggagactagaacttgggtctcacggttgctttcaactgcactgtgccggatctcttggcaggaagtgagcctcgccagccccaggtcctccccctttcccccgagggtccttccctgcctctggtaacgtttgtccttcccttcctgatctcgtccacagcccaccggccacactgccctcttcggggccgtaggacccctaactccacccccctccctggcagcacctcgagcagaaggccgagttctgaagaccctccttgacgctccatttctgggtgccaaggaagctggaggaatccctgactcaacttccccgaaggaggcctctgtggcggccagggtccccccctggagctgctgggaggcggcgctggctgcctggatgctgaccccagcgcggcgggcagagcggggcccactcttcttagcttttctactcactgttagagagagacctagctgagcggctggcaggaagcgggacaggtctaggagtcccttagggaataaaccagccccgtttctatcagcccggccagcatgcaggtctccacatcaccatctagagtatcacgcacacatctaccatatatacagatatattctatatacgagctatatataaatatatatatacatatatatatacacacatacatatctagaatgtgtatccgcggcgcccagaagcctcggtttggcccacctgtgagtggggcagggaggggttccggttgtgcagagaacagagtgttctggcaaagaggaaatcccacagcagcgcagaggacctgggcctggaggggcagggctggggcaacccggcttggcggcaaagcccagccccttctcagaccagctccccacattcctgaattccacttccaggcagaaaggagtgggctccccctactccctcagaggaactgactcaccggctgtcctagaatgggcaggggcagagcgaagttctgggtgggatgaccgcactgggggaggggcctcagtccagaaacctcgaccgctagctccacctgccttggccaccagggcagccccgggggatccgggctgctgggcagcaggtcggcgggaccacatgcctgggtctcaccctcagctccgagggccgagggctttccccaccccaccctcctcctggccggcagtcggccctgtctattcatctgcgtcaggcttgccaggggggccccccgtgtgtgccccttggtcacgtgtgtcgtcttcaaggatgttttgctgctgtggctcctgctgtgtcccctcctggcccatcctcatcctcatcttcatcctcatcctcatctgtgcaaccgcccgtcctccttttctagtttctgatgtttgtaaccagacccagctgtgtcattaaacagacccgttcttgctgta

SEQ ID NO: 461471 - DNA, 2646 bp, Homo sapiens
cacacgctccctccctccgcgctctacccctcgcccgcccgccgcgcacgcagccggccccggctcccggcgccccgcgcccgcgccccgcgccccgccaccgccgccgccgagcaaagccgggctgggcttggagctgctcatggagaaagtgccaggcgagatggagatcgagcgcagggagcggaagcgaggagctgtccgaggcggagaggaaggcggtgcaggctatgtgggcccggctctatgccaactgcgaggacgtgggggtggccatcctggtgaggttctttgtgaacttcccctcggccaagcagtacttcagccagttcaagcacatggaggatcccctggagatggagcggagcccccagctgcggaagcacgcctgccgagtcatgggggccctcaacactgtcgtggagaacctgcatgaccccgacaaggtgtcctctgtgctcgcccttgtggggaaagcccacgccctcaagcacaaggtggaaccggtgtacttcaagatcctctctggggtcattctggaggtggtcgccgaggaatttgccagtgacttcccacctgagacgcagagagcctgggccaagctgcgtggcctcatctacagccacgtgaccgctgcctacaaggaagtgggctgggtgcagcaggtccccaacgccaccaccccaccggccacactgccctcttcggggccgtaggacccctaactccacccccctccctggcagcacctcgagcagaaggccgagttctgaagaccctccttgacgctccatttctgggtgccaaggaagctggaggaatccctgactcaacttccccgaaggaggcctctgtggcggccagggtccccccctggagctgctgggaggcggcgctggctgcctggatgctgaccccagcgcggcgggcagagcggggcccactcttcttagcttttctactcactgttagagagagacctagctgagcggctggcaggaagcgggacaggtctaggagtcccttagggaataaaccagccccgtttctatcagcccggccagcatgcaggtctccacatcaccatctagagtatcacgcacacatctaccatatatacagatatattctatatacgagctatatataaatatatatatacatatatatatacacacatacatatctagaatgtgtatccgcggcgcccagaagcctcggtttggcccacctgtgagtggggcagggaggggttccggttgtgcagagaacagagtgttctggcaaagaggaaatcccacagcagcgcagaggacctgggcctggaggggcagggctggggcaacccggcttggcggcaaagcccagccccttctcagaccagctccccacattcctgaattccacttccaggcagaaaggagtgggctccccctactccctcagaggaactgactcaccggctgtcctagaatgggcaggggcagagcgaagttctgggtgggatgaccgcactgggggaggggcctcagtccagaaacctcgaccgctagctccacctgccttggccaccagggcagccccgggggatccgggctgctgggcagcaggtcggcgggaccacatgcctgggtctcaccctcagctccgagggccgagggctttccccaccccaccctcctcctggccggcagtcggccctgtctattcatctgcgtcaggcttgccaggggggccccccgtgtgtgccccttggtcacgtgtgtcgtcttcaaggatgttttgctgctgtggctcctgctgtgtcccctcctggcccatcctcatcctcatcttcatcctcatcctcatctgtgcaaccgcccgtcctccttttctagtttctgatgtttgtaaccagacccagctgtgtcattaaacagacccgttcttgctgtacctgtgcacactcgtgcagtctcttcctgccaccttccctcacctctgtcccccatccccggttctggacgcaggcctttttcctgaaagtcctcccctgacctcccacaccaagggcgccccatccactgtcccacaccaagggcgccccatcccctctcccacaccaagggcgccccatcccctgtcccactaccaagggcgccccatcccctgtcccactaccaagggcaccccatcccctctcccacaccaagggcgccccatcccctgtcccactaccaagggcaccccatcccctgtcccactaccaagggcaccccatcccctctcccacaccaagggcgccccatcccctgtcccacaacaagggcgccccatcccctgtcccactaccaagggcaccccatcccctctcccacaccaagggcgccccatcccctctcccacaccaagggcgccccatcccctgtcccacaccaagggcgccccatcccctgtcccacaccaagggcggcccatcccctctcccacaccaagggcgccccatcccctgtcccacaccaagggcgccccatcccctctcccacaccaagggcgccccatcccctgtcccacaccaagggtgccccatcccctgtcccacaccaagggcgccccatcccctgtgtctcacctttggctccccctgggcttctctctaaattg

SEQ ID NO: 461472 - DNA, 1774 bp, Homo sapiens
cacacgctccctccctccgcgctctacccctcgcccgcccgccgcgcacgcagccggccccggctcccggcgccccgcgcccgcgccccgcgccccgccaccgccgccgccgagcaaagccgggctgggcttggagctgctcatggagaaagtgccaggcgagatggagatcgagcgcagggagcggaagcgaggagctgtccgaggcggagaggaaggcggtgcaggctatgtgggcccggctctatgccaactgcgaggacgtgggggtggccatcctggtgaggttctttgtgaacttcccctcggccaagcagtacttcagccagttcaagcacatggaggatcccctggagatggagcggagcccccagctgcggaagcacgcctgccgagtcatgggggccctcaacactgtcgtggagaacctgcatgaccccgacaaggtgtcctctgtgctcgcccttgtggggaaagcccacgccctcaagcacaaggtggaaccggtgtacttcaagcccaccggccacactgccctcttcggggccgtaggacccctaactccacccccctccctggcagcacctcgagcagaaggccgagttctgaagaccctccttgacgctccatttctgggtgccaaggaagctggaggaatccctgactcaacttccccgaaggaggcctctgtggcggccagggtccccccctggagctgctgggaggcggcgctggctgcctggatgctgaccccagcgcggcgggcagagcggggcccactcttcttagcttttctactcactgttagagagagacctagctgagcggctggcaggaagcgggacaggtctaggagtcccttagggaataaaccagccccgtttctatcagcccggccagcatgcaggtctccacatcaccatctagagtatcacgcacacatctaccatatatacagatatattctatatacgagctatatataaatatatatatacatatatatatacacacatacatatctagaatgtgtatccgcggcgcccagaagcctcggtttggcccacctgtgagtggggcagggaggggttccggttgtgcagagaacagagtgttctggcaaagaggaaatcccacagcagcgcagaggacctgggcctggaggggcagggctggggcaacccggcttggcggcaaagcccagccccttctcagaccagctccccacattcctgaattccacttccaggcagaaaggagtgggctccccctactccctcagaggaactgactcaccggctgtcctagaatgggcaggggcagagcgaagttctgggtgggatgaccgcactgggggaggggcctcagtccagaaacctcgaccgctagctccacctgccttggccaccagggcagccccgggggatccgggctgctgggcagcaggtcggcgggaccacatgcctgggtctcaccctcagctccgagggccgagggctttccccaccccaccctcctcctggccggcagtcggccctgtctattcatctgcgtcaggcttgccaggggggccccccgtgtgtgccccttggtcacgtgtgtcgtcttcaaggatgttttgctgctgtggctcctgctgtgtcccctcctggcccatcctcatcctcatcttcatcctcatcctcatctgtgcaaccgcccgtcctccttttctagtttctgatgtttgtaaccagacccagctgtgtcattaaacagacccgttcttgctgta

SEQ ID NO: 461473 - DNA, 1176 bp, Homo sapiens
ctccagaaagatttaggacgtcaagtcgtctgaaaagatttcctttttggagaacaagccccgctctttggggtaccggagggtctctaagaagcactgcctgtcccagtttctacaaagttggggccgcctctctgggataggccagtccagctctgaaagctgagccaaggggctgtttctggaagttggaagaatcatggtgaaacggcacaagtatgggctgttcaacaattaaccaggcagcgtggagtatcatcacagagaatctacgatgtgctactgtgtgctctctgctagaaactgaagagatgggatcttgctatgttgcccaggctggtctcgaactcctggcctcaagcaatccacccgccttggcctcccaaactgctgggattacaggcatgagccaccatgcccagcctaatttgggttctttttttaaagtaagattctaactgttaataaactgaggaacctcattgtccatgatattcacaataaatgataataaaaagaaaaacagctgtaatttatcgaaccccgggctggtacagttttgctctggcgagcgctgccacatccattacttgcagccttggaggcaccgccaatcacatgactcatcctgggccaatctctccttaggcggtgaggacatgagagagcagccatgtgcaagccaggaggaggaggccctccccagaatccaacgaaatccatatcatggagtcccaggccaccctaaagagatgcccactgtcctgagtgaccagtggccccctccaggagaaaaagatttttctctgcccatcaccaggatggaagagaaagccagaggcccagaggagagacaagagaaagatggagaccgaggtgtagactcgaggggagagagctcccccctccatgcctacccacccatggtggcagatgcaatagacaacacgggttttgccactggtttggagatcctagcacgcacccattaacctaagtccctcctgctttgctgctgcagaaaatatttcagtgcctctgttctctgctctgggtatattagatcagctccagtctttgtatatgtagctatttataacaatcgtcacccacacatacttccaaaatggatttctcaaagaaattgcaatttctcaaattgcataccatttctat

SEQ ID NO: 461474 - DNA, 4061 bp, Homo sapiens
cagggggctggtaccgcccggagtatgggatcgcacagctacctggtaggtgactggaggtgttgatcagtgcttggtgggattttgctgatgtggccccaagcccgcctccctccccaccctgcgatggcagaagaaactcgacaaagtaaattggcagcagccaagagaaagttaaaagaatattggcagagaaacagccctggtgttccagcaggagccaagaggaacaggaaaacaaatggcagcatccatgagacagccacttctggtggttgccactcacctggagattcagcaacaggtatccacggggagagccctacatcatctgctaccctgaaggatctggagagcccgtgccaagaactagcagtagtcccagactcgaggtccgtaaaagtcagtcaactgaagaacaccatcaaatctttgaaacaacagaagaaacaagtggtacatcagctggaagaagtaacatgatttctttgtttgctcgcgacatgactgctcggtttgggggacactcagatgtagaggccccgagtctcgtctcacccactcccagcctggggaagaaggctcaccccccagagtccaccccatcccccacagggtctctgataacccggtcccatgggtgggcctgtcccggggcaggggcagtggaaaagaaagcaaacaacgagaaacagaaagccgaaagggagctagagggggagtcctttgggccccatctcaactctctcattacagaagagtccaaggatctggccgtccgtctgcaacattcattgcagcgtaaaggagagttagagcgggctctctctgctgtcaccgccacacagaagaagaaggcggagaggcagttctccagccgcagtaaagcacgtacggagtggaagttagagcagtccatgcgggagcaggcactgctgaaagcgcagctgacacagggccctttccccctgtgctttgggcaggtttgctcgttgaagaaggagaagaagcatgataaatatcgggtagagacgctggagaggagcttgtccaaactcaaaaaccagatggctgaacctctgcccccggagcccccagcagtgccctctgaggcggagctgcagcacctgaggaaggaactagagagagtggcaggagcgctccaggcccaggtggagtacaatcagcgcataagtctcctgaatgaggggcaaaaggagaggcttcgggagcagcaggagaggcttccagagcaggaggagaggcttcagcagctggccgagccacagaacagcttcaaggagctgaacaatgagaacaagagcgtactacagttggagcagcaagtaaaggagctgcaggagaagctaggcaaggagcgtctggaagctgccagccagcagaaacagcagctaacggcccagttgagcctcatggctctccctggggaaggagatggaggaggacatctggacagtgagggggaggaggcacctcggcccattcctagcatcccacaggacctggagagcagggaggccatgagcagctttatggaccacctggaggagaaggcagacctgagtgagctggtgaagaaacaagaacttcgcttcattcaatactggcaagagagatgccatcagaaaatccatcaccttttatcagaaccagggggccgtgccaaagatgcggcactgggaggaggacaccatcaggctggagctcagggaggagatgaagatgaagctgctggagctgcagcagatggtattgcggcttacagcaactacaacaatgggcacagaaaattcctggccgctgcccacaaccctgctgatgagcccggtccaggagccccagccccccaggagcttggggctgcagacaagcatggtggagaggccagggaggatcctctccttgacaagcctactgcacagccgatcgtgcaggaccaccaggagcacccaggcttgggcaacaactgctgtgtgccattcttttgctgggcttggctgccaagaagaaggagataaacatcaccatcatcaaagagctgctcaagaaatttttaaataagaaaccaagttatggggttaatctcctacacaattcatttacttcctttgaatgttagagtcactcatgattatttgtgtttctaatttatagttttaagtttatttgtaaaaagttaaaagagagtgggtgtctgtggctctcactgatgttcactctggcatcctttagcatttttcttttttaatttcataattgtaggtcattagcatgcatatcgagtttgcccttacgtggtgggggttcaaacacacaaagacccactctttgcccaaaactgttctcgctggtttggaataggctgccatgcttttttaatgttattgcagcatgtatattcactacagaattcagacaaaatttgcctatgttctgctgttgtttgatctaatcttaatcacagtgagctcttcgttagctcaatatgtagtttgcccccaagcgtgcactgtttattactttgtaatatgccactatgagtactgacatttagagttgtttaaaggccaagaactggaaacagcctttcctccattttctgtgtattggtgatgggagtgaaaccttttgagggagctttttaaatctcacagaagaggaaagtggcctcctctggcaggtatgtccaggatagagtgtgtttcatctgttccggtgccaggaattagcagtgtattatggtggttcccttaggatttgtatgtgctctgggctcatgaagatactgcatcatgagctgcagcagttgtactctttttcaatgacctaaaaagggcttatttctgaggaatgaaaggttcccatcgttgactgtggatgtggaaaacctttcctagcttagagcatttgtatctacaatacattttaaactcagagttcatgttacctgttttaatcacatgactacatgtcccagtacacaaaagggcactggttggcattcttcttaatgtatttagtaaagatcataagaaatcctttacgagttcaaatgtccctggaacaggcatacaggctctagtcaagaatgaattagagtgaaggaaagctgtgtgacacctggcattcctctctgttcacggagattctttgaggcttgaagattgattttaccatctagacctctttggctaatacctattcttcaaccaccttggttactctgacataggaatttacttctttttccttgaatggaaaacactttaaaaaataatagaaacattattataaactaatatatgtgagatacttagttgaaacaaaagggagttttagtagacggtattatactatctttgaaaatcaaggagaagtttatgaaacttaaaatgtgtacaaactgcagtgcaatctactgttcgtgaatgtcaatgtattatcaggaaacgtgcctatacaatcacagagttatattttctcacagacttctttacaaagtgaaatatgtttttgtatctctgggtttctgttcgggacatattttgtgcaatatttatgtgattgtgcctatgcatgatgaatgaatgcatttcagttatgtattgcctaaatcgtaacttgatgatgcttgggaaagactcaacagttaaaacttcatgaagttctaatgtctgtgttccaaaacacatcacattgttaggatgcagggagataggtgtgtgtgctccctgcggtggggatttctagttactagatcatctccatttttagcatttggcatcctcatgatacttctataaatatgacattaacaggagagcaacaatacgattttaccgatggaataacagatttgctggcattcactgaaagagtgcaaatattcggtccttgtgacttcaactgactcttccaaattttatgaatgtatcaatggtattagattatgaatgtatcaatgtattagataaacccagtttcagaatgataaagaaaaaatgttagaacaaataatgcggctaatgaaacagtggtac

SEQ ID NO: 461475 - DNA, 991 bp, Homo sapiens
ttcgcagttaatttgttacccagtcagtggttttgacaccacagtttggaactttaagctcagtggattttttaattttcccccggctccagcaaagtatagataaagaagatccaaagaggtgcttgaatggaattttcagttcatgttttgctgtgggaataatagtgaagaagatggtaacagtacctattttttttggaacacatattttatgggaagacacagtacccatcccccaaaaaaagacaaataaatatatgcataaaatgactttacatggaattttgttacaaaaagaccaaagaagacactaagatgaagaatgagaatgggggaacataatctaggtagttttgtcaagattagatctctatagggaggtgacatttaagattgacacccaaaaggatagaaggaattagtcacatgacatgtagggagaacattccatttagagggggagcttaggccgcgaccatgaggtggcaatgtgcttggctcatttaaaggactgaaaaatgagcagtgtgactacaagatggtgggttaggaacaaagtagaagtggagacataaatcggggccaaaggatgcagaaattatactctgctctagtgtatggattttatttcattgctatgagaagccacagaaggattttaagcaaagcgttgacatgattccatttgaattttaaggtcacttttgctccttgtggagagtggattgaagaggagcattgaactgacgagacccagtgaaaattctgttccaataatgtggatgtatgatcatgatgatttaataaacgtgaagcaaagaggtcaaagccaagaaatcactggagttaaaaccaccagggatgctaccaaattggatgtagggtgaggaaaaatggagtttcgctcttgttggccaggccgagattgcgccactgcagtccgcagtccggcctgggcgacagagcgagactccgtctcaaaaaaaaa

SEQ ID NO: 461476 - DNA, 1573 bp, Homo sapiens
cacagaagtcaaggtttgggaacctccacctagatttcagaagatgtatggaaacgcctggatgcccaggcagaagtttgctgccggggtggggacctcatggggaacctctgctagggcagtgcagaagggaaatgtggggtgggagcccacacacaaagtccctactggggcaccacctagtggagctgtgagattagggacactgtcctccagaccccagaatggtggatccactgacagcttgcactgtgcacctggaaaagctgtagacactcaacatcagcccatgaaagtagccatgagagaagctgtaccctgcaaagccacaggggcagagctgcccaagaccatgggaatcccccttttgttgaaggctcagttcttaagactgtcccctcacaacctttcagatgccaaacaagagccccagattgttgtacccgttttgtacagaaccaacccagatgttgtaccagatagttatagcttctggctgaccagctacaaatcagggtttccacaacctcctcctcagaaagaagtagaactacctcctcctccgactgagtagaaagtgcttagcgttactatccctcatgtgagacatcctgtgctctgacaatggaaaatgaaaaatcatactcaaagatctatttttgttcacttccaagcaaagtatagataaagaagatccaaagaggtgcttgaatggaattttcagttcatgttttgctgtgggaataatagtgaagaagatggtaacagtacctattttttttggaacacatattttatgggaagacacagtacccatcccccaaaaaaagacaaataaatatatgcataaaatgactttacatggaattttgttacaaaaagaccaaagaagacactaagatgaagaatgagaatgggggaacataatctaggtagttttgtcaagattagatctctatagggaggtgacatttaagattgacacccaaaaggatagaaggaattagtcacatgacatgtagggagaacattccatttagagggggagcttaggccgcgaccatgaggtggcaatgtgcttggctcatttaaaggactgaaaaatgagcagtgtgactacaagatggtgggttaggaacaaagtagaagtggagacataaatcggggccaaaggatgcagaaattatactctgctctagtgtatggattttatttcattgctatgagaagccacagaaggattttaagcaaagcgttgacatgattccatttgaattttaaggtcacttttgctccttgtggagagtggattgaagaggagcattgaactgacgagacccagtgaaaattctgttccaataatgtggatgtatgatcatgatgatttaataaacgtgaagcaaagaggtcaaagccaagaaatcactggagttaaaaccaccagggatgctaccaaattggatgtagggtgaggaaaaatggagtttcgctcttgttggccaggccgagattgcgccactgcagtccgcagtccggcctgggcgacagagcgagactccgtctcaaaaaaaaa

SEQ ID NO: 461477 - DNA, 1668 bp, Homo sapiens
  misc_feature (1)..(1): n is a, c, g, or t
nccagagtatcccctgcctctccggccacctcggcctcttaaagttctgggattataggtttggcctagagctctttcttcttagcggacatcgtctggagacatttttggttgccaggatttgctgggtggccttactggcatctagaagaccgacgctgctcaaccctgttggcgcgctgaacccaaatgccagtggcagtgagcttgcaaatcgttggactcatgatgctttgagtgctctcaggactctggaggtcgatgctggggttcctcgctggcttcctgctgctgatgctcttcccctctctgagctcttttacggaaagcttcgtggcacacttgctgcttttcactgaaaccaggctgtgtggtgactagaagctgcgtattcacatttatttttattgattgatggattgaggctgctgtgcagtggtgcggtgcggctgcgtgacccccgatgaccccagcacgcggttcccagtgagtgtggccggcgttgtgggagtgcagagtctccctggcaccctcacccctggggagcttgtcggctgtttctgtgtcctgccgtagaatgctccaggggttcctggcggctgctgacagccacaggactaggtttgcaggtctgtaagggatttgtaggtgccactcaagatgtgtagcgtctggcccagccagggcagcctgctcctcttccggtgcagtcaaggtttcccaccgcttgtgtgcagggattctgaaggcagtgctggctgctggcacagggctgcaagtttgaaagagaagtagagcaaaaaggtccctgggcccccgtggtggcaccagcacacacgagaggggatgtggtggagggcaccgtcatggaggcgtggccctgggtgtggacagccagcgtgggcccgagcccctgtgctgctgccttctgccctggccacccttctctctgcaggcagcttcaggaacctgcctcctgcactggccgcccctgccctctgcaggcagcttcaggatcctgcctcctgccctggccacccttctctctgcaggcagctttcaggaaagcgcctgtggaggccgggcagcctgaacatgttgactttggcagcaggagctgcccagctctgcttattctgtggcccagcaactgggtgctgatgctggcctttctgtgcatcaaacctggtggttttgccagcttcacgcctctttgtcctggtcaccatgtctgtgagcgcgccggctggtgttttgtcgccctcaggagtgtggccgaggcccaggtgtgggtttcccgtgcccgccgtgacctggcagtgagggtctgtgcttctgtcagtgccgttggcctgagacatgtctgtcctggagaccagcacgtgtgggatccatagtagtgactgcgtctgtcttctcctgacctaggcattagcctgatagagtgctggtaactttgcgagtcaacagtgttttcaaaagcagcttttccttctcttctctttaccccatacccttcaaactgttggctcattttctggaggacaccagaataacaaaataatattttgtggctattaatcctttaaaagcagaggaaaatttttcctagcaggagacataatagggttgtaccttttcagtgttttcagtgaaggcaattttttt

SEQ ID NO: 461478 - DNA, 1875 bp, Homo sapiens
gctctgttttgttgctgagtggtctccgtggtgtgggtggactcagcttatttatccatggtgcctggtaggcaggtacacccggggcagtcacagcaggtagtttatctcctctaatgcaagtccctcccccagttcctcactggtcgagtactatggggttacaatcttcccggaggtcgcctgagtttcattatcccgttccttgagcttctgtgcggaagtgatcctcccacctcggcctcttaaagttctgggattataggtttggcctagagctctttcttcttagcggacatcgtctggagacatttttggttgccaggatttgctgggtggccttactggcatctagaagaccgacgctgctcaaccctgttggcgcgctgaacccaaatgccagtggcagtgagcttgcaaatcgttggactcatgatgctttgagtgctctcaggactctggaggtcgatgctggggttcctcgctggcttcctgctgctgatgctcttcccctctctgagctcttttacggaaagcttcgtggcacacttgctgcttttcactgaaaccaggctgtgtggtgactagaagctgcgtattcacatttatttttattgattgatggattgaggctgctgtgcagtggtgcggtgcggctgcgtgacccccgatgaccccagcacgcggttcccagtgagtgtggccggcgttgtgggagtgcagagtctccctggcaccctcacccctggggagcttgtcggctgtttctgtgtcctgccgtagaatgctccaggggttcctggcggctgctgacagccacaggactaggtttgcaggtctgtaagggatttgtaggtgccactcaagatgtgtagcgtctggcccagccagggcagcctgctcctcttccggtgcagtcaaggtttcccaccgcttgtgtgcagggattctgaaggcagtgctggctgctggcacagggctgcaagtttgaaagagaagtagagcaaaaaggtccctgggcccccgtggtggcaccagcacacacgagaggggatgtggtggagggcaccgtcatggaggcgtggccctgggtgtggacagccagcgtgggcccgagcccctgtgctgctgccttctgccctggccacccttctctctgcaggcagcttcaggaacctgcctcctgcactggccgcccctgccctctgcaggcagcttcaggatcctgcctcctgccctggccacccttctctctgcaggcagctttcaggaaagcgcctgtggaggccgggcagcctgaacatgttgactttggcagcaggagctgcccagctctgcttattctgtggcccagcaactgggtgctgatgctggcctttctgtgcatcaaacctggtggttttgccagcttcacgcctctttgtcctggtcaccatgtctgtgagcgcgccggctggtgttttgtcgccctcaggagtgtggccgaggcccaggtgtgggtttcccgtgcccgccgtgacctggcagtgagggtctgtgcttctgtcagtgccgttggcctgagacatgtctgtcctggagaccagcacgtgtgggatccatagtagtgactgcgtctgtcttctcctgacctaggcattagcctgatagagtgctggtaactttgcgagtcaacagtgttttcaaaagcagcttttccttctcttctctttaccccatacccttcaaactgttggctcattttctggaggacaccagaataacaaaataatattttgtggctattaatcctttaaaagcagaggaaaatttttcctagcaggagacataatagggttgtaccttttcagtgttttcagtgaaggcaattttttt

SEQ ID NO: 461479 - DNA, 2429 bp, Homo sapiens
  misc_feature (26)..(26): n is a, c, g, or t
  misc_feature (29)..(29): n is a, c, g, or t
agcggaacggcggcggccacgggctngcnagaggaagcgctgcccctgcagccgcagccacggccaccgggagctaggagtgaacccctgcgggggagcagcttccccctcgcgatcgtggggacagccagtcctgtgaaacgaggaggcggttccggacgcccagaaacgcccagggagacctggagccgggggaagaggggacatgagcggccagctgagtccatccccaggcggctaggggcggacccagcagcccctcagctctcctcgtaaccacggaatctgagagaatggagccgagtacctgtaggaccatggaatcagaggaagactatgttgaggaaaaggaatctgagaagtgtgttaaagagggagttaccaacccctctaactcttcacagcaggctctcttaaaagctgactataaggcattaaaaaatggggttccctcacccattatggccacaaaaattccgaagaaagtcatagccccagttgacacaggcgacttagaagctgggaggaggaagagaaggcggaaacgcagatcactggccatcaacctgaccaactgcaagtatgagagtgtgcgtcgggcagcccaaatgtgtggcctgaaggaggtgggggaggatgaagagtggactctgtactggacagactgcgctgtctcactggaacgagtcatggacatgaagaggtttcagaaaatcaaccacttccctggcatgacagaaatctgccgcaaagatctgctggctcggaacctcaaccgcatgtacaaactctatccctctgagtacaacatcttcccccgcacctggtgcctccccgcagagaagagctccatgcggccccgggaaagccttgatgcacagaaaccttttgaccaggccctctctgcacatagctatggggacttccagtcctacggtcgtcagcgaaaagcccgcacatatatctgcaagccagacagtggctgtcagggacgtggcatcttcattacccgaaatccccgggagatcaagccaggagagcatatgatctgccagcaatacatctccaagcccctcctcattgatggcttcaagtttgatatgcgagtctacgtcctgatcacatcctgtgaccctctccggatcttcacatatgaggagggcctagcccgttttgccaccacgccctatatggagcccagccataacaacctggacaatgtctgcatgcacctgaccaactatgctatcaacaaacacaatgagaattttgtccgggatggcgctgtgggcagtaagaggaagctgtcgacactcaacatctggctgcaagagcacagctacaaccctggagagctgtggggggacatcgaggacatcatcatcaaaaccatcatctcagcccattctgttctacgccacaactaccgaacctgttttccccagtatctgaatggaggtacatgtgcctgttttgaaatccttggttttgacatcttgctggaccacaagttgaagccctggctgctagaggaatgcaggtttgggatccccagtgccctaatctttaccacggactcatgccttgatcaagaagtaaaggatgcacttctctgtgatgctatgacccttgtcaacctccggggctgtgacaaaaggaaggtgatggaggaggataagcggcgagtcaaggaacggcttttccagtgctaccgacagccacgagaatctaggaaagaaaaaactgagtcatcccatgtggcaatgctggaccaggaacgatatgaggattctcacctgggaaaataccggcggatctaccctgggcctgacacagagaagtatgcccgcttcttcaagcacaatggctccctcttccaagagactgctgcttccaaggccagagaggagtgtgccaggcagcaactagaggagatccgccttaagcaggaacagcaggagacctcgggcactaagaggcaaaaggccagggaccagaaccagggtgaatcagctggggagaaaagccgacccagggcagggctccagagcctttccacccacttggcttacaggaaccgcaactgggagaaagagctgctgccgggacagctggacaccatgaggcctcaagaaattgtggaagaggaggagctggagcggatgaaggccctgctacaaagggagactctcatccgaagcctgggtattgtagagcagctcacccgtctgcagcaccctggcccccagggccagaaaaaacttcatgagaatatgacatccagcaagttgcagctccaaaccttctcatttacaggaaacttgctctctatattcctgtcccaaaataaccccacactcatgactgacaaataacaagcccaccaccctcagtggcttctgtataattttctccctagcactgccagt

SEQ ID NO: 461480 - DNA, 2069 bp, Homo sapiens
  misc_feature (26)..(26): n is a, c, g, or t
  misc_feature (29)..(29): n is a, c, g, or t
agcggaacggcggcggccacgggctngcnagaggaagcgctgcccctgcagccgcagccacggccaccgggagctaggagtgaacccctgcgggggagcagcttccccctcgcgatcgtggggacagccagtcctgtgaaacgaggaggcggttccggacgcccagaaacgcccagggagacctggagccgggggaagaggggacatgagcggccagctgagtccatccccaggcggctaggggcggacccagcagcccctcagctctcctcgtaaccacggaatctgagagaatggagccgagtacctgtaggaccatggaatcagaggaagactatgttgaggaaaaggaatctgagaagtgtgttaaagagggagttaccaacccctctaactcttcacagcaggctctcttaaaagctgactataaggcattaaaaaatggggttccctcacccattatggccacaaaaattccgaagaaagtcatagccccagttgacacaggcgacttagaagctgggaggaggaagagaaggcggaaacgcagatcactggccatcaacctgaccaactgcaagtatgagagtgtgcgtcgggcagcccaaatgtgtggcctgaaggaggtgggggaggatgaagagtggactctgtactggacagactgcgctgtctcactggaacgagtcatggacatgaagaggtttcagcccctcctcattgatggcttcaagtttgatatgcgagtctacgtcctgatcacatcctgtgaccctctccggatcttcacatatgaggagggcctagcccgttttgccaccacgccctatatggagcccagccataacaacctggacaatgtctgcatgcacctgaccaactatgctatcaacaaacacaatgagaattttgtccgggatggcgctgtgggcagtaagaggaagctgtcgacactcaacatctggctgcaagagcacagctacaaccctggagagctgtggggggacatcgaggacatcatcatcaaaaccatcatctcagcccattctgttctacgccacaactaccgaacctgttttccccagtatctgaatggaggtacatgtgcctgttttgaaatccttggttttgacatcttgctggaccacaagttgaagccctggctgctagaggaatgcaggtttgggatccccagtgccctaatctttaccacggactcatgccttgatcaagaagtaaaggatgcacttctctgtgatgctatgacccttgtcaacctccggggctgtgacaaaaggaaggtgatggaggaggataagcggcgagtcaaggaacggcttttccagtgctaccgacagccacgagaatctaggaaagaaaaaactgagtcatcccatgtggcaatgctggaccaggaacgatatgaggattctcacctgggaaaataccggcggatctaccctgggcctgacacagagaagtatgcccgcttcttcaagcacaatggctccctcttccaagagactgctgcttccaaggccagagaggagtgtgccaggcagcaactagaggagatccgccttaagcaggaacagcaggagacctcgggcactaagaggcaaaaggccagggaccagaaccagggtgaatcagctggggagaaaagccgacccagggcagggctccagagcctttccacccacttggcttacaggaaccgcaactgggagaaagagctgctgccgggacagctggacaccatgaggcctcaagaaattgtggaagaggaggagctggagcggatgaaggccctgctacaaagggagactctcatccgaagcctgggtattgtagagcagctcacccgtctgcagcaccctggcccccagggccagaaaaaacttcatgagaatatgacatccagcaagttgcagctccaaaccttctcatttacaggaaacttgctctctatattcctgtcccaaaataaccccacactcatgactgacaaataacaagcccaccaccctcagtggcttctgtataattttctccctagcactgccagt

SEQ ID NO: 461481 - DNA, 861 bp, Homo sapiens
gggttcacgcgattctcctgcctcagcctcccaagtagctgggactacaggcccagctccatgatgatgcctctctccagagacctcctgacctcctgacctgcacagcccgggagaccacagcccacagccgctgccccaggtgtccacaagcatctcagcccctccacagcccacgcatctcctctttcattggctcatggggagtgaaggacaatgtctgaattaaatgccgtgctttaaactgaaagggaaacttagcaaataaatgagagtaacaacactagatcattggccagtgtggttgcaattcttcctttccctccagatttctgtttaacctttaaatctcatttcggcatgcctcttggtcctccttggattgatattaagttgtacacaggctacttcttggtgaccctgggaaattccaccctctgctccctccgggccgcagtgtgtcgaccacagaatgagaagattgggccagagcagcttgtctggccctgcgagtgccggcggaataacattcgcgtggtgtacctgggaggccagcagctccgggagcaaccagccgcccactgcgtggccagagtgtcttgcggcccgcctgtgaaggacagtcctgctcatgataagcctgctcgctgtagctgcaagctgacatttaaggtttctcgtctcccgaggagctggtccaaagggttatttggacaagcttacgaggcccgtgtcaggagggcagtttctgatggtgcgatttgatcaggtcacctggcctacatgagcctgagttttcccgtctgtgtaatgtgaatgacagtagtagtgatctttcaggcactggtctgaattacttgc

SEQ ID NO: 461482 - DNA, 991 bp, Homo sapiens
gcaaacccactgtgtgcctggcgcccttgcggtcatcccagatttttgcccacatccctctgttccacccagaggccacctgcatgcaggcatggtggatggttgctgtgtgcagtgatggcctcctgggacctcttgctggccacggagttaaccaggagggaccatcaacctcggaaggcccagctccatgatgatgcctctctccagagacctcctgacctcctgacctgcacagcccgggagaccacagcccacagccgctgccccaggtgtccacaagcatctcagcccctccacagcccacgcatctcctctttcattggctcatggggagtgaaggacaatgtctgaattaaatgccgtgctttaaactgaaagggaaacttagcaaataaatgagagtaacaacactagatcattggccagtgtggttgcaattcttcctttccctccagatttctgtttaacctttaaatctcatttcggcatgcctcttggtcctccttggattgatattaagttgtacacaggctacttcttggtgaccctgggaaattccaccctctgctccctccgggccgcagtgtgtcgaccacagaatgagaagattgggccagagcagcttgtctggccctgcgagtgccggcggaataacattcgcgtggtgtacctgggaggccagcagctccgggagcaaccagccgcccactgcgtggccagagtgtcttgcggcccgcctgtgaaggacagtcctgctcatgataagcctgctcgctgtagctgcaagctgacatttaaggtttctcgtctcccgaggagctggtccaaagggttatttggacaagcttacgaggcccgtgtcaggagggcagtttctgatggtgcgatttgatcaggtcacctggcctacatgagcctgagttttcccgtctgtgtaatgtgaatgacagtagtagtgatctttcaggcactggtctgaattacttgc

SEQ ID NO: 461483 - DNA, 1461 bp, Homo sapiens
tcccgtagccagacctcaagccatggctggtcccttctcccgtctgctgtccgcccgcccgggactcaggctcctggctttggccggagcggggtctctagccgctgggtttctgctccgaccggaacctgtacgagctgccagtgaacgacggaggctgtatcccccgagcgctgagtacccagacctccgaaagcacaacaactgcatggccagtcacctgaccccagcagtctatgcacggctctgcgacaagaccacacccactggttggacgctagatcagtgtatccagactggcgtggacaaccctggccaccccttcatcaagactgtgggcatggtggctggagatgaggagacctatgaggtatttgctgacctgtttgaccctgtgatccaagagcgacacaatggatatgacccccggacaatgaagcacaccacggatctagatgccagtaaaatccgttctggctactttgatgagaggtatgtattgtcctctagagtcagaactggccgaagcatccgaggactcagtctgcctccagcttgcactcgagcagagcgacgagaggtggaacgtgttgtggtggatgcactgagtggcctgaagggtgacctggctggacgttactataggctcagtgagatgacagaggctgaacagcagcagcttattgatgaccactttctgtttgataagcctgtgtccccgttgctgactgcagcaggaatggctcgagactggccagatgctcgtggaatttggcacaacaatgagaagagcttcctgatctgggtgaatgaggaggatcatacacgggtgatctccatggagaagggtggtaacatgaagagagtgtttgaaagattctgccgaggcctcaaagaggtggagagacttatccaagaacgtggctgggagttcatgtggaatgagcgtttgggatacatcttgacctgtccatctaacctgggcactggacttcgggcaggagtgcacatcaaactgcccctgctaagcaaagtaaaggagttgtggggttacagaggggttagccgcttcccaaagatcctggagaacctaagactccaaaagcgtggtactggaggagtggacactgctgccacaggcggtgtctttgatatttctaatttggaccgactaggcaaatcagaggaccaaatccccgggggggaccccacaactaggagaaagagaggaacaattatccccccagatctaggcttcatatcctttgccctcgttggccacgggtccccataaccagctcaccagtcccctctatgcatttactcccttcccttcttccttcatctcaccctggggatcaaggaaattgcctcagtagacagagtgaatactaggcgtccagcttgctctacttcatcctggctccacaactctggtttcctggggacaggaagaaaatc

SEQ ID NO: 461484 - DNA, 1101 bp, Homo sapiens
aacgggaaatcgtgcaagtagtagtgccgtgattgtaattcgaagcagcgattgctgtgatcctatgagactgacacaatgtatatatccgccggacaatgaatactacaccagggatctacatgcctatctaaaatccgttctggctactttgatgagaggtatgtattgtcctctagagtcagaactggccgaagcatccgaggactcagtctgcctccagcttgcactcgagcagagcgacgagaggtggaacgtgttgtggtggatgcactgagtggcctgaagggtgacctggctggacgttactataggctcagtgagatgacagaggctgaacagcagcagcttattgatgaccactttctgtttgataagcctgtgtccccgttgctgactgcagcaggaatggctcgagactggccagatgctcgtggaatttggcacaacaatgagaagagcttcctgatctgggtgaatgaggaggatcatacacgggtgatctccatggagaagggtggtaacatgaagagagtgtttgaaagattctgccgaggcctcaaagaggtggagagacttatccaagaacgtggctgggagttcatgtggaatgagcgtttgggatacatcttgacctgtccatctaacctgggcactggacttcgggcaggagtgcacatcaaactgcccctgctaagcaaatagccgcttcccaaagatcctggagaacctaagactccaaaagcgtggtactggaggagtggacactgctgccacaggcggtgtctttgatatttctaatttggaccgactaggcaaatcagaggaccaaatccccgggggggaccccacaactaggagaaagagaggaacaattatccccccagatctaggcttcatatcctttgccctcgttggccacgggtccccataaccagctcaccagtcccctctatgcatttactcccttcccttcttccttcatctcaccctggggatcaaggaaattgcctcagtagacagagtgaatactaggcgtccagcttgctctacttcatcctggctccacaactctggtttcctggggacaggaagaaaatc

SEQ ID NO: 461485 - DNA, 1864 bp, Homo sapiens
taaaaatctcttcaaaccctgctttcagctctttcgcatgtgcctggcagtggagttgctgatgacctggtggttgtgtgtttcatcttttgtggaactgctggcagcggagtttctgatgacgtggtggttgtgtgtttcatcttttgaggaaccgctggcagtggagttgctgatgacctggtggttgtgtgtttcatcttttgaggaaccgctggcagcggagtttctgatgacctggtggttgtatgtttcatcttttgaggaaccgctggcagcggagttgctgatgacctggtggttgtgtgtttcatcttttgcggagccgctggcagtggagttgctgatgacctgcgtcgtggacagcttgcatctgctggacaaagggatgattcgtgtcccaggtggggcagaggagacgcaggtaactgaaactgtggaaagccagaaagcagagcttctgtgtgtgtctcagtactcagcgtggtggagtggcagcgtgggtagagcccctgccggcacccaagtccagcggcctcaaggggcagcacgtgcaaggctggagctgcggctgaccctgtgcgctctccgtggagcacacattgatgagaaagactggcagacatgccagggaatgcagatccgggtcctggcaggaacaaagtgagcctgtggcttcaaggagaacaacggacagtgttagcagtattaaaattggagctttcagttgaaaattggacttttgtgtgctcaccagcttctcagtgtgtcaggactttctcaggtgaccattgcaggatgtcacagaatcatgcctgggtaaaagacccattcaaagttcaagatagaccaatggatttcagaagaaccaagttggaaaagtgtggtgatagggttcaattgcagctcgctgtaaggagccttcccttgctgagtgcggtgtcagggagaagctctgagcacactgaaaaggcttttagatgcccctccctctctagctgcatctcttcctggggctgtaatgtcctctcctgcttgagccacagcggcccttcatggtcgatcgcatgcagatgggaggccaggggttttccagggtcagcattcaagagattcgcaaaaaggcaaagaatgctattcctctcaccaaatattttaaaaacagtttcataaatatttgttactatatattggatatcttgttattgttaaataatgagatatctttaagtgtctcttaatttctaatatcgtacgtatcaatagaaatgacacatataaaccaagtaaacacagggaattgatatttactgtattcaaaatcagaagagacatttaaagatacttcatgtgtgggctgtgctggagcatgagctgagcctcagttcctgccacctctgtgtttagtttccggattttccatgtttcctatctgtttcctgtctgtttccctgatccagtttgggttggttgctactgagcatgcaggttccctttctgtagttacattgtttagtgaaaaaaagcaaggttcagcacagagcataatatatatgctcaggtaaaagggggcaatgattgatggatggagccccagtatattgataactgcctctgggaatggccctggaggcatgggataggtggtcaacttcacagtgtaccttttagagtgggtgggtattttttatttacaagtatttcatttgattatgaaatatttcatatatataaaataatacagtgtttacacaagcgtaaagattaataagagaataaaacaaagtgctgggattacaggcgtgagccaccgtgcccggcctctaatgtgtaattaatcttaatgatttccattaacagcaaa

SEQ ID NO: 461486 - DNA, 1834 bp, Homo sapiens
cagctgccacctgcaggtggcgggcgtcgagttaagcctctttcgggtggagcagtgggcctggagccaactcaggctgagtcaagtgtgagagggagcttcctccgtgtctggggtgggggatgggggggtctcaggcagggatactctagccccttgactgctgtttagaccctgctgtagctgctgctgctccctgcccagccccagccatgaaactgcccaaggggaccaggagctctgtgtactttgcacagcacccagaaaaggagccattgccctcaaggcaggaggtcaagcagacccctgtcatcatggccaagatcaaaggtccggggcccgccaagtacctccggccatcctgcacgggctacatagatcatgacatctccatgttcaaggcaccagcttataccctgcatagccggcactcagagaagcggatggtgtgccacagcagccctgggccttgctatctcttggatcccaaaataactcggtttggaatgtccagctgcccgcaggtccccatggaggagcgcatctccaacctgcgcctgaaccccaccctcgcatcctgccagtactactttgagaagatccacccaccgggggaacgcagggctccccagtacacgtttggctaccggcgcccatacagagtgatggacctcaacccggctcccaaccagtaccagatgccactcttgctggggcccaacacccctgtcagccgagctgctccctgctacagtctggcctccagggacaagaactggttctacaaggaggatgtggcaggaggccctggacctaccacgtacgcccgacctgagccatccatctatcagaaccgcagccctacttacagcatggccaagcgcttcgcctaccctctggacctcacgccacggcctggccccggctcccacgaggtccagcaggtcactgtgcacaagccccacatccctgctttcaccatgggcatcaagcactcactccacctgtgcccactggtcatcgacattcgtgactgaggcccctcttggggcactcactgcccctcatccccagaaattatttttctacaccaaattgagcaatttgaccaagatttctagtagcagagccggtacctgctgagtgtccggcacacagaagacattagagatacattttcatgtatttgttttttccttttctgttcacagttgcttcctgtgggtcctgctctgggtgaggggctggggacactggaaggaatgatacagtccctgtccttgaagagttccattctggttcaccaggtggggaagccatgtgtctgtcctccaaggagccccaggcagagactcgggagagctgcattccagtcctaactgccattacaggctgtgtggccttgtgcagctcctgcccctctctgggctcaggattgccctttagacagtgcacagggtaggcttggaagaggtctaggttctcccaagttccagaactgtgggactgtgctgacagtgtgcagtccccgagacaggggcagggcaggtcggggtgcaggcagaggagcggagtccctctggttgggagttgggagaggagtttcctcggggagggacctaagaggacaagaggagactgctggggagggcgaaggtggaggtcaaggtgagggaacgggcacagagagtttatgacctttacacacagagtggtggggcatggactcaaacccaggtctgtctgttctctggagaggcacctgcatttggaggtgaaaactacccctgtggccatatgacagtccactgtgaccggacactgaaatgaccag

SEQ ID NO: 461487 - DNA, 1526 bp, Homo sapiens
  misc_feature (3)..(3): n is a, c, g, or t
  misc_feature (10)..(10): n is a, c, g, or t
  misc_feature (13)..(14): n is a, c, g, or t
  misc_feature (17)..(17): n is a, c, g, or t
gangcctgtnaanncantcttccccagcgcacgttctgtacttctggccctggagacggaccagggggaagtgccatggaagatgaggtgcctgctttcttccaggtagtgaatttcacgtgccaggtgcgctccaagcacacgcagaccatcctgctgtcaaaccgcaccaaccagacctggaatctgcaccccatctttgagggcgagcactgggaggggcctgagttcatcaccctggaggcccaccagcaaaacaagccctatgagatcacctacaggccccgcaccatgaacttggagaaccgcaagcaccagggcaccctcttcttccccctcccagatgggaccggctggctgtatgctctgcatgggacttctgagctccccaaagctgtagccaatatctatcgtgaagtgccatgtaagaccccctacactgagcttctgccaatcaccaactggctgaacaagccccagagattccgggtcatcgtggaaatactgaaaccagagaagccggacctaagcatcactatgaagggccttgattacattgatgtactgtctggctctaagaaagactacaagctgaacttcttttcccacaaggagggaacgtacgctgcaaaggcattggacaacaggcagcacaatactgcaatcctcgaaaaggaaggaaaactcatgacgaatccccatgattatcctggttctctgcctaaggacaatttcctgactacaattcagtgatcttccgaaacgaggtgacaaatgagttcttgtactacaatgtgagtttcagggtcatcccttcaggcatcatcaaaaccatcgagatggtgaccccagtccggcaagttgcgtcagcctccatcaagttggagaaccctctgccctactcggtgaccttctccacagaatgccagatgcccgacatcgccctgccctcccagtttgtggtgcctgccaactccgagcccacctgacgagttcccctcactccagctccagctgacttccttcttcaggctggtcatttgtgttggtttcaatgtctagttatcctgaaaaatgtggccatggatctcctggtacatgtatcctcccaatgcgcataggcatacgttgttccacagcatatgcctaggagtagaaccacaggtcatagagtgtgcatagctttcactttagtaggtaattgccaattagtgatgagagttcctaatgttcaacgtcttcaccaacccttggtattgtcggtttttttaaggttactaatctgataaactgctaactcctcgtggacttaatttccctttttacaaacagattgatttcagttgggtaatattatatataggagatctgcatctgtgttcatgagatgaggaggataatctagttttagggttgttttgaggatacctggtaagctctcaatacttctgctgctttttatgtacttagtcagtccaacatgctaaataagaatgaattctgggtcttgtcttgcccatgttttc

SEQ ID NO: 461488 - DNA, 1459 bp, Homo sapiens
cagaagcttcagggaggtggctcaggcctaggctgcaagcagggaacaggtaccagcaaaatatgctaggaagcttctcgctgggaggctaatataaatgggtgggccatttgctaggatacaagagaaacttgccattgggctgctagggaaactcgcccagggacgtgcgcccctgggtctcccacacgccagtgacaaggagacctggggctctctggcaagaaccacaagaagccccttcttcctgctgtgtccctccagggccctctactgacagacccaacaccgttccagctggtaaaggaggaccctccggaggcccagccccaggatcaagaaaacagagcaaaacatgggtcgacctggagttgatccttaattgatgatgggcacaacatggagcctgaaatcatttatttcattttcaagtttcaggctttctgacagaggcaaagcacctagccataaattgcagaaatgcttcattgaccacggattaccatggtggggctggagccaatgtccttctccaggatgtgaatggaaatatcccattagattatgctgtagaagggacagaatccagctctatcctgttgacctatctggatgaaaatggtaggcaaaaacttttaaaaccatagaaaaaaatagattgggagaattgtaagtgtgtattcattttcacaggtttgcttacatgatttccgatggatgtagtttccgcacgagcatcaatccagagtgtattcttgggtccgctgtgctaggctttctcttgatgtttgctgccaggatgaaatcagataagagacaaagtgctcagaagagtggctggttcatagcaaacacttgctgtgagggaggagtggatttgacctcactgcgccagatgaagcttcagagaccaatgagtatgttaacagatgtcaaacacttcttatcatctggaggaaatgtcaatgagaaaaacgatgaaggagtaaccctgaaatgggatgagaaggagcaagcactgaggaaggaggaaaaccaagaggacgaaatgtcctcggaaccaagtgaaaactttgaggaagcaggaggaatgatagactaccaaatactgctgagtgatgtcacttcactggccgtctttcctaatgctcggaatttgcatatgatggttcctctcctgtccctgtacaagcaccctgcatatcccgtatcataaacacagccttaccacaacttgcggtagttgtcagttcattcatctgtatcaccttttagtctgtaagaagtgaatgcaggaacatttgtttggcttgtcaaaatatcatcatatctcagacaggagccaacacagaatactggctaagttactatttatttaatgagagaatcaataaatgccctaatgatcactgaataaatgtgtgagcagtaggtgagtgcgcacgccccttgagactgg

SEQ ID NO: 461489 - DNA, 2154 bp, Homo sapiens
cagactccttaggaaaaacgagagctcatgaaacagtgtcttgctctgacacccggggtggagtgcagtggcatgatcatgggtaatggcagcctcacctcctgggctaaagagatcctcaccttggcttcccagagtgcttggattacagatgtaaaccaccacactgagcccacccttgttatatctgatatgatctgttatcaaaagggaaatggccttattactgataaagttttggtggtctggatagaagatgaaactagccacaacattcccttaatccaaagtctaatccagagcaaggctctaatgctcttcaagtctgtgaaggctgagagagtcattgagtggctgaatgaattaaaaaacaggatccaaccatgtgctgcctgtaagacactcagctttaaggacaaatacagggtgaaagcggggaaatgagaaaagatactccatgcaaatagtaattaaaagagcaggagtgtctatacttatatcttagaaaatagactttaagtcaaaaactgacacaagagacaaggtcattatagaatgataaaagggtcagtcaggaagacaaaacaattataaatatatatgcatccagtatgagggcacctaaatatgtaaagcaaatattaacatacctgaagtgaaaaataaacaacaatacaataataaaataagacatcaagacacaactctcaacaatggataaatcatctggacagaaaatcagtgaggaaacactggattttaaccaaactatgggccaaatggacctaacagacatatacagaacattccatccaacaacagcagaatacacattcttctcaagcacacatggaacattctccaggataaatcacatgttaggctacaaaacaagtcttaacaaatttaagaagattgaaatcatgtcagatatcttttctgaccacaataatataaaactggaaatcaataaaaggaaaatttacaaatatatggaaattaaacagtcaataaatattaaaagggaatcaaataatatcttgatacaaataaaaataaaaaacaacttaccaaaacttatagcaagtggcaaaagcaatactaaaaggaaaatttatagcaaaaaatgccctatgttaagaaagaagaaaaaggccaggcgcagtggctcacacctgtaagcccaacattttgggaggccgaggcatacagatcatgaggtcaggagtttgagaccagccaggccaacatagtgaaaccctgtctctactactacaaaaaattagttgggtgtggtggtggtcgcctgtaatcccagctacttaggaggctgaggcgggagaatcgcttgaacctgggaggcggagggtgcagtgagccaagatcacaccactgcactccagccctggcgacagtgcaagactctgtctcaaaaaaaaagaaaaaagaaaaatttcatacaacgtaactttaaaccctaatgaattagaaaaacaatgttcaaagccccaagttagcagaagaaaggaaataataaatattacagcagaaataaatacagactagaaaaagcggtagtaaggactaacaaagctgggcattgctttttgaaaaggtaaacaaaattgacaaacctttagagtaagaaaaaagactcgaagtgaaagaggagacattacaactgatgccacagaaatacaataagattataagagactcctgtgagccttcatttccaacaaattgaataatctagaagaataaataaattcatagaaacataaaccttccaaaactgaatcatgaaggaaatataaaataccatcagaccaatagcaaatgagagtgaatccataattattaaaaaccttcccccaaaaaaagaaaagcccaggactggatggcttcacaggtgaattctaccaaatattagaagaagaattaatgccagtccttcttcaactcttcgaaaaagttgaggaagagggaacgcttctaaactcattttatgtgactagcactactgtgataccaaagccagacaaggacactaacaataaaactataggtcagtgtctctgataaacatagataccaaaatcctcaacaaatagcaaactaaatttgacagcacattaaaaggatcgtatatcc

SEQ ID NO: 461490 - DNA, 721 bp, Homo sapiens
atagctgttctcgaggatcccgagggttcaagtaactttaaaccctaatgaattagaaaaacaatgttcaaagccccaagttagcagaagaaaggaaataataaatattacagcagaaataaatacagactagaaaaagcggtagtaaggactaacaaagctgggcattgctttttgaaaaggtaaacaaaattgacaaacctttagagtaagaaaaaagactcgaagtgaaagaggagacattacaactgatgccacagaaatacaataagattataagagactcctgtgagccttcatttccaacaaattgaataatctagaagaataaataaattcatagaaacataaaccttccaaaactgaatcatgaaggaaatataaaataccatcagaccaatagcaaatgagagtgaatccataattattaaaaaccttcccccaaaaaaagaaaagcccaggactggatggcttcacaggtgaattctaccaaatattagaagaagaattaatgccagtccttcttcaactcttcgaaaaagttgaggaagagggaacgcttctaaactcattttatgtgactagcactactgtgataccaaagccagacaaggacactaacaataaaactataggtcagtgtctctgataaacatagataccaaaatcctcaacaaatagcaaactaaatttgacagcacattaaaaggatcgtatatcc

SEQ ID NO: 461491 - DNA, 2729 bp, Homo sapiens
ccagggaagggcagaaggtgggaagggtgttccagggagaaggaacagcaaacacagagacctagagaaagtctcttctgggcccggccctggaccaggcgatacctgggacttggagatgattcaaacccagtgtctgcccttggggagcctccatcctggtggggaaggtgctcatgtctatgaggagagacaccaagtgtccgtctctcgaacagatgatgtgggctgcgtggtgccgtccgagtgcctgcgggcctgcggggccgaggtcggctgctccaacatcgcctaccccaagctggtcatggaactgatgcccatcggtctgcgggggctgatgatcgcagtgatgctggcggcgctcatgtcgtcgctgacctccatcttcaacagcagcagcaccctcttcactatggacatctggaggcggctgcgtccccgctccggcgagcgggagctcctgctggtgggacggtacgggggtgggggccagctggtcatagtggcactcatcggcgtgagtgtggcctggatccccgtcctgcaggactccaacagcgggcaactcttcatctacatgcagtcagtgaccagctccctggccccaccagtgactgcagtctttgtcctgggcgtcttctggcgacgtgccaacgagcagggggccttctggggcctgatagcagggctggtggtgggggccacgaggctggtcctggaattcctgaacccagccccaccgtgcggagagccagacacgcggccagccgtcctggggagcatccactacctgcacttcgctgtcgccctctttgcactcagtggtgctgttgtggtggctggaagcctgctgaccccacccccacagagtgtccagattgagaaccttacctggtggaccctggctcaggatgtgcccttgggaactaaagcaggtgatggccaaacaccccagaaacacgccttctgggcccgtgtctgtggcttcaatgccatcctcctcatgtgtgtcaacatattcttttatgcctacttcgcctgacactgccatcctggacagaaaggcaggagctctgagtcctcaggtccacccatttccctcatggggatcccgaagccccaagaggggcagattcccctcacagctgcacagcagctcggtgcccaagaactggccaagccagcaaagcgggagccctgaaaaattaggggggaaatgggagaaaataatgtgacatttcaaaaacagcaccaaagcagtcagcattggaaggaaaattagatttctgacggacatcctgatgttggttttactgttttcgttttgaatacacaggctgggtcaggagcagtgagatttgccagcactcagggttctaagggtcttgggccagctctggatggaggaagagccccacatgcccagagcaaggccccccattaagggactgcagccacctccaagggctcctccctccacccaccagctcccaaatgccagagggagcctcttcgccctccctccctgcccaccatccctcaaccatcagcctggcgttcaaagcctttccaagtcccacctcacttttccctctcccaaaggtgcccaggctctgggcaggccctgctcatatccctgatcatggcacattctctggaggaccctcctgttctcgggtaggggccgtgccccacctaggtagccgtcccatgtgggatcctgtaggatctctaaaacctagctctggccccaactttctgtctgccctggaggtttctcagcctcctgagagctctgctgggccccggtctgggcagaacctgggcctaaacaaacaagagccagggcagccagggtctctgcgtggctgggcccagggcttgccctcagagctcacctgtccaacagaagaggagtgtgcctccaccttccctactgcccgcccctttttcagggtcttagggcctctagccctgtggtggggtgctgggtgccccaggtggagctgaagtcatggggctgttgaggagttggtgtccacctggagtctgtccaagctggcccttggggctccttgatgaaagggctggctggcaaattgctgttattgcaaggtcaaggggtggatgaccccgaccccccaccccccaccccccaccccgcggcttgccaggatctcgcccaccagcactcatgctgccccacacccaaggtcaactcttccgcgagcagaaaccaggactgagcctaccaggatataacttcgaagcctgggctggacgcctcttgcaataccaggctgctggggaagtgagaccaggcccgtgcttggcctcagtgtcagcatctcccctgctgcagatggcaggaggtgcagagaggctcccacaggccagcccccacccgcccctaccttgagcaagggctcctcgtcgcgcaggaagatctgccgcttcttggcgatggtggtgcttggacctactccctgctcccctgctcctcccatgccccagagtcccttggggagcaagtcctagactcatcctgactcagaccaaagcctactgctatgagaggagctcagacctgttgaatgtctcacgtcctccccctcccatgaaccttccgtggcttctcccttggcctcagggtaaactcttaacacttcagactcaagatctggctccacttacatgtccagcttcatttactttatatcctctcc

SEQ ID NO: 461492 - DNA, 1899 bp, Homo sapiens
tcttgaagaatgacagtggattatcgtaagcttaaccaagtggtgagtccaattgcagctgctgtaccagatgtggttttattgcttgagcaaattaacacatctcctgatacctggtatgcagccattgacttggcaaatgcctttttctccattcctgtccataaggcccaacagaagcaatttgccttcagctggcaaggccagcaatatacctttactgtcctacctcaggggtatatcagctctctggctttgtgtcataatcttattcgaagagaccttgatggctttttgcttctgcaaaatatcacactgctggtccattatgttgatgacattatgctgattggatccaaactacaccccgtttctaggacatctctgaaggacagcagtgaagggaaatcttcccagtgggcagaacttcaagcagtgcacctggtcgtgcactttgcaggtaggaacactgtcaccaggacacataacgacaattccattaaactggaagttaagattgacacccggacactttgggctcctcctacctttaagtctatgaagcctaagaagggagttacagtgttggctggggtgattgaccccggctatcaagatgaaatcagtctactactccacaatggagatgctgagggctctgtttacctggtgacacccaaaattctatggagacaacaatgacaacagaattaccacagagaactagaaaatgaaactcagctgaaaaacggccacctaagatggaagaagccatgagatgagtaagcgttgcctactcacaaggttgcaaactgtccttcacttacgattatcccccaacgccccctcctaaatctgatcaatcgcatggaacttgatggttacaaaagacagagctaacaactagctaccttgcaggaacgggaacgtcattctgagggtagtccacatgcaagtgttctaaagttgacatcactgcttcatcattcacctcattttcccagaacagaagcaccaagaaaattatcaccattattatcatcagagattaagaagcagcaatgcccctcttgtggcaagagttggcagcgtgcggttggtatgtcaatgcatccaaggtccaagggcctggattgtctgccaaatgcttgggagttgtttgatcaggttgacatgctccaacagcattgtggactgggcccacacctacgctgaggtgaccaatgtctccaactgttggatctgctccaccttccagcagcagctgcggagagtttgccctggaacgcgtatcctgcttctgttaagaactggacatggctagaagcttggggtcccacggacaatgggtgggatgccacagggcgggctttggataggaggcatcacaaaacccatggcaaacctggcccttggctgactcatagtgtccatgatggatggagctggctaatgggagaacacgtggtgcccccattgcaggtatcacaatgtatagagcagcactggggtaaagtcactgtgggatggttgcctactgaggtttgtgcaaacataacatgtgtcaccacaccaagggtgcagtggaacaagcggccttacgaaggccaggcccccatggactttgtgccccctgggagtttatgggtctgtggggacacaggatggccatatctcccagccaactggactggacattgtacctggggttggccctatgtgcctgccactgggcttcccacattgcctagtcgccacataactgggagccactgtgttcctgctttttcccagtgcagcaggccctctagtggttctatcccttagcaatgactatccctggagcaggcgtcattactatagaaaagcaagttgcagcctttgcagaccacacagctc

SEQ ID NO: 461493 - DNA, 570 bp, Homo sapiens
tttatggtttaattcagtaaagattattttattgaagcagaataaaacaatcccaacccagcaatacaggaaggataaattaattaccagtggcttccccttccgctcaaggcattgccccatgtccacggtccaggtctgcctcaggcacagccagctccaatgccattgagagaagagatctcagactcgggagctgatcttgagttatttaacatagccaaggaaactatctggcctcaagtcatcacaagtgacaagaacaaacccctctgtgggggaatagtggtacctgcaggcagggtatcttgtgccttcaatgagctgacagactgtcattttgaactttgtctcactctgaaagcagaaaatggccgaaaggttttggcaagcaaccttcttgggagaaatgcaaataccattgatttttcgaggcctctcatggatgaagacatgctcctttttacaagtgtggtcaggttccctgataactctttgtatgatcatgtggttgcagtaccttgcaggaacgggaacgtcattctgagggtagtccacatgcaagtgttc

SEQ ID NO: 461494 - DNA, 2670 bp, Homo sapiens
tcttgaagaatgacagtggattatcgtaagcttaaccaagtggtgagtccaattgcagctgctgtaccagatgtggttttattgcttgagcaaattaacacatctcctgatacctggtatgcagccattgacttggcaaatgcctttttctccattcctgtccataaggcccaacagaagcaatttgccttcagctggcaaggccagcaatatacctttactgtcctacctcaggggtatatcagctctctggctttgtgtcataatcttattcgaagagaccttgatggctttttgcttctgcaaaatatcacactgctggtccattatgttgatgacattatgctgattggatccaaactacaccccgtttctaggacatctctgaaggacagcagtgaagggaaatcttcccagtgggcagaacttcaagcagtgcacctggtcgtgcactttgcaggtaggaacactgtcaccaggacacataacgacaattccattaaactggaagttaagattgacacccggacactttgggctcctcctacctttaagtctatgaagcctaagaagggagttacagtgttggctggggtgattgaccccggctatcaagatgaaatcagtctactactccacaatggagatgctgagggctctgtttacctggtgacacccaaaattctatggagacaacaatgacaacagaattaccacagagaactagaaaatgaaactcagctgaaaaacggccacctaagatggaagaagccatgagatgagtaagcgttgcctactcacaaggttgcaaactgtccttcacttacgattatcccccaacgccccctcctaaatctgatcaatcgcatggaacttgatggttacaaaagacagagctaacaactagcgtaagtgcaccttcttctttgacatgaccttgaactaagtccaaatgagcaatgaacagctgaagtctctcaactgaaaagatcaggacagagagtgctctccaaagcctgtgacccacccatgcctgctctaggtcactgtatgagtctctagctctcacatacaggattgaaatgccatagctcagaattagtgacaacataatctggcctttatttgccaattgccccttatttcttactacctcacaatacaaattctcccctccaacaatggctataatatagccattttctgtactacttaagaaatagaattatagactaatagacttggaaagaacttgaaagattatctaattcaagatcctcactttacagacaaggaaactaatgaatagagaagaagaggacttcatgaaatccccagaattagaaatctctctttctcgtccttctccttctagctcagaaaatggccgaaaggttttggcaagcaaccttcttgggagaaatgcaaataccattgatttttcgaggcctctcatggatgaagacatgctcctttttacaagtgtggtcaggttccctgataactctttgtatgatcatgtggttgcagtaccttgcaggaacgggaacgtcattctgagggtagtccacatgcaagtgttctaaagttgacatcactgcttcatcattcacctcattttcccagaacagaagcaccaagaaaattatcaccattattatcatcagagtgcagatccttttttaatagcgagaacatttaaaacctactcttcgaataattttgaaatctacaaaatggcagcatggcccaggagtgtgactggcagtgaaggagctgggaagaccttggatgcaggaaggtcatttaaagcaaaagattaagaagcagcaatgcccctcttgtggcaagagttggcagcgtgcggttggtatgtcaatgcatccaaggtccaagggcctggattgtctgccaaatgcttgggagttgtttgatcaggttgacatgctccaacagcattgtggactgggcccacacctacgctgaggtgaccaatgtctccaactgttggatctgctccaccttccagcagcagctgcggagagtttgccctggaacgcgtatcctgcttctgttaagaactggacatggctagaagcttggggtcccacggacaatgggtgggatgccacagggcgggctttggataggaggcatcacaaaacccatggcaaacctggcccttggctgactcatagtgtccatgatggatggagctggctaatgggagaacacgtggtgcccccattgcaggtatcacaatgtatagagcagcactggggtaaagtcactgtgggatggttgcctactgaggtttgtgcaaacataacatgtgtcaccacaccaagggtgcagtggaacaagcggccttacgaaggccaggcccccatggactttgtgccccctgggagtttatgggtctgtggggacacaggatggccatatctcccagccaactggactggacattgtacctggggttggccctatgtgcctgccactgggcttcccacattgcctagtcgccacataactgggagccactgtgttcctgctttttcccagtgcagcaggccctctagtggttctatcccttagcaatgactatccctggagcaggcgtcattactatagaaaagcaagttgcagcctttgcagaccacacagctc

SEQ ID NO: 461495 - DNA, 1495 bp, Homo sapiens
tcttgaagaatgacagtggattatcgtaagcttaaccaagtggtgagtccaattgcagctgctgtaccagatgtggttttattgcttgagcaaattaacacatctcctgatacctggtatgcagccattgacttggcaaatgcctttttctccattcctgtccataaggcccaacagaagcaatttgccttcagctggcaaggccagcaatatacctttactgtcctacctcaggggtatatcagctctctggctttgtgtcataatcttattcgaagagaccttgatggctttttgcttctgcaaaatatcacactgctggtccattatgttgatgacattatgctgattggatccaaactacaccccgtttctaggacatctctgaaggacagcagtgaagggaaatcttcccagtgggcagaacttcaagcagtgcacctggtcgtgcactttgcaggtaggaacactgtcaccaggacacataacgacaattccattaaactggaagttaagattgacacccggacactttgggctcctcctacctttaagtctatgaagcctaagaagggagttacagtgttggctggggtgattgaccccggctatcaagatgaaatcagtctactactccacaatggagatgctgagggctctgtttacctggtgacacccaaaattctatggagacaacaatgacaacagaattaccacagagaactagaaaatgaaactcagctgaaaaacggccacctaagatggaagaagccatgagatgagtaagcgttgcctactcacaaggttgcaaactgtccttcacttacgattatcccccaacgccccctcctaaatctgatcaatcgcatggaacttgatggttacaaaagacagagctaacaactagcgtaagtgcaccttcttctttgacatgaccttgaactaagtccaaatgagcaatgaacagctgaagtctctcaactgaaaagatcaggacagagagtgctctccaaagcctgtgacccacccatgcctgctctaggtcactgtatgagtctctagctctcacatacaggattgaaatgccatagctcagaattagtgacaacataatctggcctttatttgccaattgccccttatttcttactacctcacaatacaaattctcccctccaacaatggctataatatagccattttctgtactacttaagaaatagaattatagactaatagacttggaaagaacttgaaagattatctaattcaagatcctcactttacagacaaggaaactaatgaatagagaagaagaggacttcatgaaatccccagaattagaaatctctctttctcgtccttctccttctagctgtaaggatactatgcccatagctgaatgtggggaaactaagcagcattgccccatgtccacggtccaggtctgcctcaggcacagccagctccaatgccattgagagaagagatctca

SEQ ID NO: 461496 - DNA, 1222 bp, Homo sapiens
ccagtgtccaagatttctatcatgttgatgcagtggattgctgaatcatatggcaaaaaaagtaaatattttaacttcataagaaattgccaagccatttccaaagtggctgaatcattttacattcccaccagtgatgtttgtttctcccgacaaaagttcccagcctctagcatcagagcagcctttgctggagtcatagaagccatcactagagaatacaccaaatgtattcaatttgaaggcatcatcacctccctcggccaatcacagaagccacagagcattgcatcccctgcactctgtgggggcaaaagcaagttggaggaccatcctggattcatggggagaagaccaaacaagtgtgagtgctggaaaggagacttccctgtgggccagctttggagatgagtgaccacattctccattaccatttgctccacgtggttcagaaccacatgattatttaaccaaagctcgggttgactacacttcaactaactggaacctactgtaacggatccaggaggcccacaggtctgaacaaacacattgtggtcttccaactggtacctggtttctgctcctggatttaccaagtgactcctcctgtgactctggaagccttgaaaaacttggcatcattccttcctctgtagattaacaataactttacccatcttctttcccacaactatggaaaggctctgaaaaaaaacagaaatcataactttgtacctaatttgtgattcctcgtggaaggaggtaaagttctctgggaaaattagagattgcacggtctttcaaatactaataatcataatctcaacaatctctttgctatattaaaaaacttacaggaatttagaatgcctcaaactggaaacaaatgtccatcaacaggaatgtagattcatacaatggaatattcaagcataaaaagtatgaactactaatacataaaacaacatggacaaatctcaaaaacatcatgttgaatgaaagaagccagactcataacagtactcattatataattccattcctacgaaagccaaatacagatcttcaggaaaagttctctacatataaccaatttatctatgttagtggtacattgaggaggtgtccagagacaaagagacaagacagcaaatgaatggacaagatgctgtgagggagtaggattcagaagaatgtcccagagcacaacacagcctgg

SEQ ID NO: 461497 - DNA, 2416 bp, Homo sapiens
gtttgagcaacagagcaaaggccagtgtggaggaagaaaggaaattgttttactcttgtccaaactgtcttcactatttagaggtcatagaggaacaagaagtgactgagagcagtcatggctctttgagcctaaacccccgagactttggaaaagtgaagtgtgatgaaaagatggaattaggaccttagtctcctgccctacttgtcgggtgctgttgccactcatctaagctgccactggtttggagctcacatttttattttttttgagacaaagtctcattcttgtctgccaggctggagtgcaatgttgcgatctctgctcactgcaacctccgcctcccgggagaatcgcttgaacctggaaggtggaggttgtagtgagccaagatcacgccactgcactccagctgggtgacagagggagactccatctcaaacaaaaacaaaaacaaaacaaacaaacaaaaaataaataaaaaaaacttaaataaaacggggctctatgagagtcccatctgcaccccttctagctggtccccacccctgaggaagtgtttccccagcggacctattttctggcccttgaggaagtggttccccagaggaagtggtagcccagtgggtctagttcctggcctcccaggaagtggttccccagcaggcctgtttcctggccttggaggaagtggttccccagtggacctgtttcctggttccccctgggaagtggttcctcagcgggcctgtttcctggccctggaggaagtggttccccagtggacctgtttcctggttccccctggtaagtggttcctcagcaggcctgtttcctggccctggaggaagtggttccccaatgggcctgtttcctggcccccaaggaggtggttccccctgggaagtggttcctcagcaggcttgtttactggcccctaaggaagtggttccccagtggcctgtttcctgaccaccaaggaagtggttccccagcaggcctgtttcctggcccccgaggaagtggttcccatgaggacgtgtttccccagcaggcctgtttcctggccctggaggaactggttcccctgaggaagtggttccccagtgggcctgtttcctggctccctgagctgcattttgtaaatgtagtgactggttttgttgagtctttgcagttgagttttcatagaaacaaccacacttttcacactgttttaaatgggctgagaacatacacaactggctggtgagggcagctgcgctcaggcatgaggcagagtgtggggccgtgagcagcgcacacacactgcctgctgcagacgccgggccgggggcttcacagagaggataggagaggggaatgtacaccagcaattacaatacagggctgtgagaggttagaacgggtgctatggaagcaggaggaagaggtaccagagccacttgcggggcaggatcagggaacgcttcctggaggaaatgaaattatcaccaaacagatcatcactgtgaccacctaccttcatgatcaccatcatcaccattgatgtcatcatcatcatgctcactgtcatcaatatcactatctcctttaccatcattgccatcatcatgctgtcatcatgactgtcctgtcatcttcactgtcctcattaccatcaccacctgcaccatcaccatcatcaccatcatcgttgctgtcatcatcaccattattgtcaccatcatcatcacttcccacctccttctcaatatcaccatcagcttcaccatcaccatcagcatcagcaccgttgtcatcagtaccaccactagcatcatggcagctagcatgcttgaccaccttctgtgtgcctggcaccatgcaaagctctttgcacacattgtctcatttaatttccaccgtgaccctatgaagccaagttgttattctcactttagaggtgaagaaaatgaggatcctaaaggttacacagtttgaccaaggtcacagaaacaattctaactagtagggatgataatagcaggcgtctttgtcttaattctgacttaaatgggaatgtctttagtgtttcacatttctctgcttaaggagtgttaaatgcaactaaatcttattttgatgtttcagagtcattggtaatacataattgaaaaacattctgtcatacagtcataccatcagcaatcagtggagcttacttatctgttttacttgaaggttccaagttttatttttctcactcatgctctctcttttgcattgctgactcactgagactttccttgtttctcttctcttgctcccaagctgtctattgtcggtaatttctgttgtttttctcctttttcattttataaaccattgttttaattgaggccataatttgaggacgtggaaaacatttcaaata

SEQ ID NO: 461498 - DNA, 13114 bp, Homo sapiens
  misc_feature (12493)..(12495): n is a, c, g, or t
ccagacgttccgccccacgtcgcatgcgccccgggaacgcgtggggcggagcttccggaggccccgccctgctgccgaccctttggagcggagggtgaagcctccggatgccagtccctcatcgctggcccggtcgcgctgtggcgaagggggcggagcttgcaacccgccccgcccccccttgccccgtccggcccggacggggtgcattgtgctctaaagccctcggcggggcccgcactgcagcgccagcgtccgagcgggcggccgagctcccggagcggcctggcccccgagccccgagcgggcgtcgctcagcagcaggtcgcggccgcagccccatccagccccgcgcccgccatgccgtccgccggccccgcctgagccgcggcctccgcgcgcgggcgggcctggggacggcggggccatgcgcgcgctgccctaacgatgccgcccgccgcgcccgcccgcctggcgctggccctgggcctggggcctgtggctcggggcgctggcggaggggcccgggggcggctgcggggccttgcgagcccccctgcctctgcggcctagcgcccggcgccgcctgccgcgtcaactgctcgggccgcggtccgcggcctgcggacgctcggtcccgcgctgcgcatccccgcggacgccacagcgctaacggcgatggcaaaagcagatggagacgtgaaaaagtacgggagcaagcgaggggctctggccctgacccacggccactcactcctcagagacgtctcccacaacctgctccgggcgctggacgttgggctcctggcgaacctctcggcgctggcagagctacctggtccccaacacctgcccctgccctgcagaaacctgagtgggaacccgtttgagtgtgactgtggcctggcgtggctgccgcaatgggcggaggagcagcaggtgcgggtggtgcagcccgaggcagccacgtgtgctgggcctggctccctggctggccagcctctgcttggcatccccttgctggacagtggctgtggtgaggagtatgtcgcctgcctccctgacaacagctcaggcaccgtggcagcagtgtccttttcagctgcccacgaaggcctgcttcagccagaggcctgcagcgccttctgcttctccaccggccagggcctcgcagccctctcggagcagggctggtgcctgtgtggggcggcccagccctccagtgcctcctttgcctgcctgtccctctgctccgggcccccggcacctcctgcccccacctgtaggggccccaccctcctccagcacgtcttccctgcctccccaggggccaccctggtggggccccacggacctctggcctctggccagctagcagccttccacatcgctgccccgctccctgtcactgccacacgctgggacttcggagacggctccgccgaggtggatgccgctgggccggctgcctcgcatcgctatgtgctgcctgggcgctatcacgtgacggccgtgctggccctgggggccggctcagccctgctggggacagacgtgcaggtggaagcggcacctgccgccctggagctcgtgtgcccgtcctcggtgcagagtgacgagagcctcgacctcagcatccagaaccgcggtggttcaggcctggaggccgcctacagcatcgtggccctgggcgaggagccggcccgagcggtgcacccgctctgcccctcggacacggagatcttccctggcaacgggcactgctaccgcctggtggtggagaaggcggcctggctgcaggcgcaggagcagtgtcaggcctgggccggggccgccctggcaatggtggacagtcccgccgtgcagcgcttcctggtctcccgggtcaccaggagcctagacgtgtggatcggcttctcgactgtgcagggggtggaggtgggcccagcgccgcagggcgaggccttcagcctggagagctgccagaactggctgcccggggagccacacccagccacagccgagcactgcgtccggctcgggcccaccgggtggtgtaacaccgacctgtgctcagcgccgcacagctacgtctgcgagctgcagcccggaggcccagtgcaggatgccgagaacctcctcgtgggagcgcccagtggggacctgcagggacccctgacgcctctggcacagcaggacggcctctcagccccgcacgagcccgtggaggtcatggtattcccgggcctgcgtctgagccgtgaagccttcctcaccacggccgaatttgggacccaggagctccggcggcccgcccagctgcggctgcaggtgtaccggctcctcagcacagcagggaccccggagaacggcagcgagcctgagagcaggtccccggacaacaggacccagctggcccccgcgtgcatgccagggggacgctggtgccctggagccaacatctgcttgccgctggacgcctcctgccacccccaggcctgcgccaatggctgcacgtcagggccagggctacccggggccccctatgcgctatggagagagttcctcttctccgttcccgcggggccccccgcgcagtactcggtcaccctccacggccaggatgtcctcatgctccctggtgacctcgttggcttgcagcacgacgctggccctggcgccctcctgcactgctcgccggctcccggccaccctggtccccgggccccgtacctctccgccaacgcctcgtcatggctgccccacttgccagcccagctggagggcacttggggctgccctgcctgtgccctgcggctgcttgcacaacgggaacagctcaccgtgctgctgggcttgaggcccaaccctggactgcggctgcctgggcgctatgaggtccgggcagaggtgggcaatggcgtgtccaggcacaacctctcctgcagctttgacgtggtctccccagtggctgggctgcgggtcatctaccctgccccccgcgacggccgcctctacgtgcccaccaacggctcagccttggtgctccaggtggactctggtgccaacgccacggccacggctcgctggcctgggggcagtctcagcgcccgctttgagaatgtctgccctgccctggtggccaccttcgtgcccgcctgcccctgggagaccaacgataccctgttctcagtggtagcactgccgtggctcagtgagggggagcacgtggtggacgtggtggtggaaaacagcgccagccgggccaacctcagcctgcgggtgacggcggaggagcccatctgtggcctccgcgccacgcccagccccgaggcccgtgtactgcagggagtcctagtgaggtacagccccgtggtggaggccggctcggacatggtcttccggtggaccatcaacgacaagcagtccctgaccttccagaacgtggtcttcaatgtcatttatcagagcgcggcggtcttcaagctctcactgacggcctccaaccacgtgagcaacgtcaccgtgaactacaacgtaaccgtggagcggatgaacaggatgcagggtctgcaggtctccacagtgccggccgtgctgtcccccaatgccacgctagcactgacggcgggcgtgctggtggactcggccgtggaggtggccttcctgtggacctttggggatggggagcaggccctccaccagttccagcctccgtacaacgagtccttcccagttccagacccctcggtggcccaggtgctggtggagcacaatgtcacgcacacctacgctgccccaggtgagtacctcctgaccgtgctggcatctaatgccttcgagaacctgacgcagcaggtgcctgtgagcgtgcgcgcctccctgccctccgtggctgtgggtgtgagtgacggcgtcctggtggccggccggcccgtcaccttctacccgcacccgctgccctcgcctgggggtgttctttacacgtgggacttcggggacggctcccctgtcctgacccagagccagccggctgccaaccacacctatgcctcgaggggcacctaccacgtgcgcctggaggtcaacaacacggtgagcggtgcggcggcccaggcggatgtgcgcgtctttgaggagctccgcggactcagcggcgcccccgtggtggtcagcgccgcggtgcagacgggcgacaacatcacgtggaccttcgacatgggggacggcaccgtgctgtcgggcccggaggcaacagtggagcatgtgtacctgcgggcacagaactgcacagtgaccgtgggtgcgggcagccccgccggccacctggcccggagcctgcacgtgctggtcttcgtcctggaggtgctgcgcgttgaacccgccgcctgcatccccacgcagcctgacgcgcggctcacggcctacgtcaccgggaacccggcccactacctcttcgactggaccttcggggatggctcctccaacacgaccgtgcgggggtgcccgacggtgacacacaacttcacgcggagcggcacgttccccctggcgctggtgctgtccagccgcgtgaacagggcgcattacttcaccagcatctgcgtggagccagaggtgggcaacgtcaccctgcagccagagaggcagtttgtgcagctcggggacgaggcctggctggtggcatgtgcctggcccccgttcccctaccgctacacctgggactttggcaccgaggaagccgcccccacccgtgccaggggccctgaggtgacgttcatctaccgagacccaggctcctatcttgtgacagtcaccgcgtccaacaacatctctgctgccaatgactcagccctggtggaggtgcaggagcccgtgctggtcaccagcatcaaggtcaatggctcccttgggctggagctgcagcagccgtacctgttctctgctgtgggccgtgggcgccccgccagctacctgtgggatctgggggacggtgggtggctcgagggtccggaggtcacccacgcttacaacagcacaggtgacttcaccgttagggtggccggctggaatgaggtgagccgcagcgaggcctggctcaatgtgacggtgaagcggcgcgtgcgggggctcgtcgtcaatgcaagccgcacggtggtgcccctgaatgggagcgtgagcttcagcacgtcgctggaggccggcagtgatgtgcgctattcctgggtgctctgtgaccgctgcacgcccatccctgggggtcctaccatctcttacaccttccgctccgtgggcaccttcaatatcatcgtcacggctgagaacgaggtgggctccgcccaggacagcatcttcgtctatgtcctgcagctcatagaggggctgcaggtggtgggcggtggccgctacttccccaccaaccacacggtacagctgcaggccgtggttagggatggcaccaacgtctcctacagctggactgcctggagggacaggggcccggccctggccggcagcggcaaaggcttctcgctcaccgtgctcgaggccggcacctaccatgtgcagctgcgggccaccaacatgctgggcagcgcctgggccgactgcaccatggacttcgtggagcctgtggggtggctgatggtggccgcctccccgaacccagctgccgtcaacacaagcgtcaccctcagtgccgagctggctggtggcagtggtgtcgtatacacttggtccttggaggaggggctgagctgggagacctccgagccatttaccacccatagcttccccacacccggcctgcacttggtcaccatgacggcagggaacccgctgggctcagccaacgccaccgtggaagtggatgtgcaggtgcctgtgagtggcctcagcatcagggccagcgagcccggaggcagcttcgtggcggccgggtcctctgtgcccttttgggggcagctggccacgggcaccaatgtgagctggtgctgggctgtgcccggcggcagcagcaagcgtggccctcatgtcaccatggtcttcccggatgctggcaccttctccatccggctcaatgcctccaacgcagtcagctgggtctcagccacgtacaacctcacggcggaggagcccatcgtgggcctggtgctgtgggccagcagcaaggtggtggcgcccgggcagctggtccattttcagatcctgctggctgccggctcagctgtcaccttccgcctacaggtcggcggggccaaccccgaggtgctccccgggccccgtttctcccacagcttcccccgcgtcggagaccacgtggtgagcgtgcggggcaaaaaccacgtgagctgggcccaggcgcaggtgcgcatcgtggtgctggaggccgtgagtgggctgcaggtgcccaactgctgcgagcctggcatcgccacgggcactgagaggaacttcacagcccgcgtgcagcgcggctctcgggtcgcctacgcctggtacttctcgctgcagaaggtccagggcgactcgctggtcatcctgtcgggccgcgacgtcacctacacgcccgtggccgcggggctgttggagatccaggtgcgcgccttcaacgccctgggcagtgagaaccgcacgctggtgctggaggttcaggacgccgtccagtatgtggccctgcagagcggcccctgcttcaccaaccgctcggcgcagtttgaggccgccaccagccccagcccccggcgtgtggcctaccactgggactttggggatgggtcgccagggcaggacacagatgagcccagggccgagcactcctacctgaggcctggggactaccgcgtgcaggtgaacgcctccaacctggtgagcttcttcgtggcgcaggccacggtgaccgtccaggtgctggcctgccgggagccggaggtggacgtggtcctgcccctgcaggtgctgatgcggcgatcacagcgcaactacttggaggcccacgttgacctgcgcgactgcgtcacctaccagactgagtaccgctgggaggtgtatcgcaccgccagctgccagcggccggggcgcccagcgcgtgtggccctgcccggcgtggacgtgagccggcctcggctggtgctgccgcggctggcgctgcctgtggggcactactgctttgtgtttgtcgtgtcatttggggacacgccactgacacagagcatccaggccaatgtgacggtggcccccgagcgcctggtgcccatcattgagggtggctcataccgcgtgtggtcagacacacgggacctggtgctggatgggagcgagtcctacgaccccaacctggaggacggcgaccagacgccgctcagtttccactgggcctgtgtggcttcgacacaggccacgtcgccccttgttctcggcctgcagagggaggctggcgggtgtgcgctgaactttgggccccgcgggagcagcacggtcaccattccacgggagcggctggcggctggcgtggagtacaccttcagcctgaccgtgtggaaggccggccgcaaggaggaggccaccaaccagacggtgctgatccggagtggccgggtgcccattgtgtccttggagtgtgtgtcctgcaaggcacaggccgtgtacgaagtgagccgcagctcctacgtgtacttggagggccgctgcctcaattgcagcagcggctccaagcgagggcggtgggctgcacgtacgttcagcaacaagacgctggtgctggatgagaccaccacatccacgggcagtgcaggcatgcgactggtgctgcggcggggcgtgctgcgggacggcgagggatacaccttcacgctcacggtgctgggccgctctggcgaggaggagggctgcgcctccatccgcctgtcccccaaccgcccgccgctggggggctcttgccgcctcttcccactgggcgctgtgcacgccctcaccaccaaggtgcacttcgaatgcacgggctggcatgacgcggaggatgctggcgccccgctggtgtacgccctgctgctgcggcgctgtcgccagggccactgcgaggagttctgtgtctacaagggcagcctctccagctacggagccgtgctgcccccgggtttcaggccacacttcgaggtgggcctggccgtggtggtgcaggaccagctgggagccgctgtggtcgccctcaacaggtctttggccatcaccctcccagagcccaacggcagcgcaacggggctcacagtctggctgcacgggctcaccgctagtgtgctcccagggctgctgcggcaggccgatccccagcacgtcatcgagtactcgttggccctggtcaccgtgctgaacgagtacgagcgggccctggacgtggcggcagagcccaagcacgagcggcagcaccgagcccagatacgcaagaacatcacggagactctggtgtccctgagggtccacactgtggatgacatccagcagatcgctgctgcgctggcccagtgcatggggcccagcagggagctcgtatgccgctcgtgcctgaagcagacgctgcacaagctggaggccatgatgctcatcctgcaggcagagaccaccgcgggcaccgtgacgcccaccgccatcggagacagcatcctcaacatcacaggagacctcatccacctggccagctcggacgtgcgggcaccacagccctcagagctgggagccgagtcaccatctcggatggtggcgtcccaggcctacaacctgacctctgccctcatgcgcatcctcatgcgctcccgcgtgctcaacgaggagcccctgacgctggcgggcgaggagatcgtggcccagggcaagcgctcggacccgcggagcctgctgtgctatggcggcgccccagggcctggctgccacttctccatccccgaggctttcagcggggccctggccaacctcagtgacgtggtgcagctcatctttctggtggactccaatccctttccctttggctatatcagcaactacaccgtctccaccaaggtggcctcgatggcattccagacacaggccggcgcccagatccccatcgagcggctggcctcagagcgcgccatcaccgtgaaggtgcccaacaactcggactgggctgcccggggccaccgcagctccgccaactccgccaactccgttgtggtccagccccaggcctccgtcggtgctgtggtcaccctggacagcagcaaccctgcggccgggctgcatctgcagctcaactatacgctgctggacggccactacctgtctgaggaacctgagccctacctggcagtctacctacactcggagccccggcccaatgagcacaactgctcggctagcaggaggatccgcccagagtcactccagggtgctgaccaccggccctacaccttcttcatttccccggggagcagagacccagcggggagttaccatctgaacctctccagccacttccgctggtcggcgctgcaggtgtccgtgggcctgtacacgtccctgtgccagtacttcagcgaggaggacatggtgtggcggacagaggggctgctgcccctggaggagacctcgccccgccaggccgtctgcctcacccgccacctcaccgccttcggcgccagcctcttcgtgcccccaagccatgtccgctttgtgtttcctgagccgacagcggatgtaaactacatcgtcatgctgacatgtgctgtgtgcctggtgacctacatggtcatggccgccatcctgcacaagctggaccagttggatgccagccggggccgcgccatccctttctgtgggcagcggggccgcttcaagtacgagatcctcgtcaagacaggctggggccggggctcaggtaccacggcccacgtgggcatcatgctgtatggggtggacagccggagcggccaccggcacctggacggcgacagagccttccaccgcaacagcctggacatcttccggatcgccaccccgcacagcctgggtagcgtgtggaagatccgagtgtggcacgacaacaaagggctcagccctgcctggttcctgcagcacgtcatcgtcagggacctgcagacggcacgcagcgccttcttcctggtcaatgactggctttcggtggagacggaggccaacgggggcctggtggagaaggaggtgctggccgcgagtaaaggcctcgttccatggtcccactccgtggaaggcgacgcagcccttttgcgcttccggcgcctgctggtggctgagctgcagcgtggcttctttgacaagcacatctggctctccatatgggaccggccgcctcgtagccgtttcactcgcatccagagggccacctgctgcgttctcctcatctgcctcttcctgggcgccaacgccgtgtggtacggggctgttggcgactctgcctacagcacggggcatgtgtccaggctgagcccgctgagcgtcgacacagtcgctgttggcctggtgtccagcgtggttgtctatcccgtctacctggccatcctttttctcttccggatgtcccggagcaaggtggctgggagcccgagccccacacctgccgggcagcaggtgctggacatcgacagctgcctggactcgtccgtgctggacagctccttcctcacgttctcaggcctccacgctgagcaggcctttgttggacagatgaagagtgacttgtttctggatgattctaagagttggccggacctgctcagtgacccgtccattgtgggtagcaatctgcggcagctggcacggggccaggcgggccatgggctgggcccagaggaggacggcttctccctggccagcccctactcgcctgccaaatccttctcagcatcaggactggtggagggtctgcggaaggtcctgctgccggcctggtgtgcctccctggcccacgggctcagcctgctcctggtggctgtggctgtggctgtctcaggcagcgccaccttcctggcctcattcctcggctgggagccactgaaggtcttgctggaagccctgtacttctcactggtggccaagcggctgcacccggatgaagatgacaccctggtagagagcccggctgtgacgcctgtgagcgcacgtgtgccccgcgtacggccaccccacggctttgcactcttcctggccaaggaagaagcccgcaaggtcaagaggctacatggcatgctgcggagcctcctggtgtacatgctttttctgctggtgaccctgctggccagctatggggatgcctcatgccatgggcacgcctaccgtctgcaaagcgccatcaagcaggagctgcacagccgggccttcctggccatcacgcgggggctctggccatggatggcccacgtgctgctgccctacgtccacgggaaccagtccagcccagagctggggcccccacggctgcggcagagcctcctggtgtacatgctttttctgctggtgaccctgctggccagctatggggatgcctcatgccatgggcacgcctaccgtctgcaaagcgccatcaagcaggagctgcacagccgggccttcctggccatcacgcggtacgggcatccggagctctggccatggatggcccacgtgctgctgccctacgtccacgggaaccagtccagcccagagctggggcccccacggctgcggcaggtgggagctccctcccctgccctctccggggtggccgcagtcaccagccaggagcccaccctcactcctccggcccccgctggcctaggcggcttccacagcccctcagccacgcctgcactcgcgcgcccggccgtggggctgcacgccgccgtcacgctgcgcctcgagttcccggcggccggccgcgccctggccgccctcagcgtccgcccctttgcgctgcgccgcctcagcgcgggcctctcgctgcctctgctcacctcgttttttttccgccctcctgaaccgtgccccccacaggtgtgcctgctgctgttcgccgtgcacttcgccgtggccgaggcccgtacttggcacagggaagggcgctggcgcgtgctgcggctcggagcctgggcgcggtggctgctggtggcgctgacggcggccacggcactggtacgcctcgcccagctgggtgccgctgaccgccagtggacccgtttcgtgcgcggccgcccgcgccgcttcactagcttcgaccaggtggcgcacgtgagctccgcagcccgtggcctggcggcctcgctgctcttcctgcttttggtcaagggctgcaagaagacagatttctcgtccgcagctgcccagcacgtacgcttcgtgcgccagtggtccgtctttggcaagacattatgccgagctctgccagagctcctgggggtcaccttgggcctggtggtgctcggggtagcctacgcccagctggccatcctgnnnctccagcagctgatgggctgagcgtgatcctgggccggctggggacaaggtgtgagcctgagccctcccgcctccaagccgtgttcgaggccctgctcacccagtttgaccgactcaaccaggccacagaggacgtctaccagctggagcagcagctgcacagcctgcaaggccgcaggagcagccgggcgcccgccggatcttcccgtggcccatccccgggcctgcggccagcactgcccagccgccttgcccgggccagtcggggtgtggacctggccactggccccagcaggacaccttttcgggccaagaacaaggtccaccccagcagcacttagtcctccttcctggcgggggtgggccgtggagtcggagtggacaccgctcagtattactttctgccgctgtcaaggccgagggccaggcagaatggctgcacgtaggttccccagggagcaggcaggggcatctgtctgtctgtgggcttcagcactttaaagaggctgtgtggccaaccaggacccagggtcccctccccagctcccttgggaaggacacagcagtattggacggtttctagcctctgagatgctaatttatttccccgagtcctcag

SEQ ID NO: 461499 - DNA, 644 bp, Homo sapiens
ctcattttgatccctctgcaggctgtgaggcaggctgtggctcaaactgtggaagagctcaagttgaagcctacgatgatgaacttggtggaggcacaactgatgaacccagatgccactgcacgccaggaagcagtcatctctttgggtgtcctggggatccgcagtccacaagtgttccacttgctcctggacttactagatgcagaaaaccaccaggctgtgaagaagagtctacaagaaacattaatcctttgtgcctcaattgatccctggatccaaaacaagctgaaaaacaaggttctctctgtatatgaggcacctaagaccaatgtgaaggcagagcccacaaggttccagaaagagcctgagaacccagaagagttaactattcaagactttcgatccctccctgaagatgcttctcaggctcccatgagaaaacaatctatacttatcttccgtgaataaacaagtgtcactctacctaccacatttctctgaatcactactgccacttctgttcatcagaagctccactggaacacaggtctcctcattcctacctgggtatactttccactcagccacatgcccttctaccagaggaaggagggaaggacagagccaaagcttctctggac

SEQ ID NO: 461500 - DNA, 1141 bp, Homo sapiens
gagcccctcttgcaggcaaagggaagcagttggaagagaaaatgaggactcaagtcggggatgagggcaagctggtgcctgtactacagacactgatcaagaagtcgtccagtgaagcatctctggaggcagccctgtgcctgggtttcctgaggccttgcagcaacatggtccaagagttcttgttgcagtgcctgtgccaaggactcaagacccagcggatgaaggcacttaggatgctggtcaaggtgatgcacgtgcactcagccccagtcatcaaggccatcctagaccagctgtgttcttccagtgtccttgaggaccgctttgaagccacccaaatgctcaagaccattgggctggaacagatccaggcacaggggctagaggaactcacatttaacctgctcaggaggaagacgcataatgaacccttccttggtgtcctggggatccgcagtccacaagtgttccacttgctcctggacttactagatgcagaaaaccaccaggctgtgaagaagagtctacaagaaacattaatcctttgtgcctcaattgatccctggatccaaaacaagctgaaaaacaaggttctctctgtatatgaggcacctaagaccaatgtgaaggcagagcccacaaggttccagaaagagcctgagaacccagaagagttaactattcaagactttcgacttgcaaagctgaaccccttgtttattgcaaagtccatcaccaaagtaggccaaaagaaaacgcctgctttcccaccgtgctgctcgaaaccacgaaaacataggccacaggtcatagggccctggcagccaaggatcaagaaacagctccgggtccttgctgaaattgccaaataagtcaattctttgggcctactccccgactccctccctgaagatgcttctcaggctcccatgagaaaacaatctatacttatcttccgtgaataaacaagtgtcactctacctaccacatttctctgaatcactactgccacttctgttcatcagaagctccactggaacacaggtctcctcattcctacctgggtatactttccactcagccacatgcccttctaccagaggaaggagggaaggacagagccaaagcttctctggac

SEQ ID NO: 461501 - DNA, 848 bp, Homo sapiens
ctcattttgatccctctgcaggctgtgaggcaggctgtggctcaaactgtggaagagctcaagttgaagcctacgatgatgaacttggtggaggcacaactgatgaacccagatgccactgcacgccaggaagcagtcatctctttgggtgtcctggggatccgcagtccacaagtgttccacttgctcctggacttactagatgcagaaaaccaccaggctgtgaagaagagtctacaagaaacattaatcctttgtgcctcaattgatccctggatccaaaacaagctgaaaaacaaggttctctctgtatatgaggcacctaagaccaatgtgaaggcagagcccacaaggttccagaaagagcctgagaacccagaagagttaactattcaagactttcgacttgcaaagctgaaccccttgtttattgcaaagtccatcaccaaagtaggccaaaagaaaacgcctgctttcccaccgtgctgctcgaaaccacgaaaacataggccacaggtcatagggccctggcagccaaggatcaagaaacagctccgggtccttgctgaaattgccaaataagtcaattctttgggcctactccccgactccctccctgaagatgcttctcaggctcccatgagaaaacaatctatacttatcttccgtgaataaacaagtgtcactctacctaccacatttctctgaatcactactgccacttctgttcatcagaagctccactggaacacaggtctcctcattcctacctgggtatactttccactcagccacatgcccttctaccagaggaaggagggaaggacagagccaaagcttctctggac

SEQ ID NO: 461502 - DNA, 1271 bp, Homo sapiens
gacactgtgaagggtatgatgtcatcgttcacaggtgcagtcctggatgtacacgcagtttccacggaaatgctgtcatttggcaagagagctttctatcactgtttttatgccctgactgtatcactagaaaaacatggaagtctctaccttggtgcagaagaaagggttcaagcagctcagaaggacactcctgctttaagtacagaaaactgcatggaagtgatggacttgtatgatctcactgttcctctcccaggaagctcccagaacctctgccctacaagtgagctgggattgccaccttcctactgtgaccacacctggtggaaggaaagagggagctctctggggtattgtatcaggacgctgattccattcatgaaacggagcctcaacacctttcaaaggagaccaaaggccccacctcctgccaccgtcacgatggagttgagattccaacatatgccttgtggggggtcataacccttcagtcaacaggaggactttatgtcagtcaatggatttcatttactgtgtgttctcagaataattttccttgatagtacaggttgggtttctataatttttaccagattaggttgtctctttggaaatcttgaagtttctcacaccatcacactggtaatgagataactctatttatattcgtgattgaagcttcctcattagggccataagcatttggaatgttcttctcttaaatcatttgccgtgatggaataaacttgtcccccctcatcagtattatcatttgttcagaaatacactttttatattttaatattgcaaatccacctttcctttatctttctttaacatggtgtctttctttatgttttaaaatttgtaactgattatgtttaaattttagggtaattttagattttaaggcaagccccctagagtaaggtgtgttctcatgtacaactttccagggttcccatacactgatccacactctaccaaggctgggtctctctccggccatctacggggctcactctctgaacagtgttctgctatccactgtctagtctgtgatctccacacttcttggcctgtctgggatctcagctccttttcctcagcttcaaatctacctggttcctcttcagcactgtggcctggaaactctctttaaaaagtagcaaagcatgcgttcatcagagggctccttttgtatattttccccacctcagcaatcactgtccttgttatttgatgtaaaataccttaaaatcatgttt

SEQ ID NO: 461503 - DNA, 962 bp, Homo sapiens
ctcttatagatagatttagggcaaaggatgaggtctcactatgttgcttaggctggagtgcagtagctagtcacaaacacaatcatggaaactggactgcaattacatgcgtggagtccttattccaaccgttcaaatttttctttgataaactattatgacttaaaagcattaactaataatacaaaggtgcttaaaagctccagagtcagtattgtgttctggggaaccaaacatgttacttttcacaaaatcgtcatggcaactgactcctccttcgcctgctccccaggggtgtccggcgactccagtcactccctggccaccgccagcaggagtaactcggcgctgagctgcgggtacgctctgggcgtggcggacgcggcaggctctgcaggcggcgccttgtggcagagggaaggcatcgctcaccgccgctgccgatgggttcatggatctgtcctgagaggaggacgaggtgtctccaatgccaagcttcggcagcagaagcagcagccacagcaaactgaacaacccacatggatttgacatcccctcatgatcatcctcatgatcatcccctcatgagaaattccaagtttcttcatttgaaatactgctctcttcaagaaaccacaattgtaataatttgtagaatgtattaccattagaaaattaattatgtattatgcacacgtttctgaaatacttcactgcagtaaatagtatatggtgagaattattgtttcctttaacaaaaaactaatgtgggtaaaattatttacataaattcagatgttttggcttcaactgccattctacctcattagcacttccctaacttcataaaaggtatgatttgaaatttttgtttaattcagaatgtattaaaaagaatttttaaaaaatgttataatgtttatattgcaattgaggacatgttcaataaatatcttaaactt

SEQ ID NO: 461504 - DNA, 1212 bp, Homo sapiens
ctcctcaagccccatgagagtgatacagagaggcccagacccggggagggaacagccgtgctggctgcactcgccagggataactatggcttgcttctcattggacgaagtgcccggcggctttcctaagacttctggacctgacaagattcttctagaattcctcagctgccaggtgctctcaccttccctcaatctcaatgagaagcagaataaccagatgtacaaagaatttgaattccagttgtacaagtatagagagacagctgccaaagagctaaaaacagccttgacatatgctgttgtgtccaaaattggtggattcctgacttcactgacctcaagaaggaagccacagaccctcacggccggcagtgctgggggacctggtgctgcctcctcccctgctggcctgggtgctaagatgctcactccctggggccagcgccggccagccgctctgagtgtggggcctgctgagccggcgcccatccagcactcccgctggcccacgagggccatgcgcggccctggttcctgccctgtggccagagtgggcactgaggccaaggaggcactgagagcaagtgagggctgccagcacgctgtcacctctcactgtggagacaagatcggtgaacaggtgatctctgaaccatctggaatttaattgttgatgggagttacagacctagtttgatttctttctaaatgaccacctggctgtctgagcaccattaatcacaatgcttgggtctatttctggaccttctgttccatttcactggtctgtctattcctgcttcagtaccacactgttttaattatagagactttatagtatgtctgaatatttggtagaggtagacctctctcatagcttttctttcgcaggtattcctagctcttcttacatttttatccttccgtatgaatgtgtgtatcagtttaggctctagaaaaaatgttttggcattttactagaatcgcactaagtttattaattaacttgaggagaactgacatatttatgatattgagtcatcttttccaagaacaaaagatgacttggcttatttgggtctacttctgtgtctttcaggagtgttaatgttttcctcatacagactttgttgctcttgtaaatgggttttctctacattacatcctctacttgattatcatttatgtttatgacagttactgatttcc

SEQ ID NO: 461505 - DNA, 368 bp, Homo sapiens
tgcctggctgtgtttgatgtttttagcagctggagcagttcaagaaggacaacgaggaaacaggcttcggctcaggcacccgggccctggagcaagccctggagaagacgaaagccaacatcaagtgggtgaaggagaacaaggaggtggtgctccagtggttcacagaaaacagcaaatagtccccagcccttgaagtcacccccagatgagcagaagctctcgatggacaatgaacggccttgctgggggccgccctgtaccctctttcacctttccctaaagaccctaaatctgaggaatcaacagggcagcagatctgtatatttttttctaagagaaaatgtaaataaaggatttctagatga

SEQ ID NO: 461506 - DNA, 480 bp, Homo sapiens
cgctcacgctccagaaccccagccagacgtgcccgctcacgctctagaaccccagctagacgcagtggtcgctcacgctccagaacaccagccaggagagggaggtctcggtctagggcaccaagacgaggaagatcccgcagtagaagcttagttagacgcggaagatctcactctagaacacctcaaagaagaggcagatctggctcatcttcagagcggaaaaacaaatccagaactacctgaagaagcaggtcacacccctcttcattcacttcagaaataataccaacaactggagggagatcccagaaaacctgatggaccagtacagcgaggttaatgccatcagcaccgcctgctccaacggagttccagagtgtgaggagatggtctctggccttttcaagcagtggatggagaaccccaataataacccatccacctcaacctgtcgacagtctgggatcctctagtcat

SEQ ID NO: 461507 - DNA, 404 bp, Homo sapiens
  misc_feature (9)..(9): n is a, c, g, or t
  misc_feature (20)..(20): n is a, c, g, or t
cgcggcccncgcgacacggntgcgagagacgacagaaggggggagcagttccgaaatgccacactggtcaatgaggctgacaagctccgggcagccctggcctgcagcaaagagttgtggatcctgaacaggctctggtgtagctggacctgggtcttttcaaacatccagctgggcaccccctcaagcccttggatgagggtccccacctcccaccatgtgcctcatatgccattacctggatgcagtaaagaagagccacccttgggcagggtgtggtggctcatacctgtaatcccagcactttggaagactgaggtggatggatcacctgaggtcaggagttcgagaccagcctggccaacatggagaaaccccgtctctactaaaaatactaaaaatac

SEQ ID NO: 461508 - DNA, 2635 bp, Homo sapiens
ggtgccagagctgggcagaagctgggagcctgggcagctgctcctcactggcagtgaccacaccgccatctctcaccacctctggatctttaattgcagctacagaatccacataaaatgcttaaagtagtgcctggcacatgttatgagcagccctactcagcaaggcactgaagaagcgaagggcatgacaagtcatcctttgccttggccaaggctacagatgaaggaaggcaagaagttggaggcattctagtgctgtgctgagtgctttcagagtgtatggttggggctagtgaggtatggggacatggagcagggaataagggagattcaagttcatggagaggtcagggagggcttcccggaggaggtgagctgagtcttagaggaagagtaggaatcagacaggctaatgtggcagagaaaagaattccaggcaaagggaatagcaagtgccagggatagaggtaggagagagtgtggggactgagtgtagctagggcagaggtgtgcccaagagataaagctggtccccaagggccccaggggctgcaggagacagtggatggggcaggtgggaaatgagcaacctattggccctgacctctggctgctgaaacaaagtatgagaggagtgagggaggagggggacccacagggaggaaggggcactaagccccagaaagagacagcagcactgggggtctgggtgaatgggaggggaagggagaggaggagctgcctgtggttcccacttgggtgacaggtgtgatggagtgtggaggagggcaaggaggaggaacagcctggattgctgagtgtgagcggcctggcagctggcctggccgtgcagagcctagggaggcagggcaggttctgaggtttggggtggcatgtcatcttcatgggttgatggtctgtgaagccactggcagcccagttcctcatcccttccttccccacccttagcgtctccccagcagcttgagggtgaggtggtgccaggctgcgggggcagctgctcttgcaagaggtccaggggtcagcccatggcctctgagcagccctgcccaggtctcgtccctctccacagcccagaacgatctcttcagcacatcaggcaatgagtgggtcctgctgaacctcaatgtgacgggctattaccgggtgaactacgacgaagagaactggaggaagattcagactcagctgcagagagaccactcggccatccctgtcatcaatcgggcacagatcattaatgacgccttcaacctggccagtgcccataaggtccctgtcactctggcgctgaacaacaccctcttcctgattgaagagagacagtacatgccctgggaggccgccctgagcagcctgagctacttcaagctcatgtttgaccgctccgaggtctatggccccatgaagaactacctgaagaagcaggtcacacccctcttcattcacttcagaaataataccaacaactggagggagatcccagaaaacctgatggaccagtacagcgaggttaatgccatcagcaccgcctgctccaacggagttccagagtgtgaggagatggtctctggccttttcaagcagtggatggagaaccccaataataacccgatccaccccaacctgcggtccaccgtctactgcaacgctatcgcccagggcggggaggaggagtgggacttcgcctgggagcagttccgaaatgccacactggtcaatgaggctgacaagctccgggcagccctggcctgcagcaaagagttgtggatcctgaacaggtacctgagctacaccctgaacccggacttaatccggaagcaggacgccacctctaccatcatcagcattaccaacaacgtcattgggcaaggtctggtctgggactttgtccagagcaactggaagaagctttttaacgattatggtggtggctcgttctccttctccaacctcatccaggcagtgacacgacgattctccaccgagtatgagctgcagcagctggagcagttcaagaaggacaacgaggaaacaggcttcggctcaggcacccgggccctggagcaagccctggagaagacgaaagccaacatcaagtgggtgaaggagaacaaggaggtggtgctccagtggttcacagaaaacagcaaatagtccccagcccttgaagtcacccggccccgatgcaaggtgcccacatgtgtccatcccagcggctggtgcagggcctccattcctggagcccgaggcaccagtgtcctcccctcaaggacaaagtctccagcccacgttctctctgcctgtgagccagtctagttcctgatgacccaggctgcctgagcacctcccagcccctgcccctcatgccaaccccgccctaggcctggcatggcacctgtcgcccagtgccctggggctgatctcagggaagcccagctccagggccagatgagcagaagctctcgatggacaatgaacggccttgctgggggccgccctgtaccctctttcacctttccctaaagaccctaaatctgaggaatcaacagggcagcagatctgtatatttttttctaagagaaaatgtaaataaaggatttctagatga

SEQ ID NO: 461509 - DNA, 2446 bp, Homo sapiens
cttctgagcgccccctcacccccaccccagggcgcctcagtcctcaggatgctctccagcttcctgtccgaggacgtattcaagcagggcctggcgtcctacctccacacctttgcctaccagaacaccatctacctgaacctgtgggaccacctgcaggaggctgtgaacaaccggtccatccaactccccaccaccgtgcgggacatcatgaaccgctggaccctgcagatgggcttcccggtcatcacggtggataccagcacggggaccctttcccaggagcacttcctccttgaccccgattccaatgttacccgcccctcagaattcaactacgtgtggattgtgcccatcacatccatcagagatggcagacagcagcaggactactggctgatagatgtaagagcccagaacgatctcttcagcacatcaggcaatgagtgggtcctgctgaacctcaatgtgacgggctattaccgggtgaactacgacgaagagaactggaggaagattcagactcagctgcagagagaccactcggccatccctgtcatcaatcgggcacagatcattaatgacgccttcaacctggccagtgcccataaggtccctgtcactctggcgctgaacaacaccctcttcctgattgaagagagacagtacatgccctgggaggccgccctgagcagcctgagctacttcaagctcatgtttgaccgctccgaggtctatggccccatgaagaactacctgaagaagcaggtcacacccctcttcattcacttcagaaataataccaacaactggagggagatcccagaaaacctgatggaccagtacagcgaggttaatgccatcagcaccgcctgctccaacggagttccagagtgtgaggagatggtctctggccttttcaagcagtggatggagaaccccaataataacccgatccaccccaacctgcggtccaccgtctactgcaacgctatcgcccagggcggggaggaggagtgggacttcgcctgggagcagttccgaaatgccacactggtcaatgaggctgacaagctccgggcagccctggcctgcagcaaagagttgtggatcctgaacaggtacctgagctacaccctgaacccggacttaatccggaagcaggacgccacctctaccatcatcagcattaccaacaacgtcattgggcaaggtctggtctgggactttgtccagagcaactggaagaagctttttaacgattatggtggtggctcgttctccttctccaacctcatccaggcagtgacacgacgattctccaccgagtatgagctgcagcagctggagcagttcaagaaggacaacgaggaaacaggcttcggctcaggcacccgggccctggagcaagccctggagaagacgaaagccaacatcaagtgggtgaaggagaacaaggaggtggtgctccagtggttcacagaaaacagcaaatagtccccagcccttgaagtcacccggccccgatgcaaggtgcccacatgtgtccagcccacgttctctctgcctgtgagccagtctagttcctgatgacccaggctgcctgagcacctcccagcccctgcccctcatgccaaccccgccctaggcctggcatggcacctgtcgcccagtgccctggggctgatctcagggaagcccagctccagggccagatgagcagaagctctcgatggacaatgaacggccttgctgggggccgccctgtaccctctttcacctttccctaaagaccctaaatctgaggaatcaacagggcagcagatctgtatatttttttctaagagaaaatgtaaataaaggatttctagatgaaaaaaaaaaaaaaaaaaaaaaaaaaaaaaaaaaaaaaaaaaaaaaaaaaaaaaaggggggggcgcgcgcgctaaaagaatacccccccgcgggggcggcgcccacaaggtttcgccgcacgcacacccacggtgttttgtgtggcaaacacgggcggcgccaccaataagggggcgcggcacgaaaattataaacacaaagaagcgacgggcgcgcgcgggttaaacaacaccggttcggcagctgggggaaaaaccggcgcggcagcgcgggggcgcaccactggggaggagagagggcgacaccccttatacgccccgagcgggggcggggcgcacaccctgtggcgggcacaacaaacattccccctacagaggagaagatattaaaagacgcgcttacgagggcggacagcatatatcaaaaattttagaaaggagggtaaataagtggggggtgtagaaaaatgagggggggataaaatatgctctagggagttgtggagaaaaatttggtggctacacaggcgagattatggattgtagaaaaaaaattttattaaccaggggag

SEQ ID NO: 461510 - DNA, 2231 bp, Homo sapiens
cttctgagcgccccctcacccccaccccagggcgcctcagtcctcaggatgctctccagcttcctgtccgaggacgtattcaagcagggcctggcgtcctacctccacacctttgcctaccagaacaccatctacctgaacctgtgggaccacctgcaggaggctgtgaacaaccggtccatccaactccccaccaccgtgcgggacatcatgaaccgctggaccctgcagatgggcttcccggtcatcacggtggataccagcacggggaccctttcccaggagcacttcctccttgaccccgattccaatgttacccgcccctcagaattcaactacgtgtggattgtgcccatcacatccatcagagatggcagacagcagcaggactactggctgatagatgtaagagcccagaacgatctcttcagcacatcaggcaatgagtgggtcctgctgaacctcaatgtgacgggctattaccgggtgaactacgacgaagagaactggaggaagattcagactcagctgcagagagaccactcggccatccctgtcatcaatcgggcacagatcattaatgacgccttcaacctggccagtgcccataaggtccctgtcactctggcgctgaacaacaccctcttcctgattgaagagagacagtacatgccctgggaggccgccctgagcagcctgagctacttcaagctcatgtttgaccgctccgaggtctatggccccatgaagaactacctgaagaagcaggtcacacccctcttcattcacttcagaaataataccaacaactggagggagatcccagaaaacctgatggaccagtacagcgaggttaatgccatcagcaccgcctgctccaacggagttccagagtgtgaggagatggtctctggccttttcaagcagtggatggagaaccccaataataacccgatccaccccaacctgcggtccaccgtctactgcaacgctatcgcccagggcggggaggaggagtgggacttcgcctgggagcagttccgaaatgccacactggtcaatgaggctgacaagctccgggcagccctggcctgcagcaaagagttgtggatcctgaacaggtacctgagctacaccctgaacccggacttaatccggaagcaggacgccacctctaccatcatcagcattaccaacaacgtcattgggcaaggtctggtctgggactttgtccagagcaactggaagaagctttttaacgattatggtggtggctcgttctccttctccaacctcatccaggcagtgacacgacgattctccaccgagtatgagctgcagcagctggagcagttcaagaaggacaacgaggaaacaggcttcggctcaggcacccgggccctggagcaagccctggagaagacgaaagccaacatcaagtgggtgaaggagaacaaggaggtggtgctccagtggttcacagaaaacagcaaatagtccccagcccttgaagtcacccggcacctgtcgcccagtgccctggggctgatctcagggaagcccagctccagggccagatgagcagaagctctcgatggacaatgaacggccttgctgggggccgccctgtaccctctttcacctttccctaaagaccctaaatctgaggaatcaacagggcagcagatctgtatatttttttctaagagaaaatgtaaataaaggatttctagatgaaaaaaaaaaaaaaaaaaaaaaaaaaaaaaaaaaaaaaaaaaaaaaaaaaaaaaaaaaaaaaaaaacacaaaaaaaaacacaaaaaaaaaaaaaaaaaaaaaaaaaaaaaaaaaacaaaagggcgcggcgggccgccccccacccccccccgccgcggcgccccccccccccccccgacgcgtgttgttgtttacaagagcaggggccaccccggcaagaggagggtgttgcttttacttaatagtcatgcgccacgggcggtgggtcgtttacaacaacccactggtggtggacagacaaaaacaacacgcacctgccaggcggtatctcgtctgtttagggcaagccgccactccctgcttttgctggcgagagagcacaataatgggaggacagccgtagtcctgcctcagagagtctgtgtgagtcgctgcgggggactatcacaacctctagcgggggtgtatgagatgcgcaaccccgccgtcctgacg

SEQ ID NO: 461511 - DNA, 1770 bp, Homo sapiens
cttctgagcgccccctcacccccaccccagggcgcctcagtcctcaggatgctctccagcttcctgtccgaggacgtattcaagcagggcctggcgtcctacctccacacctttgcctaccagaacaccatctacctgaacctgtgggaccacctgcaggaggctgtgaacaaccggtccatccaactccccaccaccgtgcgggacatcatgaaccgctggaccctgcagatgggcttcccggtcatcacggtggataccagcacggggaccctttcccaggagcacttcctccttgaccccgattccaatgttacccgcccctcagaattcaactacgtgtggattgtgcccatcacatccatcagagatggcagacagcagcaggactactggctgatagatgtaagagcccagaacgatctcttcagcacatcaggcaatgagtgggtcctgctgaacctcaatgtgacgggctattaccgggtgaactacgacgaagagaactggaggaagattcagactcagctgcagagagaccactcggccatccctgtcatcaatcgggcacagatcattaatgacgccttcaacctggccagtgcccataaggtccctgtcactctggcgctgaacaacaccctcttcctgattgaagagagacagtacatgccctgggaggccgccctgagcagcctgagctacttcaagctcatgtttgaccgctccgaggtctatggccccatgaagaactacctgaagaagcaggtcacacccctcttcattcacttcagaaataataccaacaactggagggagatcccagaaaacctgatggaccagtacagcgaggttaatgccatcagcaccgcctgctccaacggagttccagagtgtgaggagatggtctctggccttttcaagcagtggatggagaaccccaataataacccgatccaccccaacctgcggtccaccgtctactgcaacgctatcgcccagggcggggaggaggagtgggacttcgcctgggagcagttccgaaatgccacactggtcaatgaggctgacaagctccgggcagccctggcctgcagcaaagagttgtggatcctgaacaggtacctgagctacaccctgaacccggacttaatccggaagcaggacgccacctctaccatcatcagcattaccaacaacgtcattgggcaaggtctggtctgggactttgtccagagcaactggaagaagctttttaacgattatggtggtggctcgttctccttctccaacctcatccaggcagtgacacgacgattctccaccgagtatgagctgcagcagctggagcagttcaagaaggacaacgaggaaacaggcttcggctcaggcacccgggccctggagcaagccctggagaagacgaaagccaacatcaagtgggtgaaggagaacaaggaggtggtgctccagtggttcacagaaaacagcaaatagtcatcccagcggctggtgcagggcctccattcctggagcccgaggcaccagtgtcctcccctcaaggacaaagtctccgcccacgtttctttggctgggagcaggctagttctggaggcccaggttgctgaggaccttcagcccttgcccttaatgcaacccccctaggcctgcatggaccctgcgcccaggcccgggggttgctcaggggcccagtcagggccgagagcagagcttttatgacagtgacggcttgttggggctccctgccct

SEQ ID NO: 461512 - DNA, 1299 bp, Homo sapiens
  misc_feature (1119)..(1119): n is a, c, g, or t
cttctgagcgccccctcacccccaccccagggcgcctcagtcctcaggatgctctccagcttcctgtccgaggacgtattcaagcagggcctggcgtcctacctccacacctttgcctaccagaacaccatctacctgaacctgtgggaccacctgcaggaggctgtgaacaaccggtccatccaactccccaccaccgtgcgggacatcatgaaccgctggaccctgcagatgggcttcccggtcatcacggtggataccagcacggggaccctttcccaggagcacttcctccttgaccccgattccaatgttacccgcccctcagaattcaactacgtgtggattgtgcccatcacatccatcagagatggcagacagcagcaggactactggctgatagatgtaagagcccagaacgatctcttcagcacatcaggcaatgagtgggtcctgctgaacctcaatgtgacgggctattaccgggtgaactacgacgaagagaactggaggaagattcagactcagctgcagagagaccactcggccatccctgtcatcaatcgggcacagatcattaatgacgccttcaacctggccagtgcccataaggtccctgtcactctggcgctgaacaacaccctcttcctgattgaagagagacagtacatgccctgggaggccgccctgagcagcctgagctacttcaagctcatgtttgaccgctccgaggtctatggccccatgaagaactacctgaagaagcaggtcacacccctcttcattcacttcagaaataataccaacaactggagggagatcccagaaaacctgatggaccagtacagcgaggttaatgccatcagcaccgcctgctccaacggagttccagagtgtgaggagatggtctctggccttttcaagcagtggatggagaaccccaataataacccaaaaaaaaaaacaaaaaaaaaaaaaaaaattttgtgtggggggcacttgggccacgaaaggaaaagttttataaaaacacatttctgggtgggggacgcgggccccagggttaggtgcagtttgcacacgtggcgcccataccgctggtgctcccctgagaggganaacccgcggccccgtagaacataagtcgctgtgggtttccttcacccacattaaaaaaaagggcggcggggggagaagcggacgtggtcgtgaaaccaaaatcccgagaggggattcggaagcacataagggtcctccaaagagggttcaggaggaccgaaattaattagcgcgcggggc

SEQ ID NO: 461513 - DNA, 947 bp, Homo sapiens
  misc_feature (417)..(417): n is a, c, g, or t
  misc_feature (422)..(422): n is a, c, g, or t
  misc_feature (426)..(426): n is a, c, g, or t
  misc_feature (442)..(443): n is a, c, g, or t
  misc_feature (473)..(473): n is a, c, g, or t
  misc_feature (484)..(484): n is a, c, g, or t
  misc_feature (714)..(714): n is a, c, g, or t
  misc_feature (774)..(774): n is a, c, g, or t
  misc_feature (781)..(782): n is a, c, g, or t
  misc_feature (784)..(785): n is a, c, g, or t
  misc_feature (788)..(788): n is a, c, g, or t
cttctgagcgccccctcacccccaccccagggcgcctcagtcctcaggatgctctccagcttcctgtccgaggacgtattcaagcagggcctggcgtcctacctccacacctttgcctaccagaacaccatctacctgaacctgtgggaccacctgcaggaggctgtgaacaaccggtccatccaactccccaccaccgtgcgggacatcatgaaccgctggaccctgcagatgggcttcccggtcatcacggtggataccagcacggggaccctttcccaggagcacttcctccttgaccccgattccaatgttacccgcccctcagaattcaactacgtgtggattgtgcccatcacatccatcagagatggcagacagcagcaggactactggctgatagatgtaaggtaatcnagccntgcnttatgggcacagcccnnccccatactcctagctcctggcccatgttntgagggctgtnatgggccattccattcaacaaatggacttgacttctttggttccaatctccactttgctgctgcttcgctgtgtgactctgggcaagttaccatcccgctctggtctctagttcctcttctataaaatgaggctaagagcaatactccattagttatgtgaggattaaaggagagaatcctaggccaggcatggtggctcatgcctgtaatcccagcactttgggaggcngaggcgacctggggtcaggagttcgagaccagcctgacaaacatggagaaaccccatttntactaannanncanaattagccaggtgtggtggtgcatgcctgtaatcccagctactctggaggctggggcaggagaattgcttgaacctgggaggcagaggttgcagtgagccaagatcgcaccattgcactccagcctgggcaacaagagcgaaactctgtctcaaaaaaa

SEQ ID NO: 461514 - DNA, 431 bp, Homo sapiens
cctctctactctcttgattggattgatattataataaaatattacacctgaaggccagaatctccctgagccaggttttgcctgggattgtcattttgcaacctctgtgttcacaaggactttgcccgggagcaaggtggacgtcctgcctatccctggaacagggtgtggtcccatccatggggactctaaagtgggagtggaaagccagaggcctgagagagctcctcctcaaggctgttagggacccagccggactgagaatcttttgtttttctggcagctggagcagttcaagaaggacaacgaggaaacaggcttcggctcaggcacccgggccctggagcaagccctggagaagacgaaagccaacatcaagtgggtgaaggagaacaaggaggtggtgctccagtggttcacagaaaacagca

SEQ ID NO: 461515 - DNA, 3065 bp, Homo sapiens
ggtgccagagctgggcagaagctgggagcctgggcagctgctcctcactggcagtgaccacaccgccatctctcaccacctctggatctttaattgcagctacagaatccacataaaatgcttaaagtagtgcctggcacatgttatgagcagccctactcagcaaggcactgaagaagcgaagggcatgacaagtcatcctttgccttggccaaggctacagatgaaggaaggcaagaagttggaggcattctagtgctgtgctgagtgctttcagagtgtatggttggggctagtgaggtatggggacatggagcagggaataagggagattcaagttcatggagaggtcagggagggcttcccggaggaggtgagctgagtcttagaggaagagtaggaatcagacaggctaatgtggcagagaaaagaattccaggcaaagggaatagcaagtgccagggatagaggtaggagagagtgtggggactgagtgtagctagggcagaggtgtgcccaagagataaagctggtccccaagggccccaggggctgcaggagacagtggatggggcaggtgggaaatgagcaacctattggccctgacctctggctgctgaaacaaagtatgagaggagtgagggaggagggggacccacagggaggaaggggcactaagccccagaaagagacagcagcactgggggtctgggtgaatgggaggggaagggagaggaggagctgcctgtggttcccacttgggtgacaggtgtgatggagtgtggaggagggcaaggaggaggaacagcctggattgctgagtgtgagcggcctggcagctggcctggccgtgcagagcctagggaggcagggcaggttctgaggtttggggtggcatgtcatcttcatgggttgatggtctgtgaagccactggcagcccagttcctcatcccttccttccccacccttagcgtctccccagcagcttgagggtgaggtggtgccaggctgcgggggcagctgctcttgcaagaggtccaggggtcagcccatggcctctgagcagccctgcccaggtctcgtccctctccacagcccagaacgatctcttcagcacatcaggcaatgagtgggtcctgctgaacctcaatgtgacgggctattaccgggtgaactacgacgaagagaactggaggaagattcagactcagctgcagagagaccactcggccatccctgtcatcaatcgggcacagatcattaatgacgccttcaacctggccagtgcccataaggtccctgtcactctggcgctgaacaacaccctcttcctgattgaagagagacagtacatgccctgggaggccgccctgagcagcctgagctacttcaagctcatgtttgaccgctccgaggtctatggccccatgaagaactacctgaagaagcaggtcacacccctcttcattcacttcagaaataataccaacaactggagggagatcccagaaaacctgatggaccagtacagcgaggttaatgccatcagcaccgcctgctccaacggagttccagagtgtgaggagatggtctctggccttttcaagcagtggatggagaaccccaataataacccgatccaccccaacctgcggtccaccgtctactgcaacgctatcgcccagggcggggaggaggagtgggacttcgcctgggagcagttccgaaatgccacactggtcaatgaggctgacaagctccgggcagccctggcctgcagcaaagagttgtggatcctgaacaggtacctgagctacaccctgaacccggacttaatccggaagcaggacgccacctctaccatcatcagcattaccaacaacgtcattgggcaaggtctggtctgggactttgtccagagcaactggaagaagctttttaacgattatggtggtggctcgttctccttctccaacctcatccaggcagtgacacgacgattctccaccgagtatgagctgcagcagctggagcagttcaagaaggacaacgaggaaacaggcttcggctcaggcacccgggccctggagcaagccctggagaagacgaaagccaacatcaagtgggtgaaggagaacaaggaggtggtgctccagtggttcacagaaaacagcaaatagtccccagcccttgaagtcacccggccccgatgcaaggtgcccacatgtgtccatcccagcggctggtgcagggcctccattcctggagcccgaggcaccagtgtcctcccctcaaggacaaagtctccagcccacgttctctctgcctgtgagccagtctagttcctgatgacccaggctgcctgagcacctcccagcccctgcccctcatgccaaccccgccctaggcctggcatggcacctgtcgcccagtgccctggggctgatctcagggaagcccagctccagggccagatgagcagaagctctcgatggacaatgaacggccttgctgggggccgccctgtaccctctttcacctttccctaaagaccctaaatctgaggaatcaacagggcagcagatctgtatatttttttctaagagaaaatgtaaataaaggatttctagatgagtgagactcattactaaactaaagcaggagtgggtcaatacagcagctggggaggccgggtgggggaagctgggtgcatgcggagcaccgtggagtctgggaccccagagcacaggaggggagacgtgcccagcctgccggcccttcctgcaggtgccctgcgcctgtgcctccatgtctgcctgcaggactccgggctccttttcatgctctattgactgagctagctgggtggtttgcagggctccttttattcctattctgatggcagctggagctgctgggtggtggggagctgtggacccagtgctcccgcaccctaacatccaatacttcggaatgtaactgtgactgtattagaagaaagatccctaaaagagtaaatacagttaaatgggtcccttagggtaggtcctgatccaacatgact

SEQ ID NO: 461516 - DNA, 1951 bp, Homo sapiens
cttctgagcgccccctcacccccaccccagggcgcctcagtcctcaggatgctctccagcttcctgtccgaggacgtattcaagcagggcctggcgtcctacctccacacctttgcctaccagaacaccatctacctgaacctgtgggaccacctgcaggaggctgtgaacaaccggtccatccaactccccaccaccgtgcgggacatcatgaaccgctggaccctgcagatgggcttcccggtcatcacggtggataccagcacggggaccctttcccaggagcacttcctccttgaccccgattccaatgttacccgcccctcagaattcaactacgtgtggattgtgcccatcacatccatcagagatggcagacagcagcaggactactggctgatagatgtaagagcccagaacgatctcttcagcacatcaggcaatgagtgggtcctgctgaacctcaatgtgacgggctattaccgggtgaactacgacgaagagaactggaggaagattcagactcagctgcagagagaccactcggccatccctgtcatcaatcgggcacagatcattaatgacgccttcaacctggccagtgcccataaggtccctgtcactctggcgctgaacaacaccctcttcctgattgaagagagacagtacatgccctgggaggccgccctgagcagcctgagctacttcaagctcatgtttgaccgctccgaggtctatggccccatgaagaactacctgaagaagcaggtcacacccctcttcattcacttcagaaataataccaacaactggagggagatcccagaaaacctgatggaccagtacagcgaggttaatgccatcagcaccgcctgctccaacggagttccagagtgtgaggagatggtctctggccttttcaagcagtggatggagaaccccaataataacccgatccaccccaacctgcggtccaccgtctactgcaacgctatcgcccagggcggggaggaggagtgggacttcgcctgggagcagttccgaaatgccacactggtcaatgaggctgacaagctccgggcagccctggcctgcagcaaagagttgtggatcctgaacaggtacctgagctacaccctgaacccggacttaatccggaagcaggacgccacctctaccatcatcagcattaccaacaacgtcattgggcaaggtctggtctgggactttgtccagagcaactggaagaagctttttaacgattatggtggtggctcgttctccttctccaacctcatccaggcagtgacacgacgattctccaccgagtatgagctgcagcagctggagcagttcaagaaggacaacgaggaaacaggcttcggctcaggcacccgggccctggagcaagccctggagaagacgaaagccaacatcaagtgggtgaaggagaacaaggaggtggtgctccagtggttcacagaaaacagcaaatagtccccagcccttgaagtcacccggccccgatgcaaggtgcccacatgtgtccatcccagcggctggtgcagggcctccattcctggagcccgaggcaccagtgtcctcccctcaaggacaaagtctccagcccacgttctctctgcctgtgagccagtctagttcctgatgacccaggctgcctgagcacctcccagcccctgcccctcatgccaaccccgccctaggcctggcatggcacctgtcgcccagtgccctggggctgatctcagggaagcccagctccagggccagatgagcagaagctctcgatggacaatgaacggccttgctgggggccgccctgtaccctctttcacctttccctaaagaccctaaatctgaggaatcaacagggcagcagatctgtatatttttttctaagagaaaatgtaaataaaggatttctagatga

SEQ ID NO: 461517 - DNA, 2445 bp, Homo sapiens
cttctgagcgccccctcacccccaccccagggcgcctcagtcctcaggatgctctccagcttcctgtccgaggacgtattcaagcagggcctggcgtcctacctccacacctttgcctaccagaacaccatctacctgaacctgtgggaccacctgcaggaggctgtgaacaaccggtccatccaactccccaccaccgtgcgggacatcatgaaccgctggaccctgcagatgggcttcccggtcatcacggtggataccagcacggggaccctttcccaggagcacttcctccttgaccccgattccaatgttacccgcccctcagaattcaactacgtgtggattgtgcccatcacatccatcagagatggcagacagcagcaggactactggctgatagatgtaagagcccagaacgatctcttcagcacatcaggcaatgagtgggtcctgctgaacctcaatgtgacgggctattaccgggtgaactacgacgaagagaactggaggaagattcagactcagctgcagagagaccactcggccatccctgtcatcaatcgggcacagatcattaatgacgccttcaacctggccagtgcccataaggtccctgtcactctggcgctgaacaacaccctcttcctgattgaagagagacagtacatgccctgggaggccgccctgagcagcctgagctacttcaagctcatgtttgaccgctccgaggtctatggccccatgaagaactacctgaagaagcaggtcacacccctcttcattcacttcagaaataataccaacaactggagggagatcccagaaaacctgatggaccagtacagcgaggttaatgccatcagcaccgcctgctccaacggagttccagagtgtgaggagatggtctctggccttttcaagcagtggatggagaaccccaataataacccgatccaccccaacctgcggtccaccgtctactgcaacgctatcgcccagggcggggaggaggagtgggacttcgcctgggagcagttccgaaatgccacactggtcaatgaggctgacaagctccgggcagccctggcctgcagcaaagagttgtggatcctgaacaggtacctgagctacaccctgaacccggacttaatccggaagcaggacgccacctctaccatcatcagcattaccaacaacgtcattgggcaaggtctggtctgggactttgtccagagcaactggaagaagctttttaacgattatggtggtggctcgttctccttctccaacctcatccaggcagtgacacgacgattctccaccgagtatgagctgcagcagctggagcagttcaagaaggacaacgaggaaacaggcttcggctcaggcacccgggccctggagcaagccctggagaagacgaaagccaacatcaagtgggtgaaggagaacaaggaggtggtgctccagtggttcacagaaaacagcaaatagtccccagcccttgaagtcacccggccccgatgcaaggtgcccacatgtgtccatcccagcggctggtgcagggcctccattcctggagcccgaggcaccagtgtcctcccctcaaggacaaagtctccagcccacgttctctctgcctgtgagccagtctagttcctgatgacccaggctgcctgagcacctcccagcccctgcccctcatgccaaccccgccctaggcctggcatggcacctgtcgcccagtgccctggggctgatctcagggaagcccagctccagggccagatgagcagaagctctcgatggacaatgaacggccttgctgggggccgccctgtaccctctttcacctttccctaaagaccctaaatctgaggaatcaacagggcagcagatctgtatatttttttctaagagaaaatgtaaataaaggatttctagatgaaaaaaaaaaaaaaaaaaaaaaaaaaaaaaaaaaaaaaaaaaaaaaaaaaaaaaaaaaaaaaaaaacacaaaaaaaaacacaaaaaaaaaaaaaaaaaaaaaaaaaaaaaaaaaacaaaagggcgcggcgggccgccccccacccccccccgccgcggcgccccccccccccccccgacgcgtgttgttgtttacaagagcaggggccaccccggcaagaggagggtgttgcttttacttaatagtcatgcgccacgggcggtgggtcgtttacaacaacccactggtggtggacagacaaaaacaacacgcacctgccaggcggtatctcgtctgtttagggcaagccgccactccctgcttttgctggcgagagagcacaataatgggaggacagccgtagtcctgcctcagagagtctgtgtgagtcgctgcgggggactatcacaacctctagcgggggtgtatgagatgcgcaaccccgccgtcctgacg

SEQ ID NO: 461518 - DNA, 1825 bp, Homo sapiens
cttctgagcgccccctcacccccaccccagggcgcctcagtcctcaggatgctctccagcttcctgtccgaggacgtattcaagcagggcctggcgtcctacctccacacctttgcctaccagaacaccatctacctgaacctgtgggaccacctgcaggaggctgtgaacaaccggtccatccaactccccaccaccgtgcgggacatcatgaaccgctggaccctgcagatgggcttcccggtcatcacggtggataccagcacggggaccctttcccaggagcacttcctccttgaccccgattccaatgttacccgcccctcagaattcaactacgtgtggattgtgcccatcacatccatcagagatggcagacagcagcaggactactggctgatagatgtaagagcccagaacgatctcttcagcacatcaggcaatgagtgggtcctgctgaacctcaatgtgacgggctattaccgggtgaactacgacgaagagaactggaggaagattcagactcagctgcagagagaccactcggccatccctgtcatcaatcgggcacagatcattaatgacgccttcaacctggccagtgcccataaggtccctgtcactctggcgctgaacaacaccctcttcctgattgaagagagacagtacatgccctgggaggccgccctgagcagcctgagctacttcaagctcatgtttgaccgctccgaggtctatggccccatgaagaactacctgaagaagcaggtcacacccctcttcattcacttcagaaataataccaacaactggagggagatcccagaaaacctgatggaccagtacagcgaggttaatgccatcagcaccgcctgctccaacggagttccagagtgtgaggagatggtctctggccttttcaagcagtggatggagaaccccaataataacccgatccaccccaacctgcggtccaccgtctactgcaacgctatcgcccagggcggggaggaggagtgggacttcgcctgggagcagttccgaaatgccacactggtcaatgaggctgacaagctccgggcagccctggcctgcagcaaagagttgtggatcctgaacaggtacctgagctacaccctgaacccggacttaatccggaagcaggacgccacctctaccatcatcagcattaccaacaacgtcattgggcaaggtctggtctgggactttgtccagagcaactggaagaagctttttaacgattatggtggtggctcgttctccttctccaacctcatccaggcagtgacacgacgattctccaccgagtatgagctgcagcagctggagcagttcaagaaggacaacgaggaaacaggcttcggctcaggcacccgggccctggagcaagccctggagaagacgaaagccaacatcaagtgggtgaaggagaacaaggaggtggtgctccagtggttcacagaaaacagcaaatagtcagcccacgttctctctgcctgtgagccagtctagttcctgatgacccaggctgcctgagcacctcccagcccctgcccctcatgccaaccccgccctaggcctggcatggcacctgtcgcccagtgccctggggctgatctcagggaagcccagctccagggccagatgagcagaagctctcgatggacaatgaacggccttgctgggggccgccctgtaccctctttcacctttccctaaagaccctaaatctgaggaatcaacagggcagcagatctgtatatttttttctaagagaaaatgtaaataaaggatttctagatga

SEQ ID NO: 461519 - DNA, 1254 bp, Homo sapiens
cttctgagcgccccctcacccccaccccagggcgcctcagtcctcaggatgctctccagcttcctgtccgaggacgtattcaagcagggcctggcgtcctacctccacacctttgcctaccagaacaccatctacctgaacctgtgggaccacctgcaggaggctgtgaacaaccggtccatccaactccccaccaccgtgcgggacatcatgaaccgctggaccctgcagatgggcttcccggtcatcacggtggataccagcacggggaccctttcccaggagcacttcctccttgaccccgattccaatgttacccgcccctcagaattcaactacgtgtggattgtgcccatcacatccatcagagatggcagacagcagcaggactactggctgatagatgtaagagcccagaacgatctcttcagcacatcaggcaatgagtgggtcctgctgaacctcaatgtgacgggctattaccgggtgaactacgacgaagagaactggaggaagattcagactcagctgcagagagaccactcggccatccctgtcatcaatcgggcacagatcattaatgacgccttcaacctggccagtgcccataaggtccctgtcactctggcgctgaacaacaccctcttcctgattgaagagagacagtacatgccctgggaggccgccctgagcagcctgagctacttcaagctcatgtttgaccgctccgaggtctatggccccatgaagaactacctgaagaagcaggtcacacccctcttcattcacttcagaaataataccaacaactggagggagatcccagaaaacctgatggaccagtacagcgaggttaatgccatcagcaccgcctgctccaacggagttccagagtgtgaggagatggtctctggccttttcaagcagtggatggagaaccccaataataacccgatccaccccaacctgcggtccaccgtctactgcaacgctatcgcccctgcccctcatgccaaccccgccctaggcctggcatggcacctgtcgcccagtgccctggggctgatctcagggaagcccagctccagggccagatgagcagaagctctcgatggacaatgaacggccttgctgggggccgccctgtaccctctttcacctttccctaaagaccctaaatctgaggaatcaacagggcagcagatctgtatatttttttctaagagaaaatgtaaataaaggatttctagatga

SEQ ID NO: 461520 - DNA, 880 bp, Homo sapiens
cttctgagcgccccctcacccccaccccagggcgcctcagtcctcaggatgctctccagcttcctgtccgaggacgtattcaagcagggcctggcgtcctacctccacacctttgcctaccagaacaccatctacctgaacctgtgggaccacctgcaggaggctgtgaacaaccggtccatccaactccccaccaccgtgcgggacatcatgaaccgctggaccctgcagatgggcttcccggtcatcacggtggataccagcacggggaccctttcccaggagcacttcctccttgaccccgattccaatgttacccgcccctcagaattcaactacgtgtggattgtgcccatcacatccatcagagatggcagacagcagcaggactactggctgatagatgtaagagcccagaacgatctcttcagcacatcaggcaatgagtgggtcctgctgaacctcaatgtgacgggctattaccgggtgaactacgacgaagagaactggaggaagattcagactcagctgcagagagaccactcggccatccctgtcatcaatcgggcacagatcattaatgacgccttcaacctggccagtgcccataaggtccctgtcactctggcgctgaacaacaccctcttcctgattgaagagagacagtacatgccctgggaggccgccctgagcagcctgagctacttcaagctcatgtttgaccgctccgaggtctatggccccatgaaggtacggaggtgcatggtagggttcaagaaccagttcgccccagtgcctgaaagtgcactattaggaagttaatagactattgcctactggactcctggtcagggaaccttcaaaagcaaaacaaaaaacc

SEQ ID NO: 461521 - DNA, 680 bp, Homo sapiens
cttctgagcgccccctcacccccaccccagggcgcctcagtcctcaggatgctctccagcttcctgtccgaggacgtattcaagcagggcctggcgtcctacctccacacctttgcctaccagaacaccatctacctgaacctgtgggaccacctgcaggaggctgtgaacaaccggtccatccaactccccaccaccgtgcgggacatcatgaaccgctggaccctgcagatgggcttcccggtcatcacggtggataccagcacggggaccctttcccaggagcacttcctccttgaccccgattccaatgttacccgcccctcagaattcaactacgtgtggattgtgcccatcacatccatcagagatggcagacagcagcaggactactggctgatagatgtaagagcccagaacgatctcttcagcacatcaggcaatgagtgggtcctgctgaacctcaatgtgacgggctattaccgggtgaactacgacgaagagaactggaggaagattcagactcagctgcagagagaccactcggccatccctgtcatcaatcgggcacagatcattaatgacgccttcaacctggccagaactactggccgaagctggatcacgcccttagtgtctggctggatataatagtacagggactggccgaagctggatca

SEQ ID NO: 461522 - DNA, 633 bp, Homo sapiens
gacaccatcagcagggagagcacctgtgtttttgtgaagaattatgccgagaagatcgatgattccagatggaaaaaatggaaatgcttcatccatgtgctagttcagcctgtgagatgctggtgagcccacctccaggcactcacggactccccacccattgagtgtggcctggatttagtgactcaatcaaacgtgacagagtgctggggtgtcattttcaagactgggttatgtgaagactgcagcctccatctggggtgctctctcttggattgcttgctcagggatgtggggagagctgctgtgctgggaggctgcccatgtgagttgacttggatgtgaaccttctgtggcctgccaatagccacgtgtttgtgtggacactgctgtcatttctcttgggaagatactgaggagtcagattgctggatcccgtgaagaatgtgcacctgggattggctcttgcttcctaaggaacctcaaaaaagctgcaacctattggagacttttgattcagcatcaaggatatgcgtgagactttggttcttttctgttgggacacagttgattctgactgtcttaaagttaggcttttctaaagatttagactaataaattatttgaatggga

SEQ ID NO: 461523 - DNA, 299 bp, Homo sapiens
accctgctaagccacacacagcttcctggcccacagaaactatgaaataataaccatttcttatataagcctccaagttttgggagtaatattttgcacagtgatggatcactaatacaagccagtcatcagttgaaagacactgaatttatttccagttttatgtgattatgaataatgtcaccatatgcatttgcatacaggtgtttgtgtggacactgctgtcatttctcttgggaagatactgaggagtcagattgctggatcccgtgaagaatgtatgttgaatgttataaaaa

SEQ ID NO: 461524 - DNA, 338 bp, Homo sapiens
ctcaatcaaacgtgacagagtgctggggtgtcattttcaagactgggttatgtgaagactgcagcctccatctggggtgctctctcttggattgcttgctcagggatgtggggagagctgctgtgctgggaggctgcccatgtgagttgacttggatgtgaaccttctgtggcctgccaatagccacgtgagtgaccttgaaaatggatcagccttcactcaagtctcaagatgactgtggtcttggctgacagcttgattgctgtctcatgggggaccttaaaccaaaggcaccctgctaagccacacacagcttcctggcccacagaaactatgaa

SEQ ID NO: 461525 - DNA, 1251 bp, Homo sapiens
tcttttttttttttttttttttttttaccagcacaatattttatttagctgccggcaatagtgtgcttcaaaaagttgagcttttggtccattatgataccaaactatttcaaaaagccattcttgcccaaatgacagcaaatcaaggtcttctgaaactgcgtccaccctactctaccctccagatagccagctcttctgctcaaagaaaacatgcagatgttcaggggaaggaattccccaaagctgatctccatggcataatggatatgctgtggacactccatagaacctgctgctgctccttcaaacttgggtgggcaaaagtcgaaaaggctttggccttgattgaaggtttagcaggaagaagcagcctctgttctccctctcctcctgaattggaggctgctcagagcactgaaatctgcgctcgcatcagtaaaaggatggcaattaaaaacactggcagctctgcggaagctcctgtagtcatctctccaaatcgctactggccttcccctccaaatgaaattgccatcctcactttgtggcagtccaagggtggcaaggtgggaggatgggatggaatgaagcatatgaaacgacttaatcaggacaatatatactattcagttgatgtggacactaaaagcccagccatggccacgatgccatacagccacatattgaccataccgacactgcttcatccatgtgctagttcagcctgtgagatgctggtgagcccacctccaggcactcacggactccccacccattgagtgtggcctggatttagtgactcaatcaaacgtgacagagtgctggggtgtcattttcaagactgggttatgtgaagactgcagcctccatctggggtgctctctcttggattgcttgctcagggatgtggggagagctgctgtgctgggaggctgcccatgtgagttgacttggatgtgaaccttctgtggcctgccaatagccacgtgtttgtgtggacactgctgtcatttctcttgggaagatactgaggagtcagattgctggatcccgtgaagaatgtgcacctgggattggctcttgcttcctaaggaacctcaaaaaagctgcaacctattggagacttttgattcagcatcaaggatatgcgtgagactttggttcttttctgttgggacacagttgattctgactgtcttaaagttaggcttttctaaagatttagactaataaattatttgaatggga

SEQ ID NO: 461526 - DNA, 2072 bp, Homo sapiens
atcaagcctggtatttttgggtttcaggttctgcggctccctgagacctgcagattcctggtctccgggtccctgggtcccggacgtgtccatcaaggcgtccattagggccatcacctaatggacaagcatcagggtaaggggggaggtgctattgggggggggtccctcagagaatcagccctagctctgtgtgggggcaaatacggcctccccacctccctccctcccaggagacactggcctgagcataagtctcgagggtctgccctgtactaagcaagcgcttaatcagaggatgtggcttctgcgggagagcttcaaagggtgccctacttgcccctcttggtaaccatgacgtcatggaaatgggaggggaccgccccagcccccaaacacctggagggaagtgggagactttttccacttcctgttctacttgtggctactgactcaatgtctgacctgtttattaattgcaaaatatagctctatgtgtgctacccagagaggcctcaggcctgtgtgtctctgtgtgaaaggaggcctgcactccccacccctcgccgcgttgcccaggtggccttgacacagacgcagggcgctggtggtcctgcagccttccggcagccagaatgacagcactgggtctccatgtgcttgctcccccagactcatcccagtcagaagctcgtcttcccacacatggctcacggaggtttaacagcctcggacatgagggaaggttcttgctgaatcaaggatctcctggatttagacggaaatttctcaggggtggagctgagcctgctttccggatgtccccctacctgcccgggccttgtcatcgtgcctccctgcttgggtgtgggtgggtccatagcccctgctgcatcaccttgcatagatctgtgggcggccttgggggaccagtgactgctgggctttgctgcctgagggcactgggctggcaggctccacaggctccacaggctcccgcagcctccacaggctccacaggctcccgcagacctccacaggcctccacaggcctccacaggctcccgcaggcctccacaggctccacaggctccacaggctcccgcagacctccacaggctcccgcagcctccacaggctccacaggctccacaggctcccgcagcctccacaggcctccacagcgtcccgcagacctccacaggcctccacaggcctccacaggctcccgcgggcctccacaggcctccacaggctcccgcgggcctccacaggcctccacaggctcccgcgggcctcctgcaggtctcctgcagtccgggtctcctctgaggttcttggaggggtggtatggtcctaccacgtgcgagagtgaccctgctgtgatggaggtctgagccctttccctttggtgttatttaaggggattgtatttaggtgagagatggggcagcttagaaagaactggggattctgtgactcccgtcagtagggctgaccaggagaagggacactggttcttaattctacaggggtcacagaatcagaggtgcagggagtgggaggtagcctccagtcctacccgacatttcgtgagagctcgaggcctctactctcctcggtcaaatctctgggcttgtggggagacagctcatctccttttttcctcattctcacatccgggatggtgggaacataaagtcctgctggggtcacagcttcctctcaaccttgctcctggtgtcagcttgggcacctcaaagggctggcgtggggctggatcaggcagcagagtggtgggtggtccccagccacgaatttgtgagacaatgcacagtttcagtggaaacccagtctgagaggagaggcaaaggaaatgctcctggagggcaggagacagtgggtggcattttggggacacttgctgtgtggtccctgtctgccgcaggtcactgccacccatgtgtgtgggctcctgttatgggtggtcccgtggcgtggcatgagagtgggagaggaggggtccaagctggtaggtgggttttcctggcccttagcatagcctgctaagc

SEQ ID NO: 461527 - DNA, 1975 bp, Homo sapiens
atcaagcctggtatttttgggtttcaggttctgcggctccctgagacctgcagattcctggtctccgggtccctgggtcccggacgtgtccatcaaggcgtccattagggccatcacctaatggacaagcatcagggagacactggcctgagcataagtctcgagggtctgccctgtactaagcaagcgcttaatcagaggatgtggcttctgcgggagagcttcaaagggtgccctacttgcccctcttggtaaccatgacgtcatggaaatgggaggggaccgccccagcccccaaacacctggagggaagtgggagactttttccacttcctgttctacttgtggctactgactcaatgtctgacctgtttattaattgcaaaatatagctctatgtgtgctacccagagaggcctcaggcctgtgtgtctctgtgtgaaaggaggcctgcactccccacccctcgccgcgttgcccaggtggccttgacacagacgcagggcgctggtggtcctgcagccttccggcagccagaatgacagcactgggtctccatgtgcttgctcccccagactcatcccagtcagaagctcgtcttcccacacatggctcacggaggtttaacagcctcggacatgagggaaggttcttgctgaatcaaggatctcctggatttagacggaaatttctcaggggtggagctgagcctgctttccggatgtccccctacctgcccgggccttgtcatcgtgcctccctgcttgggtgtgggtgggtccatagcccctgctgcatcaccttgcatagatctgtgggcggccttgggggaccagtgactgctgggctttgctgcctgagggcactgggctggcaggctccacaggctccacaggctcccgcagcctccacaggctccacaggctcccgcagacctccacaggcctccacaggcctccacaggctcccgcaggcctccacaggctccacaggctccacaggctcccgcagacctccacaggctcccgcagcctccacaggctccacaggctccacaggctcccgcagcctccacaggcctccacagcgtcccgcagacctccacaggcctccacaggcctccacaggctcccgcgggcctccacaggcctccacaggctcccgcgggcctccacaggcctccacaggctcccgcgggcctcctgcaggtctcctgcagtccgggtctcctctgaggttcttggaggggtggtatggtcctaccacgtgcgagagtgaccctgctgtgatggaggtctgagccctttccctttggtgttatttaaggggattgtatttaggtgagagatggggcagcttagaaagaactggggattctgtgactcccgtcagtagggctgaccaggagaagggacactggttcttaattctacaggggtcacagaatcagaggtgcagggagtgggaggtagcctccagtcctacccgacatttcgtgagagctcgaggcctctactctcctcggtcaaatctctgggcttgtggggagacagctcatctccttttttcctcattctcacatccgggatggtgggaacataaagtcctgctggggtcacagcttcctctcaaccttgctcctggtgtcagcttgggcacctcaaagggctggcgtggggctggatcaggcagcagagtggtgggtggtccccagccacgaatttgtgagacaatgcacagtttcagtggaaacccagtctgagaggagaggcaaaggaaatgctcctggagggcaggagacagtgggtggcattttggggacacttgctgtgtggtccctgtctgccgcaggtcactgccacccatgtgtgtgggctcctgttatgggtggtcccgtggcgtggcatgagagtgggagaggaggggtccaagctggtaggtgggttttcctggcccttagcatagcctgctaagc

SEQ ID NO: 461528 - DNA, 4952 bp, Homo sapiens
  misc_feature (1)..(1): n is a, c, g, or t
  misc_feature (5)..(5): n is a, c, g, or t
  misc_feature (9)..(9): n is a, c, g, or t
  misc_feature (11)..(11): n is a, c, g, or t
ncacntggngnagccagacccggagcctggcagcgacatcctgggctacatcaatatcatcgaccccaacatctggaacccccagcccagccagatgaaccgcatcaagatccgtgacacctcccaggccagcgcccagcaccagctgtggaagcagagccaggacagcaggccccgtccagagccttgccctcccccagagcccagtgccccccaggacggtgtcccagctgagaacggcctcccccagggggaccctgagccattgccccccgtgcccaagccccggacagtccctgtggcagatgtactagcccgggacagcagtgatattggctgggtcctggagctccccaaagaggaagctccccagaatgggacagaccataggctacccaggatggcaggcccaggccacgccccactccagcggcagctatctgtgacccaggatgaccccgagagcctcggggtggggctccccaatgggctggatggggtggaagaagaagatgatgacgactacgtaaccctcagtgaccaggacagccactcaggcagctccggccgtggccctggcccccgacggccctcagtggcttcctctgtgtcagaggagtacttcgaggtgagagagcactcagtccctctccggaggcgccactcagagcaagtggccaacgggccaaccccaccaccgcgccggcagctgagtgccccccatataacccgagggacctttgttggaccccagggtggctccccatgggcccagagtcggggaagagaagaagcagatgcgttgaagaggatgcaggcccagcgctccacagacaaggaggcacagggccagcagtttcatcatcacagggtccctgcctcagggactagggataaagacggcttcccaggaccccctaggtaccgctctgctgctgacagcgtccagagctctaccagaaacgctggcccagccatggctggcccccaccactggcaggccaagggaggtcaggtaccccgcctgcttccggatcccggcagcccaagactggcccaaaatgcccgccccatgaccgatggcagggccaccgaggagcatccgagtcccttcggaatcccatactccaaactgtctcagtcgaagcacctaaaggccaggacgggcggtagccagtgggcctcatcggattctaaacggagggctcaagccccccgggaccgcaaagacccctagcagcatgtcccagcctggagccacaccttctgaggccccagcccagactcatgacgcggagggcagacaggccgcctgggcctaccagagcccactgggacggcaggaaggtgggatgggcgggagacgttggcactcacctggtcggtgcaccagtaccaggtggccatgatggtcaggccaaaggtcatcccggtccacggcaggtcccctgtgtgggggtctcgaaacatgtgcatggcgtctgtacgtggcaggtggcaggtggtgttggcaatggtcctggagggaatggcctgggcgtaggctgcctccagctgcccgtaaccaccgatctggtcaaaagctggaggggtcagggtggaacagggacagtttggtggttgcggggccctgactccctgggctcccccctgccttcatctcacaagaaacttcctgatgcatcaaacttgagttttttccacctcatctttcccagtgtttggaaaggtgtgagggtagagggttgtttttttttttaaggtgtatttgaatgactattttattcgtatttaaaataatactattaagtaagcattttgcacatgggcaccccagtgtcccgctggcccagcaggagtcactgttggcctctggacactcatcggccttgggcaagtggttctcagccaggtttccgattgtcgattcaaggaagcaaaagtaatttttcttgacatttgaggaccttcctgaggcttctaaagtgttcatcctgatcacctgaagggtgtgattttagcagagctgagagtggctggtggtgatgtggccccaccccctgaggcacagagaagagggagacaggtccagagagggatggggcctccaccaagaccatatagaccatctggcgggctcaagccggggctttttcctctccagtccaaaacacctcactgttcctgtctacctcggggtcagggcccggcatggccaagccctggcccatctgtgtctgtgtcactcccctcccttccagactgggcctggctgctgggatccctctcatgcggtgggtcccagggacactagagcccctggtctgagagggagaagcctggatgtaggaaaacccgtttccaccccaggccctactccctagccttttccaagtgggacatggaagaggcagcctgctgcctggatgctggtctccccagcatcactgttcccatggagctcaggtcaggctctgtattcagaccgagggtttgtgtgaggctcagagcaaatgaacaagtgccattcaagggttagaaactgctcagccacagggtcccagtgtctgagtctggaagagtctttagagatttgttcactctctgagggatcctcctggctctgcttacatacttccagggacggtgagctcacgctctctccgggcagccctgtgagtttcctatctgttccagactagtatcgccaatctctcccagctctcttctttcctccctggcctttgtcctgcaggaggtagcatcacctcttggcattttgtacatgcttttaaacaattggaggagctgcccaggcagttttatggcctcctggttgtgtgccttcacacccgcctacagccccacctcaccatcaagcgctgagccaatgcgggtgtggctggccctgagttcctgagtcagctccttgccaggccagagctggtaacagcggggcagcagggtgggtagcctctaccagccagggcagtccctgaggggccagcaggggggctgactgcctagtggctcaacctcctgaacccacccactcccagcgatgctacccagaaccccaacggcatgaatcctgcacagtgccgggcagtgccagactccaaagggctcgctgtggggacagccccgccatggccacagactctgtcctcacctttgattgtcaggatgacagcccccaccaccatgatgagcgtctgcagggcgtccgtgtagattacagcagccaggccccctgccagtggaagcaaggttgctggagggggccctggccccagggaggagggacacggggaggaacttctggggctcctgctggggccacttcctgggctgctccctcgggcctgtagggggaggtggccttctgacccctttacacgtcccctgggtggacctccctgctgcaggcaccatacctgcgatggtgtacagggctgtgatgccgagcgtgaggatggtggagaggtagaagttccagcccaggcagatgtgcacaaacagagcccccgcgtacaggtccagctgcggagggagagagccttgtgtgggactgttattcccagggctccagcaagccactccctgggtgacctcgggcaaggccctctctgggcctcggtggcctgtggataaggaggggagacccccactcgcctgcctgcctgcatcacggggccattgtgaggttgggggaagacctggccgtggagctacaagcttgtgcggatgtcaggggacattactgttgctaataaagtccaaagtggccaatgcctttcccaaaagcagtgttgttattgaatctggccccttcccgaggggataaaaggcagagccctgtcccctcggttcccaggggcaccttgatgagtttgtgaggagtctgtgaagaccagtaggcctcaggaaaagtgtgtgctgggcggaccagtaggcctcaggaaaagtgtgtgctgggcggaccaggaaacagaggggcagccttgcttcctgcccccaccccccagtgggtttggaactgaagccaatagtggctcagaggctgggtctcaggctgaagctggtctccacactgactggacacagcccctgccctcccagaacctgtggctgctcctcctaaaggcaggagcgctagcctggaggccaacctctgcctggcatgggcctcaaagaccagaatcccaccctccacctggcagtaggggcccagtgagaggaagggcaggaccctgttctctgggacatgggctagtaacaggcttcaccttgccccacccctgagttcctaaacctaccattctgctttgactcaggagatgcgagatgacccaacacacagcctcaggggccaggagcttcctgagaaggctggggccctgtgcttcctagtgtggggacacatctgcacgaggcccaggaagtgcaggccccaggcccctttgagctcccccaggcagggatccctgcctcctggggtctgacacagggcccaggcaggatgggatctggctccaaagcctgtgcttcctgtacctctccctccaggcgcctctctcaacctgtcttagagagaccagccagtttggaaactagccaggggctttcaggagaaccccggctctggtccttatctttggctgtgtgtgtgtgtgtataggaagggcaggtagttcaggggaaggtgtggtggggggtgggggcgggatctgcctccagcccaagtagagaagcgcagaggtgctgaatatcagagcaggatggactcttcaagtcctgccccatcagactagaggataaactgaggccccaggaagggaaaggacttccccaaagtcagcccctggtaggtatcagagattggagttaccaggagagggaaggccgagagggagcaggaggcttctagaaggcccaccacaggcagcctg

SEQ ID NO: 461529 - DNA, 1724 bp, Homo sapiens
attatgtgaattatatatctcctgcaaatatcgaatacttgagtcatgtgttaaactcgatgcttcatatttcataatctcttctaacattctcctggacttcaaagtagcagcgtctatcatatttggttttgatgattcatcaggattataagtgagttggattgcttttatcagctgtttgacttctgatgttttgttttcaacttgatgtaagatgtcttccaaagactgtagatccttgtctactttggtttgataagtagacaggaaatctgcaatgccacaggtagttggacaataactaccgaatctttcatctaagatgcagcagttgtctctggtagcaacatatgctacacatgttgaagagagaaataaaagagcatagaagtagagaattaaattccgggggtgcaaggaccaactcatgatgtctgagtgcccggagctccgagccttgcggggccattgtgaggttgggggaagacctggccgtggagctacaagcttgtgcggatgtcaggggacattactgttgctaataaagtccaaagtggccaatgcctttcccaaaagcagtgttgttattgaatctggccccttcccgaggggataaaaggcagagccctgtcccctcggttcccaggggcaccttgatgagtttgtgaggagtctgtgaagaccagtaggcctcaggaaaagtgtgtgctgggcggaccagtaggcctcaggaaaagtgtgtgctgggcggaccaggaaacagaggggcagccttgcttcctgcccccaccccccagtgggtttggaactgaagccaatagtggctcagaggctgggtctcaggctgaagctggtctccacactgactggacacagcccctgccctcccagaacctgtggctgctcctcctaaaggcaggagcgctagcctggaggccaacctctgcctggcatgggcctcaaagaccagaatcccaccctccacctggcagtaggggcccagtgagaggaagggcaggaccctgttctctgggacatgggctagtaacaggcttcaccttgccccacccctgagttcctaaacctaccattctgctttgactcaggagatgcgagatgacccaacacacagcctcaggggccaggagcttcctgagaaggctggggccctgtgcttcctagtgtggggacacatctgcacgaggcccaggaagtgcaggccccaggcccctttgagctcccccaggcagggatccctgcctcctggggtctgacacagggcccaggcaggatgggatctggctccaaagcctgtgcttcctgtacctctccctccaggcgcctctctcaacctgtcttagagagaccagccagtttggaaactagccaggggctttcaggagaaccccggctctggtccttatctttggctgtgtgtgtgtgtgtataggaagggcaggtagttcaggggaaggtgtggtggggggtgggggcgggatctgcctccagcccaagtagagaagcgcagaggtgctgaatatcagagcaggatggactcttcaagtcctgccccatcagactagaggataaactgaggccccaggaagggaaaggacttccccaaagtcagcccctggtaggtatcagagattggagttaccaggagagggaaggccgagagggagcaggaggcttctagaaggcccaccacaggcagcctg

SEQ ID NO: 461530 - DNA, 3803 bp, Homo sapiens
  misc_feature (1)..(1): n is a, c, g, or t
  misc_feature (5)..(5): n is a, c, g, or t
  misc_feature (9)..(9): n is a, c, g, or t
  misc_feature (11)..(11): n is a, c, g, or t
ncacntggngnagccagacccggagcctggcagcgacatcctgggctacatcaatatcatcgaccccaacatctggaacccccagcccagccagatgaaccgcatcaagatccgtgacacctcccaggccagcgcccagcaccagctgtggaagcagagccaggacagcaggccccgtccagagccttgccctcccccagagcccagtgccccccaggacggtgtcccagctgagaacggcctcccccagggggaccctgagccattgccccccgtgcccaagccccggacagtccctgtggcagatgtactagcccgggacagcagtgatattggctgggtcctggagctccccaaagaggaagctccccagaatgggacagaccataggctacccaggatggcaggcccaggccacgccccactccagcggcagctatctgtgacccaggatgaccccgagagcctcggggtggggctccccaatgggctggatggggtggaagaagaagatgatgacgactacgtaaccctcagtgaccaggacagccactcaggcagctccggccgtggccctggcccccgacggccctcagtggcttcctctgtgtcagaggagtacttcgaggtgagagagcactcagtccctctccggaggcgccactcagagcaagtggccaacgggccaaccccaccaccgcgccggcagctgagtgccccccatataacccgagggacctttgttggaccccagggtggctccccatgggcccagagtcggggaagagaagaagcagatgcgttgaagaggatgcaggcccagcgctccacagacaaggaggcacagggccagcagtttcatcatcacagggtccctgcctcagggactagggataaagacggcttcccaggaccccctaggtaccgctctgctgctgacagcgtccagagctctaccagaaacgctggcccagccatggctggcccccaccactggcaggccaagggaggtcaggtaccccgcctgcttccggatcccggcagcccaagactggcccaaaatgcccgccccatgaccgatggcagggccaccgaggagcatccgagtcccttcggaatcccatactccaaactgtctcagtcgaagcacctaaaggccaggacgggcggtagccagtgggcctcatcggattctaaacggagggctcaagccccccgggaccgcaaagacccctagcagcatgtcccagcctggagccacaccttctgaggccccagcccagactcatgacgcggagggcagacaggccgcctgggcctaccagagcccactgggacggcaggaaggtgggatgggcgggagacgttggcactcacctggtcggtgcaccagtaccaggtggccatgatggtcaggccaaaggtcatcccggtccacggcaggtcccctgtgtgggggtctcgaaacatgtgcatggcgtctgtacgtggcaggtggcaggtggtgttggcaatggtcctggagggaatggcctgggcgtaggctgcctccagctgcccgtaaccaccgatctggtcaaaagctggaggggtcagggtggaacagggacagtttggtggttgcggggccctgactccctgggctcccccctgccttcatctcacaagaaacttcctgatgcatcaaacttgagttttttccacctcatctttcccagtgtttggaaaggtgtgagggtagagggttgtttttttttttaaggtgtatttgaatgactattttattcgtatttaaaataatactattaagtaagcattttgcacatgggcaccccagtgtcccgctggcccagcaggagtcactgttggcctctggacactcatcggccttgggcaagtggttctcagccaggtttccgattgtcgattcaaggaagcaaaagtaatttttcttgacatttgaggaccttcctgaggcttctaaagtgttcatcctgatcacctgaagggtgtgattttagcagagctgagagtggctggtggtgatgtggccccaccccctgaggcacagagaagagggagacaggtccagagagggatggggcctccaccaagaccatatagaccatctggcgggctcaagccggggctttttcctctccagtccaaaacacctcactgttcctgtctacctcggggtcagggcccggcatggccaagccctggcccatctgtgtctgtgtcactcccctcccttccagactgggcctggctgctgggatccctctcatgcggtgggtcccagggacactagagcccctggtctgagagggagaagcctggatgtaggaaaacccgtttccaccccaggccctactccctagccttttccaagtgggacatggaagaggcagcctgctgcctggatgctggtctccccagcatcactgttcccatggagctcaggtcaggctctgtattcagaccgagggtttgtgtgaggctcagagcaaatgaacaagtgccattcaagggttagaaactgctcagccacagggtcccagtgtctgagtctggaagagtctttagagatttgttcactctctgagggatcctcctggctctgcttacatacttccagggacggtgagctcacgctctctccgggcagccctgtgagtttcctatctgttccagactagtatcgccaatctctcccagctctcttctttcctccctggcctttgtcctgcaggaggtagcatcacctcttggcattttgtacatgcttttaaacaattggaggagctgcccaggcagttttatggcctcctggttgtgtgccttcacacccgcctacagccccacctcaccatcaagcgctgagccaatgcgggtgtggctggccctgagttcctgagtcagctccttgccaggccagagctggtaacagcggggcagcagggtgggtagcctctaccagccagggcagtccctgaggggccagcaggggggctgactgcctagtggctcaacctcctgaacccacccactcccagcgatgctacccagaaccccaacggcatgaatcctgcacagtgccgggcagtgccagactccaaagggctcgctgtggggacagccccgccatggccacagactctgtcctcacctttgattgtcaggatgacagcccccaccaccatgatgagcgtctgcagggcgtccgtgtagattacagcagccaggccccctgccagtggaagcaaggttgctggagggggccctggccccagggaggagggacacggggaggaacttctggggctcctgctggggccacttcctgggctgctccctcgggcctgtagggggaggtggccttctgacccctttacacgtcccctgggtggacctccctgctgcaggcaccatacctgcgatggtgtacagggctgtgatgccgagcgtgaggatggtggagaggtagaagttccagcccaggcagatgtgcacaaacagagcccccgcgtacaggtccagctgcggagggagagagccttgtgtgggactgttattcccagggctccagcaagccactccctgggtgacctcgggcaaggccctctctgggcctcggtggcctgtggataaggaggggagacccccactcgcctgcctgcctgcatcacggggccattgtgaggttgggggaagacctggccgtggagctacaagcttgtgcggatgtcaggggacattactgttgctaataaagtccaaagtggccaatgcctttccca

SEQ ID NO: 461531 - DNA, 2952 bp, Homo sapiens
  misc_feature (1)..(1): n is a, c, g, or t
  misc_feature (5)..(5): n is a, c, g, or t
  misc_feature (9)..(9): n is a, c, g, or t
  misc_feature (11)..(11): n is a, c, g, or t
  misc_feature (2777)..(2777): n is a, c, g, or t
  misc_feature (2800)..(2800): n is a, c, g, or t
  misc_feature (2847)..(2847): n is a, c, g, or t
  misc_feature (2858)..(2858): n is a, c, g, or t
  misc_feature (2876)..(2876): n is a, c, g, or t
  misc_feature (2879)..(2879): n is a, c, g, or t
  misc_feature (2890)..(2890): n is a, c, g, or t
  misc_feature (2895)..(2895): n is a, c, g, or t
  misc_feature (2898)..(2898): n is a, c, g, or t
  misc_feature (2908)..(2908): n is a, c, g, or t
  misc_feature (2914)..(2914): n is a, c, g, or t
  misc_feature (2931)..(2932): n is a, c, g, or t
  misc_feature (2938)..(2941): n is a, c, g, or t
  misc_feature (2950)..(2950): n is a, c, g, or t
ncacntggngnagccagacccggagcctggcagcgacatcctgggctacatcaatatcatcgaccccaacatctggaacccccagcccagccagatgaaccgcatcaagatccgtgacacctcccaggccagcgcccagcaccagctgtggaagcagagccaggacagcaggccccgtccagagccttgccctcccccagagcccagtgccccccaggacggtgtcccagctgagaacggcctcccccagggggaccctgagccattgccccccgtgcccaagccccggacagtccctgtggcagatgtactagcccgggacagcagtgatattggctgggtcctggagctccccaaagaggaagctccccagaatgggacagaccataggctacccaggatggcaggcccaggccacgccccactccagcggcagctatctgtgacccaggatgaccccgagagcctcggggtggggctccccaatgggctggatggggtggaagaagaagatgatgacgactacgtaaccctcagtgaccaggacagccactcaggcagctccggccgtggccctggcccccgacggccctcagtggcttcctctgtgtcagaggagtacttcgaggtgagagagcactcagtccctctccggaggcgccactcagagcaagtggccaacgggccaaccccaccaccgcgccggcagctgagtgccccccatataacccgagggacctttgttggaccccagggtggctccccatgggcccagagtcggggaagagaagaagcagatgcgttgaagaggatgcaggcccagcgctccacagacaaggaggcacagggccagcagtttcatcatcacagggtccctgcctcagggactagggataaagacggcttcccaggaccccctaggtaccgctctgctgctgacagcgtccagagctctaccagaaacgctggcccagccatggctggcccccaccactggcaggccaagggaggtcaggtaccccgcctgcttccggatcccggcagcccaagactggcccaaaatgcccgccccatgaccgatggcagggccaccgaggagcatccgagtcccttcggaatcccatactccaaactgtctcagtcgaagcacctaaaggccaggacgggcggtagccagtgggcctcatcggattctaaacggagggctcaagccccccgggaccgcaaagacccctagcagcatgtcccagcctggagccacaccttctgaggccccagcccagactcatgacgcggagggcagacaggccgcctgggcctaccagagcccactgggacggcaggaaggtgggatgggcgggagacgttggcactcacctggtcggtgcaccagtaccaggtggccatgatggtcaggccaaaggtcatcccggtccacggcaggtcccctgtgtgggggtctcgaaacatgtgcatggcgtctgtacgtggcaggtggcaggtggtgttggcaatggtcctggagggaatggcctgggcgtaggctgcctccagctgcccgtaaccaccgatctggtcaaaagctggaggggtcagggtggaacagggacagtttggtggttgcggggccctgactccctgggctcccccctgccttcatctcacaagaaacttcctgatgcatcaaacttgagttttttccacctcatctttcccagtgtttggaaaggtgtgagggtagagggttgtttttttttttaaggtgtatttgaatgactattttattcgtatttaaaataatactattaagtaagcattttgcacatgggcaccccagtgtcccgctggcccagcaggagtcactgttggcctctggacactcatcggccttgggcaagtggttctcagccaggtttccgattgtcgattcaaggaagcaaaagtaatttttcttgacatttgaggaccttcctgaggcttctaaagtgttcatcctgatcacctgaagggtgtgattttagcagagctgagagtggctggtggtgatgtggccccaccccctgaggcacagagaagagggagacaggtccagagagggatggggcctccaccaagaccatatagaccatctggcgggctcaagccggggctttttcctctccagtccaaaacacctcactgttcctgtctacctcggggtcagggcccggcatggccaagccctggcccatctgtgtctgtgtcactcccctcccttccagactgggcctggctgctgggatccctctcatgcggtgggtcccagggacactagagcccctggtctgagagggagaagcctggatgtaggaaaacccgtttccaccccaggccctactccctagccttttccaagtgggacatggaagaggcagcctgctgcctggatgctggtctccccagcatcactgttcccatggagctcaggtcaggctctgtattcagaccgagggtttgtgtgaggctcagagcaaatgaacaagtgccattcaagggttagaaactgctcagccacagggtcccagtgtctgagtctggaagagtctttagagatttgttcactctctgagggatcctcctggctctgcttacatacttccagggacggtgagctcacgctctctccgggcagccctgtgagtttcctatctgttccagactagtatcgccaatctcctcgtgccgaattcggcacgaggtgtattaagcttttcaaacaatggaggggatgggccctngtgtcctgacgggagccaggtcngcctgagagctgtgccgctcctctgtcttgtcagtggaggtgcctgngtggtgagcangtctcaggcctcttgtcnctncccagtggctncaggnctnatagtggcangggcangatgaggctgcacccgnntggagnnnntttgttctngg

SEQ ID NO: 461532 - DNA, 2897 bp, Homo sapiens
  misc_feature (1)..(1): n is a, c, g, or t
  misc_feature (5)..(5): n is a, c, g, or t
  misc_feature (9)..(9): n is a, c, g, or t
  misc_feature (11)..(11): n is a, c, g, or t
ncacntggngnagccagacccggagcctggcagcgacatcctgggctacatcaatatcatcgaccccaacatctggaacccccagcccagccagatgaaccgcatcaagatccgtgacacctcccaggccagcgcccagcaccagctgtggaagcagagccaggacagcaggccccgtccagagccttgccctcccccagagcccagtgccccccaggacggtgtcccagctgagaacggcctcccccagggggaccctgagccattgccccccgtgcccaagccccggacagtccctgtggcagatgtactagcccgggacagcagtgatattggctgggtcctggagctccccaaagaggaagctccccagaatgggacagaccataggctacccaggatggcaggcccaggccacgccccactccagcggcagctatctgtgacccaggatgaccccgagagcctcggggtggggctccccaatgggctggatggggtggaagaagaagatgatgacgactacgtaaccctcagtgaccaggacagccactcaggcagctccggccgtggccctggcccccgacggccctcagtggcttcctctgtgtcagaggagtacttcgaggtgagagagcactcagtccctctccggaggcgccactcagagcaagtggccaacgggccaaccccaccaccgcgccggcagctgagtgccccccatataacccgagggacctttgttggaccccagggtggctccccatgggcccagagtcggggaagagaagaagcagatgcgttgaagaggatgcaggcccagcgctccacagacaaggaggcacagggccagcagtttcatcatcacagggtccctgcctcagggactagggataaagacggcttcccaggaccccctaggtaccgctctgctgctgacagcgtccagagctctaccagaaacgctggcccagccatggctggcccccaccactggcaggccaagggaggtcaggtaccccgcctgcttccggatcccggcagcccaagactggcccaaaatgcccgccccatgaccgatggcagggccaccgaggagcatccgagtcccttcggaatcccatactccaaactgtctcagtcgaagcacctaaaggccaggacgggcggtagccagtgggcctcatcggattctaaacggagggctcaagccccccgggaccgcaaagacccctagcagcatgtcccagcctggagccacaccttctgaggccccagcccagactcatgacgcggagggcagacaggccgcctgggcctaccagagcccactgggacggcaggaaggtgggatgggcgggagacgttggcactcacctggtcggtgcaccagtaccaggtggccatgatggtcaggccaaaggtcatcccggtccacggcaggtcccctgtgtgggggtctcgaaacatgtgcatggcgtctgtacgtggcaggtggcaggtggtgttggcaatggtcctggagggaatggcctgggcgtaggctgcctccagctgcccgtaaccaccgatctggtcaaaagctggaggggtcagggtggaacagggacagtttggtggttgcggggccctgactccctgggctcccccctgccttcatctcacaagaaacttcctgatgcatcaaacttgagttttttccacctcatctttcccagtgtttggaaaggtgtgagggtagagggttgtttttttttttaaggtgtatttgaatgactattttattcgtatttaaaataatactattaagtaagcattttgcacatgggcaccccagtgtcccgctggcccagcaggagtcactgttggcctctggacactcatcggccttgggcaagtggttctcagccaggtttccgattgtcgattcaaggaagcaaaagtaatttttcttgacatttgaggaccttcctgaggcttctaaagtgttcatcctgatcacctgaagggtgtgattttagcagagctgagagtggctggtggtgatgtggccccaccccctgaggcacagagaagagggagacaggtccagagagggatggggcctccaccaagaccatatagaccatctggcgggctcaagccggggctttttcctctccagtccaaaacacctcactgttcctgtctacctcggggtcagggcccggcatggccaagccctggcccatctgtgtctgtgtcactcccctcccttccagactgggcctggctgctgggatccctctcatgcggtgggtcccagggacactagagcccctggtctgagagggagaagcctggatgtaggaaaacccgtttccaccccaggccctactccctagccttttccaagtgggacatggaagaggcagcctgctgcctggatgctggtctccccagcatcactgttcccatggagctcaggtcaggctctgtattcagaccgagggtttgtgtgaggctcagagcaaatgaacaagtgccattcaagggttagaaactgctcagccacagggtcccagtgtctgagtctggaagagtctttagagatttgttcactctctgagggatcctcctggctctgcttacatacttccagggacggtgagctcacgctctctccgggcagccctgtgagtttcctatctgttccagactagtatcgccaatctctcccagctctcttctttcctccctggcctttgtcctgcaggaggtagcatcacctcttggcattttgtacatgcttttaaacaattggaggagctgcccaggcagttttatggcctcctggttgtgtgccttcacacccgcctgtcgacgcggccgcgaatttagtagtagtaggcggccgc

SEQ ID NO: 461533 - DNA, 3663 bp, Homo sapiens
  misc_feature (1)..(1): n is a, c, g, or t
  misc_feature (5)..(5): n is a, c, g, or t
  misc_feature (9)..(9): n is a, c, g, or t
  misc_feature (11)..(11): n is a, c, g, or t
ncacntggngnagccagacccggagcctggcagcgacatcctgggctacatcaatatcatcgaccccaacatctggaacccccagcccagccagatgaaccgcatcaagatccgtgacacctcccaggccagcgcccagcaccagctgtggaagcagagccaggacagcaggccccgtccagagccttgccctcccccagagcccagtgccccccaggacggtgtcccagctgagaacggcctcccccagggggaccctgagccattgccccccgtgcccaagccccggacagtccctgtggcagatgtactagcccgggacagcagtgatattggctgggtcctggagctccccaaagaggaagctccccagaatgggacagaccataggctacccaggatggcaggcccaggccacgccccactccagcggcagctatctgtgacccaggatgaccccgagagcctcggggtggggctccccaatgggctggatggggtggaagaagaagatgatgacgactacgtaaccctcagtgaccaggacagccactcaggcagctccggccgtggccctggcccccgacggccctcagtggcttcctctgtgtcagaggagtacttcgaggtgagagagcactcagtccctctccggaggcgccactcagagcaagtggccaacgggccaaccccaccaccgcgccggcagctgagtgccccccatataacccgagggacctttgttggaccccagggtggctccccatgggcccagagtcggggaagagaagaagcagatgcgttgaagaggatgcaggcccagcgctccacagacaaggaggcacagggccagcagtttcatcatcacagggtccctgcctcagggactagggataaagacggcttcccaggaccccctaggtaccgctctgctgctgacagcgtccagagctctaccagaaacgctggcccagccatggctggcccccaccactggcaggccaagggaggtcaggtaccccgcctgcttccggatcccggcagcccaagactggcccaaaatgcccgccccatgaccgatggcagggccaccgaggagcatccgagtcccttcggaatcccatactccaaactgtctcagtcgaagcacctaaaggccaggacgggcggtagccagtgggcctcatcggattctaaacggagggctcaagccccccgggaccgcaaagacccctagcagcatgtcccagcctggagccacaccttctgaggccccagcccagactcatgacgcggagggcagacaggccgcctgggcctaccagagcccactgggacggcaggaaggtgggatgggcgggagacgttggcactcacctggtcggtgcaccagtaccaggtggccatgatggtcaggccaaaggtcatcccggtccacggcaggtcccctgtgtgggggtctcgaaacatgtgcatggcgtctgtacgtggcaggtggcaggtggtgttggcaatggtcctggagggaatggcctgggcgtaggctgcctccagctgcccgtaaccaccgatctggtcaaaagctggaggggtcagggtggaacagggacagtttggtggttgcggggccctgactccctgggctcccccctgccttcatctcacaagaaacttcctgatgcatcaaacttgagttttttccacctcatctttcccagtgtttggaaaggtgtgagggtagagggttgtttttttttttaaggtgtatttgaatgactattttattcgtatttaaaataatactattaagtaagcattttgcacatgggcaccccagtgtcccgctggcccagcaggagtcactgttggcctctggacactcatcggccttgggcaagtggttctcagccaggtttccgattgtcgattcaaggaagcaaaagtaatttttcttgacatttgaggaccttcctgaggcttctaaagtgttcatcctgatcacctgaagggtgtgattttagcagagctgagagtggctggtggtgatgtggccccaccccctgaggcacagagaagagggagacaggtccagagagggatggggcctccaccaagaccatatagaccatctggcgggctcaagccggggctttttcctctccagtccaaaacacctcactgttcctgtctacctcggggtcagggcccggcatggccaagccctggcccatctgtgtctgtgtcactcccctcccttccagactgggcctggctgctgggatccctctcatgcggtgggtcccagggacactagagcccctggtctgagagggagaagcctggatgtaggaaaacccgtttccaccccaggccctactccctagccttttccaagtgggacatggaagaggcagcctgctgcctggatgctggtctccccagcatcactgttcccatggagctcaggtcaggctctgtattcagaccgagggtttgtgtgaggctcagagcaaatgaacaagtgccattcaagggttagaaactgctcagccacagggtcccagtgtctgagtctggaagagtctttagagatttgttcactctctgagggatcctcctggctctgcttacatacttccagggacggtgagctcacgctctctccgggcagccctgtgagtttcctatctgttccagactagtatcgccaatctctcccagctctcttctttcctccctggcctttgtcctgcaggaggtagcatcacctcttggcattttgtacatgcttttaaacaattggaggagctgcccaggcagttttatggcctcctggttgtgtgccttcacacccgcctacagccccacctcaccatcaagcgctgagccaatgcgggtgtggctggccctgagttcctgagtcagctccttgccaggccagagctggtaacagcggggcagcagggtgggtagcctctaccagccagggcagtccctgaggggccagcaggggggctgactgcctagtggctcaacctcctgaacccacccactcccagcgatgctacccagaaccccaacggcatgaatcctgcacagtgccgggcagtgccagactccaaagggctcgctgtggggacagccccgccatggccacagactctgtcctcacctttgattgtcaggatgacagcccccaccaccatgatgagcgtctgcagggcgtccgtgtagattacagcagccaggccccctgccagtggaagcaaggttgctggagggggccctggccccagggaggagggacacggggaggaacttctggggctcctgctggggccacttcctgggctgctccctcgggcctgtagggggaggtggccttctgacccctttacacgtcccctgggtggacctccctgctgcaggcaccatacctgcgatggtgtacagggctgtgatgccgagcgtgaggatggtggagaggtagaagttccagcccaggcagatgtgcacaaacagaacccccactcgcctgcctgcctgcatcacggggccattgtgaggttgggggaagacctggccgtggagctacaagcttgtgcggatgtcaggggacattactgttgctaataaagtccaaagtggccaatgcctttccca

SEQ ID NO: 461534 - DNA, 1299 bp, Homo sapiens
cgctaacgcatggtgtcggagggaggcccacttgctgaacagcagggagcgatggcgcagaacgtgtatggtccgggagtccggataggcaactggaatgaggatgtctacctggaggaggagctcatgaaagacttcttagagaagagagacaaggggaaacttctcatacagagaagtagaagactaaaacagaatctcttgagaccgatgcaactttccgtaactgaagatggctatattcattacggtgacaaagtgatgcttgtgaatcctgatgatcctgacacagaagctgatgtgtttctgcgtggggacctgagcctgtgtatgactccagatgaaattcagtcccatctgaaagacgaattagaggtaccctgtggcctgagcgcagttcaagccaagaccccaattggcagaaacacttttatcattttgagtgtacacagagatgccactggtcaagtccttagatatgggcaggacttttgcctggggataacaggaggatttgacaacaaaatgttgtatttgtcaagtgaccacaggaccctcctgaaatcgtctaagaggtcttggctccaggaagtgtacctaacagatgaggtctcccatgtgaactgctggcaggctgccttccctgacccccagttacgcctggaatatgaaggcttccccgtcccggcaaatgctaaaattctcatcaatcactgtcacacaaatcggggactggcagcccaccggcatcttttcttaagcacctattttggaaaggaggctgaggttgtagctcacacatacctggattcacatagagttgagaaaccaaggaaccactggatgttggttactgggaatcccagggatgcctcgtcctccatgttggatctgcccaaaccacccacagaggacactcgagccatggagcaggccatgggccttgacacgcaattagaatatgtggtctctaacatgacttccagatatattaataatctgcttttagcatctgagctggactttgatggaaacttagaatattggcagggggagactggctctccaggatgcagccgctgtatggacctgtgtacagtgactttggcacacagcacctctgcagcgacctccagtggtgcacaatcacaaattgtggagagcatcctgcgtgctgtgtgcagtcattcattatacagaaaatgccactgagtcacttgctgcaacgatgcctgcacagctttgtcctgagtcatggacaatgggctcctcccagctctaaggttcactttctttcaa

SEQ ID NO: 461535 - DNA, 587 bp, Homo sapiens
  misc_feature (1)..(2): n is a, c, g, or t
  misc_feature (5)..(6): n is a, c, g, or t
  misc_feature (9)..(10): n is a, c, g, or t
  misc_feature (13)..(14): n is a, c, g, or t
  misc_feature (17)..(17): n is a, c, g, or t
  misc_feature (169)..(169): n is a, c, g, or t
  misc_feature (172)..(172): n is a, c, g, or t
  misc_feature (174)..(175): n is a, c, g, or t
  misc_feature (177)..(179): n is a, c, g, or t
  misc_feature (181)..(183): n is a, c, g, or t
nnttnnctnnacnntcnagtctagacaagacatgccttcagaggatgttttatctttacaagtctctctcgttaatcttgacatgaaatgttaccctgatcgtgtggactatattgataaagttctagaaacagcagcggagatattcaataagctcaaccttgaacantangnnannntnnnttactttgactatgagtccagaaagagcatgagttgttatgtgttaagtagtgttctggattataacacagaaattgtctctcaagaccaggtggattccataatgaatttggtatccacgttgattcaagatcagccagatcaacctgtagaagaccctgatccagaagattttgctgatgagcagagcgttgtgggcccttcattcatctgctgcgctctgaggaccctgaccagcagtacttggactgtggtattgtgctctgtgagctatgtgatctgtacagagtgactgtctgagtattttaactgattcccttatgtttctgtgtgagattgtgtgtgtctgtgcgttttcattttctattacataccaaatgtagtagttaggaagtatgcctttt

SEQ ID NO: 461536 - DNA, 684 bp, Homo sapiens
  misc_feature (2)..(2): n is a, c, g, or t
  misc_feature (4)..(4): n is a, c, g, or t
  misc_feature (6)..(6): n is a, c, g, or t
  misc_feature (8)..(8): n is a, c, g, or t
  misc_feature (11)..(11): n is a, c, g, or t
  misc_feature (14)..(15): n is a, c, g, or t
tntntncnttntannagaagccctagacccacttttcatggatccagacttggcatatggaacttatacaggaagctgtggtcatgtaatgcacgcagtgtgctggcagaagtattttgaagctgtacagctgagctctcagcagcgcattcatgttgacctttttgacttggaaagtggagaatatctttgccctctttgcaaatctctgtgcaatactgtgatccccattattcctttgcaacctcaaaagataaacagtgagaatgcagatgctcttgctcaacttttgaccctggcacggtggatacagactgttctggccagaatatcaggttataatataagacatgctaaaggagaaaacccaattcctattttctttaatcaaggaatgggagattctactttggagttccattccatcctgagttttggcgttgagtcttcgattaaatattcaaatagcatcaaggaaatggttattctctttgccacaacaatttatagaattggattgaaagtgccacctgatgaaagggatcctcgagtccccatgctgacctggagcacctgcgctttcactatccaggcaattggtaaagctcataagaaaactggtttggaggtttcagtgagaattaactttgatcattcattcttaaattctttttttcactgatg

SEQ ID NO: 461537 - DNA, 1178 bp, Homo sapiens
gaacgcatttgcacaaattcagctgccaccctgctcacaggtaaggttataacatatcactaagcctggtacttaatgatgtgactctctgatcctgtttgtgccctgccctcaagaagcattgtgacatcactgggctaagcaacaaggtaatcttgcttatgtgtgtcttctgtctaggccatgtgcacagggggcattgagaaatatctctggaccaatcacctaaaagatgtgactctcctcacttgcctggactctgctcagaatagagatttcgacacatcagtgggttcaacacctaggtgatgcggctcttccttcttttctgggctcttccatcagagaagattgtgacattttctgagcccagcactcaagtgaggtgacttgtctccctggactctccccacagacagcattgtgaaatatctttgggatcatcacctaggttactgggatctcaatgtagatgttatgtccagacagaggctgctgtgagctgaatcgtctgcttcccaaaattcctatgttgacaccttaacccccagcacctaagaatgtgactatatttggagatagcatcatcacagagtctcagggatgtctttatcagcagtatgaaaatgaaccaattcatcccacttcactgtttgaagaaaaactgctggctctatggggtcttcaatttactgaatgattcctagatgcctggccctaattcactcaagagtcaagaaaggtgccaccttatggtgctcactgggcggttgtggatgtctaacctcagtgctagtcacacagaacctgaagccaggctggctgctcctgtaaatggcatggaatcccagggaatatcctgcattctcagtgtccagctgtctgatgccacagttgtttatgatgatcgaggacaactacgtttttctgaggagacttaccacctcatggctgaggcattcacaaaaaatagctcacgttatgttttgcttatttgcaaattgggctctgatcctcgtgcaacatggagtttaggtgacttgcttctcccaggcacagagtcccatagtctatctctgacaaatatttctggatcagtctttcaagtgaagctcttctgccaatgtcatgagtgaacacatttctcaaagcctcctcagggacctaagccatttccc

SEQ ID NO: 461538 - DNA, 876 bp, Homo sapiens
gaacgcatttgcacaaattcagctgccaccctgctcacaggtaaggttataacatatcactaagcctggtacttaatgatgtgactctctgatcctgtttgtgccctgccctcaagaagcattgtgacatcactgggctaagcaacaaggttactgggatctcaatgtagatgttatgtccagacagaggctgctgtgagctgaatcgtctgcttcccaaaattcctatgttgacaccttaacccccagcacctaagaatgtgactatatttggagatagcatcatcacagagtctcagggatgtctttatcagcagtatgaaaatgaaccaattcatcccacttcactgtttgaagaaaaactgctggctctatggggtcttcaatttactgaatgattcctagatgcctggccctaattcactcaagagtcaagaaaggtgccaccttatggtgctcactgggcggttgtggatgtctaacctcagtgctagtcacacagaacctgaagccaggctggctgctcctgtaaatggcatggaatcccagggaatatcctgcattctcagtgtccagctgtctgatgccacagttgtttatgatgatcgaggacaactacgtttttctgaggagacttaccacctcatggctgaggcattcacaaaaaatagctcacgttatgttttgcttatttgcaaattgggctctgatcctcgtgcaacatggagtttaggtgacttgcttctcccaggcacagagtcccatagtctatctctgacaaatatttctggatcagtctttcaagtgaagctcttctgccaatgtcatgagtgaacacatttctcaaagcctcctcagggacctaagccatttccc

SEQ ID NO: 461539 - DNA, 911 bp, Homo sapiens
attctcagggacaggtaccagctgggatgttggcagcagccgctcccctgcaaggagaacctcccacttcctgtcccgcacacctgcctcattggaaagtgacgcacccactgtttggcctcggcagcctgatgtttctcatcacacaggaagacggtcatgctacaggaagacctcggactttgcatccagcagatggttgttctagagattgtcagaccgagaccacgccacacacccagaaggcacccaagtcacagagcctgatattgttcctggagcgccattgcatcatccttgaccacaagatctgcgtcattggatttgtctcaaaaacttgggactctggagataaaacctcattgcaaggctacctttgccactgtatcttagcagcttttgaagcaaagcatttcaatatttagacactgtgtttctaatgggtactgggatcaaaataataaaaactcagtctgcaaagggagaagaatagaaaccagcagatttattatttcacagaatgttcctctcctctcaggaatccttgcaaagtaggaaaattgaacccagtgattgttttcaagatagctttatgttaatactcaatttaaccaattaaagaaatcgacataaaatcaactaaccccatatgtggttttttttttttgtttttgtttttgttttttttggcccctgacttttgtggagacccatgagatgcttggtcctgagcctaacggatgcaggggcctggctgggacccagctgggaagctgatgctgttctccagcctgacccaccttcctagaaagacagctcaggattcatttctgcccagggctttcgtcgtgcatgagaagtcccttctgccttctattttctctgctccaggaaacctctctccgcagccc

SEQ ID NO: 461540 - DNA, 1170 bp, Homo sapiens
attctcagggacaggtaccagctgggatgttggcagcagccgctcccctgcaaggagaacctcccacttcctgtcccgcacacctgcctcattggaaagtgacgcacccactgtttggcctcggcagcctgatgtttctcatcacacaggaagacggtcatgctacaggaagacctcggactttgcatccagcagatgtgagttcaaattccagctttgtaatttgcaagctcagaggtggatttgctgggaagctaaacaagcttacctgcagagcccccagcttgcatgggcccctcccaagaccttaacctcattttgtattcataattttgtagtcttttcccttcaaaaggcagcccaaatttaaaagcattaagccccacaagacctgagtccacctaggaggtgggagatatcccttgcagcatgagaataataattaccacctcgtagggttgttctagagattgtcagaccgagaccacgccacacacccagaaggcacccaagtcacagagcctgatattgttcctggagcgccattgcatcatccttgaccacaagatctgcgtcattggatttgtctcaaaaacttgggactctggagataaaacctcattgcaaggctacctttgccactgtatcttagcagcttttgaagcaaagcatttcaatatttagacactgtgtttctaatgggtactgggatcaaaataataaaaactcagtctgcaaagggagaagaatagaaaccagcagatttattatttcacagaatgttcctctcctctcaggaatccttgcaaagtaggaaaattgaacccagtgattgttttcaagatagctttatgttaatactcaatttaaccaattaaagaaatcgacataaaatcaactaaccccatatgtggttttttttttttgtttttgtttttgttttttttggcccctgacttttgtggagacccatgagatgcttggtcctgagcctaacggatgcaggggcctggctgggacccagctgggaagctgatgctgttctccagcctgacccaccttcctagaaagacagctcaggattcatttctgcccagggctttcgtcgtgcatgagaagtcccttctgccttctattttctctgctccaggaaacctctctccgcagccc

SEQ ID NO: 461541 - DNA, 821 bp, Homo sapiens
gtgtccgtctgctcgtgggcctggagggcattaatattacactcacagagcgccacacccccactttcctgtctgaatccgcttagttgcgaggtctccgaccgcgggcagccccatgagcccgcctcaccccacagggaccccagtgcatcagctgaacgagaccattgactacaacgagcagttcacctggcgtctgaaagagaattacgccgcggagtacgcgaacgcactggagaaggggctgccggacccagtgctctacctggcggagaagttcacaccgagtagcccttgcggcctgtaccaccagtaccacctggcgggacactacgcctcggccacgctatgggtggcgttctgcttctggctcctctccaacgtgctgctctccacgccggccccgctctacggaggcctggcactgctgaccaccggagccttcgcgctcttcggggtcttcgccttggcctccatctctagcgtgccgctctgcccgctccgcctaggctcctccgcgctcaccactcagtacggcgccgccttctgggtcacgctggcaaccggcgtcctgtgcctcttcctcggaggggccgtggtgagtctccagtatgttcggcccagcgctcttcgcacccttctggaccaaagcgccaaggactgcagccaggagagagggggctcacctcttatcctcggcgacccactgcacaagcaggccgctctcccagacttaaaatgtatcaccactaacctgtgagggggacccaatctggactccttccccgccttgggacatcgcaggccgggaagcagtgccc

SEQ ID NO: 461542 - DNA, 2997 bp, Homo sapiens
cagcgccgagcagagagggtcagggtttttgacgttcctcgccagctgcacaaacctcccggagcaagtgtgagtgtgggtgagagtgcgcgcgcgcgcacgggctggctgcgcttggcacgcttggtggcccagggtcccggggcccggggtcccgtctggcggcccgggattaccgtgacgtcacattgagcctctggccaccttggactgggacacctccggagcctcacagccccgcgccgcgccgcgcctcacctcgccaccacgcgcctttgggaacccgcatcttcttccttcccctgcccatccatgggcccttctgtcttccggaccccacgggccggaggggcgccttccggagcgcagggctcggcagccgggctgccctcggctctgcctccactggggccaaccaggcgaaggaaccggcgctgggcatccgcagcggtgtaaggaactgagacacctcactgctgggggcgcggaacagctgggctgagacgggaactcgacagggaagagagagacgggccagggacagccaccatgtccttcccacactttggacacccgtaccgcggcgcttcccagtttctggcgtcggcaagttccagcaccacatgctgcgaatctacccaacgctctgtctcagatgtggcatcaggctccaccccagcgcccgctctctgctgcgcaccctacgatagtcgactgctgggcagtgcgcgaccggagctgggcgccgccttgggcatctatggagcaccctatgcggccgctgcagctgcccagagctaccctggctacctgccctatagcccagagcccccctcactgtatggggcactgaatccacagtatgaatttaaggaggctgcagggagttttacatccagcctggcacaaccaggagcctattatccctatgagcggactctggggcagtaccaatatgaacggtatggcgcagtggaattgagtggcgccggtcgccgaaagaacgcgacccgggagaccaccagtacactcaaggcctggctcaacgagcaccgcaaaaacccctaccccactaagggtgagaagatcatgctggccatcatcaccaagatgaccctcacccaggtgtccacctggaaagagaacaaaatgacatgggcgcccaagaacaaaggtggggaggagaggaaggcagagggaggagaggaggactcactaggctgcctaactgctgacaccaaagaagttactgctagccaggaggcccgggggctccggctgagtgacctggaagacctggaggaagaggaggaggaggaggaggaagctgaagacgaggaggtagtggccacagctggggacaggctgacggagttccgaaagggcgcgcagtcactgcctgggccgtgcgctgcagctcgagagggccgattggagcgcagggagtgcggcctggctgcgccccgcttctccttcaatgacccttccggatcggaagaagctgacttcctctcggcggagacaggcagccctaggttgaccatgcactacccatgcttggagaaaccgcgcatctggtctctggcgcacaccgcgacagccagcgctgttgaaggtgcacccccagcccgcctaggccacgaagtcctgagtgccgtatgattcctggacagcctcctgcctctgcccggcgactctcagtccccagagactccgcgtgcgacgagtcttcctgcatacccaaagcctttggaaaccccaagtttgccctgcagggactaccgctgaactgtgcgccgtgcccgcggaggagcgagcctgtagtgcagtgccagtacccgtctggagcagaaggttagcgcaatggctgcgatttgcgaaagaatcttggaaatgggccccacgtttcgaattcatctccaggttaagaagctgccagaccttgccagggaccaggagctctcactttgcctaagagacagacacacagaaaccctcctagcagctgtccttgcacgcagagctggggtggtgggccgacttgaaccttagcagtccccacgggagatggcagggcaccttggggaaggccaagtgggaggctgggaggctgccccacccaccgactctaccaagtctctcttcctcctgtggattcagcaaggcttcctctcctgctcacccctgtctctcacctccaccaaccccactcactttgtaacttcatcactgacccggccaataaggaccctgtgcgtcttctccccctcctaagcccttgtgtccttaaaaataatcagtccgaacccatgtagtgtggcctatctttgccagaggtgcttgagaggtcggtgtgcaggcaaagatgcattgcggccagggattcttgcgacagcgcggcgtgggctgcatacctcagttcctttagtagctgggaaagaaactgacaaggtaacagacaaggccgtggcgcctgcagctcagcggactaaccgctgcgtaaccaatccgtggagccaagctgaccacctcgcgggtcctgcgcatgggaagtggtgggacttgtcaggatgtttatctggaaactgcatctgtttccgggttcgtatttgggttgtaagtttactgggggaggggtgacgaggaccgcgctcctccgatcgaactgaacctaatggggaggtcaggcagctttcagggtcggtgtgaggcgagagggggcattcttcccgttttatcaaaagtgtcagcaaacacttccggtacaggccaaccaatgggaactgacgggcagggaaggggtctttgtcccccttgctaggagtgtcgagcgaccgggttgggggggagagggatccttagaatcagagagtcaacacttggagatgggaagctgaagatcagattggagaagggaccccactaaactcagttcatgtggctgagcagggtctgggatccagagggtgggggttagggggaatctcaccttcacac

SEQ ID NO: 461543 - DNA, 1040 bp, Homo sapiens
aaccgaaagccaattgaataatgagtgacatgtgcatcagccaattggagggaggcaaagtcccgcccgctgggtggttgatgtacagcaacaggaagctggaaggggaggggcttagccgaagagtgcttttgtattggtcgaggttgaccttccacccacctctaacccagaggatgaatgatagatctgccctgaagccaatcagaagtccttagggtgaggcccacaaatgccccagaaatagcatatacattgcgccctaagtccagtctcgcccaggtgtggcaggagcttttacctgctcttcggcagtagccggctgccactcaaccccatgcctggtgagtggaaagccatcaaccttttatttagtccctctctcgttgtcgcctggggaggggcgactttgtacagtgaggcactggggtccggcaccatagtgggagttggggttgtttacgcgacacttctaaggggattttcacaatcggttaagcccccgttaatcctcacatggttattgcggcgacccccatagcccacggtcccaaacgtgtgcatctgaatcatccgaagctctttctaaaggcaggctcccctggccgcctctcctaatccgactcggtacttcacggggcgtgcctagaatctgcattttagcaagggcctcgcgtggacagaattgcacgcttgagtttgagaagtactgcttggcctctgccccacttacccttaccttcttgagatgaggtaaagcacttggtaggcactaggcgggtaggtttatctttgctcccaagtctcttccgagaacttgggaaggctgcctagcttagtgagggaatccattctggcttcagaccagtctgggtttgaaacctacacatcccactaacttaggcagggtaccgaaactccctgagcttcatgtcctcatcagtaaaacgaggttaatcacacctacaccttagcgcgatggcttaaaaaaaaaaaaaaaacaaacaaaaaaaaacatagtccatcaagagaaatacatt

SEQ ID NO: 461544 - DNA, 1485 bp, Homo sapiens
aaccgaaagccaattgaataatgagtgacatgtgcatcagccaattggagggaggcaaagtcccgcccgctgggtggttgatgtacagcaacaggaagctggaaggggaggggcttagccgaagagtgcttttgtattggtcgaggttgaccttccacccacctctaacccagaggatgaatgatagatctgccctgaagccaatcagaagtccttagggtgaggcccacaaatgccccagaaatagcatatacattgcgccctaagtccagtctcgcccaggtgtggcaggagcttttacctgctcttcggcagtagccggctgccactcaaccccatgcctgggttgtcctcatctaatccgtcagtaccagacagtgaacatctctcccccaggatgctgagggagggtcctggagggaaggatgtggaactacagcctctgctctcaagaagctcagatctgggcagggaacatcacataccagggctgtctgtcgggggggtggagggctgggggagggatagcattaggggaaatacctaatgtaaatgacaagttgatgggtgcagcaaaccaacatggcacatgtatacctatgtaacaaatctgcatgttgtgcacgtgtaccctagaacttaaagtataattaaaaaaaaaaaaagcttcagatccctcctggagcctcctatgaaaccacgtggcataactgggttcttccttctttgctccttctttctacccccagtctccctggggtgggatctgtggagcctcaggaagaaagggcagggccccagcagcatcttctctctgcctctgcccctcccctgcactcccctgctccccacctttcccgaccccattgaccacagctccatgtggtgcccagtctgcttctccatgtttgccaggaaggtgaggagcctggctccacccttcctggaaagacatgagaaggagagagtggccttcatgctgaaggtggggagaggcccccccggggaagcagggagcctgggagccagccccaggaatgcaaggagatggcagatggcaaatacttgccctgaggccctggagagggatgagggtggtaagaagctgggagaagaggaggaggaggcagatgccaggccagagtttctgagaagagaagaagccgggtgggagaggggaaatgacaaagctgcccccctggtggtggcaggggcccggaaaagggggctgagggggagctgagaaagcagtcagtgaagacttgggagaggcagctgtctaggcccctctcccctgtggaatggctcctgctgaccacaggtttgggcaggtggagggggcagagtcctcaactttagggaaaagtattaatggtagacacacagtcccaccctaatgggggctctctggcctcagagagctacaatatactggaaaagatgcagcctgtgttcttgcgaagcccccagtctaacgtaagagat

SEQ ID NO: 461545 - DNA, 1544 bp, Homo sapiens
aaccgaaagccaattgaataatgagtgacatgtgcatcagccaattggagggaggcaaagtcccgcccgctgggtggttgatgtacagcaacaggaagctggaaggggaggggcttagccgaagagtgcttttgtattggtcgaggttgaccttccacccacctctaacccagaggatgaatgatagatctgccctgaagccaatcagaagtccttagggtgaggcccacaaatgccccagaaatagcatatacattgcgccctaagtccagtctcgcccaggtgtggcaggagcttttacctgctcttcggcagtagccggctgccactcaaccccatgcctgactgagctgtggtagaaggattgaggccagcacagaggaggatcagcaggaaatgtaagggttgtcctcatctaatccgtcagtaccagacagtgaacatctctcccccaggatgctgagggagggtcctggagggaaggatgtggaactacagcctctgctctcaagaagctcagatctgggcagggaacatcacataccagggctgtctgtcgggggggtggagggctgggggagggatagcattaggggaaatacctaatgtaaatgacaagttgatgggtgcagcaaaccaacatggcacatgtatacctatgtaacaaatctgcatgttgtgcacgtgtaccctagaacttaaagtataattaaaaaaaaaaaaagcttcagatccctcctggagcctcctatgaaaccacgtggcataactgggttcttccttctttgctccttctttctacccccagtctccctggggtgggatctgtggagcctcaggaagaaagggcagggccccagcagcatcttctctctgcctctgcccctcccctgcactcccctgctccccacctttcccgaccccattgaccacagctccatgtggtgcccagtctgcttctccatgtttgccaggaaggtgaggagcctggctccacccttcctggaaagacatgagaaggagagagtggccttcatgctgaaggtggggagaggcccccccggggaagcagggagcctgggagccagccccaggaatgcaaggagatggcagatggcaaatacttgccctgaggccctggagagggatgagggtggtaagaagctgggagaagaggaggaggaggcagatgccaggccagagtttctgagaagagaagaagccgggtgggagaggggaaatgacaaagctgcccccctggtggtggcaggggcccggaaaagggggctgagggggagctgagaaagcagtcagtgaagacttgggagaggcagctgtctaggcccctctcccctgtggaatggctcctgctgaccacaggtttgggcaggtggagggggcagagtcctcaactttagggaaaagtattaatggtagacacacagtcccaccctaatgggggctctctggcctcagagagctacaatatactggaaaagatgcagcctgtgttcttgcgaagcccccagtctaacgtaagagat

SEQ ID NO: 461546 - DNA, 2060 bp, Homo sapiens
  misc_feature (2051)..(2051): n is a, c, g, or t
  misc_feature (2054)..(2054): n is a, c, g, or t
  misc_feature (2056)..(2057): n is a, c, g, or t
acagctacaacgaggagaaagatgaggaccactgcagctcccagtgggcacacctgccagcaaatcaccactgctcccacagatggggcccctgggggaccattctcaggcatttctgacaaatggcagccactgttgagtactgttacaggggttcacagatacaagtggttgaagcagaatgttcaggatctttatccgcagtctccactcctcagtacaattgctgaatttgcccttaaagaagagccagtggatttagaagtctggcagtgtcccgagtcaaattctttatctttatttgaaagggaacctcttactgattgtttaaaggatgttgatttgatcccaccttttaatcggatgctgctggaagtcacctttggcaagctgtatgcttggactgttcagaacattctaaatgttctgatggatgccagtgccaaatttaaagagcttggtatccagccggttcccctgcagaccatcaccagtgagaacccattgggaccgagcctggggagcatcccgcaagcccgcttcctcctgatgatgctcagcatgctcaccctgcagcacagcgcaaacaacctcgacctcctgctcaattccggcacgctggccctcactcagacggcactgcgcctgattgttcttccagatgtagagttattgatttgagatcatcttctgtgaatgcagacttctatagtataattgcccgtcttagccctgcttttggcgcagcacagaagttttggccccagttgtgacaatgttgaggaagatatgaatgcttctgctcaaggtgcttctgccacagttttggaagcaacaaggaaggaaacggctcctgtgcatctccctgtttcagggccagaactggctgccacgatgaagattggaacgagggtcatgagaggtgtggactggaaatggggcgatcagaagctgaacaaactgaaaggaacattcaccccactacaatgatgtttaccagcactattaacttactgcagactctttgtctgcctgccagagttcatgctgagatcatgcagagcgaagccaccaagactttatgcggactgctgcaaatattagtggaaagcggaacgacggacaagacacgcatggaatgagagattgagggcccagggagtcagcgctgggggccgcacgcttgtcgtgtccgggtgtgcatgtgggtgggtgtggatgtgtgtggattcatttcctgtggctgctgtaacaaagtactacaaacttgggggcttacgcagtagaaattctcatgattctggtggttggaagactgagatcaagggtggttccttctggggctgtgagggagaagctgcttcagggctctgccccagcttctggagtttgctggcctctttagcgttcctcggcttgtagaggggtcaccctgatctctgccatcatcttcacatggcattctccctgtgtgtgagtcacctccaaatctccccttttcataaggacatcattcaacctcatcaaactgattacatctgcagcggccctatttccaaacaaggtcacctgccgaggtatggtaggggttagggcttcaacatacaaattttgcaattctgaattcaacccataacactggcttcaaacaacaaatttgttctctcagagttctggagaccagaagtcccaaatccaggtgcgggcagggccatgctccctccacaggctctaggggaaggtccttccttaccttatccagcttctgggagctccaggcttccctggtgtggggacgcattgtgccagtctcagaggcctgcatcttcacatggcccctgcccctgtgttctgcatgtctttttctgtctctgaaaggactctttcattgagcttctttgactctaatccaacatgatgtcacctaaattcttaccttaaggacgtctacagagacctcattaaataagatcatattctgagttccgaatgtatgtgaagttgggggacaggcacagtttaatccataaagtgtttgtgtgtgtggaganttntnnaaa

SEQ ID NO: 461547 - DNA, 585 bp, Homo sapiens
agccttcgggaaagaacatcaagatgaatggagtctgagttcctgacaacatggagcatcatgccagccatgaaccacttctgagacatccctatgagacaaaaataaacttccatgttctttaatttatcattttggagggttttctgttattgccgcaaaacctaatcttaactaatacagacattgtatctgaaattcccaggaaaatccctgtaaacgtgttgcttgccacgaataactggcctctaccagtatcacattccagatgagcagaacagggaaaggattggaagacaagagaggggaggaacacacctcgctctctcctgctattggctgtgcctggctgcaagctagaaatgctgggtccattgcaaatggccacacatctaaggccctaccaccatgggaacagccactgggagataactagcagcttttaccatttgtcatttaattattttaaagttagaaactttttctttttgaatgtctgaaagagaatggcctgagaaatattttggaaaagttaaataaagctgatttgtgactgttaaaaaaaataaaagtacaatcatagta

SEQ ID NO: 461548 - DNA, 509 bp, Homo sapiens
gtaagttgcattcacgtgggaagcacaaagaattaaattcaaaacaatgaaacattagagaaaagcatggagttaaaacacaacagaatcagatgtttactatttctcattttaacactagtgctttgcgggcttctaataaagttgtactccaggaggctaagactgaaaagtgacactagtgaaaagtagcattgaaatagttccttagaaaagttgggtgaatgtggggcaaagatgccactaaactttaattttccatcgacacacaaattcaaagttttccagaactggcaagtaaaatggaagatccactcacaggacacatgcagtgtgtgaggggaatgcttttcagcacttcttgatggatgcacaaataatgccaatgtggtaaatgtctttggtaaatgtgcaatggaatgtagtggttgtgtgaaggaagaattttgttttcagcttcatttttgataaacacaagcagctctggactgtgtgaaaccatggagcac

SEQ ID NO: 461549 - DNA, 2294 bp, Homo sapiens
atgaatgaaaaaaattacacctttagaaaaagagttgttataaaaaagccttggttgcgtctgggggaagtgacagcacagaagagaccagagaatagcctgctggaggagaccctgcactttgaccatgctgtccggatggtgcctgtgattacagaggaaatacctttcaactggaagatatcattaaacacaggaaaagagatcaggaaaatccctgtaaacgtgttgcttgccacgaataactggcctctaccagtatcacattccagatgagcagaacagggaaaggattggaagacaagagaggggaggaacacacctcgctctctcctgctattggctgtgcctggctgcaagctagaaatgctgggtccattgcaaatggccacacatctaaggccctaccaccatgggaacagccactgggagataactagcagcttttaccatttgtcatttaattattttaaagttagaaactttttctttttgaatgtctgaaagagaatggcctgagaaatattttggaaaagttaaataaagctgatttgtgactgttaaaaaaaataaaagtacaatcatagtaaatgggcttttgtcacttattatattttaaacatgtttctagggcagaacataaccgatgaggagttgaaggagaaaaatgccgaactacaagaaaaacttcgacttgtagaatctgaaaagtctgagatccagctcaacgtaaaggaccttaaaaggaagctggaaagggcccagctcctgctgccacaggcgagcagctgcagccccgggggttgtgggagccccatccggctggggccatggtctagggatcatcagcagctgcaggtggaggctgaccgcctgggtaaggagctacagagtgtgtcagcaaagctccaagcccaggtggaagagaacgagttgtggaacctcctgaaccagcaacaagaggagaagatgtggaggcaggaggagaagatacaggagcaggaagagaagatgtgtgagcaggagctgaagataagggagcaggaggagaagatgtggaggcaggaggagaagatgcatgagcaggaagagaagatacgggagcaggaggacaagatgtggaggcaggaggagaagatacgggagcaggaagagaagatacgggagcaggaggagaagatgtggaggcaggaggagaagatacgggagcaggatgagaagatacaggagcaggaggaggagatgtggaggcaggaggagaagatacgggagcaggaggagaagaggcaggagaagatgtggaggcaggagaagaagatgcgcgagcaggatgagaagatacgggagcaggaggaggagatgtggaggcaggaggagaagatacgggagctggaggagatgatgcaagatcaggaggagaagctgcgggaggtggaggagaaaatgcaggaggaggaggaaaagatgcaggagcaggaggagaagatacagaggcaggaggagaagatccaggagcaggaggagaagacgtggaggcaggagaagctgctcaagcaggaagagaagatatgggagcaggaggagaagatgtggaggcaggaggagaagatgtgggaacaggaggagaagatgcaggaacaggaggagaagatgcagaggcaggaggagaagatgcgggagcaggaagtgaggctgtggcagcaggaggagaagatgcaggaacaggaggtgaggctgcaggagctggaggagaggctggggaagctggggcagaaggcggagctcttggggggagcaggcagagaatctggaagccagcgactacctaccctgacgcctatcctgcaggtggagctgaagagccaagaggctcagagtctgcagcagcagcaagaccactaccggggtcacctgcagcagcataactgaaggtgaaaggacagaatcaccatgtgttactggcacagatgcatcggctagtgaagaaagaagacattcaaactagtcccgctctgtcgcccagtctggagtgcagcagcgccatcatagctcactgccacctagaagccggggtgaagcaatcctcctccatcagccttcagagtagctgggactacctgcgcggcccaccacacccggctaatctttgtggtttttgttttgttttccgttctgggtttccgtcgggcgcagtggctcaggcctgcaatcccagcactttggaaggcagaggtgggcggatcacccgaggtcggagaccagcctgaccaacatgaagaaatcccgtctctact

SEQ ID NO: 461550 - DNA, 684 bp, Homo sapiens
agcgggtggggtgggggcggggcctggctgggcgccgggacgggaggagtcccggcggcgcctcggacttttgctcccacaagtcctgcctcggaggcgggggagctggaccagcagccgcctggagcgtccgagtcaccgtcgccggggctcccgcgctccccagaacggtgggacgcggggctcggcagccgccagcggaacatggcgccctggacgctgtggcgctgctgccagcgcgtcgtgggctgggtgccggtgctcttcatcaccttcgtggtcgtctggtcctactacgcgtacgtggtggagctctgcgtgtttactatttttggaaatgaagaaaatggaaagaccgttgtttaccttgtggctttccatctgttctttgttatgtttgtatggtcctattggatgacaattttcacatctcccgcttccccctccaaagagttctacttgtccaattctgaaaaggaacgttatgaaaaagaattcagccaagaaagacaacaagaaattttgagaagagcagcaagagctttacctatctataccacatcagcttcaaaaagcctcatgcagtctacaaaatagaacaggagctccaatgagctggacaggggaagtcggctttagaacaaggctgaagaaagtggaaaccaaagaacagaaagaagattg

SEQ ID NO: 461551 - DNA, 524 bp, Homo sapiens
tcttcaggaatgacattctctagcaataaaaggaatgaaccgttatgtttctaagctgaaaagaggaacaggtgggtaattatcctgccatacttaaatatagtggaaaatcctctattgagaatgtggataaatgaacaattgtaagttttgcatcataaactgagaacttccccctccaaagagttctacttgtccaattctgaaaaggaacgttatgaaaaagaattcagccaagaaagacaacaagaaattttgagaagagcagcaagagctttacctatctataccacatcagcttcaaaaactatcagatattgtgaaaaatgtcagctgattaaacctgatcatttactgaagtagtttgattggctggctaacttagaattattgtttcttgttttgtactgcaataggggttataattgtaagataaaaatgtgtgtgtgtttaagggaagtaggtggtggttaaaattcttggaaaattttcagaatactttaaaaataaagttccaagttaca

SEQ ID NO: 461552 - DNA, 3311 bp, Homo sapiens
atttgatacactctcatagttttgtgtcatccattgttagagaagaatgaggcacagtactatagtattgtatgaattgtggtgacagttgtcaaatttgtacagtgaactctgtaacccctcatttcagtctttttaccctcctttcaagttcctcctgggaggaggagaggagagaggcgagtccagtgaggtgtagaaatggaacgtgcaattcctacaacatcgaaagcttagttatgagcattaatacaaccatgtagtagagcaagtgcccaaggtttaaagggaacttggcagtataagaaatattttgggttctctctgctattttatagctttttttgttgaactttcaggggtatgtacatgggcagagaaacacaaaggtacatgtgctggagaatactggacacagtaggaagaagtataggtgtccagaagaaaatctaagaggaatattgtaatttgttaaaaaaaatagttttgagttttaacagcagttagaataaagcatgctgttgacttcactttcaaatttcagtgtaggtaatgactaaaaattactttgaaactttttacagtaatactgtaatagcttaaacagtgatttaaaatgcaatttaaactaggcaaaaaaaactttagagtaagttttcctcctggctgtcagttggaaattctaacctgagtggtcattttacattcccagtctcttgagaagtggattctactcttagacgcacagtctgaagtctgacttcctaacggcaacccctttatgactagacacatttctcctttttccttttaaaatctaagcgacaggaggtgttgcattaactccaaggaaaagtacagaataaacaatgtagaaatgtcactcctcatttacaccttttagacagacagacacacacacacacacaccccccccaaaataattgattgcttccagtgagtgggtggagatgaatctcagcagcatctgtgagtactacaggttggagcttcctgtctgtaaaatgggactgcaggggagggggtgttgtgaataagttggactggatgacttctaacattctgtgatgcctaattttgcaaaatcacttttcattcacccaataaatttttttcttcttttttccacagagttttgctctgtctcccaggcaggagtgcagtggcgggatcttggctcgctgcaacctctggcttccaggttcaatagagtctcctgcctcagcctcccaagtggctgggattacaggctcatgccaccatgcccggctaattttcacatttttagaagagacgaggtttcaccatgttgaccaggctgatcactaactcctgacctcaaataatccacccacctcagcactttgggaggccaaggctggcggatcacctgaggtcaggggttcgagattagcctggtcaaaatggcaaaaccctgtctccactaaaaatacaaaaaaaccccaaaactgtccaggcatggtggcacacgcctgtggtcccaactactcgggaggtggaggcaggagaatcacttgaacccaggaggtggaggtcgcagtgagccgagatcgtgccactgcactccagcctgggcgacgagtgaaactccatctcaaaaatatatatatatatcaattaccaactaaaaacataactccagtttggcagtttgcatattataaggagataaatgttaaaacatacttgactactttcagaaatgttctcctggtactttttgcatttctacattcagataaaaagatttgcatgcacctggctaacgccaagggaacttcatttttttcttcactattatgcactttcatggtatagtctttctcagttcttttaatttttgttatttaacatctttaatagcacagcaaacatcttttcagaaattttcagttaaagcctttgaattacttatctttgatttaatttacagccagcattttgccacgttctaaataatatttagctcaactgattcatacgtattaatgaccattctagcaaaggcctacaagtggtgtgggaatcagggaaaggctgcctctttggtatctcaactggtattgattattgctatcaactatttggggagaaaaaatcaaaatgaagccctgtcaaattttagaagtactatctttggtccttcaaacactttgtgatgacaccttaagaaaaataaagttgaagttcaggtcttgccattgccattacagacaaattaggagacttggtttacctgggaacaaatttacttgaatattcagtacctgaaactatgccaaaccaaagagcagctgcagtacattcgttattttaaatgaacaagtttacaaagtttattttcatctatacgtaaggatgatttttttaaaactttttacatattagtggttatgatccaatgtgtcatgagtgaatttaactgtaaggtggtttaaatcaaatatgcaatgtttacttgaattgtatttctattagcagattttgactatgtttacaggacggtttaaattaaggattatcaggcatgtgagatctttcagttatctttaaagtagatgtatattaagggcttagatttaggatctacatattctgggcattgaataggcagtaacttacaaataagttttgcttaccttttgttctagggactagcactgctatcaatggaaagtatttttaactaatctgttattaagaaagtcatatttttgcatttcagccaaaataaagaccgcctgtaataatctgttagaaacagataatacatgtctgaaatccatatgtttcatatgatctaaactgtattttccaatttaaattaaaaatgtaatatagattcagaaaggttcatatttttctaatgacttcattctatattattttgttaggttgcataaagaagcaaggaattgtacttgtattaaaagatgaagaaagctattaggtatatttgtacatgactgcaaatgagtctatgcccgtttaaaagaaaagatggacactattttaaagtgagctttaatatgcttttatataaacaaatttgaagtacagtttagtttggttgtgtttacctaacaagtaccataagccttgtgtttgttcttatttgtataatcctagcctgtgacttaatgttgatgctttgctttgtcttttggctggcctaacctacattgacatgtacacagaacattttaaaactttttttttcaaaagtcataatgaattactttattaataaacaaagtcttgtatttgaa

SEQ ID NO: 461553 - DNA, 3253 bp, Homo sapiens
atttgatacactctcatagttttgtgtcatccattgttagagaagaatgaggcacagtactatagtattgtatgaattgtggtgacagttgtcaaatttgtacagtgaactctgtaacccctcatttcagtctttttaccctcctttcaagttcctcctgggaggaggagaggagagaggcgagtccagtgaggtgtagaaatggaacgtgcaattcctacaacatcgaaagcttagttatgagcattaatacaaccatgtagtagagcaagtgcccaaggtttaaagggaacttggcagtataagaaatattttgggttctctctgctattttatagctttttttgttgaactttcaggggtatgtacatgggcagagaaacacaaaggtacatgtgctggagaatactggacacagtaggaagaagtataggtgtccagaagaaaatctaagaggaatattgtaatttgttaaaaaaaatagttttgagttttaacagcagttagaataaagcatgctgttgacttcactttcaaatttcagtgtaggtaatgactaaaaattactttgaaactttttacagtaatactgtaatagcttaaacagtgatttaaaatgcaatttaaactaggctggtcattttacattcccagtctcttgagaagtggattctactcttagacgcacagtctgaagtctgacttcctaacggcaacccctttatgactagacacatttctcctttttccttttaaaatctaagcgacaggaggtgttgcattaactccaaggaaaagtacagaataaacaatgtagaaatgtcactcctcatttacaccttttagacagacagacacacacacacacacaccccccccaaaataattgattgcttccagtgagtgggtggagatgaatctcagcagcatctgtgagtactacaggttggagcttcctgtctgtaaaatgggactgcaggggagggggtgttgtgaataagttggactggatgacttctaacattctgtgatgcctaattttgcaaaatcacttttcattcacccaataaatttttttcttcttttttccacagagttttgctctgtctcccaggcaggagtgcagtggcgggatcttggctcgctgcaacctctggcttccaggttcaatagagtctcctgcctcagcctcccaagtggctgggattacaggctcatgccaccatgcccggctaattttcacatttttagaagagacgaggtttcaccatgttgaccaggctgatcactaactcctgacctcaaataatccacccacctcagcactttgggaggccaaggctggcggatcacctgaggtcaggggttcgagattagcctggtcaaaatggcaaaaccctgtctccactaaaaatacaaaaaaaccccaaaactgtccaggcatggtggcacacgcctgtggtcccaactactcgggaggtggaggcaggagaatcacttgaacccaggaggtggaggtcgcagtgagccgagatcgtgccactgcactccagcctgggcgacgagtgaaactccatctcaaaaatatatatatatatcaattaccaactaaaaacataactccagtttggcagtttgcatattataaggagataaatgttaaaacatacttgactactttcagaaatgttctcctggtactttttgcatttctacattcagataaaaagatttgcatgcacctggctaacgccaagggaacttcatttttttcttcactattatgcactttcatggtatagtctttctcagttcttttaatttttgttatttaacatctttaatagcacagcaaacatcttttcagaaattttcagttaaagcctttgaattacttatctttgatttaatttacagccagcattttgccacgttctaaataatatttagctcaactgattcatacgtattaatgaccattctagcaaaggcctacaagtggtgtgggaatcagggaaaggctgcctctttggtatctcaactggtattgattattgctatcaactatttggggagaaaaaatcaaaatgaagccctgtcaaattttagaagtactatctttggtccttcaaacactttgtgatgacaccttaagaaaaataaagttgaagttcaggtcttgccattgccattacagacaaattaggagacttggtttacctgggaacaaatttacttgaatattcagtacctgaaactatgccaaaccaaagagcagctgcagtacattcgttattttaaatgaacaagtttacaaagtttattttcatctatacgtaaggatgatttttttaaaactttttacatattagtggttatgatccaatgtgtcatgagtgaatttaactgtaaggtggtttaaatcaaatatgcaatgtttacttgaattgtatttctattagcagattttgactatgtttacaggacggtttaaattaaggattatcaggcatgtgagatctttcagttatctttaaagtagatgtatattaagggcttagatttaggatctacatattctgggcattgaataggcagtaacttacaaataagttttgcttaccttttgttctagggactagcactgctatcaatggaaagtatttttaactaatctgttattaagaaagtcatatttttgcatttcagccaaaataaagaccgcctgtaataatctgttagaaacagataatacatgtctgaaatccatatgtttcatatgatctaaactgtattttccaatttaaattaaaaatgtaatatagattcagaaaggttcatatttttctaatgacttcattctatattattttgttaggttgcataaagaagcaaggaattgtacttgtattaaaagatgaagaaagctattaggtatatttgtacatgactgcaaatgagtctatgcccgtttaaaagaaaagatggacactattttaaagtgagctttaatatgcttttatataaacaaatttgaagtacagtttagtttggttgtgtttacctaacaagtaccataagccttgtgtttgttcttatttgtataatcctagcctgtgacttaatgttgatgctttgctttgtcttttggctggcctaacctacattgacatgtacacagaacattttaaaactttttttttcaaaagtcataatgaattactttattaataaacaaagtcttgtatttgaa

SEQ ID NO: 461554 - DNA, 2263 bp, Homo sapiens
cggtagtgttttgtaaaaaagttaaaatccacctgcaatctgcagccatatatctgccagaatcattccgcgcacccacgttttcatacggacctgatggaaatggtttctctcttggatgcagtaaaaattggagacaagtctttggtgatgaaaagaaatattggctacttccaatattttcaagcttgggtgatggttgcagttttccaactcgccttgtggggatggatccagaacaagcttctgttacaaaccagaatgagtatgccagaagatctaaactgcagaggtagaaagcagaaaacttggcaaatgacagtagtggctcaaatcaaccttttcctatcaaaccacttagtgaatcaaaaaaccgcttgttggacagtgaatctcagtggctggagaatggagctgaagaaggcatcgtcaaatcaggtgtatgaaaacattatagactggtattttcaattttcatttgcaagaaaatgatcagtggaatgaaataactgaagtataacagaagatatattttttaaaacggaaagccttttgcactccagcctgggcgacgagtgaaactccatctcaaaaatatatatatatatcaattaccaactaaaaacataactccagtttggcagtttgcatattataaggagataaatgttaaaacatacttgactactttcagaaatgttctcctggtactttttgcatttctacattcagataaaaagatttgcatgcacctggctaacgccaagggaacttcatttttttcttcactattatgcactttcatggtatagtctttctcagttcttttaatttttgttatttaacatctttaatagcacagcaaacatcttttcagaaattttcagttaaagcctttgaattacttatctttgatttaatttacagccagcattttgccacgttctaaataatatttagctcaactgattcatacgtattaatgaccattctagcaaaggcctacaagtggtgtgggaatcagggaaaggctgcctctttggtatctcaactggtattgattattgctatcaactatttggggagaaaaaatcaaaatgaagccctgtcaaattttagaagtactatctttggtccttcaaacactttgtgatgacaccttaagaaaaataaagttgaagttcaggtcttgccattgccattacagacaaattaggagacttggtttacctgggaacaaatttacttgaatattcagtacctgaaactatgccaaaccaaagagcagctgcagtacattcgttattttaaatgaacaagtttacaaagtttattttcatctatacgtaaggatgatttttttaaaactttttacatattagtggttatgatccaatgtgtcatgagtgaatttaactgtaaggtggtttaaatcaaatatgcaatgtttacttgaattgtatttctattagcagattttgactatgtttacaggacggtttaaattaaggattatcaggcatgtgagatctttcagttatctttaaagtagatgtatattaagggcttagatttaggatctacatattctgggcattgaataggcagtaacttacaaataagttttgcttaccttttgttctagggactagcactgctatcaatggaaagtatttttaactaatctgttattaagaaagtcatatttttgcatttcagccaaaataaagaccgcctgtaataatctgttagaaacagataatacatgtctgaaatccatatgtttcatatgatctaaactgtattttccaatttaaattaaaaatgtaatatagattcagaaaggttcatatttttctaatgacttcattctatattattttgttaggttgcataaagaagcaaggaattgtacttgtattaaaagatgaagaaagctattaggtatatttgtacatgactgcaaatgagtctatgcccgtttaaaagaaaagatggacactattttaaagtgagctttaatatgcttttatataaacaaatttgaagtacagtttagtttggttgtgtttacctaacaagtaccataagccttgtgtttgttcttatttgtataatcctagcctgtgacttaatgttgatgctttgctttgtcttttggctggcctaacctacattgacatgtacacagaacattttaaaactttttttttcaaaagtcataatgaattactttattaataaacaaagtcttgtatttgaa

SEQ ID NO: 461555 - DNA, 3469 bp, Homo sapiens
atttgatacactctcatagttttgtgtcatccattgttagagaagaatgaggcacagtactatagtattgtatgaattgtggtgacagttgtcaaatttgtacagtgaactctgtaacccctcatttcagtctttttaccctcctttcaagttcctcctgggaggaggagaggagagaggcgagtccagtgaggtgtagaaatggaacgtgcaattcctacaacatcgaaagcttagttatgagcattaatacaaccatgtagtagagcaagtgcccaaggtttaaagggaacttggcagtataagaaatattttgggttctctctgctattttatagctttttttgttgaactttcaggggtatgtacatgggcagagaaacacaaaggtacatgtgctggagaatactggacacagtaggaagaagtataggtgtccagaagaaaatctaagaggaatattgtaatttgttaaaaaaaatagttttgagttttaacagcagttagaataaagcatgctgttgacttcactttcaaatttcagtgtaggtaatgactaaaaattactttgaaactttttacagtaatactgtaatagcttaaacagtgatttaaaatgcaatttaaactaggcaaaaaaaactttagagtaagttttcctcctggctgtcagttggaaattctaacctgagtggtcattttacattcccagtctcttgagaagtggattctactcttagacgcacagtctgaagtctgacttcctaacggcaacccctttatgactagacacatttctcctttttccttttaaaatctaagcgacaggaggtgttgcattaactccaaggaaaagtacagaataaacaatgtagaaatgtcactcctcatttacaccttttagacagacagacacacacacacacacaccccccccaaaataattgattgcttccagtgagtgggtggagatgaatctcagcagcatctgtgagtactacaggttggagcttcctgtctgtaaaatgggactgcaggggagggggtgttgtgaataagttggactggatgacttctaacattctgtgatgcctaattttgcaaaatcacttttcattcacccaataaatttttttcttcttttttccacagagttttgctctgtctcccaggcaggagtgcagtggcgggatcttggctcgctgcaacctctggcttccaggttcaatagagtctcctgcctcagcctcccaagtggctgggattacaggctcatgccaccatgcccggctaattttcacatttttagaagagacgaggtttcaccatgttgaccaggctgatcactaactcctgacctcaaataatccacccacctcagcactttgggaggccaaggctggcggatcacctgaggtcaggggttcgagattagcctggtcaaaatggcaaaaccctgtctccactaaaaatacaaaaaaaccccaaaactgtccaggcatggtggcacacgcctgtggtcccaactactcgggaggtggaggcaggagaatcacttgaacccaggaggtggaggtcgcagtgagccgagatcgtgccactgcactccagcctgggcgacgagtgaaactccatctcaaaaatatatatatatatcaattaccaactaaaaacataactccagtttggcagtttgcatattataaggagataaatgttaaaacatacttgactactttcagaaatgttctcctggtactttttgcatttctacattcagataaaaagatttgcatgcacctggctaacgccaagggaacttcatttttttcttcactattatgcactttcatggtatagtctttctcagttcttttaatttttgttatttaacatctttaatagcacagcaaacatcttttcagaaattttcagttaaagcctttgaattacttatctttgatttaatttacagccagcattttgccacgttctaaataatatttagctcaactgattcatacgtattaatgaccattctagcaaaggcctacaagtggtgtgggaatcagggaaaggctgcctctttggtatctcaactggtattgattattgctatcaactatttggggagaaaaaatcaaaatgaagccctgtcaaattttagaagtactatctttggtccttcaaacactttgtgatgacaccttaagaaaaataaagttgaagttcaggtcttgccattgccattacagacaaattaggagacttggtttacctgggaacaaatttacttgaatattcagtacctgaaactatgccaaaccaaagagcagctgcagtacattcgttattttaaatgaacaagtttacaaagtttattttcatctatacgtaaggatgatttttttaaaactttttacatattagtggttatgatccaatgtgtcatgagtgaatttaactgtaaggtggtttaaatcaaatatgcaatgtttacttgaattgtatttctattagcagattttgactatgtttacaggacggtttaaattaaggattatcaggcatgtgagatctttcagttatctttaaagtagatgtatattaagggcttagatttaggatctacatattctgggcattgaataggcagtaacttacaaataagttttgcttaccttttgttctagggactagcactgctatcaatggaaagtatttttaactaatctgttattaagaaagtcatatttttgcatttcagccaaaataaagaccgcctgtaataatctgttagaaacagataatacatgtctgaaatccatatgtttcatatgatctaaactgtattttccaatttaaattaaaaatgtaatatagattcagaaaggttcatatttttctaatgacttcattctatattattttgttaggttgcataaagaagcaaggaattgtacttgtattaaaagatgaagaaagctattaggtatatttgtacatgactgcaaatgagtctatgcccgtttaaaagaaaagatggacactattttaaagtgagctttaatatgcttttatataaacaaatttgaagtacagtttagtttggttgtgtttacctaacaagtaccataagccttgtgtttgttcttatttgtataatcctagcctgtgacttaatgttgatgctttgctttgtcttttggctggcctaacctacattgacatgtacacagaacattttaaaactttttttttcaaaagtcataatgaattactttattaataaacaaagtcttgtatttgaatggttagcatttggtcccacccagatctcaatttgagccggatcttccacaattcccattgttgggcgagggtccctctcggacatggccgatccagggcgtgcaatcactataactgttctgggagtgcccactggcctcaggcttgatcgtttctc

SEQ ID NO: 461556 - DNA, 3207 bp, Homo sapiens
  misc_feature (3204)..(3204): n is a, c, g, or t
atttgatacactctcatagttttgtgtcatccattgttagagaagaatgaggcacagtactatagtattgtatgaattgtggtgacagttgtcaaatttgtacagtgaactctgtaacccctcatttcagtctttttaccctcctttcaagttcctcctgggaggaggagaggagagaggcgagtccagtgaggtgtagaaatggaacgtgcaattcctacaacatcgaaagcttagttatgagcattaatacaaccatgtagtagagcaagtgcccaaggtttaaagggaacttggcagtataagaaatattttgggttctctctgctattttatagctttttttgttgaactttcaggggtatgtacatgggcagagaaacacaaaggtacatgtgctggagaatactggacacagtaggaagaagtataggtgtccagaagaaaatctaagaggaatattgtaatttgttaaaaaaaatagttttgagttttaacagcagttagaataaagcatgctgttgacttcactttcaaatttcagtgtaggtaatgactaaaaattactttgaaactttttacagtaatactgtaatagcttaaacagtgatttaaaatgcaatttaaactaggcaaaaaaaactttagagtaagttttcctcctggctgtcagttggaaattctaacctgagtggtcattttacattcccagtctcttgagaagtggattctactcttagacgcacagtctgaagtctgacttcctaacggcaacccctttatgactagacacatttctcctttttccttttaaaatctaagcgacaggaggtgttgcattaactccaaggaaaagtacagaataaacaatgtagaaatgtcactcctcatttacaccttttagacagacagacacacacacacacacaccccccccaaaataattgattgcttccagtgagtgggtggagatgaatctcagcagcatctgtgagtactacaggttggagcttcctgtctgtaaaatgggactgcaggggagggggtgttgtgaataagttggactggatgacttctaacattctgtgatgcctaattttgcaaaatcacttttcattcacccaataaatttttttcttcttttttccacagagttttgctctgtctcccaggcaggagtgcagtggcgggatcttggctcgctgcaacctctggcttccaggttcaatagagtctcctgcctcagcctcccaagtggctgggattacaggctcatgccaccatgcccggctaattttcacatttttagaagagacgaggtttcaccatgttgaccaggctgatcactaactcctgacctcaaataatccacccacctcagcactttgggaggccaaggctggcggatcacctgaggtcaggggttcgagattagcctggtcaaaatggcaaaaccctgtctccactaaaaatacaaaaaaaccccaaaactgtccaggcatggtggcacacgcctgtggtcccaactactcgggaggtggaggcaggagaatcacttgaacccaggaggtggaggtcgcagtgagccgagatcgtgccactgcactccagcctgggcgacgagtgaaactccatctcaaaaatatatatatatatcaattaccaactaaaaacataactccagtttggcagtttgcatattataaggagataaatgttaaaacatacttgactactttcagaaatgttctcctggtactttttgcatttctacattcagataaaaagatttgcatgcacctggctaacgccaagggaacttcatttttttcttcactattatgcactttcatggtatagtctttctcagttcttttaatttttgttatttaacatctttaatagcacagcaaacatcttttcagaaattttcagttaaagcctttgaattacttatctttgatttaatttacagccagcattttgccacgttctaaataatatttagctcaactgattcatacgtattaatgaccattctagcaaaggcctacaagtggtgtgggaatcagggaaaggctgcctctttggtatctcaactggtattgattattgctatcaactatttggggagaaaaaatcaaaatgaagccctgtcaaattttagaagtactatctttggtccttcaaacactttgtgatgacaccttaagaaaaataaagttgaagttcaggtcttgccattgccattacagacaaattaggagacttggtttacctgggaacaaatttacttgaatattcagtacctgaaactatgccaaaccaaagagcagctgcagtacattcgttattttaaatgaacaagtttacaaagtttattttcatctatacgtaaggatgatttttttaaaactttttacatattagtggttatgatccaatgtgtcatgagtgaatttaactgtaaggtggtttaaatcaaatatgcaatgtttacttgaattgtatttctattagcagattttgactatgtttacaggacggtttaaattaaggattatcaggcatgtgagatctttcagttatctttaaagtagatgtatattaagggcttagatttaggatctacatattctgggcattgaataggcagtaacttacaaataagttttgcttaccttttgttctagggactagcactgctatcaatggaaagtatttttaactaatctgttattaagaaagtcatatttttgcatttcagccaaaataaagaccgcctgtaataatctgttagaaacagataatacatgtctgaaatccatatgtttcatatgatctaaactgtattttccaatttaaattaaaaatgtaatatagattcagaaaggttcatatttttctaatgacttcattctatattattttgttaggttgcataaagaagcaaggaattgtacttgtattaaaagatgaagaaagctattaggtatatttgtacatgactgcaaatgagtctatgcccgtttaaaagaaaagatggacactattttaaagtgagctttaatatgcttttatataaacaaatttgaagtacagtttagtttggttgtgtttacctaacaagtaccataagccttgtgtttgttcttatttgtataatcctagcctgtgacttaatgtataaaaaaaaaataaaantaa

SEQ ID NO: 461557 - DNA, 3081 bp, Homo sapiens
atttgatacactctcatagttttgtgtcatccattgttagagaagaatgaggcacagtactatagtattgtatgaattgtggtgacagttgtcaaatttgtacagtgaactctgtaacccctcatttcagtctttttaccctcctttcaagttcctcctgggaggaggagaggagagaggcgagtccagtgaggtgtagaaatggaacgtgcaattcctacaacatcgaaagcttagttatgagcattaatacaaccatgtagtagagcaagtgcccaaggtttaaagggaacttggcagtataagaaatattttgggttctctctgctattttatagctttttttgttgaactttcaggggtatgtacatgggcagagaaacacaaaggtacatgtgctggagaatactggacacagtaggaagaagtataggtgtccagaagaaaatctaagaggaatattgtaatttgttaaaaaaaatagttttgagttttaacagcagttagaataaagcatgctgttgacttcactttcaaatttcagtgtaggtaatgactaaaaattactttgaaactttttacagtaatactgtaatagcttaaacagtgatttaaaatgcaatttaaactaggcaaaaaaaactttagagtaagttttcctcctggctgtcagttggaaattctaacctgagtggtcattttacattcccagtctcttgagaagtggattctactcttagacgcacagtctgaagtctgacttcctaacggcaacccctttatgactagacacatttctcctttttccttttaaaatctaagcgacaggaggtgttgcattaactccaaggaaaagtacagaataaacaatgtagaaatgtcactcctcatttacaccttttagacagacagacacacacacacacacaccccccccaaaataattgattgcttccagtgagtgggtggagatgaatctcagcagcatctgtgagtactacaggttggagcttcctgtctgtaaaatgggactgcaggggagggggtgttgtgaataagttggactggatgacttctaacattctgtgatgcctaattttgcaaaatcacttttcattcacccaataaatttttttcttcttttttccacagagttttgctctgtctcccaggcaggagtgcagtggcgggatcttggctcgctgcaacctctggcttccaggttcaatagagtctcctgcctcagcctcccaagtggctgggattacaggctcatgccaccatgcccggctaattttcacatttttagaagagacgaggtttcaccatgttgaccaggctgatcactaactcctgacctcaaataatccacccacctcagcactttgggaggccaaggctggcggatcacctgaggtcaggggttcgagattagcctggtcaaaatggcaaaaccctgtctccactaaaaatacaaaaaaaccccaaaactgtccaggcatggtggcacacgcctgtggtcccaactactcgggaggtggaggcaggagaatcacttgaacccaggaggtggaggtcgcagtgagccgagatcgtgccactgcactccagcctgggcgacgagtgaaactccatctcaaaaatatatatatatatcaattaccaactaaaaacataactccagtttggcagtttgcatattataaggagataaatgttaaaacatacttgactactttcagaaatgttctcctggtactttttgcatttctacattcagataaaaagatttgcatgcacctggctaacgccaagggaacttcatttttttcttcactattatgcactttcatggtatagtctttctcagttcttttaatttttgttatttaacatctttaatagcacagcaaacatcttttcagaaattttcagttaaagcctttgaattacttatctttgatttaatttacagccagcattttgccacgttctaaataatatttagctcaactgattcatacgtattaatgaccattctagcaaaggcctacaagtggtgtgggaatcagggaaaggctgcctctttggtatctcaactggtattgattattgctatcaactatttggggagaaaaaatcaaaatgaagccctgtcaaattttagaagtactatctttggtccttcaaacactttgtgatgacaccttaagaaaaataaagttgaagttcaggtcttgccattgccattacagacaaattaggagacttggtttacctgggaacaaatttacttgaatattcagtacctgaaactatgccaaaccaaagagcagctgcagtacattcgttattttaaatgaacaagtttacaaagtttattttcatctatacgtaaggatgatttttttaaaactttttacatattagtggttatgatccaatgtgtcatgagtgaatttaactgtaaggtggtttaaatcaaatatgcaatgtttacttgaattgtatttctattagcagattttgactatgtttacaggacggtttaaattaaggattatcaggcatgtgagatctttcagttatctttaaagtagatgtatattaagggcttagatttaggatctacatattctgggcattgaataggcagtaacttacaaataagttttgcttaccttttgttctagggactagcactgctatcaatggaaagtatttttaactaatctgttattaagaaagtcatatttttgcatttcagccaaaataaagaccgcctgtaataatctgttagaaacagataatacatgtctgaaatccatatgtttcatatgatctaaactgtattttccaatttaaattaaaaatgtaatatagattcagaaaggttcatatttttctaatgacttcattctatattattttgttaggttgcataaagaagcaaggaattgtacttgtattaaaagatgaagaaagctattaggtatatttgtacatgactgcaaatgagtctatgcccgtttaaaagaaaagatggacacttgcatccagagacctttgcatccagagggg

SEQ ID NO: 461558 - DNA, 2901 bp, Homo sapiens
atttgatacactctcatagttttgtgtcatccattgttagagaagaatgaggcacagtactatagtattgtatgaattgtggtgacagttgtcaaatttgtacagtgaactctgtaacccctcatttcagtctttttaccctcctttcaagttcctcctgggaggaggagaggagagaggcgagtccagtgaggtgtagaaatggaacgtgcaattcctacaacatcgaaagcttagttatgagcattaatacaaccatgtagtagagcaagtgcccaaggtttaaagggaacttggcagtataagaaatattttgggttctctctgctattttatagctttttttgttgaactttcaggggtatgtacatgggcagagaaacacaaaggtacatgtgctggagaatactggacacagtaggaagaagtataggtgtccagaagaaaatctaagaggaatattgtaatttgttaaaaaaaatagttttgagttttaacagcagttagaataaagcatgctgttgacttcactttcaaatttcagtgtaggtaatgactaaaaattactttgaaactttttacagtaatactgtaatagcttaaacagtgatttaaaatgcaatttaaactaggcaaaaaaaactttagagtaagttttcctcctggctgtcagttggaaattctaacctgagtggtcattttacattcccagtctcttgagaagtggattctactcttagacgcacagtctgaagtctgacttcctaacggcaacccctttatgactagacacatttctcctttttccttttaaaatctaagcgacaggaggtgttgcattaactccaaggaaaagtacagaataaacaatgtagaaatgtcactcctcatttacaccttttagacagacagacacacacacacacacaccccccccaaaataattgattgcttccagtgagtgggtggagatgaatctcagcagcatctgtgagtactacaggttggagcttcctgtctgtaaaatgggactgcaggggagggggtgttgtgaataagttggactggatgacttctaacattctgtgatgcctaattttgcaaaatcacttttcattcacccaataaatttttttcttcttttttccacagagttttgctctgtctcccaggcaggagtgcagtggcgggatcttggctcgctgcaacctctggcttccaggttcaatagagtctcctgcctcagcctcccaagtggctgggattacaggctcatgccaccatgcccggctaattttcacatttttagaagagacgaggtttcaccatgttgaccaggctgatcactaactcctgacctcaaataatccacccacctcagcactttgggaggccaaggctggcggatcacctgaggtcaggggttcgagattagcctggtcaaaatggcaaaaccctgtctccactaaaaatacaaaaaaaccccaaaactgtccaggcatggtggcacacgcctgtggtcccaactactcgggaggtggaggcaggagaatcacttgaacccaggaggtggaggtcgcagtgagccgagatcgtgccactgcactccagcctgggcgacgagtgaaactccatctcaaaaatatatatatatatcaattaccaactaaaaacataactccagtttggcagtttgcatattataaggagataaatgttaaaacatacttgactactttcagaaatgttctcctggtactttttgcatttctacattcagataaaaagatttgcatgcacctggctaacgccaagggaacttcatttttttcttcactattatgcactttcatggtatagtctttctcagttcttttaatttttgttatttaacatctttaatagcacagcaaacatcttttcagaaattttcagttaaagcctttgaattacttatctttgatttaatttacagccagcattttgccacgttctaaataatatttagctcaactgattcatacgtattaatgaccattctagcaaaggcctacaagtggtgtgggaatcagggaaaggctgcctctttggtatctcaactggtattgattattgctatcaactatttggggagaaaaaatcaaaatgaagccctgtcaaattttagaagtactatctttggtccttcaaacactttgtgatgacaccttaagaaaaataaagttgaagttcaggtcttgccattgccattacagacaaattaggagacttggtttacctgggaacaaatttacttgaatattcagtacctgaaactatgccaaaccaaagagcagctgcagtacattcgttattttaaatgaacaagtttacaaagtttattttcatctatacgtaaggatgatttttttaaaactttttacatattagtggttatgatccaatgtgtcatgagtgaatttaactgtaaggtggtttaaatcaaatatgcaatgtttacttgaattgtatttctattagcagattttgactatgtttacaggacggtttaaattaaggattatcaggcatgtgagatctttcagttatctttaaagtagatgtatattaagggcttagatttaggatacaggtaataggtatgacgaatgagtacgaaatttgagatcggtatctcgcgtgacgatcgatcgttgtgtgagtgataagagaagagtatacaactgggaagaaagggcagtcttagtatagttatcattgtaatatatgttcttgcagctcttgctccagacaggacgcaggtggtaatctactggctgcacaggattcagatactgtgaggggaatggtacttatagtgatgattacggccagctatcacatggatcagcttcaggttat

SEQ ID NO: 461559 - DNA, 1875 bp, Homo sapiens
agcgggtggggtgggggcggggcctggctgggcgccgggacgggaggagtcccggcggcgcctcggacttttgctcccacaagtcctgcctcggaggcgggggagctggaccagcagccgcctggagcgtccgagtcaccgtcgccggggctcccgcgctccccagaacggtgggacgcggggctcggcagccgccagcggaacatggcgccctggacgctgtggcgctgctgccagcgcgtcgtgggctgggtgccggtgctcttcatcaccttcgtggtcgtctggtcctactacgcgtacgtggtggagctctgcgtgtttactatttttggaaatgaagaaaatggaaagaccgttgtttaccttgtggctttccatctgttctttgttatgtttgtatggtcctattggatgacaattttcacatctcccgcttccccctccaaagagttctacttgtccaattctgaaaaggaacgttatgaaaaagaattcagccaagaaagacaacaagaaattttgagaagagcagcaagagctttacctatctataccacatcagcttcaaaaactatcagatattgtgaaaaatgtcagctgattaaacctgatcgggcgcatcactgctcagcctgtgactcatgtattcttaagatggatcatcactgtccttgggtgaataactgtgtgggattttctaattacaaattcttcctgctgtttttattgtattccctattatattgccttttcgtggctgcaacagttttagagtactttataaaattttggacgaatgaactgacagatacacgtgcaaaattccacgtactttttcttttctttgtgtctgcaatgttcttcatcagcgtcctctcacttttcagctaccactgctggctagttggaaaaaatagaacaacaatagaatcattccgcgcacccacgttttcatacggacctgatggaaatggtttctctcttggatgcagtaaaaattggagacaagtctttggtgatgaaaagaaatattggctacttccaatattttcaagcttgggtgatggttgcagttttccaactcgccttgtggggatggatccagaacaagcttctgttacaaaccagaatgagtatgccagaagtagtggctcaaatcaaccttttcctatcaaaccacttagtgaatcaaaaaaccgcttgttggacagtgaatctcagtggctggagaatggagctgaagaaggcatcgtcaaatcagggacaaataaccatgtaacagtggcaatagaaaattgagtaccacttgttcataactaaccatttgaataagagcaaggtgtatgaaaacattatagactggtattttcaattttcatttgcaagaaaatgatcagtggaatgaaataactgaagtataacagaagatatattttttaaaacggaaagcctttgtacagttcctgggattcacagaagcactactccagagcagaatgatgccttaatcttaagtgtccatttgtgcagcattgacttagagctacaaaagtgacttaatgttattctggaaataatacttacctgttatgagttgctataatatgagctgtcatcacattttaacatgcatatgtattttttgatacctgaattacattattaggaataagtatccatatacattttcactccaaaaacacaagcttaaaaactttaaagtacatctagggcaaatggtggctgaaagtgaataatattcaaattactgttgcttgtactgtataaggaaaactgcttttttaaattgggtatttgctaatttataattactattttatacttttcaacatttttaataactttttttat

SEQ ID NO: 461560 - DNA, 374 bp, Homo sapiens
tcctagtacagcataaattttatggttgctactgtaggtttataatttgtttataatttggcctaatttccatcagccatactaatattggattttaaaaggaggcaactttttttctttttgaaccaaaggaatgagttagctttgaaaacataatttgggatattatagtatggattcttctacctttgtttcaactccttagtaatcttgattctagcaaactagaatgagatttaagagataccaattattgctgggtgtggtggctcatgcctgtaatcccaggcactttgggaggccaaggctggcggatcacctgaggtcaggggttcgagattagcctggtcaaaatggcaaaaccctgtctccac

SEQ ID NO: 461561 - DNA, 756 bp, Homo sapiens
cgcacctcggcggtctctggttgtttaaagaaagaccgttgtttaccttgtggctttccatctgttctttgttatgtttgtatggtcctattggatgacaattttcacatctcccgcttccccctccaaagagttctacttgtccaattctgaaaaggaacgttatgaaaaagaattcagccaagaaagacaacaagaaattttgagaagagcagcaagagctttacctatctataccacatcagcttcaaaaactatcagatattgtgaaaaatgtcagctgattaaacctgatcgggcgcatcactgctcagcctgtgactcgataggaagcaccacgtgggaaccagagcctttattgtggttcctgtggggaaggcagggtaagcagattttggattggctggctgcaggaattgcagaggactcaggtatcggggctatctctagttgtcttgtacctggtcctgggatgatgaaggcagaggactgctgccttctggagtgtaaaaggcagatagaagaggtggttctcagtgtgggatctggattgtttagtttatgtatgaaagatgtgctcctggctagaaaaataagtctacgctaaatcactgaatcattttttccccttagatctaaactgcagaggtagaaagcagaaaacttggcaaatgacagggtcccagcttttgcttagttgaaaataattcttgaaaagcattacatcctttgctgccttagttaaaaaagagcaca

SEQ ID NO: 461562 - DNA, 3089 bp, Homo sapiens
agcgggtggggtgggggcggggcctggctgggcgccgggacgggaggagtcccggcggcgcctcggacttttgctcccacaagtcctgcctcggaggcgggggagctggaccagcagccgcctggagcgtccgagtcaccgtcgccggggctcccgcgctccccagaacggtgggacgcggggctcggcagccgccagcggaacatggcgccctggacgctgtggcgctgctgccagcgcgtcgtgggctgggtgccggtgctcttcatcaccttcgtggtcgtctggtcctactacgcgtacgtggtggagctctgcgtgtttactatttttggaaatgaagaaaatggaaagaccgttgtttaccttgtggctttccatctgttctttgttatgtttgtatggtcctattggatgacaattttcacatctcccgcttccccctccaaagagttctacttgtccaattctgaaaaggaacgttatgaaaaagaattcagccaagaaagacaacaagaaattttgagaagagcagcaagagctttacctatctataccacatcagcttcaaaaactatcagatattgtgaaaaatgtcagctgattaaacctgatcgggcgcatcactgctcagcctgtgactcatgtattcttaagatggatcatcactgtccttgggtgaataactgtgtgggattttctaattacaaattcttcctgctgtttttattgtattccctattatattgccttttcgtggctgcaacagttttagagtactttataaaattttggacgaatgaactgacagatacacgtgcaaaattccacgtactttttcttttctttgtgtctgcaatgttcttcatcagcgtcctctcacttttcagctaccactgctggctagttggaaaaaatagaacaacaatagaatcattccgcgcacccacgttttcatacggacctgatggaaatggtttctctcttggatgcagtaaaaattggagacaagtctttggtgatgaaaagaaatattggctacttccaatattttcaagcttgggtgatggttgcagttttccaactcgccttgtggggatggatccagaacaagcttctgttacaaaccagaatgagtatgccagaagtagtggctcaaatcaaccttttcctatcaaaccacttagtgaatcaaaaaaccgcttgttggacagtgaatctcagtggctggagaatggagctgaagaaggcatcgtcaaatcaggtgtatgaaaacattatagactggtattttcaattttcatttgcaagaaaatgatcagtggaatgaaataactgaagtataacagaagatatattttttaaaacggaaagccttttgcactccagcctgggcgacgagtgaaactccatctcaaaaatatatatatatatcaattaccaactaaaaacataactccagtttggcagtttgcatattataaggagataaatgttaaaacatacttgactactttcagaaatgttctcctggtactttttgcatttctacattcagataaaaagatttgcatgcacctggctaacgccaagggaacttcatttttttcttcactattatgcactttcatggtatagtctttctcagttcttttaatttttgttatttaacatctttaatagcacagcaaacatcttttcagaaattttcagttaaagcctttgaattacttatctttgatttaatttacagccagcattttgccacgttctaaataatatttagctcaactgattcatacgtattaatgaccattctagcaaaggcctacaagtggtgtgggaatcagggaaaggctgcctctttggtatctcaactggtattgattattgctatcaactatttggggagaaaaaatcaaaatgaagccctgtcaaattttagaagtactatctttggtccttcaaacactttgtgatgacaccttaagaaaaataaagttgaagttcaggtcttgccattgccattacagacaaattaggagacttggtttacctgggaacaaatttacttgaatattcagtacctgaaactatgccaaaccaaagagcagctgcagtacattcgttattttaaatgaacaagtttacaaagtttattttcatctatacgtaaggatgatttttttaaaactttttacatattagtggttatgatccaatgtgtcatgagtgaatttaactgtaaggtggtttaaatcaaatatgcaatgtttacttgaattgtatttctattagcagattttgactatgtttacaggacggtttaaattaaggattatcaggcatgtgagatctttcagttatctttaaagtagatgtatattaagggcttagatttaggatctacatattctgggcattgaataggcagtaacttacaaataagttttgcttaccttttgttctagggactagcactgctatcaatggaaagtatttttaactaatctgttattaagaaagtcatatttttgcatttcagccaaaataaagaccgcctgtaataatctgttagaaacagataatacatgtctgaaatccatatgtttcatatgatctaaactgtattttccaatttaaattaaaaatgtaatatagattcagaaaggttcatatttttctaatgacttcattctatattattttgttaggttgcataaagaagcaaggaattgtacttgtattaaaagatgaagaaagctattaggtatatttgtacatgactgcaaatgagtctatgcccgtttaaaagaaaagatggacactattttaaagtgagctttaatatgcttttatataaacaaatttgaagtacagtttagtttggttgtgtttacctaacaagtaccataagccttgtgtttgttcttatttgtataatcctagcctgtgacttaatgttgatgctttgctttgtcttttggctggcctaacctacattgacatgtacacagaacattttaaaactttttttttcaaaagtcataatgaattactttattaataaacaaagtcttgtatttgaa

SEQ ID NO: 461563 - DNA, 1797 bp, Homo sapiens
agcgggtggggtgggggcggggcctggctgggcgccgggacgggaggagtcccggcggcgcctcggacttttgctcccacaagtcctgcctcggaggcgggggagctggaccagcagccgcctggagcgtccgagtcaccgtcgccggggctcccgcgctccccagaacggtgggacgcggggctcggcagccgccagcggaacatggcgccctggacgctgtggcgctgctgccagcgcgtcgtgggctgggtgccggtgctcttcatcaccttcgtggtcgtctggtcctactacgcgtacgtggtggagctctgcgtgtttactatttttggaaatgaagaaaatggaaagaccgttgtttaccttgtggctttccatctgttctttgttatgtttgtatggtcctattggatgacaattttcacatctcccgcttccccctccaaagagttctacttgtccaattctgaaaaggaacgttatgaaaaagaattcagccaagaaagacaacaagaaattttgagaagagcagcaagagctttacctatctataccacatcagcttcaaaaactatcagatattgtgaaaaatgtcagctgattaaacctgatcgggcgcatcactgctcagcctgtgactcatgtattcttaagatggatcatcactgtccttgggtgaataactgtgtgggattttctaattacaaattcttcctgctgtttttattgtattccctattatattgccttttcgtggctgcaacagttttagagtactttataaaattttggacgaatgaactgacagatacacgtgcaaaattccacgtactttttcttttctttgtgtctgcaatgttcttcatcagcgtcctctcacttttcagctaccactgctggctagttggaaaaaatagaacaacaatagaatcattccgcgcacccacgttttcatacggacctgatggaaatggtttctctcttggatgcagtaaaaattggagacaagtctttggtgatgaaaagaaatattggctacttccaatattttcaagcttgggtgatggttgcagttttccaactcgccttgtggggatggatccagaacaagcttctgttacaaaccagaatgagtatgccagaagtagtggctcaaatcaaccttttcctatcaaaccacttagtgaatcaaaaaaccgcttgttggacagtgaatctcagtggctggagaatggagctgaagaaggcatcgtcaaatcaggtgtatgaaaacattatagactggtattttcaattttcatttgcaagaaaatgatcagtggaatgaaataactgaagtataacagaagatatattttttaaaacggaaagcctttgtacagttcctgggattcacagaagcactactccagagcagaatgatgccttaatcttaagtgtccatttgtgcagcattgacttagagctacaaaagtgacttaatgttattctggaaataatacttacctgttatgagttgctataatatgagctgtcatcacattttaacatgcatatgtattttttgatacctgaattacattattaggaataagtatccatatacattttcactccaaaaacacaagcttaaaaactttaaagtacatctagggcaaatggtggctgaaagtgaataatattcaaattactgttgcttgtactgtataaggaaaactgcttttttaaattgggtatttgctaatttataattactattttatacttttcaacatttttaataactttttttat

SEQ ID NO: 461564 - DNA, 1357 bp, Homo sapiens
  misc_feature (40)..(40): n is a, c, g, or t
  misc_feature (43)..(44): n is a, c, g, or t
  misc_feature (47)..(47): n is a, c, g, or t
taagaaattactactcacataaattacatttgtgaggtangtnnaangcggccaggttccaagtgtggtgagggatctgagggatttctgggccgccagaatgcattcaggtggagccaagcatccaggttgggtagcagaaactacaatgtatacatgcttctcccaggaagccaggcaggggccatgtaagaggctggtggacaggcatgcctacaggatagacatgtcccaatcctgcgggctggagcccatgcgagggtctgcagtctttgttccggatggggaactactgcttcagctggttacccaggtgccccgatggggaaaggaaggaaatggtgagaatcttcagcacagcggatcacatcaccctggaagagaccagtcctgcctgcgcatagcacaagcagccgcaggctagaggcagtcatgtcaggcctcctccatacagcatctctcctgcttttttttcaaacggccctaatcacttaatttggtcatcttccctgtcacaatggggcacctggcgctatagacacttgggaaacacacagatctgggatcctacagtgtccaggtgaagacgccgggagtcagagaggaaagtcttttgaagcctccaaaaggaatgcacaggaccccacttgaagaggtggcgtgcccagtggcggatacaggccccacacatcgcagcagtaaacagggactccacggtgtccagctctccagcctggggtttctcatcacccagtgattccaaaagaaacgatctacaatggcatgactaagttccagaaacaaataaacaaaatactgagggaagcccattggtcactttgattcttcaaaggtgacaattgtccctccctgaaatcttatgagtgcatgaacagactattctaatgtaaatgaaattcacactaaaactgattgaaagatgattctgtttccaaggtactttgtattctcaaattgcatctgcttaccctggccccctcaaaatggaagagtgatgactatttgtcttcgtaacactgtggggacacagagccttaaatggaagagtgtcaaaagcaacattccataaagggctgtcacttccaattttcaagcgaggttggaaaccaaccatgatgtatgaaacactgttggccaaagtgcacaattagtaatacaaaatgaataatataaactattgtaaatatgtgtggacatcgtggcaatttggacatcaaaaacactgccaaattcagaaagaggaagctgtaaactcatggctgttaggaagcttaacttctgtgtactagaacctatcaaaattaaatttctccatgtcaatccgtccaaacaaaca

SEQ ID NO: 461565 - DNA, 1297 bp, Homo sapiens
gatccctgatacggcctctaccctggagcctgtcctgacaccttaattgctccttcctcttgaatggtccttgtggaccagcttcttaactggccccttctctccacgctgctgacggcagtgattccaggctcccattgctgcatgtcttaagtccagggcactgagtggatgatgcaggctgtgcacagccgctgcacaccctggtgccacggaacctgcacgaaccccatggagtgtgctcgggtgttccacacaggtggggcaaggctggtgctgtgtggaaagaactgggagaggctagagaacctatatgatgccttgatcagcgtggctgaccccagcaagcagacattcaccccaaagctggtcctgttggacctctcagacatcagctgtgtcccagatgtggcaaaagaagtcctggattgctatggctgtgtggacatcctcatcaacaatgccagtgtgaaggtgaaggggcctgcccataagatttctctggagctcgacaaaaagatcatggatgccaattactttggccccatcacattgacgaaagccctgcttcccaacatgatctcccggagaacaggccaaatcgtgttagtgaataatatccaagggaagtttggaatcccgttccgtacgacttacgctgcctccaagcacgcagccctgggcttctttgactgcctccgagccgaagtggaggaatacgatgttgtcatcagcaccgtgagcccgactttcatccggtcgtaccacgtgtatccagagcaaggaaactgggaagcttccatttggaaattctttttcaggaagctgacctacggcgtgcacccagtagaggtggcggaggaggtgatgcgcaccgtgcggaggaagaagcaagaggtgtttatggccaaccccatccccaaggccgccgtgtacgtccgcaccttcttcccggagttctttttcgccgtggtggcctgtggggtgaaggagaagctcaatgtcccggaggaggggtaactgcaggaggccaaatgggccaccccttggaaataaaggtttttctggcacggtgggctgccagcagaatgtggccacgacccagatccacgctgtagggtccttacctgttccctttagggctctgcctggtcacaggttccagagggagcagggccctgctgacatctggatttcagacttccagcctccagggctgtgaggcaataggtttctgttatttcaagcaacccaatttgtggcaatttgttacagtagccctagaacactaatagac

SEQ ID NO: 461566 - DNA, 1141 bp, Homo sapiens
gatccctgatacggcctctaccctggagcctgtcctgacaccttaattgctccttcctcttgaatggtccttgtggaccagcttcttaactggccccttctctccacgctgctgacggcagtgattccaggctcccattgctgcatgtcttaagtccagggcactgagtggatgatgcaggctgtgcacagccgctgcacaccctggtgccacggaacctgcacgaaccccatggagtgtgctcgggtgttccacacaggtggggcaaggctggtgctgtgtggaaagaactgggagaggctagagaacctatatgatgccttgatcagcgtggctgaccccagcaagcagacattcaccccaaagctggtcctgttggacctctcagacatcagctgtgtcccagatgtggcaaaagaagtcctggattgctatggctgtgtggacatcctcatcaacaatgccagtgtgaaggtgaaggggcctgcccataagatttctctggagctcgacaaaaagatcatggatgccaattactttggccccatcacattgacgaaagccctgcttcccaacatgatctcccggagaacaggccaaatcgtgttagtgaataatatccaagggaagtttggaatcccgttccgtacgactttctttttcaggaagctgacctacggcgtgcacccagtagaggtggcggaggaggtgatgcgcaccgtgcggaggaagaagcaagaggtgtttatggccaaccccatccccaaggccgccgtgtacgtccgcaccttcttcccggagttctttttcgccgtggtggcctgtggggtgaaggagaagctcaatgtcccggaggaggggtaactgcaggaggccaaatgggccaccccttggaaataaaggtttttctggcacggtgggctgccagcagaatgtggccacgacccagatccacgctgtagggtccttacctgttccctttagggctctgcctggtcacaggttccagagggagcagggccctgctgacatctggatttcagacttccagcctccagggctgtgaggcaataggtttctgttatttcaagcaacccaatttgtggcaatttgttacagtagccctagaacactaatagac

SEQ ID NO: 461567 - DNA, 5811 bp, Homo sapiens
gtgtgggtctgcacaccctgggggaggcagagggcctcttggtagacacggtcatctcagacctcggtcagtacctccttccctctgcaggccccctccctctgtccatctgcctcctcccttgggcttgctgcctctacatgccctgatctgaaacctgcctcccctcctcatggagccctccaagatgctcctagccccagctctctggtcccgcagcaacttctggtgccagattctgccttctcagaagtctgggaggcagggccccacctggccatagccttcttggtctgctctaggcactgctagccttgaagcctccagcctgctggatgcctccatccccggctatgctgtggctctcctcattctaggcctcctgctcgtcacattcacccttgtcctggtgagtgtctggctgggcccaggctccttcctgaggggcaggctgagcctttgatgccttgagccttgagccaagctgaggagtgagcaggcccctttacacccctgattcccccacccaagcccagcatctcctcatcctccagctggggctgcagggtttggggccagggggctgggcctgatcccagtgtccccacccttcttgtcaaggtgctaaagtggagggcctcccatggggtgttcagcctgggtgtgtagaagcacacagtgtggtacagaggaccctctccagacaggtgacccctcatgctgctgctccctctgctgaaacccaaactgcaaacctctcctctccctgccttcaccttgccccacggcttccacagacagtgcctcaaccccgaggaatgaatccgaagttccaacaccactgactttcccaggaactcagagccagagagggccaaggaccagctcgaggacacacagccagggcttcttccctccgaaacccccaaggactggacttgcagggctgggacagaggtggggtgggggaaagcaatgccttgtcaacccacgtggggagccccactcccatccccaaggtgcataaagttgaggaacacccctgctcccacgtccatgctcattcagggccctgctccaagtgcttggcactcacaccagcctcctgccctccacagggcaggtgtggggccgccggggcaaggcaagctcccagggcagagactgaggccaccccctgcagccccactgcaggggggaacactgggataggcaagggtcttaacccagaaagccccagcagctcccgggcccatcaggacaccattgaggcttggcggtggtggaacccaggaatggtctttgaacccatgacctggaagggggagccaaggatagtcctggcctgaaggctcccctacctgcaggcagtgggcaagcccagcgaggggaccccaggaacccagaccatgagcttacgtggccaaagacagcagccagcaccaagacatcaaagagggcgggaccaggagagctctggagcccaccccgacacccattggaaacctggaatccgcacctgcaggagatcaggagaggggtttggcctccgatgcacctgcagcaagcagaggagaaggggcagccgcccatcaggccattgcccagattgaagccactgaagctaggtcccaacaggcacctcagcaggtttgggtccaccttcatcatgatcagggagtgggtccctgggatcacaaaggtgaggggcagcttcttgggctccaggtgctccaagctaaaagaatatcagcagaggaacagccctggtgttccagcaggagtgaagatgaaaaagaaaaacactggcagtagccctgagacagccacttttggtggttgccactcacctggggctattcaggacattctgaaggtgctggtgtccaatcttaaccattccaatggggtagcactcccccattggataagtggaagcatttgcttggcttttctcccaaacattcaattccaggcaatcgacatcctcacattggaaaaggcagacttgaagaccaccctttaccatactaaacgtgctgcccgacacttcgaagaagagtccaaggatctggctggccgcctgcaatactccttacagcgtattcaagaattggagcgggctctctctgctgtgtctacacagcagcaggaagaggacagggacggagtgtcctgcccagaaggcagcatggtcatttctcgctacttttgtgtatggctgttagaggcagctgctgtgggtgagttggggggcactgtggagagtgagcactggatgcagagctcagaggccaagtgcttgccctgccctttcctggcttcctcgagctgcagagaagcggtcctccagtggcggttacagcagaccataaaggagcaggcactgctgaacgcacacgtgacacaggagcaggacgagaggctccgagagcaggaggagtggagggtgcgggagcaggagagactgtgtgagcaaaatgagaggcttcgggagcagcagaagacgctacgggagcagggtgagaggctgcgaaagcaggagcagaggctatgcaagcaggaggagaggctgcgaaaggaggaggagaggctgcgaaagcaggaaaagaggctgtgggaccaggaggagaggctgtgggaccaggaggagaggctgtgggagaaggaggagaggctacaaaagcaggaggagaggctcatgctctcccagaaccacaagctcgacaagcagctggccgagccacagtgcagcttcgaggatctgaataacgagaacaagagcgcactgcagttggagcagcaagtaaaggagctgcaggagaggctgggcgagaaggagacagtaacctctgccccatccaagaagggctgggaggaaccagctgccagccaccagaaccaacagctagagacccagctaagcctcgtggctctccctggagaaggagatggaggacaacatctggacagtgaggaggaggaggcgcctcggcccacgccaaacatcccagaggacctggagagccgggaggccacggaggagcaggcacggctatgtgggcagtggaaggtgcgaaggctgtgccacctgcacctggctcatctggtggccttggcctggaaggagccagaggcagaggccccagccccagggactgggggtgactttgtgtgtggggagagctaccaggccctcaaggaggctatggagaaggtgaagagcggctttatggacctcccgaaggagaaggtgggcaggaaggagcaggtggaaaaactagagcttggattcgtccagctctctggagcgacagacggcatgagagagtacatcactgaatatgagagccagggggcagtgccaaacacgcggcaccaggagaaggaagacatcatcaggctggcccagaaggaggaggagatgaaggtgaagctgctggagctgcaggagctggtgttgccccttgtgggcgaccacgaggggcatggcaaattcctcaccgctgcccagaaccctgccgatgagcccgctccaggggccccagccccccaggaacttggggctgccgatgagcagggtgatttttatgaagtgagcctggacgatagcgaggagcctgcaccgggagcggccggggagggttctccccatgacaaccccactgcacagcagatcgtgcagctgcctcctgtaatgcaggacacccaggagcacccaggcttgcccggcaacccctgtgtgtcattcttttaccaggcagccgagaacagggagataaacatcatcatctaagagctggtcaagaaattaaaaaaaaaaaaaacaaaaagttatggggttcatctcctacacaattcatttactccatttgaatgttagagccactcatgtttatttgtgtttctaatttacagtttaaatttatttgtaaaaagttaagggagagtgggtctttccctgatgttcactctggcatcctttagcatttttgtttttaatttgataattgtagccacgttggtttctctgacataggaatttacttctttcccttgactggaaaacactttaaaaataataaaaaccattattataaaccaatatatgtgagagtacttagttgaaacaaaaaggagttttagtagacagtattatactacacatgaaaatcaaggtgaagtttatgcaacttaaaatgtttacaagctgccgtgcaatctaatgtttgtgaatgtccaagtattatgaggaaaagtgtctatacaattatagagttatatttcctcacagggttctttacaaagagtgaaatatgtttttatacctctcggtttcagttagaggcatattttgtgccatatttatgttaatgtgcctatacatgatgaatgaattatttcagtcatacattgcctaaatcataactttaagatgcttgggaaagaatcaacagctaaaatttcatgaagttctaaagtctgtgttccaaaatacgtcacattattaggatgcagggagagatgcatgtgtgctctctggggtgggcatttctagtgattagaccatctccatttttagcatttggcatcttcattgatacttttatacatacgacattaataggagagcaataataagattttacagatgaaataacagatttgcctgcagtcactgaaagagtgcaaatattgggttattgtgacttcaactgactcttccaaattgtttgaatttatcaatgtattagataaacccagtttcagaatgataaggaaaaactgttagaccaaataatgtggctaattaacagtggtacaatttctagcctgagggtttaaaatggacttaaggtcctgttcttgcctcctattttgtgaacttgccgcttttgcattatttgagttcacttgaaagacagttactttaagtccattttaaaccctcgggctagaaatcatactactgttaattagccaacttacttggtctaacagtttttctttataattctgaaactgggtttacctaatacatttataaattatttcaaaggtatttttatagttcagatcacttcacttttaccctgataaatataaatgactaggaatgaccttcagatagcctttagcacctgtaaccaatctgacaataatgtgttcatcaggtacctatggattaaatcacacactggcatatttaagctgaatgtcagtctggaaaatgaatgtactatattaactgaaataccactctttgtgtaggtattctgtcatatatttaagaaaaattaaatagcatgtaaatcgtatgacaataacctaagtctttcttcaaagtgcatgcgttcctttgcaatacctcattcagccaagtatttgttctcttcctcattcagtataaggcagctttcaatttgcttagaaggcaatattggaaggttagagtttatcagaaacatagaattttaaagtgtgagttcaactgaataaattagaatttctgtagaagtgaagaattaaaatacctatttaaatattgcaatatataataatttttaaagtatttgattaaacctgataggtttttccagaaatgaaaaaaaatcagttctaaaaccaaagctgatatttagaaaatctgaaaatgtaaatcagccctatccataatatagtttctctaaaactttatcttaaagagtcgttttaaaagaatataactatttaaaaatgtaactgctatcttaatgttttgaaataagttaaaacattttaaaatatgaatactgtagtttaaaagaaacc

SEQ ID NO: 461568 - DNA, 5599 bp, Homo sapiens
gtgtgggtctgcacaccctgggggaggcagagggcctcttggtagacacggtcatctcagacctcggtcagtacctccttccctctgcaggccccctccctctgtccatctgcctcctcccttgggcttgctgcctctacatgccctgatctgaaacctgcctcccctcctcatggagccctccaagatgctcctagccccagctctctggtcccgcagcaacttctggtgccagattctgccttctcagaagtctgggaggcagggccccacctggccatagccttcttggtctgctctaggcactgctagccttgaagcctccagcctgctggatgcctccatccccggctatgctgtggctctcctcattctaggcctcctgctcgtcacattcacccttgtcctggtgctaaagtggagggcctcccatggggtgttcagcctgggtgtgtagaagcacacagtgtggtacagaggaccctctccagacaggtgacccctcatgctgctgctccctctgctgaaacccaaactgcaaacctctcctctccctgccttcaccttgccccacggcttccacagacagtgcctcaaccccgaggaatgaatccgaagttccaacaccactgactttcccaggaactcagagccagagagggccaaggaccagctcgaggacacacagccagggcttcttccctccgaaacccccaaggactggacttgcagggctgggacagaggtggggtgggggaaagcaatgccttgtcaacccacgtggggagccccactcccatccccaaggtgcataaagttgaggaacacccctgctcccacgtccatgctcattcagggccctgctccaagtgcttggcactcacaccagcctcctgccctccacagggcaggtgtggggccgccggggcaaggcaagctcccagggcagagactgaggccaccccctgcagccccactgcaggggggaacactgggataggcaagggtcttaacccagaaagccccagcagctcccgggcccatcaggacaccattgaggcttggcggtggtggaacccaggaatggtctttgaacccatgacctggaagggggagccaaggatagtcctggcctgaaggctcccctacctgcaggcagtgggcaagcccagcgaggggaccccaggaacccagaccatgagcttacgtggccaaagacagcagccagcaccaagacatcaaagagggcgggaccaggagagctctggagcccaccccgacacccattggaaacctggaatccgcacctgcaggagatcaggagaggggtttggcctccgatgcacctgcagcaagcagaggagaaggggcagccgcccatcaggccattgcccagattgaagccactgaagctaggtcccaacaggcacctcagcaggtttgggtccaccttcatcatgatcagggagtgggtccctgggatcacaaaggtgaggggcagcttcttgggctccaggtgctccaagctaaaagaatatcagcagaggaacagccctggtgttccagcaggagtgaagatgaaaaagaaaaacactggcagtagccctgagacagccacttttggtggttgccactcacctggggctattcaggacattctgaaggtgctggtgtccaatcttaaccattccaatggggtagcactcccccattggataagtggaagcatttgcttggcttttctcccaaacattcaattccaggcaatcgacatcctcacattggaaaaggcagacttgaagaccaccctttaccatactaaacgtgctgcccgacacttcgaagaagagtccaaggatctggctggccgcctgcaatactccttacagcgtattcaagaattggagcgggctctctctgctgtgtctacacagcagcaggaagaggacagggacggagtgtcctgcccagaaggcagcatggtcatttctcgctacttttgtgtatggctgttagaggcagctgctgtgggtgagttggggggcactgtggagagtgagcactggatgcagagctcagaggccaagtgcttgccctgccctttcctggcttcctcgagctgcagagaagcggtcctccagtggcggttacagcagaccataaaggagcaggcactgctgaacgcacacgtgacacaggagcaggacgagaggctccgagagcaggaggagtggagggtgcgggagcaggagagactgtgtgagcaaaatgagaggcttcgggagcagcagaagacgctacgggagcagggtgagaggctgcgaaagcaggagcagaggctatgcaagcaggaggagaggctgcgaaaggaggaggagaggctgcgaaagcaggaaaagaggctgtgggaccaggaggagaggctgtgggaccaggaggagaggctgtgggagaaggaggagaggctacaaaagcaggaggagaggctcatgctctcccagaaccacaagctcgacaagcagctggccgagccacagtgcagcttcgaggatctgaataacgagaacaagagcgcactgcagttggagcagcaagtaaaggagctgcaggagaggctgggcgagaaggagacagtaacctctgccccatccaagaagggctgggaggaaccagctgccagccaccagaaccaacagctagagacccagctaagcctcgtggctctccctggagaaggagatggaggacaacatctggacagtgaggaggaggaggcgcctcggcccacgccaaacatcccagaggacctggagagccgggaggccacggaggagcaggcacggctatgtgggcagtggaaggtgcgaaggctgtgccacctgcacctggctcatctggtggccttggcctggaaggagccagaggcagaggccccagccccagggactgggggtgactttgtgtgtggggagagctaccaggccctcaaggaggctatggagaaggtgaagagcggctttatggacctcccgaaggagaaggtgggcaggaaggagcaggtggaaaaactagagcttggattcgtccagctctctggagcgacagacggcatgagagagtacatcactgaatatgagagccagggggcagtgccaaacacgcggcaccaggagaaggaagacatcatcaggctggcccagaaggaggaggagatgaaggtgaagctgctggagctgcaggagctggtgttgccccttgtgggcgaccacgaggggcatggcaaattcctcaccgctgcccagaaccctgccgatgagcccgctccaggggccccagccccccaggaacttggggctgccgatgagcagggtgatttttatgaagtgagcctggacgatagcgaggagcctgcaccgggagcggccggggagggttctccccatgacaaccccactgcacagcagatcgtgcagctgcctcctgtaatgcaggacacccaggagcacccaggcttgcccggcaacccctgtgtgtcattcttttaccaggcagccgagaacagggagataaacatcatcatctaagagctggtcaagaaattaaaaaaaaaaaaaacaaaaagttatggggttcatctcctacacaattcatttactccatttgaatgttagagccactcatgtttatttgtgtttctaatttacagtttaaatttatttgtaaaaagttaagggagagtgggtctttccctgatgttcactctggcatcctttagcatttttgtttttaatttgataattgtagccacgttggtttctctgacataggaatttacttctttcccttgactggaaaacactttaaaaataataaaaaccattattataaaccaatatatgtgagagtacttagttgaaacaaaaaggagttttagtagacagtattatactacacatgaaaatcaaggtgaagtttatgcaacttaaaatgtttacaagctgccgtgcaatctaatgtttgtgaatgtccaagtattatgaggaaaagtgtctatacaattatagagttatatttcctcacagggttctttacaaagagtgaaatatgtttttatacctctcggtttcagttagaggcatattttgtgccatatttatgttaatgtgcctatacatgatgaatgaattatttcagtcatacattgcctaaatcataactttaagatgcttgggaaagaatcaacagctaaaatttcatgaagttctaaagtctgtgttccaaaatacgtcacattattaggatgcagggagagatgcatgtgtgctctctggggtgggcatttctagtgattagaccatctccatttttagcatttggcatcttcattgatacttttatacatacgacattaataggagagcaataataagattttacagatgaaataacagatttgcctgcagtcactgaaagagtgcaaatattgggttattgtgacttcaactgactcttccaaattgtttgaatttatcaatgtattagataaacccagtttcagaatgataaggaaaaactgttagaccaaataatgtggctaattaacagtggtacaatttctagcctgagggtttaaaatggacttaaggtcctgttcttgcctcctattttgtgaacttgccgcttttgcattatttgagttcacttgaaagacagttactttaagtccattttaaaccctcgggctagaaatcatactactgttaattagccaacttacttggtctaacagtttttctttataattctgaaactgggtttacctaatacatttataaattatttcaaaggtatttttatagttcagatcacttcacttttaccctgataaatataaatgactaggaatgaccttcagatagcctttagcacctgtaaccaatctgacaataatgtgttcatcaggtacctatggattaaatcacacactggcatatttaagctgaatgtcagtctggaaaatgaatgtactatattaactgaaataccactctttgtgtaggtattctgtcatatatttaagaaaaattaaatagcatgtaaatcgtatgacaataacctaagtctttcttcaaagtgcatgcgttcctttgcaatacctcattcagccaagtatttgttctcttcctcattcagtataaggcagctttcaatttgcttagaaggcaatattggaaggttagagtttatcagaaacatagaattttaaagtgtgagttcaactgaataaattagaatttctgtagaagtgaagaattaaaatacctatttaaatattgcaatatataataatttttaaagtatttgattaaacctgataggtttttccagaaatgaaaaaaaatcagttctaaaaccaaagctgatatttagaaaatctgaaaatgtaaatcagccctatccataatatagtttctctaaaactttatcttaaagagtcgttttaaaagaatataactatttaaaaatgtaactgctatcttaatgttttgaaataagttaaaacattttaaaatatgaatactgtagtttaaaagaaacc

SEQ ID NO: 461569 - DNA, 1118 bp, Homo sapiens
agggaagggtttggtactggaaagatgctacttctccctacgcgaaggcattccataccgaacagcaaaatctcaccaggcattgctcatggaaattgacaaggtggacaggaaatactcaagaacagtcccagggttccctccatgctgcaggatgaccgcaggcaggcaaaggtgcagtgggactccaaaagccagcagtgtgggctggccagaagacagcagcagaagaatcgtcacgcccccttaactaaagcaccgctgggatttccacgggctcttttctccggcttgtcattgtgcacaggtgattttttttaatttaatttttttttttagtattaaatcatttttggaacaataggataaaaaccttgtataacatttgtctactcctaaaagcaatttctagaatgcacagggcaaaggcttggtgttccacttacacaggcaaatgtgtctgttcttgagtctggctgcacaggtgacttgtcttgctcgggctggggtggccgcagaggaggaaccccagctccttttgagctcctttgagcgaaagctgcctgctggtgggtggctggaaggtctggagccatgcctttgtggccaccaaccccctcgagccccaaagagaaaagagaacagaaagagcacacctctgtggcccaggcgccttcccatcagaagcccacaccccaggcgccttccggccgggcgactggcgctgctggcctggacgggccctgggggtgagctccaggcggcgaagtcccccttgcctggggctgaggagctcggaggccgcgcccaggcgcttctgctgcccggggctgcaactagaaacccgctgaggctcgggtgcgtccaaggcgtcggccccgcgcggagaaccgcggcgtccgctgatgtgtaatccacacgcagaagccctgctccaagcagctcctgctccaagcagctcctgcccctgctccggggctttattacagggaggatttcatgtcaaggggcatcttgacttccctgttccagcgcaaaatccttaaaatagatgaagacattgtgaattaattctacgttattccaggacaaaaacccctaagataatcggagcgatt

SEQ ID NO: 461570 - DNA, 2937 bp, Homo sapiens
tgtggtttatcaattgtgataggttacttattcgagcccctgtttacaagagttttaggatgaaacactacccatttaccagtttacagacatttaggtcgtttcgagttatgaataatgctgtgaacattcatgtgcaagtctttatgtggacttttgaggacatccacaggtatcctttgatgtgtagggaccggaatggaaaactaaaagcaggagctaaggttactctcttcatctctgagtaccacagtttcttggaatcttcatcaagcttttccaggtcatactggctgagtgcactgaacccagaatctctaaggtttcagtgcacaggacagcttttatctcaattgcagcttcctcctagtgatggtggcggctcatctggagcagctgctgcggtgaaggccgctgcagtaggagggggtgcacctggggctgtgccctctgtggagcccgtaggggacactggtctttgcagcagaagctgcttgcagtacatctggtccagccagagcctcacatggagccagtgcctgtgctggtgcttggtgctgcccgctccgcagcagcagctggtatgcctggctgtgcgcagtggccggattccacactgacttgctcatgcatcccttgtcactgagtgcttggctcacccttagtagccgtgggatccgggccaataaataaattgactatttatattcattgcctaattttctattgacttgtatatttttcttgtgaaagaactagatagagatagtggttgtaccatattgtgaatgactaattgtaaatgtcactttattgttcactttaaatgattacttttacattgtgtaaatttcaactcaattttaaaaatttaaaaatggaacaagggagaggatttagaaggttctaaatgctaaaagaagttaatgatagaattcagctcactcaagaacccagcccccatagtgtgaggaggcctaggacagttacagaagccatgtgtaggtgttctggctccagcaaaagtcttatctgacaacatcaactacatgttagtgggtataacctcatcctggagcagggcaccctatcgtcagatggtatcatctttaaggggttgtctcagccatgcctttagaattacctttcattgcttgtcatgctggaagcttctgaatgttgcattttgtgatagaaacagtgggtaccatggtcatgtgctcacatctcctttgcggtaaagaaaaggatcactcattaacatccaccagataacattctccatgaaagcaccaaataaggtttgtcttggtccattttatgctgctataacagaacaccacagactgagaaatttataaggaatagaagtttatttgcctcatgtttctggaggctgggaattccaagatcaaggggctgcatagattgaggtcctttttgctgactcataacgtggaaagagagtgcactgcatagaagaaaggaggccaaactcattcttttatcatgagcctactcctgaaataactcactctcaagataatggcattaatccattcatgaaggcagaatactcatgatgtaatcacctcttaaaaggtcctatttcctaacactgttgcattagggattaagctgtcaacacatgaatattgggggacacattcaaaccatagcaagagttctttgtctttgtgactcggtgtggttcagcaaattgcgattggtctgctatagcggactttcccctcacctcccaaatgtttattatgaaaaatttcattttaaagaaaggtggaaggaattgttgaaagaatatgtcatctagtttctactgttgttaacattgtgtcatatttgccttttcatccatccaaccacccatccatctagctaccttataattactattattacttattattactattatttttaaagacacctctattaaagcaaccatcttattttttgattttatttattttcaaagttagttgcagacattagtatactttactcctagacattttagcgtgaacataattaactggagtataatacttgttttcaatttctttttatttttgaggtaaaatttacatacagtgaaatccaaatcttaagtgtaccactagataaattttgataaatgcattatgcctggtcttcacacacccttttcaatatatagaaaatttccagataatttattttgttgtttttttcacacactaagttctagacttttccaggtccgagggaactattaggggggaaagtacttgttatagtaaaaaagattttaggtgtgtttgtttttaaggtgcagaaacacatcgcagattaaggtctgcatctctgctttttgttattgttccagtttgatctcagtgacattacaagcaagcagaaacactcagacatgaaatggccagtgcctgtgagttaagagcaggatctaggtctatttttttgatatgtatctcaactacctggaatactttatacttttggcactcaataaatatttgttgctgccagacgatctgccacaaaaatttactgggtctattttatggctattgtttgttcaccttgaaaataatcatgggatcatagaagtcaaagtcatggagagcagcacagaggtttctcagctgttgataagttctttacagtaaagcagggttaaatgtagaaggtatgatactgagagcttctcaaagttttcagttctttgtattaaattctttctgtccaaatggctgatatggtttctgcctctttattgaacccagactaatagaattgtcatactaatttgttaattagcaagacaatttagggtcatatcttaactgtacattctgtctagtatttactatttatactgttatccataatacttagtgaataatgatgacatacact

SEQ ID NO: 461571 - DNA, 1528 bp, Homo sapiens
tgtggtttatcaattgtgataggttacttattcgagcccctgtttacaagagttttaggatgaaacactacccatttaccagtttacagacatttaggtcgtttcgagttatgaataatgctgtgaacattcatgtgcaagtctttatgtggacttttgaggacatccacaggtatcctttgatgtgtagggaccggaatggaaaactaaaagcaggagctaaggttactctcttcatctctgagtaccacagtttcttggaatcttcatcaagcttttccaggtcatactggctgagtgcactgaacccagaatctctaaggtttcagtgcacaggacagcttttatctcaattgcagcttcctcctagtgatggtggcggctcatctggagcagctgctgcggtgaaggccgctgcagtaggagggggtgcacctggggctgtgccctctgtggagcccgtaggggacactggtctttgcagcagaagctgcttgcagtacatctggtccagccagagcctcacatggagccagtgcctgtgctggtgcttggtgctgcccgctccgcagcagcagctggtatgcctggctgtgcgcagtggccggattccacactgacttgctcatgcatcccttgtcactgagtgcttggctcacccttagtagccgtgggatccgggccaataaataaattgactatttatattcattgcctaattttctattgacttgtatatttttcttgtgaaagaactagatagagatagtggttgtaccatattgtgaatgactaattgtaaatgtcactttattgttcactttaaatgattacttttacattgtgtaaatttcaactcaattttaaaaatttaaaaatggaacaagggagaggatttagaaggttctaaatgctaaaagaagttaatgatagaattcagctcactcaagaacccagcccccatagtgtgaggaggcctaggacagttacagaagccatgtgtaggtgttctggctccagcaaaagtcttatctgacaacatcaactacatgttagtggcctttccttgaaattgctggagcttgtgcatcatcaaaataatggcataaaccaaggaagaagaaaacaaaattgaggaaatgggatccaacacaaaagagagacaacaggattaattgagtgttggtgaaaagccacagcctgtaaataatgcagttcgaactgaaatagaccaggaggctcaaggagagacttcttcaagaagataaaattgatagaatgcctaaggagtttgagtgcattgagaatagattcatatcagttctggagaactgggtggatacattaatgttaagtacatagaaaagttaaaaatgaaaaaaattctcaattctagggaaaataatcatagtaaactacatgttttagttaccaatagtgtttacgtagtcaatataaacaatgggcattgatataaataatgtatgttgatctgctataacaaggtaaaatgctattggggaaacaa

SEQ ID NO: 461572 - DNA, 1912 bp, Homo sapiens
tgtggtttatcaattgtgataggttacttattcgagcccctgtttacaagagttttaggatgaaacactacccatttaccagtttacagacatttaggtcgtttcgagttatgaataatgctgtgaacattcatgtgcaagtctttatgtggacttttgaggacatccacaggtatcctttgatgtgtagggaccggaatggaaaactaaaagcaggagctaaggttactctcttcatctctgagtaccacagtttcttggaatcttcatcaagcttttccaggtcatactggctgagtgcactgaacccagaatctctaaggtttcagtgcacaggacagcttttatctcaattgcagcttcctcctagtgatggtggcggctcatctggagcagctgctgcggtgaaggccgctgcagtaggagggggtgcacctggggctgtgccctctgtggagcccgtaggggacactggtctttgcagcagaagctgcttgcagtacatctggtccagccagagcctcacatggagccagtgcctgtgctggtgcttggtgctgcccgctccgcagcagcagctggtatgcctggctgtgcgcagtggccggattccacactgacttgctcatgcatcccttgtcactgagtgcttggctcacccttagtagccgtgggatccgggccaataaataaattgactatttatattcattgcctaattttctattgacttgtatatttttcttgtgaaagaactagatagagatagtggttgtaccatattgtgaatgactaattgtaaatgtcactttattgttcactttaaatgattacttttacattgtgtaaatttcaactcaattttaaaaatttaaaaatggaacaagggagaggatttagaaggttctaaatgctaaaagaagttaatgatagaattcagctcactcaagaacccagcccccatagtgtgaggaggcctaggacagttacagaagccatgtgtaggtgttctggctccagcaaaagtcttatctgacaacatcaactacatgttagtggggtttgtcttggtccattttatgctgctataacagaacaccacagactgagaaatttataaggaatagaagtttatttgcctcatgtttctggaggctgggaattccaagatcaaggggctgcatagattgaggtcctttttgctgactcataacgtggaaagagagtgcactgcatagaagaaaggaggccaaactcattcttttatcatgagcctactcctgaaataactcactctcaagataatggcattaatccattcatgaaggcagaatactcatgatgtaatcacctcttaaaagtttgatctcagtgacattacaagcaagcagaaacactcagacatgaaatggccagtgcctgtgagttaagagcaggatctaggtctatttttttgatatgtatctcaactacctggaatactttatacttttggcactcaataaatatttgttgctgccagacgatctgccacaaaaatttactgggtctattttatggctattgtttgttcaccttgaaaataatcatgggatcatagaagtcaaagtcatggagagcagcacagaggtttctcagctgttgataagttctttacagtaaagcagggttaaatgtagaaggtatgatactgagagcttctcaaagttttcagttctttgtattaaattctttctgtccaaatggctgatatggtttctgcctctttattgaacccagactaatagaattgtcatactaatttgttaattagcaagacaatttagggtcatatcttaactgtacattctgtctagtatttactatttatactgttatccataatacttagtgaataatgatgacatacact

SEQ ID NO: 461573 - DNA, 1464 bp, Homo sapiens
tgtggtttatcaattgtgataggttacttattcgagcccctgtttacaagagttttaggatgaaacactacccatttaccagtttacagacatttaggtcgtttcgagttatgaataatgctgtgaacattcatgtgcaagtctttatgtggacttttgaggacatccacaggtatcctttgatgtgtagggaccggaatggaaaactaaaagcaggagctaaggttactctcttcatctctgagtaccacagtttcttggaatcttcatcaagcttttccaggtcatactggctgagtgcactgaacccagaatctctaaggtttcagtgcacaggacagcttttatctcaattgcagcttcctcctagtgatggtggcggctcatctggagcagctgctgcggtgaaggccgctgcagtaggagggggtgcacctggggctgtgccctctgtggagcccgtaggggacactggtctttgcagcagaagctgcttgcagtacatctggtccagccagagcctcacatggagccagtgcctgtgctggtgcttggtgctgcccgctccgcagcagcagctggtatgcctggctgtgcgcagtggccggattccacactgacttgctcatgcatcccttgtcactgagtgcttggctcacccttagtagccgtgggatccgggccaataaataaattgactatttatattcattgcctaattttctattgacttgtatatttttcttgtgaaagaactagatagagatagtggttgtaccatattgtgaatgactaattgtaaatgtcactttattgttcactttaaatgattacttttacattgtgtaaatttcaactcaattttaaaaatttaaaaatggaacaagggagaggatttagaaggttctaaatgctaaaagaagttaatgatagaattcagctcactcaagaacccagcccccatagtgtgaggaggcctaggacagttacagaagccatgtgtaggtgttctggctccagcaaaagtcttatctgacaacatcaactacatgttagtgggtataacctcatcctggagcagggcaccctatcgtcagatggtatcatctttaaggggttgtctcagccatgcctttagaattacctttcattgcttgtcatgctggaagcttctgaatgttgcattttgtgatagaaacagtgggtaccatggtcatgtgctcacatctcctttgcggtaaagaaaaggatcactcattaacatccaccagataacattctccatgaaagcaccaaataaactaaccagaattggctacagtttcttcaagaaaataccccaatggaagaaaaaaaggtggagggagaaactgaatgaagaaaggatgatttgaaattaccagaaagtggaacgtggaaaaaacagagtaaaactagtttgagaataaaatcttaggttgtaaa

SEQ ID NO: 461574 - DNA, 2143 bp, Homo sapiens
gatcatcagggcagatttcctccttgctgttttcatgatggaatctacgggtgttggagaagacccctcctgaaatcctccagaagagctttttgagggagcttgtggctcctgttcacccagccccgggtaagaaaagggtcgcgaacctgcattgcgaggtggtctctccctcacaccacctctgatgtcccaaaagacggggagaaagttgcccgccccgggctgcggcggggcctgctgctccgccccggcgctggcgggcgcgctctacactggccgccgaggggcgagcgcgggacccggaggcgggcggcgggcggggaaggcgcggggcgtggtttgccgctttccgagcgccaaggagcggagcgcgctcagctgcgcccagagccttcggccggacctgaaaaagcgagagggagagcgagcaaaaggcgcgatccagagagccaggcaagcggggcgccgacctcgggcggccccggcccgcgcccttgcccctcggccgggcggacggtgggtgagcgcggccgcggggccccagcaccccggtgcgccccggagagagtgggagggaggggaaggggcgggggcgagagagggaaaggtctctgagccgggggcgggggcggcgggagacgggaaccgacccgatgccggggtccgagccgggccacaggaaactttgctcgggtggggagagcggggtgcgcggagggcgccgtaaacttgtcagcgggcggggcgctccggggattggagcgagcgccagcgggtggcgtttgtctctctgggttctttgtgtcacctccgggccccagcccgccggtccgcccggctcgggcaggcgctgcgcgggaggctgtgcccgggtgccccggccgccccctcccgggcccaggccccggccctcgggggccgctgattgttttcattcctcgcgtcacgcctgggcgggaaagattttgaacgccgcgtgagctggaaggcggacagccgcggcgcagagattgcaggatcgtgagcggtgcggtgctcgccccggggacccgggaacccgcgggtcggggcgcaccggggctggagagggcgcggggacgggcggcccgggcactggaggggcggcggcggtatcgagggtaagtaaaatggagaaagcaggccctgtggtagaccacagtggagaaggtggaatttctagacttagcaggccagcgctgctacagaagccttccgggggcacttggagcaagcttaatgtggtggatgctgtgtttactgtcaagattcgcttcaaagaaagactcggtgcccagcctcttgggagtgaccgctttagccattgcctcagctgcagtgaaccaccttactcaaaggatggagatggagggtcccacatccagggactaatgaggaggatccagagaggcaaccctcaccctggccttactgacattgccagccagactgaagatttagcacaacccagaagagcttatcaaagaatggcatctagtcctgagcttcccaccgaagatgaacagggttcctggggcatcgacgatctccatatttcattgcaagggaaagagaatagagcaggacaagagggatcgggagttgggggtgttacaattttagatcggacagtcagggtagacctcttagatgaggtgttgtctgagccaggatttgaaggaggaatctgtcgcagtaacccaggtggaggtgatggtgacttgggccagggtggtggtgatggaggtggtgagaagtggtcatatcctgaatatattgtgagggtggacctaacaggatatctggaggcattagatatgaaacgtgagagaaagggaggaggcaaccttgatgaaggaggaaaatcaggagtctggttcctggaagcaggagaggagaatgatcatctatatcagatgctgctgatgggtccagcaggatgaaggttgagaatagaccattggttttcatgagagtgtgtcatcgaggaccttgattcaagtgaccatgatgagaagctgtttcagtcgaatggcagggacctaatcggtatgggttcagttaagagtgagggaggagaagaccttgagacagtaaacacaaactatttgagggcatttgc

SEQ ID NO: 461575 - DNA, 1042 bp, Homo sapiens
cttctgcgtacaggcacagtatccgacaactgggattgccactctcacacatggacaaagcccacagggatgaggcctcattatgttgcttaggctggagtgcagtagctagtcacaaacacaatcatggtgcattacagcctgggctcaaagggtcctcctgacttagcctcccgagccgttgggactaaagggacatgtcaccacacccggctatgtttttaaaaaccacttttacactattgcacatttttggacactgggaacaaacagattttgactctcaagaaaaaagtacttcatggcacattaaacaatgagtgaatgagtttacaaaacacaagaggcagggtagttattccaaaatgacaagaaacaacattgtgcctttgcttttgtttgaagagaaataaactgtttccactcaagttttaaatgccaaaatagctaattactgttaaaatgtcaccaaaattaaaaactatcatggcagcgcatttgttccggagcacttcatcaccccaatacagctactggggaaccggagcaactctgcactgcgctgcgggtcagctcccggcagggcgggcacggacggctctgaggaggcgcccgttggcggagggggagcttcgcgaaccggcgctgccgctaggctcatggttctgtcctgagagaaggaagaggcatctccagttccaacctgtggcagcaggaacagcaaccacggcgaccgcaaaacctgaactccttattggaaggcggagatatgttctgcagttacattgccttcacaggcaatgtgaggaggggctgcgctggggccttacagacacctgcggagccagaggccaccagactgcaggcagccaaaggcagcctcctccctgctggctgctgtggctcccacctggatgccctgatatgcattgcctggagccaaacgggaccagttgactgcatatgggtgaatttatttctaggtcctctattctgtttcagtggttcctattatttgcctatttggggtctttcatggctc

SEQ ID NO: 461576 - DNA, 406 bp, Homo sapiens
cttctgcgtacaggcacagtatccgacaactgggattgccactctcacacatggacaaagcccacaggttgttttttgtttcagagaagctgaacgtcttcaattgaggatggattgcctgtccccaagcctccatatgttcactgaagctgaagctaaatcggagatttcattacccaccatccttccccaggccgtctccttttttccaacccatcttctccaacatcttctgacatttgttactgtcagtaatttcagaatgaacagatgcaggagcaacatctctctagaatgttccttcacttccaatctgctcactatgatttccagctctatctttatattttagattattcagtgtctattcatgttcataatctatattctgtaaaccccaaaaaaa

SEQ ID NO: 461577 - DNA, 908 bp, Homo sapiens
ggcctgagctgggcagggggcggaggcgggggctcggctgtctccggggctgccacgcagagcgggcttcgtggcgtggatgaagaaactgaggcacagagggattaagtagcctgctcaagatcacacagctagtaaggaaccaagattcaaacttgggcagtgtgattcagagactttaaattcaacgctggtgcctcactgcctcacactaaaagtgaatcagaaaaataaagaaccagcatcaaatttgaagtggccacaaattctattaaagcagaagaaatagtggtgaaccataaaagagaaccagtttcctctctattctgcaatttagaggaaaaattttcatccaaggacagatcagcaagggaacaaaactggatggagaatgagtttgacaaatcgacagaattaggcttcagaaggtgggtaataacaaactcctccaagctaaaggaggatattctaactcaatgcaaggaagctaagaaccatgaaaaaaggttagaggaattactaactggaataagcagtttagagaagaacataagtgacctgattgagctgaaaaacatagcacgagaacttcaacaagcatacacaagtatcaatagccaaatcgatcaagtggaagaaaggatatcagagattgaagatcaacttaatgaaataaaaaccaatgacaaaaaccacgtgagtatctcaatagatgcagaaaaggcctttgataaaagtcaatacccctttatgctaaaaactaaaaacaataaactaggtatcgatggaatgcatgtcaaaaatcataagagctatttatgacaaacccacagccaatatcatactgaatgggcaaaagctggaagcattccctttgaaaaccagcacaacacaaggatgccctctct

SEQ ID NO: 461578 - DNA, 1030 bp, Homo sapiens
tcagatcggcctaacggctcagatcagccttgcgggttgctgggactacaggttttggcagttatgaatagacgtgctttggttgtgtgaacataaatatttcactcctttgggtgaataccaaggagcaccgttgctagactacatgcaagaagatgagaaagctgtgaggacactcagtcttccacggggtggatactaaccaaaatcacaagcagcttgagctggaaggacctgggagccgggagagatgccggaggagtcccgcgcgctgcctgtcacagctgtgtgacttcgagacagggctctggccccctgggcctcagtgtcctcccctggaaaatggctcattcatttctcagaacatctcgccgggtgaagtggctcacggttgtaatcccatcactttgggaagctgagggaggtgaatcacgaggtcaagagatcgagaccatcctggccaacatggtgaaaccctgtctctacaaaaaattagctgggcatggtggtgcgcacctgtattcccagctacttgagagactgaggcaggaggatcgcttgaacccaggaagtggaggttgcagtgagtcgagattgcaccctgagatcgcgccactataccccagcctggcgacagggactccgtctcatacaaacaaaaaaacaaaaaacaacaacaaaaagaacatctcattacctcagaaagaaaccctgtacccatttgcagtcactccacattcctctctccctcagcaaccaataatctgctttctgcctgttgtggacatttcatagaaatggaatcatacactatgtggtcttttgtgactagcttcttcatttaacctgttcaggattcatccatgttgtagcatcctttttatggctgacccatattccagtgtggatagaccacactttgtttaaacattcatcagatgagggacattaagtatgaataatactgctatgaacatttgcccacaagtttttgtgtggacatatgttttcagttgttttgggtatatat

SEQ ID NO: 461579 - DNA, 820 bp, Homo sapiens
cacagacttagcccatttcaactagcacagaaggacccagaatgccaggtggaagacgctgccatgtgcaacaaaaagagaaagggcccaggctgcatgcacaactaacgaggctgttccctgaggaaagggcatttgctgatttagactcatttcctcaaggtcctcaagcaagcccaagagtacataggccagtcgctgagacactgaaagttgagatgtggaagaaagggccaacagactgtcccagaagcagaatgcttcagtcctccagggaagctttgggggagatctgccctcacggcttcctgattttcgtacatcaacaaggagacgtctatgaccctggtctccagcacacctttcttggtagagttgagaattcaaccagccagttcttcctggagattctcagagccacattgagagagcagaggacttacaagtgctgccctatccatggtgactccccttggcctctaggcttgtctgagcagaggtagagtgaccctgccgcctgttcctcaacagtctgtgcaaattcaaagaaatagagtgtgaattcaaggaactcatttgaagaacaggaaaagcaactctctccttgaggttatcggggaaatgaaggttgaaacatggatcagaagacttgctgaggtcccttccaccctcagctcttccattctgttcccaaatgaggcccaaaacacagctttctccatcactctttaatctgttggttgatttgtctggtgcacccaaccagcactgtggccctgaaaataaaatgttaattacatcaatcttacagccatccatc

SEQ ID NO: 461580 - DNA, 674 bp, Homo sapiens
acccatggacacatgtggcatgggctcctttgggtgccggtggatcccttcatacggtagtgttggtgtaaaaggcaaacccgtgtcatgagggatggtcatcatcttgtgtgatccttggagatggcaggaagccctggacatacatggtgtgggggctcctccagaggctgttgggatcctcctggatgtggtgtgggcatggaaggaaggccagtggagacaatggatgatcttgttcttagcagatcactggatgtggcagggagtcctaggacatgtgtggtgtgggcttcttcaggtgctgagaagcccagagagggtatccacgttgaattgtatgtccataggagggggaaacccaagtcccgtggcccctgaagcatcctggcagtggaaggggagagggccgtgcatgcgtgtaccacacagccttctgtctgggtcacagagcgacgacttcatagtgccttggaagccctgtaggattcagcatgtcttgtgctcttctgggtccccgagctgtacctttgaggaaaacccagaggtggaggttgatttgtgattgagcatgtttctcagtgggaagagtgtcaaaggagcctggggtgaaagtacttcaggaccaaaggaaaattgcccttcactcaagaagaggctttccttgaacctgt

SEQ ID NO: 461581 - DNA, 709 bp, Homo sapiens
gagcccaccctaaaaagaataatgttcctgtctctggagatcacgcaatccatccccaccaccaagcaagggtctgcttttctactctttatcatcacgcactttgtcttagttccagctgctgtaatagaatactatgcactgggcagcttcaacaacaaacatttattactcacagttctggaacctgagaaaattaaggtgctagcagttccagtttctggtgggaacactcttcctggtttatggatagtgatcttccctactaatattagagttattgaagtcttggttacaacacagaggacctggacagggcaatgccacgctcagatgaaggaatactctacagcagctaaaaggaatggatttgacctacatgaggaagaggaagagagatttgagtcaggccactcagctctctcaccatgcgattgccctgcaacaccttggaactctgcagagagtccccagcaggaaggtctcacctgaggtgaaccttcgaccttggacttctcagcctccagaatgaagaatggcaaccatcaaatcaagaaattggcccaaagccctacagtctgcaaacatcataacaattcatcctgaagtttctccatgaattgtgatgctttgctacatcattctgcaatcccagaagattttttgcatatttttttgctattacagaaaaatctcagtctccctccct

SEQ ID NO: 461582 - DNA, 3764 bp, Homo sapiens
ctcccttcaaacaggatcccagagatgtggggagaaggctgaagtgcaatgttgtgatctcggctcactgcaacctctgcctcccaggttcaagcgattctcctgctttggcctcctgagtagctgggattgcaggtcagttgctctccctggaaggaagagtgttctcggatttcaccttaaaggaggaaggctgccagaactgaactagcacttctgaatatcctgaggcgagagatgccagccccaccccaggaatcgactgaaaatttggttccattcctggacacctgggattcagctggagagcagcccctggagccagagcagttcttggcttcacagcaggatttaaaggacaagctgagtccacaggaaagactccctgtttcgcccaagaagctgaagaaagatccagctcagcgttggagccttgctgagattattggaattgcacgccaattatccacacctcagagtcagaaacagactttgcagaatgaatattccagtacagatacaccgtatcccagtagcctgcctccagaactccgggtgaagtcagatgagcctccagggccctctgagcaagttggaccttctcaattccatctagagcccgaaactcaaaatccagagacccttgaagacatccagtcctcttcactccagcaagaagccccagcacagcttccacagctccttgaggaagaaccttcttcaatgcagcaggaggccccagctctgcctccagagtcctctatggagagtctaactctaccgaatcatgaggtgtcagttcaacctccaggtgaggatcaagcttattatcacttgcccaacattacagttaaacctgcagatgtggaggttaccataacttcagagcctaccaatgagacagaatcttcccaagcccagcaggagaccccaattcagtttccagaggaggtggaaccttctgcaacccaacaggaggccccaattgagcctccagtttctcctatggagcatgaactttccatcagtgagcagcagcagccagttcagccttctgagtcttctagggaggtcgaatcttctctgacccagcaggagaccccaggtcagcctccagaacatcatgaagtcacagtttcacctccaggtcaccatcaaactcatcatttagattcacccagtgtctctgtgaagcctccagacgtgcagctcaccatagcagcagagcctagtgcagaggtgggaacttctctagtccaccaggaggctacagctcggctctcagggtcaggtaatgatgtagaacctcccgccatccagcacgggggcccacctctgcttccagagtcatcagaagaagctggacctttagcagttcaacaggagacttcatttcaatctccggaacctattaataatgagaacccctctccaacccagcaggaggctgcagctgagcatccacagaccgctgaggagggtgagtcttccctaacccatcaggaggccccagctcagactccagagttccctaatgtagttgtagctcaacctccagagcattcacacctgactcaagccacagttcaacctttggatctggggtttaccatcactccagaatccatgacagaggttgaactttctccaaccatgaaggagaccccaactcagcctcctaagaaagttgtaccccaacttcgagtatatcaaggggtaacaaatccaacaccaggtcaggatcaagctcagcatccagtgtcacccagcgttacagttcaacttttggacctgggacttaccatcactccagaacccactacggaggttggacattctacagccccgaagaggactatagtttctccaaagcatcctgaggtgacacttccacatccagaccaggttcagactcagcattcacacctgactcgagccacagttcaacctttggacctggggtttaccatcactccaaaatccatgacagaggttgaaccttctacagccctgatgactacagctcctcctccaggacaccctgaggtgacacttccaccttcagacaagggtcaggctcagcattcacacctgactcaagccaccgttcaacctctggacctggagcttaccataactacaaaacctactacagaggttaaaccatctccaaccacagaggagacctcaactcagcctccagacctgggacttgccatcattccagaacccactacagagactggacattctacagccctggagaagactacagctcctcatccagaccgggttcagagtctgcatcgaagcctgactgaagtcacaggtccacctactgaactagaacctgctcaggattcactggtgcagtctgaaagttacacccaaaataaggctttaactgcaccagaggaacagaaggcctccacaagcaccaacatatgtgagctctgtacctgcggagatgagatgttgtcatgtattgatctcaacccagagcagaggctccgccaagtgcctgtgccagagcccaacacccacaatggcaccttcaccatctttctgggaacagagtgagaccctgtctcaaaaattaaattaaattaaatataaacaacatttatgttatgtgcactttatgcacattatagttctccaatttttttgatggggggaaaaaggttgaatggcttcacttgcagccctgacatggttccatgtggggctttcataataaggtttgggaaaagagaggaggaaatggaggttctgctgatcttggtgccacccagagttggattctaaaagggattttgtgatctagagaggaggcatgaaataatagaatttggtgggaagaaacccactcttcaaggggtgtgcttgagtgtgtgtgtgtgtgtttgtggtggtggtggagagagatggacacaaaaaggaaaatataagaaaaggtttgaatgaaagcagagcagatcccaccatcttgaagtgaccatgacccagctttcctccacatgcaggagatggttctgtgtagcaaatagttgtagtttgcattttaatctagaaataacttcttcattttccagaattctcagagaaaataacttgactgaattacacaaggattcatttgaaggcctgctatccctccagtatttagatttatcctgcaataaaatacagtctattgaaagacatacatttgaaccactaccatttttgaagtttataaatcttagttgcaatgtaattacagaactcagctttggaacatttcaggcctggcacggaatgcagtttttacataagttgtaagtgaaatagaagatgaatacatgtaaacaactatttatgtacaaaaactcatacaattattgggtagctgggtataagcccattatcaactctgaaaagcgtgtcttaagatccattcatttttctcaaatggggaagctaaggtacaaagaggccaagagacttacgtagcttatatatgacctcctctgcttgtcctagttctgacctatagcatgggcaagaaaaggcatcaaagaagtgaccctcaaattagccttgttgctgggcggggtggctcagacctgtaatcccagaactttgggagccgaggtgggtggatcacccgaggtcaggaattcaacaccagcctggccaacatagtgaaaccctgtccctactataaatacaaaaaaattagctgggcgtggtggtgcagttttttgctccctggaggactt

SEQ ID NO: 461583 - DNA, 2998 bp, Homo sapiens
ctcccttcaaacaggatcccagagatgtggggagaaggctgaagtgcaatgttgtgatctcggctcactgcaacctctgcctcccaggttcaagcgattctcctgctttggcctcctgagtagctgggattgcaggtcagttgctctccctggaaggaagagtgttctcggatttcaccttaaaggaggaaggctgccagaactgaactagcacttctgaatatcctgaggcgagagatgccagccccaccccaggaatcgactgaaaatttggttccattcctggacacctgggattcagctggagagcagcccctggagccagagcagttcttggcttcacagcaggatttaaaggacaagctgagtccacaggaaagactccctgtttcgcccaagaagctgaagaaagatccagctcagcgttggagccttgctgagattattggaattgcacgccaattatccacacctcagagtcagaaacagactttgcagaatgaatattccagtacagatacaccgtatcccagtagcctgcctccagaactccgggtgaagtcagatgagcctccagggccctctgagcaagttggaccttctcaattccatctagagcccgaaactcaaaatccagagacccttgaagacatccagtcctcttcactccagcaagaagccccagcacagcttccacagctccttgaggaagaaccttcttcaatgcagcaggaggccccagctctgcctccagagtcctctatggagagtctaactctaccgaatcatgaggtgtcagttcaacctccaggtgaggatcaagcttattatcacttgcccaacattacagttaaacctgcagatgtggaggttaccataacttcagagcctaccaatgagacagaatcttcccaagcccagcaggagaccccaattcagtttccagaggaggtggaaccttctgcaacccaacaggaggccccaattgagcctccagtttctcctatggagcatgaactttccatcagtgagcagcagcagccagttcagccttctgagtcttctagggaggtcgaatcttctctgacccagcaggagaccccaggtcagcctccagaacatcatgaagtcacagtttcacctccaggtcaccatcaaactcatcatttagattcacccagtgtctctgtgaagcctccagacgtgcagctcaccatagcagcagagcctagtgcagaggtgggaacttctctagtccaccaggaggctacagctcggctctcagggtcaggtaatgatgtagaacctcccgccatccagcacgggggcccacctctgcttccagagtcatcagaagaagctggacctttagcagttcaacaggagacttcatttcaatctccggaacctattaataatgagaacccctctccaacccagcaggaggctgcagctgagcatccacagaccgctgaggagggtgagtcttccctaacccatcaggaggccccagctcagactccagagttccctaatgtagttgtagctcaacctccagagcattcacacctgactcaagccacagttcaacctttggatctggggtttaccatcactccagaatccatgacagaggttgaactttctccaaccatgaaggagaccccaactcagcctcctaagaaagttgtaccccaacttcgagtatatcaaggggtaacaaatccaacaccaggtcaggatcaagctcagcatccagtgtcacccagcgttacagttcaacttttggacctgggacttaccatcactccagaacccactacggaggttggacattctacagccccgaagaggactatagtttctccaaagcatcctgaggtgacacttccacatccagaccaggttcagactcagcattcacacctgactcgagccacagttcaacctttggacctggggtttaccatcactccaaaatccatgacagaggttgaaccttctacagccctgatgactacagctcctcctccaggacaccctgaggtgacacttccaccttcagacaagggtcaggctcagcattcacacctgactcaagccaccgttcaacctctggacctggagcttaccataactacaaaacctactacagaggttaaaccatctccaaccacagaggagacctcaactcagcctccagacctgggacttgccatcattccagaacccactacagagactggacattctacagccctggagaagactacagctcctcatccagaccgggttcagagtctgcatcgaagcctgactgaagtcacaggtccacctactgaactagaacctgctcaggattcactggtgcagtctgaaagttacacccaaaataaggctttaactgcaccagaggaacagaaggcctccacaagcaccaacatatgtgagctctgtacctgcggagatgagatgttgtcatgtattgatctcaacccagagcagaggctccgccaagtgcctgtgccagagcccaacacccacaatggcaccttcaccatcttaaatttccaaggaaactatatttcttacattgatggaaatgtatggaaagcatacagttggactgagaaactaattctcagagaaaataacttgactgaattacacaaggattcatttgaaggcctgctatccctccagtatttagatttatcctgcaataaaatacagtctattgaaagacatacatttgaaccactaccatttttgaagtttataaatcttagttgcaatgtaattacagaactcagctttggaacatttcaggcctggcacggaatgcagtttttacataagttgatcttacctagccatatggcctgctgtctctgccaacttaaaaacagcattgaggctgtctgcagacagtccagctgcattgcacagtgctgtctgtcaacacctacattgtcgttagatgggggggtgtgctccc

SEQ ID NO: 461584 - DNA, 3305 bp, Homo sapiens
ctcccttcaaacaggatcccagagatgtggggagaaggctgaagtgcaatgttgtgatctcggctcactgcaacctctgcctcccaggttcaagcgattctcctgctttggcctcctgagtagctgggattgcaggtcagttgctctccctggaaggaagagtgttctcggatttcaccttaaaggaggaaggctgccagaactgaactagcacttctgaatatcctgaggcgagagatgccagccccaccccaggaatcgactgaaaatttggttccattcctggacacctgggattcagctggagagcagcccctggagccagagcagttcttggcttcacagcaggatttaaaggacaagctgagtccacaggaaagactccctgtttcgcccaagaagctgaagaaagatccagctcagcgttggagccttgctgagattattggaattgcacgccaattatccacacctcagagtcagaaacagactttgcagaatgaatattccagtacagatacaccgtatcccagtagcctgcctccagaactccgggtgaagtcagatgagcctccagggccctctgagcaagttggaccttctcaattccatctagagcccgaaactcaaaatccagagacccttgaagacatccagtcctcttcactccagcaagaagccccagcacagcttccacagctccttgaggaagaaccttcttcaatgcagcaggaggccccagctctgcctccagagtcctctatggagagtctaactctaccgaatcatgaggtgtcagttcaacctccaggtgaggatcaagcttattatcacttgcccaacattacagttaaacctgcagatgtggaggttaccataacttcagagcctaccaatgagacagaatcttcccaagcccagcaggagaccccaattcagtttccagaggaggtggaaccttctgcaacccaacaggaggccccaattgagcctccagtttctcctatggagcatgaactttccatcagtgagcagcagcagccagttcagccttctgagtcttctagggaggtcgaatcttctctgacccagcaggagaccccaggtcagcctccagaacatcatgaagtcacagtttcacctccaggtcaccatcaaactcatcatttagattcacccagtgtctctgtgaagcctccagacgtgcagctcaccatagcagcagagcctagtgcagaggtgggaacttctctagtccaccaggaggctacagctcggctctcagggtcaggtaatgatgtagaacctcccgccatccagcacgggggcccacctctgcttccagagtcatcagaagaagctggacctttagcagttcaacaggagacttcatttcaatctccggaacctattaataatgagaacccctctccaacccagcaggaggctgcagctgagcatccacagaccgctgaggagggtgagtcttccctaacccatcaggaggccccagctcagactccagagttccctaatgtagttgtagctcaacctccagagcattcacacctgactcaagccacagttcaacctttggatctggggtttaccatcactccagaatccatgacagaggttgaactttctccaaccatgaaggagaccccaactcagcctcctaagaaagttgtaccccaacttcgagtatatcaaggggtaacaaatccaacaccaggtcaggatcaagctcagcatccagtgtcacccagcgttacagttcaacttttggacctgggacttaccatcactccagaacccactacggaggttggacattctacagccccgaagaggactatagtttctccaaagcatcctgaggtgacacttccacatccagaccaggttcagactcagcattcacacctgactcgagccacagttcaacctttggacctggggtttaccatcactccaaaatccatgacagaggttgaaccttctacagccctgatgactacagctcctcctccaggacaccctgaggtgacacttccaccttcagacaagggtcaggctcagcattcacacctgactcaagccaccgttcaacctctggacctggagcttaccataactacaaaacctactacagaggttaaaccatctccaaccacagaggagacctcaactcagcctccagacctgggacttgccatcattccagaacccactacagagactggacattctacagccctggagaagactacagctcctcatccagaccgggttcagagtctgcatcgaagcctgactgaagtcacaggtccacctactgaactagaacctgctcaggattcactggtgcagtctgaaagttacacccaaaataaggctttaactgcaccagaggaacagaaggcctccacaagcaccaacatatgtgagctctgtacctgcggagatgagatgttgtcatgtattgatctcaacccagagcagaggctccgccaagtgcctgtgccagagcccaacacccacaatggcaccttcaccatcttaaatttccaaggaaactatatttcttacattgatggaaatgtatggaaagcatacagttggactgagaaactaattctcagagaaaataacttgactgaattacacaaggattcatttgaaggcctgctatccctccagtatttagatttatcctgcaataaaatacagtctattgaaagacatacatttgaaccactaccatttttgaagtttataaatcttagttgcaatgtaattacagaactcagctttggaacatttcaggcctggcacggaatgcagtttttacataagttgtaagtgaaatagaagatgaatacatgtaaacaactatttatgtacaaaaactcatacaattattgggtagctgggtataagcccattatcaactctgaaaagcgtgtcttaagatccattcatttttctcaaatggggaagctaaggtacaaagaggccaagagacttacgtagcttatatatgacctcctctgcttgtcctagttctgacctatagcatgggcaagaaaaggcatcaaagaagtgaccctcaaattagccttgttgctgggcggggtggctcagacctgtaatcccagaactttgggagccgaggtgggtggatcacccgaggtcaggaattcaacaccagcctggccaacatagtgaaaccctgtccctactataaatacaaaaaaattagctgggcgtggtggtgcagttttttgctccctggaggactt

SEQ ID NO: 461585 - DNA, 2156 bp, Homo sapiens
ccgtggccaggggcccagagctcatcaaaacctgctcagtccaaggccttaggctgagcctgacatcctgccgtggccctggagagttcccagagtatttcctgacgaaatgaacagaagaccacagccttctgcagcggaggagaagcatgcggagcatccacatctacaaaggccccaaagtggaaaaacctgttgtttttcctgagcagcccggctggaaacaatggcggttttgtttcgcagactccgcagaatctggcgggcagggggatgggggcgccggatgctgcagggaggcggctgagggaaggagggggcgtcgacccttcctgacccacggaggacacctctctggcccgcttcgggggggtggggggtgggtcggtttgcccgggaggaaatcccactgcttcccactcacaagccggtgggtggccgcgaggcctggccgcacagcctcattcctgcgactttcttctgccttgtggcatggctttttcttttcccctaaggaaagtttgcttaaagagaaagagacacacataccattctctggtcctttgaagggttgagctaagctgggtcaagaggaaatggcttgctcagtcacccctgagaacaaaatactcccacgagttttggtgaggcacttgtgtcttctcagctcaaatctctaccaccccacggacaaggcagttcaaatccaggctcaccaccacctgctgtgtgggttgggcaagctgtggacatctctgagcttcggttccttgagtgtagaataagcataacatctgtgtagaaggattactgtgagggatgctgtttgtacacctcccactgccagaacgcaagttccatgaggctggggctgcgttttctgcattgctgcaaaccctctaaaatgtcatccgagttcatcagaaccacaaggaccaccaccaccatcatcgtcaccctcacccaaacgctcaaatctccaagtgtctaaactcatgggtctgtgccaaatgctaccatgcttagcgtccccaaagctagagtcaccacgaagaaggttctctccagtattactgccttaaacttctagcccagaaccctcaataaacttgggcaccttttgtgctgggcctcctttagccgatggctccagggcccctatccctggcacagaaggccatcggcaatgtagggggtaagctggggggggggtggggggtgagccgttcagctctgctgagctgtgctgtctcatgggagtggccccacccttccaggaaccttccttgagcaaaatcgtcaaatgtcagcaggtggtcttgaaatcccttcctctgtgacccagtaattcagagatcttaatgatgtttccccaaagttagaacatagtggctgttccctaacacacacacacacacacaccctttctctgttatgtgtctcccataatttttctgtttctcaattatgtttctttctctgttatgtttgtctattatttcttctttgaattgtcaatgcctgcttctactggtctgtaccaggttctattgcaatcacctctggttggggcaaaactgcacatttagctattttatgagtgtttccttgtacttcatagagggcaccagagcccttgcagcatgtgggcacacgggtcagaggatgcagactgaaaggagcttctggacgtgcattctattctcattctggagccaaggaagtgagaggggaaaagggaagtgattctaagccttttgtggggtctcatacataactcagtttccacaaagctgtgccccagctcagccctatggatagaagcatggtctggggttcctttgctgaccagggtgtgtactttgtccaagttattgaccttcccaaacctcatcaatgcacttaaaaagagcacttgcaaacaatgaatctagacatggaccttcacaaagaaataactcaaaatggatcccaggcctaaatgaaaaatgaaaaactataaaactcctagaagataacataaaagaagatctagatgacctagggtttggcaatgactttttagatccagcaccaaaggcagggtccaggaaagaaataattgataagctagacttcattaaaatgaaaacttctgctctgtgaaagatgctgcc

SEQ ID NO: 461586 - DNA, 3967 bp, Homo sapiens
cactctgctccctgctccactgctttttggctccctgccatgtctcccccactgaacagcttaaagatctggcttgagtttggacactactttgccctggtttttccctctgcaccctacctctcacatccacttcaggtatccactttctgctgctccaagtgccaggctcacagcacccatatccggcaggcctgcctgtcctctcacgcactgacttgcccagctgccccttccctccattctcacacaggagctcagaaccccatttcgtgggaggtgcagcgatttgatgggtggtacaacaacctcatggagcacagatggggcagcaaaggctcccggctgcagcgcctggtcccagccagctatgcagatggcgtgtaccagcccttgggagaaccccacctgcccaacccccgagaccttagcaacaccatctcaaggggccctgcagggctggcctccctgagaaaccgcacagtgttgggggtcttctttgcaccccctcctgcactgcccgcaggctatcacgtgctttcagacctggtgagcgtggaaactcccggctgccccgccgagttcctcaacattcgcatcccgcccggagaccccatgttcgaccccgaccagcgcggggacgtggtgctgcccttccagagaagccgctgggaccccgagaccggacggagtcccagcaatccccgggacccgccgcggacacccgccgggccccggccttccctagctcgccgccgcccatcgacccgggctcacccgccgcgtgccccgcaggccaaccaggtgacgggctggctggacggcagcgccatctatggttcctcgcattcctggagcgacgcgctgcggagcttctccaggggacagctggcgtcggggcccgaccccgcttttccccgagactcgcagaaccccctgctcatgtgggcggcgcccgaccccgccaccgggcagaacgggccccgggggctgtacggtgaggccacaggggcgggacggggccggctgggggtctgcgagtgtgggctcccccgatcacgctaccgctcgtctcctcccctgcgcccccacgcgctgggcctgctctggttccgctaccacaacctgtgggcgcagaggctggcccgccagcacccagactgggaggacgaggagctgttccagcacgcacgcaaagggtcatcgccacctaccaggtcagccgtccgcgccccgcgacgtcctcccttccgcaacatcgctgtgtatgagtggctgcccagcttcctgcagaaaacactcccggagtatacaggataccgtcctttcctagaccccagcatctccccggaatttgtggtggcctctgagcagttcttctctaccatggtgccccctggtgtctacatgagaaatgccagctgtcatttccggaaggtcctgaacaagggttttcaaagctcccaagctctcagggtctgcaacaactactggattcgggagaaccccaatctgaacagtacccaggaggtgaatgagctgctgctgggaatggcctcccagatttcggagttggaggacaacatagtggttgaagatctgagggattactggcctggccctggcaaattctcccgtacagactatgtggccagcagcatccaacgtggccgagatatggggctgcccagctatagccaggccctgctggcctttgggctggacatcccaaggaactggagtgatctcaaccctaatgtggacccccaggtgctggaggccacagctgccctgtacaaccaggacctatcccagctagagctgctccttggcgggctcctggagagccatggggaccctggacccctgttcagtgccattgtcctcgaccagtttgtacggctgcgggatggtgaccgctactggtttgagaacaccaggaatgggctgttctccaagaaggagattgaagacatccgaaataccaccctgcgggacgtgctggtcgctgttatcaacattgaccccagtgccctgcagcccaatgtctttgtctggcataaaggtgcaccctgccctcaacctaagcagctcacaactgacggcctgccccagtgtgcacccctgactgtgcttgacttctttgaaggcagcagccctggttttgccatcaccatcattgctctctgctgccttcccttagtgagtctgcttctctctggagtggtggcctatttccggggccgagaacacaagaagctacaaaagaaactcaaagagagcgtgaagaaggaagcagccaaagatggagtgccagcgatggagtggccaggccccaaggagaggagcagtcccatcatcatccagctgctgtcagacaggtgtctgcaggtcctgaacaggcatctcactgtgctccgtgtggtccagctgcagcctctgcagcaggtcaacctcatcctgtccaacaaccgaggatgccgcaccctgctgctcaagatccctaaggagtatgacctggtgctgctgtttagttctgaagaggaacggggcgcctttgtgcagcagctatgggacttctgcgtgcgctgggctctgggcctccatgtggctgagatgagcgagaaggagctatttaggaaggctgtgacaaagcagcagcgggaacgcatcctggagatcttcttcagacacctttttgctcaggtgctggacatcaaccaggccgacgcagggaccctgcccctggactcctcccagaaggtgcgggaggccctgacctgcgagctgagcagggccgagtttgccgagtccctgggcctcaagccccaggacatgtttgtggagtccatgttctctctggctgacaaggatggcaatggctacctgtccttccgagagttcctggacatcctggtggtcttcatgaaaggctccccagaggataagtcccgtctaatgtttaccatgtatgacctggatgagaatggcttcctctccaaggacgaattcttcaccatgatgcgatccttcatcgagatctccaacaactgcctgtccaaggcccagctggccgaggtggtggagtctatgttccgggagtcgggattccaggacaaggaggagctgacatgggaggattttcacttcatgctgcgggaccatgacagcgagctccgcttcacgcagctctgtgtcaaaggtggaggtggaggtggaaatggtattagagatatctttaaacaaaacatcagctgtcgagtctcgttcatcactcggacacctggggagcggtgagcaggaatggggctctggcaggttggcctggctgagccccctgcagagaaatgaagggagtaggactggctgatcagcccctggtaaaatcaggcatttgccctttgaaagtagctcatggtagcacaaacattccagctgcctctctcaccctatgctgctcggatgcttggctctctccctgctgctccaggccagaatcattctacaaaacaaatcatgagatcctattaattcattttgtgccttgccccctgcctggtaccaggagccactccctacctctaccccatgctctgcccagggagttgttctcctggctgcaaagacaaggggagaacagccccatttctttttctcagctcccacccccagggactggggccccctgccccagaagccccagagctgggaggccctggactgaagaagaggtttggcaaaaagatcggaggtagagtctgtcctggttggcatctctaacagggtctgtctcttccagttttgcacagtgctggccacgcagtcaatgtctacatcttctcagtcagcccactcagcctgctggcctgcatattccccaacgtctttgtgaatgatgggtcagttctggggaaggtttctcctgggactcatagggtgggcccaagggtataatagaaaaagaaat

SEQ ID NO: 461587 - DNA, 1675 bp, Homo sapiens
cactcacctttatgccagacaaagacattgggctgcagggcactggggtcaatgttgataacagcgaccagcacgtcccgcagggtggtatttcggatgtcttcaatgtgcaccctgccctcaacctaagcagctcacaactgacggcctgccccagtgtgcacccctgactgtgcttgacttctttgaaggcagcagccctggttttgccatcaccatcattgctctctgctgccttcccttagtgagtctgcttctctctggagtggtggcctatttccggggccgagaacacaagaagctacaaaagaaactcaaagagagcgtgaagaaggaagcagccaaagatggagtgccagcgatggagtggccaggccccaaggagaggagcagtcccatcatcatccagctgctgtcagacaggtgtctgcaggtcctgaacaggcatctcactgtgctccgtgtggtccagctgcagcctctgcagcaggtcaacctcatcctgtccaacaaccgaggatgccgcaccctgctgctcaagatccctaaggagtatgacctggtgctgctgtttagttctgaagaggaacggggcgcctttgtgcagcagctatgggacttctgcgtgcgctgggctctgggcctccatgtggctgagatgagcgagaaggagctatttaggaaggctgtgacaaagcagcagcgggaacgcatcctggagatcttcttcagacacctttttgctcaggtgctggacatcaaccaggccgacgcagggaccctgcccctggactcctcccagaaggtgcgggaggccctgacctgcgagctgagcagggccgagtttgccgagtccctgggcctcaagccccaggacatgtttgtggagtccatgttctctctggctgacaaggatggcaatggctacctgtccttccgagagttcctggacatcctggtggtcttcatgaaaggctccccagaggataagtcccgtctaatgtttaccatgtatgacctggatgagaatggcttcctctccaaggacgaattcttcaccatgatgcgatccttcatcgagatctccaacaactgcctgtccaaggcccagctggccgaggtggtggagtctatgttccgggagtcgggattccaggacaaggaggagctgacatgggaggattttcacttcatgctgcgggaccatgacagcgagctccgcttcacgcagctctgtgtcaaaggtggaggtggaggtggaaatggtattagagatatctttaaacaaaacatcagctgtcgagtctcgttcatcactcggacacctggggagcgctcccacccccagggactggggccccctgccccagaagccccagagctgggaggccctggactgaagaagaggtttggcaaaaaggcagcagtgcccactccccggctgtacacagaggcgctgcaagagaagatgcagcgaggcttcctagcccaaaagctgcagcagtacaagcgcttcgtggagaactaccggaggcacatcgtgtgtgtggcaatcttctcggccatctgtgttggcgtgtttgcagatcgtgcttactactatggctttgccttgccaccctcggacattgcacagaccaccctcgtgggcatcatcctgtcacgaggcacggcg

SEQ ID NO: 461588 - DNA, 1873 bp, Homo sapiens
aacctcatctgtccaacaaccggacgatgccgcaccctgctgctcactatcccagctagagctgctccttggcgggctcctggagagccatggggaccctggacccctgttcagtgccattgtcctcgaccagtttgtacggctgcgggatggtgaccgctactggtttgagaacaccaggaatgggctgttctccaagaaggagattgaagacatccgaaataccaccctgcgggacgtgctggtcgctgttatcaacattgaccccagtgccctgcagcccaatgtctttgtctggcataaaggtgcaccctgccctcaacctaagcagctcacaactgacggcctgccccagtgtgcacccctgactgtgcttgacttctttgaaggcagcagccctggttttgccatcaccatcattgctctctgctgccttcccttagtgagtctgcttctctctggagtggtggcctatttccggggccgagaacacaagaagctacaaaagaaactcaaagagagcgtgaagaaggaagcagccaaagatggagtgccagcgatggagtggccaggccccaaggagaggagcagtcccatcatcatccagctgctgtcagacaggtgtctgcaggtcctgaacaggcatctcactgtgctccgtgtggtccagctgcagcctctgcagcaggtcaacctcatcctgtccaacaaccgaggatgccgcaccctgctgctcaagatccctaaggagtatgacctggtgctgctgtttagttctgaagaggaacggggcgcctttgtgcagcagctatgggacttctgcgtgcgctgggctctgggcctccatgtggctgagatgagcgagaaggagctatttaggaaggctgtgacaaagcagcagcgggaacgcatcctggagatcttcttcagacacctttttgctcaggtgctggacatcaaccaggccgacgcagggaccctgcccctggactcctcccagaaggtgcgggaggccctgacctgcgagctgagcagggccgagtttgccgagtccctgggcctcaagccccaggacatgtttgtggagtccatgttctctctggctgacaaggatggcaatggctacctgtccttccgagagttcctggacatcctggtggtcttcatgaaaggctccccagaggataagtcccgtctaatgtttaccatgtatgacctggatgagaatggcttcctctccaaggacgaattcttcaccatgatgcgatccttcatcgagatctccaacaactgcctgtccaaggcccagctggccgaggtggtggagtctatgttccgggagtcgggattccaggacaaggaggagctgacatgggaggattttcacttcatgctgcgggaccatgacagcgagctccgcttcacgcagctctgtgtcaaaggtggaggtggaggtggaaatggtattagagatatctttaaacaaaacatcagctgtcgagtctcgttcatcactcggacacctggggagcgctcccacccccagggactggggccccctgccccagaagccccagagctgggaggccctggactgaagaagaggtttggcaaaaaggcagcagtgcccactccccggctgtacacagaggcgctgcaagagaagatgcagcgaggcttcctagcccaaaagctgcagcagtacaagcgcttcgtggagaactaccggaggcacatcgtgtgtgtggcaatcttctcggccatctgtgttggcgtgtttgcagatcgtgcttactactatggctttgccttgccaccctcggacattgcacagaccaccctcgtgggcatcatcctgtcacgaggcacggcg

SEQ ID NO: 461589 - DNA, 759 bp, Homo sapiens
ccggcgcttcttctaccgggctatctccccgcgccgaggcgataagggcggcgctccaggtgctcatcttttccaagaatggctctgtgtgccttatggatgtggccaagcgtgaaatcatctgtgcctttgcccctccgggagcctttcctctggaggtcccctggaagccagtgtttgctgtgtctccagaccatccatgtttcctgctccgaggagactattcacatgaaactgcgtccaccgacgatgctggaatccaatattctgttttctattttaattttgaggcctgcccactcctggaaaatatctcaaaaaattgtaccattcctcaaagggacttggataacatggccttcccccaagcactgccactggagaagagatgtgagcgtttcctccagaagagctatcggaagctggagaagaacccagagaaggaggaggagcactgggcccggcttcagaggtactccttgtcgctccagagagagaacttcaagaagtgaggctgccaccgccctgggatctctgaaaaggaggtttcagccacgaggcagctgctcccaggacactgaggccaagagaaatgtaacagagccacagctccacaggcctgcactcggagtctggggcctctgcagagccagcaaggggaaaagtataatctgggggaccttcaaccactaagcctcttgtcagagccctcaggcaggcagatgtgtcacccaaataaacagtgatattgtctccaga

SEQ ID NO: 461590 - DNA, 1562 bp, Homo sapiens
ctcgggagggagcaggtccttcttccagaccactttaggggaaatgattgaagtcccacctcctggccagggccggggggttcagcctggaatttcccccttttgggagggccaggcgggcggataccctgagggcaccacattcaaaagccccctggaagtctttgcaaagatcaaggactgctacggactgggctccgggcagaatcatttcatcaaggacagtcagtgggagcagcaagctgagatcttcaacgcttcctacaagaagtacctagatagggagtgggaggaagagccactcagtacggccaccttctatttccttcttcctagctgcctatttgcaatgccaccggaagtcaagggcccctcaggaatggcctgtgtccttggtatacactggaccagaagtcacaatttcttcctgtattcactaaaccgaactctaaaggataaagctgaccccgagggtgtgtggccctgtgctgcgcccattgcagtctctcagctcagctgctcctcctcctacctggtgctggcctgcgaggatggtgtgctcacgctgtgggacctggccaaaggattccctcttggggtcgctgctcttcctcagggatgtttctgccaaagcattcacttcctaaaatatttctcggtccacaaaggacagaatatgtatcctgaaggtcaagtgaaatcccaaatgaaatgtgtggtgctgtgcacagacgcctccctccatctggtggaggctagcgggacccaaggacccaccatcagtgtgcttgttgagaggcctgtaaagcacctggataaaaccatctgtgccgtggccccagtcccagccttacctggcatggtgctcatcttttccaagaatggctctgtgtgccttatggatgtggccaagcgtgaaatcatctgtgcctttgcccctccgggagcctttcctctggaggtcccctggaagccagtgtttgctgtgtctccagaccatccatgtttcctgctccgaggagactattcacatgaaactgcgtccaccgacgatgctggaatccaatattctgttttctattttaattttgaggcctgcccactcctggaaaatatctcaaaaaattgtaccattcctcaaagggacttggataacatggccttcccccaagcactgccactggagaagagatgtgagcgtttcctccagaagagctatcggaagctggagaagaacccagagaaggaggaggagcactgggcccggcttcagaggtactccttgtcgctccagagagagaacttcaagaagtgaggctgccaccgccctgggatctctgaaaaggaggtttcagccacgaggcagctgctcccaggacactgaggccaagagaaatgtaacagagccacagctccacaggcctgcactcggagtctggggcctctgcagagccagcaaggggaaaagtataatctgggggaccttcaaccactaagcctcttgtcagagccctcaggcaggcagatgtgtcacccaaataaacagtgatattgtctccaga

SEQ ID NO: 461591 - DNA, 107 bp, Homo sapiens
cttcacatcctacaagtccctcacacacttgctggtcacagcccctgtgcccatggcctcctcccctaccccgttttctgaccggcttgtgtgattactttctctag

SEQ ID NO: 461592 - DNA, 1732 bp, Homo sapiens
ctcgggagggagcaggtccttcttccagaccactttaggggaaatgattgaagtcccacctcctggccagggccggggggttcagcctggaatttcccccttttgggagggccaggcgggcggataccctgagggcaccacattcaaaagccccctggaagtctttgcaaagatcaaggactgctacggactgggctccgggcagaatcatttcatcaaggacagtcagtgggagcagcaagctgagatcttcaacgcttcctacaagaagtacctagatagggagtgggaggaagagccactcagtacggccaccttctatttccttcttcctagctgcctatttgcaatgccaccggaagtcaagggcccctcaggaatggcctgtgtccttggtatacactggaccagaagtcacaatttcttcctgtattcactaaaccgaactctaaaggataaagctgaccccgagggtgtgtggccctgtgctgcgcccattgcagtctctcagctcagctgctcctcctcctacctggtgctggcctgcgaggatggtgtgctcacgctgtgggacctggccaaaggattccctcttggggtcgctgctcttcctcagggatgtttctgccaaagcattcacttcctaaaatatttctcggtccacaaaggacagaatatgtatcctgaaggtcaagtgaaatcccaaatgaaatgtgtggtgctgtgcacagacgcctccctccatctggtggaggctagcgggacccaaggacccaccatcagtgtgcttgttgagaggcctgtaaagcacctggataaaaccatctgtgccgtggccccagtcccagccttacctggcatggtgctcatcttttccaagaatggctctgtgtgccttatggatgtggccaagcgtgaaatcatctgtgcctttgcccctccgggagcctttcctctggaggtcccctggaagccagtgtttgctgtgtctccagaccatccatgtttcctgctccgaggagactattcacatgaaactgcgtccaccgacgatgctggaatccaatattctgttttctattttaattttgaggcctgcccactcctggaaaatatctcaaaaaattgtaccattcctcaaagggacttggataacatggccttcccccaagcactgccactggagaagagatgtgagcgtttcctccagaagagctatcggaagctggagaagaacccagagaaggaggaggagcactgggcccggcttcagaggtactccttgtcgctccagagagagaacttcaagaagtgaggctgccaccgccctgggatctctgaaaaggaggtttcagccacgaggcagctgctcccaggacactgaggccaagagaaatgtaacagagccacagctccacaggcctgcactcggagtctggggcctctgcagagccagcaaggggaaaagtataatctgggggaccttcaaccactaagcctcttgtcagagccctcaggcaggcagatgtgtcacccaaataaacagtgatattgtctccagactcccaagttgctgtggtatataactcatcgttcccacgcagtccagaccccagcagggcccagatgatggtttcaaccagagtcctcggcctgcgtgtgaggggagagcgggtggggagaggggatctgaggcattcacaaggcgtcttatgtgccaggtcccaccagc

SEQ ID NO: 461593 - DNA, 824 bp, Homo sapiens
  misc_feature (760)..(760): n is a, c, g, or t
  misc_feature (775)..(776): n is a, c, g, or t
  misc_feature (785)..(785): n is a, c, g, or t
  misc_feature (790)..(790): n is a, c, g, or t
  misc_feature (792)..(792): n is a, c, g, or t
  misc_feature (794)..(794): n is a, c, g, or t
  misc_feature (796)..(796): n is a, c, g, or t
  misc_feature (803)..(804): n is a, c, g, or t
  misc_feature (809)..(809): n is a, c, g, or t
ccggcgcttcttctaccgggctatctccccgcgccgaggcgataagggcggcgctccaggtgctcatcttttccaagaatggctctgtgtgccttatggatgtggccaagcgtgaaatcatctgtgcctttgcccctccgggagcctttcctctggaggtcccctggaagccagtgtttgctgtgtctccagaccatccatgtttcctgctccgaggagactattcacatgaaactgcgtccaccgacgatgctggaatccaatattctgttttctattttaattttgaggcctgcccactcctggaaaatatctcaaaaaattgtaccattcctcaaagggacttggataacatggccttcccccaagcactgccactggagaagagatgtgagcgtttcctccagaagagctatcggaagctggagaagaacccagagaaggaggaggagcactgggcccggcttcagaggtactccttgtcgctccagagagagaacttcaagaagtgaggctgccaccgccctgggatctctgaaaaggaggtttcagccacgaggcagctgctcccaggacactgaggccaagagaaatgtaacagagccacagctccacaggcctgcactcggagtctggggcctctgcagagccagcaaggggaaaagtataatctgggggaccttcaaccactaagcctcttgtcagagccctcaggcaggcagatgtgtcacccaaataaacagtgatattgtctccaganaaaaaaaaaacggcnngttggcctnagggngnantntgcggcnnttccnttagtgaggttaatt

SEQ ID NO: 461594 - DNA, 1440 bp, Homo sapiens
cctgttctctccccagtgagaaagcgtgctcccattttcactcctggatgttcagcacctcagcctgcacctgcacagctctaacaatacgcaagcccaaagagggctgtgcacattatggcctttgttttccagattcgaatgtgccccccagatctccacgccgtgcaatttctcggacaaaccaactcacgtcttcttattggaaatgaacaagagtttctgcagctgctgatgctgccaccatcccgcaacaacgagggaaagagcatgagaacgaagcccaggcacagaagaaaggcagccataaaagtgtcagaaaaacggagccggagcctgattatcctcctcatcttggtacacactcacactcacacactccctatggtgtctgcatcggacaacactcaactcgggattggcacccagccagtgccctacactatacaagatgccactgtagggacagggatgacctctagcaaggtgaccctcagtgggccagagggggcttctgaagagaatttctctagcttcttggtgtttcctgcctgctactttcaaacaagggtcccatttttaatgttttcccagtaataccttatgaatgttattgcaaagcagcgggctaaatcaacaccacaggccccgtgatcaatatatgtgatgaggacattacatcctggtgttgttgccccaagtcttgacgtgaatctgaccacaaggacaattcggacaacctgaaatggtgacgcattctacaaaataaacatcaatgtcatgaaagacaaagactcaagattttctgcttaatggagactaaagagatgcgacaacagaatgccaggcatgatcttggatattcttttggctcaaacagtcttaggacaattgaaaaaacgtgaatgaggtctgtagctaatagaattgtgtcaatgccacatccttggttttgttaattgcattgtggttacagaagagaatccctttgttttcaggaaatgcacacagcagtatttaatagtaaaggcacatcttgtctgcaacttcctctgtgtgtgtgtgtgtgtgtgtgtgtgtgtgtgtgtgtgtgtgtgagagagagagagagagagagagagagagatgcaacaaatatggtaaatattaattttggggactctgggtgaagggtatcttgagatttttgtgctcctcttctgcacatctgaaatcatgtcaaaaaataaaaaaggtgtgcactctgcaagggatacccagatacccatgcagaagagagaactgattcaagagatgaacccaggtgggagccacgatgatgcccactggggaatgagcctgtaaatccaggagaggctgcacctgcagcccattcctccagggtggttctcctagacctgcttcaagtgtcatggtttaaattctcaggcaccccttggg

SEQ ID NO: 461595 - DNA, 238 bp, Homo sapiens
atactttctgtacatatgtggcttggattgtcttccgacgtcaacacttgacagagattgaagaagaagtagggagactctttcgtaccaatatgttcaacattcctcgcaggaggcgtgaagatgaggaatcaggaggggaaaagaaacgcatgacttttgttcagttcaggtatgaccttttgactttcctatgctcaggggtatttcttttcttcctttcctttcttttcttttc

SEQ ID NO: 461596 - DNA, 1558 bp, Homo sapiens
tcgtcgccttcgccccgggctggcggttctcaaagacacctggccatatttgcctagaaaaaaaaaaaactctggtgtatttgacagatggtcagaattgaattctggctccctgcgcagcagttgggattacgattagggatgtggtactggaaagatgaaaccagaactcttgaattcagaagatgaagaaacaaggctcagggagattaagcaactgaaccaaagtcatacagccagtttgccgcagaagattctgtccagtggctcctgaaacatcaccctcattttacacctgcagcagaagtcaaggaaaaaggaaagaaaggcaaagcagttcactttgcagaaactgatggtccagcttcagacaggttgacagataaaagacttgctgcaaaagatgataagtcagctaaagctgtagagaaacgaggtcaacagggcaccattacactggatgatgttaaatttgttactttgcttttgctacaagatactgagatgcagcggatctgttcttttacaacatttatgaggaataagaatcttgataatttcctcatggcattattgtactacttatcccattacttggaaaaaaactcactggaaaagaaacccaaaagctatatggtaggccttgtagagaaaaaagaaatggaattggttttaagtgaattagaagcagcacagaggtacttggcgcagaagtactgtatccttgtgctgggcttggccgtgccggataagcatcacatgtgctgtggaaaggagaaaatatcagatacacagaaagactggaagttctttgagtccttttatactttctgtacatatgtggcttggattgtcttccgacgtcaacacttgacagagattgaagaagaagtagggagactctttcgtaccaatatgttcaacattcctcgcaggaggcgtgaagatgaggaatcaggaggggaaaagaaacgcatgacttttgttcagttcaggagaatgatggcaaaacgcccagcaattaaaaaagctatcaacatgcgttctccagtcatgtctactctgctgccatctctcagagaaaaagctcaaaacgtctttgagaaaaagtatcatcaagtagacgtcagattcccagccgagatgcaaaagcatgtgggaactctggactctgtgcccatgccggtagttggcatcttgggggagcctcgatgtctattcaacccacatacgcttcacccccttgatccagaagaaaacacaaaatcatttgggagatatccttccttgatggaaaacaataacatgaggattcaggatacactggacttggtcatgaaaacactgtcctctcatacatcatgccctaagtaacctggtacattccatatctcaagtaaactactttgactttatagaagatggatttggagaggtgggaagttaggaggggaatattcctggttgtcttcattatctactgctgtataacattacctcaaaacatggtagcttaaaacagcaacatttattgtctcatagttttggtaggtcagga

SEQ ID NO: 461597 - DNA, 657 bp, Homo sapiens
tggcacaccgtggaacactatgcagccataaaaaaggatgagttcatgtcctttgcagggacatggatgaagctaggagccatcattctcagcaaactaacacaggaacagaaaaccaaacaccatatgttctcactcataagtgggagttaaacaatgagaacatacggacacagggaggggaacatcacacatgggggcctgttggggccattcacctttttgtttctcttttgcttcaagtctctgaaatatcagctgctttaagtcctcgtctgctcattcccacattcccactacatccaggatgccatcctgctgaaatgctgcactctgtcgttggagctgtgggtgtctctgaagtcctcctctcttttctctcatatggacatcagtcagatgtaagggctgctgagttttgcttggtcagcagtgaatttatcggtgggactggctgactttcgcaggcttccctgctttcaggaagctcctcagaggtgaatcagataatgaagcagaacaagatctgcccttgtgaattgcttatttgattgccatcatcttaattttaattttattataaagtgtgtaggcaacacagttgaagaaaactgtgaagccacaggagcctaagcaatagattcgattccttccatt

SEQ ID NO: 461598 - DNA, 2309 bp, Homo sapiens
ggccagcaccaggcagtggggacggagccccagtgcaggcacaatgtggaaaacctggagccgacacgacctgcaggacgcacagtggttctgcgtcatcacagacagcaaggggttcaggaggcggccggtcggcagcggacaggacatgccctcgctcgctctcggtgcctcctcggccttggcgcccactctggccgtgcttgaggagcccttcagcccaccgctgcactgtgggagcccctttctgggctggccaaggccggagccggctccctcagcttgctgggaggtgtggagggagaggtgcgggctgcgcgcggcccttgcgggccaacgcaagttcctggtgggcgtggactcggctggcccagcactcggagaggccggccggccagcccgcaagcccggggcagtgaggggcttagcacctgggccagcatttgctgtgctcgatttctcgccaggccttagctgcttccccgcagggcagggcttgggacctgcagcccgccatgcctgagcctcctccccctccccaccgtgggctcctgcgaggcccgagcctcccagacgagcgctgctccctgctccatggcgcccagtcccattgaccgcccaagggctgaggagtgtgggcgtacagcgcgggactggcaagcagctccacctgaggccccgtgggggatccactgggtgaagccagctgggctcctgagtctggtggggacttggagaatctttatgtctagctaaggggttgtaaatgcaccaatcagcactctgtatctagctgaaggtttgtaaacacaccaatcggcaccctctgcctagctcagggtttgtgaatgcaccagtcggcactctgtatctagttaatctggtggggacttggagaatctttatgtctagctaagggattgtgaatgcaccaattggcactctgtatctagctcaaggtttgtaaatgcaccaatcagcactctatatctagctcagggtttgtaaatacaccaatggacactctgtatctagctaatctagtggggacgtggagaacttttgtgtctagctcagggattgtaaacgcaccaatcagcaccctgtcaaaacggaccaatcagctctctgtaaaatggaccaatcagcaggatgcgggtggggccagataaaagaataacagcgggctgccgaagccagccgtggttgccttacacactatgcaagctttgctgtttgcagtaaaactggctgctgcttgctctttgggtccacactgactttatgagctgtagcactcaccatgaaggtttgtagctttactcttgaagccagtgagattaaaaacccaccgggaggaacaaacaactccagtacgcgccgccttaggagctgtaacactcacggcgaaggtctgcagcttcactcctgagccagccgcaccacgaacctatcagaaggaagaaactccgaacacatccgaacgtcaggaacaaactccggccacgccgcctttaagaactgtagaactcgctacagcactcaccgtgaaggctccagcaggccccacgaacaggactctgggccttatgccaggagggggaagattcaaagagggcccctcacctgggtctgacccaaacccacaccaaagccagcaggtcatccagagctgattccctgggaagcctgcccaggaaccaccgtccgtcgggctttcttattgtaagagcttttttttttttttcctcctttggcagagcacagcgctgggctccagccctgatgcagaggtacaaagctcgtctgggcagattgttatgcaaatcaaaagaggaagcagagctaggggagccgaggagctcctgctgggctctgccagggaagaagccgcagtaggagcccctacgtaggccctgcaagaggcctggtgttcaggaaagggcccgctgaccatccagtgcagggaaaggagtccagctctggcctctgcccctcagctccacctcctgcattcctaggagttctccagaggatctgatgggagctcagaaccggtcccaacagctccctccacccttcatgaacgggggctggaaaatgtggtctgctctgataaggatttgcgtcaggctactggctactcagcagccgagaagagcaagcctccaggcctctgcacgcgtgccttctgcccggtgagcctctcactatcgtccttctaaaagacacttcaaaaagaggcaaaatcatgccttccatacatatattaaaaaaagaatatgtgtcaaatattttattctactcct

SEQ ID NO: 461599 - DNA, 882 bp, Homo sapiens
tcagggcccgagggatgcatcactgagggagccacgactggtctctgggcctgacggtaaaccagggctgttaagtgttgcccaggtggccagcaagacaaataagtgcctcaagctaaggtaaatgaggaccagagagatgaagctcctggctcaagtggctcctatcccatgattccagctctccagcaattctcccccactcccacctctattcgattctggggccgaaagccagcaaggcagagccactgggaccttccctgcctgagaagcgcatagaagtaagaccctcgaacaggtccaagctgggcccatcacagaaaacagatgtccactgagggtccagcatcgggatttagggctattttttacaatgttactgaatgaataaattcccccaagacttacattttaaaatttaagatctttggtgacaatttcctccaactgctaatgacaattcagcggcaggtgaccatccttgctgggacacggggctcctggagcaagtcctgtgcagctgaagaggggagcgaatgggaactttggaaggaggaggaaacaggaagtccaagcgagctccacgaagcctccgggcaggaacgcaaacaggaaagcgaggtctccactctgggtacagtggccagatctgatgaccttagcaaagccgctcttggcctggagaatcttgcaagcttggactttctggggctcccagggagaactggggatcaatcccggtcagacaccatgaccctggtcaagtgcctccttcccacttatctcatacacaaaatgggaatggtgcctacagtagaggctttctgccaagatgacaagagccacttacacaaagagcatgtggtggacacctagcgg

SEQ ID NO: 461600 - DNA, 632 bp, Homo sapiens
ccggaggctccaacgtctgtctccctgtgatgctgtgcttcagtggtcacgctccttgttcactttcatgttcagcctgtacacctggctcctccttttaagttcttagaagacagcagtagcagaactagtaggagtaccacagtcttcgatctttctgataagtgcatagaagaaacgctgacgtttgctgtcctccctctccacctcggctaccacaaagggaaaggccccctgtccagtggacacgtgactcgcgtgacctatcgatcattggagatgactggcactccttaccctgcccccttgccttgactacaataaatagcagcgcctccaggcactcggggccactacctgtctgtctccgcgctttggtggcagtggtcccccgggcccagctgtctttcttcctatctctttgtcttctgtctttatctcttcgatctctcgtctccgcacacacgcgaagagaaaacccacagacccggtaggggtggaccctacattatctcagctacaacataatcaggatattcacgtggactactgagtctttcggtgcccccttgctgttttagttttgtctctgaagcacgtcggtatggggatccttctagagtctgtccctg

SEQ ID NO: 461601 - DNA, 1529 bp, Homo sapiens
ccggaggctccaacgtctgtctccctgtgatgctgtgcttcagtggtcacgctccttgttcactttcatgttcagcctgtacacctggctcctccttttaagttcttagaagacagcagtagcagaactagtaggagtaccacagtcttcgatctttctgataagtgcatagaagaaacgctgacgtttgctgtcctccctctccacctcggctaccacaaagggaaaggccccctgtccagtggacacgtgactcgcgtgacctatcgatcattggagatgactggcactccttaccctgcccccttgccttgactacaataaatagcagcgcctccaggcactcggggccactacctgtctgtctccgcgctttggtggcagtggtcccccgggcccagctgtctttcttcctatctctttgtcttctgtctttatctcttcgatctctcgtctccgcacacacgcgaagagaaaacccacagacccggtaggggtggaccctacattatctcagctacaacataatcaggatattcacgtggactactgagtctttcggtgcccccttgctgttttagttttgtcctgcggccgagtgtttccctcgctctcgcttcacgccaacacaatctccgccgccctgtcttgtcatccccattctacagcccagcacggtgtagtatggcagccgctagccacaggtatctagggagccctggaaatgtggtcagttctaatggagctgcgctgggtggagccctcatggagaaccactgctagggcagtgcaaagggaaattgtggggtgcaagccctcacacagactcccaactggggcagtgcctagtggagctgcaagaaaagagtcactgtcctccagaccccagaatggtagctccactgacagcttgcaccttgctcctggaaaagccacagacactcaaggcctgcctgtgaaagcagctgggagggggggctataccctgcaaagccacaggggcagagctgccaaggccatgggagcccacctcttgcatcagtgtgacctggacatgagacatggagtcaaaggaaatcattttggggctttaagatttgactgctgccaggcattgaataagtctcacaagatctgatggttttataaaggggagttcccttgcacaagttctctctcaccttccaccatgtaagacatgcctttcaccttccaccatgattgtgaggcttccccagccacgtggaactgtgagtccattaaacctctttttctttataaattacccagtctccgcttgcccagggttaaggtgagcccagtcagcttccaccagttacactcagtgacacaggtgcagtttgttagagttggtgcagttagattagttggaggtgggcccaaggactttggggatgcgggttgagggggtggggagtggggtgacaggtaccaaagggtagcagagggagggatggtagaggtgattggagagtgtgaccctcgaagtggatggggttatggcaatc

SEQ ID NO: 461602 - DNA, 1725 bp, Homo sapiens
ttggtagtaacaagagcacacaatgatcaatggttcccaagggggcatgcaattggcttgtttgaataaattcatgggctggcagacagaggagctctatggtgactttgaagacttggaaacaggggacgtgcacaagggaaaatcgggccccgatactcagagaaacaaggaagaaattgaccccgacaaagaagaaagtgccaagaaaaagcatttggataagaagagaaaattgaaggagatgtttgatgaggaatatgatgaaggagaaagcacatattttgatgatcttaaaggagaaatgcagaaacaagcacagctgaatcgcacagaatttgaagatcaagatgatgaagccagagttccatatgagggttttcggcctggggtgtacgtccgcgttgagattgaaaatgttccctgtgaatttgtgcagaactttgacccccattaccccattatcctgggtggcttgggcaacagtgagggaaatgttggagacgtgcaggtgggtccctttgctgcatatttggtgcctaaggctctgtggatttcccctccatcaatcatcttacactctcatccccctcagatgcatctgaagaaacatcgctggtataagaaaatcctcaagtcccgagatccaatcatattttctgtagggtggaggaggtttcagaccatcccgctctattatatcgaagaccataatggaagacaaaggcttctaaagtataccccacagcacatgcattgcggagcagccttttgggaaggagctttccgggccagctttgaggataagctgctgatgagcgatattgtcttcatgcgaacttggtatcctgtttccatcccagccttctataacccagtaacatctttgttgaaaccagtgggtgagaaagacacctggtcaggaatgtggaccacgggccaactcaggctcgcctatggtgtcagactaaaggcaaataaggactctctgtataagaaaaaagaaaaaataaaaaacaaacccaagacccaagcaaaggacaggcggagactggccgtcatgcgtgagcctcatgaaagaaagatcctcacactgctggatgctctgagtatggtgcacagtcagaagatgaagaaggccaaggagcagcggcacctgcacaataaagagcacttcagagccaagcagaaggaggaggaggagaagctgaagtggcagaaggacctcaggaagaagctcttccaaattcaggggcagaaggaaagaagaaaccagaagtccagtttgaagggggctgagggccagtttcagtgagcctttggactggagggactgtccctggatctgcagaggtggacagtttcaaacatcacagtttgaatgcctgtgaatgacaagtcagtgggcaagaactcaagagatgtctctacacaaactgtgcctgcaagaggaacagagaagcctggactacttggaccgggttcattctcatcacttggggctgtcgagatttaaagtgatgtaagctgtggttgtgtggattctcttactttcctctgcctgcctcagtttaattattttgtcctgcaaaaataccattaaatttttttttgttagttttggcttagtagttttcattagggatgaatgcctgacaattctttgtggataattatttatgctaccaccttcatgaggagtcttccagaagagaaagaaatatt

SEQ ID NO: 461603 - DNA, 1759 bp, Homo sapiens
ttggtagtaacaagagcacacaatgatcaatggttcccaagggggcatgcaattggcttgtttgaataaattcatgggctggcagacagaggagctctatggtgactttgaagacttggaaacaggggacgtgcacaagggaaaatcgggccccgatactcagagaaacaaggaagaaattgaccccgacaaagaagaaagtgccaagaaaaagcatttggataagaagagaaaattgaaggagatgtttgatgaggaatatgatgaaggagaaagcacatattttgatgatcttaaaggagaaatgcagaaacaagcacagctgaatcgcacagaatttgaagatcaagatgatgaagccagagttccatatgagggttttcggcctggggtgtacgtccgcgttgagattgaaaatgttccctgtgaatttgtgcagaactttgacccccattaccccattatcctgggtggcttgggcaacagtgagggaaatgttggagacgtgcaggtgggtccctttgctgcatatttggtgcctaaggctctgtggatttcccctccatcaatcatcttacactctcatccccctcagatgcatctgaagaaacatcgctggtataagaaaatcctcaagtcccgagatccaatcatattttctgtagggtggaggaggtttcagaccatcccgctctattatatcgaagaccataatggaagacaaaggcttctaaagtataccccacagcacatgcattgcggagcagccttttgggaaggagctttccgggccagctttgaggataagctgctgatgagcgatattgtcttcatgcgaacttggtatcctgtttccatcccagccttctataacccagtaacatctttgttgaaaccagtgggtgagaaagacacctggtcaggaatgtggaccacgggccaactcaggctcgcctatggtgtcagactaaaggcaaataaggactctctgtataagaaaaaagaaaaaataaaaaacaaacccaagacccaagcaaaggacaggcggagactggccgtcatgcgtgagcctcatgaaagaaagatcctcacactgctggatgctctgagtatggtgcacagtcagaagatgaagaaggccaaggagcagcggcacctgcacaataaagagcacttcagagccaagcagaaggaggaggaggagaagctgaagtggcagaaggacctcaggaagaagctcttccaaattcaggggcagaaggaaagaagaaaccagaagtccagtttgaagggggctgagggccagtttcagtgagcctttggactggagggactgtccctggatctgcagaggtggacagtttcaaacatcacagtttgaatgcctgtgaatgacaagtcagtgggcaagaactcaagagatgtctctacacaaactgtgcctgcaagaggaacagagaagcctggactacttggaccgggttcattctcatcacttggggctgtcgagatttaaagtgatgtaagctgaagtggcagaaggacctcaggaagaagctcttccaaattcaggggcagaaggaaagaagaaaccagaagtccagtttaattattttgtcctgcaaaaataccattaaatttttttttgttagttttggcttagtagttttcattagggatgaatgcctgacaattctttgtggataattatttatgctaccaccttcatgaggagtcttccagaagagaaagaaatatt

SEQ ID NO: 461604 - DNA, 526 bp, Homo sapiens
  misc_feature (347)..(347): n is a, c, g, or t
  misc_feature (382)..(382): n is a, c, g, or t
cgaatcatatggggatttgccctcgaggcaagaattcggcacgaggcaggaccgagcccactcatgcaccactatgggaactctgatattctggatgtcacccagtgatacccactgccctgacccctgggcaggcccctctctgcatctactggagtggtccctgggctctggctgagaatctcctcagagcccagtgcagaagctgtgatgcttagaacctggacagcccgactgcctcaactctgtctccaggtctattccctccagctccaaaaggagcagccctacttctaccccttcccgtccccaaagtgtcagcaactttgaggagggcaccaggcatnttcatcaagcctagtgtggagccctctgcaggtcncgatgaactctgagtgtgtggatggatgggtggatggagggtggcaggtggggcgtctgcagggccactcttggcagagactttgggtttgtaggggtcctcaagtgcctttgtgattaaagaatgttggtctatgaaaaaaaa

SEQ ID NO: 461605 - DNA, 1641 bp, Homo sapiens
ctacttgtcctgcatctaatcctctgtcacatacctcatctcaacagccaaatcagcaaggccaccagacctctcatgtctacatgccaatcagttcacctactacttcatgcaccactatgagaacttctgagcctgtcctccctggctgctgcttccagtatcctgccttctcttctgtgcacctaagttgcccagccctgctggcaatctctccatcagaatccaccttaggcctcagctggagggctgcagagcccctcccaatattgggagaatattgacccagacaattatacaaatgagaaaaggcaggagactatgttctacaattgcagtgcatgatgattataagtccacctgtttatcaacggcaccattcctgcagccctccagacttcctgcccttagcaagtgcgcaaccagtcaggatctcccaaagaagataaagaccactcctcaccccagctcaagccatggcaggcgtggcaagcaaagtggggaggagacagtccctgcttgtgacaagtgtggaggtgaaaaggtacaatagtgcttgtctccgatagctccccacatctctaattgacttccacaaaatcgatgcgttgctttggtatttgcttggactgacatttgagggaggaggaggctgggatcctctggctgagaatctcctcagagcccagtgcagaagctgtgatgcttagaacctggacagcccgactgcctcaactctgtctccaggtctattccctccagctccaaaaggagcagccctacttctaccccttcccgtccccaaagtgtcagcaactttgaggagggcaccaggaaacaaagatgcctccccagccctgatattcttgatgtcaccagtgatacccactgccctgacccctgggcaggcccctctctgcatctactggagtggtccctgggctctggggctgaaggattccagcctctctgccagatattcagtactcgatctcaattcccctcttccacaagagttgggtgaccagctgtcctagtttgcccaggactctccctgttttagcactgaaagtctcttgccccaggaaaccccatcagtcccaggcagattgggacagctggtcaccttacgcaagagccaggctgaaacatcccctccatactcagctctttaacttttcttttcctttttcatcgggctctttcctaaaaagctgagctgtaaaatattttacatcgaggtataataaataatcatgtacatgttttaccaccacccaggtcaagacatagaatgtttcaacatttccatcaccccagaaactccccttgtacccccttccacttcgtctcccctagctcctagaagcaaccactgatgtgatttctaccaaatccagttttggtcctactaaatatactcttttgagactggcctcttttactcaccataatgcctttgtaattcatccatgctgttgtgtgtatcagcagtttgttccttttcattgctgagtagtattctattgtagagatgtaccacagtttgtttattcttctgttgatggacgtttgggttgtttctaattttgaatgattataaataaaaattctgtgagtgttcttgtacctatgttttgg

SEQ ID NO: 461606 - DNA, 2807 bp, Homo sapiens
cttctgctcctggtcctggccatcatgtatgtcttcgcctcccaccacttccgccgccgcagcttccggggcttctggctgacccaccacctctacatcctgctctatgccctgctcatcatccatggcagctatgctctgatccagctgcccactttccacatctacttcctggtcccggcaatcatctatggaggtgacaagctggtgagcctgagccggaagaaggtggagatcagcgtggtgaaggcggagctgctgccctcaggagtgacctacctgcaattccagaggccccaaggctttgagtacaagtcaggacagtgggtgcggatcgcctgcctggctctggggaccaccgagtaccaccccttcacactgacctccgcgccccatgaggacacactcaacctgcacatccgggcagtggggccctggaccactcgcctcaggagatctactcatccccaaagggcaatggctgtgctggatacccaaaggtgcccgtcactgggaaccatgcttccgggcttctggcactggcagaggatctctgcctttccctatcctgagagtagaagctccagccgtcccaaagccagcctgggagaggaccggggtgcctcagaaaagactaggatgttctgtatcctccctctgcctgtgtctccgtttctggtctcagagctggggcagggtcaggctcatttcatctcccccctctcttggcagctgtaccttgatggaccgtttggagagggccatcaggagtggcataaatttgaggtgtcagtgttggtgggagggggcattggggtcaccccctttgcctccatcctcaaagacctggtcttcaagtcatccttgggcagccaaatgctgtgtaagaagatctacttcatctgggtgacacggacccagcgtcagtttgagtggctggctgacatcatccaagaggtggaggagaacgaccaccaggacctggtgtctgtgcacatttatgtcacccagctggctgagaagttcgacctcaggaccaccatgctatacatctgcgagcggcacttccagaaagtgctgaaccggagtctgttcacgggcctgcgctccatcacccactttggccgtccccccttcgagcccttcttcaactccctgcaggaggtccacccacaggtgcgcaagatcggggtgttcagctgcggccctccaggaatgaccaagaatgtagagaaggcctgtcagctcgtcaacaggcaggaccgagcccacttcatgcaccactatgagaacttctgagcctgtcctccctggctgctgcttccagtatcctgccttctcttctgtgcacctaagttgcccagccctgctggcaatctctccatcagaatccaccttaggcctcagctggagggctgcagagcccctcccaatattgggagaatattgacccagacaattatacaaatgagaaaaggcaggagactatgttctacaattgcagtgcatgatgattataagtccacctgtttatcaacggcaccattcctgcagccctccagacttcctgcccttagcaagtgcgcaaccagtcaggatctcccaaagaagataaagaccactcctcaccccagctcaagccatggcaggcgtggcaagcaaagtggggaggagacagtccctgcttgtgacaagtgtggaggtgaaaaggtacaatagtgcttgtctccgatagctccccacatctctaattgacttccacaaaatcgatgcgttgctttggtatttgcttggactgacatttgagggaggaggaggctgggatcctctggctgagaatctcctcagagcccagtgcagaagctgtgatgcttagaacctggacagcccgactgcctcaactctgtctccaggtctattccctccagctccaaaaggagcagccctacttctaccccttcccgtccccaaagtgtcagcaactttgaggagggcaccaggaaacaaagatgcctccccagccctgatattcttgatgtcaccagtgatacccactgccctgacccctgggcaggcccctctctgcatctactggagtggtccctgggctctggggctgaaggattccagcctctctgccagatattcagtactcgatctcaattcccctcttccacaagagttgggtgaccagctgtcctagtttgcccaggactctccctgttttagcactgaaagtctcttgccccaggaaaccccatcagtcccaggcagattgggacagctggtcaccttacgcaagagccaggctgaaacatcccctccatactcagctctttaacttttcttttcctttttcatcgggctctttcctaaaaagctgagctgtaaaatattttacatcgaggtataataaataatcatgtacatgttttaccaccacccaggtcaagacatagaatgtttcaacatttccatcaccccagaaactccccttgtacccccttccacttcgtctcccctagctcctagaagcaaccactgatgtgatttctaccaaatccagttttggtcctactaaatatactcttttgagactggcctcttttactcaccataatgcctttgtaattcatccatgctgttgtgtgtatcagcagtttgttccttttcattgctgagtagtattctattgtagagatgtaccacagtttgtttattcttctgttgatggacgtttgggttgtttctaattttgaatgattataaataaaaattctgtgagtgttcttgtacctatgttttgg

SEQ ID NO: 461607 - DNA, 1707 bp, Homo sapiens
gaaggatttgaaatattttgagaactctgaaataatgcacaccagaaacgtccagctgaaaacaaaaagggaacaagatgacattttgcaatcccatgcacgttgcaggcacgttgaatgtgaagctttcttgccggcctctcctcgcagccgctcccttccacacctgccttttcacctgccagactgcgcgttgcccgttgccctaggtctgcgtgttcagcacttctgcaacagtttcttctgcaaaggtaaggtagacagctgtaaactggatcccctgctgtacccagcaaatgctgagagccctgcttcccctcttgtattcaaatggctctataagagaggaagtagtacagctatcagtaacaatgccatccgtattttattaacatgtgctactatacaaatacacaattcacttaggactctgtttcgtgtggatcacatgggagctttcattaaattgtggtgattccaatgtgagtggttatcaagtcaacatcaaataacatgaagtgtgttttagtcggcaaacatcactttgtaattctctgatgtgtttgggttgattcccttctttctgctctttttctctttataaagtaaacatttttattgcaaagaaaaatggatataaacaatattgtaaatcatatttggaaaataaatattagaatcattgaatccctgagttatagaaaaatttattaatagcgctatctggctactttttaaagtgtggacatcctcgatgtattagctatgcatctgtggataggaggcttacccactctgagtcttgtcaaataccaaacacaggaaaacaatatcttcctgagaatgttgtgaagaatatatcatccagtcagagtgaatcagcttgcccagtgcttggcatatagctgctcaagaaatattaggcattctttgttattataaatcccctttgtattttaaaatcctcatgtatcactgaaacaaccaactgaaaaccattgagaggctcatggtgaaagaagacagacagtgtaatttccctggaaactcaattttgattcagacgtccacagcatctcatttctgcctttaaaaaatttcaagagtgacattttggcatgactggactcacaggtggagaagtgttgtcttttccctgcattgagatagcattgcatggagatccttgtactcttcgaacagaggctgcagatggacacaggatctgctcagggagataagatcacctgctaattctgctttctccatcagagtctgaatgatcagtgatggggaccagagctaggttaggtctctggaaacgccctctgtctgagtccgggagatggatgatatgggtaatgacttgctgctttatcttctctccatctccttacagcagctccaactactgacttttattgtgtggcagctaattgtaggattctatttctgtaaagagaaggcaagagaggaatgcagtgtccaccatccctgcagccctttggcgccttccccctcccattaccttgaagtagagggaaaggggacgacagaagaacccttagaagtaagactttttctgtctctgatgccacggacctttgaaatatttttttgaaaagaaggcctcccttggctgataccttctgactgttagtgaataaaggaagtttaaacaatctcttccctgtaatcattaatctc

SEQ ID NO: 461608 - DNA, 1505 bp, Homo sapiens
ggaagacaatttttccacaggcggcaagggatggggcacaggatgctaatggttcttcctgccatcctgccatcatttgttttttatgttttgtcgccaaaagtgaccttgaggaaccctgggagctcaggaaggaaggagcgcccagaagcagggacagggagctggttggggaggaccagaaatcaggttatcaatactctggctgaccatcgtcatcgtgggactgactttggtggaagtccttggttacttatcattactgtgtttctgagaagttataaatttgccatctccctctgcacaagttacctttgtgtgtctttcctgaagactatcttcccgtctcaaaatggacatgatggatccacggatgtacagcagagagccaggaggtccaaccgccgtagacaggaaggaattaaaattgtcctggaagacatctttactttatggagacaggtggaaaccaaagttcgagctaaaatccgtaagatgaaggtgacaacaaaagtcaaccgtcatgacaaaatcaatggaaagaggaagaccgccaaagaacatctgaggaaactaagcatgaaagaacgtgagcacggagaaaaggagaggcaggtgtcagaggcagaggaaaatgggaaattggatatgaaagaaatacacacctacatggaaatgtttcaacgtgcgcaagcgttgcggcggcgggcagaggactactacagatgcaaaatcaccccttctgcaagaaagcctctttgcaaccgggtcagaatggcggcagtggagcatcgtcattcttcaggattgccctactggccctacctcacagctgaaactttaaaaaacaggatgggccaccagccacctcctccaactcaacaacattctataattgataactccctgagcctcaagacaccttccgagtgtctgctctatccccttccaccctcagcggatgataatctcaagacacctcccgagtgtctgctcactccccttccaccctcagctctaccctcagcggatgataatctcaagacacctgcggagtgtctgctctatccccttccaccctcagcggatgataatctcaagaaactaacgaagaataaataaataatataaaaataaaatgaatactgcagtccttatgttattgctttgtttcaatatctgttgcttctcggagctaaggtctccctgctccttttttcctctatggaaatggatgagaaaaggttttctaacaaggggccatcacctggatttttagaatagcataaaatattctctgctgcagcttcggaatccgactgtgctggtgtttggcaggaaaatgcagaacactgcgaagctctggacgggaaagtcagggaggccccttaggggagggtgggaggctgaggggagcctcttctcttccccttgttctccactgtggcaggcaaagcagcagctgggaggaagccgggctccagactgaaggcatcattaccatc

SEQ ID NO: 461609 - DNA, 607 bp, Homo sapiens
ctgatcagaggatcccgaaaatgacatagagccaggaggtccaaccgccgtagacaggaaggaattaaaattgtcctggaagacatctttactttatggagacaggtggaaaccaaagttcgagctaaaatccgtaagatgaaggtgacaacaaaagtcaaccgtcatgacaaaatcaatggaaagaggaagaccgccaaagaacatctgaggaaactaagcatgaaagaacgtgagcacggagaaaaggagaggcaggtgtcagaggcagaggaaaatgggaaattggatatgaaagaaatacacacctacatggaaatgtttcaacgtgcgcaagcgttgcggcggcgggcagaggactactacagatgcaaaatcaccccttctgcaagaaagcctctttgcaaccgggatgataatctcaagacacctcccgagtgtgtctgctcactccccttccaccctcagcggatgataatctcaagaaactaaggaagaataaataaataatataaaaatacaaacaacaccccccccaacagaaaaaaaaaaccaaccctgccccactaccctgacacaaccccaccatcaccaccacaaatacata

SEQ ID NO: 461610 - DNA, 374 bp, Homo sapiens
tctaacttctgttcttttttgtagcagtggaatcccacggtgatatctgagggatgtggttaccttttggaggaggttgacggtttctaaggatgattctttctgagtgaaatattgtcagtgtcattgaccttttcattatttcaactattattattccaggttatcaatactctggctgaccatcgtcatcgtgggactgactttggtggaagtccttggttacttatcattactgtgtttctgagaagttataaatttgccatctccctctgcacaagttacctttgggttatcaatactctggctgaccatcgtatcgtgggactgactttggtggaagtccttggttacttatcattactgtgtttctg

SEQ ID NO: 461611 - DNA, 471 bp, Homo sapiens
  misc_feature (215)..(217): n is a, c, g, or t
  misc_feature (222)..(222): n is a, c, g, or t
  misc_feature (224)..(224): n is a, c, g, or t
  misc_feature (226)..(227): n is a, c, g, or t
  misc_feature (230)..(230): n is a, c, g, or t
  misc_feature (232)..(232): n is a, c, g, or t
  misc_feature (420)..(420): n is a, c, g, or t
  misc_feature (426)..(426): n is a, c, g, or t
ggctgggagcccgagccccacacctgccgggcagcaggtgctggacgtcgacagctgcctggactcatccgtgctggacagctccttcctcacgttctgaggcctccacgctgaggtgagggctctactgggggtcctgccgccttggcgcagcttggactcaagaccctgtgcacctctcagcaggcctttgctggacagatgaagagtgactnnnttctnangnntcnangcaggttatcaatactctggctgaccatcgtcatcgtgggactgactttggtggaagtccttggttacttatcattactgtgtttctgagaagttataaatttgccatctccctctgcacaagttacctttgggttatcaatactctggctgaccatcgtcatcgtgggactgactttggtggaagtncttggntacttatcattactgtgtttctgagaagttataaatttgccatct

SEQ ID NO: 461612 - DNA, 1261 bp, Homo sapiens
agaaacatatccatataggtgtgtatctctttcatatccaatttgccatctccctctgcacaagttacctttgtgtgtctttcctgaagactatcttcccgtctcaaaatggacatgatggatccacggatgtacagcagagagccaggaggtccaaccgccgtagacaggaaggaattaaaattgtcctggaagacatctttactttatggagacaggtggaaaccaaagttcgagctaaaatccgtaagatgaaggtgacaacaaaagtcaaccgtcatgacaaaatcaatggaaagaggaagaccgccaaagaacatctgaggaaactaagcatgaaagaacgtgagcacggagaaaaggagaggcaggtgtcagaggcagaggaaaatgggaaattggatatgaaagaaatacacacctacatggaaatgtttcaacgtgcgcaagcgttgcggcggcgggcagaggactactacagatgcaaaatcaccccttctgcaagaaagcctctttgcaaccgggtcagaatggcggcagtggagcatcgtcattcttcaggattgccctactggccctacctcacagctgaaactttaaaaaacaggatgggccaccagccacctcctccaactcaacaacattctataattgataactccctgagcctcaagacaccttccgagtgtctgctctatccccttccaccctcagcggatgataatctcaagacacctcccgagtgtctgctcactccccttccaccctcagctctaccctcagcggatgataatctcaagacacctgcggagtgtctgctctatccccttccaccctcagcggatgataatctcaagaaactaacgaagaataaataaataatataaaaataaaatgaatactgcagtccttatgttattgctttgtttcaatatctgttgcttctcggagctaaggtctccctgctccttttttcctctatggaaatggatgagaaaaggttttctaacaaggggccatcacctggatttttagaatagcataaaatattctctgctgcagcttcggaatccgactgtgctggtgtttggcaggaaaatgcagaacactgcgaagctctggacgggaaagtcagggaggccccttaggggagggtgggaggctgaggggagcctcttctcttccccttgttctccactgtggcaggcaaagcagcagctgggaggaagccgggctccagactgaaggcatcattaccatc

SEQ ID NO: 461613 - DNA, 1190 bp, Homo sapiens
tggaaggggagtgagcagacactcgggaggtgtcttgagattatcatccgctgagggtggaaggggatagagcagacgctcggaaggtgtcttgaggctcagggagttatcaattatagaatgttgttgagttggaggaggtggctggtggaaaccaaagttcgagctaaaatccgtaagatgaaggtgacaacaaaagtcaaccgtcatgacaaaatcaatggaaagaggaagaccgccaaagaacatctgaggaaactaagcatgaaagaacgtgagcacggagaaaaggagaggcaggtgtcagaggcagaggaaaatgggaaattggatatgaaagaaatacacacctacatggaaatgtttcaacgtgcgcaagcgttgcggcggcgggcagaggactactacagatgcaaaatcaccccttctgcaagaaagcctctttgcaaccgggtcagaatggcggcagtggagcatcgtcattcttcaggattgccctactggccctacctcacagctgaaactttaaaaaacaggatgggccaccagccacctcctccaactcaacaacattctataattgataactccctgagcctcaagacaccttccgagtgtctgctctatccccttccaccctcagcggatgataatctcaagacacctcccgagtgtctgctcactccccttccaccctcagctctaccctcagcggatgataatctcaagacacctgcggagtgtctgctctatccccttccaccctcagcggatgataatctcaagaaactaacgaagaataaataaataatataaaaataaaatgaatactgcagtccttatgttattgctttgtttcaatatctgttgcttctcggagctaaggtctccctgctccttttttcctctatggaaatggatgagaaaaggttttctaacaaggggccatcacctggatttttagaatagcataaaatattctctgctgcagcttcggaatccgactgtgctggtgtttggcaggaaaatgcagaacactgcgaagctctggacgggaaagtcagggaggccccttaggggagggtgggaggctgaggggagcctcttctcttccccttgttctccactgtggcaggcaaagcagcagctgggaggaagccgggctccagactgaaggcatcattaccatc

SEQ ID NO: 461614 - DNA, 1426 bp, Homo sapiens
  misc_feature (215)..(217): n is a, c, g, or t
  misc_feature (222)..(222): n is a, c, g, or t
  misc_feature (224)..(224): n is a, c, g, or t
  misc_feature (226)..(227): n is a, c, g, or t
  misc_feature (230)..(230): n is a, c, g, or t
  misc_feature (232)..(232): n is a, c, g, or t
  misc_feature (1195)..(1195): n is a, c, g, or t
ggctgggagcccgagccccacacctgccgggcagcaggtgctggacgtcgacagctgcctggactcatccgtgctggacagctccttcctcacgttctgaggcctccacgctgaggtgagggctctactgggggtcctgccgccttggcgcagcttggactcaagaccctgtgcacctctcagcaggcctttgctggacagatgaagagtgactnnnttctnangnntcnangagtgaccttgaggaaccctgggagctcaggaaggaaggagcgcccagaagcagggacagggagctggttggggaggaccagaaatcaggttatcaatactctggctgaccatcgtcatcgtgggactgactttggtggaagtccttggttacttatcattactgtgtttctgagaagttataaatttgccatctccctctgcacaagttacctttgtgtgtctttcctgaagactatcttcccgtctcaaaatggacatgatggatccacggatgtacagcagagagccaggaggtccaaccgccgtagacaggaaggaattaaaattgtcctggaagacatctttactttatggagacaggtggaaaccaaagttcgagctaaaatccgtaagatgaaggtgacaacaaaagtcaaccgtcatgacaaaatcaatggaaagaggaagaccgccaaagaacatctgaggaaactaagcatgaaagaacgtgagcacggagaaaaggagaggcaggtgtcagaggcagaggaaaatgggaaattggatatgaaagaaatacacacctacatggaaatgtttcaacgtgcgcaagcgttgcggcggcgggcagaggactactacagatgcaaaatcaccccttctgcaagaaagcctctttgcaaccgggtcagaatggcggcagtggagcatcgtcattcttcaggattgccctactggccctacctcacagctgaaactttaaaaaacaggatgggccaccagccacctcctccaactcaacaacattctataattgataactccctgagcctcaagacaccttccgagtgtctgctcactccccttccaccctcagctctaccctcagcggatgataatctcaagacacctgcggagtgtctgctctatccccttccaccctcagcggatgataatctcaagacacctcccgagtgtctgntcactccccttccaccctcagctccaccctcagtggatgataatctcaagacacctcccgagtgtgtctgctcactccccttccaccctcagcggatgataatctcaagaaactaaggaagaataaataaataatataaaaatacaaacaacaccccccccaacagaaaaaaaaaaccaaccctgccccactaccctgacacaaccccaccatcaccaccacaaatacata

SEQ ID NO: 461615 - DNA, 1701 bp, Homo sapiens
  misc_feature (215)..(217): n is a, c, g, or t
  misc_feature (222)..(222): n is a, c, g, or t
  misc_feature (224)..(224): n is a, c, g, or t
  misc_feature (226)..(227): n is a, c, g, or t
  misc_feature (230)..(230): n is a, c, g, or t
  misc_feature (232)..(232): n is a, c, g, or t
ggctgggagcccgagccccacacctgccgggcagcaggtgctggacgtcgacagctgcctggactcatccgtgctggacagctccttcctcacgttctgaggcctccacgctgaggtgagggctctactgggggtcctgccgccttggcgcagcttggactcaagaccctgtgcacctctcagcaggcctttgctggacagatgaagagtgactnnnttctnangnntcnangagtgaccttgaggaaccctgggagctcaggaaggaaggagcgcccagaagcagggacagggagctggttggggaggaccagaaatcaggttatcaatactctggctgaccatcgtcatcgtgggactgactttggtggaagtccttggttacttatcattactgtgtttctgagaagttataaatttgccatctccctctgcacaagttacctttgtgtgtctttcctgaagactatcttcccgtctcaaaatggacatgatggatccacggatgtacagcagagagccaggaggtccaaccgccgtagacaggaaggaattaaaattgtcctggaagacatctttactttatggagacaggtggaaaccaaagttcgagctaaaatccgtaagatgaaggtgacaacaaaagtcaaccgtcatgacaaaatcaatggaaagaggaagaccgccaaagaacatctgaggaaactaagcatgaaagaacgtgagcacggagaaaaggagaggcaggtgtcagaggcagaggaaaatgggaaattggatatgaaagaaatacacacctacatggaaatgtttcaacgtgcgcaagcgttgcggcggcgggcagaggactactacagatgcaaaatcaccccttctgcaagaaagcctctttgcaaccgggtcagaatggcggcagtggagcatcgtcattcttcaggattgccctactggccctacctcacagctgaaactttaaaaaacaggatgggccaccagccacctcctccaactcaacaacattctataattgataactccctgagcctcaagacaccttccgagtgccgagcgtctgctctatccccttccaccctcagcggatgataatctcaagacacctcccgagtgtctgctctatccccttccaccctcagcggatgataatctcaagacacctcccgagtgtctgctcactccccttccaccctcagctctaccctcagcggatgataatctcaagacacctgcggagtgtctgctctatccccttccaccctcagcggatgataatctcaagaaactaacgaagaataaataaataatataaaaataaaatgaatactgcagtccttatgttattgctttgtttcaatatctgttgcttctcggagctaaggtctccctgctccttttttcctctatggaaatggatgagaaaaggttttctaacaaggggccatcacctggatttttagaatagcataaaatattctctgctgcagcttcggaatccgactgtgctggtgtttggcaggaaaatgcagaacactgcgaagctctggacgggaaagtcagggaggccccttaggggagggtgggaggctgaggggagcctcttctcttccccttgttctccactgtggcaggcaaagcagcagctgggaggaagccgggctccagactgaaggcatcattaccatc

SEQ ID NO: 461616 - DNA, 1280 bp, Homo sapiens
  misc_feature (215)..(217): n is a, c, g, or t
  misc_feature (222)..(222): n is a, c, g, or t
  misc_feature (224)..(224): n is a, c, g, or t
  misc_feature (226)..(227): n is a, c, g, or t
  misc_feature (230)..(230): n is a, c, g, or t
  misc_feature (232)..(232): n is a, c, g, or t
ggctgggagcccgagccccacacctgccgggcagcaggtgctggacgtcgacagctgcctggactcatccgtgctggacagctccttcctcacgttctgaggcctccacgctgaggtgagggctctactgggggtcctgccgccttggcgcagcttggactcaagaccctgtgcacctctcagcaggcctttgctggacagatgaagagtgactnnnttctnangnntcnangagtgaccttgaggaaccctgggagctcaggaaggaaggagcgcccagaagcagggacagggagctggttggggaggaccagaaatcaggttatcaatactctggctgaccatcgtcatcgtgggactgactttggtggaagtccttggttacttatcattactgtgtttctgagaagttataaatttgccatctccctctgcacaagttacctttgtgtgtctttcctgaagactatcttcccgtctcaaaatggacatgatggatccacggatgtacagcagagagccaggaggtccaaccgccgtagacaggaaggaattaaaattgtcctggaagacatctttactttatggagacaggtggaaaccaaagttcgagctaaaatccgtaagatgaaggtgacaacaaaagtcaaccgtcatgacaaaatcaatggaaagaggaagaccgccaaagaacatctgaggaaactaagcatgaaagaacgtgagcacggagaaaaggagaggcaggtgtcagaggcagaggaaaatgggaaattggatatgaaagaaatacacacctacatggaaatgtttcaacgtgcgcaagcgttgcggcggcgggcagaggactactacagatgcaaaatcaccccttctgcaagaaagcctctttgcaaccgggtcagaatggcggcagtggagcatcgtcattcttcaggattgccctactggccctacctcacagctgaaactttaaaaaacaggatgggccaccagccacctcctccaactcaacaacattctataattgataactccctgagcctcaagacaccttccgagtgccgagcgtctgctctatccccttccaccctcagcggatgataatctcaagacacctcccgagtgtctgctcactccccttccaccctcagctctaccctcagcggatgataatctcaagacacctgcggagtgtctgctctatccccttccaccctcagcggatgataatctcaagacacctcccgagtgtctgctcactcccccttcacacctag

SEQ ID NO: 461617 - DNA, 1382 bp, Homo sapiens
  misc_feature (215)..(217): n is a, c, g, or t
  misc_feature (222)..(222): n is a, c, g, or t
  misc_feature (224)..(224): n is a, c, g, or t
  misc_feature (226)..(227): n is a, c, g, or t
  misc_feature (230)..(230): n is a, c, g, or t
  misc_feature (232)..(232): n is a, c, g, or t
  misc_feature (1151)..(1151): n is a, c, g, or t
ggctgggagcccgagccccacacctgccgggcagcaggtgctggacgtcgacagctgcctggactcatccgtgctggacagctccttcctcacgttctgaggcctccacgctgaggtgagggctctactgggggtcctgccgccttggcgcagcttggactcaagaccctgtgcacctctcagcaggcctttgctggacagatgaagagtgactnnnttctnangnntcnangagtgaccttgaggaaccctgggagctcaggaaggaaggagcgcccagaagcagggacagggagctggttggggaggaccagaaatcaggttatcaatactctggctgaccatcgtcatcgtgggactgactttggtggaagtccttggttacttatcattactgtgtttctgagaagttataaatttgccatctccctctgcacaagttacctttgtgtgtctttcctgaagactatcttcccgtctcaaaatggacatgatggatccacggatgtacagcagagagccaggaggtccaaccgccgtagacaggaaggaattaaaattgtcctggaagacatctttactttatggagacaggtggaaaccaaagttcgagctaaaatccgtaagatgaaggtgacaacaaaagtcaaccgtcatgacaaaatcaatggaaagaggaagaccgccaaagaacaggaaatgtttcaacgtgcgcaagcgttgcggcggcgggcagaggactactacagatgcaaaatcaccccttctgcaagaaagcctctttgcaaccgggtcagaatggcggcagtggagcatcgtcattcttcaggattgccctactggccctacctcacagctgaaactttaaaaaacaggatgggccaccagccacctcctccaactcaacaacattctataattgataactccctgagcctcaagacaccttccgagtgccgagcgtctgctctatccccttccaccctcagcggatgataatctcaagacacctcccgagtgtctgctcactccccttccaccctcagctctaccctcagcggatgataatctcaagacacctgcggagtgtctgctctatccccttccaccctcagcggatgataatctcaagacacctcccgagtgtctgntcactccccttccaccctcagctccaccctcagtggatgataatctcaagacacctcccgagtgtgtctgctcactccccttccaccctcagcggatgataatctcaagaaactaaggaagaataaataaataatataaaaatacaaacaacaccccccccaacagaaaaaaaaaaccaaccctgccccactaccctgacacaaccccaccatcaccaccacaaatacata

SEQ ID NO: 461618 - DNA, 1310 bp, Homo sapiens
  misc_feature (215)..(217): n is a, c, g, or t
  misc_feature (222)..(222): n is a, c, g, or t
  misc_feature (224)..(224): n is a, c, g, or t
  misc_feature (226)..(227): n is a, c, g, or t
  misc_feature (230)..(230): n is a, c, g, or t
  misc_feature (232)..(232): n is a, c, g, or t
ggctgggagcccgagccccacacctgccgggcagcaggtgctggacgtcgacagctgcctggactcatccgtgctggacagctccttcctcacgttctgaggcctccacgctgaggtgagggctctactgggggtcctgccgccttggcgcagcttggactcaagaccctgtgcacctctcagcaggcctttgctggacagatgaagagtgactnnnttctnangnntcnangagtgaccttgaggaaccctgggagctcaggaaggaaggagcgcccagaagcagggacagggagctggttggggaggaccagaaatcaggttatcaatactctggctgaccatcgtcatcgtgggactgactttggtggaagtccttggttacttatcattactgtgtttctgagaagttataaatttgccatctccctctgcacaagttacctttgtgtgtctttcctgaagactatcttcccgtctcaaaatggacatgatggatccacggatgtacagcagagagccaggaggtccaaccgccgtagacaggaaggaattaaaattgtcctggaagacatctttactttatggagacaggtggaaaccaaagttcgagctaaaatccgtaagatgaaggtgacaacaaaagtcaaccgtcatgacaaaatcaatggaaagaggaagaccgccaaagaacatctgaggaaactaagcatgaaagaacgtgagcacggagaaaaggagaggcaggtgtcagaggcagaggaaaatgggaaattggatatgaaagaaatacacacctacatggaaatgtttcaacgtgcgcaagcgttgcggcggcgggcagaggactactacagatgcaaaatcaccccttctgcaagaaagcctctttgcaaccggtgcacttacaatttggtattacctgggagtgaaaagaaatattacagccatgcctaactgacttcttgaggtcagaatggcggcagtggagcatcgtcattcttcaggattgccctactggccctacctcacagctgaaactttaaaaaacaggatgggccaccagccacctcctccaactcaacaacattctataattgataactccctgagggatgataatctcaagacacctcccgagtgtgtctgctcactccccttccaccctcagcggatgataatctcaagaaactaaggaagaataaataaataatataaaaatacaaacaacaccccccccaacagaaaaaaaaaaccaaccctgccccactaccctgacacaaccccaccatcaccaccacaaatacata

SEQ ID NO: 461619 - DNA, 808 bp, Homo sapiens
  misc_feature (577)..(577): n is a, c, g, or t
aatccgcttagtaactctgaggtataagcatgaaagaacgtgagcacggagaaaaggagaggcaggtgtcagaggcagaggaaaatgggaaattggatatgaaagaaatacacacctacatggaaatgtttcaacgtgcgcaagcgttgcggcggcgggcagaggactactacagatgcaaaatcaccccttctgcaagaaagcctctttgcaaccgggtcagaatggcggcagtggagcatcgtcattcttcaggattgccctactggccctacctcacagctgaaactttaaaaaacaggatgggccaccagccacctcctccaactcaacaacattctataattgataactccctgagcctcaagacaccttccgagtgccgagcgtctgctctatccccttccaccctcagcggatgataatctcaagacacctcccgagtgtctgctcactccccttccaccctcagctctaccctcagcggatgataatctcaagacacctgcggagtgtctgctctatccccttccaccctcagcggatgataatctcaagacacctcccgagtgtctgntcactccccttccaccctcagctccaccctcagtggatgataatctcaagacacctcccgagtgtgtctgctcactccccttccaccctcagcggatgataatctcaagaaactaaggaagaataaataaataatataaaaatacaaacaacaccccccccaacagaaaaaaaaaaccaaccctgccccactaccctgacacaaccccaccatcaccaccacaaatacata

SEQ ID NO: 461620 - DNA, 1166 bp, Homo sapiens
  misc_feature (215)..(217): n is a, c, g, or t
  misc_feature (222)..(222): n is a, c, g, or t
  misc_feature (224)..(224): n is a, c, g, or t
  misc_feature (226)..(227): n is a, c, g, or t
  misc_feature (230)..(230): n is a, c, g, or t
  misc_feature (232)..(232): n is a, c, g, or t
ggctgggagcccgagccccacacctgccgggcagcaggtgctggacgtcgacagctgcctggactcatccgtgctggacagctccttcctcacgttctgaggcctccacgctgaggtgagggctctactgggggtcctgccgccttggcgcagcttggactcaagaccctgtgcacctctcagcaggcctttgctggacagatgaagagtgactnnnttctnangnntcnangagtgaccttgaggaaccctgggagctcaggaaggaaggagcgcccagaagcagggacagggagctggttggggaggaccagaaatcaggttatcaatactctggctgaccatcgtcatcgtgggactgactttggtggaagtccttggttacttatcattactgtgtttctgagaagttataaatttgccatctccctctgcacaagttacctttgtgtgtctttcctgaagactatcttcccgtctcaaaatggacatgatggatccacggatgtacagcagagagccaggaggtccaaccgccgtagacaggaaggaattaaaattgtcctggaagacatctttactttatggagacaggtggaaaccaaagttcgagctaaaatccgtaagatgaaggtgacaacaaaagtcaaccgtcatgacaaaatcaatggaaagaggaagaccgccaaagaacatctgaggaaactaagcatgaaagaacgtgagcacggagaaaaggagaggcaggtgtcagaggcagaggaaaatgggaaattggatatgaaagaaatacacacctacatggaaatgtttcaacgtgcgcaagcgttgcggcggcgggcagaggactactacagatgcaaaatcaccccttctgcaagaaagcctctttgcaaccggtaagtttgcttgttttccttgcttttggacatagtctgccaggtcaggacatggatacatttttctccctacggctctgtgctcaagccctgcagagggagatggcagagaggaaggctgcctacaagcatcacagtcccatccctgttggtaaccgtgttgcgcaaaaacaccttcatccccacccagtggggcccccatctaatattctaagtgtcagaggttccatatttgtaatagcaaatgggccctgactgtaaattagt

SEQ ID NO: 461621 - DNA, 614 bp, Homo sapiens
  misc_feature (215)..(217): n is a, c, g, or t
  misc_feature (222)..(222): n is a, c, g, or t
  misc_feature (224)..(224): n is a, c, g, or t
  misc_feature (226)..(227): n is a, c, g, or t
  misc_feature (230)..(230): n is a, c, g, or t
  misc_feature (232)..(232): n is a, c, g, or t
ggctgggagcccgagccccacacctgccgggcagcaggtgctggacgtcgacagctgcctggactcatccgtgctggacagctccttcctcacgttctgaggcctccacgctgaggtgagggctctactgggggtcctgccgccttggcgcagcttggactcaagaccctgtgcacctctcagcaggcctttgctggacagatgaagagtgactnnnttctnangnntcnangagtgaccttgaggaaccctgggagctcaggaaggaaggagcgcccagaagcagggacagggagctggttggggaggaccagaaatcaggttatcaatactctggctgaccatcgtcatcgtgggactgactttggtggaagtccttggttacttatcattactgtgtttctgagaagttataaatttgccatctccctctgcacaagttacctttgtgtgtctttcctgaagactatcttcccgtctcaaaatggacatgatggatccacggatgtacagcagagagccaggaggtccaaccgccgtagacaggaaggaattaaaattgtcctggaagacatctttactttatggagacagatgggtgccgagctcgattc

SEQ ID NO: 461622 - DNA, 836 bp, Homo sapiens
  misc_feature (605)..(605): n is a, c, g, or t
gaacatgtaccagacgatataaaatattaacatagtcgggcctagtctgagaactaatatgattgacgtgagcacggagaaaaggagaggcaggtgtcagaggcagaggaaaatgggaaattggatatgaaagaaatacacacctacatggaaatgtttcaacgtgcgcaagcgttgcggcggcgggcagaggactactacagatgcaaaatcaccccttctgcaagaaagcctctttgcaaccgggtcagaatggcggcagtggagcatcgtcattcttcaggattgccctactggccctacctcacagctgaaactttaaaaaacaggatgggccaccagccacctcctccaactcaacaacattctataattgataactccctgagcctcaagacaccttccgagtgccgagcgtctgctctatccccttccaccctcagcggatgataatctcaagacacctcccgagtgtctgctcactccccttccaccctcagctctaccctcagcggatgataatctcaagacacctgcggagtgtctgctctatccccttccaccctcagcggatgataatctcaagacacctcccgagtgtctgntcactccccttccaccctcagctccaccctcagtggatgataatctcaagacacctcccgagtgtgtctgctcactccccttccaccctcagcggatgataatctcaagaaactaaggaagaataaataaataatataaaaatacaaacaacaccccccccaacagaaaaaaaaaaccaaccctgccccactaccctgacacaaccccaccatcaccaccacaaatacata

SEQ ID NO: 461623 - DNA, 1637 bp, Homo sapiens
  misc_feature (215)..(217): n is a, c, g, or t
  misc_feature (222)..(222): n is a, c, g, or t
  misc_feature (224)..(224): n is a, c, g, or t
  misc_feature (226)..(227): n is a, c, g, or t
  misc_feature (230)..(230): n is a, c, g, or t
  misc_feature (232)..(232): n is a, c, g, or t
ggctgggagcccgagccccacacctgccgggcagcaggtgctggacgtcgacagctgcctggactcatccgtgctggacagctccttcctcacgttctgaggcctccacgctgaggtgagggctctactgggggtcctgccgccttggcgcagcttggactcaagaccctgtgcacctctcagcaggcctttgctggacagatgaagagtgactnnnttctnangnntcnangagtgaccttgaggaaccctgggagctcaggaaggaaggagcgcccagaagcagggacagggagctggttggggaggaccagaaatcaggttatcaatactctggctgaccatcgtcatcgtgggactgactttggtggaagtccttggttacttatcattactgtgtttctgagaagttataaatttgccatctccctctgcacaagttacctttgtgtgtctttcctgaagactatcttcccgtctcaaaatggacatgatggatccacggatgtacagcagagagccaggaggtccaaccgccgtagacaggaaggaattaaaattgtcctggaagacatctttactttatggagacaggtggaaaccaaagttcgagctaaaatccgtaagatgaaggtgacaacaaaagtcaaccgtcatgacaaaatcaatggaaagaggaagaccgccaaagaacatctgaggaaactaagcatgaaagaacgtgagcacggagaaaaggagaggcaggtgtcagaggcagaggaaaatgggaaattggatatgaaagaaatacacacctacatggaaatgtttcaacgtgcgcaagcgttgcggcggcgggcagaggactactacagatgcaaaatcaccccttctgcaagaaagcctctttgcaaccgggtcagaatggcggcagtggagcatcgtcattcttcaggattgccctactggccctacctcacagctgaaactttaaaaaacaggatgggccaccagccacctcctccaactcaacaacattctataattgataactccctgagcctcaagacaccttccgagtgtctgctctatccccttccaccctcagcggatgataatctcaagacacctcccgagtgtctgctcactccccttccaccctcagctctaccctcagcggatgataatctcaagacacctgcggagtgtctgctctatccccttccaccctcagcggatgataatctcaagaaactaacgaagaataaataaataatataaaaataaaatgaatactgcagtccttatgttattgctttgtttcaatatctgttgcttctcggagctaaggtctccctgctccttttttcctctatggaaatggatgagaaaaggttttctaacaaggggccatcacctggatttttagaatagcataaaatattctctgctgcagcttcggaatccgactgtgctggtgtttggcaggaaaatgcagaacactgcgaagctctggacgggaaagtcagggaggccccttaggggagggtgggaggctgaggggagcctcttctcttccccttgttctccactgtggcaggcaaagcagcagctgggaggaagccgggctccagactgaaggcatcattaccatc

SEQ ID NO: 461624 - DNA, 1326 bp, Homo sapiens
gtcaactgcatgtcaacctgaaagcaaggaagtaaaaagaatttcagttattttggaggtgtttcaaaagactgaagatcactaccctagagaaaaatcacacatgtatgcaaaaagagataggtaaagaatgttaattgggccgggcatggtggctcacacctgcaatcccagcactctgagagccccaggcaggcaaattgcttaggccaggaggtccaaccgccgtagacaggaaggaattaaaattgtcctggaagacatctttactttatggagacaggtggaaaccaaagttcgagctaaaatccgtaagatgaaggtgacaacaaaagtcaaccgtcatgacaaaatcaatggaaagaggaagaccgccaaagaacatctgaggaaactaagcatgaaagaacgtgagcacggagaaaaggagaggcaggtgtcagaggcagaggaaaatgggaaattggatatgaaagaaatacacacctacatggaaatgtttcaacgtgcgcaagcgttgcggcggcgggcagaggactactacagatgcaaaatcaccccttctgcaagaaagcctctttgcaaccgggtcagaatggcggcagtggagcatcgtcattcttcaggattgccctactggccctacctcacagctgaaactttaaaaaacaggatgggccaccagccacctcctccaactcaacaacattctataattgataactccctgagcctcaagacaccttccgagtgtctgctctatccccttccaccctcagcggatgataatctcaagacacctcccgagtgtctgctcactccccttccaccctcagctctaccctcagcggatgataatctcaagacacctgcggagtgtctgctctatccccttccaccctcagcggatgataatctcaagaaactaacgaagaataaataaataatataaaaataaaatgaatactgcagtccttatgttattgctttgtttcaatatctgttgcttctcggagctaaggtctccctgctccttttttcctctatggaaatggatgagaaaaggttttctaacaaggggccatcacctggatttttagaatagcataaaatattctctgctgcagcttcggaatccgactgtgctggtgtttggcaggaaaatgcagaacactgcgaagctctggacgggaaagtcagggaggccccttaggggagggtgggaggctgaggggagcctcttctcttccccttgttctccactgtggcaggcaaagcagcagctgggaggaagccgggctccagactgaaggcatcattaccatc

SEQ ID NO: 461625 - DNA, 1490 bp, Homo sapiens
  misc_feature (215)..(217): n is a, c, g, or t
  misc_feature (222)..(222): n is a, c, g, or t
  misc_feature (224)..(224): n is a, c, g, or t
  misc_feature (226)..(227): n is a, c, g, or t
  misc_feature (230)..(230): n is a, c, g, or t
  misc_feature (232)..(232): n is a, c, g, or t
  misc_feature (1259)..(1259): n is a, c, g, or t
ggctgggagcccgagccccacacctgccgggcagcaggtgctggacgtcgacagctgcctggactcatccgtgctggacagctccttcctcacgttctgaggcctccacgctgaggtgagggctctactgggggtcctgccgccttggcgcagcttggactcaagaccctgtgcacctctcagcaggcctttgctggacagatgaagagtgactnnnttctnangnntcnangagtgaccttgaggaaccctgggagctcaggaaggaaggagcgcccagaagcagggacagggagctggttggggaggaccagaaatcaggttatcaatactctggctgaccatcgtcatcgtgggactgactttggtggaagtccttggttacttatcattactgtgtttctgagaagttataaatttgccatctccctctgcacaagttacctttgtgtgtctttcctgaagactatcttcccgtctcaaaatggacatgatggatccacggatgtacagcagagagccaggaggtccaaccgccgtagacaggaaggaattaaaattgtcctggaagacatctttactttatggagacaggtggaaaccaaagttcgagctaaaatccgtaagatgaaggtgacaacaaaagtcaaccgtcatgacaaaatcaatggaaagaggaagaccgccaaagaacatctgaggaaactaagcatgaaagaacgtgagcacggagaaaaggagaggcaggtgtcagaggcagaggaaaatgggaaattggatatgaaagaaatacacacctacatggaaatgtttcaacgtgcgcaagcgttgcggcggcgggcagaggactactacagatgcaaaatcaccccttctgcaagaaagcctctttgcaaccgggtcagaatggcggcagtggagcatcgtcattcttcaggattgccctactggccctacctcacagctgaaactttaaaaaacaggatgggccaccagccacctcctccaactcaacaacattctataattgataactccctgagcctcaagacaccttccgagtgccgagcgtctgctctatccccttccaccctcagcggatgataatctcaagacacctcccgagtgtctgctcactccccttccaccctcagctctaccctcagcggatgataatctcaagacacctgcggagtgtctgctctatccccttccaccctcagcggatgataatctcaagacacctcccgagtgtctgntcactccccttccaccctcagctccaccctcagtggatgataatctcaagacacctcccgagtgtgtctgctcactccccttccaccctcagcggatgataatctcaagaaactaaggaagaataaataaataatataaaaatacaaacaacaccccccccaacagaaaaaaaaaaccaaccctgccccactaccctgacacaaccccaccatcaccaccacaaatacata

SEQ ID NO: 461626 - DNA, 1306 bp, Homo sapiens
  misc_feature (215)..(217): n is a, c, g, or t
  misc_feature (222)..(222): n is a, c, g, or t
  misc_feature (224)..(224): n is a, c, g, or t
  misc_feature (226)..(227): n is a, c, g, or t
  misc_feature (230)..(230): n is a, c, g, or t
  misc_feature (232)..(232): n is a, c, g, or t
  misc_feature (1267)..(1267): n is a, c, g, or t
  misc_feature (1273)..(1273): n is a, c, g, or t
  misc_feature (1280)..(1280): n is a, c, g, or t
ggctgggagcccgagccccacacctgccgggcagcaggtgctggacgtcgacagctgcctggactcatccgtgctggacagctccttcctcacgttctgaggcctccacgctgaggtgagggctctactgggggtcctgccgccttggcgcagcttggactcaagaccctgtgcacctctcagcaggcctttgctggacagatgaagagtgactnnnttctnangnntcnangagtgaccttgaggaaccctgggagctcaggaaggaaggagcgcccagaagcagggacagggagctggttggggaggaccagaaatcaggttatcaatactctggctgaccatcgtcatcgtgggactgactttggtggaagtccttggttacttatcattactgtgtttctgagaagttataaatttgccatctccctctgcacaagttacctttgtgtgtctttcctgaagactatcttcccgtctcaaaatggacatgatggatccacggatgtacagcagagagccaggaggtccaaccgccgtagacaggaaggaattaaaattgtcctggaagacatctttactttatggagacaggtggaaaccaaagttcgagctaaaatccgtaagatgaaggtgacaacaaaagtcaaccgtcatgacaaaatcaatggaaagaggaagaccgccaaagaacatctgaggaaactaagcatgaaagaacgtgagcacggagaaaaggagaggcaggtgtcagaggcagaggaaaatgggaaattggatatgaaagaaatacacacctacatggaaatgtttcaacgtgcgcaagcgttgcggcggcgggcagaggactactacagatgcaaaatcaccccttctgcaagaaagcctctttgcaaccggtgcacttacaatttggtattacctgggagtgaaaagaaatattacagccatgcctaactgacttcttgaggtcagaatggcggcagtggagcatcgtcattcttcaggattgccctactggccctacctcacagctgaaactttaaaaaacaggatgggccaccagccacctcctccaactcaacaacattctataattgataactccctgagcctcaagacaccttccgagtgtctgctcactccccttccaccctcagctctaccctcagcggatgataatctcaagacacctgcggagtgtctgctctatccccttccaccctcagcggatgataatctcaagacacctcccgagtgtctgtcnctcccntcccctnccttctttctcttctttcggacaggc

SEQ ID NO: 461627 - DNA, 1087 bp, Homo sapiens
  misc_feature (215)..(217): n is a, c, g, or t
  misc_feature (222)..(222): n is a, c, g, or t
  misc_feature (224)..(224): n is a, c, g, or t
  misc_feature (226)..(227): n is a, c, g, or t
  misc_feature (230)..(230): n is a, c, g, or t
  misc_feature (232)..(232): n is a, c, g, or t
ggctgggagcccgagccccacacctgccgggcagcaggtgctggacgtcgacagctgcctggactcatccgtgctggacagctccttcctcacgttctgaggcctccacgctgaggtgagggctctactgggggtcctgccgccttggcgcagcttggactcaagaccctgtgcacctctcagcaggcctttgctggacagatgaagagtgactnnnttctnangnntcnangagtgaccttgaggaaccctgggagctcaggaaggaaggagcgcccagaagcagggacagggagctggttggggaggaccagaaatcaggttatcaatactctggctgaccatcgtcatcgtgggactgactttggtggaagtccttggttacttatcattactgtgtttctgagaagttataaatttgccatctccctctgcacaagttacctttgtgtgtctttcctgaagactatcttcccgtctcaaaatggacatgatggatccacggatgtacagcagagagccaggaggtccaaccgccgtagacaggaaggaattaaaattgtcctggaagacatctttactttatggagacaggtggaaaccaaagttcgagctaaaatccgtaagatgaaggtgacaacaaaagtcaaccgtcatgacaaaatcaatggaaagaggaagaccgccaaagaacatctgaggaaactaagcatgaaagaacgtgagcacggagaaaaggagaggcaggtgtcagaggcagaggaaaatgggaaattggatatgaaagaaatacacacctacatggaaatgtttcaacgtgcgcaagcgttgcggcggcgggcagaggactactacagatgcaaaatcaccccttctgcaagaaagcctctttgcaaccgggtcagaatggcggcagtggagcatcgtcattcttcaggattgccctactggccctacctcacagctgaaactttaaaaaacaggatgggccaccagccacctcctccaactcaacaacattctataattgataactccctgagcctcaagacaccttccgagtgtctgctcactccccttctgtcgt

SEQ ID NO: 461628 - DNA, 1340 bp, Homo sapiens
  misc_feature (215)..(217): n is a, c, g, or t
  misc_feature (222)..(222): n is a, c, g, or t
  misc_feature (224)..(224): n is a, c, g, or t
  misc_feature (226)..(227): n is a, c, g, or t
  misc_feature (230)..(230): n is a, c, g, or t
  misc_feature (232)..(232): n is a, c, g, or t
  misc_feature (1109)..(1109): n is a, c, g, or t
ggctgggagcccgagccccacacctgccgggcagcaggtgctggacgtcgacagctgcctggactcatccgtgctggacagctccttcctcacgttctgaggcctccacgctgaggtgagggctctactgggggtcctgccgccttggcgcagcttggactcaagaccctgtgcacctctcagcaggcctttgctggacagatgaagagtgactnnnttctnangnntcnangagtgaccttgaggaaccctgggagctcaggaaggaaggagcgcccagaagcagggacagggagctggttggggaggaccagaaatcaggttatcaatactctggctgaccatcgtcatcgtgggactgactttggtggaagtccttggttacttatcattactgtgtttctgagaagttataaatttgccatctccctctgcacaagttacctttgtgtgtctttcctgaagactatcttcccgtctcaaaatggacatgatggatccacggatgtacagcagagagccaggaggtccaaccgccgtagacaggaaggaattaaaattgtcctggaagacatctttactttatggagacaggtggaaaccaaagttcgagctaaaatccgtaagatgaaggtgacaacaaaagtcaaccgtcatgacaaaatcaatggaaagaggaagaccgccaaagaacaggactactacagatgcaaaatcaccccttctgcaagaaagcctctttgcaaccgggtcagaatggcggcagtggagcatcgtcattcttcaggattgccctactggccctacctcacagctgaaactttaaaaaacaggatgggccaccagccacctcctccaactcaacaacattctataattgataactccctgagcctcaagacaccttccgagtgccgagcgtctgctctatccccttccaccctcagcggatgataatctcaagacacctcccgagtgtctgctcactccccttccaccctcagctctaccctcagcggatgataatctcaagacacctgcggagtgtctgctctatccccttccaccctcagcggatgataatctcaagacacctcccgagtgtctgntcactccccttccaccctcagctccaccctcagtggatgataatctcaagacacctcccgagtgtgtctgctcactccccttccaccctcagcggatgataatctcaagaaactaaggaagaataaataaataatataaaaatacaaacaacaccccccccaacagaaaaaaaaaaccaaccctgccccactaccctgacacaaccccaccatcaccaccacaaatacata

SEQ ID NO: 461629 - DNA, 836 bp, Homo sapiens
  misc_feature (605)..(605): n is a, c, g, or t
tgttagtttagtgttgtaggatacttatgatgtgggggttttgtgctgagaactaagctgtaagaacgtgagcacggagaaaaggagaggcaggtgtcagaggcagaggaaaatgggaaattggatatgaaagaaatacacacctacatggaaatgtttcaacgtgcgcaagcgttgcggcggcgggcagaggactactacagatgcaaaatcaccccttctgcaagaaagcctctttgcaaccgggtcagaatggcggcagtggagcatcgtcattcttcaggattgccctactggccctacctcacagctgaaactttaaaaaacaggatgggccaccagccacctcctccaactcaacaacattctataattgataactccctgagcctcaagacaccttccgagtgccgagcgtctgctctatccccttccaccctcagcggatgataatctcaagacacctcccgagtgtctgctcactccccttccaccctcagctctaccctcagcggatgataatctcaagacacctgcggagtgtctgctctatccccttccaccctcagcggatgataatctcaagacacctcccgagtgtctgntcactccccttccaccctcagctccaccctcagtggatgataatctcaagacacctcccgagtgtgtctgctcactccccttccaccctcagcggatgataatctcaagaaactaaggaagaataaataaataatataaaaatacaaacaacaccccccccaacagaaaaaaaaaaccaaccctgccccactaccctgacacaaccccaccatcaccaccacaaatacata

SEQ ID NO: 461630 - DNA, 1096 bp, Homo sapiens
  misc_feature (215)..(217): n is a, c, g, or t
  misc_feature (222)..(222): n is a, c, g, or t
  misc_feature (224)..(224): n is a, c, g, or t
  misc_feature (226)..(227): n is a, c, g, or t
  misc_feature (230)..(230): n is a, c, g, or t
  misc_feature (232)..(232): n is a, c, g, or t
ggctgggagcccgagccccacacctgccgggcagcaggtgctggacgtcgacagctgcctggactcatccgtgctggacagctccttcctcacgttctgaggcctccacgctgaggtgagggctctactgggggtcctgccgccttggcgcagcttggactcaagaccctgtgcacctctcagcaggcctttgctggacagatgaagagtgactnnnttctnangnntcnangagtgaccttgaggaaccctgggagctcaggaaggaaggagcgcccagaagcagggacagggagctggttggggaggaccagaaatcaggttatcaatactctggctgaccatcgtcatcgtgggactgactttggtggaagtccttggttacttatcattactgtgtttctgagaagttataaatttgccatctccctctgcacaagttacctttgtgtgtctttcctgaagactatcttcccgtctcaaaatggacatgatggatccacggatgtacagcagagagccaggaggtccaaccgccgtagacaggaaggaattaaaattgtcctggaagacatctttactttatggagacaggtggaaaccaaagttcgagctaaaatccgtaagatgaaggtgacaacaaaagtcaaccgtcatgacaaaatcaatggaaagaggaagaccgccaaagaacatctgaggaaactaagcatgaaagaacgtgagcacggagaaaaggagaggcaggtgtcagaggcagaggaaaatgggaaattggatatgaaagaaatacacacctacatggaaatgtttcaacgtgcgcaagcgttgcggcggcgggcagaggactactacagatgcaaaatcaccccttctgcaagaaagcctctttgcaaccgggatgataatctcaagacacctcccgagtgtgtctgctcactccccttccaccctcagcggatgataatctcaagaaactaaggaagaataaataaataatataaaaatacaaacaacaccccccccaacagaaaaaaaaaaccaaccctgccccactaccctgacacaaccccaccatcaccaccacaaatacata

SEQ ID NO: 461631 - DNA, 583 bp, Homo sapiens
  misc_feature (215)..(217): n is a, c, g, or t
  misc_feature (222)..(222): n is a, c, g, or t
  misc_feature (224)..(224): n is a, c, g, or t
  misc_feature (226)..(227): n is a, c, g, or t
  misc_feature (230)..(230): n is a, c, g, or t
  misc_feature (232)..(232): n is a, c, g, or t
ggctgggagcccgagccccacacctgccgggcagcaggtgctggacgtcgacagctgcctggactcatccgtgctggacagctccttcctcacgttctgaggcctccacgctgaggtgagggctctactgggggtcctgccgccttggcgcagcttggactcaagaccctgtgcacctctcagcaggcctttgctggacagatgaagagtgactnnnttctnangnntcnangagtgaccttgaggaaccctgggagctcaggaaggaaggagcgcccagaagcagggacagggagctggttggggaggaccagaaatcaggttatcaatactctggctgaccatcgtcatcgtgggactgactttggtggaagtccttggttacttatcattactgtgtttctgagaagttatagagatggcagagaggaaggctgcctacaagcatcacagtcccatccctgttggtaaccgtgttgcgcaaaaacaccttcatccccacccagtggggcccccatctaatattctaagtgtcagaggttccatatttgtaatagcaaatgggccctgactgtaaattagt

SEQ ID NO: 461632 - DNA, 765 bp, Homo sapiens
  misc_feature (1)..(2): n is a, c, g, or t
  misc_feature (6)..(8): n is a, c, g, or t
  misc_feature (11)..(12): n is a, c, g, or t
nnctgnnnctnncaggaatcgtaccggaggcaccggcacatgtggatctggtttagacgatgcgatctggcccttgaacctgagccagatgagatgatgaaggaggctttggggagtctggggagtcacagtcctcagatggctgaggcaccagacatgcccgtgaccagctttcagatgattccagccaccttgctgcatgaaggaccgagagtgacaactgctccagtgatctctgttgacacccagagcctgagagggataatatgggccgcaaatctaacatggaggcctgaaagtaggaacagtggcaacgggacactccccgctttctcagggagggtgctggtggctccctcagatcctgggcttctcctggtatatgtggcaccgggggagaatgcctcatatctttggaggtcctgttctaatttatatctaagcccacgtcaatgtccactttgaagactttcctatggacgatctcatctaatgtcgttttacagattttcttgttgtccttatcaccaggactctaaagacaaacatttggactctcctccccatagtcttaggaatttctcctctgctttgatctaagcattgttgaaacatggctgatatactaagacagtaactttttgtaagtgaaaaatatcctaaaggtctattctttcttaatgccactaataaaaagcactttgaagagtgtacagcatggtgacaatagttaatgacaatatattgtattcttaaaaaatgcta

SEQ ID NO: 461633 - DNA, 1813 bp, Homo sapiens
cttgacagatgtacgttggctctgcccagaaaggcgggacgacttcaaggtgaggaggggcttcctggtcacaggtgggttcaaagactttctgattagcaattggttgagagagttaagttattatctgatcacctggactcaatagaaaggagtgtctggattaagataaggggctgtggagaccaaagttcttattctgtagaagaaatctcatagggggctgcccttcgaggcaatagatggcaaatgtctcctattgagacctttgaaatgtgctagacgctaagcccatctctccagcatcagaaaaagccctggaaagggaagaggattctctacagaatgtggattttccccacaagagacagctttgcggggccgtttaaaattatgtcaaacactctattccttccaggacctgctccctgtcatgtgatgttatactagactcgggttggaatttggtgtcttattgctacaaacagcctgtgctgtcagtcttaaactctcggttttaatatgaatcatggcacacgatccccattacagtatcacagagcagcttcctgggcccctaaatcctccatgctcctgccacgcaccctccctgccctccttgctcctgccatgcaccctccctgccctccgtgctcctgccactcaccctccctgccctctgtgctcctgccactcaccctccctgccctccgtgctcctgccatgcaccctccctgccctccttgctcctgccactcacccttcctgcactctgtgctcctgccagtcaccctctgcccagccccggcagctgctgatctttcttgttttcatggttttgccttttcctgaatgtcatggagttggaatcacacagtatccagccttttccaatgggcttcttcacctagcagcatctaagattcctccctgccttttcacagcctggcagttcctttctttttagcactgaaaaatattccattgtctggagggaccccagcttatcctctctgccatcggctattctctggggtttttctactggtcctactcgtttttgttcattttacaatccagagttgtgagttgggtagatcagctgggaaaaaatggaaaagtagttgttttaattatttcccctttatgtggttaaaaagaagatgaagaagattctttaagttctagcattgactgttgaaagccacttgtataaaaggtgccaagaactacaggattctttcatctactgctttgcttcagagatcatctggcagccagcatggtggatcacgcctgtaatcccagcacttggggaggccgaggtgggcagatcactcgaggtcaggagttcaagactagcctggccaatatgatgaaaccccgtctctactaaaagtacaaaaattagccgggcatggtggcacatgcctgtaatcccagctactcaggaggctgaggcaggagaattgcttgatcctgggaggcggaggttgcagtgagccaagattgcatcattgcactccagcctgggtgacaagagtaaaactctgtctcaataaataaataaatacataggctattctagatccctttgcatctctgtataacttttagaaacagcttatcaacttccaccaaaaaaaaaatcagctagagttttgattgcaaatactttgagattacagataaattttggggaagattaacattgtaatggtattgagtgtttgaatccatgaacatggtatacttctccatttatttaggtcttatttaatttctctcaataatgttttgacattttcagtgt

SEQ ID NO: 461634 - DNA, 2454 bp, Homo sapiens
agttcatcaccatttcccctcgcaagaggatagactctacttaaaactctcagaaatttacatttcagtgaatataaaatgtggagtaaagtggagacgtatgaaccatgtgatgggcaccttgagcgcgaaaaaggcagaagacttgaaattggcctgttcactctttcagctaaggctgcagataaagctctggatgccacaggtcctgggtggggcctgaggcattgctgtgctagccagatccctggcgatgttggtgtcgctggtgttccagggacacatggcctatgccatacatcacagtaccaccagacgctggcacgtgtgtacacatcatcagaaacaggtatcacaagttcctgcctcaaacgggacacacaggccactcttctttgcctacccacaaaacttctttcaccccgaagttctcgacatcttcttgaactatcagtgaaaagtaccactgggaaagcctttctgcacagagccacatcggtgcagtgcccctctcgactctcccagtgctgtgtgagtgcctgtgttccgaagcagcacccctggtatcacatggaccgactctgacagatttgtttcttcattcgtcatccctccagatggctttaaaatgaatatagcattcaaataactacacagaagaaatcatcctataaccagttgatgcatataaaatgtgtgaaaatcagattataccacttatttttccacttagaattagcttcagaggttttcattttacataaatgatataacatgaaaaacaagcatgttccacaggggcctaactgctgtccagtcactcttctgtggcttggagaaattcgggcaaatagtctttgattaactatacacagttccagagggatcctttccaagttaccttaagatagcactgaatttaaaatgcatatgttcagataaggaaaatacctgaataataacaataatgaaacaaatagcagatggttaataactactggcttaatttaacttgttttcaaaccaggaattaattcaaactatttggatatttttccatagtgagactgagtaagcttcctccttcagattgttatttaaagttcaaatttcattattagttaaaaaaaaaagaaaaggaaaaaagataacaaagaaaaagattgggtggcacagacaattaaatcattactcatcaatgccaaaattctaggttctttgttctttgtcatagacagatgagtgtgcgagtgtcaatccagtcttccctccctgttttacttagactgggccacttttggacctattcagcaattctgaatcatcagctcatgtcatttctaaagccaagtccccatcctttgactcatcaattatcatatatttttactcatagatattctccctatcactttttaaagatgcaatttatgtctactttccagtaatcgtcatatttttatcaaagcttttagctaccatttgtttttgccacctatgcacttttggtggttttacagcaagaaacttccaaataatttctggtgtcatggactgcgtggtttcccattgttgctctaatctgcccttctcacttcaaacctctacttcctaaaatgagtcaaggatggactctgatgttgttgaaggtgagaagcagggcaaagagaaacagaaaaaaaggggagctgactgagacgtgaacgagctggggaagtccaggttgaacatgcacttatgagagaccaactctgcacaaagaaatcaaccttagttcttcaattttggctcctctgactcctgctatgggtaaatatgacaaaatgctttactgacaaggtttgataatgtctgagtggttaaaaggtgacaagtgatataactgtacaatgtgttcaaatgggaaagaaactgaattgggaatctgaaaactgagatttaggtcccactttgtaaccagtttgctatgatgcccttggcaagtcacctaacaagcaacgctctaccctccctcagagctgcctgtttgcgtttctccggacaagacataaattctattctgtgttacaaactctgacctctcctcaaagtgtgtgagctcgcccagagtaaggggacatctttgtacattttatggtgtctcctagcttgccttcgaatgtagcaagtttaaataactgatagccaagaaatggggctgtggagcaggagatggtaagtcgcatttcttgagccctgaatgaatgcaaagggcttttcatatcacctcacatcctcctcacagacacaggcctggatgacaatcgtcttttgatagtgagacagataatggttgtagacattcattcacttacacaagttcacagggatgctgttatgggctgaactgtgtccccccgccaaagataagtgaatgtgatgtttagggtctttggagagtactcaagttaaggc

SEQ ID NO: 461635 - DNA, 660 bp, Homo sapiens
  misc_feature (3)..(4): n is a, c, g, or t
  misc_feature (7)..(8): n is a, c, g, or t
  misc_feature (11)..(11): n is a, c, g, or t
  misc_feature (13)..(14): n is a, c, g, or t
  misc_feature (16)..(17): n is a, c, g, or t
ctnnctnnccntnncnngagctcatggtcccagtggcaggacgtccgttatgcaggtccagcagtatggagttgctcctgctcctgcccctccacatccccagggaacagatgcttctggcaggggctatggccaagttgctcagagcttcctgggttgtgtctgtgaagagcctgctgcctgtcgggtgttggtcccagaggtctgagctggggtgggtggggtccatgggccatggctgctcctcagggatcctgcagatgctgagtggatggcatcccctggcagaggtcacactgagaggaggtgacaggggagcctctccacctggagtcacaggctgcaggaaagaggagcacacttcacaatataaagccacccccactgcaacttgggcccagaaagcctgccaaaaccagggatgctgctccaggtcctgttacatccactctgcagaaaagacacattcctcagtggattgactgccccaggagcacagggacctggcagttctgaagggccgcctgaggaccctaagcctccttctgcccctccctcttcttcaaggcagctggcaacctccctctctataaaaaagaaggggaaatgcatgaacacgtggaacgtgataaaatacgctgtttatttccatgtgattag

SEQ ID NO: 461636 - DNA, 1642 bp, Homo sapiens
tttcacttcttttgtgattcttcagttacttcaggccatctgggcgtatacatgcaagaccttcttccctgggagaagggctggggtcaatcttggccgaccactgccacagggaccaacttgcctttatgttgccagagtagcaggctcaaagctcgactggagggtaggtccttgtgtacttcagattatgatccatctattatctatctatctatctatctatctatctatctatcatttatctatctatcatctatctattatctatcatctatctatctatcatctatctattatctatcatctgtctatcatctatctatctatctatctatctatctatctatctatctatctatctatctatctgtctttactgccatcaatacaatgactgcttctcattctaacactctagaccctggagtcaaatccagctcttccactaaccagctgtgtaaccttgagcaagttcttatcttttccacatctcacttttctcttctgtaaagtgaggatgataaccgtatctaccccatggagttgtttgagaattttaagccattcatgccctactcctagcatgtgtttggtgcacagcgagcactatagtaactattgatgttgttaacacattatttccttcctattatccttaagagggagttcttaccttctcatcccatctctttagttttcttaatataactctaaattaaaataaaactcttcactttgttaggaagaggaccatgacttgcttaggcccgactaacatttgcactcaccattttgttacacagatggcaaaccaggaaaacagagctcagtacagaagggagttgggcagcctctgttcctgtttggctctgtccttgaagaaagtgataagaagtgcacagattttggaattaaacagaccatggtttgaagtctggatcttccagttgtaaccaggtggcattgggaggcgaggagagaatggatcccggtctgagctccccgcttccgtccccagtctccagataccggtcctcgcctctccgcgccgcgcgctgcctcctctccccggtgctagcagcggccgctggcatttggaattctgcccacaaaagggggcctggaggaggaggagaggagggacggaggccggcggcgagaaacggcattcggagtccaaaacatcatgggaaaaggaaccgagcggcggcggctctgaaggctgtgccgctgcgcccgaccgcagtgcatcagcgtggccgccctgacatcccccaggatggttaacatggggcattatgcgctggttaacaggctccgagctgctcagcgacttgttttaagcattttctctctcgctctcgcttttaatcttgtctctagtggcgtgtgtaggggggaggactttatttccattggctaagctctcccttcccacccacatctcttccacatcaccttggtgtctccctaaataaaaccagccctccttatcgcctggaaaaaatcaagagctagagtttgaatgggttttatataaacactcacccctgtcagcgtgcggctgggctctcaggataaactcacagcatctggcgcgatgcttgccttgcgttctctcccctgaacgtcaaggttt

SEQ ID NO: 461637 - DNA, 5857 bp, Homo sapiens
tcacctgtcttctgcgtcagtcatgctgggagctgcagactggagctctgtaacccatgctggtgatgtttgcaagtgtctctgtggcctaaggtccaaggcgcaggtatgcagccgctcagctggcctgggggtgtatctgccaggagctggcctgagccagctgtccctgagtgctggcaaatacactgacctgaagattacaattcctagaccttctgtggcatctacacagtcaacttcaggaagctttcactgtggtcagcagccagagaagaaagatcttcagcccatggagcccactgtggaactttactctccaagggaaaacttctctggcttggttgtgacagagggtgaacctcctagtggaggaagcagaacagatttggggcttcagatagatcacattggtcatgacatgttacccaacattagagaaagtaacaaatctcaagacctgggaccaaaagaacttcctgatcataatagactggttgtgagagaatttgaaaatctccctggggaaactgaagagaaaagcatccttttagagtcagataatgaagatgagaagttaagtagagggcagcattgtattgagatctcctctctcccaggagatttggtaattgtggaaaaggatcactcagctactactgaacctcttgatgtgacaaaaacacagacttttagtgtggtgccaaatcaagacaaaaataatgagataatgaagcttctgacagttggaacttcagaaatttcttccagagacattgacccacatgttgaaggtcagataggccaagtggcagaaatgcaaaaaaataagatatctaaggatgatgacatcatgagtgaagacttgccaggtcatcaaggagacctctctacttttttgcaccaagagggcaagagagagaaaatcacccctagaaatggagaactatttcattgtgtttcagagaatgaacatggtgccccaacccggaaggatatggttaggtcatcctttgtaactagacacagccgaatccctgttttagcacaagagatagactcaactttggaatcatcctctccagtttctgcaaaagaaaagctcctccaaaagaaagcctatcagccagacctagtcaagcttctggtggaaaaaagacaattcaagtccttccttggcgacctctcaagtgcctctgataaattgctagaggagaaactagctactgttcctgctcccttttgtgaggaggaagtgctcactcccttttcaagactgacagtagattctcacctgagtaggtcagctgaagatagctttctgtcacccatcatctcccagtctagaaagagcaaaattccaaggccagtttcatgggtcaacacagatcaggtcaatagctcaacttcgtctcagttctttcctcggccaccaccaggaaagccacccacgaggcctggagtagaagccaggctacgcagatataaagtcctagggagtagtaactccgactcagaccttttctcccgcctggcccaaattcttcaaaatggatctcagaaaccccggagcactactcagtgcaagagtccaggatctcctcacaatccaaaaacaccacccaagagtccagttgtccctcgcaggagtcccagtgcctctcctcgaagctcatccttgcctcgcacgtctagttcctcaccatctagggctggacggccccaccatgaccagaggagttcgtccccacatctggggagaagcaagtcacctcccagccactcaggatcttcctcctccaggaggtcctgccaacaggagcattgcaaacccagcaagaatggcctgaaaggatccggcagcctccaccaccactcagccagcactaaaaccccccaagggaagagtaagccagccagtaaactcagcagataggagccaggctgcatctctttgaaaggtgtgagatcttcctcctaaacctgatgcatgtgtgtccctgtactttctatgtaaaaaaatcagtgttgatcttctcttgcaaaagaaagtaacatgatcaattatttataagaagacataatacatgataaggaattacctaaggcaggcagcaagtagattaggaatcaatgtctttgtacaagaaggaaaaatagagcaaaaatccaagggggagaaactcattaaaatgagctctcattttttaagctgcctttgaaacaaaagagttgaggataggagatagaatggaattttaggggggttgcctaatttttttaagcctcaattcaaagattatatagcaaaagtgaaacttcttgtttgatattttcattcaaaactttcccaccctgaagagtcattgatcagatattagattatataagaagtctgttgccagggagccagtattcatgtatatttggcttgtgtgtttatttcgtgtattgagaatgaacacctttactttgcctcattcctagtaccctccctggagttcagatttttttttaaaattttgtatgtctcgtctgattcaatctctctgcttttattttatggtcctagttgtactatcaaatccaattacttttttttaggtccccctgattttttttttttagagcaagagttcttaacatattacatttttattatgaaaaataagaaagttaggtaaaggaaagaaaagtctaactagagctattttgcaggctttagtgtttagggagagaaagaaagtgtgggttaatagccttcaagatagaagatgccctttcatctctgttaagtgtcctcctttagaaacttgagtagaaggaaaactgaccagagtagactgcttccttaagtcttctgggttccaactgtttgtaatatcagcatccaagatgatacgagggaagcacaatgctttggactgtgatttgagatttagaaataaattagatatattattgaggcttagaatcctcaaactttgtattttatacatttagccaataaggaattaatatctggggaaataaatttaggcaaatatttcttttttaatgttttattacctgcttctcctgtgttttagttcaacatttgggcttcttggcctgattttcatacaatctcaatttacgaagctgtaaagaggaagatatttgttctaatctcactcttctaataggaatcaggcaaatgaaagtctaccagacttttaaaatgggctgtttttatactctctaggtgttttgtgttgtaaagaccttattaaggtcaggtaaattggtctgcttgctgttgaaatttgccttctagcaaacatatgtgctttctgtttgaccttgtgtttgctgccaaacctaatacagttgaattgggaaacaaaaaaaaaagaaaggaatacatttcctccccaagtgaacatcttctaatgctgcatcaaagctgccctgaagctgcactgaacttctcttgttctctttatctgtgttgagctttttaaaaaaacaaactcaaaacactattgaggcatataacgtctcttataagaaatgtagcatagtgtggaatcttaatttctctccagtttcaaacactccagaggaatgcaatagataagacatacttgctgtttatctaaagcaactgtaatattggaagatcagtccttctgtattatattgtataatagttgctataacactacttgcatgtcttcatggtaaattatataaatatttataaatatatagagagacatatccttatatagagtcattctttgtcattctccatttgtaatttcgagatcacagatggcgaaattccttttctattgtgtgcctcatgtacacttgggccttgcctatcttcattttctgaaactatgttcttggcatgtgacacctcagagtcttcttgccttccctgtgtacaatgcaagggtgggcagtatttaacaagccaagataggttatttaattttcatttcaaaaagattttaatagggaaaaaattacagggacatgcttgtaatactggttcagagatttgtcatgttaatcacatagttctctccttatagttagagtggataaactgggatgatgatgagtctgacagatttttaaaacatttcttaaaaattgccattctactttcctcttttcatctcactttttttgcagggggtcgggggaataatgaagaaattgtcatatttctgttgcattagctaaattgtgctaaaagtagctagctttaaatcctgacccctttagtcggaaatatgctagtagtaatcattggaaaagctgatgaagctacaactgtggtacgtgtgtgtgattttatttcttattggcatttctctgctggcagttggaactgacagtgatgggaatgtggcaactgaatgttttctctctttcttggttccttccatttttatctcaacttttctagtgtgttgtccccttttctaaatggcattgacaaactcatcaagatccagagataaacagtccatcgtttaagaatattttattttgcatgtagaggaaagaattaaccaaagacgtttctgctctgatactttctaaagaaaacagactaattatatataagtggtatcaatagtctatgcccattaagacgtcttctaattcagttgtgattgtctgctcctacttaaaaaaatatttaagcttgatgtttaattattccctttcagcaaatttggatcagaaaattaaagtatgtgacaagatcaggtcaccttgaatttccacacaatctcaagacactgaatagcaaaaaagtaacattacacagtaatgattaggatatttccttagactttgctggatctttggtcttaaggtaacatgtaaaagtagtgaagcctttcctttcatggccctgtgcaatgtaacggttttctgcctcctcttcagctggaagcgttagtggtagtatgggcacagaatatatgtacactggcgatgctgaccatgcctcccaggtaccctggctctgggttccttgacctagggaacaagattggatgaggcagatctttgagcccatgtgactatagaatttgctgatgatataattttacaataacaatggataggaattttacctctctttttattagtttaatattatttaatattatgtacataagtgttcactcgcctaattaaaaacattgagtaaaccaagtttttatatagactacccttgccatatgatgctctttttctctaataatatgcagtttaaatcctgaggaatcaatgcccagcatttcaccacatctgaactctgtgtgggcattcttcactcgcctacaaggggtaaacaaggctaccagaacttgaatttgacttatagggagctacccaggaaggggaaagcccttgggactttttccaaaacaatcttctatttgaactgttcatcagccaaagtagtccactgaggtgacaaagctttcagaaatacaaagatgggaagataaagagagatgagaaactactctttgaaatacctccagaggcgttttattgtgttcctttcccctccaagcagctccctttatacaattttgctcaggcaaccaaggacagagtatcggcagaaacatggagtgcttttgtataggccacctgtacataaaagtgtaattatttatttaattttcccatttgtatcatattaaagctttgtacagtgttttaagttctgttttaaaattattttgtattttatttttataacctagtaataaaatattcattccgcatgcaaaatctagttctgtttgtgtgatggtctggatttcaaaag

SEQ ID NO: 461638 - DNA, 5676 bp, Homo sapiens
  misc_feature (27)..(27): n is a, c, g, or t
ttcatcggcacctcgctattcatcgcnacctcgctattcatcggcacctcgctattcatcggcacctcgctattcatcggcacccagccagagaagaaagatcttcagcccatggagcccactgtggaactttactctccaagggaaaacttctctggcttggttgtgacagagggtgaacctcctagtggaggaagcagaacagatttggggcttcagatagatcacattggtcatgacatgttacccaacattagagaaagtaacaaatctcaagacctgggaccaaaagaacttcctgatcataatagactggttgtgagagaatttgaaaatctccctggggaaactgaagagaaaagcatccttttagagtcagataatgaagatgagaagttaagtagagggcagcattgtattgagatctcctctctcccaggagatttggtaattgtggaaaaggatcactcagctactactgaacctcttgatgtgacaaaaacacagacttttagtgtggtgccaaatcaagacaaaaataatgagataatgaagcttctgacagttggaacttcagaaatttcttccagagacattgacccacatgttgaaggtcagataggccaagtggcagaaatgcaaaaaaataagatatctaaggatgatgacatcatgagtgaagacttgccaggtcatcaaggagacctctctacttttttgcaccaagagggcaagagagagaaaatcacccctagaaatggagaactatttcattgtgtttcagagaatgaacatggtgccccaacccggaaggatatggttaggtcatcctttgtaactagacacagccgaatccctgttttagcacaagagatagactcaactttggaatcatcctctccagtttctgcaaaagaaaagctcctccaaaagaaagcctatcagccagacctagtcaagcttctggtggaaaaaagacaattcaagtccttccttggcgacctctcaagtgcctctgataaattgctagaggagaaactagctactgttcctgctcccttttgtgaggaggaagtgctcactcccttttcaagactgacagtagattctcacctgagtaggtcagctgaagatagctttctgtcacccatcatctcccagtctagaaagagcaaaattccaaggccagtttcatgggtcaacacagatcaggtcaatagctcaacttcgtctcagttctttcctcggccaccaccaggaaagccacccacgaggcctggagtagaagccaggctacgcagatataaagtcctagggagtagtaactccgactcagaccttttctcccgcctggcccaaattcttcaaaatggatctcagaaaccccggagcactactcagtgcaagagtccaggatctcctcacaatccaaaaacaccacccaagagtccagttgtccctcgcaggagtcccagtgcctctcctcgaagctcatccttgcctcgcacgtctagttcctcaccatctagggctggacggccccaccatgaccagaggagttcgtccccacatctggggagaagcaagtcacctcccagccactcaggatcttcctcctccaggaggtcctgccaacaggagcattgcaaacccagcaagaatggcctgaaaggatccggcagcctccaccaccactcagccagcactaaaaccccccaagggaagagtaagccagccagtaaactcagcagataggagccaggctgcatctctttgaaaggtgtgagatcttcctcctaaacctgatgcatgtgtgtccctgtactttctatgtaaaaaaatcagtgttgatcttctcttgcaaaagaaagtaacatgatcaattatttataagaagacataatacatgataaggaattacctaaggcaggcagcaagtagattaggaatcaatgtctttgtacaagaaggaaaaatagagcaaaaatccaagggggagaaactcattaaaatgagctctcattttttaagctgcctttgaaacaaaagagttgaggataggagatagaatggaattttaggggggttgcctaatttttttaagcctcaattcaaagattatatagcaaaagtgaaacttcttgtttgatattttcattcaaaactttcccaccctgaagagtcattgatcagatattagattatataagaagtctgttgccagggagccagtattcatgtatatttggcttgtgtgtttatttcgtgtattgagaatgaacacctttactttgcctcattcctagtaccctccctggagttcagatttttttttaaaattttgtatgtctcgtctgattcaatctctctgcttttattttatggtcctagttgtactatcaaatccaattacttttttttaggtccccctgattttttttttttagagcaagagttcttaacatattacatttttattatgaaaaataagaaagttaggtaaaggaaagaaaagtctaactagagctattttgcaggctttagtgtttagggagagaaagaaagtgtgggttaatagccttcaagatagaagatgccctttcatctctgttaagtgtcctcctttagaaacttgagtagaaggaaaactgaccagagtagactgcttccttaagtcttctgggttccaactgtttgtaatatcagcatccaagatgatacgagggaagcacaatgctttggactgtgatttgagatttagaaataaattagatatattattgaggcttagaatcctcaaactttgtattttatacatttagccaataaggaattaatatctggggaaataaatttaggcaaatatttcttttttaatgttttattacctgcttctcctgtgttttagttcaacatttgggcttcttggcctgattttcatacaatctcaatttacgaagctgtaaagaggaagatatttgttctaatctcactcttctaataggaatcaggcaaatgaaagtctaccagacttttaaaatgggctgtttttatactctctaggtgttttgtgttgtaaagaccttattaaggtcaggtaaattggtctgcttgctgttgaaatttgccttctagcaaacatatgtgctttctgtttgaccttgtgtttgctgccaaacctaatacagttgaattgggaaacaaaaaaaaaagaaaggaatacatttcctccccaagtgaacatcttctaatgctgcatcaaagctgccctgaagctgcactgaacttctcttgttctctttatctgtgttgagctttttaaaaaaacaaactcaaaacactattgaggcatataacgtctcttataagaaatgtagcatagtgtggaatcttaatttctctccagtttcaaacactccagaggaatgcaatagataagacatacttgctgtttatctaaagcaactgtaatattggaagatcagtccttctgtattatattgtataatagttgctataacactacttgcatgtcttcatggtaaattatataaatatttataaatatatagagagacatatccttatatagagtcattctttgtcattctccatttgtaatttcgagatcacagatggcgaaattccttttctattgtgtgcctcatgtacacttgggccttgcctatcttcattttctgaaactatgttcttggcatgtgacacctcagagtcttcttgccttccctgtgtacaatgcaagggtgggcagtatttaacaagccaagataggttatttaattttcatttcaaaaagattttaatagggaaaaaattacagggacatgcttgtaatactggttcagagatttgtcatgttaatcacatagttctctccttatagttagagtggataaactgggatgatgatgagtctgacagatttttaaaacatttcttaaaaattgccattctactttcctcttttcatctcactttttttgcagggggtcgggggaataatgaagaaattgtcatatttctgttgcattagctaaattgtgctaaaagtagctagctttaaatcctgacccctttagtcggaaatatgctagtagtaatcattggaaaagctgatgaagctacaactgtggtacgtgtgtgtgattttatttcttattggcatttctctgctggcagttggaactgacagtgatgggaatgtggcaactgaatgttttctctctttcttggttccttccatttttatctcaacttttctagtgtgttgtccccttttctaaatggcattgacaaactcatcaagatccagagataaacagtccatcgtttaagaatattttattttgcatgtagaggaaagaattaaccaaagacgtttctgctctgatactttctaaagaaaacagactaattatatataagtggtatcaatagtctatgcccattaagacgtcttctaattcagttgtgattgtctgctcctacttaaaaaaatatttaagcttgatgtttaattattccctttcagcaaatttggatcagaaaattaaagtatgtgacaagatcaggtcaccttgaatttccacacaatctcaagacactgaatagcaaaaaagtaacattacacagtaatgattaggatatttccttagactttgctggatctttggtcttaaggtaacatgtaaaagtagtgaagcctttcctttcatggccctgtgcaatgtaacggttttctgcctcctcttcagctggaagcgttagtggtagtatgggcacagaatatatgtacactggcgatgctgaccatgcctcccaggtaccctggctctgggttccttgacctagggaacaagattggatgaggcagatctttgagcccatgtgactatagaatttgctgatgatataattttacaataacaatggataggaattttacctctctttttattagtttaatattatttaatattatgtacataagtgttcactcgcctaattaaaaacattgagtaaaccaagtttttatatagactacccttgccatatgatgctctttttctctaataatatgcagtttaaatcctgaggaatcaatgcccagcatttcaccacatctgaactctgtgtgggcattcttcactcgcctacaaggggtaaacaaggctaccagaacttgaatttgacttatagggagctacccaggaaggggaaagcccttgggactttttccaaaacaatcttctatttgaactgttcatcagccaaagtagtccactgaggtgacaaagctttcagaaatacaaagatgggaagataaagagagatgagaaactactctttgaaatacctccagaggcgttttattgtgttcctttcccctccaagcagctccctttatacaattttgctcaggcaaccaaggacagagtatcggcagaaacatggagtgcttttgtataggccacctgtacataaaagtgtaattatttatttaattttcccatttgtatcatattaaagctttgtacagtgttttaagttctgttttaaaattattttgtattttatttttataacctagtaataaaatattcattccgcatgcaaaatctagttctgtttgtgtgatggtctggatttcaaaag

SEQ ID NO: 461639 - DNA, 3454 bp, Homo sapiens
gtccttctgatgaggagcctgaagtacttcaagtcctggaggcatcacctcaagatgaaaagctccagttaggtccttgggcagaaaatgatcatttaaagaaggaaacctcaggtgtggtcttagcactttctgcagagggtcctcctactgctgcttcagaacaatatacagataggctggaactccagcctggagctgctagtcagtttattgcagcgacgcccacaagtctaatggaggcgcaggcagaaggaccccttacagcgattacaattcctagaccttctgtggcatctacacagtcaacttcaggaagctttcactgtggtcagcagccagagaagaaagatcttcagcccatggagcccactgtggaactttactctccaagggaaaacttctctggcttggttgtgacagagggtgaacctcctagtggaggaagcagaacagatttggggcttcagatagatcacattggtcatgacatgttacccaacattagagaaagtaacaaatctcaagacctgggaccaaaagaacttcctgatcataatagactggttgtgagagaatttgaaaatctccctggggaaactgaagagaaaagcatccttttagagtcagataatgaagatgagaagttaagtagagggcagcattgtattgagatctcctctctcccaggagatttggtaattgtggaaaaggatcactcagctactactgaacctcttgatgtgacaaaaacacagacttttagtgtggtgccaaatcaagacaaaaataatgagataatgaagcttctgacagttggaacttcagaaatttcttccagagacattgacccacatgttgaaggtcagataggccaagtggcagaaatgcaaaaaaataagatatctaaggatgatgacatcatgagtgaagacttgccaggtcatcaaggagacctctctacttttttgcaccaagagggcaagagagagaaaatcacccctagaaatggagaactatttcattgtgtttcagagaatgaacatggtgccccaacccggaaggatatggttaggtcatcctttgtaactagacacagccgaatccctgttttagcacaagagatagactcaactttggaatcatcctctccagtttctgcaaaagaaaagctcctccaaaagaaagcctatcagccagacctagtcaagcttctggtggaaaaaagacaattcaagtccttccttggcgacctctcaagtgcctctgataaattgctagaggagaaactagctactgttcctgctcccttttgtgaggaggaagtgctcactcccttttcaagactgacagtagattctcacctgagtaggtcagctgaagatagctttctgtcacccatcatctcccagtctagaaagagcaaaattccaaggccagtttcatgggtcaacacagatcaggtcaatagctcaacttcgtctcagttctttcctcggccaccaccaggaaagccacccacgaggcctggagtagaagccaggctacgcagatataaagtcctagggagtagtaactccgactcagaccttttctcccgcctggcccaaattcttcaaaatggatctcagaaaccccggagcactactcagtgcaagagtccaggatctcctcacaatccaaaaacaccacccaagagtccagttgtccctcgcaggagtcccagtgcctctcctcgaagctcatccttgcctcgcacgtctagttcctcaccatctagggctggacggccccaccatgaccagaggagttcgtccccacatctggggagaagcaagtcacctcccagccactcaggatcttcctcctccaggaggtcctgccaacaggagcattgcaaacccagcaagaatggcctgaaaggatccggcagcctccaccaccactcagccagcactaaaaccccccaagggaagagtaagccagccagtaaactcagcagataggagccaggctgcatctctttgaaaggtgtgagatcttcctcctaaacctgatgcatgtgtgtccctgtactttctatgtaaaaaaatcagtgttgatcttctcttgcaaaagaaagtaacatgatcaattatttataagaagacataatacatgataaggaattacctaaggcaggcagcaagtagattaggaatcaatgtctttgtacaagaaggaaaaatagagcaaaaatccaagggggagaaactcattaaaatgagctctcattttttaagctgcctttgaaacaaaagagttgaggataggagatagaatggaattttaggggggttgcctaatttttttaagcctcaattcaaagattatatagcaaaagtgaaacttcttgtttgatattttcattcaaaactttcccaccctgaagagtcattgatcagatattagattatataagaagtctgttgccagggagccagtattcatgtatatttggcttgtgtgtttatttcgtgtattgagaatgaacacctttactttgcctcattcctagtaccctccctggagttcagatttttttttaaaattttgtatgtctcgtctgattcaatctctctgcttttattttatggtcctagttgtactatcaaatccaattacttttttttaggtccccctgattttttttttttagagcaagagttcttaacatattacatttttattatgaaaaataagaaagttaggtaaaggaaagaaaagtctaactagagctattttgcaggctttagtgtttagggagagaaagaaagtgtgggttaatagccttcaagatagaagatgccctttcatctctgttaagtgtcctcctttagaaacttgagtagaaggaaaactgaccagagtagactgcttccttaagtcttctgggttccaactgtttgtaatatcagcatccaagatgatacgagggaagcacaatgctttggactgtgatttgagatttagaaataaattagatatattattgaggcttagaatcctcaaactttgtattttatacatttagccaataaggaattaatatctggggaaataaatttaggcaaatatttcttttttaatgttttattacctgcttctcctgtgttttagttcaacatttgggcttcttggcctgattttcatacaatctcaatttacgaagctgtaaagaggaagatatttgttctaatctcactcttctaataggaatcaggcaaatgaaagtctaccagacttttaaaatgggctgtttttatactctctaggtgttttgtgttgtaaagaccttattaaggtcaggtaaattggtctgcttgctgttgaaatttgccttctagcaaacatatgtgctttctgtttgaccttgtgtttgctgccaaacctaatacagttgaattgggaaaca

SEQ ID NO: 461640 - DNA, 1112 bp, Homo sapiens
gccaagatacaccatttaatcttttttttttttttttaattgagatggaacgccagttagtaaatcttcccatgctatatgacagccagtcctggagaagaagaaaatcacctatcccaggaaaagtggctctacacctatttcaacctcaagtcttccggccttcatctttctcctgtgctggatgcttcttgtcctcaaacatcagactctgagttcttcagcttttggactcctggacttacaccagtggtttgtcaggggctctcgggccattggccacacaatgaaggctgcactgtcggcttccctacttctgaggttttgggactcagactgatacactactggctttctcgctcctcaacttgcagacagcctattgtgggattttaccttgtgaccatgcttggcacaggtggaggaattccactgcagaaaaccaagacgaataatgcttctgaaaacttccgaatggtagatagagatctgaaagagcgcagacacatgaccccaaaggacatttgctgagtgctgaggcagtataggaagtggggtgtttatctgttcagggtgcttaggtgacaaaatccttctataaatacaacagatttgcaaggttatgaacctgtttgggtggaaggttaaagggcttaatttaaaggatccaaaagatacacattatattactgaagaagtagagactcattagacttttcatcaaaaccctggtaaagccacagtcaaaaaggatggggctgaaagggagagtaaaattttgctcaatttcttggtacttaggataaaaggtcctgttttaaaccatggctcatctcttcctcaagatgtttgacagatattgaagctacatggggctggaggctaaatagttaagctcaaactcagaaaaattgaattgaagggtttaaggtctgaggagacacacatctaccaagatcacaatcagaagatcagcgatatagcagaggtgggctgaatctatctaaaactacaatccagttctgaccaagctcaattactgattagatttaaatgacctggccagccactgtggcttatgcctgtaatcccggcactttgggaggccgaaa

SEQ ID NO: 461641 - DNA, 692 bp, Homo sapiens
agcgcagatacgactcgagctcggacccggagacaacttacgacttctagtctgtccacatctggagcatagtcatgcatagctgggatgctactgtgtgctgaacattatatttaagaaatgtctttgatcccatgtgtaaggaccccatctaattccttgtctccttgtttcctaagtgctgatagcatcatcattgttctactactgctgtgataataatgaaatgtttccatttttacatattctttgctttattcactcctgtggtgtgtagggtcattattcatgtggttgcccagtgccatgaggaaggattggagagccacttgaggtcatatgttaaggtatgtaaaacacactgttctgatcacttacatctgtggctctccagttttccttctaaggacttattttttcacaagcctggttatttgaggatgtgcttgtaacgtatgctttctcttctatttctcatagccaatgcttgtacctgaataggggaggtacgaagagggacagccattcactaatttacttaattccattccttcaattatgtttcttttaatgggttttccaaataatatgactcaatgtggaagtttaaagaagaattttaagttgttcttggctaggcctctgctaacgtaagtgtctccgggtccgagctcgagtcgtatcatgtactt

SEQ ID NO: 461642 - DNA, 1775 bp, Homo sapiens
  misc_feature (880)..(880): n is a, c, g, or t
ctttacttctctgagcctctgttagctcatctgtaaatggggactttcttctgccccagattatggtgaggattagatggcacaatctatgtgaaattgtgagagcacgtagtacagtgcctggcacacaacagattctcagtctatatgccatgtcattcctgcctatcattgttcttggcaagtgtagagtgaaagcctgtggccatacatcttcatgagccatcagcatccccatagccaccgtctctgcttatctcaggccccaaagactctggctttttccctaagagaaacctctttacctatttctcaacctcagtgtaaaatataagaatgcaaaaaaggttagctattagatgatagaactcaaacgatggtaatactaaactgttaagggttcacacagaggtttaaatgcacataccattgggtacagctgtttcgcttcagagaacttatcctgtaggtatagttagacatgcatgcaaagacccacataaaaggatgttcattgaaacataattataatagcaaaaagttaggggagagaaacagtaactgcctatcagtaggagactagttaactcaattatggtctatccacatagaggaatattacgcaacttgggaaaacttgagatagatccaagctatattgttcagttaaaactcagagagcaaaattatgtgtgtaatatgcaaagattttcaacaaattccctgttggggagagatcctgtagtaggagacaagagagcccggctttaggttatatgtccacttgtattctttgaattttctagtctatttaagagcatgttacgaataagttaaatgagcattatgccagaatatagcactaaatgacgtatgatgnaattaaagttcaaatgcagcatgttgaaggtgaataggcctcaggtgtgtgatacccagtgtagagtggtcagctataaaagagggcaggggaagggtttagaggcctacactccagggtttagaggcctacactccaaggttccttcccattttcacaacaggtgattctccataatgtatatcatatgtattgtgattctaagtaaatgtttattttctagatgctttgtttacatattggaacaaggcttcaacatctgaacttatggatttttttacaatatctgagtaagtagctttctctttgatcactgcctcttgattttttcctggatcattaagaggcttgaagaatactatgtagttgaaccagaggagtagtgtatgtcacatcctcacttactccttaagccctttctcatggtcttggccctaaaacatattttcagggcttgtgacccagtgatcagtggtcacccttaaagtattacagatacgtgcctgttttacatgagaggtaactgtttatgtgtataagtcatcttaataaaataacatgaaatttattaggctgaattggggtagatactgcttttctaagttgaacctaacttaagctgatgcagaaactgagtcagaaaagttgctataattttaaaatataagaagtaaaagtgaaatcttatgtagcatctttatctcattttggtttgtcagtataagtttctgatttcctttaagctctttacttttagaaacgtgaatttacaatcccttatccaaaactgctggggccagatgattttccaaattcagaactttttggatttctgaaaaatttacatatagactgtatcccattacatcccagcagcatctctctataataataa

SEQ ID NO: 461643 - DNA, 320 bp, Homo sapiens
tatgaggccaacgaaggccatttgtttattttttttttgtgtgtgtgtgtatttttattcaagttcaaggacttttcacctccattatcacatttgttattttaaaatcgattctcctctttgcacatgggaagaaatgggctttgttctgttttccagaggctggcccatctgtatgacacgctgcaccgggcctacagcaaagtgaccgaggtcatgcactcgggccgcaggcttctggggacctacttccgggtagccttcttcgggcaggtgagcctcctgtcctatctgcagactgtcgtaagtcctttaaaaaa

SEQ ID NO: 461644 - DNA, 476 bp, Homo sapiens
aggtggatggatgctcttcctcacttctagtctgtccacatctggagcatagtcatgcatagctgggatgctactgtgtgctgaacattatatttaagaaatgtctttgatcccatgtgtaaggaccccatctaattccttgtctccttgtttcctaagtgctgatagcatcatcattgttctactactgctgtgataataatgaaatgtttccatttttacatattctttgctttattcactcctgtggtgtgtagggtcattattcatgtggttgcccagtgccatgaggaaggattggagagccacttgaggtcatatgttaaggtatgtaaaacacactgttctgatcacttacatctgtggctctccagttttccttctaaggacttattttttcacaagccaaagccaaaggcgcggtcaaagaacttgaagagctgctggatgctctcaaggatcgccaagccgaaacc

SEQ ID NO: 461645 - DNA, 548 bp, Homo sapiens
ctgtctttaatacatggttattaatatccttccatcatgtctaataataaattccattcgctgtgatttttcacacctctttttaaaatacaggccaacagtaaaggcagtgttcccaatgcattgtattaataatagttcaaagtaagacacctgaggaaccaaaacaaagcagcttcccacacctctgacccagcaacgtgggcattatgaagattgtccgggtgcagtttaagtgttatgaagattggctgggcatggtggctcatgcctgtaatcccaacactttgggaggccaagctgctggtggccaagcagcaggtggatcacttgagaccaggagttcgagaccagcctggccaacatggtgaaaccccgtctctactaaaaatacaaaaactagtcaggcttattggcacacacatgtaatcccagctactggggaggctgagacatgaaatcacttgaacctggggggctgaggttgcagtgagctaagactgtgccactgcactccagcctgggtgacagaacaagaccctatctca

SEQ ID NO: 461646 - DNA, 515 bp, Homo sapiens
  misc_feature (458)..(458): n is a, c, g, or t
agaagctgctttagtgagtagttaatacataaaagaacggctttaggttatacagatatattttaggaaaatccctatggttgtctgttgggtttaggctcttagtcatctgaacttatggatttttttacaatatctgaagtctgcctgcaccagttccagtacatggggaagcgatacatagccaggaaccaggaggggttgggacccatagttcatgatcgaaagtctcagacattgcctgtttcccgtaacagaacaggaatgatgcatgccagattgcagcagctgggcagcctggataactctctcacttttaaccacagctatggccactcggacgcagatgttctgcaccagtcattacttgaagccaacattgctactgaggtttgcctgacagctctggacacgctttctctatttacattggcgtttaagaaccagctcctgggatngggctatcaaaccagacggatgaggaagtgttccatctcctgggattgggctatcaa

SEQ ID NO: 461647 - DNA, 6117 bp, Homo sapiens
ataaaatacaaccggaagatttctgccgatttccacgtagacctgaaccatttctcagtgaggcaaatgctcgccaccacgtccccggcgctgatgaatggcagtgggcagagcccatctgtcctcaagggcatccttcatgaagccgccatgcagtatccgaagcagggaatattttcagtcacttgtcctcatccagatatatttcttgtggccagaattgaaaaagtccttcaggggagcatcacacattgcgctgagccatatatgaaaagttcagactcttctaaggtggcccagaaggtgctgaagaatgccaagcaggcatgccaaagactaggacagtatagaatgccatttgcttgggcagcaaggacattgtttaaggatgcatctggaaatcttgacaaaaatgccagattttctgccatctacaggcaagacagcaataagctatccaatgatgacatgctcaagttacttgcagactttcggaaacctgagaagatggctaagctcccagtgattttaggcaatctagacattacaattgataatgtttcctcagacttccctaattatgttaattcatcatacattcccacaaaacaatttgaaacctgcagtaaaactcccatcacgtttgaagtggaggaatttgtgccctgcataccaaaacacactcagccttacaccatctacaccaatcacctttacgtttatcctaagtacttgaaatacgacagtcagaagtcttttgccaaggctagaaatattgcgatttgcattgaattcaaagattcagatgaggaagactctcagccccttaagtgcatttatggcagacctggtgggccagttttcacaagaagcgcctttgctgcagttttacaccatcaccaaaacccagaattttatgatgagattaaaatagagttgcccactcagctgcatgaaaagcaccacctgttgctcacattcttccatgtcagctgtgacaactcaagtaaaggaagcacgaagaagagggatgtcgttgaaacccaagttggctactcctggcttcccctcctgaaagacggaagggtggtgacaagcgagcagcacatcccggtctcggcgaaccttccttcgggctatcttggctaccaggagcttgggatgggcaggcattatggtccggaaattaaatgggtagatggaggcaagccactgctgaaaatttccactcatctggtttctacagtgtatactcaggatcagcatttacataattttttccagtactgtcagaaaaccgaatctggagcccaagccttaggaaacgaacttgtaaagtaccttaagagtctgcatgcgatggaaggccacgtgatgatcgccttcttgcccactatcctaaaccagctgttccgagtcctcaccagagccacacaggaagaagtcgcggttaacgtgactcgggtcattattcatgtggttgcccagtgccatgaggaaggattggagagccacttgaggtcatatgttaagtacgcgtataaggctgagccatatgttgcctctgaatacaagacagtgcatgaagaactgaccaaatccatgaccacgattctcaagccttctgccgatttcctcaccagcaacaaactactgaagtactcatggtttttctttgatgtactgatcaaatctatggctcagcatttgatagagaactccaaagttaagttgctgcgaaaccagagatttcctgcatcctatcatcatgcagtggaaaccgttgtaaatatgctgatgccacacatcactcagaagtttcgagataatccagaggcatctaagaacgcgaatcatagccttgctgtcttcatcaagagatgtttcaccttcatggacaggggctttgtcttcaagcagatcaacaactacattagctgttttgctcctggagacccaaagaccctctttgaatacaagtttgaatttctccgtgtagtgtgcaaccatgaacattatattccgttgaacttaccaatgccatttggaaaaggcaggattcaaagataccaagacctccagcttgactactcattaacagatgagttctgcagaaaccacttcttggtgggactgttactgagggaggtggggacagccctccaggagttccgggaggtccgtctgatcgccatcagtgtgctcaagaacctgctgataaagcattcttttgatgacagatatgcttcaaggagccatcaggcaaggatagccaccctctacctgcctctgtttggtctgctgattgaaaacgtccagcggatcaatgtgagggatgtgtcacccttccctgtgaacgcgggcatgactgtgaaggatgaatccctggctctaccagctgtgaatccgctggtgacgccgcagaagggaagcaccctggacaacagcctgcacaaggacctgctgggcgccatctccggcattgcttctccatatacaacctcaactccaaacatcaacagtgtgagaaatgctgattcgagaggatctctcataagcacagattcgggtaacagccttccagaaaggaatagtgagaagagcaattccctggataagcaccaacaaagtagcacattgggaaattccgtggttcgctgtgataaacttgaccagtctgagattaagagcctactgatgtgtttcctctacatcttaaagagcatgtctgatgatgctttgtttacatattggaacaaggcttcaacatctgaacttatggatttttttacaatatctgaagtctgcctgcaccagttccagtacatggggaagcgatacatagccagtgtgagaaagatatcaagtgtgcttggaatttctgtagacaatggctatggccactcggacgcagatgttctgcaccagtcattacttgaagccaacattgctactgaggtttgcctgacagctctggacacgctttctctatttacattggcgtttaagaaccagctcctggccgaccatggacataatcctctcatgaaaaaagtttttgatgtctacctgtgttttcttcaaaaacatcagtctgaaacggctttaaaaaatgtcttcactgccttaaggtccttaatttataagtttccctcaacattctatgaagggagagcggacatgtgtgcggctctgtgttacgagattctcaagtgctgtaactccaagctgagctccatcaggacggaggcctcccagctgctctacttcctgatgaggaacaactttgattacactggaaagaagtcctttgtccggacacatttgcaagtcatcatatctgtcagccagctgatagcagacgttgttggcattgggggaaccagattccagcagtccctgtccatcatcaacaactgtgccaacagtgaccggcttattaagcacaccagcttctcctctgatgtgaaggacttaaccaaaaggatacgcacggtgctaatggccaccgcccagatgaaggagcatgagaacgacccagagatgctggtggacctccagtacagcctggccaaatcctatgccagcacgcccgagctcaggaagacgtggctcgacagcatggccaggatccatgtcaaaaatggcgatctctcagaggcagcaatgtgctatgtccacgtaacagccctagtggcagaatatctcacacggaaaggcgtgtttagacaaggatgcaccgccttcagggtcattaccccaaacatcgacgaggaggcctccatgatggaagacgtggggatgcaggatgtccatttcaacgaggatgtgctgatggagctccttgagcagtgcgcagatggactctggaaagccgagcgctacgagctcatcgccgacatctacaaacttatcatccccatttatgagaagcggagggattttgagaggctggcccatctgtatgacacgctgcaccgggcctacagcaaagtgaccgaggtcatgcactcgggccgcaggcttctggggacctacttccgggtagccttcttcgggcaggggattctttgaagatgaagatggaaaggagtatatttacaaggaacccaaactcacaccgctgtcggaaatttctcagagactccttaaactgtactcggataaatttggttctgaaaatgtcaaaatgatacaggattctggcaaggtcaaccctaaggatctggattctaagtatgcatacatccaggtgactcacgtcatccccttctttgacgaaaaagagttgcaagaaaggaaaacagagtttgagagatcccacaacatccgccgcttcatgtttgagatgccatttacgcagaccgggaagaggcagggcggggtggaagagcagtgcaaacggcgcaccatcctgacagccatacactgcttcccttatgtgaagaagcgcatccctgtcatgtaccagcaccacactgacctgaaccccatcgaggtggccattgacgagatgagtaagaaggtggcggagctccggcagctgtgctcctcggccgaggtggacatgatcaaactgcagctcaaactccagggcagcgtgagtgttcaggtcaatgctggcccactagcatatgcgcgagctttcttagatgatacaaacacaaagcgatatcctgacaataaagtgaagctgcttaaggaagttttcaggcaatttgtggaagcttgcggtcaagccttagcggtaaacgaacgtctgattaaagaagaccagctcgagtatcaggaagaaatgaaagccaactacagggaaatggcgaaggagctttctgaaatcatgcatgagctgggatgatctgccccctggaggagaagacgagcgtcttaccgaattcccttcacatcttcaacgccatcagtgggactccaacaagcacaatggttcacgggatgaccagctcgtcttcggtcgtgtgattacatctcatggcccgtgtgtggggacttgctttgtcatttgcaaactcaggatgctttccaaagccaatcactggggagaccgagcacagggaggaccaaggggaaggggagagaaaggaaataaagaacaacgttatttcttaacagactttctataggagttgtaagaaggtgcacatatttttttaaatctcactggcaatattcaaagttttcattgtgtcttaacaaaggtgtggtagacactcttgagctggacttagattttattcttccttgcagagtagtgttagaatagatggcctacagaaaaaaaaggttctgggatctacatggcagggagggctgcactgacattgatgcctgggggaccttttgcctcgaggctgagctggaaaatcttgaaaatattttttttttcctgtggcacattcaggttgaatacaagaactatttttgtgactagtttttgatgacctaagggaactgaccattgtaatttttgtaccagtgaaccaggagatttagtgcttttatattcatttccttgcatttaagaaaatatgaaagcttaaggaattatgtgagcttaaaactagtcaagcagtttagaaccaaaggcctatattaataaccgcaactatgctgaaaagtacaaagtagtacagtatattgttatgtacatatcattgttaatacagtcctggcattctgtacatatatgtattacatttctacatttttaatactcacatgggcttatgcattaagtttaattgtgataaatttgtgctgttccagtatatgcaatacactttaatgttttattcttgtacataaaaatgtgcaatatggagatgtatacagtctttactatattaggtttataaacagttttaagaatttcatccttttgccaaaatggtggagtatgtaattggtaaatcataaatcctgtggtgaatggtggtgtactttaaagctgtcaccatgttatattttcttttaagactttaatttagtaattttatatttgggaaaataaaggtttttaattttatttaactggaatcactgccctgctgtaattaaacattctgtaccacatctgtattaaaaagacattgctgacca

SEQ ID NO: 461648 - DNA, 6186 bp, Homo sapiens
ataaaatacaaccggaagatttctgccgatttccacgtagacctgaaccatttctcagtgaggcaaatgctcgccaccacgtccccggcgctgatgaatggcagtgggcagagcccatctgtcctcaagggcatccttcatgaagccgccatgcagtatccgaagcagggaatattttcagtcacttgtcctcatccagatatatttcttgtggccagaattgaaaaagtccttcaggggagcatcacacattgcgctgagccatatatgaaaagttcagactcttctaaggtggcccagaaggtgctgaagaatgccaagcaggcatgccaaagactaggacagtatagaatgccatttgcttgggcagcaaggacattgtttaaggatgcatctggaaatcttgacaaaaatgccagattttctgccatctacaggcaagacagcaataagctatccaatgatgacatgctcaagttacttgcagactttcggaaacctgagaagatggctaagctcccagtgattttaggcaatctagacattacaattgataatgtttcctcagacttccctaattatgttaattcatcatacattcccacaaaacaatttgaaacctgcagtaaaactcccatcacgtttgaagtggaggaatttgtgccctgcataccaaaacacactcagccttacaccatctacaccaatcacctttacgtttatcctaagtacttgaaatacgacagtcagaagtcttttgccaaggctagaaatattgcgatttgcattgaattcaaagattcagatgaggaagactctcagccccttaagtgcatttatggcagacctggtgggccagttttcacaagaagcgcctttgctgcagttttacaccatcaccaaaacccagaattttatgatgagattaaaatagagttgcccactcagctgcatgaaaagcaccacctgttgctcacattcttccatgtcagctgtgacaactcaagtaaaggaagcacgaagaagagggatgtcgttgaaacccaagttggctactcctggcttcccctcctgaaagacggaagggtggtgacaagcgagcagcacatcccggtctcggcgaaccttccttcgggctatcttggctaccaggagcttgggatgggcaggcattatggtccggaaattaaatgggtagatggaggcaagccactgctgaaaatttccactcatctggtttctacagtgtatactcaggatcagcatttacataattttttccagtactgtcagaaaaccgaatctggagcccaagccttaggaaacgaacttgtaaagtaccttaagagtctgcatgcgatggaaggccacgtgatgatcgccttcttgcccactatcctaaaccagctgttccgagtcctcaccagagccacacaggaagaagtcgcggttaacgtgactcgggtcattattcatgtggttgcccagtgccatgaggaaggattggagagccacttgaggtcatatgttaagtacgcgtataaggctgagccatatgttgcctctgaatacaagacagtgcatgaagaactgaccaaatccatgaccacgattctcaagccttctgccgatttcctcaccagcaacaaactactgaagtactcatggtttttctttgatgtactgatcaaatctatggctcagcatttgatagagaactccaaagttaagttgctgcgaaaccagagatttcctgcatcctatcatcatgcagtggaaaccgttgtaaatatgctgatgccacacatcactcagaagtttcgagataatccagaggcatctaagaacgcgaatcatagccttgctgtcttcatcaagagatgtttcaccttcatggacaggggctttgtcttcaagcagatcaacaactacattagctgttttgctcctggagacccaaagaccctctttgaatacaagtttgaatttctccgtgtagtgtgcaaccatgaacattatattccgttgaacttaccaatgccatttggaaaaggcaggattcaaagataccaagacctccagcttgactactcattaacagatgagttctgcagaaaccacttcttggtgggactgttactgagggaggtggggacagccctccaggagttccgggaggtccgtctgatcgccatcagtgtgctcaagaacctgctgataaagcattcttttgatgacagatatgcttcaaggagccatcaggcaaggatagccaccctctacctgcctctgtttggtctgctgattgaaaacgtccagcggatcaatgtgagggatgtgtcacccttccctgtgaacgcgggcatgactgtgaaggatgaatccctggctctaccagctgtgaatccgctggtgacgccgcagaagggaagcaccctggacaacagcctgcacaaggacctgctgggcgccatctccggcattgcttctccatatacaacctcaactccaaacatcaacagtgtgagaaatgctgattcgagaggatctctcataagcacagattcgggtaacagccttccagaaaggaatagtgagaagagcaattccctggataagcaccaacaaagtagcacattgggaaattccgtggttcgctgtgataaacttgaccagtctgagattaagagcctactgatgtgtttcctctacatcttaaagagcatgtctgatgatgctttgtttacatattggaacaaggcttcaacatctgaacttatggatttttttacaatatctgaagtctgcctgcaccagttccagtacatggggaagcgatacatagccagtgtgagaaagatatcaagtgtgcttggaatttctgtagacaatggctatggccactcggacgcagatgttctgcaccagtcattacttgaagccaacattgctactgaggtttgcctgacagctctggacacgctttctctatttacattggcgtttaagaaccagctcctggccgaccatggacataatcctctcatgaaaaaagtttttgatgtctacctgtgttttcttcaaaaacatcagtctgaaacggctttaaaaaatgtcttcactgccttaaggtccttaatttataagtttccctcaacattctatgaagggagagcggacatgtgtgcggctctgtgttacgagattctcaagtgctgtaactccaagctgagctccatcaggacggaggcctcccagctgctctacttcctgatgaggaacaactttgattacactggaaagaagtcctttgtccggacacatttgcaagtcatcatatctgtcagccagctgatagcagacgttgttggcattgggggaaccagattccagcagtccctgtccatcatcaacaactgtgccaacagtgaccggcttattaagcacaccagcttctcctctgatgtgaaggacttaaccaaaaggatacgcacggtgctaatggccaccgcccagatgaaggagcatgagaacgacccagagatgctggtggacctccagtacagcctggccaaatcctatgccagcacgcccgagctcaggaagacgtggctcgacagcatggccaggatccatgtcaaaaatggcgatctctcagaggcagcaatgtgctatgtccacgtaacagccctagtggcagaatatctcacacggaaagaagcagtccagtgggagccgccccttctcccccacagccatagcgcctgcctgaggaggagccggggaggcgtgtttagacaaggatgcaccgccttcagggtcattaccccaaacatcgacgaggaggcctccatgatggaagacgtggggatgcaggatgtccatttcaacgaggatgtgctgatggagctccttgagcagtgcgcagatggactctggaaagccgagcgctacgagctcatcgccgacatctacaaacttatcatccccatttatgagaagcggagggattttgagaggctggcccatctgtatgacacgctgcaccgggcctacagcaaagtgaccgaggtcatgcactcgggccgcaggcttctggggacctacttccgggtagccttcttcgggcaggggattctttgaagatgaagatggaaaggagtatatttacaaggaacccaaactcacaccgctgtcggaaatttctcagagactccttaaactgtactcggataaatttggttctgaaaatgtcaaaatgatacaggattctggcaaggtcaaccctaaggatctggattctaagtatgcatacatccaggtgactcacgtcatccccttctttgacgaaaaagagttgcaagaaaggaaaacagagtttgagagatcccacaacatccgccgcttcatgtttgagatgccatttacgcagaccgggaagaggcagggcggggtggaagagcagtgcaaacggcgcaccatcctgacagccatacactgcttcccttatgtgaagaagcgcatccctgtcatgtaccagcaccacactgacctgaaccccatcgaggtggccattgacgagatgagtaagaaggtggcggagctccggcagctgtgctcctcggccgaggtggacatgatcaaactgcagctcaaactccagggcagcgtgagtgttcaggtcaatgctggcccactagcatatgcgcgagctttcttagatgatacaaacacaaagcgatatcctgacaataaagtgaagctgcttaaggaagttttcaggcaatttgtggaagcttgcggtcaagccttagcggtaaacgaacgtctgattaaagaagaccagctcgagtatcaggaagaaatgaaagccaactacagggaaatggcgaaggagctttctgaaatcatgcatgagctgggatgatctgccccctggaggagaagacgagcgtcttaccgaattcccttcacatcttcaacgccatcagtgggactccaacaagcacaatggttcacgggatgaccagctcgtcttcggtcgtgtgattacatctcatggcccgtgtgtggggacttgctttgtcatttgcaaactcaggatgctttccaaagccaatcactggggagaccgagcacagggaggaccaaggggaaggggagagaaaggaaataaagaacaacgttatttcttaacagactttctataggagttgtaagaaggtgcacatatttttttaaatctcactggcaatattcaaagttttcattgtgtcttaacaaaggtgtggtagacactcttgagctggacttagattttattcttccttgcagagtagtgttagaatagatggcctacagaaaaaaaaggttctgggatctacatggcagggagggctgcactgacattgatgcctgggggaccttttgcctcgaggctgagctggaaaatcttgaaaatattttttttttcctgtggcacattcaggttgaatacaagaactatttttgtgactagtttttgatgacctaagggaactgaccattgtaatttttgtaccagtgaaccaggagatttagtgcttttatattcatttccttgcatttaagaaaatatgaaagcttaaggaattatgtgagcttaaaactagtcaagcagtttagaaccaaaggcctatattaataaccgcaactatgctgaaaagtacaaagtagtacagtatattgttatgtacatatcattgttaatacagtcctggcattctgtacatatatgtattacatttctacatttttaatactcacatgggcttatgcattaagtttaattgtgataaatttgtgctgttccagtatatgcaatacactttaatgttttattcttgtacataaaaatgtgcaatatggagatgtatacagtctttactatattaggtttataaacagttttaagaatttcatccttttgccaaaatggtggagtatgtaattggtaaatcataaatcctgtggtgaatggtggtgtactttaaagctgtcaccatgttatattttcttttaagactttaatttagtaattttatatttgggaaaataaaggtttttaattttatttaactggaatcactgccctgctgtaattaaacattctgtaccacatctgtattaaaaagacattgctgacca

SEQ ID NO: 461649 - DNA, 6221 bp, Homo sapiens
ataaaatacaaccggaagatttctgccgatttccacgtagacctgaaccatttctcagtgaggcaaatgctcgccaccacgtccccggcgctgatgaatggcagtgggcagagcccatctgtcctcaagggcatccttcatgaagccgccatgcagtatccgaagcagggaatattttcagtcacttgtcctcatccagatatatttcttgtggccagaattgaaaaagtccttcaggggagcatcacacattgcgctgagccatatatgaaaagttcagactcttctaaggtggcccagaaggtgctgaagaatgccaagcaggcatgccaaagactaggacagtatagaatgccatttgcttgggcagcaaggacattgtttaaggatgcatctggaaatcttgacaaaaatgccagattttctgccatctacaggcaagacagcaataagctatccaatgatgacatgctcaagttacttgcagactttcggaaacctgagaagatggctaagctcccagtgattttaggcaatctagacattacaattgataatgtttcctcagacttccctaattatgttaattcatcatacattcccacaaaacaatttgaaacctgcagtaaaactcccatcacgtttgaagtggaggaatttgtgccctgcataccaaaacacactcagccttacaccatctacaccaatcacctttacgtttatcctaagtacttgaaatacgacagtcagaagtcttttgccaaggctagaaatattgcgatttgcattgaattcaaagattcagatgaggaagactctcagccccttaagtgcatttatggcagacctggtgggccagttttcacaagaagcgcctttgctgcagttttacaccatcaccaaaacccagaattttatgatgagattaaaatagagttgcccactcagctgcatgaaaagcaccacctgttgctcacattcttccatgtcagctgtgacaactcaagtaaaggaagcacgaagaagagggatgtcgttgaaacccaagttggctactcctggcttcccctcctgaaagacggaagggtggtgacaagcgagcagcacatcccggtctcggcgaaccttccttcgggctatcttggctaccaggagcttgggatgggcaggcattatggtccggaaattaaatgggtagatggaggcaagccactgctgaaaatttccactcatctggtttctacagtgtatactcaggatcagcatttacataattttttccagtactgtcagaaaaccgaatctggagcccaagccttaggaaacgaacttgtaaagtaccttaagagtctgcatgcgatggaaggccacgtgatgatcgccttcttgcccactatcctaaaccagctgttccgagtcctcaccagagccacacaggaagaagtcgcggttaacgtgactcgggtcattattcatgtggttgcccagtgccatgaggaaggattggagagccacttgaggtcatatgttaagtacgcgtataaggctgagccatatgttgcctctgaatacaagacagtgcatgaagaactgaccaaatccatgaccacgattctcaagccttctgccgatttcctcaccagcaacaaactactgaagtactcatggtttttctttgatgtactgatcaaatctatggctcagcatttgatagagaactccaaagttaagttgctgcgaaaccagagatttcctgcatcctatcatcatgcagtggaaaccgttgtaaatatgctgatgccacacatcactcagaagtttcgagataatccagaggcatctaagaacgcgaatcatagccttgctgtcttcatcaagagatgtttcaccttcatggacaggggctttgtcttcaagcagatcaacaactacattagctgttttgctcctggagacccaaagaccctctttgaatacaagtttgaatttctccgtgtagtgtgcaaccatgaacattatattccgttgaacttaccaatgccatttggaaaaggcaggattcaaagataccaagacctccagcttgactactcattaacagatgagttctgcagaaaccacttcttggtgggactgttactgagggaggtggggacagccctccaggagttccgggaggtccgtctgatcgccatcagtgtgctcaagaacctgctgataaagcattcttttgatgacagatatgcttcaaggagccatcaggcaaggatagccaccctctacctgcctctgtttggtctgctgattgaaaacgtccagcggatcaatgtgagggatgtgtcacccttccctgtgaacgcgggcatgactgtgaaggatgaatccctggctctaccagctgtgaatccgctggtgacgccgcagaagggaagcaccctggacaacagcctgcacaaggacctgctgggcgccatctccggcattgcttctccatatacaacctcaactccaaacatcaacagtgtgagaaatgctgattcgagaggatctctcataagcacagattcgggtaacagccttccagaaaggaatagtgagaagagcaattccctggataagcaccaacaaagtagcacattgggaaattccgtggttcgctgtgataaacttgaccagtctgagattaagagcctactgatgtgtttcctctacatcttaaagagcatgtctgatgatgctttgtttacatattggaacaaggcttcaacatctgaacttatggatttttttacaatatctgaagtctgcctgcaccagttccagtacatggggaagcgatacatagccagtgtgagaaagatatcaagtgtgcttggaatttctgtagacaatggctatggccactcggacgcagatgttctgcaccagtcattacttgaagccaacattgctactgaggtttgcctgacagctctggacacgctttctctatttacattggcgtttaagaaccagctcctggccgaccatggacataatcctctcatgaaaaaagtttttgatgtctacctgtgttttcttcaaaaacatcagtctgaaacggctttaaaaaatgtcttcactgccttaaggtccttaatttataagtttccctcaacattctatgaagggagagcggacatgtgtgcggctctgtgttacgagattctcaagtgctgtaactccaagctgagctccatcaggacggaggcctcccagctgctctacttcctgatgaggaacaactttgattacactggaaagaagtcctttgtccggacacatttgcaagtcatcatatctgtcagccagctgatagcagacgttgttggcattgggggaaccagattccagcagtccctgtccatcatcaacaactgtgccaacagtgaccggcttattaagcacaccagcttctcctctgatgtgaaggacttaaccaaaaggatacgcacggtgctaatggccaccgcccagatgaaggagcatgagaacgacccagagatgctggtggacctccagtacagcctggccaaatcctatgccagcacgcccgagctcaggaagacgtggctcgacagcatggccaggatccatgtcaaaaatggcgatctctcagaggcagcaatgtgctatgtccacgtaacagccctagtggcagaatatctcacacggaaagaccttttatcaggtgatgcatttcctcatgtttagaagcagtccagtgggagccgccccttctcccccacagccatagcgcctgcctgaggaggagccggggaggcgtgtttagacaaggatgcaccgccttcagggtcattaccccaaacatcgacgaggaggcctccatgatggaagacgtggggatgcaggatgtccatttcaacgaggatgtgctgatggagctccttgagcagtgcgcagatggactctggaaagccgagcgctacgagctcatcgccgacatctacaaacttatcatccccatttatgagaagcggagggattttgagaggctggcccatctgtatgacacgctgcaccgggcctacagcaaagtgaccgaggtcatgcactcgggccgcaggcttctggggacctacttccgggtagccttcttcgggcaggggattctttgaagatgaagatggaaaggagtatatttacaaggaacccaaactcacaccgctgtcggaaatttctcagagactccttaaactgtactcggataaatttggttctgaaaatgtcaaaatgatacaggattctggcaaggtcaaccctaaggatctggattctaagtatgcatacatccaggtgactcacgtcatccccttctttgacgaaaaagagttgcaagaaaggaaaacagagtttgagagatcccacaacatccgccgcttcatgtttgagatgccatttacgcagaccgggaagaggcagggcggggtggaagagcagtgcaaacggcgcaccatcctgacagccatacactgcttcccttatgtgaagaagcgcatccctgtcatgtaccagcaccacactgacctgaaccccatcgaggtggccattgacgagatgagtaagaaggtggcggagctccggcagctgtgctcctcggccgaggtggacatgatcaaactgcagctcaaactccagggcagcgtgagtgttcaggtcaatgctggcccactagcatatgcgcgagctttcttagatgatacaaacacaaagcgatatcctgacaataaagtgaagctgcttaaggaagttttcaggcaatttgtggaagcttgcggtcaagccttagcggtaaacgaacgtctgattaaagaagaccagctcgagtatcaggaagaaatgaaagccaactacagggaaatggcgaaggagctttctgaaatcatgcatgagctgggatgatctgccccctggaggagaagacgagcgtcttaccgaattcccttcacatcttcaacgccatcagtgggactccaacaagcacaatggttcacgggatgaccagctcgtcttcggtcgtgtgattacatctcatggcccgtgtgtggggacttgctttgtcatttgcaaactcaggatgctttccaaagccaatcactggggagaccgagcacagggaggaccaaggggaaggggagagaaaggaaataaagaacaacgttatttcttaacagactttctataggagttgtaagaaggtgcacatatttttttaaatctcactggcaatattcaaagttttcattgtgtcttaacaaaggtgtggtagacactcttgagctggacttagattttattcttccttgcagagtagtgttagaatagatggcctacagaaaaaaaaggttctgggatctacatggcagggagggctgcactgacattgatgcctgggggaccttttgcctcgaggctgagctggaaaatcttgaaaatattttttttttcctgtggcacattcaggttgaatacaagaactatttttgtgactagtttttgatgacctaagggaactgaccattgtaatttttgtaccagtgaaccaggagatttagtgcttttatattcatttccttgcatttaagaaaatatgaaagcttaaggaattatgtgagcttaaaactagtcaagcagtttagaaccaaaggcctatattaataaccgcaactatgctgaaaagtacaaagtagtacagtatattgttatgtacatatcattgttaatacagtcctggcattctgtacatatatgtattacatttctacatttttaatactcacatgggcttatgcattaagtttaattgtgataaatttgtgctgttccagtatatgcaatacactttaatgttttattcttgtacataaaaatgtgcaatatggagatgtatacagtctttactatattaggtttataaacagttttaagaatttcatccttttgccaaaatggtggagtatgtaattggtaaatcataaatcctgtggtgaatggtggtgtactttaaagctgtcaccatgttatattttcttttaagactttaatttagtaattttatatttgggaaaataaaggtttttaattttatttaactggaatcactgccctgctgtaattaaacattctgtaccacatctgtattaaaaagacattgctgacca

SEQ ID NO: 461650 - DNA, 4510 bp, Homo sapiens
  misc_feature (880)..(880): n is a, c, g, or t
ctttacttctctgagcctctgttagctcatctgtaaatggggactttcttctgccccagattatggtgaggattagatggcacaatctatgtgaaattgtgagagcacgtagtacagtgcctggcacacaacagattctcagtctatatgccatgtcattcctgcctatcattgttcttggcaagtgtagagtgaaagcctgtggccatacatcttcatgagccatcagcatccccatagccaccgtctctgcttatctcaggccccaaagactctggctttttccctaagagaaacctctttacctatttctcaacctcagtgtaaaatataagaatgcaaaaaaggttagctattagatgatagaactcaaacgatggtaatactaaactgttaagggttcacacagaggtttaaatgcacataccattgggtacagctgtttcgcttcagagaacttatcctgtaggtatagttagacatgcatgcaaagacccacataaaaggatgttcattgaaacataattataatagcaaaaagttaggggagagaaacagtaactgcctatcagtaggagactagttaactcaattatggtctatccacatagaggaatattacgcaacttgggaaaacttgagatagatccaagctatattgttcagttaaaactcagagagcaaaattatgtgtgtaatatgcaaagattttcaacaaattccctgttggggagagatcctgtagtaggagacaagagagcccggctttaggttatatgtccacttgtattctttgaattttctagtctatttaagagcatgttacgaataagttaaatgagcattatgccagaatatagcactaaatgacgtatgatgnaattaaagttcaaatgcagcatgttgaaggtgaataggcctcaggtgtgtgatacccagtgtagagtggtcagctataaaagagggcaggggaagggtttagaggcctacactccagggtttagaggcctacactccaaggttccttcccattttcacaacaggtgattctccataatgtatatcatatgtattgtgattctaagtaaatgtttattttctagatgctttgtttacatattggaacaaggcttcaacatctgaacttatggatttttttacaatatctgaagtctgcctgcaccagttccagtacatggggaagcgatacatagccagaacaggaatgatgcatgccagattgcagcagctgggcagcctggataactctctcacttttaaccacagctatggccactcggacgcagatgttctgcaccagtcattacttgaagccaacattgctactgaggtttgcctgacagctctggacacgctttctctatttacattggcgtttaagaaccagctcctggccgaccatggacataatcctctcatgaaaaaagtttttgatgtctacctgtgttttcttcaaaaacatcagtctgaaacggctttaaaaaatgtcttcactgccttaaggtccttaatttataagtttccctcaacattctatgaagggagagcggacatgtgtgcggctctgtgttacgagattctcaagtgctgtaactccaagctgagctccatcaggacggaggcctcccagctgctctacttcctgatgaggaacaactttgattacactggaaagaagtcctttgtccggacacatttgcaagtcatcatatctgtcagccagctgatagcagacgttgttggcattgggggaaccagattccagcagtccctgtccatcatcaacaactgtgccaacagtgaccggcttattaagcacaccagcttctcctctgatgtgaaggacttaaccaaaaggatacgcacggtgctaatggccaccgcccagatgaaggagcatgagaacgacccagagatgctggtggacctccagtacagcctggccaaatcctatgccagcacgcccgagctcaggaagacgtggctcgacagcatggccaggatccatgtcaaaaatggcgatctctcagaggcagcaatgtgctatgtccacgtaacagccctagtggcagaatatctcacacggaaaggcgtgtttagacaaggatgcaccgccttcagggtcattaccccaaacatcgacgaggaggcctccatgatggaagacgtggggatgcaggatgtccatttcaacgaggatgtgctgatggagctccttgagcagtgcgcagatggactctggaaagccgagcgctacgagctcatcgccgacatctacaaacttatcatccccatttatgagaagcggagggattttgagaggctggcccatctgtatgacacgctgcaccgggcctacagcaaagtgaccgaggtcatgcactcgggccgcaggcttctggggacctacttccgggtagccttcttcgggcaggggattctttgaagatgaagatggaaaggagtatatttacaaggaacccaaactcacaccgctgtcggaaatttctcagagactccttaaactgtactcggataaatttggttctgaaaatgtcaaaatgatacaggattctggcaaggtcaaccctaaggatctggattctaagtatgcatacatccaggtgactcacgtcatccccttctttgacgaaaaagagttgcaagaaaggaaaacagagtttgagagatcccacaacatccgccgcttcatgtttgagatgccatttacgcagaccgggaagaggcagggcggggtggaagagcagtgcaaacggcgcaccatcctgacagccatacactgcttcccttatgtgaagaagcgcatccctgtcatgtaccagcaccacactgacctgaaccccatcgaggtggccattgacgagatgagtaagaaggtggcggagctccggcagctgtgctcctcggccgaggtggacatgatcaaactgcagctcaaactccagggcagcgtgagtgttcaggtcaatgctggcccactagcatatgcgcgagctttcttagatgatacaaacacaaagcgatatcctgacaataaagtgaagctgcttaaggaagttttcaggcaatttgtggaagcttgcggtcaagccttagcggtaaacgaacgtctgattaaagaagaccagctcgagtatcaggaagaaatgaaagccaactacagggaaatggcgaaggagctttctgaaatcatgcatgagctgggatgatctgccccctggaggagaagacgagcgtcttaccgaattcccttcacatcttcaacgccatcagtgggactccaacaagcacaatggttcacgggatgaccagctcgtcttcggtcgtgtgattacatctcatggcccgtgtgtggggacttgctttgtcatttgcaaactcaggatgctttccaaagccaatcactggggagaccgagcacagggaggaccaaggggaaggggagagaaaggaaataaagaacaacgttatttcttaacagactttctataggagttgtaagaaggtgcacatatttttttaaatctcactggcaatattcaaagttttcattgtgtcttaacaaaggtgtggtagacactcttgagctggacttagattttattcttccttgcagagtagtgttagaatagatggcctacagaaaaaaaaggttctgggatctacatggcagggagggctgcactgacattgatgcctgggggaccttttgcctcgaggctgagctggaaaatcttgaaaatattttttttttcctgtggcacattcaggttgaatacaagaactatttttgtgactagtttttgatgacctaagggaactgaccattgtaatttttgtaccagtgaaccaggagatttagtgcttttatattcatttccttgcatttaagaaaatatgaaagcttaaggaattatgtgagcttaaaactagtcaagcagtttagaaccaaaggcctatattaataaccgcaactatgctgaaaagtacaaagtagtacagtatattgttatgtacatatcattgttaatacagtcctggcattctgtacatatatgtattacatttctacatttttaatactcacatgggcttatgcattaagtttaattgtgataaatttgtgctgttccagtatatgcaatacactttaatgttttattcttgtacataaaaatgtgcaatatggagatgtatacagtctttactatattaggtttataaacagttttaagaatttcatccttttgccaaaatggtggagtatgtaattggtaaatcataaatcctgtggtgaatggtggtgtactttaaagctgtcaccatgttatattttcttttaagactttaatttagtaattttatatttgggaaaataaaggtttttaattttatttaactggaatcactgccctgctgtaattaaacattctgtaccacatctgtattaaaaagacattgctgacca

SEQ ID NO: 461651 - DNA, 2780 bp, Homo sapiens
ccgatgaagatgccgttttcgcagacgttgttggcattgggggaaccagattccagcagtccctgtccatcatcaacaactgtgccaacagtgaccggcttattaagcacaccagcttctcctctgatgtgaaggacttaaccaaaaggatacgcacggtgctaatggccaccgcccagatgaaggagcatgagaacgacccagagatgctggtggacctccagtacagcctggccaaatcctatgccagcacgcccgagctcaggaagacgtggctcgacagcatggccaggatccatgtcaaaaatggcgatctctcagaggcagcaatgtgctatgtccacgtaacagccctagtggcagaatatctcacacggaaaggcgtgtttagacaaggatgcaccgccttcagggtcattaccccaaacatcgacgaggaggcctccatgatggaagacgtggggatgcaggatgtccatttcaacgaggatgtgctgatggagctccttgagcagtgcgcagatggactctggaaagccgagcgctacgagctcatcgccgacatctacaaacttatcatccccatttatgagaagcggagggattttgagaggctggcccatctgtatgacacgctgcaccgggcctacagcaaagtgaccgaggtcatgcactcgggccgcaggcttctggggacctacttccgggtagccttcttcgggcaggggattctttgaagatgaagatggaaaggagtatatttacaaggaacccaaactcacaccgctgtcggaaatttctcagagactccttaaactgtactcggataaatttggttctgaaaatgtcaaaatgatacaggattctggcaaggtcaaccctaaggatctggattctaagtatgcatacatccaggtgactcacgtcatccccttctttgacgaaaaagagttgcaagaaaggaaaacagagtttgagagatcccacaacatccgccgcttcatgtttgagatgccatttacgcagaccgggaagaggcagggcggggtggaagagcagtgcaaacggcgcaccatcctgacagccatacactgcttcccttatgtgaagaagcgcatccctgtcatgtaccagcaccacactgacctgaaccccatcgaggtggccattgacgagatgagtaagaaggtggcggagctccggcagctgtgctcctcggccgaggtggacatgatcaaactgcagctcaaactccagggcagcgtgagtgttcaggtcaatgctggcccactagcatatgcgcgagctttcttagatgatacaaacacaaagcgatatcctgacaataaagtgaagctgcttaaggaagttttcaggcaatttgtggaagcttgcggtcaagccttagcggtaaacgaacgtctgattaaagaagaccagctcgagtatcaggaagaaatgaaagccaactacagggaaatggcgaaggagctttctgaaatcatgcatgagctgggatgatctgccccctggaggagaagacgagcgtcttaccgaattcccttcacatcttcaacgccatcagtgggactccaacaagcacaatggttcacgggatgaccagctcgtcttcggtcgtgtgattacatctcatggcccgtgtgtggggacttgctttgtcatttgcaaactcaggatgctttccaaagccaatcactggggagaccgagcacagggaggaccaaggggaaggggagagaaaggaaataaagaacaacgttatttcttaacagactttctataggagttgtaagaaggtgcacatatttttttaaatctcactggcaatattcaaagttttcattgtgtcttaacaaaggtgtggtagacactcttgagctggacttagattttattcttccttgcagagtagtgttagaatagatggcctacagaaaaaaaaggttctgggatctacatggcagggagggctgcactgacattgatgcctgggggaccttttgcctcgaggctgagctggaaaatcttgaaaatattttttttttcctgtggcacattcaggttgaatacaagaactatttttgtgactagtttttgatgacctaagggaactgaccattgtaatttttgtaccagtgaaccaggagatttagtgcttttatattcatttccttgcatttaagaaaatatgaaagcttaaggaattatgtgagcttaaaactagtcaagcagtttagaaccaaaggcctatattaataaccgcaactatgctgaaaagtacaaagtagtacagtatattgttatgtacatatcattgttaatacagtcctggcattctgtacatatatgtattacatttctacatttttaatactcacatgggcttatgcattaagtttaattgtgataaatttgtgctgttccagtatatgcaatacactttaatgttttattcttgtacataaaaatgtgcaatatggagatgtatacagtctttactatattaggtttataaacagttttaagaatttcatccttttgccaaaatggtggagtatgtaattggtaaatcataaatcctgtggtgaatggtggtgtactttaaagctgtcaccatgttatattttcttttaagactttaatttagtaattttatatttgggaaaataaaggtttttaattttatttaactggaatcactgccctgctgtaattaaacattctgtaccacatctgtattaaaaagacattgctgacca

SEQ ID NO: 461652 - DNA, 684 bp, Homo sapiens
ctatagaacgagccgttacccggggacacttacgacttctagtctgtccacatctggagcatagtcatgcatagctgggatgctactgtgtgctgaacattatatttaagaaatgtctttgatcccatgtgtaaggaccccatctaattccttgtctccttgtttcctaagtgctgatagcatcatcattgttctactactgctgtgataataatgaaatgtttccatttttacatattctttgctttattcactcctgtggtgtgtagggtcattattcatgtggttgcccagtgccatgaggaaggattggagagccacttgaggtcatatgttaaggtatgtaaaacacactgttctgatcacttacatctgtggctctccagttttccttctaaggacttattttttcacaagcctggttatttgaggatgtgcttgtaacgtatgctttctcttctatttctcatagccaatgcttgtacctgaataggggaggtacgaagagggacagccattcactaatttacttaattccattccttcaattatgtttcttttaatgggttttccaaataatatgactcaatgtggaagtttaaagaagaattttaagttgttcttggctaggcctctgctaacgtaagtgtctccgggtccgagctcgagtcgtatcatgtactt

SEQ ID NO: 461653 - DNA, 700 bp, Homo sapiens
agccggaccggagacacttacgttagcagaggctagccaagacaactacgacttctagtctgtccacatctggagcatagtcatgcatagctgggatgctactgtgtgctgaacattatatttaagaaatgtctttgatcccatgtgtaaggaccccatctaattccttgtctccttgtttcctaagtgctgatagcatcatcattgttctactactgctgtgataataatgaaatgtttccatttttacatattctttgctttattcactcctgtggtgtgtagggtcattattcatgtggttgcccagtgccatgaggaaggattggagagccacttgaggtcatatgttaaggtatgtaaaacacactgttctgatcacttacatctgtggctctccagttttccttctaaggacttattttttcacaagcctggttatttgaggatgtgcttgtaacgtatgctttctcttctatttctcatagccaatgcttgtacctgaataggggaggtacgaagagggacagccattcactaatttacttaattccattccttcaattatgtttcttttaatgggttttccaaataatatgactcaatgtggaagtttaaagaagaattttaagttgttcttggctaggcctctgctaacgtaagtgtctccgggtccgagctcgagtcgtatcatgtactt

SEQ ID NO: 461654 - DNA, 1549 bp, Homo sapiens
gagataagctgaacatctccctctgtaaaccagcagccaggctttccggctgcacatcactcacgtgatggagtgagtgtagacttgtgtgtgtgatgtggggtgcaacacattgagaaatatctgcttgcatccttatactcagtaacattgtgttgcacgtggcaacattgccttaaactctgtaacattttgttacacttggtaacattgtgtcacacatggcaacatggcattgcatatggtaaccttgtgttgccctcagtaacgttgtgtttctgtcctcgagatctgccccctggaggagaagacgagcgtcttaccgaattcccttcacatcttcaacgccatcagtgggactccaacaagcacaatggttcacgggatgaccagctcgtcttcggtcgtgtgattacatctcatggcccgtgtgtggggacttgctttgtcatttgcaaactcaggatgctttccaaagccaatcactggggagaccgagcacagggaggaccaaggggaaggggagagaaaggaaataaagaacaacgttatttcttaacagactttctataggagttgtaagaaggtgcacatatttttttaaatctcactggcaatattcaaagttttcattgtgtcttaacaaaggtgtggtagacactcttgagctggacttagattttattcttccttgcagagtagtgttagaatagatggcctacagaaaaaaaaggttctgggatctacatggcagggagggctgcactgacattgatgcctgggggaccttttgcctcgaggctgagctggaaaatcttgaaaatattttttttttcctgtggcacattcaggttgaatacaagaactatttttgtgactagtttttgatgacctaagggaactgaccattgtaatttttgtaccagtgaaccaggagatttagtgcttttatattcatttccttgcatttaagaaaatatgaaagcttaaggaattatgtgagcttaaaactagtcaagcagtttagaaccaaaggcctatattaataaccgcaactatgctgaaaagtacaaagtagtacagtatattgttatgtacatatcattgttaatacagtcctggcattctgtacatatatgtattacatttctacatttttaatactcacatgggcttatgcattaagtttaattgtgataaatttgtgctgttccagtatatgcaatacactttaatgttttattcttgtacataaaaatgtgcaatatggagatgtatacagtctttactatattaggtttataaacagttttaagaatttcatccttttgccaaaatggtggagtatgtaattggtaaatcataaatcctgtggtgaatggtggtgtactttaaagctgtcaccatgttatattttcttttaagactttaatttagtaattttatatttgggaaaataaaggtttttaattttatttaactggaatcactgccctgctgtaattaaacattctgtaccacatctgtattaaaaagacattgctgacca

SEQ ID NO: 461655 - DNA, 1180 bp, Homo sapiens
gagctcggtacccaatagcttgagcacaggcgtgcctgtacacgggctctcagctcatcatcctttctctccccttccccttggacctccctgtgctcggtctccacagtgattgtctggggagaccgagcacagggaggaccaaggggaaggggagagaaaggaaataaagaacaacgttatttcttaacagactttctataggagttgtaagaaggtgcacatatttttttaaatctcactggcaatattcaaagttttcattgtgtcttaacaaaggtgtggtagacactcttgagctggacttagattttattcttccttgcagagtagtgttagaatagatggcctacagaaaaaaaaggttctgggatctacatggcagggagggctgcactgacattgatgcctgggggaccttttgcctcgaggctgagctggaaaatcttgaaaatattttttttttcctgtggcacattcaggttgaatacaagaactatttttgtgactagtttttgatgacctaagggaactgaccattgtaatttttgtaccagtgaaccaggagatttagtgcttttatattcatttccttgcatttaagaaaatatgaaagcttaaggaattatgtgagcttaaaactagtcaagcagtttagaaccaaaggcctatattaataaccgcaactatgctgaaaagtacaaagtagtacagtatattgttatgtacatatcattgttaatacagtcctggcattctgtacatatatgtattacatttctacatttttaatactcacatgggcttatgcattaagtttaattgtgataaatttgtgctgttccagtatatgcaatacactttaatgttttattcttgtacataaaaatgtgcaatatggagatgtatacagtctttactatattaggtttataaacagttttaagaatttcatccttttgccaaaatggtggagtatgtaattggtaaatcataaatcctgtggtgaatggtggtgtactttaaagctgtcaccatgttatattttcttttaagactttaatttagtaattttatatttgggaaaataaaggtttttaattttatttaactggaatcactgccctgctgtaattaaacattctgtaccacatctgtattaaaaagacattgctgacca

SEQ ID NO: 461656 - DNA, 3753 bp, Homo sapiens
ataaaatacaaccggaagatttctgccgatttccacgtagacctgaaccatttctcagtgaggcaaatgctcgccaccacgtccccggcgctgatgaatggcagtgggcagagcccatctgtcctcaagggcatccttcatgaagccgccatgcagtatccgaagcagggaatattttcagtcacttgtcctcatccagatatatttcttgtggccagaattgaaaaagtccttcaggggagcatcacacattgcgctgagccatatatgaaaagttcagactcttctaaggtggcccagaaggtgctgaagaatgccaagcaggcatgccaaagactaggacagtatagaatgccatttgcttgggcagcaaggacattgtttaaggatgcatctggaaatcttgacaaaaatgccagattttctgccatctacaggcaagacagcaataagctatccaatgatgacatgctcaagttacttgcagactttcggaaacctgagaagatggctaagctcccagtgattttaggcaatctagacattacaattgataatgtttcctcagacttccctaattatgttaattcatcatacattcccacaaaacaatttgaaacctgcagtaaaactcccatcacgtttgaagtggaggaatttgtgccctgcataccaaaacacactcagccttacaccatctacaccaatcacctttacgtttatcctaagtacttgaaatacgacagtcagaagtcttttgccaaggctagaaatattgcgatttgcattgaattcaaagattcagatgaggaagactctcagccccttaagtgcatttatggcagacctggtgggccagttttcacaagaagcgcctttgctgcagttttacaccatcaccaaaacccagaattttatgatgagattaaaatagagttgcccactcagctgcatgaaaagcaccacctgttgctcacattcttccatgtcagctgtgacaactcaagtaaaggaagcacgaagaagagggatgtcgttgaaacccaagttggctactcctggcttcccctcctgaaagacggaagggtggtgacaagcgagcagcacatcccggtctcggcgaaccttccttcgggctatcttggctaccaggagcttgggatgggcaggcattatggtccggaaattaaatgggtagatggaggcaagccactgctgaaaatttccactcatctggtttctacagtgtatactcaggatcagcatttacataattttttccagtactgtcagaaaaccgaatctggagcccaagccttaggaaacgaacttgtaaagtaccttaagagtctgcatgcgatggaaggccacgtgatgatcgccttcttgcccactatcctaaaccagctgttccgagtcctcaccagagccacacaggaagaagtcgcggttaacgtgactcgggtcattattcatgtggttgcccagtgccatgaggaaggattggagagccacttgaggtcatatgttaagtacgcgtataaggctgagccatatgttgcctctgaatacaagacagtgcatgaagaactgaccaaatccatgaccacgattctcaagccttctgccgatttcctcaccagcaacaaactactgaagtactcatggtttttctttgatgtactgatcaaatctatggctcagcatttgatagagaactccaaagttaagttgctgcgaaaccagagatttcctgcatcctatcatcatgcagtggaaaccgttgtaaatatgctgatgccacacatcactcagaagtttcgagataatccagaggcatctaagaacgcgaatcatagccttgctgtcttcatcaagagatgtttcaccttcatggacaggggctttgtcttcaagcagatcaacaactacattagctgttttgctcctggagacccaaagaccctctttgaatacaagtttgaatttctccgtgtagtgtgcaaccatgaacattatattccgttgaacttaccaatgccatttggaaaaggcaggattcaaagataccaagacctccagcttgactactcattaacagatgagttctgcagaaaccacttcttggtgggactgttactgagggaggtggggacagccctccaggagttccgggaggtccgtctgatcgccatcagtgtgctcaagaacctgctgataaagcattcttttgatgacagatatgcttcaaggagccatcaggcaaggatagccaccctctacctgcctctgtttggtctgctgattgaaaacgtccagcggatcaatgtgagggatgtgtcacccttccctgtgaacgcgggcatgactgtgaaggatgaatccctggctctaccagctgtgaatccgctggtgacgccgcagaagggaagcaccctggacaacagcctgcacaaggacctgctgggcgccatctccggcattgcttctccatatacaacctcaactccaaacatcaacagtgtgagaaatgctgattcgagaggatctctcataagcacagattcgggtaacagccttccagaaaggaatagtgagaagagcaattccctggataagcaccaacaaagtagcacattgggaaattccgtggttcgctgtgataaacttgaccagtctgagattaagagcctactgatgtgtttcctctacatcttaaagagcatgtctgatgatgctttgtttacatattggaacaaggcttcaacatctgaacttatggatttttttacaatatctgaagtctgcctgcaccagttccagtacatggggaagcgatacatagccagtgtgagaaagatatcaagtgtgcttggaatttctgtagacaatggctatggccactcggacgcagatgttctgcaccagtcattacttgaagccaacattgctactgaggtttgcctgacagctctggacacgctttctctatttacattggcgtttaagaaccagctcctggccgaccatggacataatcctctcatgaaaaaagtttttgatgtctacctgtgttttcttcaaaaacatcagtctgaaacggctttaaaaaatgtcttcactgccttaaggtccttaatttataagtttccctcaacattctatgaagggagagcggacatgtgtgcggctctgtgttacgagattctcaagtgctgtaactccaagctgagctccatcaggacggaggcctcccagctgctctacttcctgatgaggaacaactttgattacactggaaagaagtcctttgtccggacacatttgcaagtcatcatatctgtcagccagctgatagcagacgttgttggcattgggggaaccagattccagcagtccctgtccatcatcaacaactgtgccaacagtgaccggcttattaagcacaccagcttctcctctgatgtgaaggacttaaccaaaaggatacgcacggtgctaatggccaccgcccagatgaaggagcatgagaacgacccagagatgctggtggacctccagtacagcctggccaaatcctatgccagcacgcccgagctcaggaagacgtggctcgacagcatggccaggatccatgtcaaaaatggcgatctctcagaggcagcaatgtgctatgtccacgtaacagccctagtggcagaatatctcacacggaaagaagcagtcgtgaaatcccagtgaaatccccagtga

SEQ ID NO: 461657 - DNA, 2721 bp, Homo sapiens
ataaaatacaaccggaagatttctgccgatttccacgtagacctgaaccatttctcagtgaggcaaatgctcgccaccacgtccccggcgctgatgaatggcagtgggcagagcccatctgtcctcaagggcatccttcatgaagccgccatgcagtatccgaagcagggaatattttcagtcacttgtcctcatccagatatatttcttgtggccagaattgaaaaagtccttcaggggagcatcacacattgcgctgagccatatatgaaaagttcagactcttctaaggtggcccagaaggtgctgaagaatgccaagcaggcatgccaaagactaggacagtatagaatgccatttgcttgggcagcaaggacattgtttaaggatgcatctggaaatcttgacaaaaatgccagattttctgccatctacaggcaagacagcaataagctatccaatgatgacatgctcaagttacttgcagactttcggaaacctgagaagatggctaagctcccagtgattttaggcaatctagacattacaattgataatgtttcctcagacttccctaattatgttaattcatcatacattcccacaaaacaatttgaaacctgcagtaaaactcccatcacgtttgaagtggaggaatttgtgccctgcataccaaaacacactcagccttacaccatctacaccaatcacctttacgtttatcctaagtacttgaaatacgacagtcagaagtcttttgccaaggctagaaatattgcgatttgcattgaattcaaagattcagatgaggaagactctcagccccttaagtgcatttatggcagacctggtgggccagttttcacaagaagcgcctttgctgcagttttacaccatcaccaaaacccagaattttatgatgagattaaaatagagttgcccactcagctgcatgaaaagcaccacctgttgctcacattcttccatgtcagctgtgacaactcaagtaaaggaagcacgaagaagagggatgtcgttgaaacccaagttggctactcctggcttcccctcctgaaagacggaagggtggtgacaagcgagcagcacatcccggtctcggcgaaccttccttcgggctatcttggctaccaggagcttgggatgggcaggcattatggtccggaaattaaatgggtagatggaggcaagccactgctgaaaatttccactcatctggtttctacagtgtatactcaggatcagcatttacataattttttccagtactgtcagaaaaccgaatctggagcccaagccttaggaaacgaacttgtaaagtaccttaagagtctgcatgcgatggaaggccacgtgatgatcgccttcttgcccactatcctaaaccagctgttccgagtcctcaccagagccacacaggaagaagtcgcggttaacgtgactcgggtcattattcatgtggttgcccagtgccatgaggaaggattggagagccacttgaggtcatatgttaagtacgcgtataaggctgagccatatgttgcctctgaatacaagacagtgcatgaagaactgaccaaatccatgaccacgattctcaagccttctgccgatttcctcaccagcaacaaactactgaagtactcatggtttttctttgatgtactgatcaaatctatggctcagcatttgatagagaactccaaagttaagttgctgcgaaaccagagatttcctgcatcctatcatcatgcagtggaaaccgttgtaaatatgctgatgccacacatcactcagaagtttcgagataatccagaggcatctaagaacgcgaatcatagccttgctgtcttcatcaagagatgtttcaccttcatggacaggggctttgtcttcaagcagatcaacaactacattagctgttttgctcctggagacccaaagaccctctttgaatacaagtttgaatttctccgtgtagtgtgcaaccatgaacattatattccgttgaacttaccaatgccatttggaaaaggcaggattcaaagataccaagacctccagcttgactactcattaacagatgagttctgcagaaaccacttcttggtgggactgttactgagggaggtggggacagccctccaggagttccgggaggtccgtctgatcgccatcagtgtgctcaagaacctgctgataaagcattcttttgatgacagatatgcttcaaggagccatcaggcaaggatagccaccctctacctgcctctgtttggtctgctgattgaaaacgtccagcggatcaatgtgagggatgtgtcacccttccctgtgaacgcgggcatgactgtgaaggatgaatccctggctctaccagctgtgaatccgctggtgacgccgcagaagggaagcaccctggacaacagcctgcacaaggacctgctgggcgccatctccggcattggtaacgctccatgctcttgtgggcttctctccaccatcactctgaaagtgtcttggagccaatagttggtgaacgtgtcacacttgtgtggtaggaccttgaagtctaagttgctttcctgagtattcttttcctgcttgtgatagtcaacaactgaaacccctcagccatgccctgaaataaaggtcccggatgcctgtgactcctcaggatcatacagtaatcactggctcacg

SEQ ID NO: 461658 - DNA, 693 bp, Homo sapiens
atcctgtgcatgtaattgatcaagcgtccacattctgacattccagctctgaatggatgttaatccttgcactactgtgaaaacataaagcccatgaatcaatttgtgagggtgtggaaaagcatccaataacaaagtgactttttctgtgttttcagtgtgagaaagatatcaagtgtgcttggaatttctgtagacaatggtaagatttaatcaggttgaagtctgctttatgaggttgcttcacttgcaagccaagaccctttttgttcatcttgccttcctaactttggggctttctaactttacaaaagagattctgccagaacaggggagcatatttttaatttacttttatcagtcagcagaggggacaaggcattgtgtgctgtttctagtaatttaagtgctttatcttcttaagggtttctcaaagcagaacacctgaaagatatcaaccatacagcacgtgaaaaattgatgagatcatttataatacccatttctgctagcattgtgttctctaaattgttccatctcttctccaagcatgacacagctagttattgttttatctcaacaattatttgttattccaagtgctgtctttaatacatggttattaatatccttccatcatgtctaataataaattccattcgctgtgatttttcacacctctttttaaaatac

SEQ ID NO: 461659 - DNA, 168 bp, Homo sapiens
tcttcccccggaattgaagggtacattaccgagcactgacctgtctgtggtttatctgctgcttcctctcatcctgtctagtttccctcaacattctatgaagggagagcggacatgtgtgcggctctgtgttacgagattctcaagtgctgtaactccaagctgagc

SEQ ID NO: 461660 - DNA, 1535 bp, Homo sapiens
cagaaagggatgctgcagtgcagcgcagcacacggcaagagatcctccagcaggacgtggcagggagttgaggttggtttggctgagaagtcccttagtgtctcagcgtcctcttctccaagcctctatcagttgctgcgaaaccagagatttcctgcatcctatcatcatgcagtggaaaccgttgtaaatatgctgatgccacacatcactcagaagtttcgagataatccagaggcatctaagaacgcgaatcatagccttgctgtcttcatcaagagatgtttcaccttcatggacaggggctttgtcttcaagcagatcaacaactacattagctgttttgctcctggagacccaaaggagttccgggaggtccgtctgatcgccatcagtgtgctcaagaacctgctgataaagcattcttttgatgacagatatgcttcaaggagccatcaggcaaggatagccaccctctacctgcctctgtttggtctgctgattgaaaacgtccagcggatcaatgtgagggatgtgtcacccttccctgtgaacgcgggcatgtcaggagtccagaagtccaaaatcaaggtgtcagtggggttggttcctactggaggctcatgggccatgctcctctcacagctgctgatgctgcaggcaacttttggtgctctctggcttgtagtggcatcgcgccagtctctgcctctatcctcacttggtgttcgttctccatggtgtttattagaagtgagactggacatcagggatgccaagactgtgaaggatgaatccctggctctaccagctgtgaatccgctggtgacgccgcagaagggaagcaccctggacaacagcctgcacaaggacctgctgggcgccatctccggcattgcttctccatatacaacctcaactccaaacatcaacagtgtgagaaatgctgattcgagaggatctctcataagcacagattcgggtaacagccttccagaaaggaatagtgagaagagcaattccctggataagcaccaacaaagtagcacattgggaaattccgtggttcgctgtgataaacttgaccagtctgagattaagagcctactgatgtgtttcctctacatcttaaagagcatgtctgatgataaataacgtcccgaaaataattttatctttgcatttccctaataatttttcatcttgcctgcagagtctgcctgcaccagttccagtacatggggaagcgatacatagccaggaaccaggaggggttgggacccatagttcatgatcgaaagtctcagacattgcctgtttcccgtaacagaacaggaatgatgcatgccagattgcagcagctgggcagcctggataactctctcacttttaaccacagctatggccactcggacgcagatgttctgcaccagtcattacttgaagccaacattgctactgaggtttgcctgacagctctggacacgctttctctatttacattggcgtttaaggtttgtatcaatttgctgttc

SEQ ID NO: 461661 - DNA, 6247 bp, Homo sapiens
ataaaatacaaccggaagatttctgccgatttccacgtagacctgaaccatttctcagtgaggcaaatgctcgccaccacgtccccggcgctgatgaatggcagtgggcagagcccatctgtcctcaagggcatccttcatgaagccgccatgcagtatccgaagcagggaatattttcagtcacttgtcctcatccagatatatttcttgtggccagaattgaaaaagtccttcaggggagcatcacacattgcgctgagccatatatgaaaagttcagactcttctaaggtggcccagaaggtgctgaagaatgccaagcaggcatgccaaagactaggacagtatagaatgccatttgcttgggcagcaaggacattgtttaaggatgcatctggaaatcttgacaaaaatgccagattttctgccatctacaggcaagacagcaataagctatccaatgatgacatgctcaagttacttgcagactttcggaaacctgagaagatggctaagctcccagtgattttaggcaatctagacattacaattgataatgtttcctcagacttccctaattatgttaattcatcatacattcccacaaaacaatttgaaacctgcagtaaaactcccatcacgtttgaagtggaggaatttgtgccctgcataccaaaacacactcagccttacaccatctacaccaatcacctttacgtttatcctaagtacttgaaatacgacagtcagaagtcttttgccaaggctagaaatattgcgatttgcattgaattcaaagattcagatgaggaagactctcagccccttaagtgcatttatggcagacctggtgggccagttttcacaagaagcgcctttgctgcagttttacaccatcaccaaaacccagaattttatgatgagattaaaatagagttgcccactcagctgcatgaaaagcaccacctgttgctcacattcttccatgtcagctgtgacaactcaagtaaaggaagcacgaagaagagggatgtcgttgaaacccaagttggctactcctggcttcccctcctgaaagacggaagggtggtgacaagcgagcagcacatcccggtctcggcgaaccttccttcgggctatcttggctaccaggagcttgggatgggcaggcattatggtccggaaattaaatgggtagatggaggcaagccactgctgaaaatttccactcatctggtttctacagtgtatactcaggatcagcatttacataattttttccagtactgtcagaaaaccgaatctggagcccaagccttaggaaacgaacttgtaaagtaccttaagagtctgcatgcgatggaaggccacgtgatgatcgccttcttgcccactatcctaaaccagctgttccgagtcctcaccagagccacacaggaagaagtcgcggttaacgtgactcgggtcattattcatgtggttgcccagtgccatgaggaaggattggagagccacttgaggtcatatgttaagtacgcgtataaggctgagccatatgttgcctctgaatacaagacagtgcatgaagaactgaccaaatccatgaccacgattctcaagccttctgccgatttcctcaccagcaacaaactactgaagtactcatggtttttctttgatgtactgatcaaatctatggctcagcatttgatagagaactccaaagttaagttgctgcgaaaccagagatttcctgcatcctatcatcatgcagtggaaaccgttgtaaatatgctgatgccacacatcactcagaagtttcgagataatccagaggcatctaagaacgcgaatcatagccttgctgtcttcatcaagagatgtttcaccttcatggacaggggctttgtcttcaagcagatcaacaactacattagctgttttgctcctggagacccaaagaccctctttgaatacaagtttgaatttctccgtgtagtgtgcaaccatgaacattatattccgttgaacttaccaatgccatttggaaaaggcaggattcaaagataccaagacctccagcttgactactcattaacagatgagttctgcagaaaccacttcttggtgggactgttactgagggaggtggggacagccctccaggagttccgggaggtccgtctgatcgccatcagtgtgctcaagaacctgctgataaagcattcttttgatgacagatatgcttcaaggagccatcaggcaaggatagccaccctctacctgcctctgtttggtctgctgattgaaaacgtccagcggatcaatgtgagggatgtgtcacccttccctgtgaacgcgggcatgactgtgaaggatgaatccctggctctaccagctgtgaatccgctggtgacgccgcagaagggaagcaccctggacaacagcctgcacaaggacctgctgggcgccatctccggcattgcttctccatatacaacctcaactccaaacatcaacagtgtgagaaatgctgattcgagaggatctctcataagcacagattcgggtaacagccttccagaaaggaatagtgagaagagcaattccctggataagcaccaacaaagtagcacattgggaaattccgtggttcgctgtgataaacttgaccagtctgagattaagagcctactgatgtgtttcctctacatcttaaagagcatgtctgatgatgctttgtttacatattggaacaaggcttcaacatctgaacttatggatttttttacaatatctgaagtctgcctgcaccagttccagtacatggggaagcgatacatagccagaacaggaatgatgcatgccagattgcagcagctgggcagcctggataactctctcacttttaaccacagctatggccactcggacgcagatgttctgcaccagtcattacttgaagccaacattgctactgaggtttgcctgacagctctggacacgctttctctatttacattggcgtttaagaaccagctcctggccgaccatggacataatcctctcatgaaaaaagtttttgatgtctacctgtgttttcttcaaaaacatcagtctgaaacggctttaaaaaatgtcttcactgccttaaggtccttaatttataagtttccctcaacattctatgaagggagagcggacatgtgtgcggctctgtgttacgagattctcaagtgctgtaactccaagctgagctccatcaggacggaggcctcccagctgctctacttcctgatgaggaacaactttgattacactggaaagaagtcctttgtccggacacatttgcaagtcatcatatctgtcagccagctgatagcagacgttgttggcattgggggaaccagattccagcagtccctgtccatcatcaacaactgtgccaacagtgaccggcttattaagcacaccagcttctcctctgatgtgaaggacttaaccaaaaggatacgcacggtgctaatggccaccgcccagatgaaggagcatgagaacgacccagagatgctggtggacctccagtacagcctggccaaatcctatgccagcacgcccgagctcaggaagacgtggctcgacagcatggccaggatccatgtcaaaaatggcgatctctcagaggcagcaatgtgctatgtccacgtaacagccctagtggcagaatatctcacacggaaagaagcagtccagtgggagccgccccttctcccccacagccatagcgcctgcctgaggaggagccggggaggcgtgtttagacaaggatgcaccgccttcagggtcattaccccaaacatcgacgaggaggcctccatgatggaagacgtggggatgcaggatgtccatttcaacgaggatgtgctgatggagctccttgagcagtgcgcagatggactctggaaagccgagcgctacgagctcatcgccgacatctacaaacttatcatccccatttatgagaagcggagggattttgagaggctggcccatctgtatgacacgctgcaccgggcctacagcaaagtgaccgaggtcatgcactcgggccgcaggcttctggggacctacttccgggtagccttcttcgggcagggcaataccagtttacagacagtgaaacagatgtggagggattctttgaagatgaagatggaaaggagtatatttacaaggaacccaaactcacaccgctgtcggaaatttctcagagactccttaaactgtactcggataaatttggttctgaaaatgtcaaaatgatacaggattctggcaaggtcaaccctaaggatctggattctaagtatgcatacatccaggtgactcacgtcatccccttctttgacgaaaaagagttgcaagaaaggaaaacagagtttgagagatcccacaacatccgccgcttcatgtttgagatgccatttacgcagaccgggaagaggcagggcggggtggaagagcagtgcaaacggcgcaccatcctgacagccatacactgcttcccttatgtgaagaagcgcatccctgtcatgtaccagcaccacactgacctgaaccccatcgaggtggccattgacgagatgagtaagaaggtggcggagctccggcagctgtgctcctcggccgaggtggacatgatcaaactgcagctcaaactccagggcagcgtgagtgttcaggtcaatgctggcccactagcatatgcgcgagctttcttagatgatacaaacacaaagcgatatcctgacaataaagtgaagctgcttaaggaagttttcaggcaatttgtggaagcttgcggtcaagccttagcggtaaacgaacgtctgattaaagaagaccagctcgagtatcaggaagaaatgaaagccaactacagggaaatggcgaaggagctttctgaaatcatgcatgagctgggatgatctgccccctggaggagaagacgagcgtcttaccgaattcccttcacatcttcaacgccatcagtgggactccaacaagcacaatggttcacgggatgaccagctcgtcttcggtcgtgtgattacatctcatggcccgtgtgtggggacttgctttgtcatttgcaaactcaggatgctttccaaagccaatcactggggagaccgagcacagggaggaccaaggggaaggggagagaaaggaaataaagaacaacgttatttcttaacagactttctataggagttgtaagaaggtgcacatatttttttaaatctcactggcaatattcaaagttttcattgtgtcttaacaaaggtgtggtagacactcttgagctggacttagattttattcttccttgcagagtagtgttagaatagatggcctacagaaaaaaaaggttctgggatctacatggcagggagggctgcactgacattgatgcctgggggaccttttgcctcgaggctgagctggaaaatcttgaaaatattttttttttcctgtggcacattcaggttgaatacaagaactatttttgtgactagtttttgatgacctaagggaactgaccattgtaatttttgtaccagtgaaccaggagatttagtgcttttatattcatttccttgcatttaagaaaatatgaaagcttaaggaattatgtgagcttaaaactagtcaagcagtttagaaccaaaggcctatattaataaccgcaactatgctgaaaagtacaaagtagtacagtatattgttatgtacatatcattgttaatacagtcctggcattctgtacatatatgtattacatttctacatttttaatactcacatgggcttatgcattaagtttaattgtgataaatttgtgctgttccagtatatgcaatacactttaatgttttattcttgtacataaaaatgtgcaatatggagatgtatacagtctttactatattaggtttataaacagttttaagaatttcatccttttgccaaaatggtggagtatgtaattggtaaatcataaatcctgtggtgaatggtggtgtactttaaagctgtcaccatgttatattttcttttaagactttaatttagtaattttatatttgggaaaataaaggtttttaattttatttaactggaatcactgccctgctgtaattaaacattctgtaccacatctgtattaaaaagacattgctgacca

SEQ ID NO: 461662 - DNA, 5901 bp, Homo sapiens
ataaaatacaaccggaagatttctgccgatttccacgtagacctgaaccatttctcagtgaggcaaatgctcgccaccacgtccccggcgctgatgaatggcagtgggcagagcccatctgtcctcaagggcatccttcatgaagccgccatgcagtatccgaagcagggaatattttcagtcacttgtcctcatccagatatatttcttgtggccagaattgaaaaagtccttcaggggagcatcacacattgcgctgagccatatatgaaaagttcagactcttctaaggtggcccagaaggtgctgaagaatgccaagcaggcatgccaaagactaggacagtatagaatgccatttgcttgggcagcaaggacattgtttaaggatgcatctggaaatcttgacaaaaatgccagattttctgccatctacaggcaagacagcaataagctatccaatgatgacatgctcaagttacttgcagactttcggaaacctgagaagatggctaagctcccagtgattttaggcaatctagacattacaattgataatgtttcctcagacttccctaattatgttaattcatcatacattcccacaaaacaatttgaaacctgcagtaaaactcccatcacgtttgaagtggaggaatttgtgccctgcataccaaaacacactcagccttacaccatctacaccaatcacctttacgtttatcctaagtacttgaaatacgacagtcagaagtcttttgccaaggctagaaatattgcgatttgcattgaattcaaagattcagatgaggaagactctcagccccttaagtgcatttatggcagacctggtgggccagttttcacaagaagcgcctttgctgcagttttacaccatcaccaaaacccagaattttatgatgagattaaaatagagttgcccactcagctgcatgaaaagcaccacctgttgctcacattcttccatgtcagctgtgacaactcaagtaaaggaagcacgaagaagagggatgtcgttgaaacccaagttggctactcctggcttcccctcctgaaagacggaagggtggtgacaagcgagcagcacatcccggtctcggcgaaccttccttcgggctatcttggctaccaggagcttgggatgggcaggcattatggtccggaaattaaatgggtagatggaggcaagccactgctgaaaatttccactcatctggtttctacagtgtatactcaggatcagcatttacataattttttccagtactgtcagaaaaccgaatctggagcccaagccttaggaaacgaacttgtaaagtaccttaagagtctgcatgcgatggaaggccacgtgatgatcgccttcttgcccactatcctaaaccagctgttccgagtcctcaccagagccacacaggaagaagtcgcggttaacgtgactcgggtcattattcatgtggttgcccagtgccatgaggaaggattggagagccacttgaggtcatatgttaagtacgcgtataaggctgagccatatgttgcctctgaatacaagacagtgcatgaagaactgaccaaatccatgaccacgattctcaagccttctgccgatttcctcaccagcaacaaactactgaagtactcatggtttttctttgatgtactgatcaaatctatggctcagcatttgatagagaactccaaagttaagttgctgcgaaaccagagatttcctgcatcctatcatcatgcagtggaaaccgttgtaaatatgctgatgccacacatcactcagaagtttcgagataatccagaggcatctaagaacgcgaatcatagccttgctgtcttcatcaagagatgtttcaccttcatggacaggggctttgtcttcaagcagatcaacaactacattagctgttttgctcctggagacccaaagaccctctttgaatacaagtttgaatttctccgtgtagtgtgcaaccatgaacattatattccgttgaacttaccaatgccatttggaaaaggcaggattcaaagataccaagacctccagcttgactactcattaacagatgagttctgcagaaaccacttcttggtgggactgttactgagggaggtggggacagccctccaggagttccgggaggtccgtctgatcgccatcagtgtgctcaagaacctgctgataaagcattcttttgatgacagatatgcttcaaggagccatcaggcaaggatagccaccctctacctgcctctgtttggtctgctgattgaaaacgtccagcggatcaatgtgagggatgtgtcacccttccctgtgaacgcgggcatgactgtgaaggatgaatccctggctctaccagctgtgaatccgctggtgacgccgcagaagggaagcaccctggacaacagcctgcacaaggacctgctgggcgccatctccggcattgcttctccatatacaacctcaactccaaacatcaacagtgtgagaaatgctgattcgagaggatctctcataagcacagattcgggtaacagccttccagaaaggaatagtgagaagagcaattccctggataagcaccaacaaagtagcacattgggaaattccgtggttcgctgtgataaacttgaccagtctgagattaagagcctactgatgtgtttcctctacatcttaaagagcatgtctgatgatgctttgtttacatattggaacaaggcttcaacatctgaacttatggatttttttacaatatctgaagtctgcctgcaccagttccagtacatggggaagcgatacatagccagtgtgagaaagatatcaagtgtgcttggaatttctgtagacaatggctatggccactcggacgcagatgttctgcaccagtcattacttgaagccaacattgctactgaggtttgcctgacagctctggacacgctttctctatttacattggcgtttaagaaccagctcctggccgaccatggacataatcctctcatgaaaaaagtttttgatgtctacctgtgttttcttcaaaaacatcagtctgaaacggctttaaaaaatgtcttcactgccttaaggtccttaatttataagtttccctcaacattctatgaagggagagcggacatgtgtgcggctctgtgttacgagattctcaagtgctgtaactccaagctgagctccatcaggacggaggcctcccagctgctctacttcctgatgaggaacaactttgattacactggaaagaagtcctttgtccggacacatttgcaagtcatcatatctgtcagccagctgatagcagacgttgttggcattgggggaaccagattccagcagtccctgtccatcatcaacaactgtgccaacagtgaccggcttattaaggcagcaatgtgctatgtccacgtaacagccctagtggcagaatatctcacacggaaaggcgtgtttagacaaggatgcaccgccttcagggtcattaccccaaacatcgacgaggaggcctccatgatggaagacgtggggatgcaggatgtccatttcaacgaggatgtgctgatggagctccttgagcagtgcgcagatggactctggaaagccgagcgctacgagctcatcgccgacatctacaaacttatcatccccatttatgagaagcggagggattttgagaggctggcccatctgtatgacacgctgcaccgggcctacagcaaagtgaccgaggtcatgcactcgggccgcaggcttctggggacctacttccgggtagccttcttcgggcaggggattctttgaagatgaagatggaaaggagtatatttacaaggaacccaaactcacaccgctgtcggaaatttctcagagactccttaaactgtactcggataaatttggttctgaaaatgtcaaaatgatacaggattctggcaaggtcaaccctaaggatctggattctaagtatgcatacatccaggtgactcacgtcatccccttctttgacgaaaaagagttgcaagaaaggaaaacagagtttgagagatcccacaacatccgccgcttcatgtttgagatgccatttacgcagaccgggaagaggcagggcggggtggaagagcagtgcaaacggcgcaccatcctgacagccatacactgcttcccttatgtgaagaagcgcatccctgtcatgtaccagcaccacactgacctgaaccccatcgaggtggccattgacgagatgagtaagaaggtggcggagctccggcagctgtgctcctcggccgaggtggacatgatcaaactgcagctcaaactccagggcagcgtgagtgttcaggtcaatgctggcccactagcatatgcgcgagctttcttagatgatacaaacacaaagcgatatcctgacaataaagtgaagctgcttaaggaagttttcaggcaatttgtggaagcttgcggtcaagccttagcggtaaacgaacgtctgattaaagaagaccagctcgagtatcaggaagaaatgaaagccaactacagggaaatggcgaaggagctttctgaaatcatgcatgagctgggatgatctgccccctggaggagaagacgagcgtcttaccgaattcccttcacatcttcaacgccatcagtgggactccaacaagcacaatggttcacgggatgaccagctcgtcttcggtcgtgtgattacatctcatggcccgtgtgtggggacttgctttgtcatttgcaaactcaggatgctttccaaagccaatcactggggagaccgagcacagggaggaccaaggggaaggggagagaaaggaaataaagaacaacgttatttcttaacagactttctataggagttgtaagaaggtgcacatatttttttaaatctcactggcaatattcaaagttttcattgtgtcttaacaaaggtgtggtagacactcttgagctggacttagattttattcttccttgcagagtagtgttagaatagatggcctacagaaaaaaaaggttctgggatctacatggcagggagggctgcactgacattgatgcctgggggaccttttgcctcgaggctgagctggaaaatcttgaaaatattttttttttcctgtggcacattcaggttgaatacaagaactatttttgtgactagtttttgatgacctaagggaactgaccattgtaatttttgtaccagtgaaccaggagatttagtgcttttatattcatttccttgcatttaagaaaatatgaaagcttaaggaattatgtgagcttaaaactagtcaagcagtttagaaccaaaggcctatattaataaccgcaactatgctgaaaagtacaaagtagtacagtatattgttatgtacatatcattgttaatacagtcctggcattctgtacatatatgtattacatttctacatttttaatactcacatgggcttatgcattaagtttaattgtgataaatttgtgctgttccagtatatgcaatacactttaatgttttattcttgtacataaaaatgtgcaatatggagatgtatacagtctttactatattaggtttataaacagttttaagaatttcatccttttgccaaaatggtggagtatgtaattggtaaatcataaatcctgtggtgaatggtggtgtactttaaagctgtcaccatgttatattttcttttaagactttaatttagtaattttatatttgggaaaataaaggtttttaattttatttaactggaatcactgccctgctgtaattaaacattctgtaccacatctgtattaaaaagacattgctgacca

SEQ ID NO: 461663 - DNA, 4156 bp, Homo sapiens
gcttaccaatgccatttggaaagttcaacggaatataatgttcatggttgcacattatattccgttgaacttaccaatgccatttggaaaaggcaggattcaaagataccaagacctccagcttgactactcattaacagatgagttctgcagaaaccacttcttggtgggactgttactgagggaggtggggacagccctccaggagttccgggaggtccgtctgatcgccatcagtgtgctcaagaacctgctgataaagcattcttttgatgacagatatgcttcaaggagccatcaggcaaggatagccaccctctacctgcctctgtttggtctgctgattgaaaacgtccagcggatcaatgtgagggatgtgtcacccttccctgtgaacgcgggcatgactgtgaaggatgaatccctggctctaccagctgtgaatccgctggtgacgccgcagaagggaagcaccctggacaacagcctgcacaaggacctgctgggcgccatctccggcattgcttctccatatacaacctcaactccaaacatcaacagtgtgagaaatgctgattcgagaggatctctcataagcacagattcgggtaacagccttccagaaaggaatagtgagaagagcaattccctggataagcaccaacaaagtagcacattgggaaattccgtggttcgctgtgataaacttgaccagtctgagattaagagcctactgatgtgtttcctctacatcttaaagagcatgtctgatgatgctttgtttacatattggaacaaggcttcaacatctgaacttatggatttttttacaatatctgaagtctgcctgcaccagttccagtacatggggaagcgatacatagccagtgtgagaaagatatcaagtgtgcttggaatttctgtagacaatggctatggccactcggacgcagatgttctgcaccagtcattacttgaagccaacattgctactgaggtttgcctgacagctctggacacgctttctctatttacattggcgtttaagaaccagctcctggccgaccatggacataatcctctcatgaaaaaagtttttgatgtctacctgtgttttcttcaaaaacatcagtctgaaacggctttaaaaaatgtcttcactgccttaaggtccttaatttataagtttccctcaacattctatgaagggagagcggacatgtgtgcggctctgtgttacgagattctcaagtgctgtaactccaagctgagctccatcaggacggaggcctcccagctgctctacttcctgatgaggaacaactttgattacactggaaagaagtcctttgtccggacacatttgcaagtcatcatatctgtcagccagctgatagcagacgttgttggcattgggggaaccagattccagcagtccctgtccatcatcaacaactgtgccaacagtgaccggcttattaagcacaccagcttctcctctgatgtgaaggacttaaccaaaaggatacgcacggtgctaatggccaccgcccagatgaaggagcatgagaacgacccagagatgctggtggacctccagtacagcctggccaaatcctatgccagcacgcccgagctcaggaagacgtggctcgacagcatggccaggatccatgtcaaaaatggcgatctctcagaggcagcaatgtgctatgtccacgtaacagccctagtggcagaatatctcacacggaaaggcgtgtttagacaaggatgcaccgccttcagggtcattaccccaaacatcgacgaggaggcctccatgatggaagacgtggggatgcaggatgtccatttcaacgaggatgtgctgatggagctccttgagcagtgcgcagatggactctggaaagccgagcgctacgagctcatcgccgacatctacaaacttatcatccccatttatgagaagcggagggattttgagaggctggcccatctgtatgacacgctgcaccgggcctacagcaaagtgaccgaggtcatgcactcgggccgcaggcttctggggacctacttccgggtagccttcttcgggcaggggattctttgaagatgaagatggaaaggagtatatttacaaggaacccaaactcacaccgctgtcggaaatttctcagagactccttaaactgtactcggataaatttggttctgaaaatgtcaaaatgatacaggattctggcaaggtcaaccctaaggatctggattctaagtatgcatacatccaggtgactcacgtcatccccttctttgacgaaaaagagttgcaagaaaggaaaacagagtttgagagatcccacaacatccgccgcttcatgtttgagatgccatttacgcagaccgggaagaggcagggcggggtggaagagcagtgcaaacggcgcaccatcctgacagccatacactgcttcccttatgtgaagaagcgcatccctgtcatgtaccagcaccacactgacctgaaccccatcgaggtggccattgacgagatgagtaagaaggtggcggagctccggcagctgtgctcctcggccgaggtggacatgatcaaactgcagctcaaactccagggcagcgtgagtgttcaggtcaatgctggcccactagcatatgcgcgagctttcttagatgatacaaacacaaagcgatatcctgacaataaagtgaagctgcttaaggaagttttcaggcaatttgtggaagcttgcggtcaagccttagcggtaaacgaacgtctgattaaagaagaccagctcgagtatcaggaagaaatgaaagccaactacagggaaatggcgaaggagctttctgaaatcatgcatgagctgggatgatctgccccctggaggagaagacgagcgtcttaccgaattcccttcacatcttcaacgccatcagtgggactccaacaagcacaatggttcacgggatgaccagctcgtcttcggtcgtgtgattacatctcatggcccgtgtgtggggacttgctttgtcatttgcaaactcaggatgctttccaaagccaatcactggggagaccgagcacagggaggaccaaggggaaggggagagaaaggaaataaagaacaacgttatttcttaacagactttctataggagttgtaagaaggtgcacatatttttttaaatctcactggcaatattcaaagttttcattgtgtcttaacaaaggtgtggtagacactcttgagctggacttagattttattcttccttgcagagtagtgttagaatagatggcctacagaaaaaaaaggttctgggatctacatggcagggagggctgcactgacattgatgcctgggggaccttttgcctcgaggctgagctggaaaatcttgaaaatattttttttttcctgtggcacattcaggttgaatacaagaactatttttgtgactagtttttgatgacctaagggaactgaccattgtaatttttgtaccagtgaaccaggagatttagtgcttttatattcatttccttgcatttaagaaaatatgaaagcttaaggaattatgtgagcttaaaactagtcaagcagtttagaaccaaaggcctatattaataaccgcaactatgctgaaaagtacaaagtagtacagtatattgttatgtacatatcattgttaatacagtcctggcattctgtacatatatgtattacatttctacatttttaatactcacatgggcttatgcattaagtttaattgtgataaatttgtgctgttccagtatatgcaatacactttaatgttttattcttgtacataaaaatgtgcaatatggagatgtatacagtctttactatattaggtttataaacagttttaagaatttcatccttttgccaaaatggtggagtatgtaattggtaaatcataaatcctgtggtgaatggtggtgtactttaaagctgtcaccatgttatattttcttttaagactttaatttagtaattttatatttgggaaaataaaggtttttaattttatttaactggaatcactgccctgctgtaattaaacattctgtaccacatctgtattaaaaagacattgctgacca

SEQ ID NO: 461664 - DNA, 3043 bp, Homo sapiens
tccctttgctctcctgatcagcattttgctttgcaaacagtgttttttaaggatagcagaatcactttctgtaattattcttaaaggggaagaaaatacctcagacattgtttcctacacggagcgacccctgctcaaagcaccccccaacccccactttgctgggtccttaggcacatcctaactgaacgcagaagcccagcctgggcagtcatttgaaggtaaattgatttgctcatgtttgtgtgtccctaaggtcatcatatctgtcagccagctgatagcagacgttgttggcattgggggaaccagattccagcagtccctgtccatcatcaacaactgtgccaacagtgaccggcttattaagcacaccagcttctcctctgatgtgaaggacttaaccaaaaggatacgcacggtgctaatggccaccgcccagatgaaggagcatgagaacgacccagagatgctggtggacctccagtacagcctggccaaatcctatgccagcacgcccgagctcaggaagacgtggctcgacagcatggccaggatccatgtcaaaaatggcgatctctcagaggcagcaatgtgctatgtccacgtaacagccctagtggcagaatatctcacacggaaaggcgtgtttagacaaggatgcaccgccttcagggtcattaccccaaacatcgacgaggaggcctccatgatggaagacgtggggatgcaggatgtccatttcaacgaggatgtgctgatggagctccttgagcagtgcgcagatggactctggaaagccgagcgctacgagctcatcgccgacatctacaaacttatcatccccatttatgagaagcggagggattttgagaggctggcccatctgtatgacacgctgcaccgggcctacagcaaagtgaccgaggtcatgcactcgggccgcaggcttctggggacctacttccgggtagccttcttcgggcaggggattctttgaagatgaagatggaaaggagtatatttacaaggaacccaaactcacaccgctgtcggaaatttctcagagactccttaaactgtactcggataaatttggttctgaaaatgtcaaaatgatacaggattctggcaaggtcaaccctaaggatctggattctaagtatgcatacatccaggtgactcacgtcatccccttctttgacgaaaaagagttgcaagaaaggaaaacagagtttgagagatcccacaacatccgccgcttcatgtttgagatgccatttacgcagaccgggaagaggcagggcggggtggaagagcagtgcaaacggcgcaccatcctgacagccatacactgcttcccttatgtgaagaagcgcatccctgtcatgtaccagcaccacactgacctgaaccccatcgaggtggccattgacgagatgagtaagaaggtggcggagctccggcagctgtgctcctcggccgaggtggacatgatcaaactgcagctcaaactccagggcagcgtgagtgttcaggtcaatgctggcccactagcatatgcgcgagctttcttagatgatacaaacacaaagcgatatcctgacaataaagtgaagctgcttaaggaagttttcaggcaatttgtggaagcttgcggtcaagccttagcggtaaacgaacgtctgattaaagaagaccagctcgagtatcaggaagaaatgaaagccaactacagggaaatggcgaaggagctttctgaaatcatgcatgagctgggatgatctgccccctggaggagaagacgagcgtcttaccgaattcccttcacatcttcaacgccatcagtgggactccaacaagcacaatggttcacgggatgaccagctcgtcttcggtcgtgtgattacatctcatggcccgtgtgtggggacttgctttgtcatttgcaaactcaggatgctttccaaagccaatcactggggagaccgagcacagggaggaccaaggggaaggggagagaaaggaaataaagaacaacgttatttcttaacagactttctataggagttgtaagaaggtgcacatatttttttaaatctcactggcaatattcaaagttttcattgtgtcttaacaaaggtgtggtagacactcttgagctggacttagattttattcttccttgcagagtagtgttagaatagatggcctacagaaaaaaaaggttctgggatctacatggcagggagggctgcactgacattgatgcctgggggaccttttgcctcgaggctgagctggaaaatcttgaaaatattttttttttcctgtggcacattcaggttgaatacaagaactatttttgtgactagtttttgatgacctaagggaactgaccattgtaatttttgtaccagtgaaccaggagatttagtgcttttatattcatttccttgcatttaagaaaatatgaaagcttaaggaattatgtgagcttaaaactagtcaagcagtttagaaccaaaggcctatattaataaccgcaactatgctgaaaagtacaaagtagtacagtatattgttatgtacatatcattgttaatacagtcctggcattctgtacatatatgtattacatttctacatttttaatactcacatgggcttatgcattaagtttaattgtgataaatttgtgctgttccagtatatgcaatacactttaatgttttattcttgtacataaaaatgtgcaatatggagatgtatacagtctttactatattaggtttataaacagttttaagaatttcatccttttgccaaaatggtggagtatgtaattggtaaatcataaatcctgtggtgaatggtggtgtactttaaagctgtcaccatgttatattttcttttaagactttaatttagtaattttatatttgggaaaataaaggtttttaattttatttaactggaatcactgccctgctgtaattaaacattctgtaccacatctgtattaaaaagacattgctgacca

SEQ ID NO: 461665 - DNA, 3601 bp, Homo sapiens
ataaaatacaaccggaagatttctgccgatttccacgtagacctgaaccatttctcagtgaggcaaatgctcgccaccacgtccccggcgctgatgaatggcagtgggcagagcccatctgtcctcaagggcatccttcatgaagccgccatgcagtatccgaagcagggaatattttcagtcacttgtcctcatccagatatatttcttgtggccagaattgaaaaagtccttcaggggagcatcacacattgcgctgagccatatatgaaaagttcagactcttctaaggtggcccagaaggtgctgaagaatgccaagcaggcatgccaaagactaggacagtatagaatgccatttgcttgggcagcaaggacattgtttaaggatgcatctggaaatcttgacaaaaatgccagattttctgccatctacaggcaagacagcaataagctatccaatgatgacatgctcaagttacttgcagactttcggaaacctgagaagatggctaagctcccagtgattttaggcaatctagacattacaattgataatgtttcctcagacttccctaattatgttaattcatcatacattcccacaaaacaatttgaaacctgcagtaaaactcccatcacgtttgaagtggaggaatttgtgccctgcataccaaaacacactcagccttacaccatctacaccaatcacctttacgtttatcctaagtacttgaaatacgacagtcagaagtcttttgccaaggctagaaatattgcgatttgcattgaattcaaagattcagatgaggaagactctcagccccttaagtgcatttatggcagacctggtgggccagttttcacaagaagcgcctttgctgcagttttacaccatcaccaaaacccagaattttatgatgagattaaaatagagttgcccactcagctgcatgaaaagcaccacctgttgctcacattcttccatgtcagctgtgacaactcaagtaaaggaagcacgaagaagagggatgtcgttgaaacccaagttggctactcctggcttcccctcctgaaagacggaagggtggtgacaagcgagcagcacatcccggtctcggcgaaccttccttcgggctatcttggctaccaggagcttgggatgggcaggcattatggtccggaaattaaatgggtagatggaggcaagccactgctgaaaatttccactcatctggtttctacagtgtatactcaggatcagcatttacataattttttccagtactgtcagaaaaccgaatctggagcccaagccttaggaaacgaacttgtaaagtaccttaagagtctgcatgcgatggaaggccacgtgatgatcgccttcttgcccactatcctaaaccagctgttccgagtcctcaccagagccacacaggaagaagtcgcggttaacgtgactcgggtcattattcatgtggttgcccagtgccatgaggaaggattggagagccacttgaggtcatatgttaagtacgcgtataaggctgagccatatgttgcctctgaatacaagacagtgcatgaagaactgaccaaatccatgaccacgattctcaagccttctgccgatttcctcaccagcaacaaactactgaagtactcatggtttttctttgatgtactgatcaaatctatggctcagcatttgatagagaactccaaagttaagttgctgcgaaaccagagatttcctgcatcctatcatcatgcagtggaaaccgttgtaaatatgctgatgccacacatcactcagaagtttcgagataatccagaggcatctaagaacgcgaatcatagccttgctgtcttcatcaagagatgtttcaccttcatggacaggggctttgtcttcaagcagatcaacaactacattagctgttttgctcctggagacccaaagaccctctttgaatacaagtttgaatttctccgtgtagtgtgcaaccatgaacattatattccgttgaacttaccaatgccatttggaaaaggcaggattcaaagataccaagacctccagcttgactactcattaacagatgagttctgcagaaaccacttcttggtgggactgttactgagggaggtggggacagccctccaggagttccgggaggtccgtctgatcgccatcagtgtgctcaagaacctgctgataaagcattcttttgatgacagatatgcttcaaggagccatcaggcaaggatagccaccctctacctgcctctgtttggtctgctgattgaaaacgtccagcggatcaatgtgagggatgtgtcacccttccctgtgaacgcgggcatgactgtgaaggatgaatccctggctctaccagctgtgaatccgctggtgacgccgcagaagggaagcaccctggacaacagcctgcacaaggacctgctgggcgccatctccggcattgcttctccatatacaacctcaactccaaacatcaacagtgtgagaaatgctgattcgagaggatctctcataagcacagattcgggtaacagccttccagaaaggaatagtgagaagagcaattccctggataagcaccaacaaagtagcacattgggaaattccgtggttcgctgtgataaacttgaccagtctgagattaagagcctactgatgtgtttcctctacatcttaaagagcatgtctgatgatgctttgtttacatattggaacaaggcttcaacatctgaacttatggatttttttacaatatctgaagtctgcctgcaccagttccagtacatggggaagcgatacatagccagtgtgagaaagatatcaagtgtgcttggaatttctgtagacaatggctatggccactcggacgcagatgttctgcaccagtcattacttgaagccaacattgctactgaggtttgcctgacagctctggacacgctttctctatttacattggcgtttaagaaccagctcctggccgaccatggacataatcctctcatgaaaaaagtttttgatgtctacctgtgttttcttcaaaaacatcagtctgaaacggctttaaaaaatgtcttcactgccttaaggtccttaatttataagtttccctcaacattctatgaagggagagcggacatgtgtgcggctctgtgttacgagattctcaagtgctgtaactccaagctgagctccatcaggacggaggcctcccagctgctctacttcctgatgaggaacaactttgattacactggaaagaagtcctttgtccggacacatttgcaagtgcgtgtggtttagctttccaatacagatttactctgtagaatcctgctgtatcaggaaaactttgagtatcacattaaccaatttaccttgtcataaagatactgcaagatctggaaaactgggaagccacgtttgctggcttggtttatttcatgttccattactataagatatgggcctgagatgcgtttctgttggtaaattgacatttaaatattgaatcaatattggactgactaaaattccattgaatcaagaagtgttagaa

SEQ ID NO: 461666 - DNA, 2341 bp, Homo sapiens
  misc_feature (128)..(128): n is a, c, g, or t
cgagcgctcctgcaccgtggggtggcggagccgggggactgcatggaacccgggacgcccccgcggggagaggagcgcgagcggccgcgggaggagggcgcccaaggcggcgggggaggttaagccgnccgcctgcgggagggacgctcggcggccgcgacggggggcgctggcggcggcggacgctgcagcggcggcggggctggcgccgcggcggctcccgggccgggacaggcctgggcaccgggcggagctccgcggccgggcggcagcggcgcggagcgggcacggcgcctgcagccgggccccggccccgggggcgccgcctccccccgcaccttctgcacggctggcctgccactcctcctgctatgatgcctgggcagatcccggacccttcggtgaccacaggctccctgccagggcttggccccctgaccgggctccccagctcggccctgactgtggaggagctgaaatacgctgacatccgcaacctcggggccatgattgcacccttgcacttcctggaggtgaaactgggcaagaggccccagcccgtgaaaagtgaggtccaccggcaacatggactcagagttgggaaactgagtcctctcctgggtgaggctcatctggctgaacaactatgaagccatttaagtctgttttccttctactgtgcccaaaaggcacaaggcaacctggcctgaggttggagcatggagatctagaggaactcatggatggattcaggcgggatgtgaaagtgctgggagtgagggcctgggcctcctctgggtttagccacccttccaggttgtgtacaacctgccatatgctggggctcattgactgtgctctgctctgtggctacaggatccccttttactgagcgtagtgcatgtgtatgctctgacaaactcctccgtggtttgcctctgtagtcctccctacaccctaccaactccccagtccccgcgaataaaaacccttgcctttttggaggcaatgtagcaaagcaggactgctgcattggaatagtttggctctggagagttcactagatgtttgaaattcagtttcgtcccttgtaaaaataggggaaatagacccctacctagtacctagtaccatatacatatattatctcaaaatggatcgaaggcctaaatgtaagagtgaaaactagaaaactcttagaagaaaacagctgtaaatctttgtgaccttggattaggtagtggtttcttagattttatgccaaaaataaaagcaacaaaataaaaaaaataaattggacatcttcaaaattaaaaactttggtacttcaaaggacacaaagtaaaaagaaaatccacagaatgagagaaaatgtttgcaaatcgtagatccaataagggacttgtatctagaatatataaagaatgattacagctcaataataagacaaataacccagtagaaaaatgggcaaaagatctcaatattaatttctccaaagaaaatatataaatggcaactaagcacatgaaaaaatgctcaacatcatagccatcaaggaaatacaagtcaaaaaccacaatgagatactactttgcacccactaggatgactatagtgaaaaaaaagagataataacaagtattggtgagcatgtggagaagctgtcgtcatgaattgatcgtgggaatgtaaaatgatgcagccactttggaaaacagtctggcagttcctcaaatggctaaacagagttcccatgcgatccagccatttcactcctacatatatttcctttcccaacagaaaggaaaacatgtccacacaaaaacatacatgagagtttacagtggcattattcataatagctccaaagtggaagcagctcaaatgtccatgaattggtgcatgaataaataaaacatggtctatccatacaatggattattatttagccataaaaaggaatgaagaactgatacatgctgtaatatggatgaaccttggaaacattatgctgggtaaaagaagccagccacaagagaccacagagtgtgtgggtccatttagatgaaatgtccagaataggcaaattcatagagacaggaagtagagccagtactgtggttacctaggggtggggagatgggaggagtggggagtgatggccaagggatatgaggtttcttttgggggtgatgaaagtgttctaaaattgtagtgatagttgcacaactctggatataatacaagttggtgaattgtatactttaatggacaaattgtatggtatgtgtgagtttgatctcaataaagtgcttttaaaaatggagaataataatat

SEQ ID NO: 461667 - DNA, 2117 bp, Homo sapiens
cgagcgctcctgcaccgtggggtggcggagccgggggactgcatggaacccgggacgcccccgcggggagaggagcgcgagcggccgcgggaggagggcgcccaaggcggcgggggaggttaaggctggcctgccactcctcctgctatgatgcctgggcagatcccggacccttcggtgaccacaggctccctgccagggcttggccccctgaccgggctccccagctcggccctgactgtggaggagctgaaatacgctgacatccgcaacctcggggccatgattgcacccttgcacttcctggaggtgaaactgggcaagaggccccagcccgtgaaaagtgaggtccaccggcaacatggactcagagttgggaaactgagtcctctcctgggtgaggctcatctggctgaacaactatgaagccatttaagtctgttttccttctactgtgcccaaaaggcacaaggcaacctggcctgaggttggagcatggagatctagaggaactcatggatggattcaggcgggatgtgaaagtgctgggagtgagggcctgggcctcctctgggtttagccacccttccaggttgtgtacaacctgccatatgctggggctcattgactgtgctctgctctgtggctacaggatccccttttactgagcgtagtgcatgtgtatgctctgacaaactcctccgtggtttgcctctgtagtcctccctacaccctaccaactccccagtccccgcgaataaaaacccttgcctttttggaggcaatgtagcaaagcaggactgctgcattggaatagtttggctctggagagttcactagatgtttgaaattcagtttcgtcccttgtaaaaataggggaaatagacccctacctagtacctagtaccatatacatatattatctcaaaatggatcgaaggcctaaatgtaagagtgaaaactagaaaactcttagaagaaaacagctgtaaatctttgtgaccttggattaggtagtggtttcttagattttatgccaaaaataaaagcaacaaaataaaaaaaataaattggacatcttcaaaattaaaaactttggtacttcaaaggacacaaagtaaaaagaaaatccacagaatgagagaaaatgtttgcaaatcgtagatccaataagggacttgtatctagaatatataaagaatgattacagctcaataataagacaaataacccagtagaaaaatgggcaaaagatctcaatattaatttctccaaagaaaatatataaatggcaactaagcacatgaaaaaatgctcaacatcatagccatcaaggaaatacaagtcaaaaaccacaatgagatactactttgcacccactaggatgactatagtgaaaaaaaagagataataacaagtattggtgagcatgtggagaagctgtcgtcatgaattgatcgtgggaatgtaaaatgatgcagccactttggaaaacagtctggcagttcctcaaatggctaaacagagttcccatgcgatccagccatttcactcctacatatatttcctttcccaacagaaaggaaaacatgtccacacaaaaacatacatgagagtttacagtggcattattcataatagctccaaagtggaagcagctcaaatgtccatgaattggtgcatgaataaataaaacatggtctatccatacaatggattattatttagccataaaaaggaatgaagaactgatacatgctgtaatatggatgaaccttggaaacattatgctgggtaaaagaagccagccacaagagaccacagagtgtgtgggtccatttagatgaaatgtccagaataggcaaattcatagagacaggaagtagagccagtactgtggttacctaggggtggggagatgggaggagtggggagtgatggccaagggatatgaggtttcttttgggggtgatgaaagtgttctaaaattgtagtgatagttgcacaactctggatataatacaagttggtgaattgtatactttaatggacaaattgtatggtatgtgtgagtttgatctcaataaagtgcttttaaaaatggagaataataatat

SEQ ID NO: 461668 - DNA, 1910 bp, Homo sapiens
atcataacaaactataaatgagaaggcttttcaagcctctgttttcccctaagctgccttctgtgaccccttatcttgtttcctgtggtgttaatgtcatcgttgtattcccatcaaccaacaatcttttagcagccttaagaagggctgtcaagtcttctgtcaatcctaccatcttactttgatgtttccaggtccaccggcaacatggactcagagttgggaaactgagtcctctcctgggtgaggctcatctggctgaacaactatgaagccatttaagtctgttttccttctactgtgccctcatggatggattcaggcgggatgtgaaagtgctgggagtgagggcctgggcctcctctgggtttagccacccttccaggttgtgtacaacctgccatatgctggggctcattgactgtgctctgctctgtggctacaggatccccttttactgagcgtagtgcatgtgtatgctctgacaaactcctccgtggtttgcctctgtagtcctccctacaccctaccaactccccagtccccgcgaataaaaacccttgcctttttggaggcaatgtagcaaagcaggactgctgcattggaatagtttggctctggagagttcactagatgtttgaaattcagtttcgtcccttgtaaaaataggggaaatagacccctacctagtacctagtaccatatacatatattatctcaaaatggatcgaaggcctaaatgtaagagtgaaaactagaaaactcttagaagaaaacagctgtaaatctttgtgaccttggattaggtagtggtttcttagattttatgccaaaaataaaagcaacaaaataaaaaaaataaattggacatcttcaaaattaaaaactttggtacttcaaaggacacaaagtaaaaagaaaatccacagaatgagagaaaatgtttgcaaatcgtagatccaataagggacttgtatctagaatatataaagaatgattacagctcaataataagacaaataacccagtagaaaaatgggcaaaagatctcaatattaatttctccaaagaaaatatataaatggcaactaagcacatgaaaaaatgctcaacatcatagccatcaaggaaatacaagtcaaaaaccacaatgagatactactttgcacccactaggatgactatagtgaaaaaaaagagataataacaagtattggtgagcatgtggagaagctgtcgtcatgaattgatcgtgggaatgtaaaatgatgcagccactttggaaaacagtctggcagttcctcaaatggctaaacagagttcccatgcgatccagccatttcactcctacatatatttcctttcccaacagaaaggaaaacatgtccacacaaaaacatacatgagagtttacagtggcattattcataatagctccaaagtggaagcagctcaaatgtccatgaattggtgcatgaataaataaaacatggtctatccatacaatggattattatttagccataaaaaggaatgaagaactgatacatgctgtaatatggatgaaccttggaaacattatgctgggtaaaagaagccagccacaagagaccacagagtgtgtgggtccatttagatgaaatgtccagaataggcaaattcatagagacaggaagtagagccagtactgtggttacctaggggtggggagatgggaggagtggggagtgatggccaagggatatgaggtttcttttgggggtgatgaaagtgttctaaaattgtagtgatagttgcacaactctggatataatacaagttggtgaattgtatactttaatggacaaattgtatggtatgtgtgagtttgatctcaataaagtgcttttaaaaatggagaataataatat

SEQ ID NO: 461669 - DNA, 2579 bp, Homo sapiens
agcgcctacattaggcagaggacaaagcgatgttataggcaaggccttggaagcatttctctggtctccagggaagagcaggagttccctgggggttggttccaggttcttctatggctgggatggctgtgcagggatcacggctgccagtgttcagtggcttctcttgaacccagctaccgctccttgtcttcttatgaagcagtgcagggatggagtagagggcacaggagatgctggctgtctgccttggggcagaaatggaaacctagttcttgatggcaccttgttgccagtgtctgtgcagctgtgttctggcctgcagggtggaggagaccttagaggaaaccgaggccgagggcaggtgctgggccccatttctgcaccttctacccagccctgacctggcaccctttgtttctgttctgcagtcaactgccaggatgcaagatggtcctgcccccttggggtttagagctggaaagtgggagagcggagaatcctctggggagaatcctcttcatggctgcaggaaagagagactagtccagaagggaccttgaggggtcatctggcactagtgcccctccaggaaggaaggccctggtggccacactgacttcactcttactatgtgcaggcactgttccaggtactttccaagtattaactaatttaatcctcttgacagccatacagggcaaataacattgttattctttacagctgaggaaagagaggcacagagaggttagggaacttgcccaagggcacacagctagtaagaagggacagagctaggattcacactcaggtgatctggctccaaaaccgccactcttaacccccccttcctcttggcctgcagagctggggacagccatctgaagagggccttttgctgctcgccttcactctcagtcttggggccttccccatcatcttgcttctcgccttctggatctcctcgacttttggaagccgcgtgacctacgtcattcagattccaagagagaggtcatcctgggtgattccttagctccaagaagaggcttggtggttgattctccaagattcatggtagcaggctggcctgccactcctcctgctatgatgcctgggcagatcccggacccttcggtgaccacaggctccctgccagggcttggccccctgaccgggctccccagctcggccctgactgtggaggagctgaaatacgctgacatccgcaacctcggggccatgattgcacccttgcacttcctggaggtgaaactgggcaagaggccccagcccgtgaaaagtgagctagatgaggaagaggagcgaaggaaaaggcgccgggagaagaacaaagtcgcagcagcccgatgccggaacaagaagaaggagcgcacggagtttctgcagcgggaatccgagcggctggaactcatgaacgcagagctgaagacccagattgaggagctgaagcaggagcggcagcagctcatcctgatgctgaaccgacaccgccccacctgcatcgtccggaccgacagtgtcaagacccccgagtcagaaggcaacccactgctcgagcagctcgagaagaagtgaccatgggctgggaggaggtggaggaggaggaagaggagaaggaaaagtgacgaagagagaggaggaggggggccccagatggcccttcctttggtgcatgaaaaactgtacaatgaggttcagcacagccagcatcagccgagcttttttgtgaaactcagatcagccacccaggaggaagagcgggctgaggaaacccagagggaccaagcgctgagaccaaagttgaccctcgggtagggttgtcctgcctggggccccacttgaaggaggcaggacagaggcaccgaggccagggagacgcccaacgaggcagccctgggctcttctctggcctcctcaccagggcacccatccaaggaacctccgaacagccaggaaaagccatgagttgcaaccaaaacgcggctgaggatggaactcagaatgaaactgcaacccacctgcccccagccctgcccctcgccctgatgcgaagctggagaggggcgtgctgcggggccctgatgcccccacccacctcggtccagcgcggccctgcccaggaggcggcagccgggcgcaccctcgccagccctgctggagtttgctgtgggcactgaggcgcgggcgcccttccaaagcacatactcaccgaatgtttacagactggctgtcctggcagggctttcaactgcacatgttttttatactttccttttttttttttttttaatattttttacaaaaaaaaagattttatacaagcaatatatatatggatttctataatcactcgatgtgatacagtataaatatgctatggtttgtttgttatgaacagatagccaccagttacggccgttgtgtgtaactcctaagtactgtagtctctgggtgtcgggggtggccagggcgggggcggggtgcatttccatccttgtaaacccttcatagtactcagtcctgtatcgctcagtaaacattgctcttactta

SEQ ID NO: 461670 - DNA, 1840 bp, Homo sapiens
  misc_feature (128)..(128): n is a, c, g, or t
cgagcgctcctgcaccgtggggtggcggagccgggggactgcatggaacccgggacgcccccgcggggagaggagcgcgagcggccgcgggaggagggcgcccaaggcggcgggggaggttaagccgnccgcctgcgggagggacgctcggcggccgcgacggggggcgctggcggcggcggacgctgcagcggcggcggggctggcgccgcggcggctcccgggccgggacaggcctgggcaccgggcggagctccgcggccgggcggcagcggcgcggagcgggcacggcgcctgcagccgggccccggccccgggggcgccgcctccccccgcaccttctgcacggctggcctgccactcctcctgctatgatgcctgggcagatcccggacccttcggtgaccacaggctccctgccagggcttggccccctgaccgggctccccagctcggccctgactgtggaggagctgaaatacgctgacatccgcaacctcggggccatgattgcacccttgcacttcctggaggtgaaactgggcaagaggccccagcccgtgaaaagtgagctagatgaggaagaggagcgaaggaaaaggcgccgggagaagaacaaagtcgcagcagcccgatgccggaacaagaagaaggagcgcacggagtttctgcagcgggaatccgagcggctggaactcatgaacgcagagctgaagacccagattgaggagctgaagcaggagcggcagcagctcatcctgatgctgaaccgacaccgccccacctgcatcgtccggaccgacagtgtcaagacccccgagtcagaaggcaacccactgctcgagcagctcgagaagaagtgaccatgggctgggaggaggtggaggaggaggaagaggagaaggaaaagtgacgaagagagaggaggaggggggccccagatggcccttcctttggtgcatgaaaaactgtacaatgaggttcagcacagccagcatcagccgagcttttttgtgaaactcagatcagccacccaggaggaagagcgggctgaggaaacccagagggaccaagcgctgagaccaaagttgaccctcgggtagggttgtcctgcctggggccccacttgaaggaggcaggacagaggcaccgaggccagggagacgcccaacgaggcagccctgggctcttctctggcctcctcaccagggcacccatccaaggaacctccgaacagccaggaaaagccatgagttgcaaccaaaacgcggctgaggatggaactcagaatgaaactgcaacccacctgcccccagccctgcccctcgccctgatgcgaagctggagaggggcgtgctgcggggccctgatgcccccacccacctcggtccagcgcggccctgcccaggaggcggcagccgggcgcaccctcgccagccctgctggagtttgctgtgggcactgaggcgcgggcgcccttccaaagcacatactcaccgaatgtttacagactggctgtcctggcagggctttcaactgcacatgttttttatactttccttttttttttttttttaatattttttacaaaaaaaaagattttatacaagcaatatatatatggatttctataatcactcgatgtgatacagtataaatatgctatggtttgtttgttatgaacagatagccaccagttacggccgttgtgtgtaactcctaagtactgtagtctctgggtgtcgggggtggccagggcgggggcggggtgcatttccatccttgtaaacccttcatagtactcagtcctgtatcgctcagtaaacattgctcttactta

SEQ ID NO: 461671 - DNA, 1165 bp, Homo sapiens
ggtgctcgggctcgaacttcagtatcgctggatcatgctatcaccagattgaggagctgaagcaggagcggcagcagctcatcctgatgctgaaccgacaccgccccacctgcatcgtccggaccgacagtgtcaagacccccgagtcagaaggcaacccactgctcgagcagctcgagaagaagtgaccatgggctgggaggaggtggaggaggaggaagaggagaaggaaaagtgacgaagagagaggaggaggggggccccagatggcccttcctttggtgcatgaaaaactgtacaatgaggttcagcacagccagcatcagccgagcttttttgtgaaactcagatcagccacccaggaggaagagcgggctgaggaaacccagagggaccaagcgctgagaccaaagttgaccctcgggtagggttgtcctgcctggggccccacttgaaggaggcaggacagaggcaccgaggccagggagacgcccaacgaggcagccctgggctcttctctggcctcctcaccagggcacccatccaaggaacctccgaacagccaggaaaagccatgagttgcaaccaaaacgcggctgaggatggaactcagaatgaaactgcaacccacctgcccccagccctgcccctcgccctgatgcgaagctggagaggggcgtgctgcggggccctgatgcccccacccacctcggtccagcgcggccctgcccaggaggcggcagccgggcgcaccctcgccagccctgctggagtttgctgtgggcactgaggcgcgggcgcccttccaaagcacatactcaccgaatgtttacagactggctgtcctggcagggctttcaactgcacatgttttttatactttccttttttttttttttttaatattttttacaaaaaaaaagattttatacaagcaatatatatatggatttctataatcactcgatgtgatacagtataaatatgctatggtttgtttgttatgaacagatagccaccagttacggccgttgtgtgtaactcctaagtactgtagtctctgggtgtcgggggtggccagggcgggggcggggtgcatttccatccttgtaaacccttcatagtactcagtcctgtatcgctcagtaaacattgctcttactta

SEQ ID NO: 461672 - DNA, 3438 bp, Homo sapiens
agcgcctacattaggcagaggacaaagcgatgttataggcaaggccttggaagcatttctctggtctccagggaagagcaggagttccctgggggttggttccaggttcttctatggctgggatggctgtgcagggatcacggctgccagtgttcagtggcttctcttgaacccagctaccgctccttgtcttcttatgaagcagtgcagggatggagtagagggcacaggagatgctggctgtctgccttggggcagaaatggaaacctagttcttgatggcaccttgttgccagtgtctgtgcagctgtgttctggcctgcagggtggaggagaccttagaggaaaccgaggccgagggcaggtgctgggccccatttctgcaccttctacccagccctgacctggcaccctttgtttctgttctgcagtcaactgccaggatgcaagatggtcctgcccccttggggtttagagctggaaagtgggagagcggagaatcctctggggagaatcctcttcatggctgcaggaaagagagactagtccagaagggaccttgaggggtcatctggcactagtgcccctccaggaaggaaggccctggtggccacactgacttcactcttactatgtgcaggcactgttccaggtactttccaagtattaactaatttaatcctcttgacagccatacagggcaaataacattgttattctttacagctgaggaaagagaggcacagagaggttagggaacttgcccaagggcacacagctagtaagaagggacagagctaggattcacactcaggtgatctggctccaaaaccgccactcttaacccccccttcctcttggcctgcagagctggggacagccatctgaagagggccttttgctgctcgccttcactctcagtcttggggccttccccatcatcttgcttctcgccttctggatctcctcgacttttggaagccgcgtgacctacgtcattcagattccaagagagaggtcatcctgggtgattccttagctccaagaagaggcttggtggttgattctccaagattcatggtagcaggctggcctgccactcctcctgctatgatgcctgggcagatcccggacccttcggtgaccacaggctccctgccagggcttggccccctgaccgggctccccagctcggccctgactgtggaggagctgaaatacgctgacatccgcaacctcggggccatgattgcacccttgcacttcctggaggtgaaactgggcaagaggccccagcccgtgaaaagtgagctagatgaggaagaggagcgaaggaaaaggcgccgggagaagaacaaagtcgcagcagcccgatgccggaacaagaagaaggagcgcacggagtttctgcagcgggaatccgagcggctggaactcatgaacgcagagctgaagacccagattgaggagctgaagcaggagcggcagcagctcatcctgatgctgaaccgacaccgccccacctgcatcgtccggaccgacagtgtcaagacccccgagtcagaaggcaacccactgctcgagcagctcgagaagaagtgaccatgggctgggaggaggtggaggaggaggaagaggagaaggaaaagtgacgaagagagaggaggaggggggccccagatggcccttcctttggtgcatgaaaaactgtacaatgaggttcagcacagccagcatcagccgagcttttttgtgaaactcagatcagccacccaggaggaagagcgggctgaggaaacccagagggaccaagcgctgagaccaaagttgaccctcgggtagggttgtcctgcctggggccccacttgaaggaggcaggacagaggcaccgaggccagggagacgcccaacgaggcagccctgggctcttctctggcctcctcaccagggcacccatccaaggaacctccgaacagccaggaaaagccatgagttgcaaccaaaacgcggctgaggatggaactcagaatgaaactgcaacccacctgcccccagccctgcccctcgccctgatgcgaagctggagaggggcgtgctgcggggccctgatgcccccacccacctcggtccagcgcggccctgcccaggaggcggcagccgggcgcaccctcgccagccctgctggagtttgctgtgggcactgaggcgcgggcgcccttccaaagcacatactcaccgaatgtttacagactggctgtcctggcagggctttcaactgcacatgttttttatactttccttttttttttttttttaatattttttacaaaaaaaaagattttatacaagcaatatatatatggatttctataatcactcgatgtgatacagtataaatatgctatggtttgtttgttatgaacagatagccaccagttacggccgttgtgtgtaactcctaagtactgtagtctctgggtgtcgggggtggccagggcgggggcggggtgcatttccatccttgtaaacccttcatagtactcagtcctgtatcgctcagtaaacattgctcttacttacatagccgccttgcgtggtgtctgcctggggaatgggtgcaaggccctctcagggtcggagactgtttggagcctctgctataggcctgttcattttcacaacagctctcctatttcacagatgaggaagctaaggctcagagacattaagccacctgcagttactattttgagagcagtcagagtgttcgctcactctgcagatgttttctgagggcctgttgtgtgtgccaggccctgagaattcactggaggatgaaacagacctaagtcttgcccttgtggggcctccagtaaggagtgaatcctgtgcttgctccataagttgtctcatttcgtcttcatggcagccttgccagggaacagcacttgtccccaattcacagatggcgaattagaggtccagggaattaaactcgcagacaccatttgttgaagacttattttgtgacaagcagacatagtctcttcccttctcacaagagcacaaactaggcacgattcttctcattttacagatggtttaactgaggctcagagaaggtaagcgacttatccaaggtaacccagctagcaagggatagagctggtgtttgaactctccctccagaggcctgtgactctcctcctgtcaccaacccactatgattgtcctcatggttgaataggaagcttatgaggccacagttatagatttagtttctgggaaggctggatagagttccaggttgtcccatgatcacagagtgaaccaactaccctggtcaatgtgtgtctgacccagggaagggtgtggatggcttctctgccccctcacctcgacagctgaatccctgccacccagggccggagcagctca

SEQ ID NO: 461673 - DNA, 1145 bp, Homo sapiens
agcgcctacattaggcagaggacaaagcgatgttataggcaaggccttggaagcatttctctggtctccagggaagagcaggagttccctgggggttggttccaggttcttctatggctgggatggctgtgcagggatcacggctgccagtgttcagtggcttctcttgaacccagctaccgctccttgtcttcttatgaagcagtgcagggatggagtagagggcacaggagatgctggctgtctgccttggggcagaaatggaaacctagttcttgatggcaccttgttgccagtgtctgtgcagctgtgttctggcctgcagggtggaggagaccttagaggaaaccgaggccgagggcaggtgctgggccccatttctgcaccttctacccagccctgacctggcaccctttgtttctgttctgcagtcaactgccaggatgcaagatggtcctgcccccttggggtttagagctggaaagtgggagagcggagaatcctctggggagaatcctcttcatggctgcaggaaagagagactagtccagaagggaccttgaggggtcatctggcactagtgcccctccaggaaggaaggccctggtggccacactgacttcactcttactatgtgcaggcactgttccaggtactttccaagtattaactaatttaatcctcttgacagccatacagggcaaataacattgttattctttacagctgaggaaagagaggcacagagaggttagggaacttgcccaagggcacacagctagtaagaagggacagagctaggattcacactcaggtgatctggctccaaaaccgccactcttaacccccccttcctcttggcctgcagagctggggacagccatctgaagagggccttttgctgctcgccttcactctcagtcttggggccttccccatcatcttgcttctcgccttctggatctcctcgacttttggaagccgcgtgacctacgtcattcagattccaagagagaggtcatcctgggtgattccttagctccaagaagaggcttggtggttgattctccaagattcatggtagcaggtactatgcgccatgacacctggcctggcacctttctgaccttctctgtggactcctg

SEQ ID NO: 461674 - DNA, 1616 bp, Homo sapiens
cgagcgctcctgcaccgtggggtggcggagccgggggactgcatggaacccgggacgcccccgcggggagaggagcgcgagcggccgcgggaggagggcgcccaaggcggcgggggaggttaaggctggcctgccactcctcctgctatgatgcctgggcagatcccggacccttcggtgaccacaggctccctgccagggcttggccccctgaccgggctccccagctcggccctgactgtggaggagctgaaatacgctgacatccgcaacctcggggccatgattgcacccttgcacttcctggaggtgaaactgggcaagaggccccagcccgtgaaaagtgagctagatgaggaagaggagcgaaggaaaaggcgccgggagaagaacaaagtcgcagcagcccgatgccggaacaagaagaaggagcgcacggagtttctgcagcgggaatccgagcggctggaactcatgaacgcagagctgaagacccagattgaggagctgaagcaggagcggcagcagctcatcctgatgctgaaccgacaccgccccacctgcatcgtccggaccgacagtgtcaagacccccgagtcagaaggcaacccactgctcgagcagctcgagaagaagtgaccatgggctgggaggaggtggaggaggaggaagaggagaaggaaaagtgacgaagagagaggaggaggggggccccagatggcccttcctttggtgcatgaaaaactgtacaatgaggttcagcacagccagcatcagccgagcttttttgtgaaactcagatcagccacccaggaggaagagcgggctgaggaaacccagagggaccaagcgctgagaccaaagttgaccctcgggtagggttgtcctgcctggggccccacttgaaggaggcaggacagaggcaccgaggccagggagacgcccaacgaggcagccctgggctcttctctggcctcctcaccagggcacccatccaaggaacctccgaacagccaggaaaagccatgagttgcaaccaaaacgcggctgaggatggaactcagaatgaaactgcaacccacctgcccccagccctgcccctcgccctgatgcgaagctggagaggggcgtgctgcggggccctgatgcccccacccacctcggtccagcgcggccctgcccaggaggcggcagccgggcgcaccctcgccagccctgctggagtttgctgtgggcactgaggcgcgggcgcccttccaaagcacatactcaccgaatgtttacagactggctgtcctggcagggctttcaactgcacatgttttttatactttccttttttttttttttttaatattttttacaaaaaaaaagattttatacaagcaatatatatatggatttctataatcactcgatgtgatacagtataaatatgctatggtttgtttgttatgaacagatagccaccagttacggccgttgtgtgtaactcctaagtactgtagtctctgggtgtcgggggtggccagggcgggggcggggtgcatttccatccttgtaaacccttcatagtactcagtcctgtatcgctcagtaaacattgctcttactta

SEQ ID NO: 461675 - DNA, 930 bp, Homo sapiens
gcgcgaccggtactgctactagtgcagttgataatagtggacgttccatcataggaagggcagaggttgtcctcactggaatagacacttactccggatatgggttgcctatcttgcacgcagtggtccgccaagattaccatctgtggactcacagaatgccttttctaccatcacggtatcccacacagcattgcctctgaccaagacactcactttacagctaaagaagtgcggcaatggattcatgctcatggaattcactggtcttaccatgttccccatcatcctgaagcagctggattgatagaacggtggaatggccttttgaagtcacaattataatgccaactaggtgacaatactttgcagggctgaggcaaagttctccagaaggccatgtatgctctgaatcagtgtccaatatatggtactgattctcccatggccaggattcacgggtccaggaatcaaagaggggaagtagcactactcaccatcacccctagtgatccactagcaaaatttttgcttcctgttcccgcaacattatgttctgctggcctagaggtcttagttccagagggaggaacgctgccaccagtgtacacaacaacaattccattaaagtggaagttaatattgccacctggacactttggactcctcctacctttatgtcaacaggctaagaaggaagttactgtgttagctggggtgattgacccgggctatcaagataaaatcagtctactactccacaatggaggcagtaacctggggacagttcattgcagaagcaacaacaatatggggaccagatggccctggagcctgaccagttcttcagtgctccgttagttcttacctgatttcctagcctggacatcctaccacctatggatttgaacccaagggccttcatgaccc

SEQ ID NO: 461676 - DNA, 3470 bp, Homo sapiens
  misc_feature (4)..(4): n is a, c, g, or t
  misc_feature (7)..(8): n is a, c, g, or t
  misc_feature (10)..(10): n is a, c, g, or t
  misc_feature (17)..(19): n is a, c, g, or t
ttgngtnntntctcatnnnggtacaacgaatattattggaattggacatgcaaaacattcaagataaccttgctaaacatttaagtgaaggacagaaaagaaagctgacttttgggattaccattttaggagatcctcaaattttgcttttagatgaaccaactactggattggatcccttttccagagatcaagtgtggagcctcctgagagagcgtagagcagatcatgtgatccttttcagtacccagtccatggatgaggctgacatcctggctgatagaaaagtgatcatgtccaatgggagactgaagtgtgcaggttcttctatgtttttgaaaagaaggtggggtcttggatatcacctaagtttacataggaatgaaatatgtaacccagaacaaataacatccttcattactcatcacatccccgatgctaaattaaaaacagaaaacaaagaaaagcttgtatatactttgccactggaaaggacaaatacatttccagatcttttcagtgatctggataagtgttctgaccagggagtgacaggttatgacatttccatgtcaactctaaatgaagtctttatgaaactggaaggacagtcaactatcgaacaagatttcgaacaagtggagatgataagagactcagaaagcctcaatgaaatggagctggctcactcttccttctctgaaatgcagacagctgtgagtgacatgggcctctggagaatgcaagtctttgccatggcacggctccgtttcttaaagttaaaacgtcaaactaaagtgttattgaccctattattggtatttggaatcgcaatattccctttgattgttgaaaatataatgtatgctatgttaaatgaaaagatcgattgggaatttaaaaacgaattgtattttctctctcctggacaacttccccaggaaccccgtaccagcctgttgatcatcaataacacaggtttgcccagctgtgctcctcagataaggtctctcagtatacgtcacgaccctgactatagcttcagagcataccttacccccttgcattcatccactctgagttcagaatcaaatattgaagattttataaaatcactgaagcatcaaaatatacttttggaagtagatgactttgaaaacagaaatggtactgatggcctctcatacaatggagctatcatagtttctggtaaacaaaagacaaagcagttaaatctatcaacgttcaccatcctgagccagaaactctccaagatgtttagaatttccccccaaagtagagatgctaagccaaatccagaagaacccatagatgaagatgaagatattcaaacagaaagaataagaacagccactgctctgaccacttcaatcttagatgagaaacctgttataattgccagctgtctacacaaagaatatgcaggccagaagaaaagttgcttttcaaagaggaagaagaaaatagcagcaagaaatatctctttctgtgttcaagaaggtgaaattttgggattgctaggacccaatggtgctggaaaaagttcatctattagaatgatatctgggatcacaaagccaactgctggagaggtggaactgaaaggctgcagttcagttttgggccacctggggtactgccctcaagagaacgtgctgtggcccatgctgacgttgagggaacacctggaggtgtatgctgccgtcaaggggctcaggaaagcggacgcgaggctcgccatcgcaagattagtgagtgctttcaaactgcatgagcagctgaatgttcctgtgcagaaattaacagcaggaatcacgagaaagttgtgttttgtgctgagcctcctgggaaactcacctgtcttgctcctggatgaaccatctacgggcatagaccccacagggcagcagcaaatgtggcaggcaatccaggcagtcgttaaaaacacagagagaggtgtcctcctgaccacccataacctggctgaggcggaagccttgtgtgaccgtgtggccatcatggtgtctggaaggcttagatgcattggctccatccaacacctgaaaaacaaacttggcaaggattacattctagagctaaaagtgaaggaaacgtctcaagtgactttggtccacactgagattctgaagcttttcccacaggctgcagggcaggaaaggtattcctctttgttaacctataagctgcccgtggcagacgtttaccctctatcacagacctttcacaaattagaagcagtgaagcataactttaacctggaagaatacagcctttctcagtgcacactggagaaggtattcttagagctttctaaagaacaggaagtaggaaattttgatgaagaaattgatacaacaatgagatggaaactcctccctcattcagatgaaccttaaaacctcaaacctagtaattttttgttgatctcctataaactcatgttttatgtaataattaatagtatgtttaattttaaagatcatttaaaattaacatcaggtatattttgtaaatttagttaacaaatacataaattttaaaattattcttcctctcaaacataggggtgatagcaaacctgtgataaaggcaatacaaaatattagtaaagtcacccaaagagtcaggcactgggtattgtggaaataaaactatataaacttagaattttttaaaaatatgacttttttaccttttacaaaacattctcttgctgaaatatgtgaagggtatattcagtagccaagagttgcatgactacttcacaccagttcatgatacaacaggtatacaggttttcttttataaccaactacaactcaagagtcttctgaaagtgttccagaaattgctttaaaactcaaaagtaaggggccaggtgcagtggctcacgcctgtaatcccagcactttgggaggccgaggcaggtggatcacaaggtcaggagttcgagactagcctggccaatatggtgaaactccatctctaataaaaatacaaaaattagccgggcgttggcatttgcctgtagtcctagctattcgggaggctgagggaggagaattgcttgaacccgggaggcagaggttgcagtgagccatgtgctagtgcactccagcctgggtgacagagtgagactctgtcaaaaaaaaaaaaaacaacaaaaacaaaaccaaaaaacctcacaagtattaggaggtccttggacacacaagtagacaagcactcatgttgaaaagtagttccattataccttttgaaaataaagggagtcacagtagtatttgttcagattttttaaattttgcatactcttaacaacattaacttattgttttcagggggtgctaattttccttgtcatctttgaatagttttatgggatttgatattttttaaaatcatttctcccttatataagtgtatgt

SEQ ID NO: 461677 - DNA, 5750 bp, Homo sapiens
ccttgatttgtcactgatcaccaaccttcaaatcctctctcagtttcttcttttttttgtttttgagatggatctcgaaaaaacttcctactgtacacctaccctatataaacctcaagctcccagaagctaatcatgatatgcttactgacatctaaactgcaaagtagttgaaatattaacctcatgtaaacccacttaagtaaataaagctacatacaagcaattctgtgtgcagggtggcccgaggcactttaagggttgtggcttggggattattaagaacctcctagaaataattctttcctaaatggtcagttgatggtgagcgctgaaaagccgatgggtactgctcggccaagggattgaaaaatcggcctttgagaagaacaaagtcaaaatgaaagattagattataatttctctggggtggtgccagttggatctaggaaacttaaactcgtgaaagaatgtgcttagagcagaagatagaagctggtggctgtctctgctcccctctacctctctcccgggtcctgggtctccctagaggggcgtccgacccgcggcagccccactcccagctcgaatccctcccttcaggtcgctccagggcgggcagccaaggtgggcctccccaggcgctgtgatccacatttcacctcctaacaaccggcctctcggccggggttgaggactcagcgaggccttgactccgtgggtctgggcaacagccggctccgccccgccccgccagccgggtccctccccatcccgcgacccaacggtcgttccccgccgccggccccgcccctccctggccgcccgcggcgcgccggcgcctgcgcagtcgccccagagcgccccgaccgggatggcggccgttttggagtcgctgctgcgagaagaggtgtcggtcgcagccgtcgtgcggtggatcgcgcgcagcacccagggttcggaggtaacagcggtgacacgcccccaggtctgactcgaagccggttcccgcagtggagtccagccctccagtccccttcctctagggcgcctggctgccagccgggccgagtgcactccaactgggcgccgctgcccgggccgcccacccgaggcgcgccctacggccccggctgctcacggcccgcgggccggcggctgaccctctcgcccctccacctgtgcttctgccctaggataacgctggggaggcggccgcgctgagctcactccgggccctgcggaaagaattcgtaccgttcctgttgaacttcctgagggagcagagcagccgcgtcctcccgcaggggcccccgacccccgccaagaccccgggcgcctcggcagccttgccagggaggccgggaggcccgccgcggggtagccgcggggcgcgcagccagcttttccctccgaccgaggcccagagcaccgctgccgaggcccctctggcccgccgcgggggcaggaggcggggcccggggccggcccgcgagcgtggaggccgcggcctggaggagggggtcagcggggagagcctgcccggagccgggggccggaggcttaggggctctggcagccccagccgccccagcctcacgctgtctgatccgccaaacctcagcaacctggaggagttccctcccgtaggctcggttccccccggccctacaggcaggacgaagccttctcgcaggatcaacccaactccggtgagcgaagagcggtcactctccaagcccaagacctgcttcacctcacccccaatcagctgtgtccccagttcccaaccctcagccctggacactagcccttggggccttggccttcccccagggtgcagaagtctgcaagaggagcgagagatgctcaggaaggagcgctctaagcagctgcagcagtcacctacccccacctgtcccaccccagaattggggtcgcccctccccagccggacaggaagcctcacagatgaacctgcagaccctgccagagtgtcttcccgccagcgcctggagcttgtagcccttgtttactcctcgtgcattgctgagaacctggtaccaaacctcttcttggagcttttcttcgtctttcagctcctcactgcccggaggatggtgactgccaaggacagcgaccctgaactaagtccagctgtcctaggtcaggttctttccaacctggacaaagggaccttgaagctgctggctgagaatgagcggctgctgtgcttctcaccagctctgcaaggccgccttcgagctgcctatgagggcagtgttgccaagccagagactgacaatcgtgccaacttctccagtgaccgagcctttcatacttttaagaaacagagggccatgatgggtcagctctccgcagcctgcagccacagccactttgttcggcttttccaaaaacaactactccagatgtgtcagagccctggtggtgctgggggcaccgtcttgggcgaggccccagatgtgttgagtatgctgggagctgacaagctggggcggttgtggcgcctacaggaacggcttatggctcctcagagcagtggggggccctgcccaccccccaccttcccaggctgtcaaggcttctttagggacttcatccttagtgccagcagcttccagtttaaccagcatctcatggacagtctgagcttgaagatccaggagctcaatggtcttgccctgccccagcatgagcccaatgatgaagacggggagtcagacgtagactggcagggtgagcggaagcaatttgctgtggtgcttcttagcctgagacttttggctaaattcctgggctttgtggctttcctgccataccgggggcctgaacctcccccgaccggtgagcttcaggactccattctggccctcaggagccaggtccctccggtcctggatgtgcggactctgctgcagcgagggctgcaggcccgccgggcggtgctcaccgtgccctggctggtggagtttctctcctttgctgaccatgttgttcccttgctggaatattaccgggacatcttcactctcctgctgcgcctgcaccggagcttggtgttgtcgcaggagagtgaggggaagatgtgtttcctgaacaagctgctgctacttgctgtcctgggctggcttttccagattcccacagtccctgaggacttgttctttctggaagagggtccctcatatgcctttgaggtggacacagtagccccagagcatggcttggacaatgcgcctgtggtggaccagcagctgctctacacctgctgcccctacatcggagagctccggaaactgctcgcttcgtgggtgtcaggcagtagtggacggagtgggggcttcatgaggaaaatcacccccaccactaccaccagcctgggagcccagccttcccagaccagccaggggctgcaggcacagctcgcccaggcctttttccacaaccagccgccctccttgcgccggaccgtagagttcgtggcagaaagaattggatcaaactgtgtcaaacatatcaaggctacactggtggcagatctggtgcgccaggcagagtcacttctccaagagcagctggtgacacagggagaggaagggggagacccagcccagctgttggagatcttgtgttcccagctgtgccctcacggggcccaggcattggccctggggcgggagttctgtcaaaggaagagccctggggctgtgcgggcgctgcttccagaggagaccccggcagccgttctgagcagtgcagagaacattgctgtggggcttgcaacagagaaagcctgtgcttggctgtcagccaacatcacagcactgatcaggagggaggtgaaagcagcagtgagtcgcacacttcgagcccagggtcctgaacctgctgcccggggggagcggaggggctgctcccgcgcctgtgagcaccatgctcccctcccctcccacctcatctccgagataaaagacgtgctctccttggccgtggggccacgggaccctgacgagggagtctccccagagcatctggaacagctcctaggccagctgggccagacgctgcggtgccgccagttcctgtgcccacctgctgagcagcatctggcaaagtgctctgtggagttagcttccctcctcgttgcagatcaaattcctatcctagggcccccggcacagtacaggctggagagagggcaggctcgaaggcttctgcacatgctgctttccttgtggaaggaagactttcaggggccggttccgctgcagctgctgctgagcccaagaaatgtggggcttctggcagacacaaggccaagggagtgggacttgctgctattcttgctacgggagctggtggagaagggtctgatgggacggatggagatagaggcctgcctgggcagcctccaccaggcccagtggccaggggactttgctgaagaattagcaacactgtctaatctgtttctagccgagccccacctgccagaaccccagctaagagcctgtgagttggtgcagccaaaccggggcactgtgctggcccagagctagggctgagaagtggccctgccttgggcattgcaccagaaccctggacccccgcctcacgaggaggcccaagtgcccaatgcagaccctcactggttggggtgtagctgggtctacagtcagacttcctgctctaagggtgtcactgcctggcatcccaccacgcgaatcctagaggaaggagagttggcctgatttgggattatggcagaaaagtccagagatgccagtcctggagtagaagaggtggtgtttgtttatctcttggatactaaatgaaatgaggtgtgtgggcttgtcaacacagaattcaagcctcatttgctatcccagcatctcttaaaactttgtagtcttggaattcatgacagaggcaaatgactcctgcttaacttatgaagaaagttaaaacatgaatcttgggagtctacattttcttatcaccaggagctggactgccatctccttataaatgcctaacacaggccgggtctggtggctcatgcctgtaatcccagcactttgagaggcctgaggtcggcggactgcctgaggtcaggaattcaagaccagcctggccaacatggcaaaaccccatctctactaaaaataaaaaaattattagctgggcatggtggtgtgtgcctgtaatcccagctactcaggaggatgaggcaggagacctgcttgaacctggaggtggaggttgcagtgagccgaggtcgcaccactgcactccagtctgggtaacagagcgagactttctagaaaaagcctaacaaacagataaggtaggactcaaccaactgaaacctgactttccccctgtaccttcagcccctgtgcaggtagtaacctcttgagacctctccctgaccagggaccaagcacagggcatttagagctttttagaataaactggttttctttaacaagggcttgatgtctaatcattgtcacctgtcttctccctttagaaggctgcagtctcgggtgggctgtaggtggagcgctgtaattgtggctttgctctgtgcattacaagttcttacttgggctatagttgagcaacttacctggttgctgtttaccctgcaaagcaatgccaagttcatgggaaactgtacatacatgtaaactgaatctttgaaacagctatgagtgggtatt

SEQ ID NO: 461678 - DNA, 1713 bp, Homo sapiens
ccttgatttgtcactgatcaccaaccttcaaatcctctctcagtttcttcttttttttgtttttgagatggatctcgaaaaaacttcctactgtacacctaccctatataaacctcaagctcccagaagctaatcatgatatgcttactgacatctaaactgcaaagtagttgaaatattaacctcatgtaaacccacttaagtaaataaagctacatacaagcaattctgtgtgcagggtggcccgaggcactttaagggttgtggcttggggattattaagaacctcctagaaataattctttcctaaatggtcagttgatggtgagcgctgaaaagccgatgggtactgctcggccaagggattgaaaaatcggcctttgagaagaacaaagtcaaaatgaaagattagattataatttctctggggtggtgccagttggatctaggaaacttaaactcgtgaaagaatgtgcttagagcagaagatagaagctggtggctgtctctgctcccctctacctctctcccgggtcctgggtctccctagaggggcgtccgacccgcggcagccccactcccagctcgaatccctcccttcaggtcgctccagggcgggcagccaaggtgggcctccccaggcgctgtgatccacatttcacctcctaacaaccggcctctcggccggggttgaggactcagcgaggccttgactccgtgggtctgggcaacagccggctccgccccgccccgccagccgggtccctccccatcccgcgacccaacggtcgttccccgccgccggccccgcccctccctggccgcccgcggcgcgccggcgcctgcgcagtcgccccagagcgccccgaccgggatggcggccgttttggagtcgctgctgcgagaagaggtgtcggtcgcagccgtcgtgcggtggatcgcgcgcagcacccagggttcggaggtaacagcggtgacacgcccccaggtctgactcgaagccggttcccgcagtggagtccagccctccagtccccttcctctagggcgcctggctgccagccgggccgagtgcactccaactgggcgccgctgcccgggccgcccacccgaggcgcgccctacggccccggctgctcacggcccgcgggccggcggctgaccctctcgcccctccacctgtgcttctgccctaggataacgctggggaggcggccgcgctgagctcactccgggccctgcggaaagaattcgtaccgttcctgttgaacttcctgagggagcagagcagccgcgtcctcccgcaggggcccccgacccccgccaagaccccgggcgcctcggcagccttgccagggaggccgggaggcccgccgcggggtagccgcggggcgcgcagccagcttttccctccgaccgaggcccagagcaccgctgccgaggcccctctggcccgccgcgggggcaggaggcggggcccggggccggcccgcgagcgtggaggccgcggcctggaggagggggtcagcggggagagcctgcccggagccgggggccggaggcttaggggctctggcagccccagccgccccagcctcacgctgtctgatccgccaaacctcagcaacctggaggagttccctcccgtaggctcggttccccccggccctacagggtgagactcagctctcatgcaggagatgggtaccacga

SEQ ID NO: 461679 - DNA, 392 bp, Homo sapiens
gtcacctacccccacctgtcccaccccagaattggggtcgcccctccccagccggacaggaagcctcacagatgaacctgcagaccctgccagagtgtcttcccgccagcgcctggagcttgtagcccttgtttactcctcgtgcattgctggtgagtgagagcggagggagcgggagtggagacacttgtagaacttatgggtaagagaattggtaaggcacttggaactgagccttggctccaaatggtgcccataccatgggctttctttttgtatctatctagagaacctggtaccaaacctcttcttggagcttttcttcgtctttcagctcctcactgcccggaggatggtgactgccaaggacagcgaccctgaactaagtccag

SEQ ID NO: 461680 - DNA, 2186 bp, Homo sapiens
agaggaaagtgactatacctatctgcagggactgcagctggctgcccagaggaggtggcatctgaattgggtccccaaggatccgtaaatattggccaggtgataaggcagaagcaagaacaagctaatcaggaggaatacgcaggggaaatcccagagctggtaacaagcagctcttgtgtgcaggagctgagagagacccaaggcagggtctctctcaaggctgaaatcagtgtgtcaaccagggctgggagctcatctgaaggctcaacaggggatgtatccactgcaggcctcttctcaggatattgttgacacaatttagctccttgagggtgctggactgagggcctcacttcctagatgactgttggccagtggccaccagcaattctttgccacatgagcctctccagtattgcagcttgcttcatcaaagtgtgcagacaagaagacaaaaaagagagctgcaagaaagacggaaaccaagatctcatgtaacctaatgacagaggacgaagtcttgctctgttgaccaagctggatggagtgcagtggtgcgatcacaactcactgcaaccttgacctcctgggcccaagcaatcctcctgcttcagcctaccaaagtgttgggattacaggaatgagctaccatgcccagccaaaagcccagggttttgttggatggtagtacaaggagatgctttctcactgcacccccacctcccatctttgaggataaacaaggaagcacgtcttcccaagaggcaggggctatcttgaaaccatgaagaaagactcatcctgagaagaacgcaaacaccaaacaagtggaacctggagatactgagagaaacagggtcctggttgtgtcccctgagctgctgaacttttcagatgcacaaacccattacatttttttattaaaaatggtttgagtccggttttctcttacttgctcctaaagtatcaaaataaagactagagaggctctgctatgagcagagtggggggaatatgggaaagaagatgagaggcaggaaacagtatgagattgtagctaaggagtgcattttaacaaatatgaatgctctttccaagccgttattgttcctagctctaagttcagaaggaatgtctccatttcctccgcaacaaccacaacacactacaagtcaatgtctagtccgtgaaagtgtgaaatccacagcgtccttaggcaaggacctaactccacaagaagactccatttatttaggcagtattaataaggatccacaagatgcccatggaagggatgctgctgggatgaaggaacgaagatcactggtctcaaacagcccacagtatggtgtggatgcaaacgtgaaaattatcacacaagacagaaataaagaaatgctgagagatgaacagacaaagaagcctataagaggaaaccctaaaacactttcaaaattctgtccttcctgccaaactcagggatacatgaactttccctccaccacagtggagtgtgcagtgcagaaaagtctgcacattggggaagacaaactaatttgtgcttttatcattgagtgcatctgtgtagtattaaatcacgaaatatgagccgcaaatagggaagactctcttcctgaattgtgacctttgagcaattacagatggagagaaacactctccatagtgtcataagaagatcctgatgtcaatgaattttgacatatgtatgtatatatatatgtgtgtgtgtgtatgtgtgtgtgtgtgtatatatatatatatacatatatatacacatatactcagaaatggaattgctgtagttttaaccattataaaatatccctaaattcattaatatttgttttttaagtagcactgttaaatgtacattaaagaaaatttagatgacaatgtcacccatttatgccaccttctcctctagtttcttaattcaagtttaagcccagggcttacataagtcagtgtctgaagtttcactcaccttaggccattggcattgatgcagagcagtgtggagacatgctgttttccataatttctgttcatgaccttcattctttaatgccttaattcaaggcatattgaagaacattggcactctgtctgagtttcctatttggttaaactcaacattgtgtttttttcttaattgagtttct

SEQ ID NO: 461681 - DNA, 1009 bp, Homo sapiens
gttggaatgggataggtagttccccgtttccaggaccccagacggcctgctgggacagtgtatatgagtccggaatgggctggaccagggtcaggctagcccagacttcaggtacgggctgtgatgacgaggagtgggctagtctcccgggtcggtcaccgctgaactctcagagacaatcaagctttcgatgatcatgtgatgaggtttccagtcagttccaggtgaagacaccactggccatcaagaagctaccctctccccaccagacagagcaggatgagagttctataatcctcaataggaggaagcactcaattgaacaagtgcaggaaccagctggctgcctcagcactgacagaagcaaattccatttgcttggacccactgcattccatcccttgtggaagagagcatgtaagcaagtgagtgcaggaactggctggctgctttggtgctggcaggagcaaacaccatgaaggccccatggcagagtccaggacaggaccttcaggcctctgaaaaaaaaaggatcaaagaactgaaactcaccagatcacctcaccagatgctggacccctcattcaccatttttccttctaacagtcaggcccctctgctgcaggtctgctggagtttgctggaggtccactctagaccctgtttccctgggtatcaccagcggaggctgcagaacagcaaagattgctgcccgttccttcctctggaagctttgtcccagaggggcacctgccagattccagctggagctctcctgtatgaagtatctgacaacccctgctgggaggtgtctcccagtgctctgtccaagggagatgggagttttatctataagcccctgactggagctgctgcctttctttcagagatgtcctgcccagagaggaggaatctagagaggcagtctggctacagtggctttgctgagctgcagttgactctgcccagttcgagcttccaggcagctttgtttacgctgtgaggggaa

SEQ ID NO: 461682 - DNA, 3979 bp, Homo sapiens
  misc_feature (1)..(1): n is a, c, g, or t
  misc_feature (8)..(8): n is a, c, g, or t
  misc_feature (11)..(11): n is a, c, g, or t
ngcccatntcncagaacccttcacgcagtaggtgtcagcatgttcgctgagtatatgaatgattgcaatatattgatttttataagtctgtgtgttggcattaagaggtggggactctggaaggtgagtaggtcctgggggtacagccctgcagagaacatcgagattgtagccaagcaaacatttgataaagagatgagtatggtagagggaagccagatgctgctaatcaagacaactgaggaaggacctccggaggcaatctttggggctgccccacccatcttaggcccagaatgccaggaccctggggccagaacaatttcaagtctctgctccctgcaatcggatgcagtgctcctcggctgccccagctgtggctccagtgggtccaggtgtagctcagatggtctctctggaggacacaagcaggaagccttcgtgacctccacgtggtgccaactctgcaggcacacagagtgcaagagctgtgagaatgtggccacctccacccagcttccaagggatgccctggagaacttctgtgaccaggcacagacctgacacaggagcagggccaacaacagaggccccacaagggcagtgttgtgggagaggggctcctcactccgtaagaatagaaatgtctgtcttatgcctgtcccaccattgtattttggaagcacacaatttatttgatttcataggctcatactgggagagaaatgtgcctcaggatcaatcatacctggactctcacttgatttagatgatatttagatgagactgtggactttagactttttaggttgattttggaaagagttaagacttttgggggctattagaatggaatgaatgtattttgcatgtgagaaggatataaattttgggaggttaggggtgaaatgttacggactgaatgtgtccctccaaaattcataagctgaaatctaatccccaatctgctggtattgagaggtggtgcctttgggaagtgattaggtcattagagtgatgtcctcatgagtgggattagtgcccttataaaggagggagcatctgtcctttctgctgcgtgaggacacagcagcagggcaccatctatgaatcctggatctcatcagacaccaaatctactagtactttgatcttggacttaccagcctctagaacagtgagaaataaatttctgtcatttataaattatccagcctaaggtatttttgttataatagcccaagtggactaagacagtaactgattcacagaaatttggttttcaagacgttttagaccaagagaacccctaaacatataggtggatgtaagctggttaacttatcttgcgctgactgtgctgagcattatcagtttctaatgatatcaagctacttagaaagcaatgaagctgaaagttcttctaaaacaaaatgagaactttgaagaagctttttaaaagtaagttttgtttgttttagttcccctgggtaggcaaacatataaacagagctccattgtctcttcaaaacccacttaattaggttttctcaagtttatatggaaaacacctttgtggagtttgacacatgccatacttcatattgttttaactactcttcttcattttgaaagatacagatggtactaaaatgagttggattgattctcttgagcaaaggcaatgctaacaatacaaggaaccaatcctcatctacaaaacaggttttagttttgacaaggtttgtacctatgagcttgttctctggtcctcctccccacctcccaattaacagaaggtaaccaatactatgcaataaacaaatgggaatgaatttatgataaagggcaaagctgaacaactgtttggatgggacagtcagctataaaactgaaaactgctgaagccaactcactggttaggaaaaaagttggaaatgcgtgggtgtgttctcaaggtcttaggaaaattccggaagtccagcagatgttttctgttaggaggcaatggaagccccaagagctacatcttcttcttcattctcttaattataagtttacttatgaaatcattttttttcttaagtatctctctgccaatacttacaaaatagaaggctggccaaagtagtcaactcatgagccttcctgtgtaaccagaatatgtgtacgtgggcaggaaatctctataggaagcagaaatctaggtccatcattataaatgctttatcttctgaataactcttttagttactgaagtggaattacaacttttttaatcttatcaattataaaagtatattcaggtttcattgattacaatatttttcccccttttggaaaatgatgtaattaatagtcatcatagtaatttttctgtttttttggttctctatataaacattaataaatggggatagattcaaggaatcagaagttaatgaagcatattttaaacatttagactttctgctgtcttaattttgaatacgtgtttgaatacctatgggaggctacttttcttactgcatttgctttactagcttctgtgttatgaaatctaaccatcaactctttcagggagaaggaatgaacatttccgtctgaccaaagtttcaaaagtcaagaggtgaattaatgttcagaaaatacttaaaatcttatttaaatttctcatctgcttaagaactttttcacttttttttctgtagtaggtatctgaagaccaactttttcacttttatcacatatgcaaattgatctccaaaaggtttattagagattgggtctatatatcaaaaggtactttatgaatgaattaagaagggagtttcctatctaggctggctagttagtgaggttgcagaagcagtcagcataaaaactttgttaaagttcaggaatccagctggctgtatgttttggagaatttgtctgattactacacatggttactagatctatcgtgaatatggaacaaattcaagaacattagattctcttggccttgtggagattactcaattcatctagaattttaatcgagcatcttacagatggaacttctgcaattatcaagcttcagaagccatgaccaaagcaaacctcactcaaatcttctcttaccctcaaaacagaatgttttcccctaaaagaagcaggtggcctatcatattcctgccaggaagatcctgcagggcaggcataatcagattaaaatcaattagatgaactgtgtgggaatttgcattttaaacattctcatggcacatccccccaaatttagacaatttttgaaaagttccaatattttcatatatttcacaaaactggattgtgtcaccaagggaatgctatgcatctggagaataaaaggtttcacaggacctaggctcagttccacacatttatttttgtcctctgtgggaaagaaaataggtaaagtggttcagagatgcaagactttaggtctggggccaaccaaactcaaagagctgctttaaagcccattatgggtaaagctagacttcttcattctcagaccaagtcaatacgggagctcacttatgccccacatgccagcatgaatatgtcactaatatatgatggccatcaaggttctctggttgttttgtgaatgttatctctcaacaaggtgtctgacatcacaggctctgagggcttacgggaggaacaagattttatctttgctctccttggtgatctagacaagtggtttaaccttgggctcctgtgcggatgtgtgagttaagtagctagtgagggaaaaatgtgataggtgttcaataaattttcttcacctttctccccaatgccctttcattcctttgacctgcttcttaaacatccttcacaatagttaccagaatactgggcacagagtggcctggctgcttaacaacttacacattctcccagttttcctgccaataaaaaaagcttcttacaactaaaaacc

SEQ ID NO: 461683 - DNA, 1931 bp, Homo sapiens
  misc_feature (3)..(6): n is a, c, g, or t
  misc_feature (9)..(10): n is a, c, g, or t
  misc_feature (13)..(14): n is a, c, g, or t
tgnnnntcnngcnnttcagagcccctcgcctttatcctgccaaagagagagacgcttttcaccctggatgaccaggcgctggggcccgagctcacagctccagcaccagagcctcccgccgaggagccacgcctggagcccgcgggcccagcctgcccggagggagggcgagcggagacgcaggccgaaccgcccagcgtggggccctagccggcgtcccctgcctccagaacgcggtgcgtgaggttcccggcgcggggtggccaggactgcctcgccctggaaggtccggggcgggttcgggaggcgggaaggcgctcccgggaggagagcggaagggggcggtgctcactgccagtctaagcaggaaggcggggatccagtcgcggcttcgctgtgtgctggccgacggcgcttcccggcgtgccccgcgctgcggccggaaggggcgggccgggtcactgttaagggggccgccatggcccggctgtggggcgcgctgagtctttggccactgtgggcggccgtgccgtggggcggggcggcagccgtcggtgtccgggcttgcagctccacggccgccccggacggcgtcgagggcccggcgctgcggcgctcctattggcgccacctgaggcgtctggtgctgggtcctcccgaaccgccgttctcgcacgtgtgccaagtcggggacccggtgctgcgcggcgtggcggccccggtggagcgggcgcagctaggcgggcccgagctgcagcggctgacgcaacggctggtccaggtgatgcggcggcggcgctgcgtgggcctaagcgcgccgcagctgggggtgccgcggcaggtgctggcgctggagctccccgaggcgctgtgtcgggagtgcccgccccgccagcgcgcgctccggcaaatggagcccttccccctgcgcgtgttcgtgaaccccagcctgcgagtgcttgacagccgcctggtcacctttcccgagggctgcgagagcgtcgccggcttcctggcctgcgtgccccgcttccaggcggtgcagatctcaggtgcgggcggcggggaccggggctgctggagcagcgcgcgcgtctcttctgcccgactccgcgagagcgcagaagtggtcgcgctctacagtgagctcgataacctaattaccagagttgggaaccaggttgaacgcttggtaatggaccgagatgagggacgttttccagttagaagaggagctgctgtctacatttgccatctgctgttgcctcttgtcaatgggaacagccaggaccgggggcagggggctgtaacttcctttgcagggctggaccccaatggagaacaggtggtgtggcaggcgagcgggtgggcagcccgcatcatccagcacgagatggaccacctgcagggctgcctgtttattgacaaaatggacagcaggacgttcacaaacgtctattggatgaagactgagctggaggaagatgtcagaaatgtttgccctgaaatcagttacggacaaaatgttggctacaacttgaggagaaaaatcacccccaaaggagtggacatttcctaacaattctgtatggaggaaggtggggtaattgcattcgtctgcagtagacacgagttcctcggacctgtataatctcccaaagccaaggtttggtaataatgtagtccccaaatacctgaaagctgtctttaaaaatgcaggacttgtcaaggtgtttaagcagtaggaatgaggaaacaacgttctgattcaagtaaatgtaactagaagtaaaaatttaaaaacttgtaagctcactaaagtgaagctctgcagacacggttcatatcctggtggctgagggcacataaccaagaacttacacaagcacccccaagccacaaagatcccagctgctatggttgaggggtaa

SEQ ID NO: 461684 - DNA, 2334 bp, Homo sapiens
aggagctgcagaccagggctgggactgaccccaggaatgtctcccccggctgcaggccacactcaacctccagcaattcatcaaaattaccatttatgcattccgtcctaccaatttctggctctagtgatttctgctccagggctaatcatgtggtccttgagaatgaaacagattctgatcctacacctaatgactgttttgaaccagtgtctccagaattctgtgggaaagaagccatcagaatcaaaaatcttaaaaaagaatatgcagggaagtgtgagagagtagaagctttgaaaggttcagtcactgtctataatcacacactttcaagaatggctgatatagaaaatatcagcaagttcactggattttgtccacaatccaatgtgcaatttggatttctcactgtgaaagaaaacctcaggctgtttgctaaaataaaagggattttgccacatgaagtggagaaagaggtacaacgagttgtacaggaattagaaatggaaaatattcaagacatccttgctcaaaacttaagtggtggacaaaataggaaactaacttttgggattgccattttaggagatcctcaagttttgctattggatgaaccgactgctggattggatcctctttcaaggcaccgaatatggaatctcctgaaagaggggaaatcagacagagtaattctcttcagcacccagtttatagatgaggctgacattctggcggacaggaaggtgttcatatccaatgggaagctgaagtgtgcaggctcttctctgttccttaagaagaaatggggcataggctaccatttaagtttgcatctgaatgaaaggtgtgatccagagagtataacatcactggttaagcagcacatctctgatgccaaattgacagcacaaagtgaagaaaaacttgtatatattttgcctttggaaaggacaaacaaatttccagaactttacagggatcttgatagatgttctaaccaaggcattgaggattatggtgtttccataacaactttgaatgaggtgtttctgaaattagaaggaaaatcaactattgatgaatcagatattggaatttggggacaattacaaactgatggggcaaaagatataggaagccttgttgagctggaacaagttttgtcttccttccacgaaacaaggaaaacaatcagtggcgtggcgctctggaggcagcaggtctgtgcaatagcaaaagttcgcttcctaaagttaaagaaagaaagaaaaagcctgtggactatctttatccctcaacttttggaacatctattctacgagtcatatcagaaaagttacccgtgggaactgtctccaaatacatacttcctctcaccaggacaacaaccacaggatcctctgacccatttactggtcatcaataagacaggtgaacatggggctgaaatgcagctgttaaatgttgttcttgttgagagattccccccaaaaaacatgaacagccaagaaaaaaataaactctggtcaaccattgataactttttacattcactgaggcgacagaacatagctatagaagtggatgcctttggaactagaaatggcacagatgacccatcttacaatggtgctatcattgtgtcaggtgatgaaaaggatcacagattttcaatagcatgtaatacaaaacggctgaattgctttcctgtcctcctggatgtcattagcaatggactacttggaatttttaattcgtcagaacacattcagactgacagaagcacattttttgaagagcatatggattatgagtatgggtaccgaagtaacaccttcttctggataccgatggcagcctctttcactccatacattgcaatgagcagcattggtgactacaaagtaagaagagttaaagtcttcacatgttttttatatctagagaacccttcccacacccttacgactataaatttacatgcaagtggtaaatctaatttttgtacttgatgcaatgaataatcaagcactttaataataattgtcaaatatgaagaaaatgctatctttctgaaacaaataaaaaagctcattcccagctacggatttcaggcctctacccttctgcatactggtttggccaagcactggtggatgtttccctgtactttttgatcctcctgctaatgcaaataatggattatatttttagcccagaggagattatatttataattcaaaacctgttaattcaagtaatgtagccagtttctgaacttaataaaaatggaatcatgtagaaggcataattatatatctgtatataatc

SEQ ID NO: 461685 - DNA, 7019 bp, Homo sapiens
gaatacaaaccaccttctccaagcagggcatcaaaaaggcatcagagggttctggcaactagggtcagaaatattaccaaaaagtcctctcacttgcctcttggcagtcctttgaagagacaacaaaatacaagggacccagacaccatggtcccactcacagatttcagcccagtaatggatcattcaagagaaaaagacaatgatttatctgacacagatagcaactactcattggattctctctcatgtgtctatgccaaagccctgatagagccactgaagccagaggagaggaaatgggatttcccagagccagagaactctgaaagtgatgacagccaactatctgaggactcactggctgagaagaggtaccaaagccccaaaaacaggctagggggcaatcgtcccaccaacaaccgtggccaacccaggaccagaactagagcttctgtgaggggcttcactgcagcctcagacagtgacctacttgctcaaactcataggagcttctccttggatagcctgattgatgcagaggaagaactgggggaagatcagcaagaagaacctttccctggttcagctgacgagatacccacagagactttttggcacctggaggactctagtctgcctgtaatggaccaagaggcaatatgcaggcttggtcccatcaactacagaacagcagctaggctggatgccgtcctgccaatgagcagttcgttttaccttgatcctcagttccaaccccattgtgagctccaaccccattgtgagctccaaccccattgtgagctccagccccattgtgagcaggctgaatcacaggtagagccaagctactctgaacaagccgactctctccaaggcatgcagctttcaagagagagcccactgatgtccatggattcctggttttcctgtgactctaagatcaaccccagcagccccccaggaatagtgggttctttatgtccaagtcctgatatgcaggaatttcactcctgtaagggggagaggcctggatactggccaaatactgaggaactaaagccatcagatgcagaaacggttctgccatatagctccaaactgcaccaaggcagtactgagctcctctgcagtgcaagagatgagcacacagcctctgctgctgatacgtctaggctgtctctctggggaattcaaaggcttattcaaccaggagctgatggcacctttcagggcagatgtatccctgacatgacccagcagggcagctctgaagcatcccacaattctagcgtatcaaacgtgctggctgcctctgccaccaccttgactcatgtaggcagcacccatgaaagggattggtctgcccttcagcagaagtacctccttgaactctcttgtcctgttttggaggccataggagcacccaagccagcttacccctaccttgaggaagactctggttccctggcccaagcttctagcaaaggaggagatactctattgccagttggccctagggtatctagcaatctgaatctcaacaactttccagtccatctgtccagaatcaggcgtttgagggcagagaaagaacaggacagtttaaatgccaaattagaaggtgtttcagatttctttagcactagtgagaaagaggcgagttatgacgaaacttattcggcagacttagaatcattgtctgcttctcgatctacaaatgcacaggtctttgcaacagagaacgcgataccagattccatgacagaagcatgtgaagtcaagcagaacaacttggaagaatgccttcagagttgcaggaaacctggactgatgacttcctctgatgaggattttttccagaagaacgcttgtcacagtaatgtcactacagccaccaaagcagaccattggtcccaaggctgggctcctctcaggaaaaatagtgcagtccagccagggcaattaagtcccgacagccactacccactagaggaagagaagacagattgccaggagagctctaaggaagcagttagaagacacataaatgtttcctttgcccttccttcaggtccagagctataccttcactctgctccctggaatccattgtcatcttccctgcagcccccactcttggaaacattctatgtgaccaaaagcagggatgccctgacagaaactgccttagagattccagcttgcagagaagtaagggtaccctccccaccccccagggaagcctggggctttggtcacaaccaccaagctctccaaggtgcttatttgaagaataatttgccagtgctgttacaaaaccagaattctaagattgcctcatctcagcaggtcacagctgagataccagttgatctgaataccagggaagtcatcagagaatcaggtaaatgccctggaaatattacagaagaaagccatgattcagtttattcttctgttactcagaacagacattttctcccctctaccagcacaaaagtatgtgaatttgaaaaccaagttgtaattttaaataaaaaacacagttttccagcacttgagggaggagaggtcactgctcagtcctgttgcggtgcttcctcagacagcactgagtctgggaagtctctcctctttcgtgaatctgaggcacgagaggaagaagagctggatcagaatacggttctgaggcagaccatcaatgtaagccttgagaaagacatgccaggggaaagtgctgtttctttgaaatccagatcagtagatcgtagagtaagcagcccagtgatggtggcccagggtggtggcccaacccctaagtgggaagggaaaaatgaaactgggcttcttgaaaaaggtcttcgtcccaaagatagctcagaagagtttaagcttccaggtacaaagcctgcatatgaaaggttccagttagttgcatgccctcaggaaagaaaccccagtgaatgcaagtcacaagaaatgttaaatcccaacagagaaccttctggaaagaaacagaataaaagagttaataatactgatgaaatggctaggctaattaggagtgtaatgcagctggaaaatggcatcttagaaattgaatctaagcagaataagcaggttcatgcttcccacacaccaggaaccgataaggagttggtgttccaggaccagaaggagcaggagaagactgaccatgcctttaggccagacagctctggaaaccctttgccctctaaggatcagccatcttctccaagacagacagatgatactgtctttagggatagtgaagctggagcgatggaggttaacagcattgggaaccatccccaggtccagaaaatcaccccaaaccccttcaggtcaagggaaggtgtacgagagagtgaacctgtgagagagcacacccacccagctggatcggacagacctgccagggatatttgtgattctttagggaaacacacaacttgcagagagttcaccaacacttctcttcacccacagagaatgaaagcattggctagagctctgccattgcaacccaggctagagaggtcttctaagaataatggccagtttgtaaaagcatcagcaagtctcaaagggcagccttggggcttaggaagtcttgaggaattggagactgtgaaaggttttcaggaaagccaagtagctgaacacgtaagtagttccaaccaagaagagccaaaagctcaaggtaaagttgaagaaatgcctatgcaaaggggaggcagccttcaggaagaaaataaagtgactcagaaatttcctagtctcagccagctttgtagggacacgtttttcaggcaggaaactgtcagcccattactaagccggacagaattctgtacagctcctcttcaccaagacctgagtaataccttgcccttgaattctccaaggtggccaagaaggtgtcttcatgtacctgttgctctaggcatctcttcacttgactgtgtgctggatctcacaatgttgaaaattcataacagtcccttggtaactggagtagagcatcaggaccagagtacggagaccagaagccacagccccgaaggaaatgttagagggcgttcctctgaggcacacactgcctggtgtgggtctgtgcgatccatggccatgggatctcatagtcaatctggtgtaccagagagcattcctctggggacagaggacaggatctcagcaagcaccagcccccaagaccatggaaaggacctcagaatcaccttgctgggtttcagtaccagtgaagattttgcttctgaagccgaggtggctgtacaaaaagaaataagagtcagttcactgaacaaggtctctagccagcctgaaaagagggtcagcttctccttggaagaggatagtgaccaagccagcaagccaaggcagaaggcagagaaggagactgaggacgtcggactgaccagcggtgtttccttagcacctgtttccctgccgagggtgcccagtccagagcctaggctgttggagccctctgaccatgcatccatgtgcctggccatcttggaggagatcagacaggcaaaggcccagagaaagcagcttcatgactttgtggccaggggcacagtcctttcttactgtgaaactttactagaacccgaatgttcttcaagggttgctggcaggcctcagtgtaaacaaatagaccagtcatcatcagaccagaccaggaatgagggtgaagcaccgggatttcatgtggcatctctatctgctgaagcagggcagatagatctgttacctgatgagaggaaagtccaggccacatctctgtctgcagacagctttgaatctctgcccaatacggaaactgacagagagccatgggatcctgtgcaggctttctcccatgctgctcctgctcaagacaggaaacgtcgtactggagaactgaggcagttcgcgggagcaagtgaaccatttatatgtcactctagttcttctgaaatcatagagaaaaagaaagatgcaaccagaacaccttcctcagctgatcctttggccccagacagtcctcgttcttcagcacctgtggaggaggtcaggagggtagtatcaaagaaggtagtggctgccttaccttctcaggccccttatgatgatcctagagtgactctgcatgagctaagtcagtcagttccgcaggagactgcagagggcataccccctggcagtcaggacagcagcccagagcatcaggaacccagaactctagacaccacatatggagaagtttcagataatttgttagtgactgcacagggagaaaaaacagcccattttgaaagtcagtctgtgacctgtgatgttcagaattctacaagtgcctcagggcctaagcaagaccatgtccaatgccctgaggcttctactggctttgaagaagtaccttccagggcctatgaaatggatgagacaggagagatctctaggggacctgatgtgcacttgacacatggccttgagcccaaagatgttaacagggaatttaggctaacagagagcagcacttgtgagccttctactgtggctgctgtcctatctcgagctcaaggctgcagatccccttctgctcctgacgtgaggacaggttccttcagccactcagctactgatggaagcgtggggttaataggggttcctgagaaaaaggttgctgagaagcaagcaagcacagaacttgaggctgcctctttccctgcaggcatgtactctgagcccctgaggcagtttagggacagctctgtaggtgaccagaatgcacaggtgtgtcaaaccaatccagaaccacctgcaacaactcagggaccacacaccctggatttaagtgaagggtctgctgagagcaagttggtggtagagccacagcatgaatgtttagaaaataccactagatgttttttggaaaagccacaattttccactgagttgagggatcacaatcgcttggattcccaagccaagtttgtagcaaggttaaaacatacctgcagcccccaggaagacagtccctggcaggaagaagagcagcacagagaccaggcttcaggtggtggagaaggcttcgcccagggtgtgaatccccttcctgatgaagatggcttagatggctgtcagattttagatgctgggagagaggaggtggctgtggccaagcctcctgtgtccaagattttatcacagggcttcaaagacccagccactgtgtccttgaggcaaaatgaaacaccgcagcctgctgctcagaggagtggccacctctacactggcagagagcagccagcacccaaccacaggggctcacttcctgtgactacaatcttctctggccccaaacactccaggtcctcccccacaccacagttctcagttgtcggctcttctcgttctcttcaggagctgaacttgagtgtggagcctccttcccctacagacgaagatacacaggggcctaacagattgtggaacccacatctcaggggctattcctcaggaaagtcagtggcaagaacatctctgcaggctgaggacagcaatcagaaagcctcatctcgcttggatgatgggactaccgatcacaggcacctgaagcctgccacccctccttatccaatgccttccactctctcacacatgccaacccctgatttcacgaccagctggatgtctggtactttggaacaagcccaacagggaaagcgagagaaactgggtgtccaggttaggccagaaaattggtgctctcagatggacaaaggaatgctgcactttggctccagtgacatcagtccctatgcgctgccgtggcgtccggaggagcctgcacgtatcagctggaagcagtatatgtctggcagtgcagtcgatgtttcctgcagccagaagccccaggggctgacactatcaaatcagcactgagaatgcccagggttcaaatgaggcctgggaagtattcc

SEQ ID NO: 461686 - DNA, 2558 bp, Homo sapiens
gaatacaaaccaccttctccaagcagggcatcaaaaaggcatcagagggttctggcaactagggtcagaaatattaccaaaaagtcctctcacttgcctcttggcagtcctttgaagagacaacaaaatacaagggacccagacaccatggtcccactcacagatttcagcccagtaatggatcattcaagagaaaaagacaatgatttatctgacacagatagcaactactcattggattctctctcatgtgtctatgccaaagccctgatagagccactgaagccagaggagaggaaatgggatttcccagagccagagaactctgaaagtgatgacagccaactatctgaggactcactggctgagaagaggtaccaaagccccaaaaacaggctagggggcaatcgtcccaccaacaaccgtggccaacccaggaccagaactagagcttctgtgaggggcttcactgcagcctcagacagtgacctacttgctcaaactcataggagcttctccttggatagcctgattgatgcagaggaagaactgggggaagatcagcaagaagaacctttccctggttcagctgacgagatacccacagagactttttggcacctggaggactctagtctgcctgtaatggaccaagaggcaatatgcaggcttggtcccatcaactacagaacagcagctaggctggatgccgtcctgccaatgagcagttcgttttaccttgatcctcagttccaaccccattgtgagctccaaccccattgtgagctccaaccccattgtgagctccagccccattgtgagcaggctgaatcacaggtagagccaagctactctgaacaagccgactctctccaaggcatgcagctttcaagagagagcccactgatgtccatggattcctggttttcctgtgactctaagatcaaccccagcagccccccaggaatagtgggttctttatgtccaagtcctgatatgcaggaatttcactcctgtaagggggagaggcctggatactggccaaatactgaggaactaaagccatcagatgcagaaacggttctgccatatagctccaaactgcaccaaggcagtactgagctcctctgcagtgcaagagatgagcacacagcctctgctgctgatacgtctaggctgtctctctggggaattcaaaggcttattcaaccaggagctgatggcacctttcagggcagatgtatccctgacatgacccagcagggcagctctgaagcatcccacaattctagcgtatcaaacgtgctggctgcctctgccaccaccttgactcatgtaggcagcacccatgaaagggattggtctgcccttcagcagaagtacctccttgaactctcttgtcctgttttggaggccataggagcacccaagccagcttacccctaccttgaggaagactctggttccctggcccaagcttctagcaaaggaggagatactctattgccagttggccctagggtatctagcaatctgaatctcaacaactttccagtccatctgtccagaatcaggcgtttgagggcagagaaagaacaggacagtttaaatgccaaattagaaggtgtttcagatttctttagcactagtgagaaagaggcgagttatgacgaaacttattcggcagacttagaatcattgtctgcttctcgatctacaaatgcacaggtctttgcaacagagaacgcgataccagattccatgacagaagcatgtgaagtcaagcagaacaacttggaagaatgccttcagagttgcaggaaacctggactgatgacttcctctgatgaggattttttccagaagaacgcttgtcacagtaatgtcactacagccaccaaagcagaccattggtcccaaggctgggctcctctcaggaaaaatagtgcagtccagccagggcaattaagtcccgacagccactacccactagaggaagagaagacagattgccaggagagctctaaggaagcagttagaagacacataaatgtttcctttgcccttccttcaggtccagagctataccttcactctgctccctggaatccattgtcatcttccctgcagcccccactcttggaaacattctatgtgaccaaaagcagggatgccctgacagaaactgccttagagattccagcttgcagagaagtaagggtaccctccccaccccccagggaagcctggggctttggtcacaaccaccaagctctccaaggtgcttatttgaagaataatttgccagtgctgttacaaaaccagaattctaagattgcctcatctcagcaggtcacagctgagataccagttgatctgaataccagggaagtcatcagagaatcaggtaaatgccctggaaatattacagaagaaagccatgattcagtttattcttctgttactcagaacagacattttctcccctctaccagcacaaaagtatgtgaatttgaaaaccaagttgtaattttaaataaaaaacacagttttccagc

SEQ ID NO: 461687 - DNA, 1665 bp, Homo sapiens
gacagccctgaggcggtcatgctgggggtccatgtgtgggcaccccaatccatactccagccgggctcccagacaccaaccagcatttactagcagctataaacatgtgtcatctagaacatccaacccagtcaacatctgaccacagtcaaatgagacacccctagtgagaaccaccgagccgagatcttcctggatttctaatccacaaaaccatgagcaacatcatatacggacacctccggctttcggaccattccattcaactcacaaccttggaaggaggcaagctccaggccatcggctccctgttcaacctctttgggcctcagttcccccatcgatccctgggccgctccctgggaagttctgatctaatatgtccaggctccttctgggatctgtttattaagcatcaggatgattcatatgactccgccgttggaacactggagcctgcgcgggtgtcaacgcttgttcacttgttacaggtgaggtcacccctttgtcacgcacctcgggccctgcgccctggtggtccagggctggtgcgggggcttaggtgcagcctctcccacgtgcacctgcgaggcctaccctttctcccgtctcagggccttgatgcccgtgcctgtgaagctggcatcagcgaagacctcagacgggaagggatgagtgagcaggagtatgagtacgtgagtttcgaatggaagcactgttatgccagcatcaaacaccctgcattgacagaaatgtgattccggcaaggtaataactgccactccctgggactgtttgacatgactccaggaccacagggagtgcatgaggaagctggcagtccacctgccacccactgtgaacccagacagagaggccatctgacccacacagcaattctgggggactgggacctgcgagcaaggttcgattcccagcccatccgtccctgtctctctgacacacggtcaccacgtgcattctgctgccaggccccggagctgaatcctgtgaaatccttgctccaggggccacacaatgtaaccgggaggcaggaatatgacaggaaaagttaacccacaggatgggaggtcccaggctgtgtgcacagtgacaggagtgatcacaagagtgcatggggactcaccctggccagagacagagaggcatataggaaggttccccaggggagccgagactctgtccagacctcaaagaattcggagaggagagtgagagtgagcccgtatctgggataactgaaaaaaaaaaatgactagcttaaaaaaaaatctccatgtgtgacaccttacgtcactaaagcaaagtgtggatttgagttactaggtactaacgagaattttggaaaatggacacagccctgcgtttaaaggaattgtcttttcttgctggctgatacacttgtaaacacacacacacacacacaccccacctggcatctccatataacatcccagggtgccgttagcctttctgcctcctccctcatcccatgtctcctagaactgccatgaagctgacgtgcagcatgtgctcgctgctgggcataggtggccagcccatggctccttcctgtacccgttgctggcaggtcccgtgccccggggcagctcctgccaccagtcctctcctctgccctccctc

SEQ ID NO: 461688 - DNA, 771 bp, Homo sapiens
atacaccgataaataatgagactgagctttttccagatccttaatcatattctgacacccaatatttgtcattccacagcgtctatgttcccatgtttatgtccagccagagtgatccagcaagaaaaagaaataaaaggcatccaaataggaagagcagaaatcaaactatttctttttgctgattatataattctatacccagaaaaccctaaagactcttccaaaaggctcctagaactaataaacgacttcgtcttctgcttatttgccactcaggtgatcagcaaaagctcagaaagagtggtactgatggagaggataaatgcttacccaaactcacataagttggcatatctgcagggaaacatcacgttagcctttgaggagagaggctatgcagggatccaaacaagaaaatgtgtaacaatttcagaagtggcaaaaagcaacaacgagatggaaaaagatgtgaaggatgtgacagtgaatgtgggtcacccccaaggctctttgtggcaagacaacgctggagcttctcctttgcatgaaactgattgatgctgcaaggtcctgaaggaagacagatgttttttgttttgttttgttttagtgcagttctccagtaaaaagaaaacccaggcggtgaataaattcagtcttctcctttgggagaagttcacttctactggggccagaatctgcttttacataccctgaactagaggatcagagtatcctcaaaaggctttcttggtacttcaactctga

SEQ ID NO: 461689 - DNA, 1033 bp, Homo sapiens
gctccacagtctaggtaaactgcaggacatttaaaaatgtttttgctttgttttaattttcaagacgattatagagcttgggaccttcataaaagtgaactttataagccagaacaaacttaccacccgcctactgtgaaatttggaaattcaactacatttcaggatgattttgttcctcaggagataaagcctaggcaaagctttaaaccctcctctgtggtcaaacgttctacagccccttttaatggtattacaagtcatcgccttgattatatacctcatcagcttgaactcaagtttgaaaggccaaaagaagtttacaaaccaactgaccaacgctttgaggatctcacaactcaccggtgtgactttcagggtctcattggtgaaactgcaaaactctgcagacctgtacacaccagagtgacccagaatgctctgtttgaaggaagcactgaattccgtgaaagttttcaaccatgggaaatcccaccacctgaggtcaagaaagtaccagagtatgtgcctcctacaggtagcatgctgttaaacagcacaagccatcttgactatgttccatatcaggccaaccatgttgttcccatcaggccagtttctcaaaaaagaagtaacaattttcctttccaaggaaaaagcatcatgaaagaagattttccagcatgggaaagttgtcgtcaaggacttattaagaagcagcagcagattcccaacccatctggaaaatttgatggtttgagcactttcagatctcactatgtgccacatgaattgatcccaacagagagttgcaaacctttaaatattgcttttaagagttctgttccatttgatgatgtaaccatgtactctgtagagtacacaccgaaaagacaggaaatttgcccagccagctatccctctcctccaggttatattttcgacaatacaaattcccaaggtcataaattcttccgcaagattattcctgcagtgaaggccttctaataaccaaaatgtgcttaaaaggaag

SEQ ID NO: 461690 - DNA, 1312 bp, Homo sapiens
ggaaggggatccgagcgggttgccctgaggttggggtcttaagcacaggaggcgggtcaaggcaaaaggagtaatgcaacgcctgtgaagccagccccacgcgcgcaccagtcgcgtaagacaacagcagtgtctccacctcggggaccaaggacgcctccgtgcctccagaccccgcctcctccagcccctgcacctgtcatttattcttccactgcccaataaatattcatggcagactttactggggctgcgcgcacacgtgcccgccgatcccggctgcctagcccttacagtctcccttctggtgaggccccgcctggggaccgtcaggccagcccaagttccgcagcttcaggggtgcgtgggcctccgctgagcacaaggggacaaccctgccccggccgcctggctcggtcccgaacgccgcgcctccagtccaaagtgggccagcgccgagcagggagccagcccgaacggcccaccgggtgcaggaatgcgagcgtgggccgcaggggctggctccatccctgcgcggctttcctctgccagccccgccttaagctcctcagaccctctttcctggctgcttcgccccgcccccgccccccgcaactccaggagctccgcgcggtcctgctcgcagtagatgctcagcgggtccaggtgctcctcgcagtggccctgcggcacctgggccagcccctccaccaggcgcgccagctgcaggttggtgctgagtgcctgcggccgcgtgggggcctggcagcaggggcagagaacggtgccatccgccgccggctccccggccacgcggccctaggcaggcgcggcagaaactgtggccgcactcggctgtcacgggcgcgtcgaacagctgcaggcacagcgggcaggacagctcctggtgcaggaggccgggcgcagccgacatggcgggcctgggtggaggaggactccttcctccttgctggcagcccctccccagcctgtcacccactcattccccaagtttatggctgaccaaggtcaccctggcaggattaccccacctgcaggagggcaggacctcaccccaccctgaaatgttttcttcctccagagctgaggggagggtcttttccactttggtctctctagtacacccaggacaagcctgggacaaagtaggcctctctaaatgcttggagaatgaatgatagagagacattgaacaaatgaatgaactgaatccagagcctgcagcccagaactcaattctgccctggttcctgtatgtgtatctttcaaatctcagctgaaatttcattta

SEQ ID NO: 461691 - DNA, 1615 bp, Homo sapiens
gctgcaggaaaggtaggacctgatggctccaggccctcggaggctcagaggcgcagggctgagccatgggaacgaagcgcgaggccatcctgaaggtgctggagaacctgacaccggaggagctcaagaagttcaagatgaagctggggacggtgccgctgcgcgagggctttgagcgcatcccgcggggcgcgctcgggcagctagatatcgtggacctcaccgacaagctggtcgcctcctactacgaggactacgcagccgagctcgtcgtggccgtgctgcgcgacatgcgcatgttggaggaggccgcacggctgcagcgggctgcgtgagggccactctgagctggaggcgggtcaaggcaaaaggagtaatgcaacgcctgtgaagccagccccacgcgcgcaccagtcgcgtaagacaacagcagtgtctccacctcggggaccaaggacgcctccgtgcctccagaccccgcctcctccagcccctgcacctgtcatttattcttccactgcccaataaatattcatggcagactttactggggctgcgcgcacacgtgcccgccgatcccggctgcctagcccttacagtctcccttctggtgaggccccgcctggggaccgtcaggccagcccaagttccgcagcttcaggggtgcgtgggcctccgctgagcacaaggggacaaccctgccccggccgcctggctcggtcccgaacgccgcgcctccagtccaaagtgggccagcgccgagcagggagccagcccgaacggcccaccgggtgcaggaatgcgagcgtgggccgcaggggctggctccatccctgcgcggctttcctctgccagccccgccttaagctcctcagaccctctttcctggctgcttcgccccgcccccgccccccgcaactccaggagctccgcgcggtcctgctcgcagtagatgctcagcgggtccaggtgctcctcgcagtggccctgcggcacctgggccagcccctccaccaggcgcgccagctgcaggttggtgctgagtgcctgcggccgcgtgggggcctggcagcaggggcagagaacggtgccatccgccgccggctccccggccacgcggccctaggcaggcgcggcagaaactgtggccgcactcggctgtcacgggcgcgtcgaacagctgcaggcacagcgggcaggacagctcctggtgcaggaggccgggcgcagccgacatggcgggcctgggtggaggaggactccttcctccttgctggcagcccctccccagcctgtcacccactcattccccaagtttatggctgaccaaggtcaccctggcaggattaccccacctgcaggagggcaggacctcaccccaccctgaaatgttttcttcctccagagctgaggggagggtcttttccactttggtctctctagtacacccaggacaagcctgggacaaagtaggcctctctaaatgcttggagaatgaatgatagagagacattgaacaaatgaatgaactgaatccagagcctgcagcccagaactcaattctgccctggttcctgtatgtgtatctttcaaatctcagctgaaatttcattta

SEQ ID NO: 461692 - DNA, 2869 bp, Homo sapiens
agggccgctgccgccgacggccatggaggacgagcagctcgacagcctggagggctgggcgccggtccggcaaggcctcttcgccgatgccgagaggcaccggctgcgcttcctggtggcgtggaatggcgcggagggcaagttagctgtgacttgtcacgacctcaccgcgcagcagccgcagcggcgcgagggggcccggctggggctggagcccaaacccaaggccgctgtgtccccgcccagctgccgtgtccccgcccagctgccgtgttcccgcccaactgggccggccggttctcggccgcgggcggcgctgtggccgcctctggaacgctgctccccgcagctggacgtgggcggcggcggggcctggagtctggggctcgggctgtgggcgctgctctggcaggcgcgcgcgggccccggcgaggtggcgctgcaggagctatgcgggcagctggagcgctacctgggcgcggcggcccacggctgcggcggcgccaccgtgcgccacgctgttttcgcggctaaaggccgcgcggctgactgcgagagcccgcgcgagtttcgagagcgggccctgcgcgcctgatgggtcgaggcggacgcgcggctgcgtcagacagctgccttcttaactgagtgctcatatagcctttcttctgtgtgtaagtttagagagaaagaaagtgatccctgtctttctcttctaatggcactaatcccatgatgggggtgctatccttttgacataatctgaacctaattacttccaaaggacccacctccaaataacatcacattgggagttagagtgtcaacatatgaattttgtggggacaccaatatgcaatacataataatacctcattgccatttatgtttctcaaaacctaaatgtttttctgtttcaaggatgagataaaatattagcatcactagatgaaatgaaaaagtgtttctttcctatttgcttttttatatttagtattgaacaaggaatagaaaatagctagaatgcttctgaagtttgtttttaatatactatttattttaacttatttttcttttttctatgaaaataagatggaagatcttccagaacaagaaaaaaatataaatgttgtagatgaattagaaatgcaattttatgaaattcagttagaactatatgaagttaaatttgagatattaaaaaacgaagaaatactgcttactacacagttggactctcttaaaagacttataaaagaaatatttaatttttatgaagtcgtgtttattgattttttcccctatggcttctgcttttagtattatgtctggcaataggctcctatcccaaaattatgtcaatatatacttatgttttctttcagtatgtttatgatgttactttttaaaacatttaattctttagtccaggtggaatttattttgaatgtggtaggaattgaacctttccctcaaattgttaagcagtcccaatcactgattttaaaaacattttccctaaatgtttaacatttctccagttaagcattagattgactttggtctgtttctgagttgttctcctccattggttcgtgagtggcttctgctgctggctccatactgttcccacgactgtcttggaggcacattttagggtctgtgatccgcccaccttggcctcccaaagtcctgggattacaggtgtgagccactgcccctggaccacagacggagtctcactctgtagcccaggctggagtgcaatggcgcgatcttggctcaccgcaagctccccctcccgggttcacgccattctcctgcctctgcctcgcgagtagctggaactactggcgcccaccaccacatccagctaatttttttgtatttttagtgcagactgggtttcaccgtgttagccaggatggtctggatctcctgaccttgggatccgcccgcctcggcctccgaaagtgctgggattacaggcgtgagccaccgtgcccggccgagacttttaattatgcaatgccagactgcattgcataaaccaaaggccaacagagaggtgacctttcaaattactggcacaagaagagccgagatcagaaagctccaacttaatgcaaacatcgacaagaaatccgacagaaatgacttctgtgtctggtcaacttaacataacatgacatattgtcaagcacatttggctttttaggtagaattgtctataaaggtttaactgctttagaaaatataaatgtgaagatttgtggtatttgggtttatatataagatatttctacattgaaaagagacagtggaaaagcttggtataagatttgtaaaatatgtttgtaataatgctaatggaagaggtgagatttgggtggggtggggtgtagatgggaacatggtttggggattggggaaagggaagtcatgctgttaataaaatagtgaggcatgttgtataaagtgtgttttatgtctcaattgaaatgttatagagataaatttaaaatagatcatgatgggttttgaatctgatttctaattttaaaatgttatgagcttttgttgctttcctatttcatacacatttctttatgggtttcacttagactgcatgaaattgcagatgccaattaccttttaacaaaattaaattcacatatatgtataatttacatgtatatattcatggaattttttattctacacgatatattattttaaaatggtttttcaatgacaaaataaaaagtatttttctatactttcagttttctggtttgaattttttctggcaacactaattttcacctacctatactcattgatagtataaaattgtacaagtgcatatttt

SEQ ID NO: 461693 - DNA, 740 bp, Homo sapiens
ctggcattttacttgttcccaactaatttttcttctaatgacttgaaaagtatatgtttagttcctatatctttatatttttatacacatagctacacatatgattgacatccagagctaatcgtatagataaaatgagactcctagcatgcttttacttctctctccttcctcctttccagacttcataactttccatcccgagttatttcagattttagttttttattataggtttatttttataatttagacttaaaagtaaacttcactgattatcttgctcacctgtgcttcttatatccctttttttcttcccagatttattttctttttgaatatattttctacaccatggtttctcaaccagaggtgatacagcactgtctccaaatgtggggctgttgtgtattgtcacggggaggagaaatgctactggcatttagtggatgatggtcaaggacactaagcaacctgcaatgtgtggatcaatcttacacaacgaaggactgttccaccccaaatgccaatggtaccctgttgagaaaggttagtctatgtggacagtgaattataaactttttgaatctgtttttggtcttaaaatgtctttatgatgccctcacattcacttgcactttggctggttaaacaatattaaaagaaaacttcaaattaaatggaatttaattgagcaagaaaaaaaaaacaattcacaagttgggcagcctccagaacca

SEQ ID NO: 461694 - DNA, 246 bp, Homo sapiens
ggtaattggcatctgcaatttcatgcagtctaagtgaaacccataaagatatatgtataatttacatgtatatattcatggaattttttattctacacgatatattattttaaaatggtttttcaatgacaaaataaaaagtatttttctatactttcagttttctggtttgaattttttctggcaacactaattttcacctacctatactcattgatagtataaaattgtacaagtgcatatttt

SEQ ID NO: 461695 - DNA, 2636 bp, Homo sapiens
ctccatgttggtcaggctggtgtcgaagtcctgacctcaagtgatccacccgcctcggcctcccaaagtgctggaattacaggcgtgagccacggtgcctggccaaaagtctccatattattaaacaatcttcagaagcacagtgctgaatgactacagtaataatattctgccatggatatatcataatttacttaacaattcttgttttattgggcatttttgatggaggatgatgacattttcatatttaatcaatattttaaattgatgtattgaaagttgagaacatgaaggtttcttttgtttagttttgtttgttgggtatgtattacactgtctgacttgagctttattcacatttgctctctaggttatccaaggacatggaaaagccaacaccatggtagcattaatgaaagtttaccaagaggaagatgaagcctaccaggaattagttaccatggcaaccatgtttttccagtacttactgcagccatttagggctatgcgagaagttgcaactttataattccttggatgaggatgacgtaggtcctacgtctccaggatagttgccctggagaaagaagctgaagaatggaccagacgggctgaagaagctgttgtctctattcaagatatcacagtgaattattttaattagacagtaaaagcattagcaggaatgcagaaagaaatggaacaggatgtgaagagatttggccaggctgcctgggccacagcaattcccaggttggaaaaacttaagctaatgctagctcaagagactctgcaactcatgagagcgaaagaattgtatttaaatcgcaaaagagctgaaattcagggaaagatggaagatcttccagaacaagaaaaaaatataaatgttgtagatgaattagaaatgcaattttatgaaattcagttagaactatatgaagttaaatttgagatattaaaaaacgaagaaatactgcttactacacagttggactctcttaaaagacttataaaagaaatatttaatttttatgaagtcgtgtttattgattttttcccctatggcttctgcttttagtattatgtctggcaataggctcctatcccaaaattatgtcaatatatacttatgttttctttcagtatgtttatgatgttactttttaaaacatttaattctttagtccaggtggaatttattttgaatgtggtaggaattgaacctttccctcaaattgttaagcagtcccaatcactgattttaaaaacattttccctaaatgtttaacatttctccagttaagcattagattgactttggtctgtttctgagttgttctcctccattggttcgtgagtggcttctgctgctggctccatactgttcccacgactgtcttggaggcacattttagggtctgtgatccgcccaccttggcctcccaaagtcctgggattacaggtgtgagccactgcccctggaccacagacggagtctcactctgtagcccaggctggagtgcaatggcgcgatcttggctcaccgcaagctccccctcccgggttcacgccattctcctgcctctgcctcgcgagtagctggaactactggcgcccaccaccacatccagctaatttttttgtatttttagtgcagactgggtttcaccgtgttagccaggatggtctggatctcctgaccttgggatccgcccgcctcggcctccgaaagtgctgggattacaggcgtgagccaccgtgcccggccgagacttttaattatgcaatgccagactgcattgcataaaccaaaggccaacagagaggtgacctttcaaattactggcacaagaagagccgagatcagaaagctccaacttaatgcaaacatcgacaagaaatccgacagaaatgacttctgtgtctggtcaacttaacataacatgacatattgtcaagcacatttggctttttaggtagaattgtctataaaggtttaactgctttagaaaatataaatgtgaagatttgtggtatttgggtttatatataagatatttctacattgaaaagagacagtggaaaagcttggtataagatttgtaaaatatgtttgtaataatgctaatggaagaggtgagatttgggtggggtggggtgtagatgggaacatggtttggggattggggaaagggaagtcatgctgttaataaaatagtgaggcatgttgtataaagtgtgttttatgtctcaattgaaatgttatagagataaatttaaaatagatcatgatgggttttgaatctgatttctaattttaaaatgttatgagcttttgttgctttcctatttcatacacatttctttatgggtttcacttagactgcatgaaattgcagatgccaattaccttttaacaaaattaaattcacatatatgtataatttacatgtatatattcatggaattttttattctacacgatatattattttaaaatggtttttcaatgacaaaataaaaagtatttttctatactttcagttttctggtttgaattttttctggcaacactaattttcacctacctatactcattgatagtataaaattgtacaagtgcatatttt

SEQ ID NO: 461696 - DNA, 2348 bp, Homo sapiens
ctccatgttggtcaggctggtgtcgaagtcctgacctcaagtgatccacccgcctcggcctcccaaagtgctggaattacaggcgtgagccacggtgcctggccaaaagtctccatattattaaacaatcttcagaagcacagtgctgaatgactacagtaataatattctgccatggatatatcataatttacttaacaattcttgttttattgggcatttttgatggaggatgatgacattttcatatttaatcaatattttaaattgatgtattgaaagttgagaacatgaaggtttcttttgtttagttttgtttgttgggtatgtattacactgtctgacttgagctttattcacatttgctctctaggttatccaaggacatggaaaagccaacaccatggtagcattaatgaaagtttaccaagaggaagatgaagcctaccaggaattagttaccatggcaaccatgtttttccagtacttactgcagccatttagggctatgcgagaagttgcaactttataattccttggatgaggatgacgtaggtcctacgtctccaggatagttgccctggagaaagaagctgaagaatggaccagacgggctgaagaagctgttgtctctattcaagatatcacagtgaattattttaattagacagtaaaagcattagcaggaatgcagaaagaaatggaacaggatgtgaagagatttggccaggctgcctgggccacagcaattcccaggttggaaaaacttaagctaatgctagctcaagagactctgcaactcatgagagcgaaagaattgtatttaaatcgcaaaagagctgaaattcagggaaagatggaagatcttccagaacaagaaaaaaatataaatgttgtagatgaattagaaatgcaattttatgaaattcagttagaactatatgaagttaaatttgagatattaaaaaacgaagaaatactgcttactacacagttggactctcttaaaagacttataaaagaaaaacaggatgaagttgtctattacgatccatgtgaaagtccagaggaacttagtcattgactgtggtggggctgcaggacgataagaattcggaagtgaaagaactcagaaggcagtgccagcagctggagtctgttaaacggggcagtctgtgtcaaaagagcttctctccagagtagaaagacggagtctcactctgtagcccaggctggagtgcaatggcgcgatcttggctcaccgcaagctccccctcccgggttcacgccattctcctgcctctgcctcgcgagtagctggaactactggcgcccaccaccacatccagctaatttttttgtatttttagtgcagactgggtttcaccgtgttagccaggatggtctggatctcctgaccttgggatccgcccgcctcggcctccgaaagtgctgggattacaggcgtgagccaccgtgcccggccgagacttttaattatgcaatgccagactgcattgcataaaccaaaggccaacagagaggtgacctttcaaattactggcacaagaagagccgagatcagaaagctccaacttaatgcaaacatcgacaagaaatccgacagaaatgacttctgtgtctggtcaacttaacataacatgacatattgtcaagcacatttggctttttaggtagaattgtctataaaggtttaactgctttagaaaatataaatgtgaagatttgtggtatttgggtttatatataagatatttctacattgaaaagagacagtggaaaagcttggtataagatttgtaaaatatgtttgtaataatgctaatggaagaggtgagatttgggtggggtggggtgtagatgggaacatggtttggggattggggaaagggaagtcatgctgttaataaaatagtgaggcatgttgtataaagtgtgttttatgtctcaattgaaatgttatagagataaatttaaaatagatcatgatgggttttgaatctgatttctaattttaaaatgttatgagcttttgttgctttcctatttcatacacatttctttatgggtttcacttagactgcatgaaattgcagatgccaattaccttttaacaaaattaaattcacatatatgtataatttacatgtatatattcatggaattttttattctacacgatatattattttaaaatggtttttcaatgacaaaataaaaagtatttttctatactttcagttttctggtttgaattttttctggcaacactaattttcacctacctatactcattgatagtataaaattgtacaagtgcatatttt

SEQ ID NO: 461697 - DNA, 2879 bp, Homo sapiens
ctccatgttggtcaggctggtgtcgaagtcctgacctcaagtgatccacccgcctcggcctcccaaagtgctggaattacaggcgtgagccacggtgcctggccaaaagtctccatattattaaacaatcttcagaagcacagtgctgaatgactacagtaataatattctgccatggatatatcataatttacttaacaattcttgttttattgggcatttttgatggaggatgatgacattttcatatttaatcaatattttaaattgatgtattgaaagttgagaacatgaaggtttcttttgtttagttttgtttgttgggtatgtattacactgtctgacttgagctttattcacatttgctctctaggttatccaaggacatggaaaagccaacaccatggtagcattaatgaaagtttaccaagaggaagatgaagcctaccaggaattagttaccatggcaaccatgtttttccagtacttactgcagccatttagggctatgcgagaagttgcaactttataattccttggatgaggatgacgtaggtcctacgtctccaggatagttgccctggagaaagaagctgaagaatggaccagacgggctgaagaagctgttgtctctattcaagatatcacagtgaattattttaattagacagtaaaagcattagcaggaatgcagaaagaaatggaacaggatgtgaagagatttggccaggctgcctgggccacagcaattcccaggttggaaaaacttaagctaatgctagctcaagagactctgcaactcatgagagcgaaagaattgtatttaaatcgcaaaagagctgaaattcagggaaagatggaagatcttccagaacaagaaaaaaatataaatgttgtagatgaattagaaatgcaattttatgaaattcagttagaactatatgaagttaaatttgagatattaaaaaacgaagaaatactgcttactacacagttggactctcttaaaagacttataaaaggtaaagtttatatttaagtatatagattacaatgtttataaatttaaggaaatacagaccatattatcaattactttttgtaaactgtaacatctgaaaatttcctaaagttttccttcagtagtttattattcaaataatatattcattgttagcacatagcaaaacaaagaaagaaaaatgattattacttcaatcccatcatctagagatgcttagtgtttggctgggcacagtggctcacgcctataatcccagcactttgggaggctgaggcgggcggatcacttgaggtcaggagttccagaccagtctgaccaacatggtgaaaccccatctctactaaaaatacaaaaatactaaaccctgtctctactaaaaatacaaagtccgatgtggtggcacgtgcctgtaatcccagctacttgggaggctgaggcaggagaatggcttgaacccgtgaggtggaagtttcagtgagccaagatcgtgccactgcactccagcctggaagacagagcgagactccgtaaaaacaggatgaagttgtctattacgatccatgtgaaagtccagaggaacttagtcattgactgtggtggggctgcaggacgataagaattcggaagtgaaagaactcagaaggcagtgccagcagctggagtctgttaaacggggcagtctgtgtcaaaagagcttctctccagagtagaaagacggagtctcactctgtagcccaggctggagtgcaatggcgcgatcttggctcaccgcaagctccccctcccgggttcacgccattctcctgcctctgcctcgcgagtagctggaactactggcgcccaccaccacatccagctaatttttttgtatttttagtgcagactgggtttcaccgtgttagccaggatggtctggatctcctgaccttgggatccgcccgcctcggcctccgaaagtgctgggattacaggcgtgagccaccgtgcccggccgagacttttaattatgcaatgccagactgcattgcataaaccaaaggccaacagagaggtgacctttcaaattactggcacaagaagagccgagatcagaaagctccaacttaatgcaaacatcgacaagaaatccgacagaaatgacttctgtgtctggtcaacttaacataacatgacatattgtcaagcacatttggctttttaggtagaattgtctataaaggtttaactgctttagaaaatataaatgtgaagatttgtggtatttgggtttatatataagatatttctacattgaaaagagacagtggaaaagcttggtataagatttgtaaaatatgtttgtaataatgctaatggaagaggtgagatttgggtggggtggggtgtagatgggaacatggtttggggattggggaaagggaagtcatgctgttaataaaatagtgaggcatgttgtataaagtgtgttttatgtctcaattgaaatgttatagagataaatttaaaatagatcatgatgggttttgaatctgatttctaattttaaaatgttatgagcttttgttgctttcctatttcatacacatttctttatgggtttcacttagactgcatgaaattgcagatgccaattaccttttaacaaaattaaattcacatatatgtataatttacatgtatatattcatggaattttttattctacacgatatattattttaaaatggtttttcaatgacaaaataaaaagtatttttctatactttcagttttctggtttgaattttttctggcaacactaattttcacctacctatactcattgatagtataaaattgtacaagtgcatatttt

SEQ ID NO: 461698 - DNA, 2582 bp, Homo sapiens
ctccatgttggtcaggctggtgtcgaagtcctgacctcaagtgatccacccgcctcggcctcccaaagtgctggaattacaggcgtgagccacggtgcctggccaaaagtctccatattattaaacaatcttcagaagcacagtgctgaatgactacagtaataatattctgccatggatatatcataatttacttaacaattcttgttttattgggcatttttgatggaggatgatgacattttcatatttaatcaatattttaaattgatgtattgaaagttgagaacatgaaggtttcttttgtttagttttgtttgttgggtatgtattacactgtctgacttgagctttattcacatttgctctctaggttatccaaggacatggctaccaggaattagttaccatggcaaccatgtttttccagtacttactgcagccatttagggctatgcgagaagttgcaactttataattccttggatgaggatgacgtaggtcctacgtctccaggatagttgccctggagaaagaagctgaagaatggaccagacgggctgaagaagctgttgtctctattcaagatatcacagtgaattattttaattagacagtaaaagcattagcaggaatgcagaaagaaatggaacaggatgtgaagagatttggccaggctgcctgggccacagcaattcccaggttggaaaaacttaagctaatgctagctcaagagactctgcaactcatgagagcgaaagaattgtatttaaatcgcaaaagagctgaaattcagggaaagatggaagatcttccagaacaagaaaaaaatataaatgttgtagatgaattagaaatgcaattttatgaaattcagttagaactatatgaagttaaatttgagatattaaaaaacgaagaaatactgcttactacacagttggactctcttaaaagacttataaaagaaatatttaatttttatgaagtcgtgtttattgattttttcccctatggcttctgcttttagtattatgtctggcaataggctcctatcccaaaattatgtcaatatatacttatgttttctttcagtatgtttatgatgttactttttaaaacatttaattctttagtccaggtggaatttattttgaatgtggtaggaattgaacctttccctcaaattgttaagcagtcccaatcactgattttaaaaacattttccctaaatgtttaacatttctccagttaagcattagattgactttggtctgtttctgagttgttctcctccattggttcgtgagtggcttctgctgctggctccatactgttcccacgactgtcttggaggcacattttagggtctgtgatccgcccaccttggcctcccaaagtcctgggattacaggtgtgagccactgcccctggaccacagacggagtctcactctgtagcccaggctggagtgcaatggcgcgatcttggctcaccgcaagctccccctcccgggttcacgccattctcctgcctctgcctcgcgagtagctggaactactggcgcccaccaccacatccagctaatttttttgtatttttagtgcagactgggtttcaccgtgttagccaggatggtctggatctcctgaccttgggatccgcccgcctcggcctccgaaagtgctgggattacaggcgtgagccaccgtgcccggccgagacttttaattatgcaatgccagactgcattgcataaaccaaaggccaacagagaggtgacctttcaaattactggcacaagaagagccgagatcagaaagctccaacttaatgcaaacatcgacaagaaatccgacagaaatgacttctgtgtctggtcaacttaacataacatgacatattgtcaagcacatttggctttttaggtagaattgtctataaaggtttaactgctttagaaaatataaatgtgaagatttgtggtatttgggtttatatataagatatttctacattgaaaagagacagtggaaaagcttggtataagatttgtaaaatatgtttgtaataatgctaatggaagaggtgagatttgggtggggtggggtgtagatgggaacatggtttggggattggggaaagggaagtcatgctgttaataaaatagtgaggcatgttgtataaagtgtgttttatgtctcaattgaaatgttatagagataaatttaaaatagatcatgatgggttttgaatctgatttctaattttaaaatgttatgagcttttgttgctttcctatttcatacacatttctttatgggtttcacttagactgcatgaaattgcagatgccaattaccttttaacaaaattaaattcacatatatgtataatttacatgtatatattcatggaattttttattctacacgatatattattttaaaatggtttttcaatgacaaaataaaaagtatttttctatactttcagttttctggtttgaattttttctggcaacactaattttcacctacctatactcattgatagtataaaattgtacaagtgcatatttt

SEQ ID NO: 461699 - DNA, 1504 bp, Homo sapiens
atccctgctagccgcaatttgttggactctcttaaaagattataaaagatgaaatttagaatcaagttcaaaacaaaaaactctttggaattttgattgtgattttgcttaaaattagagattactttggggagaatagtggtctttgcaattttgaatcttcctacccaagaacatgaaaaacaggatgaagttgtctattacgatccatgtgaaagtccagaggaacttagtcattgactgtggtggggctgcaggacgataagaattcggaagtgaaagaactcagaaggcagtgccagcagctggagtctgttaaacggggcagtctgtgtcaaaagagcttctctccagagtagaaagacggagtctcactctgtagcccaggctggagtgcaatggcgcgatcttggctcaccgcaagctccccctcccgggttcacgccattctcctgcctctgcctcgcgagtagctggaactactggcgcccaccaccacatccagctaatttttttgtatttttagtgcagactgggtttcaccgtgttagccaggatggtctggatctcctgaccttgggatccgcccgcctcggcctccgaaagtgctgggattacaggcgtgagccaccgtgcccggccgagacttttaattatgcaatgccagactgcattgcataaaccaaaggccaacagagaggtgacctttcaaattactggcacaagaagagccgagatcagaaagctccaacttaatgcaaacatcgacaagaaatccgacagaaatgacttctgtgtctggtcaacttaacataacatgacatattgtcaagcacatttggctttttaggtagaattgtctataaaggtttaactgctttagaaaatataaatgtgaagatttgtggtatttgggtttatatataagatatttctacattgaaaagagacagtggaaaagcttggtataagatttgtaaaatatgtttgtaataatgctaatggaagaggtgagatttgggtggggtggggtgtagatgggaacatggtttggggattggggaaagggaagtcatgctgttaataaaatagtgaggcatgttgtataaagtgtgttttatgtctcaattgaaatgttatagagataaatttaaaatagatcatgatgggttttgaatctgatttctaattttaaaatgttatgagcttttgttgctttcctatttcatacacatttctttatgggtttcacttagactgcatgaaattgcagatgccaattaccttttaacaaaattaaattcacatatatgtataatttacatgtatatattcatggaattttttattctacacgatatattattttaaaatggtttttcaatgacaaaataaaaagtatttttctatactttcagttttctggtttgaattttttctggcaacactaattttcacctacctatactcattgatagtataaaattgtacaagtgcatatttt

SEQ ID NO: 461700 - DNA, 1137 bp, Homo sapiens
atccctgctagccgcaatttgttggactctcttaaaagattataaaagatgaaatttagaatcaagttcaaaacaaaaaactctttggaattttgattgtgattttgcttaaaattagagattactttggggagaatagtggtctttgcaattttgaatcttcctacccaagaacatgaaaaacaggatgaagttgtctattacgatccatgtgaaagtccagaggaacttagtcattgactgtggtggggctgcaggacgataagaattcggaagtgaaagaactcagaaggcagtgccagcagctggagtctgttaaacggggcagtctgtgtcaaaagagcttctctccagagtagaaagatttattttctttttgaatatattttctacaccatggtttctcaaccagaggtgatacagcactgtctccaaatgtggggctgttgtgtattgtcacggggaggagaaatgctactggcatttagtggatgatggtcaaggacactaagcaacctgcaatgtgtggatcaatcttacacaacgaaggactgttccaccccaaatgccaatggtaccctgttgagaaaggattcaagatggattggcatcaaagttcacttctttaacaaaagtgctttatgaccttaataaaatattagagaatggtaggatccatggaagccctttacaaaaacttgtgatagaaagttttgatgataagcagactttgcaacaactggaattgcaaaatgacccaattttacaaagcttccagaatgcagttagtgaaacaaagatgaagatatcagtatcccagagagtgaagaacaggagcatgaagaggatggttcagagacagaggctgatggccaggaggacctagaagatttagaggaggaggaggaagtgtcagatatgggtggtgacaatcctgaagtgagtgagagagcaaactcaagcaaattcgatccgacgaaaagcccagttctcagtgatgaggattctgaccttgactttcatatcaacaaattggaacagcagagcaaggtgcgaaacaaaggacacgggaaaccaagagaaaagtccatagcagacgagaaattcttccaactctctgaaatggaggcctattta

SEQ ID NO: 461701 - DNA, 782 bp, Homo sapiens
atccctgctagccgcaatttgttggactctcttaaaagattataaaagatgaaatttagaatcaagttcaaaacaaaaaactctttggaattttgattgtgattttgcttaaaattagagattactttggggagaatagtggtctttgcaattttgaatcttcctacccaagaacatgaaaaacaggatgaagttgtctattacgatccatgtgaaagtccagaggaacttagtcattgactgtggtggggctgcaggacgataagaattcggaagtgaaagaactcagaaggcagtgccagcagctggagtctgttaaacggggcagtctgtgtcaaaagagcttctctccagagtagaaagatttattttctttttgaatatattttctacaccatggtttctcaaccagaggtgatacagcactgtctccaaatgtggggctgttgtgtattgtcacggggaggagaaatgctactggcatttagtggatgatggtcaaggacactaagcaacctgcaatgtgtggatcaatcttacacaacgaaggactgttccaccccaaatgccaatggtaccctgttgagaaaggttagtctatgtggacagtgaattataaactttttgaatctgtttttggtcttaaaatgtctttatgatgccctcacattcacttgcactttggctggttaaacaatattaaaagaaaacttcaaattaaatggaatttaattgagcaagaaaaaaaaaacaattcacaagttgggcagcctccagaacca

SEQ ID NO: 461702 - DNA, 1794 bp, Homo sapiens
ctccatgttggtcaggctggtgtcgaagtcctgacctcaagtgatccacccgcctcggcctcccaaagtgctggaattacaggcgtgagccacggtgcctggccaaaagtctccatattattaaacaatcttcagaagcacagtgctgaatgactacagtaataatattctgccatggatatatcataatttacttaacaattcttgttttattgggcatttttgatggaggatgatgacattttcatatttaatcaatattttaaattgatgtattgaaagttgagaacatgaaggtttcttttgtttagttttgtttgttgggtatgtattacactgtctgacttgagctttattcacatttgctctctaggttatccaaggacatggaaaagccaacaccatggtagcattaatgaaagtttaccaagaggaagatgaagcctaccaggaattagttaccatggcaaccatgtttttccagtacttactgcagccatttagggctatgcgagaagttgcaactttataattccttggatgaggatgacgtaggtcctacgtctccaggatagttgccctggagaaagaagctgaagaatggaccagacgggctgaagaagctgttgtctctattcaagatatcacagtgaattattttaattagacagtaaaagcattagcaggaatgcagaaagaaatggaacaggatgtgaagagatttggccaggctgcctgggccacagcaattcccaggttggaaaaacttaagctaatgctagctcaagagactctgcaactcatgagagcgaaagaattgtatttaaatcgcaaaagagctgaaattcagggaaagatggaagatcttccagaacaagaaaaaaatataaatgttgtagatgaattagaaatgcaattttatgaaattcagttagaactatatgaagttaaatttgagatattaaaaaacgaagaaatactgcttactacacagttggactctcttaaaagacttataaaaggtaaagtttatatttaagtatatagattacaatgtttataaatttaaggaaatacagaccatattatcaattactttttgtaaactgtaacatctgaaaatttcctaaagttttccttcagtagtttattattcaaataatatattcattgttagcacatagcaaaacaaagaaagaaaaatgattattacttcaatcccatcatctagagatgcttagtgtttggctgggcacagtggctcacgcctataatcccagcactttgggaggctgaggcgggcggatcacttgaggtcaggagttccagaccagtctgaccaacatggtgaaaccccatctctactaaaaatacaaaaatactaaaccctgtctctactaaaaatacaaagtccgatgtggtggcacgtgcctgtaatcccagctacttgggaggctgaggcaggagaatggcttgaacccgtgaggtggaagtttcagtgagccaagatcgtgccactgcactccagcctggaagacagagcgagactccgtaaaaacaggatgaagttgtctattacgatccatgtgaaagtccagaggaacttagtcattgactgtggtggggctgcaggacgataagaattcggaagtgaaagaactcagaaggcagtgccagcagctggagtctgttaaacggggcagtctgtgtcaaaagagcttctctccagagtagaaaggtaggtacgctcagagcggctttcttttcttttctcttccagagatttattcttgt

SEQ ID NO: 461703 - DNA, 1406 bp, Homo sapiens
ctccatgttggtcaggctggtgtcgaagtcctgacctcaagtgatccacccgcctcggcctcccaaagtgctggaattacaggcgtgagccacggtgcctggccaaaagtctccatattattaaacaatcttcagaagcacagtgctgaatgactacagtaataatattctgccatggatatatcataatttacttaacaattcttgttttattgggcatttttgatggaggatgatgacattttcatatttaatcaatattttaaattgatgtattgaaagttgagaacatgaaggtttcttttgtttagttttgtttgttgggtatgtattacactgtctgacttgagctttattcacatttgctctctaggttatccaaggacatggctaccaggaattagttaccatggcaaccatgtttttccagtacttactgcagccatttagggctatgcgagaagttgcaactttataattccttggatgaggatgacgtaggtcctacgtctccaggatagttgccctggagaaagaagctgaagaatggaccagacgggctgaagaagctgttgtctctattcaagatatcacagtgaattattttaattagacagtaaaagcattagcaggaatgcagaaagaaatggaacaggatgtgaagagatttggccaggctgcctgggccacagcaattcccaggttggaaaaacttaagctaatgctagctcaagagactctgcaactcatgagagcgaaagaattgtatttaaatcgcaaaagagctgaaattcagggaaagaaaaacaggatgaagttgtctattacgatccatgtgaaagtccagaggaacttagtcattgactgtggtggggctgcaggacgataagaattcggaagtgaaagaactcagaaggcagtgccagcagctggagtctgttaaacggggcagtctgtgtcaaaagagcttctctccagagtagaaagatttattttctttttgaatatattttctacaccatggtttctcaaccagaggtgatacagcactgtctccaaatgtggggctgttgtgtattgtcacggggaggagaaatgctactggcatttagtggatgatggtcaaggacactaagcaacctgcaatgtgtggatcaatcttacacaacgaaggactgttccaccccaaatgccaatggtaccctgttgagaaaggttagtctatgtggacagtgaattataaactttttgaatctgtttttggtcttaaaatgtctttatgatgccctcacattcacttgcactttggctggttaaacaatattaaaagaaaacttcaaattaaatggaatttaattgagcaagaaaaaaaaaacaattcacaagttgggcagcctccagaacca

SEQ ID NO: 461704 - DNA, 2362 bp, Homo sapiens
tctacaggatctccggcactgcttcggatggtgcctgtgattacagaggaaatacctttcaactggaagatatcattaaacacaggaaaagagatcaggttatccaagggacatggaaaagccaacaccatggtagcattaatgaaagtttaccaagaggaagatgaagcctaccaggaattagttaccatggcaaccatgtttttccagtacttactgcagccatttagggctatgcgagaagttgcaactttataattccttggatgaggatgacgtaggtcctacgtctccaggatagttgccctggagaaagaagctgaagaatggaccagacgggctgaagaagctgttgtctctattcaagatatcacagtgaattattttaattagacagtaaaagcattagcaggaatgcagaaagaaatggaacaggatgtgaagagatttggccaggctgcctgggccacagcaattcccaggttggaaaaacttaagctaatgctagctcaagagactctgcaactcatgagagcgaaagaattgtatttaaatcgcaaaagagctgaaattcagggaaagatggaagatcttccagaacaagaaaaaaatataaatgttgtagatgaattagaaatgcaattttatgaaattcagttagaactatatgaagttaaatttgagatattaaaaaacgaagaaatactgcttactacacagttggactctcttaaaagacttataaaagaaatatttaatttttatgaagtcgtgtttattgattttttcccctatggcttctgcttttagtattatgtctggcaataggctcctatcccaaaattatgtcaatatatacttatgttttctttcagtatgtttatgatgttactttttaaaacatttaattctttagtccaggtggaatttattttgaatgtggtaggaattgaacctttccctcaaattgttaagcagtcccaatcactgattttaaaaacattttccctaaatgtttaacatttctccagttaagcattagattgactttggtctgtttctgagttgttctcctccattggttcgtgagtggcttctgctgctggctccatactgttcccacgactgtcttggaggcacattttagggtctgtgatccgcccaccttggcctcccaaagtcctgggattacaggtgtgagccactgcccctggaccacagacggagtctcactctgtagcccaggctggagtgcaatggcgcgatcttggctcaccgcaagctccccctcccgggttcacgccattctcctgcctctgcctcgcgagtagctggaactactggcgcccaccaccacatccagctaatttttttgtatttttagtgcagactgggtttcaccgtgttagccaggatggtctggatctcctgaccttgggatccgcccgcctcggcctccgaaagtgctgggattacaggcgtgagccaccgtgcccggccgagacttttaattatgcaatgccagactgcattgcataaaccaaaggccaacagagaggtgacctttcaaattactggcacaagaagagccgagatcagaaagctccaacttaatgcaaacatcgacaagaaatccgacagaaatgacttctgtgtctggtcaacttaacataacatgacatattgtcaagcacatttggctttttaggtagaattgtctataaaggtttaactgctttagaaaatataaatgtgaagatttgtggtatttgggtttatatataagatatttctacattgaaaagagacagtggaaaagcttggtataagatttgtaaaatatgtttgtaataatgctaatggaagaggtgagatttgggtggggtggggtgtagatgggaacatggtttggggattggggaaagggaagtcatgctgttaataaaatagtgaggcatgttgtataaagtgtgttttatgtctcaattgaaatgttatagagataaatttaaaatagatcatgatgggttttgaatctgatttctaattttaaaatgttatgagcttttgttgctttcctatttcatacacatttctttatgggtttcacttagactgcatgaaattgcagatgccaattaccttttaacaaaattaaattcacatatatgtataatttacatgtatatattcatggaattttttattctacacgatatattattttaaaatggtttttcaatgacaaaataaaaagtatttttctatactttcagttttctggtttgaattttttctggcaacactaattttcacctacctatactcattgatagtataaaattgtacaagtgcatatttt

SEQ ID NO: 461705 - DNA, 594 bp, Homo sapiens
  misc_feature (17)..(17): n is a, c, g, or t
  misc_feature (22)..(22): n is a, c, g, or t
  misc_feature (26)..(26): n is a, c, g, or t
gcaggctggtaccgccnagggngtanggatatcgtcgacccacgcgctccatttattgaatgaatgagtgaatggaaaaactgggagagtcaaaagtgagcagaagctctccatttctacttctgtcacaaaccacattaaattgtaaataaggcccttctccacttgacttcaggcagcagattgtctagaagcctaaggacagcaatttctctgacaagacaaagtagatattttataccaggggttggcaaactactgcccacgggccgaatttggcccagtctgtttttgtatggtgcaaactaaaaatgatttttacatttttaaagagttataaaagaaaaaaatatgtggtctgtgaaatctaaaatatttactacctggcctgttggaggaaaggtttgccaatctctgttttataccattaactatgagattaacaaaaacttttacctttgtgcagaaggttaaaaaaaaaaaaacatggttaaggaaaaggagacatgttacctcttcatacactcctataactgtggcattgcaaaaaataaaaataaccacctttaaaaaaataaatcttatttaaattgc

SEQ ID NO: 461706 - DNA, 333 bp, Homo sapiens
tctgtgaaatctaaaatatttactacctggcctgttggaggaaactaaaaatgatttttacatttttaaagagttataaaagaaaaaaatatgtggtctgtgaaatctaaaatatttactacctggcctgttggaggaaaggtttgccaatctctgttttataccattaactatgagattaacaaaaacttttacctttgtgcagaaggttaaaaaaaaaaaaacatggttaaggaaaaggagacatgttacctcttcatacactcctataactgtggcattgcaaaaaataaaaataaccacctttaaaaaaataaatcttatttaaattgc

SEQ ID NO: 461707 - DNA, 449 bp, Homo sapiens
tttaaggtagtttttatttacagctgggaagtttctaaacactccatgaagctgttgaaataactttgagacttcttggtaccagcttcttgatcagtccatcattatttggagctgtttttctgttccgaaacaccaatgtggaagatgtccttaatgcccgaaaactggagcgagactcacttcgggatgaatcccaaaggaagaaggaacaggacaagctggatccagattttatgttaacatggcagcaaaactaggaaaatgggaagaaattacttgcggggtgttctagatctgattttttttttttttttgaaagtttcagccttgatttttgtcactgaaggagtcaggttatatccacggtcccctgaagggtacttgtttcaatttgttagtagtcagttctttcttctgggactctgctatgtatgtcacagttaagt

SEQ ID NO: 461708 - DNA, 2579 bp, Homo sapiens
tctccttcagttctcctcctcagtgaaggtggtagccgtcggtagcgacgacgagggtattccaggctgtcaggaggttcttgccagacagctgtgtgggagtgggcggccagcatcccccgaaagcgcggggaaggcagctcggtcgggtggaggaagcgatggcatccacgctgagctccagtcctgggtagttattagccgcgtgactttggccaaattactgcacctctctcaacttcccgaactgtagaatgagtctgttaagaatactcacatgccaagcatcttgtgagatcacgcgaccgcacgtatgcgaagacgcgcttcatctagaaagcacaaaactctcaagccggccgacacggctgcgctctttgcacttacgggcctgggcttcctcttcaggcatgcgcggtggacctgcggcgcggcccgtcaggcactgcggtaggcgccctaggggcttgcaggaccctgaccccaagatggcggcgcccagcgaagtggccgcgatagcccctggcgaaggcgatggcggaggcggcggctttggctcctggctggacggacggttggaggcactgggagtggaccgagccgtttatggagcctacatcttgggtatcctgcaggaggaggaggaagaagagaagctggacgctctgcaggggatcctctctgctttcctggaagaagattccctccttaatatctgcaaggagattgtggaacgatggtcagaaactcagaatgttgtcaccaaagtgaaaaaagaagatgaagtacaggccattgccaccctaattgagaagcaggcacaaatcgtagtaaagccaaggatggtgtcagaagaggagaagcagagaaaagctgccctcctggcccagtatgctgatgtgacagatgaagaggatgaagcagatgagaaggatgattcaggtgctaccacaatgaacattggttctgacaaacttctgttccgaaacaccaatgtggaagatgtccttaatgcccgaaaactggagcgagactcacttcgggatgaatcccaaaggaagaaggaacaggacaagctgcagagggagagagacaaactagccaagcaggagcgcaaggaaaaggaaaaaaaaaggacacagagaggggagcgaaagcgataaccttggcctactctattctttccccccatgaacttatcaaagggagaactggttgtgtatttaagagaaatgagagtgcattgcaaagtagtttcccaaggcatttcccctattgtttacatggtcaaaaggaaaatcaaaatcacttctaattacaaaatgtgctgttttggtggggtgggcaatcagattattatagttgatgactgtaccaaagatctggaatgggggccacctttatattttaatactcaagtcctgtgctccttttggccactttaaaaagtcttccctcaccttggataaataggattcagaaagctaacagttttcattctgaaggagcagaaacataatcaatccctccctgagataaaatgtgggcatgcacattgctttggagtcagtattcagctgtaagtgtagtattgttttatggctgaaatagaaagctaatgaagaggcctacctggatccagattttatgttaacatggcagcaaaactaggaaaatgggaagaaattacttgcggggtgttctagatctgattttttttttttttttgaaagtttcagcctgtgggaggaaaagaggtatcttttaaaatagagatagttacatattttcctcatctaggctgtgtcactattgggtgcaaggatatcattgttggctagattcattttgtataatcatgtatcctcttgtgtgctggtagagattttaatcctgatttttccataaaacatgagtattaagaaataattcctggtttggagaaactggagaaatcacccttttaaggaagaaacactggaaatttctgctaacaccaagatatttaagagtgtacatagtaggtgctcaacaaatttattgaatgaatgagtgaatggaaaaactgggagagtcaaaagtgagcagaagctctccatttctacttctgtcacaaaccacattaaattgtaaataaggcccttctccacttgacttcaggcagcagattgtctagaagcctaaggacagcaatttctctgacaagacaaagtagatattttataccaggggttggcaaactactgcccacgggccgaatttggcccagtctgtttttgtatggtgcaaactaaaaatgatttttacatttttaaagagttataaaagaaaaaaatatgtggtctgtgaaatctaaaatatttactacctggcctgttggaggaaaggtttgccaatctctgttttataccattaactatgagattaacaaaaacttttacctttgtgcagaaggttaaaaaaaaaaaaacatggttaaggaaaaggagacatgttacctcttcatacactcctataactgtggcattgcaaaaaataaaaataaccacctttaaaaaaataaatcttatttaaattgc

SEQ ID NO: 461709 - DNA, 2094 bp, Homo sapiens
gctgtactggccggaatttttgggatcgcgatagcccctggcgaaggcgatggcggaggcggcggctttggctcctggctggacggacggttggaggcactgggagtggaccgagccgtttatggagcctacatcttgggtatcctgcaggaggaggaggaagaagagaagctggacgctctgcaggggatcctctctgctttcctggaagaagattccctccttaatatctgcaaggagattgtggaacgatggtcagaaactcagaatgttgtcaccaaagtgaaaaaagaagatgaagtacaggccattgccaccctaattgagaagcaggcacaaatcgtagtaaagccaaggatggtgtcagaagaggagaagcagagaaaagctgccctcctggcccagtatgctgatgtgacagatgaagaggatgaagcagatgagaaggatgattcaggtgctaccacaatgaacattggttctgacaaacttctgttccgaaacaccaatgtggaagatgtccttaatgcccgaaaactggagcgagactcacttcgggatgaatcccaaaggaagaaggaacaggacaagctgcagagggagagagacaaactagccaagcaggagcgcaaggaaaaggaaaaaaaaaggacacagagaggggagcgaaagcgataaccttggcctactctattctttccccccatgaacttatcaaagggagaactggttgtgtatttaagagaaatgagagtgcattgcaaagtagtttcccaaggcatttcccctattgtttacatggtcaaaaggaaaatcaaaatcacttctaattacaaaatgtgctgttttggtggggtgggcaatcagattattatagttgatgactgtaccaaagatctggaatgggggccacctttatattttaatactcaagtcctgtgctccttttggccactttaaaaagtcttccctcaccttggataaataggattcagaaagctaacagttttcattctgaaggagcagaaacataatcaatccctccctgagataaaatgtgggcatgcacattgctttggagtcagtattcagctgtaagtgtagtattgttttatggctgaaatagaaagctaatgaagaggcctacctggatccagattttatgttaacatggcagcaaaactaggaaaatgggaagaaattacttgcggggtgttctagatctgattttttttttttttttgaaagtttcagcctgtgggaggaaaagaggtatcttttaaaatagagatagttacatattttcctcatctaggctgtgtcactattgggtgcaaggatatcattgttggctagattcattttgtataatcatgtatcctcttgtgtgctggtagagattttaatcctgatttttccataaaacatgagtattaagaaataattcctggtttggagaaactggagaaatcacccttttaaggaagaaacactggaaatttctgctaacaccaagatatttaagagtgtacatagtaggtgctcaacaaatttattgaatgaatgagtgaatggaaaaactgggagagtcaaaagtgagcagaagctctccatttctacttctgtcacaaaccacattaaattgtaaataaggcccttctccacttgacttcaggcagcagattgtctagaagcctaaggacagcaatttctctgacaagacaaagtagatattttataccaggggttggcaaactactgcccacgggccgaatttggcccagtctgtttttgtatggtgcaaactaaaaatgatttttacatttttaaagagttataaaagaaaaaaatatgtggtctgtgaaatctaaaatatttactacctggcctgttggaggaaaggtttgccaatctctgttttataccattaactatgagattaacaaaaacttttacctttgtgcagaaggttaaaaaaaaaaaaacatggttaaggaaaaggagacatgttacctcttcatacactcctataactgtggcattgcaaaaaataaaaataaccacctttaaaaaaataaatcttatttaaattgc

SEQ ID NO: 461710 - DNA, 2025 bp, Homo sapiens
cggacgcgtgggtcgagccacgcttttcggcggtcccgcgggtctgtctcttgcttcaacagtgtttggacgtaacagatccggggactctcttaccagcctccgaccgtccctccgatttcgctctctgctttcctggaagaagattccctccttaatatctgcaaggagattgtggaacgatggtcagaaactcagaatgttgtcaccaaagtgaaaaaagaagatgaagtacaggccattgccaccctaattgagaagcaggcacaaatcgtagtaaagccaaggatggtgtcagaagaggagaagcagagaaaagctgccctcctggcccagtatgctgatgtgacagatgaagaggatgaagcagatgagaaggatgattcaggtgctaccacaatgaacattggttctgacaaacttctgttccgaaacaccaatgtggaagatgtccttaatgcccgaaaactggagcgagactcacttcgggatgaatcccaaaggaagaaggaacaggacaagctgcagagggagagagacaaactagccaagcaggagcgcaaggaaaaggaaaaaaaaaggacacagagaggggagcgaaagcgataaccttggcctactctattctttccccccatgaacttatcaaagggagaactggttgtgtatttaagagaaatgagagtgcattgcaaagtagtttcccaaggcatttcccctattgtttacatggtcaaaaggaaaatcaaaatcacttctaattacaaaatgtgctgttttggtggggtgggcaatcagattattatagttgatgactgtaccaaagatctggaatgggggccacctttatattttaatactcaagtcctgtgctccttttggccactttaaaaagtcttccctcaccttggataaataggattcagaaagctaacagttttcattctgaaggagcagaaacataatcaatccctccctgagataaaatgtgggcatgcacattgctttggagtcagtattcagctgtaagtgtagtattgttttatggctgaaatagaaagctaatgaagaggcctacctggatccagattttatgttaacatggcagcaaaactaggaaaatgggaagaaattacttgcggggtgttctagatctgattttttttttttttttgaaagtttcagcctgtgggaggaaaagaggtatcttttaaaatagagatagttacatattttcctcatctaggctgtgtcactattgggtgcaaggatatcattgttggctagattcattttgtataatcatgtatcctcttgtgtgctggtagagattttaatcctgatttttccataaaacatgagtattaagaaataattcctggtttggagaaactggagaaatcacccttttaaggaagaaacactggaaatttctgctaacaccaagatatttaagagtgtacatagtaggtgctcaacaaatttattgaatgaatgagtgaatggaaaaactgggagagtcaaaagtgagcagaagctctccatttctacttctgtcacaaaccacattaaattgtaaataaggcccttctccacttgacttcaggcagcagattgtctagaagcctaaggacagcaatttctctgacaagacaaagtagatattttataccaggggttggcaaactactgcccacgggccgaatttggcccagtctgtttttgtatggtgcaaactaaaaatgatttttacatttttaaagagttataaaagaaaaaaatatgtggtctgtgaaatctaaaatatttactacctggcctgttggaggaaaggtttgccaatctctgttttataccattaactatgagattaacaaaaacttttacctttgtgcagaaggttaaaaaaaaaaaaacatggttaaggaaaaggagacatgttacctcttcatacactcctataactgtggcattgcaaaaaataaaaataaccacctttaaaaaaataaatcttatttaaattgc

SEQ ID NO: 461711 - DNA, 3351 bp, Homo sapiens
tctccttcagttctcctcctcagtgaaggtggtagccgtcggtagcgacgacgagggtattccaggctgtcaggaggttcttgccagacagctgtgtgggagtgggcggccagcatcccccgaaagcgcggggaaggcagctcggtcgggtggaggaagcgatggcatccacgctgagctccagtcctgggtagttattagccgcgtgactttggccaaattactgcacctctctcaacttcccgaactgtagaatgagtctgttaagaatactcacatgccaagcatcttgtgagatcacgcgaccgcacgtatgcgaagacgcgcttcatctagaaagcacaaaactctcaagccggccgacacggctgcgctctttgcacttacgggcctgggcttcctcttcaggcatgcgcggtggacctgcggcgcggcccgtcaggcactgcggtaggcgccctaggggcttgcaggaccctgaccccaagatggcggcgcccagcgaagtggccgcgatagcccctggcgaaggcgatggcggaggcggcggctttggctcctggctggacggacggttggaggcactgggagtggaccgagccgtttatggagcctacatcttgggtatcctgcaggaggaggaggaagaagagaagctggacgctctgcaggggatcctctctgctttcctggaagaagattccctccttaatatctgcaaggagattgtggaacgatggtcagaaactcagaatgttgtcaccaaagtgaaaaaagaagatgaagtacaggccattgccaccctaattgagaagcaggcacaaatcgtagtaaagccaaggatggtgtcagaagaggagaagcagagaaaagctgccctcctggcccagtatgctgatgtgacagatgaagaggaatatcctttctggagtctcggcaccattccctaaagctcaagccagacatatttgtgggtttacagtgacctttggcaagttgctaatccccctctatagcttaattttcccctctaaaatggcagtaatctatggccctttgtggatatgcggagtgatattggattagttgatactggacttatatttttcaacacataatcattatattcctgaaaactttggtgtaaaacaaataatgtcttaatagtccatttatattatgctttcagaaaatacaatatagctattcagtgtgtatggttattagaatgtggttttcacttcagctttagtagtctaggaacaaaagcaaattgataaagtttaataaggttaaacatcttatttaactcttttaaggcattttaacagagccaagtacataaacatttagtcagttacattactactctgttcaccaaaactagcctagattctctaatattctgccattgaatgatataagtacttattctagaatgaaatttcattttgatgaaatattttgttttcttatttttttgtttctttggtaaaatattttaaaattcagatttaggtaaatctgaataagagttttattccaaaggacattttaaaacttttgtaatatagctttaggatttctctgttagaccaaggataaacataagggttttttttaaaaaaccaggaatagataaagacgattcaggactcagcaggtggagagaggataagtagaatgaggaaaggcagcagtaggtgtgatctgtgtgacctgtaccctaatcccttaactcacctgtttctgttccgaaacaccaatgtggaagatgtccttaatgcccgaaaactggagcgagactcacttcgggatgaatcccaaaggaagaaggaacaggacaagctgcagagggagagagacaaactagccaagcaggagcgcaaggaaaaggaaaaaaaaaggacacagagaggggagcgaaagcgataaccttggcctactctattctttccccccatgaacttatcaaagggagaactggttgtgtatttaagagaaatgagagtgcattgcaaagtagtttcccaaggcatttcccctattgtttacatggtcaaaaggaaaatcaaaatcacttctaattacaaaatgtgctgttttggtggggtgggcaatcagattattatagttgatgactgtaccaaagatctggaatgggggccacctttatattttaatactcaagtcctgtgctccttttggccactttaaaaagtcttccctcaccttggataaataggattcagaaagctaacagttttcattctgaaggagcagaaacataatcaatccctccctgagataaaatgtgggcatgcacattgctttggagtcagtattcagctgtaagtgtagtattgttttatggctgaaatagaaagctaatgaagaggcctacctggatccagattttatgttaacatggcagcaaaactaggaaaatgggaagaaattacttgcggggtgttctagatctgattttttttttttttttgaaagtttcagcctgtgggaggaaaagaggtatcttttaaaatagagatagttacatattttcctcatctaggctgtgtcactattgggtgcaaggatatcattgttggctagattcattttgtataatcatgtatcctcttgtgtgctggtagagattttaatcctgatttttccataaaacatgagtattaagaaataattcctggtttggagaaactggagaaatcacccttttaaggaagaaacactggaaatttctgctaacaccaagatatttaagagtgtacatagtaggtgctcaacaaatttattgaatgaatgagtgaatggaaaaactgggagagtcaaaagtgagcagaagctctccatttctacttctgtcacaaaccacattaaattgtaaataaggcccttctccacttgacttcaggcagcagattgtctagaagcctaaggacagcaatttctctgacaagacaaagtagatattttataccaggggttggcaaactactgcccacgggccgaatttggcccagtctgtttttgtatggtgcaaactaaaaatgatttttacatttttaaagagttataaaagaaaaaaatatgtggtctgtgaaatctaaaatatttactacctggcctgttggaggaaaggtttgccaatctctgttttataccattaactatgagattaacaaaaacttttacctttgtgcagaaggttaaaaaaaaaaaaacatggttaaggaaaaggagacatgttacctcttcatacactcctataactgtggcattgcaaaaaataaaaataaccacctttaaaaaaataaatcttatttaaattgc

SEQ ID NO: 461712 - DNA, 2520 bp, Homo sapiens
tctccttcagttctcctcctcagtgaaggtggtagccgtcggtagcgacgacgagggtattccaggctgtcaggaggttcttgccagacagctgtgtgggagtgggcggccagcatcccccgaaagcgcggggaaggcagctcggtcgggtggaggaagcgatggcatccacgctgagctccagtcctgggtagttattagccgcgtgactttggccaaattactgcacctctctcaacttcccgaactgtagaatgagtctgttaagaatactcacatgccaagcatcttgtgagatcacgcgaccgcacgtatgcgaagacgcgcttcatctagaaagcacaaaactctcaagccggccgacacggctgcgctctttgcacttacgggcctgggcttcctcttcaggcatgcgcggtggacctgcggcgcggcccgtcaggcactgcggtaggcgccctaggggcttgcaggaccctgaccccaagatggcggcgcccagcgaagtggccgcgatagcccctggcgaaggcgatggcggaggcggcggctttggctcctggctggacggacggttggaggcactgggagtggaccgagccgtttatggagcctacatcttgggtatcctgcaggaggaggaggaagaagagaagctggacgctctgcaggggatcctctctgctttcctggaagaagattccctccttaatatctgcaaggagattgtggaacgatggtcagaaactcagaatgttgtcaccaaagtgaaaaaagaagatgaagtacaggccattgccaccctaattgagaagcaggcacaaatcgtagtaaagccaaggatggtgtcagaagaggagaagcagagaaaagctgccctcctggcccagtatgctgatgtgacagatgaagaggattctgttccgaaacaccaatgtggaagatgtccttaatgcccgaaaactggagcgagactcacttcgggatgaatcccaaaggaagaaggaacaggacaagctgcagagggagagagacaaactagccaagcaggagcgcaaggaaaaggaaaaaaaaaggacacagagaggggagcgaaagcgataaccttggcctactctattctttccccccatgaacttatcaaagggagaactggttgtgtatttaagagaaatgagagtgcattgcaaagtagtttcccaaggcatttcccctattgtttacatggtcaaaaggaaaatcaaaatcacttctaattacaaaatgtgctgttttggtggggtgggcaatcagattattatagttgatgactgtaccaaagatctggaatgggggccacctttatattttaatactcaagtcctgtgctccttttggccactttaaaaagtcttccctcaccttggataaataggattcagaaagctaacagttttcattctgaaggagcagaaacataatcaatccctccctgagataaaatgtgggcatgcacattgctttggagtcagtattcagctgtaagtgtagtattgttttatggctgaaatagaaagctaatgaagaggcctacctggatccagattttatgttaacatggcagcaaaactaggaaaatgggaagaaattacttgcggggtgttctagatctgattttttttttttttttgaaagtttcagcctgtgggaggaaaagaggtatcttttaaaatagagatagttacatattttcctcatctaggctgtgtcactattgggtgcaaggatatcattgttggctagattcattttgtataatcatgtatcctcttgtgtgctggtagagattttaatcctgatttttccataaaacatgagtattaagaaataattcctggtttggagaaactggagaaatcacccttttaaggaagaaacactggaaatttctgctaacaccaagatatttaagagtgtacatagtaggtgctcaacaaatttattgaatgaatgagtgaatggaaaaactgggagagtcaaaagtgagcagaagctctccatttctacttctgtcacaaaccacattaaattgtaaataaggcccttctccacttgacttcaggcagcagattgtctagaagcctaaggacagcaatttctctgacaagacaaagtagatattttataccaggggttggcaaactactgcccacgggccgaatttggcccagtctgtttttgtatggtgcaaactaaaaatgatttttacatttttaaagagttataaaagaaaaaaatatgtggtctgtgaaatctaaaatatttactacctggcctgttggaggaaaggtttgccaatctctgttttataccattaactatgagattaacaaaaacttttacctttgtgcagaaggttaaaaaaaaaaaaacatggttaaggaaaaggagacatgttacctcttcatacactcctataactgtggcattgcaaaaaataaaaataaccacctttaaaaaaataaatcttatttaaattgc

SEQ ID NO: 461713 - DNA, 400 bp, Homo sapiens
tttttttaaggcagcagaacttcagtatataaaacaagtaaaatcagggctgctctgattgaagatggatacaaagcttggcctgcatggcctttcctttcctttctcaatggcccccgagccatgtcctttgaactgccaggctctaaggaggcagcagatgccaatgtcttcagtacaagtgctgcctatgtggactagtggttcagtgagcttgttctctctcatacaaccttgttcttccttccaccacctcccagatgaagtacaggccattgccaccctaattgagaagcaggcacaaatcgtagtaaagccaaggatggtgtcagaagaggagaagcagagaaaagctgccctcctggcccagtatgctgatgtgacagatgaagaggaatat

SEQ ID NO: 461714 - DNA, 2389 bp, Homo sapiens
ggtgtctggttttctgttcttgtgttagtttgctgagaatgatggttttcagcttcatccatgtccctgcagaaaacatgaactcatccttttttatggctgcatagtattccatggtgtgtatgtgccacattttctttatccagtctatcactgatgggcatttgggttggttccaagtctttgctattgtgaatagagctgcagtaaacatatgtgtgcatgtgtctttatagtagaattatttataatcctttgggtatatacccagtaatgagactgctgggtcaaatggtatttctagttctaggtccttgaggaattgccacactgtcttccacaatggttgaactactgtacactcccaccaacagtgtaaaagtgttcctatttctccacatcctctccagcatctgttgtttcctgactttttaatgatcgccattctaactggtgtgagatggtatctcattgtggtttcaatttgcatttctctaatgaccagtgatgatgagctttttttcatgattgttggctgcataaatgtcttcttttgataagtgtctgtttatatcctttgcccactttttgatggggttactttttcttgtaaatttaagttatctgtagattccaggtattagccctttgtcagatggatagattgcaaaaattttctcccattctgtaggtttcctgttcactccaacgatagtttcttttgttgtgaagaagctctttagtttaattagatcccatttgtcaattttggcttttgttgccatggctttttgtgttttaatcatgaagtcttcgcccgtgcctatatcctgaatggtattgcctgggttttcttctagggttcttagggttttaggtcttacatttaagtctttaattcaacttgaattaatttttgtatagagtgtaaggaaggggtccagtttcagttttctgctcatggctagccagttttcccaacaccgtttatcaaatagggaaacctttccccattgattgtttttgccaggtttgtaaaagatcagatggttgtagaggtgtggtattatttctgaggcctctgttccattccattaatctatatgtctgttttggtaccagtaccaggctgttttgttactgtagccatgtagtatactttgaagtcaggtagcatgatgcctccagctttgatctttttgcttaggattgtcttggctatgcgggctcttttttggttccatatgaaatttaaggtagttttttctaattctgtgaagaaagtcaatggtagcttgatggggatagcactgaatctataaattacttttggcactatggccattttcacgatattgattcttcctactcatgagcctggaatatttttccatttgtttgtgtcctctcttatttccttgagcagtggtttgtagttctccttgaagaagtccttcataatctcttgtaagttgtattcctaggtattttattctctttgtaataattgtgaatgggagttcactaatgatttggctctctgtttgtctattattgatgtacagaactgcttgtgatttttgcacattgattttgtatgctgagactttgctgaagttgcttatctgcttaaggagattttgggctgagatgatggggttttctaaatatgcaatcatgtcatctgcaaacagagacaatttgactccctctgttcctatttgaataccctttatttctttctcttgtctgattgtcctggccagaacttccgatactgtgttgaataggagcaatgagagaggtcatccttgtcttgtgccggttttcaaaagacatgcttccagtttttgccccttcactcaacgaggagccagccccgtggctcaagcacctgctggcttgcccaggtgctgctcgccacgagtctgttcgccttgtcctcacgcccctgtccacagatggatggagttaccgaacggcctccacgccgcgcttcacttatccccgctcacagcccatcttcgggctgttcataatgacaggcggtccctcgaaatgtgcagtgaattccacggacaacggaaaggcagctctatctgaaggtgaaactgctctagctaacagggaaagctctttaaaagaccatcaaagagacaccctgcacaatgcctgctttccggaggagcctcgcgcccacaaggccatcccccaaatccaaaatatgctggcatgctaatcgcgtgagacaacttggcccacggacagccacaaagcacaaaaacaaaacacaaactcactcagagaagaaacaagaatcgtgttttcctggcatctacgagaagcgctttattagaagcgctttatttttcctctagatttcttttct

SEQ ID NO: 461715 - DNA, 5535 bp, Homo sapiens
  misc_feature (1)..(1): n is a, c, g, or t
  misc_feature (5)..(5): n is a, c, g, or t
  misc_feature (9)..(16): n is a, c, g, or t
ncctntccnnnnnnnnggagtctggaatggaaactgactttggggagcctgagtggggcaatgactccccagcagctgggggttcactcttcctctcatgctcttgatggagctggtggtctgggggtcttactccttggaggccgtgtggaccataaggtccaccaccctgttgctgctgccaaattcatcccaggaaaggagcctgacaaagtggccattgaagaccatggagttgaggccagtgaagagatcattgatgatgacagtgtccattttgccgagttgaaagctgccctggtgaccaggtatccaatatggccaaatccattgactcagactctcaccattgtatcctggatgaggctgacactgcatgagcagatggagctgtttgctagctctgaaggacagatgtcttcccccgagaggcagctgctctcagatgaggagctaacctacgaatgcatcagatgtcccaataaagtctccctggagctggaaagtggcattactgaaacattccagaaacgagctgaagtcactcaaggaaggccttgggaactagggtttggcccggtgggcagcgcatggtagacattcacacgcgctccagcactgaacactgcgacctggcagggagctcacagtattgtgggagaaatgaagaagtaaatagttaattttaagataatgtagtggctgtgagatggaagttttcagggtgttaacagggatgggggacctaaccagtggctgaggaggaagacaggcaggggtgagaagtattgggaaaggcttccagaaagagttaatgccttcaagtctatttcttcctatcatccgtgagggggatatgtgggagaaaagttaggaattcacaaaccccaccatgcatccgatgagaaggaaaaaattttccttccaattttctatgcgatgctattattcctagggtcctcatgacttatattagtgaacatttttttgcctctcattttgaacatgaattcaatgaaagttaattaaaatgatgtaaaatgtgaccttgtgtgaattaattaatgttagtaaaaatgagcctttttccccctttttttttttcaattactcacatatggaaacccaagaaaacatttgccatcacttgactaagcactgtcaggactcatggttttcaacatctttctcctgcttacaaccataagaacaggcaggtggccaatgaggggaggagggtaaaagcgagaatttgttacgctggaattcagcagagcctctctctaacatgtggggtttaagattagtggaatcatgagtaagagaagtgggaaagagtataaactaagaatctacttagaaagctgactgagccactaagaaaggggttgtggtagtcagaaactctttctctgctcttctcaaagaacatggaacaaaatatcagttgagtcatttggaatgcatttggctgcaagtaatagaaaccctaattcatcataattggaacaattagatggtttgttatctcacataagaagaagtccggggggatggcagttccagggttgattaattcaccagctcaccagtgtcttaaagatccaggttatttcgatgtttctaccctgccatccccagtgttctggtttatcctcataggctgctgtcttaatggacccaaggtgctttggttccaggaacaacacacagagcccaagtccagaggcagaaaagcaaacatttttatcttgtggctttttctttttttttccaagagaaaccttcccagaagccccatcagcagatttccttttttagctccattggcccaattgcgtcacatgcctgaaccaattgtttagcaggggaaatcactccgtcctctctagcttcaaccatgaactctcagtcctgggtaagagggcagcctagccttccctaaaggacttggtaacttggaataagatgaacaaaatcagagttctatgaacaacgaagttgggggatggcagaggggacagcgactaacacgtccatgttaaacaagagttctctgctttctcttcttgaacttgaggggcacagccttggggatttgggggatgcccctttgatcatctcatttcttctccttggtagcaagtaattgatagaatcacaccagaaaaaagagcaaaatatgacaaagaaacaactttaatacagtgaggatactggggaacagaccagatgtgagcagacagggaagtctttagcaaaactgtggagtgcccaaagcttggcttctgatgcgtggagcctttccgttttgtgttcttcctcctcactccacatcccacccaagaaacctggtattttaatattctcctctttgctccattaaagcatcaaacatattcacacaaggtttacgtgaccaaggagtgcaagatagggattaaaaaatagacttgaaataccagctctgccatctgctaactttctgaccattttgggcctcaagttcctcaccaacaaagtgagaataatgatactacccagcaggttgttaccgctatgtttattagtgttcatcctattggagcaagctgactgctaacaactttaaaatcatgatggcttaacacaagtttgtttctcactaacacagagtctagtgtcgatggtcctgatcgggtggctttctggtgacctgaggactcaaggatactgcccttgcattttaaggtgccactgtcttcaacacaggatctttaggttttctctctgccacattattattatggctgttgctgttattgtaactaatcctgtgtattgaaacggcagtcattttccagatgtaactacggtaccctaacagttcactgatgttcatggccataattccaggaagccatttctgagagcttatgtaccttaaatcccagtttgaggtgtctagggaagagacaatagtccattaaggatgacagcagggaagtctagtaacttctctcctctccacgatacttagcatggtgttggacacagcaggtgctgacccagtgactgtggcacttactcatggtggatgcactactctatttccttgggtccctttcccattttcacaccccttggctccacgtttgcttttactctcggtatccagaacccatgcttctttgtgagagggctgccctcatgcttctggagtctcctttacctgtgtgcagagagagtgggggatacctagaaacatgcatccctctgagatggcccttgaccaatggagggaggggctctcagtctccaaatctcctctgtgggaggagccagtgccctgcaagcacgggaccttgcttgacattgcactcttgcttggcttccttctcactgtcttgcatcctcacttccctgcaggggacactgcccaacacatcactttctcacaaatctgcatctctgggatgcttctggggaaccagcctgagacaggaggtaagctgaagaagcagaattttgaagattctgggctctgtttgaatggaatagctgagacgggtctttgagaacatcagtatttgcctcccacctcagtttttacattcacaaattaaaggatcacacaggcagactttggtatgatatgcagttcctgagcagtgttgggactcaaagacgtttatggcagctcatcagcctgcatccagtgcttcaaagggttctaagagactggctcagccaactgccagcctggtcatttcgaaactgaaatgaaagcagcagagagagttatatttatcaactgagtgagacttgcttttctcaacaggatatttacgttgtgaactggtaaaatctgaactgcagaatatcagtttccagacattcttcctagatgatgccgtctgccacgggtcccttcctctctccagctgtctggaatggagctaccctgtctggtgcccaagcagccagctctgacccagagttaacatattatggattgtggagccacaggatggagtagcctgggtctgatggttctgttagtcaaggctagtcaaagaagcaggaccaacaggaaatacatatgtttatgtatgtatatgttatgtatatgctatgtatacacatacacacacacacagatacacagagagagagagagttaagaaagtggatcatgtgattgtggggctggcaagttcaaaatctgcagacccacagaagagctgatgttgcagctcaagtctgaaggcaatttggaggcagaattcccacttcttcaggggacctcagtcttttctcttaaagccttttactgattgaatgaggcccacccacattatgaagggtcatttgctttactcaaagtttactgatttaaatgttaatcacataaaaaaaaccttcacatcaatgctggtgggtgattgaaggtgggttattatgacaaatgcaatgaaataataaatgtggaagggcttctcacagtgcctgcctcagagtggaaactcaataaatactagggcattctgtgtctgaaaatctcacctctaattattctcttttccttccctattatacaaaacagcagcagcagtaacagcgaccacaaaatgcactccaagatacttctaaccatttcttgctgggggaatgtttgcatccttggttagttaaaacttttgtgttcctcccatgtcagaagcccctggatcttgtgtgaagctgtgcattccctgattagtttgtttctgtccttctgtggcttgttctaaagggctttgctgctgccttcatctggggaaattcacacactaatgcagtggtatctcatcccaatctattaggtgtgacaactactggcaagaaatagatttgtgtttaattctttgttgcccagcagggacctctatcacccaaagggaaacagccgtctatctacgaagctgtgatctcccctacaagcaagagaactcaattgccaggaggtctttgctttttctggcttccagagaatgcagaaatttcaaggagccactattgggctccttccctataggatgttgggccaggcaacagaacaaacctcctgaggcacttctacctgggaatgccctcctgaggccaatggcagccctctgatgaagatactatagtatttattttttgtacacgctggtgatcatccagtgtacatctctgcttagtgaaccttcatgaactggaggctgaatattctcatcctgcattgatagaaccacgtaggctggttctaggctgttttctgtgcaacactcaacatgacaataataatgatgatgatgctaatgatgattgtaaaatccgcagtagttgccatttattgccctatttggcttgtaagacttggcagatcacagtgacatacacacacacacactctctctctctctctctctctactgtgtgccagggactggacaaagcactttgcatgcattataacacttttcctaacaatcctgcagcaggcagcagtagcatccccgctttataact

SEQ ID NO: 461716 - DNA, 905 bp, Homo sapiens
caagggaggaaactgactgccttcttggggttttcttaactgtgctttttctgctctgcaggaaagatgcaacctgggccagaggcccctggaggttgtgcctgaacccagacagatcacacaaacctgagcagccattagctgctgtgtgggctcctttgcactgtggggctgctcctggggatatttacgttgtgaactggtaaaatctgaactgcagaatatcagtttccagacattcttcctagatgatgccgtctgccacggcagggacctctatcacccaaagggaaacagccgtctatctacgaagctgtgatctcccctacaagcaagagaactcaattgccaggaggtctttgctttttctggcttccagagaatgcagaaatttcaaggagccactattgggctccttccctataggatgttgggccaggcaacagaacaaacctcctgaggcacttctacctgggaatgccctcctgaggccaatggcagccctctgatgaagatactatagtatttattttttgtacacgctggtgatcatccagtgtacatctctgcttagtgaaccttcatgaactggaggctgaatattctcatcctgcattgatagaaccacgtaggctggttctaggctgttttctgtgcaacactcaacatgacaataataatgatgatgatgctaatgatgattgtaaaatccgcagtagttgccatttattgccctatttggcttgtaagacttggcagatcacagtgacatacacacacacacactctctctctctctctctctctactgtgtgccagggactggacaaagcactttgcatgcattataacacttttcctaacaatcctgcagcaggcagcagtagcatccccgctttataact

SEQ ID NO: 461717 - DNA, 4236 bp, Homo sapiens
  misc_feature (1)..(1): n is a, c, g, or t
  misc_feature (5)..(5): n is a, c, g, or t
  misc_feature (9)..(16): n is a, c, g, or t
ncctntccnnnnnnnnggagtctggaatggaaactgactttggggagcctgagtggggcaatgactccccagcagctgggggttcactcttcctctcatgctcttgatggagctggtggtctgggggtcttactccttggaggccgtgtggaccataaggtccaccaccctgttgctgctgccaaattcatcccaggaaaggagcctgacaaagtggccattgaagaccatggagttgaggccagtgaagagatcattgatgatgacagtgtccattttgccgagttgaaagctgccctggtgaccaggtatccaatatggccaaatccattgactcagactctcaccattgtatcctggatgaggctgacactgcatgagcagatggagctgtttgctagctctgaaggacagatgtcttcccccgagaggcagctgctctcagatgaggagctaacctacgaatgcatcagatgtcccaataaagtctccctggagctggaaagtggcattactgaaacattccagaaacgagctgaagtcactcaaggaaggccttgggaactagggtttggcccggtgggcagcgcatggtagacattcacacgcgctccagcactgaacactgcgacctggcagggagctcacagtattgtgggagaaatgaagaagtaaatagttaattttaagataatgtagtggctgtgagatggaagttttcagggtgttaacagggatgggggacctaaccagtggctgaggaggaagacaggcaggggtgagaagtattgggaaaggcttccagaaagagttaatgccttcaagtctatttcttcctatcatccgtgagggggatatgtgggagaaaagttaggaattcacaaaccccaccatgcatccgatgagaaggaaaaaattttccttccaattttctatgcgatgctattattcctagggtcctcatgacttatattagtgaacatttttttgcctctcattttgaacatgaattcaatgaaagttaattaaaatgatgtaaaatgtgaccttgtgtgaattaattaatgttagtaaaaatgagcctttttccccctttttttttttcaattactcacatatggaaacccaagaaaacatttgccatcacttgactaagcactgtcaggactcatggttttcaacatctttctcctgcttacaaccataagaacaggcaggtggccaatgaggggaggagggtaaaagcgagaatttgttacgctggaattcagcagagcctctctctaacatgtggggtttaagattagtggaatcatgagtaagagaagtgggaaagagtataaactaagaatctacttagaaagctgactgagccactaagaaaggggttgtggtagtcagaaactctttctctgctcttctcaaagaacatggaacaaaatatcagttgagtcatttggaatgcatttggctgcaagtaatagaaaccctaattcatcataattggaacaattagatggtttgttatctcacataagaagaagtccggggggatggcagttccagggttgattaattcaccagctcaccagtgtcttaaagatccaggttatttcgatgtttctaccctgccatccccagtgttctggtttatcctcataggctgctgtcttaatggacccaaggtgctttggttccaggaacaacacacagagcccaagtccagaggcagaaaagcaaacatttttatcttgtggctttttctttttttttccaagagaaaccttcccagaagccccatcagcagatttccttttttagctccattggcccaattgcgtcacatgcctgaaccaattgtttagcaggggaaatcactccgtcctctctagcttcaaccatgaactctcagtcctgggtaagagggcagcctagccttccctaaaggacttggtaacttggaataagatgaacaaaatcagagttctatgaacaacgaagttgggggatggcagaggggacagcgactaacacgtccatgttaaacaagagttctctgctttctcttcttgaacttgaggggcacagccttggggatttgggggatgcccctttgatcatctcatttcttctccttggtagcaagtaattgatagaatcacaccagaaaaaagagcaaaatatgacaaagaaacaactttaatacagtgaggatactggggaacagaccagatgtgagcagacagggaagtctttagcaaaactgtggagtgcccaaagcttggcttctgatgcgtggagcctttccgttttgtgttcttcctcctcactccacatcccacccaagaaacctggtattttaatattctcctctttgctccattaaagcatcaaacatattcacacaaggtttacgtgaccaaggagtgcaagatagggattaaaaaatagacttgaaataccagctctgccatctgctaactttctgaccattttgggcctcaagttcctcaccaacaaagtgagaataatgatactacccagcaggttgttaccgctatgtttattagtgttcatcctattggagcaagctgactgctaacaactttaaaatcatgatggcttaacacaagtttgtttctcactaacacagagtctagtgtcgatggtcctgatcgggtggctttctggtgacctgaggactcaaggatactgcccttgcattttaaggtgccactgtcttcaacacaggatctttaggttttctctctgccacattattattatggctgttgctgttattgtaactaatcctgtgtattgaaacggcagtcattttccagatgtaactacggtaccctaacagttcactgatgttcatggccataattccaggaagccatttctgagagcttatgtaccttaaatcccagtttgaggtgtctagggaagagacaatagtccattaaggatgacagcagggaagtctagtaacttctctcctctccacgatacttagcatggtgttggacacagcaggtgctgacccagtgactgtggcacttactcatggtggatgcactactctatttccttgggtccctttcccattttcacaccccttggctccacgtttgcttttactctcggtatccagaacccatgcttctttgtgagagggctgccctcatgcttctggagtctcctttacctgtgtgcagagagagtgggggatacctagaaacatgcatccctctgagatggcccttgaccaatggagggaggggctctcagtctccaaatctcctctgtgggaggagccagtgccctgcaagcacgggaccttgcttgacattgcactcttgcttggcttccttctcactgtcttgcatcctcacttccctgcaggggacactgcccaacacatcactttctcacaaatctgcatctctgggatgcttctggggaaccagcctgagacaggaggtaagctgaagaagcagaattttgaagattctgggctctgtttgaatggaatagctgagacgggtctttgagaacatcagtatttgcctcccacctcagtttttacattcacaaattaaaggatcacacaggcagactttggtatgatatgcagttcctgagcagtgttgggactcaaagacgtttatggcagctcatcagcctgcatccagtgcttcaaagggttctaagagactggctcagccaactgccagcctggtcatttcgaaactgaaatgaaagcagcagagagagttatatttatcaactgagtgagacttgcttttctcaacaggatatttacgttgtgaactggtaaaatctgaactgcagaatatcagtttccagacattcttcctagatgatgccgtctgccacgggtgagtgttttcagctttatgctgactatgtattaatataaagccattccttactcttctaccttaatatatagtctccttggttttaattaggtctctccttgcttctgaacttctggttttccccagtaatgtttaggaatgacctcagaccaggtacatacaaggtacaacgtggtatgtacaaggctgtacctcaagccacgtgagaggctaccttggccttgggcactatggtgaacactgtaaagtgccacgtagatcccctcaataaggacttgcagtcccagtggtgcagagtgctgctggcacacagaggttgcctgggctg

SEQ ID NO: 461718 - DNA, 1319 bp, Homo sapiens
tcatcctgtcctcacaatggctggtgtggagacccacagacttcatccttaggacggaccttcaggcacccaggctgcctactgacctccctggcatgggtgggaaccgggagctcgttggtaagcaggaggattcaggactatcgactgaaccccacctcctctgtggcacgcaccgtgctgtgtctttgcagtcatcatctcatcacctctgcaaaggaagattatctcccccattttgtgatgaggaaatggaggctccaggtggaaagatgcaacctgggccagaggcccctggaggttgtgcctgaacccagacagatcacacaaacctgagcagccattagctgctgtgtgggctcctttgcactgtggggctgctcctggggatatttacgttgtgaactggtaaaatctgaactgcagaatatcagtttccagacattcttcctagatgatgccgtctgccacggagaccatgtagatggattgaatggggatatgatgaggatgaccacccctgcatttgctaagttcttgggagtggcatcgatctcagccattccactggaatagggtcaggaaacaaaacgtgagggctctaccagctgctcagtctatcctttccaattgagcacactggaactgaggaagcaaagacagggtgagccctaacaccctcatcatcactgctgagcctgccttgacaagaactccatttatcacccgcctccataatagcccattctaactagctgtcatcgtggcatttcaggttctgctgatgtcattataatggaccttaactagtgggctgaaggcaatgaggggatgtgaggatgcatcttgtgaaggacaaaagtcatcctgtaaggattcatgagacctgagcagccagccagccctgaaatggttggaacaggagaaagaagaagagctcgacagataccctgcctgggctggcagctagctgcaccacaagctggccagctgacagcgggcacatcccttcatcacccagtgcctttcttccctcttgtgaaaatggagatatgctgagaaggttacttcagctcatccagagaaagcttcttcagctaactaggctgtagaaagggcctacagcctaaattttcaaaaacaagttaatgccagaatataaactccgtgaagtaacagattgtgtcggtttcattcctgcatgtatccctggtgcctagacagtgtctggcacacagtaggtgctcaacattgactgaatgtgagggaaaaacctatgtagttcaatactatgtagacaagatcataaatgatcacta

SEQ ID NO: 461719 - DNA, 614 bp, Homo sapiens
gagcctgcaacttcactccagagaaaaaccctttacaataagatactttatcagtttccttaagagcgggaggcttgtggtgaacatataatcatctgaaaggtgttaatgctcaaatcaggtgtatgggtggaaggaaattttccaaaaaaggaaaaaaaataaagatggggatgagttatgctgggtgaaagaagtcagtcaaaggtatacaggattccacctatgtgacattctagaaaaggcaaagctatagggagagagaacagattagtggttgccagaggttagtcgggggggggtgtggctatacagggagatttttgggggtggatggaacagctttgtatcctgattgtggtgagggctgcacaaatttatacgagttaaaattcatagaactgtaccatcctccaaaagaagtcaattttactgtataataattttaaaaacaagtatacattttttttaaagatggagaggctaacaaactttgcaacctttccaggtaaggattcatgagacctgagcagccagccagccctgaaatggttggaacaggagaaagaagaagagctcgacagataccctgcctgggctggcagctagctgca

SEQ ID NO: 461720 - DNA, 4751 bp, Homo sapiens
  misc_feature (1)..(1): n is a, c, g, or t
  misc_feature (5)..(5): n is a, c, g, or t
  misc_feature (9)..(16): n is a, c, g, or t
ncctntccnnnnnnnnggagtctggaatggaaactgactttggggagcctgagtggggcaatgactccccagcagctgggggttcactcttcctctcatgctcttgatggagctggtggtctgggggtcttactccttggaggccgtgtggaccataaggtccaccaccctgttgctgctgccaaattcatcccaggaaaggagcctgacaaagtggccattgaagaccatggagttgaggccagtgaagagatcattgatgatgacagtgtccattttgccgagttgaaagctgccctggtgaccaggtatccaatatggccaaatccattgactcagactctcaccattgtatcctggatgaggctgacactgcatgagcagatggagctgtttgctagctctgaaggacagatgtcttcccccgagaggcagctgctctcagatgaggagctaacctacgaatgcatcagatgtcccaataaagtctccctggagctggaaagtggcattactgaaacattccagaaacgagctgaagtcactcaaggaaggccttgggaactagggtttggcccggtgggcagcgcatggtagacattcacacgcgctccagcactgaacactgcgacctggcagggagctcacagtattgtgggagaaatgaagaagtaaatagttaattttaagataatgtagtggctgtgagatggaagttttcagggtgttaacagggatgggggacctaaccagtggctgaggaggaagacaggcaggggtgagaagtattgggaaaggcttccagaaagagttaatgccttcaagtctatttcttcctatcatccgtgagggggatatgtgggagaaaagttaggaattcacaaaccccaccatgcatccgatgagaaggaaaaaattttccttccaattttctatgcgatgctattattcctagggtcctcatgacttatattagtgaacatttttttgcctctcattttgaacatgaattcaatgaaagttaattaaaatgatgtaaaatgtgaccttgtgtgaattaattaatgttagtaaaaatgagcctttttccccctttttttttttcaattactcacatatggaaacccaagaaaacatttgccatcacttgactaagcactgtcaggactcatggttttcaacatctttctcctgcttacaaccataagaacaggcaggtggccaatgaggggaggagggtaaaagcgagaatttgttacgctggaattcagcagagcctctctctaacatgtggggtttaagattagtggaatcatgagtaagagaagtgggaaagagtataaactaagaatctacttagaaagctgactgagccactaagaaaggggttgtggtagtcagaaactctttctctgctcttctcaaagaacatggaacaaaatatcagttgagtcatttggaatgcatttggctgcaagtaatagaaaccctaattcatcataattggaacaattagatggtttgttatctcacataagaagaagtccggggggatggcagttccagggttgattaattcaccagctcaccagtgtcttaaagatccaggttatttcgatgtttctaccctgccatccccagtgttctggtttatcctcataggctgctgtcttaatggacccaaggtgctttggttccaggaacaacacacagagcccaagtccagaggcagaaaagcaaacatttttatcttgtggctttttctttttttttccaagagaaaccttcccagaagccccatcagcagatttccttttttagctccattggcccaattgcgtcacatgcctgaaccaattgtttagcaggggaaatcactccgtcctctctagcttcaaccatgaactctcagtcctgggtaagagggcagcctagccttccctaaaggacttggtaacttggaataagatgaacaaaatcagagttctatgaacaacgaagttgggggatggcagaggggacagcgactaacacgtccatgttaaacaagagttctctgctttctcttcttgaacttgaggggcacagccttggggatttgggggatgcccctttgatcatctcatttcttctccttggtagcaagtaattgatagaatcacaccagaaaaaagagcaaaatatgacaaagaaacaactttaatacagtgaggatactggggaacagaccagatgtgagcagacagggaagtctttagcaaaactgtggagtgcccaaagcttggcttctgatgcgtggagcctttccgttttgtgttcttcctcctcactccacatcccacccaagaaacctggtattttaatattctcctctttgctccattaaagcatcaaacatattcacacaaggtttacgtgaccaaggagtgcaagatagggattaaaaaatagacttgaaataccagctctgccatctgctaactttctgaccattttgggcctcaagttcctcaccaacaaagtgagaataatgatactacccagcaggttgttaccgctatgtttattagtgttcatcctattggagcaagctgactgctaacaactttaaaatcatgatggcttaacacaagtttgtttctcactaacacagagtctagtgtcgatggtcctgatcgggtggctttctggtgacctgaggactcaaggatactgcccttgcattttaaggtgccactgtcttcaacacaggatctttaggttttctctctgccacattattattatggctgttgctgttattgtaactaatcctgtgtattgaaacggcagtcattttccagatgtaactacggtaccctaacagttcactgatgttcatggccataattccaggaagccatttctgagagcttatgtaccttaaatcccagtttgaggtgtctagggaagagacaatagtccattaaggatgacagcagggaagtctagtaacttctctcctctccacgatacttagcatggtgttggacacagcaggtgctgacccagtgactgtggcacttactcatggtggatgcactactctatttccttgggtccctttcccattttcacaccccttggctccacgtttgcttttactctcggtatccagaacccatgcttctttgtgagagggctgccctcatgcttctggagtctcctttacctgtgtgcagagagagtgggggatacctagaaacatgcatccctctgagatggcccttgaccaatggagggaggggctctcagtctccaaatctcctctgtgggaggagccagtgccctgcaagcacgggaccttgcttgacattgcactcttgcttggcttccttctcactgtcttgcatcctcacttccctgcaggggacactgcccaacacatcactttctcacaaatctgcatctctgggatgcttctggggaaccagcctgagacaggaggtaagctgaagaagcagaattttgaagattctgggctctgtttgaatggaatagctgagacgggtctttgagaacatcagtatttgcctcccacctcagtttttacattcacaaattaaaggatcacacaggcagactttggtatgatatgcagttcctgagcagtgttgggactcaaagacgtttatggcagctcatcagcctgcatccagtgcttcaaagggttctaagagactggctcagccaactgccagcctggtcatttcgaaactgaaatgaaagcagcagagagagttatatttatcaactgagtgagacttgcttttctcaacaggatatttacgttgtgaactggtaaaatctgaactgcagaatatcagtttccagacattcttcctagatgatgccgtctgccacggagaccatgtagatggattgaatggggatatgatgaggatgaccacccctgcatttgctaagttcttgggagtggcatcgatctcagccattccactggaatagggtcaggaaacaaaacgtgagggctctaccagctgctcagtctatcctttccaattgagcacactggaactgaggaagcaaagacagggtgagccctaacaccctcatcatcactgctgagcctgccttgacaagaactccatttatcacccgcctccataatagcccattctaactagctgtcatcgtggcatttcaggttctgctgatgtcattataatggaccttaactagtgggctgaaggcaatgaggggatgtgaggatgcatcttgtgaaggacaaaagtcatcctgtaaggattcatgagacctgagcagccagccagccctgaaatggttggaacaggagaaagaagaagagctcgacagataccctgcctgggctggcagctagctgcaccacaagctggccagctgacagcgggcacatcccttcatcacccagtgcctttcttccctcttgtgaaaatggagatatgctgagaaggttacttcagctcatccagagaaagcttcttcagctaactaggctgtagaaagggcctacagcctaaattttcaaaaacaagttaatgccagaatataaactccgtgaagtaacagattgtgtcggtttcattcctgcatgtatccctggtgcctagacagtgtctggcacacagtaggtgctcaacattgactgaatgtgagggaaaaacctatgtagttcaatactatgtagacaagatcataaatgatcacta

SEQ ID NO: 461721 - DNA, 2103 bp, Homo sapiens
tcatcctgtcctcacaatggctggtgtggagacccacagacttcatccttaggacggaccttcaggcacccaggctgcctactgacctccctggcatgggtgggaaccgggagctcgttggtaagcaggaggattcaggactatcgactgaaccccacctcctctgtggcacgcaccgtgctgtgtctttgcagtcatcatctcatcacctctgcaaaggaagattatctcccccattttgtgatgaggaaatggaggctccaggtggaaagatgcaacctgggccagaggcccctggaggttgtgcctgaacccagacagatcacacaaacctgagcagccattagctgctgtgtgggctcctttgcactgtggggctgctcctggggatatttacgttgtgaactggtaaaatctgaactgcagaatatcagtttccagacattcttcctagatgatgccgtctgccacgggtcccttcctctctccagctgtctggaatggagctaccctgtctggtgcccaagcagccagctctgacccagagttaacatattatggattgtggagccacaggatggagtagcctgggtctgatggttctgttagtcaaggctagtcaaagaagcaggaccaacaggaaatacatatgtttatgtatgtatatgttatgtatatgctatgtatacacatacacacacacacagatacacagagagagagagagttaagaaagtggatcatgtgattgtggggctggcaagttcaaaatctgcagacccacagaagagctgatgttgcagctcaagtctgaaggcaatttggaggcagaattcccacttcttcaggggacctcagtcttttctcttaaagccttttactgattgaatgaggcccacccacattatgaagggtcatttgctttactcaaagtttactgatttaaatgttaatcacataaaaaaaaccttcacatcaatgctggtgggtgattgaaggtgggttattatgacaaatgcaatgaaataataaatgtggaagggcttctcacagtgcctgcctcagagtggaaactcaataaatactagggcattctgtgtctgaaaatctcacctctaattattctcttttccttccctattatacaaaacagcagcagcagtaacagcgaccacaaaatgcactccaagatacttctaaccatttcttgctgggggaatgtttgcatccttggttagttaaaacttttgtgttcctcccatgtcagaagcccctggatcttgtgtgaagctgtgcattccctgattagtttgtttctgtccttctgtggcttgttctaaagggctttgctgctgccttcatctggggaaattcacacactaatgcagtggtatctcatcccaatctattaggtgtgacaactactggcaagaaatagatttgtgtttaattctttgttgcccagcagggacctctatcacccaaagggaaacagccgtctatctacgaagctgtgatctcccctacaagcaagagaactcaattgccaggaggtctttgctttttctggcttccagagaatgcagaaatttcaaggagccactattgggctccttccctataggatgttgggccaggcaacagaacaaacctcctgaggcacttctacctgggaatgccctcctgaggccaatggcagccctctgatgaagatactatagtatttattttttgtacacgctggtgatcatccagtgtacatctctgcttagtgaaccttcatgaactggaggctgaatattctcatcctgcattgatagaaccacgtaggctggttctaggctgttttctgtgcaacactcaacatgacaataataatgatgatgatgctaatgatgattgtaaaatccgcagtagttgccatttattgccctatttggcttgtaagacttggcagatcacagtgacatacacacacacacactctctctctctctctctctctactgtgtgccagggactggacaaagcactttgcatgcattataacacttttcctaacaatcctgcagcaggcagcagtagcatccccgctttataact

SEQ ID NO: 461722 - DNA, 1112 bp, Homo sapiens
tgcgcggtcgggcataccggcttcgcttggcgcggcttggctggttggcttcgcttgttactggctctgactttggaaactgcgaagtttcctggttggaggtggtggctgaccagagtggcttggtcttactgggcctctgaggctgtgataggcggactggtgctgaggtgtctctgatagcctccgccatgaggaggagctctggcttcgggggccagaagggccaggggccctcctgctccttcaccggctgttggtgttgcaggggggacgatgtcgccgagagcgatgacagccccttcgcccagtgcgggtacaatatccaagagaaacacctcggcaagctccacagagctgccagccggggtgaagtctccaaggtggagtgcatcctttcgagcgggagcgctgacttggatgagagagacaagaagaaaaggactgctctgcatttggcctgtgccaacggccatccagaagtggtagctcttctggtggacagaggatgtcaacttgatgtctttgacaacaaaaacaggactgctctgctaaaggcggtacaatgccaggaagaggaatgtgcgactattttgctagaacacggagccgacccagaccttccagatgtctatggcaatactaccttacactatgccatctacaatgaggatatcccaatgacaaaaaaactgcttttacaccatgccaatattgaatcagcaaacaaggcttgtagggtccagccccacagggtcggtgggttttctccccgtgtgcggagacgagagagtgtagaaataaagacacaagacaaacagataaaagacagctgggcccgggggaccactaccaccaagatgcggagaccggtagtggcccagaatgccaggctgcgctgatatttattggatacaagacaaaggggcaggatattcagttgtcctagcatcagttgttgaaaacattgttctttctccactgaatgattttggtacccttagagaaaatcaattgatcatagatgtatgggtttatttctggactctcaattctattccttttatatttattctatccttatatcaatatcacatacttttgattgctat

SEQ ID NO: 461723 - DNA, 1193 bp, Homo sapiens
atcatcaaattgttggatggaaaacgatctcaaactgtgggaatcttgatatctagtttacatttagaaatgaaggatatccaacaggccattttcaatgtggatgactccgtggttgatctggagaccctggcagccttatatgaaaacagagcccaagaggatgagctggttaaaataagaaagtattacgagacatccaaagaagaagaactgaagctgctggataaacctgagcaatttttacatgagttagcccagattcctaattttgctgaacgtgcccagtgcataatcttcagatctgtcttttctgagggtatcacctccttgcacagaaaggtagagatcatcacgcgagcttctaagcaactgttaattctgttggtaccaagcctcccgacagcctattgagtacacagtcgatatttgttactgaatgaacatgggtgcatttggagttcagctccgtaataactggtgtttgccatcacaggacttgctgcacgtgaagagcgtgaaggatattttagctctcatcttggcttttggaaattatatgaatggaggaaataggactcggggacaagccgatggatatagcttagaaattctgcccaaactcaaggatgtcaaaagtcgggtatttatttttcataataagttcccatgatctgccattattttctttctttacctttaattttaaaaaacgtattccagattgttccatttatctctatcctccccttaacaacatttatattagagcatgcatttttttgtttgctttcttttcactttcgaataaagagtttggttttttttttttcacgttagactttattttcaattactcaattcccatcttcgtgtgctctgacatacacaatcaggataatgggattaatctggtggactacgttgttaagtattacctgcgttactatgatcagcgcgcgcacgagcgtgcacacacacacacgcaatcaaaaccaggactgaatctgataaagttttggaaaatggaaagagatactatgcctgagttcttccagcatagattagcatggagctttgtagtgaggatcttagatgttgttccatcttggcactcagatgagagtactgcttccattttaaagtagtaaaataagtatatgaagatgggggaaaaaagtacattgtgtctg

SEQ ID NO: 461724 - DNA, 734 bp, Homo sapiens
atcatcaaattgttggatggaaaacgatctcaaactgtgggaatcttgatatctagtttacatttagaaatgaaggatatccaacaggccattttcaatgtggatgactccgtggttgatctggagaccctggcagccttatatgaaaacagagcccaagaggatgagctggttaaaataagaaagtattacgagacatccaaagaagaagaactgaagctgctggataaacctgagcaatttttacatgagttagcccagattcctaattttgctgaacgtgcccagtgcataatcttcagatctgtcttttctgagggtatcacctccttgcacagaaaggtagagatcatcacgcgagcttctaaggacttgctgcacgtgaagagcgtgaaggatattttagctctcatcttggcttttggaaattatatgaatggaggaaataggactcggggacaagccgatggatatagcttagaaattctgcccaaactcaaggatgtcaaaagtcgggtatttatttttcataataagttcccatgatctgccattattttctttctttacctttaattttaaaaaacgtattccagattgttccatttatctctatcctccccttaacaacatttatattagagcatgcatttttttgtttgctttcttttcactttcgaataaagagttaccgagagccctttcttttctcttttaatgggcggcacgtgtga

SEQ ID NO: 461725 - DNA, 775 bp, Homo sapiens
aaatgtgtgaatgtggcagtgaatgtgtgcgaccctcctggatactccagctcactctggctctgtctcccccacttcagatgacagtgctgcagcccccaaaaccccctggggcatcaacatcatcaagaaaaataagaaggctgccccaagggcatttggggtcaggctggaggagtgccagccagccacggagaaccaggtgggtctctgccacacgccagagcaggcccggcagggggagaccaaggcacagaggcatgtccccttaatcgtggctgcacgctgtcacattgtggaggcacgagggctggagtccacaggcttttaccgagtgcctggcaacaatgcagtggtgtccagcctacaggagcagctcaatcctgggcctggtgacatcaaccagcaggatgagcgctggcaagacctcaatgtgatcaacagcctgctcaagtccttcttccgaaagctgcccgagcctcttttcactgctgccatttgtcccggggacatctgttgaggcccccatccctccccccgattggaagtgctgcctttatcatataataaatatccacatggcccacttcccccctttctagccttaacattgctctgccttttctgccatgccagccggcttcagctgtgccatccattcaggatgtttcagtccctggtagggcagatcctcccgcgttactctttctttaaaaactattcctggctgtctttgtgcgttagctcatccagatgaatttcagaataggcttat

SEQ ID NO: 461726 - DNA, 567 bp, Homo sapiens
aaatgtgtgaatgtggcagtgaatgtgtgcgaccctcctggatactccagctcactctggctctgtctcccccacttcagatgacagtgctgcagcccccaaaaccccctggggcatcaacatcatcaagaaaaataagaaggctgccccaagggcatttggggtcaggctggaggagtgccagccagccacggagaaccaggtgggtctctgccacacgccagagcaggcccggcagggggagaccaaggcacagaggcatgtccccttaatcgtggctgcacgctgtcacattgtggaggcacgagggctggagtccacaggcttttaccgagtgcctggcaacaatgcagtggtgtccagcctacaggagcagctcaatcctgggcctggtgacatcaaccagcaggatgagcgctggcaagacctcaatgtgatcaacagcctgctcaagtccttcttccgaaagctgcccgagcctcttttcactgctgacaaatacaacgacttcatcgaggccaactgcattgaggacgtgcgtcgtggcttcggatctctagataacag

SEQ ID NO: 461727 - DNA, 2619 bp, Homo sapiens
gatcctcgtgaggtcttgggggtcccaccgccctgcgagccgcgcccgcgccccgccagacccggaactgcgtcgctaggccgggagagggaggcggcgccgcagagcctcgggtgcagtctgagaagtttgggagtgacttgaagagtgactggaagcaccccagacccgaacgtcgggacctggttccctctttaatcacacccccgggggcgcttcgtgtgaggttccacgggggaaggcgagaggcgcaggctgccacacacgcactgtttggaagaggggaagcattgccccccctgcaccacctcaccaagatggctactttgggacacacattccccttctatgctggccccaagccaaccttcccgatggacaccactttggccagcatcatcatgatctttctgactgcactggccacgttcatcgtcatcctgcctggcattcggggaaagacgaggctgttctggctgcttcgggtggtgaccagcttattcatcggggctgcaatcctggctgtgaatttcagttctgagtggtctgtgggccaggtcagcaccaacacatcatacaaggccttcagttctgagtggatcagcgctgatattgggctgcaggtcgggctgggtggagtcaacatcacactcacagggacccccgtgcagcagctgaatgagaccatcaattacaacgaggagttcacctggcgcctgggtgagaactatgctgaggagtatgcaaaggctctggagaaggggctgccagaccctgtgttgtacctagctgagaagttcactccaagaagcccatgtggcctataccgccagtaccgcctggcgggacactacacctcagccatgctatgggtggcattcctctgctggctgctggccaatgtgatgctctccatgcctgtgctggtatatggtggctacatgctattggccacgggcatcttccagctgttggctctgctcttcttctccatggccacatcactcacctcaccctgtcccctgcacctgggcgcttctgtgctgcatactcaccatgggcctgccttctggatcacattgaccacaggactgctgtgtgtgctgctgggcctggctatggcggtggcccacaggatgcagcctcacaggctgaaggctttcttcaaccagagtgtggatgaagaccccatgctggagtggagtcctgaggaaggtggactcctgagcccccgctaccggtccatggctgacagtcccaagtcccaggacattcccctgtcagaggcttcctccaccaaggcatactgtaaggaggcacaccccaaagatcctgattgtgctttataacattcctccccgtggaggccacctggacttccagtctggctccaaacctcattggcgccccataaaaccagcagaactgccctcagggtggctgttaccagacacccagcaccaatctacagacggagtagaaaaaggaggctctatatactgatgttaaaaaacaaaacaaaacaaaaagccctaagggactgaagagatgctgggcctgtccataaagcctgttgccatgataaggccaagcaggggctagcttatctgcacagcaacccagcctttccgtgctgccttgcctcttcaagatgctattcactgaaacctaacttcacccccataacaccagcagggtgggggttacatatgattctcctatggtttcctctcatccctcggcacctcttgttttcctttttcctgggttccttttgttcttcctttacttctccagcttgtgtggccttttggtacaatgaaagacagcactggaaaggaggggaaaccaaacttctcatcctaggtctaacattaaccaactatgccacattctctttgagcttcagttcccaaatttgctacataagattgcaagacttgccaagaatcttgggatttatctttctatgccttgctgacacctaccttggccctcaaacaccacctcacaagaagccaggtgggaagttagggaatcaactccaaaacgctattccttcccaccccactcagctgggctagctgagtggcatccaggacgggggagtgggtgacctgcctcatcactgccacctaacgtccccctggggtggttcagaaagatgctagctctggtagggtccctccggcctcactagagggcgcccctattactctggagtcgacgcagagaatcaggtttcacagcactgcggagagtgtactaggctgtctccagcccagcgaagctcatgaggacgtgcgaccccggcgcggagaagccatgaaaattaatgggaaaaacagtttttaaaaaacaaaagaaaaaaaggtttatttacagatcgccccaggagactttccctggtgcctgcggatgtccgaggcctcgcgccagcagcgctcagtgcccttcctggagctctcctggcccaggcctggcgggcactgcttcccggcctgcgatgtcccaaggcggggaaggagtccagattgggtccccctcacaggttagtggtgatacattttaagtctgggagagcggcctgcttgtgcagtgggtcgccgaggataagag

SEQ ID NO: 461728 - DNA, 2770 bp, Homo sapiens
gatcctcgtgaggtcttgggggtcccaccgccctgcgagccgcgcccgcgccccgccagacccggaactgcgtcgctaggccgggagagggaggcggcgccgcagagcctcgggtgcagtctgagaagtttgggagtgacttgaagagtgactggaagcaccccagacccgaacgtcgggacctggttccctctttaatcacacccccgggggcgcttcgtgtgaggttccacgggggaaggcgagaggcgcaggctgccacacacgcactgtttggaagaggggaagcattgccccccctgcaccacctcaccaagatggctactttgggacacacattccccttctatgctggccccaagccaaccttcccgatggacaccactttggccagcatcatcatgatctttctgactgcactggccacgttcatcgtcatcctgcctggcattcggggaaagacgaggctgttctggctgcttcgggtggtgaccagcttattcatcggggctgcaatcctggctgtgaatttcagttctgagtggtctgtgggccaggtcagcaccaacacatcatacaaggccttcagttctgagtggatcagcgctgatattgggctgcaggtcgggctgggtggagtcaacatcacactcacagggacccccgtgcagcagctgaatgagaccatcaattacaacgaggagttcacctggcgcctgggtgagaactatgctgaggagtatgcaaaggctctggagaaggggctgccagaccctgtgttgtacctagctgagaagttcactccaagaagcccatgtggcctataccgccagtaccgcctggcgggacactacacctcagccatgctatgcaggtagaagtacctgggccagtcctcactgggtcctggctctccagggtggcattcctctgctggctgctggccaatgtgatgctctccatgcctgtgctggtatatggtggctacatgctattggccacgggcatcttccagctgttggctctgctcttcttctccatggccacatcactcacctcaccctgtcccctgcacctgggcgcttctgtgctgcatactcaccatgggcctgccttctggatcacattgaccacaggactgctgtgtgtgctgctgggcctggctatggcggtggcccacaggatgcagcctcacaggctgaaggctttcttcaaccagagtgtggatgaagaccccatgctggagtggagtcctgaggaaggtggactcctgagcccccgctaccggtccatggctgacagtcccaagtcccaggacattcccctgtcagaggcttcctccaccaaggcatactgtaaggaggcacaccccaaagatcctgattgtgctttataacattcctccccgtggaggccacctggacttccagtctggctccaaacctcattggcgccccataaaaccagcagaactgccctcagggtggctgttaccagacacccagcaccaatctacagacggagtagaaaaaggaggctctatatactgatgttaaaaaacaaaacaaaacaaaaagccctaagggactgaagagatgctgggcctgtccataaagcctgttgccatgataaggccaagcaggggctagcttatctgcacagcaacccagcctttccgtgctgccttgcctcttcaagatgctattcactgaaacctaacttcacccccataacaccagcagggtgggggttacatatgattctcctatggtttcctctcatccctcggcacctcttgttttcctttttcctgggttccttttgttcttcctttacttctccagcttgtgtggccttttggtacaatgaaagacagcactggaaaggaggggaaaccaaacttctcatcctaggtctaacattaaccaactatgccacattcttttccgtggcgcctcggaggcgttcagctgcttcaagatgaagctgaacatctccttcccagccactggcctgccagaaactcattgaagtggacggatgaacgcaaacttcgtactttctatgagaagcgtatggccacagaagttgctgctgacgctctgggtgaagaatggaagggttatgtggtccgaatcagtggtgggaacgacaaacaaggtttccccatgaagcagggtgtcttgacccatggccgtgtccgcctgctactgagtaaggggcattcctgttacagaccaaggagaactggagaaagaaagagaaaatcagttcgtggttgcattgtggatgcaaatctgagcgttctcaacttggttattgtaaaaaaaggagagaaggatattcctggactgactgatactacagtgcctcgccgcctgggccccaaaagagctagcagaatccgcaaacttttcaatctctctaaagaagatgatgtccgccagtatgttgtaagaaagcccttaaataaagaaggtaagaaacctaggaccaaagcacccaagattcagcgtcttgttactccacgtgtcctgcagcacaaacggcggcgtattgctctgaagaagcagcgtaccaagaaaaataaagaagaggctgcagaatatgctaaaccttttggccaagagaatgaaggaggctaaggagaagcgccaggaacaaattgcgaagagacgcagactttcctctctgcgagcttctacttctaagtctgaatccagtcagaaataagattttttgagtaacaaataaataagatcagactctg

SEQ ID NO: 461729 - DNA, 613 bp, Homo sapiens
  misc_feature (2)..(2): n is a, c, g, or t
  misc_feature (4)..(4): n is a, c, g, or t
  misc_feature (6)..(6): n is a, c, g, or t
  misc_feature (9)..(9): n is a, c, g, or t
  misc_feature (12)..(15): n is a, c, g, or t
  misc_feature (17)..(17): n is a, c, g, or t
tnananacnaannnnangggactccagacatggaagagggttcctctggctaaagtaactggagaagaatccataaaggtgggggccaaggagccagatattaaagaagagaatgagcatcaggagctagggagagcacctagggagggggtggggaagaggggcacagcttgcccccatctggaggatttagcaaacccaagcaataaactcgggtctgtaaaactccattccctttctacaacacaagacactggagaccaaaacaattcaaaggaaaaagtgatgaggtgcactgagaaattcagggaatactccaaagctgcagaggatataaagaataggatttcccagaagaagagacatttttatcccagtaatccacaataaaatggggtgtagagagatgtatccagagctgcacagctagtggacgtctgagcaggagccacatgcagaagagtctgactccagggcctcagcgtgtaatgccctacacctgctgcatgggtttacatttccagctgctttaaagttaagactatggatgtctgaacagctctttttccttagagcataaaactaaactaacctaatgtttttttttttttaa

SEQ ID NO: 461730 - DNA, 1816 bp, Homo sapiens
cctacatgttacagacagcagatgggacctttcacattcagcctctgattggtttctccccgacccggcccgcgccacagcggtgctgctggtggtctgctctgtggggccgtgttgagagagaagctctgagggagaggctttgcatgcgtgcctcggtgcacggtgccagcctggatccctgtggctgtggaatgggcgcttgctgtttgccaggctccatcctgagagccatgcttggtggactggctacttcaatccttgcaccaaccctcggaagtcaatatggtggctgtccccactttacagatggggacacaggcttggaaatgccacatcacttgtgtcgcacgactagtgatgggggcggccctcccgaggaagcactggaagacagcagtggtcagagcccggtcagcagtgaaggtcagcgccattgccggcctccgaccctagtggcagtgtctggaacagggattctgggtgtgttggaggctgactgtagggaagccctaccccagaggtcccatgtggttggcccctggtgggatgtcttggcacctggaggcctggaagcccccgcgggtgggcagttggggccggtgttcctagaggaggccgtgctgccctgtggctatttgtgaaagagatttgcatctggtcactctgggagctggtctagttaagtactgggttccctttgctgagattttaagcagtaatcttttttctctctttctctttttgatgagtagagctctaggttaagaaatattaaaaggaatgtttttacatggaaaatgtttttttggttagcgttggctttcacttggtctaagtcagcaaatagctttcactcttaaactgtctgtcttcttgttctggtttttagagacacgtaatgactattttagcaaaatgcttacaaatctattttgtttttatgttttatgttttttacgttaacttaaaagtatttaacagacgttactccttcctgtatagaggtaggttaattggaaaacaaattgaaaacactattttttcatagtcatgtttactgtattttgtttgtgggggtagacactttgaagttcatgttaacccctgatgtgcccggccctcgagatatgtgtggaaggaaagtgtggttatggttttagaagcttgctttttctatacttttcatatcattcacatcttgtagggaggtatttatatttagacttaatatctgtaacttttttaaattctagaagtagtgattgttcctcacagaaaaattggaaaacagaaaaataaaataaaaattacccagagataaatgctagtaatatttcggtgtacctttgtcttttctcagtgcctgtttgcacacaactgatgtacgttctgcccattttcacattatctgtgagcatcctgcatgccttttaagactgcataatattcagtcatctggacatacacatttagcgacctatttcaatagtaatctgttgctgggatgtttatgttgtttgtttttctttttgctcaagctgagataaatctccttacacacaaacctttgactacatcgctgattgactgtatcctaacagcagactcctcccagtgggattagtgggtgaaaagctacagatgggaaaaaagctcatcacatcctgcctccttgctgtccagacagtggccccaggttacactcagctgaggacgaggccaccccctgcagctttatgagcatttgactcctgagaacattttaactgtagtccaagtaattaaataattattcaagctgtaatgtgcttgt

SEQ ID NO: 461731 - DNA, 3485 bp, Homo sapiens
gcggccgcgccctcgcacagatcccagctgggtcacccgcactgagtcaacagactgagcgcgtccaggcctgacagctctgcggctcgggccctgagagacagcgtctcgggctagagtgcagtggtgcgatcaaagttcactgcagccttgaacgtctggactctagggaccctgctgaatagctggggctacaggcgtgtgtcactgcgcccaggtttattcagaaaacatgtccactgcaattagggaggtaggagtttggagacagaccagaacacttctactgaagaattacttaattaaatgcagaaccaaaaagagtagtgttcaggaaattctttttccactattttttttattttggttaatattaattagcatgatgcatccaaataagaaatatgaagaagtgcctaatatagaactcaatcctatggacaagtttactctttctaatctaattcttggatatactccagtgactaatattacaagcagcatcatgcagaaagtgtctactgatcatctacctgatgtcataattactgaagaatatacaaatgaaaaagaaatgttaacatccagtctctctaagccgagcaactttgtaggtgtggttttcaaagactccatgtcctatgaacttcgtttttttcctgatatgattccagtatcttctatttatatggattcaagagctggctgttcaaaatcatgtgaggctgctcagtactggtcctcaggtttcacagttttacaagcatccatagatgctgccattatacagttgaagaccaatgtttctctttggaaggagctggagtcaactaaagctgttattatgggagaaactgctgttgtagaaatagatacctttccccgaggagtaattttaatatacctagttatagcattttcaccttttggatactttttggcaattcatatcgtagcagaaaaagaaaaaaaaataaaagaatttttaaagataatgggacttcatgatactgccttttgtggtattcagaagacatacagaaagaagggtgaaaatgtggaggctttgagaaatttgtcatttgacatatatgagggtcagattactgccttacttggccacagtggaacaggaaagagtacattgatgaatattctttgtggactctgcccaccttctgatgggtttgcatctatatatggacacagagtctcagaaatagatgaaatgtttgaagcaagaaaaatgattggcatttgtccacagttagatatacactttgatgttttgacagtagaagaaaatttatcaattttggcttcaatcaaagggataccagccaacaatataatacaagaagtgcagaaggttttactagatttagacatgcagactatcaaagataaccaagctaaaaaattaagtggtggtcaaaaaagaaagctgtcattaggaattgctgttcttgggaacccaaagatactgctgctagatgaaccaacagctggaatggacccctgttctcgacatattgtatggaatcttttaaaatacagaaaagccaatcgggtgacagtgttcagtactcatttcatggatgaagctgacattcttgcaggtttgttttctgccctagacagtcattcaaatttgggtgtcatttcttatggtgtttccatgacgactttggaagacgtatttttaaagctagaagttgaagcagaaattgaccaagcagacttatattttctaaaacctggagacaaaccacataaatacaaaacaagtctgcttcttcaaaattctgctggtgagagtgtgtgaaggtctgtgaacgagtgttggcatggagcatggggttgaggggtggataaaggtctggattttaaaactatatttaagatagaactgttggattgtacatatcagaatcaagattacagaaaagtatccaacatattttctcttaatccttttgattttcatatgctaaaaaataaatggacaaatatctgttttgtgtaaacatcattttcatttctctgagataaatgcccaagagtgcaattgctgaattatacatgttaattttataagaaattgccaaattattttccaagatgagtgttccattttatgttatccctaccagcagtgtgtgaatgacaaaagtttgaattatccaaaataattgcatttgccttagcttatgtttttattcttgtattagaatttacatgtgtctcatgttctcataattcattgaacagaaaacttgccaattttgttcatttctcctcttcttaactaatctttatatttcatgcttcctttatctctgtggacagctctttcatataataccttcagttattaggagtagatatttttatagatgacaaaaatcaactaaataaaattgttaggtatttggatttatgaaatattttagaaatttcaaattaaatgagaacatgagataggaaaactatgatcatttgagtttaccattaacaaacttgtgacgtaaataacaccttagatttatatgctataccagtgtacacaaaaggctttgaacatttcaaaagctttcacttaagctgaaagccttatgtaaatccaaaggatacttggcaatttattagtgtttttatttatgaaaggttcatttttaaaactgagagaattctttttctgtgtaaacatgtcttcccatctgtttccacagtatttcaaaagtagtaatgttttggctatttattatttgtatagctgtaaccccaaccgccatgacaccttttgctttattttaatctcagtttcttggcagcactactgtattctgattcttaaaaattttgttgaaattgttacatctcagaaataatgagccaaattaaaggctaaatggaatttgtatttagtgtgagggggacttttattacctataagcctggaatgtaacctttttggttttgctgatgtaaaattaagagatctacaataatttactaatttatttgtgtgtttctaaagtgtctaaaattataataaattgtttttcattttttttagatcaaagcttatactcaacttaaactttcaggtcttttgccatctgcatattggattggacaagctgttgttgatatccccttattttttatcattcttattttgatgctaggaagcttattggcatttcattatggattatatttttatactgtaaagttccttgctgtggtaagttaacgttagttgtactcatgctatttatagatagaatgttatttaaaatctgttataaacatgacagttgacttattgcataatttggttattaatttgttaaagaaaatagagcaagtgtgtctggtatttaatacatgtaatcattttatatgataagtgacttttaaaaacaataacttaccaccattttaaaataatttcttgaaactaaagtgatctttcatgt

SEQ ID NO: 461732 - DNA, 351 bp, Homo sapiens
tctactcagaattatgatattggggtcactcactttatttcaggtatggagctttttgaggattgtatttgtactaggttactgaccaaatttagggatatagctgtcccgttttactaggggctgctatcataactaaattaatttgatgtatttacattttctaattatagttgaagaccaatgtttctctttggaaggagctggagtcaactaaagctgttattatgggagaaactgctgttgtagaaatagatacctttccccgaggagtaattttaatatacctagttatagcattttcaccttttggatactttttggcaattcatatcgtagcagaaaaagaaa

SEQ ID NO: 461733 - DNA, 3366 bp, Homo sapiens
gcggccgcgccctcgcacagatcccagctgggtcacccgcactgagtcaacagactgagcgcgtccaggcctgacagctctgcggctcgggccctgaggtttattcagaaaacatgtccactgcaattagggaggtaggagtttggagacagaccagaacacttctactgaagaattacttaattaaatgcagaaccaaaaagagtagtgttcaggaaattctttttccactattttttttattttggttaatattaattagcatgatgcatccaaataagaaatatgaagaagtgcctaatatagaactcaatcctatggacaagtttactctttctaatctaattcttggatatactccagtgactaatattacaagcagcatcatgcagaaagtgtctactgatcatctacctgatgtcataattactgaagaatatacaaatgaaaaagaaatgttaacatccagtctctctaagccgagcaactttgtaggtgtggttttcaaagactccatgtcctatgaacttcgtttttttcctgatatgattccagtatcttctatttatatggattcaagagctggctgttcaaaatcatgtgaggctgctcagtactggtcctcaggtttcacagttttacaagcatccatagatgctgccattatacagttgaagaccaatgtttctctttggaaggagctggagtcaactaaagctgttattatgggagaaactgctgttgtagaaatagatacctttccccgaggagtaattttaatatacctagttatagcattttcaccttttggatactttttggcaattcatatcgtagcagaaaaagaaaaaaaaataaaagaatttttaaagataatgggacttcatgatactgccttttgtggtattcagaagacatacagaaagaagggtgaaaatgtggaggctttgagaaatttgtcatttgacatatatgagggtcagattactgccttacttggccacagtggaacaggaaagagtacattgatgaatattctttgtggactctgcccaccttctgatgggtttgcatctatatatggacacagagtctcagaaatagatgaaatgtttgaagcaagaaaaatgattggcatttgtccacagttagatatacactttgatgttttgacagtagaagaaaatttatcaattttggcttcaatcaaagggataccagccaacaatataatacaagaagtgcagaaggttttactagatttagacatgcagactatcaaagataaccaagctaaaaaattaagtggtggtcaaaaaagaaagctgtcattaggaattgctgttcttgggaacccaaagatactgctgctagatgaaccaacagctggaatggacccctgttctcgacatattgtatggaatcttttaaaatacagaaaagccaatcgggtgacagtgttcagtactcatttcatggatgaagctgacattcttgcaggtttgttttctgccctagacagtcattcaaatttgggtgtcatttcttatggtgtttccatgacgactttggaagacgtatttttaaagctagaagttgaagcagaaattgaccaagcagacttatattttctaaaacctggagacaaaccacataaatacaaaacaagtctgcttcttcaaaattctgctggtgagagtgtgtgaaggtctgtgaacgagtgttggcatggagcatggggttgaggggtggataaaggtctggattttaaaactatatttaagatagaactgttggattgtacatatcagaatcaagattacagaaaagtatccaacatattttctcttaatccttttgattttcatatgctaaaaaataaatggacaaatatctgttttgtgtaaacatcattttcatttctctgagataaatgcccaagagtgcaattgctgaattatacatgttaattttataagaaattgccaaattattttccaagatgagtgttccattttatgttatccctaccagcagtgtgtgaatgacaaaagtttgaattatccaaaataattgcatttgccttagcttatgtttttattcttgtattagaatttacatgtgtctcatgttctcataattcattgaacagaaaacttgccaattttgttcatttctcctcttcttaactaatctttatatttcatgcttcctttatctctgtggacagctctttcatataataccttcagttattaggagtagatatttttatagatgacaaaaatcaactaaataaaattgttaggtatttggatttatgaaatattttagaaatttcaaattaaatgagaacatgagataggaaaactatgatcatttgagtttaccattaacaaacttgtgacgtaaataacaccttagatttatatgctataccagtgtacacaaaaggctttgaacatttcaaaagctttcacttaagctgaaagccttatgtaaatccaaaggatacttggcaatttattagtgtttttatttatgaaaggttcatttttaaaactgagagaattctttttctgtgtaaacatgtcttcccatctgtttccacagtatttcaaaagtagtaatgttttggctatttattatttgtatagctgtaaccccaaccgccatgacaccttttgctttattttaatctcagtttcttggcagcactactgtattctgattcttaaaaattttgttgaaattgttacatctcagaaataatgagccaaattaaaggctaaatggaatttgtatttagtgtgagggggacttttattacctataagcctggaatgtaacctttttggttttgctgatgtaaaattaagagatctacaataatttactaatttatttgtgtgtttctaaagtgtctaaaattataataaattgtttttcattttttttagatcaaagcttatactcaacttaaactttcaggtcttttgccatctgcatattggattggacaagctgttgttgatatccccttattttttatcattcttattttgatgctaggaagcttattggcatttcattatggattatatttttatactgtaaagttccttgctgtggtaagttaacgttagttgtactcatgctatttatagatagaatgttatttaaaatctgttataaacatgacagttgacttattgcataatttggttattaatttgttaaagaaaatagagcaagtgtgtctggtatttaatacatgtaatcattttatatgataagtgacttttaaaaacaataacttaccaccattttaaaataatttcttgaaactaaagtgatctttcatgt

SEQ ID NO: 461734 - DNA, 619 bp, Homo sapiens
atcatcatcacaccacattgctatgtgtaaagaccatagaaagaaaacattagaagctgtaaaacagaaccttgactgcctgaattcagaccttgaaaaggacctgcagaaactggatatggagaatcaggttctccttagaaagattaaagagaaagaagaaactatttcaagcctggaaagaaagctggccttgtcactagaagaagccaaagaggaggaggagttgaactatgtcatagatgaacaggaggaatccctgagggagctggaattagagacagcaaagctggagaaaagtaacgcaatcctaagcaggaatgtggtggaggttcagaaaaagatttcagggttatttacaaatattggccttgaagaagaaaccacaaagcagatcctggaggaaatgaaggcaagactacagaagtcaacagagtcctgtgcaaagcaagaggaggaactggccaaggcagaggcaatgtctcttccactgagggtctgcccgggatagaatgggagagaatcccaagggtcttagaaacagatctgcttgaggcataggagggggaggtacaaaaacatcttgcaaatgaatttctgattcttatgcattcttatg

SEQ ID NO: 461735 - DNA, 731 bp, Homo sapiens
cggagaaagggccctgggctcggctcccacgctcgggcaggcctcccgccgggggatcggagctgcggtcactcgcggcttcggggccgtggcgtcccgcgcacagcttccgcgcctctgcaaggcgctctgaagaaatggaggtgaacagaggaacagccactcccagcaagcaagggaagaagaatcttgaaagcctgtgacttcacagagacttcttgattgatgcccctgaaatcagcctgccaagtgtggcctctgcagcataaatacaaggagtctgatgacacaagacggcgtgcttgtccaactcctctggcaaggacccttcttggagggctgagattgttttcctggaggccaccagacttcaggcttctaacctcagagcctgggtgctttgtcttacagcatggtctttctgagctgctggagacctctcagaactgctcctatagccaaatccacatgataacagtggattgccaaatccacatgataacacctcctcaggtgccattttggttgattgagccaggtgcagaccccaggaatgggaatgaagaggaaaggccacatgaagacaaagtggccatctgcaagccaggaagagggccctcaccggagccagaacctgatcagaaccttgcaaacccattaagtaaaatgagcataatttctgcgtgaagcaggccagttcttgatctaaacttgtttctctgtgtcgtgac

SEQ ID NO: 461736 - DNA, 4646 bp, Homo sapiens
ggagaaggactacgtctttgacaaaaggctcagatacagtgtccgccagaatgaaagcaactgtcggtttcgagacatcgttgtgcggaaggaagaagggttcacgcacatcctgctgtccagtcagacctcggataacaatgccctgacacctgagggagctgaggatggtaactagcgtgcataaaaacttgactgcagcgcgcaatttgctcatcattttacatacattatcccatttgatctttatgaccgtgtaatgataccctctcatcttatggatgaagaccatggggagagggactcactgaactgatcgtggacacagacttagccaaggggcagacccagaatccaaacatcacatcttgggcttttccagctaaactttgttgtcatcagcatgtcatatttgttggccgcagatataattcactcagttaatatcatgaaagaagtccggcgagcgctctgcaacgcagccacagacgacagcaaactgctgctcctcagcgcagtggggagcgtgttctgcagcggcctggattattcctacctaattggccggttgtccagcgaccggcgaaaggagagcactcggattgcagaagccatcagggactttgtgaaggcctttatccagtttaagaagcctatcgtggtggccatcaatgggccggccctgggcctgggtgcctccatcctgcccctctgtgacatcgtgtgggccagtgagaaggcctggttccagacgccctacgccaccatccgcctcacgcctgctggctgctcctcctacaccttcccccagatcctgggcgtcgcgctgaagcaagtctggacaggggagagcactgatgacagctggcacgtaggaagcacttgctgtgtgctgggctgggctgtcaacgccgtccacgcccctgtgaggcaggacagctgtgatccccattttgcggatgtggagactgaggctagagaggtttaccccacctctccacaggccgggacacagccatggatggtccttgggctcactgatgccaatgagatgctgttctgtgggcggaagctcaccgcccaggaggcctgcagcagggggctggtgtcgcaggtcttctggcccaccacgttcagccaggaggtcatgctgcgggtcaaggagatggcatcctgcagtgccgtggtgttagaggagtccaaatgcctcgtgcggagcttcctgaaatcagtgctggaagacgtgaacgagaaggaatgcctcatgctcaagcagctctggagctcctccaaaggccttgactcccttttcagctacctgcaggacaaaatttatgaagtctgaggggccccagctcacgggcccccaacttccagctctgccctgtgtttcggaaaccagagcacagtgtctgccccggccaaggagtttgtcaaggtgtctctttatacgtagggttgtgtccatttcctcgtgtcctttggttgctcctccttggtttgattttgtgtaatggatggaaaacgcagcatacttggcctcccccacctccctgcccttcctggccagagagctgtccaaggctgtatcttcccagggctccgccaagcaccgctgtcctttccccacttgctgaaatgcaccatgacggtccaggaaggggaagaccactttcacattcttctgactcaggctgtgtctacacagtgcctctgacttggagacttggccatcatggctctctctggttgtatttagatcgggtgtcagaggacgaccaatcttagggaatttccagaccaatgagcaaaatgattgtgcacacctggcctcagtctcctttccgacgcaaatctgtgtgactattagggcttggtcttaaaacccaattgagtgatttgcaaacccagatattgtacatttagaaatgttttgttaaatatatatttttaaaacaatgtaagtggaaattctgataatttatgtgtattatatgtaaagctagttttgcaaaaacaaactactagggaaatgttttttctttccttggacttgttttatttatttatttttgtttatatattgtgatgtctgttgttcacacagatactattttcatactaccctggaccaaatcccacacaaggttcatgccgtttggtgcattctagcaatgaaccatgtagaaataaagtttagagagatgaaaacagaaggatttctgtggacaaaaggaatagcgctgcacctctgtgtaaaacggttctcagctgtaataatagaatactagttccttaggatcctgtaaggacttcggacctgtcctacagggagttactatagggagacacctgcttttgcccaaatgcctgttgtcacagctctatctggatcttatctcctcctttgagaaagcaaatgtgagctttccaaaacccttagatgaccctggttcttacatattgtggcagacagtgtcttcactactgctaaattttcattagaaagagccccctcttttctgttgaacttctgattgggcgcagttatattcagcatcggttgaagtggggtcaggattctccttggacatggaaggggatgtttagaaattcctttagatcagtgtccaccttcattccctgcttgaaagaactagaaatgcttcagctttggatgtactatcaaatccaaacttctaaacatttcaaggatctctgaagattaaggtaggaatgtgaaaccatttctaaggtggaaatcttgctgttaagtcacaggtcctgggtgtaacgggggtggtgaaagtctgtattttggttgtttccatacagtcagttccaccaattgggtgaaagcaggtgaaatctttttgctgcagggtggactgaatttttcactttctgggtagttgttttgatcatgtgtaggcgaattccaggtaacttacagcaaatagatttgggatggaaaataccagacctctggttgtgtcagggtttatcctaatagctttcctgagacagagctcagactttcatttttgatcttccaccccagggccccctctctgtctatgggatcctttctcccctctctctaccattttcccgtaccttcccccataagtcactcccaagagcctgggcaggtctttgaggaattgcggctcattttggcagccccgtcctgcaattacctttgggtttgaaagaatagctgtgggtgggcaattgaggacacctctttagtcagggacctttctagcaatccactccctcccatcctgttagccatgcagtggaactctccttccctctctgccccaaccccggtgatggctcactctcagcatcttatgggaccatctgagttaacaaccctgttccaagaagactttgtgcagaacttttgttagggtggtcataccttctcaccaccatttggaagacacagcctaatgctgatgtacttaatgtgccccttccggcatagaaataatgtctgggtaacagccatcaaaatcactaagaatgacattggatagctatgagaaagtagtagagaattgatttaaaatatcattcttgtttggtatagattaaactaggaaatgttctctctgaagcatgaaaatgtttttcccatgtgaagtttagtacaaggatggaaaaataataatcacagtagactttgaacaatgcaactgtatctctgaatatccacatttaaaaatagccttcactgaatgctgaattgcatttcccattaatttttggttttaaaaattttgtaaactttttttttatttggaatttagtcacatccattaaattttccaatctagtttctgtggaaattttttaacagagagaaacaaatagaaacatcttcaaatcttcctaagtgaatatttaaaatgcagaattgcttatcttctgtttttctgtattcagacacttatatctgttgtatatattagtttagacactctcactaatatacacagtatttaagactctaaatgagatttcttaagtattttattttattctctgtaaatggttttgtataatctttaaacatctacactttgcctttgtagatatttaagggaaaccatttggggttgtcttgcatgtatatttttgttgtagataagtgttgcttagttatttctgcaaattttggttgaaatgcttacagactttaatacagtatatattttcaaaatataaacttttatatttctgtgataagttaggatatgcgttttaggcaatatttttcattaatatcacttgttcttttgaaaaatagcatactggtttggtgccaattttttcattagaatataatgctcttatattgttggagagcaggttaatcttttttcgaagtaattgcgtttgaagtataatttcaaaatgtattgaatttgtgaataagccttaccattaggatcagtaaatttttcaactttgcaactacataagtagtttaagatctccccgtaaattctcactgtgtggcagttgatggagtttgtgaacagagccttaagcttgttgcaaaaaaatttaaaaagggtaatacgggttgtttcctccatgcaacgtaagccatgctgatggactgaatgcag

SEQ ID NO: 461737 - DNA, 1130 bp, Homo sapiens
tgctctcccctgctttgtagctttgcatgtcttcttacatctctcacttcttggacttatgccatgcccacccctacctagaaaacagccactcctccaatactgaggttgccttttcttcctctagggctagcaaccacctcctcctttgcgacaggtatgacaggtgccccagacaggtgacctcgccagcactgcccaatgctggaagtctaattgtcggtaaacataccaccagtaacaaggtgcagctgagcgacactggcacccctcacaggctctcacagcccctgcaggggagagatgccaagaagacctgcacgttccctgccacacagaactgtttacttcatggaatggttttgacaggggaaactctgaaggaccacaggagttggaggttccacgtatctctaagtagtaacatacgatgggtccaaaacagaagaaagagaactcaagattcccgagccacagagctgttgattggaggctgactcagagaaaccctggattcagtgacatacagagacaacaggtacaggatcagtatgggttttaattgaggggctcggcaccaaatgacagacttgacacatccacccccaccatggatgctgtccgtccactgttgcacaatgtccttcagtgtctaatttacagatccagctgtatttccccttccacctgcatccctgaagttcctcccacctgaaaacttcacctgacccaagaaagcaaaggaaaaaacccggagagccagctcatggtctggttcactgtttaacagccagaagccagagcctgcgtactagaagtggatgcccaggaagtacttgtgagctgactaagaatgtaagaacgccacccacttcattcaggaaagtgaggcaggattccatggagtatgaatgactgcacatggaacaagcaggttatcatttatattcagcaagggacctccatgaacaggacatttggggagctgctatcaaacatcagaacttctgacactgtgcacacagtcttatattgtgccttgtctgttgtgatgtctcactacagtaatgattaagatgatgagcacttatgcgttgatattgcaatatgtctgtgtaagaactatcgct

SEQ ID NO: 461738 - DNA, 2648 bp, Homo sapiens
gggtcaccatccttgcagcacagcagaagtcacctctgccacggagaaggctgtgggtttgcatttctttggaatcacagtccagccagcacgttccccacttaaaagatttcataagctcacctttgagctgcgggaccctgccagggctgcagctcccatcctccccagacaaggcaagcctcagaatgaggcgacaacagcagctgtccaaatccttgggtgacagtaagaaccgccacaaaaagcccaaggaccccaagccaaaggtgaagaagcttaaatatcaccagtacattcccccagaccagaaggcagagaagtcccctccacctatggactcagcctacgctcggctgctccagcaacagcagctgttcctgcagctccaaatcctcagccagcagcagcagcagcagcaacaccgattcagctacctagggatgcaccaagctcagcttaaggaaccaaatgaacagatggtcagaaatccaaactcttcttcaacgccactgagcaatacccccttgtctcctgtcaaaaacagtttttctggacaaactggtgtctcttctttcaaaccaggcccactcccacctaacctggatgatctgaaggtctctgaattaagacaacagcttcgaattcggggcttgcctgtgtcaggcaccaaaacggctctcatggaccggcttcgacccttccaggactgctctggcaacccagtgccgaactttggggatataacgactgtcacttttcctgtcacacccaacacgctgcccaattaccagtcttcctcttctaccagtgccctgtccaacggcttctaccactttggcagcaccagctccagccccccgatctccccagcctcctctgacctgtcagtcgctgggtccctgccggacaccttcaatgatgcctccccctccttcggcctgcacccgtccccagtccacgtgtgcacggaggaaagtctcatgagcagcctgaatgggggctctgttccttctgagctggatgggctggactccgagaaggacaagatgctggtggagaagcagaaggtgatcaatgaactcacctggaaactccagcaagagcagaggcaggtggaggagctgaggatgcagcttcagaagcagaaaaggaataactgttcagagaagaagccgctgcctttcctggctgcctccatcaagcaggaagaggctgtctccagctgtccttttgcatcccaagtacctgtgaaaagacaaagcagcagctcagagtgtcacccaccggcttgtgaagctgctcaactccagcctcttggaaatgctcattgtgtggagtcctcagatcaaaccaatgtactttcttccacatttctcagcccccagtgttcccctcagcattcaccgctgggggctgtgaaaagcccacagcacatcagtttgcccccatcacccaacaaccctcactttctgccctcatcctccggggcccagggagaagggcacagggtctcctcgcccatcagcagccaggtgtgcactgcacagatccatgaattcaatgcctttcttcatattttacccatgcagatggctggtttacactcttctgataaggtggggccaaagttttcaattccatccccaactttttctaagtcaagttcagcaatttcagaggtaacacagcctccatcctatgaagatgccgtaaagcagcaaatgacccggagtcagcagatggatgaactcctggacgtgcttattgaaagcggagaaatgccagcagacgctagagaggatcactcatgtcttcaaaaagtcccaaagatacccagatcttcccgaagtccaactgctgtcctcaccaagccctcggcttcctttgaacaagcctcttcaggcagccagatcccctttgatccctatgccaccgacagtgatgagcatcttgaagtcttattaaattcccagagccccctaggaaagatgagtgatgtcacccttctaaaaattgggagcgaagagcctcactttgatgggataatggatggattctctgggaaggctgcagaagacctcttcaatgcacatgagatcttgccaggccccctctctccaatgcagacacagttttcaccctcttctgtggacagcaatgggctgcagttaagcttcactgaatctccctgggaaaccatggagtggctggacctcactccgccaaattccacaccaggctttagcgccctcaccaccagcagccccagcatcttcaacatcgatttcctggatgtcactgatctcaatttgaattcttccatggaccttcacttgcagcagtggtagaatgcccaatgcaccagtgctatggaagaccaatggagttccatgggggaaagcacacagccatacatactttactgtccaaaaacagaagaagaagaagagaattaaaaagaagcaatgatttctgtgccaatgaacaagaacaaaagtcatttttagaaatacatatactgtaatatttaccaacagtcagtaactgttaatgatttcaacaatgcattaaaagaatgtgctttctcagattaaggatgccaaaaaagatatttcactgccttttcaaagaccagtatattttct

SEQ ID NO: 461739 - DNA, 967 bp, Homo sapiens
gggaaacccttgtcccaaaagcccatgtgtacagcaaaagcaaatgacccggagtcagcagatggatgaactcctggacgtgcttattgaaagcggagaaatgccagcagacgctagagaggatcactcatgtcttcaaaaagtcccaaagatacccagatcttcccgaagtccaactgctgtcctcaccaagccctcggcttcctttgaacaagcctcttcaggcagccagatcccctttgatccctatgccaccgacagtgatgagcatcttgaagtcttattaaattcccagagccccctaggaaagatgagtgatgtcacccttctaaaaattgggagcgaagagcctcactttgatgggataatggatggattctctgggaaggctgcagaagacctcttcaatgcacatgagatcttgccaggccccctctctccaatgcagacacagttttcaccctcttctgtggacagcaatgggctgcagttaagcttcactgaatctccctgggaaaccatggagtggctggacctcactccgccaaattccacaccaggctttagcgccctcaccaccagcagccccagcatcttcaacatcgatttcctggatgtcactgatctcaatttgaattcttccatggaccttcacttgcagcagtggtagaatgcccaatgcaccagtgctatggaagaccaatggagttccatgggggaaagcacacagccatacatactttactgtccaaaaacagaagaagaagaagagaattaaaaagaagcaatgatttctgtgccaatgaacaagaacaaaagtcatttttagaaatacatatactgtaatatttaccaacagtcagtaactgttaatgatttcaacaatgcattaaaagaatgtgctttctcagattaaggatgccaaaaaagatatttcactgccttttcaaagaccagtatattttct

SEQ ID NO: 461740 - DNA, 1234 bp, Homo sapiens
  misc_feature (3)..(3): n is a, c, g, or t
  misc_feature (6)..(7): n is a, c, g, or t
  misc_feature (10)..(10): n is a, c, g, or t
ccncannagncagagcagttaagatgaaagggggcggatgaaaatgtcccggactgtgtcacccccagatcctactagaaataagaaaactccactgccaacatctatggtccccacaagtcctgggaggctctgctgcttggcagttcactcctcgggctctggcattggagactttggctggaatcgtggctgcgccctaacccagaacagagacagtaatacaggatgcgttcgggaccgaagcgaggtgatattcatgtattatggagcggtgtgctctcaatcaatccatgtcctgttattttcacaccaaaagcacctaacccctgcaattggtgtgcacgggggtgggcaccagttcttgtgctggctgaggtcattttcagaagggatggataactccttgcctccctggaagaaggcagagatgagtgttcagatctagaggtggctgtagtggaaacagagagccctgatccttcttgctcaacgcttcctgggccaatgtttgcaatcaaaatggccaatttccattcaaatgtcaattactatgggtgaggaaatcagcattacatcacagatgtgtgagcacctacacaaagcctgcaaatgctggacagggaacctcgtgcaaataatatggcagtattggcaggaatgatggaggaatccctttaaaatgtacacttcaggcagcagcagctaacagaaggcctgaccatcagaagggaaaatgcacatgcagatgaatgtgtggcagcactgggatcctccagatatccagttgattatgagaactatgactatctgcatagtcagagtcattctttggaatcagacagatgtgtatgggctggagtatgtacatattagggccataacaattctgaaaactggtgacgagaagccactcaccatttgctactaacagctcaaaggtgaagaatattccattaaataaagcactaaagaagataagcctctcctcaggcgacaaagggccaaccccaaatgaagtccatgctgcgggtcttaaggtcatctgctcataagaaactggtcacttctggtgtgagttaagatgaatggagagagaattggttcccagagaccacagtgaaaaaggttaagaacataataaagaccgtaagttccccaaatagtgaattgtgtttctcttcttcctaaatacagaaaggaagggtgctacttttcactctgagacagatgg

SEQ ID NO: 461741 - DNA, 1896 bp, Homo sapiens
  misc_feature (1)..(1): n is a, c, g, or t
  misc_feature (6)..(6): n is a, c, g, or t
  misc_feature (9)..(10): n is a, c, g, or t
  misc_feature (13)..(13): n is a, c, g, or t
nacatntannaantagtgaccatctgaagataaacctggaatgaggaataacaacctctcatttaaaggagttttaaagagacaagagggaggaaacgagaagagaatgacagtgtttctttcattaaaaggagcccaatatttattgagccaacaggtttacactgtgtctaccccagagtgtcatcagcccaaaccagatcagcgtcgcgtcccctgttactcggagtgcaagccatgctctcgagctggccatggcatcctgcgtcctctcccttcccccattggctctgttcttcctgccagtgctcttccccctgctcactgggttccagctgtgcgggcctccctgctgttcaatggaatgagacccatgcccctcctgggaacccaggacccaggacccaggacgagagttcagcaaagaccatttacagaagctatccttccaaaacggccactcagaaatggtgtcttttattttgcattctgtacaggaaggacaaatggagaaaagtctccagaaattggcctcgtttgaaaggacctcatgcaaagagagatctttggagacatttcagaaaggtttttattcaaacatattcgcagcttgtatgacagtggaatgttttgaaatgagcttgattctgtttacccatccttcttaatccaacaactctgctggtctctctgctgacacaagatcgttcgcaggttatagaaggatttaacacgtcagccaatgcaggaagtagtcctctgaaatacatgtccacagaacacgccgtgctttccagaagacgcaacagacagaaactttccaaagggaattacctgggatcatttctcatcctctctctctttctctgtattacttagccttaaaaaaaaaaaaaaaaggactaatacttcctgctttcacatctactttccagatagttttttctagagaacggtctggttctgtcacccaggttggaatgcagtgtcaggatcatagctccactgtgtgacctcaaactcttgggctcaagcaactctcctgcctcaagcaactctccagcctcagcctccgagtaactgagactacagtcagggaaatgaagagccactttcaacaattctgaagaagaaatatgggatgttttgcttcgggatggaggctggagcaggagtttctggagtctgccagtacccagtttgaatcccagctctgccttttatcagctgggtgttgggcaagttagctgacttttgtgagttttctcatcattaaaatgagaacactgttattggtctttcgggattgttttgagaaatgagatatcgagacatgcctggcacaaggccttaattcttcttcatggtcaagaaatggcagattttcccccttccattcccacccttgcacatagtaggttctcagcaagtatttgtagatgtaatcgaccagcagagatcatttgtacccttaacgcccacagagagtcacagatgctttcactgaaggagggtgtcccaagactcaatggcagggaataaaaatgccaagtcatgtaagtattccacaaagttagaggggaggagtaagtatctcttattcgtgcatctttatggtatgaccaagggctcatgatttgtaagcagttcaggcactgagacccgggacacaggtgacactgtatctgcagattcctttttctcattgtttctctgtcatgtttaatttttggttttgaaaacagcagaaaatccaaccagtgtgttcacaggacttctggctttgcagcaattcctttttctggggtcttttgcctaatcgtttactggtttggagacactgttttctgtattgtttaggactgaaaatgtagacctaactgaaatcaagcactc

SEQ ID NO: 461742 - DNA, 981 bp, Homo sapiens
gccactgcactgggccaggaatatctttctatgacaaacggtctggttctgtcacccaggttggaatgcagtgtcaggatcatagctccactgtgtgacctcaaactcttgggctcaagcaactctcctgcctcaagcaactctccagcctcagcctccgagtaactgagactacagtcagggaaatgaagagccactttcaacaattctgaagaagaaatatgggatgttttgcttcgggatggaggctggagcaggagtttctggagtctgccagtacccagtttgaatcccagctctgccttttatcagctgggtgttgggcaagttagctgacttttgtgagttttctcatcattaaaatgagaacactgttattggtctttcgggattgttttgagaaatgagatatcgagacatgcctggcacaaggccttaattcttcttcatggtcaagaaatggcagattttcccccttccattcccacccttgcacatagtaggttctcagcaagtatttgtagatgtaatcgaccagcagagatcatttgtacccttaacgcccacagagagtcacagatgctttcactgaaggagggtgtcccaagactcaatggcagggaataaaaatgccaagtcatgtaagtattccacaaagttagaggggaggagtaagtatctcttattcgtgcatctttatggtatgaccaagggctcatgatttgtaagcagttcaggcactgagacccgggacacaggtgacactgtatctgcagattcctttttctcattgtttctctgtcatgtttaatttttggttttgaaaacagcagaaaatccaaccagtgtgttcacaggacttctggctttgcagcaattcctttttctggggtcttttgcctaatcgtttactggtttggagacactgttttctgtattgtttaggactgaaaatgtagacctaactgaaatcaagcactc

SEQ ID NO: 461743 - DNA, 1436 bp, Homo sapiens
cagtatgctcatgggaacccagctggaaagtgctgtggaaggacaaatggagaaaagtctccagaaattggcctcgtttgaaaggacctcatgcaaagagagatctttggagacatttcagaaaggtttttattcaaacatattcgcagcttgtatgacagtggaatgttttgaaatgagcttgattctgtttacccatccttcttaatccaacaactctgctggtctctctgctgacacaagatcgttcgcaggttatagaaggatttaacacgtcagccaatgcaggaagtagtcctctgaaatacatgtccacagaacacgccgtgctttccagaagacgcaacagacagaaactttccaaagggaattacctgggatcatttctcatcctctctctctttctctgtattacttagccttaaaaaaaaaaaaaaaaggactaatacttcctgctttcacatctactttccagatagttttttctagagaacggtctggttctgtcacccaggttggaatgcagtgtcaggatcatagctccactgtgtgacctcaaactcttgggctcaagcaactctcctgcctcaagcaactctccagcctcagcctccgagtaactgagactacagtcagggaaatgaagagccactttcaacaattctgaagaagaaatatgggatgttttgcttcgggatggaggctggagcaggagtttctggagtctgccagtacccagtttgaatcccagctctgccttttatcagctgggtgttgggcaagttagctgacttttgtgagttttctcatcattaaaatgagaacactgttattggtctttcgggattgttttgagaaatgagatatcgagacatgcctggcacaaggccttaattcttcttcatggtcaagaaatggcagattttcccccttccattcccacccttgcacatagtaggttctcagcaagtatttgtagatgtaatcgaccagcagagatcatttgtacccttaacgcccacagagagtcacagatgctttcactgaaggagggtgtcccaagactcaatggcagggaataaaaatgccaagtcatgtaagtattccacaaagttagaggggaggagtaagtatctcttattcgtgcatctttatggtatgaccaagggctcatgatttgtaagcagttcaggcactgagacccgggacacaggtgacactgtatctgcagattcctttttctcattgtttctctgtcatgtttaatttttggttttgaaaacagcagaaaatccaaccagtgtgttcacaggacttctggctttgcagcaattcctttttctggggtcttttgcctaatcgtttactggtttggagacactgttttctgtattgtttaggactgaaaatgtagacctaactgaaatcaagcactc

SEQ ID NO: 461744 - DNA, 4122 bp, Homo sapiens
atcttgctctgcccccgacatcgtggtgagaggggaaccttcctcatatctgggcgctggcctctccgggcttgggagagaggaactcagtgatcatagagctggccgaatgccggggtagaggggaccggaagttgtttttttcgcccccgcccagcggccggatcgcatctcagctggttggctttggttagagctcccgtcagactttcgttcggccctaggatttggtagccccgaagtgtgggctctctccagtaccagactcatttcagtaccagcctttgggaagtcgtgtgaatacctcggtctcttagccacagggatagaatggcggcctgacggagccgcggcgccggcgaagtcgctgaggcgcgagctggaacccccagaccagctcaaacgggagccaaaactcgaagcttggaagaattagcaggaaatggcggatgaggcgttgtttttgcttctccataacgagatggtgtctggagtgtacaagtccgcggagcagggggaggtggaaaacggacgatgtattactaagctggaaaacatggggtttcgagtgggacaaggattgatagaaaggtttacaaaagatactgcaaggttcaaggatgagttagatatcatgaagttcatttgtaaagatttttggactacggtattcaagaaacaaatcgacaatctaaggacaaatcatcagggcatctatgtacttcaggacaacaaatttcgcctgcttactcagatgtctgcaggaaaacagtatttagaacatgcatctaagtatttagcatttacgtgtggcttaatcagaggtggcttatcaaacttgggaataaaaagtattgtaacagctgaagtgtcttcaatgcctgcttgcaaatttcaggtgatgatacagaagctgtagaacatactgaaatgcaaggcttcaacagtgtaaagagataaattattcatgtaaaagtatttcaagtagtgatgatttaattacattgttcgatgtttgtacaggagtaagcatgtatttttatcaatttaacacagatcaaaggagatgaagggacattctgccatgacatacacttaaccaaaactattcaaaatgaaaaccggatttcaaataaccagacaccaagatgcagggcccttattttaaacctttttatttggttagagtgatatgtatttagccatagatggagaaacaaagctcagggtttgttgaattagcatgagagaaaattatgtaccaacagaattatttgtgagaagaatgaacaaattttgataaagtatgaatttgttttattttaaaaagcaaacatactaaattttttttattttattgcttataatttattaagaatgtttacacctgtataaggatttcatatatacattgtatgtgtgtatatataaatacatatatgactgcctaaattgtttataaatttaatttttctttaataggtttcattccttcagagctccattaatgtaatcaaaatgaaatatagattagtttaaatgtgaattcagtgactctagggccaaagaatattaggtatgtttggaaagaatttttgtatttattcctgttacagttttgactttcaacttctctccccgtgcatggaagtcctggtaaaggatctaacatctttattcccttctttcctcttccagctgagcagagttggataattgaattagtcattctgacattctttggaccatatcatcttagtggtttggggtcagtgctcatctgatatatctttcttaccacctcttctacttactttctcttacttaaattatctggcataagcagttatctccagcttttgttagaatcttgcatgttgattactaaaactatactttgtttcccatttatttattacccttttgcatgtatttgtgtgacagggaactctgcagcagggggtgactgacacaccaaacaagatgtttcactgggtactctgccatagaaatggcagattaagaagattgactataccaaacattatattaaaaacacaaaataaaaactataaaaatgtactttaggacattaaagaaaactcaagttagaagcataccattttcctttcatggaagggtacagtattacaaagataatttgtttaacttgatttattaaattctagttatgtgccctataatgatgtttcagtcagtgacagacctcatatatggcagtggttccataagattacaatactgtatttttactgtaccttctttatgtttagatatgcaagtacttaccattgtgttacagtgtcctacagtattcactacaataatatgctgtacaggtttgtagcctaggagcaataggccatagcttaggtgtatagtagatcataccatctaggtttgtgtaagtacactctgtgattgtacaattttaaaatctcctaatgatgatgcatttctcagaatgtatcccctttgctaagcaatgcatgactgcaatcctaattctcacatgttttggggaaaaaattttaattttgaaaaaatttaggaaagttcctaccaaatatacatgtataaagtttattaaaagtcataatgacccaggaatagctaatgacacagaagtagatcaaaatagaacacaatagagaacttcaaaataaaacaggtgtgagaattgtgtgtgtgaaaaagctgggttcaaataagttggtttgttagacattcatatgcctacccatcagccatttcgttctcccttccttgctgacaaagccccatttttttttctttttttttggcctaaaactctgtatggctgccttgtgctatagaatagggtgcttccctagcctagagagggtgagtgttgattagattctgtgccaatcatggtaattggcttacttgatcatttgatggaatctaggctaacgagacaaaggaagtctgaaggctttgaataagaaattttctgttgctcttaacaattgatacaagttagggatttgccagcatccctcttctgcttctcagtgaagatatgtgatatggatgtttgaagctaatctgcaacagccttctgatggccatgaaaggacaagtatggagatgaaagctatcacactgagaatagtgggatgtagatagaaagcacctgaattgtgcttctgaattaaccaatccaggaactgctttacctttggactttttgttatgtgagatattctttatattgttccatttgctttgggtatatgtatattgttacttgtagccaaaaagaaacctctcttagtagaaacaaagggagagttaggttattcaaaaattagtatgggacaattgaatatgcctttttctgcgggagtaggtggggagaaacttaaaggttcacttgtaaaacaataaagtactaaagaaaatgtgataatactttcgtgattttgtggtggagaaggcctttccaacacacaaatgtaggaaatcataaaggaaaactataaaacaaagaaatgtagtaaaatctcttcaacaaatagtgttgggaaaactggacatccacatacaaaagaatgaaattggattgttgccttaatgccatacatagaaatcaacttaaggccgggtgtggtggctcaagcctgtaatcccagcactttgggaggccgaggtggggcagatcatgaggtcaggagttcaagaccagcctggccaaacagtgaaaccctgtctctactgaaaaaaatacaaaaattagctgggtgtggtggtgggcgcctgtagtcccagctacttgggaggctgaggcaggagaattgcttgaacccgggagtcggaggttgcagtgagccaagatggagccactgcgctccagcctgggcgacacagtgagactctgtctccaaaaaaaaaaagaaatcaacttaaaatggattgaagatttaaaagtaaaatctgaaactatacaattctagcagaaaacataggggaaaagcttcgtaacattggtcttggcaatgatctcttggaatgcctaagtgtatgcccagccacgttatgagagaaatataaaacaattgacactttacttctatt

SEQ ID NO: 461745 - DNA, 757 bp, Homo sapiens
atcttgctctgcccccgacatcgtggtgagaggggaaccttcctcatatctgggcgctggcctctccgggcttgggagagaggaactcagtgatcatagagctggccgaatgccggggtagaggggaccggaagttgtttttttcgcccccgcccagcggccggatcgcatctcagctggttggctttggttagagctcccgtcagactttcgttcggccctaggatttggtagccccgaagtgtgggctctctccagtaccagactcatttcagtaccagcctttgggaagtcgtgtgaatacctcggtctcttagccacagggatagaatggcggcctgacggagccgcggcgccggcgaagtcgctgaggcgcgagctggaacccccagaccagctcaaacgggagccaaaactcgaagcttggaagaattagcaggaaatggcggatgaggcgttgtttttgcttctccataacgagatggtgtctggagtgtacaagtccgcggagcagggggaggtggtgagtgctgccacacaaccttgaggtccttttgcggtgacacaccttgtttcccctcagtgctttccttcaacccctgtcccatcgccacccgacgcctcccgaggtgtacacaaaatggtccacctccaggtgtcctaaaccctagaacctgtcagttgtctcctttgaaccgtcatctttcatcgttttctctttcgtatcttcttctatttgattctctttgtctattcc

SEQ ID NO: 461746 - DNA, 796 bp, Homo sapiens
atcttgctctgcccccgacatcgtggtgagaggggaaccttcctcatatctgggcgctggcctctccgggcttgggagagaggaactcagtgatcatagagctggccgaatgccggggtagaggggaccggaagttgtttttttcgcccccgcccagcggccggatcgcatctcagctggttggctttggttagagctcccgtcagactttcgttcggccctaggatttggtagccccgaagtgtgggctctctccagtaccagactcatttcagtaccagcctttgggaagtcgtgtgaatacctcggtctcttagccacagggatagaatggcggcctgacggagccgcggcgccggcgaagtcgctgaggcgcgagctggaacccccagaccagctcaaacgggagccaaaactcgaagcttggaagaattagcaggaaatggcggatgaggcgttgtttttgcttctccataacgagatggtgtctggagtgtacaagtccgcggagcagggggaggtggaaaacggacgatgtattactaagctggaaaacatggggtttcgagtgggacaaggattgatagaaaggtgagcaggttggatttgaaaattttcttgcaggtaggttataaacaaaggtgatctatttcaaaagattgcataaaacttgggatattttaattttaattcctgaatgttattctctttacttcaaaaattaaaatttctttttagatccaatgccatttaactcatttattcaaattttattttaatgtttaaagaaaatata

SEQ ID NO: 461747 - DNA, 3455 bp, Homo sapiens
atcttgctctgcccccgacatcgtggtgagaggggaaccttcctcatatctgggcgctggcctctccgggcttgggagagaggaactcagtgatcatagagctggccgaatgccggggtagaggggaccggaagttgtttttttcgcccccgcccagcggccggatcgcatctcagctggttggctttggttagagctcccgtcagactttcgttcggccctaggatttggtagccccgaagtgtgggctctctccagtaccagactcatttcagtaccagcctttgggaagtcgtgtgaatacctcggtctcttagccacagggatagaatggcggcctgacggagccgcggcgccggcgaagtcgctgaggcgcgagctggaacccccagaccagctcaaacgggagccaaaactcgaagcttggaagaattagcaggaaatggcggatgaggcgttgtttttgcttctccataacgagatggtgtctggagtgtacaagtccgcggagcagggggaggtggaaaacggacgatgtattactaagctggaaaacatggggtttcgagtgggacaaggattgatagaaaggtttacaaaagatactgcaaggttcaaggatgagttagatatcatgaagttcatttgtaaagatttttggactacggtattcaagaaacaaatcgacaatctaaggacaaatcatcagggcatctatgtacttcaggacaacaaatttcgcctgcttactcagatgtctgcaggaaaacagtatttagaacatgcatctaagtatttagcatttacgtgtggcttaatcagaggtggcttatcaaacttgggaataaaaagtattgtaacagctgaagtgtcttcaatgcctgcttgcaaatttcaggtgatgatacagaagctgtagaacatactgaaatgcaaggcttcaacagtgtaaagagataaattattcatgtaaaagtatttcaagtagtgatgatttaattacattgttcgatgtttgtacaggagtaagcatgtatttttatcaatttaacacagatcaaaggagatgaagggacattctgccatgacatacacttaaccaaaactattcaaaatgaaaaccggatttcaaataaccagacaccaagatgcagggcccttattttaaacctttttatttggttagagtgatatgtatttagccatagatggagaaacaaagctcagggtttgttgaattagcatgagagaaaattatgtaccaacagaattatttgtgagaagaatgaacaaattttgataaagtatgaatttgttttattttaaaaagcaaacatactaaattttttttattttattgcttataatttattaagaatgtttacacctgtataaggatttcatatatacattgtatgtgtgtatatataaatacatatatgactgcctaaattgtttataaatttaatttttctttaataggtttcattccttcagagctccattaatgtaatcaaaatgaaatatagattagtttaaatgtgaattcagtgactctagggccaaagaatattaggtatgtttggaaagaatttttgtatttattcctgttacagttttgactttcaacttctctccccgtgcatggaagtcctggtaaaggatctaacatctttattcccttctttcctcttccagctgagcagagttggataattgaattagtcattctgacattctttggaccatatcatcttagtggtttggggtcagtgctcatctgatatatctttcttaccacctcttctacttactttctcttacttaaattatctggcataagcagttatctccagcttttgttagaatcttgcatgttgattactaaaactatactttgtttcccatttatttattacccttttgcatgtatttgtgtgacagggaactctgcagcagggggtgactgacacaccaaacaagatgtttcactgggtactctgccatagaaatggcagattaagaagattgactataccaaacattatattaaaaacacaaaataaaaactataaaaatgtactttaggacattaaagaaaactcaagttagaagcataccattttcctttcatggaagggtacagtattacaaagataatttgtttaacttgatttattaaattctagttatgtgccctataatgatgtttcagtcagtgacagacctcatatatggcagtggttccataagattacaatactgtatttttactgtaccttctttatgtttagatatgcaagtacttaccattgtgttacagtgtcctacagtattcactacaataatatgctgtacaggtttgtagcctaggagcaataggccatagcttaggtgtatagtagatcataccatctaggtttgtgtaagtacactctgtgattgtacaattttaaaatctcctaatgatgatgcatttctcagaatgtatcccctttgctaagcaatgcatgactgcaatcctaattctcacatgttttggggaaaaaattttaattttgaaaaaatttaggaaagttcctaccaaatatacatgtataaagtttattaaaagtcataatgacccaggaatagctaatgacacagaagtagatcaaaatagaacacaatagagaacttcaaaataaaacaggtgtgagaattgtgtgtgtgaaaaagctgggttcaaataagttggtttgttagacattcatatgcctacccatcagccatttcgttctcccttccttgctgacaaagccccatttttttttctttttttttggcctaaaactctgtatggctgccttgtgctatagaatagggtgcttccctagcctagagagggtgagtgttgattagattctgtgccaatcatggtaattggcttacttgatcatttgatggaatctaggctaacgagacaaaggaagtctgaaggctttgaataagaaattttctgttgctcttaacaattgatacaagttagggatttgccagcatccctcttctgcttctcagtgaagatatgtgatatggatgtttgaagctaatctgcaacagccttctgatggccatgaaaggacaagtatggagatgaaagctatcacactgagaatagtgggatgtagatagaaagcacctgaattgtgcttctgaattaaccaatccaggaactgctttacctttggactttttgttatgtgagatattctttatattgttccatttgctttgggtatatgtatattgttacttgtagccaaaaagaaacctctcttagtagaaacaaagggagagttaggttattcaaaaattagtatgggacaattgaatatgcctttttctgcgggagtaggtggggagaaacttaaaggttcacttgtaaaacaataaagtactaaagaaaatgtgat

SEQ ID NO: 461748 - DNA, 2793 bp, Homo sapiens
atccccgaggtgtcatgaacaatcgacaatctaaggacaaatcatcaggcatctatgtacttcaggacaacaaatttcgcctgcttactcagatgtctgcaggaaaacagtatttagaacatgcatctaagtatttagcatttacgtgtggcttaatcagaggtggcttatcaaacttgggaataaaaagtattgtaacagctgaagtgtcttcaatgcctgcttgcaaatttcaggtgatgatacagaagctgtagaacatactgaaatgcaaggcttcaacagtgtaaagagataaattattcatgtaaaagtatttcaagtagtgatgatttaattacattgttcgatgtttgtacaggagtaagcatgtatttttatcaatttaacacagatcaaaggagatgaagggacattctgccatgacatacacttaaccaaaactattcaaaatgaaaaccggatttcaaataaccagacaccaagatgcagggcccttattttaaacctttttatttggttagagtgatatgtatttagccatagatggagaaacaaagctcagggtttgttgaattagcatgagagaaaattatgtaccaacagaattatttgtgagaagaatgaacaaattttgataaagtatgaatttgttttattttaaaaagcaaacatactaaattttttttattttattgcttataatttattaagaatgtttacacctgtataaggatttcatatatacattgtatgtgtgtatatataaatacatatatgactgcctaaattgtttataaatttaatttttctttaataggtttcattccttcagagctccattaatgtaatcaaaatgaaatatagattagtttaaatgtgaattcagtgactctagggccaaagaatattaggtatgtttggaaagaatttttgtatttattcctgttacagttttgactttcaacttctctccccgtgcatggaagtcctggtaaaggatctaacatctttattcccttctttcctcttccagctgagcagagttggataattgaattagtcattctgacattctttggaccatatcatcttagtggtttggggtcagtgctcatctgatatatctttcttaccacctcttctacttactttctcttacttaaattatctggcataagcagttatctccagcttttgttagaatcttgcatgttgattactaaaactatactttgtttcccatttatttattacccttttgcatgtatttgtgtgacagggaactctgcagcagggggtgactgacacaccaaacaagatgtttcactgggtactctgccatagaaatggcagattaagaagattgactataccaaacattatattaaaaacacaaaataaaaactataaaaatgtactttaggacattaaagaaaactcaagttagaagcataccattttcctttcatggaagggtacagtattacaaagataatttgtttaacttgatttattaaattctagttatgtgccctataatgatgtttcagtcagtgacagacctcatatatggcagtggttccataagattacaatactgtatttttactgtaccttctttatgtttagatatgcaagtacttaccattgtgttacagtgtcctacagtattcactacaataatatgctgtacaggtttgtagcctaggagcaataggccatagcttaggtgtatagtagatcataccatctaggtttgtgtaagtacactctgtgattgtacaattttaaaatctcctaatgatgatgcatttctcagaatgtatcccctttgctaagcaatgcatgactgcaatcctaattctcacatgttttggggaaaaaattttaattttgaaaaaatttaggaaagttcctaccaaatatacatgtataaagtttattaaaagtcataatgacccaggaatagctaatgacacagaagtagatcaaaatagaacacaatagagaacttcaaaataaaacaggtgtgagaattgtgtgtgtgaaaaagctgggttcaaataagttggtttgttagacattcatatgcctacccatcagccatttcgttctcccttccttgctgacaaagccccatttttttttctttttttttggcctaaaactctgtatggctgccttgtgctatagaatagggtgcttccctagcctagagagggtgagtgttgattagattctgtgccaatcatggtaattggcttacttgatcatttgatggaatctaggctaacgagacaaaggaagtctgaaggctttgaataagaaattttctgttgctcttaacaattgatacaagttagggatttgccagcatccctcttctgcttctcagtgaagatatgtgatatggatgtttgaagctaatctgcaacagccttctgatggccatgaaaggacaagtatggagatgaaagctatcacactgagaatagtgggatgtagatagaaagcacctgaattgtgcttctgaattaaccaatccaggaactgctttacctttggactttttgttatgtgagatattctttatattgttccatttgctttgggtatatgtatattgttacttgtagccaaaaagaaacctctcttagtagaaacaaagggagagttaggttattcaaaaattagtatgggacaattgaatatgcctttttctgcgggagtaggtggggagaaacttaaaggttcacttgtaaaacaataaagtactaaagaaaatgtgat

SEQ ID NO: 461749 - DNA, 1849 bp, Homo sapiens
tgcggagtgtggggagtacggggcttctctccccgtgcatggaagtcctggtaaaggatctaacatctttattcccttctttcctcttccagctgagcagagttggataattgaattagtcattctgacattctttggaccatatcatcttagtggtttggggtcagtgctcatctgatatatctttcttaccacctcttctacttactttctcttacttaaattatctggcataagcagttatctccagcttttgttagaatcttgcatgttgattactaaaactatactttgtttcccatttatttattacccttttgcatgtatttgtgtgacagggaactctgcagcagggggtgactgacacaccaaacaagatgtttcactgggtactctgccatagaaatggcagattaagaagattgactataccaaacattatattaaaaacacaaaataaaaactataaaaatgtactttaggacattaaagaaaactcaagttagaagcataccattttcctttcatggaagggtacagtattacaaagataatttgtttaacttgatttattaaattctagttatgtgccctataatgatgtttcagtcagtgacagacctcatatatggcagtggttccataagattacaatactgtatttttactgtaccttctttatgtttagatatgcaagtacttaccattgtgttacagtgtcctacagtattcactacaataatatgctgtacaggtttgtagcctaggagcaataggccatagcttaggtgtatagtagatcataccatctaggtttgtgtaagtacactctgtgattgtacaattttaaaatctcctaatgatgatgcatttctcagaatgtatcccctttgctaagcaatgcatgactgcaatcctaattctcacatgttttggggaaaaaattttaattttgaaaaaatttaggaaagttcctaccaaatatacatgtataaagtttattaaaagtcataatgacccaggaatagctaatgacacagaagtagatcaaaatagaacacaatagagaacttcaaaataaaacaggtgtgagaattgtgtgtgtgaaaaagctgggttcaaataagttggtttgttagacattcatatgcctacccatcagccatttcgttctcccttccttgctgacaaagccccatttttttttctttttttttggcctaaaactctgtatggctgccttgtgctatagaatagggtgcttccctagcctagagagggtgagtgttgattagattctgtgccaatcatggtaattggcttacttgatcatttgatggaatctaggctaacgagacaaaggaagtctgaaggctttgaataagaaattttctgttgctcttaacaattgatacaagttagggatttgccagcatccctcttctgcttctcagtgaagatatgtgatatggatgtttgaagctaatctgcaacagccttctgatggccatgaaaggacaagtatggagatgaaagctatcacactgagaatagtgggatgtagatagaaagcacctgaattgtgcttctgaattaaccaatccaggaactgctttacctttggactttttgttatgtgagatattctttatattgttccatttgctttgggtatatgtatattgttacttgtagccaaaaagaaacctctcttagtagaaacaaagggagagttaggttattcaaaaattagtatgggacaattgaatatgcctttttctgcgggagtaggtggggagaaacttaaaggttcacttgtaaaacaataaagtactaaagaaaatgtgat

SEQ ID NO: 461750 - DNA, 2715 bp, Homo sapiens
atcttgctctgcccccgacatcgtggtgagaggggaaccttcctcatatctgggcgctggcctctccgggcttgggagagaggaactcagtgatcatagagctggccgaatgccggggtagaggggaccggaagttgtttttttcgcccccgcccagcggccggatcgcatctcagctggttggctttggttagagctcccgtcagactttcgttcggccctaggatttggtagccccgaagtgtgggctctctccagtaccagactcatttcagtaccagcctttgggaagtcgtgtgaatacctcggtctcttagccacagggatagaatggcggcctgacggagccgcggcgccggcgaagtcgctgaggcgcgagctggaacccccagaccagctcaaacgggagccaaaactcgaagcttggaagaattagcaggaaatggcggatgaggcgttgtttttgcttctccataacgagatggtgtctggagtgtacaagtccgcggagcagggggaggtggaaaacggacgatgtattactaagctggaaaacatggggtttcgagtgggacaaggattgatagaaaggtttacaaaagatactgcaaggttcaaggatgagttagatatcatgaagttcatttgtaaagatttttggactacggtattcaagaaacaaatcgacaatctaaggacaaatcatcagggcatctatgtacttcaggacaacaaatttcgcctgcttactcagatgtctgcaggaaaacagtatttagaacatgcatctaagtatttagcatttacgtgtggcttaatcagaggtggcttatcaaacttgggaataaaaagtattgtaacagctgaagtgtcttcaatgcctgcttgcaaatttcaggtgatgatacagaagctgtagaacatactgaaatgcaaggcttcaacagtgtaaagagataaattattcatgtaaaagtatttcaagtagtgatgatttaattacattgttcgatgtttgtacaggagtaagcatgtatttttatcaatttaacacagatcaaaggagatgaagggacattctgccatgacatacacttaaccaaaactattcaaaatgaaaaccggatttcaaataaccagacaccaagatgcagggcccttattttaaacctttttatttggttagagtgatatgtatttagccatagatggagaaacaaagctcagggtttgttgaattagcatgagagaaaattatgtaccaacagaattatttgtgagaagaatgaacaaattttgataaagtatgaatttgttttattttaaaaagcaaacatactaaattttttttattttattgcttataatttattaagaatgtttacacctgtataaggatttcatatatacattgtatgtgtgtatatataaatacatatatgactgcctaaattgtttataaatttaatttttctttaataggtttcattccttcagagctccattaatgtaatcaaaatgaaatatagattagtttaaatgtgaattcagtgactctagggccaaagaatattaggtatgtttggaaagaatttttgtatttattcctgttacagttttgactttcaacttctctccccgtgcatggaagtcctggtaaaggatctaacatctttattcccttctttcctcttccagctgagcagagttggataattgaattagtcattctgacattctttggaccatatcatcttagtggtttggggtcagtgctcatctgatatatctttcttaccacctcttctacttactttctcttacttaaattatctggcataagcagttatctccagcttttgttagaatcttgcatgttgattactaaaactatactttgtttcccatttatttattacccttttgcatgtatttgtgtgacagggaactctgcagcagggggtgactgacacaccaaacaagatgtttcactgggtactctgccatagaaatggcagattaagaagattgactataccaaacattatattaaaaacacaaaataaaaactataaaaatgtactttaggacattaaagaaaactcaagttagaagcataccattttcctttcatggaagggtacagtattacaaagataatttgtttaacttgatttattaaattctagttatgtgccctataatgatgtttcagtcagtgacagacctcatatatggcagtggttccataagattacaatactgtatttttactgtaccttctttatgtttagatatgcaagtacttaccattgtgttacagtgtcctacagtattcactacaataatatgctgtacaggtttgtagcctaggagcaataggccatagcttaggtgtatagtagatcataccatctaggtttgtgtaagtacactctgtgattgtacaattttaaaatctcctaatgatgatgcatttctcagaatgtatcccctttgctaagcaatgcatgactgcaatcctaattctcacatgttttggggaaaaaattttaattttgaaaaaatttaggaaagttcctaccaaatatacatgtataaagtttattaaaagtcataatgacccaggaatagctaatgacacagaagtagatcaaaatagaacacaatagagatcaggtgtgagttgtgtgtgtgagcctttcgttctccctt

SEQ ID NO: 461751 - DNA, 466 bp, Homo sapiens
tactttgtgagcctctcctatgggagggagagcaagcctctgactgctcaacagacaaccaaactggatgctcccactaacctcgagtgcatctttagagcccctctcctaaaaaatacaaaaattagctgggtgtggtggtgggcgcctgtagtcccagctacttgggaggctgaggcaggagaattgcttgaacccgggagtcggaggttgcagtgagccaagatggagccactgcgctccagcctgggcgacacagtgagactctgtctccaaaaaaaaaaagaaatcaacttaaaatggattgaagatttaaaagtaaaatctgaaactatacaattctagcagaaaacataggggaaaagcttcgtaacattggtcttggcaatgatctcttggaatgcctaagtgtatgcccagccacgttatgagagaaatataaaacaattgacactttacttctatt

SEQ ID NO: 461752 - DNA, 3484 bp, Homo sapiens
atcttgctctgcccccgacatcgtggtgagaggggaaccttcctcatatctgggcgctggcctctccgggcttgggagagaggaactcagtgatcatagagctggccgaatgccggggtagaggggaccggaagttgtttttttcgcccccgcccagcggccggatcgcatctcagctggttggctttggttagagctcccgtcagactttcgttcggccctaggatttggtagccccgaagtgtgggctctctccagtaccagactcatttcagtaccagcctttgggaagtcgtgtgaatacctcggtctcttagccacagggatagaatggcggcctgacggagccgcggcgccggcgaagtcgctgaggcgcgagctggaacccccagaccagctcaaacgggagccaaaactcgaagcttggaagaattagcaggaaatggcggatgaggcgttgtttttgcttctccataacgagatggtgtctggagtgtacaagtccgcggagcagggggaggtggaaaacggacgatgtattactaagctggaaaacatggggtttcgagtgggacaaggattgatagaaaggtttacaaaagatactgcaaggttcaaggatgagttagatatcatgaagttcatttgtaaagatttttggactacggtattcaagaaacaaatcgacaatctaaggacaaatcatcagggcatctatgtacttcaggacaacaaatttcgcctgcttactcagatgtctgcaggaaaacagtatttagaacatgcatctaagtatttagcatttacgtgtggcttaatcagaggtggcttatcaaacttgggaataaaaagtattgtaacagctgaagtgtcttcaatgcctgcttgcaaatttcaggtgatgatacagaagctgtagaacatactgaaatgcaaggcttcaacagtgtaaagagataaattattcatgtaaaagtatttcaagtagtgatgatttaattacattgttcgatgtttgtacaggagtaagcatgtatttttatcaatttaacacagatcaaaggagatgaagggacattctgccatgacatacacttaaccaaaactattcaaaatgaaaaccggatttcaaataaccagacaccaagatgcagggcccttattttaaacctttttatttggttagagtgatatgtatttagccatagatggagaaacaaagctcagggtttgttgaattagcatgagagaaaattatgtaccaacagaattatttgtgagaagaatgaacaaattttgataaagtatgaatttgttttattttaaaaagcaaacatactaaattttttttattttattgcttataatttattaagaatgtttacacctgtataaggatttcatatatacattgtatgtgtgtatatataaatacatatatgactgcctaaattgtttataaatttaatttttctttaataggtttcattccttcagagctccattaatgtaatcaaaatgaaatatagattagtttaaatgtgaattcagtgactctagggccaaagaatattaggtatgtttggaaagaatttttgtatttattcctgttacagttttgactttcaacttctctccccgtgcatggaagtcctggtaaaggatctaacatctttattcccttctttcctcttccagctgagcagagttggataattgaattagtcattctgacattctttggaccatatcatcttagtggtttggggtcagtgctcatctgatatatctttcttaccacctcttctacttactttctcttacttaaattatctggcataagcagttatctccagcttttgttagaatcttgcatgttgattactaaaactatactttgtttcccatttatttattacccttttgcatgtatttgtgtgacagggaactctgcagcagggggtgactgacacaccaaacaagatgtttcactgggtactctgccatagaaatggcagattaagaagattgactataccaaacattatattaaaaacacaaaataaaaactataaaaatgtactttaggacattaaagaaaactcaagttagaagcataccattttcctttcatggaagggtacagtattacaaagataatttgtttaacttgatttattaaattctagttatgtgccctataatgatgtttcagtcagtgacagacctcatatatggcagtggttccataagattacaatactgtatttttactgtaccttctttatgtttagatatgcaagtacttaccattgtgttacagtgtcctacagtattcactacaataatatgctgtacaggtttgtagcctaggagcaataggccatagcttaggtgtatagtagatcataccatctaggtttgtgtaagtacactctgtgattgtacaattttaaaatctcctaatgatgatgcatttctcagaatgtatcccctttgctaagcaatgcatgactgcaatcctaattctcacatgttttggggaaaaaattttaattttgaaaaaatttaggaaagttcctaccaaatatacatgtataaagtttattaaaagtcataatgacccaggaatagctaatgacacagaagtagatcaaaatagaacacaatagagatagtagaagcttttggagaataagaaagggtggtggggagtgtggttggggtgggtggtgagggggggggggggtggtgtggggtggggttgggtgggtgggggtgtggggtgttttgtgttggggggttgggttgccgccttgctgacaaagccccatttttttttctttttttttggcctaaaactctgtatggctgccttgtgctatagaatagggtgcttccctagcctagagagggtgagtgttgattagattctgtgccaatcatggtaattggcttacttgatcatttgatggaatctaggctaacgagacaaaggaagtctgaaggctttgaataagaaattttctgttgctcttaacaattgatacaagttagggatttgccagcatccctcttctgcttctcagtgaagatatgtgatatggatgtttgaagctaatctgcaacagccttctgatggccatgaaaggacaagtatggagatgaaagctatcacactgagaatagtgggatgtagatagaaagcacctgaattgtgcttctgaattaaccaatccaggaactgctttacctttggactttttgttatgtgagatattctttatattgttccatttgctttgggtatatgtatattgttacttgtagccaaaaagaaacctctcttagtagaaacaaagggagagttaggttattcaaaaattagtatgggacaattgaatatgcctttttctgcgggagtaggtggggagaaacttaaaggttcacttgtaaaacaataaagtactaaagaaaatgtgat

SEQ ID NO: 461753 - DNA, 3371 bp, Homo sapiens
atcttgctctgcccccgacatcgtggtgagaggggaaccttcctcatatctgggcgctggcctctccgggcttgggagagaggaactcagtgatcatagagctggccgaatgccggggtagaggggaccggaagttgtttttttcgcccccgcccagcggccggatcgcatctcagctggttggctttggttagagctcccgtcagactttcgttcggccctaggatttggtagccccgaagtgtgggctctctccagtaccagactcatttcagtaccagcctttgggaagtcgtgtgaatacctcggtctcttagccacagggatagaatggcggcctgacggagccgcggcgccggcgaagtcgctgaggcgcgagctggaacccccagaccagctcaaacgggagccaaaactcgaagcttggaagaattagcaggaaatggcggatgaggcgttgtttttgcttctccataacgagatggtgtctggagtgtacaagtccgcggagcagggggaggtggaaaacggacgatgtattactaagctggaaaacatggggtttcgagtgggacaaggattgatagaaaggtttacaaaagatactgcaaggttcaaggatgagttagatatcatgaagttcatttgtaaagatttttggactacggtattcaagaaacaaatcgacaatctaaggacaaatcatcagtatttagcatttacgtgtggcttaatcagaggtggcttatcaaacttgggaataaaaagtattgtaacagctgaagtgtcttcaatgcctgcttgcaaatttcaggtgatgatacagaagctgtagaacatactgaaatgcaaggcttcaacagtgtaaagagataaattattcatgtaaaagtatttcaagtagtgatgatttaattacattgttcgatgtttgtacaggagtaagcatgtatttttatcaatttaacacagatcaaaggagatgaagggacattctgccatgacatacacttaaccaaaactattcaaaatgaaaaccggatttcaaataaccagacaccaagatgcagggcccttattttaaacctttttatttggttagagtgatatgtatttagccatagatggagaaacaaagctcagggtttgttgaattagcatgagagaaaattatgtaccaacagaattatttgtgagaagaatgaacaaattttgataaagtatgaatttgttttattttaaaaagcaaacatactaaattttttttattttattgcttataatttattaagaatgtttacacctgtataaggatttcatatatacattgtatgtgtgtatatataaatacatatatgactgcctaaattgtttataaatttaatttttctttaataggtttcattccttcagagctccattaatgtaatcaaaatgaaatatagattagtttaaatgtgaattcagtgactctagggccaaagaatattaggtatgtttggaaagaatttttgtatttattcctgttacagttttgactttcaacttctctccccgtgcatggaagtcctggtaaaggatctaacatctttattcccttctttcctcttccagctgagcagagttggataattgaattagtcattctgacattctttggaccatatcatcttagtggtttggggtcagtgctcatctgatatatctttcttaccacctcttctacttactttctcttacttaaattatctggcataagcagttatctccagcttttgttagaatcttgcatgttgattactaaaactatactttgtttcccatttatttattacccttttgcatgtatttgtgtgacagggaactctgcagcagggggtgactgacacaccaaacaagatgtttcactgggtactctgccatagaaatggcagattaagaagattgactataccaaacattatattaaaaacacaaaataaaaactataaaaatgtactttaggacattaaagaaaactcaagttagaagcataccattttcctttcatggaagggtacagtattacaaagataatttgtttaacttgatttattaaattctagttatgtgccctataatgatgtttcagtcagtgacagacctcatatatggcagtggttccataagattacaatactgtatttttactgtaccttctttatgtttagatatgcaagtacttaccattgtgttacagtgtcctacagtattcactacaataatatgctgtacaggtttgtagcctaggagcaataggccatagcttaggtgtatagtagatcataccatctaggtttgtgtaagtacactctgtgattgtacaattttaaaatctcctaatgatgatgcatttctcagaatgtatcccctttgctaagcaatgcatgactgcaatcctaattctcacatgttttggggaaaaaattttaattttgaaaaaatttaggaaagttcctaccaaatatacatgtataaagtttattaaaagtcataatgacccaggaatagctaatgacacagaagtagatcaaaatagaacacaatagagaacttcaaaataaaacaggtgtgagaattgtgtgtgtgaaaaagctgggttcaaataagttggtttgttagacattcatatgcctacccatcagccatttcgttctcccttccttgctgacaaagccccatttttttttctttttttttggcctaaaactctgtatggctgccttgtgctatagaatagggtgcttccctagcctagagagggtgagtgttgattagattctgtgccaatcatggtaattggcttacttgatcatttgatggaatctaggctaacgagacaaaggaagtctgaaggctttgaataagaaattttctgttgctcttaacaattgatacaagttagggatttgccagcatccctcttctgcttctcagtgaagatatgtgatatggatgtttgaagctaatctgcaacagccttctgatggccatgaaaggacaagtatggagatgaaagctatcacactgagaatagtgggatgtagatagaaagcacctgaattgtgcttctgaattaaccaatccaggaactgctttacctttggactttttgttatgtgagatattctttatattgttccatttgctttgggtatatgtatattgttacttgtagccaaaaagaaacctctcttagtagaaacaaagggagagttaggttattcaaaaattagtatgggacaattgaatatgcctttttctgcgggagtaggtggggagaaacttaaaggttcacttgtaaaacaataaagtactaaagaaaatgtgat

SEQ ID NO: 461754 - DNA, 1949 bp, Homo sapiens
tctataatatgaactcaattttgcaaaacttcaaagtacgtacaacttttaacttactagggtatacataccagtaataaattcacaacggtagacatgtttgcctactgtaaatataacaaagactaaacaagcagatactaaatcattaagcaattatcagttagtatctttaattttcttatacttctatattttctatagatcatctttgtaacaagaagaaaaccaaccaaatgaaaatgaaatgaattctctcaaaaagaattaagtcaagacaggaagaaggctcgcaaagtaatataaaatatatcttatggtttatgtaaaattcttaataaaataccttctttgctccaagctgcactctggctttgcctttgggtcaggtggcatttctttgcacgatgactggttttattgagtaggcactgcttcagccctacaggaagaacaaaacctctctggaacacagcagcattcctgactcccacttgaggaggcctaacaaaacggcatatgcctcaacagcagcagatcagtgttaaaaagtctggagtcaaggggaaaaagtaaaattggaccatttccaaaatctcacaaaaagcaacaaactgacgttctaagtgcccaacatgagcaaattagaaccttaaataaaggtcactcttaatgcctatcccagcatagatgcagcaccaagtacagtgtcattttactggtttacctttttcattcttgaaaacatttaccacattggcattatttgtgcatccatcaagaagtgctgaaaagcattcccctcacacactgcatgtgtcctgtgagtggatcttccattttacttgccagttctggaaaactttgaatttgtgtgtcgatggaaaattaaagtttagtggcatctttgccccacattcacccaacttttctaaggaactatttcaatgctacttttcactagtgtcacttttcagtcttagcctcctggagtacaactttattagaagcccgcaaagcactattgacaaactaaccttaaagaacacagcttgcaatgtggtccttgtgtatgtgactcgtttgcagctcacagcctctgcatctttccatcgagtctgacaaaacctgagttggtctgtaactgctcattgagacaagtcccctgatgtcacatacagatgctgggagaatgtcaagtttctatagaaatttctaaacatttaccctgaatttctatgtttctgtcattacatagagatgacagagtgttgacagactttgagtggtctttagtaaccaattgttgaaagtctggtttagctaaactagtttttttagttcaaacagatgttttcactcctaaaagactcaaaatttctgacaatgccctttattaatgttactttttgagaaatcacttattaagtaaaaattaaatttacatttttcaaaattgcatgttgggttaatttaccaaatcttttatctgttttgtgtttccagttagccatttttgtttctgatttgtaaatattcaaaaatatttgttgaaattacaaattttattaattgatttttgaggggagtagggtgcgttagttacttttcatttaaattctgtggtgtttttgcatattcaaattattgtattgtgaataacctgaaagacagtagctgtatgatcgtttgaggtaatggtaacaatactcaagggttgaaaagatatgattttaagtatgagctaaggagactgccctttatgtaactacgggatgatgtgaaaatctgttttaacagcatgattaaatttggaattcttttttttgaagttttgtaaaagggaggcagaagtttaagggaaaaagttggccaggtaaacttggatagttttagatctattagtgacagaatactcaagctcttgaaaataggaaaagttgttcttg

SEQ ID NO: 461755 - DNA, 462 bp, Homo sapiens
tgctatttcagctcaccaaggaaaagacaaactcctaaaagcttccagggagaaagtcatgcataaacaagtgaaactcaggatggcatgaggcttcgccaccacgactggttagaagacaacagcacagactttgaaattctaaggtaaaattatcctcaacctagaaatacgtaatcaagcaaactatcaatcaagtgtgagggtagaatatgagagacgtgaatactgatggggatgtgatatgcagcaggcactgttctaaatggtttacatgtaccaacccaattaagaaacttaaaatacacacgcgcacacacacacacacacacacacacacacacagtttttcctgctaatcattttacgatgaaacagccaagtagctaacccagagcccacaaaggcagagtaaaaattctaacacttggtaaaataaaaatgcacatataccctgtgatc

SEQ ID NO: 461756 - DNA, 1891 bp, Homo sapiens
tgctatttcagctcaccaaggaaaagacaaactcctaaaagcttccagggagaaagtcatgcataaacaagtgaaactcaggatggcatgaggcttcgccaccacgactggttagaagacaacagcacagactttgaaattctaagatcatctttgtaacaagaagaaaaccaaccaaatgaaaatgaaatgaattctctcaaaaagaattaagtcaagacaggaagaaggctcgcaaagtaatataaaatatatcttatggtttatgtaaaattcttaataaaataccttctttgctccaagctgcactctggctttgcctttgggtcaggtggcatttctttgcacgatgactggttttattgagtaggcactgcttcagccctacaggaagaacaaaacctctctggaacacagcagcattcctgactcccacttgaggaggcctaacaaaacggcatatgcctcaacagcagcagatcagtgttaaaaagtctggagtcaaggggaaaaagtaaaattggaccatttccaaaatctcacaaaaagcaacaaactgacgttctaagtgcccaacatgagcaaattagaaccttaaataaaggtcactcttaatgcctatcccagcatagatgcagcaccaagtacagtgtcattttactggtttacctttttcattcttgaaaacatttaccacattggcattatttgtgcatccatcaagaagtgctgaaaagcattcccctcacacactgcatgtgtcctgtgagtggatcttccattttacttgccagttctggaaaactttgaatttgtgtgtcgatggaaaattaaagtttagtggcatctttgccccacattcacccaacttttctaaggaactatttcaatgctacttttcactagtgtcacttttcagtcttagcctcctggagtacaactttattagaagcccgcaaagcactattgacaaactaaccttaaagaacacagcttgcaatgtggtccttgtgtatgtgactcgtttgcagctcacagcctctgcatctttccatcgagtctgacaaaacctgagttggtctgtaactgctcattgagacaagtcccctgatgtcacatacagatgctgggagaatgtcaagtttctatagaaatttctaaacatttaccctgaatttctatgtttctgtcattacatagagatgacagagtgttgacagactttgagtggtctttagtaaccaattgttgaaagtctggtttagctaaactagtttttttagttcaaacagatgttttcactcctaaaagactcaaaatttctgacaatgccctttattaatgttactttttgagaaatcacttattaagtaaaaattaaatttacatttttcaaaattgcatgttgggttaatttaccaaatcttttatctgttttgtgtttccagttagccatttttgtttctgatttgtaaatattcaaaaatatttgttgaaattacaaattttattaattgatttttgaggggagtagggtgcgttagttacttttcatttaaattctgtggtgtttttgcatattcaaattattgtattgtgaataacctgaaagacagtagctgtatgatcgtttgaggtaatggtaacaatactcaagggttgaaaagatatgattttaagtatgagctaaggagactgccctttatgtaactacgggatgatgtgaaaatctgttttaacagcatgattaaatttggaattcttttttttgaagttttgtaaaagggaggcagaagtttaagggaaaaagttggccaggtaaacttggatagttttagatctattagtgacagaatactcaagctcttgaaaataggaaaagttgttcttg

SEQ ID NO: 461757 - DNA, 1283 bp, Homo sapiens
tcaaatccctgcagggggagaccagcagccccgacttcagccgccatgcctcctgcctgagaagctagctgcgaaggttccagaaggagactgccctccgggaacagaaacagcgcatgactgcgacctgtctgcaaaaatcttgatcacttgtaaatccttctccacctgataagttatcacattggctcatgatgttttttttcattctcaccctatggcgtggatgctgttactaccccattttacaaaggagtaaagtgaggcccagagagaacagttaaatcacttccccagcttcactcaactcatctacggtgagtcgacggtacacatgcccttccacaacacaaaggtctccactttgccacgtgtcactctgatggttccaggtgcagattttgcgtctgcttcttgacttctaatggctgcaccattttgcattggatggttataccatcatttatttgactcatctcctgtgcacaagcatctagtttatctgcaaacttttgctaccaaaaacaatgctgcaatgaataaataagctgatgcctgcttctaagcgtgcgtgcatgctgtaatgtgagatgaattcccagaagtggagtggctgagtccaagagtaaatgcatttttcattttgatagtatcgccaaatgtctttccaaaggggttgtgctggatcccactccagctagcaatgtgtgagagcaccaatcccaccgcccactgcagcacacatattgacgtcggctagtccaataccagcacaggcagctgggccccctcgggtgatgcagtgggcaaagtgcgcactcagctctgagatcctggcttcctcacctgcggaaaggatgagactcgcccagcgttcacccagtgaatatgctttcagcctctgctgggtaccaggcatagttttgggcactgggaataaagggtatttgctccttttgattgattacctcatgttatataacctgagtggctacaagcagcaatctgtaatttgcaacatccggaaagccactgtcagcttcagaggctccaagagggcaagttacttgcccaaggtcacacagccggtgctgatggcgctggactcagacctgggcatcctggttttggagcccctcattcttacccaaggtgcttctgtgccaccccaggacagggtgtggttgcagagaggtccatgagcaggcatggccacccctgcaggcacagaacacaagtgttctctccaaatgatgggcgtcagagcccagccagccctgctc

SEQ ID NO: 461758 - DNA, 4740 bp, Homo sapiens
acagctaataaatggaaaccatacagctaataaatggaaacctttcagctgtgagttcaacatggaggcaaatcagtgccccctggttgtggaaccatcttacccagacctggtcatcaatgtaggagaagtgactcttggagaagaaaacagaaaaaagctgcagaaaattcagagagaccaagagaaggagagagttatgcgggctgcatgtgctttattaaactcaggaggaggagtgattcgaatggccaagaaggttgagcatcccgtggagatgggactggatttagaacagtctttgagagagcttattcagtcttcagatctgcaggctttctttgagaccaagcaacaaggaaggtgtttttacatttttgttaaatcttggagcagtggccctttccctgaagatcgctctgtcaagccccgcctttgcagcctcagttcttcattataccgtagatctgagacctctgtgcgttccatggactcaagagaggcattctgtttcctgaagaccaaaaggaagccaaaaatcttggaagaaggaccttttcacaaaattcacaagggtgtataccaagagctccctaactcggatcctgctgacccaaactcggatcctgctgacctaattttccaaaaagactatcttgaatatggtgaaatcctgccttttcctgagtctcagttagtagagtttaaacagttctctacaaaacacttccaagaatatgtaaaaaggacaattccagaatacgtccctgcatttgcaaacactggaggaggctatctttttattggagtggatgataagagtagggaagtcctgggatgtgcaaaagaaaatgttgaccctgactctttgagaaggaaaatagaacaagccatatacaaactaccttgtgttcatttttgccaaccccaacgcccgataaccttcacactcaaaattgtgaatgtgttaaaaaggggagagctctatggctatgcttgcatgatcagagtaaatcccttctgctgtgcagtgttctcagaagctcccaattcatggatagtggaggacaagtacgtctgcagcctgacaaccgagaaatgggtaggcatgatgacagacacagatccagatcttctacagttgtctgaagattttgaatgtcagctgagtctatctagtgggcctccccttagcagaccagtgtactccaagaaaggcctggaacataaaaaggaactccagcaacttttattttcagaagcatgctccattatacaattaaagaaaaagaagacctatgcaatgataagaagttgggctgtggacctgaacttgcaggagaagccaggagtcatctgtgatgctctgctgatagcacagaacagcacccccattctctacaccattctcagggagcaagatgcagagggccaggactactgcactcgcaccgcctttactttgaagcagaagctagtgaacatggggggctacaccgggaaggtgtgtgtcagggccaaggtcctctgcctgagtcctgagagcagcgcagaggccttggaggctgcagtgtctccgatggattaccctgcgtcctatagccttgcaggcacccagcacatggaagccctgctgcagtccctcgtgattgtcttactcggcttcaggtctctcttgagtgaccagctcggctgtgaggttttaaatctgctcacagcccagcagtatgagatattctccagaagcctccgcaagaacagagagttgtttgtccacggcttacctggctcagggaagaccatcatggccatgaagatcatggagaagatcaggaatgtgtttcactgtgaggcacacagaattctctacgtttgtgaaaaccagcctctgaggaactttatcagtgatagaaatatctgccgagcagagacccggaaaactttcctaagagaaaactttgaacacattcaacacatcgtcattgacgaagctcagaatttccgtactgaagatggggactggtatgggaaggcaaaaagcatcactcggagagcaaagggtggcccaggaattctctggatctttctggattactttcagaccagccacttggattgcagtggcctccctcctctctcagaccaatatccaagagaagagctcaccagaatagttcgcaatgcagatccaatagccaagtacttacaaaaagaaatgcaagtaattagaagtaatccttcatttaacatccccactgggtgcctcgaggtatttcctgaagccgaatggtcccagggtgttcagggaaccttacgaattaagaaatacttgactgtggagcaaataatgacctgtgtggcagacacgtgcaggcgcttctttgataggggctattctccaaaggatgttgctgtgcttgtcagcaccgcaaaagaagtggagcactataagtatgagctcttgaaagcaatgaggaagaaaagggtggtgcagctcagtgatgcatgtgatatgttgggtgatcacattgtgttggacagtgttcggcgattctcaggcctggaaaggagcatagtgtttgggatccatccaaggacagctgacccagctatcttacccaatgttctgatctgtctggcttccagggcaaaacaacacctgtatatttttccgtggggtggccattaggaagaactccaaatcaaaatgctatgtaaatgtctatgggtgacagtctgctgatggtagaaacctttctttttagttcacaagtcagagatttggacggagctgacacaaagagtttggagctcccccatttctggctctcctttcaggggttccttccccaaccctttcagcagcggtggctgccccccattctgacccctgactcttccagccagaaagatggtggttttctaaaggaactttagctgtcctgcacaatgccgatctgtgtcttgcattttgggtaaaagccataaaaataagaaactcagcctgtggcctttctttcttccaaggctgggcttctttttttaagtgacttcatgcagtttgttgcttttaaaaatttgtccagaatcgttttctgcagaagcatggtctgttaggagcttactggccgtagcagaagcaattgtttcctgaattcttgacatttatctttgctgtattcatttagggcttgggagagtccgaagataattcagtcactgtcagattaataattttgtcaggacaaagaataccgttatgattatttaatcctttaaaattgtggtctccagagcttgttctcagaatggcccagaccaagccttaattgtgatagtgaatattaatggtcactttaaggagaaattataggccaagatgaaatgaacataaacctgtttgccctggctttcagtggaagatgatattagagaccaaaatctggttctgaaggtgtgtatcagccctaaggtgaaccagacttgggaaagattgtctttaaaaatcaatgagtttatgttttaacttctcagcttagttctatgcattgctctataacacacctagttaagttttatgttattcttgaactgtgattttttttctatttactttcatggtttggtgggccattgttatggactgaatgtttgtgtcccacccttcacccccaaattcccgtgttgaagccccaacctgcactgtggagctggggctgctaaggaagtaattaaggttacatgaagtcatggtggggctctgatctgctaaggttggtgtccttatagggagagaccccagagagcttgttccctccctccctgtgcatgcaaacaagagggcatgggagcacacagagagatggcagccacctacaagccaagaggagaagcctcacaatcaaactctcgctgctggcgagagtcttggactctgtcttggacttccagcctccagactgtgagaaacaaatttctgttgtttcagcttctcagtctctggtgttttgttattgcagcctgagaacacagctgtacgattatttgtcaaacagaaaacactgatacttaacaatgctaatgcaattatttatttgcttttcagtctctacaaaacgttctaaaacactaatctaaatattaacagtaaaatatttgcataactaatggaaactaagaaatcatatgaccaatatttcacttattggtaatcttactctactgatttccccccagactgtgatttttgaacttccttgcctttctcctgtctttctgtgtttattcatggaattccagttatctgggcttgaaattgcaggctctcctaacttaagcaaaatctgacagatcagcaaaatgagataaatgtttcttttttctttctgactgcattaaatcagatacaactcagcattaaaaagctatctttgtaaatgttgttactaataaattagtcttataagatccctggactttggagttgttgcaatgtctttgagagtaattctttaaaagtctaatttcgactggttgtatctctttatgatttattgccccactaacaacatttgaaacaatataatattttaaaatgtataaataattatgaatttttgtttagaacaaagaggattactgatatttgtttccctatgaatggcaaaaggtttagcttactactgcatttctgttttaaataaaaagttgagagtttgtgtctcattaaactgaaaaaaa

SEQ ID NO: 461759 - DNA, 4475 bp, Homo sapiens
acagctaataaatggaaaccatacagctaataaatggaaacctttcagctgtgagttcaacatggaggcaaatcagtgccccctggttgtggaaccatcttacccagacctggtcatcaatgtaggagaagtgactcttggagaagaaaacagaaaaaagctgcagaaaattcagagagaccaagagaaggagagagttatgcgggctgcatgtgctttattaaactcaggaggaggagtgattcgaatggccaagaaggttgagcatcccgtggagatgggactggatttagaacagtctttgagagagcttattcagtcttcagatctgcaggctttctttgagaccaagcaacaaggaaggtgtttttacatttttgttaaatcttggagcagtggccctttccctgaagatcgctctgtcaagccccgcctttgcagcctcagttcttcattataccgtagatctgagacctctgtgcgttccatggactcaagagaggcattctgtttcctgaagaccaaaaggaagccaaaaatcttggaagaaggaccttttcacaaaattcacaagggtgtataccaagagctccctaactcggatcctgctgacccaaactcggatcctgctgacctaattttccaaaaagactatcttgaatatggtgaaatcctgccttttcctgagtctcagttagtagagtttaaacagttctctacaaaacacttccaagaatatgtaaaaaggacaattccagaatacgtccctgcatttgcaaacactggaggaggctatctttttattggagtggatgataagagtagggaagtcctgggatgtgcaaaagaaaatgttgaccctgactctttgagaaggaaaatagaacaagccatatacaaactaccttgtgttcatttttgccaaccccaacgcccgataaccttcacactcaaaattgtgaatgtgttaaaaaggggagagctctatggctatgcttgcatgatcagagtaaatcccttctgctgtgcagtgttctcagaagctcccaattcatggatagtggaggacaagtacgtctgcagcctgacaaccgagaaatgggtaggcatgatgacagacacagatccagatcttctacagttgtctgaagattttgaatgtcagctgagtctatctagtgggcctccccttagcagaccagtgtactccaagaaaggcctggaacataaaaaggaactccagcaacttttattttcagaagcatgctccattatacaattaaagaaaaagaagacctatgcaatgataagaagttgggctgtggacctgaacttgcaggagaagccaggagtcatctgtgatgctctgctgatagcacagaacagcacccccattctctacaccattctcagggagcaagatgcagagggccaggactactgcactcgcaccgcctttactttgaagcagaagctagtgaacatggggggctacaccgggaaggtgtgtgtcagggccaaggtcctctgcctgagtcctgagagcagcgcagaggccttggaggctgcagtgtctccgatggattaccctgcgtcctatagccttgcaggcacccagcacatggaagccctgctgcagtccctcgtgattgtcttactcggcttcaggtctctcttgagtgaccagctcggctgtgaggttttaaatctgctcacagcccagcagtatgagatattctccagaagcctccgcaagaacagagagttgtttgtccacggcttacctggctcagggaagaccatcatggccatgaagatcatggagaagatcaggaatgtgtttcactgtgaggcacacagaattctctacgtttgtgaaaaccagcctctgaggaactttatcagtgatagaaatatctgccgagcagagacccggaaaactttcctaagagaaaactttgaacacattcaacacatcgtcattgacgaagctcagaatttccgtactgaagatggggactggtatgggaaggcaaaaagcatcactcggagagcaaagggtggcccaggaattctctggatctttctggattactttcagaccagccacttggattgcagtggcctccctcctctctcagaccaatatccaagagaagagctcaccagaatagttcgcaatgcagatccaatagccaagtacttacaaaaagaaatgcaagtaattagaagtaatccttcatttaacatccccactgggtgcctcgaggtatttcctgaagccgaatggtcccagggtgttcagggaaccttacgaattaagaaatacttgactgtggagcaaataatgacctgtgtggcagacacgtgcaggcgcttctttgataggggctattctccaaaggatgttgctgtgcttgtcagcaccgcaaaagaagtggagcactataagtatgagctcttgaaagcaatgaggaagaaaagggtggtgcagctcagtgatgcatgtgatatgttgggtgatcacattgtgttggacagtgttcggcgattctcaggcctggaaaggagcatagtgtttgggatccatccaaggacagctgacccagctatcttacccaatgttctgatctgtctggcttccagggcaaaacaacacctgtatatttttccgtggggtggccattaggaagaactccaaatcaaaatgctatgtaaatgtctatgggtgacagtctgctgatggtagaaacctttctttttagttcacaagtcagagatttggacggagctgacacaaagagtttggagctcccccatttctggctctcctttcaggggttccttccccaaccctttcagcagcggtggctgccccccattctgacccctgactcttccagccagaaagatggtggttttctaaaggaactttagctgtcctgcacaatgccgatctgtgtcttgcattttgggtaaaagccataaaaataagaaactcagcctgtggcctttctttcttccaaggctgggcttctttttttaagtgacttcatgcagtttgttgcttttaaaaatttgtccagaatcgttttctgcagaagcatggtctgttaggagcttactggccgtagcagaagcaattgtttcctgaattcttgacatttatctttgctgtattcatttagggcttgggagagtccgaagataattcagtcactgtcagattaataattttgtcaggacaaagaataccgttatgattatttaatcctttaaaattgtggtctccagagcttgttctcagaatggcccagaccaagccttaattgtgatagtgaatattaatggtcactttaaggagaaattataggccaagatgaaatgaacataaacctgtttgccctggctttcagtggaagatgatattagagaccaaaatctggttctgaaggtgtgtatcagccctaaggtgaaccagacttgggaaagattgtctttaaaaatcaatgagtttatgttttaacttctcagcttagttctatgcattgctctataacacacctagttaagttttatgttattcttgaactgtgattttttttctatttactttcatggtttggtgggccattgttatggactgaatgtttgtgtcccacccttcacccccaaattcccgtgttgaagccccaacctgcactgtggagctggggctgctaaggaagtaattaaggttacatgaagtcatggtggggctctgatctgctaaggttggtgtccttatagggagagaccccagagagcttgttccctccctccctgtgcatgcaaacaagagggcatgggagcacacagagagatggcagccacctacaagccaagaggagaagcctcacaatcaaactctcgctgctggcgagagtcttggactctgtcttggacttccagcctccagactgtgagaaacaaatttctgttgtttcagcttctcagtctctggtgttttgttattgcagcctgagaacacagctgtacgattatttgtcaaacagaaaacactgatacttaacaatgctaatgcaattatttatttgcttttcagtctctacaaaacgttctaaaacactaatctaaatattaacagtaaaatatttgcataactaatggaaactaagaaatcatatgaccaatatttcacttattggtaatcttactctactgatttccccccagactgtgatttttgaacttccttgcctttctcctgtctttctgtgtttattcatggaattccagttatctgggcttgaaattgcaggctctcctaacttaagcaaaatctgacagatcagcaaaatgagataaatgtttcttttttctttctgactgcattaaatcagatacaactcagcattaaaaagctatctttgtaaatgttgttactaataaattagtcttataagatccctgga

SEQ ID NO: 461760 - DNA, 4769 bp, Homo sapiens
acagctaataaatggaaaccatacagctaataaatggaaacctttcagctgtgagttcaacatggaggcaaatcagtgccccctggttgtggaaccatcttacccagacctggtcatcaatgtaggagaagtgactcttggagaagaaaacagaaaaaagctgcagaaaattcagagagaccaagagaaggagagagttatgcgggctgcatgtgctttattaaactcaggaggaggagtgattcgaatggccaagaaggttgagcatcccgtggagatgggactggatttagaacagtctttgagagagcttattcagtcttcagatctgcaggctttctttgagaccaagcaacaaggaaggtgtttttacatttttgttaaatcttggagcagtggccctttccctgaagatcgctctgtcaagccccgcctttgcagcctcagttcttcattataccgtagatctgagacctctgtgcgttccatggactcaagagaggcattctgtttcctgaagaccaaaaggaagccaaaaatcttggaagaaggaccttttcacaaaattcacaagggtgtataccaagagctccctaactcggatcctgctgacccaaactcggatcctgctgacctaattttccaaaaagactatcttgaatatggtgaaatcctgccttttcctgagtctcagttagtagagtttaaacagttctctacaaaacacttccaagaatatgtaaaaaggacaattccagaatacgtccctgcatttgcaaacactggaggaggctatctttttattggagtggatgataagagtagggaagtcctgggatgtgcaaaagaaaatgttgaccctgactctttgagaaggaaaatagaacaagccatatacaaactaccttgtgttcatttttgccaaccccaacgcccgataaccttcacactcaaaattgtgaatgtgttaaaaaggggagagctctatggctatgcttgcatgatcagagtaaatcccttctgctgtgcagtgttctcagaagctcccaattcatggatagtggaggacaagtacgtctgcagcctgacaaccgagaaatgggtaggcatgatgacagacacagatccagatcttctacagttgtctgaagattttgaatgtcagctgagtctatctagtgggcctccccttagcagaccagtgtactccaagaaaggcctggaacataaaaaggaactccagcaacttttattttcagaagcatgctccattatacaattaaagaaaaagaagacctatgcaatgataagaagttgggctgtggacctgaacttgcaggagaagccaggagtcatctgtgatgctctgctgatagcacagaacagcacccccattctctacaccattctcagggagcaagatgcagagggccaggactactgcactcgcaccgcctttactttgaagcagaagctagtgaacatggggggctacaccgggaaggtgtgtgtcagggccaaggtcctctgcctgagtcctgagagcagcgcagaggccttggaggctgcagtgtctccgatggattaccctgcgtcctatagccttgcaggcacccagcacatggaagccctgctgcagtccctcgtgattgtcttactcggcttcaggtctctcttgagtgaccagctcggctgtgaggttttaaatctgctcacagcccagcagtatgagatattctccagaagcctccgcaagaacagagagttgtttgtccacggcttacctggctcagggaagaccatcatggccatgaagatcatggagaagatcaggaatgtgtttcactgtgaggcacacagaattctctacgtttgtgaaaaccagcctctgaggaactttatcagtgatagaaatatctgccgagcagagacccggaaaactttcctaagagaaaactttgaacacattcaacacatcgtcattgacgaagctcagaatttccgtactgaagatggggactggtatgggaaggcaaaaagcatcactcggagagcaaagggtggcccaggaattctctggatctttctggattactttcagaccagccacttggattgcagtggcctccctcctctctcagaccaatatccaagagaagagctcaccagaatagttcgcaatgcagatccaatagccaagtacttacaaaaagaaatgcaagtaattagaagtaatccttcatttaacatccccactgggtgcctcgaggtatttcctgaagccgaatggtcccagggtgttcagggaaccttacgaattaagaaatacttgactgtggagcaaataatgacctgtgtggcagacacgtgcaggcgcttctttgataggggctattctccaaaggatgttgctgtgcttgtcagcaccgcaaaagaagtggagcactataagtatgagctcttgaaagcaatgaggaagaaaagggtggtgcagctcagtgatgcatgtgatatgttgggtgatcacattgtgttggacagtgttcggcgattctcaggcctggaaaggagcatagtgtttgggatccatccaaggacagctgacccagctatcttacccaatgttctgatctgtctggcttccagggcaaaacaacacctgtatatttttccgtggggtggccattaggaagaactccaaatcaaaatgctatgtaaatgtctatgggtgacagtctgctgatggtagaaacctttctttttagttcacaagtcagagatttggacggagctgacacaaagagtttggagctcccccatttctggctctcctttcaggggttccttccccaaccctttcagcagcggtggctgccccccattctgacccctgactcttccagccagaaagatggtggttttctaaaggaactttagctgtcctgcacaatgccgatctgtgtcttgcattttgggtaaaagccataaaaataagaaactcagcctgtggcctttctttcttccaaggctgggcggctggaataaatgtgagcttcatgcatggggggcgctcttcaatgatgagtccaggaactcgatggtcctgcagaacgcaatggatccgttatagatgctctaggtgcggcccgtctgtacaacgacactggtttcctggaactactctgagcagtatactcttctgcttgtcattcttgacggcttgggagagtccgaagataattcagtcactgtcagattaataattttgtcaggacaaagaataccgttatgattatttaatcctttaaaattgtggtctccagagcttgttctcagaatggcccagaccaagccttaattgtgatagtgaatattaatggtcactttaaggagaaattataggccaagatgaaatgaacataaacctgtttgccctggctttcagtggaagatgatattagagaccaaaatctggttctgaaggtgtgtatcagccctaaggtgaaccagacttgggaaagattgtctttaaaaatcaatgagtttatgttttaacttctcagcttagttctatgcattgctctataacacacctagttaagttttatgttattcttgaactgtgattttttttctatttactttcatggtttggtgggccattgttatggactgaatgtttgtgtcccacccttcacccccaaattcccgtgttgaagccccaacctgcactgtggagctggggctgctaaggaagtaattaaggttacatgaagtcatggtggggctctgatctgctaaggttggtgtccttatagggagagaccccagagagcttgttccctccctccctgtgcatgcaaacaagagggcatgggagcacacagagagatggcagccacctacaagccaagaggagaagcctcacaatcaaactctcgctgctggcgagagtcttggactctgtcttggacttccagcctccagactgtgagaaacaaatttctgttgtttcagcttctcagtctctggtgttttgttattgcagcctgagaacacagctgtacgattatttgtcaaacagaaaacactgatacttaacaatgctaatgcaattatttatttgcttttcagtctctacaaaacgttctaaaacactaatctaaatattaacagtaaaatatttgcataactaatggaaactaagaaatcatatgaccaatatttcacttattggtaatcttactctactgatttccccccagactgtgatttttgaacttccttgcctttctcctgtctttctgtgtttattcatggaattccagttatctgggcttgaaattgcaggctctcctaacttaagcaaaatctgacagatcagcaaaatgagataaatgtttcttttttctttctgactgcattaaatcagatacaactcagcattaaaaagctatctttgtaaatgttgttactaataaattagtcttataagatccctggactttggagttgttgcaatgtctttgagagtaattctttaaaagtctaatttcgactggttgtatctctttatgatttattgccccactaacaacatttgaaacaatataatattttaaaatgtataaataattatgaatttttgtttagaacaaagaggattactgatatttgtttccctatgaatggcaaaaggtttagcttactactgcatttctgttttaaataaaaagttgagagtttgtgtctcattaaactgaaaaaaa

SEQ ID NO: 461761 - DNA, 4686 bp, Homo sapiens
acagctaataaatggaaaccatacagctaataaatggaaacctttcagctgtgagttcaacatggaggcaaatcagtgccccctggttgtggaaccatcttacccagacctggtcatcaatgtaggagaagtgactcttggagaagaaaacagaaaaaagctgcagaaaattcagagagaccaagagaaggagagagttatgcgggctgcatgtgctttattaaactcaggaggaggagtgattcgaatggccaagaaggttgagcatcccgtggagatgggactggatttagaacagtctttgagagagcttattcagtcttcagatctgcaggctttctttgagaccaagcaacaaggaaggtgtttttacatttttgttaaatcttggagcagtggccctttccctgaagatcgctctgtcaagccccgcctttgcagcctcagttcttcattataccgtagatctgagacctctgtgcgttccatggactcaagagaggcattctgtttcctgaagaccaaaaggaagccaaaaatcttggaagaaggaccttttcacaaaattcacaagggtgtataccaagagctccctaactcggatcctgctgacccaaactcggatcctgctgacctaattttccaaaaagactatcttgaatatggtgaaatcctgccttttcctgagtctcagttagtagagtttaaacagttctctacaaaacacttccaagaatatgtaaaaaggacaattccagaatacgtccctgcatttgcaaacactggaggaggctatctttttattggagtggatgataagagtagggaagtcctgggatgtgcaaaagaaaatgttgaccctgactctttgagaaggaaaatagaacaagccatatacaaactaccttgtgttcatttttgccaaccccaacgcccgataaccttcacactcaaaattgtgaatgtgttaaaaaggggagagctctatggctatgcttgcatgatcagagtaaatcccttctgctgtgcagtgttctcagaagctcccaattcatggatagtggaggacaagtacgtctgcagcctgacaaccgagaaatgggtaggcatgatgacagacacagatccagatcttctacagttgtctgaagattttgaatgtcagctgagtctatctagtgggcctccccttagcagaccagtgtactccaagaaaggcctggaacataaaaaggaactccagcaacttttattttcagaagcatgctccattatacaattaaagaaaaagaagacctatgcaatgataagaagttgggctgtggacctgaacttgcaggagaagccaggagtcatctgtgatgctctgctgatagcacagaacagcacccccattctctacaccattctcagggagcaagatgcagagggccaggactactgcactcgcaccgcctttactttgaagcagaagctagtgaacatggggggctacaccgggaaggtgtgtgtcagggccaaggtcctctgcctgagtcctgagagcagcgcagaggccttggaggctgcagtgtctccgatggattaccctgcgtcctatagccttgcaggcacccagcacatggaagccctgctgcagtccctcgtgattgtcttactcggcttcaggtctctcttgagtgaccagctcggctgtgaggttttaaatctgctcacagcccagcagtatgagatattctccagaagcctccgcaagaacagagagttgtttgtccacggcttacctggctcagggaagaccatcatggccatgaagatcatggagaagatcaggaatgtgtttcactgtgaggcacacagaattctctacgtttgtgaaaaccagcctctgaggaactttatcagtgatagaaatatctgccgagcagagacccggaaaactttcctaagagaaaactttgaacacattcaacacatcgtcattgacgaagctcagaatttccgtactgaagatggggactggtatgggaaggcaaaaagcatcactcggagagcaaagggtggcccaggaattctctggatctttctggattactttcagaccagccacttggattgcagtggcctccctcctctctcagaccaatatccaagagaagagctcaccagaatagttcgcaatgcagatccaatagccaagtacttacacctcgaggtatttcctgaagccgaatggtcccagggtgttcagggaaccttacgaattaagaaatacttgactgtggagcaaataatgacctgtgtggcagacacgtgcaggcgcttctttgataggggctattctccaaaggatgttgctgtgcttgtcagcaccgcaaaagaagtggagcactataagtatgagctcttgaaagcaatgaggaagaaaagggtggtgcagctcagtgatgcatgtgatatgttgggtgatcacattgtgttggacagtgttcggcgattctcaggcctggaaaggagcatagtgtttgggatccatccaaggacagctgacccagctatcttacccaatgttctgatctgtctggcttccagggcaaaacaacacctgtatatttttccgtggggtggccattaggaagaactccaaatcaaaatgctatgtaaatgtctatgggtgacagtctgctgatggtagaaacctttctttttagttcacaagtcagagatttggacggagctgacacaaagagtttggagctcccccatttctggctctcctttcaggggttccttccccaaccctttcagcagcggtggctgccccccattctgacccctgactcttccagccagaaagatggtggttttctaaaggaactttagctgtcctgcacaatgccgatctgtgtcttgcattttgggtaaaagccataaaaataagaaactcagcctgtggcctttctttcttccaaggctgggcttctttttttaagtgacttcatgcagtttgttgcttttaaaaatttgtccagaatcgttttctgcagaagcatggtctgttaggagcttactggccgtagcagaagcaattgtttcctgaattcttgacatttatctttgctgtattcatttagggcttgggagagtccgaagataattcagtcactgtcagattaataattttgtcaggacaaagaataccgttatgattatttaatcctttaaaattgtggtctccagagcttgttctcagaatggcccagaccaagccttaattgtgatagtgaatattaatggtcactttaaggagaaattataggccaagatgaaatgaacataaacctgtttgccctggctttcagtggaagatgatattagagaccaaaatctggttctgaaggtgtgtatcagccctaaggtgaaccagacttgggaaagattgtctttaaaaatcaatgagtttatgttttaacttctcagcttagttctatgcattgctctataacacacctagttaagttttatgttattcttgaactgtgattttttttctatttactttcatggtttggtgggccattgttatggactgaatgtttgtgtcccacccttcacccccaaattcccgtgttgaagccccaacctgcactgtggagctggggctgctaaggaagtaattaaggttacatgaagtcatggtggggctctgatctgctaaggttggtgtccttatagggagagaccccagagagcttgttccctccctccctgtgcatgcaaacaagagggcatgggagcacacagagagatggcagccacctacaagccaagaggagaagcctcacaatcaaactctcgctgctggcgagagtcttggactctgtcttggacttccagcctccagactgtgagaaacaaatttctgttgtttcagcttctcagtctctggtgttttgttattgcagcctgagaacacagctgtacgattatttgtcaaacagaaaacactgatacttaacaatgctaatgcaattatttatttgcttttcagtctctacaaaacgttctaaaacactaatctaaatattaacagtaaaatatttgcataactaatggaaactaagaaatcatatgaccaatatttcacttattggtaatcttactctactgatttccccccagactgtgatttttgaacttccttgcctttctcctgtctttctgtgtttattcatggaattccagttatctgggcttgaaattgcaggctctcctaacttaagcaaaatctgacagatcagcaaaatgagataaatgtttcttttttctttctgactgcattaaatcagatacaactcagcattaaaaagctatctttgtaaatgttgttactaataaattagtcttataagatccctggactttggagttgttgcaatgtctttgagagtaattctttaaaagtctaatttcgactggttgtatctctttatgatttattgccccactaacaacatttgaaacaatataatattttaaaatgtataaataattatgaatttttgtttagaacaaagaggattactgatatttgtttccctatgaatggcaaaaggtttagcttactactgcatttctgttttaaataaaaagttgagagtttgtgtctcattaaactgaaaaaaa

SEQ ID NO: 461762 - DNA, 305 bp, Homo sapiens
gaaaaaaaaatgagaaagctgcctctattctacttcttttcaaagctgcccaactgttaatattttagactcggctccctatgcccagtaaatataaattttcagaactgtgatcacagccctggctaaatagtgcccctggtcaaaccttcgtaggcaaaatgttttctccagctttctgctagttcttagaagccagtgtgaaggaaaagggatgtcatgaagcatcactctccaagctgatcatctattccattgccttgagaattatgtagaataaaatcactgtctccctaaatgataaa

SEQ ID NO: 461763 - DNA, 2634 bp, Homo sapiens
agatcatatggccgcggcagccaaagtccacagggcaacaggctttgatgctgttctgcactaccgcaatgtctccctttagaactaaagtacacattccatatgacttcagcagaagtactgaccggaagacatcagccattctgtcactgtccaccctacagctggtacaacagcatcagaggttcagcagtgaccatgggatccactggagctaccacatgctacagtacccagagacttctgacctggcagtgctgtggactgtccttgtgaaggtgcaactctggtaccagcttgccgatgaaataggacacgggccattttatccaaagtctcatcagctaccacagcaacaaggtaaagggcacagaaagagctcagataggtgctacgtcactcagagttcaggtaacataactggaaatagctccagatatgtaagaagagagatttcacacaatggtgcttgcacaatctttggaagggctggaggaggagaagtcactttcttcaaggccttccgtgaaaatcagagacaccaacaggccagcatgctcccccttgcccctggaccttcccttctttttgtggacttcaagcatcagctgaagctcatggggcctgcctgcttatgataatctcttcctgatgcctgctctgtggaattcaggcttacctagccagacctcacaattgtgtgagctaatcttacataacaagtaaatccatatgtaagtttatataatgtaaacaaaatataaaatatacatatgtatacatacatatgtaagtgttaagatatatagatgtgatatattgagagagagagctcctaccagttctatgcctctgattgaaccccaactgatatagaatattctactctcactttcaactactcacaataaactcattatccttttcctcattctataccaaaaccaactccctttttcatataattcatgatacaatcttttccagaatttgaaaaaaaaagaaagacgtttctttcctctcatctgtagtatccagtaatccctaattccacacagttttcctttaaggtctctcccttctattccaaaccagttttcccttttctcacgctgtgatgattttccttcttcctaaagcttttccctgtctcaattctcaccctcttttaatgcagtctctatggaaagacctttttacatctccctacatactgctctatttaaaaatgatcatactattgcctacaagttaaaatcttcagttgtttttgtctgtttttaagatagcatttaaggcttaacaaaatattatttcataattaatatagaatagtagtcataatacaataagcaattctatgtaaggcactctgagaagtggttttcacaagttatcgtctttaattctcactataatcccatgagacacgtacaattatccccaatttataagtgacaacattgaggcagagagaggttaattcattccccaatttatacatccattagcagtattgatatagtccagggactcctagaaacacctgttgtgttgctttggtgagcagatgctgttcatcttccatggcacctgtattttatctgcatggagatgagctcagccagagtacttctcagagaggataccacgtggatgcaaataagagcagagaaagcaccgagtagttacaatggtccttgctgggtgtttggagaagctaattatttgagagagaaacaagcctaggaaagacttttgggattaggtgaaaagtgtacccttgcagggagcaagaagccatgccatgcccaggctttcgatcgctccaccacaggatatcattgtccacaggccctaactttagttcttgatttttccaacctctctttaaagtttattcttattttccaaaacttagaaaccatgcccaatggaatattggctgtgaaatgaatgaatgtgtgtctctgttagatcagccaggctgtttctcttaacacattcccccgacatgattctgagatacattaacatcacaatgctttcttgaccatcgagtcacacagaaatgaaaccagtctgaaaagatttactttccacaaggctatttaagttacgactacaatttttctagagtctcttctagttccaaagtacacatatatgagttatctttttcttttcaagacgaattttctggttatgctccattgtcatctttaagtaaaagccatctgatattttactgcaagcatgtggcagtgaagacgacaatgactgctagtatggtttgtgccactgccttgatttccgctcaggcaccagcagtcttacccaccattgctttggtgcagttggtggagatatcaatggatcaaaagcgcaagtaatatgactcggctccctatgcccagtaaatataaattttcagaactgtgatcacagccctggctaaatagtgcccctggtcaaaccttcgtaggcaaaatgttttctccagctttctgctagttcttagaagccagtgtgaaggaaaagggatgtcatgaagcatcactctccaagctgatcatctattccattgccttgagaattatgtagaataaaatcactgtctccctaaatgataaa

SEQ ID NO: 461764 - DNA, 958 bp, Homo sapiens
gaggcacagtaaaagttctcagttgattatcttgagctcaaggtgattgggtttggtacagtcaggtgactgggagggctgggaacccgcacgggtttaattgttggttatgttagaagcagacccatacaaaggggcccctattaaagggtctagactgagcaaaacgaaataccttcgtgctaaattttctgaacatcaggagtccaggtatagccagttgcttatctagcaaactccatccatcttctgaacagaacagtgttgtgttcaaggtctcgcgaggctgcaatcaaggtgtcagctgagctgtgttttcagctggatgtttgagtggggaagagtccacctccaagctcactcaggttgttcacagactgtatttccttgtggctgtataactaagaactctggcattttgctggctgttggctgaggctacccttcggttctagaggctgccttgtaaacttcttcaacacagctgctcacttcatcaagcctgcgacaagaacctctccagtgcatgccagcaagatggggccatacacagacataaaattacgggagtgacatcccatcacctttgcattttctattgctaagaggcaagtctcaggttccacctgcactcagatggagggaattacacaaaggcatggacatcaggaagcaggaatcactgtgggtcactctaggatttgttatccacaagggatcacattatctgcttagaatttcaaacgaataataaaaccaaaaaaagttggtctgccttttaaaaattttcccttatttaaaactttattcttaataaagaaaatgaaaacctaaaaaaaaaaaaaaaaaagtgtgggggggccggaaatttaaaaaggggggggcaggtagaaggtaaggtaaaacgggggagggggtcaaaacgggggcggtgaacagagggggtgtaaagagaagg

SEQ ID NO: 461765 - DNA, 2396 bp, Homo sapiens
gaggcacagtaaaagttctcagttgattatcttgagctcaaggtgattgggtttggtacagtcaggtgactgggagggctgggaacccgcacgggtttaattgttggttatgttagaagcagacccatacaaaggggcccctattaaagggtctagactgagcaaaacgaaataccttcgtgctaaattttctgaacatcaggagtccaggtatagccagttgcttatctagcaaactccatccatcttctgaacagaacagtgttgtgttcaaggtctcgcgaggctgcaatcaaggtgtcagctgagctgtgttttcagctggatgtttgagtggggaagagtccacctccaagctcactcaggttgttcacagactgtatttccttgtggctgtataactaagaactctggcattttgctggctgttggctgaggctacccttcggttctagaggctgccttgtaaacttcttcaacacagctgctcacttcatcaagcctgcgacaagaacctctccagtgcatgccagcaagatggggccatacacagacataaaattacgggagtgacatcccatcacctttgcattttctattgctaagaggcaagtctcaggttccacctgcactcagatggagggaattacacaaaggcatggacatcaggaagcaggaatcactgtgggtcactctaggatttgttatccacaagggatcacattatctgcttagaatttcaaacgaataataaaaccaaaaaaagttggtctgccttttaaaaattttcccttatttaaaactttattcttaataaagaaaaatgagaaaaccccaaaactttcttctttaattggcaaccttcaaaaaagatattcacaacaggactcagagcaagggcagagatccccaaagagatggtttttccttaattcatcaggctggagcagagtttaaaccaagctggaaccactccggctctggccacaacctaatctctacatcctggcctccatcacattggccggaagctggttcgcttcatccaagggtctagtttgagggcattcatggcttctgcaagtttgagcatcccttgctcctggtgctggcagtgccactcagccatggactggagcatccacttggtttggagcttgtaccaataggagctgtaaaccacgacctcggtgaggtctgaagactccagagccttcagctggagcatggccttgctcatctgctcgatgtaagggattatccatacgggcctgctgggggaaggggatgagagctcccagcgactcccgtcaccgccccgcagcgcggcccccacccggcgccgtgacgccggcccgccgcttccgctctgcccatatttggctcagccactgcgccgccggcccggggagcatttttttttctactctgataatgacaactcaagtaattacctgcaagacaagaagaatgaacaacagtcaatgcaaaatgttagaaaacatctgctttgcagggcttgtctatcaaagcccgactctgtgcctgaatggtgttcaggtccctgaagctattgatttttacattgtcaagtgtggtaacattacatcctgtcccaaaaccatagtgagctcttctcttcattgtctatggtccattctaaaagttgaaaactatcaaacggcacttcaagtagagtattttgtgcggataaatgagcacaatttctgcactgccattgccacaaacgccatcactatcaccatcaccatcacaaccattactactaccatcaccatcaccaccaccaccatcaacacctataccataactaccatctccaccatcatcagcaccattatcatcaccatgccaccaccaccaccactgccattgccaatgcctgagtggaagaggagtggaggagcgaggtgcctgagacagaattttctcccccaaatcctccattatcaccattgctgctaacaccatcaaagctaaaacttgaggctgtttctatacctgaagcctcaatgtgcttattaaagtgctaagtggctagaacagattcagataatccagggtcttgttgctcaaagtgtggttcatggaccagtagcactggcatcccctgggagctcgttagaaaggtagaatcttagtcattaccccagacctacataatttccatcttaacaagatacccaagtagttcacatgcatgttgaagtctgagaagcgccactctagagcagggcttggaaacctacaggactcctagaggagacagtgctttcattattgtctgtcttttggatagaagctgttctaactggggtgagatgatatctcactgtggttttgatttgcatttcttgatgattaatgatgttgag

SEQ ID NO: 461766 - DNA, 913 bp, Homo sapiens
  misc_feature (1)..(2): n is a, c, g, or t
  misc_feature (4)..(4): n is a, c, g, or t
  misc_feature (8)..(9): n is a, c, g, or t
  misc_feature (13)..(13): n is a, c, g, or t
  misc_feature (15)..(17): n is a, c, g, or t
nnantgcnnacangnnnagttataattattttttaggctatggctttgtgtcaatacttggaggaacatgccgaggaactgaatttccaagatgcaaaaatacttgaaattggtgccggaccaggccttgtttccattgtggccagtattttaggagctcaagtcacagcaacagatttgcctgatgtcctgggaaaccttcaatacaatcttttaaaaaacacactacaatgtacagcacatctgcctgaagtgaaagaactggtatggggggaagacctggacaaaaactttcccaagtcagctttttactatgattacgtcctagcctcagatgtggtctaccatcactacttcctggacaagctgctcaccaccatggtgtacctttcccagccagggacggtgctgctttgggcaaacaaattcaggttcagcaccgactatgaatttttagataaattcaagcaagtttttgacacaacactgttggctgaatatccagagtcatcagtcaaactttttaaggggatactaaaatgggactaaatccaacaaaatgcctttcacaacgttactgtgtcttttgagcaatgtgttagaaattgctttggtaatagacttctttcacaggattgagaaggtagtgcatagaaacaacttgtatacttggaacaaatgtaacaatactgcagaaactttctaatttctaagataatttaagattatctggttaatctaaatatctaaaaagaacaacataaaaacatgaaagtagctttgttggttccaacgaagttacatgtttaataaatcttacatggataaagtaataagtgaatttcttccctatttctgctatagagcatatgtttaaacttggcaatatagtcttgtcacatgctttttgaaa

SEQ ID NO: 461767 - DNA, 901 bp, Homo sapiens
tctctaataatctcaccgctacaggctatggctttgtgtcaatacttggaggaacatgccgaggaactgaatttccaagatgcaaaaatacttgaaattggtgccggaccaggccttgtttccattgtggccagtattttaggagctcaagtcacagcaacagatttgcctgatgtcctgggaaaccttcaatacaatcttttaaaaaacacactacaatgtacagcacatctgcctgaagtgaaagaactggtatggggggaagacctggacaaaaactttcccaagtcagctttttactatgattacgtcctagcctcagatgtggtctaccatcactacttcctggacaagctgctcaccaccatggtgtacctttcccagccagggacggtgctgctttgggcaaacaaattcaggttcagcaccgactatgaatttttagataaattcaagcaagtttttgacacaacactgttggctgaatatccagagtcatcagtcaaactttttaaggggatactaaaatgggactaaatccaacaaaatgcctttcacaacgttactgtgtcttttgagcaatgtgttagaaattgctttggtaatagacttctttcacaggattgagaaggtagtgcatagaaacaacttgtatacttggaacaaatgtaacaatactgcagaaactttctaatttctaagataatttaagattatctggttaatctaaatatctaaaaagaacaacataaaaacatgaaagtagctttgttggttccaacgaagttacatgtttaataaatcttacatggataaagtaataagtgaatttcttccctatttctgctatagagcatatgtttaaacttggcaatatagtcttgtcacatgctttttgaaa

SEQ ID NO: 461768 - DNA, 4376 bp, Homo sapiens
gcattcaacttaaatgcttttattgacaatgtcttggaacaataagcaaacaatgcttaaatttttcattcaaattcactttccacatgtcaaaagacctcaaggtagaaaaaaataaaataaaaatataaatatctgagaatccatcttaataaataaattaaaaacacaataaaacgttttcatggaaaactgttaatgtcagaacattcagaccacctcaacaatgcatgatcagtaacattacaatgaacattgatgttgaagaaaaactacagtacatggatatagctatttatttctatctaccagaaaataaagtcgtatcttttcttagtataatattggtcatttctaatcagaacacactattgccaggaacacagtagttattgttaaaatcagctgcactagatacaatttgaaaatatccagcaccaggttaattccaataatgaacccaatagattagttaatgctatgagaagactaaggagaaagagaaaagagacacagacccaggcctggctcaacatgctactaactaccagctctctgaagtgtcactgggaacaatacacactccatgcgttttgctacatctccggaagaggtaaggacttgagtccacacatggatgctttcaagtccttgaggcccacagcctggtgtgtttcacgcacagataaggtcctccctaggtctacaggaaccctctagggaagatgtgtttctcctctctgtaatgcaccagctcgggcagtggcacttgtgggtgccggctgcctccccttccctgccccctcacagggccagcagcgtgggtgagctgagcgagtcagaggaaggctcattgctgctgctgcccttgcggtgggcagctgcacagctggggaaggagtcagcctcggggtaggtgaagacgaaggaagacgtgtaagcagtgcagctgggagtacagtgaccgtgggaatgaagttggcactggagacggccaggtccgtgcagaagtcctagaacaaaacagaaggggaaagccgacgtgagcgagcaggttccggacacaggtggggcgagttcccagtgccgcatgcagcagtgaagagaaacgatcctgccacggacatttcatcttaaatgtccctcatcctggatgaaaggtctcccccttttcctcccaggcattccgcagcgcagtgcctgtctcttccatcctgccgctgcgttcccgttatcccttcagcatcacttgcttgaaagggggtttgttataaatatccctgacgtctgcgctgacgcaggcgccgctccggagtctccagaatgaactcgctttttatcaatgaaactgccttacacacccgcccgctgcaccctcctccctcatccctcctccgtgctccaggctgccgggggaggggggattgccgctttctgccacctccccggagaagccaggctctagttagcgagtttgtgcttgggacacgtctgctccagctaatgtcagagatccgtcctggagtgcagaccagaggttgctcagaacgaacctgcctcccgaagggggaaccaattcttactatggcaagcgtgcgtgcgctcagagcaagtcccgagcccccgagccggcaccgctccggccacggcagcctccctccaggcacaagggagccccctactcatctactggagcgtcccgcccggtgtctcctcctccgcgaccccaagcccccggccccgcggcgacgggaagccagccttacctgcgcgttgacaggcgagcccatgctggagaaggagtctgcgggtgagtggtagtaagagaggctatccccggccggggacgcgctgctgcagcgggaggatgacgcctcgtagtctgcgttgaagcccgagaacatcatcgtggcggttaggcaaagccgggcgaggggccgaggggcggagacaggtgggcgctgtggagcagagctgggtaggagcacggtcactgctcgttcgctgcgccgcggccgccggctcagtcttggcttctcagatgctcgctgcagatgcggttggagtacgaggcgccgcagccactgcttttataacaagcgttttatgaatgagtgtaaacgtcacgggctcaaccacggtggcgccagaggggtggcgcgcgggcctgggcgcttctgcggccgcccggctgcgtccccagcgctcgcagctccctgcccccgccttggcgcgtgtcctaatctcgtgagcatttcgcagttcctgtctcagaggtctcgtgggccccccaagatgaggggtttcggggatggctccccccagggctacagggaaaggccgtggaaacctgctgacgcagatgtcctaatatggacatcctgtgtaaggggggagggattgacgggaactgctcgcgggctgcagccaacaccgagggtgcagtgcggggggaggcgggggccgcggctgggggaggggaggcgggaacggcgcagaatgagagagaacattcgcacctggttcaatgcggacccttgttcccgaggtcgggggggatggggcagagagcgcctttttacccttgtacggaaactgaagacagttctgaggctcagagataggagaaacggcatcgagtacaggaccccgaggacttaagcctcggctcccgaaggaatgcgcccctacccccatccccaattctagccctaattcagtgcaaagcgtggaagcagaccttcatcccctaacctccagccctcgggctcgagcaatactagcactgttcctgcgtttggaagcagaaagtggaggatccaaaataagagaatacgataacctactttacgatactgggtactttatttatttatttttttaaagaagacagcgcatttatttatttatttttctcggccatgtgtgggaatattaaggaaactgtcaaatccctgagacaccagcagataaacactgtgcaaaacctacgtgcgaagacatttgaagggggtgtctgcccggttctgagctgggccccaggggtagggagtgcgaggaagctgtgcttacgggagcccgcagcgggtgattttccagcgcggacttggagggtggaggacgggggctggaaggacagtgtccagctgcgcctgggcggaatacctcgactgctgggaccccaggagcggctccacgtcctggaacacggggctttggggaggcaaggtgctccagagtgtgccacgccccccaatctcctgccctgctgcgtaggacagccggggtcacgctgccggggctcagccccagcgcgctggccacctccagggcgcgaagacgcatgtccccgcacagccccggtcttcccttctccactcttcgggcccgggggtcggggcccgcgccgccgcgcccgggagccaggagatcctgctatagatagtaacagggaagcggctgtttacagcaacacagcgccgccagggccgtctccaggcaacgccgcgcggccgggcgcgccgtcggcctggcgaggccaccctccctcccagctcccctgggccgcggcctccccggcccggccgcggccgctcccgtcgcctgacatcatccgccgggtccgggggctgagcggcccgcgcgaggctgtgcgctaacctccattcttagagatccaacccggcaggagcggggagggcaggaggcggggattcgtggaactgggccacttgctatttttgcattccctgtcacaggcagaggtgaaaacagaatttcatcattgtatgtcattggtttatgttggtgggaatttaggcgcttttttttctcactcataaaaagggagggaaacggaaaaacacacataatacgtaaacacagattccttggagctgctctgaatcctaaagcaattctgcggccttcggtacttctaattctatccttgattacagaaagaaagagggggacgggagggaaaggggttatgaagccaaatacatctctcttattattaatattagcttcagacaaaataggtcaagctttgaattcctgagtctggccatgactgccattcacaactagatctcaggccacttaacaggaaacctgactgggtgcggtggctcactcctgtaattcctgcactttgggagcccgaggcgggtggatcacttgaggccaggagttcgagaccagcttggccatcatggtgaaactctgtccctgctaaaaatacaaaacagccgggtgtggtggcgcacgcctgtagtcccagctactcaggaggctgaggcaggagaattgcttgaacccgggaggcagaggttcctgtgagccgagatcgtgccaccgcactccagcctggg

SEQ ID NO: 461769 - DNA, 5650 bp, Homo sapiens
ctcctgaggcacactggactggtccccccaaccccggtgccttgggctacccccaccaaagttttgtcagtcagccccaccccttcagcaagcagcccagtccttgccctcgccaatcaccccagggtgactttgggtgggtgactcctggggcttcccgctccattactgggccctcatctcctgccgccccaagcttgatctccgtgggctctttgggctctcatctccaaggagccaggccccaccctcgccagtcatccttgggtgactttgggctggtgactcctgggactccctgctgcagactgtgccctcccctcctgctgcctcaaggtgggactgggtgcccctctgccagctgagacagcccacacaccccagccctaacgatcgttctctctacctctctccccactcctgctccacctcctcctctctgcatgcacctcagagcccgtgccaagaacgagcagtagtcctggattcaacacacccctgctcgagtccttgctacacacgccctggggttgttgcctcttggggaagtgctagcctgactggttgtcaagggccccgtatttctgccatgactcagtccctaatttgctctttgattctggacaagccacctctcctttttgggctcgtgtttccagaggaggtagaaaagaaagcaaacaacgagagacagaaagccgaaagggtgctagaggttcaaatccagacattgatcatacagaaagaggaactaaatacggacctgtaccacatggaacgttctctcagatactttgaagaagagtccaaggacctggctgtccgcctgcaacattcattgcagtgtaaaggagagttagagagggctctgtctgctgtcatcgccacagagaagaagaaggcaaaccagttgtccagctgcagcaaagcacatacagagtgggagttagagcagtccctacaggaccaggcactgctgaaagcgcagctgacacagttgaaggagtcatttcaacaactccaattagaaagagatgagtgtgctgaacatatagaaggagagagggcccggtggcatcagaggatgagtaaaatgtcgcaggagatttgcacattaaagaaagagaagcaggatatgcgttgggtagagcagctggagtggagcttgtccaaactcaaaaaccagacggctgaacccttgcccccggagcccccagcagtgccctctgaggtggagctgcagcacctgaggaaggaactagagagagtggcaggagagctccagtcccaggtcaaaaacaatcagcacataagtctcctgaaccggcgacaagaagagaggattcgggaacaggaagagaggcttcggaagcaggaggagaggcttcaggagcagcacgagaagcttcggcagctggccaagccacagagcgtcttcgaggagctgaacaatgagaacaagagcacactgcagttggagcagcaagtaaaggagctacaggagaagcttggcgaggtggagctgaagagccaagaggttcagagtctgcagcagcagccagaccattacctgggtcacctgcagcagtacgtggccacctatcagcagcaggtggccgcctatcagcagctgacctgtgagaaggaggcgctaagaatgctcacatcttgccctcaggtggcatttttcaagtccgctggagctagtgcccaggagaagcaggcacagttacaagagcaggtgaaagagcagagggtgtgctgccagcgcctggctcacccggtggcctcggcccagaaggagccagaggcagccagaggccctggagccccagggcctgggggcgagtctgtgagtggggagacccaccgggccctgcaggaagtcacggagaagctggcccatgccaggactcacctccgccttctccatgacttgaaaatgccacctgagggcaggtcgctgccgagatgtgactgcaatattttggctccagagcagctttatggaccacctgaaggagaaggcagacctgaggccatcagaggggccccagcgtctgagccctgtcctcccgcaggaaaatccatcaccttttatcagaaccagggggccgtgccaaagatgcagcactgggaggaggacaccatcaggctggagctcagggaggagatgaaggtgaagctgctggagctgcagcagatggtattgcggcttacagcaactacaacaatgggcacagaaaattcctggccgctgcccacaactctgctgatgagcccggtccaggagccccagccccccaggagcttggggctgcagacaagcatggtgatcttcgtgaggtgaccctcacctcctctgcccaaggagaggccagggaggatcctctccttgacaagcctactgcacagccgatcgtgcaggaccaccaggagcacccaggcttgggcagcaactgctgtgtgccattattttgttgggcttggctgccaagaagaaggagataaacatcaccatcatcaaacagctgctcaagaaatttttaaataagaaaccaagttatggggttaatctcctacacaattcatttacttcctttgaatgttagactcactcatgattatttgtgtttctaatttatagtttaagtttatttgtaaaaagttaaaagagagtgggtgtctgtggctctcactgatgttcactctggcatcctttagcatttttcttttttaatttcataattgtaggtcattagcgtgcatatcgagtttgcccttacgtggtgggagttcaaacacacaaagacccactctttgcccaaaactgttctctttggtttggaataggctgccatgcttttttaatgttattgcagcatgtatattcactacagcattcagacaaaatttgcctatgttctgctgttgtttgatgtaatcttaatcacagtgagctcttccttagctcaatatgtagtttgcccccaagtgtgcactgtttattactttgtaatacgccactatgagtactgacatttagagttgtttaaaggccaagaattggaaacagcctttcctccattttctgtgtattggtgatgggagtgataaccttttgggggagctttttaaatctcacagaagaggaaagtggcctcctctggcaggtacgtgcaggatagagtgtgtttcatctgttccggtgccaggaattagcagtgtattatggtggttcccttaggatttgtatgtgctctgggctcatgaagatactgcatcatgagctgcagcagttgcactctttttcgatgacctaaaaagggcttatttctgaggaatgaaaggttcccatcgttgactgtggatgtggaaaacctttcctagcttagagcatttgtatctacaatacattttaaagtcagagttcatgttacctgttttaatcacatgactacatgccccagtacacaaaagggcactggttggcattcttcttaatgtatttagtgaagatcataagaaatcctttacgagttcaaatgtccctggaacaggcatacaggctctagtcaagaatgaattagagtgaaggaaagctgtgtgactcctggcattcctctctgttcacggagattctttgaggcttgaagattgattttaccatctagacctctttggctaatacctattcttcaaccaccttggttactctgacataggaatttacttctttttctttgaatggaaaacactttaaaaaaatagaaacattcttataaactaatatatgtgagatagttgaaacaaaaaggagttttagtagatggtattatactatctttgaaaatcaaggagaagtttatgaaacttaaaatgtgtacaaactgcagtgcaatctactgttgttcgtgaatgtcaatgtattatcaggaaacgtgtctatacaaccacagagttatattttctcacaaacttctttacaaagtgaaatatgtttttgtacctctgggtttctgttcgggacatattttgtgcaatatttatgtgattgtgcctatgcatgatgaatgaatgcatttcagttatgtattgcctaaatcgtaacttgatgatgcttgggaaagactcaacagttaaaacttcatgaagttctaatgtctgtgttccaaaacacatcacattgttaggatgcagggagataggtgtgtgtgctccctgcggtggggatttctagttactagatcatctccatttttagcatttggcatcctcatgatacttctataaatatgacattaacaggagagcaacaatacgattttaccgatggaataacagatttgctggcattcactgaaagagtgcaaatattcggtccttgtgacttccactgactcttccaaattttatgaatgtatcaatgtattagataaacccagtttcagaatgataaagaaaaaatcttagaccaaataatgcggctaattaacagtggtacgatttgtagcccgtgggtttaaaatgcacttaaagtcctgttctcgccttttattttctgaacttgccgcttttgcattctttgagttcagtttaaagacagttactttaagagcattttaaaccctcgggctagaaatcggaccactgttaatcagccacattatttggtctaacgttttttcttttatcattctgaaactgggtttatctaatacattgataaattattgcaaaggtacttttatcgttgaaatcacttcacttttaccctgataaatatcagtgactaggaatgaccttcggatagcgtttagcatctgtaaccaatctgacaataatgtgttcatgaggtgcctatggattaaatcacacactggcatatttaagctgaaggtcagtctggaaaataaatttactatattgactgaaataccactctttgtgtaggtatttgtcatatatttaagaaaaagctaaaaagaatggaaattgtatgacaataactcaagtctttctccaaagtgcatgcagtcttttgtgatacctcattcagccgagtatttgtgctcttcctcattcagtataaggcagctttcagtttgcttagaaggcaacattggaatgttagagttcatcagaaacatagaattttaaactgtgagttccactgaatacattttgatttctgtaggaagaatcaaaatacctatttaaagatggcaatgtataataatcattttaaaagtatttgattaaacctgataattttccagaaatgaaaaaaaaaatcagctctaaaaccaaagctgattttagaaaatttgaaaatgtaaatcagccctatccataatatagtttctctaaaactttattttaaagagtcattttaaaataactattaaaaaatgtaactgctatcttaatgttctgaaataatttaaaacattttaaaatatgaatactgtagtataaaagaaagaaatggtgggaacgaaaagcagagaaagaaatgccaattccagtccaaagttttatttgccaagttttcttagaatgaattttaccagtttatgaattattgtaaagagaatgtgtcgtggaaatactgaaagatttttccctagagtggccttattgactgctg

SEQ ID NO: 461770 - DNA, 3046 bp, Homo sapiens
gtgcttagcacctatctgctctctggcctgcgtcagtggtctacagcagttacacacaggcagtggtatctgtgagcagctctgtggactcaaaggttttctccctgagaggcatgacccaggccagctgattcatcagaatcaggatggacgtggtagaggtcgcgggtagttggtgggcacaagagcgagaggacatcattatgaaatacgaaaagggacaccgagctgggctgccagaggacaaggggcctaagccttttcgaagctacaacaacaacgtcgatcatttggggattgtacatgagacggagctgcctcctctgactgcgcgggaggcgaagcaaattcggcgggagatcagccgaaagagcaagtgggtggatatgctgggagactgggagaaatacaaaagcagcagaaagctcatagatcgagcgtacaagggaatgcccatgaacatccggggcccgatgtggtcagtcctcctgaacattgaggaaatgaagttgaaaaaccccggaagataccagatcatgaaggagaagggcaagaggtcatctgagcacatccagcgcatcgaccgggacataagcgggacattaaggaagcatatgttcttcagggatcgatacggaaccaagcagcgggaactactccacatcctcctggcatatgaggagtataacccggaggtgggctactgcagggacctgagccacatcgccgccttgttcctcctctatcttcctgaggaggatgcattctgggcactggtgcagctgctggccagtgagaggcactcccctgcaggggatttcacagcccaaatggcgggaccgtccaggggctccaaagaccaacaggagcatgtggtagccacgtcacaatccaagaccatggggcatcaggacaagaaagatctatgtgggcagtgttccccgttaggctgcctcatccggatattgattgacgggatctctctcgggctcaccctgcgcctgtgggacgtgtatctggtagaaggcgaacaggcgttgatgccgataacaagaatcgcctttaaggttcagcagaagcgcctcacgaagacgtccaggtgtggcccgtgggcacgtttttgcaaccggttcgttgatacctgggccagggatgaggacactgtgctcaagcatcttagggcctctatgaagaaactaacaagaaagcagggggacctgccacccccagccaaacccgagcaagggtcgtcggcatccaggcctgtgccggcttcacgtggcgggaagaccctctgcaagggggacaggcaggcccctccaggcccaccagcccggttcccgcggcccatttggtcagcttccccgccacgggcacctcgttcttccacaccctgtcctggtggggctgtccgggaagacacctaccctgtgggcactcagggtgtgcccagcccggccctggctcagggaggacctcagggttcctggagattcctgcagtggaactccatgccccgcctcccaacggacctggacgtagagggcccttggttccgccattatgatttcagacagagctgctgggtccgtgccatatcccaggaggaccagctggccccctgctggcaggctgaacaccctgcggagcgggtgagatcggctttcgctgcacccagcactgattccgaccagggcacccccttcagagctagggacgaacagcagctgagcttcctggaggaggagcagctgctgttgctggtgaccagcacattcaggaacggagactactctgtcaacagacagggggatgacctgagtgctcaggccactccgggtcacgcaggtcatttgccggcccctgtcataattattgccatatgagagtgccacccgtcctatgacatattttatatatttctgtgaatggcctacttgtttgtatttatgaatttatgtttaaaggatgggcaggggtgctcgagaggtccccaggagtttccctctggggagagaggggcccaccccttcccagcagccctctgagccccccgatcgcttggccacagcctctgcctggagaaagcatccccctcggagatatatggacatcagaagaaacctttctctgtcaccaggacaaatcctgttcttacttgaaccaaggccaggtttcctaatgaatgcagggaggacagcacagatcaatgaaaccagcagataatccacaagactgtttcccagagctgggaaatttccttccctgccaacacttttcctgaaagttcttaagaatgaggcaaacagtttaagtctctctcgcactgttcttttagtgaaagagttcaatgaggaaagagaggaagtggagcatatgcttagtttccaagctggaaaagtggcccatggttaaccaagactagatgtaaaagcacaggtgtccacgggtccaggtgagccggtcctacgatggcatggctgctaatgccagcagatgctcctgtcctctcctttcaaagactgacttcttctggtctttcattcgttaaaataaaattgacagggcatcatccgagaagctctacactttcccttacttggatttcagactctagattcggctgagatttgagcttcatggtgaacacattcttggtgtgcttgctgctgaggggtgtggaggacagagagatggtgaaatggcaaagtgactcttgagcatgggtgggggaagcccccacatgtctgagtcagtgccacctggacactacccttggagcatcctgctgaggtggccattccggttttctttcctttccttttattccactgtttctgaatcacaaataaagatccaaggcaaacagcacattcagatccccaagctctccacctccaatgtgaccagggacgtgcaccacttcaggctcatgcaggacccacagcctttggacctcagctaagggacctgcttctcttcagcacacggggcttgtttgtgttggggtctgagccctgagcgcatggtcaaggagacccccagg

SEQ ID NO: 461771 - DNA, 2958 bp, Homo sapiens
ctacaccgccaaggctcatttggggattgtacagtcctgcccctcctgggagtcagccccacaggaaggcccttgtcctcccttccctgtgccttctcctgggctgagccctgagctggaaagggacagagccagtcctttctgggggtcggcacccaggctggggccgctccaggccccgtgcagttcctcagctctgcctgggttgccttacagtgagacggagctgcctcctctgactgcgcgggaggcgaagcaaattcggcgggagatcagccgaaagagcaagtgggtggatatgctgggagactgggagaaatacaaaagcagcagaaagctcatagatcgagcgtacaagggaatgcccatgaacatccggggcccgatgtggtcagtcctcctgaacattgaggaaatgaagttgaaaaaccccggaagataccagatcatgaaggagaagggcaagaggtcatctgagcacatccagcgcatcgaccgggacataagcgggacattaaggaagcatatgttcttcagggatcgatacggaaccaagcagcgggaactactccacatcctcctggcatatgaggagtataacccggaggtgggctactgcagggacctgagccacatcgccgccttgttcctcctctatcttcctgaggaggatgcattctgggcactggtgcagctgctggccagtgagaggcactcccctgcaggggatttcacagcccaaatggcgggaccgtccaggggctccaaagaccaacaggagcatgtggtagccacgtcacaatccaagaccatggggcatcaggacaagaaagatctatgtgggcagtgttccccgttaggctgcctcatccggatattgattgacgggatctctctcgggctcaccctgcgcctgtgggacgtgtatctggtagaaggcgaacaggcgttgatgccgataacaagaatcgcctttaaggttcagcagaagcgcctcacgaagacgtccaggtgtggcccgtgggcacgtttttgcaaccggttcgttgatacctgggccagggatgaggacactgtgctcaagcatcttagggcctctatgaagaaactaacaagaaagcagggggacctgccacccccagccaaacccgagcaagggtcgtcggcatccaggcctgtgccggcttcacgtggcgggaagaccctctgcaagggggacaggcaggcccctccaggcccaccagcccggttcccgcggcccatttggtcagcttccccgccacgggcacctcgttcttccacaccctgtcctggtggggctgtccgggaagacacctaccctgtgggcactcagggtgtgcccagcccggccctggctcagggaggacctcagggttcctggagattcctgcagtggaactccatgccccgcctcccaacggacctggacgtagagggcccttggttccgccattatgatttcagacagagctgctgggtccgtgccatatcccaggaggaccagctggccccctgctggcaggctgaacaccctgcggagcgggtgagatcggctttcgctgcacccagcactgattccgaccagggcacccccttcagagctagggacgaacagcagctgagcttcctggaggaggagcagctgctgttgctggtgaccagcacattcaggaacggagactactctgtcaacagacagggggatgacctgagtgctcaggccactccgggtcacgcaggtcatttgccggcccctgtcataattattgccatatgagagtgccacccgtcctatgacatattttatatatttctgtgaatggcctacttgtttgtatttatgaatttatgtttaaaggatgggcaggggtgctcgagaggtccccaggagtttccctctggggagagaggggcccaccccttcccagcagccctctgagccccccgatcgcttggccacagcctctgcctggagaaagcatccccctcggagatatatggacatcagaagaaacctttctctgtcaccaggacaaatcctgttcttacttgaaccaaggccaggtttcctaatgaatgcagggaggacagcacagatcaatgaaaccagcagataatccacaagactgtttcccagagctgggaaatttccttccctgccaacacttttcctgaaagttcttaagaatgaggcaaacagtttaagtctctctcgcactgttcttttagtgaaagagttcaatgaggaaagagaggaagtggagcatatgcttagtttccaagctggaaaagtggcccatggttaaccaagactagatgtaaaagcacaggtgtccacgggtccaggtgagccggtcctacgatggcatggctgctaatgccagcagatgctcctgtcctctcctttcaaagactgacttcttctggtctttcattcgttaaaataaaattgacagggcatcatccgagaagctctacactttcccttacttggatttcagactctagattcggctgagatttgagcttcatggtgaacacattcttggtgtgcttgctgctgaggggtgtggaggacagagagatggtgaaatggcaaagtgactcttgagcatgggtgggggaagcccccacatgtctgagtcagtgccacctggacactacccttggagcatcctgctgaggtggccattccggttttctttcctttccttttattccactgtttctgaatcacaaataaagatccaaggcaaacagcacattcagatccccaagctctccacctccaatgtgaccagggacgtgcaccacttcaggctcatgcaggacccacagcctttggacctcagctaagggacctgcttctcttcagcacacggggcttgtttgtgttggggtctgagccctgagcgcatggtcaaggagacccccagg

SEQ ID NO: 461772 - DNA, 3200 bp, Homo sapiens
gtgcttagcacctatctgctctctggcctgcgtcagtggtctacagcagttacacacaggcagtggtatctgtgagcagctctgtggactcaaaggttttctccctgagaggcatgacccaggccagctgattcatcagaatcaggatggacgtggtagaggtcgcgggtagttggtgggcacaagagcgagaggacatcattatgaaatacgaaaaggctccctctgggctacagggacaccgagctgggctgccagaggacaaggggcctaagccttttcgaagctacaacaacaacgtcgatcatttggggattgtacatgagacggagctgcctcctctgactgcgcgggaggcgaagcaaattcggcgggagatcagccgaaagagcaagtgggtggatatgctgggagactgggagaaatacaaaagcagcagaaagctcatagatcgagcgtacaagggaatgcccatgaacatccggggcccgatgtggtcagtcctcctgaacattgaggaaatgaagttgaaaaaccccggaagataccagatcatgaaggagaagggcaagaggtcatctgagcacatccagcgcatcgaccgggacataagcgggacattaaggaagcatatgttcttcagggatcgatacggaaccaagcagcgggaactactccacatcctcctggcatatgaggagtataacccgcctctttttcagaggaagcctctccttcagaggaagcctctccagtcacctctgccctctccaatgacatgagtcctcccaggtgacctcagccctcccaggtgatgtccttccatggtgactctggctcttgcaggaggtgggctactgcagggacctgagccacatcgccgccttgttcctcctctatcttcctgaggaggatgcattctgggcactggtgcagctgctggccagtgagaggcactcccctgcaggggatttcacagcccaaatggcgggaccgtccaggggctccaaagaccaacaggagcatgtggtagccacgtcacaatccaagaccatggggcatcaggacaagaaagatctatgtgggcagtgttccccgttaggctgcctcatccggatattgattgacgggatctctctcgggctcaccctgcgcctgtgggacgtgtatctggtagaaggcgaacaggcgttgatgccgataacaagaatcgcctttaaggttcagcagaagcgcctcacgaagacgtccaggtgtggcccgtgggcacgtttttgcaaccggttcgttgatacctgggccagggatgaggacactgtgctcaagcatcttagggcctctatgaagaaactaacaagaaagcagggggacctgccacccccagccaaacccgagcaagggtcgtcggcatccaggcctgtgccggcttcacgtggcgggaagaccctctgcaagggggacaggcaggcccctccaggcccaccagcccggttcccgcggcccatttggtcagcttccccgccacgggcacctcgttcttccacaccctgtcctggtggggctgtccgggaagacacctaccctgtgggcactcagggtgtgcccagcccggccctggctcagggaggacctcagggttcctggagattcctgcagtggaactccatgccccgcctcccaacggacctggacgtagagggcccttggttccgccattatgatttcagacagagctgctgggtccgtgccatatcccaggaggaccagctggccccctgctggcaggctgaacaccctgcggagcgggtgagatcggctttcgctgcacccagcactgattccgaccagggcacccccttcagagctagggacgaacagcagctgagcttcctggaggaggagcagctgctgttgctggtgaccagcacattcaggaacggagactactctgtcaacagacagggggatgacctgagtgctcaggccactccgggtcacgcaggtcatttgccggcccctgtcataattattgccatatgagagtgccacccgtcctatgacatattttatatatttctgtgaatggcctacttgtttgtatttatgaatttatgtttaaaggatgggcaggggtgctcgagaggtccccaggagtttccctctggggagagaggggcccaccccttcccagcagccctctgagccccccgatcgcttggccacagcctctgcctggagaaagcatccccctcggagatatatggacatcagaagaaacctttctctgtcaccaggacaaatcctgttcttacttgaaccaaggccaggtttcctaatgaatgcagggaggacagcacagatcaatgaaaccagcagataatccacaagactgtttcccagagctgggaaatttccttccctgccaacacttttcctgaaagttcttaagaatgaggcaaacagtttaagtctctctcgcactgttcttttagtgaaagagttcaatgaggaaagagaggaagtggagcatatgcttagtttccaagctggaaaagtggcccatggttaaccaagactagatgtaaaagcacaggtgtccacgggtccaggtgagccggtcctacgatggcatggctgctaatgccagcagatgctcctgtcctctcctttcaaagactgacttcttctggtctttcattcgttaaaataaaattgacagggcatcatccgagaagctctacactttcccttacttggatttcagactctagattcggctgagatttgagcttcatggtgaacacattcttggtgtgcttgctgctgaggggtgtggaggacagagagatggtgaaatggcaaagtgactcttgagcatgggtgggggaagcccccacatgtctgagtcagtgccacctggacactacccttggagcatcctgctgaggtggccattccggttttctttcctttccttttattccactgtttctgaatcacaaataaagatccaaggcaaacagcacattcagatccccaagctctccacctccaatgtgaccagggacgtgcaccacttcaggctcatgcaggacccacagcctttggacctcagctaagggacctgcttctcttcagcacacggggcttgtttgtgttggggtctgagccctgagcgcatggtcaaggagacccccagg

SEQ ID NO: 461773 - DNA, 2830 bp, Homo sapiens
gaggtctgcccttccctggctccttccagctggctcccaccagggctccagagcccaagacccagcatccgcgggcggctctgggaagcctggcagctccgctaactccaacatgcctcatttgacagcaaattcggcgggagatcagccgaaagagcaagtgggtggatatgctgggagactgggagaaatacaaaagcagcagaaagctcatagatcgagcgtacaagggaatgcccatgaacatccggggcccgatgtggtcagtcctcctgaacattgaggaaatgaagttgaaaaaccccggaagataccagatcatgaaggagaagggcaagaggtcatctgagcacatccagcgcatcgaccgggacataagcgggacattaaggaagcatatgttcttcagggatcgatacggaaccaagcagcgggaactactccacatcctcctggcatatgaggagtataacccggaggtgggctactgcagggacctgagccacatcgccgccttgttcctcctctatcttcctgaggaggatgcattctgggcactggtgcagctgctggccagtgagaggcactcccctgcaggggatttcacagcccaaatggcgggaccgtccaggggctccaaagaccaacaggagcatgtggtagccacgtcacaatccaagaccatggggcatcaggacaagaaagatctatgtgggcagtgttccccgttaggctgcctcatccggatattgattgacgggatctctctcgggctcaccctgcgcctgtgggacgtgtatctggtagaaggcgaacaggcgttgatgccgataacaagaatcgcctttaaggttcagcagaagcgcctcacgaagacgtccaggtgtggcccgtgggcacgtttttgcaaccggttcgttgatacctgggccagggatgaggacactgtgctcaagcatcttagggcctctatgaagaaactaacaagaaagcagggggacctgccacccccagccaaacccgagcaagggtcgtcggcatccaggcctgtgccggcttcacgtggcgggaagaccctctgcaagggggacaggcaggcccctccaggcccaccagcccggttcccgcggcccatttggtcagcttccccgccacgggcacctcgttcttccacaccctgtcctggtggggctgtccgggaagacacctaccctgtgggcactcagggtgtgcccagcccggccctggctcagggaggacctcagggttcctggagattcctgcagtggaactccatgccccgcctcccaacggacctggacgtagagggcccttggttccgccattatgatttcagacagagctgctgggtccgtgccatatcccaggaggaccagctggccccctgctggcaggctgaacaccctgcggagcgggtgagatcggctttcgctgcacccagcactgattccgaccagggcacccccttcagagctagggacgaacagcagctgagcttcctggaggaggagcagctgctgttgctggtgaccagcacattcaggaacggagactactctgtcaacagacagggggatgacctgagtgctcaggccactccgggtcacgcaggtcatttgccggcccctgtcataattattgccatatgagagtgccacccgtcctatgacatattttatatatttctgtgaatggcctacttgtttgtatttatgaatttatgtttaaaggatgggcaggggtgctcgagaggtccccaggagtttccctctggggagagaggggcccaccccttcccagcagccctctgagccccccgatcgcttggccacagcctctgcctggagaaagcatccccctcggagatatatggacatcagaagaaacctttctctgtcaccaggacaaatcctgttcttacttgaaccaaggccaggtttcctaatgaatgcagggaggacagcacagatcaatgaaaccagcagataatccacaagactgtttcccagagctgggaaatttccttccctgccaacacttttcctgaaagttcttaagaatgaggcaaacagtttaagtctctctcgcactgttcttttagtgaaagagttcaatgaggaaagagaggaagtggagcatatgcttagtttccaagctggaaaagtggcccatggttaaccaagactagatgtaaaagcacaggtgtccacgggtccaggtgagccggtcctacgatggcatggctgctaatgccagcagatgctcctgtcctctcctttcaaagactgacttcttctggtctttcattcgttaaaataaaattgacagggcatcatccgagaagctctacactttcccttacttggatttcagactctagattcggctgagatttgagcttcatggtgaacacattcttggtgtgcttgctgctgaggggtgtggaggacagagagatggtgaaatggcaaagtgactcttgagcatgggtgggggaagcccccacatgtctgagtcagtgccacctggacactacccttggagcatcctgctgaggtggccattccggttttctttcctttccttttattccactgtttctgaatcacaaataaagatccaaggcaaacagcacattcagatccccaagctctccacctccaatgtgaccagggacgtgcaccacttcaggctcatgcaggacccacagcctttggacctcagctaagggacctgcttctcttcagcacacggggcttgtttgtgttggggtctgagccctgagcgcatggtcaaggagacccccagg

SEQ ID NO: 461774 - DNA, 1833 bp, Homo sapiens
gtgcggggccgccgccgcccgcaggagccgccgccgcctattgttcatgcgcctccgcagagctgggaggacccccccccaacgacggcggccgcaggggcgcagcgggccgagtccccgcctgcccgctcgcccccccgggggcggcctcgtcacctctgccgccggtacctgctcgcgcagccggtgcccgccgctgccagccggccgccgctctcctctccgcgccgtgccgtgccccgccccccgcaccgccagctcgccgggaccacctgacgcgggcctggctccgccccagccctgcggaccccagggggctccgccccacgcccgccccgccccgcgcccgctgccttcccattggctgcggccgcccagtccccggttcctccgccgtggttggggcagcctagctggccgtctcgcaggtccctctcaccccctgcgccgccgtcgcaccgtgccctcccccattgcgggctctgtcattctcaaacccaggtcgacccactcttcccgcccactggcccgccgcagctccctccattggctcgcggcacctgtccgtttcctgggagagttcagcacctcccggcaggaagaggctccggcctcattgggtgcgtgagaagggaagggtggatcctaaaaggtaatactgagccttcattcaaactaaaaggctggaagggaggcagctgcctttgtttgccatggatgggtaggggctgcactgagcagcaccggtgttcttcatccggctgcacccccaacagagctctttcttccccagatcccttttacagttggattctccctcttggatctggctctgccttagtccgacctagagggatcagcttcgcccacgcccactctcacccggaacctttcatctcttattgaagccttttaggcccattgggatgttcattagaactctgaaaactacagttctcccctttatgaggactgcaccacagctcgccctctcctgggttccggtaagaagagattccaataccactcttttttcagaattcagaaaggcaagagaccaccttactgagcttcaaactggggctgggaacgctgccatgaattgggcttggtctgtctgaagggagccaccttttcgacaatccttagacttcttttgcctgttggaattacaccttggatcgtggcgaagtctatagaggtcagattaagaagaaccaaagcagaataaacgtagaacccgatgctgagttcacgagtgaggacgacctcttcctatatgctttgctataccctgcgttttgaacattaaggacgagataggaggcccataatgtttcttcttgctttaatcctgtcgtggcaacgttgacttccacctggttgcagagtgagcccatgggacagccctctgaaattatactgcttacaaccatgctgagtctgcaaggacttcgtccaagcctttccgtccaggacctcaaacagatccaatcacaagaagagagatttcaggaaagagaaaattattcctatcatcggggtttttgaagaacatgaaatgactgggaaaataatcatgttaagtggaaaaaaaaaagaaatctatctgttgtaattttcaaataatttttaaataaatttgaaaaattaagagaactatatatataatacattcctaatcttgtgaaaaatatatatgcattaatattattgaaagaaatatatcaaaaggtgaacagcaattatcaccaatctagattatgagattaggagtgattttttttctttgtcctatactatttaatattttctaccattaaaatattctga

SEQ ID NO: 461775 - DNA, 1459 bp, Homo sapiens
gtgcggggccgccgccgcccgcaggagccgccgccgcctattgttcatgcgcctccgcagagctgggaggacccccccccaacgacggcggccgcaggggcgcagcgggccgagtccccgcctgcccgctcgcccccccgggggcggcctcgtcacctctgccgccggtacctgctcgcgcagccggtgcccgccgctgccagccggccgccgctctcctctccgcgccgtgccgtgccccgccccccgcaccgccagctcgccgggaccacctgacgcgggcctggctccgccccagccctgcggaccccagggggctccgccccacgcccgccccgccccgcgcccgctgccttcccattggctgcggccgcccagtccccggttcctccgccgtggttggggcagcctagctggccgtctcgcaggtccctctcaccccctgcgccgccgtcgcaccgtgccctcccccattgcgggctctgtcattctcaaacccaggtcgacccactcttcccgcccactggcccgccgcagctccctccattggctcgcggcacctgtccgtttcctgggagagttcagcacctcccggcaggaagaggctccggcctcattgggtgcgtgagaagggaagggtggatcctaaaaggtaatactgagccttcattcaaactaaaaggctggaagggaggcagctgcctttgtttgccatggatgggtaggggctgcactgagcagcaccggtgttcttcatccggctgcacccccaacagagctctttcttccccagatcccttttacagttggattctccctcttggatctggctctgccttagtccgacctagagggatcagcttcgcccacgcccactctcacccggaacctttcatctcttattgaagccttttaggcccattgggatgttcattagaactctgaaaactacagttctcccctttatgaggactgcaccacagctcgccctctcctgggttccgcctggttgcagagtgagcccatgggacagccctctgaaattatactgcttacaaccatgctgagtctgcaaggacttcgtccaagcctttccgtccaggacctcaaacagatccaatcacaagaagagagatttcaggaaagagaaaattattcctatcatcggggtttttgaagaacatgaaatgactgggaaaataatcatgttaagtggaaaaaaaaaagaaatctatctgttgtaattttcaaataatttttaaataaatttgaaaaattaagagaactatatatataatacattcctaatcttgtgaaaaatatatatgcattaatattattgaaagaaatatatcaaaaggtgaacagcaattatcaccaatctagattatgagattaggagtgattttttttctttgtcctatactatttaatattttctaccattaaaatattctga

SEQ ID NO: 461776 - DNA, 495 bp, Homo sapiens
taattcctctatgaggaattatgagttaatgtagcttgaaccaccaaaaaggtaagaaatctttcctcttttaggaaaacctcagttcagaaaagcaataaactatggggggggtggctgtttagaatgttgcatctctggagagcaagttgcattttaacaatgatcagagcctttaattaaggagtgaaggtcaaatcatttctgcttcatccagcctggttgcagagtgagcccatgggacagccctctgaaattatactgcttacaaccatgctgagtctgcaaggacttcgtccaagcctttccgtccaggacctcaaacagatccaatcacaagaagagagatttcaggaaagagaaaattattcctatcatcggggtttttgaagaacatgaaatgactgggaaaataatcatgttaagtggaaaaaaaaaagaaatctatctgttgtaattttcaaataatttttaaataaatttgaaaaattaaga

SEQ ID NO: 461777 - DNA, 978 bp, Homo sapiens
ttgccgggcatgtacaagcttcagtgcaacaactgtgctacaaatggagccacagagaggaaacaagcagcaggctcaggagcagggtatgcgctgccttcggctctccaatccatacctcagggctcctatgccactgcacgattcttggttgccaagaggccaaccacaggccatcttgagaaggagtttatgttccactgcagaaagcagccaggatcaccatccaggggacttggtcttctgtggccctggccagacatagaatttgtgccaaggcaggacaagctcactcagagcagcgtgttagtacctcaaatctgtgcatgccagacaaggccaaactggctcaatgagcaaccagccacctctgcaggggtgcgtctggaggaggtggaccagccaccaaccttacccagtcaaggaagtggatggccatgttcccacagcctgagtggctgccacctgatggctgatggagcaaaggccttaggaaaagcagatggcccttggccctacctttttgttagaagaactgatgttccatgtcctgcagcgatgtctccttcaggagctcttgtaacacaagaatgtggatttatttcttgtaaggcgctttggaatcctgcagatataataatgataattaaacaaaacactcagagaaactgccaaccctaggatgaagtatattgttactgtgctttgggattaaaataagtaactacagtttatagaacttttatactgatacacagacactaaaaagggaaagggtttagatgagaagctctgctgtgcaatcaagaatctcagccactcatttctgtaggggctgcaggagctccctgtaaagagaggttatggagtctgtagcttcaggtaaccactgatccacttccagtcactatccatgagtttttatttccaaatacatgaaatcatatggtatgtatactttctgatcactcagcatca

SEQ ID NO: 461778 - DNA, 435 bp, Homo sapiens
gacccgttggcataagattacatcctctgactataaaaatcctggaagaaaacctaggaaatattcgtctggactttgcacttggcaatgaatttatgggtaaccactgatccacttccagtcactatccatgagtttttatttccaaatacatgaaatcatatgaatctgcaaagggacatttgtgagaccattgtggccaatggggcaataggaaatatcttcacataaaaactagacagaaactttctgggaaacttctttgtgatatgtgctttcatctcacagagttgaacctttcttttgattgagcagtttggaaacagtctttttgtagtatctgcaaatggatatttggagcactttgaggcctatggtgaaaaaggaaatatctttacttaaaaactagacagaagcattctgagaaacttcgtt

SEQ ID NO: 461779 - DNA, 838 bp, Homo sapiens
gcacggggctgctgtaaggccgaggttgcggcggaagcggagaccatgttccgagcggcggctccggggcagctccggcgggcggctcattgctacgatttcagagtaccctggtaatagctgagcatgcaaatgattccctagcacccattactttaaataccattactgcagccacacgccttggaggtgaagtgtcctgcttagtagctggaaccaaatgtgacaaggtggcacaagatctctgtaaagtagcaggcatagcaaaagttctggtggctcagcatgatgtgtacaaaggcctacttccagaggaactgacaccattgattttggcaactcagaagcagttcaattacacacacatctgtgctggagcatctgccttcggaaagaaccttttgcccagagtagcagccaaacttgaggttgccccgatttctgacatcattgcaatcaagtcacctgacacatttgtgagaactatttatgcaggaaatgctctatgtacagtgaagtgtgatgagaaagtgaaagtgtttctgtccgtggaacatcctttgatgctgcagcaacaagtgggcggtagtgccagttcagaaaaggcatcaagtacttcaccagtggaaatatcagagtgggttgacccagaaattaccaaaaagtgttcgaccagagctaacaggtgccaaagtggtggtatcctggtggtcgaggcttgaaaagtggggagaactttaagttgttatggacttggggatcaactaattctgcagtggggttcccggcgtgttgagctggttgttccaatgacatgcaagttggacagacgggagaa

SEQ ID NO: 461780 - DNA, 467 bp, Homo sapiens
agggcgaggccccgagtgcacgctaacattattcgaccatggtccacggtgaacgttcctcatcggaaccgcgctggggcgagcgctttaagcctcgtccaggctcattgctacgatttcagagtaccctggtaatagctgagcatgcaaatgattccctagcacccattactttaaataccattactgcagccacacgccttggaggtgaagtgtcctgcttagtagctggaaccaaatgtgacaaggtggcacaagatctctgtaaagtagcaggcatagcaaaagttctggtggctcagcatgatgtgtacaaaggcctacttccagaggaactgacaccattgattttggcaactcagaagcagttcaattacacacacatctgtgctggagcatctgccttcggaaagaaatggggttttgctatagctgcccaggctcttcttgaacttctggcctgatgc

SEQ ID NO: 461781 - DNA, 1102 bp, Homo sapiens
gaaacctaaatgcttgtatagtaggcgccccctatgaccatctacactgaacaagatttatacaatcatgtcgtacctaagccccgcaacaaaagggtacccattcttccttttgttatcggagcaggagtgctaggtggagtaggtactggcactggcggtatcacaacctctattcagttctactacaaactatctcaagaactaaatggtgacatggaacgggtctctgactccctggtcaccttgcaagatcaacttaactccctagcagcaaatcgaagctgcaaagctacaaatggttcttcaaatggagccccagatgcaatccatgaaaagcaactggctctgctccattatgagcaagttgaaaaattcacagcccatctggtcactcagaagagatctggaggacagggagaccaccaccagagcctgcagcaagtcttccatttcctcctcatcagcaagcctgtaggacctggggtaacgcagggggatctcaccaggtctactctgtgtgctgctcaggtgtatcagccttggaatgatgcacactttccctgtgtaaccaccaacagtttgcagtttctgctttaactgatgagctgtgtttcgggcatattcaagtcctccaggccaattggggtctattaagattgtatagagtaccacggggctgttaactgctatcaggagagcatcacacaggacattctgttctttcctgaagccaacatcaccagcccagcttctagaaaatatcacaatcccctgagaacaaggatgtatcagggtcttcattaaaccctccagttctttatgatctgagaacagcttcttacagagggattctggtttaaattgtacctcttcctgtgtcactgaaaattcaaggaatagatgttaccaaaacttacaaaagcatgtgagcctccttaaatttgtggacttttatgggatatccgggactttttcgtgcagatgaagctgatgaaatcaggcaagagttgtagtctgtgaccaaactgggaggagctagacaattacatggaaagttgtttcagacaaaaaataaaaagttaaaaaaaaaaaaaaaaaa

SEQ ID NO: 461782 - DNA, 1248 bp, Homo sapiens
actggtcgatgtgggagttctgacctgctccctttctgaccttggccagttcagccacccttaggcaacttggtgaccgcccgctcacaggaggtcaccacactgatgccgaacttagtgcaggcacccggtcggcataatgaccagctgctctaaaggtcagctgctgataggcggccacctgctgctgataggtggccacgtactgctgcaggtgacccaggtaatggtctggctgctgctgcagactctgagcctcttggctcttcagctccacctgcaggaagaccctggctgcgctttcagcagtgcctggtcctgtagggactgctctaactcccactctgtatgtgctttgctgcagctggacaactggatggtgaagagtgagaagtttcaatctggagagcctgggcatttccacacagtgccccttaacagggctagggctaggcccaatatacaactcggaagaggaagacagagctcttaccagggggaggcagagatggcacagcaagagacatgcccccagaatgccaccaatgccccaggacaggcccacccatgggaccagatcatctttgtaacaagaagaaaaccaaccaaatgaaaatgaaatgaattctctcaaaaagaattaagtcaagacaggaagaaggctcgcaaagtaatataaaatatatcttatggtttatgtaaaattcttaataaaataccttctttgctcctagctgcactctggctttgcctttgagtcaggtggcatttctttgcacgatgactggttttattgagtaggcactgcttcagccctacaggaagaacaaaacctctctggaacacagcagcattcctgactcccacttgaggaggcctaacaaaacggcatatgcctcaacagcagcagatcagtgttaaaaagtctggagtcaaggggaaaaagtaaaattggaccatttccaaaatctcacaaaaagcaacaaactgacgttctaagtgcccaacatgagcaaattagaaccttaaataaaggtcactcttaatgcctatcccagcatagatgcagcaccaagtacagtgtcattttactggtttacctttttcattcttgaaagtaggagctatgaaaaaaaaacactaaaatttccctaagagaaccttctactttctgtctaacttacataatcaaaacactctattgagggtgaaaattgaatattataagaaaataatcacgtgttttgc

SEQ ID NO: 461783 - DNA, 1038 bp, Homo sapiens
tagtatgcatttactaacaccacatctcacccccacgaaacttggtaagggcagcaacagaactttatctgccatatgcactcctgtattcctattaccaaatagtgccagggactaagtgaatatttgtccaatgaatgagttttaagtaggaaacgtttgcatagaatcattttgtttcttttggagttcaaatcttcggatattttacccttcccaatccaaagaaaagtctctgagtgaagagatgggaacaaaatgaagaggaagacagagctcttaccagggggaggcagagatggcacagcaagagacatgcccccagaatgccaccaatgccccaggacaggcccacccatgggaccagatcatctttgtaacaagaagaaaaccaaccaaatgaaaatgaaatgaattctctcaaaaagaattaagtcaagacaggaagaaggctcgcaaagtaatataaaatatatcttatggtttatgtaaaattcttaataaaataccttctttgctcctagctgcactctggctttgcctttgagtcaggtggcatttctttgcacgatgactggttttattgagtaggcactgcttcagccctacaggaagaacaaaacctctctggaacacagcagcattcctgactcccacttgaggaggcctaacaaaacggcatatgcctcaacagcagcagatcagtgttaaaaagtctggagtcaaggggaaaaagtaaaattggaccatttccaaaatctcacaaaaagcaacaaactgacgttctaagtgcccaacatgagcaaattagaaccttaaataaaggtcactcttaatgcctatcccagcatagatgcagcaccaagtacagtgtcattttactggtttacctttttcattcttgaaagtaggagctatgaaaaaaaaacactaaaatttccctaagagaaccttctactttctgtctaacttacataatcaaaacactctattgagggtgaaaattgaatattataagaaaataatcacgtgttttgc

SEQ ID NO: 461784 - DNA, 2108 bp, Homo sapiens
gctcagtctggctggccccatgttactgagcggagctcctccggctggctcccgcccggggccgcgaacgcaggggagcgctgggggcggcccgggggggtcccgccggggcgccgggggtgcgggagccggcccaggagggggcggcagcggcggagtagccaagtggctccgggagcacctgggcttccgcggggggggcggcggcggagggggcagcaagccggcgccccccgagcccgactaccgcccccctgcgccctctccggccgcgccccccgcgccgcccccggacatcctggccgcctacaggctgcagcgggagcgcgacttcgaagacccctactccggggggtcgtccggctccgccgccctcgccacccctgtcgcccccggacccacgccgcccccgcgccacggctctcccccacaccgccttattcgggtcgagaccccggggcccccggcgccgcctgctgatgagcggatctccggaccccccgccagcagcgataggctagctatcctagaagactatgcggacccgtttgatgttcaggagactggcgaaggctcagcaggagcttcaggagccccagagaaggtccctgaaaatgatggctacatggagccctatgaggctcaaaagatgatggccgagatccggggctccaaggagacagcaactcagcccttgcctctgtatgacacaccctatgagccagaggaggatggggccaccccggaaggtgagggggccccctggccccgggagtcccgcctgccagaggatgatgagaggccccctgaggagtatgaccagccctgggagtggaagaaggagcggatttccaaagcctttgcagcccagtttgaaggaccggagaagagctgcctgtcacctggccgggaggagaaggggcggctacctccccgactctctgcagggaaccccaagtcagccaaacccctaagcatggagcccagcagccccctgggggagtggacagatccagcactgcctctggaaaaccaggtctggtatcacggggccatcagccgaaccgacgccgagaacctgctccggctgtgcaaagaggccagctacctggtgcgcaacagtgagaccagcaagaatgacttctccctctccctcaagagcagccagggattcatgcacatgaagctgtcccgaaccaaggaacacaaatatgtgctgggccagaacagcccgcccttcagcagcgtccctgaaattgtgcaccactatgccagccgcaagctacccattaagggagccgaacacatgtccctgctctaccctgtggccatccggactctttagatgtgaagccagggcactgtgatagacctgtacccagccctgtgcccatcacctggctgagggctgtggctcttgccagggacgtgatctttcaaacctttcttctcctgggatccagtagaagctggagattccttaatttattctaaagggaaagggctcctggggccttggagtaaggggttgtctggagctggggaaagaggaatccctggagagaaaggatagcccctggaggaagggggttccagagctactgggatggtagggagtttcagactggcagctccggctcctttccgaccttagggcagaggtggtgacctccaccaccaccaccctctccccactgggtccgtgcgaggtagtgcagaattcggccccttggggcgccttaccacctctctgcctccgtccccgacttccaccccagaccgtcggagggctccgcccagagtctggtaagaggtttggggaagacaggcccctgggaagcagccggctttggggggtggggagagaaggggaggggctcgggcagagggaactgtgcagtccccaggccgccccggctccgggctagaggcaataaataaacccgatcctgccgggcacagccgcgcccgcgcctccggcgccgtccccgggctgacgggggagggagcggagaagcgagcgcagattctgcgtataaatcagctctggagcagacacagcccggctgtgaaaagcactttcgaagcatcaagttcctttctttgac

SEQ ID NO: 461785 - DNA, 898 bp, Homo sapiens
aaatacggctagtagaggctgggttgtagcagcagcgtccctgaaattgtgcaccactatgccagccgcaagctacccattaagggagccgaacacatgtccctgctctaccctgtggccatccggactctttagatgtgaagccagggcactgtgatagacctgtacccagccctgtgcccatcacctggctgagggctgtggctcttgccagggacgtgatctttcaaacctttcttctcctgggatccagtagaagctggagattccttaatttattctaaagggaaagggctcctggggccttggagtaaggggttgtctggagctggggaaagaggaatccctggagagaaaggatagcccctggaggaagggggttccagagctactgggatggtagggagtttcagactggcagctccggctcctttccgaccttagggcagaggtggtgacctccaccaccaccaccctctccccactgggtccgtgcgaggtagtgcagaattcggccccttggggcgccttaccacctctctgcctccgtccccgacttccaccccagaccgtcggagggctccgcccagagtctggtaagaggtttggggaagacaggcccctgggaagcagccggctttggggggtggggagagaaggggaggggctcgggcagagggaactgtgcagtccccaggccgccccggctccgggctagaggcaataaataaacccgatcctgccgggcacagccgcgcccgcgcctccggcgccgtccccgggctgacgggggagggagcggagaagcgagcgcagattctgcgtataaatcagctctggagcagacacagcccggctgtgaaaagcactttcgaagcatcaagttcctttctttgac

SEQ ID NO: 461786 - DNA, 1861 bp, Homo sapiens
acgagacttgtcttgactgtaaaccagtgtcggtggaattcggatgtatgacggagctcctccggctggctcccgcccggggccgctgctgatgagcggatctccggaccccccgccagcagcgataggctagctatcctagaagactatgcggacccgtttgatgttcaggagactggcgaaggctcagcaggagcttcaggagccccagagaaggtccctgaaaatgatggctacatggagccctatgaggctcaaaagatgatggccgagatccggggctccaaggagacagcaactcagcccttgcctctgtatgacacaccctatgagccagaggaggatggggccaccccggaaggtgagggggccccctggccccgggagtcccgcctgccagaggatgatgagaggccccctgaggagtatgaccagccctgggagtggaagaaggagcggatttccaaagcctttgcagttgacattaaggtcatcaaagacctaccttggcctccacctgtgggacagctggacagcagcccctccctgcctgatggggacagggacatctccggtccagcctcgcccctccctgagcccagcctggaggacagcagcgcccagtttgaaggaccggagaagagctgcctgtcacctggccgggaggagaaggggcggctacctccccgactctctgcagggaaccccaagtcagccaaacccctaagcatggagcccagcagccccctgggggagtggacagatccagcactgcctctggaaaaccaggtctggtatcacggggccatcagccgaaccgacgccgagaacctgctccggctgtgcaaagaggccagctacctggtgcgcaacagtgagaccagcaagaatgacttctccctctccctcaagagcagccagggattcatgcacatgaagctgtcccgaaccaaggaacacaaatatgtgctgggccagaacagcccgcccttcagcagcgtccctgaaattgtgcaccactatgccagccgcaagctacccattaagggagccgaacacatgtccctgctctaccctgtggccatccggactctttagatgtgaagccagggcactgtgatagacctgtacccagccctgtgcccatcacctggctgagggctgtggctcttgccagggacgtgatctttcaaacctttcttctcctgggatccagtagaagctggagattccttaatttattctaaagggaaagggctcctggggccttggagtaaggggttgtctggagctggggaaagaggaatccctggagagaaaggatagcccctggaggaagggggttccagagctactgggatggtagggagtttcagactggcagctccggctcctttccgaccttagggcagaggtggtgacctccaccaccaccaccctctccccactgggtccgtgcgaggtagtgcagaattcggccccttggggcgccttaccacctctctgcctccgtccccgacttccaccccagaccgtcggagggctccgcccagagtctggtaagaggtttggggaagacaggcccctgggaagcagccggctttggggggtggggagagaaggggaggggctcgggcagagggaactgtgcagtccccaggccgccccggctccgggctagaggcaataaataaacccgatcctgccgggcacagccgcgcccgcgcctccggcgccgtccccgggctgacgggggagggagcggagaagcgagcgcagattctgcgtataaatcagctctggagcagacacagcccggctgtgaaaagcactttcgaagcatcaagttcctttctttgac

SEQ ID NO: 461787 - DNA, 1577 bp, Homo sapiens
gctcagtctggctggccccatgttactgagcggagctcctccggctggctcccgcccggggccgcgaacgcaggggagcgctgggggcggcccgggggggtcccgccggggcgccgggggtgcgggagccggcccaggagggggcggcagcggcggagtagccaagtggctccgggagcacctgggcttccgcggggggggcggcggcggagggggcagcaagccggcgccccccgagcccgactaccgcccccctgcgccctctccggccgcgccccccgcgccgcccccggacatcctggccgcctacaggctgcagcgggagcgcgacttcgaagacccctactccggggggtcgtccggctccgccgccctcgccacccctgtcgcccccggacccacgccgcccccgcgccacggctctcccccacaccgccttattcgggtcgagaccccggggcccccggcgccgcctgctgatgagcggatctccggaccccccgccagcagcgataggctagctatcctagaagactatgcggacccgtttgatgttcaggagactggcgaaggctcagcaggagcttcaggagccccagagaaggtccctgaaaatgatggctacatggagccctatgaggctcaaaagatgatggccgagatccggggctccaaggagacagcaactcagcccttgcctctgtatgacacaccctatgagccagaggaggatggggccaccccggaaggtgagggggccccctggccccgggagtcccgcctgccagaggatgatgagaggccccctgaggagtatgaccagccctgggagtggaagaaggagcggatttccaaagcctttgcaggtgagtcctggtggagagggcaggtcagctggggcctctgagcagctttccaggctcaagagaatggaaggagtggaccccaggaacccagagaggcccaggatcaggactccagggaaatgtagttgagttctgtaccatagggggtggggttggcagtgtggacacagcgctgtgtgcagggtcaaggaatgggtacaggagaaggatgaaggcattcccctgcatcaccacctcttggaagctaagaggcttagactacttctctcttttggggactgggtatatttaaaaataaattccaaaacaaacttatgaaactcgtgacatatgttaaaatacttacatttaacaaaagaaggcacttacttcaaacaataaagacagctatgggtgtaacctgaattctagggctctgcctcccagtggtaggccctggcggaccaggggtgtctggccccaaggagatttctgaggagcagagtgaggctgtgagaaatctcttgattgccaaatgaagatcaggtttcttctgtccatcccaagtccaagtccaccatggaaaagttcatgttagtggtctgaggtgggtggagcaagagcctggagtagggagagggcttttgctcctgggtccttgattcagggagaacataaagggctcaaatgccattcgacttcactcctgcctgcatatgcccctctcccctg

SEQ ID NO: 461788 - DNA, 2129 bp, Homo sapiens
acgagacttgtcttgactgtaaaccagtgtcggtggaattcggatgtatgacggagctcctccggctggctcccgcccggggccgcgaacgcaggggagcgctgggggcggcccgggggggtcccgccggggcgccgggggtgcgggagccggcccaggagggggcggcagcggcggagtagccaagtggctccgggagcacctgggcttccgcggggggggcggcggcggagggggcagcaagccggcgccccccgagcccgactaccgcccccctgcgccctctccggccgcgccccccgcgccgcccccggacatcctggccgcctacaggctgcagcgggagcgcgacttcgaagacccctactccggggggtcgtccggctccgccgccctcgccacccctgtcgcccccggacccacgccgcccccgcgccacggctctcccccacaccgccttattcgggtcgagaccccggggcccccggcgccgcctgctgatgagcggatctccggaccccccgccagcagcgataggctagctatcctagaagactatgcggacccgtttgatgttcaggagactggcgaaggctcagcaggagcttcaggagccccagagaaggtccctgaaaatgatggctacatggagccctatgaggctcaaaagatgatggccgagatccggggctccaaggagacagcaactcagcccttgcctctgtatgacacaccctatgagccagaggaggatggggccaccccggaaggtgagggggccccctggccccgggagtcccgcctgccagaggatgatgagaggccccctgaggagtatgaccagccctgggagtggaagaaggagcggatttccaaagcctttgcagcccagtttgaaggaccggagaagagctgcctgtcacctggccgggaggagaaggggcggctacctccccgactctctgcagggaaccccaagtcagccaaacccctaagcatggagcccagcagccccctgggggagtggacagatccagcactgcctctggaaaaccaggtctggtatcacggggccatcagccgaaccgacgccgagaacctgctccggctgtgcaaagaggccagctacctggtgcgcaacagtgagaccagcaagaatgacttctccctctccctcaagagcagccagggattcatgcacatgaagctgtcccgaaccaaggaacacaaatatgtgctgggccagaacagcccgcccttcagcagcgtccctgaaattgtgcaccactatgccagccgcaagctacccattaagggagccgaacacatgtccctgctctaccctgtggccatccggactctttagatgtgaagccagggcactgtgatagacctgtacccagccctgtgcccatcacctggctgagggctgtggctcttgccagggacgtgatctttcaaacctttcttctcctgggatccagtagaagctggagattccttaatttattctaaagggaaagggctcctggggccttggagtaaggggttgtctggagctggggaaagaggaatccctggagagaaaggatagcccctggaggaagggggttccagagctactgggatggtagggagtttcagactggcagctccggctcctttccgaccttagggcagaggtggtgacctccaccaccaccaccctctccccactgggtccgtgcgaggtagtgcagaattcggccccttggggcgccttaccacctctctgcctccgtccccgacttccaccccagaccgtcggagggctccgcccagagtctggtaagaggtttggggaagacaggcccctgggaagcagccggctttggggggtggggagagaaggggaggggctcgggcagagggaactgtgcagtccccaggccgccccggctccgggctagaggcaataaataaacccgatcctgccgggcacagccgcgcccgcgcctccggcgccgtccccgggctgacgggggagggagcggagaagcgagcgcagattctgcgtataaatcagctctggagcagacacagcccggctgtgaaaagcactttcgaagcatcaagttcctttctttgac

SEQ ID NO: 461789 - DNA, 1088 bp, Homo sapiens
gctcagtctggctggccccatgttactgagcggagctcctccggctggctcccgcccggggccgcgaacgcaggggagcgctgggggcggcccgggggggtcccgccggggcgccgggggtgcgggagccggcccaggagggggcggcagcggcggagtagccaagtggctccgggagcacctgggcttccgcggggggggcggcggcggagggggcagcaagccggcgccccccgagcccgactaccgcccccctgcgccctctccggccgcgccccccgcgccgcccccggacatcctggccgcctacaggctgcagcgggagcgcgacttcgaagacccctactccggggggtcgtccggctccgccgccctcgccacccctgtcgcccccggacccacgccgcccccgcgccacggctctcccccacaccgccttattcgggtcgagaccccggggcccccggcgccgcctgctgatgagcggatctccggaccccccgccagcagcgataggctagctatcctagaagactatgcggacccgtttgatgttcaggagactggcgaaggctcagcaggagcttcaggagccccagagaaggtccctgaaaatgatggctacatggagccctatgaggctcaaaagatgatggccgagatccggggctccaaggagacagcaactcagcccttgcctctgtatgacacaccctatgagccagaggaggatggggccaccccggaaggtgagggggccccctggccccgggagtcccgcctgccagaggatgatgagaggccccctgaggagtatgaccagccctgggagtggaagaaggagcggatttccaaagcctttgcagccagactggaaaaccacaggattctaatattcttcctgtaaagcacacaccattgaggatgggccgtttatctccagaagtctccttggagaatcaatactgtttggattgcttaatgggaaaatctatgctcgtcattaggaaacctcgttagcagtccagcagccgccagtggcatcactcttctcaggatggggggtggggattaaatttcaataaaac

SEQ ID NO: 461790 - DNA, 506 bp, Homo sapiens
agctaatacccaaactaaaaactgggtaactggccctgaagtgcttcccatattaggaaaaggcctgccaccaaagcaggaagctgcacactcctaacccttctcccagggtgtggggtcccttgacgtcatgaagagctattgcaaggtgcttctgtacttttccagcctggaaatggagggtgactggccctggctcctgctatgagaagataaccagcctcattttctcagtgccccagaggtctaggataggatttctaaactggaatctctgggacatttttgaggcatttgaagcagaatatagagtggtctcatctccttccttaatcttcctggtggttgggatgttccacttgtatcatagatttttttattacagatatgctccactgtttttaaatgtgaacttgtgcgcaaatgtgcagattcaatgttcttgttacagattgaataaatttttattttgaagatgaaacgtgtacttcatcagatgcaacaaa

SEQ ID NO: 461791 - DNA, 8071 bp, Homo sapiens
tcctgggattacaggtgggaaccaccacacccagccccatactgcattttaattgtatgtttctcccactgaatcctatcctttaggataaaagctgtatgttacttacctttgcatcccagcactttgcacattgccttacacatattgtaaatgcctggtaaatgtttgctgaatggattaaagaagcataatattaacattgaataattagtagtgagctgcctcactctaccctacccacacatttgattataaatgtatatgagtgtaccaaagtggagagattgcatagcaagaaaatggaagagcaggacaggacacttggaaaaatctagaaaccaacttttaaaatatccccactattgtattttcctctattctttacctcaatcccccaaacaaggaaacatggatctaaatgccttgtgcactgcaaaatgggggtgagtcgctcagcctccaccgtgattgcctatgcaatgaaggaatatggctggaatctggaccgagcctatgactatgtgaaagaaagacgaacggtaaccaagcccaacccaagcttcatgagacaactggaagagtatcaggggatcttgctggcaagcaaacagcggcataacaaactatggagatctcattcagatagtgacctctcagaccaccacgaacccatctgcaaacctgggctagaactcaacaagaaggatatcaccacctcagcagaccagattgctgaggtgaagaccatggagagtcacccacccatacctcctgtctttgtggaacatatggtcccacaagatgcaaatcagaaaggcctgtgtaccaaagaaagaatgatctgcttggagtttacttctagggaatttcatgctggacagattgaggatgaattaaacttaaatgacatcaatggatgctcatcagggtgttgtctgaatgaatcaaaatttcctcttgacaattgccatgcatccaaagccttaattcagcctggacatgtcccagaaatggccaacaagtttccagacttaacagtggaagatttggagacagatgcactgaaagcagacatgaatgtccacctactgcctatggaagaattgacatctccactgaaagacccccccatgtcccctgatcctgagtcaccaagcccccaacccagttgccagactgaaatctcagatttcagtacagatcgcattgacttttttagtgccctagagaagtttgtggagctctcccaagaaacccggtcacgatctttttcccattcaaggatggaggaactgggtggaggaaggaatgagagctgtcgactgtcagtggtagaagtagccccttccaaagtgacagctgatgaccagagaagcagctctttgagtaatactccccatgcatcagaagaatcttcaatggatgaggaacagtcaaaggcaatttcagaactggtcagcccagacatcttcatgcagtctcactcggaaaatgcaatttcagtcaaagaaattgtcactgaaattgagtccatcagtcaaggagttgggcagattcaactgaaaggagacatcttacccaacccatgccatacaccaaagaagaacagcatccatgagctgctccttgagagggcccagactccagagaacaaacctggacatatggagcaagatgaggactcctgcacagcccagcctgaactagccaaagactcagggatgtgcaacccagaaggctgcctaaccacacactcatctatagcagacttggaagaaggggaaccagctgagggggaacaagagctccagggctcagggatgcacccaggtgccaagtggtaccctgggtctgtgaggcgagccaccttggagttcgaagagcgcttacggcaggagcaagagcatcatggtgctgccccaacatgtacctcattgtccactcgtaagaattcaaagaatgattcttctgtggcagacctagcaccaaaagggaaaagtgatgaagcccccccagaacattcatttgtcctcaaggaaccagaaatgagcaaaggcaaagggaaatacagtgggtctgaggctggctcactgtcccattctgagcagaatgccactgttccagctcccagggtgctggagtttgaccacttgccagatcctcaggagggcccagggtcagatactggaacacagcaggaaggagtcctgaaggatctgaggactgtgattccataccaggagtctgaaacacaagcagtccctcttccccttcccaagagggtagaaatcattgaatatacccacatagttacatcacccaatcacactgggccagggagtgaaatagccaccagtgagaagagcggagagcaagggctgaggaaagtgaacatggaaaaatctgtcactgtgctctgcacactggatgaaaatctaaacaggactctggaccccaaccaggtttctctgcacccccaagtgctacctctgcctcattcttcctcccctgagcacaacagacccactgaccatccaacctccatcctgagtagccctgaagacagaggcagcagcctgtccacagccctggagacagcagcaccttttgtcagtcatacaacccatttactgtctgccagtttggattacctgcatccccagactatggttcacctggagggcttcacagagcagagcagcactacagatgagccctctgcagaacaggttagctgggaagaaagtcaggagagccctctctccagtggcagtgaggtgccatataaggactcccagctaagtagcgcagacctaagtttaattagcaaacttggtgacaacactggggagttacaggagaaaatggacccattgcctgtagcctgtcgactcccacatagctctagtagtgaaaacataaagagtctcagccacagccccggtgtggtgaaggagcgtgctaaagaaatcgagtctcgagtggttttccaggcagggctcaccaaaccatcccaaatgaggcgctcagcttctctcgccaaattaggttacttggacctctgtaaagactgcttaccagagagggagcctgcctcctgtgaatcccctcatctcaaactgcttcagcctttcctcagaacagactcaggcatgcacgcgatggaggaccaagagtccctagaaaacccaggtgtaatatgtaaggaacatgcactttattggttaattttataatattttggtcattttactgtttctggtgcatgcagggtttgggtgtttttcagtgtgtatgtgtgtgtatatgtaaggggaaagagagattgatctggatggcaagaccgtttatcattttttatttaaaaaaatcaaacctcaaaaaagtcattttcagagaacacctttatcaaaggcaaattgctgtttttcagtcagctgccacctgcttctcattttgccctctgagaaaaggcatggtttcttaattgagggaaggaagcagattcggaggggtggagataaagctggggattggagatgttcccctgcctttgtgatgatggtttggtttccagacctgaggcatcgaatgggctaaaggtcagccagaagtcagagggctctcagccttcatccagccgcagccctttagagttcctgaaggaggcaggttccgctttgctttaaaagagggtcttccggtgttccagagtgtatcgttacagtaagacatgataatggccggctctgcaaatttatcatatagtttttttcccaagaaaattatttttgaaattaaaacaggaccccaaatgaaatccaagtggtcttctgtagaggaaagcatgataagaggaggaagacataaagttgggggtggagaggctgctgcccagaaactgctgggttggtgggatccacacagatgggcatcttggctctccctgccagaaaaatgtgctctgcagtgtcctcccaactgaaaacaacagtgacatgtttgaaaagcagcaatcgaaagtcagtgtgttcttgtaaaatgaatatgtatgtagggttttaacccttccattacttgaataattctttgggccttctgagtttaatggccatattttcttccagtttattttccttccccatgctgttgtccccatgctgcctatttttttaaatttcatagattatatttgaattgttacatatgtttaacatccattgaatgcaacgttttatttttggtattatcactgttaacacttttttttccttttcctggaaggtttgtcatttctctaaagtttgtacacagtatttatgtacataatattgtcactgtcttagtgtcttgttcatgttgtagggtaattttgatttattctttttaagaaggagtagagttgcaactggaaaacacagacaccagaaatgaaagtgttgggtgttgataggaatctgtacaatatgttgatggtggctgtagttgtttaaatggagacttccaatcaccagctcctgccaaattatgcattagtaactttttcctcagagacacccctaaaggctcccattaggtcacagcgtgactgaaagctgatttctctgtgagactgaaatcccagaacattgtttgccagtatctcaaccacagccaggaagtatatgtgagttgcccagagtggaagctcctagtagaggctgaaggccacaggggaggcctcagccaggggcaagtgcccacagtgactccatttaggatgctgtcgttttgctactgttgtggagatccttaacgcagcagcgcctgtcataaacaagcctcttgtagcttcttacagaaaacagatttagtctagcatgaaacacctctgcatctcattgaaactgaagaggcttgcagatttgctttcgttgatgtccacgttactgaggattgactgagtatagactggagacaggtttttggcttatcacagcactgaggaaaatacaaatgcacagactgtcagcatgatgtcagaggccagagtttggtgggggcagatggcagggcgacccaaaagatgcagaaaaggtagactggggccactgggtcttaagaggagctgtgaagttgtgtggaagccaaggctgggtctgacatccctgccaggaagcaggttggacagaaaccacttgctaaaagcgtctctatggtgcagtgattatgtgtaccctgtgctgttgctcagtagtctccttgaatgttcaagtatctcatccactcagttttgtgattcctggatatttgtgtgttgtaaagtgttttgttaggtggtatgaaccaatgtgaggaggcttgagacagggttatggatttccagagctcttccatgtagaataccctgccttcttgaagcagttccaccaccaatatgatggggaagggcaggaacttatggcagggtggggagagggtttgcctggaagttaagagagtggcatccacttgtggtaaccccttacgatgatgacatcccacacactaagaggtacaagcaggaccaaagttttggactgttccctcttctcccctccactgtgtttaatgttcactcactgcattaaataacaacaaagatgggacaaaacccactaatactgtggggaaaaaaaattttcaagagcagaggaaagtctttctgcctttttataattactttttttatcatttaatttacctgcctaaataaacatcttctacagaatatctgtcattcaaccatgccaaggagtttgtgccagccttttcagactcccagaattgggtgttcctgggttatttacatagctgagcagtgtccaggggaggtgcgcagtgaactgtcaaggactttccagactgtcttctcttcagacttttataatctccagtggcatctttcccttttcttttgttcatgacctgacctgaagcagcagatttgatagactggcaaagatgaataggaaaaactttgactcttgcccagtgcctgcctgcctctctctctctcctctctctctctctctttttaaaccaccatagactctcacttattttggaggagtgtatgtgcatgtgtacacatatgtacatatataaaaacagttgatgttttggtgtatggggtaaaagccccaggagcatacagaacttgagctgaacctggtcagtagaaagggaaaccccaaccctttcttgatttttggagacacccaggactaatggatactgtagtagacatgtagtactatagtaccgtaatattcatctctcctcattttagttgcctttcagattctaaatgtttgggatcattcctatcatcttagtctcttcaggatctttagtattttcctggttctgaggaggcttgagacagggttatggatttccttgttctgtgtctttatccctactgatagttcctctttctcattttgcaaactacccagagctccaaggacagcctgaagatctcagtgcctcaggctctgaggtactctgctcacaggccccagacagatgctgttgggtaaactcaaagcttcctatgagaagcttctgagatgtagcaggtcacagaagtgttcacctgtttcatctgaggatttcagttctgaagtgatctaggcatgtttggtaaaaatgtttttgtgagagttctttttttaagaaagcattatgcaaaaagtcacttttaagggcatttaaaaatttttaagtaaagccattctttggcttttttggactatttgtggatactttgtttacattttgaatattaaaatgtgcatcatcttgtcggccatgcagtcctgcaggcatcagtgccctggctgtcctgtgagtcctcatgcagagcagggccatcatggtcagcccttgtgagtaagtgggtatacgctgaagctgacttccgtctgtgtcctgccctcccatccagcactctctatggaaatagttgtcatttcctcagtgatggtgtgtcttatagtgatggttgtaatggtgaatggctagtgtcattttgtttaattttgttttgctttttgatggtggataagatgaaattttagctgtttcagcatcaatccaacttaaaagcatcttggactttgttttcccttccaaactaaaagatcaaggcatgtattagacacaagcatatttgctgcctcaactcctctgacacccatattaggaaaaggcctgccaccaaagcaggaagctgcacactcctaacccttctcccagggtgtggggtcccttgacgtcatgaagagctattgcaaggtgcttctgtacttttccagcctggaaatggagggtgactggccctggctcctgctatgagaagataaccagcctcattttctcagtgccccagaggtctaggataggatttctaaactggaatcatccttaatcaccttgaagatcccttaagaggcatttgactggtgctgccgtctgtgtcctcaaagcaatgctggtggcagcgtcctgtgtacacatgcagagctaatacccaaactaaaaactgggtaactggccctgaagtgcttcccaatcagtaagcccacagggaaatgtttgatttttatgttctgttggattttggtttgcttggcatatctaaaggtgcctttacttttctttttttttttttttctttctgctttgttttgtaggacttgttctaacatggaaaacaagtccagaagactctcctctgactgttacctttgccccaagccaccccaaacttttatgctcatgttttattaaagcaggtgctccctggaatctctgggacatttttgaggcatttgaagcagaatatagagtggtctcatctccttccttaatcttcctggtggttgggatgttccacttgtatcatagatttttttattacagatatgctccactgtttttaaatgtgaacttgtgcgcaaatgtgcagattcaatgttcttgttacagattgaataaatttttattttgaagatgaaacgtgtacttcatcagatgcaacaaa

SEQ ID NO: 461792 - DNA, 2538 bp, Homo sapiens
cagtgagtgaacattaaacacagtggaggggagaagagggaacagtccacatgtgtttaatgttcactcactgcattaaataacaacaaagatgggacaaaacccactaatactgtggggaaaaaaaattttcaagagcagaggaaagtctttctgcctttttataattactttttttatcatttaatttacctgcctaaataaacatcttctacagaatatctgtcattcaaccatgccaaggagtttgtgccagccttttcagactcccagaattgggtgttcctgggttatttacatagctgagcagtgtccaggggaggtgcgcagtgaactgtcaaggactttccagactgtcttctcttcagacttttataatctccagtggcatctttcccttttcttttgttcatgacctgacctgaagcagcagatttgatagactggcaaagatgaataggaaaaactttgactcttgcccagtgcctgcctgcctctctctctctcctctctctctctctctttttaaaccaccatagactctcacttattttggaggagtgtatgtgcatgtgtacacatatgtacatatataaaaacagttgatgttttggtgtatggggtaaaagccccaggagcatacagaacttgagctgaacctggtcagtagaaagggaaaccccaaccctttcttgatttttggagacacccaggactaatggatactgtagtagacatgtagtactatagtaccgtaatattcatctctcctcattttagttgcctttcagattctaaatgtttgggatcattcctatcatcttagtctcttcaggatctttagtattttcctggttctgaggaggcttgagacagggttatggatttccttgttctgtgtctttatccctactgatagttcctctttctcattttgcaaactacccagagctccaaggacagcctgaagatctcagtgcctcaggctctgaggtactctgctcacaggccccagacagatgctgttgggtaaactcaaagcttcctatgagaagcttctgagatgtagcaggtcacagaagtgttcacctgtttcatctgaggatttcagttctgaagtgatctaggcatgtttggtaaaaatgtttttgtgagagttctttttttaagaaagcattatgcaaaaagtcacttttaagggcatttaaaaatttttaagtaaagccattctttggcttttttggactatttgtggatactttgtttacattttgaatattaaaatgtgcatcatcttgtcggccatgcagtcctgcaggcatcagtgccctggctgtcctgtgagtcctcatgcagagcagggccatcatggtcagcccttgtgagtaagtgggtatacgctgaagctgacttccgtctgtgtcctgccctcccatccagcactctctatggaaatagttgtcatttcctcagtgatggtgtgtcttatagtgatggttgtaatggtgaatggctagtgtcattttgtttaattttgttttgctttttgatggtggataagatgaaattttagctgtttcagcatcaatccaacttaaaagcatcttggactttgttttcccttccaaactaaaagatcaaggcatgtattagacacaagcatatttgctgcctcaactcctctgacacccatattaggaaaaggcctgccaccaaagcaggaagctgcacactcctaacccttctcccagggtgtggggtcccttgacgtcatgaagagctattgcaaggtgcttctgtacttttccagcctggaaatggagggtgactggccctggctcctgctatgagaagataaccagcctcattttctcagtgccccagaggtctaggataggatttctaaactggaatcatccttaatcaccttgaagatcccttaagaggcatttgactggtgctgccgtctgtgtcctcaaagcaatgctggtggcagcgtcctgtgtacacatgcagagctaatacccaaactaaaaactgggtaactggccctgaagtgcttcccaatcagtaagcccacagggaaatgtttgatttttatgttctgttggattttggtttgcttggcatatctaaaggtgcctttacttttctttttttttttttttctttctgctttgttttgtaggacttgttctaacatggaaaacaagtccagaagactctcctctgactgttacctttgccccaagccaccccaaacttttatgctcatgttttattaaagcaggtgctccctggaatctctgggacatttttgaggcatttgaagcagaatatagagtggtctcatctccttccttaatcttcctggtggttgggatgttccacttgtatcatagatttttttattacagatatgctccactgtttttaaatgtgaacttgtgcgcaaatgtgcagattcaatgttcttgttacagattgaataaatttttattttgaagatgaaacgtgtacttcatcagatgcaacaaa

SEQ ID NO: 461793 - DNA, 8461 bp, Homo sapiens
tcctgggattacaggtgggaaccaccacacccagccccatactgcattttaattgtatgtttctcccactgaatcctatcctttaggataaaagctgtatgttacttacctttgcatcccagcactttgcacattgccttacacatattgtaaatgcctggtaaatgtttgctgaatggattaaagaagcataatattaacattgaataattagtagtgagctgcctcactctaccctacccacacatttgattataaatgtatatgagtgtaccaaagtggagagattgcatagcaagaaaatggaagagcaggacaggacacttggaaaaatctagaaaccaacttttaaaatatccccactattgtattttcctctattctttacctcaatcccccaaacaaggaaacatggatctaaatgccttgtgcactgcaaaatgggggtgagtcgctcagcctccaccgtgattgcctatgcaatgaaggaatatggctggaatctggaccgagcctatgactatgtgaaagaaagacgaacggtaaccaagcccaacccaagcttcatgagacaactggaagagtatcaggggatcttgctggcaagcaaacagcggcataacaaactatggagatctcattcagatagtgacctctcagaccaccacgaacccatctgcaaacctgggctagaactcaacaagaaggatatcaccacctcagcagaccagattgctgaggtgaagaccatggagagtcacccacccatacctcctgtctttgtggaacatatggtcccacaagatgcaaatcagaaaggcctgtgtaccaaagaaagaatgatctgcttggagtttacttctagggaatttcatgctggacagattgaggatgaattaaacttaaatgacatcaatggatgctcatcagggtgttgtctgaatgaatcaaaatttcctcttgacaattgccatgcatccaaagccttaattcagcctggacatgtcccagaaatggccaacaagtttccagacttaacagtggaagatttggagacagatgcactgaaagcagacatgaatgtccacctactgcctatggaagaattgacatctccactgaaagacccccccatgtcccctgatcctgagtcaccaagcccccaacccagttgccagactgaaatctcagatttcagtacagatcgcattgacttttttagtgccctagagaagtttgtggagctctcccaagaaacccggtcacgatctttttcccattcaaggatggaggaactgggtggaggaaggaatgagagctgtcgactgtcagtggtagaagtagccccttccaaagtgacagctgatgaccagagaagcagctctttgagtaatactccccatgcatcagaagaatcttcaatggatgaggaacagtcaaaggcaatttcagaactggtcagcccagacatcttcatgcagtctcactcggaaaatgcaatttcagtcaaagaaattgtcactgaaattgagtccatcagtcaaggagttgggcagattcaactgaaaggagacatcttacccaacccatgccatacaccaaagaagaacagcatccatgagctgctccttgagagggcccagactccagagaacaaacctggacatatggagcaagatgaggactcctgcacagcccagcctgaactagccaaagactcagggatgtgcaacccagaaggctgcctaaccacacactcatctatagcagacttggaagaaggggaaccagctgagggggaacaagagctccagggctcagggatgcacccaggtgccaagtggtaccctgggtctgtgaggcgagccaccttggagttcgaagagcgcttacggcaggagcaagagcatcatggtgctgccccaacatgtacctcattgtccactcgtaagaattcaaagaatgattcttctgtggcagacctagcaccaaaagggaaaagtgatgaagcccccccagaacattcatttgtcctcaaggaaccagaaatgagcaaaggcaaagggaaatacagtgggtctgaggctggctcactgtcccattctgagcagaatgccactgttccagctcccagggtgctggagtttgaccacttgccagatcctcaggagggcccagggtcagatactggaacacagcaggaaggagtcctgaaggatctgaggactgtgattccataccaggagtctgaaacacaagcagtccctcttccccttcccaagagggtagaaatcattgaatatacccacatagttacatcacccaatcacactgggccagggagtgaaatagccaccagtgagaagagcggagagcaagggctgaggaaagtgaacatggaaaaatctgtcactgtgctctgcacactggatgaaaatctaaacaggactctggaccccaaccaggtttctctgcacccccaagtgctacctctgcctcattcttcctcccctgagcacaacagacccactgaccatccaacctccatcctgagtagccctgaagacagaggcagcagcctgtccacagccctggagacagcagcaccttttgtcagtcatacaacccatttactgtctgccagtttggattacctgcatccccagactatggttcacctggagggcttcacagagcagagcagcactacagatgagccctctgcagaacaggttagctgggaagaaagtcaggagagccctctctccagtggcagtgaggtgccatataaggactcccagctaagtagcgcagacctaagtttaattagcaaacttggtgacaacactggggagttacaggagaaaatggacccattgcctgtagcctgtcgactcccacatagctctagtagtgaaaacataaagagtctcagccacagccccggtgtggtgaaggagcgtgctaaagaaatcgagtctcgagtggttttccaggcagggctcaccaaaccatcccaaatgaggcgctcagcttctctcgccaaattaggttacttggacctctgtaaagactgcttaccagagagggagcctgcctcctgtgaatcccctcatctcaaactgcttcagcctttcctcagaacagactcaggcatgcacgcgatggaggaccaagagtccctagaaaacccaggtgccccccacaacccagagcccaccaagtcttttgtagaacaactcacaacaacagagtgtattgtgcagagcaagccagtggagaggccccttgtgcagtatgccaaagaatttggttctagtcagcagtatttgctccccagggcaggacttgaattgactagttctgaaggaggccttcccgtgctacagacccagggactgcagtgtgcatgcccagctccagggctggccgtggcaccccgtcagcaacacggcagaactcacccccttaggagactgaaaaaggcaaatgacaaaaaacggacaaccaaccccttctataataccatgtgattctgagcctacacatgtgactttctagaagaaatgtttgtaaaaggggcaggtgtaatatgtaaggaacatgcactttattggttaattttataatattttggtcattttactgtttctggtgcatgcagggtttgggtgtttttcagtgtgtatgtgtgtgtatatgtaaggggaaagagagattgatctggatggcaagaccgtttatcattttttatttaaaaaaatcaaacctcaaaaaagtcattttcagagaacacctttatcaaaggcaaattgctgtttttcagtcagctgccacctgcttctcattttgccctctgagaaaaggcatggtttcttaattgagggaaggaagcagattcggaggggtggagataaagctggggattggagatgttcccctgcctttgtgatgatggtttggtttccagacctgaggcatcgaatgggctaaaggtcagccagaagtcagagggctctcagccttcatccagccgcagccctttagagttcctgaaggaggcaggttccgctttgctttaaaagagggtcttccggtgttccagagtgtatcgttacagtaagacatgataatggccggctctgcaaatttatcatatagtttttttcccaagaaaattatttttgaaattaaaacaggaccccaaatgaaatccaagtggtcttctgtagaggaaagcatgataagaggaggaagacataaagttgggggtggagaggctgctgcccagaaactgctgggttggtgggatccacacagatgggcatcttggctctccctgccagaaaaatgtgctctgcagtgtcctcccaactgaaaacaacagtgacatgtttgaaaagcagcaatcgaaagtcagtgtgttcttgtaaaatgaatatgtatgtagggttttaacccttccattacttgaataattctttgggccttctgagtttaatggccatattttcttccagtttattttccttccccatgctgttgtccccatgctgcctatttttttaaatttcatagattatatttgaattgttacatatgtttaacatccattgaatgcaacgttttatttttggtattatcactgttaacacttttttttccttttcctggaaggtttgtcatttctctaaagtttgtacacagtatttatgtacataatattgtcactgtcttagtgtcttgttcatgttgtagggtaattttgatttattctttttaagaaggagtagagttgcaactggaaaacacagacaccagaaatgaaagtgttgggtgttgataggaatctgtacaatatgttgatggtggctgtagttgtttaaatggagacttccaatcaccagctcctgccaaattatgcattagtaactttttcctcagagacacccctaaaggctcccattaggtcacagcgtgactgaaagctgatttctctgtgagactgaaatcccagaacattgtttgccagtatctcaaccacagccaggaagtatatgtgagttgcccagagtggaagctcctagtagaggctgaaggccacaggggaggcctcagccaggggcaagtgcccacagtgactccatttaggatgctgtcgttttgctactgttgtggagatccttaacgcagcagcgcctgtcataaacaagcctcttgtagcttcttacagaaaacagatttagtctagcatgaaacacctctgcatctcattgaaactgaagaggcttgcagatttgctttcgttgatgtccacgttactgaggattgactgagtatagactggagacaggtttttggcttatcacagcactgaggaaaatacaaatgcacagactgtcagcatgatgtcagaggccagagtttggtgggggcagatggcagggcgacccaaaagatgcagaaaaggtagactggggccactgggtcttaagaggagctgtgaagttgtgtggaagccaaggctgggtctgacatccctgccaggaagcaggttggacagaaaccacttgctaaaagcgtctctatggtgcagtgattatgtgtaccctgtgctgttgctcagtagtctccttgaatgttcaagtatctcatccactcagttttgtgattcctggatatttgtgtgttgtaaagtgttttgttaggtggtatgaaccaatgtgaggaggcttgagacagggttatggatttccagagctcttccatgtagaataccctgccttcttgaagcagttccaccaccaatatgatggggaagggcaggaacttatggcagggtggggagagggtttgcctggaagttaagagagtggcatccacttgtggtaaccccttacgatgatgacatcccacacactaagaggtacaagcaggaccaaagttttggactgttccctcttctcccctccactgtgtttaatgttcactcactgcattaaataacaacaaagatgggacaaaacccactaatactgtggggaaaaaaaattttcaagagcagaggaaagtctttctgcctttttataattactttttttatcatttaatttacctgcctaaataaacatcttctacagaatatctgtcattcaaccatgccaaggagtttgtgccagccttttcagactcccagaattgggtgttcctgggttatttacatagctgagcagtgtccaggggaggtgcgcagtgaactgtcaaggactttccagactgtcttctcttcagacttttataatctccagtggcatctttcccttttcttttgttcatgacctgacctgaagcagcagatttgatagactggcaaagatgaataggaaaaactttgactcttgcccagtgcctgcctgcctctctctctctcctctctctctctctctttttaaaccaccatagactctcacttattttggaggagtgtatgtgcatgtgtacacatatgtacatatataaaaacagttgatgttttggtgtatggggtaaaagccccaggagcatacagaacttgagctgaacctggtcagtagaaagggaaaccccaaccctttcttgatttttggagacacccaggactaatggatactgtagtagacatgtagtactatagtaccgtaatattcatctctcctcattttagttgcctttcagattctaaatgtttgggatcattcctatcatcttagtctcttcaggatctttagtattttcctggttctgaggaggcttgagacagggttatggatttccttgttctgtgtctttatccctactgatagttcctctttctcattttgcaaactacccagagctccaaggacagcctgaagatctcagtgcctcaggctctgaggtactctgctcacaggccccagacagatgctgttgggtaaactcaaagcttcctatgagaagcttctgagatgtagcaggtcacagaagtgttcacctgtttcatctgaggatttcagttctgaagtgatctaggcatgtttggtaaaaatgtttttgtgagagttctttttttaagaaagcattatgcaaaaagtcacttttaagggcatttaaaaatttttaagtaaagccattctttggcttttttggactatttgtggatactttgtttacattttgaatattaaaatgtgcatcatcttgtcggccatgcagtcctgcaggcatcagtgccctggctgtcctgtgagtcctcatgcagagcagggccatcatggtcagcccttgtgagtaagtgggtatacgctgaagctgacttccgtctgtgtcctgccctcccatccagcactctctatggaaatagttgtcatttcctcagtgatggtgtgtcttatagtgatggttgtaatggtgaatggctagtgtcattttgtttaattttgttttgctttttgatggtggataagatgaaattttagctgtttcagcatcaatccaacttaaaagcatcttggactttgttttcccttccaaactaaaagatcaaggcatgtattagacacaagcatatttgctgcctcaactcctctgacacccatattaggaaaaggcctgccaccaaagcaggaagctgcacactcctaacccttctcccagggtgtggggtcccttgacgtcatgaagagctattgcaaggtgcttctgtacttttccagcctggaaatggagggtgactggccctggctcctgctatgagaagataaccagcctcattttctcagtgccccagaggtctaggataggatttctaaactggaatcatccttaatcaccttgaagatcccttaagaggcatttgactggtgctgccgtctgtgtcctcaaagcaatgctggtggcagcgtcctgtgtacacatgcagagctaatacccaaactaaaaactgggtaactggccctgaagtgcttcccaatcagtaagcccacagggaaatgtttgatttttatgttctgttggattttggtttgcttggcatatctaaaggtgcctttacttttctttttttttttttttctttctgctttgttttgtaggacttgttctaacatggaaaacaagtccagaagactctcctctgactgttacctttgccccaagccaccccaaacttttatgctcatgttttattaaagcaggtgctccctggaatctctgggacatttttgaggcatttgaagcagaatatagagtggtctcatctccttccttaatcttcctggtggttgggatgttccacttgtatcatagatttttttattacagatatgctccactgtttttaaatgtgaacttgtgcgcaaatgtgcagattcaatgttcttgttacagattgaataaatttttattttgaagatgaaacgtgtacttcatcagatgcaacaaa

SEQ ID NO: 461794 - DNA, 1623 bp, Homo sapiens
tacgttgaggtgtatttggtactcagatgctggaaatgcacggatgcactggaaacttgacctgtctagctgacaggcattgccggtcacaagctggacttgagcatagcagattttggcatctgcgggttgtcctgaaaccagtgccccacagatatggagagctgactgcattccaagtgaagttcatgaggattcctagagcagaaaagaagacagcaagcttagaggaagaaaacagcaatgttactgaaatttgggaggcagaggtcaaagttcaaggcttcagtagtggctggaaattaattctggagaggaggaaaccacgaagtgttagctctaaaatctgcacaaaaatgccaaacaggaagacccaactgccaatcccaagtgagattccctctgcatggaatagcatggatcacagcagtgccaaccactagaagtaggagcccaagacatcttctatgggttcagagctggggggcctgtgtcagaactaatgataatcccaccaccctttgctgacactctttttggactccggctgcctgcacccaggtgattaaaaagctttattgctcacacaaagcctgtttggtcgtctcttcacacggacacacatgacatttggtgccgaagagctgggacaggaggactccttcaggagaccagttcccttgtcctcgccctcactccatgaggagatccacctatgacctcgggtcctcagaccaaccagcccaaggaacatctcaccaatttcaaatcagccaaaatccacagtgatccacataatactcaggaatcacccagaagggatttctatctgaaaggagaaagaagctctggggcatgaatatacgttgtcttgtgaaaaaataaatcagtaattcatgtgtgtatattttatactcaatgggaaaaaatattttatttaaaaaaacactcaatattttacatgacattgtgaaaaggcagcacggaattactcatttgcttccttttttaaagttttagatgaaaaataaacatttaatcccatcacttgttcttaaatgtaatattattttgttgtcctttacaccccagttgtcacagagtctccagtatctatcatttccatcttcgcatccatgtgtacatccagtgtttagctcccacttataagtgagaacatgtggcattttgttttctgttcctgcattagtttgcttaggatagcggcctctggatgcatccatggtgctgcaaaggacatgatttcattctttttatggctgcatagcattccatggtgtacgtgtaccacattttctttagccagtccaccgtggatgggcacctaggttgattccatgtctttgcagttgtgaatagtgctgtgatgaatgtacaaatgcatgagtctttttgccagaagtatttattttcctctgggtatgtacccagtaatgggatcactggattgaatggtattaatagttctgtttttaagttctttagatgctgatttcttgcagctgttaatatatttttagacttttgaaagcaatagccaaaaaatacttccccttatctcttaatgatccacattgcagcttagagtccagtggtccacac

SEQ ID NO: 461795 - DNA, 1540 bp, Homo sapiens
gaagcaaacggcgctggtctattttaatcctgctccttctagaaactagaaactgcaagaatgggaactatgcaaaggcacctggctgacggtccagccagcgctgaaggaaatggcagtgtcaaggcaatagtttttaaatctctggaaacacccattaaaaaaagtcagagtaggataacaaagccaaaacaccatgtacggtatccacaacaaaaccaagtgaaaagatgtccctacaaatgccaagcattgagccatactaaccagactactatagtaaggaggaggcagaggggtaaaagaggtacttctgatgtactgactaacaatcccaaactgacaacagacagtcacttgaaagctcagcaagccaatctaaggagagcagtcaaatctgggtgggagcttagccgactagaattcccgggtaagactgatgtagccagagatgtctgggacctctgtactcttgatactaatcatccaaatctcccttcaagatgatttcaccaggaaggagaaacttctgtgagcagaatccaaattagttaggttagggaaaataggggcaaagaaaggagaaggagggaaaaaggaaaatgagcagagccagtggatctcaggaagtatgagagtatatgttttcaaaaacgcttgagaacaacagaaaagagagctctacagaatatagcatgaaatctatcctggttcatctttcctttctagcaaagaaaaacctgtttcacttaaaatgagcaacagaaaatgattgcaggcaaatcccacataaagtcactataagggggaaaaaaaaaaaccaggaccaacacaatattcatatagacaatcaaagaaatcagaagattatgtttacaaaatagatgaaaattataaactaatatttcagaagagatgaaaaataatatgaaataatgcaaatagagtaaaagaagctatgaaggaacacaaataagcttagagaaactcagaaatggtatgactgaagaaaagataagaaaaagaaaagctttgaaaaaggacctgtctaagcttagaaaataatgaaaattaaaacattatttcagaaataaagtctaaatgagaaggaacacaagcatgaataagcaacacacaaaattccttagataaataggagattgaagagagtgacacaactttaaatcagaaaggaattcaaaagagatgaaacagattagacagtgatacagaagctagacagggaagatccaatgcatgcataataggagttttcaaagaagaaaacaaagatatggaaaagaattaatattaaaaactataattcaatcaagctttcctgaaataaaaaaaaatatttcacacatattctaacaattaaatatcagtagttaaaaaaatcagtaggtaagacaaattcaggagggaaaagttattgttctgataaaaactaaattatacccactatccctttgaagaaggaaattccctctaatttcatattcccctcctcctttgatttgaagattctgttaaaaac

SEQ ID NO: 461796 - DNA, 3106 bp, Homo sapiens
aggcagagccaagtgcgtcctggaggcttcccccgttgcgaaggtctttcaggactgattttggtggaagaagacagcaggcggtgggcattcactgtgctggtgggaagtctggttacattaagaaaggaattctagcaaagttattctgtaaatacaacagaatcagttgcttttgttaaatatattggtgcaagttcaacatggaggcaaatcactgctccctgggtgtgtatccatcttacccagacctggtcatcgatgtcggagaagtgactctgggagaagaaaacagaaaaaagctacagaaaactcagagagaccaagagagggcgagagttatacgggccgcgtgtgctttattaaactcaggaggaggagtgattcagatggaaatggccaacagggatgagcgtcccacagagatgggactggatttagaagaatccttgagaaagcttattcagtatccatatttgcaggctttctttgagactaagcaacacggaaggtgtttttatatttttgttaaatcttggagtggtgatcctttccttaaagatggttctttcaattcccgcatttgcagccttagttcttcattatactgtagatctggcacctctgtgcttcacatgaattcaagacaggcattcgatttcctgaagaccaaggaaagacagtccaaatataatctgattaatgaagggtctccacctagtaaaattatgaaagctgtataccagaacatatctgagtcaaatcctgcatatgaagttttccaaactgacactattgaatatggtgaaatcctatcttttcttgagtctccatccatagagtttaaacagttctctacaaaacatatccaacaatatgtagaaaatataattccagagtacatctctgcatttgcaaacactgagggaggctatctttttattggagtggatgataagagtaggaaagtcctgggatgtgccaaagaacaggttgaccctgactctttgaaaaatgtaattgcaagagcaatttctaagttgcccattgttcatttttgctcttcaaaacctcgggtagagtacagcaccaaaatcgtagaagtgttttgtgggaaagagttgtatggctatctctgtgtgattaaagtgaaggcattctgttgtgtggtgttctcggaagctcccaagtcatggatggtgagggagaagtacatccgccccttgacaactgaggaatgggtagagaaaatgatggacgcagatccagagtttcctccagactttgctgaggcctttgagtctcagttgagtctatctgacagtccttcactttgcagaccagtgtattctaagaaaggtctggaacacaaagctgatctacaacaacatttatttccaggtactgactgccagtttttacatcaggagagaaggaagtcatttaatacatttcgtggaaaacaaatccatgaaagattgtgtcctgcagatccaggtgtacacagtgacaatgccacaagcctcttggggatgattccaccaggacatttggaatgtactccagagtccctctggaaggagctgtctttacagcatgaaggactaaaggagttaatacacaagcaaatgcgacctttctcccagggaattgtgatcctctctagaagctgggctgtggacctgaacttgcaggagaagccaggagtcatctgtgatgctctgctgatagcacagaacagcacccccattctctacaccattctcagggagcaggatgcagagggccaggactactgcactcgcaccgcctttactttgaagcagaagctagtgaacatggggggctacaccgggaaggtgtgtgtcagggccaaggtcctctgcctgagtcctgagagcagcgcagaggccttggaggctgcagtgtctccgatggattaccctgcgtcctatagccttgcaggcacccagcacatggaagccctgctgcagtccctcgtgattgtcttactcggcttcaggtctctcttgagtgaccagctcggctgtgaggttttaaatctgctcacagcccagcagtatgagatattctccagaagcctccgcaagaacagagagttgtttgtccacggcttacctggctcagggaagaccatcatggccatgaagatcatggagaagatcaggaatgtgtttcactgtgaggcacacagaattctctacgtttgtgaaaaccagcctctgaggaactttatcagtgatagaaatatctgccgagcagagacccgggaaactttcctaagagaaaaatttgaacacattcaacacatcgtcattgacgaagctcagaatttccgtactgaagatggggactggtataggaaggcaaaaaccatcactcagagagaaaaggattgtccaggagttctctggatctttctggactactttcagaccagtcacttgggtcacagtggccttccccctctctcagcacagtatccaagagaagagctcaccagagtagttcgcaatgcagatgaaatagccgagtacatacaacaagaaatgcaactaattatagaaaatcctccaattaatatcccccatgggtatctggcaattctcagtgaagctaaatgggttccaggtgttccaggcaacacaaagattattaaaaactttactttggagcaaatagtgacctatgtggcagacacctgcaggtgcttctttgaaaggggctattctccaaaggatgttgctgtgcttgtcagcaccgtgacagaagtggagcagtatcagtctaagctcttgaaagcaatgaggaagaaaatggtggtgcagctcagtgatgcatgtgatatgttgggtgtgcacattgtgttggacagtgacctgcttcattaaagatctgaaaatctatccagccattgtaaaatgaaacaaaatgttttgaaaatttaaattagccttttattttagttcagacatatagaaaagttgcaagcatagtacagaaagttcctatataccccacttagtgccctcctttttaaaatttttttaaacctagcttatttcctttaagatttctgagaatt

SEQ ID NO: 461797 - DNA, 1313 bp, Homo sapiens
atctgcgaagccaaagtaaacaacggggttggggcggcgagaatgatcaatagcgatgctccgaaaggactccgcgataggaatcgagcgggaaggattccctccatcctaacagcctcgcgcgcgcgcttgccgtggcaaccaagacgttccacgacgcgcgctctcgaacgcttcgcgtcacgcggccgcgcggccccgcccgtcggcctcgctcccgccacagagcccgcagcacgccgccgccgcagcctaggtcacagatctgtgaaaatctttaaaggcatgtgttttgccatatatgcaagtgaatcaacttgccagataaaagtttgctgcctaaatatgattactaggaaagccaagtctctcttcctggatttcttctcctataaaccgcctattgatacctacccacttctctatggagcacagatgaaggatattggtcatctccagcatctagcacaacgtctgcaatggaacaggcgagctgtgaatatttgtggaatgcatgggtggactaaagacctatcacctcactctagaatgcccagcatgttggagcatgttaagcactatatgagctgctgaggatacaggaataaacaacaacacaggtgtgtcctctgcccaaaccaggcataaatgagcttccaaatgaacacaaacaaatctggaaggcttttgaggaagaaggaccattaaaaaagctgctgacgactgcctggaatctggtttggagcatctccaaagccaacgtactttcccccaagaaaatacaggaagatctctctgcccaggcttggaaatacataaggatcaggtttgccatcctctactttagggtgactttaacataatttaatgcccactgactgcttttctcctacaggtaaagtaacaaacaaaggagtcaactctcaggagctctctctttcatctgctttatgttgccattttccctcattgccctctcacattcactcagtaattcaccaaatatttatagagacttcatggtgtgcaaggcagtgaactccacactgtaggaagagtaaagccatggagatcgcaggcctggctcttcatacctttggctttctgttgaattgaactttctgttaagtttaaaatacacaatagaactttgacgatgttgtggcctggtcagggatgggacagataaccagcccttaaaaataaagctcctccggccccgcccaataccttctgaaagaaggagggttattatagagcataaataaaacagtagtgattaataatgataataaagtttatctctttactca

SEQ ID NO: 461798 - DNA, 1226 bp, Homo sapiens
atctgcgaagccaaagtaaacaacggggttggggcggcgagaatgatcaatagcgatgctccgaaaggactccgcgataggaatcgagcgggaaggattccctccatcctaacagcctcgcgcgcgcgcttgccgtggcaaccaagacgttccacgacgcgcgctctcgaacgcttcgcgtcacgcggccgcgcggccccgcccgtcggcctcgctcccgccacagagcccgcagcacgccgccgccgcagcctaggtcacattactaggaaagccaagtctctcttcctggatttcttctcctataaaccgcctattgatacctacccacttctctatggagcacagatgaaggatattggtcatctccagcatctagcacaacgtctgcaatggaacaggcgagctgtgaatatttgtggaatgcatgggtggactaaagacctatcacctcactctagaatgcccagcatgttggagcatgttaagcactatatgagctgctgaggatacaggaataaacaacaacacaggtgtgtcctctgcccaaaccaggcataaatgagcttccaaatgaacacaaacaaatctggaaggcttttgaggaagaaggaccattaaaaaagctgctgacgactgcctggaatctggtttggagcatctccaaagccaacgtactttcccccaagaaaatacaggaagatctctctgcccaggcttggaaatacataaggatcaggtttgccatcctctactttagggtgactttaacataatttaatgcccactgactgcttttctcctacaggtaaagtaacaaacaaaggagtcaactctcaggagctctctctttcatctgctttatgttgccattttccctcattgccctctcacattcactcagtaattcaccaaatatttatagagacttcatggtgtgcaaggcagtgaactccacactgtaggaagagtaaagccatggagatcgcaggcctggctcttcatacctttggctttctgttgaattgaactttctgttaagtttaaaatacacaatagaactttgacgatgttgtggcctggtcagggatgggacagataaccagcccttaaaaataaagctcctccggccccgcccaataccttctgaaagaaggagggttattatagagcataaataaaacagtagtgattaataatgataataaagtttatctctttactca

SEQ ID NO: 461799 - DNA, 728 bp, Homo sapiens
atctgcgaagccaaagtaaacaacggggttggggcggcgagaatgatcaatagcgatgctccgaaaggactccgcgataggaatcgagcgggaaggattccctccatcctaacagcctcgcgcgcgcgcttgccgtggcaaccaagacgttccacgacgcgcgctctcgaacgcttcgcgtcacgcggccgcgcggccccgcccgtcggcctcgctcccgccacagagcccgcagcacgccgccgccgcagcctaggtcacattactaggaaagccaagtctctcttcctggatttcttctcctataaaccgcctattgatacctacccacttctctatggagcacagatgaaggatattggtcatctccagcatctagcacaacgtctgcaatggaacaggcgagctgtgaatatttgtggaatgcatgggtggactaaagacctatcacctcactctagaatgcccagcatgttggagcatgttaagcactatatgagctgctgaggatacaggaataaacaacaacacaggtgtgtcctctgcccaaaccaggcataaatgagcttccaaatgaacacaaacaaatctggaaggcttttgaggaagaaggaccattaaaaaaggtacagaaagaatgtattgagatcatgtttatccatcactgaaataaaatacgctccaaaatttcaatgattctccagccaatatattattacccctcctta

SEQ ID NO: 461800 - DNA, 1104 bp, Homo sapiens
cttagactcagccgttgacaatttcttcctcagccctccccctggaaggtgttacgccccttctccaggtgggggacactaaggttcagagagctcgccctgcagcctacaggggtcacctctcacattctactctccagcgtatgacaaccctggacgaaaggggctgagaccaagaaacagtatcagaggctgaacccctcggcgatgagcgtctgtcccaggacttggaagggagggagggagcatggccacggcagctgcctgcagtattacagttccaaaacataacttgaaggtcagcacaggagctgctgtgatataaaaggagagagtcacctggcgccccctgcagtcctccagttgcccagcagcggtgggacgctcagtggcacacactgggtctctgtatggcctcccacctgcaaggacttccccgggcaggcccagctgcccagaagccccggaacacacaggaagacaacactataggatggcaggtggggatctgtgcaatacaaacatgtagctagaaaacccaactgaggatctgtctagaatacttccgatatcaatataccgtagttgttgaaaccagaaccgtctccagccgtcagcagtcttggcggctactgtacagctgtcagcatgactacaggcagcacccgaggctatctggggggccacgggctgggtgttggggtgaaggttcagaggaggaacagcagcttggggcagcccctgtcagaagggccccctgccatggcagccagtggaggccagggaccttcagggcactggaggggacagagcagctctttcctcagtgacccgagggaggggaagtggcagctggtgctggcccacgggcccagccccattcctgctgcacctcctcagcagccaccccccaggctgacagctgtcgtttcacgatgggctgaggggtggggtggggggtttccaacacttgattcgagcggactgcaacgcccagctcacaggacaactgaaggagtcagacctcaaattgctgttctcaaagacaatgacaacacccatttttgatgcctgaaaagaggcaaaggcttctggctaaatata

SEQ ID NO: 461801 - DNA, 745 bp, Homo sapiens
ctcccttcctggacaacaagctccctgaggacgtgggcgacttagtacatcttgtatgggcctctctgcctgttctttgctttgctttctgggacacccttaggctagtctagcaattctgaactgcctggcttgaagagttgattcccatgggatgttgaggaggggccagaggttctggaagaatagtaaaaaacctacaaccaagtggtagcatctcagtattcctcttccacaaagtagcccatccccccccatcaccaagggaagcccctagtggtggcaggcatcttgggaatttaccttcattactaattctcccttgtctaccagtagcacttcttaacctgctcactgcccatcagaacagcctccgacaaagctgcatccaaattctttaaagggcaattcattgccccaagtaatctgccaaacctgtcttcatttggaaatcagtcttcatattcagcactgctcagcacgcaggcatgtgaggaagctgggcttaaaggagactccagcaaatggagagacagaccacagtcctgggttggaaagctgaatatcgttgaatgccagatcttcccaaataaatgaactggcttaatacaattctgatcaagatgccaacaagaagagagtgtatccagacaaaatgatctttggaaaatattcttcaccttgtggaataaacggagatgcggccaaacccttcccctcttcccccccacacaccaaccacccc

SEQ ID NO: 461802 - DNA, 712 bp, Homo sapiens
tgtgtccagtgagcagttgaaaatagggttttggagtatttaatggacagaagcactgctcagcacgcaggcatgtgaggaagctgggcttaaaggagactccagcaaatggagagacagaccacagtcctgggttggaaagctgaatatcgttgaatgccagatcttcccaaataaatgaactggcttaatacaattctgatcaagatgccaacaagaagagagtgtatccagacaaaatgatctttggaaaatattcttcaccttgtggaataaacaggaaagcatggctaacaacgggttgtcgaaaacttccttattagataatccggtgatagacaataggagtaagatggtaaggatagtcacaaggacaatagctgtcactaaccagcagcactgttctgacacttacaatgtatgtattaacttactgactctcaccacagccttatccatacctgtgctcaacaaaaacgtgacaaccccagaaagaatgcctgtgacgtgctttgctggccccagcagcacagcggtgagcaagagacccagtgccactggtgggggaggcaggtgtccttcaaaccatcgcccaccagagacaaaactgcagagacctgggcaaggagagtgcggtcagggaaagctctcctgggggatttttgaatttgtgatgatcctgtctttgacaagaactggctaatctggttgc

SEQ ID NO: 461803 - DNA, 442 bp, Homo sapiens
aaatttccaaaatacatttcatcaacttatgcatttagaaacaagaaaaaaatatatctaacatagtttttttgtaaaacgccatttcaactctgagtagtgggggagggaatcacaggataaagtacagttctttaaaagaaattagttttgctttataaaagtcactatgttgtcctcagttttctctcattgctgcttatttttctccacacagcactgctcagcacgcaggcatgtgaggaagctgggcttaaaggagactccagcaaatggagagacagaccacagtcctgggttggaaagctgaatatcgttgaatgccagatcttcccaaataaatgaactggcttaatacaattctgatcaagatgccaacaagaagagagtgtatccagacaaaatgatctttggaaaatattcttcaccttgtggaataaac

SEQ ID NO: 461804 - DNA, 1380 bp, Homo sapiens
ctcccttcctggacaacaagctccctgaggacgtgggcgacttagtacatcttgtatgggcctctctgcctgttctttgctttgctttctgggacacccttaggctagtctagcaattctgaactgcctggcttgaagagttgattcccatgggatgttgaggaggggccagaggttctggaagaatagtaaaaaacctacaaccaagtggtagcatctcagtattcctcttccacaaagtagcccatccccccccatcaccaagggaagcccctagtggtggcaggcatcttgggaatttaccttcattactaattctcccttgtctaccagtagcacttcttaacctgctcactgcccatcagaacagcctccgacaaagctgcatccaaattctttaaagggcaattcattgccccaagtaatctgccaaacctgtcttcatttggaaatcagtcttcatattcagaaccagccgggcgcggtggctcacgcgtgtaatcccaacactggaaggccaaggcaggcggatcacttgaagtcgggagtttgggaaacatggtgaaaccccatctctactaaaaatacaaaaattagccggccatggtggcttatgcctatagtcccagctaccaggaggctgaagcaagagaatcacttgaacccgggaggtggaggtttcagtgagctgagattgcacttctgcactacagcctgggagcactgctcagcacgcaggcatgtgaggaagctgggcttaaaggagactccagcaaatggagagacagaccacagtcctgggttggaaagctgaatatcgttgaatgccagatcttcccaaataaatgaactggcttaatacaattctgatcaagatgccaacaagaagagagtgtatccagacaaaatgatctttggaaaatattcttcaccttgtggaataaacaggaaagcatggctaacaacgggttgtcgaaaacttccttattagataatccggtgatagacaataggagtaagatggtaaggatagtcacaaggacaatagctgtcactaaccagcagcactgttctgacacttacaatgtatgtattaacttactgactctcaccacagccttatccatacctgtgctcaacaaaaacgtgacaaccccagaaagaatgcctgtgacgtgctttgctggccccagcagcacagcggtgagcaagagacccagtgccactggtgggggaggcaggtgtccttcaaaccatcgcccaccagagacaaaactgcagagacctgggcaaggagagtgcggtcagggaaagctctcctgggggatttttgaatttgtgatgatcctgtctttgacaagaactggctaatctggttgc

SEQ ID NO: 461805 - DNA, 8151 bp, Homo sapiens
  misc_feature (151)..(151): n is a, c, g, or t
  misc_feature (153)..(155): n is a, c, g, or t
  misc_feature (157)..(158): n is a, c, g, or t
  misc_feature (161)..(162): n is a, c, g, or t
gtcccccagccccacgcgtccccatgcagccctggcagtgcctccggcgctttgccctggcctggtgggagaggacggcggagggcagagcccgctctcccagggaggaggctggaccgagggaccctgggggccgaggggagccagggancnnncnnggnnaaagatgacatcatgtgtgaatgttgcccaggggcagccagaggacagagtagagggttacatccgggatccggagcggagcagcccccccatgctgtctgcggacgatgcggagtacccgcgggagtaccggaccctggggggcgggggcggcgggggcagcgggggccggcgattctccaacgtggggctggtgcacacgtccgagcggcggcacacggtgatcgcggcccagagtctggaggcgctcagcgggctccagaaggcggacgccgaccgcaagcgtgatgccttcatggaccacctgaagagcaagtacccacagcacgccctggccctgcgaggccagcaggacaggatgcgagagcaggccggcgtatcgggtgaccgcggcgacgcagccaccagcctccgccgctcctctgcggggctgcgccggcggggccgcgccgagggagggggccgcgagaggggatgtgcacggcggcgcgcagcgccgcgccaggtggagtcgcggttaccggggcgactggggcccgggccggcacggcggcggccgcggcggctctcgcattgcagcaaagggcaccggcggcggcggccgcggctgcggaggcggccgggggagagaagagcccgggcgggtgggagtaggggccctccctccccagccggacgcaggacctggggctggggaccccgcacgtacacctgtggccgcagtaagggggagcgactgtgggggccgggatcgccgcctcgggttgggcggggggcggggacacggagatgggggcccgctccgcggcaccgagagccatccaggggtgggggacgtccaggccattgcaggctttgcaccggggtgcgcatctgcacggacaccttctggtatgggcggtgggcctcggggctgcaggctgtggctgctgctttgggagagtctggctgggatgaaggtgagacagaggggtgtgggctggcactggtggtcagcctagagctgagccatagcctctcggtcacaagcacaagcggcccctccctactgcccctggcccatttctatgctgccttcctcctgccaagacccacacccacccagtggaccttcccaggcctggatatgggcagtgacaagcaaaggggggggggggtgctcatccttggttcctctcaccctgcccggcccctgcagacccgcagctcacgccacactcagggagcccagcccgggctggcagaccaggcggcaaagctgtcctacgcctccgccgagtcgctggagaccatgtcggaggccgagctgcccctgggcttcagcaggatgaaccgcttccgacagagcctgcctctctcccgctcggccagccagaccaagctgcgctccccagctcacttcccctcagtttccgccccacctgctctgcccccacttccatttccttgtccaagttccttcaactgcctggagtccagtgggtgccttgagaggctggagagccggcctggcgcccccgccggcagcatgagaggtgcctgggtgcatctgcactcgggggcggcgtctagcctcagaccctgccgctgcggggctggcgcagctccgaaaagctccccgcgctctcctggagggcggcgtggagacggcagcagtgacagcgagggcggcgtctccttcgcaggggtgctgttcctgcagttcggggaggagactcggcgcgtgcacatcacgcacgaggtcagcagcctggacacgctgcacgcactcatcgcgcacatgttcccgcagaagctcaccatgggcatgcttaagtcgcccaataccgccatcctcatcaaagacgaggctcgcaacgtcttctacgagctggaggacgtccgggacatccaggaccgcagtattatcaagatctacagaaaggagcccctctacgctgccttccctggctcacatctcaccaacggggacctccggagagagatggtgtacgcatcgcgggagtcctcgcccacgcggcgcctcaacaacctgtcaccagcgccgcacctggcatccggctcgccgccgcccgggctgccgtcggggctgccgtccgggctgcagtccggttcgccgtcgcgttcgcgcctatcgtacgccggggggcgcccgccttcgtacgccggcagcccggtgcaccacgcggccgagaggctgggaggcgccccggccgcccagggcgtcagccccagccccagcgccatcctggagcggcgcgacgtgaagccggacgaggacctggcgagcaaggcgggcggcatggtgctggtgaaaggcgagggcctctatgctgacccctacgggctgctgcacgagggccgtctgagcctggccgcggccgccggcgacccgttcgcctacccgggcgccggcggcctctacaagcgcggctcggtgcgctcgctcagcacctactcggccgccgcgctgcagtccgatctggaggactccctgtacaaggcggcgggcggcggcggcccgctgtacggcgacggctacggcttccgcctgccgccttcgtcaccgcagaagctggccgacgtggcagcaccccccggaggtcccccgccaccgcacagcccctactcggggccgcccagccgcggctcgccagtgcgccagtccttccgcaaggactcgggctcctcgtccgtctttgccgagagtcctggagggaagacccgcagcgcggggagcgcctcgacggccggagctcccccttcggagctcttccctgggcctggggaacgctcgctggttgggttcgggccgccagtgccagccaaggacacggagaccagggagcgcatggaggccatggagaagcagattgccagcctcacaggcctggtgcagagcgccttactgcgaggctctgagcctgagacccccagcgagaagattgaaggctccaatggagcagccaccccctcagcaccctgtgggtcaggcggccggagcagcggggccaccccggtgtccggcccgcccccgccctcggccagcagcacccccgcaggtcagcctaccgccgttagccggctgcagatgcagcttcacctgcgaggcctgcagaacagcgccagtgacttgcgcggccagctccagcagttgcgcaagctccagctacagaaccaggagtcggtgcgcgcgctgctgaagcgcacggaggcagagctgagcatgcgcgtgtcggaggcggcgcggcggcaggaggacccgctgcagcggcagcgcaccctggtggaagaggaacggctgcgctatctcaacgacgaggagcttattacccagcagctcaatgacctggagaaatcggtggagaagatccagagagacgtgtcccacaaccaccggctggtgcccggccctgagctggaggagaaggcactggtgctgaagcagctcggggagacgctgacagagctcaaggctcacttcccgggcctgcagagcaagatgcgggtggtgctgcgcgtggaggtggaggcggtgaagttcctgaaggaggagccccagcgcctggatgggctcctcaagcgctgccgcggggtcacggacacgctggcccagatccgaaggcaagtggatgagggtgtgtggccaccccccaacaatctcctgagtcagtcccccaagaaggtgacggcagagactgacttcaacaagagcgtggacttcgaaatgccaccccccagccccccgctgaacctgcatgagctgagcgggccagctgaaggagcctctcttacccccaaggggggcaaccccaccaaaggcctggacactcctggcaagagaagcgtggacaaagctgtgtctgttgaggctgcagagcgagactgggaggagaagcgggcagccctgacccagtacagtgccaaggacatcaaccggctgctggaagagacacaggcagagctgctcaaggccatccctgacctggactgtgccagcaaggcccatccaggcccggcccccactccagatcacaagccccccaaggccccccacggccagaaggcagccccccgaacggagcccagtgggaggaggggctcagatgagttgaccgtgccccgataccgcacagagaagccctccaagtcgcccccaccgccccctccccgccggagcttcccctcctcccatggcctgaccaccacacgtaccggagaggtggtggtcaccagcaagaaggactcggccttcatcaagaaggctgagtccgaggagctggaggtgcagaagccccaggtgaagctgcgccgggctgtgtctgaggtggcccgcccagcctccacaccacccatcatggcctcggccatcaaggacgaggatgacgaggatcgcatcatcgcagagctagagagtggcggaggcagtgtaccacccatgaaggtggtgactccgggggcctctcggctgaaggcggcccagggccaggcgggcagccccgacaaaagcaaacatggcaagcagagggccgagtacatgcggatccaggcccagcagcaggccactaaaccatctaaagagatgagcgggtcgaatgagacctcgagcccagtctcagaaaagccctcggcttccagaacctctatccctgtattgacttcctttggggcaaggaattcttccatctccttctagaagcccctcaccccgctgccccgcctgtccccctccctcactcctgccatttctcccctctcttccttcatctccaccccaccccaccctactctccagacgccctgaggggtgtgccctgaagaggagggtgcggccctcctcagcgacccctacccatcatctgttggtgtttttggttttgttttttttttttttttaacaattaacttttaattatctttttttaaacagtaaaactaaaaaccaaacacaccaccttccttgatcccagctggcctctcgctggccgcacctgtcacatctctccttcttctctttcaccactctttcccccagtccatcctgaagctcctgcacccccttcccgccttcccctcacttcccaagaatactccaaacaaactctgaaccacggagacttggagcagtgggagacccctctcccgtttctcgataccttcctggaggaacgcggggacatcggaccaacccatacatcaagccagagagcggggcttagggagactggccttggagatgccccactccctgtctaagctccgacaagactgtgacttcctctgtggctgctctgcctcctcccactcacacccaagtgggcctggagtagagacggacaggctggagacgaggccggagtttgagaggcctcagggtgggtgtgaggccatggagtctgtatccctggggaggcgctggcctcctgggccttgccgtccagtggggagtggagggcagaggccctttggtctgctggctgtggagggtgggttgcacggacagccggatatcggggacactgccttgggagagggcggcccggacgggtatttggtacttttagtttcctgatttagcactttaaatggcattaacttattgaatggggatggggtgggcaagagtgaggggcctagaaaaccaggttttgtggcttgcagttgggggaagggtctggtttgagggaaatgggagggtcgagaggggcttgacggggagcactgaagacacctgggacccgcaggtggggtgacttgaacttcagtcatcctcttggcaatttgagggttttcccaggaaaggatgagacgtagtttttcaatggggctctggtgaccctggtgagatgtctgaaggtccctgaggcctgaccatccagccagcgcccctggcctgtggacgccctgcctgccctgcagaggcggttggcagtgccgcctggcttttggccgggtcctggggaggcagagagaggccaattttggttctcactcctggccccccagagggcacagtgaggagccggtagggagaggataggagaagaggaggaggaggagcggggtccccggccgcaggattcccacttggagcacaaagtgaagtaagcacaggggagggggactagaatcagtcccccatagcaagcacagaaaggaggagctgcgcagaaggcagagccccccagaccctggggcctggctggggaaggtccgcacctggggagagctgggagctgttgaaggtttggggggaggggaaacgggttgtgtttcttcatttctttttttgtttttgcctttgttggttcatccttgttttctagctttggatcatttttgtaccaaggcgagcaagcctttttgaaaaataacaaaagaggaaaaaaaaaatccctcctggaaaaaaaaaaaaaccctggaaaatagaaaaaaaaaaaaggacctcataaatgatgcaattacttttaattgcaggcaactctttacatttaagtgaagtgtcttaacattttatattgttttaaaaatatatttacatattatatatataatatacgtaatataaatatatataaatatttaaaaaagaaaaaaaaaagaaaaccacggcactctccctggccactgttttggcgggggaggggggctggggggcgggcacgtcggcctggcttctgtggtcccagtgaaatggtctggtttgatttggctgtacagagaccccctgacttgggaggggaggggggagtggtgccccctcctccctccactccattactctctgcttgctacttcgcttgcccccagctcccaccctcagccctgtgactggaatgtgtgccccaccgtcattgtcctgagttgaatgtccctttgtgggggaggtggggggggcagtgtccatccacgaaggggcagaaggagggagccacgtgccccgccccacccgctcgggtgaagcccagtgggatttgcatctttctttctctttggttcctgcacatttatgggctgggaggcatccgtgtggaattgcgtgcagcctgtgtgtgtgctggcacaagcccatgcactgtgtgtgcagacgcatggggcctgcacccacaggcatggccgagcacatgtgtgggggaaggcgtgggcacataggtgcatgtaacctgtttgggcattggcacgtgcctacctgcatgttagcgtgagaggagctttgtgtgtgagaacatgtgtaatgtgtgtgcagacatgccgagagccagagacttgtgtgtgggccacgtacatgtggatagagacgcatacatggaggtgcatgtaatctgtgtctccgagtgtgtgtgtgcaggtatgtgtgctggtgcagacccaagtgtgtgggtgtgcctctgtgtgcgtgtgttccatcatccctgcaccactggctccagatcccttcctgagcccccgtccccgctggccctctcacagcctgcagcacatcagtgcccccagctgcatgcgcctcgctgctctgtccatcagtgtgtgcttgaccaagagaaaactaagacgtctcgggggacccctgtacctggtcctctcagcccccgcccactgtgctgtgttactcgcatgggggatttcctgccccttccacaatatgctgtttccccaggagcctcaggcctgaggctctgagtggggtccccagggggccccccggggtgagccccggctccacaccctgccccatccaccctgtagggcccatgttggtgtagcagtgatggcttctgtggatattctgtgacctctgtcggtgtaacttgacaatttctaaatggaaaagggttgctgtgttttctctgtctctcttttttaatgtccttttttcttctcccccgctccctgctctctttccttttcagtttttctagccaagtgtttggggctttaataaaacttgtttctttttcctctcctggatctccttcctataggctgatg

SEQ ID NO: 461806 - DNA, 854 bp, Homo sapiens
  misc_feature (851)..(851): n is a, c, g, or t
  misc_feature (853)..(853): n is a, c, g, or t
aacagatgagtttcgaactaaatcaaatgagagcaaatggaaacaccacatctaataagaacagtgcagcaatggatgcagagattgtgttaagatctcttatggattttttggacaaaacattaagtctctcagcaaaaatctgtgagaaaacagtcctaaagcgagttttaaaagagttatggaagctagttctcaacaaaatagaaaaacaaattgttcttcctcctctgacagatcaaacaggaccccagatgattttcattgcagctaaagatcttggacaattatccaaactgaaggagcacatgattcgagaggatgccaggggtctgacgccaagacaatgcgctataatggaggtagtcctggctaccatcaagcaatactttcatgcaggaggaaatggcctgaaaaagaatttcttggagaaaagcccagatcttcagtctctgagatatgctctcagtctttatacccaaactactgatgccttgataaagaaattcatagatactcaaacctcacagaagattattgaaaatgtcagtacgagtcaaaagagccaaatgcaggctcaaacttcagaacctaataaaagttatactacagaaataataaaaaacccacacatcacacagctgctgaccatgatcaaacctaacggccaacaccagagtcctgtgaataagtcctgcttcctacttgttctcttaaatcagcctaagccacacccccacgggaaagccccaggacaaagctccaggccctaactgtgctctctggctccccgtggcctccagacttcccctcgggctcctgccgctctctggacctctctgggatgtgtnant

SEQ ID NO: 461807 - DNA, 1315 bp, Homo sapiens
agacacaactccctctaactcccactctttgactctgcaaatgggccacccacttcttcattttcatcttcctgagcgttctgtggggaaactcaaattcggataatctgggatcttgctcagctccattgctgagaagtactgtggagcaggctgacgaggagagatgggcatcagcggggcagggaaggccagagacccccgaatcttcttcatggatgtcagcttcagcatccatgcccccaccctctgtttctgcagtttagcccacgagctgcgtctcagctgcatggagaggaaaaaggtccagattcgaagcatggatccctccgccttggcaagcgaccgatttaacctcatactggcagataccaacagtgaccggctcttcacagtgaacgatgttaaagttggaggctccaagtatggtatcatcaacctgcaaagtctgaagacccctacgctcaaggtgttcatgcacgaaaacctctacttcaccaaccggaagtggtccctggcctgcctagaaggcagccacactttacattctcctatccccttagcaggaatagaccggcctggcatgctctgcagtttccggatccctggtgcctggtcctgtgcctggtccctgaatatccaagcaaataactgcttcagtacaggcttgtctcggcgggtcctgttgaccaacgtggtgacgggacaccggcagtcctttgggaccaacagtgatgtcttggcccagcagtttgctctcatggctcctctgctgtttaatggctgccgctctggggaaatctttgccattgatctgcgttgtggaaatcaaggcaagggatggaaggccacccgcctgtttcatgattcagcagtgacctcggtgcggatcctccaagatgagcaatacctgatggcttcagacatggctggaaaggtaggggatcatggactttctcaggccacagggtctcgtggcccagtgccctgccagatcaagctgtgggacctgaggaccacgaagtgcgtaaggcagtacgaaggccacgtgaatgagtacgcctacctgcccctgcatgtgcacgaggaagaaggaatcctggtggcagtgggccaggactgctacacgagaatctggagcctccacgatgcccgcctactgagaaccataccctccccgtaccctgcctccaaggccgacattcccagtgtggccttctcctcgcggctggggggctcccggggcgcgccggggctgctcatggctgtcgggcaggacctttactgttactcctacagctaattctgcagggca

SEQ ID NO: 461808 - DNA, 1109 bp, Homo sapiens
atggagttggcgtcggagcaacagctgcgcgggcggagcagaaagcaagtgattgctttcctttcctcatttttggaagccctgcctaacacacagctgcactgtacatcccagttcctggatggacgaagaaagtgaactgatccagccccaagaccagagctgctgggcctttctgcccgatttgtgtctgtgccgtgttttctggtggctaggagacagggacaggtccagggctgctcttgtctgcagaaagtggaaccagatgatgtattctgctgagctctggcggtacagaaccatcaccttcagcgggagaccttccagggtacatgcatctgaagttgagtcagctgtttggtatgttaagaagtttggtcgttatctggagcacctggaggtcaaattcatgaatccttacaatgctgtcttgaccaagaagttccaggtcaccatgcggggcctcctgtcttgtctgagtaagagcaacaaccgtctgaaatctctttccatccaatacctggagctggaccgcctggtatggaggaacagcatcaggagctcattcatcagcagcttgagcttcttcttaaagaagatgggcaaacgcctggattatctcaacctaaaaggggccaggctgaccgtggagcaaggctgccaaattctcgactccctcagctacatgaggaatgagaatgtgatctcagagctcaacatcgaggactatttcagccatcaccttgctgtctacaacagcccccagttcaaaaagaccatgtccacattccacaatcttgtgtccctgaacctcaactacaactgtatctccgacgagctgcttgagaacttgtgtgagaatgccagcaccctccggaccatcaacatcaaatgccacgttcatgacccccacggacaggtcatctggggagatcccgatcaggagcatcagtctgagaagctgctatttcagtgacccagactgttcaatgagacccactctgatagatctcctgcccaccttccggcacactctgcagaagaaagcccactgctgcctgctcttggctaggctcccaaatgttcactcaatctcaaattgaagttct

SEQ ID NO: 461809 - DNA, 1058 bp, Homo sapiens
  misc_feature (494)..(494): n is a, c, g, or t
  misc_feature (498)..(502): n is a, c, g, or t
cccccttctggttctgcaatgagtagttacattgttcctcagagtgctgaattttgagagcaaagcattacagaaatgtaaaaaaatcttgaaggccaggtgcggtgtctcatgcctgtaatcccagcactttgggaggctgagatggagtctcgctgtgtcaccaggctggagtacagtagtgtgatctcggctcattgcaacctccatctcccaggttcaagcaatcctcctgcctcagcctcctgagtagctgggactacagaaaacaagctcatattaccaagtgtgaaattacagcaagtcttacaggctgggaactggaaaagagcttccccatcatggtggattatacaaccagtggtggagagtaactccaaaatatagcatctttctactcatcttactaaagctcaaagaaggtgatctacaagataatgaaaacaaggctcaaaataaaaacaagaaatctttatgaaattacacaaagtgtncagnnnnnaatcagaaaacgtttgaatctgcctatgacctggaagtctccacttccaattgtcccacctttccaggtggaaccaatgttttattattacttagatatagtaataacaacacatcagatgactgccattgaaaagatggcttgctattcacagttcccaagaggagagagcatgccacaccacagggggccacatgagaaagcatctgggttacttaggcagcagaaagaaagggaaaatgtgggcaaggacctttattgtggtttccatgggaagaaacaggcaagggcaatgaaaatgtcctggaatcagctagcaatcgtggttgcacaattttgtgaatatactttaaaaatctgaattgttcacttcaacagggtgaattttgtgatatgtaaatttatctcaaaaaaaagaaaaaaagttacgttagtcatgagaaaaactgttctgtgaaaaaaaaaattccctttaattcagaagaactgattttagcagaatacattttggacaaaatcatttttaaaattttcctacagtcaaagaaaggaatat

SEQ ID NO: 461810 - DNA, 3056 bp, Homo sapiens
acagtgacggtggccgtaggcactattttaaattgggtgaccaaggaagcctttctaatgaggcatcatttgagcagatatctaaagggcactgtaactctagacagatccaataaaggttttcataactgctaccaagtcagggaggagtcagacatcatcagcctcagccaggagccggacgaacatccaggcgacatatttttcaagcagactcccacgaaagacattctaactgagctgtacaaactcacaacagagagggagagactgctaaccaatctcctgagctcagaccacatcctggggatcacgatggggaaccaggaggggaagctgcaagagctgtccgtgagcctggcccccgaggatgactgtttccagagtgctggtgactggcagggagagctccccgtgggccctctcaataagaggagcacccacgggaacaaaaagcctcggaggtctagtggaaggagagagagctttggggcccttccacagaagaggaccaaaagaaaagggcgtggaggccgagaatcagctcctctgatgggcaaggacaagatctgttccagccactcccttcctctttctagaacaaggcctaacctttgggtactagaggagaaaggaaatctgctcccgaatggggcacttgcctgctccctgcagaggagagagagctgccccccagatattcccaagacgccagacacagaccttggctttgggagctttgagacggctttcaaggacactgggcttggaagagaagtgctgccccctgactgcagctccacagaggcaggaggggatggcattcggaggccgccgagcgggctggagcatcagcaaacaggtttgtctgaaagtcaccaggaccctgagaagcatccagaggcagaaaaggatgagatggagaagccggctaagcggacttgcaagcagaaacctgtctccaaagtggtggccaaagttcaggacctgtcctcccaggtacaaagagtagttaaaacgcattctaagggtaaggagacgattgccattcgcccagcagcccacgctgagtttgtacccaaagccgacttgctcaccctcccgggagctgaggctggggctcatggctccaggcggcagggcaaggagcggcaaggggataggtcatcgcagtcgccagccggggaaacagcctccatttctagtgtgtcggccagtgccgagggggccgtgaacaaggtccccctgaaggtgatagagagtgagaagttagatgaagcccctgaggggaaaagactgggcttccctgtccacacgagtgtccctcacactcgcccagaaacgagaaacaagaggagagccgggttgccccttggtggccacaagtccttgtttctggatctgccccacaaagtaggtcctgactcctcacaacccagaggtgataagaagaagccatccccaccagcaccggcagctcttggcaaggtgtttaataattcagcctcgcagtccagcacacacaaacagacgtcacctgttccctcgcctctgtctccaaggctccccagccctcagcagcatcacaggatcctccggctccctgcattgcctggtgagagggaagctgctcttaatgactctccttgtagaaagagccgtgtcttctctgggtgcgtctctgctgacaccttggagccaccatcctctgcaaaggtcacggagaccaaaggagccagcccggccttcctcagagcaggccaacctcggttggtgcctggggaaactttggaaaagagcttggggccagggaagaccacagctgagccccagcaccagtcacctccagccttccattgggatcttcagcagcactttcaggaaccagtcataagaactgtaagcatctcctgtgcttctaaccttataaaagaagaagctggaaaagggaaggagagtagaagtggaaaccaacggaagaaagcaattcagagaggcccctggattactcacagtcctgagaggaaacagatacctgcaaggctgaaggcgcaagggaaggcgtgcgtggtcactggagcccagacaggggagattaatggaggggaccctctgtcaggaacagtggtttctggtagagacacccagcggagaggaagctgtggggataaatatcctggcctcaccctcctctggaccacttcctgtaaacctcctctaactgaaccaaccagaaagcagagtgtaaaggagccaagccaggggctgtggtctacggggtcagccttccatggccaagagcaggttgagaaaaatggggagtggatctggaggagccaatgggagtctggatgagggggatgaattatgccataaagaacaggaaaatactgttgcttctaaccctctttgagggagttacttcggtagaatgacgtctatgagtagattataagaggctgaagatgctgttaccctattttgctagaaaatgctttttttatttttaactaaccttgaaactattcatctctgcatgggtttgggaatctaaatgtactcagagataaatatatatagctacccttctcattcaaggtaggcagagggaactctggaatgcttctaaaactcctaccctggcctcttaagtagaagaggcaaatgtagaagaggtgctttgctactgagtgcaggcaacagtgaaggtcccatggcaacagggaatggggaaaggcaagggtggcatgggctgaaagccagctgtgaataagaaccaccaatttcatgagccaagattgcgccactgcactctaccctggcgacagagcaagactatctaaaaaacaaaacaaacaaaacaaaaccaacttgtcaactatgtactttactgggaaatggtgtaatagacaaatgatttctacctttgtatcatatagaactacatgtaatactggaaatgagggaatgagtttctccctttgtgctctcaatttatagacagtccagaacattgtaaacaatattgacactggcattgaatgtgaccctgaatc

SEQ ID NO: 461811 - DNA, 966 bp, Homo sapiens
ctcacagtctttttgagaagaagcttgtgcctgtgcctggaagcaaggagggctggaactggggccctgctgggaagccctgtatctgcagaactgtgtcccgtgggggccaggggacacagatttttgcagccctctgatgctgaagcctttctggggctgggatgacccaatgcccacctggaccgtgcacttcctggtgaccctctgagacaacttcctgggcagagttgatcatcatggagtcagtgcaagtctgggaacagtggcctgaaactgcgcagctccagtgtgtcggtggaggcccttcagtgaggagtcccccagtctgggtggagagccagcccgatcggcttgattcctccactcttgacaccgtgagcctcagattctgagagcttgggaggatggacagagactgcggtcagcaggagaatgggaagcagatgggagaggaagaagcttgcctttggtggggaccaggaggctgggagcccaggcccattcactgtaacatgtgcagtaaatcccattatattcatgcaaagaattctacacagcaaggaaaaggaaagagctgttggcatgccacaacacaggtggatctcacagacctactgctgagctaaagaaggcaaccacgcacatgtacatgctgcatggggccgtttctatctgcccagaaccaggcaagaaccatctatgccaacagcttcattgctgctgtttctggggttgttgactggaggggcgaggggaccctctcggatgtggaaatgttctgtgatgagatagaggtttcctgcatgtctgtgcctgtgagatgcatccagctgcacacttcagatgcgtgcattttattgcatatgttatgccttgatttttaaaagtctttaaatatttaatcctgaacatccctacgaaacaaataataaaacagccctaggctcctgatgtcttgcccag

SEQ ID NO: 461812 - DNA, 878 bp, Homo sapiens
caggggaccggcaggtgcgtgacatccaggagggaaagccatgcactgcggaggtttaaagaaggcgggaataaactctgcgacttttggtttagaaaacacactgtattcagaggcagccagagatgatttataacatgccatattagggaacttataatagcatctaacaagcaaaacctccgcatttcagtggcttcatgtaacaccgttaattcttgcttcctgaacagctccatgtggtgcttctggtgggcaggtggccctcttcctggctgactcagggacccctgtggctctgctgttcagggagagtcagagccctctgtgtgcagctggcaaagaaggaaagtggccagggggatggcccagccctatctcagaaacctcagcccggaagtggcccacttcccttccactcacagtctttttgagaagaagcttgtgcctgtgcctggaagcaaggagggctggaactggggccctgctgggaagccctgtatctgcagaactgtgtcccgtgggggccaggggacacagatttttgcagccctctgatgctgaagcctttctggggctgggatgacccaatgcccacctggaccgtgcacttcctggtgaccctctgagacaacttcctgggcagagttgatcatcatggagtcagtgcaagtctgggaacagtggcctgaaactgcgcagctccagtgtgtcggtgagcgccgtcctcccagggctcaggggagggcagatgagaaaccagaagatccgcagagcaggaggctccaccggaggcccgagccagggccacccagaggaacgggccctggctggggacagaagcctgctggtgtgctcactgcgtttccttccccttt

SEQ ID NO: 461813 - DNA, 1701 bp, Homo sapiens
ctcacagtctttttgagaagaagcttgtgcctgtgcctggaagcaaggagggctggaactggggccctgctgggaagccctgtatctgcagaactgtgtcccgtgggggccaggggacacagatttttgcagccctctgatgctgaagcctttctggggctgggatgacccaatgcccacctggaccgtgcacttcctggtgaccctctgagacaacttcctgggcagagttgatcatcatggagtcagtgcaagtctgggaacagtggcctgaaactgcgcagctccagtgtgtcggtggaggcccttcagtgaggagtcccccagtctgggtggagagccagcccgatcggcttgattcctccactcttgacaccgtgagcctcagattctgagagcttgggaggatggacagagactgcggtcagcaggagaatgggaagcagatgggagaggaagaagcttgcctttggtggggaccaggaggctgggagcccaggcccattcactgtaacatgtgcagtaaatcccattatattcatgcaaagaattctacacagcaaggaaaaggaaagagctgttggcatgccacaacacaggtggatctcacagacctactgctgagctaaagaaggcaaccacgcacatgtacatgctgcatggggccgtttctatctgcccagaaccaggcaagaaccatctatgccaacagcttcattgctgctgtttctggggttgttgactggaggggcgaggggaccctctcggatgtggaaatgttctgtgatgagatagaggtttcctgcatgtctgtgcctgtgagatgcatccagctgcacacttcagatgcgtgcattttattgcatatgttatgccttgatttttaaaagtctttaaatatttaatcctgaacatccctacgaaacaaataataaaacagccctaggctcctgatgtcttgcccaggatgcgcagagccaagggggtttccaatcctgctccttgctgaccagggcctctgcatcatgacactgaccgtcccacacatctggctgccgcctcctcgctattacctcatgtcttcctctgcaggctcccagactggggtcctaagatctggagatgctgcctgcagtctgcagaggcgaagtctggccaacacacgcagctgccctcctgaacagaatatcgtcagcctcaacatcagcatcggggttccctccttacacaggggtccccccttatcggggggggtgcattccaagacccccagtggaagcctgaaacttgggaagggcgcctacagtgtggagacgctggacaaagggggacgcgtgtccagggtgggaagtgtgaccctgctgcgcgtcccctctgcccaccctcctcctgcctccggcccagtcgctggttcccaaggaaacctctctaaagtcgtggccagtgaaaccacagcgccctaccaggccccatccctggacccatcctgccatctccccgccgtctgcccagggacccatggctcctccccagctgctcctcagcacccgggtctggggcacgtgtctgcagcgtctcggaacccggttctgttgctcaccataaagctctgccgagcgccctcaggaaacagaagccccaaagaaaggggcttgtaggacagtatgcatggagcccctggcctgggctcatagcccccat

SEQ ID NO: 461814 - DNA, 2261 bp, Homo sapiens
cagagtcggccctgtgctcgccaccgtcacctgctggttggattccggaaacccactgtctgaagaccacagagggactctatgctgggggccatgtttagggccggcacccccatgccccccaacctcaattcccaaggaggcggccactacttcatcgaccgggatggcaaggccttccggcacatcctcaatttcctgaggctgggccgcctggacctgccccgtgggtacggagagacagcgctgctcagggcagaggctgacttctaccagatccggcccctcctggacgcgctgcgggaactggaggcctctcaggggacccctgcacccacagctgccctgctccacgcagatgtagatgtcagcccccgcctggtgcacttctctgctcgccggggaccccatcactatgagctgagctccgtccaggtggacaccttccgagccaaccttttctgcaccgactctgagtgtctaggtgctttgcgggcccgatttggtgtggccagtggggatagggcagaggggagcccacattttcatctggagtgggccccccgccccgtggaactccccgaggtggagtatgggagactggggctgcagccgctgtggactggggggccaggagagcggcgggaggtggtgggcaccccaagcttcctggaggaggtgctgcgggtggctctcgagcacggcttccgactagactctgtcttccccgaccccgaagacctgctcaactccaggtctctgcgctttgtccctggcatcctggttcatatctgtgttgctgactacagtgtctgtgatgtccgcatgtccaggcctgtttgggatgaggtgtccatgaacaaagtcacagagaagactcacagagtcctgagggtcatggaaatcaaagaggctgtctcctcactcccttcatattggagttggcttcgaaagaccaagctccctgagtacaccagggaagggggcagcaccacgctgtacaactgctccacctgcaaggggacggaggtgtcctgctggccccgaaagcgctgcttcccaggtcctcacgcccatcttggccccgccccaccttgcccagatccctgagcccttgggctcccaagtcggtgcgtgtgggtcccagaatcattcactgcctcctgggttccctgcaggaagtcaggatctttgggaagccaagattctgctcctctccatcttcggagctttcctgcttctgggtgttctgagcctcctggtggagtgagttttgggataaagacaggaatcctaccccgcccagtgccttccaccacccatcctccctccctctgtccctcccaggcccctcccgtaggcttcccaccctcgtcttccctcaggtcccaccacctccaagcaaaaagtggcttgtgaagacgctgaaaacctcccagcctccagctctaagggccctcaaccaatcacatggctgtcaacaatgccaggaaaatatctacagaaggaaagaatcccctacgccactcccaccacacccacacccccttctgcctgttccgggaaagcgggggcatctgccccagaagctattccaggccctcctatgactgatggggaatccgggaatgcatgttctggaaaactcaccccactagagtgagatcacatcagtgggttcgcgggcatgccctccctccatcgtgttaacagtttgaaatcctggcctccctcagaggcctccatcctgccaggcctaagtaaaacttgctgttcatggcctctgcccctgcctagcctctgtctgcaactggggagggcagaggaaggatgggagactctcagagtagcacagtgcttctcagatgggggtgattttgcaccccagtagacattttgcaacatctggagtcgttttggattgttttaactggggggacgtgctactggcctctggtgggtagaggctagagatgttgctaaacatcccacaacacacaggaaagtccccacagcaaagaattatcccgtccaaaatgtcagtgtttaccaggaaagggagataggagaaaaaaaaaaagaaaagaagaaaaagaagaaggaggaggaggagaagaagaagaagaagaagaagaagaggaagaagaagaagaaagaaagaaaagaaagaaacaaaatgtcagagcatggttgagaaaccctggtgttttgtcccctgcctatcaggagtttttggtttgggaatggaacgtgggacatgg

SEQ ID NO: 461815 - DNA, 2486 bp, Homo sapiens
cagagtcggccctgtgctcgccaccgtcacctgctggttggattccggaaacccactgtctgaagaccacagagggactctatgctgggggccatgtttagggccggcacccccatgccccccaacctcaattcccaaggaggcggccactacttcatcgaccgggatggcaaggccttccggcacatcctcaatttcctgaggctgggccgcctggacctgccccgtgggtacggagagacagcgctgctcagggcagaggctgacttctaccagatccggcccctcctggacgcgctgcgggaactggaggcctctcaggggacccctgcacccacagctgccctgctccacgcagatgtagatgtcagcccccgcctggtgcacttctctgctcgccggggaccccatcactatgagctgagctccgtccaggtggacaccttccgagccaaccttttctgcaccgactctgagtgtctaggtgctttgcgggcccgatttggtgtggccagtggggatagggcagaggggagcccacattttcatctggagtgggccccccgccccgtggaactccccgaggtggagtatgggagactggggctgcagccgctgtggactggggggccaggagagcggcgggaggtggtgggcaccccaagcttcctggaggaggtgctgcgggtggctctcgagcacggcttccgactagactctgtcttccccgaccccgaagacctgctcaactccaggtctctgcgctttgtccctggcatcctggttcatatctgtgttgctgactacagtgtctgtgatgtccgcatgtccaggcctgtttgggatgaggtgtccatgaacaaagtcacagagaagactcacagagtcctgagggtcatggaaatcaaagaggctgtctcctcactcccttcatattggagttggcttcgaaagaccaagctccctgagtacaccagggaagggggcagcaccacgctgtacaactgctccacctgcaaggggacggaggtgtcctgctggccccgaaagcgctgcttcccaggtcctcacgcccatcttggccccgccccaccttgcccagatccctgagcccttgggctcccaagtcggtgcgtgtgggtcccagaatcattcactgcctcctgggttccctgcaggaagtcaggatctttgggaagccaagattctgctcctctccatcttcggagctttcctgcttctgggtgttctgagcctcctggtggagtgagttttgggataaagacaggaatcctaccccgcccagtgccttccaccacccatcctccctccctctgtccctcccaggcccctcccgtaggcttcccaccctcgtcttccctcaggtcccaccacctccaagcaaaaagtggcttgtgaagacgctgaaaacctcccagcctccagctctaaggggtatgcactcacaacttccacatcccttggaggggaaccagtcagccccttagtcccagctccaaagacagtctccagaccctaaaacccagacatccctgcttctggttggtgagataatgaaaaacaagaaaatccccaaaaacccagatcccccacaatcccagtgtcagatggcctcccgggaacccaggcacccacagctggaaagttcctcccctccagccctcaaccaatcacatggctgtcaacaatgccaggaaaatatctacagaaggaaagaatcccctacgccactcccaccacacccacacccccttctgcctgttccgggaaagcgggggcatctgccccagaagctattccaggccctcctatgactgatggggaatccgggaatgcatgttctggaaaactcaccccactagagtgagatcacatcagtgggttcgcgggcatgccctccctccatcgtgttaacagtttgaaatcctggcctccctcagaggcctccatcctgccaggcctaagtaaaacttgctgttcatggcctctgcccctgcctagcctctgtctgcaactggggagggcagaggaaggatgggagactctcagagtagcacagtgcttctcagatgggggtgattttgcaccccagtagacattttgcaacatctggagtcgttttggattgttttaactggggggacgtgctactggcctctggtgggtagaggctagagatgttgctaaacatcccacaacacacaggaaagtccccacagcaaagaattatcccgtccaaaatgtcagtgtttaccaggaaagggagataggagaaaaaaaaaaagaaaagaagaaaaagaagaaggaggaggaggagaagaagaagaagaagaagaagaagaggaagaagaagaagaaagaaagaaaagaaagaaacaaaatgtcagagcatggttgagaaaccctggtgttttgtcccctgcctatcaggagtttttggtttgggaatggaacgtgggacatgg

SEQ ID NO: 461816 - DNA, 914 bp, Homo sapiens
  misc_feature (1)..(1): n is a, c, g, or t
  misc_feature (3)..(3): n is a, c, g, or t
  misc_feature (8)..(8): n is a, c, g, or t
  misc_feature (13)..(13): n is a, c, g, or t
ncnttggntccanggcccagatattcactattaagtgtccaggaaggatctttcttatataaaggtgcttctgaggacttccagagttacaatggaggaggaatcgggggaggaactggggctggacaggtctactcccaaggatttccacttttaccacatggacctgtatgactctgaagacagactgcacctctttccagaagagaacactaggatgaggaaagtagtccaagctgaaatggccaatgagtcaagaggagcaggggatggtaaggctcaaagagaccttcaagaggaagtggatgaacttgtccacttatatggacttgaagatgatcatgaattaggggatgagtttgttgatgaaaacatacccagaacaggggtttcagaatatcctccttatatgatgaagaggagagacccagccagggagcagagagactggagacttagtggagaggcagcggaggccgaggacctgggcttcggagggtggggctcagcaggccagtgccaggacttgcgggaagcctataggtacacacacggccgtgccagcgaggagtatgaatgctatgtcatccccgaggaagaggatgaagaagaagctgctgatgtcttctgtgtcacttgtaagactccaataagagcttttcagaaggtttttgatgaacataaggagcatgaagtgatcccactcaatgaagcactggaaagtgccaaggatgaaattcacaaaaacatgtacaaattggaaaagcagataattgagatggaaaactttgcaaatcatttggaggaggttttcatcactgtggaggtaagagcacacttgaagacctcatcagactcacatttcttccatcaatggctatgtcaagcagctgtttctggtatgagctagagaa

SEQ ID NO: 461817 - DNA, 1750 bp, Homo sapiens
cttgttttctggtcacttttcatcatgtcccttcagctcctatctctaaaagaatttctgcgtggaaatggcttagctgctgggaaaatgaacatcagtattgatttagacacaaactatgctgagctggttctaaatgtgggaagagtcactcttggagagaacaatagaaaaaaaatgaaggattgtcaactgagaaaacagcagaatgaaaatgtctcacgagctgtgtgtgctctgctgaattctggagggggagtgatcaaggctgaagttgagaataaaggctatagttataaaaaagatggaatagggctagatttggaaaattcttttagtaacatgctgccatttgttcctaatttcctggacttcatgcagaatggtaactactttcacatttttgtgaaatcatggagcttggaaacctctggtccgcagattgccacgttgagctccagtttgtacaagagagatgtaacgtctgcaaaagtcatgaatgcttctgctgcactggagttcctcaaagacatggaaaaaactggagggagagcatatttaagaccagaattccctgcaaaaagggcctgtgttgatgtacaagaagaaagtaacatggaagccttggctgctgatttttttaacagaacagaacttggttataaagaaaaattgacctttactgaatccacacacgttgaaataaaaaacttctcgactgaaaagttgttacaacgaattacagagattctccctcaatatgtttctgcatttgcaaatactgatggaggatatttattcgttggtctaaatgaagataaagaagtaattggctttaaagcagagaagagttatcttactaagttagaagaagtaacaaaaaattccattgggaaactgcctgtgcatcacttctgtgtggagaaggggacgataaattacttatgcaaattccttggagtatatgataaaggaaggctttgtggatatgtgtatgcactcagagtggaacgcttctgctgtgcagtgtttgctaaaaagcctgattcctggcacgtgaaagataacagagttaagcagttgaccgagaaggaatggatccagttcatggtggattcagaaccaggttgaggaaggaggattggcaataaggatacctttggcttgggtggcaggaaggttttattgtatctttgggattagggacaagattaaaagtcttcaaatttcaacatctctgccatcacattcttctaattttaacttgttttaaaataaactcagttatatggcaatgtattaaattgctatcaatgcatttttactgttaattttccttccaagtatagagtgtttcagcagcatcaagagttaattttacaatttgtatctgacctaggaatctaaccacaatatgtaaccacaatatctaatgttctgtattgggaatgcaggatcagttctaagtagacgtttggtatactgtgcattagttagcttgagtctctcccatgccaaattaagagcgtgatttttgttttctaacattattccatagtatgtgaggaactgccctctccagcaagtacatcatcacctgtctcccagagttgtcctcttcgtgaatatattaacttcaaaattcagccactgagatatcaccttccaggtaatttaattctggcttccgtggagttgttggtgtaactgtgttcaaacctccttctcttcaaaccagctctgtcttgat

SEQ ID NO: 461818 - DNA, 2153 bp, Homo sapiens
cttgttttctggtcacttttcatcatgtcccttcagctcctatctctaaaagaatttctgcgtggaaatggcttagctgctgggaaaatgaacatcagtattgatttagacacaaactatgctgagctggttctaaatgtgggaagagtcactcttggagagaacaatagaaaaaaaatgaaggattgtcaactgagaaaacagcagaatgaaaatgtctcacgagctgtgtgtgctctgctgaattctggagggggagtgatcaaggctgaagttgagaataaaggctatagttataaaaaagatggaatagggctagatttggaaaattcttttagtaacatgctgccatttgttcctaatttcctggacttcatgcagaatggtaactactttcacatttttgtgaaatcatggagcttggaaacctctggtccgcagattgccacgttgagctccagtttgtacaagagagatgtaacgtctgcaaaagtcatgaatgcttctgctgcactggagttcctcaaagacatggaaaaaactggagggagagcatatttaagaccagaattccctgcaaaaagggcctgtgttgatgtacaagaagaaagtaacatggaagccttggctgctgatttttttaacagaacagaacttggttataaagaaaaattgacctttactgaatccacacacgttgaaataaaaaacttctcgactgaaaagttgttacaacgaattacagagattctccctcaatatgtttctgcatttgcaaatactgatggaggatatttattcgttggtctaaatgaagataaagaagtaattggctttaaagcagagaagagttatcttactaagttagaagaagtaacaaaaaattccattgggaaactgcctgtgcatcacttctgtgtggagaaggggacgataaattacttatgcaaattccttggagtatatgataaaggaaggctttgtggatatgtgtatgcactcagagtggaacgcttctgctgtgcagtgtttgctaaaaagcctgattcctggcacgtgaaagataacagagttaagcagttgaccgagaaggaatggatccagttcatggtggattcagaaccaggttgaggaaggaggattggcaataaggatacctttggcttgggtggcaggaaggttttattgtatctttgggattagggacaagattaaaagtcttcaaatttcaacatctctgccatcacattcttctaattttaacttgttttaaaataaactcagttatatggcaatgtattaaattgctatcaatgcatttttactgttaattttccttccaagtatagagtgtttcagcagcatcaagagttaattttacaatttgtatctgacctaggaatctaaccacaatatgtaaccacaatatctaatgttctgtattgggaatgcaggatcagttctaagtagacgtttggtatactgtgcattagttagcttgagtctctcccatgccaaattaagagcgtgatttttgttttctaacattattccatagtatgtgaggaactgccctctccagcaagtacatcatcacctgtctcccagagttgtcctcttcgtgaatatattaacttcaaaattcagccactgagatatcaccttccagattagataaagaaaatgtggtacatatacaccatgggctactacacagccataaaaaagaacaagatcatgtcttttgcaggaacatggatggaactggaggccattacccttagcaaactaacttaagaacagaaaaccaagtccagcatcttctcactgataaatgggagctaaacgaaagaacttatgaacacaaagaaggaaacagcagacactggggtctatttgagggggggagggtgggaggagggagaggagcagaaaagttaactattgggtatgggcttaatacctgggtgatgaaataatatgtataacaaaaccccatgacacatgtttacctgtgtaatgagccttcacatgcgcccccaaacctaaaataaaaattaacaaaaattttatctacatataattcagttggttattttttttctctccctgtgctatagtttggatgtttggtcccctccaaaccccatgtc

SEQ ID NO: 461819 - DNA, 2072 bp, Homo sapiens
cttgttttctggtcacttttcatcatgtcccttcagctcctatctctaaaagaatttctgcgtggaaatggcttagctgctgggaaaatgaacatcagtattgatttagacacaaactatgctgagctggttctaaatgtgggaagagtcactcttggagagaacaatagaaaaaaaatgaaggattgtcaactgagaaaacagcagaatgaaaatgtctcacgagctgtgtgtgctctgctgaattctggagggggagtgatcaaggctgaagttgagaataaaggctatagttataaaaaagatggaatagggctagatttggaaaattcttttagtaacatgctgccatttgttcctaatttcctggacttcatgcagaatggtaactactttcacatttttgtgaaatcatggagcttggaaacctctggtccgcagattgccacgttgagctccagtttgtacaagagagatgtaacgtctgcaaaagtcatgaatgcttctgctgcactggagttcctcaaagacatggaaaaaactggagggagagcatatttaagaccagaattccctgcaaaaagggcctgtgttgatgtacaagaagaaagtaacatggaagccttggctgctgatttttttaacagaacagaacttggttataaagaaaaattgacctttactgaatccacacacgttgaaataaaaaacttctcgactgaaaagttgttacaacgaattacagagattctccctcaatatgtttctgcatttgcaaatactgatggaggatatttattcgttggtctaaatgaagataaagaagtaattggctttaaagcagagaagagttatcttactaagttagaagaagtaacaaaaaattccattgggaaactgcctgtgcatcacttctgtgtggagaaggggacgataaattacttatgcaaattccttggagtatatgataaaggaaggctttgtggatatgtgtatgcactcagagtggaacgcttctgctgtgcagtgtttgctaaaaagcctgattcctggcacgtgaaagataacagagttaagcagttgaccgagaaggaatggatccagttcatggtggattcagaaccaggttgaggaaggaggattggcaataaggatacctttggcttgggtggcaggaaggttttattgtatctttgggattagggacaagattaaaagtcttcaaatttcaacatctctgccatcacattcttctaattttaacttgttttaaaataaactcagttatatggcaatgtattaaattgctatcaatgcatttttactgttaattttccttccaagtatagagtgtttcagcagcatcaagagttaattttacaatttgtatctgacctaggaatctaaccacaatatgtaaccacaatatctaatgttctgtattgggaatgcaggatcagttctaagtagacgtttggtatactgtgcattagttagcttgagtctctcccatgccaaattaagagcgtgatttttgttttctaacattattccatagtatgtgaggaactgccctctccagcaagtacatcatcacctgtctcccagagttgtcctcttcgtgaatatattaacttcaaaattcagccactgagatatcaccttccaggaacatggatggaactggaggccattacccttagcaaactaacttaagaacagaaaaccaagtccagcatcttctcactgataaatgggagctaaacgaaagaacttatgaacacaaagaaggaaacagcagacactggggtctatttgagggggggagggtgggaggagggagaggagcagaaaagttaactattgggtatgggcttaatacctgggtgatgaaataatatgtataacaaaaccccatgacacatgtttacctgtgtaatgagccttcacatgcgcccccaaacctaaaataaaaattaacaaaaattttatctacatataattcagttggttattttttttctctccctgtgctatagtttggatgtttggtcccctccaaaccccatgtc

SEQ ID NO: 461820 - DNA, 1672 bp, Homo sapiens
cggagaccgtccgcaggggggatgagtctctatgatcgtaatgctttcaggcatgtttggggtgggcatggggattggggggaggaagagaagaaaaccagagtggagaagcagacggggtcagaggactgggagaaaaatgcctccatttactggagcttcaccacggaacaagtaaatggcttggggaccttggagtgggtgtggccctggggaattactcaacctctcttccgagccttttacttcccctcttctataaagtcaagaaataatgacaagaacggaggcagattcgtcagtcaccactatcctgcccctcccctcctctttgtccacgtagagcgccccctgggcctgaggtgcccacctcctgtctgaccaggtgcctggggccactcaacctggagcatgagttctgactggaccaagccagttccggggggctcttcccccttgccagtgattggttcaggcaaaggcatgttctacatctctggccaataagccatgagaagacatctgcagggggctctgggagaggctgtctctggagggtggggcccatgaacaggaagctgtcccctccctgcttcccctgctggagaagggatgccctcttgggtcaacgctgggaagctcaatggaaggggattgggtcctagctggtgcctctgagcccctgaggaaccagccctggagctgccctaccttggacccttgtgttataaggaagaatacacttgcctcagcatgtgaggcaccaggaagtacagaggcccatcccaggtcatagagccggcaagctggaaatctgggagttgacctctgacccgttcagacactgagtccttgatcccaaagccctcctgcctcccaaaccatctagcagcctcaagaagcagagaggaacttgcttccaaatcacaagattttgggggcagggctcaggaggagctggggctcctgggttccgggctggtccccttgcactctatttgtttactcacccagtcggttaagtaacactgtgcccctgttacacactataaacccagtactgtgtaccagtacaacaccctgtgttggaggcagagggctgcagaaacccagcatctgtcctcatgccaaaagaatcacagaaataaatgctcctccctgctccttgagtgcagggtgggaaccaagagagcttgggctaaaaggctaagttttcctacacatctggagtttctttctacccaacgttgcaatgcccctcacctggtaagtgcaccctgattttcctctggggagctgctcctccccattctctgtgatttgggtggactgccgctgaggatgggcacctgaccaggcctggccaagtggagactcatccattccaagcataattctttacatcaactgggaaaatagcaagcatcgttgaaacatttaatagatgctgggaagacatttgatacaatttaccatctggtcttgaataagactctaacaaaaggagaacggagcggagagggggtggtctttattaatatgcaaaagaatattgacctaaacctaagtactgacaaggtacttaatggtaggaagctactgtctctccactgtaaaaaattataaggaaaggatgatggggtcctgcctccaccatcccttaccaaccctt

SEQ ID NO: 461821 - DNA, 5029 bp, Homo sapiens
  misc_feature (3)..(3): n is a, c, g, or t
  misc_feature (12)..(12): n is a, c, g, or t
  misc_feature (14)..(16): n is a, c, g, or t
ctntgctacttntnnncatagaagattgaattccatcaattcttatgcctttggaggttcttgatgtgaccaagataattaaatatgtctccaattttgcagaaatggagcaagagccacaaaatggagaacctgctgaaattaagatcatcagagaagcatataagaaggcctttttatttgttaacaaaggtctgaatacagatgaattaggtcagaaggaagaagcaaagaactactataagcaaggaataggacacctgctcagagggatcagcatttcatcaaaagagtctgaacacacaggtcctgggtgggaatctgctagacagatgcaacagaaaatgaaagaaactctacagaatgtacgcaccaggctggaaattctagagaagggtcttgccacttctctgcagaatgatcttcaggaggtgcccaagttatatccagaatttccacctaaagacatgtgtgaaaaattaccagagcctcagtcttttagttcagctcctcagcatgctgaagtaaatggaaacacctcaactccaagtgcaggggcagttgctgcacctgcttctctgtctttaccatcacaaagttgtccagcagaagctcctcctgcttatactcctcaagctgctgaaggtcactacactgtatcctatggaacagattctggggagttttcatcagttggagaggagttttataggaatcattctcagccaccgcctcttgagaccttagggctggatgcagatgaattgattttgataccaaatggagtacagattttttttgtaaatcctgcaggggaggttagtgcaccttcgtatcctgggtaccttcgaattgtgaggtttttggataattctctcgatacggttctaaaccgtcctcccgggtttcttcaggtttgtgactggttatatcctctagttcctgatagatctccggttctgaaatgtactgcgggagcctacatgtttcctgatacaatgctacaagcagcaggatgctttgtgggggtcgtcctgtcctctgagttaccagaggatgatagagagctctttgaggatctgttaaggcaaatgtctgaccttcggctccaggccaactggaacagagcagaagaagaaaatgaattccaaatccctggaagaactagaccctcctctgaccaactaaaagaagcctctggcactgatgtgaaacagttggaccaaggcaataaggatgctaaagatacttcaagtgaagaagttaacctgagtcacattgtaccatgtgagccagttccagaagaaaagccaaaagaattacctgaatggagtgaaaaagtggctcacaacattttgtcaggagagtttataggctttaaaaggccatgctgtagcaggcgagtgataacaggctttaatctttttaaagcatgctgcgggatgggatattggcgttgagtggggtgcttcctgggtgagttggggtttagtcaaaggtgctgagattactggtaaggcaatccagaaaggtgcttctaaactccgagagcggattcaaccagaagaaaaacccgtggaagttagtccagctgtcaccaagggactttatatagcgaagcaagctacaggaggagcagcaaaagtcagtcagttcctggtgagacctgcggaccagcaacatcacatcgtcctatctggaatccttagaaatgcagaattttagggacagacacacctactgattcagaatctgcattttcacaagatccctagttgatggagtttgcactgtagcaaattgcgttggaaaagaactagctccacatgtcaagaagcatggaagcaaacttgttccagaatctcttaaaaaagacaaagatgggaaatctcctctggatggtgctatggttgtagcagcaagtagtgttcaaggattttcaactgtctggcaaggattggaatgtgcagctaaatgcatcgttaacaatgtttcagcagaaactgtacaaactgtcagatacaaatacggatataatgcaggagaagctacccaccatgcggtggattctgcggtcaatgttggcgtaactgcctacaatattaacaacattggtatcaaagcaatggtgaagaaaactgcaacacaaacaggacacactctccttgaggactatcagatagttgataattctcagagggaaaatcaagaaggagcagcaaatgtcaacgtgagaggggagaaggatgagcagacgaaggaagtaaaggaggcaaagaagaaagataaatgatgaagtgctgggaatcacttataccaaagccttatgaaatggatgaaattttgttaaataggcaaatgtggaattcctcacagattaaccagtattttttaaatgtattcattcctacaaattaactttcataaattttatggcatgtcttctatttaaaaggaaaagaataagtattcttgcatctggccttagaaatgtgaagttatattctcaagtttatttttttccaagtgtagctaaaatatttttgcaggtaaaataaagctgatagtacatgtgttgttcaaaccttgttaaacctaatattgaactatttttatatctgctgtctttcagaaggcaaataggaaactatatatttgcttaaaaattggcatttagtaaccttaattctttttatagaaggaatgacttaaagtattgtcccctctttttgcactaattgtggatttttttagatgcttctcaaaattttcagtgtgtaagctaaacaaaaactaaaactaagaattctcaaaaaaacttgttcaaaacagggaaagactgatgaaaagtaaaatggactacttttgtaacttacctgtttgttaggaaatggaatggtctctttgatttaaaataaataaaaatagattattacgtcttttgtattgagactgtattgttatgagcctaggaaatttgggaacatgattgtattgtattaaaattcgaagtgattattatcagcttaattggattaaaaaagtacttcaagaaattattttatcatatctgcttctgtttttccaaaaggttaaaacttgtaaaaaaaatatatataaacaattgagtttactaatggtaaacatttttattctgggattcggtcattggaatttatattaaaagacaagttattaaaaaggaaaggttctattcataatcagggtaaagaatatgaaaaccttagacgtaatccatggtggataggcattatggtttccactttggcagaaggcagactattcacagccctatttacttacataggctaaaaaactatgtaactaaatacctaatggtatttaatttttgtttattgaatttaagagattggtattagttttcatagctgtagtccattctaataatttctgatcttctagtggctacttaattagacattatttgaagctgtctgaagaatgcactttatgaattaaaaaactgaattgcctgacctcgttatcacatgagcttatattttgggaacacatagaactgatggaggcttttcctaaggccaaggataatgtactagttgttaaaatggaaataaaagtgaagtggtaaatagcttacagacagtctatgctttgtttaagaaatggaatggcacttcatatattctcatttgtgggagctaaaaattacaataatcaaacttaaggagatagagagtagaatgatggttaccagaggctgggaggcattgaagggatggggagggaagtgaggttgattaatgggtacgaaaatatagttagaacgaatttgttgtagtatttgatagcccaacagggtgactacagtcaacaataactttatacatttaaaaataaaagagtgtaattgggacgtttgtaacacaaatgaatgcttgaagcagtagatacaccctgatgtaattattataaatcgcatacctgtatcaaaatatctcatgtatcccataaatatatacacctaccatgtacccataaaaatttaaaaagaaatggaatggcaaataatggaacataaactttaaacagttagctttgaccagaggtcagcaaatatcctccatgggctaaatccagatgtccacctgttttcataaataacgttttattggagcatagctgtacccatttgtttacatattggctatggctgctgtctagttcaacgtgagagttgaatagttgcatcagagagtatatggtccacaagcctaacttattcactctctggccctttgcagaaaaagtgtgctgccttagtctatagaaaatggacttttcccaccattcactgactcattaggagataggcatcttctaaagattttttttatattgtgtaatgattgatatatagataaaattatatattacttgtaaggtatgatgaataacaacacttaaaaactcatcacacctaaagacatggaaagctgccaattacctatatgtatgttcttcctattttcttacctctttccccatgtcattttttattgttccttgccattttttaatcacacatgtatgttctccaaacatactgtttcattttttgaagctttctacatatagtgtctgaatgtgaagtcttactcaacttgcttttttgagtttatgtttaaaattcattcttgcgcttatatgcatggatggtttacttgctctatagtattctgtgtgagtataccacaatttaagtgttcattttcctatcagttgacatttgtttttagtttttgttggtagaaacagtacactcaaaacatccttgactgtcccctggtacacatatgcaagagactttatgcgtaagagtggagttgttggcttgtcaagttttgcaaaataatgccaggtattttccaaaatgatgatattctcttgagtattacttccctttgcaatgtttttattgttaatgtagcatatataaaaaagtatctcataattttaatttgtgttt

SEQ ID NO: 461822 - DNA, 734 bp, Homo sapiens
  misc_feature (719)..(719): n is a, c, g, or t
  misc_feature (721)..(722): n is a, c, g, or t
  misc_feature (724)..(727): n is a, c, g, or t
  misc_feature (730)..(730): n is a, c, g, or t
  misc_feature (734)..(734): n is a, c, g, or t
ctgaataaatcgtcttttcaatttccagagggaaaacagcaccaccactcagatttctgatcgtgttgcttatctgaattttctgccgttgtcggattgcgccctcactacggtaaggttgtcagcatgctactgaccgtgcatccgagagcacccccggatgaaatcgcgtagatctgtcacaccgctttacctgcagaacttgataaaatcgagctggatagggtaggggctggtagcgcctcctccaatggtgaagggatttgcagcgtttctgcctttgcctttcccgtgggtgcacactgccctctctggccatcgtgtgttgttaataacagtactggtagtggaagggattgccgtggcccaaaaaacccaagatggacaaaatattggaatcaagcatattcctgcaacccagtgtggcatttgggttcgaaccagcaatggaggtcattttgcttcgccaaattatcctgactcatatccaccaaacaaggagtgtatctacattttggaagctgctccacgtcaaagaatagagttgacctttgatgaacattattatatagaaccatcatttgagtgtcgatcgttactgtggcgtgaaaagccctccattaattagatcaacagggagattcatgtggattaagtttagttctgatgaagagcttgaaggactgggatttcgagcaaaatattcatttattccaggnanngnnnnagnatcn

SEQ ID NO: 461823 - DNA, 716 bp, Homo sapiens
ggcctgggcgccccgcgcccgccacttcagtggatcccgcgccggggccgcgggcggagctgcctgccggtcccgcgccgcgcgtccgcactcctcggccctcgggcggtcgatgggacggggcgccgcggagcaggaggcggcgcccgtcggggtgctcgggccgcgcgggagcccactgtggggctcgggcatggcgggccgcaggacctgagctctcctcaggggagcggggaggcagctgctggccggcgatggggacggagtggggccgtcgccgccgcgccgagccgtgagcgccgagccaccgccgccgctacctcagcccttcgcagaagcgccgggcagctcgggaacatggccctggagcggctcttgctcggtcctcaaagtgttgttaataacagtactggtagtggaagggattgccgtggcccaaaaaacccaagatggacaaaatattggaatcaagcatattcctgcaacccagtgtggcatttgggttcgaaccagcaatggaggtcattttgcttcgccaaattatcctgactcatatccaccaaacaaggagtgtatctacattttggaagatccagactttaccttacctaggagggaccaacagcagatttctgcagaacgtggcaagactggtcggaagaatgggacaactaccagaagatgcggggctcctcaacggctcccgctgcatccag

SEQ ID NO: 461824 - DNA, 878 bp, Homo sapiens
aacaaagacccgcctataacaatggtatgctcttcattttcaaagtgctccaacaactcttgctgaggtacagggaagcactgtggtttagtaaaaaacatactcagactttggaatcagagaggcctgattctcctgtttatgacataaacatatgtggccttgaaggccattgtcttatttctccaccggaaagcaacttcagctgggctgttgaaattggccacaccattgccaacagtgacacagcacttcctctttcctgcttgagtcttcctccagttattagtttgaatgggagtggttcactgacggttcctggggtacttggagtcaaagcagctcacgcacgttcctgctttccaccaggaaacgtggagccacggaggccaaggaaatctgatcagctccagatccccaagttggtctttttacacccctaaagacaccatgcttgctccttctccaagactcataaggaaatacaaatgactttgaaatatcagccactgttaactggatcagattcctccagtaaatatgagagaagagtcatgacttttgctcagtcattaaaataagagacacaaggattggtatggggtatccctagcagaatttattcaaggaagcctaatcaatatcccccatctcactatttcttcagacacgtgctaagtttacatattcgaatcaaattaacatatcagagtcacaaattggcaatggtgtcaaaatacctatcctcaccattctaaatcatttttcacattaaatatgtcaagggctatgtttgcgtgcataagtcaaaagaagagaaataaagcaatacattaagaagttggtgacataagcttatttatttagttatttatttt

SEQ ID NO: 461825 - DNA, 5943 bp, Homo sapiens
tttgtgcatccctgctggacctcgtgttttaagcaacagatgaggaaactgaattccaagtgacaaagtgactccttgcccaaggtcacatggctagtaaaccttccatcacctcacatggcccgtgttccactcaaggctgcactcacagtctcttcaggagcctaccagaggcagcctgtccccttccacagccagagccgccacagagttggcccccagctctccaactcagctggcccggctgtgatctgacctaggaattccagaaagcacatgtgacccttagatccaaccccctgcctttggactgtgactctttgtcagattcctggtctcctcacaccccggggggatatgggccagccagagctccctccagacccctgttgtgcccccagggcactgattcctggtcactctctcctgtctccaagccctaggccctcagatctggattccttcaaaggctctgagaaggcacaggttacagtgggaccattattccccggagccaagctgttggcttcttgcttgtttaaacccagcgtcctggagacgggacagcacccaccccgtcgtcaccgcccgtccctgtcctgcagcgcagccaacgtgaagaagtgggagatcgagctgcagacccttcgggagagcaatgcacggctgaccacagcactgcaggagtcggcagccagtgtggagcagtggaagaggcagttctccatctgccgtgatgagaatgaccggctccgcaacaagattgatgagctggaagaacaatgcagtgagatcaacagagagaaggagaagaacacgcagctgaagaggaggatcgaggagctggaggcagagctccgagaaaaggagacagagctgaaagatctccgaaaacaaagtgaaatcatacctcagctcatgtcagagtgcgaatatgtctctgagaagctagaggcggcagagagagacaatcaaaacctggaagacaaagtgcgttccttaaagacagacattgaggagagcaaataccgacagcgccacctgaaggtggagttgaagagcttcctggaggtgctggacgggaagattgacgacctgcatgacttccgccgagggctctccaagctgggcaccgataactagggctggccgaggcccaggccccgcccgtgagtcccaagcgtgtgtgcgagaccagatagctctaggacgttcttctgtgtgcattgcttctgtaaatgcaggcgcagtttgtcgtgtttccaaaccagttgtgccgtccactcactccttttcagaatagaaatctcctctcgcttctctggccttgtgaggttgtggacaactggaagattctgactcaggaatccagaactaggtctaccttcaacatttatgcagtcagggcagggatgtttatatctttcataagggctgttgcaaccatatgaactgaaaaaacacgcattttgtaatccaaatattgatattctttacaccaagccatcaggctccttttatcaaatagcattcagagtatttgaatgtccaccagacaccagccccggggggcacagagagaacaacattcctctctgtcaacatcgagaggctttaaaacaactgtttagtggaaactttctgagagatggaaaacaagcttctggtgggtgcattttctggcccggagttgcctgcatccacgctactgccccctgccccccgcccccccagtttgtacggttgcaacagtgttccttttcttggttttaatttctgagcagatgattgtgctgtgggaacagcacacagtgagggtgcctagcacaatgtctggcacaaagtaggtgcttaataaatatttgttcaattaaatgtgtacacagaatttagtgttttaatcaaaccccacagcagagctgggaccctgtcgaatgatgcaccatctttgctgtgctgggtagttaacagacatgaataccactgtctggtcaaacccaagctggggctcgggtggccctggggcagggagggagaaggggaagcagcaggagctggtctcaggcccctggagcccatccgtgatgctctgcccctggggctctccagaccctcgaatcaccttctcccctaggaatggtgacccagggattccaggtataggggctgcccagggcttggtacctagggtaggattgtcttatgggtctggacagctgggaagaaatcacaggcatttcggggggagagagcagctcagctgacaagccttggccctcatgacagaggtgttccacccagctctgcgtcctgcctttttcagtttctcctagggaagggactgcagccataaacctctcctctctcacagagctgctcagtggggccagcgggcctgtgggtgctgttggcatcctgccctgggagattgcccgtgtgtggcaataatggcttgaatccctggccccacacatctctaaatgccttgagcaggggggaggctttggtgccccctcacccctttgagaaccacctaagaggactactccttctagaaaccttctcccatggacgtggttagactttctccctgctgaatttggattaatgagcaaacaacccgaggaaggagggagatggggtccgaacccaggtgccctgggccccaaggtgaacacgagtcctcctgctctccttcccttcccctcacggagacgcctctctgagctggggagtcttgtttgggatgtggatggaagggaaggctgggcatctggagcaccaaggcacttttagaggagctcccgcaagttcaccaagcactgaagagtgtggtgagcatcctgtgggcagcaggtgaggaacttggattcctcctgctgtgtgtccagctctacagctgttgcaaccctggagctaagagtagtaaggactcccttaaagggaaaggtaagttgggcttggccgtgaaagcacaacagcttttacaaaagcactgaactttccattccttctgcttttctctgaagatctcagtgtcttttcatttactttcttttaaaatagtggccctggagcaacctggacggtgttcccttgagctggtgtgacgtgccctcgtttattctgacatccagcccagtctcagtactgttgtcataaccttacgccagactcaggcagaatgtaagccattcactcgtgagcatcgcagccgcttgtgctgcctggaagctgcagggccaggactgcattttcagtttgcaattgaggtctcctgattttggtgtttccaagactggctgctataccttgataagctttccttctgcctccatgaaacctggtgtctaaaaaagatcaactaaaacttggaaccctttaaccaagaggacctttaaaaataacctttcattccagtcaagacccagctggatgcattttaaagttgggagtggcgaggaagccttcctagtgccgcccggggaatgtaaaaccaccagagcaacaggttgggacaggtcctatgactaattctggccaatgaaatgtgagcacaggtgacacatgaagctccagacagacactgaaatgcccatgagcagttccgcagtgtctgccttcccttccctcagcaaatgctgatgtcccagggacagagcctctgtcaagcctggatccctgagtgactacgtggagcagcccccttctcccttcatgttaccctcacctgccaccctgcatggacgggtagcatgaataaaaaaaataaaccttaggtgttaaacactggggtttcagggttaattggttaactgcagcataacatatcctgttgcaacaataaaaaagaatgcacatttttaggacttgtaatatgtattgcctcaaattgccttccagaaagacagacccaattatactcccacccacagtgtgtgagtgtgtactgcttcctctttaacactggagttaccctggggacagagagctaaaaaaaatatttttttggttaaaatgtaaccctttaaggtgttcagcagtatcattgatttctaagaggtttatttcataaacattgtaaaacaaaattttaagttgcacaaaaagtcaacagcatattcatcagttttttcctaaagtatgttttagcactttgaccatatgagacaacccttctgctgttagcatttttctctttgcaatagatcttcctatgtcagtacacatcaatctacctcattcttacctctgcataagagagtagtgtgtagttgtataatagtttaacttggcgattggttattgattttgtaactagccagttactgaattattctaaaggttttgctgttgttaatttctttcgcctttttcagttgggtaatagttctgggtaggttgataattttattcccatatttgtaatcttatttcactttctcaactcatcacattgactggtacttttagaacaatgttaaaaaacatttacataattgtgctgatattgtacattatttgatatatatatatcaaattttttttacttagaagagtgtttctccaaaactataaatttgactcttagtgtaaaataatcttaatatttgaattatacattcaggttatgccctctatttctagtttgatgaaaatattattagtaatggatgttggggttttattaaatggcttttttccacatctgtcaagatgatcaactggcttttctctattatgactttagatgaatcgttttaatagatttgctaatgttaagacatctctgcatttctacaagaatctgatgtagtcatagtatactattcttttaatatacatctcctttcaatgttaacagtggttatttatgattggttggtccatagtagatttttattttgtgtttcttatctgtactttctgatttttctacaaagattgtgtattacttgtataataaaaataagagctttaaattgtgaaattcttctggatttggttttctcattttattatggaatttttcatacctaaataagatgaatagttgggtaattttttttctgctttgtcagttattggtgtttgttaacttcttaaaaaaattaaaaagaacttgggaagctctgtttttctatgccctggaaacatttaaatatttagaattttttgctctttgaagtttttataacatgtatgaaactgtccaaatctagtagtgcctttttaggaaatatggggttgttgtttttttttaatttttttcatgctcattattttcttcaaactttatttctattctatttgttggcctggagttgtagtattctgcttcctcattcccatgttgcgtgtgctttccctttttgttctcattggtttttccagaattactctgtttcattgatcttttcaaataaccaactctgagatttatatcttaattttactgttttactatttcatgattcttttcgttttgttcttaattttttcctttattattttcccaccttcttaagttacatgccattttaactttttcttacttaataaaagacagttactaacattgtaagtttttgctttgtttctttttgatgttatttggcaaatgatctttttatatttaagggaaaaaatattttcctttaaaggcttgtatacctttgtgaattttacctgattttgttgtaatagtttctgtagaaatacatagttcagtaaaatatttgtgtctgtttttaagtcaacagaaatctttcagaaatcctttgtatcttgacaagatactttggaagttcttgatctccctaagccccaaaggccccagccctccggatgaaactaaaccactaccagggagggggacttgtgcctcttccatcgtccttttcatacttacagctgttaaatcattcattcatgttttcattt

SEQ ID NO: 461826 - DNA, 1501 bp, Homo sapiens
gccgagacaggacaaatatttgagctctggagtttgagaccagcctgggcaacagagtgagactctgtctctacagaaagttttaaaattagccaggtgtagtgacacatgcttgtagtccccattacttggaaggccaaggcgggaggatggcttgagcctgggaggtcaaggcatcagtgagcgatggttgtgccactgcctggagatagagtgagaccctgtctcaaaaaagaaagaaagaaagaaagaaaaatccctaagacctgacctgcctactccctagaaagcaccaaataaggaaaagcactccggaagaatgaagctaagaaggctgtgctctctgaggcatccgggcagccttcactggagggacaaggtccagtgggaccttcttactcaagatggcttcaattccaatcaccagagagttttgagaaccagtgggaggggttcctgggcagcggggctctgctcctaccgggatttgtttattcagctgatgttaataaatgaagctgaaggtaacaagctgtcacttagcatctccaggctggaccagaactgccattggttaagtttcagacttcagccccaaagtacagtgtcaccaccttggatgaaggatattaattagtgtcatgagggagatcacagtctcattcccctccgtcactagcacgagactgaaaaaaaaaaagaaaatcaaattcagttagaacagagacgtgctgagaagctgggccagagaccccgcggggaacctgccgttgtttgtcaaaaaacgaggccagcgaggaagaagccaaccatgcctcccgctccactcgctttggaacccacagaatgttcaacagggcagcacctttcagttattaagacactcagattccaccctggtgcagtgaagcaaactggattaaccacgcggcacgtggcagagccacagcgcaaaccacggctcctgctgctgaggaaaatacaggcacctcggccactctgggctgtggctgctcaggccatctttgatttctctctttctttcatacctcgcattctgtatgtcaaggaatatttggctctgccttcaaaatatccagaatccaatcacttctcaccacctccaatgcttccaccctggtccaagccaccatcatccaatggggccatcagtatggtctttcccctggatcactgcagtggccttctgactgcaatagcatcctacttccacctagtccctcctaccatttattctcaacacataggcagaattattctgccaacatatttggatctccccgtcctcagcacctagagttctacaagaccaccccgcttctgcttattagtttcctcatctgcagggagccagatttgaaataggactcccatttataatttatcattcatagtattaggctcatcggaaagtatgctttatccacatatttcacaaaactcttttaaaaattaattatgatttcattttcagttgttc

SEQ ID NO: 461827 - DNA, 1084 bp, Homo sapiens
cttaagcaaattaatgcaggaacgaaaaacaaaataccgcatgttcttacttatcgcgccactgcactccagcctgggtgacagagcaatagactccagctcaaaaaaaaaaaaaaaaggaaaagaaactgtatttactattcatcaagcgggagtggatcatcataaaggattggcagaggtggaagaaaattcacgtagaagtggacccacaaacttcaatcctgtgttgttcaagagtcaactgtattgtttcatgtattttgaagatatagaaaggatgtataatatgtatattatgcacgttcatgaactttactggaaccaggtggtaccttaccctcttgatactacaaaacctgcctcccactgcccctggtggggcattctgtttcggagtgcaatttccatgtggcccatgtagcgtgcagtgccctcctctcctgagctagtaatctccatgaggggaagacttgttcatccctgtagcactactgcctaaagcagtacctgacaaaatgacggagtctcactctgctgcccaggctggaatggagtggcatgatgtcggctcactgcaacctctacttcccaggttcaagcgattctcctgctttaacctcccaagtagctgggcctacaagcacacaccaccatggccggctaattttagtagagacagggttttgccatgttggctaggctggtctcgaactcctgacctcaagtgatccacccaccttggcctccgagagtgctgggattacaggcgtgaatcaccatgcccggcaatttaatatttgaaaagaacactgttaaaagaactgcaagcatgatgatatggaaacaccttccaaaatactagtttgaaaaaatgtatgaaatatcaggctgagttatcttcaaatatataaaaacgaccatctactagtgatagaacaatcttatagctacagacattttttcacccaataaaaccctaaaaacattgtcattttaatctttaaaataattataaataattttgagaggtcatgatatacctagaacttagtgcttttaactaagttgtatatagcagatg

SEQ ID NO: 461828 - DNA, 1179 bp, Homo sapiens
gggtgttcttctctgctgtgtaggctttgttcttttgctctttgcagtaaatgttgctgctgctgactgttgggtcccagccgtctttaaaagctattacactcacggtgaaggtctgtggtttcactcctgaaatcaagcgagtgtacgaacccaccggaaggaagaaactccagactccgaaggaacaaactctggacacaccaaatgtaagaattgtaacactcaccgcgacggtccgtggcgtccaccctcgcagcttctttcttgaagtcgccgagaccaagagcgcaccgaaaggaaccaattgtggacacatccgttttagtggaataatagtccttggttctctggacaaccgggagaattgcattttctgaggcccacgataagcacccaaccgttaatatttccatgcttctctgtccatcccatggagcctggggcttgagggactgtgcagtgaggcagcaactcacatctccagctgttggactggtcctgccagcgaccacttcgccttcctgccaccacgtgaagaaggatgtgtttgcttccccttctaccgtgattgttaatttcccttggaaaagtattgatgatcaagtgatgctagcagcaacagtgttaaaggctttaacgcttttaaagggagccagctcccacctgtgcaggattgtcgtggggactggcaagcagagtggaacagagctttgcttgttctctaggaacgtgacatctgaaatcggcagtttcaacctgcacatggggagaggccatactgacatgcagacagatgcagacacatggaggccaactataaaacgtagaaatccagacaatgatcacatcaaaggtgaccaatatggactgaagaccagaggatccttctctgagtcgtctggacagcagaagactgtaaagattccaatgcaatgtggggagggagaagggccccccaaaacgtgacttgggatttaatgtccctgctaccaaaaagatggctttggtgtccaaggatttgaaaagacgaattttagtttttacctttccatattctttagaacattaatatataataatagtatagaaaatgtatatacttgcaatatagataatttgtaaagaaagaagcttggtatgaagaaatgttttataggatttgaaagtagagtaatg

SEQ ID NO: 461829 - DNA, 609 bp, Homo sapiens
  misc_feature (3)..(3): n is a, c, g, or t
  misc_feature (6)..(8): n is a, c, g, or t
  misc_feature (10)..(10): n is a, c, g, or t
  misc_feature (13)..(14): n is a, c, g, or t
tcncannntncannaggagcacatagaggttgtctatacatacttaaatggcaataagaatgcacaaatcaggagaaataagctggccagtcattctagccacgtggaagcctggtgtaatggagttcatgggatagcccctacaacagagagttatccagcccaatatcaacagcgctggtctattctattaagaaccctggtctactgtgctagaaaaaaaatgcctccagcatctctttggcatcactgcattagagcgcagacctgtagacctgctgtcatgttgggcaggcccaggcataaggcacagaggaccttggtgaaatgggcagtcaggaggagacaaacccagccctgggctgggggagctgccttgctatgctgctgctccctgtggtgggaggattgcttgagctcagaaggtcaaggctgcagtgagctgtgatccataccactgcactccagcagcactcgggcaaccaagtgagactctgtctccaaaaaaaaaaaaaaaaaaaaagaaagaaaagaaaagggaaaaaaaagtaaacattgccccttctgtatgaaagacattagaaattcgacttgctgtttattcttgct

SEQ ID NO: 461830 - DNA, 713 bp, Homo sapiens
ggctcatgcctgtaatcccagcactttgggaggccaaggcaggtggatcacctgaggctaggagttcgagaccagcttgggcaacatggcgaaaccccgtctctactaaaaatacaaaaaattagctgggcatggtggcgggcacctgtaatcccagctacttgggaggctgaggcaggagaatcacttgaacccgagaggtggaggttgcagtgaaccaagatcgcaccattgcaaccccacctgggcaacaagagggaaaccctgtctaaaaaaaaaaaaaaaaaaaaggatttattatgtgctcactgctggctcaggccccaacctctggccttttaagttacctagacttgagttctggcatccagagctaacaatcattcttcagatcacccacaccggatggaatctctagctattttatcagctaagaaaatcagggtaataacgaaaaagcagtagggcctggggctagcactgagttcagatccagctttcaggaggacagtggaaagagtgcagagcctctgcctaggccctgggccccacgaagcaggacaggcagagcccagggtactgttggcatctctgtccttcccttcaggacaccccttacctatctgcctcaaccagactgggtacaaaataaagatcaagtctcccggaaaaaaaaacagacacagcaaaacacggcccaccagacacacaag

SEQ ID NO: 461831 - DNA, 2201 bp, Homo sapiens
  misc_feature (2)..(3): n is a, c, g, or t
  misc_feature (5)..(5): n is a, c, g, or t
anncngcaggcaggagggctggggcgagcactggggggccatggagcgggcagaagagcccgtggtctatcagaagctgctgccctgggagccaagcttggagtcggaggaggaagtggaggaggaggagacatcagaggcgctggttctaaacccccggaggcaccaggactcttccaggaacaaggctggcgggctgcccggaacctgggcccgtgtagtggcagccctgctgctgctggctgttggctgctccctggctgtgaggcagctccagaatcagggcaggtcgacaggaagcttgggctctgtggcccctccacccggcggacactcccacggccctggcgtataccaccacggtgccatcatcagccctgcaggccgagagctgcttgttgccgggggcaacgtcgtggatgctggagttggagctgcattgtgcctggcagtggtgcatcctcatgccacggggctaggtgccatgttttggggcctcttccacgatagctcctcaggcaattccacggccctgacatcaggcccagcacagaccctggcccccggcctggggctgcccgcggctctgcccaccctgcacctgctgcatgcacgcttcggccgcctgccctggccacgcctgctagtgggccccaccacgctggctcaggagggcttcctggtggacacacccctggcaagggctctggtggctcggggcacagaaggcctctgtccactactttgccatgctgatgggacacccctgggcgctggggcccgagccaccaacccacaactggcagctgtgcttcgcagcgcagccctcgctcccacctcagaccttgctggggatgctctactgagtctactggcgggagacctgggggtggaggtgccctcggctgtgcccaggcccactttggaaccagcagagcagctacctgtgccccagggcatcctgttcaccacccccagtccctcagctggcccagaactgctggcactgttggaggcagccctgcgctccggggcgcccatccctgacccctgcccaccgttcctgcagactgctgtgagccccgagagcagtgccctggccgccgtggacagcagcggctctgtgctccttctcacctcctcgctcaactgctcctttggctctgcacacctgtccccaagcactggggttctgctcagcaacctggtggccaagtctaccactagtgcctgggcctgccccctcatcctccgtggcagcctggatgacacagaggctgatgtgttggggcttgtggcttcagggacccctgatgtggccagggccatgactcacaccctactcaggcatctggcagcaaggccccctacccaggcccagcaccagcatcagggtcagcaagaaccaacagagcatcccagcacttgtggccaagggaccctgctccaggtggcagcccacacagagcacgcccatgtctccagtgtcccccatgcctgctgccccttccaggggttctaacaggatgggggtgggtctggcagaaggcagagttatctgaagcatgggggcaggagcagagcagacacagcagcaatggagtgtgcacccgcagggtgtggtgcctcacacctgtaatctcagcactttgggtggtcaaggcaggagaatcacttgaacccgagaggtggaggttgcagtgaaccaagatcgcaccattgcaaccccacctgggcaacaagagggaaaccctgtctaaaaaaaaaaaaaaaaaaaaggatttattatgtgctcactgctggctcaggccccaacctctggccttttaagttacctagacttgagttctggcatccagagctaacaatcattcttcagatcacccacaccggatggaatctctagctattttatcagctaagaaaatcagggtaataacgaaaaagcagtagggcctggggctagcactgagttcagatccagctttcaggaggacagtggaaagagtgcagagcctctgcctaggccctgggccccacgaagcaggacaggcagagcccagggtactgttggcatctctgtccttcccttcaggacaccccttacctatctgcctcaaccagactgggtacaaaataaagatcaagtctcccggaaaaaaaaacagacacagcaaaacacggcccaccagacacacaag

SEQ ID NO: 461832 - DNA, 2110 bp, Homo sapiens
  misc_feature (2)..(3): n is a, c, g, or t
  misc_feature (5)..(5): n is a, c, g, or t
anncngcaggcaggagggctggggcgagcactggggggccatggagcgggcagaagagcccgtggtctatcagaagctgctgccctgggagccaagcttggagtcggaggaggaagtggaggaggaggagacatcagaggcgctggttctaaacccccggaggcaccaggactcttccaggaacaaggctggcgggctgcccggaacctgggcccgtgtagtggcagccctgctgctgctggctgttggctgctccctggctgtgaggcagctccagaatcagggcaggtcgacaggaagcttgggctctgtggcccctccacccggcggacactcccacggccctggcgtataccaccacggtgccatcatcagccctgcaggccgagagctgcttgttgccgggggcaacgtcgtggatgctggagttggagctgcattgtgcctggcagtggtgcatcctcatgccacggggctaggtgccatgttttggggcctcttccacgatagctcctcaggcaattccacggccctgacatcaggcccagcacagaccctggcccccggcctggggctgcccgcggctctgcccaccctgcacctgctgcatgcacgcttcggccgcctgccctggccacgcctgctagtgggccccaccacgctggctcaggagggcttcctggtggacacacccctggcaagggctctggtggctcggggcacagaaggcctctgtccactactttgccatgctgatgggacacccctgggcgctggggcccgagccaccaacccacaactggcagctgtgcttcgcagcgcagccctcgctcccacctcagaccttgctggggatgctctactgagtctactggcgggagacctgggggtggaggtgccctcggctgtgcccaggcccactttggaaccagcagagcagctacctgtgccccagggcatcctgttcaccacccccagtccctcagctggcccagaactgctggcactgttggaggcagccctgcgctccggggcgcccatccctgacccctgcccaccgttcctgcagactgctgtgagccccgagagcagtgccctggccgccgtggacagcagcggctctgtgctccttctcacctcctcgctcaactgctcctttggctctgcacacctgtccccaagcactggggttctgctcagcaacctggtggccaagtctaccactagtgcctgggcctgccccctcatcctccgtggcagcctggatgacacagaggctgatgtgttggggcttgtggcttcagggacccctgatgtggccagggccatgactcacaccctactcaggcatctggcagcaaggccccctacccaggcccagcaccagcatcaggtgtcccccatgcctgctgccccttccaggggttctaacaggatgggggtgggtctggcagaaggcagagttatctgaagcatgggggcaggagcagagcagacacagcagcaatggagtgtgcacccgcagggtgtggtgcctcacacctgtaatctcagcactttgggtggtcaaggcaggagaatcacttgaacccgagaggtggaggttgcagtgaaccaagatcgcaccattgcaaccccacctgggcaacaagagggaaaccctgtctaaaaaaaaaaaaaaaaaaaaggatttattatgtgctcactgctggctcaggccccaacctctggccttttaagttacctagacttgagttctggcatccagagctaacaatcattcttcagatcacccacaccggatggaatctctagctattttatcagctaagaaaatcagggtaataacgaaaaagcagtagggcctggggctagcactgagttcagatccagctttcaggaggacagtggaaagagtgcagagcctctgcctaggccctgggccccacgaagcaggacaggcagagcccagggtactgttggcatctctgtccttcccttcaggacaccccttacctatctgcctcaaccagactgggtacaaaataaagatcaagtctcccggaaaaaaaaacagacacagcaaaacacggcccaccagacacacaag

SEQ ID NO: 461833 - DNA, 5273 bp, Homo sapiens
gcagggttgatgttcatgggtgattgatcatcctgtagcgacggtggtattgactgttccccagaggacaaggagtgtgttcttataatggacatcatgattgggattgtctttattaaactttgtcaggagagtaaagatcaatgtggccacatgttgtggctcatgcctgtaatcccaacactgtaatcccagcactgtaatcccagcctgtaatcccaggctgaggtgggcggatcacctgaggttgggagttcgagaccagcctgaccaacatggagaaaccccgtctctactaaaaatacaaaattagccgggcatggtggcgcatgtctttaattccagctactcaggaggctgaggcaggagaaacgcttgaacccgagaggcggaggttgcagtgagctgagattgcgccattgcactccagcctgggcaacaagagtgaaactccatctcaaaagaaaaaaaaaagaaaacaaaacaaaaaaagaaaaaaccaataatggatgctcttaaactgatttaagcacgcttccatggtcagaagccttatggttgccacagggtattaggagcatggagaccaataatggatgtccttgttctgatttgaggatgcctccaaggtcacatactctgtttgcaccacgcttaggaaggagcgtgaagaccaaggggagtaatagtcaaagtccttacctttgtttgggtggtttgtttaagagtaatcaacgtattatttaaaagtgtgaaatacagtcaaagatggccaatgttattccagtgatatgggagtgacatgaagtattatattgatgatgcatatataaaaaacaggatagttaatgaaacacccaatgtttgagtgattctgtatactgatagggaatatcaagagtgttactgggttttgtgaatcacgggccttgaaagtattattaatgaataaatgacataatcaatagacaaggtgatcctatgaatatacaatgtgtttgcttttggtctttgggtttgttcacttcactgtattattataattggatcaatgaaataatttatacgtatacatgtacgtatatgaaggggatgaagtattgtccaattataaaataagtggtgaggcaagatgtattattattattatattaaagcattatattaaagctttaatatattaaataaaaatctaatattaatatataattaatgcaatatttaatatatattaaatatgataacatattaaaatattatattaaagcattgaagtcctaagggaaataaatggtaccccactgtaacgtctttgactaaggatgatacaggtggtagttatagataatggtcaacctctgggtcaaggaaagttgcacaaagtgttcattttcttaagagaaaatgaaataattatccttcagatagtgatttctcaaatgttttcctaaagggaagatgataaacacagatcatggaggactgttttatctgtttgtgatctgccgtcctctgtgagcctcaggatggatgtttgccagccgattccatggttacaagctctatagctgcatctatgtgttaggagcatgaagaccaataatggatgcactgagctgattatgaatttagccctgatgaagacttgtgttgctgtcatgatatgaaagattccagtaatgaacgcacttgagttgattcaagcacgcttccatggtcatgagctctgtggttgcatctgtgtgttaggagcatgcagaccaatagtgataatctcgaggtgatttatgcattcttccatggccaccagccttatgattgcatctgtgcgtcacagcttagagatcaataatggatgcaacaagctctttgaatcattctgttgggatcaagattgttgtgttccctctgtttggaaagagaccaagaatggatacgctcaggtgatttaagcagtcttccatggccacgagctctgtggttgcctctgtatattaagagcacagagattaaagtgagtaatggctgacattcttttcttggtttcagtatttcttttatcttaagattattcactatattattaaaaagcatgaaatacaatgaatgcaattataacccagtaataaatatgagatgtatgaaatattatatcaattaatgcatatataaaaaataggatagttaatgaaatttatgttgatatgagaataattctatatagaaattagggatataaggactcttcttgagtttttgtgaataataatactataattttatgattcaatgaattaatcaataaacaaatgtaggtgacaatagagcaaaagggccaatcctagatcagtgatgactactgttggtgtatgagtcatatacgatgaatacatgtctgaaattctgaggtccaatgtgaaagagatgtagctcatttactctggtttaagtgaccctgtagccagttgtcaggaatatacaaggatcttggttttggtcttttcattctatgcagaggatgtcttttttttttttttttttttttttttttttgcgctgttttctctgatttatatttctcagaatggacccactcaagctgacttcagaattcctccttggtcacaagctttttgattgcatgtctgcattaggagcctagagaacaatgtaatagctaaagttcttatcttgttttgcatagtttgtttatgggcagtcactgtattattaaaaagtgtgaaatataatcaaagaaggtgagctgtagcttagtaataagcatgggattaatatgagatattatttttttagtgtatacatgaaatactacaattattattaacataagagatattgaagtgagaatggttttaagtacatattagggatataaatctcttgcatttttgtgaatcacagagttttaaaattataattattaaattaatcaataaataacttagaaatgaattgaggaaaagtgggccctcctggatcaatgataaaacttgctggcatatgaatcttggataatggatgatacgtgtgtggaactctgaggtccaacacaaaagaaaagtgattttttttcatgcactttcattctattattgtaatcggatcaataaaataagtaaatcaagataaaatagatgaggcattgtccaaatatagaaatatgtggcaaggcaagaagtactattactatatgttgaaaatatgaaattcaatgagaaattaatgttgaccaacttggtgatttttcataaagccccgcagcaaggcatctggaaagctcctttcctgctcctgacagtcaccccgaacggcatgtttccaaatccacagaacatatgggctgcagagctcagagccttgctcctggcccagccaacaggatgctctcttctttccctggcccagtggctgtcagagcctcagatggaagagccagcgggaagcccccggcccacctggctgtatgggacattgacccggcacagggagaagacccagggggatgagcaatccatcagtaagtcctatcagcgtgacaccgtgaatgcctctcctcctcgcttccttccagttgcccctgcctggtcacaggcctcatcctccctctctggcccaattggatgccctctgcttgcttgcctcgtctctgactgtatcctgtgggtgacatgcatgcatacccggaccagcgtgaggattcagagataaagtaccttgcactggttctggcacataatgagtgctcaataatgtttttagatattatttatcctagaaaataatagatttttctgagatttaaaaacttattcacataggattataaatagtatttttatactagaattttaatgtatttctatgattacttcacttttgtcattcttaattttgtatgtgcatactttatctctttttcattagatgacctagaagaatatctattttagaggtttctcaaagaatctgttcttgggataacttgtcagttcaactggtttttgtgtgcctgtgttcaaattaaataatatctgtctttattgatttctttcttctgctttctttaagtttgttttatggatttgtccatatatgccctattgttattcttctttaataatgaaaatatttcatggtatgaacttgcttctgttcacaattttgactgcattttcatgtgtcttaatatgtggtcttcagaacattaaaatatttgttataaggcttcttgtttcttcttgttattggaagaaatgattatctgagttaaatgttcaaaactagagctgattttaaaaaattaatttctaattttttaaagttgtaagttgtttatacttttaattcaattgtggttatcttttattgtggcttgagaatgtggacacatacattctactttgggggaatttattgatgccttttttgtgcataatataattgattttgtaaatgatttttgtggacatttaaaagtaggatgtacttgtttataaggtatggattttgatgtaaagacatttagttttattagctttttagtctttatttggattttcttagtaaagaattacataatctataagcaaccgtattttgaatctcaatctaagagtttactggatgtacctggtttttgtttgtttcattacattggttggaactttttggacggtgacctaatgttgatgagatgaaggggcttctttcctgtttttctcatgttctgttaagtttgttgttgcttctagatttgaggtatgttcatcactgacttcttacttatttgatatttttaggactggaagagttttggatacgatgtttctattctttttccttgttttggtgctattttatttctaatgcaaatgttcatgaatgctatgtcattgttgtggattataccttccccctcagagaggtgtttaatgacctgaaatcacagaagcacatctgttttcttttcatttgtgttcctaagctaggtagcctcactttctcatgtaattgtttctgcaaagtgttgtttgaaagttgaactggagacttgcatgttccaaagaattttgctcctcgagagctcaatcttccaggcaatttctaacattccatggatgttctttagttttgttcttttcaaacactcagtcgactgccttaaattcaattatcaaggccaaggactggccacgttgggtccgcctaacgatgtccatgtttatactaatttcttaagtatataggagatc

SEQ ID NO: 461834 - DNA, 1999 bp, Homo sapiens
gcagggttgatgttcatgggtgattgatcatcctgtagcgacggtggtattgactgttccccagaggacaaggagtgtgttcttataatggacatcatgattgggattgtctttattaaactttgtcaggagagtaaagatcaatgtggccacatgttgtggctcatgcctgtaatcccaacactgtaatcccagcactgtaatcccagcctgtaatcccaggctgaggtgggcggatcacctgaggttgggagttcgagaccagcctgaccaacatggagaaaccccgtctctactaaaaatacaaaattagccgggcatggtggcgcatgtctttaattccagctactcaggaggctgaggcaggagaaacgcttgaacccgagaggcggaggttgcagtgagctgagattgcgccattgcactccagcctgggcaacaagagtgaaactccatctcaaaagaaaaaaaaaagaaaacaaaacaaaaaaagaaaaaaccaataatggatgctcttaaactgatttaagcacgcttccatggtcagaagccttatggttgccacagggtattaggagcatggagaccaataatggatgtccttgttctgatttgaggatgcctccaaggtcacatactctgtttgcaccacgcttaggaaggagcgtgaagaccaaggggagtaatagtcaaagtccttacctttgtttgggtggtttgtttaagagtaatcaacgtattatttaaaagtgtgaaatacagtcaaagatggccaatgttattccagtgatatgggagtgacatgaagtattatattgatgatgcatatataaaaaacaggatagttaatgaaacacccaatgtttgagtgattctgtatactgatagggaatatcaagagtgttactgggttttgtgaatcacgggccttgaaagtattattaatgaataaatgacataatcaatagacaaggtgatcctatgaatatacaatgtgtttgcttttggtctttgggtttgttcacttcactgtattattataattggatcaatgaaataatttatacgtatacatgtacgtatatgaaggggatgaagtattgtccaattataaaataagtggtgaggcaagatgtattattattattatattaaagcattatattaaagctttaatatattaaataaaaatctaatattaatatataattaatgcaatatttaatatatattaaatatgataacatattaaaatattatattaaagcattgaagtcctaagggaaataaatggtaccccactgtaacgtctttgactaaggatgatacaggtggtagttatagataatggtcaacctctgggtcaaggaaagttgcacaaagtgttcattttcttaagagaaaatgaaataattatccttcagatagtgatttctcaaatgttttcctaaagggaagatgataaacacagatcatggaggactgttttatctgtttgtgatctgccgtcctctgtgagcctcaggatggatgtttgccagccgattccatggttacaagctctatagctgcatctatgtgttaggagcatgaagaccaatgtgggtaatcgttaatgctccttcttgttttgaccattttaaaatgttatttgctatattattaaaaagtattaaacacaataaaagaaggggaaatatgcaatatttaaaatctggattaaaaactttaggttaattaatgcatatgtgaaacattgagctcagttaatgaaagaaatatggtcttcgtggaaatgattatatggatgaatgttagggatattcaagaatcatattctttttttgaagacttaggtgtatttccttgttagtgaattagtcaacaaacaaatttagatggtaatagagaaagagggctgatcctggaccagtgatggtgactggtggtgtgtgagtcatgcacagtgaatatcatgtgtctggaactctgaggtcca

SEQ ID NO: 461835 - DNA, 3520 bp, Homo sapiens
taacggtttgtggatgttttaattttacttttacgtgataacctgcaataactacacagatgcatgcatttttgtgcttatttcttttctctcttccagcatcctctgcttgtgtttggcccggcacttcctggcagaatggtgggcccccaggtcctgatagcggtcctggtcttgagccgctcctggataatattgacgatttcttgatcgactttgtagtccctcctccactgcatttcggcttcatatatgcacagtgtttcacgtgtccatgtgaagacactgatgcccagcacgcggcagtactgccggtggtagtagtaatacctgttctttgcgtgctgccactctataaactctcacgagggtcgccggtcggtccactaggaggtcgaaggccttcatcaggtagacgacggggttgggcagccaagaacttcataatcagcccttttctattctcacagaatagaagttgtgtcaataacaaatggaaatcactgagctccaaaattcagctgccctaacctggctgcttgtccctatcagagattttagaatgttttccccttcagatgaatttcagtttcactcaatcctaccagtgtttgatgacaacactcatggaaaactaatggtaaattaatgtctgccttccaaagtacgtggttgagttcactgtgtaaaaaaataatgataataatactaaaggcagccaaactgctgattggcagaattttttcccatcacttaaggcatttgagttgcagtgaggctggcgcacacaaatccttgatgtctagaccgcctttctccagctgctgtgtttactgcagaaaggttccatcctgggatgatcgcctggggggagttttcttcttgcgacacctagttcagctctgctgagcttttggattcccagcctttctcccaccacaacccggtggtcatgaagtctcacaggaagtgtgagggtgatataatgtgtgtaaatgcagattcagcttcgaggaaactttcgtctaataatgaactgaaccacattatggcatgctatctccaagcctactcagtgtaaagacgatgaggatgaagacctttaggatgaccaccttctacttaatgaacagtaaatatattttctcttttttatgattttcttaagaacatttcattttctctaactgtattttaagaatatgtaataaatacatgcaaatcaacttatcagtaaggcttctagtcaacagtatgctattagtattaatagttaagtttatggggagtcaaaagttatatgtagatttttagccaggtgtggtggtgcgtgcctatagtcctatctactgggaggctgaagcaggaggattgcttaagctgaggagtttgaggctgccatgagctatgattgtgccactgcactccagcctggacaacagtgcaagactctattaaaaatttttttttaaattatctgtggttttttgattccacataggagtggcatcccaaccctcacattattcaagggtcatctgtaaatgcattaaagatgttgagagccaggtttctcaccgccaaagaagttacaaataagaggaaggggggctacaatgaaccctgtcatgttggattggaatctgagctatcacagtatgaatttgttttttaacattttatgtatatacagttacagaaatatagatgtgcatggcttagtatacatatgtattatttcaagctctgttctctatgaggccctagaagcaatgacatccagtgacaataaacacactcagtgcccagatttttgtttctaaataaaaggaaccaggcctccctggagcagtgattgattccaggctcctaggcagggaaaacacaagaagagcctggaacatcttgaaatgcaagaaagtaaggaagtgctcatgaaaggatggggcaggtcacaagtgtgcaggagccaacctgaaagagctccccgtggccaagctgggacaatttgagcaataaaataatgatggtattataatccataaaataaatatccatgagtccatactcatataaacaagcaaacaaatagatgagaaaggacagtaattctccagatagaatttcaattacttataataataaatgaggaaatcatgataattaatgagggaaataaaaaatcaccattaggcaaacactacagtaataattattacaggcacaatctactaatagatgttaagatgactgggcaaaaatttgaggtgaatcaggatatttgcatagccttaaactatctctcccaagatatttattaattacaaaggtaaaaatagtaactttacagtgaagaaacccagcagacacaactttaaccaggcgaccaaggttaacatcaccagtggcaggacatagcagcatcctatcccactaacaatatgcattgagggtttattaccttggtgatattcttcgaaggatggataacctacatttaatcttgagaaaacatcagataaactccaaatgagggagattctacaaagtaactgaccagtactcctcaaaaatgtcaagatcatgaaagacaaggaaagatagaggaactatcacagatgggagaagaccacagacctgaccactaagtgcagtgtgggatcctgagtggctcctgaagaagaaagcagaagttagataactagatagacaattagtgacaatttaataagctctgtcagttatatagtagtattgcctttatgttaatttcctgatttttttttttttttgagacggagtctggctgttacccaagctggatgtggtggcaccatcttggcttactgcaacctccacctcctgaattcaagcgattctcctgcctcagcctcccgagtagctgggattacagtgaaggcactgcactctcctttcctggctcctggtcctcactctcccctcaccctccacatggatgctgcccagagacactcctccacttcccagctgcctgctggggcatttccactgaaaagttccaccattacttcatgctccatggaaccttcaggagctctcctgaaaagcagcctctttccatattgttcctatttctgatgctccaaggcacccagcctggaagcctcagctttgcctttgccagttccactccctcattgcacacatctggtcaccaagacatctggtcttccaaacaagagcccttcccttcccttttcccttcccttcccttcccttttcccttcccttccccttttccttccctgtgcttcccttccccttctccttcccttccccttctcctgccttccctccctccctcctttctctttttcttcccttccctttttccttcccttccttttccctcccttccccgtttccttcccttcccttccctttttccttcccttcccctttttcttcccttccccttttccttaccttctgcttttccttcccttccccttctctctctccttccttccttcattag

SEQ ID NO: 461836 - DNA, 1373 bp, Homo sapiens
gaatcttgttgcctgaactattttaaattaaggagccagatctttttagtgaggctatcctgacaagacttgatctaacttcgtttttattggtcataacagtccaattatattcttggccaattttgtccaacggacaagaaaaaagcaaagtcaacgacaccattatcttgtcaagatcagatggttttactattgtggcagaagcgagaaaactttgtttattgaaaaaaaaagaaaaagaaagcaagaaaaaaagatactatggggtcaagtgtaactccatggaaatgccacgtctgctcttcagtgaagaagctggtttagagtctcacagaaaacttttgactgtatttatttattgttgcaaaaaagacgcttttttattgctgccctcatttgtcagctaagtattttttcttataaaatccagccccggttacatataatcatctgtatcttatcatgattcctgtaggtaaaagtacaagacgacctctagatgtcttttctttctatgaaaggagctgctatgtacacatgtgcacacacacacaactgggaatcaacaatgagtttattgttcatggtagattaaaattaagcttgcataaaggttgggctaagtggtcctggactacagactctgttgccttgaatataacagtacaatttgtcaattactctgcaccaggctaaagtgagtaaaatctatttgaaggtatcttctttgtaaacatttgtcagattctaatttttctttttgtattaaaattcaactatagatgtatgtgaaacaaaataaatggagatagtttttctcccacagacagaggtgtctttgaatgtgcgctaatgattatcttcaattgtcatcacgtcagagaaaaatcttcaggggtgctaatcctgtcgcatcagttgatcatactaacgaaaaagtgttcttacacattgtattactgcattgtggtaatagcttctataaaatctgccatagctggattatgcagctttgcaaaaattctactagattttattctaactcatattagctttgtcctatcaacttctggaatttatctaattattgcttttaaaagtttcctgcctttcaacgtttccctgctatgcaaaacctttcccagaccttggtttcttaaaagaaagatgttgctacagttcccaattctttcttattacaggctcaggtgtacagctgctgctgctcctcagcagtccatcccctggacagagatggcctctcaggacctggagcagagctgtaggaagctgccctctcttatggtagatgtggcccatcacaatatacctgctgcctggacaaaataaccagaacattaattcatagc

SEQ ID NO: 461837 - DNA, 1930 bp, Homo sapiens
ggacatcttgagctgaagcagggttttgagccactgctgctgctgccattgtcaccatggtctcagctctgcggggagcacccctgatcagggtgcactcaagccctgtttcttctccttctgtgagtggaccacggaggctggtgagctgcctgtcatcccaaagctcagctctgagccagagtggtggtggctccacctctgccgccggcatagaagccaggagcagggctctcagaaggcggtggtgcccagctgggatcatgttgttggccctggtctgtctgctcagctgcctgctaccctccagtgaggccaagctctacggtcgttgtgaactggccagagtgctacatgacttcgggctggacggataccggggatacagcctggctgactgggtctgccttgcttatttcacaagcggtttcaacgcagctgctttggactacgaggctgatgggagcaccaacaacgggatcttccagatcaacagccggaggtggtgcagcaacctcaccccgaacgtccccaacgtgtgccggatgtactgctcagatttgttgaatcctaatctcaaggataccgttatctgtgccatgaagataacccaagagcctcagggtctgggttactgggaggcctggaggcatcactgccagggaaaagacctcactgaatgggtggatggctgtgacttctaggatggacggaaccatgcacagcaggctgggaaatgtggtttggttcctgacctaggcttgggaagacaagccagcgaataaaggatggttgaacgtgaatatggctctcagctctcagtgtgtctgcaggtgccatgtcagagccagagcacctcctccatggtccaaccatccatctttgaaggattcgtgccttctacttcaacttcagacttctgttgcctgcctggcctggttgcttcactgggtcccattcagcttgtctgggagaggagcccaggaataggtgtagtgaagctcttggaaccaaagagaacattgttaaaggatttgggggctgtgagcagtgatgatggccacagtctcttcaagatggggctggactgggatcaggcctggacaagggaccctgaaggcctgggctgggtggttgaccaggagcaggtgaagacggagctggagaaggagtatttagggaagagggccctgatcaaagccagggaggcctcccttgttatgagggctacagagtgtgcaggcccatctgaatgtagaggccaggggagcctctatgttcagagctcagctcctgaaggacatgctcaggacgattgcaatggcttcctaagagtgttcgtgtctctaaccttggtccttgcaactccacctcctccctcagagtgagctttctatcttgtttctgccttgcatcctaggcccaatagcttttcttatcttatagggttaaagttcaagttccttgggttggtatacaaggtctttcatgaccaagactcagctgactgctacagattcaactctcacctgttcggaaacttttgctctagctagtttgtgtccttggcggtgccaaaggtttaaaaaaattatgggagaaaacaacactgatcaaatgctatctatccttttattttttcttctttctgtaaattgaaaaatgacagtcattatgtgattttaggagaagaaatgttggttgcattttgtgctgctgtacatccccaagatcccgtgtctggggtcatgtgccattaattaattaactaattaattgattgatccaatcctctgaagtcactgagaattcaaccttgtggtttggacttgtgattgctccaaactcctagccttggtgtcatcttttgggtcactcctgaaaatgggacaactccctgagtctcccttctccaccagacttccccagg

SEQ ID NO: 461838 - DNA, 2017 bp, Homo sapiens
ggacctcgaaggggcagttatggtgggagccatccaaggtgtcacagggctgggcttttcatttaacaaatttgttctgatggatgtgtatagaatagcttggaagagtggttgagacatgatacaagaagaccatgaaggaagccaggatggaggggtgcactcaagccctgtttcttctccttctgtgagtggaccacggaggctggtgagctgcctgtcatcccaaagctcagctctgagccagagtggtggtggctccacctctgccgccggcatagaagccaggagcagggctctcagaaggcggtggtgcccagctgggatcatgttgttggccctggtctgtctgctcagctgcctgctaccctccagtgaggccaagctctacggtcgttgtgaactggccagagtgctacatgacttcgggctggacggataccggggatacagcctggctgactgcctatgctctgccctatgcaggggtctgccttgcttatttcacaagcggtttcaacgcagctgctttggactacgaggctgatgggagcaccaacaacgggatcttccagatcaacagccggaggtggtgcagcaacctcaccccgaacgtccccaacgtgtgccggatgtactgctcagatttgttgaatcctaatctcaaggataccgttatctgtgccatgaagataacccaagagcctcagggtctgggttactgggaggcctggaggcatcactgccagggaaaagacctcactgaatgggtggatggctgtgacttctaggatggacggaaccatgcacagcaggctgggaaatgtggtttggttcctgacctaggcttgggaagacaagccagcgaataaaggatggttgaacgtgaatatggctctcagctctcagtgtgtctgcaggtgccatgtcagagccagagcacctcctccatggtccaaccatccatctttgaaggattcgtgccttctacttcaacttcagacttctgttgcctgcctggcctggttgcttcactgggtcccattcagcttgtctgggagaggagcccaggaataggtgtagtgaagctcttggaaccaaagagaacattgttaaaggatttgggggctgtgagcagtgatgatggccacagtctcttcaagatggggctggactgggatcaggcctggacaagggaccctgaaggcctgggctgggtggttgaccaggagcaggtgaagacggagctggagaaggagtatttagggaagagggccctgatcaaagccagggaggcctcccttgttatgagggctacagagtgtgcaggcccatctgaatgtagaggccaggggagcctctatgttcagagctcagctcctgaaggacatgctcaggacgattgcaatggcttcctaagagtgttcgtgtctctaaccttggtccttgcaactccacctcctccctcagagtgagctttctatcttgtttctgccttgcatcctaggcccaatagcttttcttatcttatagggttaaagttcaagttccttgggttggtatacaaggtctttcatgaccaagactcagctgactgctacagattcaactctcacctgttcggaaacttttgctctagctagtttgtgtccttggcggtgccaaaggtttaaaaaaattatgggagaaaacaacactgatcaaatgctatctatccttttattttttcttctttctgtaaattgaaaaatgacagtcattatgtgattttaggagaagaaatgttggttgcattttgtgctgctgtacatccccaagatcccgtgtctggggtcatgtgccattaattaattaactaattaattgattgatccaatcctctgaagtcactgagaattcaaccttgtggtttggacttgtgattgctccaaactcctagccttggtgtcatcttttgggtcactcctgaaaatgggacaactccctgagtctcccttctccaccagacttccccagg

SEQ ID NO: 461839 - DNA, 987 bp, Homo sapiens
gttcctaacatggtcttgttcctaccagtctgtggcccgggggttggagacccctgtatcagtggacggtctctatttgtcagcagttccatgttaacaagtaagagcatgccttttgatactacacaagtgttttccccaacttgttctcccaggaaacttctactgggtcttcaaaatgtaattcaaattgtcacttcttttccaaatacctctatcccactcataccaaagcagcaggccaagggaaacagccatgaggcttcagcttcaacaacaggacctcaaaaacaggagacgctcaggaccaaccggggcattggcctgagcccagctgcctccaggcaattctcctcctgccctgatggctttcaaaagagaaatgcctgggagcatcacgacctgtgcagactccccagcatcataacaggaaggtcccacgatcacgagcacattgccttcagcatccagcactgaatatggtgaattgcactctgaagagcttcctaagcttgtaagaaagtgattctgaaaagctcaacattttggtagaatggagagatttgacattgcttctgctccaaaagcaaaagacttggcccagaagctaaaaatcacctgccatcttggaaataatccctggaggatcaagtccaagggggagaagtggactggtcaccccagccgaggttatctaagttccatggcttactccagacaggaagccccacatcctgcagcctcattcataatccataatagatggtgttcttggatcccaagttgagaaaagaagttaactatgcacattttggcaaagatgcagaccagggtttgatctaagcagctatcacataaaataataaagtacaaatggaaatggcaaaaatgtgcccatatcacagtgcagagtgtgccaaagctgaccgaaaaattatgcatttttcatgtttcaataaacgtacttaactggcattttgtgggaca

SEQ ID NO: 461840 - DNA, 898 bp, Homo sapiens
gttcctaacatggtcttgttcctaccagtctgtggcccgggggttggagacccctgtatcagtggacggtctctatttgtcagcagttccatgttaacaagtaagagcatgccttttgatactacacaagtgttttccccaacttgttctcccaggaaacttctactgggtcttcaaaatgtaattcaaattgtcacttcttttccaaatacctctatcccactcataccaaagcagcaggccaagggaaacagccatgaggcttcagcttcaacaacaggacctcaaaaacaggagacgctcaggaccaaccggggcattggcctgagcccagctgcctccaggcaattctcctcctgccctgatggctttcaaaagagaaatgcctgggagcatcacgacctgtgcagactccccagcatcataacaggaaggtcccacgatcacgagcacattgccttcagcatccagcactgaatatggtgaattgcactctgaagagcttcctaagcttgtaagaaagtgattctgaaaagctcaacattttggtagaatggagagatttgacattgcttctgctccaaaagcaaaagacttggtcatcctctggttacttagcttaggtgactgcagcaagagatgtccagagtctcaacattgggtgattgaagagcagaaagactggcatgaaatatctgtcaacatagctcaacaaggaatcaggaagagagagtcttcaagatggctgactagaggcatctggtacttgcctcctccacaaagaagaaccaaaatagcaagtatattattacacttcgaatagatcatctaagaaagaacactggaattcaaccaagaagtggcaataaatacctaaggcaaggaaggagagggaaat

SEQ ID NO: 461841 - DNA, 833 bp, Homo sapiens
gttcctaacatggtcttgttcctaccagtctgtggcccgggggttggagacccctgtatcagtggacggtctctatttgtcagcagttccatgttaacaagtaagagcatgccttttgatactacacaagtgttttccccaacttgttctcccaggaaacttctactgggtcttcaaaatgtaattcaaattgtcacttcttttccaaatacctctatcccactcataccaaagcagcaggccaagggaaacagccatgaggcttcagcttcaacaacaggacctcaaaaacaggagacgctcaggaccaaccggggcattggcctgagcccagctgcctccaggcaattctcctcctgccctgatggctttcaaaagagaaatgcctgggagcatcacgacctgtgcagactccccagcatcataacaggaaggtcccacgatcacgagcacattgccttcagcatccagcactgaatatggtgaattgcactctgaagagcttcctaagcttgtaagaaagtgattctgaaaagctcaacattttggtagaatggagagatttgacattgcttctgctccaaaagcaaaagacttgggaagggcaccctgggagttgagaacatccaccacagagaggtaagttcctacttggcagtttgccgcagcaattaccacctcgtgctccatcactacctttccactccgtctcccacccttacaccaggcttgtgattcaaaggccttcaggccaggggtaacaaactatggcctgtgggccaaatctaacccactgactgttttccaaataaagttccactggaacacaggca

SEQ ID NO: 461842 - DNA, 975 bp, Homo sapiens
ccctaacttacaatcaccgaacccatgaggtcaccctatctcccagccctccttcaccagatacaggcagaaaccctcaagccagctgagcaaggctttacggaggcaagggagttagccataagactatctgtggttgagcattccaggcaggcagcagcaagagccaccacgaaggccagaaggcagggtcatgcctggctcgctccagcaacacgaaaaaggggtggagtgtggagagccaagcaaaaaagatgaagtcacataagtagcagaagacccggttgtacaaggcctggtgtgccaccgtaaaaacatggactcctcctcggaaatatggagccactgggggagtttgagcaggggaagaagatctaacaaagaactttcacacttcctgtgggagtgcaaattggtggcgtatccagagttgtttgttcctccggatgggttcgtggtcccgctgacttcaggagtgaagcacagacctacatatcctattacatctttcttggaatgcagaagccatacaacagaaaccacagtggcttccattttgaagagccttttgcagggacaagggcccatttatatattcaaactgatggtcagcaaagctgtggttttcccacggtcacacggagtgtccacaatagagcccaaccaagaagaattccaatctccatcacaccccactgcctgcatgcaggactccaggtgggcacggtgtatcagtagggcacattcagcagctggtgatgggggcgtggcagattgtgttgaagtggcttaaagcactaaggaggatttattgagttatataacgtgaagccctgaagcagtcagtcttctggattggttgataggggctcaatggtgtcatcacagtcccaattttgtcctactttgccatccacaaaggccatagtaggttggatggcaccctgatacagtttggctgtgtccccacccaaa

SEQ ID NO: 461843 - DNA, 2807 bp, Homo sapiens
aaaagggactggaaatgaacgtcgcggggttatcagcgccgatctgtcagcggcaactcgcgcggccgcaggctcgtccgctgcaggagccgtgatatatgtctcgctccctttcgcttacagaaaggatttcttccgacagacgtgaccccagaaggctgccgagggagactttaggacaagaggcgttgtttttgtgagaatgaatttttatactttaccccgaccccaccccctaccccccgcccaggtaaatccaagtaaatgattttctgaaggtcggtctcctagaaagcgtttaggctctggttttttgttttgtttctattttcgtgttttcccagttagggaaggaagaggagcctgtgcagagttgaactggggtggagaggtgccttgtaaagtatggtttccagagatggtgagacctcgtagctaagcgttgtttcctctgcacgtaactgtgagttgtgaacttgtggctcctgggggagcgggacagggcctggcagtgcgggggagggggcaaggaattcaggaagttggcgagaattcttcgtttttcattcttcgttgtaaattgcttctaaacacttctgaattttaaattgctaccgagaaggtccagaaaccgttctcatccaatttagtcacttttattacgttccactttgcctcccccaatcactgcggcggctcccagtttcagcgtggccgcatttggaaaaggctgaaggtagaaaactctggaatggagaggctggcgactggagcaggatccaggggctttaaattttaacctgaatgcgatcgaatgcgcgactcccagaagagatagccaggcgtccgcccggccgctcaacccccgccaggactcggaatgccttgcttttggttcttttctacaaggatgtctgcgtggatatccctggacactcgataccccccggggacctgcttttcccgcagctccgcagacgcggcgggagggcgcgctggccccggcgctgctgggacagaggtgagcagcggggtggacattgaccgattcgacaacgttcgggctctaagggctcgggaagggacccggcattttaccctccagattcccaatctatttttaaaaataatgttcaaaacatatgggaaaaataagtgattgctccttttcatggtcacagattgtatttattttttcagactggttttccaacctaacgagggaatgggtagtgaatgttgttgttgttgttgttgtttatgttggttaatttcgaaataaaactgtttaactcgtacagttgattcagacagaaaaccaggctgcctgacgtctccaatgtgccttttccccaatgcatctttggcgctagggaccgctctggggaagacaagcatgttttcaaagccactcccatgagccccagacccgcgcgtggagcttcctgggcgcgccccagctggtctggaaggccggcaaattaggaagtttggagggaagaggtgcaccccaaactagggagaaacccaagagctggggagaaggcccccactagtgtccaaagtacgcggacagctcttaaaagttattgttttcttcgtggggatatatattttttcttttccttcctttcctttttttttttctttcaccctcgcatgtctcctctttcgggatttgctaatcttgaacgaaactgttctctccggactgtttcgacccaatgagcggcccctcctgggcaagtcgtcccccttaccctcacagagggctggctcccgggcgcggcctgtccccagggttgatttatttcggccgcgccacaccactattcgcgattcgaatccacccagaacactgcagccaattgggcagggggcgggggcttggctgccaaacgggaagggtgtttggggacccagtcttgcgccgcttccggaggagcggcgagacccagcaaggacccgcgtccccgtgcacctccacccccgcaaactcacgctcattttacgatcctgtcacaaaactggctgcttcggcgatgtttcataaggaaaaagaatgcatttctgacttaaaacatatttttaacttagatttttaacagcccagatttatgaggccttctcgcttataccatatttcttccccgtctctgggacgcttttacccaagggacccggggtcacctcagagccccccacccctgccagcgtctggggccagtgaaacgtcaggtggtggcggcggaaacttgcaggtcgcccccacccccagcgccggctcccgccggcggccacttcggggaaggaccgcgcggagccagcgccggggtccccgggcggtcggaatcgaggcccggcgcgttgcgcaggccaggcccggcccggaggccccttgcccggcgcagcccccggccgacccccgtgcgccgccggcggccgccagcacggcgcggaggtgggctagcggcggcggcgcacgaaaggtcaccgcggtggcattcctctccgcgctgtttacgtgacttaatgtactcgctgcgccgcgggtaagttcgggctgcgataagggggcggccgggggagggtcgccgtaaaagccccacgccgggcgcctccagccctcccctcatccattaacctttttactttcttctccgctctctctccaagcctgttatctaggccacccaatgaccgacgaaagattttccctccctgcttctcccgtggccgctttaaaccaaataaatttagctattaagggccaagatgtctgacaaaagatcgaaaggtgtctttcc

SEQ ID NO: 461844 - DNA, 3102 bp, Homo sapiens
aaaagggactggaaatgaacgtcgcggggttatcagcgccgatctgtcagcggcaactcgcgcggccgcaggctcgtccgctgcaggagccgtgatatatgtctcgctccctttcgcttacagaaaggatttcttccgacagacgtgaccccagaaggctgccgagggagactttaggacaagaggcgttgtttttgtgagaatgaatttttatactttaccccgaccccaccccctaccccccgcccaggtaaatccaagtaaatgattttctgaaggtcggtctcctagaaagcgtttaggctctggttttttgttttgtttctattttcgtgttttcccagttagggaaggaagaggagcctgtgcagagttgaactggggtggagaggtgccttgtaaagtatggtttccagagatggtgagacctcgtagctaagcgttgtttcctctgcacgtaactgtgagttgtgaacttgtggctcctgggggagcgggacagggcctggcagtgcgggggagggggcaaggaattcaggaagttggcgagaattcttcgtttttcattcttcgttgtaaattgcttctaaacacttctgaattttaaattgctaccgagaaggtccagaaaccgttctcatccaatttagtcacttttattacgttccactttgcctcccccaatcactgcggcggctcccagtttcagcgtggccgcatttggaaaaggctgaaggtagaaaactctggaatggagaggctggcgactggagcaggatccaggggctttaaattttaacctgaatgcgatcgaatgcgcgactcccagaagagatagccaggcgtccgcccggccgctcaacccccgccaggactcggaatgccttgcttttggttcttttcgtgagttccgaccaaatgtttaagtggactgggttttgcagaagctcatttgtaagcactgacggaaatgggttgtgggcatttgatttcctttgattccaacgttttgaaataatgtttctcggatttgctattcgaagcaattttctaaaaactcatatcttatttgctaaaaataaactctttggctcagtttgtgtccaggctgtgtacggcctccaaccctgagccccgaggagatcgagccctggcgcgagcctgatctctgtcctgtgtgtttctttgtatttgcaagtacaaggatgtctgcgtggatatccctggacactcgataccccccggggacctgcttttcccgcagctccgcagacgcggcgggagggcgcgctggccccggcgctgctgggacagaggtgagcagcggggtggacattgaccgattcgacaacgttcgggctctaagggctcgggaagggacccggcattttaccctccagattcccaatctatttttaaaaataatgttcaaaacatatgggaaaaataagtgattgctccttttcatggtcacagattgtatttattttttcagactggttttccaacctaacgagggaatgggtagtgaatgttgttgttgttgttgttgtttatgttggttaatttcgaaataaaactgtttaactcgtacagttgattcagacagaaaaccaggctgcctgacgtctccaatgtgccttttccccaatgcatctttggcgctagggaccgctctggggaagacaagcatgttttcaaagccactcccatgagccccagacccgcgcgtggagcttcctgggcgcgccccagctggtctggaaggccggcaaattaggaagtttggagggaagaggtgcaccccaaactagggagaaacccaagagctggggagaaggcccccactagtgtccaaagtacgcggacagctcttaaaagttattgttttcttcgtggggatatatattttttcttttccttcctttcctttttttttttctttcaccctcgcatgtctcctctttcgggatttgctaatcttgaacgaaactgttctctccggactgtttcgacccaatgagcggcccctcctgggcaagtcgtcccccttaccctcacagagggctggctcccgggcgcggcctgtccccagggttgatttatttcggccgcgccacaccactattcgcgattcgaatccacccagaacactgcagccaattgggcagggggcgggggcttggctgccaaacgggaagggtgtttggggacccagtcttgcgccgcttccggaggagcggcgagacccagcaaggacccgcgtccccgtgcacctccacccccgcaaactcacgctcattttacgatcctgtcacaaaactggctgcttcggcgatgtttcataaggaaaaagaatgcatttctgacttaaaacatatttttaacttagatttttaacagcccagatttatgaggccttctcgcttataccatatttcttccccgtctctgggacgcttttacccaagggacccggggtcacctcagagccccccacccctgccagcgtctggggccagtgaaacgtcaggtggtggcggcggaaacttgcaggtcgcccccacccccagcgccggctcccgccggcggccacttcggggaaggaccgcgcggagccagcgccggggtccccgggcggtcggaatcgaggcccggcgcgttgcgcaggccaggcccggcccggaggccccttgcccggcgcagcccccggccgacccccgtgcgccgccggcggccgccagcacggcgcggaggtgggctagcggcggcggcgcacgaaaggtcaccgcggtggcattcctctccgcgctgtttacgtgacttaatgtactcgctgcgccgcgggtaagttcgggctgcgataagggggcggccgggggagggtcgccgtaaaagccccacgccgggcgcctccagccctcccctcatccattaacctttttactttcttctccgctctctctccaagcctgttatctaggccacccaatgaccgacgaaagattttccctccctgcttctcccgtggccgctttaaaccaaataaatttagctattaagggccaagatgtctgacaaaagatcgaaaggtgtctttcc

SEQ ID NO: 461845 - DNA, 1095 bp, Homo sapiens
aaaagggactggaaatgaacgtcgcggggttatcagcgccgatctgtcagcggcaactcgcgcggccgcaggctcgtccgctgcaggagccgtgatatatgtctcgctccctttcgcttacagaaaggatttcttccgacagacgtgaccccagaaggctgccgagggagactttaggacaagaggcgttgtttttgtgagaatgaatttttatactttaccccgaccccaccccctaccccccgcccaggtaaatccaagtaaatgattttctgaaggtcggtctcctagaaagcgtttaggctctggttttttgttttgtttctattttcgtgttttcccagttagggaaggaagaggagcctgtgcagagttgaactggggtggagaggtgccttgtaaagtatggtttccagagatggtgagacctcgtagctaagcgttgtttcctctgcacgtaactgtgagttgtgaacttgtggctcctgggggagcgggacagggcctggcagtgcgggggagggggcaaggaattcaggaagttggcgagaattcttcgtttttcattcttcgttgtaaattgcttctaaacacttctgaattttaaattgctaccgagaaggtccagaaaccgttctcatccaatttagtcacttttattacgttccactttgcctcccccaatcactgcggcggctcccagtttcagcgtggccgcatttggaaaaggctgaaggtagaaaactctggaatggagaggctggcgactggagcaggatccaggggctttaaattttaacctgaatgcgatcgaatgcgcgactcccagaagagatagccaggcgtccgcccggccgctcaacccccgccaggactcggaatgccttgcttttggttcttttcgtgagttccgaccaaatgtttaagtggactgggttttgcagaagctcatttgtaagcactgacggaaatgggttgtgggcatttgatttcctttgattccaacgttttgaaataatgtttctcggatttgctattcgaagcaattttctaaaaactcatatcttatttgctaaaaataaactctttggctca

SEQ ID NO: 461846 - DNA, 2419 bp, Homo sapiens
aaaagggactggaaatgaacgtcgcggggttatcagcgccgatctgtcagcggcaactcgcgcggccgcaggctcgtccgctgcaggagccgtgatatatgtctcgctccctttcgcttacagaaaggatttcttccgacagacgtgaccccagaaggctgccgagggagactttaggacaagaggcgttgtttttttagggaaggaagaggagcctgtgcagagttgaactggggtggagaggtgccttgtaaagtatggtttccagagatggtgagacctcgtagctaagcgttgtttcctctgcacgtaacttttcagcgtggccgcatttggaaaaggctgaaggtagaaaactctggaatggagaggctggcgactggagcaggatccaggggctttaaattttaacctgaatgcgatcgaatgcgcgactcccagaagagatagccaggcgtccgcccggccgctcaacccccgccaggactcggaatgccttgcttttggttcttttctacaaggatgtctgcgtggatatccctggacactcgataccccccggggacctgcttttcccgcagctccgcagacgcggcgggagggcgcgctggccccggcgctgctgggacagaggtgagcagcggggtggacattgaccgattcgacaacgttcgggctctaagggctcgggaagggacccggcattttaccctccagattcccaatctatttttaaaaataatgttcaaaacatatgggaaaaataagtgattgctccttttcatggtcacagattgtatttattttttcagactggttttccaacctaacgagggaatgggtagtgaatgttgttgttgttgttgttgtttatgttggttaatttcgaaataaaactgtttaactcgtacagttgattcagacagaaaaccaggctgcctgacgtctccaatgtgccttttccccaatgcatctttggcgctagggaccgctctggggaagacaagcatgttttcaaagccactcccatgagccccagacccgcgcgtggagcttcctgggcgcgccccagctggtctggaaggccggcaaattaggaagtttggagggaagaggtgcaccccaaactagggagaaacccaagagctggggagaaggcccccactagtgtccaaagtacgcggacagctcttaaaagttattgttttcttcgtggggatatatattttttcttttccttcctttcctttttttttttctttcaccctcgcatgtctcctctttcgggatttgctaatcttgaacgaaactgttctctccggactgtttcgacccaatgagcggcccctcctgggcaagtcgtcccccttaccctcacagagggctggctcccgggcgcggcctgtccccagggttgatttatttcggccgcgccacaccactattcgcgattcgaatccacccagaacactgcagccaattgggcagggggcgggggcttggctgccaaacgggaagggtgtttggggacccagtcttgcgccgcttccggaggagcggcgagacccagcaaggacccgcgtccccgtgcacctccacccccgcaaactcacgctcattttacgatcctgtcacaaaactggctgcttcggcgatgtttcataaggaaaaagaatgcatttctgacttaaaacatatttttaacttagatttttaacagcccagatttatgaggccttctcgcttataccatatttcttccccgtctctgggacgcttttacccaagggacccggggtcacctcagagccccccacccctgccagcgtctggggccagtgaaacgtcaggtggtggcggcggaaacttgcaggtcgcccccacccccagcgccggctcccgccggcggccacttcggggaaggaccgcgcggagccagcgccggggtccccgggcggtcggaatcgaggcccggcgcgttgcgcaggccaggcccggcccggaggccccttgcccggcgcagcccccggccgacccccgtgcgccgccggcggccgccagcacggcgcggaggtgggctagcggcggcggcgcacgaaaggtcaccgcggtggcattcctctccgcgctgtttacgtgacttaatgtactcgctgcgccgcgggtaagttcgggctgcgataagggggcggccgggggagggtcgccgtaaaagccccacgccgggcgcctccagccctcccctcatccattaacctttttactttcttctccgctctctctccaagcctgttatctaggccacccaatgaccgacgaaagattttccctccctgcttctcccgtggccgctttaaaccaaataaatttagctattaagggccaagatgtctgacaaaagatcgaaaggtgtctttcc

SEQ ID NO: 461847 - DNA, 2595 bp, Homo sapiens
aaaagggactggaaatgaacgtcgcggggttatcagcgccgatctgtcagcggcaactcgcgcggccgcaggctcgtccgctgcaggagccgtgatatatgtctcgctccctttcgcttacagaaaggatttcttccgacagacgtgaccccagaaggctgccgagggagactttaggacaagaggcgttgttttttttcagcgtggccgcatttggaaaaggctgaaggtagaaaactctggaatggagaggctggcgactggagcaggatccaggggctttaaattttaacctgaatgcgatcgaatgcgcgactcccagaagagatagccaggcgtccgcccggccgctcaacccccgccaggactcggaatgccttgcttttggttcttttcgtgagttccgaccaaatgtttaagtggactgggttttgcagaagctcatttgtaagcactgacggaaatgggttgtgggcatttgatttcctttgattccaacgttttgaaataatgtttctcggatttgctattcgaagcaattttctaaaaactcatatcttatttgctaaaaataaactctttggctcagtttgtgtccaggctgtgtacggcctccaaccctgagccccgaggagatcgagccctggcgcgagcctgatctctgtcctgtgtgtttctttgtatttgcaagtacaaggatgtctgcgtggatatccctggacactcgataccccccggggacctgcttttcccgcagctccgcagacgcggcgggagggcgcgctggccccggcgctgctgggacagaggtgagcagcggggtggacattgaccgattcgacaacgttcgggctctaagggctcgggaagggacccggcattttaccctccagattcccaatctatttttaaaaataatgttcaaaacatatgggaaaaataagtgattgctccttttcatggtcacagattgtatttattttttcagactggttttccaacctaacgagggaatgggtagtgaatgttgttgttgttgttgttgtttatgttggttaatttcgaaataaaactgtttaactcgtacagttgattcagacagaaaaccaggctgcctgacgtctccaatgtgccttttccccaatgcatctttggcgctagggaccgctctggggaagacaagcatgttttcaaagccactcccatgagccccagacccgcgcgtggagcttcctgggcgcgccccagctggtctggaaggccggcaaattaggaagtttggagggaagaggtgcaccccaaactagggagaaacccaagagctggggagaaggcccccactagtgtccaaagtacgcggacagctcttaaaagttattgttttcttcgtggggatatatattttttcttttccttcctttcctttttttttttctttcaccctcgcatgtctcctctttcgggatttgctaatcttgaacgaaactgttctctccggactgtttcgacccaatgagcggcccctcctgggcaagtcgtcccccttaccctcacagagggctggctcccgggcgcggcctgtccccagggttgatttatttcggccgcgccacaccactattcgcgattcgaatccacccagaacactgcagccaattgggcagggggcgggggcttggctgccaaacgggaagggtgtttggggacccagtcttgcgccgcttccggaggagcggcgagacccagcaaggacccgcgtccccgtgcacctccacccccgcaaactcacgctcattttacgatcctgtcacaaaactggctgcttcggcgatgtttcataaggaaaaagaatgcatttctgacttaaaacatatttttaacttagatttttaacagcccagatttatgaggccttctcgcttataccatatttcttccccgtctctgggacgcttttacccaagggacccggggtcacctcagagccccccacccctgccagcgtctggggccagtgaaacgtcaggtggtggcggcggaaacttgcaggtcgcccccacccccagcgccggctcccgccggcggccacttcggggaaggaccgcgcggagccagcgccggggtccccgggcggtcggaatcgaggcccggcgcgttgcgcaggccaggcccggcccggaggccccttgcccggcgcagcccccggccgacccccgtgcgccgccggcggccgccagcacggcgcggaggtgggctagcggcggcggcgcacgaaaggtcaccgcggtggcattcctctccgcgctgtttacgtgacttaatgtactcgctgcgccgcgggtaagttcgggctgcgataagggggcggccgggggagggtcgccgtaaaagccccacgccgggcgcctccagccctcccctcatccattaacctttttactttcttctccgctctctctccaagcctgttatctaggccacccaatgaccgacgaaagattttccctccctgcttctcccgtggccgctttaaaccaaataaatttagctattaagggccaagatgtctgacaaaagatcgaaaggtgtctttcc

SEQ ID NO: 461848 - DNA, 2259 bp, Homo sapiens
aaaagggactggaaatgaacgtcgcggggttatcagcgccgatctgtcagcggcaactcgcgcggccgcaggctcgtccgctgcaggagccgtgatatatgtctcgctccctttcgcttacagaaaggatttcttccgacagacgtgaccccagaaggctgccgagggagactttaggacaagaggcgttgtttttttagggaaggaagaggagcctgtgcagagttgaactggggtggagaggtgccttgtaaagtatggtttccagagatgtttcagcgtggccgcatttggaaaaggctgaaggtagaaaactctggaatggagaggctggcgactggagcaggatccaggggctttaaattttaacctgaatgcgatcgaatgcgcgactcccagaagagatagccaggcgtccgcccggccgctcaacccccgccaggactcggaatgccttgcttttggttcttttcgtgagcagcggggtggacattgaccgattcgacaacgttcgggctctaagggctcgggaagggacccggcattttaccctccagattcccaatctatttttaaaaataatgttcaaaacatatgggaaaaataagtgattgctccttttcatggtcacagattgtatttattttttcagactggttttccaacctaacgagggaatgggtagtgaatgttgttgttgttgttgttgtttatgttggttaatttcgaaataaaactgtttaactcgtacagttgattcagacagaaaaccaggctgcctgacgtctccaatgtgccttttccccaatgcatctttggcgctagggaccgctctggggaagacaagcatgttttcaaagccactcccatgagccccagacccgcgcgtggagcttcctgggcgcgccccagctggtctggaaggccggcaaattaggaagtttggagggaagaggtgcaccccaaactagggagaaacccaagagctggggagaaggcccccactagtgtccaaagtacgcggacagctcttaaaagttattgttttcttcgtggggatatatattttttcttttccttcctttcctttttttttttctttcaccctcgcatgtctcctctttcgggatttgctaatcttgaacgaaactgttctctccggactgtttcgacccaatgagcggcccctcctgggcaagtcgtcccccttaccctcacagagggctggctcccgggcgcggcctgtccccagggttgatttatttcggccgcgccacaccactattcgcgattcgaatccacccagaacactgcagccaattgggcagggggcgggggcttggctgccaaacgggaagggtgtttggggacccagtcttgcgccgcttccggaggagcggcgagacccagcaaggacccgcgtccccgtgcacctccacccccgcaaactcacgctcattttacgatcctgtcacaaaactggctgcttcggcgatgtttcataaggaaaaagaatgcatttctgacttaaaacatatttttaacttagatttttaacagcccagatttatgaggccttctcgcttataccatatttcttccccgtctctgggacgcttttacccaagggacccggggtcacctcagagccccccacccctgccagcgtctggggccagtgaaacgtcaggtggtggcggcggaaacttgcaggtcgcccccacccccagcgccggctcccgccggcggccacttcggggaaggaccgcgcggagccagcgccggggtccccgggcggtcggaatcgaggcccggcgcgttgcgcaggccaggcccggcccggaggccccttgcccggcgcagcccccggccgacccccgtgcgccgccggcggccgccagcacggcgcggaggtgggctagcggcggcggcgcacgaaaggtcaccgcggtggcattcctctccgcgctgtttacgtgacttaatgtactcgctgcgccgcgggtaagttcgggctgcgataagggggcggccgggggagggtcgccgtaaaagccccacgccgggcgcctccagccctcccctcatccattaacctttttactttcttctccgctctctctccaagcctgttatctaggccacccaatgaccgacgaaagattttccctccctgcttctcccgtggccgctttaaaccaaataaatttagctattaagggccaagatgtctgacaaaagatcgaaaggtgtctttcc

SEQ ID NO: 461849 - DNA, 1818 bp, Homo sapiens
tctaacttcttaaggtgcaagcttaaagtgttgctgccagacctttcttctcttctaatttaccaagtgaagaatgttgaaatatccaactataatttgtggatttctcctttcaatgctatcatttttggtgcttcatgtatttttgaagctctattattaggctagagtgcaatggcacgatcttggctcactgaaacctccgcctcctgggttcaagcgattctcctgtctcagcctctggagcagctgggattacaggcgcatgccaccatgcccggctaatttttgtatttttagtagggatggggtttcaccatgttggccaggctggtctcgaactcctgacctcaggtgatctgccagcctcggcctcccaaagtgctggaattacaggtgtgagtcactgggcctggtcaggatttctttcatttcaactaactgttggcttattaaccctacttttttgttttaatttttagtggttactgttattttaatgtattagtcagatttttccagaaaaacaaaacctataggagatagataggtagatagatagatagatagatagacagacagaggaggatttactataaggaattggcttgcatgattatggaggctgagaagtcccaagatctgcagttgacaagctggggacccaggagcatcagtggcataactccagtctgaatctgtgtctaaaggctggagaagatcagtgttccagctcaaaaacattcaggcagggagagccttccactactggcaggagcgcctttttgttcttgtcagttcttcaatcgattggatgtggtccacccatattagggagggcaatgtgctttactcagtctattgattcaaataatgtcatgcagaaacacccttgtagacgtacccagaataatgtttaactgaatatctggcaccccatggcctagtcaagttgacacataaaattaaccatcacatttgagatttataatttgcatctttaacttatcacggtctatctgcaaagaatattatatcacttagctgggcgtagtgctgtgtgcctatagtcccagctactcaggaggctaagtggggaggattgcttgagccctgaagttcgaggctgcagtgagctgcgatcacatcactgctctccagcctgggctacagagaaagagcttgtctctaaaaaaattaaaaataaaataaaaagaatattacctcatgtatggtgatacaatagtatacttctatttccttctcttttctctctttctcttgcctgctgccatccgtgtaagatgtgatttgttcctccttgccttctgccatgatcgtgaggcctccccagccatttggaatttttccataatttactggaatagctcacagaactcgggaaaatactttacttacatttactggcttattataaaggatgcaattcaggaacagccagatggaagagatgcccagggaaggtgcatacagaattatggagaaatgatggtggatcagtggagcaactggggagctgctggggcacaggagagtgacaggacaggggctcagcatgcctccaacccaatcagcaaagcatccacacttccacagcactgtgctgggtgggaaagcttgttcttgccctggctgaaagacaagatgcaagcgatatagtgcttcatcaatgttgtagaccgaacatttatctctctccaaaatgtatatgttgaaatagaatctccaatgtgatggtatttggagttgatcgctccctgcagacttgtaggaaggcaaataataggttagcaccta

SEQ ID NO: 461850 - DNA, 1107 bp, Homo sapiens
gccctcggtgacacacatttatgccatctgctctgcggtacaccatgccacgtatggtctcattggctccacctcggaatttcccctgtccctgtgttcacgtgtcctggaaagtggtatcagctttcaagtgccccagggcttttcttttttcaaaggagaagggaggcatcagtgaattttcagctgacacctcgccttggggcccatgggatcattctgggatgcagcgaggccctgccttcctagcagatgtggtgagcccatcctttctcacccggaggggtccaaagtcggatctcaagaggagttctgggaccccagcaggcgcccagaagctccacctccaccccggaagtcggcttaaggaggtcctcaagaccggactccttggggtttggccttgggacgcctgtggcctcctctcccacgctgccccgtactggacccctgatccagccaccgccagggctgcaatgcgagccgcccttcctctgcgtagccgctattgtttaaaggggtcgcagcctgactgccaggagcggagtgcgactcggcccctccaatgcgcatgcgcaaggccctggcgcatgctccagtcacagttattcccacggttgtcttagaaacccgtccctgaggcttggcaaagtaggagccctccgtggcagtgcttgggtgtcggggctccgaggctccggcctgacctctccacggggtcgacaggaacatctctggctgccaggagtcgcaaagggccgaccaggatgacgaaaccacaggcgaagtccgggggaagcggcatggcatgccagcctcaggcctgccaggacggtgttcgggactgactctaactatgtgaagaactgctacatattctacagtgcttaataggcggtgcctatctaacaggagctgtttggcttgtggatagcagttccaagatgaacaaatgacattgtgtttgaaagccactgctcttattaaagaagagtcaagcaaatgtttttattttgagttatttatagtttagaaaaattgggtgaagtgtgtttttgtgagcaaatttatttttctctaggttatccgtaatttgaaagctgtgag

SEQ ID NO: 461851 - DNA, 428 bp, Homo sapiens
ccagaagaatcatagatatgtttgaatacttattcattatttgccccagatagaaaatgtttgttaatcaaaaggcaaaagttataatgaggaagataatattgcctggggcaatgttgagacaaataaggtgaagatcaaccaaacgccctgagtcctttggcccaaatccctgctggggacccaaatacttttgatatagcatcttgctacctgaggaacgcaaggagaataatactcataagcagagcctctgttttcccataggactgactctaactatgtgaagaactgctacatattctacagtgcttaataggcggtgcctatctaacaggagctgtttggcttgtggatagcagttccaagatgaacaaatgacattgtgtttgaaagccactgctcttattaaagaagagtcaagcaaa

SEQ ID NO: 461852 - DNA, 2790 bp, Homo sapiens
  misc_feature (1)..(1): n is a, c, g, or t
  misc_feature (5)..(5): n is a, c, g, or t
  misc_feature (7)..(7): n is a, c, g, or t
  misc_feature (9)..(10): n is a, c, g, or t
  misc_feature (12)..(12): n is a, c, g, or t
nctcngncnnanaaaaaaaaaaaaaaagtacctggaaaaagtcgcagacagcgagcttttcgccagtgccaggaatacagataaaacgagagagactaagggagggagcgcgagcactagcgcgcgagagagagagcgagagcgcgcgcgccgatgacgtcacgctcggcgtctcggccatcttagctgtagatagaggcggcaacctcggaagtgcggagcgggtgggcctatatagatgttgaggtgcggaggccgtgggcttttgttgggcctggctgtagccgcagcagcggtaatggcagcacggcttatgggctggtggggtccccgcgctggctttcgccttttcataccggaggagctgtctcgctaccgcggcggcccaggggacccgggcctgtacttggcgttgctcggccgtgtctacgatgtgtcctccggccggaggcactacgagcctgggtcccactatagcggcttcgcaggccgagacgcatccagagctttcgtgaccggggactgttctgaagcaggcctcgtggatgacgtatccgacctgtcagccgctgagatgctgacacttcacaattggctttcattctatgagaagaattatgtgtgtgttgggagggtgacaggacggttctacggagaggatgggctgcccaccccggcactgacccaggtagaagctgcgatcaccagaggcttggaggccaacaaactacagctgcaagagaagcagacattcccgccgtgcaacgcggagtggagctcagccaggggcagccggctctggtgctcccagaagagtggaggtgtgagcagagactggattggcgtccccaggaagctgtataagccaggtgctaaggagccccgctgcgtgtgtgtgagaaccaccggcccccctagtggccagatgccggacaaccctccacacagaaatcgtggggacctggaccacccaaacttggcagagtacacaggctgcccaccgctagccatcacatgctcctttccactctaagccgtagcctcttctgttaataacacacagagagctctgccaagcacctgagtaggcccttgacacttgtgtgccctgggatgcctcctggcgcgaatcaggagggtctggaaggactctggctatattctgcaaatgtggctcatgccccttaccgtggctcggcgttgtggtgcctgagggacagccggccacctgcccagtactggtcagcttttcaacactattccctttgacctactggccatcttcctcacagccctcagatatcaacgggcacaaataagaccaactcaatttccacttgaatttacaaccaaaagcctgctgagttgattacagctgggccaatacagtacgaggcaataacaaattagtgtgggttgattctggaattggaaaagcttttgcttgtatggatacagcaaatccagatgtctctgaacaaagcaacaatttaaagcaacgacattttctgtcctttaagcacttaaaatcaggtgtggtgtgttttcaaaggcagaagtctgcattttgagcaaaaggtggcttcccagctctaacaaggtaactggttagcatgacattaaagcttgggcaaggcttcaaacttaaggtggctgggcttgctgcttgtccagtggtttgtatgtccagcgtcatctggcaatgtcatacctgttacctcttgactacttgtgaaggtagatgggggcaaggagtgttcctacttcagacagagaagtgggaccagcactaccacagacagcgccacggcctctgtgcatcgcctcatcagagcttccacccagctccctttgccgctcagtctcaccctcaacatccaccagcttcctccctctctgtcactgtctcctttttctccatcattcatttcactaaatcgctttccagattcacagactagaaaatggaggctgcctccccttcactggcagacccgtactcactgcccctgtccccttcactggcagacccgtgctcactgcccctgtcccctcactggcagacccgtgctcactgcccctgtcccctcactggcagacccgggcttattgcccctatggccacagctgttccttacacttgggctctggctcatggctccttttgcctgcccccgccatcctcctcacctgcccctcttgtacctttaacctctccccgtctcctggatcttcccccaggcctgtacctttcccatctcctcccatgtgcacctcctgtccagcctccctctcactgcgttatgtctgcagtgccttcacacaagctgtttcttttgcctggaatgacgcttcttcctccgttgaattaatccaccccgtattgcttcaatattcagctcaatcaggcccctcttgggagccttcattaactgttgggccagcagtgagctatagacgcactttccctgctccatggctgtgctcatatcacagtgggctcttaccatgaacttcctatcaacctcttgcactggacctcagacactctgaggacagagccccagtgtgattcagctccatacccctatatccacatgactcagctccgtacccctatatccacgactcagctccatatccctatatccacaactcagctccgtacccctatattcacatgactcagctccgtacccctatatccacatgactcagctatgtacccctatatccacatgactgagctctgtacccctataatccacgactgtccgtacccctatatcc

SEQ ID NO: 461853 - DNA, 780 bp, Homo sapiens
  misc_feature (3)..(6): n is a, c, g, or t
  misc_feature (11)..(11): n is a, c, g, or t
  misc_feature (13)..(13): n is a, c, g, or t
  misc_feature (16)..(17): n is a, c, g, or t
aannnncaaangnctnngcttggggagcttctggatagctgaacatgtgcagatgcctgaagcctggctcgcccaaaagggcatgaaagctctacgcccctcccctgcaccttgaccaattcatctcttccatccagcagtccatctgtatcctttgaatatcctttataataagtgggtaaattgttggaactgtatcctcttatcagttggaccatctctagaaaacacaaagggagctgcaaggaaatcctggcccactgctggactctaaatgtggctgacactgatccgttcagtgttaatcattggcgtatccttatattgtttcaaaattcagcatccacgtgactgggcctatataaagtttcccaagcgctttttcatctattatttattctgacatcagtgctgtgaagtatggcattatcaactctgtttgacatataaggagagacaggatcttgccatgttgcccgggctagtctcaaactcctgggctaaagtgatcctcccacctcagccccccaaagcgctgggattactacagaggctgaagtgcagtggcactatctcagctcactgcaacctttgcctcctgggttccagcgattcttctgcctcagcctcccaagtagctgggattacagagatgaggtcttgctctgtggcccggcgtggagtgcagtggtatgacgataggtcattgcagcctcaaactcctgagctcaagcaatcctcctgccttagcctcccaagttgttggaattacaggtatga

SEQ ID NO: 461854 - DNA, 1356 bp, Homo sapiens
  misc_feature (3)..(6): n is a, c, g, or t
  misc_feature (11)..(11): n is a, c, g, or t
  misc_feature (13)..(13): n is a, c, g, or t
  misc_feature (16)..(17): n is a, c, g, or t
aannnncaaangnctnngcttggggagcttctggatagctgaacatgtgcagatgcctgaagcctggctcgcccaaaagggcatgaaagctctacgcccctcccctgcaccttgaccaattcatctcttccatccagcagtccatctgtatcctttgaatatcctttataataagtgggtaaattgttggaactgtatcctcttatcagttggaccatctctagaaaacacaaagggagctgcaaggaaatcctggcccactgctggactctaaatgtggctgacactgatccgttcagtgttaatcattggcgtatccttatattgtttcaaaattcagcatccacgtgactgggcctatataaagtttcccaagcgctttttcatctattatttattctgacatcagtgctgtgaagtatggcattatcaactctgtttgacatataaggagagacaggatcttgccatgttgcccgggctagtctcaaactcctgggctaaagtgatcctcccacctcagccccccaaagcgctgggattactacagagctgggacctctatcctctcctgcccttggacatccatgctcctggttctcaggcctttgaacttggactgggacttataccattggctcccctggtcttcaggcctttgggtttgtactggggctacaccactggctttcctgggcctccagcttgcagatggcagactgtgggactcctcagccttcataatcccatgagacaataccttacggatagacaaaaggatatagtacaagccttgaagaaagttcagccgcagacttccttctacctgtggcgttctcccccgactcctctggccgccctcccaaaggatccctgtggtgccaggcaggaatgtcctgcttggggacccagtgaactcccagggcatttcccgctgcttcctgtacccctgtatttctctcgactgtctaaatggactcagccccagagggtctgtgggtcctcttgggattcctggtttgttcttgcagttgttctggagctaaaattcacaatgcaagcgtctgcatgctgctccgtccatttgagttggagctgcaatctagtcctgccttctatctgccatgatgattgccggaatcgccactgtttcaaaggaaatggcctggctgcccattggcccaaacagaactcctcaaagggcagcctaacttccaaagatacattctccctgcaccagaggcaggagagggactgacagggccaaagatccctgggggcagcccccataggccaagggccagtttccctttgtatcctccacaaactgcatgatccagttgttagcaagccttc

SEQ ID NO: 461855 - DNA, 1260 bp, Homo sapiens
ggggtgggagggcatattcagcatcacacactacccttcccagtaattcccccgacacacatacacacacacacacatacgcacacacacatatacacacccctaagttctactcaagagctggctctgcttctttcaacttcccagttctgaggagccagcttcccagctctgccatgcacttcctacccatctcaccctctcccacctgcaaagcagtaattcctcagtgccttgctaccagctctccaaagggcagaggaggctagacatcgcctctgatcaaggtactggataccttcttccccaaaaccactggcccagtggggcagaagagggcaagccttaagtggggtagaacccaaatgggccaattttaccaccataagaatcaagaaatgtcttgcttctgcccctctgtcaggatatctctagaatttaaagttagtgagaacagaaagcacatccttggcttacagtccacagggcctggcagtgcctcaacaggctggacactccttggacagccacatggactcctccttactgtggttagctgccatcaaccagtcctctcgccagcatgcagggtgggtttggcagcgccaggcacagcttcacatgccttccttgttcttctgaagtcccctctctggatggtgaccttgttcatgtggccatttttaaagcagaaagttggatcccaggccaaatcctgccttgcagttccgagaggcatgtgctgtcccccttcactggtgatggcgggccggggaaagaccccactgtggtcttacgaaaagtgtttgtagagaaaccaagcagcactgtatgggatggctgataattgctgctcttggtgttagttcctatctgcttaggcagaaggttgggactggggaggaggaatgttagtggagattttatgtaactgtaaacttcctctctactgtaagaaggattctcttgaaagaaaatgaaaaacagttccagatggtccatggaagatgtttcatggttggaaacctattctacctccttgtcaagaataactatgccttggctgggcacggtagctcacgcctctagtcccagcactttgggaagctgaagcgggagaactgctggagctcaggaggtcggggctgcagtgagccatgattgtgcacctgcaccccagcctgggcaacacagcaagattctgtctcaaaaaataataactataccttgaaaataggggtccatacttaccagcccaca

SEQ ID NO: 461856 - DNA, 1352 bp, Homo sapiens
gcctgtgcaccttccgcgtgtagttgtccagtgggcagttgagcatatgtgtttggctctcagaggaagtatctgggttggggaaataccagtgtggacaacttgtggagatgagaagaatcagtccatcatagtcagtggggagtctggagccgggaagacggtatcagccaagtatgccatgcgctatttcgccaccgttggtggctcggccagtgaaaccaacatcgaagagaaggtgctggcatccagtcccatcatggaggccattggaaatgccaagaccacccgcaatgacaacagcagccgttttggcaagtacatccagattggctttgacaaaaggtaccacatcatcggggccaacatgaggacttacctcttggagaagtccagagtggtcttccaggcagatgatgagaggaattaccacatcttttaccagctctgtgctgctgccggtcttccagaatttaaagagcttgcactaacaagtgcagaggactttttctatacatcacagggaggagacacttccatcgagggtgtggacgatgctgaggactttgagaagactcgacaagccttcacactcctcggagtgaaagagtcccatcagatgagcatttttaagataattgcttctatcttgcaccttggaagtgtggcgattcaggctgagcgtgatggtgattcctgtagtatatcaccccaggatgtatacctaagcaacttctgccgactgctaggggtggagcacagtcagatggagcactggctgtgtcatcgcaagctggtcaccacctcggagacctacgtcaagaccatgtccctgcagcaggtgatcaatgcgcgcaacgccctggcgaagcacatctatgcccagttgttcggctggattgtggagcacatcaacaaggccctgcacacctccctcaagcagcactccttcatcggggtcctggacatctatggcaagagtggcaaaagtggagtccagagagaacagaaagaatactgggatgagtttctgaatacagccagccacatccgggaagtggaaaagaacgagacattgcctccctctcagccttcaagatgccaaggtagcagagggctttggctatggccagcccattcttgcggaggacagttggcctgggagcaacacaggctgtaacagattcatgtgttctgctgaggaacagctggggagagaatggggtagaaggtggggaagttttgaccccaggaagcaggacataggatttcctgggattttatatcctcatcagtcctctgttactttcttgtggtacttcctaataataaattagcatccaactctattc

SEQ ID NO: 461857 - DNA, 1349 bp, Homo sapiens
gcctgtgcaccttccgcgtgtagttgtccagtgggcagttgagcatatgtgtttggctctcagaggaagtatctgggttggggaaataccagtgtggacaacttgtggagatgagaagaatcagtccatcatagtcagtggggagtctggagccgggaagacggtatcagccaagtatgccatgcgctatttcgccaccgttggtggctcggccagtgaaaccaacatcgaagagaaggtgctggcatccagtcccatcatggaggccattggaaatgccaagaccacccgcaatgacaacagcagccgttttggcaagtacatccagattggctttgacaaaaggtaccacatcatcggggccaacatgaggacttacctcttggagaagtccagagtggtcttccaggcagatgatgagaggaattaccacatcttttaccagctctgtgctgctgccggtcttccagaatttaaagagcttgcactaacaagtgcagaggactttttctatacatcacagggaggagacacttccatcgagggtgtggacgatgctgaggactttgagaagactcgacaagccttcacactcctcggagtgaaagagtcccatcagatgagcatttttaagataattgcttctatcttgcaccttggaagtgtggcgattcaggctgagcgtgatggtgattcctgtagtatatcaccccaggatgtatacctaagcaacttctgccgactgctaggggtggagcacagtcagatggagcactggctgtgtcatcgcaagctggtcaccacctcggagacctacgtcaagaccatgtccctgcagcaggtgatcaatgcgcgcaacgccctggcgaagcacatctatgcccagttgttcggctggattgtggagcacatcaacaaggccccccatcctgacgtccagcacacttttccatcggggaagttctcttcagagttgggcaggcacacaggctggatcatttcattgaacgtgagtggcccggccagcttcataagggcgatgtcattgcccagcctctgtggcttgtacttgctgtggcagacaatcttctccaccaagtgggatggggctggattgtccaacagggaaactagacccacctggatggtccatgacttggggaggtacaagtcataaacacagtgtgcagcagtgatgatccacaggggcgtgatgacagagcccccgcacaggtggtagtcctggaactgaaggctggcctgccagggccactgcgagagcaaggacatgtttccacccacgtatgcgtgagtctgtagccccttctatgatcacaggctgtctctca

SEQ ID NO: 461858 - DNA, 900 bp, Homo sapiens
agataagcaaggcctcgtaggccatgctaagcagtttagacttgattctcaaggcagtggagcccaacaggcagagaacccacatagttaattttttaacaaaattttttgtagaggcagagttttactatgttgcccaggatggtcttgaactcctggactcagatcttcctaccttggcctcccaaagtgttgggattatgggtgtaaaccaccatgcttggcccggttttccaaacttcttgtaccaatttacaatcctaccagtagcatttgagagctcccattacttcatgtgcttgccagtacttagtttcatcagtcttttcaattttagtcattctggtgatgaacacagaaaagctgtcttaacggatcagtacgagtttgccagacagaaggaaacttgggatgttgttgctgaggatgatgatgttaaaaataaaaaaggaagcaaaattgtagagcaggaatggatctgaagtcaatgaaaaactcttcatagctctagttgttgggcttccccagaagatgacattgaaaggaaggtttggatgcaagttgttcatttaggaggagatctcaggaagcacaaagtatttccttgagtcaggacctccaagtcctcccctaactaaatgcacagagggaggaccctatgaagactcagagagaagatggccatctgtaagctaaggagagaggcatcagcagaaaccaactctgtggacaccttgatcttggacttccagcctccggaagtgtgagacactgaatttcggtatataagccagtcaatccatggtacatggttatggaagccctagtaagcaaatacaaatttatgtccaaataaactacttgcatgtgaatctttgtctcatgatctgctaaagtagg

SEQ ID NO: 461859 - DNA, 3313 bp, Homo sapiens
aatctatggtgatagaaagccaaataattgttagggggtatggagggattgaccagagagctattgattggtaggagttacaatggggccttctgcctggtgcagccatcccggtggaacaaccccaggcaggagccgctcggtggccgaggatggcgggaagtcgctgggctgcggctggggcgggaggtgggcggaggagggtccggcgctctctttctccggattcggagccctaagtgtggatcagtcgcctcccgcccagggtgtgagcgccccctccccttctcagcctccttcggcctcgcccctccctctcacatttccaactcccaaggataacttgtcgctcgcttcagacgcccatggcttctttcagcccctgggactcagctttctcctctacctcttttgtctatttgtgcatttgatgtttctctgggcgcgcccttggatctgcttctctcttgccttttatattctcatattctcatattctctctctctctctctctctctctctccctccctccctccctccctctctccctccctctctccctctctgcctctctccctctctctctcttctctctctctctctcttctctctctcttctctctctctctgctctctccggccatctgggcgctgctcctccgcgcctctggcctccccgcggcgcgccaggcccatctcctcaccagccgctctgggatccgacggcgccgtgggtgggggcaggtgagacggccgagccccgcccgggcggaggcaggaagcgctctcgcctatccccctcccggaccctgtcctcgcccgccactcaccggcgccaggggaacgcaggagcgtgagccccttcgcgcccccagcgccgtcggcgtcgctgccccagacacagacactgcctcgaagaggcctcacagaggcgggggcagaaggcggcgacccagagccgccacatcccccgccttgggcgccgtcacagtccccagacgccctggactcctgcagtctacgaagacgcgcgggggacggcgtggttccgagagagggcgccaaaggcgacgtgccggccgccagctccaggccgagccccgagcgcctgcaggaacaggccccttcacccggcgcgggacgcagagctgcgagagaatcttgttcagcgcggactcaacgccagggcgccgcctagaggttggtctctgtctcggcctcacccgccgggagaccacagagctgcttccccagccgcccgccgccagaaattggaaaaaaaaaaaaaaaaaaaaaaatccagctggggtctaggaactcggcttctggcacctctgaattctccgagactgtctcctccctccccgcctgtaatgaaccctgtgaagggagacaggccaggaagtcccagaaatatttattcttgtgactctcacaaaatggaaaagggtctcaatttttgtttctttaaggaacttgtgttctgcgtctgtgtctacactgcctcctctcaccaaccaaattgtctagcccccctccagttacgctagaactctgctttatcttcaaggaagaaagggagtggggagaagttacctctaaaccctccagcatggccatcaattttctgaataatttggaggtcaacatgcttttggaaaagtgtttggaaaacgtttgggggtgaaaagaaatgttgcctaactggcctttactcacggagtgaccatcatctcagctagttagtgtatgagcggcaccagcaccccggccatgggtgtctgtgctgagcctctgaaagttgacttatcctttggggagccctcggaaagacacagctggtatctatgggaatggctttggggtgtcctttggcaccatacagataattttgtttttttaattggaatccatggcctgggttcttgggatgggggtagggggaagccacaaagcccctggaaatgtatgcaaaacatatgggtgtgcaggtgcatcatcctaaggctatggcctcttcagtttttccaaagagtctaagactataaaaggtttccatctccttttctcagccagggagccacagagacccaggccagcagtaggctgggagccagcacaccggcccccaccaggtgcccggtaggggatgggtaataacactcttgaatggtctggaaactgctggcccctcagtcctgccgtcctcccagagggaaatcctaatagaagaagtgacagccagtagctgccatctcagtattttgaatgaaaatataacatgataaagagcaaatgagggaggctggaggggcctccccatgcaaatactggaatatgaatgttggccagaaataagatacttcctgccctccagctgttaaagagctccccaattcctcccttttggtgctaggaaggggccagagggcactgcccccagaccaccacccacctctggagagctggggccgagtgggactgcctgcagcagagttaacccttcagaaaattcaaaacctatactgcctagtattttccctgcccgtttattttttaatcagatttttaaaatatccagcagcactttggtgccttttcttggggttggggagtggggttatctatgtgtgtatctatgggaaggtgggtgccttcagtgcactaaaccccctcttgggcctgcagctggacctcactcctgtacctgaacactctgcctgagcctgagctaatcttagccatccattgtgtctcaaaactgttttggaggtgaataactgtgaggcaggatggagaaccttttgctctcccatccagaagggcacctaaccaggcccctggagcagacaaaaggagcaggaagtcaatcacttcgatcccagttctctgaagcccaagaagaaaacggattttccttcgttttggttcggaggcctagtagagaatttggattccaccaagttctcttttttcaaaaaaagtaaacggtccagagcagacaaaaactgtggaaacttgaggcctgggtagtagtggttttgtttgattttgaggctttaaagagataaggagacggtggtggagctccgccacgccgcgtggctctcacttccacgccgaggaagaccgaccggcccctaggtttatcctctgggagcccccggcccaatcagcccccttcaggccttgggagtcaccccgagtcttatcttctgtccccttccagcaagtacccggcaataaacgggcagggctgggcaaaggtctggccgctagaaacggaaaaggaaagagaaaagtaaagttaaa

SEQ ID NO: 461860 - DNA, 2457 bp, Homo sapiens
ccggtggggtgcagccctgctgaagccccagagctcagcccagtgctgggcacatagtaggcgctcaggaaatgattgctgaatgtggaatgaaagtccccagcagacaaaaggctgtgacttctgttagtggggtggtggtcctctggggcgagtgtatggagaacttcaaggcctcctcctggctgcccaggaagtagagggcgccaaaggcgacgtgccggccgccagctccaggccgagccccgagcgcctgcaggaacaggccccttcacccggcgcgggacgcagagctgcgagagaatcttgttcagcgcggactcaacgccagggcgccgcctagaggttggtctctgtctcggcctcacccgccgggagaccacagagctgcttccccagccgcccgccgccagaaattggaaaaaaaaaaaaaaaaaaaaaaatccagctggggtctaggaactcggcttctggcacctctgaattctccgagactgtctcctccctccccgcctgtaatgaaccctgtgaagggagacaggccaggaagtcccagaaatatttattcttgtgactctcacaaaatggaaaagggtctcaatttttgtttctttaaggaacttgtgttctgcgtctgtgtctacactgcctcctctcaccaaccaaattgtctagcccccctccagttacgctagaactctgctttatcttcaaggaagaaagggagtggggagaagttacctctaaaccctccagcatggccatcaattttctgaataatttggaggtcaacatgcttttggaaaagtgtttggaaaacgtttgggggtgaaaagaaatgttgcctaactggcctttactcacggagtgaccatcatctcagctagttagtgtatgagcggcaccagcaccccggccatgggtgtctgtgctgagcctctgaaagttgacttatcctttggggagccctcggaaagacacagctggtatctatgggaatggctttggggtgtcctttggcaccatacagataattttgtttttttaattggaatccatggcctgggttcttgggatgggggtagggggaagccacaaagcccctggaaatgtatgcaaaacatatgggtgtgcaggtgcatcatcctaaggctatggcctcttcagtttttccaaagagtctaagactataaaaggtttccatctccttttctcagccagggagccacagagacccaggccagcagtaggctgggagccagcacaccggcccccaccaggtgcccggtaggggatgggtaataacactcttgaatggtctggaaactgctggcccctcagtcctgccgtcctcccagagggaaatcctaatagaagaagtgacagccagtagctgccatctcagtattttgaatgaaaatataacatgataaagagcaaatgagggaggctggaggggcctccccatgcaaatactggaatatgaatgttggccagaaataagatacttcctgccctccagctgttaaagagctccccaattcctcccttttggtgctaggaaggggccagagggcactgcccccagaccaccacccacctctggagagctggggccgagtgggactgcctgcagcagagttaacccttcagaaaattcaaaacctatactgcctagtattttccctgcccgtttattttttaatcagatttttaaaatatccagcagcactttggtgccttttcttggggttggggagtggggttatctatgtgtgtatctatgggaaggtgggtgccttcagtgcactaaaccccctcttgggcctgcagctggacctcactcctgtacctgaacactctgcctgagcctgagctaatcttagccatccattgtgtctcaaaactgttttggaggtgaataactgtgaggcaggatggagaaccttttgctctcccatccagaagggcacctaaccaggcccctggagcagacaaaaggagcaggaagtcaatcacttcgatcccagttctctgaagcccaagaagaaaacggattttccttcgttttggttcggaggcctagtagagaatttggattccaccaagttctcttttttcaaaaaaagtaaacggtccagagcagacaaaaactgtggaaacttgaggcctgggtagtagtggttttgtttgattttgaggctttaaagagataaggagacggtggtggagctccgccacgccgcgtggctctcacttccacgccgaggaagaccgaccggcccctaggtttatcctctgggagcccccggcccaatcagcccccttcaggccttgggagtcaccccgagtcttatcttctgtccccttccagcaagtacccggcaataaacgggcagggctgggcaaaggtctggccgctagaaacggaaaaggaaagagaaaagtaaagttaaa

SEQ ID NO: 461861 - DNA, 2583 bp, Homo sapiens
ccggtggggtgcagccctgctgaagccccagagctcagcccagtgctgggcacatagtaggcgctcaggaaatgattgctgaatgtggaatgaaagtccccagcagacaaaaggctgtgacttctgttagtggggtggtggtcctctggggcgagtgtatggagaacttcaaggcctcctcctggctgcccaggaagtagtgtcttcttttgcaagctgggggaggggtttaaagatgctggcgctgccctctagccggctgctggggacatcaaaggagattcgggctgtggaaggctccctagcgtcggagatggagttaggagagggcgccaaaggcgacgtgccggccgccagctccaggccgagccccgagcgcctgcaggaacaggccccttcacccggcgcgggacgcagagctgcgagagaatcttgttcagcgcggactcaacgccagggcgccgcctagaggttggtctctgtctcggcctcacccgccgggagaccacagagctgcttccccagccgcccgccgccagaaattggaaaaaaaaaaaaaaaaaaaaaaatccagctggggtctaggaactcggcttctggcacctctgaattctccgagactgtctcctccctccccgcctgtaatgaaccctgtgaagggagacaggccaggaagtcccagaaatatttattcttgtgactctcacaaaatggaaaagggtctcaatttttgtttctttaaggaacttgtgttctgcgtctgtgtctacactgcctcctctcaccaaccaaattgtctagcccccctccagttacgctagaactctgctttatcttcaaggaagaaagggagtggggagaagttacctctaaaccctccagcatggccatcaattttctgaataatttggaggtcaacatgcttttggaaaagtgtttggaaaacgtttgggggtgaaaagaaatgttgcctaactggcctttactcacggagtgaccatcatctcagctagttagtgtatgagcggcaccagcaccccggccatgggtgtctgtgctgagcctctgaaagttgacttatcctttggggagccctcggaaagacacagctggtatctatgggaatggctttggggtgtcctttggcaccatacagataattttgtttttttaattggaatccatggcctgggttcttgggatgggggtagggggaagccacaaagcccctggaaatgtatgcaaaacatatgggtgtgcaggtgcatcatcctaaggctatggcctcttcagtttttccaaagagtctaagactataaaaggtttccatctccttttctcagccagggagccacagagacccaggccagcagtaggctgggagccagcacaccggcccccaccaggtgcccggtaggggatgggtaataacactcttgaatggtctggaaactgctggcccctcagtcctgccgtcctcccagagggaaatcctaatagaagaagtgacagccagtagctgccatctcagtattttgaatgaaaatataacatgataaagagcaaatgagggaggctggaggggcctccccatgcaaatactggaatatgaatgttggccagaaataagatacttcctgccctccagctgttaaagagctccccaattcctcccttttggtgctaggaaggggccagagggcactgcccccagaccaccacccacctctggagagctggggccgagtgggactgcctgcagcagagttaacccttcagaaaattcaaaacctatactgcctagtattttccctgcccgtttattttttaatcagatttttaaaatatccagcagcactttggtgccttttcttggggttggggagtggggttatctatgtgtgtatctatgggaaggtgggtgccttcagtgcactaaaccccctcttgggcctgcagctggacctcactcctgtacctgaacactctgcctgagcctgagctaatcttagccatccattgtgtctcaaaactgttttggaggtgaataactgtgaggcaggatggagaaccttttgctctcccatccagaagggcacctaaccaggcccctggagcagacaaaaggagcaggaagtcaatcacttcgatcccagttctctgaagcccaagaagaaaacggattttccttcgttttggttcggaggcctagtagagaatttggattccaccaagttctcttttttcaaaaaaagtaaacggtccagagcagacaaaaactgtggaaacttgaggcctgggtagtagtggttttgtttgattttgaggctttaaagagataaggagacggtggtggagctccgccacgccgcgtggctctcacttccacgccgaggaagaccgaccggcccctaggtttatcctctgggagcccccggcccaatcagcccccttcaggccttgggagtcaccccgagtcttatcttctgtccccttccagcaagtacccggcaataaacgggcagggctgggcaaaggtctggccgctagaaacggaaaaggaaagagaaaagtaaagttaaa

SEQ ID NO: 461862 - DNA, 1195 bp, Homo sapiens
gtttgataattcactagaatgattcacagaactcgggtccaagcgcaggagcttctgtccccctggaatcagggtgcaccaccctctgagtacatccatgtgttcaccaaccaagacgccgttgaaccatattacgttcgttgcatcaaacccaatgacaagaaatctccacagatatttgatgatgaacgctgccggcaccaagtagaatatcttggactactggaaaatgtgagagtgcgtcgggcaggatttgccttccgccagacatacgagaagtttcttcacagattagttggtcaaaaaagagtctctaaggagctgacaatgacaggaagcagccagccatacaaagatcagagcaaagagaagatggggcagagggaacagccagggaaaaggctctattgtggtagtaagtataagatgatctctgaagaattcacctggcccaaccatgaccttccttcagacaaagaggctgtcaagaaactaattgaacggtgtggttttcaggatgatgtagcttatgggaagaccaaaattttcattcgaacaccccgaacattgtttaccttggaagaactccgtgcccagatgctcataaggattgtcctctttctacaaaaggaaactgtcagatagagacatgaagtgatgggggctttcatatgatttctaaacaaagcactctgacttctttgtaaaaccaatcaagtgttttatttctaagactaaaagcaaaataattatttctcatataaaattgattacttttgtccttaaaaaagaaaagaaggaaggagggaagggggagggggaggggggaagagagggagggaggaaggaaggaaagaaggaaggaaggagggaagggggagggagaggggggaagggagggaggaaggaaggaagaaggaaggaaggaaaaagaaaagagaaaagaaagaaacacaaaacctactgatatggtagctagtatttcctgagtgataggcactactctggatactttactattctggttatttaactaagtcattacaagaaccttgtgaatgagtgtccattattatttccatttaatagataagggagctaaagccactgagtggttaaggaccttggcagaggtcacacacggtaaacaccagagctgggatttgaacctaagaggcctgcttcccacacacac

SEQ ID NO: 461863 - DNA, 931 bp, Homo sapiens
aagaatgagattttatattgtgtttaatgtctaatcagttaaagtcatttacctattttatttgcaaaataatttttggcaaagaggaacatttttacatatcttcctagcaataagaatgtgttcaatgtttacaattgtttggttacttatgaccccagatgtgagattatagtaagtgattatcacaacgttgttgagacaaatcagcctcctaagacaaagacactttacattaattgaacaaaacacaatcttctgaaatagtctaacaaatgtaatgtctcaaatttaacacctgcggtctgaaggttttatgtcacagtccttgcaattattaaaacaaacctttcgatattacagaaaatctctttgtcctacttgggtgataatataccccttaacataataaaggagttaatgcacattaaatacataaaatacttacatcagtgcttgatgaaaggacaatttaagtgtcaggtgaaaaggaaagaactgtggcccttcagggaccccagacctgggagctccccaaccctgggttgtgactccctctttggggccctgcagttcctggagtctccaagcttctgggcaacaccacattccctggtggcagccgtggaagctgcttgcagggtgcctggtccagctgcagccttgcagagagtcggtgcctgtgccagcacctgcagctgccctgccctgcagcagcagccagtaaaatctataggacttggtgatgaattctgttttgacgatgacgtggatgattcccaagcttctgacttgggtcactgataaggttagcctttgtgtccccacccaaatctcatcttgaaatgtaatccccaggtgttgagggagagaccttgtgggaggtgattggatcatgggggcagtttccccatgctgttcttgtgatagc

SEQ ID NO: 461864 - DNA, 1479 bp, Homo sapiens
tatgaactttgttgacgaatgtgttctctgcacagctaacccagagaattcattccaccctcaggagaagccctagaagtgatacaggctctggccgggggacccgatgtgctcgtgtcgcggcgtggggcttggtgaggaaccaccggagtgctcttgcatttttcatgacaaagaccacacagttggcctcattcctgcacagtgggagaatgtgtggaggtgtcccgccaccagagaggaggtctatgtcagcaccatcaccagcatccaggctacctacaagaggaggcagggggactcctctgacacacctggggaggtctcgtcaatggcaggttccctctacaatgctttctctgctgcaaatgcaactcagcatcacctctttcctggatataattccaaggaattattaaaggaggcattggtgtcagcacctcgtgaaatactcgtaaggatgacccatggcagagcctgtgtcttcattggactggaaggaaggcagactctggtgaagacgtgggccgtcaccgtcagccttcggtacttgaagagtggttatccctgctgtgttcgcttaatttatgacgaatcatacagggacatccagtttttcagtatcaaatactgctttggaaggcttcccggacagcgtcccgccttcaggcaaggggtcttggcttcacctcccacccaagtaccaaatgctacctctaaggacttcctggacacaatggcagcttcaggaaagatagtctttgtgtcaaccatgtggaaaagccaagaatggatggcgggccatggacaatgcgctgacctagctggtcccatccaccctcagaggccactcccaagctgcccaggctgtgcagaagatgcaggaatgctgcgagcagtgccacctcatggtactcggagggaggttgtccgtggtgagttcgcattatttaatgatgcccaatacacggtcgacctcttttcggtatcagatctcaccaggtgtcttcttggacctgatgccgatttaggggacaccatactcattgtcaccttccaccctggcaggatgccttatggcaatgccacttctgagatggtcgtgggagtcagcaccactggccagggggacttcctggaggaggccaactttggagaacaggcattgacattgggtctgcgctagcgtgtggtacttgaagatagagctactctgtggtactggtggagaggtcttccatgatgcattcgatttattttttgaccaatcctacatagtggactcttttgaaagcattaaatctagccttaaagcaccctcgggtggtgccgagtttaggaactagaactggtgtctgaatgcctgaacgcacggcgaagctgacagtgtgcacactcttcttggtgggtcgtgcacctgcaggcgtcctgcttgcttaccatggcagtttcctcgaaagaggcggcagttccctcatc

SEQ ID NO: 461865 - DNA, 4474 bp, Homo sapiens
cctcccgcgcgatggcctcggcgctgagctatgtctccaagttcaagtccttcgtgatcttgttcgtcaccccgctcctgctgctgccactcgtcattctgatgcccgccaaggtgtgtgtccagtacatgaaggacaccaacatgctgttcctgggcggcctcatcgtggccgtggctgtggagcgctggaacctgcacaagaggatcgccctgcgcacgctcctctgggtgggggccaagcctgcacggctgatgctgggcttcatgggcgtcacagccctcctgtccatgtggatcagtaacacggcaaccacggccatgatggtgcccatcgtggaggccatattgcagcagatggaagccacaagcgcagccaccgaggccggcctggagctggtggacaagggcaaggccaaggagctgccagggagtcaagtgatttttgaaggccccactctggggcagcaggaagaccaagagcggaagaggttgtgtaaggccatgaccctgtgcatctgctacgcggccagcatcgggggcaccgccaccctgaccgggacgggacccaacgtggtgctcctgggccagatgaacgagttgtttcctgacagcaaggacctcgtgaactttgcttcctggtttgcatttgcctttcccaacatgctggtgatgctgctgttcgcctggctgtggctccagtttgtttacatgagattcaattttaaaaagtcctggggctgcgggctagagagcaagaaaaacgagaaggctgccctcaaggtgctgcaggaggagtaccggaagctggggcccttgtccttcgcggagatcaacgtgctgatctgcttcttcctgctggtcatcctgtggttctcccgagaccccggcttcatgcccggctggctgactgttgcctgggtggagggtgagacaaagtatgtctccgatgccactgtggccatctttgtggccaccctgctattcattgtgccttcacagaagcccaagtttaacttccgcagccagactgaggaagaaaggaaaactccattttatccccctcccctgctggattggaaggtaacccaggagaaagtgccctggggcatcgtgctgctactagggggcggatttgctctggctaaaggatccgaggcctcggggctgtccgtgtggatggggaagcagatggagcccttgcacgcagtgcccccggcagccatcaccttgatcttgtccttgctcgttgccgtgttcactgagtgcacaagcaacgtggccaccaccaccttgttcctgcccatctttgcctccatgtctcgctccatcggcctcaatccgctgtacatcatgctgccctgtaccctgagtgcctcctttgccttcatgttgcctgtggccacccctccaaatgccatcgtgttcacctatgggcacctcaaggttgctgacatggtaacacagctgtttttatttactcccgtcggactataacgctgttgtcataagggatgccccatttatgaatgacagagtttcaaaacgatgtcatgtgacttgggaatgccacggaacatccagacctgtagccattgttgacatttataatgcagcttttcttctttttctgagatgatctcaagcctcacacactgttctttctctgaggtgaaaacaggagtcataatgaacataattggagtcttctgtgtgtttttggctgtcaacacctggggacgggccatatttgacttggatcatttccctgactgggctaatgtgacacatattgagacttaggaagagccacaagaccacacacacagcccttaccctcctcaggactaccgaaccttctggcacaccttgtacagagttttggggttcacaccccaaaatgacccaacgatgtccacacaccaccaaaacccagccaatgggccacctcttcctccaagcccagatgcagagatggtcatgggcagctggagggtaggctcagaaatgaagggaacccctcagtgggctgctggacccatctttcccaagccttgccattatctctgtgagggaggccaggtagccgagggatcaggatgcaggctgctgtacccgctctgcctcaagcatcccccacacagggctctggttttcactcgcttcgtcctagatagtttaaatgggaatcggatcccctggttgagagctaagacaaccacctaccagtgcccatgtcccttccagctcaccttgagcagcctcagatcatctctgtcactctggaagggacaccccagccagggacggaatgcctggtcttgagcaacctcccactgctggagtgcgagtgggaatcagagcctcctgaagcctctgggaactcctcctgtggccaccaccaaaggatgaggaatctgagttgccaacttcaggacgacacctggcttgccacccacagtgcaccacaggccaacctacgcccttcatcacttggttctgttttaatcgactggccccctgtcccacctctccagtgagcctccttcaactccttggtcccctgttgtctgggtcaacatttgccgagacgccttggctggcaccctctggggtcccccttttctcccaggcaggtcatcttttctgggagatgcttcccctgccatccccaaatagctaggatcacactccaagtatgggcagtgatggcgctctgggggccacagtgggctatctaggccctccctcacctgaggcccagagtggacacagctgttaatttccactggctatgccacttcagagtctttcatgccagcgtttgagctcctctgggatcgttgagattgagcagcgcttggtgatctctcagcaaacaacccctgcccgtgggccaatctacttgaagttactcggacaaagaccccaaagtggggcaacaactccagagaggctgtgggaatcttcagaacccccctgtaagagacagacatgagagacaagcatcttctttcccccgcaagtccattttatttccttcttgtgctgctctggaagagaggcagtagcaaagagatgagctcctggatggcattttccagggcaggagaaagtatgagagcctcaggaaaccccatcaaggaccgagtatgtgtctggttccttgggtgggacgattcctgaccacactgtccagctcttgctctcattaaatgctctgtctcccgcggaaagctccactgtgctgctgacttgtctctggttttctgcagtgtggggagcccagggaggtggatgaatgaacagttaccatgaagggctttggccttatagggcttgtagggaaagaagcaaagtgtttggttggggagggaagtagggaaaaggctgccacctccccccaccaaggtacaactgctgacttccttcctccccagccctctatcactgccctctgtgccgctgccgttgactggcctgccccaccagactgagggctctgactgcccaccgagtctagtgtcagcattatggctgacccagagcaggctatacagttagtatgatggataaataaatgattggtcagtgcagtcaattaggtgcaagctgttggtagtaggcaaggtcaatgaaggtcatccaagcctgggcgacagagtgagactctgtctgaaaacaaacaaactacagctggctgtcctattcttagtccacaatcccttcctccaggtactttctccccttagtcacacagcctctgaaaagggtttgtgtcccaacctaccagaaacctttttaaaaatctattcacacacacacacacaagttttatcaagataaatcctccataccacgggatgggcttttacatttctcaaccggaagtttgccatttcaggctgaatctctgcaatcaagattccgtttatctcacttggcttcctgagccaggactcaggtgtactctcttccctaccccaggagcatcttccagcagcttccctgacctgcttgtacaaatgcccccttccagctgcagagccacaggccacccatggccggcagtggtgtccctgcttcctgctatcaagggcagagaaatattaaagttcaatctcagaacaccctgttatctggtcaagaaatttttaaactactttttatagtaaaaaattaatatgaacacaacctttagtccccaaaccatccacaccgaaagggaaccgctgtcaacagtttcttacacattctcctagaaatattatataatctagaaacattatgtaatagatatccattaactgtattacatatgggagcatactatgcacattttctgtgcttgattctacctacccccctccaccaattaagaatttatttggagatcattctatttcaggacatactaagtttggctaattgtttttattcaatagttaatgttagttttaaacggatgtgagatt

SEQ ID NO: 461866 - DNA, 669 bp, Homo sapiens
agagtgagaccctatctctacaaaaaaaattttaaattagccaagtgtggtagcatgtgcttacagtcccagctactccagaggctgaggggattgcttgagcctgggaggtcaaggctgcagtgagtcatgatcatgccattgtagtccaacctgggcaacagagcgagaccatctcaaaatgaaaagtgataaaaaaataaaaacaccaacatatttcaaatcactcttggaatagtcatgttgactctccaatatccactctattctgattagttttaacccattctctttgccaatgattggttaggaatggccatgagatgtgagtagaagccccctggacagcctccaaaagagaactgtgagaaaaggttcttcaatcctaaaaatgatggaggaaaaaacagtccctcttcctcagacagtgacacctcaaactgctacagtcacctttgcagcaagtctgaagatgccaccaacatcaaagggaatggagagttggtccttggtgatagcattaagccactgtatcaaccaatcctgacaatttgtatgacttctggatttccagccacattacaacaatgtaacaataaacatttattaattgcttaagccaatttgagttaggttccttatataataaatgaagtcaaaaaacaatga

SEQ ID NO: 461867 - DNA, 1482 bp, Homo sapiens
acgcattactctttaaacatggcgccgcctttttaaatagaacgccaaaggaaaagctggcgaacgaggcggcagctcctggggaagggcccccgcacacccccgcccttggggcgactcccagcccggacccgcagcagggaagcccggagaggccatttaaagttccgggggatttttctaccctgccctgcctttctagttacaactaacaaagagagagagaaatgggagccacagggagagcgaggagaaggagaaagggcagcaggaggaggaggagaggagcagcagcagcacctaccacgtgatggaggagcccccacaaaatgggcgcagtttgcaaacagccccccggcctgggcgccgagggccagcggcgggcgggggcgcgcgacggcggctccggcccgggcccgccgctctcctccccccgacgcccggagccgccctgactttccgggcgggggggcgaggcagagggggaggggaaggcggcggcggggagcggctgctttttcttctctttcgggccctttcccggccttgctccgcaccgacggggcccgagcacggctggagaccgcagcccggccgggagggcgggcgggcgggggcagagagtgaaaccgcccccccgccccgcacaaacaagcaccgccgccgccacccccggccgcctctttccagccggggagcgcgcttcagccgccccccgcgccgccgcggcgagacgagtcggcttcgctacggtgctcggttctcccgccggctcggcgagcggtggcggcggtggcggcggcactgggaaaatggcggccgagctccttttccctccccccctttaatctgaagcggagggagaatggagcgagcgagcaagcgggcgagcgccggggacacggggaggagggacagcagcgcctccgccggctgcggctgcggcggcgaagggccgctccaccccggcgcgccgccagggggcgcccgccgcgccgcccccgcgggccgccaggaggcgcggccgccgccgcctcagtcatggctcctcgccgtggccgatgtttttgtacctccatctgcggaggccgcggcgcccggccccagctgccccggacgtgcggcgacggcacgcagcactgcggcagggggaagccagccctcgctgcggccgaggaatggccatgagatgtgagtagaagccccctggacagcctccaaaagagaactgtgagaaaaggttcttcaatcctaaaaatgatggaggaaaaaacagtccctcttcctcagacagtgacacctcaaactgctacagtcacctttgcagcaagtctgaagatgccaccaacatcaaagggaatggagagttggtccttggtgatagcattaagccactgtatcaaccaatcctgacaatttgtatgacttctggatttccagccacattacaacaatgtaacaataaacatttattaattgctt

SEQ ID NO: 461868 - DNA, 1535 bp, Homo sapiens
acgcattactctttaaacatggcgccgcctttttaaatagaacgccaaaggaaaagctggcgaacgaggcggcagctcctggggaagggcccccgcacacccccgcccttggggcgactcccagcccggacccgcagcagggaagcccggagaggccatttaaagttccgggggatttttctaccctgccctgcctttctagttacaactaacaaagagagagagaaatgggagccacagggagagcgaggagaaggagaaagggcagcaggaggaggaggagaggagcagcagcagcacctaccacgtgatggaggagcccccacaaaatgggcgcagtttgcaaacagccccccggcctgggcgccgagggccagcggcgggcgggggcgcgcgacggcggctccggcccgggcccgccgctctcctccccccgacgcccggagccgccctgactttccgggcgggggggcgaggcagagggggaggggaaggcggcggcggggagcggctgctttttcttctctttcgggccctttcccggccttgctccgcaccgacggggcccgagcacggctggagaccgcagcccggccgggagggcgggcgggcgggggcagagagtgaaaccgcccccccgccccgcacaaacaagcaccgccgccgccacccccggccgcctctttccagccggggagcgcgcttcagccgccccccgcgccgccgcggcgagacgagtcggcttcgctacggtgctcggttctcccgccggctcggcgagcggtggcggcggtggcggcggcactgggaaaatggcggccgagctccttttccctccccccctttaatctgaagcggagggagaatggagcgagcgagcaagcgggcgagcgccggggacacggggaggagggacagcagcgcctccgccggctgcggctgcggcggcgaagggccgctccaccccggcgcgccgccagggggcgcccgccgcgccgcccccgcgggccgccaggaggcgcggccgccgccgcctcagtcatggctcctcgccgtggccgatgtttttgtacctccatctgcggaggccgcggcgcccggccccagctgccccggacgtgcggcgacggcacgcagcactgcggcagggggaagccagccctcgctgcggccgaggaatggccatgagatgtgagtagaagccccctggacagcctccaaaagagaactgtgagaaaaggttcttcaatcctaaaaatgatggaggaaaaaacagtccctcttcctcagacagtgacacctcaaactgctacagtcacctttgcagcaagtctgaagatgccaccaacatcaaagggaatggagagttggtccttggtgatagcattaagccactgtatcaaccaatcctgacaatttgtatgacttctggatttccagccacattacaacaatgtaacaataaacatttattaattgcttaagccaatttgagttaggttccttatataataaatgaagtcaaaaaacaatga

SEQ ID NO: 461869 - DNA, 1570 bp, Homo sapiens
acgcattactctttaaacatggcgccgcctttttaaatagaacgccaaaggaaaagctggcgaacgaggcggcagctcctggggaagggcccccgcacacccccgcccttggggcgactcccagcccggacccgcagcagggaagcccggagaggccatttaaagttccgggggatttttctaccctgccctgcctttctagttacaactaacaaagagagagagaaatgggagccacagggagagcgaggagaaggagaaagggcagcaggaggaggaggagaggagcagcagcagcacctaccacgtgatggaggagcccccacaaaatgggcgcagtttgcaaacagccccccggcctgggcgccgagggccagcggcgggcgggggcgcgcgacggcggctccggcccgggcccgccgctctcctccccccgacgcccggagccgccctgactttccgggcgggggggcgaggcagagggggaggggaaggcggcggcggggagcggctgctttttcttctctttcgggccctttcccggccttgctccgcaccgacggggcccgagcacggctggagaccgcagcccggccgggagggcgggcgggcgggggcagagagtgaaaccgcccccccgccccgcacaaacaagcaccgccgccgccacccccggccgcctctttccagccggggagcgcgcttcagccgccccccgcgccgccgcggcgagacgagtcggcttcgctacggtgctcggttctcccgccggctcggcgagcggtggcggcggtggcggcggcactgggaaaatggcggccgagctccttttccctccccccctttaatctgaagcggagggagaatggagcgagcgagcaagcgggcgagcgccggggacacggggaggagggacagcagcgcctccgccggctgcggctgcggcggcgaagggccgctccaccccggcgcgccgccagggggcgcccgccgcgccgcccccgcgggccgccaggaggcgcggccgccgccgcctcagtcatggctcctcgccgtggccgatgtttttgtacctccatctgcggaggccgcggcgcccggccccagctgccccggacgtgcggcgacggcacgcagcactgcggcagggggaagccagccctcgctgcggccgaggaatggccatgagatgtgagtagaagccccctggacagcctccaaaagagaactgtgagaaaaggttcttcaatcctaaaaatgatggaggaaaaaacagtccctcttcctcagacagtgacacctcaaactgctacagtcacctttgcagcaagtctgaagatgccaccaacatcaaagggaatggagagttggtccttggtgatagcattaagccactgtatcaaccaatcctgacaatttgtatgacttctggatttccagccacattacaacaatgtaacaataaacatttattaattgcttaagccaatttgagttaggttccttatataataaatgaagtcaaaaaacaatgaccggaaacaaaaaaaaagttggcggcctcgtgccg

SEQ ID NO: 461870 - DNA, 1682 bp, Homo sapiens
acgcattactctttaaacatggcgccgcctttttaaatagaacgccaaaggaaaagctggcgaacgaggcggcagctcctggggaagggcccccgcacacccccgcccttggggcgactcccagcccggacccgcagcagggaagcccggagaggccatttaaagttccgggggatttttctaccctgccctgcctttctagttacaactaacaaagagagagagaaatgggagccacagggagagcgaggagaaggagaaagggcagcaggaggaggaggagaggagcagcagcagcacctaccacgtgatggaggagcccccacaaaatgggcgcagtttgcaaacagccccccggcctgggcgccgagggccagcggcgggcgggggcgcgcgacggcggctccggcccgggcccgccgctctcctccccccgacgcccggagccgccctgactttccgggcgggggggcgaggcagagggggaggggaaggcggcggcggggagcggctgctttttcttctctttcgggccctttcccggccttgctccgcaccgacggggcccgagcacggctggagaccgcagcccggccgggagggcgggcgggcgggggcagagagtgaaaccgcccccccgccccgcacaaacaagcaccgccgccgccacccccggccgcctctttccagccggggagcgcgcttcagccgccccccgcgccgccgcggcgagacgagtcggcttcgctacggtgctcggttctcccgccggctcggcgagcggtggcggcggtggcggcggcactgggaaaatggcggccgagctccttttccctccccccctttaatctgaagcggagggagaatggagcgagcgagcaagcgggcgagcgccggggacacggggaggagggacagcagcgcctccgccggctgcggctgcggcggcgaagggccgctccaccccggcgcgccgccagggggcgcccgccgcgccgcccccgcgggccgccaggaggcgcggccgccgccgcctcagtcatggctcctcgccgtggccgatgtttttgtacctccatctgcggaggccgcggcgcccggccccagctgccccggacgtgcggcgacggcacgcagcactgcggcagggggaagccagccctcgctgcggccgaggtgagtctaacctgaggcactgacgccgtcacatgccctccgtgctggggccggcggtgcggctcgccagttgaggggcagggcgggccggcgccgcggagcgagaggacgtgagcgaggaactgtttgcactgtgtagtaaagagggaatggccatgagatgtgagtagaagccccctggacagcctccaaaagagaactgtgagaaaaggttcttcaatcctaaaaatgatggaggaaaaaacagtccctcttcctcagacagtgacacctcaaactgctacagtcacctttgcagcaagtctgaagatgccaccaacatcaaagggaatggagagttggtccttggtgatagcattaagccactgtatcaaccaatcctgacaatttgtatgacttctggatttccagccacattacaacaatgtaacaataaacatttattaattgcttaagccaatttgagttaggttccttatataataaatgaagtcaaaaaacaatga

SEQ ID NO: 461871 - DNA, 670 bp, Homo sapiens
gaaaactggcttgtgatccttcagaaagacccataattaggtcctttaaaaatgacggtcaagggaggagtccggggaaaagttgatagacccagggtggctacggtcctgaaagtgcacaatgcgagggataaacttgtagcacagattgcaggcctgcaggcatccaaagatcaacaactatttgatggaatcattgttgggtctcctggcagaagtatttctccttttggaactaagaccttcaggcaagcagagcataaggtcacaggaacaggagggcaagtgcttcaagatggtgaggaacatgataaaaccaatgaagtccatgaacataagcccatcgccacacttctttgctatgaaaagcaaatgaatatattatctgtccgaagcaagacatggggcaaatggatctatgagtcgtgggtgattgggactcctcgctcgcgtgggggtgtgactgtacttcagaactcattttcaccgatgctgacatacaagacagtcctcggagacctgtctatcaaactgcaacatgctctgcagaaaaattagattactcatgctcagacagagggggcgatggcaatttagagtggccccttaaatgccaattacacttgtatttacaaaacaaattaaacccacgtataggacattgttcaca

SEQ ID NO: 461872 - DNA, 4860 bp, Homo sapiens
gcagtagtggcagctgggaccgcggttcagtcaccaatatgcagctctttgtccgcgcccaggagctacacacccttgaggtgactggccaggaaatggtcgcccagatcaaggctcatgtagcctcactggagggcattgccccggaagatcaagtcgtgctcctggcaggtgcaccgctggaggatgaggccactctgggccagtgcggcgtggaggccttgactgccctggaagtagcaggccgcatgcttggaggtaaagtccatggttccctggcccgtgctggaaaagtgagaggtcagactcctaaggtggccaaacaggagaagaagaagaagaagaggaagaagaagacaggtcaggctacgcggcggatgcagtacaaccggcgctttgtcaatgtcgtgcccacctttagcaagaagaagggacccaatgccaactcttaagtcctttgtaattctagctttctctaataaaaaaaaagccacttagttcagtcaaaaaaaaataataataaaataaataaataagactgcagaactgccttgaactgctaacctctgtctctgcaggaacagtcacgaagctgtcacactgctgcttcagttaagctgtttcctctggcttgcccttgaattctttcctgggcaaagccaagaacctcacaggataagccccactttggggctcacctactctgcatccccctcacaccaggctggcagtcagttcatggcctgggtttggaatccaggtgattgtaggcagcaggtcctaggacctgacccccagtgctcctcccctggcctcgtggccatgttatctctgactttctcagaatgcaggcagaccacactaggattcattccatctcccacggtctaggaaaacatttgaaagacaaagattaatgactagggttagggatccgggaaggaaggcgaaaaacaagaggaaagaatttgttggtgggtgtcagatggtatctggagcctgcaggaactgcatcctctacaacgagctgagcagacacttcctgaagagctaatttcaccatgaggcaggctttgatccagttaatctggagaagttgtgaagatcacaggttcatcatttcctccccaggttcagactctgtcacaatcaagagaaggaatggaatggtgagtgtcatctctctggacagtctacggaaagccccaggaccaggcttaaagagcctgggccctgctggcagggaggggaaggcagctctgcctttgtgatttgaacaaaaccaaggctgtcctcaccgagcgtagctatgtcacttccactgctttcctggcagagaaatgggctgtgttccccaaactccatgcagagagctccaaccccaaccttggcttcctcaaactgaaaccaggttcaggaactgtatcctgctgggggtgcccaaactaaatctgacaaaggaagggccaagactccatggatttaggaaccactgtcattgaagatgcactgtgctttggggaccatcaaccgggctggcaccgtcaaccaggagcacctcaatggcattttcaggcctattctgcctgtgacccacagtaggtcctgcatggattgactttggggacccattgcaggtgctactcagccctctctgccctcagggagtcaacacatgagatggagttgtgcagtgccaggtacctccatgccatagacatgtctctgggaagttgcatgtacatcaaaccatttgcctacctgctgttggattttccagtttctgaatctgctgttgcatccacatttccaggttccaaaaccctacccattctctgaggcacaactgcagcctcacccgttgctaacactttcctggcagcctcaggcagcacaccccatcagctttgaactggtcccagcaggcccaaggggctgatgaaatttcattgcactccaagccaggaattttaaagccttccccagcctctttgtatctggtcattgattaacattttactggcaatgccttgtgtgtgcctacatatttatttctaacatttatattctcaattaatgagaaacatactaatataggacccagacaatacagagaggtgtgtgcaggaaacaggtgactttgtacctgcagatccttttcatttttgttccttctgtaaacaaccattgttctggctacaaaactaacaacaaaagaaaagtatctagttaatttcatgtaagaagcaacactgcactttttttggctggttgaactagcacaataataaataacatatataaaaacaactcatttcaggatctcagaagttcttttaatattttctcaggtgctgggtctgaaaagaaaaaaatgaaataacacgagaatggccctgaaggagttgatggcctgggagggaggtggtacacccaagtaaatgtgagatgacagctgcgtataagctccatggacgtgagaaaagggggagcagtggaggtgggctttagagctatgccaccttgagaaacgcatttctggccaagaggaaagatcacaaaggcctgggagaagggctgactccctttcccttattaggactccataggtgggagagtcagaacgcagtagctaagaggaaaacggtgctgagaaaatgcagtgggtgcagatgaactgcagctcagcttcaaatctaggttatcaaatcttctcagagcaaaattcattttggtttctgcttacctttttggttttagacaggtaattccttatattattttggttctttgatgtttctataaactttaaaaaatccgtcatgatgagctgtggtccatgagaggcaaatttgaataacctaggctgccaatggccccagcagaaagccgttagttttcaaattctgattcagacctaaacaagagtttagaactaaagaggaaaagaaggtagtgaggctctctttgcttaatatatttatatattgcttaatatgcttatttgttttagtatggcaatattggtaaatagcagaactagaaatgaatttgaaaatttatataaaatttttattctcagaaataaaactttgttgttctgtgagttatcaggagaataaaaaaaaagactccataatggtttaaacagtttgtttataaaattccattatgttattcattttagctaaatgattatactgatgtgtgttccctctaagcactgacccaggactttattttaaggcagcttaactcatgttcttcagagatttgaagattttatttcaaaattattttagtggtgaagtagatatagaataaaccacacaacaattatgttttgccaattttctccttgaggatgactgcagatttgtacttcttatgcaaggaatacaggctgttaagtagaaataattcctttcgatgctttggaaagaagctagtggaacaaaatttaaaatattgtgtgtatactctctatataatttcatagtatcaaagtgtataatatataacctttgaatgcaaatagcaaaacatttcttcagtatttttaaattcagggatttcatagtacaatgaatatatatatattagtaatcaggatgatctttgtggaatacaataaaacattaatgcattttattttttatggaaattagaaaaaattttactgcagaaaacaagagtaaaaatatatgtaatatttaaaaattcagtcatattactcttcaataaactgactacttatgagttttcttctgttaatattaagtgtctattcataacacagcagccagaaaggtcctgttgaaacctaagtcagatcacttcacttctttggcctcaaccccatttcagtcagggtaaagcgaatcctcctctctgctgcttttactctggcctgggctccccctgaaacattttgcaaacacacaggttgttccttatgcctgggaagcatatccttcagatgacaactccatgtgctctcttcgttcaagtctctgctcaaggaagcctcacccttactatttatcttaccttactctgtttatttttccactgtacttgccattttctaatgcattatataatttaattacgtatgcttatcatctgtgtctgcctgctagaatgtaatttcagtgttcacagatatatttcaagtatctacaataatggttgcacatagcaaatactaaaatatgtgtcaaatgaaagaataaaacttttgagaataaaagttctgtgaagcactaaggacctaaggtagtttacatgggtccagcagcaaatgtatgtgaagaaatggaaccacagagggaaagaaatttgtaatttatctaagcctttccattcctatacagtcactctgacatatgaaaactacatctattagaaatacctttattattttcaattttgaataagacactatgtaacgtacaacaaagtgaacattttaaacatcaaaacataaggaccatgacattcttaaatatttataaatactgactattcctaagtatcaataaatacccaatatattagcagtttcagcataataccccatcatatgcaatttgaaaacagagcaaaattggtcaactggttagtcaaataaaagctaatcattaacaagttcattttttttttacctttttactacaataagcaacaaatgcaaataaaaatgtgtaattatgatatataataaaaataaaaacaaatatagtaagcaaccaatactgtgaaacctaatatatgagtatatgagaagcacttttgcattcctagaaatatgattcttggcatttattttgacattgccatatattttttaaagtaatc

SEQ ID NO: 461873 - DNA, 1182 bp, Homo sapiens
ggcacaggctccaactcgggctccaactcttagtaaccgaatgtaaggggctcgttggagaaggtaggcaggcggcgccattgtcacctctgtggacctgtctactgtccacacatctggactttggggacaccactttctggctctttcagaccacacacccccaacggccaggacacacaacactgtctggaagtcattcaacagaaccatgaaagacgtgtatctaaagaccatgagggcagtgctctccgctatatcccgggggctctattctgcatgtttcccaccactattacccatcacagaagctggcactgaacgggaactcagtgaattgtgggtggatgaaaagaggccaagaacattcagtgaccgtgcccaggtccagacaagcccaaccttgttcattcgctccacgcatagctacagaacacaaagaggctttgtgacaggcctgcccttgatgcttacggagaacaacagaggaaaaagttttgatgaggagggaattgtccccagagccaaatgctacggaaaggtcagagaaattgggggtcgagaagaagccattggattgggaaggggaaacagcacgaagttacattgggaaggacagatttgaagacagagtgctcaccgccacagggctggctcaactgtgagaaatgttttccctggagatctgacacagacgtggcacagtgttggggtttcaatggggcttcctatgtttgtctgtagaataaagtttttttttttttttaagacgaagtctcactctgttgcccaggctggagtgcagtgatggttttacaggaccttggtttaaaagtaactagacacctggaagtactcccagggaggtgaaaaatatccaaagacaaggatccagcctgtggatggagactggaaagtggctgcagttatatcacacagagagtgctgcgatgcctaggaggaccaggtacgtgtgccctgtctctttcagaagcttcaggcctggcttcaggcttctgtcctgcttggcattcgcctgtggtttccaactcctccgaagtccagcctttgctgctgtgcggggattgtctgccctctactgtccatcgtctgtcatggcacacatttaacagatggccaggaactcaagagggggcactaattgggagaaaacttagagac

SEQ ID NO: 461874 - DNA, 2205 bp, Homo sapiens
ggcctggcttcatcacggattagtgttcttataagaagagacaccagagcatgttctttccagcctgtgaagacagagcaagcagaaagggagcccacaccaggacccaaacatactggcaccctgatttcagacttccagcctccagagctgtgggaagtaaatgtctggtgtttaagccatccaacctatggtttttcattatggtagcccaagccgacagacagtatccaaatttaggcttccagtactttagacacatcatttggatctcatattctgaaattgtaaattatgcctttcaactagatgttagtaagaacctggtacaatggagaaaaatgatgaaagattttcctatgggcaaggcaagccaaacaggcagtggtgctggggacttgcaagagctaggagaatgtattcttccatgttctttaaagaggaaggagacaatgagctctatacaaagtcgcccgcagagaacacaaaggctttctgcaccctggcactagtaatctgagacttttgcccagattttaaaactttgcaatccatttaaaattatgaactagaagcagtgtttgcaatgcttttttatttccgtactataaataaagtactataaataaatggctgtacatttaagtctttgaaactttaagtgcatttaaattataaggcatgggcatgaatgtataaacagtgctgatccaattggattatggattgagagtgtgtgttttagttctttatttttttaaacatatggacttggaaaagcatggatggccttagaggagaaaggaatatgtgtagagtgggggaagcatattcaaattccagataattgcagctttgtgaggttatactcttttacctttcagtagtggtttaacaaaggggtgtcagtagcaaagccaaatttctgggctttggagggtatttattagagagagagggaaattttcatatgttcggtaagctgaaaattacgtcaacatacttgtggtataaatgagttgtggttcttgaagactgtaaagctgcgactcaccaattcgggatagctgactttcttagctctcatcttccattggtaggtgtgtgaataacttctttatcaccaactaaatagtcttctaggactttatcacccttttcataagattatgtgtgtcctggtggcgagaagcctgagccaagttttgcaatacaaaagcatgtaaggaagcattctgaagacagtctaataaagaaatcatggtgtccatatatcagtttttctgtattcccgagtattcatgcacacgcataaacatgtcgtaagatatgggtatttatatgaatgattgtatgcataaatgtttgtatataaaaaggcatgtttacaatcttcattctaaccttcacatttcctaaggaattactgtattcaacagtcaccaatggcagcgcctccgcgtttgatgcgggacgttcctgtgggagggagcggctggatcacagttcggtgtgcggctggctctgctcacatcctcgtccttggcattacagcgtttcttcacaaatgactcttgaccgacaagcaaacaccaccaggcatctggatgagcggcgtgtcctgctgctgattattttgaaatagcagcgatgttttgaaacaggcatgtctccgttggcagataagaaagacgaagtgaagtgaggcaccagcacaccacagtgctccgtcaagctcttgtctattaaacaaacgacatatcccaaattctactgatacatgaatcaagagaagcttctcaagttatagatctcagagtaaatatatataccatcctatcccaatccatcttgctctaaatactgctttttttgaggctgtcaaaagcacaagctgccatggtaatgacaggaagatatgggtgaaatgccagccctaattagagacttgattgctctgtaataacaaggcctgtatttgatttggacggttctgggttgtcaggtaaaatgaattaaatatgtctgcactttcatttcaaaatgtgaaaaatgtgaatgtgcattatttatattgtatttcatggctataattaattatgtgtctgtggacatgatgtcccaaagacagttgattttatgttcaatctgtatgtgcatttgtaaaactaatttgttctcattaaaatttttaagggtttattc

SEQ ID NO: 461875 - DNA, 371 bp, Homo sapiens
agaaatgcactcctattctgtacctttatacagtggtaagagggaaacggtttacatgtgtaggtggacaaagaagaagagtttaaatgaagcattacatagttaaataaatacgggcccttagtataagaatgcaaatgtggagaagacttgcttgatagggaaagtaaaaatggcctcctctcccatgtactaatagccgtaaatactttttcagggcccacagcctgtcacccacagatcaccaagcagctttctacctggctctgcagcttgccatctccagacaggtcagtttctctaatgtttcctatacttgctgcactctgtatcttgatacaactccttcagctcttcagtttgaagtggta

SEQ ID NO: 461876 - DNA, 2216 bp, Homo sapiens
tggtggagggtgcagggtcctgggctcctagacgacacctggtcatgcacaccctcctgtgaagaagaggagtcggggtggactatggtcctccctggctggcctgagggtcttctctggaaacaggactgaggtttaactgagagtcactgctgtgggtgtccctgccctgttacacccggctctctgcctctccacgcctgcacctgcgcagcagcgtccctggggagtacccgtcaaccctgttgactacttgcaaatggtgaccaaagaccgggaggagcaccgccgctcttcagaccgggctgccacagccttcacttctctcctgacccttcccttctgcaggcacgggcacaggcaccctagacttccctgctaaaggctccctgaacccccatcgctgtctaaggactggcccagccccctgcaaacccttccctagcaaaccctcagtccattgctgctgatggaactgagcgctctccacatcttggcatcacgactctggcgcattcccccagcatcaggagatcagagaaacacaaaggccctgaatccgcatagcacttgggtagcagtttttacacctctctgcaactatgaaacccattgtttaaataaaaatttggcaagcctgggatgtaaaaccaaagcagcaggagaagtgcagggtctgcggattctgcaaaggccctcagttgggttctgggaattctgtttggagaccgatgacatggcagagcttctcctcggggagtcgaagctggagcagtacctgaaggaacaccccctgaggcagggggccagtccccgaggccccaagccccagctgactgaggtccgcaagcatctgaccgccgccctggaccgagggaaccttaagtcagaattcctacaagaatccaatctgatcatggccaagttgaattatgtggaaggtgattataaagaagctctgaacatttacgcccgggtgggcctggacgatctgccactgacagctgtcccgccctacaggctgcgggtgatcgcagaagcctacgctaccaaagggtcacgctccgttgccaggctggtgtgatctcggctcactgcaacctctgtctcccaggctcaagcgatcttcccacctcagctgggactacaggcatgcaccatcctgcctagctaatttttggtattttttctagagatgaggttttgccatgttgcccaggctggtcccgaactcctgaactcaagagatcctcctgccttggcctcccaaagtgctgggattacaggcatgagccactgcacccggctttattgttcttaatatagacaaaatacatgtgttttatataaaattcagaaatgatgactaatcaaaagaacataaagatatccattacccatctactcaaggcagttgctgttaacactacagtgcatttccttccagatcttctctacacctcctgtatgtgtgaatttttttatataaaagtgggattataccacatatactgctttgtgacctgctttttctacttcactatagatcgtaaacactttccatgacagtatataactttctgcaacatttaagcagctgtataacatttcatagctgtttggaaaataaagaaatatatatatatttctttatttataatatatatattataaatatatacataaattatatatataattatatatttatataaaatttatacatataaatatatatttatatataaaataaagaaatatatacatatatatgtatatacttaatatttatttttaaatatttataaataaagtcagagtttcttgtagacggcatatagttggatcatgttttttaaatccattctgtcaatctccatcttttgattggagagtttaatccatttccatttaaagtaggtactgataagggacttacttctgtaatttgctatattttctacatgccttatagcttttttatcccttgctttctgcattattgtcttcttttgttagttgattttttttgtagcgaaatatttaaatttctcatttccttttgtgtatatttgctagctattttctttgtggttaccatgaagattccatttgatatcttaaagtttaacactctaacttaaatgtataccagcttgactaacatacaaagactccattcctgtaaagctctatccccacccctttctgttacc

SEQ ID NO: 461877 - DNA, 694 bp, Homo sapiens
caacaaaaatgtattgagcttattattgaagtagccactcattacaagctgaaatgattctcatgtccccaaatttctctagccttggttttccattttgattttggagctctggccttcttcccatttacatttcctccttggtttgattacagagggacagatggcaatattaaagagccgagaatgtggttcagagtcatagaacaggacgaaaccaggtgcggtaagcttgtacgttagaatgtacatttcagagcctggaaaggtgctgccatggggcccaagggggaactggaacctatcgccaggacagagggtcgagagggagggttgaatgctggcgaatcagcagacaagccctggaaggaggttcagcaggaggaggataaaaccagatagaaaagataggagagaagaaaagatggaagtaggtcaagggaagagtagactatgtccccatgaaaagtggtaggctttcctgccagtggaaaaacaaggatttgaatgagagcaaggctgtgggactctggcctgagctctccataatgggctgaggacagtgatgttggtgagcggaagcagagctttgcctgtcaggcggaacgagcagctggtgctccggggacctgcaggccctttcctccttggtcccagccgagctgttgggaacgattccaagtggaaggaaatg

SEQ ID NO: 461878 - DNA, 3005 bp, Homo sapiens
tggtggagggtgcagggtcctgggctcctagacgacacctggtcatgcacaccctcctgtgaagaagaggagtcggggtggactatggtcctccctggctggcctgagggtcttctctggaaacaggactgaggtttaactgagagtcactgctgtgggtgtccctgccctgttacacccggctctctgcctctccacgcctgcacctgcgcagcagcgtccctggggagtacccgtcaaccctgttgactacttgcaaatggtgaccaaagaccgggaggagcaccgccgctcttcagaccgggctgccacagccttcacttctctcctgacccttcccttctgcaggcacgggcacaggcaccctagacttccctgctaaaggctccctgaacccccatcgctgtctaaggactggcccagccccctgcaaacccttccctagcaaaccctcagtccattgctgctgatggaactgagcgctctccacatcttggcatcacgactctggcgcattcccccagcatcaggagatcagagaaacacaaaggccctgaatccgcatagcacttgggtagcagtttttacacctctctgcaactatgaaacccattgtttaaataaaaatttggcaagcctgggatgtaaaaccaaagcagcaggagaagtgcagggtctgcggattctgcaaaggccctcagttgggttctgggaattctgtttggagaccgatgacatggcagagcttctcctcggggagtcgaagctggagcagtacctgaaggaacaccccctgaggcagggggccagtccccgaggccccaagccccagctgactgaggtccgcaagcatctgaccgccgccctggaccgagggaaccttaagtcagaattcctacaagaatccaatctgatcatggccaagttgaattatgtggaaggtgattataaagaagctctgaacatttacgcccgggtgggcctggacgatctgccactgacagctgtcccgccctacaggctgcgggtgatcgcagaagcctacgctaccaaaggactttgtttggagaagctgcctatttcttcttctaccagtaatctccatgtggaccgggaacaggatgtcatcacctgttatgagaaagcaggggacatcgcactcctgtatctccaagagatagaaagggtaatactttctaatattcaaaacagaagccctaagcctggccctgctccccacgatcaagaactaggttttttcctagaaacaggacttcagagagcccatgtcctctatttcaaaaatggagggacagatggcaatattaaagagccgagaatgtggttcagagtcatagaacaggacgaaaccaggaacttgacaagaggagtcggaagatttagagagcttctcagagcagttgaaacaagaacaactcaaaacctgcgaatgacaatagccaggcagctggcagagatcttgttgcggggtatgtgtgagcagagctactggaaccctctggaggatccaccgtgccagtcacctctggacgatcctctccgcaaaggagcaaacacaaaaacctacactctcactcggagagcccgtgtctactcaggagagaacattttttgtcctcaagaaaatacggaagaagccctgttgttattgctgattagtgaatcaatggccaaccgggacgctgtgctgagcaggatacctgaacacaagagtgaccgcctcatcagtctgcagagtgcatctgtggtctatgacttactcaccattgctcttggaagaagaggccagtatgagatgctgtcagagtgcctagaaagagccatgaagtttgcctttgaggaattccacctgtggtaccagtttgctctgtccctgatggctgctggaaaatctgcccgtgccgtgaaggtgctgaaagagtgtatccgcctgaagccggacgatgccaccatccctctcctcgctgccaagctctgcatgggctccctgcactggttggaagaggctgaaaagtttgccaaaactgtcgttgatgtgggagagaaaacgtcagagttcaaggccaaaggctacttagctctggggctcacgtacagtctgcaggccactgacgcttctttgcgagggatgcaggaggtcctacagagaaaggcgcttcttgcatttcagagggcccacagcctgtcacccacagatcaccaagcagctttctacctggctctgcagcttgccatctccagacagatcccagaggctctggggtatgtccgccaagctcttcagcttcaaggtgacgatgccaactccctgcacctccttgccctcctgctgtcagcacagaagcattaccatgacgctctgaacatcatcgacatggccctgagtgaatacccagaaaatttcatactactgttttccaaagtgaagttgcagtcactctgccgaggcccggacgaggcactgctgacttgtaagcacatgctgcagatatggaaatcctgctacaacctcaccaaccccagtgattctggacgtgggagcagcctcttagatagaaccattgctgacagacgacagcttaatacaattactttgccagacttcagcgatcccgagacaggcaactctccagaagcatactttcatggttttccttcccttttttcagttagctccgtccatgccacatcggtagcagcctcaagagtggagcaggcactgtcggaagtggcttcgtctctgcagagcagtgcccctaagcagggcccgctgcacccctggatgacgctggcacagatctggctccatgcagctgaagtctatatcggcatcgggaagcctgcagaagccacagcctgtacccaagaagctgccaacctcttcccaatgtcccacaatgtcctctacatgcgcggccagattgctgagctccggggaagcatggacgaggcgcggcggtggtatgaagaggccttagccatca

SEQ ID NO: 461879 - DNA, 291 bp, Homo sapiens
caaggtcagtggaaggggatttgaatagtcagatctcatggacagctgaggctgggagcagcaggtggctgtgatggccttgcccctcctgtccctgaaggccctgcctgccacgctccttagctgagctagccagcaatacttctagctgtccctagtattgatctcttgtttcatcccccacaattttattttattgttcttttaaaaaatttattatttatttacttttttgaaacagggtcacgctccgttgccaggctggtgtgatctcggctcactgcaacctct

SEQ ID NO: 461880 - DNA, 297 bp, Homo sapiens
tttgttgcttaccacacacaagtgaggaagacggacaggcagtatgtcccttgcaggtcagggactgaggcgcaggagttacaggagctgccggtcccgcagctgttgaagtcagtatgcagtcagggtctcctggctctaacacagtttctcctgccccaccatactacactgccctcattttattcttgttacaggtataatcacaaaaatgaaatcatctggaagcatagccccatgatgtgaaatccagcatgggtattgatcctgtcactttaaatatatctgagttacact

SEQ ID NO: 461881 - DNA, 2954 bp, Homo sapiens
tggtggagggtgcagggtcctgggctcctagacgacacctggtcatgcacaccctcctgtgaagaagaggagtcggggtggactatggtcctccctggctggcctgagggtcttctctggaaacaggactgaggtttaactgagagtcactgctgtgggtgtccctgccctgttacacccggctctctgcctctccacgcctgcacctgcgcagcagcgtccctggggagtacccgtcaaccctgttgactacttgcaaatggtgaccaaagaccgggaggagcaccgccgctcttcagaccgggctgccacagccttcacttctctcctgacccttcccttctgcaggcacgggcacaggcaccctagacttccctgctaaaggctccctgaacccccatcgctgtctaaggactggcccagccccctgcaaacccttccctagcaaaccctcagtccattgctgctgatggaactgagcgctctccacatcttggcatcacgactctggcgcattcccccagcatcaggagatcagagaaacacaaaggccctgaatccgcatagcacttgggtagcagtttttacacctctctgcaactatgaaacccattgtttaaataaaaatttggcaagcctgggatgtaaaaccaaagcagcaggagaagtgcagggtctgcggattctgcaaaggccctcagttgggttctgggaattctgtttggagaccgatgacatggcagagcttctcctcggggagtcgaagctggagcagtacctgaaggaacaccccctgaggcagggggccagtccccgaggccccaagccccagctgactgaggtccgcaagcatctgaccgccgccctggaccgagggaaccttaagtcagaattcctacaagaatccaatctgatcatggccaagttgaattatgtggaaggtgattataaagaagctctgaacatttacgcccgggtgggcctggacgatctgccactgacagctgtcccgccctacaggctgcgggtgatcgcagaagcctacgctaccaaaggactttgtttggagaagctgcctatttcttcttctaccagtaatctccatgtggaccgggaacaggatgtcatcacctgttatgagaaagcaggggacatcgcactcctgtatctccaagagatagaaagggtaatactttctaatattcaaaacagaagccctaagcctggccctgctccccacgatcaagaactaggttttttcctagaaacaggacttcagagagcccatgtcctctatttcaaaaatggagggacagatggcaatattaaagagccgagaatgtggttcagagtcatagaacaggacgaaaccaggaacttgacaagaggagtcggaagatttagagagcttctcagagcagttgaaacaagaacaactcaaaacctgcgaatgacaatagccaggcagctggcagagatcttgttgcggggtatgtgtgagcagagctactggaaccctctggaggatccaccgtgccagtcacctctggacgatcctctccgcaaaggagcaaacacaaaaacctacactctcactcggagagcccgtgtctactcaggagagaacattttttgtcctcaagaaaatacggaagaagccctgttgttattgctgattagtgaatcaatggccaaccgggacgctgtgctgagcaggatacctgaacacaagagtgaccgcctcatcagtctgcagagtgcatctgtggtctatgacttactcaccattgctcttggaagaagaggccagtatgagatgctgtcagagtgcctagaaagagccatgaagtttgcctttgaggaattccacctgtggtaccagtttgctctgtccctgatggctgctggaaaatctgcccgtgccgtgaaggtgctgaaagagtgtatccgcctgaagccggacgatgccaccatccctctcctcgctgccaagctctgcatgggctccctgcactggttggaagaggctgaaaagtttgccaaaactgtcgttgatgtgggagagaaaacgtcagagttcaaggccaaaggctacttagctctggggctcacgtacagtctgcaggccactgacgcttctttgcgagggatgcaggaggtcctacagagaaaggcgcttcttgcatttcagagggcccacagcctgtcacccacagatcaccaagcagctttctacctggctctgcagcttgccatctccagacagatcccagaggctctggggtatgtccgccaagctcttcagcttcaaggtgacgatgccaactccctgcacctccttgccctcctgctgtcagcacagaagcattaccatgacgctctgaacatcatcgacatggccctgagtgaatacccagaaaatttcatactactgttttccaaagtgaagttgcagtcactctgccgaggcccggacgaggcactgctgacttgtaagcacatgctgcagatatggaaatcctgctacaacctcaccaaccccagtgattctggacgtgggagcagcctcttagatagaaccattgctgacagacgacagcttaatacaattactttgccagacttcagcgatcccgagacaggctccgtccatgccacatcggtagcagcctcaagagtggagcaggcactgtcggaagtggcttcgtctctgcagagcagtgcccctaagcagggcccgctgcacccctggatgacgctggcacagatctggctccatgcagctgaagtctatatcggcatcgggaagcctgcagaagccacagcctgtacccaagaagctgccaacctcttcccaatgtcccacaatgtcctctacatgcgcggccagattgctgagctccggggaagcatggacgaggcgcggcggtggtatgaagaggccttagccatca

SEQ ID NO: 461882 - DNA, 2464 bp, Homo sapiens
tggtggagggtgcagggtcctgggctcctagacgacacctggtcatgcacaccctcctgtgaagaagaggagtcggggtggactatggtcctccctggctggcctgagggtcttctctggaaacaggactgaggtttaactgagagtcactgctgtgggtgtccctgccctgttacacccggctctctgcctctccacgcctgcacctgcgcagcagcgtccctggggagtacccgtcaaccctgttgactacttgcaaatggtgaccaaagaccgggaggagcaccgccgctcttcagaccgggctgccacagccttcacttctctcctgacccttcccttctgcaggcacgggcacaggcaccctagacttccctgctaaaggctccctgaacccccatcgctgtctaaggactggcccagccccctgcaaacccttccctagcaaaccctcagtccattgctgctgatggaactgagcgctctccacatcttggcatcacgactctggcgcattcccccagcatcaggagatcagagaaacacaaaggccctgaatccgcatagcacttgggtagcagtttttacacctctctgcaactatgaaacccattgtttaaataaaaatttggcaagcctgggatgtaaaaccaaagcagcaggagaagtgcagggtctgcggattctgcaaaggccctcagttgggttctgggaattctgtttggagaccgatgacatggcagagcttctcctcggggagtcgaagctggagcagtacctgaaggaacaccccctgaggcagggggccagtccccgaggccccaagccccagctgactgaggtccgcaagcatctgaccgccgccctggaccgagggaaccttaagtcagaattcctacaagaatccaatctgatcatggccaagttgaattatgtggaaggtgattataaagaagctctgaacatttacgcccgggtgggcctggacgatctgccactgacagctgtcccgccctacaggctgcgggtgatcgcagaagcctacgctaccaaaggactttgtttggagaagctgcctatttcttcttctaccagtaatctccatgtggaccgggaacaggatgtcatcacctgttatgagaaagcaggggacatcgcactcctgtatctccaagagatagaaagggtaatactttctaatattcaaaacagaagccctaagcctggccctgctccccacgatcaagaactaggttttttcctagaaacaggacttcagagagcccatgtcctctatttcaaaaatggagggacagatggcaatattaaagagccgagaatgtggttcagagtcatagaacaggacgaaaccaggaacttgacaagaggagtcggaagatttagagagcttctcagagcagttgaaacaagaacaactcaaaacctgcgaatgacaatagccaggcagctggcagagatcttgttgcggggtatgtgtgagcagagctactggaaccctctggaggatccaccgtgccagtcacctctggacgatcctctccgcaaaggagcaaacacaaaaacctacactctcactcggagagcccgtgtctactcaggagagaacattttttgtcctcaagaaaatacggaagaagccctgttgttattgctgattagtgaatcaatggccaaccgggacgctgtgctgagcaggatacctgaacacaagagtgaccgcctcatcagtctgcagagtgcatctgtggtctatgacttactcaccattgctcttggaagaagaggccagtatgagatgctgtcagagtgcctagaaagagccatgaagtttgcctttgaggaattccacctgtggtaccagtttgctctgtccctgatggctgctggaaaatctgcccgtgccgtgaaggtgctgaaagagtgtatccgcctgaagccggacgatgccaccatccctctcctcgctgccaagctctgcatgggctccctgcactggttggaagaggctgaaaagtttgccaaaactgtcgttgatgtgggagagaaaacgtcagagttcaaggccaaaggctacttagctctggggctcacgtacagtctgcaggccactgacgcttctttgcgagggatgcaggaggtcctacagagaaaggcgcttcttgcatttcagaggtataatcacaaaaatgaaatcatctggaagcatagccccatgatgtgaaatccagcatgggtattgatcctgtcactttaaatatatctgagttacactgatttcttggaactgtattagaaacttagttacgaatatttcatgaggccttcccaatacctgacaagcttcgttagactctttccttagaactggggctgcctactgatttatcatggtgtccgtatgccttttttcatgaaatcatgatcagtggtttcagtgagtctg

SEQ ID NO: 461883 - DNA, 1545 bp, Homo sapiens
ttctgcagctggatctccgtgtagggccccggagccggggacgaggtcaggttcccttgttaccgctgggtggaggtcgacggcgtcctgagcctgcctgaaggcaccagggcgagaagaggcgctcaccaaaagtcactggccaagccctcctctggccttctaggccgtactgtgggcgacgaccctcgaggcctgttccagaaacaccaggaagaggagctggaagagagaaggaagttgtaccggtggggaaacttgaaggatgggttaattctgaatgtggctggggcaaaactatgtgacctccctgtggatgagcaatttctggaagacaagagtgttgactttaaggtttcgctggccaaagggctggccgacctcactatcaaaaactaaatgttctgacgctgggcatggtggctcacgcctataatcccagcactttgggagactgaggcgggcagatcacgaggtcaagagatcgagaccatcctggccaatatggtgaaaccctgtctctactaaaaatacaaaaattagctgggcgtggtggcacgcgcctgtagtcccagttacttgggtggctaaggcacaagaattgcttgaacccaggaggtggaggttgcaatgagccaagattgcaccactgcactccagcctggtgacagagtgagactccatctcaaaaataaaataatgttccgacttgctagaatgatctgaatgacttcaaccagattttctgctgtggccagagcaagctggctggtcagtcccccaccccaatatgtctcccaggacgcttacccccagatcccacccaacccaggggaattgaaagaagcagggtggggagaccagagacttgggtccctctggtgggctggagtcaagggggcatggttggtggggttggaaggaccaagagctcagatcccacaacttgctcaacaactgccttccccagagcgcgtgcgggactcctggaaggaagatgccttatttgggtaccagtttcttaatggcgccaaccccgtggtgctgaggcgctctgctcaccttcctgctcgcctagtgttccctccaggcatggaggaactgcaggcccagctggagaaggagctggagcagcctttgacctcttcctgcacccagggaggcacattgttcgaagctgacttctccctgctggatgggatcaaggccaacgtcagtctctgtagccagcagcacctggctgcccctctggtcatgctgaaactgcagcctgatgggaaactcttgcccatggtcatccaggaggaggggagctcggatatgggtagtgaccgtcgggatggagaggaccggtggatgcgagtgcagagggagatgaaggagaggggaaaggggagccaggccaggtgcctgcagaaatagcaccaataaagagaacagggtgcccaggtagacttttgtctggccaatgttgagtgtcaaagtttttattacaatgttgcggcaagaaatgaggcttttgctaagtcaattcaacaagtgtct

SEQ ID NO: 461884 - DNA, 2051 bp, Homo sapiens
ttctggaacttgggttgcctgatagaccctatacaaaagatgtagtagggaaaaggagcgacagctggctaaaggggccccccacaaccctccccgacaccctaggaaagcagcctctctccgctgtcccagggtgccatggagatggagagcgcggcggcctccacacgtttccaccagcctcacatggagaggaagatgagtgcgatggcctgtgagatcttcaacgagcttagactagagggcaagctctgcgacgtggtcatcaaggtcaatggctttgagttcagtgcccataagaacatcctctgtagctgcagttcctactttagagctttgtttacaagtggctggaacaacactgaaaagaaggtatacaacatccctggcatttctcccgacatgatgaagctaatcattgagtatgcatacacccggaccgtgcctatcacaccggacaatgtggagaaactgcttgctgctgcagaccagtttaacatcatgggtatcgtcaggggttgctgcgagttcctcaagtcagagctgtgcttggataattgtatcggcatctgtaagttcacggactactactactgtcctgagctgaggcagaaggcctacatgttcatactgcacaactttgaggagatggtgaaagtctcggcagaatttttagagctctcggtcactgaacttaaggatatcattgagaaagatgagctcaatgtcaaacaggaagatgctgtatttgaggccattttaaagtggatttctcatgacccccaaaatagaaagcagcacatttcaattttgcttcctaaggttcgcctggccctaatgcatgctgagtacttcatgaacaatgttaagatgaatgactatgtcaaagacagtgaggaatgcaaaccagtcatcattaatgccctaaaggccatgtatgacctcaacatgaatggaccctctaattctgatttcaccaacccactcaccagaccacgcttgccctatgccatcctctttgcaattggtggctggagtggtgggagccccaccaatgccattgaggcatatgacgctcgggcagacagatgggtgaatgttacttgtgaggaagagagtccccgtgcctaccatggggcagcctatttgaaaggctatgtgtatatcattggggggtttgatagtgtagactatttcaatagtgttaagcgttttgacccagtcaagaaaacttggcatcaggtggccccgatgcactccagacgttgctatgtcagtgtgacagtcctcggcaattttatttatgccatgggaggatttgatggctacgtgcgtctaaacactgctgaacgttatgagccagagaccaatcaatggacactcatcgcccccatgcacgaacagaggagtgatgcaagcgccacaacactttatgggaaggtctacatatgtggtgggtttaatggaaacgagtgcctgttcacagcagaagtgtataacactgaaagtaatcagtggacagtcatagcacccatgagaagcaggaggagtggaataggcgtgattgcttatggagaacatgtatatgcggtaggtggctttgatggagctaatcgacttaggagtgccgaagcctacagccctgtggctaacacttggcgcacaatccccactatgtttaatcctcgtagcaattttggcatcgaggtggtggatgacctcttgtttgtggtgggtggctttaatggttttaccaccacctttaatgttgagtgctatgatgaaaagaccgatgagtggtatgatgctcatgacatgagtatataccgcagtgctctgagctgctgtgtagtaccagggctggccaatgttgaggaatatgcagctagacgggacaacttcccaggattagcactgcgagatgaagtaaaatattctgcttcgacaagtaccctacctgtatgagcctcttcatttagctaataaaaagtctaagcaataagaattaattctttttttaaaaaaatgcagtgtttaaactttgaagagta

SEQ ID NO: 461885 - DNA, 521 bp, Homo sapiens
taaaggccaaggagctgagcaccatctagaaagaatccgacgcagccatcagaagcataatgctattttggcttccattaagtcaagtgagcgggatcgcttgaaagctgagtgggaccagcacaatgactgcaagattttggacagccttgtgcgagcaagaatcaaggatgctgtgcaagggtttatcattaacattgaagaaagacgaaataagtaaggctcacaaacctgggacataaaccatgaaatattcctaaaaccacaatttgagattgaccagtcaaaaatcaaatttagcaaggatcatggctgagatgtttatattaaatccatagctattgctggttaatatttttaatatttttatttgtgatagcctgtattttgatgaaaaacaatatattgtttcatatttcattattttgattgaaacctgttcattttactcttttgttaaaaatatatatttcgtatcttatttgtatgtgatcaaataaaatatggtgcagttggttggg

SEQ ID NO: 461886 - DNA, 1609 bp, Homo sapiens
gagtgcaggcgtctgcggcccccatggtgaccagaccgacttccgcccgacccgcccacctctaccggcccctaatcccgcgaggcgcaccatggcaaccagacttctgcgtcgcggaagcgggtcccgcaggtcgccacggttgggggaaacgcggcggacgccgcccccgtcccgaaggggactcgaaaatgtacagccagcggtttggcaccgtacagcgggaggttaagggccccacccccaaagtggtgatcgtgagatccaagcctcctaaaggccaaggagctgagcaccatctagaaagaatccgacgcagccatcagaagcataatgctattttggcttccattaagtcaagtgagcgggatcgcttgaaagctgagtgggaccagcacaatgactgcaagattttggacagccttgtgcgagcaagaatcaaggatgctgtgcaagggtttatcattaacattgaagaaagacgaaataagctacgtgagcttttagcattagaagaaaatgagtattttacagaaatgcaattgaagaaagaaaccattgaggagaaaaaagataggatgagagagaaaactaaattactaaaagagaagaatgaaaaagagaggcaggattttgtggctgaaaagctagaccagcaattcagggaacgctgtgaggagctccgtgttgaattgttatctatccatcagaagaaggtgtgtgaggagcggaaagcacagattgcatttaatgaggagctgagcaggcaaaagctggtggaagagcagatgttctccaaactctgggaggaagaccgattagccaaggaaaagcgagaagcccaagaggcgaggagacagaaagagctgatggagaacacacgcctggggctgaatgcccagatcaccagcatcaaggcacaaaggcaggcgacacagctgctgaaggaagaggaggcacgccttgtggaaagtaacaacgcacagattaaacatgagaatgaacaggatatgctaaagaaacagaaggcaaagcaggaaactaggaccattttgcaaaaagccctacaagagaggatagaacatattcagcaggaatacagagacgaacaggacttgaacatgaagctcgtgcaaagggcccttcaagacttacaggaagaggcagataaaaagaaacaaaaaagagaagatatgataagagaacagaagatataccataaatatttggcacagagacgtgaggaagaaaaagctcaggagaaagaatttgacagaatattagaggaagacaaggcaaagaagttggctgagaaggacaaggagctgagacttgaaaaggaggcaaggagacagcttgtggatgaggtcatgtgtacaagaaaacttcaagttcaagaaaagttgcaacgagaagctaaagaacaggaagaacgtgctatggaacagaaacacataaatgaaagtcttaaagaacttaactgtgaagagaaggagaattttgcaagccagctaaattttgtatttttagtagagacggagtttctccatgttggtcaggctggtctcgaactcctgacctcaggtgatccacccaacctcagcctccc

SEQ ID NO: 461887 - DNA, 611 bp, Homo sapiens
tgcgaggtgatctagaggatcccagttcgaggagactctcttggtaggaccattttgcaaaaagccctacaagagaggatagaacatattcagcaggaatacagagacgaacaggacttgaacatgaagctcgtgcaaagggcccttcaagacttacaggaagaggcagataaaaagaaacaaaaaagagaagatatgataagagaacagaagatataccataaatatttggcacagagacgtgaggaagaaaaagctcaggagaaagaatttgacagaatattagaggaagacaaggcaaagaagttggctgagaaggacaaggagctgagacttgaaaaggaggcaaggagacagcttgtggatgaggtcatgtgtacaagaaaacttcaagttcaagaaaagttgcaacgagaagctaaagaacaggaagaacgtgctatggaacagaaacacataaatgaaagtcttaaagaacttaactgtgaagagaaggagaattttgcaagccagctaaattttgtatttttagtagagacggagtttctccatgttggtcaggctggtctcgaactcctgacctcaggtgatccacccaacctcagcctccc

SEQ ID NO: 461888 - DNA, 462 bp, Homo sapiens
atcctggtgcttgccctccctgctgctccctcttgtttcctgtgctccgatggcctgcatccaggtctctgatttttcttgcttcattgtgtgattgtacagatgtgtgcctcaatagagcagtgcctcacgaaaggctgggttttgtctttctaaaattttcctttcagggaacgctgtgaggagctccgtgttgaattgttatctatccatcagaagaaggtgtgtgaggagcggaaagcacagattgcatttaatgaggagctgagcaggcaaaagctgatggaagagcagatgttctccaaactctgggaggaagaccgattagccaaggaaaagcgagaagcccaagaggcgaggagacagaaagagctgatggagaacacacgcctggggctgaatgcccagatcaccagcatcaaggcacaaaggcaggcgacacagctgctgaaggaagaggag

SEQ ID NO: 461889 - DNA, 1919 bp, Homo sapiens
gagtgcaggcgtctgcggcccccatggtgaccagaccgacttccgcccgacccgcccacctctaccggcccctaatcccgcgaggcgcaccatggcaaccagacttctgcgtcgcggaagcgggtcccgcaggtcgccacggttgggggaaacgcggcggacgccgcccccgtcccgaaggggactcgaaaatgtacagccagcggtttggcaccgtacagcgggaggttaagggccccacccccaaagtggtgatcgtgagatccaagcctcctaaaggccaaggagctgagcaccatctagaaagaatccgacgcagccatcagaagcataatgctattttggcttccattaagtcaagtgagcgggatcgcttgaaagctgagtgggaccagcacaatgactgcaagattttggacagccttgtgcgagcaagaatcaaggatgctgtgcaagggtttatcattaacattgaagaaagacgaaataagctacgtgagcttttagcattagaagaaaatgagtattttacagaaatgcaattgaagaaagaaaccattgaggagaaaaaagataggatgagagagaaaactaaattactaaaagagaagaatgaaaaagagaggcaggattttgtggctgaaaagctagaccagcaattcagggaacgctgtgaggagctccgtgttgaattgttatctatccatcagaagaaggtgtgtgaggagcggaaagcacagattgcatttaatgaggagctgagcaggcaaaagctggtggaagagcagatgttctccaaactctgggaggaagaccgattagccaaggaaaagcgagaagcccaagaggcgaggagacagaaagagctgatggagaacacacgcctggggctgaatgcccagatcaccagcatcaaggcacaaaggcaggcgacacagctgctgaaggaagaggaggcacgccttgtggaaagtaacaacgcacagattaaacatgagaatgaacaggatatgctaaagaaacagaaggcaaagcaggaaactaggaccattttgcaaaaagccctacaagagaggatagaacatattcagcaggaatacagagacgaacaggacttgaacatgaagctcgtgcaaagggcccttcaagacttacaggaagaggcagataaaaagaaacaaaaaagagaagatatgataagagaacagaagatataccataaatatttggcacagagacgtgaggaagaaaaagctcaggagaaagaatttgacagaatattagaggaagacaaggcaaagaagttggctgagaaggacaaggagctgagacttgaaaaggaggcaaggagacagcttgtggatgaggtcatgtgtacaagaaaacttcaagttcaagaaaagttgcaacgagaagctaaagaacaggaagaacgtgctatggaacagaaacacataaatgaaagtcttaaagaacttaactgtgaagagaaggagaattttgcaagacgccaacgtttagcccaggagtacaggaagcaacttcagatgcaaatcgcctaccagcagcagtcccaagaagcagagaaggaagagaaacgccgagagtttgaagcaggtgtagcagcaaacaagatgtttccgtgagcatcaatatatcttttcttggtcttttaatatttttaactacagtatgcttgtatgcttcttttaactcctggataaacttttcttttttccctgagtttgtgtaattaattgaacataattttcttcctttgaataaacctgtgcctattttggagttcacagacttacaaatccaaatgatctacttaatctcatgttattttcctgccccctttgcctccttttttaactcacttatgactagctccatttgctgacaactatctaccc

SEQ ID NO: 461890 - DNA, 3069 bp, Homo sapiens
gcagttgaaagagtggcgggagaagttgcagggaattatttgatagcacatactgatggctctaaagaagtcatcaccctcactggattctggtgatagtgactctgaggagttgccaacatttgcctttctgaagaaggaaccatcttcaacaaagaggagacagcctgaaagggaagagaagattgtagtggttgacatctcagattgtgaagcctcctgtcctccagcaccagagttattttcaccacctgtcccagaaatagctgaaactgtcacacaaacacagccagtcaggttgctaagcagtgaaagtgaagatgaagaagaatttattcctctggctcaaaggcttacatgtaagtttctgacccacaagcaactgagccctgaggactctagctccccagttaaaagtgttttggatcatcaaaataatgaaggtgcatcatgtgactggaaaaagcagccctttccaaagatccctgaagttcccctccatgataccccagagaggagtgcagcagataacaaggacctgatcttagatccatgctgtcagcttccagcctacctgtctacctgccctggccagagcagcagcttggcagtaaccaaaacaaattctgacatccttccaccccagaagaaaaccaagccgagtcagaaggtccagggaagaggctcacacggatgccggcagcagagacaagcaaggcagaaggaaagcaccctgagaagacaggaaagaaagaatgcagcactggttaccaggatgaaagcccagaggccagaggaatgcttaaaacacatcattgtagtgctggatccagtgctcttacagatggaaggtgggggccagctcctaggagcactgcagaccatggagtgccgctgtgtgattgaggcgcaggctgtgccttgcagtgtcacttggaggagaagggctgggccgtctgagggaagcctggacagcactatgaaagggaaggaaacgcttcagggctttgtaactgacatcacagcaaagacagcagggaaagctctgtcactggtgattgtggatcaggagaaatgcttcaggtttggatttgccctggtgatttcatgttaaaaggggcagctcttgggccaaggggggtgagtttagtttattcattgcagatgtaggtcactctgcaaggtagtccatctctaacaagtccagggggatgctctggtccagtcttcttctgtatcttctgcctgacttcagcctggagctgctgttctttgatttcctcccctgcaccagtgctcagaatcctccaagaagagggaaacagggagcaaataaacagaccaagaagcagcagcagagacaaccagaggccagcatagggtccatggtatccagggtagacgctgaagaggcattggtggatctgcagctacacacagaagcccaggctcaaattgtgcagagctggaaagagctggccgacttcacatgcgcattcacaaaggctgtggctgaggcgcccttcaatcagcccattgtctctcaagcttgaggcagaaggagctgacctcacactggggattcttgggaagagtcctcaagcctagcgccttttcaaatattctcctttcgcctatatgtaagtatgtgttctgcaggctgatatcataggccaggttaccataggccaagttaccaggattaattacaggtcagatcacaatgtaataagcactaggaaagcaaatttttggcctactcagttcaagaagtgttcactgtcagaatttaaaataagtaaatgacctcagagacaatccagtccaagtcccttattttatacttgaggggactgaggcctgaagagattgacttgtctaagctcctagcagttagaagaaccagaaatagattgcagattgccagatatccaaagaatctggtatcttttcttctactataatggactagatgtagtttttaaatgaatcagcaactggccctatacctggcaacaaagtgagcactcaaattgtcaaaggcacaaaaaggccagatgtaacatggcgcccacctcttccaaggtcagtgggggggttttcagttgccacttgaggggaacaggtgtagaagagtaatgagcaacttacagctctccaaccacgctgttgcaggaagctccgagatgaaactaccttctccttctgtctggagagtgactgggctggaggggtgaaggtggaccttgctggcaggggactcgcactagtctggaggagacagattcagcagctgaaccgagtcagcctggaaatggccagtgcagttgtgaatgcctatccctccccacagctcctggtacaggcttatcagcagtgtttttcggataaagaacgccagaatttgctcgcagacatacaggtgcgccgtggggaaggtgtgacatccacttctcgccgcattggaccagaactatccaggcgtatctaccttcagatgaccactttacagccacatctctctttagatagtgctgactgattctagccctcagggatgaggatgaaaagctggaaacttccacttccccaacctcagagcctgactgtaatgaagagactggcagcacctcctggaacacaagcctaggtgaggcccagtctttcttgggtcttattatttgtgaaggtctctctgcctgtcggctggggcagagactgaaatactgccacctacctttggcatttaatgttcctctcctggcaaaaattcactgccacagacaaaccacccccactcctacccagccagccctcaaaacacaaaggaacaaagacagtccactcagacacttatttaataactgtagaaatccaaaagaattagcatcaaatcttgaagtcgtgagtgaagctgcgggttggcttgactgggctcagccactgagctgcctcaaccggccaaggaacgggattatgatgactatgcggacttctatattgtcttcatctcattgtgtgtattatgtatttagtttcaataaagcatttgtaccaatggctctggag

SEQ ID NO: 461891 - DNA, 2909 bp, Homo sapiens
  misc_feature (20)..(20): n is a, c, g, or t
  misc_feature (30)..(30): n is a, c, g, or t
tgcaggctgagtaccgcccncgggagttangggcatggcagcttgacagagtggcgggcatgaagttgcagggaattatttgatagcacatactgatggctctaaagaagtcatcaccctcactggattctggtgatagtgactctgaggagttgccaacatttgcctttctgaagaaggaaccatcttcaacaaagaggagacagcctgaaagggaagagaagattgtagtggttgacatctcagattgtgaagcctcctgtcctccagcaccagagttattttcaccacctgtcccagaaatagctgaaactgtcacacaaacacagccagtcaggttgctaagcagtgaaagtgaagatgaagaagaatttattcctctggctcaaaggcttacataagaaaaccaagccgagtcagaaggtccagggaagaggctcacacggatgccggcagcagagacaagcaaggcagaaggaaagcaccctgagaagacaggaaagaaagaatgcagcactggttaccaggatgaaagcccagaggccagaggaatgcttaaaacacatcattgtagtgctggatccagtgctcttacagatggaaggtgggggccagctcctaggagcactgcagaccatggagtgccgctgtgtgattgaggcgcaggctgtgccttgcagtgtcacttggaggagaagggctgggccgtctgaggacagagaggactgggtggaggagccaacagtactggtgttgctccgggcagaggcatttgtgtccatgatcgacaatggaaagcagggaagcctggacagcactatgaaagggaaggaaacgcttcagggctttgtaactgacatcacagcaaagacagcagggaaagctctgtcactggtgattgtggatcaggagaaatgcttcaggtttggatttgccctggtgatttcatgttaaaaggggcagctcttgggccaaggggggtgagtttagtttattcattgcagatgtaggtcactctgcaaggtagtccatctctaacaagtccagggggatgctctggtccagtcttcttctgtatcttctgcctgacttcagcctggagctgctgttctttgatttcctcccctgcaccagtgctcagaatcctccaagaagagggaaacagggagcaaataaacagaccaagaagcagcagcagagacaaccagaggccagcatagggtccatggtatccagggtagacgctgaagaggcattggtggatctgcagctacacacagaagcccaggctcaaattgtgcagagctggaaagagctggccgacttcacatgcgcattcacaaaggctgtggctgaggcgcccttcaatcagcccattgtctctcaagcttgaggcagaaggagctgacctcacactggggattcttgggaagagtcctcaagcctagcgccttttcaaatattctcctttcgcctatatgtaagtatgtgttctgcaggctgatatcataggccaggttaccataggccaagttaccaggattaattacaggtcagatcacaatgtaataagcactaggaaagcaaatttttggcctactcagttcaagaagtgttcactgtcagaatttaaaataagtaaatgacctcagagacaatccagtccaagtcccttattttatacttgaggggactgaggcctgaagagattgacttgtctaagctcctagcagttagaagaaccagaaatagattgcagattgccagatatccaaagaatctggtatcttttcttctactataatggactagatgtagtttttaaatgaatcagcaactggccctatacctggcaacaaagtgagcactcaaattgtcaaaggcacaaaaaggccagatgtaacatggcgcccacctcttccaaggtcagtgggggggttttcagttgccacttgaggggaacaggtgtagaagagtaatgagcaacttacagctctccaaccacgctgttgcaggaagctccgagatgaaactaccttctccttctgtctggagagtgactgggctggaggggtgaaggtggaccttgctggcaggggactcgcactagtctggaggagacagattcagcagctgaaccgagtcagcctggaaatggccagtgcagttgtgaatgcctatccctccccacagctcctggtacaggcttatcagcagtgtttttcggataaagaacgccagaatttgctcgcagacatacaggtgcgccgtggggaaggtgtgacatccacttctcgccgcattggaccagaactatccaggcgtatctaccttcagatgaccactttacagccacatctctctttagatagtgctgactgattctagccctcagggatgaggatgaaaagctggaaacttccacttccccaacctcagagcctgactgtaatgaagagactggcagcacctcctggaacacaagcctaggtgaggcccagtctttcttgggtcttattatttgtgaaggtctctctgcctgtcggctggggcagagactgaaatactgccacctacctttggcatttaatgttcctctcctggcaaaaattcactgccacagacaaaccacccccactcctacccagccagccctcaaaacacaaaggaacaaagacagtccactcagacacttatttaataactgtagaaatccaaaagaattagcatcaaatcttgaagtcgtgagtgaagctgcgggttggcttgactgggctcagccactgagctgcctcaaccggccaaggaacgggattatgatgactatgcggacttctatattgtcttcatctcattgtgtgtattatgtatttagtttcaataaagcatttgtaccaatggctctggag

SEQ ID NO: 461892 - DNA, 2211 bp, Homo sapiens
gcagttgaaagagtggcgggagaagttgcagggaattatttgatagcacatactgatggctctaaagaagtcatcaccctcactggattctggtgatagtgactctgaggagttgccaacatttgcctttctgaagaaggaaccatcttcaacaaagaggagacagcctgaaagggaagagaagattgtagtggttgacatctcagattgtgaagcctcctgtcctccagcaccagagttattttcaccacctgtcccagaaatagctgaaactgtcacacaaacacagccagtcaggttgctaagcagtgaaagtgaagatgaagaagaatttattcctctggctcaaaggcttacatgtaagtttctgacccacaagcaactgagccctgaggactctagctccccagttaaaagtgttttggatcatcaaaataatgaaggtgcatcatgtgactggaaaaagcagccctttccaaagatccctgaagttcccctccatgataccccagagaggagtgcagcagataacaaggacctgatcttagatccatgctgtcagcttccagcctacctgtctacctgccctggccagagcagcagcttggcagtaaccaaaacaaattctgacatccttccaccccagaagaaaaccaagccgagtcagaaggtccagggaagaggctcacacggatgccggcagcagagacaagcaaggcagaaggaaagcaccctgagaagacaggaaagaaagaatgcagcactggttaccaggatgaaagcccagaggccagaggaatgcttaaaacacatcattgtagtgctggatccagtgctcttacagatggaaggtgggggccagctcctaggagcactgcagaccatggagtgccgctgtgtgattgaggcgcaggctgtgccttgcagtgtcacttggaggagaagggctgggccgtctgagggaagcctggacagcactatgaaagggaaggaaacgcttcagggctttgtaactgacatcacagcaaagacagcagggaaagctctgtcactggtgattgtggatcaggagaaatgcttcagtgctcagaatcctccaagaagagggaaacagggagcaaataaacagaccaagaagcagcagcagagacaaccagaggccagcatagggtccatggtatccagggtagacgctgaagaggcattggtggatctgcagctacacacagaagcccaggctcaaattgtgcagagctggaaagagctggccgacttcacatgcgcattcacaaaggctgtggctgaggcgcccttcaagaagctccgagatgaaactaccttctccttctgtctggagagtgactgggctggaggggtgaaggtggaccttgctggcaggggactcgcactagtctggaggagacagattcagcagctgaaccgagtcagcctggaaatggccagtgcagttgtgaatgcctatccctccccacagctcctggtacaggcttatcagcagtgtttttcggataaagaacgccagaatttgctcgcagacatacaggtgcgccgtggggaaggtgtgacatccacttctcgccgcattggaccagaactatccaggcgtatctaccttcagatgaccactttacagccacatctctctttagatagtgctgactgattctagccctcagggatgaggatgaaaagctggaaacttccacttccccaacctcagagcctgactgtaatgaagagactggcagcacctcctggaacacaagcctaggtgaggcccagtctttcttgggtcttattatttgtgaaggtctctctgcctgtcggctggggcagagactgaaatactgccacctacctttggcatttaatgttcctctcctggcaaaaattcactgccacagacaaaccacccccactcctacccagccagccctcaaaacacaaaggaacaaagacagtccactcagacacttatttaataactgtagaaatccaaaagaattagcatcaaatcttgaagtcgtgagtgaagctgcgggttggcttgactgggctcagccactgagctgcctcaaccggccaaggaacgggattatgatgactatgcggacttctatattgtcttcatctcattgtgtgtattatgtatttagtttcaataaagcatttgtaccaatggctctggag

SEQ ID NO: 461893 - DNA, 3234 bp, Homo sapiens
ttaatggctgcaggaattctttttgagggaattatttgatagcacatactgatggctctaaagaagtcatcaccctcactggattctggtgatagtgactctgaggagttgccaacatttgcctttctgaagaaggaaccatcttcaacaaagaggagacagcctgaaagggaagagaagattgtagtggttgacatctcagattgtgaagcctcctgtcctccagcaccagagttattttcaccacctgtcccagaaatagctgaaactgtcacacaaacacagccagtcaggttgctaagcagtgaaagtgaagatgaagaagaatttattcctctggctcaaaggcttacatgtaagtttctgacccacaagcaactgagccctgaggactctagctccccagttaaaagtgttttggatcatcaaaataatgaaggtgcatcatgtgactggaaaaagcagccctttccaaagatccctgaagttcccctccatgataccccagagaggagtgcagcagataacaaggacctgatcttagatccatgctgtcagcttccagcctacctgtctacctgccctggccagagcagcagcttggcagtaaccaaaacaaattctgacatccttccaccccagaagaaaaccaagccgagtcagaaggtccagggaagaggctcacacggatgccggcagcagagacaagcaaggcagaaggaaagcaccctgagaagacaggaaagaaagaatgcagcactggttaccaggatgaaagcccagaggccagaggaatgcttaaaacacatcattgtagtgctggatccaggtcctcacatgtgtctttgtcctgtgctgagttatctgcgttctggaccccccactgacagtcccttttccatctgttgcagtgctcttacagatggaaggtgctcaatacctgctgacctccctccctgtgctgtgttctgggtactttggcaggacagagaggactgggtggaggagccaacagtactggtgttgctccgggcagaggcatttgtgtccatgatcgacaatggaaagcagggaagcctggacagcactatgaaagggaaggaaacgcttcagggctttgtaactgacatcacagcaaagacagcagggaaagctctgtcactggtgattgtggatcaggagaaatgcttcagcctggagctgctgttctttgatttcctcccctgcaccagtgctcagaatcctccaagaagagggaaacagggagcaaataaacagaccaagaagcagcagcagagacaaccagaggccagcatagggtccatggtatccagggtagacgctgaagaggtaagaacgtcctgttgcctgaatcgggctgggtactcactggtcacctgagacttgctattgatagagaataaaatgcctgctgcgtactgttttctgccttggcactgactaagagaaggtaccaaacaggaagccaaggggctggggtgtggctttagtggacagtgacttggcagctagtctcttcctacccttccagtccatcgttgcttttgggtttctaggcattggtggatctgcagctacacacagaagcccaggctcaaattgtgcagagctggaaagagctggccgacttcacatgcgcattcacaaaggctgtggctgaggcgcccttcaatcagcccattgtctctcaagcttgaggcagaaggagctgacctcacactggggattcttgggaagagtcctcaagcctagcgccttttcaaatattctcctttcgcctatatgtaagtatgtgttctgcaggctgatatcataggccaggttaccataggccaagttaccaggattaattacaggtcagatcacaatgtaataagcactaggaaagcaaatttttggcctactcagttcaagaagtgttcactgtcagaatttaaaataagtaaatgacctcagagacaatccagtccaagtcccttattttatacttgaggggactgaggcctgaagagattgacttgtctaagctcctagcagttagaagaaccagaaatagattgcagattgccagatatccaaagaatctggtatcttttcttctactataatggactagatgtagtttttaaatgaatcagcaactggccctatacctggcaacaaagtgagcactcaaattgtcaaaggcacaaaaaggccagatgtaacatggcgcccacctcttccaaggtcagtgggggggttttcagttgccacttgaggggaacaggtgtagaagagtaatgagcaacttacagctctccaaccacgctgttgcaggaagctccgagatgaaactaccttctccttctgtctggagagtgactgggctggaggggtgaaggtggaccttgctggcaggggactcgcactagtctggaggagacagattcagcagctgaaccgagtcagcctggaaatggccagtgcagttgtgaatgcctatccctccccacagctcctggtacaggcttatcagcagtgtttttcggataaagaacgccagaatttgctcgcagacatacaggtgcgccgtggggaaggtgtgacatccacttctcgccgcattggaccagaactatccaggcgtatctaccttcagatgaccactttacagccacatctctctttagatagtgctgactgattctagccctcagggatgaggatgaaaagctggaaacttccacttccccaacctcagagcctgactgtaatgaagagactggcagcacctcctggaacacaagcctaggtgaggcccagtctttcttgggtcttattatttgtgaaggtctctctgcctgtcggctggggcagagactgaaatactgccacctacctttggcatttaatgttcctctcctggcaaaaattcactgccacagacaaaccacccccactcctacccagccagccctcaaaacacaaaggaacaaagacagtccactcagacacttatttaataactgtagaaatccaaaagaattagcatcaaatcttgaagtcgtgagtgaagctgcgggttggcttgactgggctcagccactgagctgcctcaaccggccaaggaacgggattatgatgactatgcggacttctatattgtcttcatctcattgtgtgtattatgtatttagtttcaataaagcatttgtaccaatggctctggag

SEQ ID NO: 461894 - DNA, 2298 bp, Homo sapiens
gcagttgaaagagtggcgggagaagttgcagggaattatttgatagcacatactgatggctctaaagaagtcatcaccctcactggattctggtgatagtgactctgaggagttgccaacatttgcctttctgaagaaggaaccatcttcaacaaagaggagacagcctgaaagggaagagaagattgtagtggttgacatctcagattgtgaagcctcctgtcctccagcaccagagttattttcaccacctgtcccagaaatagctgaaactgtcacacaaacacagccagtcaggttgctaagcagtgaaagtgaagatgaagaagaatttattcctctggctcaaaggcttacatgtaagtttctgacccacaagcaactgagccctgaggactctagctccccagttaaaagtgttttggatcatcaaaataatgaaggtgcatcatgtgactggaaaaagcagccctttccaaagatccctgaagttcccctccatgataccccagagaggagtgcagcagataacaaggacctgatcttagatccatgctgtcagcttccagcctacctgtctacctgccctggccagagcagcagcttggcagtaaccaaaacaaattctgacatccttccaccccagaagaaaaccaagccgagtcagaaggtccagggaagaggctcacacggatgccggcagcagagacaagcaaggcagaaggaaagcaccctgagaagacaggaaagaaagaatgcagcactggttaccaggatgaaagcccagaggccagaggaatgcttaaaacacatcattgtagtgctggatccagtgctcttacagatggaaggtgggggccagctcctaggagcactgcagaccatggagtgccgctgtgtgattgaggcgcaggctgtgccttgcagtgtcacttggaggagaagggctgggccgtctgaggacagagaggactgggtggaggagccaacagtactggtgttgctccgggcagaggcatttgtgtccatgatcgacaatggaaagcagggaagcctggacagcactatgaaagggaaggaaacgcttcagggctttgtaactgacatcacagcaaagacagcagggaaagctctgtcactggtgattgtggatcaggagaaatgcttcagtgctcagaatcctccaagaagagggaaacagggagcaaataaacagaccaagaagcagcagcagagacaaccagaggccagcatagggtccatggtatccagggtagacgctgaagaggcattggtggatctgcagctacacacagaagcccaggctcaaattgtgcagagctggaaagagctggccgacttcacatgcgcattcacaaaggctgtggctgaggcgcccttcaagaagctccgagatgaaactaccttctccttctgtctggagagtgactgggctggaggggtgaaggtggaccttgctggcaggggactcgcactagtctggaggagacagattcagcagctgaaccgagtcagcctggaaatggccagtgcagttgtgaatgcctatccctccccacagctcctggtacaggcttatcagcagtgtttttcggataaagaacgccagaatttgctcgcagacatacaggtgcgccgtggggaaggtgtgacatccacttctcgccgcattggaccagaactatccaggcgtatctaccttcagatgaccactttacagccacatctctctttagatagtgctgactgattctagccctcagggatgaggatgaaaagctggaaacttccacttccccaacctcagagcctgactgtaatgaagagactggcagcacctcctggaacacaagcctaggtgaggcccagtctttcttgggtcttattatttgtgaaggtctctctgcctgtcggctggggcagagactgaaatactgccacctacctttggcatttaatgttcctctcctggcaaaaattcactgccacagacaaaccacccccactcctacccagccagccctcaaaacacaaaggaacaaagacagtccactcagacacttatttaataactgtagaaatccaaaagaattagcatcaaatcttgaagtcgtgagtgaagctgcgggttggcttgactgggctcagccactgagctgcctcaaccggccaaggaacgggattatgatgactatgcggacttctatattgtcttcatctcattgtgtgtattatgtatttagtttcaataaagcatttgtaccaatggctctggag

SEQ ID NO: 461895 - DNA, 2666 bp, Homo sapiens
tatcccagcaggtgtagtgtgagaactggcatatgttaggctatggtgtcaaaagagaaataccccgttcatgagagtaatccagtgattttcaaaaagacaagacacactgacatccagcgcagtcagggcacaattaccttggaaaaatcacctcacacagaatggttgaggagactttctaaggagcctgtttgcctgtcaacccaaaacaatcctaagcaaaaacaacaaagcttgaggcatcctgctacccgacttcaaactatactacaaggctacaaaaaagaagaaggagaaggagaaggagaagaagaagaagaagaagaagaagaagaagaagaagaagaagaagaagaagaagaaggggacctttatgtggtcaacaaacacaaaaaagagaaaagctcatcatcactggagactagagaaatgcaaatcaaaaccacaatgggataccttctcacaccatgttgaatggcagttattaaaaagttaggaaacaacagatgctggagaggagggcgtggcttcctgcatttggcggggtctttgtctctcgctggcgctggcacaggaacttgggatccgtctcctctttcgcctcctgcaccttgggagccctgggctactctctcacagcccctgttgccctgtgatctgtaggtccttggggacgcatagtcaaggtgccaggacatcctggaagctgggaaatgttagcatttcatcatatcaatgtgaagattatttcttccagaccatggctggagaaggaaagaaggtgtgttttgcctgactcagtgactatagagagaaccaagttctgcaggcctgtcacctaagtctcagctgggtgccacaaactctgaactggattccaaggctttcatgaatgcacttatgtttgctgtggcagctgcattatgtcgtgggggatgtggatgcagaacctcacattctgtcgtcttgcttatgttactctcctttatgtttcactttctcaaatgaatgtcaagcaggtgattttcagattcaaaagttctaaaataaattgctcaaatttatacattatgtaagctgttaataaaatttcttgtaggtgctacatatttgttaaaatttttggttgtaattttaagctcactgtaggcagaaaggaatcattaagatttctattcttttttagtctgtatctaaatgaccatatattttaattccaaatatttactttatacttcagtaatgctcattgtattttgcaaaatttatattgttcttttatttgaaaatataaggctttttttagctcctgaaagctatattatagtcatatagttttattatagtatttgataagaagagcagcaacatattgagaacagataaaattctgctgtctttttaatgattatttattaaattcttctcattagagcctattattaatgattgtaatgtatttactgtataatttttctgcaatttattaaatgccaatgacttccaatgtctgcttttcatgactgcacacagtttaaagctgtagatatctaaagggttatttttcagcccggcatggtggctcacgcctgtaatcccagcactttgggaggccaaggtgggtggatcacgaggtcaggagatcaagaccatcctggctaccacggtgaaaccccgtctctactaaatatagaaaaaattagccgggcatagtggtgggtgcctgtattcccagctactcgagaggctgaggcaggagaatggcgtgaacccagtgggcggagcttgcagtgagccgagatggcaccactgcactacagcctgggcgacagggtgagactctgtctcaaaaaaaaaaaaaaaagggcttatttttcattgtatatttatgttgtattcaggattttatgcatttaatctctcttcttatgttcaattctgtgttgttgtgtttcttttcttgggggggtatgttttctcagatcagttaattgtatttttgcttttaaagcttgatatcatgagttgaatgataattttttaactcggtacactttatgacaatgtgatatttaatttatatgtgaattagccgtgtttgttgcttatacatatatctatgtgtttttcacctataattttaaaacagagtcaaatgaacaaaaatcagttatttgtcctcttgcagggcgggtagaccttccttccccacgggtttgaggctatggctaagtggtgagccttggggagatgcaggaaggatccatcccaggcacttggctagagaattcccattagaagtatattggccatcttaatggtatcccataagtcccttaggctctcttaatttttaaaattatttttaccctcctcaccatataatttcaaaagacttcttatgaagcttgctggattttttcctgctagatcaaaccagttgttggaccttctagtgaatctctaaattcagatttttaattgtgatattatgatgccgattttagaccttttctgctttctcttgtgggcatttagtgccataaatttccctttgcacactactttagctgtatcatattttaatttttaagccctcaatctttctttttcatcatgacagtcttgactgttttatgtttatgaaaactgtaaaattgtct

SEQ ID NO: 461896 - DNA, 2861 bp, Homo sapiens
tatcccagcaggtgtagtgtgagaactggcatatgttaggctatggtgtcaaaagagaaataccccgttcatgagagtaatccagtgattttcaaaaagacaagacacactgacatccagcgcagtcagggcacaattaccttggaaaaatcacctcacacagaatggttgaggagactttctaaggagcctgtttgcctgtcaacccaaaacaatcctaagcaaaaacaacaaagcttgaggcatcctgctacccgacttcaaactatactacaaggctacaaaaaagaagaaggagaaggagaaggagaagaagaagaagaagaagaagaagaagaagaagaagaagaagaagaagaagaagaaggggacctttatgtggtcaacaaacacaaaaaagagaaaagctcatcatcactggagactagagaaatgcaaatcaaaaccacaatgggataccttctcacaccatgttgaatggcagttattaaaaagttaggaaacaacagatgctggagaggagggcgtggcttcctgcatttggcggggtctttgtctctcgctggcgctggcacaggaacttgggatccgtctcctctttcgcctcctgcaccttgggagccctgggctactctctcacagcccctgttgccctgtgatctgtaggtccttggggacgcatagtcaaggtgccaggacatcctggaagctgggaaatgatttcttccagaccatggctggagaaggaaagaaggtgtgttttgcctgactcagtgactatagagagaaccaagttctgcaggcctgtcacctaagtctcagctgggtgccacaaactctgaactggattccaaggctttcatgaatgcacttatgtttgctgtggcagctgcattatgtcgtgggggatgtggatgcagaacctcacattctgtcgtcttgcttatgttactctcctttatgtttcactttctcaaatgaatgtcaagcaggtgattttcagattcaaaagttctaaaataaattgctcaaatttatacattatgtaagctgttaataaaatttcttgtaggtgctacatatttgttaaaatttttggttgtaattttaagctcactgtaggcagaaaggaatcattaagatttctattcttttttagtctgtatctaaatgaccatatattttaattccaaatatttactttatacttcagtaatgctcattgtattttgcaaaatttatattgttcttttatttgaaaatataaggctttttttagctcctgaaagctatattatagtcatatagttttattatagtatttgataagaagagcagcaacatattgagaacagataaaattctgctgtctttttaatgattatttattaaattcttctcattagagcctattattaatgattgtaatgtatttactgtataatttttctgcaatttattaaatgccaatgacttccaatgtctgcttttcatgactgcacacagtttaaagctgtagatatctaaagggttatttttcagcccggcatggtggctcacgcctgtaatcccagcactttgggaggccaaggtgggtggatcacgaggtcaggagatcaagaccatcctggctaccacggtgaaaccccgtctctactaaatatagaaaaaattagccgggcatagtggtgggtgcctgtattcccagctactcgagaggctgaggcaggagaatggcgtgaacccagtgggcggagcttgcagtgagccgagatggcaccactgcactacagcctgggcgacagggtgagactctgtctcaaaaaaaaaaaaaaaagggcttatttttcattgtatatttatgttgtattcaggattttatgcatttaatctctcttcttatgttcaattctgtgttgttgtgtttcttttcttgggggggtatgttttctcagatcagttaattgtatttttgcttttaaagcttgatatcatgagttgaatgataattttttaactcggtacactttatgacaatgtgatatttaatttatatgtgaattagccgtgtttgttgcttatacatatatctatgtgtttttcacctataattttaaaacagagtcaaatgaacaaaaatcagttatttgtcctcttgcagggcgggtagaccttccttccccacgggtttgaggctatggctaagtggtgagccttggggagatgcaggaaggatccatcccaggcacttggctagaggtaagtaaaaatagcctttggaccagaagacctgatagtttgggtactcgtctgaacataagtccccatcttcccagaaatgtcgtcttttgtctgcaacaactggctggagaaatatttcagaaagatgtgtgcctggaacacccaaagacgtacctttcctttctctttggcataggccttgtagcactgtagaaagaccaggtttgcaatggagccttcaatactcttcatccctatggatctcaggggctcatagggtgacaggagaggagacaagctagcttgggaagagtctttgtacttcagcttctcccctactgaaacactatatacttggggccacagttcatcacaaaacacacatgctctctttctttctctcacacccacatcctgggaacccaacaacttgatggcaggtagctctgggtatccttggtctggcattcacccactgggaatctaagctgtcctaaagctctgttcaatcacttctcactctttccaggcccatgtgggtaggtgttccagccttcactctttcagactgatcatagaggcacagtgtgggaaaatcccctactgtgatggccattgct

SEQ ID NO: 461897 - DNA, 2906 bp, Homo sapiens
tatcccagcaggtgtagtgtgagaactggcatatgttaggctatggtgtcaaaagagaaataccccgttcatgagagtaatccagtgattttcaaaaagacaagacacactgacatccagcgcagtcagggcacaattaccttggaaaaatcacctcacacagaatggttgaggagactttctaaggagcctgtttgcctgtcaacccaaaacaatcctaagcaaaaacaacaaagcttgaggcatcctgctacccgacttcaaactatactacaaggctacaaaaaagaagaaggagaaggagaaggagaagaagaagaagaagaagaagaagaagaagaagaagaagaagaagaagaagaagaaggggacctttatgtggtcaacaaacacaaaaaagagaaaagctcatcatcactggagactagagaaatgcaaatcaaaaccacaatgggataccttctcacaccatgttgaatggcagttattaaaaagttaggaaacaacagatgctggagaggagggcgtggcttcctgcatttggcggggtctttgtctctcgctggcgctggcacaggaacttgggatccgtctcctctttcgcctcctgcaccttgggagccctgggctactctctcacagcccctgttgccctgtgatctgtaggtccttggggacgcatagtcaaggtgccaggacatcctggaagctgggaaatgatttcttccagaccatggctggagaaggaaagaagattgttgcagtggcaggaccaaggtcaaatgagttatagccaagtctacagtaagatgtggcagtattctgttttgaagccgggaccatgattggcaagcttgccacttggtcaagtgctcaccctctgaaaatgtcttccttggtctttgcctccagctgggtgccacaaactctgaactggattccaaggctttcatgaatgcacttatgtttgctgtggcagctgcattatgtcgtgggggatgtggatgcagaacctcacattctgtcgtcttgcttatgttactctcctttatgtttcactttctcaaatgaatgtcaagcaggtgattttcagattcaaaagttctaaaataaattgctcaaatttatacattatgtaagctgttaataaaatttcttgtaggtgctacatatttgttaaaatttttggttgtaattttaagctcactgtaggcagaaaggaatcattaagatttctattcttttttagtctgtatctaaatgaccatatattttaattccaaatatttactttatacttcagtaatgctcattgtattttgcaaaatttatattgttcttttatttgaaaatataaggctttttttagctcctgaaagctatattatagtcatatagttttattatagtatttgataagaagagcagcaacatattgagaacagataaaattctgctgtctttttaatgattatttattaaattcttctcattagagcctattattaatgattgtaatgtatttactgtataatttttctgcaatttattaaatgccaatgacttccaatgtctgcttttcatgactgcacacagtttaaagctgtagatatctaaagggttatttttcagcccggcatggtggctcacgcctgtaatcccagcactttgggaggccaaggtgggtggatcacgaggtcaggagatcaagaccatcctggctaccacggtgaaaccccgtctctactaaatatagaaaaaattagccgggcatagtggtgggtgcctgtattcccagctactcgagaggctgaggcaggagaatggcgtgaacccagtgggcggagcttgcagtgagccgagatggcaccactgcactacagcctgggcgacagggtgagactctgtctcaaaaaaaaaaaaaaaagggcttatttttcattgtatatttatgttgtattcaggattttatgcatttaatctctcttcttatgttcaattctgtgttgttgtgtttcttttcttgggggggtatgttttctcagatcagttaattgtatttttgcttttaaagcttgatatcatgagttgaatgataattttttaactcggtacactttatgacaatgtgatatttaatttatatgtgaattagccgtgtttgttgcttatacatatatctatgtgtttttcacctataattttaaaacagagtcaaatgaacaaaaatcagttatttgtcctcttgcagggcgggtagaccttccttccccacgggtttgaggctatggctaagtggtgagccttggggagatgcaggaaggatccatcccaggcacttggctagaggtaagtaaaaatagcctttggaccagaagacctgatagtttgggtactcgtctgaacataagtccccatcttcccagaaatgtcgtcttttgtctgcaacaactggctggagaaatatttcagaaagatgtgtgcctggaacacccaaagacgtacctttcctttctctttggcataggccttgtagcactgtagaaagaccaggtttgcaatggagccttcaatactcttcatccctatggatctcaggggctcatagggtgacaggagaggagacaagctagcttgggaagagtctttgtacttcagcttctcccctactgaaacactatatacttggggccacagttcatcacaaaacgcctcagcagcagaggcgtttaggaagccagaggtcagggatttcaggggaaaagaaacaaggcctggtttattctctaattctttaaaaatgggataggagcaaaaggttaaaatatgtgggtctcacacaggaaaggccttctgaagaagaaaaatgggtgattcactggagttggcccagctacacgcctctg

SEQ ID NO: 461898 - DNA, 1522 bp, Homo sapiens
tatcccagcaggtgtagtgtgagaactggcatatgttaggctatggtgtcaaaagagaaataccccgttcatgagagtaatccagtgattttcaaaaagacaagacacactgacatccagcgcagtcagggcacaattaccttggaaaaatcacctcacacagaatggttgaggagactttctaaggagcctgtttgcctgtcaacccaaaacaatcctaagcaaaaacaacaaagcttgaggcatcctgctacccgacttcaaactatactacaaggctacaaaaaagaagaaggagaaggagaaggagaagaagaagaagaagaagaagaagaagaagaagaagaagaagaagaagaagaagaaggggacctttatgtggtcaacaaacacaaaaaagagaaaagctcatcatcactggagactagagaaatgcaaatcaaaaccacaatgggataccttctcacaccatgttgaatggcagttattaaaaagttaggaaacaacagatgctggagaggagggcgtggcttcctgcatttggcggggtctttgtctctcgctggcgctggcacaggaacttgggatccgtctcctctttcgcctcctgcaccttgggagccctgggctactctctcacagcccctgttgccctgtgatctgtaggtccttggggacgcatagtcaaggtgccaggacatcctggaagctgggaaatgatttcttccagaccatggctggagaaggaaagaaggtgtgttttgcctgactcagtgactatagagagaaccaagttctgcaggcctgtcacctaagtctcagggcgggtagaccttccttccccacgggtttgaggctatggctaagtggtgagccttggggagatgcaggaaggatccatcccaggcacttggctagaggtaagtaaaaatagcctttggaccagaagacctgatagtttgggtactcgtctgaacataagtccccatcttcccagaaatgtcgtcttttgtctgcaacaactggctggagaaatatttcagaaagatgtgtgcctggaacacccaaagacgtacctttcctttctctttggcataggccttgtagcactgtagaaagaccaggtttgcaatggagccttcaatactcttcatccctatggatctcaggggctcatagggtgacaggagaggagacaagctagcttgggaagagtctttgtacttcagcttctcccctactgaaacactatatacttggggccacagttcatcacaaaacacacatgctctctttctttctctcacacccacatcctgggaacccaacaacttgatggcaggtagctctgggtatccttggtctggcattcacccactgggaatctaagctgtcctaaagctctgttcaatcacttctcactctttccaggcccatgtgggtaggtgttccagccttcactctttcagactgatcatagaggcacagtgtgggaaaatcccctactgtgatggccattgct

SEQ ID NO: 461899 - DNA, 2951 bp, Homo sapiens
tatcccagcaggtgtagtgtgagaactggcatatgttaggctatggtgtcaaaagagaaataccccgttcatgagagtaatccagtgattttcaaaaagacaagacacactgacatccagcgcagtcagggcacaattaccttggaaaaatcacctcacacagaatggttgaggagactttctaaggagcctgtttgcctgtcaacccaaaacaatcctaagcaaaaacaacaaagcttgaggcatcctgctacccgacttcaaactatactacaaggctacaaaaaagaagaaggagaaggagaaggagaagaagaagaagaagaagaagaagaagaagaagaagaagaagaagaagaagaagaaggggacctttatgtggtcaacaaacacaaaaaagagaaaagctcatcatcactggagactagagaaatgcaaatcaaaaccacaatgggataccttctcacaccatgttgaatggcagttattaaaaagttaggaaacaacagatgctggagaggagggcgtggcttcctgcatttggcggggtctttgtctctcgctggcgctggcacaggaacttgggatccgtctcctctttcgcctcctgcaccttgggagccctgggctactctctcacagcccctgttgccctgtgatctgtaggtccttggggacgcatagtcaaggtgccaggacatcctggaagctgggaaatgatttcttccagaccatggctggagaaggaaagaagattgttgcagtggcaggaccaaggtcaaatgagttatagccaagtctacagtaagatgtggcagtattctgttttgaagccgggaccatgattggcaagcttgccacttggtcaagtgctcaccctctgaaaatgtcttccttggtctttgcctccagctgggtgccacaaactctgaactggattccaaggctttcatgaatgcacttatgtttgctgtggcagctgcattatgtcgtgggggatgtggatgcagaacctcacattctgtcgtcttgcttatgttactctcctttatgtttcactttctcaaatgaatgtcaagcaggtgattttcagattcaaaagttctaaaataaattgctcaaatttatacattatgtaagctgttaataaaatttcttgtaggtgctacatatttgttaaaatttttggttgtaattttaagctcactgtaggcagaaaggaatcattaagatttctattcttttttagtctgtatctaaatgaccatatattttaattccaaatatttactttatacttcagtaatgctcattgtattttgcaaaatttatattgttcttttatttgaaaatataaggctttttttagctcctgaaagctatattatagtcatatagttttattatagtatttgataagaagagcagcaacatattgagaacagataaaattctgctgtctttttaatgattatttattaaattcttctcattagagcctattattaatgattgtaatgtatttactgtataatttttctgcaatttattaaatgccaatgacttccaatgtctgcttttcatgactgcacacagtttaaagctgtagatatctaaagggttatttttcagcccggcatggtggctcacgcctgtaatcccagcactttgggaggccaaggtgggtggatcacgaggtcaggagatcaagaccatcctggctaccacggtgaaaccccgtctctactaaatatagaaaaaattagccgggcatagtggtgggtgcctgtattcccagctactcgagaggctgaggcaggagaatggcgtgaacccagtgggcggagcttgcagtgagccgagatggcaccactgcactacagcctgggcgacagggtgagactctgtctcaaaaaaaaaaaaaaaagggcttatttttcattgtatatttatgttgtattcaggattttatgcatttaatctctcttcttatgttcaattctgtgttgttgtgtttcttttcttgggggggtatgttttctcagatcagttaattgtatttttgcttttaaagcttgatatcatgagttgaatgataattttttaactcggtacactttatgacaatgtgatatttaatttatatgtgaattagccgtgtttgttgcttatacatatatctatgtgtttttcacctataattttaaaacagagtcaaatgaacaaaaatcagttatttgtcctcttgcagggcgggtagaccttccttccccacgggtttgaggctatggctaagtggtgagccttggggagatgcaggaaggatccatcccaggcacttggctagaggtaagtaaaaatagcctttggaccagaagacctgatagtttgggtactcgtctgaacataagtccccatcttcccagaaatgtcgtcttttgtctgcaacaactggctggagaaatatttcagaaagatgtgtgcctggaacacccaaagacgtacctttcctttctctttggcataggccttgtagcactgtagaaagaccaggtttgcaatggagccttcaatactcttcatccctatggatctcaggggctcatagggtgacaggagaggagacaagctagcttgggaagagtctttgtacttcagcttctcccctactgaaacactatatacttggggccacagttcatcacaaaacacacatgctctctttctttctctcacacccacatcctgggaacccaacaacttgatggcaggtagctctgggtatccttggtctggcattcacccactgggaatctaagctgtcctaaagctctgttcaatcacttctcactctttccaggcccatgtgggtaggtgttccagccttcactctttcagactgatcatagaggcacagtgtgggaaaatcccctactgtgatggccattgct

SEQ ID NO: 461900 - DNA, 3050 bp, Homo sapiens
tatcccagcaggtgtagtgtgagaactggcatatgttaggctatggtgtcaaaagagaaataccccgttcatgagagtaatccagtgattttcaaaaagacaagacacactgacatccagcgcagtcagggcacaattaccttggaaaaatcacctcacacagaatggttgaggagactttctaaggagcctgtttgcctgtcaacccaaaacaatcctaagcaaaaacaacaaagcttgaggcatcctgctacccgacttcaaactatactacaaggctacaaaaaagaagaaggagaaggagaaggagaagaagaagaagaagaagaagaagaagaagaagaagaagaagaagaagaagaagaaggggacctttatgtggtcaacaaacacaaaaaagagaaaagctcatcatcactggagactagagaaatgcaaatcaaaaccacaatgggataccttctcacaccatgttgaatggcagttattaaaaagttaggaaacaacagatgctggagaggagggcgtggcttcctgcatttggcggggtctttgtctctcgctggcgctggcacaggaacttgggatccgtctcctctttcgcctcctgcaccttgggagccctgggctactctctcacagcccctgttgccctgtgatctgtaggtccttggggacgcatagtcaaggtgccaggacatcctggaagctgggaaatgatttcttccagaccatggctggagaaggaaagaaggtgtgttttgcctgactcagtgactatagagagaaccaagttctgcaggcctgtcacctaagtctcaggtgagtatgaattctcttgtgtttttcacagattgttgcagtggcaggaccaaggtcaaatgagttatagccaagtctacagtaagatgtggcagtattctgttttgaagccgggaccatgattggcaagcttgccacttggtcaagtgctcaccctctgaaaatgtcttccttggtctttgcctccagctgggtgccacaaactctgaactggattccaaggctttcatgaatgcacttatgtttgctgtggcagctgcattatgtcgtgggggatgtggatgcagaacctcacattctgtcgtcttgcttatgttactctcctttatgtttcactttctcaaatgaatgtcaagcaggtgattttcagattcaaaagttctaaaataaattgctcaaatttatacattatgtaagctgttaataaaatttcttgtaggtgctacatatttgttaaaatttttggttgtaattttaagctcactgtaggcagaaaggaatcattaagatttctattcttttttagtctgtatctaaatgaccatatattttaattccaaatatttactttatacttcagtaatgctcattgtattttgcaaaatttatattgttcttttatttgaaaatataaggctttttttagctcctgaaagctatattatagtcatatagttttattatagtatttgataagaagagcagcaacatattgagaacagataaaattctgctgtctttttaatgattatttattaaattcttctcattagagcctattattaatgattgtaatgtatttactgtataatttttctgcaatttattaaatgccaatgacttccaatgtctgcttttcatgactgcacacagtttaaagctgtagatatctaaagggttatttttcagcccggcatggtggctcacgcctgtaatcccagcactttgggaggccaaggtgggtggatcacgaggtcaggagatcaagaccatcctggctaccacggtgaaaccccgtctctactaaatatagaaaaaattagccgggcatagtggtgggtgcctgtattcccagctactcgagaggctgaggcaggagaatggcgtgaacccagtgggcggagcttgcagtgagccgagatggcaccactgcactacagcctgggcgacagggtgagactctgtctcaaaaaaaaaaaaaaaagggcttatttttcattgtatatttatgttgtattcaggattttatgcatttaatctctcttcttatgttcaattctgtgttgttgtgtttcttttcttgggggggtatgttttctcagatcagttaattgtatttttgcttttaaagcttgatatcatgagttgaatgataattttttaactcggtacactttatgacaatgtgatatttaatttatatgtgaattagccgtgtttgttgcttatacatatatctatgtgtttttcacctataattttaaaacagagtcaaatgaacaaaaatcagttatttgtcctcttgcagggcgggtagaccttccttccccacgggtttgaggctatggctaagtggtgagccttggggagatgcaggaaggatccatcccaggcacttggctagaggtaagtaaaaatagcctttggaccagaagacctgatagtttgggtactcgtctgaacataagtccccatcttcccagaaatgtcgtcttttgtctgcaacaactggctggagaaatatttcagaaagatgtgtgcctggaacacccaaagacgtacctttcctttctctttggcataggccttgtagcactgtagaaagaccaggtttgcaatggagccttcaatactcttcatccctatggatctcaggggctcatagggtgacaggagaggagacaagctagcttgggaagagtctttgtacttcagcttctcccctactgaaacactatatacttggggccacagttcatcacaaaacacacatgctctctttctttctctcacacccacatcctgggaacccaacaacttgatggcaggtagctctgggtatccttggtctggcattcacccactgggaatctaagctgtcctaaagctctgttcaatcacttctcactctttccaggcccatgtgggtaggtgttccagccttcactctttcagactgatcatagaggcacagtgtgggaaaatcccctactgtgatggccattgct

SEQ ID NO: 461901 - DNA, 1343 bp, Homo sapiens
tatcccagcaggtgtagtgtgagaactggcatatgttaggctatggtgtcaaaagagaaataccccgttcatgagagtaatccagtgattttcaaaaagacaagacacactgacatccagcgcagtcagggcacaattaccttggaaaaatcacctcacacagaatggttgaggagactttctaaggagcctgtttgcctgtcaacccaaaacaatcctaagcaaaaacaacaaagcttgaggcatcctgctacccgacttcaaactatactacaaggctacaaaaaagaagaaggagaaggagaaggagaagaagaagaagaagaagaagaagaagaagaagaagaagaagaagaagaagaagaaggggacctttatgtggtcaacaaacacaaaaaagagaaaagctcatcatcactggagactagagaaatgcaaatcaaaaccacaatgggataccttctcacaccatgttgaatggcagttattaaaaagttaggaaacaacagatgctggagaggagggcgtggcttcctgcatttggcggggtctttgtctctcgctggcgctggcacaggaacttgggatccgtctcctctttcgcctcctgcaccttgggagccctgggctactctctcacagcccctgttgccctgtgatctgtaggtccttggggacgcatagtcaaggtgccaggacatcctggaagctgggaaatggtgagtatacggggttcgccatcccgagaggggagaacagactgtgaaaccggcaggaccgtcctccccacggttagctccgagtctcccgcagcttggccctcagtcccctgtggctgcaagatggccgctgggccagcagcgagggccccacgtcccgtccggcccatccggtcctgtccctgggcagcgccctgctctgcgcccacagccatgagtatttcccagattgttcagggaggcctggtgggtcatcagggaaaaaccgcgactgggtgtttgcgtgggaggagctgcggcccgtggggtccccagtctctcttgttaaaaattaacgggagtctatgttaaacgttaaccagtttatctgaacaaagagtgattggtgaaatggaaagcacccagccatgatttctggtccaccagaggggcataaaggaaaggctttcataagatgcatgagaaagcagcccaaattcacctggttacatattcagaggttaattgcatgtttgtcatgggttaaacctgcattttgcttcaggctaagatagtgttttataggaaatatatttgagttaggttttagatttttttttgtttgttttttgttttttacctatg

SEQ ID NO: 461902 - DNA, 427 bp, Homo sapiens
gtctcacctcgttacccaggctggagtgcagtggtgtgatcatatctcactgtacatctccaactcctgggctcaagaaattctcctgccatagcctcctgagtaggtaggactacaggcatgtgccaccacacccagtagcatctcttcctcaaagatgagccagccgtcatttgaagaggaggaaaaactggattggggaagaatctggggcaaaatgaagccaaattgagaacgaggagaaaagaagatgctaaggccgcagataaggaggtcttgagtgttacagctctttttgaatttgtctagcatgctttctgctttttactggaaagtgcccccccccaaaaaaataaaaacgaataaataaaaaagaaagatttaaaaaataaacgagaaagaagggcctgggaattgtggctgctca

SEQ ID NO: 461903 - DNA, 375 bp, Homo sapiens
gtctcacctcgttacccaggctggagtgcagtggtgtgatcatatctcactgtacatctccaactcctgggctcaagaaattctcctgccatagcctcctgagtaggtaggactacaggcatgtgccaccacacccagtagcatctcttcctcaaagatgagccagccgtcatttgaagaggaggaaaaactggattggggaagaatctggggcaaaatgaagccaaattgagaacgaggagaaaagaagatgctaaggccgcagataaggaggtcttgagtgttacagctctttttgaatttgtctagcatgctttctgctttttactggaaagtgcccccccccaaaaaaataaaaacgaataaataaaaaag

SEQ ID NO: 461904 - DNA, 343 bp, Homo sapiens
gtcgcgctcgtcggtgctccccgactcccagggacaagaagggctcctgatgggtagcatctcttcctcaaagatgagccagccgtcatttgaagaggaggaaaaactggattggggaagaatctggggcaaaatgaagccaaattgagaacgaggagaaaagaagatgctaaggccgcagataaggaggtcttgagtgttacagctctttttgaatttgtctagcatgctttctgctttttactggaaagtgcccccccccaaaaaaataaaaacgaataaataaaaaagaaagatttaaaaaataaacgagaaagaagggcctgggaattgtggctgctca

SEQ ID NO: 461905 - DNA, 285 bp, Homo sapiens
  misc_feature (22)..(22): n is a, c, g, or t
  misc_feature (53)..(54): n is a, c, g, or t
  misc_feature (57)..(57): n is a, c, g, or t
  misc_feature (71)..(71): n is a, c, g, or t
  misc_feature (78)..(78): n is a, c, g, or t
tcgccaattacatcctcagcanataaagaaaaaaaaaaaaaaactaagaagannacntaccctcaagctgnacgcgcncaacttcgaagaggaggaaaaactggattggggaagaatctggggcaaaatgaagccaaattgagaacgaggagaaaagaagatgctaaggccgcagataaggaggtcttgagtgttacagctctttttgaatttgtctagcatgctttctgctttttactggaaagtgcccccccccaaaaaaataaaaacgaataaataaaaaag

SEQ ID NO: 461906 - DNA, 1606 bp, Homo sapiens
ttatcgtcgtctcatgaaacagcaaaaaaacaacttaagggttggggtttcgccatgttgtccaagctggtctcgaattcttgggctcaaaccatctgcccacactggcctcccaaggtgctgtagcatctcttcctcaaagatgagccagccgtcatttgaagaggaggaaaaactggattggggaagaatctggggcaaaatgaagccaaattgagaacgaggagaaaagaagatgctaaggccgcagataaggagttccatctcccgggctgatcctgctcctctgcgatacgttctgcagatggtcctgtgtggcccagtcttccaaatgcacctcttcagggatgcccatcctcagttagagaaacgggctgtaagtcagagaacttgaacttgacccagagcatggccagacacatcagctattccctacatcacgtttctttaaaataaagcctgccagcacaagaggcttgtagagtttgccatagtacatgtacccagggctctgcttttgttcacgattctgtattcatattgtgattttaatagctgctaatcaaagaaagaggctttctagtcattggtaagctggcaaagagcaaaacaaccaaatgcctgacaagcagctggtaaggaggttgtgctggagaaataaacatgcaattgtcttcccttccacaattcagaccgacttgcattctctttacctggcatcaacttaaagcgaaaacccctctgtgtctctccttattccacgcctttctcatgaaaagccaggaaaaagtttcccatccattcattcaacacatctccattgtgcaaggtattgtggaggatgtgtgggctgccaactctgagcccaaggtctatgaagttgaaactctgtctgaaaaagaagaagaagaaggaaaagaagaagaagaagaagaagaagaagaagaagaagaagaagaagaagaggaagaggaagaggaagaggaagaaggagaaggagaaggagaaggagaagaagaggaagaggaggaggaggaggaagaggaagaaggagaagaaggagaaggagaagaagaagaagaagaagaagaagaagaagaagaagaagaagaagaagaagaagcagaagcagcaacaacatgatcatgattagccactccgaggagtggacctccctacagcttctgcttacacatctgaatatgggtgtcctcccatctccttttaagaaatggatcaagcatggatcaggagtgcatggcatccttatgcactttgcttttctgtgctgtgggtgtctcagctggtcatatttagggggccagagatccaagggcccttcaacatttagccttcatcccctaaaacccccaaggtctgggaaactgagctcctgacaggtgctgcctgccaacggagcagttgcctgggctgttgggagggtcggaggcgggcttcctggtgtcagctaacctcagttctttctaagaggcaactttgccttctgaaagacaaatctatttccctgtcattttatctagagaagagtattctttgttacatcccataaattcctttttaaagttttcattatgaaggtttagat

SEQ ID NO: 461907 - DNA, 427 bp, Homo sapiens
gtctcacctcgttacccaggctggagtgcagtggtgtgatcatatctcactgtacatctccaactcctgggctcaagaaattctcctgccatagcctcctgagtaggtaggactacaggcatgtgccaccacacccagtagcatctcttcctcaaagatgagccagccgtcatttgaagaggaggaaaaactggattggggaagaatctggggcaaaatgaagccaaattgagaacgaggagaaaagaagatgctaaggccgcagataaggaggtcttgagtgttacagctctttttgaatttgtctagcatgctttctgctttttactggaaagtgcccccccccaaaaaaataaaaacgaataaataaaaaagtggcggccgaaaccctccccctctctcaactttattgacgaactggtaacac

SEQ ID NO: 461908 - DNA, 441 bp, Homo sapiens
  misc_feature (61)..(61): n is a, c, g, or t
  misc_feature (72)..(72): n is a, c, g, or t
cgaacgcacagcactgtgcccggggcctgtcccccacagaagccagcagacgactttatgntaggacgttcnggggtttcgccatgttgtccaagctggtctcgaattcttgggctcaaaccatctgcccacactggcctcccaaggtgctgtagcatctcttcctcaaagatgagccagccgtcatttgaagaggaggaaaaactggattggggaagaatctggggcaaaatgaagccaaattgagaacgaggagaaaagaagatgctaaggccgcagataaggaggtcttgagtgttacagctctttttgaatttgtctagcatgctttctgctttttactggaaagtgcccccccccaaaaaaataaaaacgaataaataaaaaagaaagatttaaaaaataaacgagaaagaagggcctgggaattgtggctgctca

SEQ ID NO: 461909 - DNA, 389 bp, Homo sapiens
  misc_feature (61)..(61): n is a, c, g, or t
  misc_feature (72)..(72): n is a, c, g, or t
cgaacgcacagcactgtgcccggggcctgtcccccacagaagccagcagacgactttatgntaggacgttcnggggtttcgccatgttgtccaagctggtctcgaattcttgggctcaaaccatctgcccacactggcctcccaaggtgctgtagcatctcttcctcaaagatgagccagccgtcatttgaagaggaggaaaaactggattggggaagaatctggggcaaaatgaagccaaattgagaacgaggagaaaagaagatgctaaggccgcagataaggaggtcttgagtgttacagctctttttgaatttgtctagcatgctttctgctttttactggaaagtgcccccccccaaaaaaataaaaacgaataaataaaaaag

SEQ ID NO: 461910 - DNA, 413 bp, Homo sapiens
cccattttttaaatagtgaatgtgtttagaataaacagtcttgtggggtttcgccatgttgtccaagctggtctcgaattcttgggctcaaaccatctgcccacactggcctcccaaggtgctgtagcatctcttcctcaaagatgagccagccgtcatttgaagaggaggaaaaactggattggggaagaatctggggcaaaatgaagccaaattgagaacgaggagaaaagaagatgctaaggccgcagataaggaggtcttgagtgttacagctctttttgaatttgtctagcatgctttctgctttttactggaaagtgcccccccccaaaaaaataaaaacgaataaataaaaaagaaagatttaaaaaataaacgagaaagaagggcctgggaattgtggctgctca

SEQ ID NO: 461911 - DNA, 1614 bp, Homo sapiens
cgttgcgctcccacacactccacggcacaaaaaaacattcgttagaggactggggtttcgccatgttgtccaagctggtctcgaattcttgggctcaaaccatctgcccacactggcctcccaaggtgctgtagcatctcttcctcaaagatgagccagccgtcatttgaagaggaggaaaaactggattggggaagaatctggggcaaaatgaagccaaattgagaacgaggagaaaagaagatgctaaggccgcagataaggagttccatctcccgggctgatcctgctcctctgcgatacgttctgcagatggtcctgtgtggcccagtcttccaaatgcacctcttcagggatgcccatcctcagttagagaaacgggctgtaagtcagagaacttgaacttgacccagagcatggccagacacatcagctattccctacatcacgtttctttaaaataaagcctgccagcacaagaggcttgtagagtttgccatagtacatgtacccagggctctgcttttgttcacgattctgtattcatattgtgattttaatagctgctaatcaaagaaagaggctttctagtcattggtaagctggcaaagagcaaaacaaccaaatgcctgacaagcagctggtaaggaggttgtgctggagaaataaacatgcaattgtcttcccttccacaattcagaccgacttgcattctctttacctggcatcaacttaaagcgaaaacccctctgtgtctctccttattccacgcctttctcatgaaaagccaggaaaaagtttcccatccattcattcaacacatctccattgtgcaaggtattgtggaggatgtgtgggctgccaactctgagcccaaggtctatgaagttgaaactctgtctgaaaaagaagaagaagaaggaaaagaagaagaagaagaagaagaagaagaagaagaagaagaagaagaagaggaagaggaagaggaagaggaagaaggagaaggagaaggagaaggagaagaagaggaagaggaggaggaggaggaagaggaagaaggagaagaaggagaaggagaagaagaagaagaagaagaagaagaagaagaagaagaagaagaagaagaagaagcagaagcagcaacaacatgatcatgattagccactccgaggagtggacctccctacagcttctgcttacacatctgaatatgggtgtcctcccatctccttttaagaaatggatcaagcatggatcaggagtgcatggcatccttatgcactttgcttttctgtgctgtgggtgtctcagctggtcatatttagggggccagagatccaagggcccttcaacatttagccttcatcccctaaaacccccaaggtctgggaaactgagctcctgacaggtgctgcctgccaacggagcagttgcctgggctgttgggagggtcggaggcgggcttcctggtgtcagctaacctcagttctttctaagaggcaactttgccttctgaaagacaaatctatttccctgtcattttatctagagaagagtattctttgttacatcccataaattcctttttaaagttttcattatgaaggtttagat

SEQ ID NO: 461912 - DNA, 1606 bp, Homo sapiens
caccgacccgagccacccctccccccgcacaacaaaaactgatggggtttcgccatgttgtccaagctggtctcgaattcttgggctcaaaccatctgcccacactggcctcccaaggtgctgtagcatctcttcctcaaagatgagccagccgtcatttgaagaggaggaaaaactggattggggaagaatctggggcaaaatgaagccaaattgagaacgaggagaaaagaagatgctaaggccgcagataaggagttccatctcccgggctgatcctgctcctctgcgatacgttctgcagatggtcctgtgtggcccagtcttccaaatgcacctcttcagggatgcccatcctcagttagagaaacgggctgtaagtcagagaacttgaacttgacccagagcatggccagacacatcagctattccctacatcacgtttctttaaaataaagcctgccagcacaagaggcttgtagagtttgccatagtacatgtacccagggctctgcttttgttcacgattctgtattcatattgtgattttaatagctgctaatcaaagaaagaggctttctagtcattggtaagctggcaaagagcaaaacaaccaaatgcctgacaagcagctggtaaggaggttgtgctggagaaataaacatgcaattgtcttcccttccacaattcagaccgacttgcattctctttacctggcatcaacttaaagcgaaaacccctctgtgtctctccttattccacgcctttctcatgaaaagccaggaaaaagtttcccatccattcattcaacacatctccattgtgcaaggtattgtggaggatgtgtgggctgccaactctgagcccaaggtctatgaagttgaaactctgtctgaaaaagaagaagaagaaggaaaagaagaagaagaagaagaagaagaagaagaagaagaagaagaagaagaggaagaggaagaggaagaggaagaaggagaaggagaaggagaaggagaagaagaggaagaggaggaggaggaggaagaggaagaaggagaagaaggagaaggagaagaagaagaagaagaagaagaagaagaagaagaagaagaagaagaagaagaagcagaagcagcaacaacatgatcatgattagccactccgaggagtggacctccctacagcttctgcttacacatctgaatatgggtgtcctcccatctccttttaagaaatggatcaagcatggatcaggagtgcatggcatccttatgcactttgcttttctgtgctgtgggtgtctcagctggtcatatttagggggccagagatccaagggcccttcaacatttagccttcatcccctaaaacccccaaggtctgggaaactgagctcctgacaggtgctgcctgccaacggagcagttgcctgggctgttgggagggtcggaggcgggcttcctggtgtcagctaacctcagttctttctaagaggcaactttgccttctgaaagacaaatctatttccctgtcattttatctagagaagagtattctttgttacatcccataaattcctttttaaagttttcattatgaaggtttagat

SEQ ID NO: 461913 - DNA, 1522 bp, Homo sapiens
  misc_feature (6)..(6): n is a, c, g, or t
ggattngtatcccctctgctcccaggaatccagtaaaagtagcatctcttcctcaaagatgagccagccgtcatttgaagaggaggaaaaactggattggggaagaatctggggcaaaatgaagccaaattgagaacgaggagaaaagaagatgctaaggccgcagataaggagttccatctcccgggctgatcctgctcctctgcgatacgttctgcagatggtcctgtgtggcccagtcttccaaatgcacctcttcagggatgcccatcctcagttagagaaacgggctgtaagtcagagaacttgaacttgacccagagcatggccagacacatcagctattccctacatcacgtttctttaaaataaagcctgccagcacaagaggcttgtagagtttgccatagtacatgtacccagggctctgcttttgttcacgattctgtattcatattgtgattttaatagctgctaatcaaagaaagaggctttctagtcattggtaagctggcaaagagcaaaacaaccaaatgcctgacaagcagctggtaaggaggttgtgctggagaaataaacatgcaattgtcttcccttccacaattcagaccgacttgcattctctttacctggcatcaacttaaagcgaaaacccctctgtgtctctccttattccacgcctttctcatgaaaagccaggaaaaagtttcccatccattcattcaacacatctccattgtgcaaggtattgtggaggatgtgtgggctgccaactctgagcccaaggtctatgaagttgaaactctgtctgaaaaagaagaagaagaaggaaaagaagaagaagaagaagaagaagaagaagaagaagaagaagaagaagaggaagaggaagaggaagaggaagaaggagaaggagaaggagaaggagaagaagaggaagaggaggaggaggaggaagaggaagaaggagaagaaggagaaggagaagaagaagaagaagaagaagaagaagaagaagaagaagaagaagaagaagaagcagaagcagcaacaacatgatcatgattagccactccgaggagtggacctccctacagcttctgcttacacatctgaatatgggtgtcctcccatctccttttaagaaatggatcaagcatggatcaggagtgcatggcatccttatgcactttgcttttctgtgctgtgggtgtctcagctggtcatatttagggggccagagatccaagggcccttcaacatttagccttcatcccctaaaacccccaaggtctgggaaactgagctcctgacaggtgctgcctgccaacggagcagttgcctgggctgttgggagggtcggaggcgggcttcctggtgtcagctaacctcagttctttctaagaggcaactttgccttctgaaagacaaatctatttccctgtcattttatctagagaagagtattctttgttacatcccataaattcctttttaaagttttcattatgaaggtttagat

SEQ ID NO: 461914 - DNA, 1193 bp, Homo sapiens
actgccagcaggaggtttgacacattctctctggataactgaatggctcctgagaaaagacccccacattctgacatcttggagtcccgccccagtttaaaagccagtttgctgtccagcgaccttgttggagatgggagttttatctataagcccctgactggagctgctgcctttctttcagtgatgccctgcccagagaggaggaaactagagaggcagtctggctacagcggctttgttgcactgtggcgggctctgcccagtccaaacttcctggtggctttgtttacactggtttctctgaagtgttccgctccatcctggaagacagccttggctgaccagtttcaggagttcccagagatgccaggctcttttaaacaaccagcccagctctcacgtgacgtaatagaacaagaactcactaattaccaacgggaaggcaccaaaccattgaggagggatttgtcctcattacccaaacacttcccaccgggcctcaccttgaacgctggagatcaaattttaacatggtatttggtggggacaaaccctatcagcagctgcttttaatatttaaaaaaatattttgagagagggcccacagaccctctgaaagaagcagactgctcctgcaggacccgggggacaccccaaatactgtgagtgccccaactgcggaagtgggaaagggagaccctcctttccggaacacacaccccctactggagaagctgaaggtctgcttccgggagatgctcccgacttcacctggagctgagtcaagttagagaaccggaccaagcgaaatacaggggcagaggaggcagcagggaggccctgggagctctttgaatccccaggtagcctattcctgcctggcaccactgggattcatcaggagggaggccagaggagcaggaggtgggaggcggaaagcctcgggcaagttttcaagcccgtcctctgtctggaaacagactcagaggtgttgcaggggacacggtgggagtgagaccagcccttcggtgtgcgtgggatctgggggaggcctgtgactgccggctttcccctgcttctctgacaacctgcatgactcagcagaggcagccataatcctggagagccccggtttaagatctccaggtgaagtagatttttattttgattcaaagaactggtcttcaagc

SEQ ID NO: 461915 - DNA, 2422 bp, Homo sapiens
gcaggtgttttctgttctcagacagcctcgggcaatgaactctggcctgtatagttgcaaaaggacctcaactccatgtttatgctactccagaggaaaagagaagaagagacagtatctcactatgttgcccaggctggactcctgggctaaaggatcctcccacctcaagtgaccacagcaggagagatggatggaagccatggaaccagctttgtacactataatgcccagctttgtacactataagtgggtaaattttatggtatatgaattatatctcaattaagctatttttaaaaattctctactcataataaataccagaaatttctgtggctattttctcctttagaactgtgttaaacaggtagaaaatggagactattagaagagattcaattttcaatttggtgcttctatatttatatgaagcctgaaggctgaggtgggaggattgcctaagtccagaggtcaaggctgcagtgagccatgattacaccactgtactccagcctgagctacaaagcaagacagaaaaaaaaaaaaaaatcttgtatattagctactctggagtgactcctcaaatgaagtctcacaatgcgggctgaactgagaacctgttttacttaatgaccaaagctactcctacctcaaatttgggtttcttttaagttctgagatatagtgcgggtaggagggacaattccatctgaattgaggtcctttttcagttttataatgtctttagctagttttgatcatgaattatgaattttggataaactttcatgtgacaaaaccaaggaacaaaaacaaggaatatgactggaagcactgatgacaatatcaaatagtataaaagtctaaggaaggagggtggtagtggagaaagagaaatccaaaaaccctagaactgaatcccagcttgactacttccaaggtacacaacctctggcaggtgacttgaccatgaacctcagtgtactcatctgtaaaatggggctattcataccagcttctgcatgtgatactaagaaatcaaggcacagagaagggaagagactcgccctaggtcccacagcaagcagcagtactggagccaacacggaggccccccggtttcacggtcagggctcgctacgctacaccctgaacgcagacccagggcagcggcctcggccgcctgaggccactgccgaagacttcgccgccaactccttcgctctttccactacagcgagaggacttctccagggccgcatcaccctgcggagggaggaagacacggtctctcacgaaagggtctccagacagttccgctgctccgggagcagcccccggccccgcccccgcacagaagccgcgtccagtgagaaggaaagaacggccgctatagccctatcggctgctacaacaccaaaacgcatccacctaactggctgacgctacaccttggtctttccgggtccttgcacgcttcgctccaactcctgcagagctgagccggaggggaatccggaagggacacgctgaacaggaacagaaatgaataaaagtcgctggcagagtagaagacgacatgggagaagaagccaccagcagaacccttggttcagactccgtgattctgaagacaggcaagtgtgccgctctggggagccacttttgcccagtgtgcttctggcattgtacacatggcatgtcacacgatcacaggtgtggagatcacctgggggctcgtcccaatgcaggttctgattctgtaggtctgaggggtcttgaggagagcctgccttcctaacgtgctcccagggcatgtcgctttggtgggtcagcccacctcactgagtagtgaggagagaggaccactctctgttctttcctaagtgaccacgacctctggccagagcattcgccataaagctagaggtagacgttatctgaaacaactggaaaaccgtttctccattttgtagactttttatgcaaatacctttgtggaaaccaaattttattaattcagcctaagtctcggacaaggatatacactcatgcttcgcttaacaaggaggaatgcattctgaggaatatgttgttaggcagtcgtgtcatgcaaacatcatagcacatacgtaacacaaacctacatggtacagccagccacacacacctaagctatatggtgtagccaattgctccgaggctgcaaacctgtacagcatgtgactactgaatgctagaggcagtcagtacacagtggtatttgtgtatctcaacatagaaaagatacagtaaaaatagggtatataagatttttttttaaatggtatacctatgtatgacactcctgtgaacagagcttgcgggactggaagtcagccatcttgtctgtttgcaatacagaccaacaggtctagac

SEQ ID NO: 461916 - DNA, 456 bp, Homo sapiens
ctcctaaagtgctgggattacaggcgtgagccaccacgcctggcatggattgttttatttcttaacctgggtggtgggtacatggctatatttagtttgtgataactcactgaactgtatccttacaatctgtacgttctatcaatgcaaaagtttattttaaaaaatattttttcgaagcacagtggctcatgcctgtaatctcaacactttgggaggccaaggcaggataatcgtttgagcccaggagttcaagaccagcctgagcaacatagcaagactccaatctctacaaaaaataaataattagccatgtgtggtggctcacacctgtgatcccagctacttgggaggctgagatgggaggattccttgagcctgggaggttgaggatgcattgagccatgatcacgccactgcactccagactgggcaaaagaacaagaccctgtctta

SEQ ID NO: 461917 - DNA, 433 bp, Homo sapiens
actttccatctcgctgtgtgcttcctcaccaggtgaattcggtgtgctgggcctcgctgaatcacttggattcccacattctgctatgcctcatgggactcgcagagactccaggctgtgccaccctgctcccagcatcactgttcgtcaatagtcacccagtggctcatgcctgtaatctcaacactttgggaggccaaggcaggataatcgtttgagcccaggagttcaagaccagcctgagcaacatagcaagactccaatctctacaaaaaataaataattagccatgtgtggtggctcacacctgtgatcccagctacttgggaggctgagatgggaggattccttgagcctgggaggttgaggatgcattgagccatgatcacgccactgcactccagactgggcaaaagaacaagaccctgtctta

SEQ ID NO: 461918 - DNA, 3843 bp, Homo sapiens
aattgactgtggtgatggctgcacatatctctggatatactaaacactattgaactgtgtactttgtttgtttgtttgtttttagagacagtatctcactatgttgcccaggctggactcctgggctaaaggatcctcccacctcaagtgaccacagcaggagagatggatggaagccatggaaccagctttgtacactataatgcccagctttgtacactataagtgggtaaattttatggtatatgaattatatctcaattaagctatttttaaaaattctctactcataataaataccagaaatttctgtggctattttctcctttagaactgtgttaaacaggtagaaaatggagactattagaagagattcaattttcaatttggtgcttctatatttatatgaagcctgaaggctgaggtgggaggattgcctaagtccagaggtcaaggctgcagtgagccatgattacaccactgtactccagcctgagctacaaagcaagacagaaaaaaaaaaaaaaatcttgtatattagctactctggagtgactcctcaaatgaagtctcacaatgcgggctgaactgagaacctgttttacttaatgaccaaagctactcctacctcaaatttgggtttcttttaagttctgagatatagtgcgggtaggagggacaattccatctgaattgaggtcctttttcagttttataatgtctttagctagttttgatcatgaattatgaattttggataaactttcatgtgacaaaaccaaggaacaaaaacaaggaatatgactggaagcactgatgacaatatcaaatagtataaaagtctaaggaaggagggtggtagtggagaaagagaaatccaaaaaccctagaactgaatcccagcttgactacttccaaggtacacaacctctggcaggtgacttgaccatgaacctcagtgtactcatctgtaaaatggggctattcataccagcttctgcatgtgatactaagaaatcaaggcacagagaagggaagagactcgccctaggtcccacagcaagcagcagtactggagccaacacggaggccccccggtttcacggtcagggctcgctacgctacaccctgaacgcagacccagggcagcggcctcggccgcctgaggccactgccgaagacttcgccgccaactccttcgctctttccactacagcgagaggacttctccagggccgcatcaccctgcggagggaggaagacacggtctctcacgaaagggtctccagacagttccgctgctccgggagcagcccccggccccgcccccgcacagaagccgcgtccagtgagaaggaaagaacggccgctatagccctatcggctgctacaacaccaaaacgcatccacctaactggctgacgctacaccttggtctttccgggtccttgcacgcttcgctccaactcctgcagagctgagccggaggggaatccggaagggacacgctgaacaggaacagaaatgaataaaagtcgctggcagagtagaagacgacatgggagaagaagccaccagcagaacccttggttcagactccgtgattctgaagacaggtctgactcccgggcagcacagcccgctcacgattccggccacggtgatgacgagtctccgtcaacctcgtctggcacagctgggacctcctctgtgccagagctacctgggttttactttgaccctgaaaagaaacgctacttccgcttgctccctggacataacaactgcaaccccctgacgaaagagagcatccggcagaaggagatggagagcaagagactgcggctgctccaggaagaagacagacggaaaaagattgccaggatgggatttaatgcatcttccatgctacgaaaaagccagctgggttttctcaacgtcaccaattactgccatttagcccacgagctgcgtctcagctgcatggagaggaaaaaggtccagattcgaagcatggatccctccgccttggcaagcgaccgatttaacctcatactggcagataccaacagtgaccggctcttcacagtgaacgatgttaaagttggaggctccaagtatggtatcatcaacctgcaaagtctgaagacccctacgctcaaggtgttcatgcacgaaaacctctacttcaccaaccggaaggtgaattcggtgtgctgggcctcgctgaatcacttggattcccacattctgctatgcctcatgggactcgcagagactccaggctgtgccaccctgctcccagcatcactgttcgtcaatagtcacccagcaggaatagaccggcctggcatgctctgcagtttccggatccctggtgcctggtcctgtgcctggtccctgaatatccaagcaaataactgcttcagtacaggcttgtctcggcgggtcctgttgaccaacgtggtgacgggacaccggcagtcctttgggaccaacagtgatgtcttggctcctctgctgtttaatggctgccgctctggggaaatctttgccattgatctgcgttgtggaaatcaaggcaagggatggaaggccacccgcctgtttcatgattcagcagtgacctctgtgcggatcctccaagatgagcaatacctgatggcttcagacatggctggaaagatcaagctgtgggacctgaggaccacgaagtgcgtaaggcagtacgaaggccacgtgaatgagtacgcctacctgcccctgcatgtgcacgaggaagaaggaatcctggtggcagtgggccaggactgctacacgagaatctggagcctccacgatgcccgcctactgagaaccataccctccccgtaccctgcctccaaggccgacattcccagtgtggccttctcgtcgcggctggggggctcccggggcgcgccggggctgctcatggctgtcgggcaggacctttactgttactcctacagctaattctgcagggcacagcccagagccatgtggatttgacttacgggagtaaagcgtaactttttactgcatctaatgagggtgttttaagtgacactcagtgtacacagatcccatcctctggctgctaggagagaagtgctgaatgttccgtgtggagatgctcaggaaagttatttgagttaaattgctggctgagagagcttggaagtccttttcataaaaggtacctctttccttttcttattgaattcttagaacttagttaaccctccctgccttttcttaacaaaaaggacttttctaaggactgaagattggcaaaaacgaaaagcttcttcctccaagagcccattgaagaagcccagtgatgagacggtgagatggtttgagtcctcggtgcctgggtagcaggaagaaagacctgcatcctgcatctgtacttggggaagccagcggagaggacggggaggttacttctctaagtttctgcagaaatattgaaggctggagtttggaatccttaaacttggccttctcaaactcagcagcagatctccgggattctgctgttattatccaaaggcgttggaaggaaagatggatcttcttacatgctagaagttttaaacggtccttaacatgcctttgttcaagcaccttccagaatgtaaggttcagcagctctggtttctattacggtgacttgaatgtcagattcaagggcccggcgtcaaaggaaattggttttgactttttgtaatctaggagcgacagttcgtgagatgtttattcagtgttaaagagcctgtttttctaccaaacaataaaaccaagagaagaaaaaaaatg

SEQ ID NO: 461919 - DNA, 3864 bp, Homo sapiens
aattgactgtggtgatggctgcacatatctctggatatactaaacactattgaactgtgtactttgtttgtttgtttgtttttagagacagtatctcactatgttgcccaggctggactcctgggctaaaggatcctcccacctcaagtgaccacagcaggagagatggatggaagccatggaaccagctttgtacactataatgcccagctttgtacactataagtgggtaaattttatggtatatgaattatatctcaattaagctatttttaaaaattctctactcataataaataccagaaatttctgtggctattttctcctttagaactgtgttaaacaggtagaaaatggagactattagaagagattcaattttcaatttggtgcttctatatttatatgaagcctgaaggctgaggtgggaggattgcctaagtccagaggtcaaggctgcagtgagccatgattacaccactgtactccagcctgagctacaaagcaagacagaaaaaaaaaaaaaaatcttgtatattagctactctggagtgactcctcaaatgaagtctcacaatgcgggctgaactgagaacctgttttacttaatgaccaaagctactcctacctcaaatttgggtttcttttaagttctgagatatagtgcgggtaggagggacaattccatctgaattgaggtcctttttcagttttataatgtctttagctagttttgatcatgaattatgaattttggataaactttcatgtgacaaaaccaaggaacaaaaacaaggaatatgactggaagcactgatgacaatatcaaatagtataaaagtctaaggaaggagggtggtagtggagaaagagaaatccaaaaaccctagaactgaatcccagcttgactacttccaaggtacacaacctctggcaggtgacttgaccatgaacctcagtgtactcatctgtaaaatggggctattcataccagcttctgcatgtgatactaagaaatcaaggcacagagaagggaagagactcgccctaggtcccacagcaagcagcagtactggagccaacacggaggccccccggtttcacggtcagggctcgctacgctacaccctgaacgcagacccagggcagcggcctcggccgcctgaggccactgccgaagacttcgccgccaactccttcgctctttccactacagcgagaggacttctccagggccgcatcaccctgcggagggaggaagacacggtctctcacgaaagggtctccagacagttccgctgctccgggagcagcccccggccccgcccccgcacagaagccgcgtccagtgagaaggaaagaacggccgctatagccctatcggctgctacaacaccaaaacgcatccacctaactggctgacgctacaccttggtctttccgggtccttgcacgcttcgctccaactcctgcagagctgagccggaggggaatccggaagggacacgctgaacaggaacagaaatgaataaaagtcgctggcagagtagaagacgacatgggagaagaagccaccagcagaacccttggttcagactccgtgattctgaagacaggtctgactcccgggcagcacagcccgctcacgattccggccacggtgatgacgagtctccgtcaacctcgtctggcacagctgggacctcctctgtgccagagctacctgggttttactttgaccctgaaaagaaacgctacttccgcttgctccctggacataacaactgcaaccccctgacgaaagagagcatccggcagaaggagatggagagcaagagactgcggctgctccaggaagaagacagacggaaaaagattgccaggatgggatttaatgcatcttccatgctacgaaaaagccagctgggttttctcaacgtcaccaattactgccatttagcccacgagctgcgtctcagctgcatggagaggaaaaaggtccagattcgaagcatggatccctccgccttggcaagcgaccgatttaacctcatactggcagataccaacagtgaccggctcttcacagtgaacgatgttaaagttggaggctccaagtatggtatcatcaacctgcaaagtctgaagacccctacgctcaaggtgttcatgcacgaaaacctctacttcaccaaccggaaggtgaattcggtgtgctgggcctcgctgaatcacttggattcccacattctgctatgcctcatgggactcgcagagactccaggctgtgccaccctgctcccagcatcactgttcgtcaatagtcacccagcaggaatagaccggcctggcatgctctgcagtttccggatccctggtgcctggtcctgtgcctggtccctgaatatccaagcaaataactgcttcagtacaggcttgtctcggcgggtcctgttgaccaacgtggtgacgggacaccggcagtcctttgggaccaacagtgatgtcttggcccagcagtttgctctcatggctcctctgctgtttaatggctgccgctctggggaaatctttgccattgatctgcgttgtggaaatcaaggcaagggatggaaggccacccgcctgtttcatgattcagcagtgacctctgtgcggatcctccaagatgagcaatacctgatggcttcagacatggctggaaagatcaagctgtgggacctgaggaccacgaagtgcgtaaggcagtacgaaggccacgtgaatgagtacgcctacctgcccctgcatgtgcacgaggaagaaggaatcctggtggcagtgggccaggactgctacacgagaatctggagcctccacgatgcccgcctactgagaaccataccctccccgtaccctgcctccaaggccgacattcccagtgtggccttctcgtcgcggctggggggctcccggggcgcgccggggctgctcatggctgtcgggcaggacctttactgttactcctacagctaattctgcagggcacagcccagagccatgtggatttgacttacgggagtaaagcgtaactttttactgcatctaatgagggtgttttaagtgacactcagtgtacacagatcccatcctctggctgctaggagagaagtgctgaatgttccgtgtggagatgctcaggaaagttatttgagttaaattgctggctgagagagcttggaagtccttttcataaaaggtacctctttccttttcttattgaattcttagaacttagttaaccctccctgccttttcttaacaaaaaggacttttctaaggactgaagattggcaaaaacgaaaagcttcttcctccaagagcccattgaagaagcccagtgatgagacggtgagatggtttgagtcctcggtgcctgggtagcaggaagaaagacctgcatcctgcatctgtacttggggaagccagcggagaggacggggaggttacttctctaagtttctgcagaaatattgaaggctggagtttggaatccttaaacttggccttctcaaactcagcagcagatctccgggattctgctgttattatccaaaggcgttggaaggaaagatggatcttcttacatgctagaagttttaaacggtccttaacatgcctttgttcaagcaccttccagaatgtaaggttcagcagctctggtttctattacggtgacttgaatgtcagattcaagggcccggcgtcaaaggaaattggttttgactttttgtaatctaggagcgacagttcgtgagatgtttattcagtgttaaagagcctgtttttctaccaaacaataaaaccaagagaagaaaaaaaatg

SEQ ID NO: 461920 - DNA, 4433 bp, Homo sapiens
  misc_feature (3273)..(3273): n is a, c, g, or t
  misc_feature (3905)..(3905): n is a, c, g, or t
  misc_feature (4427)..(4427): n is a, c, g, or t
aattgactgtggtgatggctgcacatatctctggatatactaaacactattgaactgtgtactttgtttgtttgtttgtttttagagacagtatctcactatgttgcccaggctggactcctgggctaaaggatcctcccacctcaagtgaccacagcaggagagatggatggaagccatggaaccagctttgtacactataatgcccagctttgtacactataagtgggtaaattttatggtatatgaattatatctcaattaagctatttttaaaaattctctactcataataaataccagaaatttctgtggctattttctcctttagaactgtgttaaacaggtagaaaatggagactattagaagagattcaattttcaatttggtgcttctatatttatatgaagcctgaaggctgaggtgggaggattgcctaagtccagaggtcaaggctgcagtgagccatgattacaccactgtactccagcctgagctacaaagcaagacagaaaaaaaaaaaaaaatcttgtatattagctactctggagtgactcctcaaatgaagtctcacaatgcgggctgaactgagaacctgttttacttaatgaccaaagctactcctacctcaaatttgggtttcttttaagttctgagatatagtgcgggtaggagggacaattccatctgaattgaggtcctttttcagttttataatgtctttagctagttttgatcatgaattatgaattttggataaactttcatgtgacaaaaccaaggaacaaaaacaaggaatatgactggaagcactgatgacaatatcaaatagtataaaagtctaaggaaggagggtggtagtggagaaagagaaatccaaaaaccctagaactgaatcccagcttgactacttccaaggtacacaacctctggcaggtgacttgaccatgaacctcagtgtactcatctgtaaaatggggctattcataccagcttctgcatgtgatactaagaaatcaaggcacagagaagggaagagactcgccctaggtcccacagcaagcagcagtactggagccaacacggaggccccccggtttcacggtcagggctcgctacgctacaccctgaacgcagacccagggcagcggcctcggccgcctgaggccactgccgaagacttcgccgccaactccttcgctctttccactacagcgagaggacttctccagggccgcatcaccctgcggagggaggaagacacggtctctcacgaaagggtctccagacagttccgctgctccgggagcagcccccggccccgcccccgcacagaagccgcgtccagtgagaaggaaagaacggccgctatagccctatcggctgctacaacaccaaaacgcatccacctaactggctgacgctacaccttggtctttccgggtccttgcacgcttcgctccaactcctgcagagctgagccggaggggaatccggaagggacacgctgaacaggaacagaaatgaataaaagtcgctggcagagtagaagacgacatgggagaagaagccaccagcagaacccttggttcagactccgtgattctgaagacaggtctgactcccgggcagcacagcccgctcacgattccggccacggtgatgacgagtctccgtcaacctcgtctggcacagctgggacctcctctgtgccagagctacctgggttttactttgaccctgaaaagaaacgctacttccgcttgctccctggacataacaactgcaaccccctgacgaaagagagcatccggcagaaggagatggagagcaagagactgcggctgctccaggaagaagacagacggaaaaagattgccaggatgggatttaatgcatcttccatgctacgaaaaagccagctgggttttctcaacgtcaccaattactgccatttagcccacgagctgcgtctcagctgcatggagaggaaaaaggtccagattcgaagcatggatccctccgccttggcaagcgaccgatttaacctcatactggcagataccaacagtgaccggctcttcacagtgaacgatgttaaagttggaggctccaagtatggtatcatcaacctgcaaagtctgaagacccctacgctcaaggtgttcatgcacgaaaacctctacttcaccaaccggaaggtgaattcggtgtgctgggcctcgctgaatcacttggattcccacattctgctatgcctcatgggactcgcagagactccaggctgtgccaccctgctcccagcatcactgttcgtcaatagtcacccagcaggaatagaccggcctggcatgctctgcagtttccggatccctggtgcctggtcctgtgcctggtccctgaatatccaagcaaataactgcttcagtacaggcttgtctcggcgggtcctgttgaccaacgtggtgacgggacaccggcagtcctttgggaccaacagtgatgtcttggcccagcagtttgctctcatggctcctctgctgtttaatggctgccgctctggggaaatctttgccattgatctgcgttgtggaaatcaaggcaagggatggaaggccacccgcctgtttcatgattcagcagtgacctctgtgcggatcctccaagatgagcaatacctgatggcttcagacatggctggaaagatcaagctgtgggacctgaggaccacgaagtgcgtaaggcagtacgaaggccacgtgaatgagtacgcctacctgcccctgcatgtgcacgaggaagaaggaatcctggtggcaggtacttgaggaaggaaggggaagttccaccccatcaaatactgtctctcaggggcgatcccagcaacttcagcagcagagggaaaagttaccccaaaacagaactgaatcaaggggagtgtggacagctgggtggggagactaggagggaagtagaattagattatattagtaatcaggagtgtaaataaatgtccaccaggtggacagcctcatcccatgtcagtgggcaaacgtcacttcagaaacaggcaggtggggaggtcctggggagcctgggtttggagtttgagtggatttcatcaggccagcattattccaccacgcaactatcttatccaaaaacttgggctccctgttgtctctactcacatttccaccagaggatgctgagaaaagaagttatggtcattgtaaagattcttggccccggcccggcgcggtggctcacgnccgtaatcccaacactttgggaggccaaggagggtggatcacgaggtcaggagattgagaccatcctggccaacatggtgaaaccccatctctactaaaatacaaaaattaactgggcatggtggcacctgcctgtaatctctcagctactcggaagtcagaagcaggagaattgcttggaccaggaagtcggaggttgcagtgagccgatatcacgccactgcactccagcctggcaacagagcgagactccgtctcaaaataaataaataaataaaaaagatttgtggcccctttactaccatccctgtggctccatgatctgcagattaggagcagctatctggccactaagccccctggaagggagttaccagttgattacagatgatggtggctatagcgtaatcagacagtgtgcaggctcaatgctttcacactgaaatagtagctgctgacactgcagaatgtgttctcagtcttcaagaattgtcacctctactggtattcctatagaaagggcttataccccatggaacatttttgtggctaggaagcattactttgttaggacattcatagacttatttactattctcatcaacaccaggacttcgcctcctttttaagtngatttttcacctgtttttatcacagaagagctcttgtgagctggatgatagagagagctcagccttgctgagaggcagatgcaggtagttaccagctgcagtaataaactgcagccgggattcagcttcagccaagatagcacttctggtcttagagccacacaagtgatcagaatcacaaatgtgaaatccatgactgcccaaggcctgtcctcttctcctgctgaaggtctccagtagtgtatatcatgtttctgggctgctgtaacccatgctgttgtgtgtcacagtcctcagaactggagccctgaagacttaaaccggtcctaggaactgaagcattaaaccagaaagagctgtggggagagttgtcaacctagcccatccccaggatgtaatgactttgacagatcttttactataacatgaaaagatcaggccaggtgtggtagctataattccagcacttagggagcttgaggccaggagtttaagaccagctggggcaacacagcaagaccntatctc

SEQ ID NO: 461921 - DNA, 3351 bp, Homo sapiens
aattgactgtggtgatggctgcacatatctctggatatactaaacactattgaactgtgtactttgtttgtttgtttgtttttagagacagtatctcactatgttgcccaggctggactcctgggctaaaggatcctcccacctcaagtgaccacagcaggagagatggatggaagccatggaaccagctttgtacactataatgcccagctttgtacactataagtgggtaaattttatggtatatgaattatatctcaattaagctatttttaaaaattctctactcataataaataccagaaatttctgtggctattttctcctttagaactgtgttaaacaggtagaaaatggagactattagaagagattcaattttcaatttggtgcttctatatttatatgaagcctgaaggctgaggtgggaggattgcctaagtccagaggtcaaggctgcagtgagccatgattacaccactgtactccagcctgagctacaaagcaagacagaaaaaaaaaaaaaaatcttgtatattagctactctggagtgactcctcaaatgaagtctcacaatgcgggctgaactgagaacctgttttacttaatgaccaaagctactcctacctcaaatttgggtttcttttaagttctgagatatagtgcgggtaggagggacaattccatctgaattgaggtcctttttcagttttataatgtctttagctagttttgatcatgaattatgaattttggataaactttcatgtgacaaaaccaaggaacaaaaacaaggaatatgactggaagcactgatgacaatatcaaatagtataaaagtctaaggaaggagggtggtagtggagaaagagaaatccaaaaaccctagaactgaatcccagcttgactacttccaaggtacacaacctctggcaggtgacttgaccatgaacctcagtgtactcatctgtaaaatggggctattcataccagcttctgcatgtgatactaagaaatcaaggcacagagaagggaagagactcgccctaggtcccacagcaagcagcagtactggagccaacacggaggccccccggtttcacggtcagggctcgctacgctacaccctgaacgcagacccagggcagcggcctcggccgcctgaggccactgccgaagacttcgccgccaactccttcgctctttccactacagcgagaggacttctccagggccgcatcaccctgcggagggaggaagacacggtctctcacgaaagggtctccagacagttccgctgctccgggagcagcccccggccccgcccccgcacagaagccgcgtccagtgagaaggaaagaacggccgctatagccctatcggctgctacaacaccaaaacgcatccacctaactggctgacgctacaccttggtctttccgggtccttgcacgcttcgctccaactcctgcagagctgagccggaggggaatccggaagggacacgctgaacaggaacagaaatgaataaaagtcgctggcagagtagaagacgacatgggagaagaagccaccagcagaacccttggttcagactccgtgattctgaagacaggtctgactcccgggcagcacagcccgctcacgattccggccacggtgatgacgagtctccgtcaacctcgtctggcacagctgggacctcctctgtgccagagctacctgggttttactttgaccctgaaaagaaacgctacttccgcttgctccctggacataacaactgcaaccccctgacgaaagagagcatccggcagaaggagatggagagcaagagactgcggctgctccaggaagaagacagacggaaaaaggcagataccaacagtgaccggctcttcacagtgaacgatgttaaagttggaggctccaagtatggtatcatcaacctgcaaagtctgaagacccctacgctcaaggtgttcatgcacgaaaacctctacttcaccaaccggaaggctcctctgctgtttaatggctgccgctctggggaaatctttgccattgatctgcgttgtggaaatcaaggcaagggatggaaggccacccgcctgtttcatgattcagcagtgacctctgtgcggatcctccaagatgagcaatacctgatggcttcagacatggctggaaagatcaagctgtgggacctgaggaccacgaagtgcgtaaggcagtacgaaggccacgtgaatgagtacgcctacctgcccctgcatgtgcacgaggaagaaggaatcctggtggcagtgggccaggactgctacacgagaatctggagcctccacgatgcccgcctactgagaaccataccctccccgtaccctgcctccaaggccgacattcccagtgtggccttctcgtcgcggctggggggctcccggggcgcgccggggctgctcatggctgtcgggcaggacctttactgttactcctacagctaattctgcagggcacagcccagagccatgtggatttgacttacgggagtaaagcgtaactttttactgcatctaatgagggtgttttaagtgacactcagtgtacacagatcccatcctctggctgctaggagagaagtgctgaatgttccgtgtggagatgctcaggaaagttatttgagttaaattgctggctgagagagcttggaagtccttttcataaaaggtacctctttccttttcttattgaattcttagaacttagttaaccctccctgccttttcttaacaaaaaggacttttctaaggactgaagattggcaaaaacgaaaagcttcttcctccaagagcccattgaagaagcccagtgatgagacggtgagatggtttgagtcctcggtgcctgggtagcaggaagaaagacctgcatcctgcatctgtacttggggaagccagcggagaggacggggaggttacttctctaagtttctgcagaaatattgaaggctggagtttggaatccttaaacttggccttctcaaactcagcagcagatctccgggattctgctgttattatccaaaggcgttggaaggaaagatggatcttcttacatgctagaagttttaaacggtccttaacatgcctttgttcaagcaccttccagaatgtaaggttcagcagctctggtttctattacggtgacttgaatgtcagattcaagggcccggcgtcaaaggaaattggttttgactttttgtaatctaggagcgacagttcgtgagatgtttattcagtgttaaagagcctgtttttctaccaaacaataaaaccaagagaagaaaaaaaatg

SEQ ID NO: 461922 - DNA, 432 bp, Homo sapiens
cccacgagctgcgtctcagctgcatggagaggaaaaaggtccagattcgaagcatggatccctccgccttggcaagcgaccgatttaacctcatactggtgagtgggagggggacacctgcctagggtgtggctgccaccctctggacactttgtggcttagcgttgccagtcatcaaacctggctctggagaagccaactgcaatgaaagtaggtggcatcttcttggttgtacgattttaacctgcctgctggctacccgctgggagacgctgagctggcaggcaggctgtggggcgaccatcatcaccccccacttcagctccgtcgtttaacgtcagagtctggacccagccacaccttgactactgaactttacacaataacttctccttggctgtgttgtatatgcaattaaaaaggctcacagtg

SEQ ID NO: 461923 - DNA, 327 bp, Homo sapiens
acatggggtctggttcttctagccactaacaaggaatcatcctcccttccaactccattgagacccaaaccctgaccagcacgtgtctaatcacaccgtctgacccagaggctggaagaggggttgtatcaggaggacctgccctgcccagcctcagagggatgtcatgatagccaggcactgagcagtccctctttccacaggctcctctgctgtttaatggctgccgctctggggaaatctttgccattgatctgcgttgtggaaatcaaggcaagggatggaaggccacccgcctgtttcatgattcagcagtgacctctgtgc

SEQ ID NO: 461924 - DNA, 478 bp, Homo sapiens
cccagtgatgagacggtgagatggtttgagtcctcggtgcctgggtagcaggaagaaagacctgcatcctgcatctgtacttggggaagccagcggagaggacggggaggttacttctctaagtttctgcagaaatattgaaggctggagtttggaatccttaaacttggccttctcaaactcagcagcagatctccgggattctgctgttattatccaaaggcgttggaaggaaagatggatcttcttacatgctagaagttttaaacggtccttaacatgcctttgttcaagcaccttccagaatgtaaggttcagcagctctggtttctattacggtgacttgaatgtcagattcaagggcccggcgtcaaaggaaattggttttgactttttgtaatctaggagcgacagttcgtgagatgtttattcagtgttaaagagcctgtttttctaccaaacaataaaaccaagagaa

SEQ ID NO: 461925 - DNA, 1182 bp, Homo sapiens
gggccttcacatgcatgtggtggagacagaatgggaactcaggcagtctgactccaaggccggctcactctgccactgtggcgtgtgacgggaggctctgggttcactacacagacccagtattcctgccggagggctggtgtggtagcagaggaacgaggcggaaaggagcagcacagccttggggaggaagcccagctcctcctgaggccagggaggaaaacagtggtcaggagagcagggtcctcctaggggaagctgagggcaaggtcagagagggggttcctttggcagtggacatgggtctgtgggctctgggcctcaggtccctgctggcaacagctttttagagcactcatcacactagtctctgccttcccggagagcaagcagagccactttgctgagagcacggtagtacagtgtcgtggtccctggcctctgggacccttgggggctgttgatatggcacaagacttgactcacccaaaaccacatgttaatgactcttgtccttggttcattctcttattaaatgtgttctggaaacaatgtgactactcattgtacctcacacctacttcctgagttgtggtgagattaacattagttaactcctgtgaaggcacctagcagtttctggacatcattggtcctcgacaaatgataactgaatcaggatcttttttgtaaattttatttgtttcacagcactgtatttcaaaggagttttttttgattttaatttttttcagagaaaggggtcttgccctgtcacccaggctggagtgcagtggtacaatcatagctcactccagcctagaactcctgggctcaagtgatcctcctgccttagcctcccaagtcactgggactgtaggtatgcaccaccacacccagcttacacttcaaagggtcatagagcctaaatacattagcgacctgattataaatttatataaggcatcaaactatgtgtgttctctaaattgcaaattttatgtggctttcatttgatggggttctgtaggccaatgggactgaccacatgttactatgatgatctaaccagagagctaaagaggccaagctctgcagaaagcaaaaacaagaacctcactcacatttccagtcttaaaacagcatggtattctcgtttctgtgggctaaggagaggaaaaa

SEQ ID NO: 461926 - DNA, 3867 bp, Homo sapiens
gcaggtgttttctgttctcagacagcctcgggcaatgaactctggcctgtatagttgcaaaaggacctcaactccatgtttatgctactccagaggaaaagagaagaagagacagtatctcactatgttgcccaggctggactcctgggctaaaggatcctcccacctcaagtgaccacagcaggagagatggatggaagccatggaaccagctttgtacactataatgcccagctttgtacactataagtgggtaaattttatggtatatgaattatatctcaattaagctatttttaaaaattctctactcataataaataccagaaatttctgtggctattttctcctttagaactgtgttaaacaggtagaaaatggagactattagaagagattcaattttcaatttggtgcttctatatttatatgaagcctgaaggctgaggtgggaggattgcctaagtccagaggtcaaggctgcagtgagccatgattacaccactgtactccagcctgagctacaaagcaagacagaaaaaaaaaaaaaaatcttgtatattagctactctggagtgactcctcaaatgaagtctcacaatgcgggctgaactgagaacctgttttacttaatgaccaaagctactcctacctcaaatttgggtttcttttaagttctgagatatagtgcgggtaggagggacaattccatctgaattgaggtcctttttcagttttataatgtctttagctagttttgatcatgaattatgaattttggataaactttcatgtgacaaaaccaaggaacaaaaacaaggaatatgactggaagcactgatgacaatatcaaatagtataaaagtctaaggaaggagggtggtagtggagaaagagaaatccaaaaaccctagaactgaatcccagcttgactacttccaaggtacacaacctctggcaggtgacttgaccatgaacctcagtgtactcatctgtaaaatggggctattcataccagcttctgcatgtgatactaagaaatcaaggcacagagaagggaagagactcgccctaggtcccacagcaagcagcagtactggagccaacacggaggccccccggtttcacggtcagggctcgctacgctacaccctgaacgcagacccagggcagcggcctcggccgcctgaggccactgccgaagacttcgccgccaactccttcgctctttccactacagcgagaggacttctccagggccgcatcaccctgcggagggaggaagacacggtctctcacgaaagggtctccagacagttccgctgctccgggagcagcccccggccccgcccccgcacagaagccgcgtccagtgagaaggaaagaacggccgctatagccctatcggctgctacaacaccaaaacgcatccacctaactggctgacgctacaccttggtctttccgggtccttgcacgcttcgctccaactcctgcagagctgagccggaggggaatccggaagggacacgctgaacaggaacagaaatgaataaaagtcgctggcagagtagaagacgacatgggagaagaagccaccagcagaacccttggttcagactccgtgattctgaagacaggtctgactcccgggcagcacagcccgctcacgattccggccacggtgatgacgagtctccgtcaacctcgtctggcacagctgggacctcctctgtgccagagctacctgggttttactttgaccctgaaaagaaacgctacttccgcttgctccctggacataacaactgcaaccccctgacgaaagagagcatccggcagaaggagatggagagcaagagactgcggctgctccaggaagaagacagacggaaaaagattgccaggatgggatttaatgcatcttccatgctacgaaaaagccagctgggttttctcaacgtcaccaattactgccatttagcccacgagctgcgtctcagctgcatggagaggaaaaaggtccagattcgaagcatggatccctccgccttggcaagcgaccgatttaacctcatactggcagataccaacagtgaccggctcttcacagtgaacgatgttaaagttggaggctccaagtatggtatcatcaacctgcaaagtctgaagacccctacgctcaaggtgttcatgcacgaaaacctctacttcaccaaccggaaggtgaattcggtgtgctgggcctcgctgaatcacttggattcccacattctgctatgcctcatgggactcgcagagactccaggctgtgccaccctgctcccagcatcactgttcgtcaatagtcacccagcaggaatagaccggcctggcatgctctgcagtttccggatccctggtgcctggtcctgtgcctggtccctgaatatccaagcaaataactgcttcagtacaggcttgtctcggcgggtcctgttgaccaacgtggtgacgggacaccggcagtcctttgggaccaacagtgatgtcttggctcctctgctgtttaatggctgccgctctggggaaatctttgccattgatctgcgttgtggaaatcaaggcaagggatggaaggccacccgcctgtttcatgattcagcagtgacctctgtgcggatcctccaagatgagcaatacctgatggcttcagacatggctggaaagatcaagctgtgggacctgaggaccacgaagtgcgtaaggcagtacgaaggccacgtgaatgagtacgcctacctgcccctgcatgtgcacgaggaagaaggaatcctggtggcagtgggccaggactgctacacgagaatctggagcctccacgatgcccgcctactgagaaccataccctccccgtaccctgcctccaaggccgacattcccagtgtggccttctcgtcgcggctggggggctcccggggcgcgccggggctgctcatggctgtcgggcaggacctttactgttactcctacagctaattctgcagggcacagcccagagccatgtggatttgacttacgggagtaaagcgtaactttttactgcatctaatgagggtgttttaagtgacactcagtgtacacagatcccatcctctggctgctaggagagaagtgctgaatgttccgtgtggagatgctcaggaaagttatttgagttaaattgctggctgagagagcttggaagtccttttcataaaaggtacctctttccttttcttattgaattcttagaacttagttaaccctccctgccttttcttaacaaaaaggacttttctaaggactgaagattggcaaaaacgaaaagcttcttcctccaagagcccattgaagaagcccagtgatgagacggtgagatggtttgagtcctcggtgcctgggtagcaggaagaaagacctgcatcctgcatctgtacttggggaagccagcggagaggacggggaggttacttctctaagtttctgcagaaatattgaaggctggagtttggaatccttaaacttggccttctcaaactcagcagcagatctccgggattctgctgttattatccaaaggcgttggaaggaaagatggatcttcttacatgctagaagttttaaacggtccttaacatgcctttgttcaagcaccttccagaatgtaaggttcagcagctctggtttctattacggtgacttgaatgtcagattcaagggcccggcgtcaaaggaaattggttttgactttttgtaatctaggagcgacagttcgtgagatgtttattcagtgttaaagagcctgtttttctaccaaacaataaaaccaagagaagaaaaaaaatg

SEQ ID NO: 461927 - DNA, 3764 bp, Homo sapiens
aattgactgtggtgatggctgcacatatctctggatatactaaacactattgaactgtgtactttgtttgtttgtttgtttttagagacagtatctcactatgttgcccaggctggactcctgggctaaaggatcctcccacctcaagtgaccacagcaggagagatggatggaagccatggaaccagctttgtacactataatgcccagctttgtacactataagtgggtaaattttatggtatatgaattatatctcaattaagctatttttaaaaattctctactcataataaataccagaaatttctgtggctattttctcctttagaactgtgttaaacaggtagaaaatggagactattagaagagattcaattttcaatttggtgcttctatatttatatgaagcctgaaggctgaggtgggaggattgcctaagtccagaggtcaaggctgcagtgagccatgattacaccactgtactccagcctgagctacaaagcaagacagaaaaaaaaaaaaaaatcttgtatattagctactctggagtgactcctcaaatgaagtctcacaatgcgggctgaactgagaacctgttttacttaatgaccaaagctactcctacctcaaatttgggtttcttttaagttctgagatatagtgcgggtaggagggacaattccatctgaattgaggtcctttttcagttttataatgtctttagctagttttgatcatgaattatgaattttggataaactttcatgtgacaaaaccaaggaacaaaaacaaggaatatgactggaagcactgatgacaatatcaaatagtataaaagtctaaggaaggagggtggtagtggagaaagagaaatccaaaaaccctagaactgaatcccagcttgactacttccaaggtacacaacctctggcaggtgacttgaccatgaacctcagtgtactcatctgtaaaatggggctattcataccagcttctgcatgtgatactaagaaatcaaggcacagagaagggaagagactcgccctaggtcccacagcaagcagcagtactggagccaacacggaggccccccggtttcacggtcagggctcgctacgctacaccctgaacgcagacccagggcagcggcctcggccgcctgaggccactgccgaagacttcgccgccaactccttcgctctttccactacagcgagaggacttctccagggccgcatcaccctgcggagggaggaagacacggtctctcacgaaagggtctccagacagttccgctgctccgggagcagcccccggccccgcccccgcacagaagccgcgtccagtgagaaggaaagaacggccgctatagccctatcggctgctacaacaccaaaacgcatccacctaactggctgacgctacaccttggtctttccgggtccttgcacgcttcgctccaactcctgcagagctgagccggaggggaatccggaagggacacgctgaacaggtctgactcccgggcagcacagcccgctcacgattccggccacggtgatgacgagtctccgtcaacctcgtctggcacagctgggacctcctctgtgccagagctacctgggttttactttgaccctgaaaagaaacgctacttccgcttgctccctggacataacaactgcaaccccctgacgaaagagagcatccggcagaaggagatggagagcaagagactgcggctgctccaggaagaagacagacggaaaaagattgccaggatgggatttaatgcatcttccatgctacgaaaaagccagctgggttttctcaacgtcaccaattactgccatttagcccacgagctgcgtctcagctgcatggagaggaaaaaggtccagattcgaagcatggatccctccgccttggcaagcgaccgatttaacctcatactggcagataccaacagtgaccggctcttcacagtgaacgatgttaaagttggaggctccaagtatggtatcatcaacctgcaaagtctgaagacccctacgctcaaggtgttcatgcacgaaaacctctacttcaccaaccggaaggtgaattcggtgtgctgggcctcgctgaatcacttggattcccacattctgctatgcctcatgggactcgcagagactccaggctgtgccaccctgctcccagcatcactgttcgtcaatagtcacccagcaggaatagaccggcctggcatgctctgcagtttccggatccctggtgcctggtcctgtgcctggtccctgaatatccaagcaaataactgcttcagtacaggcttgtctcggcgggtcctgttgaccaacgtggtgacgggacaccggcagtcctttgggaccaacagtgatgtcttggcccagcagtttgctctcatggctcctctgctgtttaatggctgccgctctggggaaatctttgccattgatctgcgttgtggaaatcaaggcaagggatggaaggccacccgcctgtttcatgattcagcagtgacctctgtgcggatcctccaagatgagcaatacctgatggcttcagacatggctggaaagatcaagctgtgggacctgaggaccacgaagtgcgtaaggcagtacgaaggccacgtgaatgagtacgcctacctgcccctgcatgtgcacgaggaagaaggaatcctggtggcagtgggccaggactgctacacgagaatctggagcctccacgatgcccgcctactgagaaccataccctccccgtaccctgcctccaaggccgacattcccagtgtggccttctcgtcgcggctggggggctcccggggcgcgccggggctgctcatggctgtcgggcaggacctttactgttactcctacagctaattctgcagggcacagcccagagccatgtggatttgacttacgggagtaaagcgtaactttttactgcatctaatgagggtgttttaagtgacactcagtgtacacagatcccatcctctggctgctaggagagaagtgctgaatgttccgtgtggagatgctcaggaaagttatttgagttaaattgctggctgagagagcttggaagtccttttcataaaaggtacctctttccttttcttattgaattcttagaacttagttaaccctccctgccttttcttaacaaaaaggacttttctaaggactgaagattggcaaaaacgaaaagcttcttcctccaagagcccattgaagaagcccagtgatgagacggtgagatggtttgagtcctcggtgcctgggtagcaggaagaaagacctgcatcctgcatctgtacttggggaagccagcggagaggacggggaggttacttctctaagtttctgcagaaatattgaaggctggagtttggaatccttaaacttggccttctcaaactcagcagcagatctccgggattctgctgttattatccaaaggcgttggaaggaaagatggatcttcttacatgctagaagttttaaacggtccttaacatgcctttgttcaagcaccttccagaatgtaaggttcagcagctctggtttctattacggtgacttgaatgtcagattcaagggcccggcgtcaaaggaaattggttttgactttttgtaatctaggagcgacagttcgtgagatgtttattcagtgttaaagagcctgtttttctaccaaacaataaaaccaagagaagaaaaaaaatg

SEQ ID NO: 461928 - DNA, 2938 bp, Homo sapiens
aattgactgtggtgatggctgcacatatctctggatatactaaacactattgaactgtgtactttgtttgtttgtttgtttttagagacagtatctcactatgttgcccaggctggactcctgggctaaaggatcctcccacctcaagtgaccacagcaggagagatggatggaagccatggaaccagctttgtacactataatgcccagctttgtacactataagtgggtaaattttatggtatatgaattatatctcaattaagctatttttaaaaattctctactcataataaataccagaaatttctgtggctattttctcctttagaactgtgttaaacaggtagaaaatggagactattagaagagattcaattttcaatttggtgcttctatatttatatgaagcctgaaggctgaggtgggaggattgcctaagtccagaggtcaaggctgcagtgagccatgattacaccactgtactccagcctgagctacaaagcaagacagaaaaaaaaaaaaaaatcttgtatattagctactctggagtgactcctcaaatgaagtctcacaatgcgggctgaactgagaacctgttttacttaatgaccaaagctactcctacctcaaatttgggtttcttttaagttctgagatatagtgcgggtaggagggacaattccatctgaattgaggtcctttttcagttttataatgtctttagctagttttgatcatgaattatgaattttggataaactttcatgtgacaaaaccaaggaacaaaaacaaggaatatgactggaagcactgatgacaatatcaaatagtataaaagtctaaggaaggagggtggtagtggagaaagagaaatccaaaaaccctagaactgaatcccagcttgactacttccaaggtacacaacctctggcaggtgacttgaccatgaacctcagtgtactcatctgtaaaatggggctattcataccagcttctgcatgtgatactaagaaatcaaggcacagagaagggaagagactcgccctaggtcccacagcaagcagcagtactggagccaacacggaggccccccggtttcacggtcagggctcgctacgctacaccctgaacgcagacccagggcagcggcctcggccgcctgaggccactgccgaagacttcgccgccaactccttcgctctttccactacagcgagaggacttctccagggccgcatcaccctgcggagggaggaagacacggtctctcacgaaagggtctccagacagttccgctgctccgggagcagcccccggccccgcccccgcacagaagccgcgtccagtgagaaggaaagaacggccgctatagccctatcggctgctacaacaccaaaacgcatccacctaactggctgacgctacaccttggtctttccgggtccttgcacgcttcgctccaactcctgcagagctgagccggaggggaatccggaagggacacgctgaacaggaacagaaatgaataaaagtcgctggcagagtagaagacgacatgggagaagaagccaccagcagaacccttggttcagactccgtgattctgaagacaggtctgactcccgggcagcacagcccgctcacgattccggccacggtgatgacgagtctccgtcaacctcgtctggcacagctgggacctcctctgtgccagagctacctgggttttactttgaccctgaaaagaaacgctacttccgcttgctccctggacataacaactgcaaccccctgacgaaagagagcatccggcagaaggagatggagagcaagagactgcggctgctccaggaagaagacagacggaaaaagattgccaggatgggatttaatgcatcttccatgctacgaaaaagccagctgggttttctcaacgtcaccaattactgccatttagcccacgagctgcgtctcagctgcatggagaggaaaaaggtccagattcgaagcatggatccctccgccttggcaagcgaccgatttaacctcatactggcagataccaacagtgaccggctcttcacagtgaacgatgttaaagttggaggctccaagtatggtatcatcaacctgcaaagtctgaagacccctacgctcaaggtgttcatgcacgaaaacctctacttcaccaaccggaaggtgaattcggtgtgctgggcctcgctgaatcacttggattcccacattctatgttaatgactcttgtccttggttcattctcttattaaatgtgttctggaaacaatgtgactactcattgtacctcacacctacttcctgagttgtggtgagattaacattagttaactcctgtgaaggcacctagcagtttctggacatcattggtcctcgacaaatgataactgaatcaggatcttttttgtaaattttatttgtttcacagcactgtatttcaaaggagttttttttgattttaatttttttcagagaaaggggtcttgccctgtcacccaggctggagtgcagtggtacaatcatagctcactccagcctagaactcctgggctcaagtgatcctcctgccttagcctcccaagtcactgggactgtaggtatgcaccaccacacccagcttacacttcaaagggtcatagagcctaaatacattagcgacctgattataaatttatataaggcatcaaactatgtgtgttctctaaattgcaaattttatgtggctttcatttgatggggttctgtaggccaatgggactgaccacatgttactatgatgatctaaccagagagctaaagaggccaagctctgcagaaagcaaaaacaagaacctcactcacatttccagtcttaaaacagcatggtattctcgtttctgtgggctaaggagaggaaaaa

SEQ ID NO: 461929 - DNA, 791 bp, Homo sapiens
actgaggcaactgcctggccagtgtggaggcagctttagtccctgggaccgtttctgtgcccaaggagagggagggcaggggaaggatggaatttcatctagagtagcaggtcctggttgcctggtaaattatgcatcaggactgggctagccactgcctccgttttctctgggctcctgagataacctccacctgcctctagattctgtgccagctgatcgttatctatctcatcaactcttgttccatcaggaaactgcatcttggtggatgatgaaccaataaacctggacacaatctcccgaataacaccacacatgccaacaaatgacatcagcattccagaatgtaagcggctggaatctgatgaagataagaactaacgaaaatcccacatgagtcatgctaatatacacaaagagggctcaaattccaagaatcaatttccagatcagtaagccaagatcagagcatggtaaacacctatcataaatgaaatggtagaatcctgacatggtgtttaatgatggctttacaaagtatcacatttcatagctgtgaactatccccaaatcatctcacaaaaaaggaaagatcaaagaaaagggcaattcagaaaagatcttatttctctctctctcttgcatgaaaaagagcacataaaatagaagcagtggttaccccagcgtggcccttcagagaaccgaggtaactatggtaactaagaacggtcttttagttcgcaaggttcgaattctagaactgttggttggatttggggtaagtccca

SEQ ID NO: 461930 - DNA, 686 bp, Homo sapiens
actgaggcaactgcctggccagtgtggaggcagctttagtccctgggaccgtttctgtgcccaaggagagggagggcaggggaaggatggaatttcatctagagtagcaggtcctggttgcctggtaaattatgcatcaggactgggctagccactgcctccgttttctctgggctcctgagataacctccacctgcctctagattctgtgccagctgatcgttatctatctcatcaactcttgttccatcaggaaactgcatcttggattctgggtcaacatcatccccacggtggatccattggtgagagcaataatgaagcaggtttgccaccaggctcccaaagaagtgggaacactgactgcaaagggcacaatctgattggatgaaaagcgaggcctcagaagcattggcacgtgtccgcgaagagcctagctggagagacccagacacatgcaaatggccttctgagttcattcttgatggagaggagctggaagaatccactaaggacaaattgccctgtggatttagtaagagatctgtatatagtggagccccctgaggctggcttgttaaagtagtatcttctgcttccctgacagcaaattcgtgtgcactgtttactgggaaataattatggttttcggcactggcaaatggagtcctatttctaatgggaga

SEQ ID NO: 461931 - DNA, 584 bp, Homo sapiens
tttctttataaatacgtatattttaagagcaacaaaacagagacaattttctcaaaataagcaaccactaaaatgtcaaggaaggacccatttatgacttaaaattcccatggctctctaacgaaagcaatgctaattttggccttgggaaagtggaaaaaatatataattatgaaaagtcctcacctttcttgcaatttcttgagtttctcagggtctgcctttatcttactggtttccttttcatctgtgaaaccagaggctgccatcctgctcccattatcattttgatttgggaaatgagacactgcaaagaaagtaaatggtgtattttcttgcagagacccagacacatgcaaatggccttctgagttcattcttgatggagaggagctggaagaatccactaaggacaaattgccctgtggatttagtaagagatctgtatatagtggagccccctgaggctggcttgttaaagtagtatcttctgcttccctgacagcaaattcgtgtgcactgtttactgggaaataattatggttttcggcactggcaaatggagtcctatttctaatgggaga

SEQ ID NO: 461932 - DNA, 1877 bp, Homo sapiens
actgaggcaactgcctggccagtgtggaggcagctttagtccctgggaccgtttctgtgcccaaggagagggagggcaggggaaggatggaatttcatctagagtagcaggtcctggttgcctggtaaattatgcatcaggactgggctagccactgcctccgttttctctgggctcctgagataacctccacctgcctctagattctgtgccagctgatcgttatctatctcatcaactcttgttccatcaggaaactgcatcttggattctgggtcaacatcatccccacggtggatccattggtgagagcaataatgaagcaggtttgccaccaggctcccaaagaagtgggaacactgactgcaaagggcacaatctgattggatgaaaagcgaggcctcagaagcattggcacgtgtccgcgaagagcctagctggaggtctgtcctagaggaggggctgaaggaggggcgagaatggcagcgctccatttcatccgactgctctgtgttcctcacatctgacccaaccttccgttacaacacaggcacatttgtggatactcttggttacatgtgtgttctctccttagattctgagtctcttctaggaaaggagtgtcttaatcatctttgtattcccagaagctagtttagaggctagtatgtagtaggttcgcagaaaatctttgaatagcggctgaggtgggaagatttcttgagactaggaattcaagaccagcctgggtaaactagcaagacccccatctctacaaaaaataaaaaattagccaggtgtagtggtggatgcatcccagctcctcaggaggctgaggtgggaggatcacttgagcccaggcattcaaagctgcaatgagctgtcatcccgccagtgcactccagcctgggcaacagagtgagaccctgtctcaaaaagagaaagaaaatctttgagtaaataaatatatgttgaacttggaagtattcctttacctagaatattgttctctgcaaattttgtactatcactttctccaaaacataactcaggactcgcctcctggaaaaagtaggttcttttttttttttttctttttgagacagagtcttgctctgttgcccaggctggagcgcagtggcgcgtctcggctcactgcaagctctgcctcccgggttcacgccattctcctgcctcagcctccccagcagctggggctacagggctgccaccggacagctctgggtcacagccagacttaccctctctctttccacctggttgtggttgagcctcatgagttctgcaaacctctgctcatagaggtgaagcagcagcaccagctcctcctcaccaacaaagccttggtccttatttgtttacctcatccccggcttcctcctgcaaaagctgccagtggttctctcaccagtgctctttgccagccagcttttatgcttgagacaccgggatgcatgatgacaaatcaatcagctagaaaatggtttggaactatcagaaaggccttctctggttcagagagcaagtcggagtcccacagctgttcccgcagcggcctgcatggtccttgttttgacctccacctgcaggaattgctggcttcagtcttcgctgctggtcggtagggccctgcgggtcttggaagggttgttgattttgcactttttaaagctttttacttgttgttaaaacgaagtgacaacttcaaactctttacatactgaactggaaagtgtactaagtctttgaaacttggtgtttaaaattaggtgatatattacccccctttttttttttggtactgtgtctttgaaatttggtgtgtatgtgacacttacaggatatgttgattagaa

SEQ ID NO: 461933 - DNA, 5579 bp, Homo sapiens
gtttcccctcccagagcgccggcgtggcgagatccaggctgggctggagctgggtcctggacttggaaaggcctgtccctggatagaggaacaggagataaagcaggggcagggctgccacgggcagggggcctgggtgtcctcgggcacgtagtgcggcccttctagtggcggggagggtgggaggactctggagccagccacatggagacagcacccacgggttggggacttggctggcggggacttgcccaggtaactgttattgctacttgtagccaccagatggcaccagcgcatcatgtgtccccggtccttgctgggggtcccccccccacccgccaagatgattaacctttcacaacacccacaccctgtccaacgccttcccaggactttacacccagaggaaaacatgcagcaaaataccagcagggccagggtaggggcaggagcatccagctccctggggagagcctctacctgccattcccttcagggtgtccgcccacgcccaccgagggtgtgatagcctttactcccggcaagccagtgaggtcctagtgatcatctccagagaacagaattcagagaagtgaagccacttgctgaaggcaggacagcacgtgtgtagcggaagggaactcaaacccaagcttcgcaggttccaaaaccctgggcttcctgggcaagtgaggcaggaaggggctggggcaaggatctccagagccagagcgctctctcccacaccaagtccctgttcctacttccgtccctctcatgtctccttggtccgcttctttcagacctgactcagaaccctctgcccagggaggtgctcgggccaatcgaatgggggagacagaggtgcggccatctgggagcccctgctagtgttgagcctgagctaggggaggggaccgcgttggccctaacttgggctaagctcccctctggcccatcccgccgccccacccctcactccctgtcccgctgggaggctggctgtgggctggggccaggagggccagggtggggtcccttcctcaaggctggagcaggatcctcagcaggctgtggcagtgcccaggagccagagaggagccgccgccccccacccccttgggcccctctgtaattagggctatttttaggcccctcttccttcctatttcaggcctctggactgggccggagagtgggctgtcctggggccgcgggctggagccgctaaactgggccgcggcactgcaggcttctacctgccccaggcgggaggcaggggagagaaagaggagcctgcccgcctgcccgccgcccctctgtcgtctccacgctcagacaaagagctcaccctggtctctgtgggcgtctgggagacgctggggggattagctgcccgcaccgccctctccccaccttgtgccagcccacccggctggcaccaacacctcaagcccaggggcggtgccctcaccgcagcctctctagcctgggagagtgtgtgtgtgtgtgtgtgtgtgtgtgtgtgtgtgtgtgtgtgtgtcttgctcagcaggggagccctcatgcattgagaacatgctggatgccaggtgccttacatacatcgtcacatttaattctcacaacatcccttcaagaagtccctgaggtcagcagcctgcccttcgcctggggatgctgcccgtgagcaggtggctctgacctctggccagctgtgggcaggggtggaggaggactggggggctgagactgtgtggtccaggtggcccgagcagagggtggcccctcctgtgtctctcctctccctctggcctcgcctcctggccctttgatgctcctctcaccacagacttcaaacaggctgccctctgctctgcccgccgcccgccctgcctgcctgcgataattagagcctcactccctgcctcttgccctcactctcttcccagctctccagggaagctctgccagctctctaggcgccgatcctccattcttttttcattttctcaccccttctctttttctccatctcttccctctgttcttggttctctgtctctgatcctctgagatcttcacccccacacatggttggctgccctcttctgtgcctttaccctcccagaaactgggcctcgggactcccctctgctccctgattgagctgggtcctggtgcaggcaggaagccctttgcaggtctggattttctgactcacctggcctcccacccagagtgcccccttcgtggccctgtgggaggcggtaccatggccattctctttcccaggagaagaggggtcttgcctaggagcctctccgtggcctgatggaaataggggagccaagaaccccacaaacctccctccacagagcactggagcttgggctggaccttgagcccctgccagggcccaggcacctctggcagtatctgtcagtcaggagcaggggtcccatggccactgaggagaggcttataccgccccccacccccgggcccaggacttctggtgctgcagatccaggcctcttggagagactagtttaaaggggcaagggccttggagggtggtgagagcccaggctgtgcacagactcccagggctgagagccagatgggtgggagcccccactggcactgcagccccggactggacccttggcatccctgggctgcagtttcccaagggcactgtgatggctgggcagggggaggggtatatctgaggtcgctggccctccacgagtgacttcccaagaagttctggacctggggaatcctaacctggggcgaggccgggacctagccctctcctggcacctccccccatcctgcccccgtcctggggtccccggctatggcagcccaggcctagacaccactttgagacgggagctccctgccgatggaagacccagtctccgcctctcttggcctctcctttgcccaccccgcccccggaatgctgccgaggacccagcccggtaggacagggcagcgggacttgtctccgattctacggcctcctctccgcggagggacccggacggggcagctgcagttcccgcgcaggcctctgggtgctgctcggcagctgcggtcgctcaccgccccaggcggccctatacctgacaggtcctcacccgggccttacggctccctcccgctccccgcaaaggggccaccttcatttactaaaagggaaacagccactcaaagggccgaagtgatcctacttggcgttagtattgctgaatcccatttacacacggggacactggagctccgaggccaagcggattgtctaggtctcacagaaacggggggtggtggggatcctggcaaaaaccttagaaagacccctctaagcccctcccttctatatcagttagatttccagaagaacttcccattcataggtgtgccaggaaaatcttcagcaggtgagaaaagaaaaagcaattcagggacatttggggcagttcagggcaaggtgggtgagcgcccctcattccccttccatgcccagtgtcatggactctgcccctccctgtcctgggcctcttcgaggaagaaaggggaggaggagcctctgtcttggcagcccttgggagggaatggaggaggggagcccgacagaggggctcctctgcagggggccacatcatgaaggagggcttcttcctccccctcccttctcccctccctcatcatctgccccgccttgccccatgcccagcattctcccagcagggtctggggggacagcagcaattttgacggtgggcctaagagtatacaatatgaggctctgggacctttcagatccacctgacttggccaggccaccccttcttccctttgtggtagtgatggggggtcttcaggatacacagaaccactgccctctgctccttcccactgttctgggagctctctcctctgcgaggctttcctggaacctgattggcgaagaccgtttctcctgagctcttttctctgagacatcaccatagatggctatgagtcaagtgcccccatcaaccattcctgctctgcctgggggcttggagtcccttctgatggacgaatgggtattgactcaactggctttgtatgctgggcaccactttgcaaacagcttacaggatggactgcagtcctcacaacgatcttcaaagcacgctcggagttgtggccctacggggacccggtgaattcagctgcctgtatgaggtgatgttgttttgccttaaatggtcccctagcctctcccaaagacccctccttactcttcccaagaatgtcccaattcctttcccacttgtgccactcattttcaagagaggagatggcccagccctcttctcttccccacctccctcccccaaactgtgtgaccctcagcacccagggctcagggggctgccagagatggagaggaggcaaacccaagccagctcctggggtcctacagggagggagggcatgtaaatcttgcctcaccctcttccctcccagccctgctgtcagctggccagccccatccctggagccaaactgcttccatgcaggagggagggaagcctgctcagtgggaaaagatgaagctggtccccccgcgtgtcagtgaacaaattgggccaatttggtgtgattagtgaagaattcacatctggccagcagagtcctccccccagccccagcccagcctggctcctgctccccattagaagctattttctctgacggctccatttgtctctgtagtgggggatttgacagctccctggccagcctgggaggcctggctctgagtgagaggcccaaggccaggctgtgtgcccacacccttgacctgatgccacgggggatgccatgctccaaacagggcccaggcacctgtatgggccctgtaggtcccatccctcttctgtgtgcacagatccatagttgaatgggggcctggggagcacagttcactaggctccctgacctgggccccccttgggccttggtcatcttgcacaatgattattgtgttttaagatcaacagagacttgtatgtgtgtgcatggtggtagaggaagcaggggtctggtgtttcctaaaagaaaacagctgggcatgtaataggcgggcctgcaccccacttccttcaccccttcctcacccctcccagagacctgttgctgcagctacccctcaggaatgcctgtagatggctgtcgcacagctggaaggctcgccccgagaagcggcttcaagcagcaactggcctccaggagacggaacccgaagaagtcaagatttttaaatgtctgaaaggacttttggaggaaaaggggaccagcatcagatctctgctcctgctgtcctgggagcctggagctgctggggctggttccccatctgtcctgccctcactctacctctcctccaaaggccccttccctacctcagcctctcccttccccttctctgcccatgtacccagaggctggaggccgggtgcagtggctcacgcctgtaatcccagaactttgggaggccgaggcaggtggat

SEQ ID NO: 461934 - DNA, 1743 bp, Homo sapiens
atctgagagtcggctatgcagcagccatttcagatccgagagtcagccatgcagcagccatttcagatccgagagtcggccatgcactagccatttcggatctgagagagtcgggcatgcagcagccattttggatctgagagagtcggccatgcagcagccattttggatctgagagagtcggccatgcagcagccattttggatctgagagagtcggccatgcagcagccattttggatctgagagtcagccatgcagctgccattttggatctgagagagtcggccatgcagcagccatttcggatccgagagtcggccatgcagcagccattttggatctgagagagtcggccatgcagcagccattttggatctgagagtcagccatgcagctgccattttggatctgagagagttggccatgcagcagcgtttcggatccgagagctggccatgcagcagccattaaggatccaagagtcggtcatgtagcagccatttcggatctgagagagtcggccatgcagcagccgtttgggatctgagagtcggccatgcagcagccgtttgggatctgagagagtcggccatgcagcagccatttgtgcatgcttcccttctcccagccccacaggagactgactctgcatcctgcctcctttcaaatgcatcctgtgccaacagtttctgaaaacggataaacaaattgacaacctcaaatgcaaagatgaaacatttctccagatcatcaggcacatggtttactcaggcccagaggagtgagctgatataaagaagctgtgccacacagtcggatggggtccgaaggaaacaatagggctgagtgatgagtattgaagaagaaatctaaagaaagaatgtcttatcagctgaccgcaaagctgcctccttctacctggccacattgcttatctattgtactgcgtctctcttggatggaaacgatacaccaatcactcataagtgaataatttccttctaaatcacaggcctacacctgaggtggctgccacagggaactgcacctgtgtcatgagagagacggatgagcgctgcccagcagctgacaggcaacacgccttgtccctcccttgggaacaggtcctgcctttccctgtgggtgtggcccacagagcagcggggttctctcccacagcagcagactcagtgtgggcagagtaagtgcttggatgctgcagaggcgctccaggcacctgcaatgaaggcagagctatgggaatcaaagcagggcccctgcatgagggcatgcaggaagtccagggcttgggatgaggatcaatttctcatctactttgcagatgtccttagtgaggtccccatgctccacattcctgttctgggaaccatcaagagggacagctcatggaactggatcctggcaggtactgtgtggaatggcagcagggaagtgcatccccaaaagctcccacgtgaatcaggagccggcagagggtggggcgggaatctcaggggctgcaagctaggagatgctccgtgctccgtgtcctcccacttttcccatgtgcccttttcccatctgtgcttgagctttaatacgtagagggaaacaaacggtgaaaggcatcagggaagtttgtgttcaaaccaaccagtatgagagagacaggagagagagagagagaggtttctttttgactgacagaaattcactttcaaagtcttttaatatacagatt

SEQ ID NO: 461935 - DNA, 2419 bp, Homo sapiens
ctggctacatgctctccccgtgatggggccggagctgggctggggacacccccgcggcggcgacgtctgctcctctgattccttcaacgaggacaacactgccttcgccaagcaggttcgctctgagaggcccttcttctcctccaacccagaactggacaatctgatgatccaggcaatccaagtgctgcggttccacctgctagagctggagaagggaaagatgcccatcgacctggtcatcgaggatcgggatggcggctgcagggaggacttcgaggactacccagcctcctgccccagcctcccagaccagaataatatatggattcgagaccatgaggatagcgggtctgtacatttggggaccccaggtccatccagcggggggctggcctcccagagtggggacaactccagtgaccaaggagtcgggctggacaccagcgtggcctctcccagttctggtggagaagatgaggacttggaccaggagccacggcgaaacaagaagagggggatcttccccaaggtggccaccaacatcatgcgagcctggttgttccagcacctctcacacccgtacccctcggaggagcagaagaaacagctggcgcaggacacggggcttaccatcctgcaagtcaacaactggttcattaatgcccggagacgcatcgtgcaacctatgatcgatcaatccaaccgcacagggcagggtgcagccttcagcccagagggccagcccatcgggggctataccgagacagagccacacgtggccttccgggctccagcatcagtggggatgagtttgaactcggaaggagaatggcattatctatagaggctgatgcgggagagacccagcctccggctgtgacccccagcctcacacctggctctggttcccgcctggtcctctggcttcaggatcccacctccaaaggcctctccgctcaacgcctacctccctagggccctgctgggacatgggggcctgagtgcccacccaaggggctctcaaggacaccggcaaggcctccaggctctgagccccgcttctgccttcacctctgcctgggacccgagctgggctcctgggccttggtccccagaagatggcagctagggcctcgccgcgaggacagagaagggacagggtggctgggcagtcagggaaggagggtcgcccggatccgacattttggagagattctttcaccctcctgtcccccccacctcccttctctaatttcttctttttttaatgataaagtcttaaaacacagaaaaaaaaaagacttcagagaattaggagaaaataaatcataaaacttgttttacattcaaaattactttcccgagcatgtcttagagtaatctacgtgttgatgtatgtaaattgtattttaggtaggcaaagaaacaagtctggttatttatgtaaaaactagtctaataaaactcaataaacagaattcagacagatgtaagtcaaaacaaaactttacaaagccaagtgtattatcttttgcattaacctattttttccatcatacatgctactagtatgtgcattagcatgatattctcatatacattgcattaaaaattaaaaggtagcagctcagggtgagctcttctgtcattcatttgttcctaaatttttaagggctttttctcagtcaatatttgtataaactgggtagtttaacttcattacccatttcattaaagttgatggattgtgatgagatgcatttaaggccaatagtgacagatttttttttaatctcttgaacacaagctttgaatgataactacaggttttaagtgctgttaacattaataccataatgtgatgtgttagaaccaaagggatattttaaaggtagatatctgaaaattctctagtctcaatgtatatatgtattgaatatactctaaaaataaatgtgcaatttgctagtaggacaatgcagtgattagcattaggtatgtttcttcttttatatcctagctatgtcccactttcttctaagtgcaatcctttcatgttcacttgttgttttaccccatctactctaacttcagttggaagccttgtctagagtatagtatgtgtttttacctttgcagtgaattgcatgtgctaattgtaaccacagctatttttatgttgacataactccaagtgttatattaaatgttctattttatattagctctaatcccttaagtaaattttaagaaataaattcttgttcaaaaaaaaaaaaaaaaaaagaagtgcttccttgtcctaaggtcatgacaactttcatgatatatatatatatatatatatatcaaccactgaatttagtgtaaggtactgaaaataaagaagaaatacttatttaagggcctgccttgc

SEQ ID NO: 461936 - DNA, 2608 bp, Homo sapiens
gtggactcttggggatttgcaggctgcattaagtacaagtctggtccagttttgggtgcacgtattccactgaatttggtggcatttttcaactccgctggagccagtgcccaggaggaacaaagtcccagaagaagccagaggtagcggccccagccccagagagtgggggtgagtctgtgtttggggagacccaccgggccctgcagggggccatggagaagctgcaggacagacagacaccatagtgagcgagaggctagggcaccgctggggggagctgccaggccatccgaggggccccagcatctgagccatgtcctcctgcaggaaagtacatcagccagggggcagtgtcagagacgcagcactgggagaggaggacatcgtcaggctggcccaggaccaggaggagatgaaggtgaacctgcaggagctgcggggcaggtgttgcagcttgtgggcgaccacaaggaggggcatggcaaattttgaccattgcccagaaccctgctgatgagcccactctaggagccccagtagcccaggagcttgggtgtgctgacgagcagggtggcttttatcctagatcaccactggattgctgacagatagaggaggtgggaccctgactatcacccctaatctgcagtggatttggctctcggcactcccaggctgggagctggatacctgccctggcagcatggctcagactgcatgacagtcacagactcgcctctgctcctgtggtccagtggccggacaccccctgggatggctcaaaggagtcaggacttggaagtggggacatcagggtagctgaaggaaatccacacacccagagcatctcggagttcagactctcagacctgaagtaggcgcccccgggactgggctaggagttggacggaatggaggatggaggacagcgagaagaaaggaagagaaatgcaaagtgtgggcagccgccaagagtgaaaatagagggaagtgtcatgcaagtgctggacagaaggcggcaggtgggacgagccccacagccccctcctcaaaaacgaccacctccaggactcagtgatccctggggggcaggctctgccagccctcggccacacgtggctccggcacccatggtcccagtgccttggatggagacggccagttctggcggccagatgtggtgctctggaatccagtcccatttccttcctggccacgcctggcggacccagcaggaggaagcccaggagctgggtcctgccgcccaggagctgggccctgccacccaggccgggctagggacatggcagggcctgggcatcctggcgctggacttgggcgacctgggaggcacagggaggggagagatgggcggccccgccccagcgcagtgccggccacacccatgcaccgaagctcctccctgccacaccccaaggcggttgccggagcttaagccccgcccccagcagcgagaacatcccacccccccccccctgcagccagtgctccttgtcaagctccccccgtcactccaggtgggagccaccccggtgagggggtgtgccacttgtccccagggcactcctctgggcatcccgggtgggggattttggggccgtggggggcagtctctggtacctgtgtgcgtcagggatgctctgcacctgcaaccaggtgtcgtccacgggcgggggcatggtaacagtggtcctgttgatgtcaccgatgatgctgagcgcctccttcagcgcgtggtgcatgtgcagcatctcgtcgtgctgctgtgcctgctctgccaactcctccatcagtgtgttctggttcccacatgagtacatattggccagcggctccgagatgatgaactccggggtctgagagtgggcaaacagggaagaaggttgggacctggtgcctgtgccgccctggctgccttgctgggcccttctgggactgtgcgctggacttggagccccttggagtatggcttttcacacgggcttctataccgcttcgactggaagatccacctccccactgccttttctcactcagatggggacaccgaggtccagaggaaaagacacctgtcaaatgtcacagatctgggaggggacttaagacctatcatgccaagaggacacctgtctactcagtttttttttggtggggcggggggcggtgatagggtctcgctctgtcaccaggctggagtacagtgatgactgctcactgcagcctccacctcctgggctcaaagtgatcctccaacgtcagcctctcgagtagctaggactacaggcacatgccaccaccaagcccagctatttttaaaatttttgtgtggagacaaggtctcactatgtggcccaggctggtctcgaactcctgggctcaagtgatcctcctgcctcggcctccaggagtgggagttggagttgatacctggatacaggagctctgtgggtgggagtgaggcaaaacacagggtcctgaggtctggggaccaagcaatgtcctctggtgaaaaaaatcctggacttgctggcagaagttttgcctcttacttgccatgtgctctgaatacatttacctgccctct

SEQ ID NO: 461937 - DNA, 2378 bp, Homo sapiens
gattgaatctacccggatttctgggtgctcggggcgcgcggggtgttgctgctgctggacgccctccccgcacctccgccccaggcgcggggcctgccccaaccctcgcgcggcccctcccccgttccccctccccgccgagcgggcctgagccgcggagcagctacgcgagtgcggaactcggggcgcgggcggcggtggggcccgggcgcgggcagggctggccatggcgcgggcggcgggcgcgcggggccctgccgggtggtgcaggaggcgcgggcgctgcgggcggggcacgctcctcgccttcgccgcgtggaccgcgggctgggtgctggcggccgcgctgctgctccgcgcgcacccgggtgtcctctccgagcgctgcaccgacgagaagagccggcgcatcctggccgcgctgtgccaggactaccagggcggcacgctggccggggacctctgcgaggacctgtgtgtggcgggaaagctgctgttccaacgctgcctgcactacaacagaggcaagaaggtgctgcaggccgactggcgcggccggcccgtggtcctcaagtccaaggaggaggccttctccagcttcccgcccctcagcctgttggaagaggaggcaggggagggtggccaggacatgcccgaggccgaactcctcctgatggtggctggggaggtcaagagcgctctgggcctggagttgtccaacagcagcctggggccgtggtggccgggcaggcggggcccacgctggcggggacagctggccagcctgtgggccctgctgcagcaggaggagtacgtctacttcagcctgctgcaggacctgagcccacacgtgctgcccgtgctgggttcctgcggccacttctacgcggtggagttcctggccgcgggcagcccccaccacagggcactcttccccctggaccgggccccaggtgcccctgggggtggccaggccaaggccatcagtgacatcgcactcagcttcttggacatggtgaaccattttgacagtgacttttcccaccgcctccacctctgcgacatcaagccggaaaactttgccatccggagcgacttcacagtggtggctattgatgtggacatggccttttttgaacctaaaatgagggaaatccttgagcaaaactgcacaggagatgaagactgcaatttctttgactgtttttcaagatgtgatttacgagtcaacaaatgcggagcgcagcgcgtaaacaacaacctgcaggtcatctgtgacaaaatatttcgccattggttttccgcgcctctcaagagctctgcggtctctttccagcttcagctgcagttacaggaggcggtgcaggaatgtgcagaccctggggtccccagtgggaacacccggagagcagcctccagcgtgttctggaagcttcgccaactcctccaagccacactgagggagctgcaggaggcagagaagtagccactctctggccttaaacatgctcacacaggaaaagtgaccttggctggatttcttctgccattgttttaaagatgagccatttcccctgtgctctctggggtgccgttctggtctccacattgtggagtggcaagtgctgctgccagagacagtgctccctcgctctcgtcccaccctggcctctgacctgtcgccttgtgtaaaatgagatgagggaggaggtacagacctcccttcaggagggctctcggtcagaagacaccaacctgtgtgcacttattctctgcagagagcacttgtacctggttatcccagcacgagttccagctgttctttcctgtaaatcgttaccacgttaaaaagtgtgcgtgtgtgcatacaaatgatgtgtatgcctgtgtctgggtgcaaatgagcatgtgagcatgtgtgagtgtgcccatgagtgtctgcatgtgtgtgagtgtgcacaggtgagtgtgcacaggtgagtgtggtgtgctcatgaggagtatgagtatgcctgagtgtgaatgtgtatgagtgtgaatgagtgtgtgcacatgagtgcacgggtgtcagcatgtgtatataagtgtgggcatgtgtatgtgattgtgtgagtgtgggcaggtgagtgtgttggggatgtgggttagggtggggagtggtgctttctctagtgtgtcctccggaacatcttgcctacctagcaaagaagtgtgaccattctttcggaattaaatacaataaaaagaaaataagctgcatctttagggaagggaatttgcattggagagcgtgtgtaacggcagcttatagtatttttcattttgtggaatccaccaaggttatggatgggttttagggcgcctcgtattgcaataca

SEQ ID NO: 461938 - DNA, 1447 bp, Homo sapiens
gacgcccgagagtttgtgcagcctgggagacggcggggggtttgattcaggggtgcccgtgggaaggggagggctgggtcgtcccagaacctactgactgtcctcgacccccgactctctgcatgctccggatctcactcccgggagggcccggagaaaacccaagttggggtggtggctattgatgtggacatggccttttttgaacctaaaatgagggaaatccttgagcaaaactgcacaggagatgaagactgcaatttctttgactgtttttcaagatgtgatttacgagtcaacaaatgcggagcgcagcgcgtaaacaacaacctgcaggtcatctgtgacaaaatatttcgccattggttttccgcgcctctcaagagctctgcggtctctttccagcttcagctgcagttacaggaggcggtgcaggaatgtgcagaccctggggtccccagtgggaacacccggagagcagcctccagcgtgttctggaagcttcgccaactcctccaagccacactgagggagctgcaggaggcagagaagtagccactctctggccttaaacatgctcacacaggaaaagtgaccttggctggatttcttctgccattgttttaaagatgagccatttcccctgtgctctctggggtgccgttctggtctccacattgtggagtggcaagtgctgctgccagagacagtgctccctcgctctcgtcccaccctggcctctgacctgtcgccttgtgtaaaatgagatgagggaggaggtacagacctcccttcaggagggctctcggtcagaagacaccaacctgtgtgcacttattctctgcagagagcacttgtacctggttatcccagcacgagttccagctgttctttcctgtaaatcgttaccacgttaaaaagtgtgcgtgtgtgcatacaaatgatgtgtatgcctgtgtctgggtgcaaatgagcatgtgagcatgtgtgagtgtgcccatgagtgtctgcatgtgtgtgagtgtgcacaggtgagtgtgcacaggtgagtgtggtgtgctcatgaggagtatgagtatgcctgagtgtgaatgtgtatgagtgtgaatgagtgtgtgcacatgagtgcacgggtgtcagcatgtgtatataagtgtgggcatgtgtatgtgattgtgtgagtgtgggcaggtgagtgtgttggggatgtgggttagggtggggagtggtgctttctctagtgtgtcctccggaacatcttgcctacctagcaaagaagtgtgaccattctttcggaattaaatacaataaaaagaaaataagctgcatctttagggaagggaatttgcattggagagcgtgtgtaacggcagcttatagtatttttcattttgtggaatccaccaaggttatggatgggttttagggcgcctcgtattgcaataca

SEQ ID NO: 461939 - DNA, 1944 bp, Homo sapiens
gattgaatctacccggatttctgggtgctcggggcgcgcggggtgttgctgctgctggacgccctccccgcacctccgccccaggcgcggggcctgccccaaccctcgcgcggcccctcccccgttccccctccccgccgagcgggcctgagccgcggagcagctacgcgagtgcggaactcggggcgcgggcggcggtggggcccgggcgcgggcagggctggccatggcgcgggcggcgggcgcgcggggccctgccgggtggtgcaggaggcgcgggcgctgcgggcggggcacgctcctcgccttcgccgcgtggaccgcgggctgggtgctggcggccgcgctgctgctccgcgcgcacccgggtgtcctctccgagcgctgcaccgacgagaagagccggcgcatcctggccgcgctgtgccaggactaccagggcggcacgctggccggggacctctgcgaggacctgtgtgtggcgggaaagctgctgttccaacgctgcctgcactacaacagaggcaagaaggtgctgcaggccgactggcgcggccggcccgtggtcctcaagtccaaggaggaggccttctccagcttcccgcccctcagcctgttggaagaggaggcaggggagggtggccaggacatgcccgaggccgaactcctcctgatggtggctggggaggtcaagagcgctctgggcctggagttgtccaacagcagcctggggccgtggtggccgggcaggcggggcccacgctggcggggacagctggccagcctgtgggccctgctgcagcaggaggagtacgtctacttcagcctgctgcaggacctgagcccacacgtgctgcccgtgctgggttcctgcggccacttctacgcggtggagttcctggccgcgggcagcccccaccacagggcactcttccccctggaccgggccccaggtgcccctgggggtggccaggccaaggccatcagtgacatcgcactcagcttcttggacatggtgaaccattttgacagtgacttttcccaccgcctccacctctgcgacatcaagccggaaaactttgccatccggagcgacttcacagtggtggctattgatgtggacatggccttttttgaacctaaaatgagggaaatccttgagcaaaactgcacaggagatgaagactgcaatttctttgactgtttttcaagatgtgatttacgagtcaacaaatgcggagcgcagcgcgtaaacaacaacctgcaggtcatctgtgacaaaatatttcgccattggttttccgcgcctctcaagagctctgcggtctctttccagcttcagctgcagttacaggaggcggtgcaggaatgtgcagaccctggggtccccagtgggaacacccggagagcagcctccagcgtgttctggaagcttcgccaactcctccaagccacactgagggagctgcaggaggcagagaagtagccactctctggccttaaacatgctcacacaggaaaagtgaccttggctggatttcttctgccattgttttaaagatgagagtatgagtatgcctgagtgtgaatgtgtatgagtgtgaatgagtgtgtgcacatgagtgcacgggtgtcagcatgtgtatataagtgtgggcatgtgtatgtgattgtgtgagtgtgggcaggtgagtgtgttggggatgtgggttagggtggggagtggtgctttctctagtgtgtcctccggaacatcttgcctacctagcaaagaagtgtgaccattctttcggaattaaatacaataaaaagaaaataagctgcatctttagggaagggaatttgcattggagagcgtgtgtaacggcagcttatagtatttttcattttgtggaatccaccaaggttatggatgggttttagggcgcctcgtattgcaataca

SEQ ID NO: 461940 - DNA, 2155 bp, Homo sapiens
gattgaatctacccggatttctgggtgctcggggcgcgcggggtgttgctgctgctggacgccctccccgcacctccgccccaggcgcggggcctgccccaaccctcgcgcggcccctcccccgttccccctccccgccgagcgggcctgagccgcggagcagctacgcgagtgcggaactcggggcgcgggcggcggtggggcccgggcgcgggcagggctggccatggcgcgggcggcgggcgcgcggggccctgccgggtggtgcaggaggcgcgggcgctgcgggcggggcacgctcctcgccttcgccgcgtggaccgcgggctgggtgctggcggccgcgctgctgctccgcgcgcacccgggtgtcctctccgagcgctgcaccgacgagaagagccggcgcatcctggccgcgctgtgccaggactaccagggcggcacgctggccggggacctctgcgaggacctgtgtgtggcgggaaagctgctgttccaacgctgcctgcactacaacagaggcaagaaggtgctgcaggccgactggcgcggccggcccgtggtcctcaagtccaaggaggaggccttctccagcttcccgcccctcagcctgttggaagaggaggcaggggagggtggccaggacatgcccgaggccgaactcctcctgatggtggctggggaggtcaagagcgctctgggcctggagttgtccaacagcagcctggggccgtggtggccgggcaggcggggcccacgctggcggggacagctggccagcctgtgggccctgctgcagcaggaggagtacgtctacttcagcctgctgcaggacctgagcccacacgtgctgcccgtgctgggttcctgcggccacttctacgcggtggagttcctggccgcgggcagcccccaccacagggcactcttccccctggaccgggccccaggtgcccctgggggtggccaggccaaggccatcagtgacatcgcactcagcttcttggacatggtgaaccattttgacagtgacttttcccaccgcctccacctctgcgacatcaagccggaaaactttgccatccggagcgacttcacagtggtggctattgatgtggacatggccttttttgaacctaaaatgagggaaatccttgagcaaaactgcacaggagatgaagactgcaatttctttgactgtttttcaagatgtgatttacgagtcaacaaatgcggagcgcagcgcgtaaacaacaacctgcaggtcatctgtgacaaaatatttcgccattggttttccgcgcctctcaagagctctgcggtctctttccagcttcagctgcagttacaggaggcggtgcaggaatgtgcagaccctggggtccccagtgggaacacccggagagcagcctccagcgtgttctggaagcttcgccaactcctccaagccacactgagggagctgcaggaggcagagaagtagccactctctggccttaaacatgctcacacaggaaaagtgaccttggctggatttcttctgccattgttttaaagatgagccatttcccctgtgctctctggggtgccgttctggtctccacattgtggagtggcaagtgctgctgccagagacagtgctccctcgctctcgtcccaccctggcctctgacctgtcgccttgtgtaaaatgagatgagggaggaggtacagacctcccttcaggagggctctcggtcagaagacacaggtgagtgtggtgtgctcatgaggagtatgagtatgcctgagtgtgaatgtgtatgagtgtgaatgagtgtgtgcacatgagtgcacgggtgtcagcatgtgtatataagtgtgggcatgtgtatgtgattgtgtgagtgtgggcaggtgagtgtgttggggatgtgggttagggtggggagtggtgctttctctagtgtgtcctccggaacatcttgcctacctagcaaagaagtgtgaccattctttcggaattaaatacaataaaaagaaaataagctgcatctttagggaagggaatttgcattggagagcgtgtgtaacggcagcttatagtatttttcattttgtggaatccaccaaggttatggatgggttttagggcgcctcgtattgcaataca

SEQ ID NO: 461941 - DNA, 927 bp, Homo sapiens
gattgaatctacccggatttctgggtgctcggggcgcgcggggtgttgctgctgctggacgccctccccgcacctccgccccaggcgcggggcctgccccaaccctcgcgcggcccctcccccgttccccctccccgccgagcgggcctgagccgcggagcagctacgcgagtgcggaactcggggcgcgggcggcggtggggcccgggcgcgggcagggctggccatggcgcgggcggcgggcgcgcggggccctgccgggtggtgcaggaggcgcgggcgctgcgggcggggcacgctcctcgccttcgccgcgtggaccgcgggctgggtgctggcggccgcgctgctgctccgcgcgcacccgggtgtcctctccgagcgctgcaccgacgagaagagccggcgcatcctggccgcgctggtaggtcccgccgccgctctgccccgcgccgcgcgtccggggaggggggatcacacccgctcccggtccccagccttcccggggacttgggtggcggtggcacccgccggggacatgggttcccgacacctgcgtggagtgccagaggcgcacgccccggtcccccgaatggggacgcagccggcagtgctctgtgggcgcgctgggggtgtctctccccttttcgccagaattcgccctttgtccccagacagcctctccgtcctaccctcgccacccctgagcccgagctccggaagaaagtttgcgggtctgatccgagtgtccagggaggtgccgcgtccggtgtcaggccgccgggctcggggcgcaagccagtgcggggttcgggatccggggtgccacgcctctgtctctcgggtccgcagcgctccagcccagcccgcgttctgtgattccaccctgagctgccaggtcaccccctatctcaccgagcccatgcg

SEQ ID NO: 461942 - DNA, 1562 bp, Homo sapiens
tgtgctggaccgcggggaccctggcgtccctgcttagaacccacgcagcgtctcgggccggctaggggtacaccaaagcggacaaaagccactgaggggaaggacctcggcaaaacctgagtcctgtcctctcgctttcctccccgtacacagcgagcttcaccacttgctccgcaccttctccatcaactactacctgtccctgggatctgtccagtcgcccagctaaagtgctcagcaggtcagcagcgcggcgagcttctatgaggcgtggggtctggggctcctggatctctgtgtcccatttcacagagattgccacctactgccgcctgctagaagatggggaggacttcaatcttggtggtattctggacagcagcaaatacctgtaaagcatccaaaagaccaacacccacaggatagtggacggcaaagtggtgtctgagaccaacatcacagacgtcttgaggtgctaaaccagcagaagcaaggtccctttgcggagcaggagggcaataaaaacttctgtggtcaaaaaaaaaaaaaaaaattaccctcgcatcacagaggtgttttcctcacgcaaacgtaatatagattcattaatacatagatgtggaaattagggcaatttccacaactactcacccagagaggattaaaaaaataattgaccaccaactaattaaataaatacagaagtcataaataaagcatgagtaatgtttatacagctcagtccatgcaggagatccacgagaaagttctaaacgaagtcgtgggcgccatgatgtaccacaccttctccctcaccagggaagacctggaaaatttcaaggccctgagagtgatcgtgcaggtgggcagtggctacgacaacgtggccatcaaggctgctggcgagctcgaaattgctgtgtgcagcatcccgtccgcagccgtggaagagacagccgactccaccaccggccacatcctcaatctgtactgggggaacaggtcgctgtaccaggcactgagggaaggcacgcgagttcagagcgtggagcagattggcgaggtggcctcagtaaaggctcgcattcgtggggagatattgggcctcatcggcttcggtcgcacgcagcaggaggttgcagttcgagccaaggcctttgcaggatgggatcgagcggtccctggaatacgaggggcagccctcgacgtgaatgagtcggagccctttagttttgctcggggtctgttgaaagatgcctggaatctcatctgcactcctctcactgcctgctacagccagcaggtgtcactggagatgagcgaggcagttgccactgagatccgccaagccatcataagtcgcatcccgggaagcttaagaaactgtgtgaacaaggaattctttgtcacatcagcgctttggtccgtaataaaccagcaagaaattcatcctgagctcagtggtgctacctacagatatctgccaggcatggtgggcgtggctccaggaggacttctgcagccagggaagacatcatccctggagacatcccagtgactga

SEQ ID NO: 461943 - DNA, 501 bp, Homo sapiens
gtaaataattgtcaattttatatgtttcttataacaatgtaaacaataataatatctaagtgagataccgttttaatgcatttcaataattatcttcaggacctcggcaaaacctgagtcctgtcctctcgctttcctccccgtacacagcgagcttcaccacttgctccgcaccttctccatcaactactacctgtccctgggatctgtccagtcgcccagctaaagtgctcagcaggtcagcagcgcggcgagcttctatgaggcgtggggtctggggctcctggatctctgtgtcccatttcacagagattgccacctactgccgcctgctagaagatggggaggacttcaatcttggtggtattctggacagcagcaaatacctgtaaagcatccaaaagaccaacacccacaggatagtggacggcaaagtggtgtctgagaccaacatcacagacgtcttgaggtgctaaaccagcagaagcaaggtccctttgc

SEQ ID NO: 461944 - DNA, 5318 bp, Homo sapiens
tggactaaggagcagaaagactgatagtggacataggccagctgatttaataatttaagaaagaactgttatcctgagtaaggagcatagagacaaatataaaatgaacgcactctacctgatttaattatagtcttctggtgaagatcttgctgttatctctgtgaatcaggagagaagagattgatgaatagacgagattggatttggtcatttccccaaggtgaagagcatggcgatttcttctgtggtaaggagcaataatgaagaccatggttgatttaatcagtctctgctgatgaagatcttggctgttacctttgtgtgtaaggaagctaaagacttaagtaaataacagtccaaaaacttgtcaattagggtaaatttttcattaatgttcactgaattatttaaagttaaggcatatgtagatcaatgagatgaatgtgttatgaaacttagattgtggttagtccaattaagcacaattttggttaaaaataagatgaaagacattttattcatttttttatctgattaataattcatcttattttgtactgcatttaatttaagatttattcactaataaaatctatggctgcactgttcaatgtcgtttcctctatccacatgtggctatttatatttaaaataattaaaggtacatgcacttttaaatgtaatttcttggttgcattagccacatttctagtgctcagcagctgtatgttgctattggtgactgtaatggagaacgcagttacagtacgtttacattatatgcaaagtcctgttagacagctctttaatgagggaggaatgcatggaaaggtggaagataagtggaatgagatggctaggaagcaaggatgttcattgatctatacttgcttcactgtgggccactacaaaaggagatctagtctattgagaatagggctagtctatgcgaaaagagcctgtaaacagatcttggttatattcaaggatactgtttgtggatgctaaaataacaatgggtattgattttattactgctactgaatcaatgaatggatcaataaacaaaggtataaatgaaggaaaagattgcttatcctggatcaatgatgagtaccctggggtgtctgaatcttggattttgattaaaccctataactctgaggtccattacaaaaagagtacttttcattatgtctatgggaaatgagcttattccagaagctaacaataatcaggatttagtttttgggcttctgagtatggactgtattatttttagtaaagaagtatatggataaatcaagaaaaaatgaacagccccatctgatttaatcactgtgcaatgaccgtgaactgtacagttacctccgtgtgtcacaggaagactcttttgacttaagcacccttccatggtcatgaggtttctggttgcctctgtgtgttagaagcttggagaccaatgccttctgctgtgatcgcgttctccacagttgcctctgggtaggagcctggacactaatagaaaatggatgcactggagctgatttaaacattctttggtggtcacaagatgtatagctgcctctgtatgtttggcgcatggaaaaaaatatgagtttttgtggacatacactctttatttgaaaagtatgaaatataatccaagaaagccagccatggctcagtgataaatatggaattgatatgaaacattatattgattaatcacctttgaggatgattaataaaagagagaaagtgattctatatagagatgcaggactatttcaggctcattcatgatctaggtttttgtgcttcatggttattttattatcatcaataaaaagaaaaaagaaaaaaatcttatactgtccaaaaaattagggagaccagcgcccagtgttcatgtgaggggggactagtgtccatttccaccaagcagcctggaaatgctcatcctcacagggcattggagaggtttctcaagaagcgagtgcctccatgggggaaataattaaccccagattaaatgctgcttcagacctaatggatggtaaaaacaagatccaaaaggatcaaactctttccaggtagattaactgtatcccagaacaaagctcaaggacatttttagaaatacgtatatatccagcacacaagcagggtaaaattcacatctgcaaatttaccaggcattcaaaggggcaaaaaatacacaacccacaattaagagactaatgaattaatcaaaaccaacccagaacttatacagatgtgagcattagcagaaaaggacttgaagtagttattagaactgtctccctggccgggtgtggtggctcatgcctgtaatcccagcactttgggaggccgaggtgggtggatcacctcaggtcaggagttcaagaccagtctggccaaaatggtgaaaccccacctctactaaacatggaccaatgatgaccactggtggcgtttgagtcatggacgatgaatactacgtgtctgaaactctgaggtccaacagaaaacataattggatagatatcagaaatgtgcaaagatcatattcttactttggattaatagattgaggttcatcatcaatagataaatgatagaacaattaaacaagaataaataaaggtgaatcattgttcaattatgaatatacatgatgatgtaagaaatattatcactaaaaattttaaacacagatgccccttaaagaaatggatcatgagtcccgccactgcactccagcctgggcgacagagcgagactccgtctcaaaaaaaaaaaaaaaaaaaaaaaaaaaaaagaaatggatcatgagtatcagctctttggctaaggttcatctagactcttaataagtaagagtcagtttcattttctggttaagtctcatttgacattgttccttttgttatgagagaaaacatttccattctgaaaaattaatcaatataaaaataactgaataacagaaatatggaaaggatcaatggagataaggtttgaattttttctaaaagagttacctgctctttgtattctgcagaatggatgcacttgagccgacctaagcattcatggtcatgagatttgtggttgccactgttggttaggagcatagagatcagtgtgagtaataaagttcatgtctttctctaagagactttttaaagggtattcataatatcatgaatgtgtgaaaaattatccaaaaggccaacctcagccaatgataaatatgagattggttgaaacagtatatttgctagctcatttatgacacattgaggataattcatgaaagatatatcaaagtggcagattatatagaaagttgtggaatattctatgctcttactgtttggatattatatttacatgggttataatattaatattcatgaattaatgcataaataacatgtaaatgagaattaagctaaacagtcctaagcctgagccagtgatgaaaactggtggcatagaagtcaaggatgctgaataatgtgtgtctagaactctgaggttcaatagaggaggaaatatagtctattgcttttgaagtgatcttatagttaggttttggaaatacaaaagggccatcttcttggattgtttttgtgacttttgtttcttctttaaaataaattcattgatgtaataatcaatgtacacatgtaaaaaattaaagatgaggagtgtgaagcatgtccactcaatgtaaatggtgagacaacagaaatcattaaaatgtattgaaaatatgaataccatttaaaaaacgaacaattcaagtgtaatctttgactacggatgacataagcagtatagtgaagtttcttattttgcatcagaacaagtgtgctgttgttcatttttttaaaagaaaattgataagtattaccacaattaatagatacctgaatgactaagagaagggtcaaatgaatgaatccgtgaaaaatatttcaatcctgttaccttctctgctttgcacttcccagaatggacacacctgggctggcagaacatcttgccttgatctggagccccatgtctgcccctctgtagaggtgcacatgggccaatgtgagttaacagtaaaattattttttgcttttgcttatttgtttaggatattcagtgtaatatttaaaaaatattatatattaatataatcaaggaaggccagctatgtcccaaggatacgtatggacttgacatgaaatattgtgtagattaatagatattttaaacaatgaacatgatgaatgaaggaagtattaatatactaattgaagcaaatgattatgtagacagatactaggaatacttaaggatcttgtccttaaaacttggtgatccagaggtatttatgttattgttagtgaactaatgaatcattaggaaacagcttacaaataaaaggagaaaaagagggccaattctggctggattgatgatgaccactggtggcctatgagtcatacaatgaatacgtgtctagaactctgaggtccatcacaagcagtatctagcctagtccctctgtctgaaaaactcctgtagacagatgtcagggaaatacaagaaccttgttctttttctttatgtttatgaattttaaaaatattatattattaaaatagcaacgaagaataaacaaacatgtataaatgaatatagatgaggatgaagtattgtttattgttgaaatgtgtagtaaagagaaacaatactaatataaattgaaatggttggataattaatggaccaagtgtaatacatctttgactaaggatcatatagatagcagtaagtaatggttagttgcaagtttcacatttgttgtattaagaaaaaattaataaatactcaaatgactatgtaaatgaatggtgaaaaatatagattaatgtaaagaatattcaattttttaatcatcttctctgctttgcacttttcaggatggatgcaatgagctgatcattttgctgtgatcaaggctatgttgcctctgtgttaggccaatgtgagtaatggttcttgtcttggtttaggttgtttaatggtattcctgatattattaaaaattatttaatataataaaaagttaattggcttaatgacaatgtgcaacattgaggttaattaatgaaagagatgtagtctctgtgggaaattattgtatagacaaatgtaaggattcttcaaatatcttgttcttgggttttcaaaatcatgtattcattttattatcaaagaagaaatgatttattcaataaatattt

SEQ ID NO: 461945 - DNA, 2798 bp, Homo sapiens
atgattaatgaaaaaaacatggtaaatgactttatagactggtgttagggatacttaagtcatcttgttctcaagggttttgggattttgttcataagcgttttagataggtagatatttactttaatatgattagtttactgataaattaaccagtaaagaaatgtagagatgaatgagataaaagaggcccaagcttggaccaatgataatgactgttggggtatgagtcagtgaggttgaataacagtttgtatctggaaatctgaggtccaacacaataaaaaatttagtctaattactctgatggaaatccaaaataaaagggcaaaatctttgtatattcctaatatgtatttgatagcattcttataagtaaatcaatgatggaagcattaaattaatatataaatcaataagtatgatttattgtactatagatggtgaagctttattcaagtatcaatatatgtggtcaggcaagaaatattaataataaatgttgaaaacactattcccattaagaaataagtggatcaaagtgttacccttaatgatcatatagacactgataaataatagtcaactttattactgtggttcaaaccaagtggaggttgtatgttttgtctagaaaatatataaactacaaaaagttaataaacacctaagtgaatgagtaaattaaatgtggggagtaagattcaattaagataaagtcctaattttcttttaatcaaatgctctgctttgtactccttagaatggatgcactggagctgatttaaacattctttggtggtcacaagatgtatagctgcctctgtatgtttggcgcatggaaaaaaatatgagtttttgtggacatacactctttatttgaaaagtatgaaatataatccaagaaagccagccatggctcagtgataaatatggaattgatatgaaacattatattgattaatcacctttgaggatgattaataaaagagagaaagtgattctatatagagatgcaggactatttcaggctcattcatgatctaggtttttgtgcttcatggttattttattatcatcaataaaaagaaaaaagaaaaaaatcttatactgtccaaaaaattagggagaccagcgcccagtgttcatgtgaggggggactagtgtccatttccaccaagcagcctggaaatgctcatcctcacagggcattggagaggtttctcaagaagcgagtgcctccatgggggaaataattaaccccagattaaatgctgcttcagacctaatggatggtaaaaacaagatccaaaaggatcaaactctttccaggtagattaactgtatcccagaacaaagctcaaggacatttttagaaatacgtatatatccagcacacaagcagggtaaaattcacatctgcaaatttaccaggcattcaaaggggcaaaaaatacacaacccacaattaagagactaatgaattaatcaaaaccaacccagaacttatacagatgtgagcattagcagaaaaggacttgaagtagttattagaactgtctccctggccgggtgtggtggctcatgcctgtaatcccagcactttgggaggccgaggtgggtggatcacctcaggtcaggagttcaagaccagtctggccaaaatggtgaaaccccacctctactaaacatggaccaatgatgaccactggtggcgtttgagtcatggacgatgaatactacgtgtctgaaactctgaggtccaacagaaaacataattggatagatatcagaaatgtgcaaagatcatattcttactttggattaatagattgaggttcatcatcaatagataaatgatagaacaattaaacaagaataaataaaggtgaatcattgttcaattatgaatatacatgatgatgtaagaaatattatcactaaaaattttaaacacagatgccccttaaagaaatggatcatgagtcccgccactgcactccagcctgggcgacagagcgagactccgtctcaaaaaaaaaaaaaaaaaaaaaaaaaaaaaagaaatggatcatgagtatcagctctttggctaaggttcatctagactcttaataagtaagagtcagtttcattttctggttaagtctcatttgacattgttccttttgttatgagagaaaacatttccattctgaaaaattaatcaatataaaaataactgaataacagaaatatggaaaggatcaatggagataaggtttgaattttttctaaaagagttacctgctctttgtattctgcagaatggatgcacttgagccgacctaagcattcatggtcatgagatttgtggttgccactgttggttaggagcatagagatcagtaatggacacacctgggctggcagaacatcttgccttgatctggagccccatgtctgcccctctgtagaggtgcacatgggccaatgatggatgcaatgagctgatcattttgctgtgatcaaggctatgttgcctctgtgttaggccaatgtgagtaatggttcttgtcttggtttaggttgtttaatggtattcctgatattattaaaaattatttaatataataaaaagttaattggcttaatgacaatgtgcaacattgaggttaattaatgaaagagatgtagtctctgtgggaaattattgtatagacaaatgtaaggattcttcaaatatcttgttcttgggttttcaaaatcatgtattcattttattatcaaagaagaaatgatttattcaataaatattt

SEQ ID NO: 461946 - DNA, 2339 bp, Homo sapiens
gttgctgtttagaaatgagtgtaaaacctaaaaggaggcgtatggctaagcatccatttccacttataaaggttttaatggccactgtaatgaacagccccatctgatttaatcactgtgcaatgaccgtgaactgtacagttacctccgtgtgtcacaggaagactcttttgacttaagcacccttccatggtcatgaggtttctggttgcctctgtgtgttagaagcttggagaccaatgccttctgctgtgatcgcgttctccacagttgcctctgggtaggagcctggacactaatagaaaatggatgcactggagctgatttaaacattctttggtggtcacaagatgtatagctgcctctgtatgtttggcgcatggaaaaaaatatgagtttttgtggacatacactctttatttgaaaagtatgaaatataatccaagaaagccagccatggctcagtgataaatatggaattgatatgaaacattatattgattaatcacctttgaggatgattaataaaagagagaaagtgattctatatagagatgcaggactatttcaggctcattcatgatctaggtttttgtgcttcatggttattttattatcatcaataaaaagaaaaaagaaaaaaatcttatactgtccaaaaaattagggagaccagcgcccagtgttcatgtgaggggggactagtgtccatttccaccaagcagcctggaaatgctcatcctcacagggcattggagaggtttctcaagaagcgagtgcctccatgggggaaataattaaccccagattaaatgctgcttcagacctaatggatggtaaaaacaagatccaaaaggatcaaactctttccaggtagattaactgtatcccagaacaaagctcaaggacatttttagaaatacgtatatatccagcacacaagcagggtaaaattcacatctgcaaatttaccaggcattcaaaggggcaaaaaatacacaacccacaattaagagactaatgaattaatcaaaaccaacccagaacttatacagatgtgagcattagcagaaaaggacttgaagtagttattagaactgtctccctggccgggtgtggtggctcatgcctgtaatcccagcactttgggaggccgaggtgggtggatcacctcaggtcaggagttcaagaccagtctggccaaaatggtgaaaccccacctctactaaacatggaccaatgatgaccactggtggcgtttgagtcatggacgatgaatactacgtgtctgaaactctgaggtccaacagaaaacataattggatagatatcagaaatgtgcaaagatcatattcttactttggattaatagattgaggttcatcatcaatagataaatgatagaacaattaaacaagaataaataaaggtgaatcattgttcaattatgaatatacatgatgatgtaagaaatattatcactaaaaattttaaacacagatgccccttaaagaaatggatcatgagtcccgccactgcactccagcctgggcgacagagcgagactccgtctcaaaaaaaaaaaaaaaaaaaaaaaaaaaaaagaaatggatcatgagtatcagctctttggctaaggttcatctagactcttaataagtaagagtcagtttcattttctggttaagtctcatttgacattgttccttttgttatgagagaaaacatttccattctgaaaaattaatcaatataaaaataactgaataacagaaatatggaaaggatcaatggagataaggtttgaattttttctaaaagagttacctgctctttgtattctgcagaatggatgcacttgagccgacctaagcattcatggtcatgagatttgtggttgccactgttggttaggagcatagagatcagtaatggacacacctgggctggcagaacatcttgccttgatctggagccccatgtctgcccctctgtagaggtgcacatgggccaatgatggatgcaatgagctgatcattttgctgtgatcaaggctatgttgcctctgtgttaggccaatgtgagtaatggttcttgtcttggtttaggttgtttaatggtattcctgatattattaaaaattatttaatataataaaaagttaattggcttaatgacaatgtgcaacattgaggttaattaatgaaagagatgtagtctctgtgggaaattattgtatagacaaatgtaaggattcttcaaatatcttgttcttgggttttcaaaatcatgtattcattttattatcaaagaagaaatgatttattcaataaatattt

SEQ ID NO: 461947 - DNA, 2022 bp, Homo sapiens
tggactaaggagcagaaagactgatagtggacataggccagctgatttaataatttaagaaagaactgttatcctgagtaaggagcatagagacaaatataaaatgaacgcactctacctgatttaattatagtcttctggtgaagatcttgctgttatctctgtgaatcaggagagaagagattgatgaatagacgagattggatttggtcatttccccaaggtgaagagcatggcgatttcttctgtggtaaggagcaataatgaagaccatggttgatttaatcagtctctgctgatgaagatcttggctgttacctttgtgtgtaaggaagctaaagacttaagtaaataacagtccaaaaacttgtcaattagggtaaatttttcattaatgttcactgaattatttaaagttaaggcatatgtagatcaatgagatgaatgtgttatgaaacttagattgtggttagtccaattaagcacaattttggttaaaaataagatgaaagacattttattcatttttttatctgattaataattcatcttattttgtactgcatttaatttaagatttattcactaataaaatctatggctgcactgttcaatgtcgtttcctctatccacatgtggctatttatatttaaaataattaaaggtacatgcacttttaaatgtaatttcttggttgcattagccacatttctagtgctcagcagctgtatgttgctattggtgactgtaatggagaacgcagttacagtacgtttacattatatgcaaagtcctgttagacagctctttaatgagggaggaatgcatggaaaggtggaagataagtggaatgagatggctaggaagcaaggatgttcattgatctatacttgcttcactgtgggccactacaaaaggagatctagtctattgagaatagggctagtctatgcgaaaagagcctgtaaacagatcttggttatattcaaggatactgtttgtggatgctaaaataacaatgggtattgattttattactgctactgaatcaatgaatggatcaataaacaaaggtataaatgaaggaaaagattgcttatcctggatcaatgatgagtaccctggggtgtctgaatcttggattttgattaaaccctataactctgaggtccattacaaaaagagtacttttcattatgtctatgggaaatgagcttattccagaagctaacaataatcaggatttagtttttgggcttctgagtatggactgtattatttttagtaaagaagtatatggataaatcaagaaaaaatgaacagccccatctgatttaatcactgtgcaatgaccgtgaactgtacagttacctccgtgtgtcacaggaagactcttttgacttaagcacccttccatggtcatgaggtttctggttgcctctgtgtgttagaagcttggagaccaatgccttctgctgtgatcgcgttctccacagttgcctctgggtaggagcctggacactaatagaaaatggatgcacttgagccgacctaagcattcatggtcatgagatttgtggttgccactgttggttaggagcatagagatcagtaatggacacacctgggctggcagaacatcttgccttgatctggagccccatgtctgcccctctgtagaggtgcacatgggccaatgatggatgcaatgagctgatcattttgctgtgatcaaggctatgttgcctctgtgttaggccaatgtgagtaatggttcttgtcttggtttaggttgtttaatggtattcctgatattattaaaaattatttaatataataaaaagttaattggcttaatgacaatgtgcaacattgaggttaattaatgaaagagatgtagtctctgtgggaaattattgtatagacaaatgtaaggattcttcaaatatcttgttcttgggttttcaaaatcatgtattcattttattatcaaagaagaaatgatttattcaataaatattt

SEQ ID NO: 461948 - DNA, 2101 bp, Homo sapiens
tggactaaggagcagaaagactgatagtggacataggccagctgatttaataatttaagaaagaactgttatcctgagtaaggagcatagagacaaatataaaatgaacgcactctacctgatttaattatagtcttctggtgaagatcttgctgttatctctgtgaatcaggagagaagagattgatgaatagacgagattggatttggtcatttccccaaggtgaagagcatggcgatttcttctgtggtaaggagcaataatgaagaccatggttgatttaatcagtctctgctgatgaagatcttggctgttacctttgtgtgtaaggaagctaaagacttaagtaaataacagtccaaaaacttgtcaattagggtaaatttttcattaatgttcactgaattatttaaagttaaggcatatgtagatcaatgagatgaatgtgttatgaaacttagattgtggttagtccaattaagcacaattttggttaaaaataagatgaaagacattttattcatttttttatctgattaataattcatcttattttgtactgcatttaatttaagatttattcactaataaaatctatggctgcactgttcaatgtcgtttcctctatccacatgtggctatttatatttaaaataattaaaggtacatgcacttttaaatgtaatttcttggttgcattagccacatttctagtgctcagcagctgtatgttgctattggtgactgtaatggagaacgcagttacagtacgtttacattatatgcaaagtcctgttagacagctctttaatgagggaggaatgcatggaaaggtggaagataagtggaatgagatggctaggaagcaaggatgttcattgatctatacttgcttcactgtgggccactacaaaaggagatctagtctattgagaatagggctagtctatgcgaaaagagcctgtaaacagatcttggttatattcaaggatactgtttgtggatgctaaaataacaatgggtattgattttattactgctactgaatcaatgaatggatcaataaacaaaggtataaatgaaggaaaagattgcttatcctggatcaatgatgagtaccctggggtgtctgaatcttggattttgattaaaccctataactctgaggtccattacaaaaagagtacttttcattatgtctatgggaaatgagcttattccagaagctaacaataatcaggatttagtttttgggcttctgagtatggactgtattatttttagtaaagaagtatatggataaatcaagaaaaaatgaacagccccatctgatttaatcactgtgcaatgaccgtgaactgtacagttacctccgtgtgtcacaggaagactcttttgacttaagcacccttccatggtcatgaggtttctggttgcctctgtgtgttagaagcttggagaccaatgccttctgctgtgatcgcgttctccacagttgcctctgggtaggagcctggacactaatagaaaatggatgcacttgagccgacctaagcattcatggtcatgagatttgtggttgccactgttggttaggagcatagagatcagtaatggacacacctgggctggcagaacatcttgccttgatctggagccccatgtctgcccctctgtagaggtgcacatgggccaatgatggatgcaatgagctgatcattttgctgtgatcaaggctatgttgcctctgtgttaggccaataatggacgcacctgaactgacctatgcatttgcaagctccacggctgtcccagtgtttggagcatggagaccgatttgagttatagtcagtgttcttgccttggttttggtggcttatttaggatacttactgaatacttttttaaaaagtattaaatataaccaaagaaggccaactgtggcccaatgataagtatggatttgacatgaaatattatgttgattgatcaatttttgtaacaatgggaatgattaatgaaagaggtatattcagtgatatcacatatgtcactaaatgaatgatgtgatcccatagatagatattaggggatataaga

SEQ ID NO: 461949 - DNA, 500 bp, Homo sapiens
tggactaaggagcagaaagactgatagtggacataggccagctgatttaataatttaagaaagaactgttatcctgagtaaggagcatagagacaaatataaaatgaacgcactctacctgatttaattatagtcttctggtgaagatcttgctgttatctctgtgaatcaggagagaagagattgatgaatagacgagattggatttggtcatttccccaaggtgaagagcatggcgatttcttctgtggtaaggagcaataatgaagaccatggttgatttaatcagtctctgctgatgaagatcttggctgttacctttgtgtaatgaatgcgcaatgattcaattattctccagcgaggaagatcatggttgttgtctgtttgagtaatgagtgtagaaacctatgtaagtaacaaagtgattgcttttgctttagtggttgttaagagagttaagtctttctggaaaggaataaatgactatgtatacaaataaa

SEQ ID NO: 461950 - DNA, 764 bp, Homo sapiens
agtctcattggtgcaatttccttaaaacacggaatagacatgcctccatgtgtaactatttaactttatatgtatgtgtgtatgcacgcatacacaattgttgagaatgtactcgaatccaggattcagattaatttaattctttctagcaagattcatgtagaaaggaaatttaaccctttcctagttgagtagaaggcagataaacagacagacgtgtttaatagtcacaattattattattttgcctggttttacttacagtagttaaatttcatacttgagtcaattagtcaatgaatcaatgttgttcatcttttaaatacacgacaagtaccagggtttatttctaatcaataattgttgacttgaacggaattttaaaaaaatctaaatctaggctgatccatttctctctatctctctctctctctctctctctctttctcatctacctattatattcaccttgtactccacagaatgaatgcgcaatgattcaattattctccagcgaggaagatcatggttgttgtctgtttgagtaatgagtgtagaaacctatgtaagtaacaaagtgattgcttttgctttagtggttgttaagagagttaagtctttctggaaaggaataaatgactatgtatacaaataaaatgaatgaagttatatgtgaatcattcagcacatctgtggtcagttaaggagaaaaaagcaagaccatcttattcattttaatagttaattattgagttaattaatgt

SEQ ID NO: 461951 - DNA, 2629 bp, Homo sapiens
  misc_feature (4)..(5): n is a, c, g, or t
  misc_feature (9)..(9): n is a, c, g, or t
  misc_feature (12)..(13): n is a, c, g, or t
  misc_feature (16)..(17): n is a, c, g, or t
cagnnggtnggnnccnnactcactgagtgcctgcagcagccctacagacacagcatccttggccacctcatgcccatcccggccatctagggtcagcacaacccagatgaggccgctgaagggcaccggatgcccaggaatcaccacctggtaccagaagcggtgccagccagcaggtcctatgcccaaacacttggtgaggaacacagggctgcccagcttcattcgttggcacagcaactgcagggtagcccgagccccttgggaccctaacttgtcccttgccaaggccaactggctgccctctggctgtggggaccgcaaggagggacccacaagctgctggcgaagtcgctgcttcagttctggcttgagccactccacagccacctgctctccacagaggtgtggctgcccttcctccagggcctttttggccatggcagcggtccagtgcgagctgaatttgagcagagcgatctgcccgggcgcaggtccggggctgggcagcagccgcgcctcctgcaggccgggacccagcggctgcagcgcgggcagcagcgcgggcagcagcgcggtgcgggtcagattcggcggcaggcagtcaacgctcagctcacacttcccggtgctgcggcacacgagcagcgggcaggacggccgcagcgggtggttgtgcagcgggcgatggcggcctgcgcgccgcgccgcgagctgcagcgggcatatgcgaagccgcggttcaggccgctgaaggtcatcatcaggcggaactcgtagaggcggcccacgcgctggaacagcaggatagctggtgctcatacacttcctgaggcagccgcccgatgaacacctctgacccagccggcggcgggctgcccacccagcctgggggtggcccgccatacttcctctgccctccctcagtcccgaaacacccttattctccgcacttgtcaccccaccctctgctgcccccaccgcagcgcgcaaacgcacacgagtttaaagtttaggctgtgatgctatcctcgcccgcagatcacaggacagacattctcggggacaactttgcgaggccatgtgctcgtcccccttaggaaggaagagggagaaatccctgcggctcggttttgttccaatggtctgctcagcgagtgattcccatcggtgtagtgcggagccctgggagcggagcggggatctggggagggggcgcccaggcctcagccgccggccgacaaccgggccaccttccgtgaggccgcacacgctcccacaggcccgcgcctggcgcaagccgagaaccgcgcgtcgccgcgccgcgggcccgcgacggaggaagccccgagacgcgcgcgctcacgggccctacgcttccccgccgcccggccgcgcgcgcgcgccgccgagggccccgccggccctgcccaccccaaccggccgcgcgccgttgtgccggcccccggctcgccgcccgcgccgccgccgcgcctcagcttcagattcggcctcagtcagccgcgcagggacgcggagcccggcgccgagctctgcgcttgcgcttgccgggcgggcatggacgggcgagaggcgttctgcaagcgcgaaatcggtgagcccggccgccgcgccgccgccccgcgagcctttccgagtcccggagaatcctgcacgcgagatcccagggcgcccgacccatgcgggccgtttcgctgttgctaaaaaccaacgcccagggactgggagaggaactggggttcccaaactgttttttggaagcagcgatgaacgggatagtgcatgacgtggacgtgctgggcgcgggcatctggctggtgaccctgctggtggatcgggacgggctgtacaagatgaaccgcctgtacctcactcacccccgacgtcttcttcttccgagtccacatgttagtcctggactcctccagctgcaataaaccgtgtccagagtttaaacctggcagcaggtatattgtgatgggccacatctaccataagagagggcagcttcctacagctctgctccaggtcctgagaggccatctctgtccaggggatggactgctgaggagcagcagcagctatgtgaaaaggtttaacccaaaaagggaagggcaaattcaaggtgcaattcatacccaatgcatttgaaacaaccatcctggcatttctggatcacaagagacatcggcaacaagacatgaaaggtctatcttcatgtaatgggtcctcctttagaagagagcccaaagctactctatgaatgacctgcatagttacaactgtaatctcgaaggtgtcactttgttatttacaagatgcttcttaaatgggctgctcctgagctcagtgtcaaggtgattcaactgttgtgccagacagtgatttacacagctcagataactgacctgtctagttaacagatcactgcttcatgtttttaaatattttaatttaatacattctttagtagaaatagtccacaaaacattttcctgaatttaaatacacaacttttatatcatgtatcaaacctgattttatattcaaacctgatttatattcaaaacttatatgtgaagattaaattcttcacataacagtaagc

SEQ ID NO: 461952 - DNA, 870 bp, Homo sapiens
ttcacaggaaagcgggctatagcatgcctgtgcttgtcaatgaaaatcttagcactgagtttggagtgagtgcagatgaaggccgctggctttctgggattcttgatatgaaattccacaagaataacgaagacgatgacctttttaaggtcaaagagatattaattcaatgttttcattttactgttgaagacactgggacccacagaggtgaagtgacctgcccacaatcctgctgcagtcaccagcactctgtggtcagaagctgtccctggcggctgggggacgcacctgctcttactctccttctgcactggtccagctgccatcggttcttctggctaaactgtgtcttaaccacaaagctaaggatgctctggctgactaacgttctcttttcggattcaattggacatggttctccagtgcttcttggctctaattacggcggaatgtgcctgtgagttgtccaacagctgccacatccttgttaagacattaatgagagaagatcttgtgagaattgaaggaaaatagaaaaaaaatattgcagttgcaagagaagaatgatgcctgctccgtgggaatagtcaagccatgaaaaaccagccacctcatttcttccccagaagaccataagcacatggcatctcactttgaggggcaaattctgagtttggcactttatttatattttattaatgtaaacaataacaaaacacgttcaatcacaagcactctactcagccagctttatgtctacctctgaatcgaggcacttctgagatgcttctcagtgttagggaatgctggcctggaaggcttaggagccaactggcaagctcattagaggaccaagaattgcatcat

SEQ ID NO: 461953 - DNA, 936 bp, Homo sapiens
gggaagagccgctgagtaaaataacatggaaaatcacaaagtccttcctgctttcggtcacccaataatgtggagatcaagaatgataacaggaggtgcaggacctcagcctgtctctcccccggctccagctactccagtaaagtccagctggcataagaaacacggggtctgccgccacctagagatctccactagcactgaagtcccaggtggaagcatcacaaaacaggcacaaaatgcagtctcagcatctctgtatcaggagtcactgtctaagagtctctccagagaaataagctacccaggccatccagctgctggaatatccaccctcttcatcaagaacatcgtgtcattcttcagggtcacagaatgctctacagcctacttgctggtgtccaccaaggaggagattagttgcatctgaattcaaggaagattcgagagggctcacagctgcagaattccaatcactctcagtctgactgtgctgattttagaaagacacatggggatctgccacaaggaaggcactttgcagggaggcctcaaccccatggcacaccccttcaggagggctcttctccttgtaacagtcacttagccacttgtagaaaggcaaatcttagaaaatttaaatggggaccaaaatactaaccctaaccagtttattatctcaaagaattggaaaaacaaagttttcgaatactacgggattagaagagtaaacaagatatgccttttctttggagctacatatatgtattaaaaatgggatgtacaaagaattttttatcacatggagaagtgattatgagatgatataacattaaacaaattaatgaaaggcacacattaaaaagtataaccaaacttatacattagaactcaaaatttaaaatgtgtagaaaaatgattgagaggaaatatgcc

SEQ ID NO: 461954 - DNA, 909 bp, Homo sapiens
ttatagtagtaacattcagatgcaggctgctaacaatttaaatcaggagaattccagacctctgcaagaaaaaaatacagagtcttctgaaaatatgacaaaatttccctcttctcgtggaaaatcgactgtgagtttaaacaaaaataagcaactatctaatagtgcagtatttgtggtgtcaaataacaatttaggggtggtaaaaagtgctgttgacttccaaatgaaaggaaaagaaaatttaacaggcaaaggtataacacaaattttagggaaaagccatgggtcactaaaactgaaaagacagccacacatttttgaatcagatggagaaaccgaagatccacgactgctacagcagcaatcagaaaatcaagctaaagaagttggtacaagtgaccacaggttgatagtaagcaaaatagcccacaggtctaaaagaaaattatgtccagagtcttccaaaacttcaaagaagcatcattccgatactgtgcactatggccaatccagttcttctaagaagcagatacttgactcggataaatcaaaacttaagaaatctctcatcattcataatgcttagaacatggacctgaaagaaggaaatgtctaccagagatgagcattctgaatataggatgaacactcttccagatgcctctcacactcctgtgaccatgaaatcagctctacttactgctgtggaacctcctttttcacttgacagtttctttttattgtttgcatagcatcttgttgtatgtgggtttctgtatttaactagtcccctattgatagacacttcagttcttcccaacttttcactattacaacatcatgtagtctgcagatctttgcaaaatatccaatgatcttatacagtagttttgatagttgaaaata

SEQ ID NO: 461955 - DNA, 759 bp, Homo sapiens
gccgccgcgagcccgcgcgactcgcacgagcatgtccacccgcagcgaggggccggtcactgctacggagcccgccagaaggcaaagccccagacagcaaatagggaggcggctggcacccagggaggccgaggcgggaggatcgctggagcccaggagttcgagacctgccttggcaacatactccctccagcgtgccaaatgctgctaatggacagccgctcctgccgctctgatgttgctagacctcctcagcactcagcccaaggcagccaggaagaatgaacgaatggtgattcagagggaaaggaggaagctgcgtggcatttcagagatacttattttaaaactgctggtggccatgtcttcttttcatatcagagctaatgagttttgatatgtgaacatttcttctccttcataggtaatgtgttgatttggcactttaatcttagaataatcatttctaaaaccaaaaaaaaaaaaaaaaaaaaaaaaaaaaacacaacaaaaaaacaaaaacacacacacacaacacaaacaaaaacaaacacacacacgaaggggggggcgcgctccaaaattccccccaggggggccacacatcgccccccccagcttttgtggaaaacaaggggccccaaggggggggcgtctaataacaccgcagcgcggggcccgctaaacaaaggcgccgcgggggggacacacggcagcggggcccactgtggaggagagagacccctccagcggggggaa

SEQ ID NO: 461956 - DNA, 1426 bp, Homo sapiens
gccgccgcgagcccgcgcgactcgcacgagcatgtccacccgcagcgaggggccggtcactgctacggagcccgccagaaggcaaagccccagacagcaaatagggaggcggctggcacccagggaggccgaggcgggaggatcgctggagcccaggagttcgagacctgccttggcaacatactccctccagcgtgccaaatgctgctaatggacagccgctcctgccgctctgatgttgctagacctcctcagcactcagcccaaggcagccaggaagaatgaacgaatggtgattcagagggaaaggaggaagctgcgtggcatttcagagatacttattttaaaactgctggtggccatgtcttcttttcatatcagagctaatgagttttgatatgtgaacatttcttctccttcatagaaaactctgcttcacaaacacaggatattggaaatggaagtgggcttttcagtgctttgggaacaatcacaggagattctgccttggctgtaatccagaacgtatggagatttgaagttgtcgcaaacatactttgaaggccaccagatgcagctgtacaattgaagtccatcagctcacttgcctcaataaagcctgccactgcatgcagcttgtcacttgccactcacagatagggttttgatatgactctgcaagcaattgatttatgatggtctctgtgctgtcaaacctctctgctaatgttcatctgtatttgcagccactcccaagtgctagcatcgccgcctcagctccacttcaggtcatcaggcattagttagattctcataaggagtgtgcaacccagattcctcacatgcgcagttcacaatagagtgcgctgctatgagaactaatgccactgctgatctgacaggaggcagagctcaggcggtcatgctcacccacccacctgctgctcccctcctgctgtgcggcccagttactaacagtccatggacaggtactgatgagaatgtgaacacacagaggcaaagcggcccatacgaggtcacagtgagagagggtgccgtggagtcagaacgcacagcagggacccagcccctaggttccgtctctgagccccagaggcctgcaggacttatttcctggtccccacgggatgaaggaggaaacccgtgggaactagcacatggccctaaaagcaacctctccttgccctcattgtccattagcacaagacactcccatcagcaccatgacagtttacaaatgctgtggaagttgctgccttttccttagagatttccaaataacctgcccctaatgtgcatgtcattagaagtcagtataagtggctgtgagtgcagctgcctcagcccatatgctgctgactccgggtgcactgctgaggagtcagccctggcccagttcaggaaa

SEQ ID NO: 461957 - DNA, 1404 bp, Homo sapiens
gagacgctcaagagagcaagatgttctcgtgttgcttccccacttcgagaggttgctgcttcaggaatggagggagtgagagccttttccgacaatgccgaagaaggctcatccctcaccccagacgcctgtggccctttgtaagaaggcgcacccaggtaccacaggacagcccggggcaggccctagctggccaggccacaccatagatcccatcggggctgcctctgtacattgtccttgtccaggaggagattcgggagcccatggaggcacagacacatgctcctggtccatacgcagacatagcagcacttgcggcaccggctgtcgagccaaagccagcatgggaagagccccctccagagagagcgctggaggtggagggagctccagccaaggaccagcccagccaggagctgcctgaaatcatggcacctactgtagccactggccttaatgctggagctgaaaacgtggctggagagagaagtgggagggagggggtgacaagcacagccccagccagcagatcccatgctgcccctagtcctgggcatggtggcaaacatggaggcggagaccagggcattcagactggactcctgtacctcgctggagagaggcttctctcattcgctagaaccacagccctgctgctgcagggcctgtttattgtgctaatgctggtggggtatatctctgtgcaggtggtgctcaagagcattaaaacaaggctgggaagaagagttccagcagctcctcctgctctcagacgcaatcttctcctccaggcatggatgtgtgtctgcaactgggcatccaggctgtttgccccctaatgtgctgccccgaacgggctcttaacaggtgggcaggggttgaggggaccaggaggtggctccaaagggtacagcaaggaaagcttttaaagacagctgttgtgctccaggctctccatgccaccacctgccctagcatttattaatagtgttagaattacaagtttatgaaatgaaatataaataaagtttgatttctgaaacttctcacctttttgaactccctaatgttagatggtgtttttgaggctatcctgaaaatctcggatagttgtgtcttttgttgtggttgtttgtgtggctgaattaccatcgagtcatctgttattggaaacttttcaggcctctgggcccatgatgggagtggctgctgcaaagttcttcgacatgccctggagacattttccccattgtcctgttgattaacatttggctccttgtcacttatgcaaatttctgcagctggcttgaatttctcctcagaaaatgggttttttttttttctattgcattgtcaggctgcaaattttttgaacttctgtcccctgtttctgttttaaaa

SEQ ID NO: 461958 - DNA, 2853 bp, Homo sapiens
cctgtcccgtgtttggtgaagcttccctggctgcctgatggcaagcagctgacagcgcatgaagctgcaggcagttgtgatatttgacttggtttggatctgcggtctccaccaaatctcatgtcacctgtaatccccagtgtgggaggtggggcctcctgtaatccccagcgtgggagtggggtctagtgggaggtgactggatcatgggggtgggattctcacgaatgggttgtcatcatcccctctgtgctgtccccttggtgacagtgagtgagtgaattgccctgagatccgtttttaaaaggtatacagggtgcacctcctgcctgtctcgttgctgctcctgccacgtgagacaccatgtgagacgtttgctccgctttgccttcgccatgactcaaagcttcctgaggcctccccagaagcagcagctgccatgcttcctgtacagcctgcggaacctccgaggagtcccaaaacctcaaaagtcgggaagccgacagcgcagccttcagtctgtggccaaaggcccgagagcccctggcaaaccactcttgatgcccaagcccataaccaatcctgggaacaaagcacacaggagtcgtatggatgcaatgcacgtggatgtagcttccaggaaacaggccgtgctgctcccagaactggtggtgctgggcagacagcacacgtacgccacgggcagacctcctggagacactgtgggtgaaagagacatcagcccctgctgccggctgcccctcttcctcaagcctcgcttcccacctccgctctctggccgctcccaccccacgcactcacagttaatccgtcagctgggctgcctgagcccctcttgcctcactcattgtcccacctgctctagctgtgctggagagcccgcctttctgatgagacgggctcctctggttggcgtgttgtgcacagaagtccctctctgccggaggaagggcatcaaggcgcccgtcaacaagtggccacaacgcggcattttgaactgtaagatctctgggttgaacgtgtccggcagtcagtcagttggcagggaggctgaggagccttggaacagctccagggcagtggtggaaggacgcaccagaggagcggtggggatgtctgtggaagtgcagcgcttgacctcgctggaagaccggacgtggccactgtcttcctccgtgattatgtttcaaaggaatgaccggcctccagatcactgagaaagacactccctgggccttacaactggcaagatatgtcacaaaaggcttacatctcctttctctgccccttgtaaggggcagagaaagaatttacaatgacaagtttttctaacgcaaatgctccaagaaaaggcaggtggaggaatattcacatttttatcctggtactacttctggtatacctggtatggacatgctaacttaccattggattcagcggctctaacttattagtgggtcaatttctttgtaagattattgacactagagcagcccaatttattgctttgctgagtgcagggctgagaagccgaaggacacaaagctctcatctacgggattaggatcagatgcctaagtgtgaactctccaagcctcatgtgttgttgccatggcagttctactcaagagaccttttcggacagaaaagaagagtacttgctctggagggaacttgaatccttgtgccagttccccgaggccagcggctggtgcgggaggccgcttctgagtagaggagaaagttgcctgttgaacattcagtcggcaccaaggcaggcaggtggttttaagagaaaatcttctcaaaggcagatgagcccttgtctttacaatcaacatatttaattttagtggcaaatttatcctaattacattaataatgggcccctttactcttgtaggatataaattggacatgatagtattgagttcatagggttgtgatgggaatttaatgagattatgtgggttatacctatctacattgacttagaaattattttctcagaaattaaaacaggataatttattaatatatttaaaaccaataattataagcctgttgcatgtaaacagtcataatatctattttttatggaaaataattatatcttttgaaacaaaatcagtgatgagtgactattatgtttttatgatgtctagcttaacaggagacagctggattcttgtagctgcccctgcctttaatctgccatgatcgttctggctgaagtatatggagaaaattcaaccccatatagatgagtagttggaaaagggagagttaataaccttttcctgtgattgtggatgttttccttatctgtaccaaaactagacaagtgatagcttcttaatgattaattgcaacatgaaatctgagaccacattaacaaacttttaaaacttttatattaaaattcatttgtcattcttactctttgaattcatcttgtttccctgcaattatacaatttataacatcaagcatttgtcatttagaaaattcattccaccaaattgtgcagatcttccaaatattgacgaatatcatgaatttttatcattaaaaatcacattccttaatatccccattgattgtatcagaaaacactttatctgaaatctgtcaagtgctcagaggcagatagacattttccaaaattcagattttcactctagaccttgagttgtgttcttggcaagagatggtgtcagttgtgttccttgaggtgatgggctccctgcattcatttctgagaaaataccagccataaactcaagtctggattcccttaggttgtccattatcctacttccagtaaaaacc

SEQ ID NO: 461959 - DNA, 1738 bp, Homo sapiens
gaagtcttcctggggaatggcatgagacaccgagcatggccctgacaagtgccgctctgactcatttcctgagccgtacccacgtggcttctgcccatcatcccagccgtacccacgtggcttctgcctataattccagccatacccgcatggcttctgccacttgtcccggccgtacccacgtggcttctgcccatcatcccggctgtacccacgtggcctctgcccatcgtcccggccgtacccgcgtggcctctgcccatcgtcccggccgtacccgcgtggcctctgcccatcgtcccggctgtacccgcgtggcctctgcctatcgtcccggctgtaccccgtggcctctgctcaacattctggctatacccacgtggcctacctgcgtggcttctgcccatcgtcccagccatacccacgtggcctctgcctatcgtcccagccgaacccatgtggcttctgcctatcgtcccagccgaacccgtgtggcctctgcccatcatcccagccaaacccatgtggcctctgccccatcatcccagccactactgttttccaaagtgaagttgcagtcactctgccgaggcccggacgaggcactgctgacttgtaagcacatgctgcagatatggaaatcctgctacaacctcaccaaccccagggccagagtggggaggaccctggctccaggcagtgtctggtggggactggcggatggggtgggcggtagaggccccagtggtcactcagaattccccctccggctccccgcaaagcctggagggaggagtggtgaattgagcagcccttattaaggagcatcctgtctggttttttaacttgattttctctgggatagaaataaatgtttctcctgtagcccttatcattatgtaaatgtagtcatccccgccagcctgctcgtttcccagtcttcccacccccttccagatccaccccaggctctgcacaggcctccagggcagtaagatgaggaagacgtgggcagtagcagggagtgagtggccaaattgagaatagaccctagcttcatattctcagcaacccgttccctcttctcgatttttgcttaaagggggaaaaaaattacactgagctagtcactaaactgagcattggaaaacttgcaaatagtgttccacctgcagttggagatgcgtctcttgctgtgagcaaaatggtgggtggcattctcttacatttggcgaggtgtttgtcatttcagaagcctggattctatttctctcggtctgcagttttgcttgcatttaggatagaaatctgtctcatgctttgtcttctgtcactgggtgaagtgtaaggctccctcagtccttgtgcatattgacccagccactcaagacagtgtgaattctgaccagaatctcaccagaaggtcccagcaggctccctgaactgaatctcacagcatttcagccagggatggtaataaccacgtttattgaaacttctccatgccagcactgtactaggccactgatgtgttatcttcaatccctacattagccttgcaagatagctaccgttacttccattttacagaaaataaaattgaagctaaaagtggctaaataacttgcccaagtttttccaattgaatatgtagcagaacagtgattcagccccaggcctaacatcaatgctctctccacactggcatgctgcctctcttgagctgacaaccagtttc

SEQ ID NO: 461960 - DNA, 1291 bp, Homo sapiens
ggttgactctgcagatgatgatgcagtgcctcctttatgaaagatttctgaggacttccccacttcttcctacttgcggggaagataataaggagaaaagatcaaggaaccagaaagcttctagaggcatgagatgtcggattccaataaagcactcagaaggagctgatcttaccgttttggtttgggtagtagagcgagacatctcagtgctttcagtttctacccctttccgcatcccactaaaccactttttatattccattcgaacctggaaatttgagtagagaggtccgtgttacatccagagcttggtttgggagaaaggatcctaaaatgggaggctaaagataaagacaccaagccctactctctagttttccatataatcttggccatgcccatgttgattcattttatttaaactcaaacttctcagttgtaaaaaagatgtgtattaaatatcagacactataggactcaatagatgatgatgatgatgatggtgatgaaggtgactgttgatgatagtgatgatgatggtgatgatgaaggtgatggtaatggtgatgatggtgatgaaggtgataatgatgaagatgatgataaaggtaatgaaattgatgatggtgaaggtgatggtaatggtgatgatggtgagggtgatgatgaagatgatgacaatgaaggtgatgatagtgatgatgatggtgaaggtgatgatgatgaagttgatgataatggaacggacgatggtgatgatgaaggtgatggtaatggtgatgatggtgatagtcatgatggtgatggtgatgatggtgatggtgatgatgaagatgatgaaggtgatgatggtgaaggtgatgattataaaggtgatggtgatgacagtgatgatgataaaggtgataatgaaggttatggtaatggtgatgatggtgatggtgatgatagtaaagatgatgaaggtgtgataaagccttacctggcgattaaggagacagtgtaccacaaagagcaacactccctgaagggtgttgatgatggtgaatgagtatgcaatgattgatccaatcgtcttccctacttcttcaaccataaaaaaaccaaggccccaagaacagcccaggataaatagctgagaaatggctttaaatgtcatgactctgcagggaataaaagtaataataactacggtttaccaggaatatttattgaataaggaaatgaagttacctgaaaatcagagtttctatttcttctataaattgtccttcacatgctctttatc

SEQ ID NO: 461961 - DNA, 1932 bp, Homo sapiens
cacagcaagatttgctgtgatttcttttattgccccaagcgtacctcaccttgtcttaaagtgtttgctctggatgttacaatatgtgtattgtaatatagtagtctactggtaccagtatttaccacttcaaaaggagctctacggtgactttgaagacttggaaacaggggacatgcacaagggaaaatcgggccccgacactcagagaaacaaggaagaaattgaccccgacgaagaagaaagtgccaagaaaaagcatttggataagaagagaaaattgaaggagatgtttgatgcggaatatgatgaaggagaaagcacatattttgatgatcttaaaggagaaatgcagaaagaagcacaggagaatgggagcagaggaactggaggctgcaactgtggaaaacttttgtggggttttgctgcagagagaagcagagaaatgaagcagtttttggtggaagaagtggaatcaaaaggttttgagctgaatcacgtagaatttgaagatcaagatgatgaagccagagttcagtatgatggttttcgacctgggatgtacatccgcgttgagattgaaaatgttccctgtgaatttgtgcagaactttgacccccattaccccattatcctgggtggcttgggcaacagcgagggaaatgttggacacgtgcagatgcgtctgaagaaacatcgctggtataagaaaatcctcaagtcccaagatccaatcatattttctgtagggtggaggaggtttcagaccatcctgctctattatattgaagaccacaatggaagacaaaggcttctaaagtataccccacagcacatgcattgtggagcagccttttggggtaaaatatgattacaataacttgcctattgccgagattaaactttacaggctgcgttattttagctttgtgcttttcctttcataaaattccactcctaagatgtttctgttttctgggagcagggaggtggtttggagtatatatgtaaatctatatccaaatctaaatgtccgtatccagtatgttaaactagaatctaaaatttctggtttgctatatttctttttttccttttcctttaagaccctatcactccacagggaactggtttcttggcaatacagtctgtcagtggcataatggtaactatcttggacaatttcttttacagattggtttgagaaatatatcctgaatgtgggttattatgtacatgagactttaagttgaaaattactcatttttattattataaagtaaatttccctttgcttttaatctttgtacatccttttcagtagggtgtgggattagaggaggggaggtggaagaattataatggtacatttcctatttttgtgcatcttttgcatttatttatctaagcaagtatttaagcagtgctcaccgtgtgctaagcactatatgaggctgatccctctgggggaatgggtggtgggggccagatgtttccttccctcctttatgtgactgtcctgttttccgggctctactggatttctgctactccttgatgcactctggggctctcctttagtgactttcatcaaaatatagctgtttgctgctttggctgtctttgtcaggggatgagtgcaaggggttattgatcagccccttgctggcatcactccctcttaaacttttcactggatactcttttgaactattttttcccccaccatatacatgtattttttaaacgttaatgtgctaatttctactgaagcaatgtggatttttctgaaagttttaatgttttaataagctttttattgaaatgttaatgtacatacagaagagtgcccgaatcataagtgtgcatctagatgaactgtagcacaccaggctgccacgccctggaccaagcagtagccttgacctgtgg

SEQ ID NO: 461962 - DNA, 745 bp, Homo sapiens
  misc_feature (1)..(1): n is a, c, g, or t
  misc_feature (3)..(4): n is a, c, g, or t
  misc_feature (8)..(8): n is a, c, g, or t
  misc_feature (12)..(14): n is a, c, g, or t
  misc_feature (17)..(17): n is a, c, g, or t
nanntatncctnnnatnggactcgattagtttctgctagtgtggagacaagtcatgtcatggctaggggccatgatggtaggagcagtcagaggatttcttgcattgtggcccctgaaaaaaatgttaccatcagggtgcgctccctgattcttgtgtctgctggaaggaggaaatcaagccaggaacattgtcaggatagagatgaaaatagggctcacttttctgtctcttgtgatgtcagacaagcctttcagctctgtctcctcagccctcatggaattgttgaagctgggaatgacccgaagtttacaaccaggaagaaactgaggatctacaaccacaaggaactgaattctgccaacaacccagatgctcttttagagccttcagaaagaaatgcagcctgccaacatcttgatgttatttcattgtatcatttctatattgccagagcacctacagttgcatttctttctgtcagctttatccagcatttgtttttgtcttttatttgaagttaaatatattccttgctcactacaacactgggggaaggaaggtttctgttgtcattgttgtgcttgtacagttgtgtatttaaaaacattggcgaaaacaaaaactgtacgtagatggaatggagataagacagaaaatgagagagactgatgatgagtgtgcctattctagactgggaggggtgctacactgaacagtgtctccaaggctgcaggaaaggatgg

SEQ ID NO: 461963 - DNA, 5378 bp, Homo sapiens
aggcagagtcggatagtgcagggaagcgtgttctactatggaaatgatgttagacaaaaagcaaattcaagtgattttcttattcaagttcaaaatgggtcataaagcagcagagacaactcgcagcatcaacaatgcatttggcccagaaattgctaacaaaggtacagtgcagtggtggttcaagaacttttgcaaaggagacgagagccgtgaagatgaggagtgttgtgcccggccatcaaaagttggcaacgaccaattgagagcaatcatcgaagctgatcctcttacaacactagaagcacgaccagacagggactatgcgaggggctggtggacagcagggtgcacagatcaggctcaccctggtcccacaggaaagaaagccctgttctctccaggtctggcagcttatacagctctgaagaaagacctggcctggcgagagaatttggggatagtcagccttgtatttaaaggcatgaggttgggtgagatcaaagtgaatagactgaatagagataaagaagttcaaaagactggggccctaaggtatggtctgaatatgcgttgcttggcagctcgggtcaactataagactttgattattatctgcgcactcttcactttggtcacagtacttttgtggaataagtgttccagtgacaaagcaatccagtttccacggcgttcgagtagtggcttcagagtggatgggtttgaaaaaagagcagcagcatctgagagtaacaactatatgaaccacgtggccaaacaacagtctgaggaagcattccctcaggaacagcagaaagcaccccctgttgttgggggcttcaatagcaatgtgggaagtaaggtgttagggctcaaatatgaagaaattgactgtctcataaatgatgaacacacaattaaagggagacgagaggggaacgaagtctttcttccattcacttgggttgagaaatattttgatgtttatggaaaggtggttcagtatgatggctatgatcggtttgaattctctcatagctattccaaagtctatgcacagagagccccctatcaccccgatggtgtgtttatgtcttttgaaggctacaatgtggaagtccgagacagagtcaagtgcataagtggggttgaaggtgtgccattatctacacaatggggacctcaaggctatttctatccaatccagattgcacagtatggattaagtcattacagcaagaatctaactgagaaacctcctcacatagaggtatatgaaacagcagaagacagagacaaaaacaagcctaatgactggactgtgccaaagggctgctttatggcgaatgtggctgataagtctagattcaccaatgtcaaacagtttattgcaccagaaaccagtgaaggtgtatccttgcaactgggaaacacaaaagattttattatttcatttgacctcaagttcttgacaaatggaagtgtgtccgtggttctagagaccacagaaaagaatcagctcttcactatacattatgtctcaaatgctcagctaattgcttttaaagaaagagatatatactatggcattgggcccagaacttcatggagcacagttaccagggacctggtcactgacctcaggaaaggagtgggtctttcaaacacaaaagctgtcaagccaaccaaaataatgcccaagaaggtggttaggttgattgcaaaaggtaagggattcctcgacaacattaccatctctaccacagcccacatggctgcattttttgctgctagtgattggctagtaaggaaccaggatgagaaaggtggctggccaattatggtgacccgtaagttaggggaagggttcaagtctttagagccaggatggtattctgccatggcccaagggcaagccatttctacattagtcagggcctatctgttaacaaaagaccatatattcctcaattcagctttaagggcaacagccccttataagtttctatctgagcagcatggagttaaagctgtgtttatgaataaacatgactggtatgaagaatatccaaccacacctagctcttttgttttaaatggctttatgtattctttaattgggctgtatgacttaaaagaaactgcaggggaaaaactcggaaaagaagcaaggtccttgtatgagcgtggcatggaatctcttaaagccatgctgcccttgtatgacactggctcaggaaccatctatgacctccgtcacttcatgcttggcatcgctcctaacctggctcgctgggactatcataccacccacatcaatcagttgcagctactcagtaccattgatgagtccccaatcttcaaagaatttgtcaagaggtggaaaagctaccttaaaggcagcagggcaaagcacaactagagctcacaaccaaaactgcacttcagcctctgctgtacacagaaactacaggctctgtctcaggagagcataggcacattttaaaaggttatgtactaggtttttgtggattctatcaaagtgataagtgatccttaaaaccagccttctaaaataattgcattccatgggttgggtatttagaaatgtaggtggcatttagaacacaatgtttaatcaatgggctgaacaaagatgcttcactttgccttgcccatcaccctatacagtttcgcagatagtctagtcactctatgtgagaaagataatggtaagtagttgctactggccaactgtctagcacttacctgaaaacttagtatggagctcttttaaaatgtgattatttatatttatgttgaaagcggactttaaaaaaaataatgtgctgtaacacagtaaatatgtacttgtagcctggatagcagactgtgttcaactttttaaaaagatgtttcctttctaaagattaatttcttgggagcaaatgagtatttgttgcatttgttcaatttgttgtatatggtgaatatttaattatggttttcttgaaacgtgtaaattaaaaacacaatcagtgttcaggcttcagttatataatgtaagcacaactaaaatgaaacttgttgactgcacaagaaattacaaaaatgtttctgttttgaaacttgatctacaatcagtaaaagtttgataatcagtatatcccttcccaacccccattgtgacagtttctttttgtcactgtctagaattttgtattttatttcagactataccttggagttttgtatattttgagagagatatttttgggacattattttggaaacttattacaaatctaaatttggaaaggagctagtagctttaaggccaccaccatattttacttttttaggatttttccccctttaaataaaaatattagatcaaatactatatgcaagaaatcatagcaaagtttttttttcctaccaagatcattcttgatcatcagcttcccaaactagtaagtctgtgcatcattgggtgtttttttttaatttaattttaaattatcccagctattagatagaagggatgttactgcacttatgtgtaatcagatctttatttaggtatacatatcctcctataccgcacataaatagatttcagagcccccatacaatgggcagtgtctgctatagggcttcaggcattaaataaaaccgagggttgttgattttgctgtgacagtacactaaatcaatactatatcttatacagtttgaaaatatgataccctacactttcaggggaccgagtctgacaaacacaatacatttatctgtgacctatatcaagtacacatttaggagccaggtaggttacctgcttacacactatattttaattgaattcaaactatcaagcactacttagaaactggaaaacatatatatgttagcatcaaagggggcagaagcaaagaagatacagatctgcactgaagacattagactggccatagaaaagtaagcttgaactcccaattgatgtgaccacactcttcttaattttgttcacagtaaaaacacttttttgagttattaggcttacccctagcttttgacctttgcatttcatatatgttagatgtctcagcaagaatatctggtctcccctaatttttattcccagtgccgatgttcaaaataaactttctccagtctgggaaccttttttacttccccatatttgttattatttagaatggttcatacgtctgctttgtttgcatactggtcttcagattatgagactcgatgataacagtatggtactgcttctgtgacaaatatcgtgccttaacaatgtggctgtccttttccactgaagaaggaaagacgttttgatctagaaatagcgttgtgatttccttgctgttggttttacactgccttccacattgcaacagcaagttgatttcttgtgatcccagaattttctaagaggatgagttgaatctatagcagcattgtcagtacagaccagtggttctcaaactttaaaatgcctcagcatcacttgggagcttattgaaatgcagatcccagagtcagtaaatctgcctgtgaagtatgatagtctgcatttgtaatgagcattcaagtgattctgatgcaggtgagctgggggcatacagggaggaacactgccctggactatccattgcatttttgcctctaaacaactacagaattttctagggttttaaattatgtaaaatgtttacttattctgagcttagagagaatggggagggtatttttaaattttattgttttatttctttaagtttttctttgctttaagattataggtattaggtttgtttttgtttttccacttatcttgagttcactttgatgttaaatctattgctacttcagttgtaaaaccagccaaaagtttctggatgaaggtcaagtttgaccttttaggagttattgtacataaaggcttcatccacgaaccatccagcgcacagaagcaagtgcaaaaatgacacaagcacaactctccagacgtggctccttctcctttctcagtgcagactctcactgaaagctgctattttcatcctccttgtggttgcttttcttgtttctcttccattgtacatgtgggttatataccatatgttaaatatgcaataaagtgtttacaggatgcccttctgaagggtagtcctttgtaaagctgtacagactttgcagtttaagcacaatgtgcacatgttagttttatatacagcaaaacttgattttttgcagatggaaaggtattttgtttctatacaaagtaaatggattgtttgtgcttaatgtaaagccgctttataaaactgtaaaataaagtttttttctta

SEQ ID NO: 461964 - DNA, 5373 bp, Homo sapiens
aggcagagtcggatagtgcagggaagcgtgttctactatggaaatgatgttagacaaaaagcaaattcaagtgattttcttattcaagttcaaaatgggtcataaagcagcagagacaactcgcagcatcaacaatgcatttggcccagaaattgctaacaaaggtacagtgcagtggtggttcaagaacttttgcaaaggagacgagagccgtgaagatgaggagtgttgtgcccggccatcaaaagttggcaacgaccaattgagagcaatcatcgaagctgatcctcttacaacactagaagcacgaccagacagggactatgcgaggggctggtggacagcagggtgcacagatcaggctcaccctggtcccacaggaaagaaagccctgttctctccaggtctggcagcttatacagctctgaagaaagacctggcctggcgagagaatttggggatagtcagccttgtatttaaaggcatgaggttgggtgagatcaaagtgaatagactgaatagagataaagaagttcaaaagactggggccctaaggtatggtctgaatatgcgttgcttggcagctcgggtcaactataagactttgattattatctgcgcactcttcactttggtcacagtacttttgtggaataagtgttccagtgacaaagcaatccagtttccacggcgttcgagtagtggcttcagagtggatgggtttgaaaaaagagcagcagcatctgagagtaacaactatatgaaccacgtggccaaacaacagtctgaggaagcattccctcaggaacagcagaaagcaccccctgttgttgggggcttcaatagcaatgtgggaagtaaggtgttagggctcaaatatgaagaaattgactgtctcataaatgatgaacacacaattaaagggagacgagaggggaacgaagtctttcttccattcacttgggttgagaaatattttgatgtttatggaaaggtggttcagtatgatggctatgatcggtttgaattctctcatagctattccaaagtctatgcacagagagccccctatcaccccgatggtgtgtttatgtcttttgaaggctacaatgtggaagtccgagacagagtcaagtgcataagtggggttgaaggtgtgccattatctacacaatggggacctcaaggctatttctatccaatccagattgcacagtatggattaagtcattacagcaagaatctaactgagaaacctcctcacatagaggtatatgaaacagcagaagacagagacaaaaacaagcctaatgactggactgtgccaaagggctgctttatggcgaatgtggctgataagtctagattcaccaatgtcaaacagtttattgcaccagaaaccagtgaaggtgtatccttgcaactgggaaacacaaaagattttattatttcatttgacctcaagttcttgacaaatggaagtgtgtccgtggttctagagaccacagaaaagaatcagctcttcactatacattatgtctcaaatgctcagctaattgcttttaaagaaagagatatatactatggcattgggcccagaacttcatggagcacagttaccagggacctggtcactgacctcaggaaaggagtgggtctttcaaacacaaaagctgtcaagccaaccaaaataatgcccaagaaggtggttaggttgattgcaaaaggtaagggattcctcgacaacattaccatctctaccacagcccacatggctgcattttttgctgctagtgattggctagtaaggaaccaggatgagaaaggtggctggccaattatggtgacccgtaagttaggggaagggttcaagtctttagagccaggatggtattctgccatggcccaagggcaagccatttctacattagtcagggcctatctgttaacaaaagaccatatattcctcaattcagctttaagggcaacagccccttataagtttctatctgagcagcatggagttaaagctgtgtttatgaataaacatgactggtatgaagaatatccaaccacacctagctcttttgttttaaatggctttatgtattctttaattgggctgtatgacttaaaagaaactgcaggggaaaaactcggaaaagaagcaaggtccttgtatgagcgtggcatggaatctcttaaagccatgctgcccttgtatgacactggctcaggaaccatctatgacctccgtcacttcatgcttggcatcgctcctaacctggctcgctgggactatcataccacccacatcaatcagttgcagctactcagtaccattgatgagtccccaatcttcaaagaatttgtcaagaggtggaaaagctaccttaaaggcagcagggcaaagcacaactagagctcacaaccaaaactgcacttcagcctctgctgtacacagaaactacaggctctgtctcaggagagcataggcacattttaaaaggttatgtactaggtttttgtggattctatcaaagtgataagtgatccttaaaaccagccttctaaaataattgcattccatgggttgggtatttagaaatgtaggtggcatttagaacacaatgtttaatcaatgggctgaacaaagatgcttcactttgccttgcccatcaccctatacagtttcgcagatagtctagtcactctatgtgagaaagataatggtaagtagttgctactggccaactgtctagcacttacctgaaaacttagtatggagctcttttaaaatgtgattatttatatttatgttgaaagcggactttgtgttcaactttttaaaaagatgtttcctttctaaagattaatttcttgggagcaaatgagtatttgttgcatttgttcaatttgttgtatatggtgaatatttaattatggttttcttgaaacgtgtaaattaaaaacacaatcagtgttcaggcttcagttatataatgtaagcacaactaaaatgaaacttgttgactgcacaagaaattacaaaaatgtttctgttttgaaacttgatctacaatcagtaaaagtttgataatcagtatatcccttcccaacccccattgtgacagtttctttttgtcactgtctagaattttgtattttatttcagactataccttggagttttgtatattttgagagagatatttttgggacattattttggaaacttattacaaatctaaatttggaaaggagctagtagctttaaggccaccaccatattttacttttttaggatttttccccctttaaataaaaatattagatcaaatactatatgcaagaaatcatagcaaagtttttttttcctaccaagatcattcttgatcatcagcttcccaaactagtaagtctgtgcatcattgggtgtttttttttaatttaattttaaattatcccagctattagatagaagggatgttactgcacttatgtgtaatcagatctttatttaggtatacatatcctcctataccgcacataaatagatttcagagcccccatacaatgggcagtgtctgctatagggcttcaggcattaaataaaaccgagggttgttgattttgctgtgacagtacactaaatcaatactatatcttatacagtttgaaaatatgataccctacactttcaggggaccgagtctgacaaacacaatacatttatctgtgacctatatcaagtacacatttaggagccaggtaggttacctgcttacacactatattttaattgaattcaaactatcaagcactacttagaaactggaaaacatatatatgttagcatcaaagggggcagaagcaaagaagatacagatctgcactgaagacattagactggccatagaaaagtaagcttgaactcccaattgatgtgaccacactcttcttaattttgttcacagtaaaaacacttttttgagttattaggcttacccctagcttttgacctttgcatttcatatatgttagatgtctcagcaagaatatctggtctcccctaatttttattcccagtgccgatgttcaaaataaactttctccagtctgggaaccttttttacttccccatatttgttattatttagaatggttcatacgtctgctttgtttgcatactggtcttcagattatgagactcgatgataacagtatggtactgcttctgtgacaaatatcgtgccttaacaatgtggctgtccttttccactgaagaaggaaagacgttttgatctagaaatagcgttgtgatttccttgctgttggttttacactgccttccacattgcaacagcaagttgatttcttgtgatcccagaattttctaagaggatgagttgaatctatagcagcattgtcagtacagaccagtggttctcaaactttaaaatgcctcagcatcacttgggagcttattgaaatgcagatcccagagtcagtaaatctgcctgtgaagtatgatagtctgcatttgtaatgagcattcaagtgattctgatgcaggtgagctgggggcatacagggaggaacactgccctggactatccattgcatttttgcctctaaacaactacagaattttctagggttttaaattatgtaaaatgtttacttattctgagcttagagagaatggggagggtatttttaaattttattgttttatttctttaagtttttctttgctttaagattataggtattaggtttgtttttgtttttccacttatcttgagttcactttgatgttaaatctattgctacttcagttgtaaaaccagccaaaagtttctggatgaaggtcaagtttgaccttttaggagttattgtacataaaggcttcatccacgaaccatccagcgcacagaagcaagtgcaaaaatgacacaagcacaactctccagacgtggctccttctcctttctcagtgcagactctcactgaaagctgctattttcatcctccttgtggttgcttttcttgtttctcttccattgtacatgtgggttatataccatatgttaaatatgcaataaagtgtttacaggatgcccttctgaagggtagtcctttgtaaagctgtacagactttgcagtttaagcacaatgtgcacatgttagttttatatacagcaaaacttgattttttgcagatggaaaggtattttgtttctatacaaagtaaatggattgtttgtgcttaatgtaaagccgctttataaaactgtaaaataaagtttttttcttaaaaagaatatacctggatatttctctttcttctcaaattattctaaggttatt

SEQ ID NO: 461965 - DNA, 1595 bp, Homo sapiens
aggcagagtcggatagtgcagggaagcgtgttctactatggaaatgatgttagacaaaaagcaaattcaagtgattttcttattcaagttcaaaatgggtcataaagcagcagagacaactcgcagcatcaacaatgcatttggcccagaaattgctaacaaaggtacagtgcagtggtggttcaagaacttttgcaaaggagacgagagccgtgaagatgaggagtgttgtgcccggccatcaaaagttggcaacgaccaattgagagcaatcatcgaagctgatcctcttacaacactagaagcacgaccagacagggactatgcgaggggctggtggacagcagggtgcacagatcaggctcaccctggtcccacaggaaagaaagccctgttctctccaggtctggcagcttatacagctctgaagaaagacctggcctggcgagagaatttggggatagtcagccttgtatttaaaggcatgaggttgggtgagatcaaagtgaatagactgaatagagataaagaagttcaaaagactggggccctaaggtatggtctgaatatgcgttgcttggcagctcgggtcaactataagactttgattattatctgcgcactcttcactttggtcacagtacttttgtggaataagtgttccagtgacaaagcaatccagtttccacggcgttcgagtagtggcttcagagtggatgggtttgaaaaaagagcagcagcatctgagagtaacaactatatgaaccacgtggccaaacaacagtctgaggaagcattccctcaggaacagcagaaagcaccccctgttgttgggggcttcaatagcaatgtgggaagtaaggtgttagggctcaaatatgaagaaattgactgtctcataaatgatgaacacacaattaaagggagacgagaggggaacgaagtctttcttccattcacttgggttgagaaatattttgatgtttatggaaaggtggttcagtatgatggctatgatcggtttgaattctctcatagctattccaaagtctatgcacagagagccccctatcaccccgatggtgtgtttatgtcttttgaaggctacaatgtggaagtccgagacagagtcaagtgcataagtggggttgaaggtgtgccattatctacacaatggggacctcaaggctatttctatccaatccagattgcacagtatggattaagtcattacagcaagaatctaactgagaaacctcctcacatagaggtatatgaaacagcagaagacagagacaaaaacaagcctaatgactggactgtgccaaagggctgctttatggcgaatgtggctgataagtctagattcaccaatgtcaaacagtttattgcaccagtctgaacctgagtccgggaaacctggattctagtccctgctctacaactaattagcttttggcattgggcaaaccatttaaccttgcaaagcctacatatcttcacctctaaaatggagatgtaatataataattcctgccctaccagcttcagaagattaagtatcaagtgagataatacatgtgaatgcgttttgg

SEQ ID NO: 461966 - DNA, 5431 bp, Homo sapiens
aggcagagtcggatagtgcagggaagcgtgttctactatggaaatgatgttagacaaaaagcaaattcaagtgattttcttattcaagttcaaaatgggtcataaagcagcagagacaactcgcagcatcaacaatgcatttggcccagaaattgctaacaaaggtacagtgcagtggtggttcaagaacttttgcaaaggagacgagagccgtgaagatgaggagtgttgtgcccggccatcaaaagttggcaacgaccaattgagagcaatcatcgaagctgatcctcttacaacactagaagcacgaccagacagggactatgcgaggggctggtggacagcagggtgcacagatcaggctcaccctggtcccacaggaaagaaagccctgttctctccaggtctggcagcttatacagctctgaagaaagacctggcctggcgagagaatttggggatagtcagccttgtatttaaaggcatgaggttgggtgagatcaaagtgaatagactgaatagagataaagaagttcaaaagactggggccctaaggtatggtctgaatatgcgttgcttggcagctcgggtcaactataagactttgattattatctgcgcactcttcactttggtcacagtacttttgtggaataagtgttccagtgacaaagcaatccagtttccacggcgttcgagtagtggcttcagagtggatgggtttgaaaaaagagcagcagcatctgagagtaacaactatatgaaccacgtggccaaacaacagtctgaggaagcattccctcaggaacagcagaaagcaccccctgttgttgggggcttcaatagcaatgtgggaagtaaggtgttagggctcaaatatgaagaaattgactgtctcataaatgatgaacacacaattaaagggagacgagaggggaacgaagtctttcttccattcacttgggttgagaaatattttgatgtttatggaaaggtggttcagtatgatggctatgatcggtttgaattctctcatagctattccaaagtctatgcacagagagccccctatcaccccgatggtgtgtttatgtcttttgaaggctacaatgtggaagtccgagacagagtcaagtgcataagtggggttgaaggtgtgccattatctacacaatggggacctcaaggctatttctatccaatccagattgcacagtatggattaagtcattacagcaagaatctaactgagaaacctcctcacatagaggtatatgaaacagcagaagacagagacaaaaacaagcctaatgactggactgtgccaaagggctgctttatggcgaatgtggctgataagtctagattcaccaatgtcaaacagtttattgcaccagaaaccagtgaaggtgtatccttgcaactgggaaacacaaaagattttattatttcatttgacctcaagttcttgacaaatggaagtgtgtccgtggttctagagaccacagaaaagaatcagctcttcactatacattatgtctcaaatgctcagctaattgcttttaaagaaagagatatatactatggcattgggcccagaacttcatggagcacagttaccagggacctggtcactgacctcaggaaaggagtgggtctttcaaacacaaaagctgtcaagccaaccaaaataatgcccaagaaggtggttaggttgattgcaaaaggtaagggattcctcgacaacattaccatctctaccacagcccacatggctgcattttttgctgctagtgattggctagtaaggaaccaggatgagaaaggtggctggccaattatggtgacccgtaagttaggggaagggttcaagtctttagagccaggatggtattctgccatggcccaagggcaagccatttctacattagtcagggcctatctgttaacaaaagaccatatattcctcaattcagctttaagggcaacagccccttataagtttctatctgagcagcatggagttaaagctgtgtttatgaataaacatgactggtatgaagaatatccaaccacacctagctcttttgttttaaatggctttatgtattctttaattgggctgtatgacttaaaagaaactgcaggggaaaaactcggaaaagaagcaaggtccttgtatgagcgtggcatggaatctcttaaagccatgctgcccttgtatgacactggctcaggaaccatctatgacctccgtcacttcatgcttggcatcgctcctaacctggctcgctgggactatcataccacccacatcaatcagttgcagctactcagtaccattgatgagtccccaatcttcaaagaatttgtcaagaggtggaaaagctaccttaaaggcagcagggcaaagcacaactagagctcacaaccaaaactgcacttcagcctctgctgtacacagaaactacaggctctgtctcaggagagcataggcacattttaaaaggttatgtactaggtttttgtggattctatcaaagtgataagtgatccttaaaaccagccttctaaaataattgcattccatgggttgggtatttagaaatgtaggtggcatttagaacacaatgtttaatcaatgggctgaacaaagatgcttcactttgccttgcccatcaccctatacagtttcgcagatagtctagtcactctatgtgagaaagataatggtaagtagttgctactggccaactgtctagcacttacctgaaaacttagtatggagctcttttaaaatgtgattatttatatttatgttgaaagcggactttaaaaaaaataatgtgctgtaacacagtaaatatgtacttgtagcctggatagcagactgtgttcaactttttaaaaagatgtttcctttctaaagattaatttcttgggagcaaatgagtatttgttgcatttgttcaatttgttgtatatggtgaatatttaattatggttttcttgaaacgtgtaaattaaaaacacaatcagtgttcaggcttcagttatataatgtaagcacaactaaaatgaaacttgttgactgcacaagaaattacaaaaatgtttctgttttgaaacttgatctacaatcagtaaaagtttgataatcagtatatcccttcccaacccccattgtgacagtttctttttgtcactgtctagaattttgtattttatttcagactataccttggagttttgtatattttgagagagatatttttgggacattattttggaaacttattacaaatctaaatttggaaaggagctagtagctttaaggccaccaccatattttacttttttaggatttttccccctttaaataaaaatattagatcaaatactatatgcaagaaatcatagcaaagtttttttttcctaccaagatcattcttgatcatcagcttcccaaactagtaagtctgtgcatcattgggtgtttttttttaatttaattttaaattatcccagctattagatagaagggatgttactgcacttatgtgtaatcagatctttatttaggtatacatatcctcctataccgcacataaatagatttcagagcccccatacaatgggcagtgtctgctatagggcttcaggcattaaataaaaccgagggttgttgattttgctgtgacagtacactaaatcaatactatatcttatacagtttgaaaatatgataccctacactttcaggggaccgagtctgacaaacacaatacatttatctgtgacctatatcaagtacacatttaggagccaggtaggttacctgcttacacactatattttaattgaattcaaactatcaagcactacttagaaactggaaaacatatatatgttagcatcaaagggggcagaagcaaagaagatacagatctgcactgaagacattagactggccatagaaaagtaagcttgaactcccaattgatgtgaccacactcttcttaattttgttcacagtaaaaacacttttttgagttattaggcttacccctagcttttgacctttgcatttcatatatgttagatgtctcagcaagaatatctggtctcccctaatttttattcccagtgccgatgttcaaaataaactttctccagtctgggaaccttttttacttccccatatttgttattatttagaatggttcatacgtctgctttgtttgcatactggtcttcagattatgagactcgatgataacagtatggtactgcttctgtgacaaatatcgtgccttaacaatgtggctgtccttttccactgaagaaggaaagacgttttgatctagaaatagcgttgtgatttccttgctgttggttttacactgccttccacattgcaacagcaagttgatttcttgtgatcccagaattttctaagaggatgagttgaatctatagcagcattgtcagtacagaccagtggttctcaaactttaaaatgcctcagcatcacttgggagcttattgaaatgcagatcccagagtcagtaaatctgcctgtgaagtatgatagtctgcatttgtaatgagcattcaagtgattctgatgcaggtgagctgggggcatacagggaggaacactgccctggactatccattgcatttttgcctctaaacaactacagaattttctagggttttaaattatgtaaaatgtttacttattctgagcttagagagaatggggagggtatttttaaattttattgttttatttctttaagtttttctttgctttaagattataggtattaggtttgtttttgtttttccacttatcttgagttcactttgatgttaaatctattgctacttcagttgtaaaaccagccaaaagtttctggatgaaggtcaagtttgaccttttaggagttattgtacataaaggcttcatccacgaaccatccagcgcacagaagcaagtgcaaaaatgacacaagcacaactctccagacgtggctccttctcctttctcagtgcagactctcactgaaagctgctattttcatcctccttgtggttgcttttcttgtttctcttccattgtacatgtgggttatataccatatgttaaatatgcaataaagtgtttacaggatgcccttctgaagggtagtcctttgtaaagctgtacagactttgcagtttaagcacaatgtgcacatgttagttttatatacagcaaaacttgattttttgcagatggaaaggtattttgtttctatacaaagtaaatggattgtttgtgcttaatgtaaagccgctttataaaactgtaaaataaagtttttttcttaaaaagaatatacctggatatttctctttcttctcaaattattctaaggttatt

SEQ ID NO: 461967 - DNA, 4128 bp, Homo sapiens
cggtcagggttttcaaggatgaattgcaattcaatttcaaatacaaaagtgcttttattctaaccagtctttgttggtatattctcccctacagaaaccagtgaaggtgtatccttgcaactgggaaacacaaaagattttattatttcatttgacctcaagttcttgacaaatggaagtgtgtccgtggttctagagaccacagaaaagaatcagctcttcactatacattatgtctcaaatgctcagctaattgcttttaaagaaagagatatatactatggcattgggcccagaacttcatggagcacagttaccagggacctggtcactgacctcaggaaaggagtgggtctttcaaacacaaaagctgtcaagccaaccaaaataatgcccaagaaggtggttaggttgattgcaaaaggtaagggattcctcgacaacattaccatctctaccacagcccacatggctgcattttttgctgctagtgattggctagtaaggaaccaggatgagaaaggtggctggccaattatggtgacccgtaagttaggggaagggttcaagtctttagagccaggatggtattctgccatggcccaagggcaagccatttctacattagtcagggcctatctgttaacaaaagaccatatattcctcaattcagctttaagggcaacagccccttataagtttctatctgagcagcatggagttaaagctgtgtttatgaataaacatgactggtatgaagaatatccaaccacacctagctcttttgttttaaatggctttatgtattctttaattgggctgtatgacttaaaagaaactgcaggggaaaaactcggaaaagaagcaaggtccttgtatgagcgtggcatggaatctcttaaagccatgctgcccttgtatgacactggctcaggaaccatctatgacctccgtcacttcatgcttggcatcgctcctaacctggctcgctgggactatcataccacccacatcaatcagttgcagctactcagtaccattgatgagtccccaatcttcaaagaatttgtcaagaggtggaaaagctaccttaaaggcagcagggcaaagcacaactagagctcacaaccaaaactgcacttcagcctctgctgtacacagaaactacaggctctgtctcaggagagcataggcacattttaaaaggttatgtactaggtttttgtggattctatcaaagtgataagtgatccttaaaaccagccttctaaaataattgcattccatgggttgggtatttagaaatgtaggtggcatttagaacacaatgtttaatcaatgggctgaacaaagatgcttcactttgccttgcccatcaccctatacagtttcgcagatagtctagtcactctatgtgagaaagataatggtaagtagttgctactggccaactgtctagcacttacctgaaaacttagtatggagctcttttaaaatgtgattatttatatttatgttgaaagcggactttaaaaaaaataatgtgctgtaacacagtaaatatgtacttgtagcctggatagcagactgtgttcaactttttaaaaagatgtttcctttctaaagattaatttcttgggagcaaatgagtatttgttgcatttgttcaatttgttgtatatggtgaatatttaattatggttttcttgaaacgtgtaaattaaaaacacaatcagtgttcaggcttcagttatataatgtaagcacaactaaaatgaaacttgttgactgcacaagaaattacaaaaatgtttctgttttgaaacttgatctacaatcagtaaaagtttgataatcagtatatcccttcccaacccccattgtgacagtttctttttgtcactgtctagaattttgtattttatttcagactataccttggagttttgtatattttgagagagatatttttgggacattattttggaaacttattacaaatctaaatttggaaaggagctagtagctttaaggccaccaccatattttacttttttaggatttttccccctttaaataaaaatattagatcaaatactatatgcaagaaatcatagcaaagtttttttttcctaccaagatcattcttgatcatcagcttcccaaactagtaagtctgtgcatcattgggtgtttttttttaatttaattttaaattatcccagctattagatagaagggatgttactgcacttatgtgtaatcagatctttatttaggtatacatatcctcctataccgcacataaatagatttcagagcccccatacaatgggcagtgtctgctatagggcttcaggcattaaataaaaccgagggttgttgattttgctgtgacagtacactaaatcaatactatatcttatacagtttgaaaatatgataccctacactttcaggggaccgagtctgacaaacacaatacatttatctgtgacctatatcaagtacacatttaggagccaggtaggttacctgcttacacactatattttaattgaattcaaactatcaagcactacttagaaactggaaaacatatatatgttagcatcaaagggggcagaagcaaagaagatacagatctgcactgaagacattagactggccatagaaaagtaagcttgaactcccaattgatgtgaccacactcttcttaattttgttcacagtaaaaacacttttttgagttattaggcttacccctagcttttgacctttgcatttcatatatgttagatgtctcagcaagaatatctggtctcccctaatttttattcccagtgccgatgttcaaaataaactttctccagtctgggaaccttttttacttccccatatttgttattatttagaatggttcatacgtctgctttgtttgcatactggtcttcagattatgagactcgatgataacagtatggtactgcttctgtgacaaatatcgtgccttaacaatgtggctgtccttttccactgaagaaggaaagacgttttgatctagaaatagcgttgtgatttccttgctgttggttttacactgccttccacattgcaacagcaagttgatttcttgtgatcccagaattttctaagaggatgagttgaatctatagcagcattgtcagtacagaccagtggttctcaaactttaaaatgcctcagcatcacttgggagcttattgaaatgcagatcccagagtcagtaaatctgcctgtgaagtatgatagtctgcatttgtaatgagcattcaagtgattctgatgcaggtgagctgggggcatacagggaggaacactgccctggactatccattgcatttttgcctctaaacaactacagaattttctagggttttaaattatgtaaaatgtttacttattctgagcttagagagaatggggagggtatttttaaattttattgttttatttctttaagtttttctttgctttaagattataggtattaggtttgtttttgtttttccacttatcttgagttcactttgatgttaaatctattgctacttcagttgtaaaaccagccaaaagtttctggatgaaggtcaagtttgaccttttaggagttattgtacataaaggcttcatccacgaaccatccagcgcacagaagcaagtgcaaaaatgacacaagcacaactctccagacgtggctccttctcctttctcagtgcagactctcactgaaagctgctattttcatcctccttgtggttgcttttcttgtttctcttccattgtacatgtgggttatataccatatgttaaatatgcaataaagtgtttacaggatgcccttctgaagggtagtcctttgtaaagctgtacagactttgcagtttaagcacaatgtgcacatgttagttttatatacagcaaaacttgattttttgcagatggaaaggtattttgtttctatacaaagtaaatggattgtttgtgcttaatgtaaagccgctttataaaactgtaaaataaagtttttttcttaaaaagaatatacctggatatttctctttcttctcaaattattctaaggttatt

SEQ ID NO: 461968 - DNA, 3858 bp, Homo sapiens
tgctagtgtgtatagactaatagaacccatttagctttgaacatgttcaacttctcatctttgttcttcttcatatactataggctgtttgctgtggtttagtcaaaaagccatgtagaatgcctgccttttgaagaccacttttaaggtgtctagtaagacagcagcagtattgaaagtttttaaagaatataaccgtgtgtgttggtaacagacagaagaatggaagcattccaggaacttcgtaaaccatcagcacgtttggagtgtgaccattgcagtttcagaggcacagactatgaaaatgtacaaatccatatgggtaccatccatccagaattttgtgatgaaatggatgctggtgggctaggcaaaatgatattttaccagaaaagtgcaaagttatttcactgccataaatgcttcttcaccagcaagatgtactctaatgtatactatcacatcacatccaaacatgcatccccagacaaatggaatgataaaccaaaaaatcagttgaacaaagaaacagatcctgtgaaaagccctcctcttcctgaacaccagaaaataccctgcaattcagcagaaccaaaatccatacctgccctttcaatggaaacacagaaacttggttcagttttgtctccagaatcgccaaaacctactcctcttactcccctggagcctcagaaacctggctctgttgtttctcctgagctacagacacctcttccttctcctgagccttcaaaacctgcctctgtttcttctcctgaacctccaaaatcagtccctgtttgtgagtctcagaaacttgcccctgttccttctccagaaccacagaaacctgcccctgtatctcctgagtcagtaaaggctactcttagtaatcccaaaccccagaagcagtctcatttcccggaaacattggggccaccttcagcctcatctccagagtcaccagttctagctgcttccccagaaccttggggaccatccccagctgcatctccagaatctcggaagtcagcccggactacctcccctgagccaaggaagccatccccttcagagtctcctgaaccttggaagccgttccctgctgtctccccagagcctaggagaccagcccccgctgtgtcaccaggctcttggaaaccagggccacctgggtcccctaggccttggaaatccaatccttcagcatcatcaggaccttggaagccagctaaacctgctccatctgtgtctcctggaccttggaaaccaattccttctgtatctcctggaccttggaaaccaactccatctgtgtcttctgcatcctggaaatcttcatcagtctcacccagctcctggaagtctccccctgcatctcctgagtcatggaagtctggcccaccagaactccgaaagacagctcccacgttgtctcctgaacattggaaggcagttcccccagtgtctccagagcttcgcaaacccggcccaccactatccccagagatccgtagtccagcaggatctccagagctcagaaaaccctcagggtcaccagatctttggaagctttctcctgatcagcggaaaacttctcctgcttcacttgatttccctgagtcccagaaaagttcccgtggtggttctcctgatctctggaagtcttccttttttattgagcctcagaaacctgtcttccctgagacccgaaaaccaggtccttctgggccatctgagtcccccaaagcagcctcagatatctggaagcctgttctctctatcgatactgagcctagaaaacctgccctgtttcccgagcctgccaaaacagcccctcctgcttctccagaagcacgcaaacgtgccctttttccagagccccggaagcatgcccttttccctgaactccccaaatctgctctattctcagaatcacagaaggctgttgagcttggtgatgaactacaaatagatgccatagatgatcaaaaatgtgatattttggttcaggaagaacttctagcttcacctaagaaactcttagaagatactttatttccttcctcaaagaagctcaagaaagacaaccaagagagctcagacgctgagcttagtagtagtgagtacataaaaacagatttggatgcgatggatattaagggccaggaatcaagcagtgatcaagagcaggttgatgtggaatccattgattttagcaaagagaacaaaatggacatgactagtccagagcagtctagaaatgtgctacagtttactgaagaaaaagaagcttttatctctgaagaggagattgcaaaatacatgaagcgtggaaaaggaaagtattattgcaaaatttgttgctgtcgtgctatgaaaaaaggtgctgttttgcatcatttggttaataagcataatgttcatagcccttacaaatgcacaatctgtggaaaggcttttcttttggaatctctccttaaaaatcatgtagcagcccatgggcaaagtttacttaaatgtccacgttgtaattttgaatcaaatttcccaagaggttttaagaaacatttaactcattgtcaaagccggcataatgaagaggcaaataaaaagctaatggaagctcttgaaccgccactggaggagcagcaaatttgataacacagtgtgaatatttgttctacaaaggtgtttgttggaaccattctttgtaagtatagcttatcagatagcatagttggatcagtagatgacatgtatggtgtaccgtgtttcactgtctcagttgtgttactaagaatgagcatttgatcatttttttctggtctctgtctatgtgactatcttgtaagtcaataaatttctgtatagtccagatggattaaacttctcatttcttttaaatatgtatgaataataatacaaggaagtaggcattccatttaataatcaagagcaagttgtactcaaagcattcagttaaagtgtatctgtgtgtggaactaatttcagacaatagaaaatattagttgaaatgtttaagaattaggcatgaaaaataaatttgagaaattttgtttccttacatgtatttttaaatcataagagttattttctatctgatgtaaaattagtttataaatcttaatcagcttctagatgtttattagcttttatgtcatgaaatgttggagtctcagggttgctgattttctgctaatgggaaaaattgactaagtctttaaaatagtttgcagccttctcccacaggagacaagtgaaagataagtgtgattttagatctttcttgtccatagttgttttcagtggagtcttccattctgtatcttaccctaagatctggttcttccctccccatccccaccccccacccaccgcctgccagctcacactaatagatgattcttaattgccaaatgtgttagagtttgtatatcctactcctgggccttacatgtcgcctgttggggcttaagaccaggttgataagtaggaactgaaagtcttccagattcacagtagaaaattttatagacatttctgttaaagaaatatatcgattttatgtttttcaattatgttactgtaaataccttgtacctgttcatggattattttattctaaaatattttgtcaaatgtgtatcaaccaaattaaaaagaaaggttttcatgtcagcaacatcttcatgtgtgttttcttttgtgtagttttcattgtatgatatacagatccattatttccatgttttcaacatagttttcttatctggagcagcattttcttagctgtgttttctccaagttctgtggtcaagtaagttaggggaatgc

SEQ ID NO: 461969 - DNA, 1879 bp, Homo sapiens
  misc_feature (3)..(6): n is a, c, g, or t
  misc_feature (19)..(19): n is a, c, g, or t
ttnnnncaagcttggcacnaggccagcagaagcacgcaaacgtgccctttttccagagccccggaagcatgcccttttccctgaactccccaaatctgctctattctcagaatcacagaaggctgttgagcttggtgatgaactacaaatagatgccatagatgatcaaaaatgtgatattttggttcaggaagaacttctagcttcacctaagaaactcttagaagatactttatttccttcctcaaagaagctcaagaaagacaaccaagagagctcagacgctgagcttagtagtagtgagtacataaaaacagatttggatgcgatggatattaagggccaggaatcaagcagtgatcaagagcaggttgatgtggaatccattgattttagcaaagagaacaaaatggacatgactagtccagagcagtctagaaatgtgctacagtttactgaagaaaaagaagcttttatctctgaagaggagattgcaaaatacatgaagcgtggaaaaggaaagtattattgcaaaatttgttgctgtcgtgctatgaaaaaaggtgctgttttgcatcatttggttaataagcataatgttcatagcccttacaaatgcacaatctgtggaaaggcttttcttttggaatctctccttaaaaatcatgtagcagcccatgggcaaagtttacttaaatgtccacgttgtaattttgaatcaaatttcccaagaggttttaagaaacatttaactcattgtcaaagccggcataatgaagaggcaaataaaaagctaatggaagctcttgaaccgccactggaggagcagcaaatttgataacacagtgtgaatatttgttctacaaaggtgtttgttggaaccattctttgtaagtatagcttatcagatagcatagttggatcagtagatgacatgtatggtgtaccgtgtttcactgtctcagttgtgttactaagaatgagcatttgatcatttttttctggtctctgtctatgtgactatcttgtaagtcaataaatttctgtatagtccagatggattaaacttctcatttcttttaaatatgtatgaataataatacaaggaagtaggcattccatttaataatcaagagcaagttgtactcaaagcattcagttaaagtgtatctgtgtgtggaactaatttcagacaatagaaaatattagttgaaatgtttaagaattaggcatgaaaaataaatttgagaaattttgtttccttacatgtatttttaaatcataagagttattttctatctgatgtaaaattagtttataaatcttaatcagcttctagatgtttattagcttttatgtcatgaaatgttggagtctcagggttgctgattttctgctaatgggaaaaattgactaagtctttaaaatagtttgcagccttctcccacaggagacaagtgaaagataagtgtgattttagatctttcttgtccatagttgttttcagtggagtcttccattctgtatcttaccctaagatctggttcttccctccccatccccaccccccacccaccgcctgccagctcacactaatagatgattcttaattgccaaatgtgttagagtttgtatatcctactcctgggccttacatgtcgcctgttggggcttaagaccaggttgataagtaggaactgaaagtcttccagattcacagtagaaaattttatagacatttctgttaaagaaatatatcgattttatgtttttcaattatgttactgtaaataccttgtacctgttcatggattattttattctaaaatattttgtcaaatgtgtatcaaccaaattaaaaagaaaggttttcatgtca

SEQ ID NO: 461970 - DNA, 1271 bp, Homo sapiens
cggacgcgtgggtcgacccacgcgtcgcttttcttttggaatctctccttaaaaatcatgtagcagcccatgggcaaagtttacttaaatgtccacgttgtaattttgaatcaaatttcccaagaggttttaagaaacatttaactcattgtcaaagccggcataatgaagaggcaaataaaaagctaatggaagctcttgaaccgccactggaggagcagcaaatttgataacacagtgtgaatatttgttctacaaaggtgtttgttggaaccattctttgtaagtatagcttatcagatagcatagttggatcagtagatgacatgtatggtgtaccgtgtttcactgtctcagttgtgttactaagaatgagcatttgatcatttttttctggtctctgtctatgtgactatcttgtaagtcaataaatttctgtatagtccagatggattaaacttctcatttcttttaaatatgtatgaataataatacaaggaagtaggcattccatttaataatcaagagcaagttgtactcaaagcattcagttaaagtgtatctgtgtgtggaactaatttcagacaatagaaaatattagttgaaatgtttaagaattaggcatgaaaaataaatttgagaaattttgtttccttacatgtatttttaaatcataagagttattttctatctgatgtaaaattagtttataaatcttaatcagcttctagatgtttattagcttttatgtcatgaaatgttggagtctcagggttgctgattttctgctaatgggaaaaattgactaagtctttaaaatagtttgcagccttctcccacaggagacaagtgaaagataagtgtgattttagatctttcttgtccatagttgttttcagtggagtcttccattctgtatcttaccctaagatctggttcttccctccccatccccaccccccacccaccgcctgccagctcacactaatagatgattcttaattgccaaatgtgttagagtttgtatatcctactcctgggccttacatgtcgcctgttggggcttaagaccaggttgataagtaggaactgaaagtcttccagattcacagtagaaaattttatagacatttctgttaaagaaatatatcgattttatgtttttcaattatgttactgtaaataccttgtacctgttcatggattattttattctaaaatattttgtcaaatgtgtatcaaccaaattaaaaagaaaggttttcatgtca

SEQ ID NO: 461971 - DNA, 2201 bp, Homo sapiens
  misc_feature (12)..(13): n is a, c, g, or t
  misc_feature (73)..(73): n is a, c, g, or t
  misc_feature (151)..(151): n is a, c, g, or t
agcccgcgcganngctagttttgcccacgcacttttggcacagccgcgccacgcgatcggcgatctgattggnccgcgcgggagggcgcgcggcgccaaacttgcttcccgtcagcccccgcccgtcccgcgggagcgcgcacgctcgcgnacccggatcccggctcctgcatccagtcgccattcgggaggccgctgcgctgcagggcctcgcggagcgcccgcgaccgcgagccgggccctccgcgcggtccatcgcccactggacgccgcccgcggccggaccggttcaacttctcatctttgttcttcttcatatactataggctgtttgctgtggtttagtcaaaaagccatgtagaatgcctgccttttgaagaccacttttaaggtgtctagtaagacagcagcagtattgaaagtttttaaagaatataaccgtgtgtgttggtaacagacagaagaatggaagcattccaggaacttcgtaaaccatcagcacgtttggagtgtgaccattgcagtttcagaggcacagactatgaaaatgtacaaatccatatgggtaccatccatccagaattttgtgatgaaatggatgctggtgggctaggcaaaatgatattttaccagaaaagtgcaaagttatttcactgccataaatgcttcttcaccagcaagatgtactctaatgtatactatcacatcacatccaaacatgcatccccagacaaatggaatgataaaccaaaaaatcagttgaacaaagaaacagatcctgtgaaaagccctcctcttcctgaacaccagaaaataccctgcaattcagcagaaccaaaatccatacctgccctttcaatggaaacacagaaacttggttcagttttgtctccagaatcgccaaaacctactcctcttactcccctggagcctcagaaacctggctctgttgtttctcctgagctacagacacctcttccttctcctgagccttcaaaacctgcctctgtttcttctcctgaacctccaaaatcagtccctgtttgtgagtctcagaaacttgcccctgttccttctccagaaccacagaaacctgcccctgtatctcctgagtcagtaaaggctactcttagtaatcccaaaccccagaagcagtctcatttcccggaaacattggggccaccttcagcctcatctccagagtcaccagttctagctgcttccccagaaccttggggaccatccccagctgcatctccagaatctcggaagtcagcccggactacctcccctgagccaaggaagccatccccttcagagtctcctgaaccttggaagccgttccctgctgtctccccagagcctaggagaccagcccccgctgtgtcaccaggctcttggaaaccagggccacctgggtcccctaggccttggaaatccaatccttcagcatcatcaggaccttggaagccagctaaacctgctccatctgtgtctcctggaccttggaaaccaattccttctgtatctcctggaccttggaaaccaactccatctgtgtcttctgcatcctggaaatcttcatcagtctcacccagctcctggaagtctccccctgcatctcctgagtcatggaagtctggcccaccagaactccgaaagacagctcccacgttgtctcctgaacattggaaggcagttcccccagtgtctccagagcttcgcaaacccggcccaccactatccccagagatccgtagtccagcaggatctccagagctcagaaaaccctcagggtcaccagatctttggaagctttctcctgatcagcggaaaacttctcctgcttcacttgatttccctgagtcccagaaaagttcccgtggtggttctcctgatctctggaagtcttccttttttattgagcctcagaaacctgtcttccctgagacccgaaaaccaggtccttctgggccatctgagtcccccaaagcagcctcagatatctggaagcctgttctctctatcgatactgagcctagaaaacctgccctgtttcccgagcctgccaaaacagcccctcctgcttctcatctcgaggagataagcaggagtgagagttgatattaaaacatggaggctgagcacacagctctttcctctgccccgcgccacctggagagagccgcgtcctgggtacg

SEQ ID NO: 461972 - DNA, 3945 bp, Homo sapiens
  misc_feature (12)..(13): n is a, c, g, or t
  misc_feature (73)..(73): n is a, c, g, or t
  misc_feature (151)..(151): n is a, c, g, or t
agcccgcgcganngctagttttgcccacgcacttttggcacagccgcgccacgcgatcggcgatctgattggnccgcgcgggagggcgcgcggcgccaaacttgcttcccgtcagcccccgcccgtcccgcgggagcgcgcacgctcgcgnacccggatcccggctcctgcatccagtcgccattcgggaggccgctgcgctgcagggcctcgcggagcgcccgcgaccgcgagccgggccctccgcgcggtccatcgcccactggacgccgcccgcggccggaccggttcaacttctcatctttgttcttcttcatatactataggctgtttgctgtggtttagtcaaaaagccatgtagaatgcctgccttttgaagaccacttttaaggtgtctagtaagacagcagcagtattgaaagtttttaaagaatataaccgtgtgtgttggtaacagacagaagaatggaagcattccaggaacttcgtaaaccatcagcacgtttggagtgtgaccattgcagtttcagaggcacagactatgaaaatgtacaaatccatatgggtaccatccatccagaattttgtgatgaaatggatgctggtgggctaggcaaaatgatattttaccagaaaagtgcaaagttatttcactgccataaatgcttcttcaccagcaagatgtactctaatgtatactatcacatcacatccaaacatgcatccccagacaaatggaatgataaaccaaaaaatcagttgaacaaagaaacagatcctgtgaaaagccctcctcttcctgaacaccagaaaataccctgcaattcagcagaaccaaaatccatacctgccctttcaatggaaacacagaaacttggttcagttttgtctccagaatcgccaaaacctactcctcttactcccctggagcctcagaaacctggctctgttgtttctcctgagctacagacacctcttccttctcctgagccttcaaaacctgcctctgtttcttctcctgaacctccaaaatcagtccctgtttgtgagtctcagaaacttgcccctgttccttctccagaaccacagaaacctgcccctgtatctcctgagtcagtaaaggctactcttagtaatcccaaaccccagaagcagtctcatttcccggaaacattggggccaccttcagcctcatctccagagtcaccagttctagctgcttccccagaaccttggggaccatccccagctgcatctccagaatctcggaagtcagcccggactacctcccctgagccaaggaagccatccccttcagagtctcctgaaccttggaagccgttccctgctgtctccccagagcctaggagaccagcccccgctgtgtcaccaggctcttggaaaccagggccacctgggtcccctaggccttggaaatccaatccttcagcatcatcaggaccttggaagccagctaaacctgctccatctgtgtctcctggaccttggaaaccaattccttctgtatctcctggaccttggaaaccaactccatctgtgtcttctgcatcctggaaatcttcatcagtctcacccagctcctggaagtctccccctgcatctcctgagtcatggaagtctggcccaccagaactccgaaagacagctcccacgttgtctcctgaacattggaaggcagttcccccagtgtctccagagcttcgcaaacccggcccaccactatccccagagatccgtagtccagcaggatctccagagctcagaaaaccctcagggtcaccagatctttggaagctttctcctgatcagcggaaaacttctcctgcttcacttgatttccctgagtcccagaaaagttcccgtggtggttctcctgatctctggaagtcttccttttttattgagcctcagaaacctgtcttccctgagacccgaaaaccaggtccttctgggccatctgagtcccccaaagcagcctcagatatctggaagcctgttctctctatcgatactgagcctagaaaacctgccctgtttcccgagcctgccaaaacagcccctcctgcttctccagaagcacgcaaacgtgccctttttccagagccccggaagcatgcccttttccctgaactccccaaatctgctctattctcagaatcacagaaggctgttgagcttggtgatgaactacaaatagatgccatagatgatcaaaaatgtgatattttggttcaggaagaacttctagcttcacctaagaaactcttagaagatactttatttccttcctcaaagaagctcaagaaagacaaccaagagagctcagacgctgagcttagtagtagtgagtacataaaaacagatttggatgcgatggatattaagggccaggaatcaagcagtgatcaagagcaggttgatgtggaatccattgattttagcaaagagaacaaaatggacatgactagtccagagcagtctagaaatgtgctacagtttactgaagaaaaagaagcttttatctctgaagaggagattgcaaaatacatgaagcgtggaaaaggaaagtattattgcaaaatttgttgctgtcgtgctatgaaaaaaggtgctgttttgcatcatttggttaataagcataatgttcatagcccttacaaatgcacaatctgtggaaaggcttttcttttggaatctctccttaaaaatcatgtagcagcccatgggcaaagtttacttaaatgtccacgttgtaattttgaatcaaatttcccaagaggttttaagaaacatttaactcattgtcaaagccggcataatgaagaggcaaataaaaagctaatggaagctcttgaaccgccactggaggagcagcaaatttgataacacagtgtgaatatttgttctacaaaggtgtttgttggaaccattctttgtaagtatagcttatcagatagcatagttggatcagtagatgacatgtatggtgtaccgtgtttcactgtctcagttgtgttactaagaatgagcatttgatcatttttttctggtctctgtctatgtgactatcttgtaagtcaataaatttctgtatagtccagatggattaaacttctcatttcttttaaatatgtatgaataataatacaaggaagtaggcattccatttaataatcaagagcaagttgtactcaaagcattcagttaaagtgtatctgtgtgtggaactaatttcagacaatagaaaatattagttgaaatgtttaagaattaggcatgaaaaataaatttgagaaattttgtttccttacatgtatttttaaatcataagagttattttctatctgatgtaaaattagtttataaatcttaatcagcttctagatgtttattagcttttatgtcatgaaatgttggagtctcagggttgctgattttctgctaatgggaaaaattgactaagtctttaaaatagtttgcagccttctcccacaggagacaagtgaaagataagtgtgattttagatctttcttgtccatagttgttttcagtggagtcttccattctgtatcttaccctaagatctggttcttccctccccatccccaccccccacccaccgcctgccagctcacactaatagatgattcttaattgccaaatgtgttagagtttgtatatcctactcctgggccttacatgtcgcctgttggggcttaagaccaggttgataagtaggaactgaaagtcttccagattcacagtagaaaattttatagacatttctgttaaagaaatatatcgattttatgtttttcaattatgttactgtaaataccttgtacctgttcatggattattttattctaaaatattttgtcaaatgtgtatcaaccaaattaaaaagaaaggttttcatgtca

SEQ ID NO: 461973 - DNA, 2145 bp, Homo sapiens
actttcaacctacttaggtccttaaaatgaggcttggaacgcggagcgcattgtgggcctgtcgtgggtggcgccagcagcacatgcatgcctggctcacagagcagcctttgggtgttcttttcccagaggagctctacggtgactttgaagacttggaaacaggggacatgcacaagggaaaatcgggccccgacactcagaatgaagatatagagaaacaaggaagaaattgaccccgacgaagaagaaagtgccaagaaaaagcatttggataagaagagaaaattgaaggagatgtttgatgcggaatatgatgaaggagaaagcacatattttgatgatcttaaaggagaaatgcagaaagaagcacagctgaatcacgtagaatttgaagatcaagatgatgaagccagagttcagtatgatggttttcgacctgggatgtacgtccgcgttgagattgaaaatgttccctgtgaatttgtgcagaactttgacccccattaccccattatcctgggtggcttgggcaacagcgagggaaatgttggacacgtgcagatgcgtctgaagaaacatcgctggtataagaaaatcctcaagtcccaagatccaatcatattttctgtagggtggaggaggtttcagaccatcctgctctattatattgaagaccacaatggaagacaaaggcttctaaagtataccccacagcacatgcattgtggagcagccttttggggtaaaatatgattacaataacttgcctattgccgagattaaactttacaggctgcgttattttagctttgtgcttttcctttcataaaattccactcctaagatgtttctgttttctgggagcggggaggtggtttggagtatatatgtaaatctatatccaaatctaaatgtccgtatccagtatgttaaactagaatctaaaatttctggtttgctatatttctttttttccttttcctttaagaccctatcactccacagggaactggtttcttggcaatacagtctgtcagtggcataatggtaactatcttggacaatttcttttacagattggtttgagaaatatatcctgaatgtgggttattatgtacatgagactttaagttgaaaattactcatttttattattataaagtaaatttccctttgcttttaatctttgtacatccttttcagtagggtgtgggattagaggaggggaggtggaagaattataatggtacatttcctatttttgtgcatcttttgcatttatttatctaagcaagtatttaagcagtgctcaccgtgtgctaagcactatatgaggttatgaggagccatcagagaccacccagacacaagactccctgcagctgtgctgggctgccacaggagttgtccttgatctggataaatccataaaaattgtgaagaaattaaagctaactggttttccatataaaattttcaagaacacttcatttattaagatattgtcttcatgcgaacttggtatcctgtttccatcccagccttctataacccagtaacatctttgttgaaaccagtgggtgagaaagacacctggtcaggaatgtggaccacgggccacctcgggctcgcccatggtgtcagactaaagacaaacaaggactctctgtataaggtactggtcgtgtgtgtgttagtggagatgaagcctgtgccctacagacagggagtcacgcagacacttttctataatttcttacgtactttgaatgttcaagtataaagtctaatgttaaatttgattgaacaattgtatatttgtgggatattttggaatggaacaccaaaaaatggtaatagtggttctttctggattgaagacaaacttttcttttttaaaataaattttattttatatatttgaggttgacaacatgatcttaaaggataaatatagatagatgtttgcatcagtatttaatttattggagaagttgacctgtagtttttgtttggtgtgtgtgtgtgtgtgtgtgtgtgtgtgtgtgtgtgtgtgtgtgtgttttggtttggcttaggtattaaggtgatactggcctggtaaaatgtgtttggaattatttcctctcactctgtttttgc

SEQ ID NO: 461974 - DNA, 2123 bp, Homo sapiens
cacagacagtggtatctgtgagcagctctgtggactcaaaggttttctccctgagaggcgtaacccaggccagctgattcatcagaatcaggaaactgggcatctctgtggtccctgagcatcccaggaggccgactgtacagagacctctggtccctgaccccagtctgcctccacatccctggaatagcccatcatgggcccttcaaccttggcaggtggacaccattcaacatgctggggcaggatggacatggtagaggatgtggatactttgcaggagtgagaggacatcattatgaagtatgagaacgtacagggacaccgagctgggctgccagcagacacggggcctaaagcctgttggaatctacagcagcactgatcgctttgggattctgcagctgagccctgagctggatgggacagagccagtcctttctgggggtcggctcccagaccgagatggctccaaaccttgtgcaagtcctcagctctgcctgggctgcattacagtgagaaggaactgcccggtcagagcccgggaggtgaagcaaatgcggcaggagatgagatgaaagagcaagtggatggaaatgctgggagaatgggagacatatcagaacagcaaaaaagtaatgtgtggagggagaggcccccagaaccactctctgcagagacaggggacaggcacccatggctgtggcctggcaccgtcagcctctcagagggcaggtggcacacagtgctcacccagaggaccgcaggcctggttgccagctttactgcccgttcatgcaagcatcaccttgctgagagggaatctgaatctagggctggggatgcctcctgctgacccgaaggaaagaaaaggtccagatcagagttcaggactctgagtgcccacacactctttcaatcctgcgaagggagaccctgtcccagcttgacctcacctttaccgaggaatcatggggccaaaaccaaagatttccaggatcctcgggctctggtcctggctggggtcatcccatggcctgtgacaccagatcgttttctgcccacagctaattgattgagtgtataagggcattcccatgaacatccagggccaggtgtggtcagtcctcctgaacattcaggaaatcaagatgaaaaatcccagaaaataccaggtcatgaaggagaagggcaagagatcctctgaacacatccaccaggtctacctggacatgagctggacactagggaaccacatcttcttcagggatcgatatggagtcaagagcccggggctgacccccagagcccaagtcagacacctttcatcttcatcagcagaaggcatctcatcttccccaaggccgccctctgcccaggctccagcttcccttggtacccacaaatgggccaaccaagcccagatggcagcatctccccatcccgtgtcccctggcccggccccacttccaggagacgaccacgaagcccagcacccaccctattctggccaccccctgtccccaaatggcgggacagttcaggggctccaagaccatcaggagcatgtggtacccatgtaacaacccaagaccatgtgtcatctgatctctctcgggctcaccccgtgcctgtgggacatatatttgctggaaggggaacagatgttgatgctgataacaagcactgcctttaaggttcagaggagcaagtccacgtgtgcccagtggggcctggggagcactggggtcagaccccaactagcccaagggcagcttcctcacactgttctcatgattctctgttctggcccagagggaggtctggccaggtgggctgggcagggcacagtgacaccaagcccatccctcacatgacccagatgaaagtcaggagtgtgatgagcacttccctgcccaggctgcctccccagccacagccttctgtgcacatctggacccctggggtggccacaaaaggatctggcactgcccagtgggagactgaagtggtcacggggtgtgggctctgacccttcccagggaactctcctggcctgatacccaccttgtccctagagcgccacatgaagatgtccaggtctggcctgtgggcacgttttc

SEQ ID NO: 461975 - DNA, 1869 bp, Homo sapiens
  misc_feature (25)..(25): n is a, c, g, or t
cttatgtcgggtgctgtgcctgggntcacgtagatctgagaatcgtgcgagacaggcttcaaggccattcggagctcctgtccaaatcggagtctaaaacttggaggctggccctgggccaggccctgcaccaggctttccagactcagcccttcaggagcctgctgtctagccccactctgtgtccagcagggtcaaggccttcagcaaggctgttctcctctctggccctctgttttctcctctgtaagagtgttggctctgcgggtgggttctgggattttcttagagagcagtgtcagatctgtggtgtacgagcaaatagcctgaggggaagccatacagcccactgggctcagctgggagcagggcatcttctcccagggggtgctcgcatcccccagagaccatcatgctaatgctctcaagcattccccaagagcctcttctgtaccaggcccactccaggtgccgtacatgcaaagacaaatcatggtggtccttgctgttaaagagggagatggaggtgaagagtcagccaactactggcatcacggaagggccccccctcctctcggagcccctcacctacaccctgagcccccagtgtgccatctgtggccagcacaactgcagctctggccacagccagctcagcagcactgtcatcttcccaaagggagacaaaggctgctgctcagggccgctacccagaaacctcccttccctcatagttacgttggaacgttctcgggccctgatccttcaccagctaggccgctacagtctggcggagaagatcctccgggacgcggtgcaggtgaactcgacagcccacgaggtctggaacgggctgggcgaggtcctccaagctcagggcaacgatgcggcggctacggagtgcttcctgacagccttggagctggaggccagcagccccgccgtgcccttcaccatcatcccccgcgtgctctgagcaggcgcctgccagcctcacctgccgctcaggcctcagaggccctgccgggcaccagggcttgtgccatcgccccaaggggatgaatctgccacactgaggccagggacgagtgttcagtgggccacagtgaaccaaccaaaccaaccccgaatcatcgctctcgccatgtgcgtttctcttgttttttttgccagcccaatggtagtttctgaacctattgacattgttcaaaatggatcatgtgccatattttgttagttgacatctgagttttcagtaaaatgattatggaattaatcagcaaatgtagaagaatatattcaaagttaaaattcagtggcagcacagattatttttatcagagctgtaaagaaaacaactgtccttttctccccaccacccctcctgccccactttggcccagaaaccaaatgtgaacttcctgtctcccacctcagcactagtccatgccaggacaccagctgacaatttcttggttttactgtcaataattgtaccatgtgatcaattactgtcctcacttagaacaaagcctgagtccgagaatatttatattttaccaatatatgcctgttacaagagaaggaaatatgagttatttaagtttaacttttttatgtgaattcagagtttatttatcgagggaaatatgtacaaagaagcttcaaatggaatatttaccgacattccttatacatgacagacacttggctacatgggaagatgatgttaataataaaatgatttttaaatggactcatagcctgtgtcattcgtaaaagctcaaagacctgagaaaggcttagttcctggggtggggagctgtctgtacctgggggcccactctggacatgtcagcccttgacact

SEQ ID NO: 461976 - DNA, 2217 bp, Homo sapiens
ctttcccaccgtctgtcacagtctggtctgtgccagtttttcaatgtattgactctcatctccaagtcaccctgcattacctgctttgtgataatggagctagacactttaagcatttctcccttgtggggcatgagtgggatcagcatggccattggcatcagtggcatcagctcctccgaggccccaggggggatgaagggcagctcattaggatccaaggcccaaggcaacctgcgccatgatgctctcaccggttttggtgaagaagggggtgacgaagacaaagaagacatcaaaggccagcagggccagcaggaaggaggagcagttcttgagagtgggcagccgcacacggtgcaggacgaacaggcagtaggaaatgcccagtgtgtcctgcaggagccacgcccagcggtcctcattgcggtaggccacccagaagatgatcacggttgcgcacaggctcgccagcagcagcagaggcagcggcagagaggcccagaggctgtgcggaggcctctggccggcccagtagccgcctgcagccactgtgcccacagccaggatgaagatgaccagcatgttgtagtcgatgatgggctctgggggtgcgtacatggccacgcggacgacggcctccccacgagtgtggctgaggatgtccagcatgtcagcatagtggagcatagccacagggatgcactgttggtcactgacccggctcacgatgagcagcccgtgggcaccttggccctgagccagccagcctttcgtgtggaagctgcagttacccctcatgaccatggcagtggtctggcggaggggccgctggctgggggagcggagctgggcctggtggggggaatcctcacccgggcaccagggtgccttggtgccatcatacaggggcaggagtggggcgtggtgcaggtcccgggggagggtgatgtagtcggagctgaacaggatacagtagtccttgctccaattctccgacaccacgtgggccacgccgtactttcccccggccacggtgctgatgaggaggaggaagcccacggggaggaggaagcccaggcacgccatcttcttcagttcctactgcaacatctgcgggcggcagcccaatacccctcccaggggcaggcgtggccctttgtcacagagcagtctggccacctgtcctggaaaccagggccacacctacctagtcataaagctgtgtggtccccagccgagggcgctgctgtggggcacagggtccctctagaatgatgccccccaaccctgggagaccaggggagaggtcatatggaccctgctctctgcccagaccctagtgggtttagaccaggagtcagaacaaggacgggcctgtgatgtgtctgtctatgacgaggaggacaatgtcctaaggaatggagaggaagaaagtgaagggaaccaggtccctggattccatgtggaacagtagcccaggatgtgcactatggactgttacaagagagagacatgatcttccttaaggcattgatttgtcatgagtctctttgttatagccacttaacgttaccttaatacacccacttcatggataagtaaaactgaggcttggagaagcccacattgacacagcaaagaaggctggggctcttgtgctggttaaatggaccttgatgtcttccaaatgttttcatgctggattctgagccactctcctggctgcaactctgaggccgggcagactttccgctggaaagagaactcaaatactggtgagaggtggatttgaagccaggagccccaggttttggctctgcaggtttgcacccagctctgtggtgtatgccctcacaggtcacccaggacctcctgtccaggcttcttcaggccacccatgatggagtagatttgaggaatgaggttttcaaagcagttagtgtgcgggagagtaaccctggggcctccggaaccagaagggagggatttgggggctggagcttggcagtccaggttccattgtcctcatgttctccccactggcctggcctgtcactccagtctctgcataggttgtcacatggcattctccctgtgtgtctctgtgtctcttctcttctttataaagacatagttataatggattagggcccaccctaatgacaccatcttaacttgattatgtctgcaaacaccctacttccaaataaggtc

SEQ ID NO: 461977 - DNA, 1139 bp, Homo sapiens
agcggccgccgagtccgtccacatcgccaggccaggaccttggacagggcccagcacaggggccctggaatgtggactgtctcagtggattcttgtttataggaattagaggaaggtggaagaagctcattccagagtgcaatcaataacagtggaaagaagtccctggagcccagtgcagtggcttgaactgagaatgcactcactggctgttgcagccaagactccagttctcgcctctctttccctgactcccctgtgcccacctttcccctgcaggagtcagaacaaggacgggcctgtgatgtgtctgtctatgacgaggaggacaatgtcctaaggaatggagaggaagaaagtgaagggaaccaggtccctggattccatgtggaacagtagcccaggatgtgcactatggactgttacaagagagagacatgatcttccttaaggcattgatttgtcatgagtctctttgttatagccacttaacgttaccttaatacacccacttcatggataagtaaaactgaggcttggagaagcccacattgacacagcaaagaaggctggggctcttgtgctggttaaatggaccttgatgtcttccaaatgttttcatgctggattctgagccactctcctggctgcaactctgaggccgggcagactttccgctggaaagagaactcaaatactggtgagaggtggatttgaagccaggagccccaggttttggctctgcaggtttgcacccagctctgtggtgtatgccctcacaggtcacccaggacctcctgtccaggcttcttcaggccacccatgatggagtagatttgaggaatgaggttttcaaagcagttagtgtgcgggagagtaaccctggggcctccggaaccagaagggagggatttgggggctggagcttggcagtccaggttccattgtcctcatgttctccccactggcctggcctgtcactccagtctctgcataggttgtcacatggcattctccctgtgtgtctctgtgtctcttctcttctttataaagacatagttataatggattagggcccaccctaatgacaccatcttaacttgattatgtctgcaaacaccctacttccaaataaggtc

SEQ ID NO: 461978 - DNA, 895 bp, Homo sapiens
agcggccgccgagtccgtccacatcgccaggccaggagtcagaacaaggacgggcctgtgatgtgtctgtctatgacgaggaggacaatgtcctaaggaatggagaggaagaaagtgaagggaaccaggtccctggattccatgtggaacagtagcccaggatgtgcactatggactgttacaagagagagacatgatcttccttaaggcattgatttgtcatgagtctctttgttatagccacttaacgttaccttaatacacccacttcatggataagtaaaactgaggcttggagaagcccacattgacacagcaaagaaggctggggctcttgtgctggttaaatggaccttgatgtcttccaaatgttttcatgctggattctgagccactctcctggctgcaactctgaggccgggcagactttccgctggaaagagaactcaaatactggtgagaggtggatttgaagccaggagccccaggttttggctctgcaggtttgcacccagctctgtggtgtatgccctcacaggtcacccaggacctcctgtccaggcttcttcaggccacccatgatggagtagatttgaggaatgaggttttcaaagcagttagtgtgcgggagagtaaccctggggcctccggaaccagaagggagggatttgggggctggagcttggcagtccaggttccattgtcctcatgttctccccactggcctggcctgtcactccagtctctgcataggttgtcacatggcattctccctgtgtgtctctgtgtctcttctcttctttataaagacatagttataatggattagggcccaccctaatgacaccatcttaacttgattatgtctgcaaacaccctacttccaaataaggtc

SEQ ID NO: 461979 - DNA, 1028 bp, Homo sapiens
agccccagtctgcggagagggagggcgaggggcggcggcgcaggggtgcacagaggcggacggcgaggcagatttcggagccgcggcgcttacctgatagtcgacagaggcgaggacgggagaggacagcggaggaggagaaggtggctgtggtggcggcggcagaaggagtcagaacaaggacgggcctgtgatgtgtctgtctatgacgaggaggacaatgtcctaaggaatggagaggaagaaagtgaagggaaccaggtccctggattccatgtggaacagtagcccaggatgtgcactatggactgttacaagagagagacatgatcttccttaaggcattgatttgtcatgagtctctttgttatagccacttaacgttaccttaatacacccacttcatggataagtaaaactgaggcttggagaagcccacattgacacagcaaagaaggctggggctcttgtgctggttaaatggaccttgatgtcttccaaatgttttcatgctggattctgagccactctcctggctgcaactctgaggccgggcagactttccgctggaaagagaactcaaatactggtgagaggtggatttgaagccaggagccccaggttttggctctgcaggtttgcacccagctctgtggtgtatgccctcacaggtcacccaggacctcctgtccaggcttcttcaggccacccatgatggagtagatttgaggaatgaggttttcaaagcagttagtgtgcgggagagtaaccctggggcctccggaaccagaagggagggatttgggggctggagcttggcagtccaggttccattgtcctcatgttctccccactggcctggcctgtcactccagtctctgcataggttgtcacatggcattctccctgtgtgtctctgtgtctcttctcttctttataaagacatagttataatggattagggcccaccctaatgacaccatcttaacttgattatgtctgcaaacaccctacttccaaataaggtc

SEQ ID NO: 461980 - DNA, 703 bp, Homo sapiens
tgccctaatgaaggtatggtgtcacagctttttcctccccacatcaggctcttctatcgctaccaggacctggccccacagctcgtgcccctcgactataccacctgccccgatgtgaaggtgccctacgagctcattggcagcatgcccgagctgaaggacaaccccttccgccagaggattgcccaggtattctctgaggatggggatggccacatgaccctggacaactttttggacatgttttccgtgatgagtgaaatggctccccgcgacctcaaggcttactatgcttttaaaatttatgattttaacaacgacgactacatttgtgcgtgggacctggagcagacggtgaccaaactgacgcggggggagctgagtgccgaggaggtgagcctggtatgtgagaaggtgctggatgaggctgatggagaccatgatgggcggctgtccctggaagatttccagaacatgatcctccgggcaccagacttcctcagcaccttccacatccgaatctgatggcaccacagaggagccgagctataggagggcggggtgacccctcacccgctgtggactctggtttctgagaataaacacaagtcactgagtcacacctgctgggaggacacatttttccaccttaaaactggaagatgggagggaggcggcgtagaattttatctttgactttgct

SEQ ID NO: 461981 - DNA, 519 bp, Homo sapiens
  misc_feature (506)..(506): n is a, c, g, or t
  misc_feature (511)..(511): n is a, c, g, or t
  misc_feature (513)..(514): n is a, c, g, or t
  misc_feature (516)..(517): n is a, c, g, or t
ccttgatcccccgcatggcaagcatgaagctggccaacccggccactttgctgagtctgaaaaacttttgcctgggtaccaaagaggtgcctcggctgaagctccaggaaagccgggacccaggttccagcggcccctcttccccagaaaccagtttaagtaggtccgggactgcacctccaccgcagcaggacctggtgggacacagggcaaccgccctaacccctgattcgtgcccgcttcctggccctggggagccaacacttaggagcaggcaggacaggcactttctacagcacctgttggggatgggcatgaactactgtgtgagggcactgggcatccatgaacaaaatgaatcagttctaagcatcagtaaacaaaagagaccaggtctgaatcattgtgaaatattttagtgagcggagataggttcaattgaataaatgaaaaaatatactatttcagatggcattaagtgctatggagagcaataaagtggggtnaggananngnnag

SEQ ID NO: 461982 - DNA, 3657 bp, Homo sapiens
gtgacatcgccggacccgagcgccctcatgtcccacaccacagctttccctcatgtggccgcaaccctcagcatcatggactcaaccttcaaggccccatccgccgtgtccccgataccagccgtcatcccttccccatcccacaagccatccaaaaccaaaaccagcaaatcctcaaaagtcaaagacctgtccacccgtagcgacgagtctccaagtaacaaaaaaaggaagccacagtcttcgacttcctcctcctcctcctcctcctcctcttccttgcagacatccctctcgtctccactgtcagggcctcacaaaaagaactgtgttttgaatgccagttctgctttgaactcctatcaggcggcccctccctataacagcctgtctgtgcacaactcaaacaatggggtgagcccactcagtgccaaactggagccctcaggacggacctcgctgcccggcggccccgcggacatagtgagacagtgactcctgtcccctctctgtgccctcccttgcgctccacgcaggggacctctctctggcctcacacaatgctgtgtcttctctgcccctctcttttgacaaatcagaaggaaaaaagcgtaagaactcgagttctagtagcaaagcctgtaaaatcactaaaatgcctggtatgaatagcgttcacaaaaagaacccgcccagccttctcgcaccggtgcccgatcccgttaacagcacctcctctcggcaggttgggaaaaatagcagcctagctttgtcacaatccagtccttcaagtatatccagcccaggacacagccgacagaagaacacaaacagaacgggcaggataaggactcttccataacaagactatgaagccacttccacatcaattccaggccacctaatcccatccgaggaggccatggggaggaggagggaggggagtgggctggggggagagtctgttttctgtgcactccctgtgactctggcctttcttcttctttttttaattgaccaatttttagttaaaaaggcaaaagaaggtgaatttgagatttacagaaaacagttccagtgtttggtttccgctgtctttcctttcatttgccatgtttttacattcttccaaatttggggtcactcccctagctcctgatgctgctactgtaccatccttttgctccagccatgagagcagacattgcagaatgttggttccaggttggcatgctctgaagctcttgaactgtagcacaggcagagccctttttcttcctgtcatctccacccgattccttccatccctacgtctaccactctctgggtcctcactggtcttcaaaggacctggctctcataggatcccctcaggattgtgtgcagggagagggggctttgctggggaggagctgggagtggagagttggagggtgggtggggttccctcatccagtttccacagcccaccatggctggagccaaatgctagaagcgagattgagaacagtggccgtttagtgatgtggtttacctaataccactgtccagctgtgcagctcagaaaggataaaccagtcagggacaggggccagaacaggtttgggaaggtggcagcaagcagagcatggtgggtaggagatgatccctaaaaaaactggagactgtggtggtctgagctggtcaggaatctgcagaatcccttccaggaatcagtgtgccagtgcccacagcagggtgagctaggagggagaaatcccaggaaaaaggtcgtgagaacccagaaagccactccatgaggaggcacggtgaccacagctgctaaaggttcttaggctgccttcctgggctaggaagagccccccagggagagcttccacaaaagggtatgtgtcaaaccttttgtcagaataaataatagcatttcccacccacccccatgccctgggccacagggacttggtgggatcagcacacccatggatcagcttttgctgtcttagagacagccatccccatgaaggaatggtaaggacagccactgctcagtgaagaacagccatttggaagagccacgctggagccctgcagccatagaactattcacactggagttttaaaagaaacagcaataccataagctctagtagggaatcataatcaggaaaggaattcacaacataaaataggtgttctgtgctattaatcatgtaactttgtatatgatgtatagcaaagatactgggaggttttgtttcatccttaaatcagaaatgaatgctagtttcatagctgggcagaaccctcatccccaccccaaagttttccttttctttcccgttcccccaacccaaagatcagactactgttaagtttcaccacacaattggaattgcaaagacgggaggcaaatggagtgattttcatcaatggaattgcactgacagtgagtgtttcttataggattactaaattttttaatataaaatgatttgtttaaaaatcaggagttgatattaagtaccaggacattagttcggatgatttcatttttatttctacagtgttaaaagtgcacttatatgctggtttatttacgtcttgggaaaagagactgcaaattgaagggatgattgttactttttctttttttaaaaaaaaaaggttaaggagattttaagacttataaatgtttaagaaattataaacaaggttagaccctttgaaaaaaagtttagaagatattcttaaagtaaatttttatagtgttaattttgtaataatttatgttttactatattacagagctaactgaccagaatagtttcagaaacaatatgaaacttaggaaagtttaagcaatgtttatatttttaaaatgttctttgaattatgtttttattgtacatttcttcagactgaaaagtatgtacatatctttgttatttttgcacaattttgtcttgttcggtttcagaggtctgttgttttttataatttattttgagttgtaaaacttgcaggagtaaaaacaaaaaacaaaatctccacaacaaaataaccctctgatttataaactcttatagtcaaagagggaaaacaaaggttgagagattaagtggctgcttctgagaaataatgtctcaaggactaaaggagcaattcaataggtttagacattgtagctctctacatcttgaattggaagctggaataaagagcccccacccccccccccaccctcatcgaatgctgcttactttgtcaaaagactggctatgaccaaggtgaggatatttctggaaaactgggcaaaaagggaaagcccacagtattcttccttggcagtcaaccacaggtttactttacaatgatgtattaaaaacttgcagcttgaaaaatggaatgcaaataaaaggttctctttgggtttgtcttaatggagttaaactggagcagcctataaaacatttttagggtgatgtcctctgggtccttctgttctgcacacccactcagttttctctcccagccccttgactgcacacacccctctttgcatgaagatctcctgacttgtcgccagccatagaggattgaaagctctggttgtaaagcaaaacgcaatgcatagacctgtcagccataaaaaaaaaa

SEQ ID NO: 461983 - DNA, 6279 bp, Homo sapiens
  misc_feature (1)..(2): n is a, c, g, or t
  misc_feature (8)..(8): n is a, c, g, or t
nnatttcntcaagccgacgcgggtgaggtgtgcgagcgcgcccgggatccgcactgagtgaggttccgcagagccgggagacggaggaggtgggtcagcctgggtcgctgcccttgtccagcgcaacccaagacacctgcgcgccgggtggagccagggctaggggtggggcctgggctccgggaagggggcgggcctgccttcctccagtgcaaatgcgtcctggagtggtttgtcctacgttgcggcccgtagaggcgccgactcaccgcctcttctccgggagtggcggagattcgatcatgtgacagtccggaggccagaaccgggcaggttgcttgaagcgcaggggtttgacaaaaacaaacggtgacggcgccgcggaagggtctatggccgaggcggtgaagccccagcgccgggccaaggccaaggccagccggactaaaacaaaggaaaagaagaagtatgaaactcctcagagggaagagtccagtgaagtctcccttccaaaaacctccagagagcaggaaatcccttctctagcctgtgaattcaaaggagaccatctgaaggtggtaactgattcccagctccaggatgatgccagtggacaaaatgagagtgaaatgtttgatgtaccactcacctccttaactataagcaatgaagagtccctgacgtgtaacacagagcccccaaaggaagggggagaggccagaccctgtgtgggggacagtgcagtcactccaaaggtccaccctggagacaatgttggaactaaagtagaaacccccaagaacttcacagaggtagaggaaaatatgtcggtacaaggtggactttcagaaagtgcaccccaatctaatttttcttatactcagccagcaatggaaaatatacaagtcagagaaactcagaatagtaaagaagacaaacaaggcctggtttgttcttcagaggtgccacagaatgttggcttgcagagttcttgcccagccaaacatggttttcagacacctagagtgaagaaactgtatccccagttgccagctgaaattgctggagaagcaccagctttggtggcagtgaaacccttgcttcgcagtgagcgactctacccagaactcccgtctcaactggaactagtaccatttactaaagaacagctaaaaatcttggagcctggttcatggctggaaaatgttgagtcatatttagaagaatttgacagcatggctcatcaagacaggcatgaattttatgagttgcttttgaactactcacgatgtaggaagcaactgctgctggctgaagctgagctgcttactctgacatctgattgccaaaatgctaaaagtcggctgtggcagtttaaggaggaacaaatgtctgtacagggtatctgtgcagatcaagtgaaagttttcagctatcatcgctaccaaagagtagaaatgaatgaaaatgcactggtggagctaaagaagctattcgatgccaaatctgagcacctccaccagaccctggcccttcattcttatacttctgtgctctcaagattgcaagtggagtcttacatctatgcattgctcagtagttcagctgttctgagatcttcagcaattcaccagcaaggccgagcgtctaagcagacagaaagcattccctctgatctgtgtcaactaaaggaatgcattagtgtcttattcatgttcaccaggagagttaatgaagatactcagtttcatgatgatattcttctctggctgcagaaattggtatccgtgctacaaagagttggctgtcctggagatcacctcttccttctaaaccatattcttcgatgccccgctggtgttagtaaatgggctgttccttttatccagatcaaagtgttgcataacccatcaggggtctttcattttatgcaatcccttgccctgctgatgtctcctgtcaaaaatcgagctgagtttatgtgccacatgaagcccagcgagcggaagccatcctcctcagggcctgggtctgggacttggacgctagtagacgaaggaggagaagaggatgaagaccctgagaccagttggattctccttaatgaagatgatttggttaccattttagcacagttcccctttcatgaactctttcagcatcttcttgggtttaaagcaaaaggtgattatttacctgaaacaacaagacctcaagagatgatgaaaatttttgcctttgccaactcactagtggaacttctggctgtggggttagaaacctttaatagagcacgctataggcagtttgtgaagcgaattggttatatgatcaggatgactcttggttatgtaagtgaccattgggcacagtatgtgagccataaccaaggctcaggattggcccaacagccctactctatggagaaactacaggttgaatttgatgaactgtttttgagggctgtcctacatgtgctgaaggccaaaagacttggcatttggctgtttatgtccgagatgccctttgggactctgtctgtgcaaatgctgtggaagctcttctacctcatgcaccaggtggagagcgagaacctgcagcagctctcctcctccctgcagcccgcccagtgcaagcagcagctccaagacccagaacattttaccaactttgagaagtgtctttcttctatgaatagctcagaagagatttgccttctgactacctttgctcagatggctcaggccagaagaaccaatgtggacgaagacttcataaaaattattgttctggagatatatgaggtatcttatgtcaccttgtctaccagagagactttttcaaaggttggtcgagagcttttagggactatcacagctgttcaccctgagataatttccgtccttctggatagagttcaagagaccattgaccaggttggaatggtttctctatacttgtttaaagaactgcctttgtatctttggcaaccttctgcatctgagatagcggtgattcgggattggttattgaattacaacctgacagtggtgaagaataaactggcctgtgttattcttgaaggactgaattggggatttgctaaacaggctacccttcatctggatcaagcagtccatgctgaagtggctttaatggttcttgaagcttatcagaagtaccttgcacagaagccatatgctgggattctctctgaaagtatgaagcaggtttcatatttggccagtattgttcgatatggagagacacccgagacctcatttaaccaatgggcctggaatttaatcttgaggctaaaactgcacaaaaacgattatggaatacagccgaattgtccagctgttcccttctccgtcactgtgcctgacatgacagagtcacccacgtttcatcctctcttgaaggctgtgaaagcgggcatgcccattggctgttatctagccttatctatgacagctgtgggccacagcattgagaagttctgtgcagaaggcatcccactattgggaattctggtccagtcaagacatttgagaacagtggttcatgtcctggataagattctgcctttattttacccttgccagtattaccttctgaagaatgagcagtttttatcgcatctcctcttgttcctacacttggacagcggtgtccctcagggtgtcacacaacaggtcacccacaaggtggcacagcacctgacaggagccagccatggggacaacgtgaagcttctcaacagcatgatccaggcacacatatctgtaagcactcagcccaatgaagtgggccccgttgctgtgttggagttctgggttcaggctctcataagccagcatctctggtaccgagaacaacctatcctcttcctcatggaccacttgtgtaaagcagcttttcagctgatgcaggaagactgcatacagaaattactctaccaacaacataagaatgccttgggttaccactgtgaccggagtctgctctcatctttggtaagctggattgtggcaggcaacatcactccttcctttgtggagggcttggccacgcccactcaggtctggtttgcctggacagtgctcaacatggaatccatctttgaagaggactcccagctccggagagttattgaaggggaattggtgataaactctgctttcacccctgaccaagctctgaagaaagcccagacccagctgaagctccccatcgtgccatccctccagaggctgctgatttatcgctgggcccaccaggctctggtcacaccttctgatcaccccctcctgccactcatttggcagaagttcttccttctgtatcttcaccgtccgggaccacagtatgggttacccatagatggttgtattggaagaaggttttttcaaagtcctgctcatatcaatttgttgaaagaaatgaagagacgtttgaccgaggtggctgacttccaccatgctgcaagcaaggccctccgtgttccagcagagggcagtgaagggctgccagagagccactctggcacccctggttacctgacttcaccagaactgcacaaggagctggtgaggctcttcaatgtatatatattatggctagaagatgagaattttcaaaaaggagatacctatatcccttctctaccaaagcattatgatattcacaggctagcaaaagtgatgcagaatcagcaggtgaaattatagccctcctttttttttttttttttttagcatatctgaatgtaatttgaactggtcatattcataataaaacaatttattgataagaaaatggaaatttcccttctttttttgctaattttcattgtaactattccaatgtctccatcaatttccttgggagactcttttctacaaaatgtcttctctgaaataatcttttatatgtattgtatttttcattactttcaaaatgtgtctctgatttttcaacatagttgtatttgtctaaagttcagaaatttgacctaaaagttaggatgagtccaacttattttcccaaaaagggatcatagtattatattatttgtctgaacccttgaattgagattttaaacataatcttttgctttgttaattctgaaataaaaagaaacaccttttctaaaatgtcttctaggccctctcaatcagaattcaggatggggacccattctggtatcccttcaggttcccgagctcaccatggaagagttcctgcaggagtgcctcaccttgggcagttacttgactctttacgtctacttgcttcagtgtttaaacagcgaacagactttaaggaatgaaatgaaagtgctgctcatcttaagcaagtggctggaacaggtgtacccaaggtaaggaagcgcctttctaacactgttgttctaaataggcctcagacatctgtacctacttacaggttgtgatatacttcagtaggtttttcgacttaggatctaggttctccagaaagattaatggaaaaaaaaaaagaaaaaaaaaacagagcctgattacatctttacattctaaaaagcatttttattttttcttacctttaaaaaaaattttcaattcaaacagtatttttaatagtatctcctgttgtgtttggactttgtaacctaactgcactactgatttctttttggttttgagctagtcatggacgtgacagtatgcacattttaaagaaaattatgattaatctgtataatgttttttggtctgtaaaaattataaaaaataaaatcatttatctttggttgtaactgtttaaaaaccaaattatagggatatcacactatcttgtaaagtgtttcagctgttaaagttgctgttcctgattcctgatgaaaataacttgaaaaaaaaataattatactactgatcctcttttgggataatgaaattgcgaaggaatgttgttgattataacttttattttttaatgtacagatgtactgtctctcattgagcactgatagaatttatttttctttcaatagtttaaaatcacttatgtggagacacatacttaagtgtgttcaactcgttttcttcccacatatctagtgtgacctttaaaaaccacaactttattttggacattaaatgtgcaatattcactacttattcattgttccacatttttcatacttgtacaaagggtaagtttttatataatggtgagaaacaggaagaaatgacaactggttaagtaaaattctgcaaataaactagattc

SEQ ID NO: 461984 - DNA, 10430 bp, Homo sapiens
  misc_feature (1)..(2): n is a, c, g, or t
  misc_feature (8)..(8): n is a, c, g, or t
  misc_feature (5523)..(5523): n is a, c, g, or t
nnatttcntcaagccgacgcgggtgaggtgtgcgagcgcgcccgggatccgcactgagtgaggttccgcagagccgggagacggaggaggtgggtcagcctgggtcgctgcccttgtccagcgcaacccaagacacctgcgcgccgggtggagccagggctaggggtggggcctgggctccgggaagggggcgggcctgccttcctccagtgcaaatgcgtcctggagtggtttgtcctacgttgcggcccgtagaggcgccgactcaccgcctcttctccgggagtggcggagattcgatcatgtgacagtccggaggccagaaccgggcaggttgcttgaagcgcaggggtttgacaaaaacaaacggtgacggcgccgcggaagggtctatggccgaggcggtgaagccccagcgccgggccaaggccaaggccagccggactaaaacaaaggaaaagaagaagtatgaaactcctcagagggaagagtccagtgaagtctcccttccaaaaacctccagagagcaggaaatcccttctctagcctgtgaattcaaaggagaccatctgaaggtggtaactgattcccagctccaggatgatgccagtggacaaaatgagagtgaaatgtttgatgtaccactcacctccttaactataagcaatgaagagtccctgacgtgtaacacagagcccccaaaggaagggggagaggccagaccctgtgtgggggacagtgcagtcactccaaaggtccaccctggagacaatgttggaactaaagtagaaacccccaagaacttcacagaggtagaggaaaatatgtcggtacaaggtggactttcagaaagtgcaccccaatctaatttttcttatactcagccagcaatggaaaatatacaagtcagagaaactcagaatagtaaagaagacaaacaaggcctggtttgttcttcagaggtgccacagaatgttggcttgcagagttcttgcccagccaaacatggttttcagacacctagagtgaagaaactgtatccccagttgccagctgaaattgctggagaagcaccagctttggtggcagtgaaacccttgcttcgcagtgagcgactctacccagaactcccgtctcaactggaactagtaccatttactaaagaacagctaaaaatcttggagcctggttcatggctggaaaatgttgagtcatatttagaagaatttgacagcatggctcatcaagacaggcatgaattttatgagttgcttttgaactactcacgatgtaggaagcaactgctgctggctgaagctgagctgcttactctgacatctgattgccaaaatgctaaaagtcggctgtggcagtttaaggaggaacaaatgtctgtacagggtatctgtgcagatcaagtgaaagttttcagctatcatcgctaccaaagagtagaaatgaatgaaaatgcactggtggagctaaagaagctattcgatgccaaatctgagcacctccaccagaccctggcccttcattcttatacttctgtgctctcaagattgcaagtggagtcttacatctatgcattgctcagtagttcagctgttctgagatcttcagcaattcaccagcaaggccgagcgtctaagcagacagaaagcattccctctgatctgtgtcaactaaaggaatgcattagtgtcttattcatgttcaccaggagagttaatgaagatactcagtttcatgatgatattcttctctggctgcagaaattggtatccgtgctacaaagagttggctgtcctggagatcacctcttccttctaaaccatattcttcgatgccccgctggtgttagtaaatgggctgttccttttatccagatcaaagtgttgcataacccatcaggggtctttcattttatgcaatcccttgccctgctgatgtctcctgtcaaaaatcgagctgagtttatgtgccacatgaagcccagcgagcggaagccatcctcctcagggcctgggtctgggacttggacgctagtagacgaaggaggagaagaggatgaagaccctgagaccagttggattctccttaatgaagatgatttggttaccattttagcacagttcccctttcatgaactctttcagcatcttcttgggtttaaagcaaaaggtgattatttacctgaaacaacaagacctcaagagatgatgaaaatttttgcctttgccaactcactagtggaacttctggctgtggggttagaaacctttaatagagcacgctataggcagtttgtgaagcgaattggttatatgatcaggatgactcttggttatgtaagtgaccattgggcacagtatgtgagccataaccaaggctcaggattggcccaacagccctactctatggagaaactacaggttgaatttgatgaactgtttttgagggctgtcctacatgtgctgaaggccaaaagacttggcatttggctgtttatgtccgagatgccctttgggactctgtctgtgcaaatgctgtggaagctcttctacctcatgcaccaggtggagagcgagaacctgcagcagctctcctcctccctgcagcccgcccagtgcaagcagcagctccaagacccagaacattttaccaactttgagaagtgtctttcttctatgaatagctcagaagagatttgccttctgactacctttgctcagatggctcaggccagaagaaccaatgtggacgaagacttcataaaaattattgttctggagatatatgaggtatcttatgtcaccttgtctaccagagagactttttcaaaggttggtcgagagcttttagggactatcacagctgttcaccctgagataatttccgtccttctggatagagttcaagagaccattgaccaggttggaatggtttctctatacttgtttaaagaactgcctttgtatctttggcaaccttctgcatctgagatagcggtgattcgggattggttattgaattacaacctgacagtggtgaagaataaactggcctgtgttattcttgaaggactgaattggggatttgctaaacaggctacccttcatctggatcaagcagtccatgctgaagtggctttaatggttcttgaagcttatcagaagtaccttgcacagaagccatatgctgggattctctctgaaagtatgaagcaggtttcatatttggccagtattgttcgatatggagagacacccgagacctcatttaaccaatgggcctggaatttaatcttgaggctaaaactgcacaaaaacgattatggaatacagccgaattgtccagctgttcccttctccgtcactgtgcctgacatgacagagtcacccacgtttcatcctctcttgaaggctgtgaaagcgggcatgcccattggctgttatctagccttatctatgacagctgtgggccacagcattgagaagttctgtgcagaaggcatcccactattgggaattctggtccagtcaagacatttgagaacagtggttcatgtcctggataagattctgcctttattttacccttgccagtattaccttctgaagaatgagcagtttttatcgcatctcctcttgttcctacacttggacagcggtgtccctcagggtgtcacacaacaggtcacccacaaggtggcacagcacctgacaggagccagccatggggacaacgtgaagcttctcaacagcatgatccaggcacacatatctgtaagcactcagcccaatgaagtgggccccgttgctgtgttggagttctgggttcaggctctcataagccagcatctctggtaccgagaacaacctatcctcttcctcatggaccacttgtgtaaagcagcttttcagctgatgcaggaagactgcatacagaaattactctaccaacaacataagaatgccttgggttaccactgtgaccggagtctgctctcatctttggtaagctggattgtggcaggcaacatcactccttcctttgtggagggcttggccacgcccactcaggtctggtttgcctggacagtgctcaacatggaatccatctttgaagaggactcccagctccggagagttattgaaggggaattggtgataaactctgctttcacccctgaccaagctctgaagaaagcccagacccagctgaagctccccatcgtgccatccctccagaggctgctgatttatcgctgggcccaccaggctctggtcacaccttctgatcaccccctcctgccactcatttggcagaagttcttccttctgtatcttcaccgtccgggaccacagtatgggttacccatagatggttgtattggaagaaggttttttcaaagtcctgctcatatcaatttgttgaaagaaatgaagagacgtttgaccgaggtggctgacttccaccatgctgcaagcaaggccctccgtgttccagcagagggcagtgaagggctgccagagagccactctggcacccctggttacctgacttcaccagaactgcacaaggagctggtgaggctcttcaatgtatatatattatggctagaagatgagaattttcaaaaaggagatacctatatcccttctctaccaaagcattatgatattcacaggctagcaaaagtgatgcagaatcagcaggatctgtggatggagtatttgaacatggagcgcatctatcatgagtttcaggagactgttggtctgtggacacaggccaagcttgagtcccattccacaccctgcagtttgtccgtgcagctggacttcactgatcctttgctggctaaagaaagggttttaagtaacttgcggaagcatgaggctccccagcctccccttgctctgcacccgacgaagcctcctgtgccagttatttcctctgctgtgctattgagtcagaaggacgccacccagctggtgtgcacagacctgaatctgttgcaacagcaggccagaaccgcagctcttcgggaatctcagcaggttgctctggatggtgagctgttagacacaatgccaaagcagtatgtgaatcgtgaagaacagaccacactacatttggagtgcagaggcagcagcggtaagaaatgccaaggagccgcagttgtcacggttcagtttgaaggcatgcataagaatgaagccataagccaacagcttcatgttttacggaaggaagtgaagcagttgcaagcagaagctgctaaaccaccatcacttaatattgtggaagctgctgtacatgcagaaaacttgatcacggccttagtgaatgcctacaagttgcagcctacacctgggattcagaaagttggcattagccttttctttactattgtggattacgtcagcgatgagacgcagcgtcatcccccaacaaggcagttctttacttcatgtattgagatcttgggacaggtatttatcagtggcattaaancagagtgcagaaaagtacttgaaaccattctgaagaacagcaggctctgctccctgctgtctcctttcttcactcccaatgctgcacctgcagagttcatacagctgtatgagcaagtggtgaagtttctaagtgaggacaacagtgatatgattttcatgctgctaaccaagttcgatcttaaacaatggttaagcgccactaaacctcctctgtctgatcgtaccaggcttctggagtccattcacttggcacttactgcctggggccttgaaccagatgaggatattttgatgccatttaatcttttctgtaagcactggacttatcttcttctctaccagtttcctgaccagtacagtgacattctcaggctgcttatgcaaagctccgcggagcagcttctgagccccgagtgttggaaggccactctgagagccctgggctgctgcgcccccagctgccagcagggggcagcgtccaccgagggcgccgtgcttcccagctcttctgatgctctcttgtcagacaagcaggtaatggagactatacagtggctttcagactttttttataagcttcggttatccaagatggactttaaaagctttggtttattctcaaaatggagtccttatatggctgatgtgaagacattcttgggctaccttgtgaaaaggctgattgacttagaaatgacctgtttggcccaagacccaactgccagcaggaaaacagtgctgaaatccctacattcagtaatcattcagctctttaagccatggatcctggttttagaggacaacgaaagcagccaacagcggcattacccctggctagagagtgatactgtggtggcctcaagcattgtgcagctgttcactgactgtattgactcactgcatgagagttttaaagataagctgttgccaggtgatgcaggagccctttggttgcacctgatgcattattgtgaagcatgtacagcacccaaaatgccagagttcattctgtacgctttccatagcacgtaccggaaactgccatggaaggacctgcaccctgaccagatgctcatggaggccttcttcaaagtggaacgaggaagccccaagagctgtttcttatttttggggtctgtactctgtgaagtcaactgggttagtgtgctctctgatgcctggaattccagtccccacccagaaacccgcagcatgattgtctgcctccttttcatgatgattttattggcaaaggaagttcaactggtagaccaaacagattcacctttacttagtctccttggacagacaagctcactttcatggcatcttgtggatattgtgtcgtaccagagtgtgctaagttatttcagcagccattacccgccgtccatcatcctggcaaaagaatcttatgctgaattaatcatgaagctcctaaaagtgtctgcgggcctttctattcctactgacagccagaagcatcttgatgcagttccaaaatgccaagcttttactcatcagatggttcaattcctcagcaccctggaacaaaatggaaaaatcaccttagcagtcctagaacaggaaatgtctaagctcttagacgatatcattgtctttaacccgcccgacatggacagccagacccgccacatggccctcagcagcctctttatggaagtcctgatgatgatgaacaacgcgactattccaacagcagagttccttcggggcagtatccggacctggattggccaaaaaatgcatgggctggtggtgctgccccttttaacagcagcctgccagagcctggcgtccgtccgccacatggctgagactacagaagcctgcatcactgcctacttcaaagaaagccctctcaatcagaattcaggatggggacccattctggtatcccttcaggttcccgagctcaccatggaagagttcctgcaggagtgcctcaccttgggcagttacttgactctttacgtctacttgcttcagtgtttaaacagcgaacagactttaaggaatgaaatgaaagtgctgctcatcttaagcaagtggctggaacaggtgtacccaagctccgtggaggaagaggcaaagctgtttttgtggtggcaccaagtccttcagctctccctcattcagacagagcagaatgactccgtcctgacagaatctgtcattcgaattctgctcttggttcagagcaggcagaacctcgtggctgaggagagactcagctctgggatcctgggggcaattgggtttggccggaagtcgcctttgtctaacaggttccgagtggttgcccgaagcatggctgccttcctttcagttcaggttcctatggaagatcagatccgtttgaggcctggctctgaattacatctgacccccaaagctcagcaggctctgaatgctcttgaatccatggcatcaagtaagcagtatgttgaataccaggatcaaatattgcaagccacccaatttataaggcatcctggccattgccttcaagatgggaaaagcttcttggctcttctcgttaactgtctgtatccagaagtgcattatttggaccacatacgatagttaacactgaggctcttgaaaaacccattgctgtttatgtttacatttaactttgctgttgcacaagtaactttgctcaattgcactgtagagctcagtttggccaatgtgtagttgactgagatgcaagttgggaggcgttagatattagataattttggggtgtgtgtgtgtgtgtgtgtgtgttttcttagctcttaagaccttctggggactctttaagtttttatatttatccacaagagaaacttactaagttccacttgggtgcagagccactcacagttgccgaatgtcccagtcatctcacaagacctccagatggagttctttgtatgtttccacttctgtctctgttttatgtaaatgttccagatctgacaaccttggaagtcactcagtacccttacttttaaaccccatttgtgttcctccaaagtaaagaagtcaattttgaaaaatttctgcatttctcaaatgtggacaaatacaatagttttaaagtattgtttttctcagaagggagataaaaatgccgagttagttaaagtgggtcatgtgtaaaatacgaccacttgatcgtgattatagtgggcagtagagatgatgacaagtcaatttccatccagccgtgtatcctcatggagaagctgcctgtctgaatcaggatggcaagctggcagtctgggaggagcatgttttgcacagatgttttgtttggtccacttggtgaggagtgcagacagggctgcctctctctagtcgggagagtctgtgcattccctcgggccctgaccctagcctcattcacatcacttgcccctgtcgacacctaagtttgcaccctttgatagacaccatgttcgatatctgaaaggctcagtgtcaggagacagagactgagggagactgaagacctgattctctgttccctgcttgttttttaacttcaaactcagatgaagccaatggacctgctgaaacacttgtctgtggaaactgggtcaggtcgggagatctactgaaatttggctttttttccatagccacgtgccttctgttgttgacagttcattcattaccaaagcctgtgtgtaactttgccttgttctgtggccatcttcttgctcatgttatttctcctgggaatgagcagtttgacttctgttcccacgttcctcattctatcagctctagatggattttgcctgcatagctggcttaatatgtctttgtgtatgggtagtctgtagcctgagaatatttacctaaaaatgtctaaacagccaccaagaatgtttataggggtataggaatatagttaacagagtgctaatctctcctcaaatgtccttttggaatgcttcccccaaaattgggaagttggtaggagcttttctttactttgaatttctttacttggacagaacgattctgccttaaagacacgctttgcagctctgataaagaacatccctgtttagtctcttgagttttacaggccacaaaatgtccgtctcagagggatctgtctcagcttttcttatttttgcttctctccgttttcaaaattaatcatcttgttctctgtataagaaaatttgagaagctgtggacaatttaatagtctgatctggcaacagcgatttttgtttggaaatattttgtgttttctttgaggaggatataattactgatatcctaggatgtgaaatttttgagtgacagtatgcacattttaaagaaaattatgattaatctgtataatgttttttggtctgtaaaaattataaaaaataaaatcatttatctttggttgtaactgtttaaaaaccaaattatagggatatcacactatcttgtaaagtgtttcagctgttaaagttgctgttcctgattcctgatgaaaataacttgaaaaaaaaataattatactactgatcctcttttgggataatgaaattgcgaaggaatgttgttgattataacttttattttttaatgtacagatgtactgtctctcattgagcactgatagaatttatttttctttcaatagtttaaaatcacttatgtggagacacatacttaagtgtgttcaactcgttttcttcccacatatctagtgtgacctttaaaaaccacaactttattttggacattaaatgtgcaatattcactacttattcattgttccacatttttcatacttgtacaaagggtaagtttttatataatggtgagaaacaggaagaaatgacaactggttaagtaaaattctgcaaataaactagattc

SEQ ID NO: 461985 - DNA, 9953 bp, Homo sapiens
  misc_feature (1)..(2): n is a, c, g, or t
  misc_feature (8)..(8): n is a, c, g, or t
  misc_feature (5523)..(5523): n is a, c, g, or t
nnatttcntcaagccgacgcgggtgaggtgtgcgagcgcgcccgggatccgcactgagtgaggttccgcagagccgggagacggaggaggtgggtcagcctgggtcgctgcccttgtccagcgcaacccaagacacctgcgcgccgggtggagccagggctaggggtggggcctgggctccgggaagggggcgggcctgccttcctccagtgcaaatgcgtcctggagtggtttgtcctacgttgcggcccgtagaggcgccgactcaccgcctcttctccgggagtggcggagattcgatcatgtgacagtccggaggccagaaccgggcaggttgcttgaagcgcaggggtttgacaaaaacaaacggtgacggcgccgcggaagggtctatggccgaggcggtgaagccccagcgccgggccaaggccaaggccagccggactaaaacaaaggaaaagaagaagtatgaaactcctcagagggaagagtccagtgaagtctcccttccaaaaacctccagagagcaggaaatcccttctctagcctgtgaattcaaaggagaccatctgaaggtggtaactgattcccagctccaggatgatgccagtggacaaaatgagagtgaaatgtttgatgtaccactcacctccttaactataagcaatgaagagtccctgacgtgtaacacagagcccccaaaggaagggggagaggccagaccctgtgtgggggacagtgcagtcactccaaaggtccaccctggagacaatgttggaactaaagtagaaacccccaagaacttcacagaggtagaggaaaatatgtcggtacaaggtggactttcagaaagtgcaccccaatctaatttttcttatactcagccagcaatggaaaatatacaagtcagagaaactcagaatagtaaagaagacaaacaaggcctggtttgttcttcagaggtgccacagaatgttggcttgcagagttcttgcccagccaaacatggttttcagacacctagagtgaagaaactgtatccccagttgccagctgaaattgctggagaagcaccagctttggtggcagtgaaacccttgcttcgcagtgagcgactctacccagaactcccgtctcaactggaactagtaccatttactaaagaacagctaaaaatcttggagcctggttcatggctggaaaatgttgagtcatatttagaagaatttgacagcatggctcatcaagacaggcatgaattttatgagttgcttttgaactactcacgatgtaggaagcaactgctgctggctgaagctgagctgcttactctgacatctgattgccaaaatgctaaaagtcggctgtggcagtttaaggaggaacaaatgtctgtacagggtatctgtgcagatcaagtgaaagttttcagctatcatcgctaccaaagagtagaaatgaatgaaaatgcactggtggagctaaagaagctattcgatgccaaatctgagcacctccaccagaccctggcccttcattcttatacttctgtgctctcaagattgcaagtggagtcttacatctatgcattgctcagtagttcagctgttctgagatcttcagcaattcaccagcaaggccgagcgtctaagcagacagaaagcattccctctgatctgtgtcaactaaaggaatgcattagtgtcttattcatgttcaccaggagagttaatgaagatactcagtttcatgatgatattcttctctggctgcagaaattggtatccgtgctacaaagagttggctgtcctggagatcacctcttccttctaaaccatattcttcgatgccccgctggtgttagtaaatgggctgttccttttatccagatcaaagtgttgcataacccatcaggggtctttcattttatgcaatcccttgccctgctgatgtctcctgtcaaaaatcgagctgagtttatgtgccacatgaagcccagcgagcggaagccatcctcctcagggcctgggtctgggacttggacgctagtagacgaaggaggagaagaggatgaagaccctgagaccagttggattctccttaatgaagatgatttggttaccattttagcacagttcccctttcatgaactctttcagcatcttcttgggtttaaagcaaaaggtgattatttacctgaaacaacaagacctcaagagatgatgaaaatttttgcctttgccaactcactagtggaacttctggctgtggggttagaaacctttaatagagcacgctataggcagtttgtgaagcgaattggttatatgatcaggatgactcttggttatgtaagtgaccattgggcacagtatgtgagccataaccaaggctcaggattggcccaacagccctactctatggagaaactacaggttgaatttgatgaactgtttttgagggctgtcctacatgtgctgaaggccaaaagacttggcatttggctgtttatgtccgagatgccctttgggactctgtctgtgcaaatgctgtggaagctcttctacctcatgcaccaggtggagagcgagaacctgcagcagctctcctcctccctgcagcccgcccagtgcaagcagcagctccaagacccagaacattttaccaactttgagaagtgtctttcttctatgaatagctcagaagagatttgccttctgactacctttgctcagatggctcaggccagaagaaccaatgtggacgaagacttcataaaaattattgttctggagatatatgaggtatcttatgtcaccttgtctaccagagagactttttcaaaggttggtcgagagcttttagggactatcacagctgttcaccctgagataatttccgtccttctggatagagttcaagagaccattgaccaggttggaatggtttctctatacttgtttaaagaactgcctttgtatctttggcaaccttctgcatctgagatagcggtgattcgggattggttattgaattacaacctgacagtggtgaagaataaactggcctgtgttattcttgaaggactgaattggggatttgctaaacaggctacccttcatctggatcaagcagtccatgctgaagtggctttaatggttcttgaagcttatcagaagtaccttgcacagaagccatatgctgggattctctctgaaagtatgaagcaggtttcatatttggccagtattgttcgatatggagagacacccgagacctcatttaaccaatgggcctggaatttaatcttgaggctaaaactgcacaaaaacgattatggaatacagccgaattgtccagctgttcccttctccgtcactgtgcctgacatgacagagtcacccacgtttcatcctctcttgaaggctgtgaaagcgggcatgcccattggctgttatctagccttatctatgacagctgtgggccacagcattgagaagttctgtgcagaaggcatcccactattgggaattctggtccagtcaagacatttgagaacagtggttcatgtcctggataagattctgcctttattttacccttgccagtattaccttctgaagaatgagcagtttttatcgcatctcctcttgttcctacacttggacagcggtgtccctcagggtgtcacacaacaggtcacccacaaggtggcacagcacctgacaggagccagccatggggacaacgtgaagcttctcaacagcatgatccaggcacacatatctgtaagcactcagcccaatgaagtgggccccgttgctgtgttggagttctgggttcaggctctcataagccagcatctctggtaccgagaacaacctatcctcttcctcatggaccacttgtgtaaagcagcttttcagctgatgcaggaagactgcatacagaaattactctaccaacaacataagaatgccttgggttaccactgtgaccggagtctgctctcatctttggtaagctggattgtggcaggcaacatcactccttcctttgtggagggcttggccacgcccactcaggtctggtttgcctggacagtgctcaacatggaatccatctttgaagaggactcccagctccggagagttattgaaggggaattggtgataaactctgctttcacccctgaccaagctctgaagaaagcccagacccagctgaagctccccatcgtgccatccctccagaggctgctgatttatcgctgggcccaccaggctctggtcacaccttctgatcaccccctcctgccactcatttggcagaagttcttccttctgtatcttcaccgtccgggaccacagtatgggttacccatagatggttgtattggaagaaggttttttcaaagtcctgctcatatcaatttgttgaaagaaatgaagagacgtttgaccgaggtggctgacttccaccatgctgcaagcaaggccctccgtgttccagcagagggcagtgaagggctgccagagagccactctggcacccctggttacctgacttcaccagaactgcacaaggagctggtgaggctcttcaatgtatatatattatggctagaagatgagaattttcaaaaaggagatacctatatcccttctctaccaaagcattatgatattcacaggctagcaaaagtgatgcagaatcagcaggatctgtggatggagtatttgaacatggagcgcatctatcatgagtttcaggagactgttggtctgtggacacaggccaagcttgagtcccattccacaccctgcagtttgtccgtgcagctggacttcactgatcctttgctggctaaagaaagggttttaagtaacttgcggaagcatgaggctccccagcctccccttgctctgcacccgacgaagcctcctgtgccagttatttcctctgctgtgctattgagtcagaaggacgccacccagctggtgtgcacagacctgaatctgttgcaacagcaggccagaaccgcagctcttcgggaatctcagcaggttgctctggatggtgagctgttagacacaatgccaaagcagtatgtgaatcgtgaagaacagaccacactacatttggagtgcagaggcagcagcggtaagaaatgccaaggagccgcagttgtcacggttcagtttgaaggcatgcataagaatgaagccataagccaacagcttcatgttttacggaaggaagtgaagcagttgcaagcagaagctgctaaaccaccatcacttaatattgtggaagctgctgtacatgcagaaaacttgatcacggccttagtgaatgcctacaagttgcagcctacacctgggattcagaaagttggcattagccttttctttactattgtggattacgtcagcgatgagacgcagcgtcatcccccaacaaggcagttctttacttcatgtattgagatcttgggacaggtatttatcagtggcattaaancagagtgcagaaaagtacttgaaaccattctgaagaacagcaggctctgctccctgctgtctcctttcttcactcccaatgctgcacctgcagagttcatacagctgtatgagcaagtggtgaagtttctaagtgaggacaacagtgatatgattttcatgctgctaaccaagttcgatcttaaacaatggttaagcgccactaaacctcctctgtctgatcgtaccaggcttctggagtccattcacttggcacttactgcctggggccttgaaccagatgaggatattttgatgccatttaatcttttctgtaagcactggacttatcttcttctctaccagtttcctgaccagtacagtgacattctcaggctgcttatgcaaagctccgcggagcagcttctgagccccgagtgttggaaggccactctgagagccctgggctgctgcgcccccagctgccagcagggggcagcgtccaccgagggcgccgtgcttcccagctcttctgatgctctcttgtcagacaagcaggtaatggagactatacagtggctttcagactttttttataagcttcggttatccaagatggactttaaaagctttggtttattctcaaaatggagtccttatatggctgatgtgaagacattcttgggctaccttgtgaaaaggctgattgacttagaaatgacctgtttggcccaagacccaactgccagcaggaaaacagtgctgaaatccctacattcagtaatcattcagctctttaagccatggatcctggttttagaggacaacgaaagcagccaacagcggcattacccctggctagagagtgatactgtggtggcctcaagcattgtgcagctgttcactgactgtattgactcactgcatgagagttttaaagataagctgttgccaggtgatgcaggagccctttggttgcacctgatgcattattgtgaagcatgtacagcacccaaaatgccagagttcattctgtacgctttccatagcacgtaccggaaactgccatggaaggacctgcaccctgaccagatgctcatggaggccttcttcaaagtggaacgaggaagccccaagagctgtttcttatttttggggtctgtactctgtgaagtcaactgggttagtgtgctctctgatgcctggaattccagtccccacccagaaacccgcagcatgattgtctgcctccttttcatgatgattttattggcaaaggaagttcaactggtagaccaaacagattcacctttacttagtctccttggacagacaagctcactttcatggcatcttgtggatattgtgtcgtaccagagtgtgctaagttatttcagcagccattacccgccgtccatcatcctggcaaaagaatcttatgctgaattaatcatgaagctcctaaaagtgtctgcgggcctttctattcctactgacagccagaagcatcttgatgcagttccaaaatgccaagcttttactcatcagatggttcaattcctcagcaccctggaacaaaatggaaaaatcaccttagcagtcctagaacaggaaatgtctaagctcttagacgatatcattgtctttaacccgcccgacatggacagccagacccgccacatggccctcagcagcctctttatggaagtcctgatgatgatgaacaacgcgactattccaacagcagagttccttcggggcagtatccggacctggattggccaaaaaatgcatgggctggtggtgctgccccttttaacagcagcctgccagagcctggcgtccgtccgccacatggctgagactacagaagcctgcatcactgcctacttcaaagaaagccctctcaatcagaattcaggatggggacccattctggtatcccttcaggttcccgagctcaccatggaagagttcctgcaggagtgcctcaccttgggcagttacttgactctttacgtctacttgcttcagtgtttaaacagcgaacagactttaaggaatgaaatgaaagtgctgctcatcttaagcaagtggctggaacaggtgtacccaagctccgtggaggaagaggcaaagctgtttttgtggtggcaccaagtccttcagctctccctcattcagacagagcagaatgactccgtcctgacagaatctgtcattcgaattctgctcttggttcagagcaggcagaacctcgtggctgaggagagactcagctctgggatcctgggggcaattgggtttggccggaagtcgcctttgtctaacaggttccgagtggttgcccgaagcatggctgccttcctttcagttcaggttcctatggaagatcagatccgtttgaggcctggctctgaattacatctgacccccaaagctcagcaggctctgaatgctcttgaatccatggcatcaagtaagcagtatgttgaataccaggatcaaatattgcaagccacccaatttataaggcatcctggccattgccttcaagatgggaaaagcttcttggctcttctcgttaactgtctgtatccagaagtgcattatttggaccacatacgatagttaacactgaggctcttgaaaaacccattgctgtttatgtttacatttaactttgctgttgcacaagtaactttgctcaattgcactgtagagctcagtttggccaatgtgtagttgactgagatgcaagttgggaggcgttagatattagataattttggggtgtgtgtgtgtgtgtgtgtgtgttttcttagctcttaagaccttctggggactctttaagtttttatatttatccacaagagaaacttactaagttccacttgggtgcagagccactcacagttgccgaatgtcccagtcatctcacaagacctccagatggagttctttgtatgtttccacttctgtctctgttttatgtaaatgttccagatctgacaaccttggaagtcactcagtacccttacttttaaaccccatttgtgttcctccaaagtaaagaagtcaattttgaaaaatttctgcatttctcaaatgtggacaaatacaatagttttaaagtattgtttttctcagaagggagataaaaatgccgagttagttaaagtgggtcatgtgtaaaatacgaccacttgatcgtgattatagtgggcagtagagatgatgacaagtcaatttccatccagccgtgtatcctcatggagaagctgcctgtctgaatcaggatggcaagctggcagtctgggaggagcatgttttgcacagatgttttgtttggtccacttggtgaggagtgcagacagggctgcctctctctagtcgggagagtctgtgcattccctcgggccctgaccctagcctcattcacatcacttgcccctgtcgacacctaagtttgcaccctttgatagacaccatgttcgatatctgaaaggctcagtgtcaggagacagagactgagggagactgaagacctgattctctgttccctgcttgttttttaacttcaaactcagatgaagccaatggacctgctgaaacacttgtctgtggaaactgggtcaggtcgggagatctactgaaatttggctttttttccatagccacgtgccttctgttgttgacagttcattcattaccaaagcctgtgtgtaactttgccttgttctgtggccatcttcttgctcatgttatttctcctgggaatgagcagtttgacttctgttcccacgttcctcattctatcagctctagatggattttgcctgcatagctggcttaatatgtctttgtgtatgggtagtctgtagcctgagaatatttacctaaaaatgtctaaacagccaccaagaatgtttataggggtataggaatatagttaacagagtgctaatctctcctcaaatgtccttttggaatgcttcccccaaaattgggaagttggtaggagcttttctttactttgaatttctttacttggacagaacgattctgccttaaagacacgctttgcagctctgataaagaacatccctgtttagtctcttgagttttacaggccacaaaatgtccgtctcagagggatctgtctcagcttttcttatttttgcttctctccgttttcaaaattaatcatcttgttctctgtataagaaaatttgagaagctgtggacaatttaatagtctgatctggcaacagcgatttttgtttggaaatattttgtgttttctttgaggaggatataattactgatatcctaggatgtgaaatttttgagtgacagtatgcacattttaaagaaaattatgattaatctgtataatgttttttggtctgtaaaaattataaaaaataaaatcatttatctttggttgta

SEQ ID NO: 461986 - DNA, 8727 bp, Homo sapiens
  misc_feature (1)..(2): n is a, c, g, or t
  misc_feature (8)..(8): n is a, c, g, or t
  misc_feature (5523)..(5523): n is a, c, g, or t
nnatttcntcaagccgacgcgggtgaggtgtgcgagcgcgcccgggatccgcactgagtgaggttccgcagagccgggagacggaggaggtgggtcagcctgggtcgctgcccttgtccagcgcaacccaagacacctgcgcgccgggtggagccagggctaggggtggggcctgggctccgggaagggggcgggcctgccttcctccagtgcaaatgcgtcctggagtggtttgtcctacgttgcggcccgtagaggcgccgactcaccgcctcttctccgggagtggcggagattcgatcatgtgacagtccggaggccagaaccgggcaggttgcttgaagcgcaggggtttgacaaaaacaaacggtgacggcgccgcggaagggtctatggccgaggcggtgaagccccagcgccgggccaaggccaaggccagccggactaaaacaaaggaaaagaagaagtatgaaactcctcagagggaagagtccagtgaagtctcccttccaaaaacctccagagagcaggaaatcccttctctagcctgtgaattcaaaggagaccatctgaaggtggtaactgattcccagctccaggatgatgccagtggacaaaatgagagtgaaatgtttgatgtaccactcacctccttaactataagcaatgaagagtccctgacgtgtaacacagagcccccaaaggaagggggagaggccagaccctgtgtgggggacagtgcagtcactccaaaggtccaccctggagacaatgttggaactaaagtagaaacccccaagaacttcacagaggtagaggaaaatatgtcggtacaaggtggactttcagaaagtgcaccccaatctaatttttcttatactcagccagcaatggaaaatatacaagtcagagaaactcagaatagtaaagaagacaaacaaggcctggtttgttcttcagaggtgccacagaatgttggcttgcagagttcttgcccagccaaacatggttttcagacacctagagtgaagaaactgtatccccagttgccagctgaaattgctggagaagcaccagctttggtggcagtgaaacccttgcttcgcagtgagcgactctacccagaactcccgtctcaactggaactagtaccatttactaaagaacagctaaaaatcttggagcctggttcatggctggaaaatgttgagtcatatttagaagaatttgacagcatggctcatcaagacaggcatgaattttatgagttgcttttgaactactcacgatgtaggaagcaactgctgctggctgaagctgagctgcttactctgacatctgattgccaaaatgctaaaagtcggctgtggcagtttaaggaggaacaaatgtctgtacagggtatctgtgcagatcaagtgaaagttttcagctatcatcgctaccaaagagtagaaatgaatgaaaatgcactggtggagctaaagaagctattcgatgccaaatctgagcacctccaccagaccctggcccttcattcttatacttctgtgctctcaagattgcaagtggagtcttacatctatgcattgctcagtagttcagctgttctgagatcttcagcaattcaccagcaaggccgagcgtctaagcagacagaaagcattccctctgatctgtgtcaactaaaggaatgcattagtgtcttattcatgttcaccaggagagttaatgaagatactcagtttcatgatgatattcttctctggctgcagaaattggtatccgtgctacaaagagttggctgtcctggagatcacctcttccttctaaaccatattcttcgatgccccgctggtgttagtaaatgggctgttccttttatccagatcaaagtgttgcataacccatcaggggtctttcattttatgcaatcccttgccctgctgatgtctcctgtcaaaaatcgagctgagtttatgtgccacatgaagcccagcgagcggaagccatcctcctcagggcctgggtctgggacttggacgctagtagacgaaggaggagaagaggatgaagaccctgagaccagttggattctccttaatgaagatgatttggttaccattttagcacagttcccctttcatgaactctttcagcatcttcttgggtttaaagcaaaaggtgattatttacctgaaacaacaagacctcaagagatgatgaaaatttttgcctttgccaactcactagtggaacttctggctgtggggttagaaacctttaatagagcacgctataggcagtttgtgaagcgaattggttatatgatcaggatgactcttggttatgtaagtgaccattgggcacagtatgtgagccataaccaaggctcaggattggcccaacagccctactctatggagaaactacaggttgaatttgatgaactgtttttgagggctgtcctacatgtgctgaaggccaaaagacttggcatttggctgtttatgtccgagatgccctttgggactctgtctgtgcaaatgctgtggaagctcttctacctcatgcaccaggtggagagcgagaacctgcagcagctctcctcctccctgcagcccgcccagtgcaagcagcagctccaagacccagaacattttaccaactttgagaagtgtctttcttctatgaatagctcagaagagatttgccttctgactacctttgctcagatggctcaggccagaagaaccaatgtggacgaagacttcataaaaattattgttctggagatatatgaggtatcttatgtcaccttgtctaccagagagactttttcaaaggttggtcgagagcttttagggactatcacagctgttcaccctgagataatttccgtccttctggatagagttcaagagaccattgaccaggttggaatggtttctctatacttgtttaaagaactgcctttgtatctttggcaaccttctgcatctgagatagcggtgattcgggattggttattgaattacaacctgacagtggtgaagaataaactggcctgtgttattcttgaaggactgaattggggatttgctaaacaggctacccttcatctggatcaagcagtccatgctgaagtggctttaatggttcttgaagcttatcagaagtaccttgcacagaagccatatgctgggattctctctgaaagtatgaagcaggtttcatatttggccagtattgttcgatatggagagacacccgagacctcatttaaccaatgggcctggaatttaatcttgaggctaaaactgcacaaaaacgattatggaatacagccgaattgtccagctgttcccttctccgtcactgtgcctgacatgacagagtcacccacgtttcatcctctcttgaaggctgtgaaagcgggcatgcccattggctgttatctagccttatctatgacagctgtgggccacagcattgagaagttctgtgcagaaggcatcccactattgggaattctggtccagtcaagacatttgagaacagtggttcatgtcctggataagattctgcctttattttacccttgccagtattaccttctgaagaatgagcagtttttatcgcatctcctcttgttcctacacttggacagcggtgtccctcagggtgtcacacaacaggtcacccacaaggtggcacagcacctgacaggagccagccatggggacaacgtgaagcttctcaacagcatgatccaggcacacatatctgtaagcactcagcccaatgaagtgggccccgttgctgtgttggagttctgggttcaggctctcataagccagcatctctggtaccgagaacaacctatcctcttcctcatggaccacttgtgtaaagcagcttttcagctgatgcaggaagactgcatacagaaattactctaccaacaacataagaatgccttgggttaccactgtgaccggagtctgctctcatctttggtaagctggattgtggcaggcaacatcactccttcctttgtggagggcttggccacgcccactcaggtctggtttgcctggacagtgctcaacatggaatccatctttgaagaggactcccagctccggagagttattgaaggggaattggtgataaactctgctttcacccctgaccaagctctgaagaaagcccagacccagctgaagctccccatcgtgccatccctccagaggctgctgatttatcgctgggcccaccaggctctggtcacaccttctgatcaccccctcctgccactcatttggcagaagttcttccttctgtatcttcaccgtccgggaccacagtatgggttacccatagatggttgtattggaagaaggttttttcaaagtcctgctcatatcaatttgttgaaagaaatgaagagacgtttgaccgaggtggctgacttccaccatgctgcaagcaaggccctccgtgttccagcagagggcagtgaagggctgccagagagccactctggcacccctggttacctgacttcaccagaactgcacaaggagctggtgaggctcttcaatgtatatatattatggctagaagatgagaattttcaaaaaggagatacctatatcccttctctaccaaagcattatgatattcacaggctagcaaaagtgatgcagaatcagcaggatctgtggatggagtatttgaacatggagcgcatctatcatgagtttcaggagactgttggtctgtggacacaggccaagcttgagtcccattccacaccctgcagtttgtccgtgcagctggacttcactgatcctttgctggctaaagaaagggttttaagtaacttgcggaagcatgaggctccccagcctccccttgctctgcacccgacgaagcctcctgtgccagttatttcctctgctgtgctattgagtcagaaggacgccacccagctggtgtgcacagacctgaatctgttgcaacagcaggccagaaccgcagctcttcgggaatctcagcaggttgctctggatggtgagctgttagacacaatgccaaagcagtatgtgaatcgtgaagaacagaccacactacatttggagtgcagaggcagcagcggtaagaaatgccaaggagccgcagttgtcacggttcagtttgaaggcatgcataagaatgaagccataagccaacagcttcatgttttacggaaggaagtgaagcagttgcaagcagaagctgctaaaccaccatcacttaatattgtggaagctgctgtacatgcagaaaacttgatcacggccttagtgaatgcctacaagttgcagcctacacctgggattcagaaagttggcattagccttttctttactattgtggattacgtcagcgatgagacgcagcgtcatcccccaacaaggcagttctttacttcatgtattgagatcttgggacaggtatttatcagtggcattaaancagagtgcagaaaagtacttgaaaccattctgaagaacagcaggctctgctccctgctgtctcctttcttcactcccaatgctgcacctgcagagttcatacagctgtatgagcaagtggtgaagtttctaagtgaggacaacagtgatatgattttcatgctgctaaccaagttcgatcttaaacaatggttaagcgccactaaacctcctctgtctgatcgtaccaggcttctggagtccattcacttggcacttactgcctggggccttgaaccagatgaggatattttgatgccatttaatcttttctgtaagcactggacttatcttcttctctaccagtttcctgaccagtacagtgacattctcaggctgcttatgcaaagctccgcggagcagcttctgagccccgagtgttggaaggccactctgagagccctgggctgctgcgcccccagctgccagcagggggcagcgtccaccgagggcgccgtgcttcccagctcttctgatgctctcttgtcagacaagcaggtaatggagactatacagtggctttcagactttttttataagcttcggttatccaagatggactttaaaagctttggtttattctcaaaatggagtccttatatggctgatgtgaagacattcttgggctaccttgtgaaaaggctgattgacttagaaatgacctgtttggcccaagacccaactgccagcaggaaaacagtgctgaaatccctacattcagtaatcattcagctctttaagccatggatcctggttttagaggacaacgaaagcagccaacagcggcattacccctggctagagagtgatactgtggtggcctcaagcattgtgcagctgttcactgactgtattgactcactgcatgagagttttaaagataagctgttgccaggtgatgcaggagccctttggttgcacctgatgcattattgtgaagcatgtacagcacccaaaatgccagagttcattctgtacgctttccatagcacgtaccggaaactgccatggaaggacctgcaccctgaccagatgctcatggaggccttcttcaaagtggaacgaggaagccccaagagctgtttcttatttttggggtctgtactctgtgaagtcaactgggttagtgtgctctctgatgcctggaattccagtccccacccagaaacccgcagcatgattgtctgcctccttttcatgatgattttattggcaaaggaagttcaactggtagaccaaacagattcacctttacttagtctccttggacagacaagctcactttcatggcatcttgtggatattgtgtcgtaccagagtgtgctaagttatttcagcagccattacccgccgtccatcatcctggcaaaagaatcttatgctgaattaatcatgaagctcctaaaagtgtctgcgggcctttctattcctactgacagccagaagcatcttgatgcagttccaaaatgccaagcttttactcatcagatggttcaattcctcagcaccctggaacaaaatggaaaaatcaccttagcagtcctagaacaggaaatgtctaagctcttagacgatatcattgtctttaacccgcccgacatggacagccagacccgccacatggccctcagcagcctctttatggaagtcctgatgatgatgaacaacgcgactattccaacagcagagttccttcggggcagtatccggacctggattggccaaaaaatgcatgggctggtggtgctgccccttttaacagcagcctgccagagcctggcgtccgtccgccacatggctgagactacagaagcctgcatcactgcctacttcaaagaaagccctctcaatcagaattcaggatggggacccattctggtatcccttcaggttcccgagctcaccatggaagagttcctgcaggagtgcctcaccttgggcagttacttgactctttacgtctacttgcttcagtgtttaaacagcgaacagactttaaggaatgaaatgaaagtgctgctcatcttaagcaagtggctggaacaggtgtacccaagctccgtggaggaagaggcaaagctgtttttgtggtggcaccaagtccttcagctctccctcattcagacagagcagaatgactccgtcctgacagaatctgtcattcgaattctgctcttggttcagagcaggcagaacctcgtggctgaggagagactcagctctgggatcctgggggcaattgggtttggccggaagtcgcctttgtctaacaggtaaggaagcgcctttctaacactgttgttctaaataggcctcagacatctgtacctacttacaggttgtgatatacttcagtaggtttttcgacttaggatctaggttctccagaaagattaatggaaaaaaaaaaagaaaaaaaaaacagagcctgattacatctttacattctaaaaagcatttttattttttcttacctttaaaaaaaattttcaattcaaacagtatttttaatagtatctcctgttgtgtttggactttgtaacctaactgcactactgatttctttttggttttgagctagtcatggacgtgacagtatgcacattttaaagaaaattatgattaatctgtataatgttttttggtctgtaaaaattataaaaaataaaatcatttatctttggttgtaactgtttaaaaaccaaattatagggatatcacactatcttgtaaagtgtttcagctgttaaagttgctgttcctgattcctgatgaaaataacttgaaaaaaaaataattatactactgatcctcttttgggataatgaaattgcgaaggaatgttgttgattataacttttattttttaatgtacagatgtactgtctctcattgagcactgatagaatttatttttctttcaatagtttaaaatcacttatgtggagacacatacttaagtgtgttcaactcgttttcttcccacatatctagtgtgacctttaaaaaccacaactttattttggacattaaatgtgcaatattcactacttattcattgttccacatttttcatacttgtacaaagggtaagtttttatataatggtgagaaacaggaagaaatgacaactggttaagtaaaattctgcaaataaactagattc

SEQ ID NO: 461987 - DNA, 1361 bp, Homo sapiens
ctcgtaccgatacgctcctgacggcaaatacaatagttttaaagtattgtttttctcagaagggagataaaaatgccgagttagttaaagtgggtcatgtgtaaaatacgaccacttgatcgtgattatagtgggcagtagagatgatgacaagtcaatttccatccagccgtgtatcctcatggagaagctgcctgtctgaatcaggatggcaagctggcagtctgggaggagcatgttttgcacagatgttttgtttggtccacttggtgaggagtgcagacagggctgcctctctctagtcgggagagtctgtgcattccctcgggccctgaccctagcctcattcacatcacttgcccctgtcgacacctaagtttgcaccctttgatagacaccatgttcgatatctgaaaggctcagtgtcaggagacagagactgagggagactgaagacctgattctctgttccctgcttgttttttaacttcaaactcagatgaagccaatggacctgctgaaacacttgtctgtggaaactgggtcaggtcgggagatctactgaaatttggctttttttccatagccacgtgccttctgttgttgacagttcattcattaccaaagcctgtgtgtaactttgccttgttctgtggccatcttcttgctcatgttatttctcctgggaatgagcagtttgacttctgttcccacgttcctcattctatcagctctagatggattttgcctgcatagctggcttaatatgtctttgtgtatgggtagtctgtagcctgagaatatttacctaaaaatgtctaaacagccaccaagaatgtttataggggtataggaatatagttaacagagtgctaatctctcctcaaatgtccttttggaatgcttcccccaaaattgggaagttggtaggagcttttctttactttgaatttctttacttggacagaacgattctgccttaaagacacgctttgcagctctgataaagaacatccctgtttagtctcttgagttttacaggccacaaaatgtccgtctcagagggatctgtctcagcttttcttatttttgcttctctccgttttcaaaattaatcatcttgttctctgtataagaaaatttgagaagctgtggacaatttaatagtctgatctggcaacagcgatttttgtttggaaatattttgtgttttctttgaggaggatataattactgatatcctaggatgtgaaatttttgagtgacagtatgcacattttaaagaaaattatgattaatctgtataatgttttttggtctgtaaaaattataaaaaataaaatcatttatctttggttgta

SEQ ID NO: 461988 - DNA, 7180 bp, Homo sapiens
  misc_feature (1)..(2): n is a, c, g, or t
  misc_feature (8)..(8): n is a, c, g, or t
  misc_feature (5523)..(5523): n is a, c, g, or t
nnatttcntcaagccgacgcgggtgaggtgtgcgagcgcgcccgggatccgcactgagtgaggttccgcagagccgggagacggaggaggtgggtcagcctgggtcgctgcccttgtccagcgcaacccaagacacctgcgcgccgggtggagccagggctaggggtggggcctgggctccgggaagggggcgggcctgccttcctccagtgcaaatgcgtcctggagtggtttgtcctacgttgcggcccgtagaggcgccgactcaccgcctcttctccgggagtggcggagattcgatcatgtgacagtccggaggccagaaccgggcaggttgcttgaagcgcaggggtttgacaaaaacaaacggtgacggcgccgcggaagggtctatggccgaggcggtgaagccccagcgccgggccaaggccaaggccagccggactaaaacaaaggaaaagaagaagtatgaaactcctcagagggaagagtccagtgaagtctcccttccaaaaacctccagagagcaggaaatcccttctctagcctgtgaattcaaaggagaccatctgaaggtggtaactgattcccagctccaggatgatgccagtggacaaaatgagagtgaaatgtttgatgtaccactcacctccttaactataagcaatgaagagtccctgacgtgtaacacagagcccccaaaggaagggggagaggccagaccctgtgtgggggacagtgcagtcactccaaaggtccaccctggagacaatgttggaactaaagtagaaacccccaagaacttcacagaggtagaggaaaatatgtcggtacaaggtggactttcagaaagtgcaccccaatctaatttttcttatactcagccagcaatggaaaatatacaagtcagagaaactcagaatagtaaagaagacaaacaaggcctggtttgttcttcagaggtgccacagaatgttggcttgcagagttcttgcccagccaaacatggttttcagacacctagagtgaagaaactgtatccccagttgccagctgaaattgctggagaagcaccagctttggtggcagtgaaacccttgcttcgcagtgagcgactctacccagaactcccgtctcaactggaactagtaccatttactaaagaacagctaaaaatcttggagcctggttcatggctggaaaatgttgagtcatatttagaagaatttgacagcatggctcatcaagacaggcatgaattttatgagttgcttttgaactactcacgatgtaggaagcaactgctgctggctgaagctgagctgcttactctgacatctgattgccaaaatgctaaaagtcggctgtggcagtttaaggaggaacaaatgtctgtacagggtatctgtgcagatcaagtgaaagttttcagctatcatcgctaccaaagagtagaaatgaatgaaaatgcactggtggagctaaagaagctattcgatgccaaatctgagcacctccaccagaccctggcccttcattcttatacttctgtgctctcaagattgcaagtggagtcttacatctatgcattgctcagtagttcagctgttctgagatcttcagcaattcaccagcaaggccgagcgtctaagcagacagaaagcattccctctgatctgtgtcaactaaaggaatgcattagtgtcttattcatgttcaccaggagagttaatgaagatactcagtttcatgatgatattcttctctggctgcagaaattggtatccgtgctacaaagagttggctgtcctggagatcacctcttccttctaaaccatattcttcgatgccccgctggtgttagtaaatgggctgttccttttatccagatcaaagtgttgcataacccatcaggggtctttcattttatgcaatcccttgccctgctgatgtctcctgtcaaaaatcgagctgagtttatgtgccacatgaagcccagcgagcggaagccatcctcctcagggcctgggtctgggacttggacgctagtagacgaaggaggagaagaggatgaagaccctgagaccagttggattctccttaatgaagatgatttggttaccattttagcacagttcccctttcatgaactctttcagcatcttcttgggtttaaagcaaaaggtgattatttacctgaaacaacaagacctcaagagatgatgaaaatttttgcctttgccaactcactagtggaacttctggctgtggggttagaaacctttaatagagcacgctataggcagtttgtgaagcgaattggttatatgatcaggatgactcttggttatgtaagtgaccattgggcacagtatgtgagccataaccaaggctcaggattggcccaacagccctactctatggagaaactacaggttgaatttgatgaactgtttttgagggctgtcctacatgtgctgaaggccaaaagacttggcatttggctgtttatgtccgagatgccctttgggactctgtctgtgcaaatgctgtggaagctcttctacctcatgcaccaggtggagagcgagaacctgcagcagctctcctcctccctgcagcccgcccagtgcaagcagcagctccaagacccagaacattttaccaactttgagaagtgtctttcttctatgaatagctcagaagagatttgccttctgactacctttgctcagatggctcaggccagaagaaccaatgtggacgaagacttcataaaaattattgttctggagatatatgaggtatcttatgtcaccttgtctaccagagagactttttcaaaggttggtcgagagcttttagggactatcacagctgttcaccctgagataatttccgtccttctggatagagttcaagagaccattgaccaggttggaatggtttctctatacttgtttaaagaactgcctttgtatctttggcaaccttctgcatctgagatagcggtgattcgggattggttattgaattacaacctgacagtggtgaagaataaactggcctgtgttattcttgaaggactgaattggggatttgctaaacaggctacccttcatctggatcaagcagtccatgctgaagtggctttaatggttcttgaagcttatcagaagtaccttgcacagaagccatatgctgggattctctctgaaagtatgaagcaggtttcatatttggccagtattgttcgatatggagagacacccgagacctcatttaaccaatgggcctggaatttaatcttgaggctaaaactgcacaaaaacgattatggaatacagccgaattgtccagctgttcccttctccgtcactgtgcctgacatgacagagtcacccacgtttcatcctctcttgaaggctgtgaaagcgggcatgcccattggctgttatctagccttatctatgacagctgtgggccacagcattgagaagttctgtgcagaaggcatcccactattgggaattctggtccagtcaagacatttgagaacagtggttcatgtcctggataagattctgcctttattttacccttgccagtattaccttctgaagaatgagcagtttttatcgcatctcctcttgttcctacacttggacagcggtgtccctcagggtgtcacacaacaggtcacccacaaggtggcacagcacctgacaggagccagccatggggacaacgtgaagcttctcaacagcatgatccaggcacacatatctgtaagcactcagcccaatgaagtgggccccgttgctgtgttggagttctgggttcaggctctcataagccagcatctctggtaccgagaacaacctatcctcttcctcatggaccacttgtgtaaagcagcttttcagctgatgcaggaagactgcatacagaaattactctaccaacaacataagaatgccttgggttaccactgtgaccggagtctgctctcatctttggtaagctggattgtggcaggcaacatcactccttcctttgtggagggcttggccacgcccactcaggtctggtttgcctggacagtgctcaacatggaatccatctttgaagaggactcccagctccggagagttattgaaggggaattggtgataaactctgctttcacccctgaccaagctctgaagaaagcccagacccagctgaagctccccatcgtgccatccctccagaggctgctgatttatcgctgggcccaccaggctctggtcacaccttctgatcaccccctcctgccactcatttggcagaagttcttccttctgtatcttcaccgtccgggaccacagtatgggttacccatagatggttgtattggaagaaggttttttcaaagtcctgctcatatcaatttgttgaaagaaatgaagagacgtttgaccgaggtggctgacttccaccatgctgcaagcaaggccctccgtgttccagcagagggcagtgaagggctgccagagagccactctggcacccctggttacctgacttcaccagaactgcacaaggagctggtgaggctcttcaatgtatatatattatggctagaagatgagaattttcaaaaaggagatacctatatcccttctctaccaaagcattatgatattcacaggctagcaaaagtgatgcagaatcagcaggatctgtggatggagtatttgaacatggagcgcatctatcatgagtttcaggagactgttggtctgtggacacaggccaagcttgagtcccattccacaccctgcagtttgtccgtgcagctggacttcactgatcctttgctggctaaagaaagggttttaagtaacttgcggaagcatgaggctccccagcctccccttgctctgcacccgacgaagcctcctgtgccagttatttcctctgctgtgctattgagtcagaaggacgccacccagctggtgtgcacagacctgaatctgttgcaacagcaggccagaaccgcagctcttcgggaatctcagcaggttgctctggatggtgagctgttagacacaatgccaaagcagtatgtgaatcgtgaagaacagaccacactacatttggagtgcagaggcagcagcggtaagaaatgccaaggagccgcagttgtcacggttcagtttgaaggcatgcataagaatgaagccataagccaacagcttcatgttttacggaaggaagtgaagcagttgcaagcagaagctgctaaaccaccatcacttaatattgtggaagctgctgtacatgcagaaaacttgatcacggccttagtgaatgcctacaagttgcagcctacacctgggattcagaaagttggcattagccttttctttactattgtggattacgtcagcgatgagacgcagcgtcatcccccaacaaggcagttctttacttcatgtattgagatcttgggacaggtatttatcagtggcattaaancagagtgcagaaaagtacttgaaaccattctgaagaacagcaggctctgctccctgctgtctcctttcttcactcccaatgctgcacctgcagagttcatacagctgtatgagcaagtggtgaagtttctaagtgaggacaacagtgatatgattttcatgctgctaaccaagttcgatcttaaacaatggttaagcgccactaaacctcctctgtctgatcgtaccaggcttctggagtccattcacttggcacttactgcctggggccttgaaccagatgaggatattttgatgccatttaatcttttctgtaagcactggacttatcttcttctctaccagtttcctgaccagtacagtgacattctcaggctgcttatgcaaagctccgcggagcagcttctgagccccgagtgttggaaggccactctgagagccctgggctgctgcgcccccagctgccagcagggggcagcgtccaccgagggcgccgtgcttcccagctcttctgatgctctcttgtcagacaagcaggtaatggagactatacagtggctttcagactttttttataagcttcggttatccaagatggactttaaaagctttggtttattctcaaaatggagtccttatatggctgatgtgaagacattcttgggctaccttgtgaaaaggctgattgacttagaaatgacctgtttggcccaagacccaactgccagcaggaaaacagtgctgaaatccctacattcagtaatcattcagctctttaagccatggatcctggttttagaggacaacgaaagcagccaacagcggcattacccctggctagagagtgatactgtggtggcctcaagcattgtgcagctgttcactgactgtattgactcactgcatgagagttttaaagataagctgttgccaggtgatgcaggagccctttggttgcacctgatgcattattgtgaagcatgtacagcacccaaaatgccagagttcattctgtacgctttccatagcacgtaccggaaactgccatggaaggacctgcaccctgaccagatgctcatggaggccttcttcaaagtggaacgaggaagccccaagagctgtttcttatttttggggtctgtactctgtgaagtcaactgggttagtgtgctctctgatgcctggaattccagtccccacccagaaacccgcagcatgattgtctgcctccttttcatgatgattttattggcaaaggaagttcaactggtagaccaaacagtaagtttgggaaagcttatggcaaaaattcggcaaggctgcttagatctttgctttctactaggtcggtagtttttcatttgtttttccagtgcccctatcagtgtgaacagatgcttggcatatgagatgtacctttaaccagatgcctgattttcttggatagctcattatctgattctaaattatgcaaagaaccacactgagttagaatgtattaatcaactttattttgtatctcattaatatctacttcaatctcttgtatgcttcttgaagtcaattttggcatgtcccaccagaacagagagttcttttgaaagaaaagaacctgggttccagatactcaatacatcttaatatgaatgtgtttttgc

SEQ ID NO: 461989 - DNA, 987 bp, Homo sapiens
ctctggatgcaaagtgtctctggatgcaaagtgtcctctggatgcaaagtgtcaggagacagagactgagggagactgaagacctgattctctgttccctgcttgttttttaacttcaaactcagatgaagccaatggacctgctgaaacacttgtctgtggaaactgggtcaggtcgggagatctactgaaatttggctttttttccatagccacgtgccttctgttgttgacagttcattcattaccaaagcctgtgtgtaactttgccttgttctgtggccatcttcttgctcatgttatttctcctgggaatgagcagtttgacttctgttcccacgttcctcattctatcagctctagatggattttgcctgcatagctggcttaatatgtctttgtgtatgggtagtctgtagcctgagaatatttacctaaaaatgtctaaacagccaccaagaatgtttataggggtataggaatatagttaacagagtgctaatctctcctcaaatgtccttttggaatgcttcccccaaaattgggaagttggtaggagcttttctttactttgaatttctttacttggacagaacgattctgccttaaagacacgctttgcagctctgataaagaacatccctgtttagtctcttgagttttacaggccacaaaatgtccgtctcagagggatctgtctcagcttttcttatttttgcttctctccgttttcaaaattaatcatcttgttctctgtataagaaaatttgagaagctgtggacaatttaatagtctgatctggcaacagcgatttttgtttggaaatattttgtgttttctttgaggaggatataattactgatatcctaggatgtgaaatttttgagtgacagtatgcacattttaaagaaaattatgattaatctgtataatgttttttggtctgtaaaaattataaaaaataaaatcatttatctttggttgta

SEQ ID NO: 461990 - DNA, 445 bp, Homo sapiens
gggatctgtctcagcttttcttatttttgcttctctccgttttcaaaattaatcatcttgttctctgtataagaaaatttgagaagctgtggacaatttaatagtctgatctggcaacagcgatttttgtttggaaatattttgtgttttctttgaggaggatataattactgatatcctaggatgtgaaatttttgagtgacagtatgcacattttaaagaaaattatgattaatctgtataatgttttttggtctgtaaaaattataaaaaataaaatcatttatctttggttgtaactgtttaaaaaccaaattatagggatatcacactatcttgtaaagtgtttcagctgttaaagttgctgtaggtttttatgcctgatgtcatttaatttatttgacattgaacttcattaataatcagagatggtcagtgaaagcgc

SEQ ID NO: 461991 - DNA, 559 bp, Homo sapiens
caagagaaacttactaagttccacttgggtgcagagccactcacagttgccgaatgtcccagtcatctcacaagacctccagatggagttctttgtatgtttccacttctgtctctgttttatgtaaatgttccagatctgacaaccttggaagtcactcagtacccttacttttaaaccccatttgtgttcctccaaagtaaagaagtcaattttgaaaaatttctgcatttctcaaatgtggacaaatacaatagttttaaagtattgtttttctcagaagggagataaaaatgccgagttagttaaagtgggtcatgtgtaaaatacgaccacttgatcgtgattatagtgggcagtagagatgatgacaagtcaatttccatccagccgtgtatcctcatggagaagctgcctgtctgaatcaggatggcaagctggcagtctgggaggagcatgttttgcacagatgttttgtttggtccacttggtgaggagtgcagacagggctgcctctctctagtcgggagagtctgtgcattccctcgggccctgaccc

SEQ ID NO: 461992 - DNA, 6868 bp, Homo sapiens
  misc_feature (1961)..(1961): n is a, c, g, or t
aagtaattagggaaaattctgttgagttctgatcggaaggtaaagtgcgtcctcctgtgtgcttggcaggtttttatcgcatctcctcttgttcctacacttggacagcggtgtccctcagggtgtcacacaacaggtcacccacaaggtggcacagcacctgacaggagccagccatggggacaacgtgaagcttctcaacagcatgatccaggcacacatatctgtaagcactcagcccaatgaagtgggccccgttgctgtgttggagttctgggttcaggctctcataagccagcatctctggtaccgagaacaacctatcctcttcctcatggaccacttgtgtaaagcagcttttcagctgatgcaggaagactgcatacagaaattactctaccaacaacataagaatgccttgggttaccactgtgaccggagtctgctctcatctttggtaagctggattgtggcaggcaacatcactccttcctttgtggagggcttggccacgcccactcaggtctggtttgcctggacagtgctcaacatggaatccatctttgaagaggactcccagctccggagagttattgaaggggaattggtgataaactctgctttcacccctgaccaagctctgaagaaagcccagacccagctgaagctccccatcgtgccatccctccagaggctgctgatttatcgctgggcccaccaggctctggtcacaccttctgatcaccccctcctgccactcatttggcagaagttcttccttctgtatcttcaccgtccgggaccacagtatgggttacccatagatggttgtattggaagaaggttttttcaaagtcctgctcatatcaatttgttgaaagaaatgaagagacgtttgaccgaggtggctgacttccaccatgctgcaagcaaggccctccgtgttccagcagagggcagtgaagggctgccagagagccactctggcacccctggttacctgacttcaccagaactgcacaaggagctggtgaggctcttcaatgtatatatattatggctagaagatgagaattttcaaaaaggagatacctatatcccttctctaccaaagcattatgatattcacaggctagcaaaagtgatgcagaatcagcaggatctgtggatggagtatttgaacatggagcgcatctatcatgagtttcaggagactgttggtctgtggacacaggccaagcttgagtcccattccacaccctgcagtttgtccgtgcagctggacttcactgatcctttgctggctaaagaaagggttttaagtaacttgcggaagcatgaggctccccagcctccccttgctctgcacccgacgaagcctcctgtgccagttatttcctctgctgtgctattgagtcagaaggacgccacccagctggtgtgcacagacctgaatctgttgcaacagcaggccagaaccgcagctcttcgggaatctcagcaggttgctctggatggtgagctgttagacacaatgccaaagcagtatgtgaatcgtgaagaacagaccacactacatttggagtgcagaggcagcagcggtaagaaatgccaaggagccgcagttgtcacggttcagtttgaaggcatgcataagaatgaagccataagccaacagcttcatgttttacggaaggaagtgaagcagttgcaagcagaagctgctaaaccaccatcacttaatattgtggaagctgctgtacatgcagaaaacttgatcacggccttagtgaatgcctacaagttgcagcctacacctgggattcagaaagttggcattagccttttctttactattgtggattacgtcagcgatgagacgcagcgtcatcccccaacaaggcagttctttacttcatgtattgagatcttgggacaggtatttatcagtggcattaaancagagtgcagaaaagtacttgaaaccattctgaagaacagcaggctctgctccctgctgtctcctttcttcactcccaatgctgcacctgcagagttcatacagctgtatgagcaagtggtgaagtttctaagtgaggacaacagtgatatgattttcatgctgctaaccaagttcgatcttaaacaatggttaagcgccactaaacctcctctgtctgatcgtaccaggcttctggagtccattcacttggcacttactgcctggggccttgaaccagatgaggatattttgatgccatttaatcttttctgtaagcactggacttatcttcttctctaccagtttcctgaccagtacagtgacattctcaggctgcttatgcaaagctccgcggagcagcttctgagccccgagtgttggaaggccactctgagagccctgggctgctgcgcccccagctgccagcagggggcagcgtccaccgagggcgccgtgcttcccagctcttctgatgctctcttgtcagacaagcaggtaatggagactatacagtggctttcagactttttttataagcttcggttatccaagatggactttaaaagctttggtttattctcaaaatggagtccttatatggctgatgtgaagacattcttgggctaccttgtgaaaaggctgattgacttagaaatgacctgtttggcccaagacccaactgccagcaggaaaacagtgctgaaatccctacattcagtaatcattcagctctttaagccatggatcctggttttagaggacaacgaaagcagccaacagcggcattacccctggctagagagtgatactgtggtggcctcaagcattgtgcagctgttcactgactgtattgactcactgcatgagagttttaaagataagctgttgccaggtgatgcaggagccctttggttgcacctgatgcattattgtgaagcatgtacagcacccaaaatgccagagttcattctgtacgctttccatagcacgtaccggaaactgccatggaaggacctgcaccctgaccagatgctcatggaggccttcttcaaagtggaacgaggaagccccaagagctgtttcttatttttggggtctgtactctgtgaagtcaactgggttagtgtgctctctgatgcctggaattccagtccccacccagaaacccgcagcatgattgtctgcctccttttcatgatgattttattggcaaaggaagttcaactggtagaccaaacagattcacctttacttagtctccttggacagacaagctcactttcatggcatcttgtggatattgtgtcgtaccagagtgtgctaagttatttcagcagccattacccgccgtccatcatcctggcaaaagaatcttatgctgaattaatcatgaagctcctaaaagtgtctgcgggcctttctattcctactgacagccagaagcatcttgatgcagttccaaaatgccaagcttttactcatcagatggttcaattcctcagcaccctggaacaaaatggaaaaatcaccttagcagtcctagaacaggaaatgtctaagctcttagacgatatcattgtctttaacccgcccgacatggacagccagacccgccacatggccctcagcagcctctttatggaagtcctgatgatgatgaacaacgcgactattccaacagcagagttccttcggggcagtatccggacctggattggccaaaaaatgcatgggctggtggtgctgccccttttaacagcagcctgccagagcctggcgtccgtccgccacatggctgagactacagaagcctgcatcactgcctacttcaaagaaagccctctcaatcagaattcaggatggggacccattctggtatcccttcaggttcccgagctcaccatggaagagttcctgcaggagtgcctcaccttgggcagttacttgactctttacgtctacttgcttcagtgtttaaacagcgaacagactttaaggaatgaaatgaaagtgctgctcatcttaagcaagtggctggaacaggtgtacccaagctccgtggaggaagaggcaaagctgtttttgtggtggcaccaagtccttcagctctccctcattcagacagagcagaatgactccgtcctgacagaatctgtcattcgaattctgctcttggttcagagcaggcagaacctcgtggctgaggagagactcagctctgggatcctgggggcaattgggtttggccggaagtcgcctttgtctaacaggttccgagtggttgcccgaagcatggctgccttcctttcagttcaggttcctatggaagatcagatccgtttgaggcctggctctgaattacatctgacccccaaagctcagcaggctctgaatgctcttgaatccatggcatcaagtaagcagtatgttgaataccaggatcaaatattgcaagccacccaatttataaggcatcctggccattgccttcaagatgggaaaagcttcttggctcttctcgttaactgtctgtatccagaagtgcattatttggaccacatacgatagttaacactgaggctcttgaaaaacccattgctgtttatgtttacatttaactttgctgttgcacaagtaactttgctcaattgcactgtagagctcagtttggccaatgtgtagttgactgagatgcaagttgggaggcgttagatattagataattttggggtgtgtgtgtgtgtgtgtgtgtgttttcttagctcttaagaccttctggggactctttaagtttttatatttatccacaagagaaacttactaagttccacttgggtgcagagccactcacagttgccgaatgtcccagtcatctcacaagacctccagatggagttctttgtatgtttccacttctgtctctgttttatgtaaatgttccagatctgacaaccttggaagtcactcagtacccttacttttaaaccccatttgtgttcctccaaagtaaagaagtcaattttgaaaaatttctgcatttctcaaatgtggacaaatacaatagttttaaagtattgtttttctcagaagggagataaaaatgccgagttagttaaagtgggtcatgtgtaaaatacgaccacttgatcgtgattatagtgggcagtagagatgatgacaagtcaatttccatccagccgtgtatcctcatggagaagctgcctgtctgaatcaggatggcaagctggcagtctgggaggagcatgttttgcacagatgttttgtttggtccacttggtgaggagtgcagacagggctgcctctctctagtcgggagagtctgtgcattccctcgggccctgaccctagcctcattcacatcacttgcccctgtcgacacctaagtttgcaccctttgatagacaccatgttcgatatctgaaaggctcagtgtcaggagacagagactgagggagactgaagacctgattctctgttccctgcttgttttttaacttcaaactcagatgaagccaatggacctgctgaaacacttgtctgtggaaactgggtcaggtcgggagatctactgaaatttggctttttttccatagccacgtgccttctgttgttgacagttcattcattaccaaagcctgtgtgtaactttgccttgttctgtggccatcttcttgctcatgttatttctcctgggaatgagcagtttgacttctgttcccacgttcctcattctatcagctctagatggattttgcctgcatagctggcttaatatgtctttgtgtatgggtagtctgtagcctgagaatatttacctaaaaatgtctaaacagccaccaagaatgtttataggggtataggaatatagttaacagagtgctaatctctcctcaaatgtccttttggaatgcttcccccaaaattgggaagttggtaggagcttttctttactttgaatttctttacttggacagaacgattctgccttaaagacacgctttgcagctctgataaagaacatccctgtttagtctcttgagttttacaggccacaaaatgtccgtctcagagggatctgtctcagcttttcttatttttgcttctctccgttttcaaaattaatcatcttgttctctgtataagaaaatttgagaagctgtggacaatttaatagtctgatctggcaacagcgatttttgtttggaaatattttgtgttttctttgaggaggatataattactgatatcctaggatgtgaaatttttgagtgacagtatgcacattttaaagaaaattatgattaatctgtataatgttttttggtctgtaaaaattataaaaaataaaatcatttatctttggttgtaactgtttaaaaaccaaattatagggatatcacactatcttgtaaagtgtttcagctgttaaagttgctgttcctgattcctgatgaaaataacttgaaaaaaaaataattatactactgatcctcttttgggataatgaaattgcgaaggaatgttgttgattataacttttattttttaatgtacagatgtactgtctctcattgagcactgatagaatttatttttctttcaatagtttaaaatcacttatgtggagacacatacttaagtgtgttcaactcgttttcttcccacatatctagtgtgacctttaaaaaccacaactttattttggacattaaatgtgcaatattcactacttattcattgttccacatttttcatacttgtacaaagggtaagtttttatataatggtgagaaacaggaagaaatgacaactggttaagtaaaattctgcaaataaactagattc

SEQ ID NO: 461993 - DNA, 3836 bp, Homo sapiens
ttaggatcgcgaccaagcgtccggtggaacgaggaagccccaagagctgtttcttatttttggggtctgtactctgtgaagtcaactgggttagtgtgctctctgatgcctggaattccagtccccacccagaaacccgcagcatgattgtctgcctccttttcatgatgattttattggcaaaggaagttcaactggtagaccaaacagattcacctttacttagtctccttggacagacaagctcactttcatggcatcttgtggatattgtgtcgtaccagagtgtgctaagttatttcagcagccattacccgccgtccatcatcctggcaaaagaatcttatgctgaattaatcatgaagctcctaaaagtgtctgcgggcctttctattcctactgacagccagaagcatcttgatgcagttccaaaatgccaagcttttactcatcagatggttcaattcctcagcaccctggaacaaaatggaaaaatcaccttagcagtcctagaacaggaaatgtctaagctcttagacgatatcattgtctttaacccgcccgacatggacagccagacccgccacatggccctcagcagcctctttatggaagtcctgatgatgatgaacaacgcgactattccaacagcagagttccttcggggcagtatccggacctggattggccaaaaaatgcatgggctggtggtgctgccccttttaacagcagcctgccagagcctggcgtccgtccgccacatggctgagactacagaagcctgcatcactgcctacttcaaagaaagccctctcaatcagaattcaggatggggacccattctggtatcccttcaggttcccgagctcaccatggaagagttcctgcaggagtgcctcaccttgggcagttacttgactctttacgtctacttgcttcagtgtttaaacagcgaacagactttaaggaatgaaatgaaagtgctgctcatcttaagcaagtggctggaacaggtgtacccaagctccgtggaggaagaggcaaagctgtttttgtggtggcaccaagtccttcagctctccctcattcagacagagcagaatgactccgtcctgacagaatctgtcattcgaattctgctcttggttcagagcaggcagaacctcgtggctgaggagagactcagctctgggatcctgggggcaattgggtttggccggaagtcgcctttgtctaacaggttccgagtggttgcccgaagcatggctgccttcctttcagttcaggttcctatggaagatcagatccgtttgaggcctggctctgaattacatctgacccccaaagctcagcaggctctgaatgctcttgaatccatggcatcaagtaagcagtatgttgaataccaggatcaaatattgcaagccacccaatttataaggcatcctggccattgccttcaagatgggaaaagcttcttggctcttctcgttaactgtctgtatccagaagtgcattatttggaccacatacgatagttaacactgaggctcttgaaaaacccattgctgtttatgtttacatttaactttgctgttgcacaagtaactttgctcaattgcactgtagagctcagtttggccaatgtgtagttgactgagatgcaagttgggaggcgttagatattagataattttggggtgtgtgtgtgtgtgtgtgtgtgttttcttagctcttaagaccttctggggactctttaagtttttatatttatccacaagagaaacttactaagttccacttgggtgcagagccactcacagttgccgaatgtcccagtcatctcacaagacctccagatggagttctttgtatgtttccacttctgtctctgttttatgtaaatgttccagatctgacaaccttggaagtcactcagtacccttacttttaaaccccatttgtgttcctccaaagtaaagaagtcaattttgaaaaatttctgcatttctcaaatgtggacaaatacaatagttttaaagtattgtttttctcagaagggagataaaaatgccgagttagttaaagtgggtcatgtgtaaaatacgaccacttgatcgtgattatagtgggcagtagagatgatgacaagtcaatttccatccagccgtgtatcctcatggagaagctgcctgtctgaatcaggatggcaagctggcagtctgggaggagcatgttttgcacagatgttttgtttggtccacttggtgaggagtgcagacagggctgcctctctctagtcgggagagtctgtgcattccctcgggccctgaccctagcctcattcacatcacttgcccctgtcgacacctaagtttgcaccctttgatagacaccatgttcgatatctgaaaggctcagtgtcaggagacagagactgagggagactgaagacctgattctctgttccctgcttgttttttaacttcaaactcagatgaagccaatggacctgctgaaacacttgtctgtggaaactgggtcaggtcgggagatctactgaaatttggctttttttccatagccacgtgccttctgttgttgacagttcattcattaccaaagcctgtgtgtaactttgccttgttctgtggccatcttcttgctcatgttatttctcctgggaatgagcagtttgacttctgttcccacgttcctcattctatcagctctagatggattttgcctgcatagctggcttaatatgtctttgtgtatgggtagtctgtagcctgagaatatttacctaaaaatgtctaaacagccaccaagaatgtttataggggtataggaatatagttaacagagtgctaatctctcctcaaatgtccttttggaatgcttcccccaaaattgggaagttggtaggagcttttctttactttgaatttctttacttggacagaacgattctgccttaaagacacgctttgcagctctgataaagaacatccctgtttagtctcttgagttttacaggccacaaaatgtccgtctcagagggatctgtctcagcttttcttatttttgcttctctccgttttcaaaattaatcatcttgttctctgtataagaaaatttgagaagctgtggacaatttaatagtctgatctggcaacagcgatttttgtttggaaatattttgtgttttctttgaggaggatataattactgatatcctaggatgtgaaatttttgagtgacagtatgcacattttaaagaaaattatgattaatctgtataatgttttttggtctgtaaaaattataaaaaataaaatcatttatctttggttgtaactgtttaaaaaccaaattatagggatatcacactatcttgtaaagtgtttcagctgttaaagttgctgttcctgattcctgatgaaaataacttgaaaaaaaaataattatactactgatcctcttttgggataatgaaattgcgaaggaatgttgttgattataacttttattttttaatgtacagatgtactgtctctcattgagcactgatagaatttatttttctttcaatagtttaaaatcacttatgtggagacacatacttaagtgtgttcaactcgttttcttcccacatatctagtgtgacctttaaaaaccacaactttattttggacattaaatgtgcaatattcactacttattcattgttccacatttttcatacttgtacaaagggtaagtttttatataatggtgagaaacaggaagaaatgacaactggttaagtaaaattctgcaaataaactagattc

SEQ ID NO: 461994 - DNA, 5941 bp, Homo sapiens
  misc_feature (1)..(2): n is a, c, g, or t
  misc_feature (8)..(8): n is a, c, g, or t
nnatttcntcaagccgacgcgggtgaggtgtgcgagcgcgcccgggatccgcactgagtgaggttccgcagagccgggagacggaggaggtgggtcagcctgggtcgctgcccttgtccagcgcaacccaagacacctgcgcgccgggtggagccagggctaggggtggggcctgggctccgggaagggggcgggcctgccttcctccagtgcaaatgcgtcctggagtggtttgtcctacgttgcggcccgtagaggcgccgactcaccgcctcttctccgggagtggcggagattcgatcatgtgacagtccggaggccagaaccgggcaggttgcttgaagcgcaggggtttgacaaaaacaaacggtgacggcgccgcggaagggtctatggccgaggcggtgaagccccagcgccgggccaaggccaaggccagccggactaaaacaaaggaaaagaagaagtatgaaactcctcagagggaagagtccagtgaagtctcccttccaaaaacctccagagagcaggaaatcccttctctagcctgtgaattcaaaggagaccatctgaaggtggtaactgattcccagctccaggatgatgccagtggacaaaatgagagtgaaatgtttgatgtaccactcacctccttaactataagcaatgaagagtccctgacgtgtaacacagagcccccaaaggaagggggagaggccagaccctgtgtgggggacagtgcagtcactccaaaggtccaccctggagacaatgttggaactaaagtagaaacccccaagaacttcacagaggtagaggaaaatatgtcggtacaaggtggactttcagaaagtgcaccccaatctaatttttcttatactcagccagcaatggaaaatatacaagtcagagaaactcagaatagtaaagaagacaaacaaggcctggtttgttcttcagaggtgccacagaatgttggcttgcagagttcttgcccagccaaacatggttttcagacacctagagtgaagaaactgtatccccagttgccagctgaaattgctggagaagcaccagctttggtggcagtgaaacccttgcttcgcagtgagcgactctacccagaactcccgtctcaactggaactagtaccatttactaaagaacagctaaaaatcttggagcctggttcatggctggaaaatgttgagtcatatttagaagaatttgacagcatggctcatcaagacaggcatgaattttatgagttgcttttgaactactcacgatgtaggaagcaactgctgctggctgaagctgagctgcttactctgacatctgattgccaaaatgctaaaagtcggctgtggcagtttaaggaggaacaaatgtctgtacagggtatctgtgcagatcaagtgaaagttttcagctatcatcgctaccaaagagtagaaatgaatgaaaatgcactggtggagctaaagaagctattcgatgccaaatctgagcacctccaccagaccctggcccttcattcttatacttctgtgctctcaagattgcaagtggagtcttacatctatgcattgctcagtagttcagctgttctgagatcttcagcaattcaccagcaaggccgagcgtctaagcagacagaaagcattccctctgatctgtgtcaactaaaggaatgcattagtgtcttattcatgttcaccaggagagttaatgaagatactcagtttcatgatgatattcttctctggctgcagaaattggtatccgtgctacaaagagttggctgtcctggagatcacctcttccttctaaaccatattcttcgatgccccgctggtgttagtaaatgggctgttccttttatccagatcaaagtgttgcataacccatcaggggtctttcattttatgcaatcccttgccctgctgatgtctcctgtcaaaaatcgagctgagtttatgtgccacatgaagcccagcgagcggaagccatcctcctcagggcctgggtctgggacttggacgctagtagacgaaggaggagaagaggatgaagaccctgagaccagttggattctccttaatgaagatgatttggttaccattttagcacagttcccctttcatgaactctttcagcatcttcttgggtttaaagcaaaaggtgattatttacctgaaacaacaagacctcaagagatgatgaaaatttttgcctttgccaactcactagtggaacttctggctgtggggttagaaacctttaatagagcacgctataggcagtttgtgaagcgaattggttatatgatcaggatgactcttggttatgtaagtgaccattgggcacagtatgtgagccataaccaaggctcaggattggcccaacagccctactctatggagaaactacaggttgaatttgatgaactgtttttgagggctgtcctacatgtgctgaaggccaaaagacttggcatttggctgtttatgtccgagatgccctttgggactctgtctgtgcaaatgctgtggaagctcttctacctcatgcaccaggtggagagcgagaacctgcagcagctctcctcctccctgcagcccgcccagtgcaagcagcagctccaagacccagaacattttaccaactttgagaagtgtctttcttctatgaatagctcagaagagatttgccttctgactacctttgctcagatggctcaggccagaagaaccaatgtggacgaagacttcataaaaattattgttctggagatatatgaggtatcttatgtcaccttgtctaccagagagactttttcaaaggttggtcgagagcttttagggactatcacagctgttcaccctgagataatttccgtccttctggatagagttcaagagaccattgaccaggttggaatggtttctctatacttgtttaaagaactgcctttgtatctttggcaaccttctgcatctgagatagcggtgattcgggattggttattgaattacaacctgacagtggtgaagaataaactggcctgtgttattcttgaaggactgaattggggatttgctaaacaggctacccttcatctggatcaagcagtccatgctgaagtggctttaatggttcttgaagcttatcagaagtaccttgcacagaagccatatgctgggattctctctgaaagtatgaagcaggtttcatatttggccagtattgttcgatatggagagacacccgagacctcatttaaccaatgggcctggaatttaatcttgaggctaaaactgcacaaaaacgattatggaatacagccgaattgtccagctgttcccttctccgtcactgtgcctgacatgacagagtcacccacgtttcatcctctcttgaaggctgtgaaagcgggcatgcccattggctgttatctagccttatctatgacagctgtgggccacagcattgagaagttctgtgcagaaggcatcccactattgggaattctggtccagtcaagacatttgagaacagtggttcatgtcctggataagattctgcctttattttacccttgccagtattaccttctgaagaatgagcagtttttatcgcatctcctcttgttcctacacttggacagcggtgtccctcagggtgtcacacaacaggtcacccacaaggtggcacagcacctgacaggagccagccatggggacaacgtgaagcttctcaacagcatgatccaggcacacatatctgtaagcactcagcccaatgaagtgggccccgttgctgtgttggagttctgggttcaggctctcataagccagcatctctggtaccgagaacaacctatcctcttcctcatggaccacttgtgtaaagcagcttttcagctgatgcaggaagactgcatacagaaattactctaccaacaacataagaatgccttgggttaccactgtgaccggagtctgctctcatctttggtaagctggattgtggcaggcaacatcactccttcctttgtggagggcttggccacgcccactcaggtctggtttgcctggacagtgctcaacatggaatccatctttgaagaggactcccagctccggagagttattgaaggggaattggtgataaactctgctttcacccctgaccaagctctgaagaaagcccagacccagctgaagctccccatcgtgccatccctccagaggctgctgatttatcgctgggcccaccaggctctggtcacaccttctgatcaccccctcctgccactcatttggcagaagttcttccttctgtatcttcaccgtccgggaccacagtatgggttacccatagatggttgtattggaagaaggttttttcaaagtcctgctcatatcaatttgttgaaagaaatgaagagacgtttgaccgaggtggctgacttccaccatgctgcaagcaaggccctccgtgttccagcagagggcagtgaagggctgccagagagccactctggcacccctggttacctgacttcaccagaactgcacaaggagctggtgaggctcttcaatgtatatatattatggctagaagatgagaattttcaaaaaggagatacctatatcccttctctaccaaagcattatgatattcacaggctagcaaaagtgatgcagaatcagcaggtgaaattatagccctcctttttttttttttttttttagcatatctgaatgtaatttgaactggtcatattcataataaaacaatttattgataagaaaatggaaatttcccttctttttttgctaattttcattgtaactattccaatgtctccatcaatttccttgggagactcttttctacaaaatgtcttctctgaaataatcttttatatgtattgtatttttcattactttcaaaatgtgtctctgatttttcaacatagttgtatttgtctaaagttcagaaatttgacctaaaagttaggatgagtccaacttattttcccaaaaagggatcatagtattatattatttgtctgaacccttgaattgagattttaaacataatcttttgctttgttaattctgaaataaaaagaaacaccttttctaaaatgtcttctaggccctctcaatcagaattcaggatggggacccattctggtatcccttcaggttcccgagctcaccatggaagagttcctgcaggagtgcctcaccttgggcagttacttgactctttacgtctacttgcttcagtgtttaaacagcgaacagactttaaggaatgaaatgaaagtgctgctcatcttaagcaagtggctggaacaggtgtacccaagctccgtggaggaagaggcaaagctgtttttgtggtggcaccaagtccttcagctctccctcattcagacagagcagaatgactccgtcctgacagaatctgtcattcgaattctgctcttggttcagagcaggcagaacctcgtggctgaggagagactcagctctgggatcctgggggcaattgggtttggccggaagtcgcctttgtctaacaggttccgagtggttgcccgaagcatggctgccttcctttcagttcaggttcctatggaagatcagatccgtttgaggcctggctctgaattacatctgacccccaaagctcagcaggtcagtatatacaatgaagggttagaagtttgcctgcacatcttccctagaaggcagggaggtggcagccgtagcctgtgcgcgtcatgacatgatgctctgtggtggtagcacagtgttccctttcatgtgccctacttacgggaaaatggtttcatgtgccaacctccaaatttttgtaggcagttgtctagatcgctgctactgtcattgtagaaaagtaa

SEQ ID NO: 461995 - DNA, 1472 bp, Homo sapiens
gagctgccgtaagaaacactcgcccaatcatgtttccccatcgaggtgccgtgagaaacactcgcccaatcacgtttcctcatcgagctgccgtaggaaacattcgtccaatcacgtttccccatcgaggtgccgtaagaaacactcacccaatcacgtttccccatcgagctgccgtaagaaacactcacccaatcacgtttccccatcgagctgcctgccgtaagaaacactcgggttctgtggtgccttcagaggaggaaactgaggctgagagaagtccgtcaacttgcacaggaccacactgccagcgagtgacagagcgaggatttgagcccaaggcccgtgctcttaagctgtgtgttgtcacgtggaaacagcatttcccgcccagcctggggatttccaagctggaaattcaaacagctcagcacggaataggctccaacagggtcaggacctgccaccagccacagctgaagaggctggggcgtcaaggcagaaagccaacatcccggagtcatacaagtgcacgttctcttcccagctctggcacataccagctgtgtgaccttagcccgttttatggaaatctttctaagatgtactaggagcacctcctttttccagatcaacgtagaagtgtcttgtaaacttcgatgactcggtgctgtggaagtaaggagacctctttgtccccacactgcctgaccgcggcgtgttggagctgcctccttctccagccccagacagccctcccagcttcctcttgaatctgcagccggttacccctggggagaccaagccttgctggtggaggggagataaacaagctcaccaaatcattattcttaatttgcaggaaggccaaagctccctctgagccgagctctaaagacattttttactgtttagaagcctttgattcctttacttcccagcaactggctgagttcccagggctgaagttgccttgaagtttgactgctgaataagaaaaagagttttcctctgttttgttgttaatccagagtttgagctgggagcataaagatttcaaacataccaaataggatttcttcaactagattgttttggaaaatacaaatatgagatctgagaaggacagatacaaaagaaaaagaagtctcagttccaggctaaggtggacggaaagggggtgccctaaggaggctcgaacctgagacagtctgaaccagaaaaacctcccctagagtttgggggctggcgtgcagctgctcacatttttatcttgctaaattaagaatataaaataagaaccattggataagatcacccttattttagaaaagagaggggaaaagtcaaccaaaaaagctgtttttttttaaattaaagggatttaactttatgaaaaacttcctacattgccctgtgcttttcttattttgtcatgggcaactgtgttttatgcagttttatatgctatc

SEQ ID NO: 461996 - DNA, 2933 bp, Homo sapiens
aaaaaaagaagaagaagaagaagaagaaggaggaggaggaggaggaggaggaagaagaaggacagacctgtaatttttctgtctttaatatttttgtcaagttttgcccccaaccccccgacaggccccagcgtgtgatgttcccctccctgtttccatgtgttctcattgttcaactcccacttatgagtgagaacatgcgctattttattgcagctcgtcaagttctccctgcattggtttgctccctgttgcctataaaagatgttctacttaacccttttcctgtttgccccaagaatacttgccagcagcacttgctgctgcagtatttaccccaagataactttgccacgaactctcgcttttattattactttctagtggtatttccatttacaaagtataataattctcgatcgctgaaaatgtcgaatcctagaaaatgtagcattcctacacgtgatgttaacatcattctcgaacagttcttggacagagatttatttaatgaattcgatttttctgaaatagatgattttgatgattcagatgcttctgatactagatctgtttagaaataacatcaagaacagtttttatattttattttcacattgaaaatcagtcagatttgctttagcctcaaagaatgtgtttacgtaaaattaaatgaatgctggcagtgagctgtactttttttttctaaaccggaaaagggttaatatagctttcatcgttgttttcagtaggagggctagtccaatcacaagctactctattgtggccaaaagcaaaaatctggtggtaatcatttttaatcgccattgttgatttctccgcagtggcttctggcattgataacttggttgtcacatggtcatatgtgaaggcacccggtttattcatttgttcctttgtccattaaatagtttttgagcacttctttcaggccaggtattactctagacacaagcaatataacaatatttaagataagatctgtgtcactttggcacttgcagcctgtttttatagaaaggctactaaatggttgccgagtcggacttgtggtaattaaaatagacttttcttgtgtgggggttgggagtgagaaaaaagagactggaatcttttagatgattacatcttctttatataaatatttttagccttttgaaaaaactctgtagagcttaatgcagttcacagttcacccacactacatcaatatttggcctaccttttgcaagcccaattccctaactatgagtttctgtgttacataaaaatctcaccgggagcacaattatttgacaatttgagttgaaactccaggaactgatttatggagaacaaacttagctctgaaattatgtctctttatgaatatcgacatgaaatctgatgaagaatcatcctactgtggtttcccattttaacttctgtttttgaaaaacatttcagatgcaactaagcacttattaaatgcttcgtgataccaaaaaatggcttggtggtctttgtcttccagaatagcataaatttcagtgttaccaagataaaaatataatctgggcacatgtcactgttaaaatattatagtcagatcaaggattctattcctgtctttgttattctttcccacttttgaaactttatccagtggatttttttttattacaaagacgtattccagagataacagtttgtacttctgattatgatccatgttcatgtgatcaaaaggcagcaataataggacactgtcatatatggtagctccatagaaactaggctgcactgggaggacagattcgccatcttgagcacctgtggcttggtattctcgaaattgtagcccctttggaatggctgaagaactaccagttaaaggtaaagaaaccagacacacaaggccacgtattgtatgattccacttacatgaaatgtccagaatgggcaaatccatagagacagaaagattagtgtttttcaggggctggtgggagggggaaatagggagtgacaatgtatacaggtgatggggttttggggtgatcaaaatgttctggaattagccccatcatatacatttgaaatatctttatcctagataatctgtattcatttgaatgcaaaagttttatcaatatgagtgaacttatacatctttttattcgctgatggagatatcacttgaaactttgttcctggcaaagcaaagagatgaaatgtattgaaaaaaatcgattagacttttaaaacttcaaaatacttttatagaaaatgtaaataagattgtttctaactgcagagtgttttacataaaatctttatgtgaagaatttatattgcagtacaataaagtcagtgctttttatatgttttgaatggtaaacattttgaaggtattttttgaagtaactaggtattgacattttttaataatatattttgaataaagcacacctaaaatgcatgaacttgtgtaagtatttggcatcattagtctagttgtacatatttttaaaaataagaatgggcttagaagataatgtatttgtaacaccagtcacaagtccaggcctctggaacttctgaccaaccagctttaagctggggggtctcacaaccccctctttgggttgaattaatttgctagagctgctcacagaactcgagggaaaacttaagtttaccagttgattataaaagatattgtaaagatacagatgaagagatgcatagggtgaggcacgtgggaaggggtgaactgacgggtgcctgttgagggcctgctgaggcccagcccatgggtgatgggcgccctgggggatgcaacgagcgccgaggcacaaactgtggcacctgggactctaagcccaccaggaagggatcagggagaagctgacgcccagagtgaatggtcc

SEQ ID NO: 461997 - DNA, 1775 bp, Homo sapiens
cattttgttaggccttctcaagtgggaatcaggaacgctgctgtgctctagagatgttttgttcttcctgtagggctgaagcagtgcctactcgatagaatcagtcatcatgcaaataaaagccacctgagtcaaaggcaaagccagagtgcagcttggagcaaagaagttaaaagcatattggcagaggaagagccctggcattccagcaggagctaacaggaaaaagaaaatcaatggcagtagccctgacacagccacttctggtggttaccactcacctggggattcagcaacaggtatctacggggagggccgtgcatcctctactaccctggaggatctggagagccagtaccaagaactagcagtggccctggattcaagctccgcaataatcagtcaactcactgaaaacatcaattcactggttcgcacatctaaggaggagaagaagcatgagatacatctggtacagaagcttgggaggagcttgttcaaactcaaaaaccagacggctgaacccctggccccagagcccccagcagggccatctaaggtagagcagctacaagatgagaccaaccacctaaggaaggagctagagagtgtgggaagacagctccaggctgaggtggaaaacaatcagatgttgagtctcctgaacaggagacaggaggagaggctacgtgaacaggaggagaggctacgtgaacaggaggagaggcaacgtgaacaggaggataggctacatgaacaggaggagaggctacgtgaacaggaggagaggctgtgtgaacaggaggagaggctgtgtgaacaggaggagaggctacgtgaacatgaggagaggctgtgtgaacaggaggagaggctatgtgaacaggaggagaggctacgtgaacaggaggagaggctacatgaacaggaggagaggctacgtgaacaggaggagaggctgtgtgaacaggaggagaggctacgtgaacatgaggagaggctgtgtgaacaggaggagaggctacgtgaacaggaggagaggctgtgtgaacaggaggagaggctacgtgaacaggaggagaggctgtgtgaacaggaggagaggctacgtgaacaggaggagaggctgtgtgaacaggagaagctgccagggcaggagaggctgctggaagaggtggagaagctgttagaacaggagaggcggcaggaggagcaggagaggctgctggagagggagaggctgctggaagaggtggagaagctgttagaacaggagaggcagcaggaggagcaggagaggctgctggagagggagaggctgctggaagaggtggagaagctgttagaacaggagaggcggcaggaggagcaggagaggctgctggagagggagaggctgctggacgaggtggaggagctcctggacgaggagctggagaggctgcgggagctggagaggctgcgggagctggagaggatgctggagctggggtgggaagccctgtacgagcagcgggccgagccacgcagcggcttcgaggagctgaaggcaacattagaaggttagagttcagcaggaacatagaattttaaaatgtgacttcaactgaataaatttgaatttctgtagggagtaaagaatcaaaacacctatttaaagactgcaaaatatgataattatttttaaagtaattgattaaacctggtaggttttcccaaaatgaaaaacaatcagttctaaaaccaaagctgatttttagaaaatgtgaaaatgt

SEQ ID NO: 461998 - DNA, 977 bp, Homo sapiens
  misc_feature (28)..(28): n is a, c, g, or t
  misc_feature (395)..(395): n is a, c, g, or t
  misc_feature (398)..(399): n is a, c, g, or t
  misc_feature (402)..(403): n is a, c, g, or t
  misc_feature (405)..(405): n is a, c, g, or t
  misc_feature (453)..(453): n is a, c, g, or t
  misc_feature (647)..(647): n is a, c, g, or t
  misc_feature (704)..(704): n is a, c, g, or t
  misc_feature (707)..(707): n is a, c, g, or t
  misc_feature (764)..(765): n is a, c, g, or t
  misc_feature (862)..(863): n is a, c, g, or t
  misc_feature (872)..(873): n is a, c, g, or t
gagacagggtccaggctggagtccagtngcgtgatcacagctcactgcagcctttacctcctgggccaaagtgaatcttcccttctcagcctcccaagtagctggactatggcacacaccacaacacctggctaattttttgaaattttttgtagagatggggatattgctgtattgcccaggctggtctcgaactcctgggctcaagcaatcctcctgccttggctcctcaaagtgctgggattataggtataagccacctctcccagccaaaaccccctcttttatagatgagatatttgctccaagttgcacagctggtttggctcttgactgtagattccagaggcattggtggaacacttgatcatgctggcttcagcatctgcatgttnacnngcnncntaagcttctttggcctctgtgaagcacagactttctgggtctgagtgnatctaagtctcctgctcttctccacagatactatggcgggactgagtttattgatgaactggagaccctctgtcagaagcgagccctgcaggcctataagctggacccacagtgctggggggtcaacgtccagccctactcaggtgcttgtctcatccatatggctggtgcagcctcttcatgtgcatcccccngggccgacatgcaccaagaagagtcctaagatggactgccatggactgccataggcnggncccagtggtactgtaatccagcactttgggaggcggaggaggcagaccacctgaggnnggcagttcaagaccagcctgaccaacatggagaaacccggtctccactaaaaatacaaaaattagctgggtgtagtggcacatgcctgtaatcccanntactcggannctgaggcaggagaattgcttgaacctggaggcggaggttgcagtgagctgccgagatggcgccattgcattccagcctgggcaacaagagcgaaactccatctc

SEQ ID NO: 461999 - DNA, 726 bp, Homo sapiens
cggggccaagcccaagcctggcgcgcagagtgcaccttcctgagctcgagcggtccagcgccaagttcggggtttggggttggagcggctggtcacgtggctggcccgcggcggtgcgcggggcgttgggtcagcgggtctgggactggtggcaccggcggcggcgtaggacggaggcgtcgctagggtcttgttctcttggccaggctggagtgctgtgggaaaatctgggctcactgcagcctcaacctccgggactcaagtgatcatcctgcctcagccacccagagtagctgagaatacaggcgtgcgccaccaggctcgggcagcttcgaaccagtgcaatgacgatgccagtcaacggggcccacaaggatgctgacctgtggtcctcacatgacaagatgctggcacaacccctcaaagacagtgatgttgaggtttacaacatcattaagaaggagagtaaccggcagagggttggattggagctgattgcctcggagaatttcgccagccgagcagttttggaggccctaggctcttgcttaaataacaaatactctgaggggtacccgggccagagatactatggcgggaactgaatttaatggattaaacttggagaacccttttgtcaaaaaaccgaagcccttgcaaggcccttttaaactctgggacccccacaaattggcctgggggggggttaaaaaccgttctcaaacc

SEQ ID NO: 462000 - DNA, 663 bp, Homo sapiens
tcaatgttgtatccagtgaccttgctaaatttgcttattctaacagttggcccctagcatcttgattttctaggtatattgtgttgtctgtgtgtaatgtcagtttttaaatttcttctttcctaatcgttatgccttttgtttctttttcttgcctcattatacttggaatagaagtagtattagcaggcattttggtcttgttcctgaaggtaaccattttggtttccattgtgtggtcccgtcacatttgtttcattctgcaggtgctttttggttccttctcagcaggtagtgccccagcagcagggctcactacaaccctgggactcctcagggactcctgggtctgtgagccatacttggttgagcaggctgaacacaccagtatccatcctgtctcaccctcaagtcctcatctaggacatcattcctcttgtcatggtgggtggagccagttcaagtgggaggacaggaggcaggtgtggttggaggaagcagcctgaacctgcctccctgacattccacaggtgaacccagatactggctacatcaactatgaccagctggaggagaacgcacgcctcttccacccgaagctgatcatcgcaggaaccagcttgtactcccgaaaccttgtatccccggttcgggattgccctt

SEQ ID NO: 462001 - DNA, 1144 bp, Homo sapiens
cggggccaagcccaagcctggcgcgcagagtgcaccttcctgagctcgagcggtccagcgccaagttcggggtttggggttggagcggctggtcacgtggctggcccgcggcggtgcgcggggcgttgggtcagcgggtctgggactggtggcaccggcggcggcgtaggacggaggcgtcgctaggcagcttcgaaccagtgcaatgacgatgccagtcaacggggcccacaaggatgctgacctgtggtcctcacatgacaagatgctggcacaacccctcaaagacagtgatgttgaggtttacaacatcattaagaaggagagtaaccggcagagggttggattggagctgattgcctcggagaatttcgccagccgagcagttttggaggccctaggctcttgcttaaataacaaatactctgaggggtacccgggccagagatactatggcgggactgagtttattgatgaactggagaccctctgtcagaagcgagccctgcaggcctataagctggacccacagtgctggggggtcaacgtccagccctactcaggctcccctgcaaactttgctgtgtacactgccctggtggaaccccatgggcgcatcatgggcctggaccttccggatgggggccacctgacccatgggttcatgacagacaagaagaaaatctctgccacgtccatcttctttgaatctatgccctacaaggtgaacccagatactggctacatcaactatgaccagctggaggagaacgcacgcctcttccacccgaagctgatcatcgcaggaaccagctgctactcccgaaacctggaatatgcccggctacggaagattgcagatgagaacggggcgtatctcatggcggacatggctcacatcagcgggctggtggcggctggcgtggtgccctccccatttgaacactgccatgtggtgaccaccaccactcacaagaccctgcgaggctgccgagctggcatgatcttctacaggaaaggggttgctgtggcactgaagcaagctatgactctggaatttaaagtttatcaacaccaggtggtggccaactgcagggctctgtctgaggccctgacggagctgggctacaaaatagtcacaggt

SEQ ID NO: 462002 - DNA, 1462 bp, Homo sapiens
cttcgggtccgagggccgcggcgtcccagagcccggggggtgcttcggcgtcctcgctgtcccccgccgtaccccaccctctgcagccgcaatgacgggaggggagcgcttgggtcgcgcctgggctggggatcgggcggcggccagccgcagcgccccagttccaggcacattcggtatgatggggtggcggcccgtggcctttggcaagaatgcgaaggcttatcggggatgtgagtagtagctctccactgaacacttttctcgttgagcattttcgatttaaacaatcctagctccttcacaacaaagctgcaagtcaagtgctactgtttcccccattttacaggcagcttcgaaccagtgcaatgacgatgccagtcaacggggcccacaaggatgctgacctgtggtcctcacatgacaagatgctggcacaacccctcaaagacagtgatgttgaggtttacaacatcattaagaaggagagtaaccggcagagggttggattggagctgattgcctcggagaatttcgccagccgagcagttttggaggccctaggctcttgcttaaataacaaatactctgaggggtacccgggccagagatactatggcgggactgagtttattgatgaactggagaccctctgtcagaagcgagccctgcaggcctataagctggacccacagtgctggggggtcaacgtccagccctactcaggctcccctgcaaactttgctgtgtacactgccctggtggaaccccatgggcgcatcatgggcctggaccttccggatgggggccacctgacccatgggttcatgacagacaagaagaaaatctctgccacgtccatcttctttgaatctatgccctacaaggtgaacccagatactggctacatcaactatgaccagctggaggagaacgcacgcctcttccacccgaagctgatcatcgcaggaaccagctgctactcccgaaacctggaatatgcccggctacggaagattgcagatgagaacggggcgtatctcatggcggacatggctcacatcagcgggctggtggcggctggcgtggtgccctccccatttgaacactgccatgtggtgaccaccaccactcacaagaccctgcgaggctgccgagctggcatgatcttctacaggaaaggagtgaaaagtgtggatcccaagactggcaaagagattctgtacaacctggagtctcttatcaattctgctgtgttccctggcctgcagggaggtccccacaaccacgccattgctggtaaaacatcatctgcctctgctcatcctgtagcccctaattcccatcccacctgtcctccaaaatcgtgtgccaggacttccacgctggggaaaaagctggagggctgtctctgtgcaggagatgctaacacagagtagggcatggttgagactggcctaag

SEQ ID NO: 462003 - DNA, 1261 bp, Homo sapiens
cggggccaagcccaagcctggcgcgcagagtgcaccttcctgagctcgagcggtccagcgccaagttcggggtttggggttggagcggctggtcacgtggctggcccgcggcggtgcgcggggcgttgggtcagcgggtctgggactggtggcaccggcggcggcgtaggacggaggcgtcgctaggcagcttcgaaccagtgcaatgacgatgccagtcaacggggcccacaaggatgctgacctgtggtcctcacatgacaagatgctggcacaacccctcaaagacagtgatgttgaggtttacaacatcattaagaaggagagtaaccggcagagggttggattggagctgattgcctcggagaatttcgccagccgagcagttttggaggccctaggctcttgcttaaataacaaatactctgaggggtacccgggccagagatactatggcgggactgagtttattgatgaactggagaccctctgtcagaagcgagccctgcaggcctataagctggacccacagtgctggggggtcaacgtccagccctactcaggctcccctgcaaactttgctgtgtacactgccctggtggaaccccatgggcgcatcatgggcctggaccttccggatgggggccacctgacccatgggttcatgacagacaagaagaaaatctctgccacgtccatcttctttgaatctatgccctacaaggtgaacccagatactggctacatcaactatgaccagctggaggagaacgcacgcctcttccacccgaagctgatcatcgcaggaaccagctgctactcccgaaacctggaatatgcccggctacggaagattgcagatgagaacggggcgtatctcatggcggacatggctcacatcagcgggctggtggcggctggcgtggtgccctccccatttgaacactgccatgtggtgaccaccaccactcacaagaccctgcgaggctgccgagctggcatgatcttctacaggaaaggagtgaaaagtgtggatcccaagactggcaaagagattctgtacaacctggagtctcttatcaattctgctgtgttccctggcctgcagggaggtccccacaaccacgccattgctggggttgctgtggcactgaagcaagctatgactctggaatttaaagtttatcaacaccaggtggtggccaactgcagggctctgtctgaggccctgacggagctgggctacaaaatagtcacaggt

SEQ ID NO: 462004 - DNA, 1400 bp, Homo sapiens
cggggccaagcccaagcctggcgcgcagagtgcaccttcctgagctcgagcggtccagcgccaagttcggggtttggggttggagcggctggtcacgtggctggcccgcggcggtgcgcggggcgttgggtcagcgggtctgggactggtggcaccggcggcggcgtaggacggaggcgtcgctagggtcttgttctcttggccaggctggagtgctgtgggaaaatctgggctcactgcagcctcaacctccgggactcaagtgatcatcctgcctcagccacccagagtagctgagaatacaggcgtgcgccaccaggctcgggcagcttcgaaccagtgcaatgacgatgccagtcaacggggcccacaaggatgctgacctgtggtcctcacatgacaagatgctggcacaacccctcaaagacagtgatgttgaggtttacaacatcattaagaaggagagtaaccggcagagggttggattggagctgattgcctcggagaatttcgccagccgagcagttttggaggccctaggctcttgcttaaataacaaatactctgaggggtacccgggccagagatactatggcgggactgagtttattgatgaactggagaccctctgtcagaagcgagccctgcaggcctataagctggacccacagtgctggggggtcaacgtccagccctactcaggctcccctgcaaactttgctgtgtacactgccctggtggaaccccatgggcgcatcatgggcctggaccttccggatgggggccacctgacccatgggttcatgacagacaagaagaaaatctctgccacgtccatcttctttgaatctatgccctacaaggtgaacccagatactggctacatcaactatgaccagctggaggagaacgcacgcctcttccacccgaagctgatcatcgcaggaaccagctgctactcccgaaacctggaatatgcccggctacggaagattgcagatgagaacggggcgtatctcatggcggacatggctcacatcagcgggctggtggcggctggcgtggtgccctccccatttgaacactgccatgtggtgaccaccaccactcacaagaccctgcgaggctgccgagctggcatgatcttctacaggaaaggagtgaaaagtgtggatcccaagactggcaaagagattctgtacaacctggagtctcttatcaattctgctgtgttccctggcctgcagggaggtccccacaaccacgccattgctggggttgctgtggcactgaagcaagctatgactctggaatttaaagtttatcaacaccaggtggtggccaactgcagggctctgtctgaggccctgacggagctgggctacaaaatagtcacaggt

SEQ ID NO: 462005 - DNA, 3384 bp, Homo sapiens
ccgcccagtctccgctgcgagcggttttctgtagacccggaagcggatcgcggggagtgaaggctgcgccgccgagcctgagtttcgctctctctagattaaatctgcgcttcgcagtcccccttcttccatcccccgggtctggaggggtccctacagatcttaaaatgaccacaccgcgccctccaccccagattaacctttaaagactcatgtggcctgaggaagaagtccagaagagaagaaagaggagacagggatggctctttctcaaggaaggttgacattcagggacgtggccatcgaattctctcaggaggagtggaaatgcctggaccctgctcagagggctttgtacagggacgtgatgttggagaactacaggaacctggtctccctgggaatctctctttctgaaatgagtattacctccatgttggggcaagggaaagagccctggactgtggagagtgaagtgaaaataacaaaaacatcaagtggttgggaatgcatcaaaggtgtgaacacagtagtttatcctttcacactcccatggcgctacagctccaacagtgacaaaggcaaagtctttatcatgatggacaacaccctgtcatgtggcttctgtgacctctttgatgtctctcctacacatatgatcaaggaattaccaccaaaagagaacaatagcacaggaaaagtattccaagcagtgatgttggaaagacatgaaatccatgacatccaagatttttacttcagagaaatgcagcaaaatattcatgactttgagtgtcagtgtcacaatgatgagagaaattacagagaaatacctgcaattaaaattaaaaacatcactggaagaagagatcaaggtgatggaaggaatgcaggaaataagccagttgaaaatcagcttgaactaagcttttggttgcatctggctgaactgcagggatttcaaattgaaaggaaaatttatgaatgtaatcaaattgagaagtctgtcacccgtgggtcctcagtttcattacttcaaacaaatcttccttgtgtcaacaccagcatttctaatatatacaggaatgattttatgcatccttcattactcacacaagaccagaaagcatacattagggaaaaaccttacaaatgtagtgattgtggcaaggcctttaatcagaggtccaaccttactacacatcagagaatccatactggacagaaaccacataaatgtgacatatgtggcaaaggtttcaggcgaattgcaaacctagcaagtcatcatagaattcatactggagagaaaccttacagatgtaatgagtgtggcaagaccttcaatcagacgttcaaccttactacacatcagagaatccatactggacagaaaccatataaatgtgatagatgtggcaaaggtttcaggcaaattggaaacctagcaagtcatcatagaattcatactggagagaaaccttacagatgtaacgagtgtggcaagacctttaacaggatgttccaccttactagacatcagagaatccatactggacagaaaccatataaatgtgatatatgtggcaaaggtttcaggcaaattgcaaacctagcaagtcatcatagaattcatactggagagaaaccttacaaatgtagtgattgtggcaagacctttaattacaggtcccaccttacaagacatcagagaatccatactggacagaaaccgtataaatgtgatacatgtggcaaagatttcagtcaaaattcataccttgaaaatcatcagagaattcacactagagagaaatcttacagatgtaatgagtgtggcaagacctttaataagatgaccaaccttactacacatcagagaatccatactggacagaaaacatataaatgtgatatatgtggcaaaggtttcaggcaaattggaaacctagcaagtcatcatagaattcatactggagagaaaccttacagatgtaatgagtgtggcaagaccttcaataggatgttccaccttactagacatcagagaatccatactggacagaaaccatataaatgtgatatatgtggcaaaagtttcagtcaaaattcataccttgaaaatcatcagagaattcacactggagagaaaacttacaagtttctggtggaccatcagagaactcacactggagagaaaccttacaagtgtaatgagtgtggtaaaacctttattgggcattcaagcctaactaaccatcaggtaattcatactggagagaaaccttacaaatgtaatgagtgtggaaaggcttatgtgaagtggtcccaccttagacatcatgagagtattcaaactggagagaagccatacaaatgtaccaaatgcagcaaggcctttagacaatgggcggacatcaggattcaccaaaaaatctatgctggagagaaacctcacaagtatgatgagtgtggaaaaacctttacccaggcctctcacctcactatacatcagattatccatactggagagaaaccatatgaatatgacatatatggcaaagtcttcagtcaaaattcacatttcaaaagttatcataggatttgtactgaagagaagccttacaaatgtgtgtggcaaggtcctcagtcaaaattcacaccttgtaaatcatcagagaattcatactggagagaaatcctacagatgtcatgaatgtggcaaagcctttactcaaggctcacgcttcattaatcatcagatagttcatactggagagaactttccaaatgtactgaatgtagcaaggcttttaagaatggccctaaactcaggactcaccaaatagatcatacttgtaaatgcaatgaatgtagcagtgttttaaagtagtgcttgctactcattagataagagtatctaatatatcttggggcaaaggcacacaaatgcaatgtctgtgacaaggattttatctgaggatcaaaagttggggaacagaataattcgtactggggagaaaccttagaaatccaatgagcatgggaaaaactttaccatgagttcaagtactacaagacatcagagagttcatattgaagagaaaccatgtaaatataaggattcacgtttggctgcaaagatgagtgatatagtttggatctgtgtccctgcccagatttcctgtcaaatggtaatccccagtgttggaggtgggacctgatgggaggtgattggatcatgggggcagattcccctgtggtgccgttcttgtgatggtgagttctcatgagatctggttgtgtaaaagtgtgtggcacctccccctctctctcttccttctgctctggtcatgtgaagtgcctgctcccactttgccttcc

SEQ ID NO: 462006 - DNA, 1949 bp, Homo sapiens
taaatcacagtgagctggcttatgtcaggtcaactgtggaatttgatcctagcgcattgctccctcctcttccttgcctgcgacttggcatcccctaacctgcatcaggaaagggtggcgacagatactctcacacccagggaggctgcaaggcccaccctctaccctccacctgggttctctggcgtcgagacttgtgccctacagttctgggccgttggggtgatgtcccagtgggaccaggaggacaatggagagagagtcaactctgaagtgtggtcttgtggaagaggcagctggcttgttcagtgtggcactggcagcctccctaaggttcccagtgatccaccaatgataactaacatcataaaaagatacatggctggatatgatgttccttctgacggaagaccacaacacctgctgaaaaatcaaatctgaatcggatcaagcctctagaggaggcagcacccagggtcattcctggagcataaacgatccctgcagaacatgggctagaagaccccacagtggggcagaggcaggtcctggactgggatcccagcagtgagaagacctggacatcaaccctatttcattgtgcctctgcaaatctcccaacttttggagctgtagctgcaagctcagacttgtggtttcctgtacctggaggaggcccaggtcattctgttaagtcccttgtctatttcctgcttttatctggatgctgagttaattatttgatccaacaataaaactaacaaggttttatttgtccttaatgtcttctctttgctgaacgctgtgctgggtgctgtagctgacatggtttttgtcttaacagctcatgaatcaaatcccagctccaccttttatagctttagacaagcatttaaccaccacttgggcctgtttccttacctgcaaagtggggataatgacagttaatagctacttcattgtgactttgtgaggattaaataagatacggcagataaactacttaatagggtctggcacattgtaagcctcaataaatggcagctacttcttgtattattattattgtataaaactatgagtgtttaacaatgaatatatagtaaactgtgattctgagtgatgtatgatgtaagatatcctccaggactggtgtcacagggaagtcttgcactagaccttgaaggataagactcagaaactgctagatgccccccattactgactatccccatttcctttaataacaaagctgagactacatttcctagcctcccttgctgctagatatgaccatgtgattaacttctggccgaggaaatggatgcacaagtgttatgtggaactattggaaaggctgcttaaaaggaactggttgagtgggaaagagaatccctttgtcccatttctttctactgctggtctggaatcctgatgtgatggcttgagccccagcatccatgctcgggagtgagttaagggtttcttaataagaccttgcatataaaaatatgcaccagggatgatggagcatgatggaagcctgggtttctgatgacaatgtggagtcactataatgtccctatctccttacttcatgtgggtatgagagaaatgccaagcatcgtgctaggtccaggttgaagatgaaggtgacctgcctcctacctgcaagctgctgaaatgcaacggaaatgaccaaaaaatgtggacagtgatgtgctaagtgctctgatggaaggcaaaagctgcttaggatttcagtcctcatcaggccatcattcccattccagcatctgactctcatgatcctggcccatgggccacataatgacttgtcttttgcaagatcgattttgttctgttatttactaattgcttagttattattttgatggacggaacaaggcacccagccctctgggctcctgtgaaacaaattgacttct

SEQ ID NO: 462007 - DNA, 1093 bp, Homo sapiens
ttcaatgagagaacatttaatgagaggttaaggggcttagaacaacgccgggcacaggctaagcgctcactaaacgttagctctcgccaataacatcactgattcactataaagtttctctggctgtgtgctattcgctgcgtccacagcagtgaagaagacagacgcagcccctgaccaacctcgccaagcccgggcgccgagccaggacgttgagccaagtccccatctcctaggactcgcagtgcggaggctgcgggccccgaccagcgccgagactacaagtcccagaagggcgcgcggcgacatcgccgggcccgccccccgcgcacgcgcggcgccgtgacgctaaggccgcgagcgagcgcgggtggctgcggcggctgcggccggcggggcggggcggacgtgtcggtgctgcagaagcacctgcgcaagctggtgccgctgctgctggaggacggcggcgaggcgccggccgcgctggaggcggcgctggaggagaagagcgccctggagcagatgcgcaagttcctttcggacccgcaggtccacacggtgctggtggagcgctccacgctcaaaggtgcggggccgcggagggcagggtcgccagagccaggcctcgcggaatgcagggcctgccaggtcctccggggtcgcagatgtccccgggatgggaggagcccggcagctgcagatgacccctggatgggcagagcccggcggccgcagacgtcccgccggccgggtccccagggccgcagacgccccgcagaggccggcgcggcgcccggggctcgccctcgccacacccactgcccggcccggagcccccagggcgccccgctcctggtcgcggggaggggaaaggggtccccgtctgccgtcacccaaaacaatggggtcgctttgtctgctcgggcctctcaagatggccgagttgggtggagacagcgtctccctgggctgagagcgggcgaggccgcatccctgcctccagtgtcacatgagcttttcggtttcgatttgtgtccaagccaagtggccttcgggagggatgtgtcgggggcagacccgcggagctgggggc

SEQ ID NO: 462008 - DNA, 367 bp, Homo sapiens
gctttcgcaggataagtgaccatttttaatcagttcgaaattgctacaaaggaggatcctcgcagcttctacgagcggggtgtcgcagtcttgtgcacagagtaaacttttctagctgcccctgacgcagctgcgctgggtcaagcagacaaacaccgagaagaaggccagtgtggtaaccttacctgtctacctgaacttcacccgtgcagacctcacgggtttgaaacttcaaggggccacgtgcaacaacaagaagctgaatggaatctgacggttgggagtggtggaaattggaaggataccaggaggtatttgggaaggccaatggcgtggctcctttgaggaaataaaacactaagcatga

SEQ ID NO: 462009 - DNA, 353 bp, Homo sapiens
taagttgtttgttttttttttaatttgagacagagtcttgctctgtcgcccaggctggagtgcagtggcacgatctcagctcactgcaacctccacctcccaagttcaagcgattctcctgccccagcctccagagtagctgggacttgtgagacattttaaaggtaatatcctgctttttaaggaatgctagcattttgtaagatcttcataatcatttaagagatcagctacttaccctattccagagggtttaatacagaaaagtctctcatttcttagctcttctaagcagctagctgtcctttctctcattggagttggagctcctggctgttttggttcattctcac

SEQ ID NO: 462010 - DNA, 15008 bp, Homo sapiens
  misc_feature (7590)..(7590): n is a, c, g, or t
ttcaatgagagaacatttaatgagaggttaaggggcttagaacaacgccgggcacaggctaagcgctcactaaacgttagctctcgccaataacatcactgattcactataaagtttctctggctgtgtgctattcgctgcgtccacagcagtgaagaagacagacgcagcccctgaccaacctcgccaagcccgggcgccgagccaggacgttgagccaagtccccatctcctaggactcgcagtgcggaggctgcgggccccgaccagcgccgagactacaagtcccagaagggcgcgcggcgacatcgccgggcccgccccccgcgcacgcgcggcgccgtgacgctaaggccgcgagcgagcgcgggtggctgcggcggctgcggccggcggggcggggcggggccacctggcagtggctgcctttagggcggagccggctcccgctctcctcagtctgcggtgggctagcggacggtccggcttccggcggccgtttctgtctcttgctggctgtctcgctgagtcgcggccgccttctcatcgctcctggaaggtcccgagcgcgacaccatgtcggagcccgggggcggcggcggcgaggacggctcggccggattggaagtgtcggccgtgcagaatgtggcggacgtgtcggtgctgcagaagcacctgcgcaagctggtgccgctgctgctggaggacggcggcgaggcgccggccgcgctggaggcggcgctggaggagaagagcgccctggagcagatgcgcaagttcctttcggacccgcaggtccacacggtgctggtggagcgctccacgctcaaagaggacgtcggtgatgaaggagaagaagaaaaagaattcatttcctataacatcaacatagacattcattatggggttaaatccaatagcttggcattcattaaacgtactcccgtgattgatgcagataaacccgtgtcttctcagctccgggtccttacactcagtgaagactcgccctacgaaactttgcattctttcattagcaatgcagtggctcctttttttaagtcctacattagagagtctggcaaggcagacagggatggtgataaaatggctccttcagttgaaaagaagattgcagaactcgaaatgggactccttcacttgcagcaaaatattgaaattccggagatcagcctgccgattcatccaatgatcacaaatgttgcaaaacagtgttatgagcgtggagaaaagccaaaagttacagactttggtgataaggttgaagacccaacatttcttaatcagttacaatctggagttaaccgctggatccgagaaattcaaaaagtgaccaaactggatcgagatcctgcatcaggaactgccttacaggaaattagtttttggctaaacttggaacgtgcgttataccgcatccaggagaaacgggagagcccggaagttctcctgactctggatatcttgaaacatggcaagcgcttccatgccaccgtcagttttgacactgacacaggtctaaaacaggctttggaaactgtgaatgactacaatcctctgatgaaagatttccctctgaatgatttgctgtctgccacggagctggacaaaataagacaggcgcttgttgccattttcacacatttgagaaagatccgaaacacaaaatatcctattcagagggcactgcgtttggtggaggcaatttcaagagacttgagttctcaattactcaaagtattgggcactaggaaattgatgcatgttgcttatgaagaatttgaaaaagttatggtagcatgctttgaagtttttcagacttgggatgatgagtatgagaaacttcaggtattgttgagagacatcgtcaaaagaaaaagggaagaaaatctgaagatggtgtggcgtatcaaccctgcccacaggaagctgcaggcccgccttgaccagatgagaaaatttagacgccagcatgaacagctaagagctgttatcgtcagggtcctgaggccacaggtcacggcagttgcacaacagaatcaaggagaggtccctgaaccccaagatatgaaagtggctgaggttctctttgatgctgcagatgcaaatgccattgaggaagtaaaccttgcttatgagaacgtcaaggaagtggatggactggatgtttccaaagagggcacggaagcctgggaggctgctatgaagaggtacgatgagaggatcgacagagtggagacccggatcaccgctcgccttcgggatcagcttggcacagccaagaatgccaacgagatgtttaggattttctccaggtttaatgcactgtttgtcaggcctcacatccgtggggccattcgtgactaccagacccagctgatccagcgcgtgaaagatgacattgagtctcttcacgacaagttcaaggtccagtacccacagagtcaggcttgtaagatgagtcacgttcgtgacttgccccctgtgtcagggtctatcatctgggctaaacagatcgacaggcagctgacggcctacatgaagcgggtggaagatgtccttggcaagggctgggagaatcacgtggaggggcagaagctgaagcaggatggagacagcttccgcatgaagctcaacacgcaggagatctttgatgactgggcaaggaaggtgcagcagcgcaacctcggtgtctcggggcgcattttcaccatcgaaagtactcgggttcggggccgaactggaaatgtgcttaagctgaaagttaactttcttcctgagattatcacactatccaaagaagtccggaacctcaaatggcttggtttccgcgtcccactggcgattgtgaacaaagcccatcaagcaaaccagctttacccgtttgccatctcactgatcgagagcgttcgtacctatgaacggacctgcgagaaggtggaggagcggaacaccatttcccttttggtggctggcttgaaaaaggaagtgcaggccctgatcgcagaaggcattgcgttggtgtgggagtcctacaaacttgacccatatgtacagcgcttagcagagactgtcttcaacttccaagaaaaggtggatgatctgctgatcattgaagaaaaaatagacctagaagtccgttccttggaaacttgtatgtatgaccataagacattctcggaaatcttgaacagagtccagaaagcagtggatgacttaaatctgcactcctattccaatttgcccatctgggtcaacaagcttgacatggagattgaaagaatattgggcgtccgtctgcaagctggcctgagagcttggacgcaggttcttcttggacaagctgaagataaagcagaagttgacatggacacagatgctccacaagttagtcacaagcctggtggagagccaaagatcaaaaatgtcgttcatgagctaagaataaccaatcaggtaatctacttgaatccaccaattgaagagtgcagatacaagctgtatcaggaaatgtttgcctggaagatggttgtactgtctctccccaggatccagagtcagaggtaccaggtgggtgtacattacgaattgactgaggaagagaaattctatcggaatgctttaacacggatgcctgatggccctgttgccctggaagagtcgtattctgctgtcatgggcattgtatctgaagttgaacagtatgtcaaggtttggcttcagtatcagtgtttatgggatatgcaagctgaaaacatctataacagacttggagaagatctcaacaaatggcaggctctcctggtccaaataaggaaggccagaggaacctttgacaatgcagaaaccaagaaagagtttggaccagtagttatagattatggcaaggtacaatctaaggtgaacttgaaatatgactcttggcataaggaggttcttagcaaatttgggcagatgctaggatcaaacatgacggaattccattcccagatctcaaagtcccgccaagagttggagcagcactcagtagacacggccagcacctccgatgcagtgaccttcatcacctatgtgcagtctttgaaacggaagatcaagcagtttgagaagcaagttgagctctaccgcaatggccagcgcttactggaaaagcaaaggttccagttcccaccttcctggctttatattgacaacatcgagggagagtggggagccttcaatgacatcatgcggcgaaaggactctgccattcagcagcaggtggcaaacctgcaaatgaagattgtccaggaggatcgggccgtggaaagccgcaccaccgacctgctgactgactgggagaagaccaagcctgtcacgggcaaccttcgcccagaagaggcacttcaggctctcaccatatatgaggggaagtttggtaggctgaaggacgacagagagaagtgtgcaaaggccaaggaggcgctggaattgacagatactgggcttctcagtggcagtgaagagcgcgtgcaggtggccttagaagaattacaggacctcaaaggcgtttggtcagaactttctaaggtttgggagcaaatcgatcagatgaaggagcaaccctgggtttcagtacagcctcgaaagcttcgacaaaatttggatgccctcctgaaccagctgaaaagcttccctgcccggttgcgacagtatgcgtcctatgagtttgttcagaggcttctgaaaggttacatgaagataaatatgctggtgattgaactgaaatccgaagcacttaaagaccgccattggaaacagctcatgaaaaggcttcacgttaattgggttgtttctgagctaacccttggccaaatctgggatgttgacttgcagaaaaatgaagcgattgtcaaggatgtactgcttgtggcacaaggggagatggctttggaagaatttttgaagcagataagagaagtgtggaatacttatgaactagacttggttaattatcagaacaagtgccgcttgatccgtggctgggatgacctcttcaacaaggtcaaagaacacatcaacagcgtctcggccatgaagctctctccgtattacaaggtttttgaagaggatgctctcagctgggaagataagctgaacaggatcatggctctctttgatgtgtggattgatgtgcagaggcggtgggtctacctggaaggtatcttcacaggcagtgcagatatcaagcacctgctgccagtggaaacccagcggtttcagagcatcagcactgagtttttggctctaatgaaaaaagtgtccaagtctccccttgttatggatgttctgaacatccagggagtacagaggtctctggaaagattggcagacctgctaggaaagatccagaaagcattgggagaatatctggaaagagagcggtcatctttccccaggttctattttgtgggtgatgaagatttgcttgaaatcattggaaacagcaagaatgtcgctaaattacagaaacacttcaagaagatgtttgctggagtttcgagcatcatcctgaacgaggataactctgttgttttgggtatttcatctcgggaaggagaggaggttatgtttaaaactcctgtgtcaattactgaacatcccaaaatcaatgagtggctcacattggtagaaaaggagatgagagtcaccctggccaaactgcttgctgagtctgttacggaagttgagatttttggtaaagcaacttcaattgacccaaatacctacatcacttggattgataaataccaggcccagcttgtggttttgtcagcccagatagcctggtctgagaacgtggagaccgcactgagcagcatgggcggaggtggagatgccgcgcccttgcactctgtgctgagcaatgtggaggtcaccctcaatgtgttagcagactctgtcctcatggagcagcccccactccgaaggcggaagctagaacacttgattacagagttggttcaccagagagatgttacaaggtccttgatcaaaagcaagattgacaacgccaaatcttttgaatggctcagccagatgcgattttactttgaccctaagcaaactgatgtgttacagcagttgtcaattcaaatggcaaatgccaaatttaactatggctttgagtacctgggtgttcaggacaaactggtccagacccccctcactgaccgctgctatttgacaatgacacaagccttggaggccaggctggggggttccccatttggacctgctggaactgggaaaacagagtctgtcaaagctcttggccatcagcttggacggtttgttttagttttcaactgtgatgaaacctttgatttccaggcaatgggccggatctttgtgggcctttgccaggtgggtgcctggggctgctttgacgagttcaaccgcctggaggagcggatgctctcggctgtgtcccagcaggtgcagtgcatacaggaagcactgcgtgaacattccaaccccaactacgacaagacctctgcccccattacttgtgagctgctgaacaaacaagtcaaggtgagcccggacatggccatcttcatcaccatgaaccctggctacgcgggccggtctaaccttcctgacaacttgaagaagctgttccggagcttggccatgaccaagcccgaccggcagttaatcgcccaggtcatgctgtactcacagggtttccgcactgctgaagtgcttgccaacaaaatcgtcccgttttttaaactatgcgatgagcagctctcttcccaaagccattatgacttcggtcttcgggctttgaagagtgtgctggtgagtgcaggcaatgtgaagagagagagaatccagaagataaagagggagaaagaggaacgaggggaagcagttgatgaaggagaaattgctgaaaatctccctgaacaagagattctgatacagagcgtctgtgagacgatggtgccaaagctggtggcagaggacatcccgctgctcttcagcctcctgtcggacgtgttccctggagtccagtatcacaggggtgagatgactgcccttcgagaggagctgaagaaagtgtgtcaggagatgtatttgacatatggagatggagaagaagttggtggaatgtgggttgaaaaggttctccagctctatcagatcacccagatcaatcatggcctgatgatggtggggccctcgggaagtgggaagagcatggcctggcgtgtcctgctgaaggcattggagagactcgagggtgtggaaggtgtggcccatatcatcgaccccaaggccatcagcaaagaccacctctacggaaccctggaccccaacaccagggaatggacagatgggctcttcacacacgtgctgagaaagatcatcgacagcgtgagaggcgagctgcagaagcgccagtggatcgtcttcgatggcgatgtggatccagagtgggttgagaacttgaactcagtgctggatgacaataagctcctaactttgcccaatggagagcgcctcagtcttccacccaangtgagaataatgtttgaggtacaggacttgaaatacgcgaccttggccacagtgtcgcgctgcggcatggtctggttcagtgaggatgtgctgagcaccgacatgatcttcaacaacttcctggccaggctgcgcagcatcccgctggatgaaggggaggatgaggcacagcggcggcgtaagggcaaagaggatgagggggaggaggccgcttcccccatgctgcagatccaaagagatgcagctacgatcatgcaaccgtacttcacgtccaacggcctggtcaccaaggcgctagagcacgccttccagctggagcacatcatggacctaacacgcctgcgctgcctgggctcgctcttctccatgctgcaccaggcctgccgcaacgtggcgcagtataacgccaaccatcccgacttccccatgcagatcgagcagctggagcgctacattcaggtcagggggcatcaggggcttcacagagctcaccactgcgccagaccacaggtctgaggacctctgaaatgctgcacctgtggggatgtgcgctctctcctaggcgaggcagagccttcgttgaggggctaggaaaggtgcagtgggtgtctgtgatgcaagaagactgggaaccactgtctttaggttaactttgctgtaagtgtctttcttttgttgttgaaattttataaaaatcaaagtttaattccctttttaatagcgatatctggtttatgccatactctggtccctgtctggagacagccggctaaaaatgagagcagagctgggtgaatacatcagaagaatcacgaccgtgcctctgcccactgcgcccaacatacccattatcgattatgaggtgtccatcagcggagaatggtctccgtggcaggccaaggtgcctcagattgaagtggagacgcacaaggtggcagcccctgatgtcgtcgtgccaacgctggacacagtccgccacgaagccctcttgtacacttggctggccgaacacaagcccctggtcttgtgtggccctcctgggtctggcaagaccatgacactcttcagcgccctccgggccttgcctgacatggaggtggtgggtctcaacttctccagtgctactactccagagctgcttctgaagacttttgatcactactgcgagtacaggcgcacacctaatggggtggttttggctcctgttcaacttggaaagtggctggtgttgttctgtgatgaaatcaacttgccagatatggataaatatgggacccagagggtcatatccttcatcagacagatggtggagcacggaggcttttaccgtacctcagatcaaacatgggtgaagctggagagaatccagtttgttggggcttgtaatccccccacagaccctggaagaaagcccctctcacacaggttcctgcgccacgtgcctgtcgtgtatgtggattacccgggccccgcctccctcacacagatctacggcaccttcaaccgcgccatgctgaggctcattccatccctgcggacgtatgcagagccgctcactgctgccatggtggagttctacaccatgtctcaggagagattcacccaggatacacaacctcactatatctattcaccccgtgaaatgactaggtgggtgagaggcatctttgaagcgctgagacctctggagaccctgcctgttgaaggcctcattcggatttgggcacatgaagctctgcgtctcttccaagatagactcgtagaggatgaggagaggcgttggactgatgagaacatcgacacggttgctctgaagcacttccctaacatcgacagagagaaggcaatgagccgacccatcttgtacagcaactggctgtcaaaggattacatcccagtagaccaagaagagttaagagattatgtcaaagctaggctgaaggtcttttatgaagaagaacttgatgttccgctggtgctgtttaatgaagtcctagaccacgtgctgaggattgacagaatattccgtcaacctcaaggccacttgcttctgattggtgttagtggagcaggaaaaactaccctgtctcgtttcgtcgcctggatgaacggtttgagtgtgtaccagattaaggtccataggaagtacacaggggaagactttgatgaagatctacggacagtgttgagacgttctggctgtaaaaatgaaaagatagcatttataatggatgaatctaatgtgttagattctggattcctggagcgaatgaatacccttctggccaatggagaggtgcctggtctctttgaaggagacgagtatgccaccttgatgacgcagtgcaaagagggggcacagaaggaaggcctgatgctggactcgcacgaggagctctacaagtggttcactagccaggttatccgcaacctccacgtcgtgttcaccatgaacccgtcctcggagggactcaaggaccgggcagctacatcaccagcacttttcaacaggtgtgtgttgaattggtttggagactggtccaccgaagcactgtatcaggttggcaaagaattcacaagtaagatggatctggagaagccaaattacatcgtgcctgattacatgccagttgtgtatgataagctgccgcagccaccatcccatcgggaagccattgtgaacagctgtgtgtttgttcatcagactcttcaccaggcgaatgctcggctagcaaagcgaggcggcagaacgatggccatcacccctcgccactacctggacttcatcaatcactatgccaacctgttccacgagaagcggagcgagctggaggagcagcagatgcacttgaacgtggggctcaggaagatcaaagagacagtcgaccaggtagaagaactgcgtcgtgacttgaggataaagagccaagagctggaggtgaagaatgcagcagccaatgacaagctgaaaaagatggtgaaagaccagcaggaggctgaaaagaagaaggttatgagccaagaaatccaggaacagctgcataagcagcaggaggtaattgcagacaaacagatgagtgtcaaagaagatcttgataaggtggaacctgccgtcattgaggcccagaatgctgtgaagtcgatcaagaagcagcacctggtggaggtgaggtccatggccaaccctcctgctgctgtgaagctggcgctggagtccatctgcctgctgctgggggaaagcaccacagactggaagcagatccgctccatcatcatgcgggagaacttcatccccaccatcgtcaacttctctgcagaggagatcagtgacgccataagggagaagatgaagaaaaattacatgtccaatccaagttacaattatgaaattgtgaatcgggcttccctggcttgcggccctatggtgaaatgggcaattgcacagcttaactatgcagacatgttaaagagagtggagcccctacgcaatgagctgcagaagctggaagatgacgccaaggacaaccagcagaaggccaacgaggtggagcagatgatccgagacctggaagccagcatcgcccgctacaaggaggaatacgccgtcctgatctcagaggcccaggccatcaaggcagacctggcagctgtcgaggcaaaagtaaaccggagcactgctcttctgaagagcttgtctgctgaacgtgaacgatgggaaaaaacaagtgaaactttcaaaaaccagatgtccaccattgctggggactgtctcttgtcagctgcgttcattgcctacgcgggttactttgaccagcagatgcgtcagaacttgttcactacctggtcccatcacctacagcaagccaacatccagttccgtacagatattgccaggacggaatacctttccaatgctgatgagcgtcttcgctggcaggccagctccttgcctgctgatgacctttgcacagaaaatgccatcatgctgaaacgattcaataggtatccgctgatcattgacccctctggacaggccacagaattcattatgaatgaatataaggatcgtaagatcacacggaccagcttcctggatgacgccttcagaaagaacttagagagtgcactgagattcggtaacccccttctggtccaggatgtggaaagctacgatccagttttgaacccggtgctgaaccgtgaagtgcggcgaacaggggggagagtgctgatcactctcggggaccaggacatagacctgtcgccatcgtttgtcatcttcctgtccacccgggatccaactgtcgagttcccaccagatctctgttcccgggttacttttgtaaacttcacagttacccgtagcagtttacaaagccagtgtctaaatgaagtacttaaagcagaaagacctgatgtggacgagaaacgatctgatcttcttaaacttcaaggggaatttcagctccgtttgcgtcagctggaaaaatctctactacaagctctgaacgaggtgaaagggcgcattttggatgacgacacgatcataaccactctggagaacctgaagagagaggctgcagaggtcaccaggaaagttgaggagacggacattgtcatgcaggaggtggagaccgtgtcccagcagtacctcccgctctccaccgcctgcagcagcatctacttcaccatggagtccctcaagcagatacacttcttgtaccagtactccctccagtttttcctggacatttatcacaacgtcctatacgagaacccgaacctgaagggtgtcaccgaccacacacagcgcctgtccattataacaaaggacctcttccaggtggcgtttaaccgagtggctcgaggcatgctgcatcaggaccacattacctttgccatgctgctggcaagaatcaaactgaagggcaccgtgggggagcccacctacgatgcagaattccagcacttcttgagaggaaatgagattgtcctgagtgctggctccacccccaggatccagggcctgactgtggagcaggcggaggcggtggtgaggctgagctgccttcccgcgtttaaggacttgattgcaaaggttcaggcagacgagcaatttggcatctggctggacagcagctccccggagcagactgtgccctacctctggagtgaagaaacacctgcaacacccattggccaggccatccaccgcctgctcctgatccaggctttccggcccgatcgcctgttggccatggcccacatgtttgtttcaacaaaccttggggagtctttcatgtccatcatggagcagccgctcgacctgacccacattgtgggcacagaggtgaagcccaacactcctgtcttaatgtgctctgtgcctggttatgatgccagtggacatgtcgaggaccttgcagccgagcagaacacgcagatcacttcaattgcaatcggctctgcagaaggctttaaccaagcagataaggcaataaacaccgctgtaaagtcgggcaggtgggtgatgctgaagaatgtgcatctggccccagggtggctgatgcagctggagaagaagttgcattccctgcagccgcatgcctgcttccgactcttcctcaccatggagatcaaccccaaggtgcctgtgaatctgctccgtgcgggccgcatctttgtgttcgagccaccgccaggggtgaaggccaacatgctgaggacgttcagcagcattcccgtctcacggatatgcaagtctcccaacgagcgtgcccgcttgtacttcctgctggcctggtttcatgcgatcatccaagaacgcttacgatacgcaccactggggtggtcaaagaagtatgaatttggagagtctgacctgcggtcagcttgcgatacggtggacacgtggctggatgacacggccaagggcaggcagaacatctcaccggataagatcccgtggtctgcactaaagaccttaatggcccagtccatttatggcgggcgcgtggacaacgagtttgaccagcgtctgctcaacaccttcctggagcgcctgttcacaaccaggagtttcgacagtgagtttaagctggcatgcaaggtcgacggacataaagacattcaaatgccagatggcatcaggcgagaggagtttgtgcagtgggtggagttgctccccgacacccagacgccctcctggctgggcctgcccaacaacgccgagagagtcctccttaccacacagggtgtggacatgatcagtaaaatgctgaagatgcagatgttggaggatgaggacgacctggcctacgcagagactgagaagaagacgaggacagactccacgtccgacgggcgccctgcctggatgcggacactgcacaccaccgcgtccaactggctgcacctcatcccccagacgctgagccacctcaagcgcaccgtggagaatatcaaggatcctttgttcaggttctttgagagagaagtgaagatgggcgcaaagctgcttcaggacgttcgccaggaccttgcagatgtcgtccaggtgtgcgaaggaaagaagaagcagaccaactacttgcgcacgctgatcaacgagctagtgaaagggatcttgcctcggagctggtcccactacacggtgcctgccggcatgaccgtcatccagtgggtgtccgacttcagcgagaggatcaaacagctgcagaacatctcactggcagctgcatctggtggcgccaaggagctaaagaacatccacgtgtgcctgggtggcctgttcgtgcctgaggcgtacatcactgccaccaggcagtatgtggcccaggccaacagctggtccctggaggagctctgcctggaagtcaacgtcaccacctcacagggcgccacccttgacgcttgcagcttcggagtcacgggtttgaaacttcaaggggccacgtgcaacaacaacaagctgtcactgtccaatgccatctcaaccgcccttcccctgacgcagctgcgctgggtcaagcagacaaacaccgagaagaaggccagtgtggtaaccttacctgtctacctgaacttcacccgtgcagacctcatcttcaccgtggacttcgaaattgctacaaaggaggatcctcgcagcttctacgagcggggtgtcgcagtcttgtgcacagagtaaacttttctagctgcccctttctgtaatagtgaaagttggtatttaacatttattcatttttaaaatatttggaaggtctgagcttgtgaaaagaaagtggttggtctgaggttggaggaagctgaatggaatctgacggttgggagtggtggaaattggaaggataccaggaggtatttgggaaggccaatggcgtggctcctttgaggaaataaaacactaagcatga

SEQ ID NO: 462011 - DNA, 15697 bp, Homo sapiens
  misc_feature (8279)..(8279): n is a, c, g, or t
ttcaatgagagaacatttaatgagaggttaaggggcttagaacaacgccgggcacaggctaagcgctcactaaacgttagctctcgccaataacatcactgattcactataaagtttctctggctgtgtgctattcgctgcgtccacagcagtgaagaagacagacgcagcccctgaccaacctcgccaagcccgggcgccgagccaggacgttgagccaagtccccatctcctaggactcgcagtgcggaggctgcgggccccgaccagcgccgagactacaagtcccagaagggcgcgcggcgacatcgccgggcccgccccccgcgcacgcgcggcgccgtgacgctaaggccgcgagcgagcgcgggtggctgcggcggctgcggccggcggggcggggcggggccacctggcagtggctgcctttagggcggagccggctcccgctctcctcagtctgcggtgggctagcggacggtccggcttccggcggccgtttctgtctcttgctggctgtctcgctgagtcgcggccgccttctcatcgctcctggaaggtcccgagcgcgacaccatgtcggagcccgggggcggcggcggcgaggacggctcggccggattggaagtgtcggccgtgcagaatgtggcggacgtgtcggtgctgcagaagcacctgcgcaagctggtgccgctgctgctggaggacggcggcgaggcgccggccgcgctggaggcggcgctggaggagaagagcgccctggagcagatgcgcaagttcctttcggacccgcaggtccacacggtgctggtggagcgctccacgctcaaagaggacgtcggtgatgaaggagaagaagaaaaagaattcatttcctataacatcaacatagacattcattatggggttaaatccaatagcttggcattcattaaacgtactcccgtgattgatgcagataaacccgtgtcttctcagctccgggtccttacactcagtgaagactcgccctacgaaactttgcattctttcattagcaatgcagtggctcctttttttaagtcctacattagagagtctggcaaggcagacagggatggtgataaaatggctccttcagttgaaaagaagattgcagaactcgaaatgggactccttcacttgcagcaaaatattgaaattccggagatcagcctgccgattcatccaatgatcacaaatgttgcaaaacagtgttatgagcgtggagaaaagccaaaagttacagactttggtgataaggttgaagacccaacatttcttaatcagttacaatctggagttaaccgctggatccgagaaattcaaaaagtgaccaaactggatcgagatcctgcatcaggaactgccttacaggaaattagtttttggctaaacttggaacgtgcgttataccgcatccaggagaaacgggagagcccggaagttctcctgactctggatatcttgaaacatggcaagcgcttccatgccaccgtcagttttgacactgacacaggtctaaaacaggctttggaaactgtgaatgactacaatcctctgatgaaagatttccctctgaatgatttgctgtctgccacggagctggacaaaataagacaggcgcttgttgccattttcacacatttgagaaagatccgaaacacaaaatatcctattcagagggcactgcgtttggtggaggcaatttcaagagacttgagttctcaattactcaaagtattgggcactaggaaattgatgcatgttgcttatgaagaatttgaaaaagttatggtagcatgctttgaagtttttcagacttgggatgatgagtatgagaaacttcaggtattgttgagagacatcgtcaaaagaaaaagggaagaaaatctgaagatggtgtggcgtatcaaccctgcccacaggaagctgcaggcccgccttgaccagatgagaaaatttagacgccagcatgaacagctaagagctgttatcgtcagggtcctgaggccacaggtcacggcagttgcacaacagaatcaaggagaggtccctgaaccccaagatatgaaagtggctgaggttctctttgatgctgcagatgcaaatgccattgaggaagtaaaccttgcttatgagaacgtcaaggaagtggatggactggatgtttccaaagagggcacggaagcctgggaggctgctatgaagaggtacgatgagaggatcgacagagtggagacccggatcaccgctcgccttcgggatcagcttggcacagccaagaatgccaacgagatgtttaggattttctccaggtttaatgcactgtttgtcaggcctcacatccgtggggccattcgtgactaccagacccagctgatccagcgcgtgaaagatgacattgagtctcttcacgacaagttcaaggtccagtacccacagagtcaggcttgtaagatgagtcacgttcgtgacttgccccctgtgtcagggtctatcatctgggctaaacagatcgacaggcagctgacggcctacatgaagcgggtggaagatgtccttggcaagggctgggagaatcacgtggaggggcagaagctgaagcaggatggagacagcttccgcatgaagctcaacacgcaggagatctttgatgactgggcaaggaaggtgcagcagcgcaacctcggtgtctcggggcgcattttcaccatcgaaagtactcgggttcggggccgaactggaaatgtgcttaagctgaaagttaactttcttcctgagattatcacactatccaaagaagtccggaacctcaaatggcttggtttccgcgtcccactggcgattgtgaacaaagcccatcaagcaaaccagctttacccgtttgccatctcactgatcgagagcgttcgtacctatgaacggacctgcgagaaggtggaggagcggaacaccatttcccttttggtggctggcttgaaaaaggaagtgcaggccctgatcgcagaaggcattgcgttggtgtgggagtcctacaaacttgacccatatgtacagcgcttagcagagactgtcttcaacttccaagaaaaggtatgctctcatgtaatcctcaggtgtcctggtaacgaatgaagcacagtaatagcgagctcagttaaaacactagttctcccgaagaaggcatgcatggttgatgcagcatacggccatgtgagctgcaagggaggaggaccctttgtactcaccgggctatttaatggtgctgggttttagggaggccattaagtaacaacctgagtttagaaacaggtggagagctaaaggacacaggagtccaacagagagcagaatgcagttttattgctgctacagctgaaagcagagcaggctctaggtctcagccacgaaggccttacccagagcctgcggctgccagcggaccagatgcatacgacagcgaggctggctccccaggcacaggaggagcttaacagagcacgtttacttccttctcccagatttacccatcagaggccacctctcccattgagtgggagtaagggaagagaagctggggaggctccatgcattttcctttcctctgcaaggacatgcgagtggggattagtgttctcaccccagcagctaggattagctacttatggaagaactgtgcctggagcatttgtcaatgtataatatttgagaagaatgttatgtgagaataaaggaacagagtgtgagtgggtgttttaaatattaaatatttcttccttcaggtggatgatctgctgatcattgaagaaaaaatagacctagaagtccgttccttggaaacttgtatgtatgaccataagacattctcggaaatcttgaacagagtccagaaagcagtggatgacttaaatctgcactcctattccaatttgcccatctgggtcaacaagcttgacatggagattgaaagaatattgggcgtccgtctgcaagctggcctgagagcttggacgcaggttcttcttggacaagctgaagataaagcagaagttgacatggacacagatgctccacaagttagtcacaagcctggtggagagccaaagatcaaaaatgtcgttcatgagctaagaataaccaatcaggtaatctacttgaatccaccaattgaagagtgcagatacaagctgtatcaggaaatgtttgcctggaagatggttgtactgtctctccccaggatccagagtcagaggtaccaggtgggtgtacattacgaattgactgaggaagagaaattctatcggaatgctttaacacggatgcctgatggccctgttgccctggaagagtcgtattctgctgtcatgggcattgtatctgaagttgaacagtatgtcaaggtttggcttcagtatcagtgtttatgggatatgcaagctgaaaacatctataacagacttggagaagatctcaacaaatggcaggctctcctggtccaaataaggaaggccagaggaacctttgacaatgcagaaaccaagaaagagtttggaccagtagttatagattatggcaaggtacaatctaaggtgaacttgaaatatgactcttggcataaggaggttcttagcaaatttgggcagatgctaggatcaaacatgacggaattccattcccagatctcaaagtcccgccaagagttggagcagcactcagtagacacggccagcacctccgatgcagtgaccttcatcacctatgtgcagtctttgaaacggaagatcaagcagtttgagaagcaagttgagctctaccgcaatggccagcgcttactggaaaagcaaaggttccagttcccaccttcctggctttatattgacaacatcgagggagagtggggagccttcaatgacatcatgcggcgaaaggactctgccattcagcagcaggtggcaaacctgcaaatgaagattgtccaggaggatcgggccgtggaaagccgcaccaccgacctgctgactgactgggagaagaccaagcctgtcacgggcaaccttcgcccagaagaggcacttcaggctctcaccatatatgaggggaagtttggtaggctgaaggacgacagagagaagtgtgcaaaggccaaggaggcgctggaattgacagatactgggcttctcagtggcagtgaagagcgcgtgcaggtggccttagaagaattacaggacctcaaaggcgtttggtcagaactttctaaggtttgggagcaaatcgatcagatgaaggagcaaccctgggtttcagtacagcctcgaaagcttcgacaaaatttggatgccctcctgaaccagctgaaaagcttccctgcccggttgcgacagtatgcgtcctatgagtttgttcagaggcttctgaaaggttacatgaagataaatatgctggtgattgaactgaaatccgaagcacttaaagaccgccattggaaacagctcatgaaaaggcttcacgttaattgggttgtttctgagctaacccttggccaaatctgggatgttgacttgcagaaaaatgaagcgattgtcaaggatgtactgcttgtggcacaaggggagatggctttggaagaatttttgaagcagataagagaagtgtggaatacttatgaactagacttggttaattatcagaacaagtgccgcttgatccgtggctgggatgacctcttcaacaaggtcaaagaacacatcaacagcgtctcggccatgaagctctctccgtattacaaggtttttgaagaggatgctctcagctgggaagataagctgaacaggatcatggctctctttgatgtgtggattgatgtgcagaggcggtgggtctacctggaaggtatcttcacaggcagtgcagatatcaagcacctgctgccagtggaaacccagcggtttcagagcatcagcactgagtttttggctctaatgaaaaaagtgtccaagtctccccttgttatggatgttctgaacatccagggagtacagaggtctctggaaagattggcagacctgctaggaaagatccagaaagcattgggagaatatctggaaagagagcggtcatctttccccaggttctattttgtgggtgatgaagatttgcttgaaatcattggaaacagcaagaatgtcgctaaattacagaaacacttcaagaagatgtttgctggagtttcgagcatcatcctgaacgaggataactctgttgttttgggtatttcatctcgggaaggagaggaggttatgtttaaaactcctgtgtcaattactgaacatcccaaaatcaatgagtggctcacattggtagaaaaggagatgagagtcaccctggccaaactgcttgctgagtctgttacggaagttgagatttttggtaaagcaacttcaattgacccaaatacctacatcacttggattgataaataccaggcccagcttgtggttttgtcagcccagatagcctggtctgagaacgtggagaccgcactgagcagcatgggcggaggtggagatgccgcgcccttgcactctgtgctgagcaatgtggaggtcaccctcaatgtgttagcagactctgtcctcatggagcagcccccactccgaaggcggaagctagaacacttgattacagagttggttcaccagagagatgttacaaggtccttgatcaaaagcaagattgacaacgccaaatcttttgaatggctcagccagatgcgattttactttgaccctaagcaaactgatgtgttacagcagttgtcaattcaaatggcaaatgccaaatttaactatggctttgagtacctgggtgttcaggacaaactggtccagacccccctcactgaccgctgctatttgacaatgacacaagccttggaggccaggctggggggttccccatttggacctgctggaactgggaaaacagagtctgtcaaagctcttggccatcagcttggacggtttgttttagttttcaactgtgatgaaacctttgatttccaggcaatgggccggatctttgtgggcctttgccaggtgggtgcctggggctgctttgacgagttcaaccgcctggaggagcggatgctctcggctgtgtcccagcaggtgcagtgcatacaggaagcactgcgtgaacattccaaccccaactacgacaagacctctgcccccattacttgtgagctgctgaacaaacaagtcaaggtgagcccggacatggccatcttcatcaccatgaaccctggctacgcgggccggtctaaccttcctgacaacttgaagaagctgttccggagcttggccatgaccaagcccgaccggcagttaatcgcccaggtcatgctgtactcacagggtttccgcactgctgaagtgcttgccaacaaaatcgtcccgttttttaaactatgcgatgagcagctctcttcccaaagccattatgacttcggtcttcgggctttgaagagtgtgctggtgagtgcaggcaatgtgaagagagagagaatccagaagataaagagggagaaagaggaacgaggggaagcagttgatgaaggagaaattgctgaaaatctccctgaacaagagattctgatacagagcgtctgtgagacgatggtgccaaagctggtggcagaggacatcccgctgctcttcagcctcctgtcggacgtgttccctggagtccagtatcacaggggtgagatgactgcccttcgagaggagctgaagaaagtgtgtcaggagatgtatttgacatatggagatggagaagaagttggtggaatgtgggttgaaaaggttctccagctctatcagatcacccagatcaatcatggcctgatgatggtggggccctcgggaagtgggaagagcatggcctggcgtgtcctgctgaaggcattggagagactcgagggtgtggaaggtgtggcccatatcatcgaccccaaggccatcagcaaagaccacctctacggaaccctggaccccaacaccagggaatggacagatgggctcttcacacacgtgctgagaaagatcatcgacagcgtgagaggcgagctgcagaagcgccagtggatcgtcttcgatggcgatgtggatccagagtgggttgagaacttgaactcagtgctggatgacaataagctcctaactttgcccaatggagagcgcctcagtcttccacccaangtgagaataatgtttgaggtacaggacttgaaatacgcgaccttggccacagtgtcgcgctgcggcatggtctggttcagtgaggatgtgctgagcaccgacatgatcttcaacaacttcctggccaggctgcgcagcatcccgctggatgaaggggaggatgaggcacagcggcggcgtaagggcaaagaggatgagggggaggaggccgcttcccccatgctgcagatccaaagagatgcagctacgatcatgcaaccgtacttcacgtccaacggcctggtcaccaaggcgctagagcacgccttccagctggagcacatcatggacctaacacgcctgcgctgcctgggctcgctcttctccatgctgcaccaggcctgccgcaacgtggcgcagtataacgccaaccatcccgacttccccatgcagatcgagcagctggagcgctacattcaggtcagggggcatcaggggcttcacagagctcaccactgcgccagaccacaggtctgaggacctctgaaatgctgcacctgtggggatgtgcgctctctcctaggcgaggcagagccttcgttgaggggctaggaaaggtgcagtgggtgtctgtgatgcaagaagactgggaaccactgtctttaggttaactttgctgtaagtgtctttcttttgttgttgaaattttataaaaatcaaagtttaattccctttttaatagcgatatctggtttatgccatactctggtccctgtctggagacagccggctaaaaatgagagcagagctgggtgaatacatcagaagaatcacgaccgtgcctctgcccactgcgcccaacatacccattatcgattatgaggtgtccatcagcggagaatggtctccgtggcaggccaaggtgcctcagattgaagtggagacgcacaaggtggcagcccctgatgtcgtcgtgccaacgctggacacagtccgccacgaagccctcttgtacacttggctggccgaacacaagcccctggtcttgtgtggccctcctgggtctggcaagaccatgacactcttcagcgccctccgggccttgcctgacatggaggtggtgggtctcaacttctccagtgctactactccagagctgcttctgaagacttttgatcactactgcgagtacaggcgcacacctaatggggtggttttggctcctgttcaacttggaaagtggctggtgttgttctgtgatgaaatcaacttgccagatatggataaatatgggacccagagggtcatatccttcatcagacagatggtggagcacggaggcttttaccgtacctcagatcaaacatgggtgaagctggagagaatccagtttgttggggcttgtaatccccccacagaccctggaagaaagcccctctcacacaggttcctgcgccacgtgcctgtcgtgtatgtggattacccgggccccgcctccctcacacagatctacggcaccttcaaccgcgccatgctgaggctcattccatccctgcggacgtatgcagagccgctcactgctgccatggtggagttctacaccatgtctcaggagagattcacccaggatacacaacctcactatatctattcaccccgtgaaatgactaggtgggtgagaggcatctttgaagcgctgagacctctggagaccctgcctgttgaaggcctcattcggatttgggcacatgaagctctgcgtctcttccaagatagactcgtagaggatgaggagaggcgttggactgatgagaacatcgacacggttgctctgaagcacttccctaacatcgacagagagaaggcaatgagccgacccatcttgtacagcaactggctgtcaaaggattacatcccagtagaccaagaagagttaagagattatgtcaaagctaggctgaaggtcttttatgaagaagaacttgatgttccgctggtgctgtttaatgaagtcctagaccacgtgctgaggattgacagaatattccgtcaacctcaaggccacttgcttctgattggtgttagtggagcaggaaaaactaccctgtctcgtttcgtcgcctggatgaacggtttgagtgtgtaccagattaaggtccataggaagtacacaggggaagactttgatgaagatctacggacagtgttgagacgttctggctgtaaaaatgaaaagatagcatttataatggatgaatctaatgtgttagattctggattcctggagcgaatgaatacccttctggccaatggagaggtgcctggtctctttgaaggagacgagtatgccaccttgatgacgcagtgcaaagagggggcacagaaggaaggcctgatgctggactcgcacgaggagctctacaagtggttcactagccaggttatccgcaacctccacgtcgtgttcaccatgaacccgtcctcggagggactcaaggaccgggcagctacatcaccagcacttttcaacaggtgtgtgttgaattggtttggagactggtccaccgaagcactgtatcaggttggcaaagaattcacaagtaagatggatctggagaagccaaattacatcgtgcctgattacatgccagttgtgtatgataagctgccgcagccaccatcccatcgggaagccattgtgaacagctgtgtgtttgttcatcagactcttcaccaggcgaatgctcggctagcaaagcgaggcggcagaacgatggccatcacccctcgccactacctggacttcatcaatcactatgccaacctgttccacgagaagcggagcgagctggaggagcagcagatgcacttgaacgtggggctcaggaagatcaaagagacagtcgaccaggtagaagaactgcgtcgtgacttgaggataaagagccaagagctggaggtgaagaatgcagcagccaatgacaagctgaaaaagatggtgaaagaccagcaggaggctgaaaagaagaaggttatgagccaagaaatccaggaacagctgcataagcagcaggaggtaattgcagacaaacagatgagtgtcaaagaagatcttgataaggtggaacctgccgtcattgaggcccagaatgctgtgaagtcgatcaagaagcagcacctggtggaggtgaggtccatggccaaccctcctgctgctgtgaagctggcgctggagtccatctgcctgctgctgggggaaagcaccacagactggaagcagatccgctccatcatcatgcgggagaacttcatccccaccatcgtcaacttctctgcagaggagatcagtgacgccataagggagaagatgaagaaaaattacatgtccaatccaagttacaattatgaaattgtgaatcgggcttccctggcttgcggccctatggtgaaatgggcaattgcacagcttaactatgcagacatgttaaagagagtggagcccctacgcaatgagctgcagaagctggaagatgacgccaaggacaaccagcagaaggccaacgaggtggagcagatgatccgagacctggaagccagcatcgcccgctacaaggaggaatacgccgtcctgatctcagaggcccaggccatcaaggcagacctggcagctgtcgaggcaaaagtaaaccggagcactgctcttctgaagagcttgtctgctgaacgtgaacgatgggaaaaaacaagtgaaactttcaaaaaccagatgtccaccattgctggggactgtctcttgtcagctgcgttcattgcctacgcgggttactttgaccagcagatgcgtcagaacttgttcactacctggtcccatcacctacagcaagccaacatccagttccgtacagatattgccaggacggaatacctttccaatgctgatgagcgtcttcgctggcaggccagctccttgcctgctgatgacctttgcacagaaaatgccatcatgctgaaacgattcaataggtatccgctgatcattgacccctctggacaggccacagaattcattatgaatgaatataaggatcgtaagatcacacggaccagcttcctggatgacgccttcagaaagaacttagagagtgcactgagattcggtaacccccttctggtccaggatgtggaaagctacgatccagttttgaacccggtgctgaaccgtgaagtgcggcgaacaggggggagagtgctgatcactctcggggaccaggacatagacctgtcgccatcgtttgtcatcttcctgtccacccgggatccaactgtcgagttcccaccagatctctgttcccgggttacttttgtaaacttcacagttacccgtagcagtttacaaagccagtgtctaaatgaagtacttaaagcagaaagacctgatgtggacgagaaacgatctgatcttcttaaacttcaaggggaatttcagctccgtttgcgtcagctggaaaaatctctactacaagctctgaacgaggtgaaagggcgcattttggatgacgacacgatcataaccactctggagaacctgaagagagaggctgcagaggtcaccaggaaagttgaggagacggacattgtcatgcaggaggtggagaccgtgtcccagcagtacctcccgctctccaccgcctgcagcagcatctacttcaccatggagtccctcaagcagatacacttcttgtaccagtactccctccagtttttcctggacatttatcacaacgtcctatacgagaacccgaacctgaagggtgtcaccgaccacacacagcgcctgtccattataacaaaggacctcttccaggtggcgtttaaccgagtggctcgaggcatgctgcatcaggaccacattacctttgccatgctgctggcaagaatcaaactgaagggcaccgtgggggagcccacctacgatgcagaattccagcacttcttgagaggaaatgagattgtcctgagtgctggctccacccccaggatccagggcctgactgtggagcaggcggaggcggtggtgaggctgagctgccttcccgcgtttaaggacttgattgcaaaggttcaggcagacgagcaatttggcatctggctggacagcagctccccggagcagactgtgccctacctctggagtgaagaaacacctgcaacacccattggccaggccatccaccgcctgctcctgatccaggctttccggcccgatcgcctgttggccatggcccacatgtttgtttcaacaaaccttggggagtctttcatgtccatcatggagcagccgctcgacctgacccacattgtgggcacagaggtgaagcccaacactcctgtcttaatgtgctctgtgcctggttatgatgccagtggacatgtcgaggaccttgcagccgagcagaacacgcagatcacttcaattgcaatcggctctgcagaaggctttaaccaagcagataaggcaataaacaccgctgtaaagtcgggcaggtgggtgatgctgaagaatgtgcatctggccccagggtggctgatgcagctggagaagaagttgcattccctgcagccgcatgcctgcttccgactcttcctcaccatggagatcaaccccaaggtgcctgtgaatctgctccgtgcgggccgcatctttgtgttcgagccaccgccaggggtgaaggccaacatgctgaggacgttcagcagcattcccgtctcacggatatgcaagtctcccaacgagcgtgcccgcttgtacttcctgctggcctggtttcatgcgatcatccaagaacgcttacgatacgcaccactggggtggtcaaagaagtatgaatttggagagtctgacctgcggtcagcttgcgatacggtggacacgtggctggatgacacggccaagggcaggcagaacatctcaccggataagatcccgtggtctgcactaaagaccttaatggcccagtccatttatggcgggcgcgtggacaacgagtttgaccagcgtctgctcaacaccttcctggagcgcctgttcacaaccaggagtttcgacagtgagtttaagctggcatgcaaggtcgacggacataaagacattcaaatgccagatggcatcaggcgagaggagtttgtgcagtgggtggagttgctccccgacacccagacgccctcctggctgggcctgcccaacaacgccgagagagtcctccttaccacacagggtgtggacatgatcagtaaaatgctgaagatgcagatgttggaggatgaggacgacctggcctacgcagagactgagaagaagacgaggacagactccacgtccgacgggcgccctgcctggatgcggacactgcacaccaccgcgtccaactggctgcacctcatcccccagacgctgagccacctcaagcgcaccgtggagaatatcaaggatcctttgttcaggttctttgagagagaagtgaagatgggcgcaaagctgcttcaggacgttcgccaggaccttgcagatgtcgtccaggtgtgcgaaggaaagaagaagcagaccaactacttgcgcacgctgatcaacgagctagtgaaagggatcttgcctcggagctggtcccactacacggtgcctgccggcatgaccgtcatccagtgggtgtccgacttcagcgagaggatcaaacagctgcagaacatctcactggcagctgcatctggtggcgccaaggagctaaagaacatccacgtgtgcctgggtggcctgttcgtgcctgaggcgtacatcactgccaccaggcagtatgtggcccaggccaacagctggtccctggaggagctctgcctggaagtcaacgtcaccacctcacagggcgccacccttgacgcttgcagcttcggagtcacgggtttgaaacttcaaggggccacgtgcaacaacaacaagctgtcactgtccaatgccatctcaaccgcccttcccctgacgcagctgcgctgggtcaagcagacaaacaccgagaagaaggccagtgtggtaaccttacctgtctacctgaacttcacccgtgcagacctcatcttcaccgtggacttcgaaattgctacaaaggaggatcctcgcagcttctacgagcggggtgtcgcagtcttgtgcacagagtaaacttttctagctgcccctttctgtaatagtgaaagttggtatttaacatttattcatttttaaaatatttggaaggtctgagcttgtgaaaagaaagtggttggtctgaggttggaggaagctgaatggaatctgacggttgggagtggtggaaattggaaggataccaggaggtatttgggaaggccaatggcgtggctcctttgaggaaataaaacactaagcatga

SEQ ID NO: 462012 - DNA, 15506 bp, Homo sapiens
  misc_feature (7590)..(7590): n is a, c, g, or t
ttcaatgagagaacatttaatgagaggttaaggggcttagaacaacgccgggcacaggctaagcgctcactaaacgttagctctcgccaataacatcactgattcactataaagtttctctggctgtgtgctattcgctgcgtccacagcagtgaagaagacagacgcagcccctgaccaacctcgccaagcccgggcgccgagccaggacgttgagccaagtccccatctcctaggactcgcagtgcggaggctgcgggccccgaccagcgccgagactacaagtcccagaagggcgcgcggcgacatcgccgggcccgccccccgcgcacgcgcggcgccgtgacgctaaggccgcgagcgagcgcgggtggctgcggcggctgcggccggcggggcggggcggggccacctggcagtggctgcctttagggcggagccggctcccgctctcctcagtctgcggtgggctagcggacggtccggcttccggcggccgtttctgtctcttgctggctgtctcgctgagtcgcggccgccttctcatcgctcctggaaggtcccgagcgcgacaccatgtcggagcccgggggcggcggcggcgaggacggctcggccggattggaagtgtcggccgtgcagaatgtggcggacgtgtcggtgctgcagaagcacctgcgcaagctggtgccgctgctgctggaggacggcggcgaggcgccggccgcgctggaggcggcgctggaggagaagagcgccctggagcagatgcgcaagttcctttcggacccgcaggtccacacggtgctggtggagcgctccacgctcaaagaggacgtcggtgatgaaggagaagaagaaaaagaattcatttcctataacatcaacatagacattcattatggggttaaatccaatagcttggcattcattaaacgtactcccgtgattgatgcagataaacccgtgtcttctcagctccgggtccttacactcagtgaagactcgccctacgaaactttgcattctttcattagcaatgcagtggctcctttttttaagtcctacattagagagtctggcaaggcagacagggatggtgataaaatggctccttcagttgaaaagaagattgcagaactcgaaatgggactccttcacttgcagcaaaatattgaaattccggagatcagcctgccgattcatccaatgatcacaaatgttgcaaaacagtgttatgagcgtggagaaaagccaaaagttacagactttggtgataaggttgaagacccaacatttcttaatcagttacaatctggagttaaccgctggatccgagaaattcaaaaagtgaccaaactggatcgagatcctgcatcaggaactgccttacaggaaattagtttttggctaaacttggaacgtgcgttataccgcatccaggagaaacgggagagcccggaagttctcctgactctggatatcttgaaacatggcaagcgcttccatgccaccgtcagttttgacactgacacaggtctaaaacaggctttggaaactgtgaatgactacaatcctctgatgaaagatttccctctgaatgatttgctgtctgccacggagctggacaaaataagacaggcgcttgttgccattttcacacatttgagaaagatccgaaacacaaaatatcctattcagagggcactgcgtttggtggaggcaatttcaagagacttgagttctcaattactcaaagtattgggcactaggaaattgatgcatgttgcttatgaagaatttgaaaaagttatggtagcatgctttgaagtttttcagacttgggatgatgagtatgagaaacttcaggtattgttgagagacatcgtcaaaagaaaaagggaagaaaatctgaagatggtgtggcgtatcaaccctgcccacaggaagctgcaggcccgccttgaccagatgagaaaatttagacgccagcatgaacagctaagagctgttatcgtcagggtcctgaggccacaggtcacggcagttgcacaacagaatcaaggagaggtccctgaaccccaagatatgaaagtggctgaggttctctttgatgctgcagatgcaaatgccattgaggaagtaaaccttgcttatgagaacgtcaaggaagtggatggactggatgtttccaaagagggcacggaagcctgggaggctgctatgaagaggtacgatgagaggatcgacagagtggagacccggatcaccgctcgccttcgggatcagcttggcacagccaagaatgccaacgagatgtttaggattttctccaggtttaatgcactgtttgtcaggcctcacatccgtggggccattcgtgactaccagacccagctgatccagcgcgtgaaagatgacattgagtctcttcacgacaagttcaaggtccagtacccacagagtcaggcttgtaagatgagtcacgttcgtgacttgccccctgtgtcagggtctatcatctgggctaaacagatcgacaggcagctgacggcctacatgaagcgggtggaagatgtccttggcaagggctgggagaatcacgtggaggggcagaagctgaagcaggatggagacagcttccgcatgaagctcaacacgcaggagatctttgatgactgggcaaggaaggtgcagcagcgcaacctcggtgtctcggggcgcattttcaccatcgaaagtactcgggttcggggccgaactggaaatgtgcttaagctgaaagttaactttcttcctgagattatcacactatccaaagaagtccggaacctcaaatggcttggtttccgcgtcccactggcgattgtgaacaaagcccatcaagcaaaccagctttacccgtttgccatctcactgatcgagagcgttcgtacctatgaacggacctgcgagaaggtggaggagcggaacaccatttcccttttggtggctggcttgaaaaaggaagtgcaggccctgatcgcagaaggcattgcgttggtgtgggagtcctacaaacttgacccatatgtacagcgcttagcagagactgtcttcaacttccaagaaaaggtggatgatctgctgatcattgaagaaaaaatagacctagaagtccgttccttggaaacttgtatgtatgaccataagacattctcggaaatcttgaacagagtccagaaagcagtggatgacttaaatctgcactcctattccaatttgcccatctgggtcaacaagcttgacatggagattgaaagaatattgggcgtccgtctgcaagctggcctgagagcttggacgcaggttcttcttggacaagctgaagataaagcagaagttgacatggacacagatgctccacaagttagtcacaagcctggtggagagccaaagatcaaaaatgtcgttcatgagctaagaataaccaatcaggtaatctacttgaatccaccaattgaagagtgcagatacaagctgtatcaggaaatgtttgcctggaagatggttgtactgtctctccccaggatccagagtcagaggtaccaggtgggtgtacattacgaattgactgaggaagagaaattctatcggaatgctttaacacggatgcctgatggccctgttgccctggaagagtcgtattctgctgtcatgggcattgtatctgaagttgaacagtatgtcaaggtttggcttcagtatcagtgtttatgggatatgcaagctgaaaacatctataacagacttggagaagatctcaacaaatggcaggctctcctggtccaaataaggaaggccagaggaacctttgacaatgcagaaaccaagaaagagtttggaccagtagttatagattatggcaaggtacaatctaaggtgaacttgaaatatgactcttggcataaggaggttcttagcaaatttgggcagatgctaggatcaaacatgacggaattccattcccagatctcaaagtcccgccaagagttggagcagcactcagtagacacggccagcacctccgatgcagtgaccttcatcacctatgtgcagtctttgaaacggaagatcaagcagtttgagaagcaagttgagctctaccgcaatggccagcgcttactggaaaagcaaaggttccagttcccaccttcctggctttatattgacaacatcgagggagagtggggagccttcaatgacatcatgcggcgaaaggactctgccattcagcagcaggtggcaaacctgcaaatgaagattgtccaggaggatcgggccgtggaaagccgcaccaccgacctgctgactgactgggagaagaccaagcctgtcacgggcaaccttcgcccagaagaggcacttcaggctctcaccatatatgaggggaagtttggtaggctgaaggacgacagagagaagtgtgcaaaggccaaggaggcgctggaattgacagatactgggcttctcagtggcagtgaagagcgcgtgcaggtggccttagaagaattacaggacctcaaaggcgtttggtcagaactttctaaggtttgggagcaaatcgatcagatgaaggagcaaccctgggtttcagtacagcctcgaaagcttcgacaaaatttggatgccctcctgaaccagctgaaaagcttccctgcccggttgcgacagtatgcgtcctatgagtttgttcagaggcttctgaaaggttacatgaagataaatatgctggtgattgaactgaaatccgaagcacttaaagaccgccattggaaacagctcatgaaaaggcttcacgttaattgggttgtttctgagctaacccttggccaaatctgggatgttgacttgcagaaaaatgaagcgattgtcaaggatgtactgcttgtggcacaaggggagatggctttggaagaatttttgaagcagataagagaagtgtggaatacttatgaactagacttggttaattatcagaacaagtgccgcttgatccgtggctgggatgacctcttcaacaaggtcaaagaacacatcaacagcgtctcggccatgaagctctctccgtattacaaggtttttgaagaggatgctctcagctgggaagataagctgaacaggatcatggctctctttgatgtgtggattgatgtgcagaggcggtgggtctacctggaaggtatcttcacaggcagtgcagatatcaagcacctgctgccagtggaaacccagcggtttcagagcatcagcactgagtttttggctctaatgaaaaaagtgtccaagtctccccttgttatggatgttctgaacatccagggagtacagaggtctctggaaagattggcagacctgctaggaaagatccagaaagcattgggagaatatctggaaagagagcggtcatctttccccaggttctattttgtgggtgatgaagatttgcttgaaatcattggaaacagcaagaatgtcgctaaattacagaaacacttcaagaagatgtttgctggagtttcgagcatcatcctgaacgaggataactctgttgttttgggtatttcatctcgggaaggagaggaggttatgtttaaaactcctgtgtcaattactgaacatcccaaaatcaatgagtggctcacattggtagaaaaggagatgagagtcaccctggccaaactgcttgctgagtctgttacggaagttgagatttttggtaaagcaacttcaattgacccaaatacctacatcacttggattgataaataccaggcccagcttgtggttttgtcagcccagatagcctggtctgagaacgtggagaccgcactgagcagcatgggcggaggtggagatgccgcgcccttgcactctgtgctgagcaatgtggaggtcaccctcaatgtgttagcagactctgtcctcatggagcagcccccactccgaaggcggaagctagaacacttgattacagagttggttcaccagagagatgttacaaggtccttgatcaaaagcaagattgacaacgccaaatcttttgaatggctcagccagatgcgattttactttgaccctaagcaaactgatgtgttacagcagttgtcaattcaaatggcaaatgccaaatttaactatggctttgagtacctgggtgttcaggacaaactggtccagacccccctcactgaccgctgctatttgacaatgacacaagccttggaggccaggctggggggttccccatttggacctgctggaactgggaaaacagagtctgtcaaagctcttggccatcagcttggacggtttgttttagttttcaactgtgatgaaacctttgatttccaggcaatgggccggatctttgtgggcctttgccaggtgggtgcctggggctgctttgacgagttcaaccgcctggaggagcggatgctctcggctgtgtcccagcaggtgcagtgcatacaggaagcactgcgtgaacattccaaccccaactacgacaagacctctgcccccattacttgtgagctgctgaacaaacaagtcaaggtgagcccggacatggccatcttcatcaccatgaaccctggctacgcgggccggtctaaccttcctgacaacttgaagaagctgttccggagcttggccatgaccaagcccgaccggcagttaatcgcccaggtcatgctgtactcacagggtttccgcactgctgaagtgcttgccaacaaaatcgtcccgttttttaaactatgcgatgagcagctctcttcccaaagccattatgacttcggtcttcgggctttgaagagtgtgctggtgagtgcaggcaatgtgaagagagagagaatccagaagataaagagggagaaagaggaacgaggggaagcagttgatgaaggagaaattgctgaaaatctccctgaacaagagattctgatacagagcgtctgtgagacgatggtgccaaagctggtggcagaggacatcccgctgctcttcagcctcctgtcggacgtgttccctggagtccagtatcacaggggtgagatgactgcccttcgagaggagctgaagaaagtgtgtcaggagatgtatttgacatatggagatggagaagaagttggtggaatgtgggttgaaaaggttctccagctctatcagatcacccagatcaatcatggcctgatgatggtggggccctcgggaagtgggaagagcatggcctggcgtgtcctgctgaaggcattggagagactcgagggtgtggaaggtgtggcccatatcatcgaccccaaggccatcagcaaagaccacctctacggaaccctggaccccaacaccagggaatggacagatgggctcttcacacacgtgctgagaaagatcatcgacagcgtgagaggcgagctgcagaagcgccagtggatcgtcttcgatggcgatgtggatccagagtgggttgagaacttgaactcagtgctggatgacaataagctcctaactttgcccaatggagagcgcctcagtcttccacccaangtgagaataatgtttgaggtacaggacttgaaatacgcgaccttggccacagtgtcgcgctgcggcatggtctggttcagtgaggatgtgctgagcaccgacatgatcttcaacaacttcctggccaggctgcgcagcatcccgctggatgaaggggaggatgaggcacagcggcggcgtaagggcaaagaggatgagggggaggaggccgcttcccccatgctgcagatccaaagagatgcagctacgatcatgcaaccgtacttcacgtccaacggcctggtcaccaaggcgctagagcacgccttccagctggagcacatcatggacctaacacgcctgcgctgcctgggctcgctcttctccatgctgcaccaggcctgccgcaacgtggcgcagtataacgccaaccatcccgacttccccatgcagatcgagcagctggagcgctacattcaggtcagggggcatcaggggcttcacagagctcaccactgcgccagaccacaggtctgaggacctctgaaatgctgcacctgtggggatgtgcgctctctcctaggcgaggcagagccttcgttgaggggctaggaaaggtgcagtgggtgtctgtgatgcaagaagactgggaaccactgtctttaggttaactttgctgtaagtgtctttcttttgttgttgaaattttataaaaatcaaagtttaattccctttttaatagcgatatctggtttatgccatactctggtccctgtctggagacagccggctaaaaatgagagcagagctgggtgaatacatcagaagaatcacgaccgtgcctctgcccactgcgcccaacatacccattatcgattatgaggtgtccatcagcggagaatggtctccgtggcaggccaaggtgcctcagattgaagtggagacgcacaaggtggcagcccctgatgtcgtcgtgccaacgctggacacagtccgccacgaagccctcttgtacacttggctggccgaacacaagcccctggtcttgtgtggccctcctgggtctggcaagaccatgacactcttcagcgccctccgggccttgcctgacatggaggtggtgggtctcaacttctccagtgctactactccagagctgcttctgaagacttttgatcactactgcgagtacaggcgcacacctaatggggtggttttggctcctgttcaacttggaaagtggctggtgttgttctgtgatgaaatcaacttgccagatatggataaatatgggacccagagggtcatatccttcatcagacagatggtggagcacggaggcttttaccgtacctcagatcaaacatgggtgaagctggagagaatccagtttgttggggcttgtaatccccccacagaccctggaagaaagcccctctcacacaggttcctgcgccacgtgcctgtcgtgtatgtggattacccgggccccgcctccctcacacagatctacggcaccttcaaccgcgccatgctgaggctcattccatccctgcggacgtatgcagagccgctcactgctgccatggtggagttctacaccatgtctcaggagagattcacccaggatacacaacctcactatatctattcaccccgtgaaatgactaggtgggtgagaggcatctttgaagcgctgagacctctggagaccctgcctgttgaaggcctcattcggatttgggcacatgaagctctgcgtctcttccaagatagactcgtagaggatgaggagaggcgttggactgatgagaacatcgacacggttgctctgaagcacttccctaacatcgacagagagaaggcaatgagccgacccatcttgtacagcaactggctgtcaaaggattacatcccagtagaccaagaagagttaagagattatgtcaaagctaggctgaaggtcttttatgaagaagaacttgatgttccgctggtgctgtttaatgaagtcctagaccacgtgctgaggattgacagaatattccgtcaacctcaaggccacttgcttctgattggtgttagtggagcaggaaaaactaccctgtctcgtttcgtcgcctggatgaacggtttgagtgtgtaccagattaaggtccataggaagtacacaggggaagactttgatgaagatctacggacagtgttgagacgttctggctgtaaaaatgaaaagatagcatttataatggatgaatctaatgtgttagattctggattcctggagcgaatgaatacccttctggccaatggagaggtgcctggtctctttgaaggagacgagtatgccaccttgatgacgcagtgcaaagagggggcacagaaggaaggcctgatgctggactcgcacgaggagctctacaagtggttcactagccaggttatccgcaacctccacgtcgtgttcaccatgaacccgtcctcggagggactcaaggaccgggcagctacatcaccagcacttttcaacaggtgtgtgttgaattggtttggagactggtccaccgaagcactgtatcaggttggcaaagaattcacaagtaagatggatctggagaagccaaattacatcgtgcctgattacatgccagttgtgtatgataagctgccgcagccaccatcccatcgggaagccattgtgaacagctgtgtgtttgttcatcagactcttcaccaggcgaatgctcggctagcaaagcgaggcggcagaacgatggccatcacccctcgccactacctggacttcatcaatcactatgccaacctgttccacgagaagcggagcgagctggaggagcagcagatgcacttgaacgtggggctcaggaagatcaaagagacagtcgaccaggtagaagaactgcgtcgtgacttgaggataaagagccaagagctggaggtgaagaatgcagcagccaatgacaagctgaaaaagatggtgaaagaccagcaggaggctgaaaagaagaaggttatgagccaagaaatccaggaacagctgcataagcagcaggaggtaattgcagacaaacagatgagtgtcaaagaagatcttgataaggtggaacctgccgtcattgaggcccagaatgctgtgaagtcgatcaagaagcagcacctggtggaggtgaggtccatggccaaccctcctgctgctgtgaagctggcgctggagtccatctgcctgctgctgggggaaagcaccacagactggaagcagatccgctccatcatcatgcgggagaacttcatccccaccatcgtcaacttctctgcagaggagatcagtgacgccataagggagaagatgaagaaaaattacatgtccaatccaagttacaattatgaaattgtgaatcgggcttccctggcttgcggccctatggtgaaatgggcaattgcacagcttaactatgcagacatgttaaagagagtggagcccctacgcaatgagctgcagaagctggaagatgacgccaaggacaaccagcagaaggccaacgaggtggagcagatgatccgagacctggaagccagcatcgcccgctacaaggaggaatacgccgtcctgatctcagaggcccaggccatcaaggcagacctggcagctgtcgaggcaaaagtaagattatcatcattgatcctcagcctttcctgctgtggaagcagagattaacacacttcaacatgcgctgcatgcaccatgctggccctcggtgaaattcgctctttaaacatctgtaaggccccggaggacttttttcctgggaaaataatacacactgagtagtcactaagtgttgttaattaggatagattgatacaaactggacactttttcagccgttgaatccccccaccagcagctccagacctgtttgctctgctgcctgagggcctcgctccgtaccccagcttctgccccgctgagattctgagtcgtgtgtggtcattagttatatatgatctgggtctcatctcctctgggactgtgaacaacttgggcacgtttctaacccacccaaaaccctgcacataatgtggatgaaccgatttgcaggattcggtataaatcctgaaaggcctcatccctgagcatcttgttcggttttccttttaggtaaaccggagcactgctcttctgaagagcttgtctgctgaacgtgaacgatgggaaaaaacaagtgaaactttcaaaaaccagatgtccaccattgctggggactgtctcttgtcagctgcgttcattgcctacgcgggttactttgaccagcagatgcgtcagaacttgttcactacctggtcccatcacctacagcaagccaacatccagttccgtacagatattgccaggacggaatacctttccaatgctgatgagcgtcttcgctggcaggccagctccttgcctgctgatgacctttgcacagaaaatgccatcatgctgaaacgattcaataggtatccgctgatcattgacccctctggacaggccacagaattcattatgaatgaatataaggatcgtaagatcacacggaccagcttcctggatgacgccttcagaaagaacttagagagtgcactgagattcggtaacccccttctggtccaggatgtggaaagctacgatccagttttgaacccggtgctgaaccgtgaagtgcggcgaacaggggggagagtgctgatcactctcggggaccaggacatagacctgtcgccatcgtttgtcatcttcctgtccacccgggatccaactgtcgagttcccaccagatctctgttcccgggttacttttgtaaacttcacagttacccgtagcagtttacaaagccagtgtctaaatgaagtacttaaagcagaaagacctgatgtggacgagaaacgatctgatcttcttaaacttcaaggggaatttcagctccgtttgcgtcagctggaaaaatctctactacaagctctgaacgaggtgaaagggcgcattttggatgacgacacgatcataaccactctggagaacctgaagagagaggctgcagaggtcaccaggaaagttgaggagacggacattgtcatgcaggaggtggagaccgtgtcccagcagtacctcccgctctccaccgcctgcagcagcatctacttcaccatggagtccctcaagcagatacacttcttgtaccagtactccctccagtttttcctggacatttatcacaacgtcctatacgagaacccgaacctgaagggtgtcaccgaccacacacagcgcctgtccattataacaaaggacctcttccaggtggcgtttaaccgagtggctcgaggcatgctgcatcaggaccacattacctttgccatgctgctggcaagaatcaaactgaagggcaccgtgggggagcccacctacgatgcagaattccagcacttcttgagaggaaatgagattgtcctgagtgctggctccacccccaggatccagggcctgactgtggagcaggcggaggcggtggtgaggctgagctgccttcccgcgtttaaggacttgattgcaaaggttcaggcagacgagcaatttggcatctggctggacagcagctccccggagcagactgtgccctacctctggagtgaagaaacacctgcaacacccattggccaggccatccaccgcctgctcctgatccaggctttccggcccgatcgcctgttggccatggcccacatgtttgtttcaacaaaccttggggagtctttcatgtccatcatggagcagccgctcgacctgacccacattgtgggcacagaggtgaagcccaacactcctgtcttaatgtgctctgtgcctggttatgatgccagtggacatgtcgaggaccttgcagccgagcagaacacgcagatcacttcaattgcaatcggctctgcagaaggctttaaccaagcagataaggcaataaacaccgctgtaaagtcgggcaggtgggtgatgctgaagaatgtgcatctggccccagggtggctgatgcagctggagaagaagttgcattccctgcagccgcatgcctgcttccgactcttcctcaccatggagatcaaccccaaggtgcctgtgaatctgctccgtgcgggccgcatctttgtgttcgagccaccgccaggggtgaaggccaacatgctgaggacgttcagcagcattcccgtctcacggatatgcaagtctcccaacgagcgtgcccgcttgtacttcctgctggcctggtttcatgcgatcatccaagaacgcttacgatacgcaccactggggtggtcaaagaagtatgaatttggagagtctgacctgcggtcagcttgcgatacggtggacacgtggctggatgacacggccaagggcaggcagaacatctcaccggataagatcccgtggtctgcactaaagaccttaatggcccagtccatttatggcgggcgcgtggacaacgagtttgaccagcgtctgctcaacaccttcctggagcgcctgttcacaaccaggagtttcgacagtgagtttaagctggcatgcaaggtcgacggacataaagacattcaaatgccagatggcatcaggcgagaggagtttgtgcagtgggtggagttgctccccgacacccagacgccctcctggctgggcctgcccaacaacgccgagagagtcctccttaccacacagggtgtggacatgatcagtaaaatgctgaagatgcagatgttggaggatgaggacgacctggcctacgcagagactgagaagaagacgaggacagactccacgtccgacgggcgccctgcctggatgcggacactgcacaccaccgcgtccaactggctgcacctcatcccccagacgctgagccacctcaagcgcaccgtggagaatatcaaggatcctttgttcaggttctttgagagagaagtgaagatgggcgcaaagctgcttcaggacgttcgccaggaccttgcagatgtcgtccaggtgtgcgaaggaaagaagaagcagaccaactacttgcgcacgctgatcaacgagctagtgaaagggatcttgcctcggagctggtcccactacacggtgcctgccggcatgaccgtcatccagtgggtgtccgacttcagcgagaggatcaaacagctgcagaacatctcactggcagctgcatctggtggcgccaaggagctaaagaacatccacgtgtgcctgggtggcctgttcgtgcctgaggcgtacatcactgccaccaggcagtatgtggcccaggccaacagctggtccctggaggagctctgcctggaagtcaacgtcaccacctcacagggcgccacccttgacgcttgcagcttcggagtcacgggtttgaaacttcaaggggccacgtgcaacaacaacaagctgtcactgtccaatgccatctcaaccgcccttcccctgacgcagctgcgctgggtcaagcagacaaacaccgagaagaaggccagtgtggtaaccttacctgtctacctgaacttcacccgtgcagacctcatcttcaccgtggacttcgaaattgctacaaaggaggatcctcgcagcttctacgagcggggtgtcgcagtcttgtgcacagagtaaacttttctagctgcccctttctgtaatagtgaaagttggtatttaacatttattcatttttaaaatatttggaaggtctgagcttgtgaaaagaaagtggttggtctgaggttggaggaagctgaatggaatctgacggttgggagtggtggaaattggaaggataccaggaggtatttgggaaggccaatggcgtggctcctttgaggaaataaaacactaagcatga

SEQ ID NO: 462013 - DNA, 15147 bp, Homo sapiens
  misc_feature (7590)..(7590): n is a, c, g, or t
ttcaatgagagaacatttaatgagaggttaaggggcttagaacaacgccgggcacaggctaagcgctcactaaacgttagctctcgccaataacatcactgattcactataaagtttctctggctgtgtgctattcgctgcgtccacagcagtgaagaagacagacgcagcccctgaccaacctcgccaagcccgggcgccgagccaggacgttgagccaagtccccatctcctaggactcgcagtgcggaggctgcgggccccgaccagcgccgagactacaagtcccagaagggcgcgcggcgacatcgccgggcccgccccccgcgcacgcgcggcgccgtgacgctaaggccgcgagcgagcgcgggtggctgcggcggctgcggccggcggggcggggcggggccacctggcagtggctgcctttagggcggagccggctcccgctctcctcagtctgcggtgggctagcggacggtccggcttccggcggccgtttctgtctcttgctggctgtctcgctgagtcgcggccgccttctcatcgctcctggaaggtcccgagcgcgacaccatgtcggagcccgggggcggcggcggcgaggacggctcggccggattggaagtgtcggccgtgcagaatgtggcggacgtgtcggtgctgcagaagcacctgcgcaagctggtgccgctgctgctggaggacggcggcgaggcgccggccgcgctggaggcggcgctggaggagaagagcgccctggagcagatgcgcaagttcctttcggacccgcaggtccacacggtgctggtggagcgctccacgctcaaagaggacgtcggtgatgaaggagaagaagaaaaagaattcatttcctataacatcaacatagacattcattatggggttaaatccaatagcttggcattcattaaacgtactcccgtgattgatgcagataaacccgtgtcttctcagctccgggtccttacactcagtgaagactcgccctacgaaactttgcattctttcattagcaatgcagtggctcctttttttaagtcctacattagagagtctggcaaggcagacagggatggtgataaaatggctccttcagttgaaaagaagattgcagaactcgaaatgggactccttcacttgcagcaaaatattgaaattccggagatcagcctgccgattcatccaatgatcacaaatgttgcaaaacagtgttatgagcgtggagaaaagccaaaagttacagactttggtgataaggttgaagacccaacatttcttaatcagttacaatctggagttaaccgctggatccgagaaattcaaaaagtgaccaaactggatcgagatcctgcatcaggaactgccttacaggaaattagtttttggctaaacttggaacgtgcgttataccgcatccaggagaaacgggagagcccggaagttctcctgactctggatatcttgaaacatggcaagcgcttccatgccaccgtcagttttgacactgacacaggtctaaaacaggctttggaaactgtgaatgactacaatcctctgatgaaagatttccctctgaatgatttgctgtctgccacggagctggacaaaataagacaggcgcttgttgccattttcacacatttgagaaagatccgaaacacaaaatatcctattcagagggcactgcgtttggtggaggcaatttcaagagacttgagttctcaattactcaaagtattgggcactaggaaattgatgcatgttgcttatgaagaatttgaaaaagttatggtagcatgctttgaagtttttcagacttgggatgatgagtatgagaaacttcaggtattgttgagagacatcgtcaaaagaaaaagggaagaaaatctgaagatggtgtggcgtatcaaccctgcccacaggaagctgcaggcccgccttgaccagatgagaaaatttagacgccagcatgaacagctaagagctgttatcgtcagggtcctgaggccacaggtcacggcagttgcacaacagaatcaaggagaggtccctgaaccccaagatatgaaagtggctgaggttctctttgatgctgcagatgcaaatgccattgaggaagtaaaccttgcttatgagaacgtcaaggaagtggatggactggatgtttccaaagagggcacggaagcctgggaggctgctatgaagaggtacgatgagaggatcgacagagtggagacccggatcaccgctcgccttcgggatcagcttggcacagccaagaatgccaacgagatgtttaggattttctccaggtttaatgcactgtttgtcaggcctcacatccgtggggccattcgtgactaccagacccagctgatccagcgcgtgaaagatgacattgagtctcttcacgacaagttcaaggtccagtacccacagagtcaggcttgtaagatgagtcacgttcgtgacttgccccctgtgtcagggtctatcatctgggctaaacagatcgacaggcagctgacggcctacatgaagcgggtggaagatgtccttggcaagggctgggagaatcacgtggaggggcagaagctgaagcaggatggagacagcttccgcatgaagctcaacacgcaggagatctttgatgactgggcaaggaaggtgcagcagcgcaacctcggtgtctcggggcgcattttcaccatcgaaagtactcgggttcggggccgaactggaaatgtgcttaagctgaaagttaactttcttcctgagattatcacactatccaaagaagtccggaacctcaaatggcttggtttccgcgtcccactggcgattgtgaacaaagcccatcaagcaaaccagctttacccgtttgccatctcactgatcgagagcgttcgtacctatgaacggacctgcgagaaggtggaggagcggaacaccatttcccttttggtggctggcttgaaaaaggaagtgcaggccctgatcgcagaaggcattgcgttggtgtgggagtcctacaaacttgacccatatgtacagcgcttagcagagactgtcttcaacttccaagaaaaggtggatgatctgctgatcattgaagaaaaaatagacctagaagtccgttccttggaaacttgtatgtatgaccataagacattctcggaaatcttgaacagagtccagaaagcagtggatgacttaaatctgcactcctattccaatttgcccatctgggtcaacaagcttgacatggagattgaaagaatattgggcgtccgtctgcaagctggcctgagagcttggacgcaggttcttcttggacaagctgaagataaagcagaagttgacatggacacagatgctccacaagttagtcacaagcctggtggagagccaaagatcaaaaatgtcgttcatgagctaagaataaccaatcaggtaatctacttgaatccaccaattgaagagtgcagatacaagctgtatcaggaaatgtttgcctggaagatggttgtactgtctctccccaggatccagagtcagaggtaccaggtgggtgtacattacgaattgactgaggaagagaaattctatcggaatgctttaacacggatgcctgatggccctgttgccctggaagagtcgtattctgctgtcatgggcattgtatctgaagttgaacagtatgtcaaggtttggcttcagtatcagtgtttatgggatatgcaagctgaaaacatctataacagacttggagaagatctcaacaaatggcaggctctcctggtccaaataaggaaggccagaggaacctttgacaatgcagaaaccaagaaagagtttggaccagtagttatagattatggcaaggtacaatctaaggtgaacttgaaatatgactcttggcataaggaggttcttagcaaatttgggcagatgctaggatcaaacatgacggaattccattcccagatctcaaagtcccgccaagagttggagcagcactcagtagacacggccagcacctccgatgcagtgaccttcatcacctatgtgcagtctttgaaacggaagatcaagcagtttgagaagcaagttgagctctaccgcaatggccagcgcttactggaaaagcaaaggttccagttcccaccttcctggctttatattgacaacatcgagggagagtggggagccttcaatgacatcatgcggcgaaaggactctgccattcagcagcaggtggcaaacctgcaaatgaagattgtccaggaggatcgggccgtggaaagccgcaccaccgacctgctgactgactgggagaagaccaagcctgtcacgggcaaccttcgcccagaagaggcacttcaggctctcaccatatatgaggggaagtttggtaggctgaaggacgacagagagaagtgtgcaaaggccaaggaggcgctggaattgacagatactgggcttctcagtggcagtgaagagcgcgtgcaggtggccttagaagaattacaggacctcaaaggcgtttggtcagaactttctaaggtttgggagcaaatcgatcagatgaaggagcaaccctgggtttcagtacagcctcgaaagcttcgacaaaatttggatgccctcctgaaccagctgaaaagcttccctgcccggttgcgacagtatgcgtcctatgagtttgttcagaggcttctgaaaggttacatgaagataaatatgctggtgattgaactgaaatccgaagcacttaaagaccgccattggaaacagctcatgaaaaggcttcacgttaattgggttgtttctgagctaacccttggccaaatctgggatgttgacttgcagaaaaatgaagcgattgtcaaggatgtactgcttgtggcacaaggggagatggctttggaagaatttttgaagcagataagagaagtgtggaatacttatgaactagacttggttaattatcagaacaagtgccgcttgatccgtggctgggatgacctcttcaacaaggtcaaagaacacatcaacagcgtctcggccatgaagctctctccgtattacaaggtttttgaagaggatgctctcagctgggaagataagctgaacaggatcatggctctctttgatgtgtggattgatgtgcagaggcggtgggtctacctggaaggtatcttcacaggcagtgcagatatcaagcacctgctgccagtggaaacccagcggtttcagagcatcagcactgagtttttggctctaatgaaaaaagtgtccaagtctccccttgttatggatgttctgaacatccagggagtacagaggtctctggaaagattggcagacctgctaggaaagatccagaaagcattgggagaatatctggaaagagagcggtcatctttccccaggttctattttgtgggtgatgaagatttgcttgaaatcattggaaacagcaagaatgtcgctaaattacagaaacacttcaagaagatgtttgctggagtttcgagcatcatcctgaacgaggataactctgttgttttgggtatttcatctcgggaaggagaggaggttatgtttaaaactcctgtgtcaattactgaacatcccaaaatcaatgagtggctcacattggtagaaaaggagatgagagtcaccctggccaaactgcttgctgagtctgttacggaagttgagatttttggtaaagcaacttcaattgacccaaatacctacatcacttggattgataaataccaggcccagcttgtggttttgtcagcccagatagcctggtctgagaacgtggagaccgcactgagcagcatgggcggaggtggagatgccgcgcccttgcactctgtgctgagcaatgtggaggtcaccctcaatgtgttagcagactctgtcctcatggagcagcccccactccgaaggcggaagctagaacacttgattacagagttggttcaccagagagatgttacaaggtccttgatcaaaagcaagattgacaacgccaaatcttttgaatggctcagccagatgcgattttactttgaccctaagcaaactgatgtgttacagcagttgtcaattcaaatggcaaatgccaaatttaactatggctttgagtacctgggtgttcaggacaaactggtccagacccccctcactgaccgctgctatttgacaatgacacaagccttggaggccaggctggggggttccccatttggacctgctggaactgggaaaacagagtctgtcaaagctcttggccatcagcttggacggtttgttttagttttcaactgtgatgaaacctttgatttccaggcaatgggccggatctttgtgggcctttgccaggtgggtgcctggggctgctttgacgagttcaaccgcctggaggagcggatgctctcggctgtgtcccagcaggtgcagtgcatacaggaagcactgcgtgaacattccaaccccaactacgacaagacctctgcccccattacttgtgagctgctgaacaaacaagtcaaggtgagcccggacatggccatcttcatcaccatgaaccctggctacgcgggccggtctaaccttcctgacaacttgaagaagctgttccggagcttggccatgaccaagcccgaccggcagttaatcgcccaggtcatgctgtactcacagggtttccgcactgctgaagtgcttgccaacaaaatcgtcccgttttttaaactatgcgatgagcagctctcttcccaaagccattatgacttcggtcttcgggctttgaagagtgtgctggtgagtgcaggcaatgtgaagagagagagaatccagaagataaagagggagaaagaggaacgaggggaagcagttgatgaaggagaaattgctgaaaatctccctgaacaagagattctgatacagagcgtctgtgagacgatggtgccaaagctggtggcagaggacatcccgctgctcttcagcctcctgtcggacgtgttccctggagtccagtatcacaggggtgagatgactgcccttcgagaggagctgaagaaagtgtgtcaggagatgtatttgacatatggagatggagaagaagttggtggaatgtgggttgaaaaggttctccagctctatcagatcacccagatcaatcatggcctgatgatggtggggccctcgggaagtgggaagagcatggcctggcgtgtcctgctgaaggcattggagagactcgagggtgtggaaggtgtggcccatatcatcgaccccaaggccatcagcaaagaccacctctacggaaccctggaccccaacaccagggaatggacagatgggctcttcacacacgtgctgagaaagatcatcgacagcgtgagaggcgagctgcagaagcgccagtggatcgtcttcgatggcgatgtggatccagagtgggttgagaacttgaactcagtgctggatgacaataagctcctaactttgcccaatggagagcgcctcagtcttccacccaangtgagaataatgtttgaggtacaggacttgaaatacgcgaccttggccacagtgtcgcgctgcggcatggtctggttcagtgaggatgtgctgagcaccgacatgatcttcaacaacttcctggccaggctgcgcagcatcccgctggatgaaggggaggatgaggcacagcggcggcgtaagggcaaagaggatgagggggaggaggccgcttcccccatgctgcagatccaaagagatgcagctacgatcatgcaaccgtacttcacgtccaacggcctggtcaccaaggcgctagagcacgccttccagctggagcacatcatggacctaacacgcctgcgctgcctgggctcgctcttctccatgctgcaccaggcctgccgcaacgtggcgcagtataacgccaaccatcccgacttccccatgcagatcgagcagctggagcgctacattcaggtcagggggcatcaggggcttcacagagctcaccactgcgccagaccacaggtctgaggacctctgaaatgctgcacctgtggggatgtgcgctctctcctaggcgaggcagagccttcgttgaggggctaggaaaggtgcagtgggtgtctgtgatgcaagaagactgggaaccactgtctttaggttaactttgctgtaagtgtctttcttttgttgttgaaattttataaaaatcaaagtttaattccctttttaatagcgatatctggtttatgccatactctggtccctgtctggagacagccggctaaaaatgagagcagagctgggtgaatacatcagaagaatcacgaccgtgcctctgcccactgcgcccaacatacccattatcgattatgaggtgtccatcagcggagaatggtctccgtggcaggccaaggtgcctcagattgaagtggagacgcacaaggtggcagcccctgatgtcgtcgtgccaacgctggacacagtccgccacgaagccctcttgtacacttggctggccgaacacaagcccctggtcttgtgtggccctcctgggtctggcaagaccatgacactcttcagcgccctccgggccttgcctgacatggaggtggtgggtctcaacttctccagtgctactactccagagctgcttctgaagacttttgatcactactgcgagtacaggcgcacacctaatggggtggttttggctcctgttcaacttggaaagtggctggtgttgttctgtgatgaaatcaacttgccagatatggataaatatgggacccagagggtcatatccttcatcagacagatggtggagcacggaggcttttaccgtacctcagatcaaacatgggtgaagctggagagaatccagtttgttggggcttgtaatccccccacagaccctggaagaaagcccctctcacacaggttcctgcgccacgtgcctgtcgtgtatgtggattacccgggccccgcctccctcacacagatctacggcaccttcaaccgcgccatgctgaggctcattccatccctgcggacgtatgcagagccgctcactgctgccatggtggagttctacaccatgtctcaggagagattcacccaggatacacaacctcactatatctattcaccccgtgaaatgactaggtgggtgagaggcatctttgaagcgctgagacctctggagaccctgcctgttgaaggcctcattcggatttgggcacatgaagctctgcgtctcttccaagatagactcgtagaggatgaggagaggcgttggactgatgagaacatcgacacggttgctctgaagcacttccctaacatcgacagagagaaggcaatgagccgacccatcttgtacagcaactggctgtcaaaggattacatcccagtagaccaagaagagttaagagattatgtcaaagctaggctgaaggtcttttatgaagaagaacttgatgttccgctggtgctgtttaatgaagtcctagaccacgtgctgaggattgacagaatattccgtcaacctcaaggccacttgcttctgattggtgttagtggagcaggaaaaactaccctgtctcgtttcgtcgcctggatgaacggtttgagtgtgtaccagattaaggtccataggaagtacacaggggaagactttgatgaagatctacggacagtgttgagacgttctggctgtaaaaatgaaaagatagcatttataatggatgaatctaatgtgttagattctggattcctggagcgaatgaatacccttctggccaatggagaggtgcctggtctctttgaaggagacgagtatgccaccttgatgacgcagtgcaaagagggggcacagaaggaaggcctgatgctggactcgcacgaggagctctacaagtggttcactagccaggttatccgcaacctccacgtcgtgttcaccatgaacccgtcctcggagggactcaaggaccgggcagctacatcaccagcacttttcaacaggtgtgtgttgaattggtttggagactggtccaccgaagcactgtatcaggttggcaaagaattcacaagtaagatggatctggagaagccaaattacatcgtgcctgattacatgccagttgtgtatgataagctgccgcagccaccatcccatcgggaagccattgtgaacagctgtgtgtttgttcatcagactcttcaccaggcgaatgctcggctagcaaagcgaggcggcagaacgatggccatcacccctcgccactacctggacttcatcaatcactatgccaacctgttccacgagaagcggagcgagctggaggagcagcagatgcacttgaacgtggggctcaggaagatcaaagagacagtcgaccaggtagaagaactgcgtcgtgacttgaggataaagagccaagagctggaggtgaagaatgcagcagccaatgacaagctgaaaaagatggtgaaagaccagcaggaggctgaaaagaagaaggttatgagccaagaaatccaggaacagctgcataagcagcaggaggtaattgcagacaaacagatgagtgtcaaagaagatcttgataaggtggaacctgccgtcattgaggcccagaatgctgtgaagtcgatcaagaagcagcacctggtggaggtgaggtccatggccaaccctcctgctgctgtgaagctggcgctggagtccatctgcctgctgctgggggaaagcaccacagactggaagcagatccgctccatcatcatgcgggagaacttcatccccaccatcgtcaacttctctgcagaggagatcagtgacgccataagggagaagatgaagaaaaattacatgtccaatccaagttacaattatgaaattgtgaatcgggcttccctggcttgcggccctatggtgaaatgggcaattgcacagcttaactatgcagacatgttaaagagagtggagcccctacgcaatgagctgcagaagctggaagatgacgccaaggacaaccagcagaaggccaacgaggtggagcagatgatccgagacctggaagccagcatcgcccgctacaaggaggaatacgccgtcctgatctcagaggcccaggccatcaaggcagacctggcagctgtcgaggcaaaagtaaaccggagcactgctcttctgaagagcttgtctgctgaacgtgaacgatgggaaaaaacaagtgaaactttcaaaaaccagatgtccaccattgctggggactgtctcttgtcagctgcgttcattgcctacgcgggttactttgaccagcagatgcgtcagaacttgttcactacctggtcccatcacctacagcaagccaacatccagttccgtacagatattgccaggacggaatacctttccaatgctgatgagcgtcttcgctggcaggccagctccttgcctgctgatgacctttgcacagaaaatgccatcatgctgaaacgattcaataggtatccgctgatcattgacccctctggacaggccacagaattcattatgaatgaatataaggatcgtaagatcacacggaccagcttcctggatgacgccttcagaaagaacttagagagtgcactgagattcggtaacccccttctggtccaggatgtggaaagctacgatccagttttgaacccggtgctgaaccgtgaagtgcggcgaacaggggggagagtgctgatcactctcggggaccaggacatagacctgtcgccatcgtttgtcatcttcctgtccacccgggatccaactgtcgagttcccaccagatctctgttcccgggttacttttgtaaacttcacagttacccgtagcagtttacaaagccagtgtctaaatgaagtacttaaagcagaaagacctgatgtggacgagaaacgatctgatcttcttaaacttcaaggggaatttcagctccgtttgcgtcagctggaaaaatctctactacaagctctgaacgaggtgaaagggcgcattttggatgacgacacgatcataaccactctggagaacctgaagagagaggctgcagaggtcaccaggaaagttgaggagacggacattgtcatgcaggaggtggagaccgtgtcccagcagtacctcccgctctccaccgcctgcagcagcatctacttcaccatggagtccctcaagcagatacacttcttgtaccagtactccctccagtttttcctggacatttatcacaacgtcctatacgagaacccgaacctgaagggtgtcaccgaccacacacagcgcctgtccattataacaaaggacctcttccaggtggcgtttaaccgagtggctcgaggcatgctgcatcaggaccacattacctttgccatgctgctggcaagaatcaaactgaagggcaccgtgggggagcccacctacgatgcagaattccagcacttcttgagaggaaatgagattgtcctgagtgctggctccacccccaggatccagggcctgactgtggagcaggcggaggcggtggtgaggctgagctgccttcccgcgtttaaggacttgattgcaaaggttcaggcagacgagcaatttggcatctggctggacagcagctccccggagcagactgtgccctacctctggagtgaagaaacacctgcaacacccattggccaggccatccaccgcctgctcctgatccaggctttccggcccgatcgcctgttggccatggcccacatgtttgtttcaacaaaccttggggagtctttcatgtccatcatggagcagccgctcgacctgacccacattgtgggcacagaggtgaagcccaacactcctgtcttaatgtgctctgtgcctggttatgatgccagtggacatgtcgaggaccttgcagccgagcagaacacgcagatcacttcaattgcaatcggctctgcagaaggctttaaccaagcagataaggcaataaacaccgctgtaaagtcgggcaggtgggtgatgctgaagaatgtgcatctggccccagggtggctgatgcagctggagaagaagttgcattccctgcagccgcatgcctgcttccgactcttcctcaccatggagatcaaccccaaggtgcctgtgaatctgctccgtgcgggccgcatctttgtgttcgagccaccgccaggggtgaaggccaacatgctgaggacgttcagcagcattcccgtctcacggatatgcaagtctcccaacgagcgtgcccgcttgtacttcctgctggcctggtttcatgcgatcatccaagaacgcttacgatacgcaccactggggtggtcaaagaagtatgaatttggagagtctgacctgcggtcagcttgcgatacggtggacacgtggctggatgacacggccaagggcaggcagaacatctcaccggataagatcccgtggtctgcactaaagaccttaatggcccagtccatttatggcgggcgcgtggacaacgagtttgaccagcgtctgctcaacaccttcctggagcgcctgttcacaaccaggagtttcgacagtgagtttaagctggcatgcaaggtcgacggacataaagacattcaaatgccagatggcatcaggcgagaggagtttgtgcagtgggtggagttgctccccgacacccagacgccctcctggctgggcctgcccaacaacgccgagagagtcctccttaccacacagggtgtggacatgatcagtaaaatgctgaagatgcagatgttggaggatgaggacgacctggcctacgcagagactgagaagaagacgaggacagactccacgtccgacgggcgccctgcctggatgcggacactgcacaccaccgcgtccaactggctgcacctcatcccccagacgctgagccacctcaagcgcaccgtggagaatatcaaggatcctttgttcaggttctttgagagagaagtgaagatgggcgcaaagctgcttcaggacgttcgccaggaccttgcagatgtcgtccaggtgtgcgaaggaaagaagaagcagaccaactacttgcgcacgctgatcaacgagctagtgaaagggatcttgcctcggagctggtcccactacacggtgcctgccggcatgaccgtcatccagtgggtgtccgacttcagcgagaggatcaaacagctgcagaacatctcactggcagctgcatctggtggcgccaaggagctaaagaacatccacgtgtgcctgggtggcctgttcgtgcctgaggcgtacatcactgccaccaggcagtatgtggcccaggccaacagctggtccctggaggagctctgcctggaagtcaacgtcaccacctcacagggcgccacccttgacgcttgcagcttcggagtcacgggtttgaaacttcaaggggccacgtgcaacaacaacaagctgtcactgtccaatgccatctcaaccgcccttcccctgacgcagctgcgctgggtcaagcagacaaacaccgagaagaaggccagtgtggtaaccttacctgtctacctgaacttcacccgtgcagacctcatcttcaccgtggacttcgaaattgctacaaaggaggatcctcgcagcttctacgagcggggtgtcgcagtcttgtgcacagagtaaacttttctagctgcccctttctgtaatagtgaaagttggtatttaacatttattcatttttaaaatatttggaaggtctgagcttgtgaaaagaaagtggttggtctgaggttggaggaagctgaatggaatctgacggttgggagtggtggaaattggaaggataccaggaggtatttgggaaggccaatggcgtggctcctttgaggaaataaaacactaagcatgagccggctccgcctcttctgtctccgctttcatcccagggcacagagccttgccttccatgctgcccagggagggcagcccacggcagccatgcccctccccacctcgctttcatcatgagctcgctcccgagcggccac

SEQ ID NO: 462014 - DNA, 10797 bp, Homo sapiens
  misc_feature (3379)..(3379): n is a, c, g, or t
accttgaggatcccaaacgcagagaggatagcaagcaagagttcttggtccaacgcgagaacctctctgcgtaaatctctcattggggaagattgtccaggaggatcgggccgtggaaagccgcaccaccgacctgctgactgactgggagaagaccaagcctgtcacgggcaaccttcgcccagaagaggcacttcaggctctcaccatatatgaggggaagtttggtaggctgaaggacgacagagagaagtgtgcaaaggccaaggaggcgctggaattgacagatactgggcttctcagtggcagtgaagagcgcgtgcaggtggccttagaagaattacaggacctcaaaggcgtttggtcagaactttctaaggtttgggagcaaatcgatcagatgaaggagcaaccctgggtttcagtacagcctcgaaagcttcgacaaaatttggatgccctcctgaaccagctgaaaagcttccctgcccggttgcgacagtatgcgtcctatgagtttgttcagaggcttctgaaaggttacatgaagataaatatgctggtgattgaactgaaatccgaagcacttaaagaccgccattggaaacagctcatgaaaaggcttcacgttaattgggttgtttctgagctaacccttggccaaatctgggatgttgacttgcagaaaaatgaagcgattgtcaaggatgtactgcttgtggcacaaggggagatggctttggaagaatttttgaagcagataagagaagtgtggaatacttatgaactagacttggttaattatcagaacaagtgccgcttgatccgtggctgggatgacctcttcaacaaggtcaaagaacacatcaacagcgtctcggccatgaagctctctccgtattacaaggtttttgaagaggatgctctcagctgggaagataagctgaacaggatcatggctctctttgatgtgtggattgatgtgcagaggcggtgggtctacctggaaggtatcttcacaggcagtgcagatatcaagcacctgctgccagtggaaacccagcggtttcagagcatcagcactgagtttttggctctaatgaaaaaagtgtccaagtctccccttgttatggatgttctgaacatccagggagtacagaggtctctggaaagattggcagacctgctaggaaagatccagaaagcattgggagaatatctggaaagagagcggtcatctttccccaggttctattttgtgggtgatgaagatttgcttgaaatcattggaaacagcaagaatgtcgctaaattacagaaacacttcaagaagatgtttgctggagtttcgagcatcatcctgaacgaggataactctgttgttttgggtatttcatctcgggaaggagaggaggttatgtttaaaactcctgtgtcaattactgaacatcccaaaatcaatgagtggctcacattggtagaaaaggagatgagagtcaccctggccaaactgcttgctgagtctgttacggaagttgagatttttggtaaagcaacttcaattgacccaaatacctacatcacttggattgataaataccaggcccagcttgtggttttgtcagcccagatagcctggtctgagaacgtggagaccgcactgagcagcatgggcggaggtggagatgccgcgcccttgcactctgtgctgagcaatgtggaggtcaccctcaatgtgttagcagactctgtcctcatggagcagcccccactccgaaggcggaagctagaacacttgattacagagttggttcaccagagagatgttacaaggtccttgatcaaaagcaagattgacaacgccaaatcttttgaatggctcagccagatgcgattttactttgaccctaagcaaactgatgtgttacagcagttgtcaattcaaatggcaaatgccaaatttaactatggctttgagtacctgggtgttcaggacaaactggtccagacccccctcactgaccgctgctatttgacaatgacacaagccttggaggccaggctggggggttccccatttggacctgctggaactgggaaaacagagtctgtcaaagctcttggccatcagcttggacggtttgttttagttttcaactgtgatgaaacctttgatttccaggcaatgggccggatctttgtgggcctttgccaggtgggtgcctggggctgctttgacgagttcaaccgcctggaggagcggatgctctcggctgtgtcccagcaggtgcagtgcatacaggaagcactgcgtgaacattccaaccccaactacgacaagacctctgcccccattacttgtgagctgctgaacaaacaagtcaaggtgagcccggacatggccatcttcatcaccatgaaccctggctacgcgggccggtctaaccttcctgacaacttgaagaagctgttccggagcttggccatgaccaagcccgaccggcagttaatcgcccaggtcatgctgtactcacagggtttccgcactgctgaagtgcttgccaacaaaatcgtcccgttttttaaactatgcgatgagcagctctcttcccaaagccattatgacttcggtcttcgggctttgaagagtgtgctggtgagtgcaggcaatgtgaagagagagagaatccagaagataaagagggagaaagaggaacgaggggaagcagttgatgaaggagaaattgctgaaaatctccctgaacaagagattctgatacagagcgtctgtgagacgatggtgccaaagctggtggcagaggacatcccgctgctcttcagcctcctgtcggacgtgttccctggagtccagtatcacaggggtgagatgactgcccttcgagaggagctgaagaaagtgtgtcaggagatgtatttgacatatggagatggagaagaagttggtggaatgtgggttgaaaaggttctccagctctatcagatcacccagatcaatcatggcctgatgatggtggggccctcgggaagtgggaagagcatggcctggcgtgtcctgctgaaggcattggagagactcgagggtgtggaaggtgtggcccatatcatcgaccccaaggccatcagcaaagaccacctctacggaaccctggaccccaacaccagggaatggacagatgggctcttcacacacgtgctgagaaagatcatcgacagcgtgagaggcgagctgcagaagcgccagtggatcgtcttcgatggcgatgtggatccagagtgggttgagaacttgaactcagtgctggatgacaataagctcctaactttgcccaatggagagcgcctcagtcttccacccaangtgagaataatgtttgaggtacaggacttgaaatacgcgaccttggccacagtgtcgcgctgcggcatggtctggttcagtgaggatgtgctgagcaccgacatgatcttcaacaacttcctggccaggctgcgcagcatcccgctggatgaaggggaggatgaggcacagcggcggcgtaagggcaaagaggatgagggggaggaggccgcttcccccatgctgcagatccaaagagatgcagctacgatcatgcaaccgtacttcacgtccaacggcctggtcaccaaggcgctagagcacgccttccagctggagcacatcatggacctaacacgcctgcgctgcctgggctcgctcttctccatgctgcaccaggcctgccgcaacgtggcgcagtataacgccaaccatcccgacttccccatgcagatcgagcagctggagcgctacattcaggtcagggggcatcaggggcttcacagagctcaccactgcgccagaccacaggtctgaggacctctgaaatgctgcacctgtggggatgtgcgctctctcctaggcgaggcagagccttcgttgaggggctaggaaaggtgcagtgggtgtctgtgatgcaagaagactgggaaccactgtctttaggttaactttgctgtaagtgtctttcttttgttgttgaaattttataaaaatcaaagtttaattccctttttaatagcgatatctggtttatgccatactctggtccctgtctggagacagccggctaaaaatgagagcagagctgggtgaatacatcagaagaatcacgaccgtgcctctgcccactgcgcccaacatacccattatcgattatgaggtgtccatcagcggagaatggtctccgtggcaggccaaggtgcctcagattgaagtggagacgcacaaggtggcagcccctgatgtcgtcgtgccaacgctggacacagtccgccacgaagccctcttgtacacttggctggccgaacacaagcccctggtcttgtgtggccctcctgggtctggcaagaccatgacactcttcagcgccctccgggccttgcctgacatggaggtggtgggtctcaacttctccagtgctactactccagagctgcttctgaagacttttgatcactactgcgagtacaggcgcacacctaatggggtggttttggctcctgttcaacttggaaagtggctggtgttgttctgtgatgaaatcaacttgccagatatggataaatatgggacccagagggtcatatccttcatcagacagatggtggagcacggaggcttttaccgtacctcagatcaaacatgggtgaagctggagagaatccagtttgttggggcttgtaatccccccacagaccctggaagaaagcccctctcacacaggttcctgcgccacgtgcctgtcgtgtatgtggattacccgggccccgcctccctcacacagatctacggcaccttcaaccgcgccatgctgaggctcattccatccctgcggacgtatgcagagccgctcactgctgccatggtggagttctacaccatgtctcaggagagattcacccaggatacacaacctcactatatctattcaccccgtgaaatgactaggtgggtgagaggcatctttgaagcgctgagacctctggagaccctgcctgttgaaggcctcattcggatttgggcacatgaagctctgcgtctcttccaagatagactcgtagaggatgaggagaggcgttggactgatgagaacatcgacacggttgctctgaagcacttccctaacatcgacagagagaaggcaatgagccgacccatcttgtacagcaactggctgtcaaaggattacatcccagtagaccaagaagagttaagagattatgtcaaagctaggctgaaggtcttttatgaagaagaacttgatgttccgctggtgctgtttaatgaagtcctagaccacgtgctgaggattgacagaatattccgtcaacctcaaggccacttgcttctgattggtgttagtggagcaggaaaaactaccctgtctcgtttcgtcgcctggatgaacggtttgagtgtgtaccagattaaggtccataggaagtacacaggggaagactttgatgaagatctacggacagtgttgagacgttctggctgtaaaaatgaaaagatagcatttataatggatgaatctaatgtgttagattctggattcctggagcgaatgaatacccttctggccaatggagaggtgcctggtctctttgaaggagacgagtatgccaccttgatgacgcagtgcaaagagggggcacagaaggaaggcctgatgctggactcgcacgaggagctctacaagtggttcactagccaggttatccgcaacctccacgtcgtgttcaccatgaacccgtcctcggagggactcaaggaccgggcagctacatcaccagcacttttcaacaggtgtgtgttgaattggtttggagactggtccaccgaagcactgtatcaggttggcaaagaattcacaagtaagatggatctggagaagccaaattacatcgtgcctgattacatgccagttgtgtatgataagctgccgcagccaccatcccatcgggaagccattgtgaacagctgtgtgtttgttcatcagactcttcaccaggcgaatgctcggctagcaaagcgaggcggcagaacgatggccatcacccctcgccactacctggacttcatcaatcactatgccaacctgttccacgagaagcggagcgagctggaggagcagcagatgcacttgaacgtggggctcaggaagatcaaagagacagtcgaccaggtagaagaactgcgtcgtgacttgaggataaagagccaagagctggaggtgaagaatgcagcagccaatgacaagctgaaaaagatggtgaaagaccagcaggaggctgaaaagaagaaggttatgagccaagaaatccaggaacagctgcataagcagcaggaggtaattgcagacaaacagatgagtgtcaaagaagatcttgataaggtggaacctgccgtcattgaggcccagaatgctgtgaagtcgatcaagaagcagcacctggtggaggtgaggtccatggccaaccctcctgctgctgtgaagctggcgctggagtccatctgcctgctgctgggggaaagcaccacagactggaagcagatccgctccatcatcatgcgggagaacttcatccccaccatcgtcaacttctctgcagaggagatcagtgacgccataagggagaagatgaagaaaaattacatgtccaatccaagttacaattatgaaattgtgaatcgggcttccctggcttgcggccctatggtgaaatgggcaattgcacagcttaactatgcagacatgttaaagagagtggagcccctacgcaatgagctgcagaagctggaagatgacgccaaggacaaccagcagaaggccaacgaggtggagcagatgatccgagacctggaagccagcatcgcccgctacaaggaggaatacgccgtcctgatctcagaggcccaggccatcaaggcagacctggcagctgtcgaggcaaaagtaaaccggagcactgctcttctgaagagcttgtctgctgaacgtgaacgatgggaaaaaacaagtgaaactttcaaaaaccagatgtccaccattgctggggactgtctcttgtcagctgcgttcattgcctacgcgggttactttgaccagcagatgcgtcagaacttgttcactacctggtcccatcacctacagcaagccaacatccagttccgtacagatattgccaggacggaatacctttccaatgctgatgagcgtcttcgctggcaggccagctccttgcctgctgatgacctttgcacagaaaatgccatcatgctgaaacgattcaataggtatccgctgatcattgacccctctggacaggccacagaattcattatgaatgaatataaggatcgtaagatcacacggaccagcttcctggatgacgccttcagaaagaacttagagagtgcactgagattcggtaacccccttctggtccaggatgtggaaagctacgatccagttttgaacccggtgctgaaccgtgaagtgcggcgaacaggggggagagtgctgatcactctcggggaccaggacatagacctgtcgccatcgtttgtcatcttcctgtccacccgggatccaactgtcgagttcccaccagatctctgttcccgggttacttttgtaaacttcacagttacccgtagcagtttacaaagccagtgtctaaatgaagtacttaaagcagaaagacctgatgtggacgagaaacgatctgatcttcttaaacttcaaggggaatttcagctccgtttgcgtcagctggaaaaatctctactacaagctctgaacgaggtgaaagggcgcattttggatgacgacacgatcataaccactctggagaacctgaagagagaggctgcagaggtcaccaggaaagttgaggagacggacattgtcatgcaggaggtggagaccgtgtcccagcagtacctcccgctctccaccgcctgcagcagcatctacttcaccatggagtccctcaagcagatacacttcttgtaccagtactccctccagtttttcctggacatttatcacaacgtcctatacgagaacccgaacctgaagggtgtcaccgaccacacacagcgcctgtccattataacaaaggacctcttccaggtggcgtttaaccgagtggctcgaggcatgctgcatcaggaccacattacctttgccatgctgctggcaagaatcaaactgaagggcaccgtgggggagcccacctacgatgcagaattccagcacttcttgagaggaaatgagattgtcctgagtgctggctccacccccaggatccagggcctgactgtggagcaggcggaggcggtggtgaggctgagctgccttcccgcgtttaaggacttgattgcaaaggttcaggcagacgagcaatttggcatctggctggacagcagctccccggagcagactgtgccctacctctggagtgaagaaacacctgcaacacccattggccaggccatccaccgcctgctcctgatccaggctttccggcccgatcgcctgttggccatggcccacatgtttgtttcaacaaaccttggggagtctttcatgtccatcatggagcagccgctcgacctgacccacattgtgggcacagaggtgaagcccaacactcctgtcttaatgtgctctgtgcctggttatgatgccagtggacatgtcgaggaccttgcagccgagcagaacacgcagatcacttcaattgcaatcggctctgcagaaggctttaaccaagcagataaggcaataaacaccgctgtaaagtcgggcaggtgggtgatgctgaagaatgtgcatctggccccagggtggctgatgcagctggagaagaagttgcattccctgcagccgcatgcctgcttccgactcttcctcaccatggagatcaaccccaaggtgcctgtgaatctgctccgtgcgggccgcatctttgtgttcgagccaccgccaggggtgaaggccaacatgctgaggacgttcagcagcattcccgtctcacggatatgcaagtctcccaacgagcgtgcccgcttgtacttcctgctggcctggtttcatgcgatcatccaagaacgcttacgatacgcaccactggggtggtcaaagaagtatgaatttggagagtctgacctgcggtcagcttgcgatacggtggacacgtggctggatgacacggccaagggcaggcagaacatctcaccggataagatcccgtggtctgcactaaagaccttaatggcccagtccatttatggcgggcgcgtggacaacgagtttgaccagcgtctgctcaacaccttcctggagcgcctgttcacaaccaggagtttcgacagtgagtttaagctggcatgcaaggtcgacggacataaagacattcaaatgccagatggcatcaggcgagaggagtttgtgcagtgggtggagttgctccccgacacccagacgccctcctggctgggcctgcccaacaacgccgagagagtcctccttaccacacagggtgtggacatgatcagtaaaatgctgaagatgcagatgttggaggatgaggacgacctggcctacgcagagactgagaagaagacgaggacagactccacgtccgacgggcgccctgcctggatgcggacactgcacaccaccgcgtccaactggctgcacctcatcccccagacgctgagccacctcaagcgcaccgtggagaatatcaaggatcctttgttcaggttctttgagagagaagtgaagatgggcgcaaagctgcttcaggacgttcgccaggaccttgcagatgtcgtccaggtgtgcgaaggaaagaagaagcagaccaactacttgcgcacgctgatcaacgagctagtgaaagggatcttgcctcggagctggtcccactacacggtgcctgccggcatgaccgtcatccagtgggtgtccgacttcagcgagaggatcaaacagctgcagaacatctcactggcagctgcatctggtggcgccaaggagctaaagaacatccacgtgtgcctgggtggcctgttcgtgcctgaggcgtacatcactgccaccaggcagtatgtggcccaggccaacagctggtccctggaggagctctgcctggaagtcaacgtcaccacctcacagggcgccacccttgacgcttgcagcttcggagtcacgggtttgaaacttcaaggggccacgtgcaacaacaacaagctgtcactgtccaatgccatctcaaccgcccttcccctgacgcagctgcgctgggtcaagcagacaaacaccgagaagaaggccagtgtggtaaccttacctgtctacctgaacttcacccgtgcagacctcatcttcaccgtggacttcgaaattgctacaaaggaggatcctcgcagcttctacgagcggggtgtcgcagtcttgtgcacagagtaaacttttctagctgcccctttctgtaatagtgaaagttggtatttaacatttattcatttttaaaatatttggaaggtctgagcttgtgaaaagaaagtggttggtctgaggttggaggaagctgaatggaatctgacggttgggagtggtggaaattggaaggataccaggaggtatttgggaaggccaatggcgtggctcctttgaggaaataaaacactaagcatga

SEQ ID NO: 462015 - DNA, 15001 bp, Homo sapiens
  misc_feature (7590)..(7590): n is a, c, g, or t
ttcaatgagagaacatttaatgagaggttaaggggcttagaacaacgccgggcacaggctaagcgctcactaaacgttagctctcgccaataacatcactgattcactataaagtttctctggctgtgtgctattcgctgcgtccacagcagtgaagaagacagacgcagcccctgaccaacctcgccaagcccgggcgccgagccaggacgttgagccaagtccccatctcctaggactcgcagtgcggaggctgcgggccccgaccagcgccgagactacaagtcccagaagggcgcgcggcgacatcgccgggcccgccccccgcgcacgcgcggcgccgtgacgctaaggccgcgagcgagcgcgggtggctgcggcggctgcggccggcggggcggggcggggccacctggcagtggctgcctttagggcggagccggctcccgctctcctcagtctgcggtgggctagcggacggtccggcttccggcggccgtttctgtctcttgctggctgtctcgctgagtcgcggccgccttctcatcgctcctggaaggtcccgagcgcgacaccatgtcggagcccgggggcggcggcggcgaggacggctcggccggattggaagtgtcggccgtgcagaatgtggcggacgtgtcggtgctgcagaagcacctgcgcaagctggtgccgctgctgctggaggacggcggcgaggcgccggccgcgctggaggcggcgctggaggagaagagcgccctggagcagatgcgcaagttcctttcggacccgcaggtccacacggtgctggtggagcgctccacgctcaaagaggacgtcggtgatgaaggagaagaagaaaaagaattcatttcctataacatcaacatagacattcattatggggttaaatccaatagcttggcattcattaaacgtactcccgtgattgatgcagataaacccgtgtcttctcagctccgggtccttacactcagtgaagactcgccctacgaaactttgcattctttcattagcaatgcagtggctcctttttttaagtcctacattagagagtctggcaaggcagacagggatggtgataaaatggctccttcagttgaaaagaagattgcagaactcgaaatgggactccttcacttgcagcaaaatattgaaattccggagatcagcctgccgattcatccaatgatcacaaatgttgcaaaacagtgttatgagcgtggagaaaagccaaaagttacagactttggtgataaggttgaagacccaacatttcttaatcagttacaatctggagttaaccgctggatccgagaaattcaaaaagtgaccaaactggatcgagatcctgcatcaggaactgccttacaggaaattagtttttggctaaacttggaacgtgcgttataccgcatccaggagaaacgggagagcccggaagttctcctgactctggatatcttgaaacatggcaagcgcttccatgccaccgtcagttttgacactgacacaggtctaaaacaggctttggaaactgtgaatgactacaatcctctgatgaaagatttccctctgaatgatttgctgtctgccacggagctggacaaaataagacaggcgcttgttgccattttcacacatttgagaaagatccgaaacacaaaatatcctattcagagggcactgcgtttggtggaggcaatttcaagagacttgagttctcaattactcaaagtattgggcactaggaaattgatgcatgttgcttatgaagaatttgaaaaagttatggtagcatgctttgaagtttttcagacttgggatgatgagtatgagaaacttcaggtattgttgagagacatcgtcaaaagaaaaagggaagaaaatctgaagatggtgtggcgtatcaaccctgcccacaggaagctgcaggcccgccttgaccagatgagaaaatttagacgccagcatgaacagctaagagctgttatcgtcagggtcctgaggccacaggtcacggcagttgcacaacagaatcaaggagaggtccctgaaccccaagatatgaaagtggctgaggttctctttgatgctgcagatgcaaatgccattgaggaagtaaaccttgcttatgagaacgtcaaggaagtggatggactggatgtttccaaagagggcacggaagcctgggaggctgctatgaagaggtacgatgagaggatcgacagagtggagacccggatcaccgctcgccttcgggatcagcttggcacagccaagaatgccaacgagatgtttaggattttctccaggtttaatgcactgtttgtcaggcctcacatccgtggggccattcgtgactaccagacccagctgatccagcgcgtgaaagatgacattgagtctcttcacgacaagttcaaggtccagtacccacagagtcaggcttgtaagatgagtcacgttcgtgacttgccccctgtgtcagggtctatcatctgggctaaacagatcgacaggcagctgacggcctacatgaagcgggtggaagatgtccttggcaagggctgggagaatcacgtggaggggcagaagctgaagcaggatggagacagcttccgcatgaagctcaacacgcaggagatctttgatgactgggcaaggaaggtgcagcagcgcaacctcggtgtctcggggcgcattttcaccatcgaaagtactcgggttcggggccgaactggaaatgtgcttaagctgaaagttaactttcttcctgagattatcacactatccaaagaagtccggaacctcaaatggcttggtttccgcgtcccactggcgattgtgaacaaagcccatcaagcaaaccagctttacccgtttgccatctcactgatcgagagcgttcgtacctatgaacggacctgcgagaaggtggaggagcggaacaccatttcccttttggtggctggcttgaaaaaggaagtgcaggccctgatcgcagaaggcattgcgttggtgtgggagtcctacaaacttgacccatatgtacagcgcttagcagagactgtcttcaacttccaagaaaaggtggatgatctgctgatcattgaagaaaaaatagacctagaagtccgttccttggaaacttgtatgtatgaccataagacattctcggaaatcttgaacagagtccagaaagcagtggatgacttaaatctgcactcctattccaatttgcccatctgggtcaacaagcttgacatggagattgaaagaatattgggcgtccgtctgcaagctggcctgagagcttggacgcaggttcttcttggacaagctgaagataaagcagaagttgacatggacacagatgctccacaagttagtcacaagcctggtggagagccaaagatcaaaaatgtcgttcatgagctaagaataaccaatcaggtaatctacttgaatccaccaattgaagagtgcagatacaagctgtatcaggaaatgtttgcctggaagatggttgtactgtctctccccaggatccagagtcagaggtaccaggtgggtgtacattacgaattgactgaggaagagaaattctatcggaatgctttaacacggatgcctgatggccctgttgccctggaagagtcgtattctgctgtcatgggcattgtatctgaagttgaacagtatgtcaaggtttggcttcagtatcagtgtttatgggatatgcaagctgaaaacatctataacagacttggagaagatctcaacaaatggcaggctctcctggtccaaataaggaaggccagaggaacctttgacaatgcagaaaccaagaaagagtttggaccagtagttatagattatggcaaggtacaatctaaggtgaacttgaaatatgactcttggcataaggaggttcttagcaaatttgggcagatgctaggatcaaacatgacggaattccattcccagatctcaaagtcccgccaagagttggagcagcactcagtagacacggccagcacctccgatgcagtgaccttcatcacctatgtgcagtctttgaaacggaagatcaagcagtttgagaagcaagttgagctctaccgcaatggccagcgcttactggaaaagcaaaggttccagttcccaccttcctggctttatattgacaacatcgagggagagtggggagccttcaatgacatcatgcggcgaaaggactctgccattcagcagcaggtggcaaacctgcaaatgaagattgtccaggaggatcgggccgtggaaagccgcaccaccgacctgctgactgactgggagaagaccaagcctgtcacgggcaaccttcgcccagaagaggcacttcaggctctcaccatatatgaggggaagtttggtaggctgaaggacgacagagagaagtgtgcaaaggccaaggaggcgctggaattgacagatactgggcttctcagtggcagtgaagagcgcgtgcaggtggccttagaagaattacaggacctcaaaggcgtttggtcagaactttctaaggtttgggagcaaatcgatcagatgaaggagcaaccctgggtttcagtacagcctcgaaagcttcgacaaaatttggatgccctcctgaaccagctgaaaagcttccctgcccggttgcgacagtatgcgtcctatgagtttgttcagaggcttctgaaaggttacatgaagataaatatgctggtgattgaactgaaatccgaagcacttaaagaccgccattggaaacagctcatgaaaaggcttcacgttaattgggttgtttctgagctaacccttggccaaatctgggatgttgacttgcagaaaaatgaagcgattgtcaaggatgtactgcttgtggcacaaggggagatggctttggaagaatttttgaagcagataagagaagtgtggaatacttatgaactagacttggttaattatcagaacaagtgccgcttgatccgtggctgggatgacctcttcaacaaggtcaaagaacacatcaacagcgtctcggccatgaagctctctccgtattacaaggtttttgaagaggatgctctcagctgggaagataagctgaacaggatcatggctctctttgatgtgtggattgatgtgcagaggcggtgggtctacctggaaggtatcttcacaggcagtgcagatatcaagcacctgctgccagtggaaacccagcggtttcagagcatcagcactgagtttttggctctaatgaaaaaagtgtccaagtctccccttgttatggatgttctgaacatccagggagtacagaggtctctggaaagattggcagacctgctaggaaagatccagaaagcattgggagaatatctggaaagagagcggtcatctttccccaggttctattttgtgggtgatgaagatttgcttgaaatcattggaaacagcaagaatgtcgctaaattacagaaacacttcaagaagatgtttgctggagtttcgagcatcatcctgaacgaggataactctgttgttttgggtatttcatctcgggaaggagaggaggttatgtttaaaactcctgtgtcaattactgaacatcccaaaatcaatgagtggctcacattggtagaaaaggagatgagagtcaccctggccaaactgcttgctgagtctgttacggaagttgagatttttggtaaagcaacttcaattgacccaaatacctacatcacttggattgataaataccaggcccagcttgtggttttgtcagcccagatagcctggtctgagaacgtggagaccgcactgagcagcatgggcggaggtggagatgccgcgcccttgcactctgtgctgagcaatgtggaggtcaccctcaatgtgttagcagactctgtcctcatggagcagcccccactccgaaggcggaagctagaacacttgattacagagttggttcaccagagagatgttacaaggtccttgatcaaaagcaagattgacaacgccaaatcttttgaatggctcagccagatgcgattttactttgaccctaagcaaactgatgtgttacagcagttgtcaattcaaatggcaaatgccaaatttaactatggctttgagtacctgggtgttcaggacaaactggtccagacccccctcactgaccgctgctatttgacaatgacacaagccttggaggccaggctggggggttccccatttggacctgctggaactgggaaaacagagtctgtcaaagctcttggccatcagcttggacggtttgttttagttttcaactgtgatgaaacctttgatttccaggcaatgggccggatctttgtgggcctttgccaggtgggtgcctggggctgctttgacgagttcaaccgcctggaggagcggatgctctcggctgtgtcccagcaggtgcagtgcatacaggaagcactgcgtgaacattccaaccccaactacgacaagacctctgcccccattacttgtgagctgctgaacaaacaagtcaaggtgagcccggacatggccatcttcatcaccatgaaccctggctacgcgggccggtctaaccttcctgacaacttgaagaagctgttccggagcttggccatgaccaagcccgaccggcagttaatcgcccaggtcatgctgtactcacagggtttccgcactgctgaagtgcttgccaacaaaatcgtcccgttttttaaactatgcgatgagcagctctcttcccaaagccattatgacttcggtcttcgggctttgaagagtgtgctggtgagtgcaggcaatgtgaagagagagagaatccagaagataaagagggagaaagaggaacgaggggaagcagttgatgaaggagaaattgctgaaaatctccctgaacaagagattctgatacagagcgtctgtgagacgatggtgccaaagctggtggcagaggacatcccgctgctcttcagcctcctgtcggacgtgttccctggagtccagtatcacaggggtgagatgactgcccttcgagaggagctgaagaaagtgtgtcaggagatgtatttgacatatggagatggagaagaagttggtggaatgtgggttgaaaaggttctccagctctatcagatcacccagatcaatcatggcctgatgatggtggggccctcgggaagtgggaagagcatggcctggcgtgtcctgctgaaggcattggagagactcgagggtgtggaaggtgtggcccatatcatcgaccccaaggccatcagcaaagaccacctctacggaaccctggaccccaacaccagggaatggacagatgggctcttcacacacgtgctgagaaagatcatcgacagcgtgagaggcgagctgcagaagcgccagtggatcgtcttcgatggcgatgtggatccagagtgggttgagaacttgaactcagtgctggatgacaataagctcctaactttgcccaatggagagcgcctcagtcttccacccaangtgagaataatgtttgaggtacaggacttgaaatacgcgaccttggccacagtgtcgcgctgcggcatggtctggttcagtgaggatgtgctgagcaccgacatgatcttcaacaacttcctggccaggctgcgcagcatcccgctggatgaaggggaggatgaggcacagcggcggcgtaagggcaaagaggatgagggggaggaggccgcttcccccatgctgcagatccaaagagatgcagctacgatcatgcaaccgtacttcacgtccaacggcctggtcaccaaggcgctagagcacgccttccagctggagcacatcatggacctaacacgcctgcgctgcctgggctcgctcttctccatgctgcaccaggcctgccgcaacgtggcgcagtataacgccaaccatcccgacttccccatgcagatcgagcagctggagcgctacattcaggtcagggggcatcaggggcttcacagagctcaccactgcgccagaccacaggtctgaggacctctgaaatgctgcacctgtggggatgtgcgctctctcctaggcgaggcagagccttcgttgaggggctaggaaaggtgcagtgggtgtctgtgatgcaagaagactgggaaccactgtctttaggttaactttgctgtaagtgtctttcttttgttgttgaaattttataaaaatcaaagtttaattccctttttaatagcgatatctggtttatgccatactctggtccctgtctggagacagccggctaaaaatgagagcagagctgggtgaatacatcagaagaatcacgaccgtgcctctgcccactgcgcccaacatacccattatcgattatgaggtgtccatcagcggagaatggtctccgtggcaggccaaggtgcctcagattgaagtggagacgcacaaggtggcagcccctgatgtcgtcgtgccaacgctggacacagtccgccacgaagccctcttgtacacttggctggccgaacacaagcccctggtcttgtgtggccctcctgggtctggcaagaccatgacactcttcagcgccctccgggccttgcctgacatggaggtggtgggtctcaacttctccagtgctactactccagagctgcttctgaagacttttgatcactactgcgagtacaggcgcacacctaatggggtggttttggctcctgttcaacttggaaagtggctggtgttgttctgtgatgaaatcaacttgccagatatggataaatatgggacccagagggtcatatccttcatcagacagatggtggagcacggaggcttttaccgtacctcagatcaaacatgggtgaagctggagagaatccagtttgttggggcttgtaatccccccacagaccctggaagaaagcccctctcacacaggttcctgcgccacgtgcctgtcgtgtatgtggattacccgggccccgcctccctcacacagatctacggcaccttcaaccgcgccatgctgaggctcattccatccctgcggacgtatgcagagccgctcactgctgccatggtggagttctacaccatgtctcaggagagattcacccaggatacacaacctcactatatctattcaccccgtgaaatgactaggtgggtgagaggcatctttgaagcgctgagacctctggagaccctgcctgttgaaggcctcattcggatttgggcacatgaagctctgcgtctcttccaagatagactcgtagaggatgaggagaggcgttggactgatgagaacatcgacacggttgctctgaagcacttccctaacatcgacagagagaaggcaatgagccgacccatcttgtacagcaactggctgtcaaaggattacatcccagtagaccaagaagagttaagagattatgtcaaagctaggctgaaggtcttttatgaagaagaacttgatgttccgctggtgctgtttaatgaagtcctagaccacgtgctgaggattgacagaatattccgtcaacctcaaggccacttgcttctgattggtgttagtggagcaggaaaaactaccctgtctcgtttcgtcgcctggatgaacggtttgagtgtgtaccagattaaggtccataggaagtacacaggggaagactttgatgaagatctacggacagtgttgagacgttctggctgtaaaaatgaaaagatagcatttataatggatgaatctaatgtgttagattctggattcctggagcgaatgaatacccttctggccaatggagaggtgcctggtctctttgaaggagacgagtatgccaccttgatgacgcagtgcaaagagggggcacagaaggaaggcctgatgctggactcgcacgaggagctctacaagtggttcactagccaggttatccgcaacctccacgtcgtgttcaccatgaacccgtcctcggagggactcaaggaccgggcagctacatcaccagcacttttcaacaggtgtgtgttgaattggtttggagactggtccaccgaagcactgtatcaggttggcaaagaattcacaagtaagatggatctggagaagccaaattacatcgtgcctgattacatgccagttgtgtatgataagctgccgcagccaccatcccatcgggaagccattgtgaacagctgtgtgtttgttcatcagactcttcaccaggcgaatgctcggctagcaaagcgaggcggcagaacgatggccatcacccctcgccactacctggacttcatcaatcactatgccaacctgttccacgagaagcggagcgagctggaggagcagcagatgcacttgaacgtggggctcaggaagatcaaagagacagtcgaccaggtagaagaactgcgtcgtgacttgaggataaagagccaagagctggaggtgaagaatgcagcagccaatgacaagctgaaaaagatggtgaaagaccagcaggaggctgaaaagaagaaggttatgagccaagaaatccaggaacagctgcataagcagcaggaggtaattgcagacaaacagatgagtgtcaaagaagatcttgataaggtggaacctgccgtcattgaggcccagaatgctgtgaagtcgatcaagaagcagcacctggtggaggtgaggtccatggccaaccctcctgctgctgtgaagctggcgctggagtccatctgcctgctgctgggggaaagcaccacagactggaagcagatccgctccatcatcatgcgggagaacttcatccccaccatcgtcaacttctctgcagaggagatcagtgacgccataagggagaagatgaagaaaaattacatgtccaatccaagttacaattatgaaattgtgaatcgggcttccctggcttgcggccctatggtgaaatgggcaattgcacagcttaactatgcagacatgttaaagagagtggagcccctacgcaatgagctgcagaagctggaagatgacgccaaggacaaccagcagaaggccaacgaggtggagcagatgatccgagacctggaagccagcatcgcccgctacaaggaggaatacgccgtcctgatctcagaggcccaggccatcaaggcagacctggcagctgtcgaggcaaaagtaaaccggagcactgctcttctgaagagcttgtctgctgaacgtgaacgatgggaaaaaacaagtgaaactttcaaaaaccagatgtccaccattgctggggactgtctcttgtcagctgcgttcattgcctacgcgggttactttgaccagcagatgcgtcagaacttgttcactacctggtcccatcacctacagcaagccaacatccagttccgtacagatattgccaggacggaatacctttccaatgctgatgagcgtcttcgctggcaggccagctccttgcctgctgatgacctttgcacagaaaatgccatcatgctgaaacgattcaataggtatccgctgatcattgacccctctggacaggccacagaattcattatgaatgaatataaggatcgtaagatcacacggaccagcttcctggatgacgccttcagaaagaacttagagagtgcactgagattcggtaacccccttctggtccaggatgtggaaagctacgatccagttttgaacccggtgctgaaccgtgaagtgcggcgaacaggggggagagtgctgatcactctcggggaccaggacatagacctgtcgccatcgtttgtcatcttcctgtccacccgggatccaactgtcgagttcccaccagatctctgttcccgggttacttttgtaaacttcacagttacccgtagcagtttacaaagccagtgtctaaatgaagtacttaaagcagaaagacctgatgtggacgagaaacgatctgatcttcttaaacttcaaggggaatttcagctccgtttgcgtcagctggaaaaatctctactacaagctctgaacgaggtgaaagggcgcattttggatgacgacacgatcataaccactctggagaacctgaagagagaggctgcagaggtcaccaggaaagttgaggagacggacattgtcatgcaggaggtggagaccgtgtcccagcagtacctcccgctctccaccgcctgcagcagcatctacttcaccatggagtccctcaagcagatacacttcttgtaccagtactccctccagtttttcctggacatttatcacaacgtcctatacgagaacccgaacctgaagggtgtcaccgaccacacacagcgcctgtccattataacaaaggacctcttccaggtggcgtttaaccgagtggctcgaggcatgctgcatcaggaccacattacctttgccatgctgctggcaagaatcaaactgaagggcaccgtgggggagcccacctacgatgcagaattccagcacttcttgagaggaaatgagattgtcctgagtgctggctccacccccaggatccagggcctgactgtggagcaggcggaggcggtggtgaggctgagctgccttcccgcgtttaaggacttgattgcaaaggttcaggcagacgagcaatttggcatctggctggacagcagctccccggagcagactgtgccctacctctggagtgaagaaacacctgcaacacccattggccaggccatccaccgcctgctcctgatccaggctttccggcccgatcgcctgttggccatggcccacatgtttgtttcaacaaaccttggggagtctttcatgtccatcatggagcagccgctcgacctgacccacattgtgggcacagaggtgaagcccaacactcctgtcttaatgtgctctgtgcctggttatgatgccagtggacatgtcgaggaccttgcagccgagcagaacacgcagatcacttcaattgcaatcggctctgcagaaggctttaaccaagcagataaggcaataaacaccgctgtaaagtcgggcaggtgggtgatgctgaagaatgtgcatctggccccagggtggctgatgcagctggagaagaagttgcattccctgcagccgcatgcctgcttccgactcttcctcaccatggagatcaaccccaaggtgcctgtgaatctgctccgtgcgggccgcatctttgtgttcgagccaccgccaggggtgaaggccaacatgctgaggacgttcagcagcattcccgtctcacggatatgcaagtctcccaacgagcgtgcccgcttgtacttcctgctggcctggtttcatgcgatcatccaagaacgcttacgatacgcaccactggggtggtcaaagaagtatgaatttggagagtctgacctgcggtcagcttgcgatacggtggacacgtggctggatgacacggccaagggcaggcagaacatctcaccggataagatcccgtggtctgcactaaagaccttaatggcccagtccatttatggcgggcgcgtggacaacgagtttgaccagcgtctgctcaacaccttcctggagcgcctgttcacaaccaggagtttcgacagtgagtttaagctggcatgcaaggtcgacggacataaagacattcaaatgccagatggcatcaggcgagaggagtttgtgcagtgggtggagttgctccccgacacccagacgccctcctggctgggcctgcccaacaacgccgagagagtcctccttaccacacagggtgtggacatgatcagtaaaatgctgaagatgcagatgttggaggatgaggacgacctggcctacgcagagactgagaagaagacgaggacagactccacgtccgacgggcgccctgcctggatgcggacactgcacaccaccgcgtccaactggctgcacctcatcccccagacgctgagccacctcaagcgcaccgtggagaatatcaaggatcctttgttcaggttctttgagagagaagtgaagatgggcgcaaagctgcttcaggacgttcgccaggaccttgcagatgtcgtccaggtgtgcgaaggaaagaagaagcagaccaactacttgcgcacgctgatcaacgagctagtgaaagggatcttgcctcggagctggtcccactacacggtgcctgccggcatgaccgtcatccagtgggtgtccgacttcagcgagaggatcaaacagctgcagaacatctcactggcagctgcatctggtggcgccaaggagctaaagaacatccacgtgtgcctgggtggcctgttcgtgcctgaggcgtacatcactgccaccaggcagtatgtggcccaggccaacagctggtccctggaggagctctgcctggaagtcaacgtcaccacctcacagggcgccacccttgacgcttgcagcttcggagtcacgggtttgaaacttcaaggggccacgtgcaacaacaacaagctgtcactgtccaatgccatctcaaccgcccttcccctgacgcagctgcgctgggtcaagcagacaaacaccgagaagaaggccagtgtggtaaccttacctgtctacctgaacttcacccgtgcagacctcatcttcaccgtggacttcgaaattgctacaaaggaggatcctcgcagcttctacgagcggggtgtcgcagtcttgtgcacagagtaaacttttctagctgcccctttctgtaatagtgaaagttggtatttaacatttattcatttttaaaatatttggaaggtctgagcttgtgaaaagaaagtggttggtctgaggttggaggaagctgaatggaatctgacggttgggagtggtggaaattggaaggataccaggaggtatttgggaaggccaatggcgtgcgtcatccgggccgagctcgatgtt

SEQ ID NO: 462016 - DNA, 15025 bp, Homo sapiens
  misc_feature (7590)..(7590): n is a, c, g, or t
  misc_feature (15007)..(15007): n is a, c, g, or t
ttcaatgagagaacatttaatgagaggttaaggggcttagaacaacgccgggcacaggctaagcgctcactaaacgttagctctcgccaataacatcactgattcactataaagtttctctggctgtgtgctattcgctgcgtccacagcagtgaagaagacagacgcagcccctgaccaacctcgccaagcccgggcgccgagccaggacgttgagccaagtccccatctcctaggactcgcagtgcggaggctgcgggccccgaccagcgccgagactacaagtcccagaagggcgcgcggcgacatcgccgggcccgccccccgcgcacgcgcggcgccgtgacgctaaggccgcgagcgagcgcgggtggctgcggcggctgcggccggcggggcggggcggggccacctggcagtggctgcctttagggcggagccggctcccgctctcctcagtctgcggtgggctagcggacggtccggcttccggcggccgtttctgtctcttgctggctgtctcgctgagtcgcggccgccttctcatcgctcctggaaggtcccgagcgcgacaccatgtcggagcccgggggcggcggcggcgaggacggctcggccggattggaagtgtcggccgtgcagaatgtggcggacgtgtcggtgctgcagaagcacctgcgcaagctggtgccgctgctgctggaggacggcggcgaggcgccggccgcgctggaggcggcgctggaggagaagagcgccctggagcagatgcgcaagttcctttcggacccgcaggtccacacggtgctggtggagcgctccacgctcaaagaggacgtcggtgatgaaggagaagaagaaaaagaattcatttcctataacatcaacatagacattcattatggggttaaatccaatagcttggcattcattaaacgtactcccgtgattgatgcagataaacccgtgtcttctcagctccgggtccttacactcagtgaagactcgccctacgaaactttgcattctttcattagcaatgcagtggctcctttttttaagtcctacattagagagtctggcaaggcagacagggatggtgataaaatggctccttcagttgaaaagaagattgcagaactcgaaatgggactccttcacttgcagcaaaatattgaaattccggagatcagcctgccgattcatccaatgatcacaaatgttgcaaaacagtgttatgagcgtggagaaaagccaaaagttacagactttggtgataaggttgaagacccaacatttcttaatcagttacaatctggagttaaccgctggatccgagaaattcaaaaagtgaccaaactggatcgagatcctgcatcaggaactgccttacaggaaattagtttttggctaaacttggaacgtgcgttataccgcatccaggagaaacgggagagcccggaagttctcctgactctggatatcttgaaacatggcaagcgcttccatgccaccgtcagttttgacactgacacaggtctaaaacaggctttggaaactgtgaatgactacaatcctctgatgaaagatttccctctgaatgatttgctgtctgccacggagctggacaaaataagacaggcgcttgttgccattttcacacatttgagaaagatccgaaacacaaaatatcctattcagagggcactgcgtttggtggaggcaatttcaagagacttgagttctcaattactcaaagtattgggcactaggaaattgatgcatgttgcttatgaagaatttgaaaaagttatggtagcatgctttgaagtttttcagacttgggatgatgagtatgagaaacttcaggtattgttgagagacatcgtcaaaagaaaaagggaagaaaatctgaagatggtgtggcgtatcaaccctgcccacaggaagctgcaggcccgccttgaccagatgagaaaatttagacgccagcatgaacagctaagagctgttatcgtcagggtcctgaggccacaggtcacggcagttgcacaacagaatcaaggagaggtccctgaaccccaagatatgaaagtggctgaggttctctttgatgctgcagatgcaaatgccattgaggaagtaaaccttgcttatgagaacgtcaaggaagtggatggactggatgtttccaaagagggcacggaagcctgggaggctgctatgaagaggtacgatgagaggatcgacagagtggagacccggatcaccgctcgccttcgggatcagcttggcacagccaagaatgccaacgagatgtttaggattttctccaggtttaatgcactgtttgtcaggcctcacatccgtggggccattcgtgactaccagacccagctgatccagcgcgtgaaagatgacattgagtctcttcacgacaagttcaaggtccagtacccacagagtcaggcttgtaagatgagtcacgttcgtgacttgccccctgtgtcagggtctatcatctgggctaaacagatcgacaggcagctgacggcctacatgaagcgggtggaagatgtccttggcaagggctgggagaatcacgtggaggggcagaagctgaagcaggatggagacagcttccgcatgaagctcaacacgcaggagatctttgatgactgggcaaggaaggtgcagcagcgcaacctcggtgtctcggggcgcattttcaccatcgaaagtactcgggttcggggccgaactggaaatgtgcttaagctgaaagttaactttcttcctgagattatcacactatccaaagaagtccggaacctcaaatggcttggtttccgcgtcccactggcgattgtgaacaaagcccatcaagcaaaccagctttacccgtttgccatctcactgatcgagagcgttcgtacctatgaacggacctgcgagaaggtggaggagcggaacaccatttcccttttggtggctggcttgaaaaaggaagtgcaggccctgatcgcagaaggcattgcgttggtgtgggagtcctacaaacttgacccatatgtacagcgcttagcagagactgtcttcaacttccaagaaaaggtggatgatctgctgatcattgaagaaaaaatagacctagaagtccgttccttggaaacttgtatgtatgaccataagacattctcggaaatcttgaacagagtccagaaagcagtggatgacttaaatctgcactcctattccaatttgcccatctgggtcaacaagcttgacatggagattgaaagaatattgggcgtccgtctgcaagctggcctgagagcttggacgcaggttcttcttggacaagctgaagataaagcagaagttgacatggacacagatgctccacaagttagtcacaagcctggtggagagccaaagatcaaaaatgtcgttcatgagctaagaataaccaatcaggtaatctacttgaatccaccaattgaagagtgcagatacaagctgtatcaggaaatgtttgcctggaagatggttgtactgtctctccccaggatccagagtcagaggtaccaggtgggtgtacattacgaattgactgaggaagagaaattctatcggaatgctttaacacggatgcctgatggccctgttgccctggaagagtcgtattctgctgtcatgggcattgtatctgaagttgaacagtatgtcaaggtttggcttcagtatcagtgtttatgggatatgcaagctgaaaacatctataacagacttggagaagatctcaacaaatggcaggctctcctggtccaaataaggaaggccagaggaacctttgacaatgcagaaaccaagaaagagtttggaccagtagttatagattatggcaaggtacaatctaaggtgaacttgaaatatgactcttggcataaggaggttcttagcaaatttgggcagatgctaggatcaaacatgacggaattccattcccagatctcaaagtcccgccaagagttggagcagcactcagtagacacggccagcacctccgatgcagtgaccttcatcacctatgtgcagtctttgaaacggaagatcaagcagtttgagaagcaagttgagctctaccgcaatggccagcgcttactggaaaagcaaaggttccagttcccaccttcctggctttatattgacaacatcgagggagagtggggagccttcaatgacatcatgcggcgaaaggactctgccattcagcagcaggtggcaaacctgcaaatgaagattgtccaggaggatcgggccgtggaaagccgcaccaccgacctgctgactgactgggagaagaccaagcctgtcacgggcaaccttcgcccagaagaggcacttcaggctctcaccatatatgaggggaagtttggtaggctgaaggacgacagagagaagtgtgcaaaggccaaggaggcgctggaattgacagatactgggcttctcagtggcagtgaagagcgcgtgcaggtggccttagaagaattacaggacctcaaaggcgtttggtcagaactttctaaggtttgggagcaaatcgatcagatgaaggagcaaccctgggtttcagtacagcctcgaaagcttcgacaaaatttggatgccctcctgaaccagctgaaaagcttccctgcccggttgcgacagtatgcgtcctatgagtttgttcagaggcttctgaaaggttacatgaagataaatatgctggtgattgaactgaaatccgaagcacttaaagaccgccattggaaacagctcatgaaaaggcttcacgttaattgggttgtttctgagctaacccttggccaaatctgggatgttgacttgcagaaaaatgaagcgattgtcaaggatgtactgcttgtggcacaaggggagatggctttggaagaatttttgaagcagataagagaagtgtggaatacttatgaactagacttggttaattatcagaacaagtgccgcttgatccgtggctgggatgacctcttcaacaaggtcaaagaacacatcaacagcgtctcggccatgaagctctctccgtattacaaggtttttgaagaggatgctctcagctgggaagataagctgaacaggatcatggctctctttgatgtgtggattgatgtgcagaggcggtgggtctacctggaaggtatcttcacaggcagtgcagatatcaagcacctgctgccagtggaaacccagcggtttcagagcatcagcactgagtttttggctctaatgaaaaaagtgtccaagtctccccttgttatggatgttctgaacatccagggagtacagaggtctctggaaagattggcagacctgctaggaaagatccagaaagcattgggagaatatctggaaagagagcggtcatctttccccaggttctattttgtgggtgatgaagatttgcttgaaatcattggaaacagcaagaatgtcgctaaattacagaaacacttcaagaagatgtttgctggagtttcgagcatcatcctgaacgaggataactctgttgttttgggtatttcatctcgggaaggagaggaggttatgtttaaaactcctgtgtcaattactgaacatcccaaaatcaatgagtggctcacattggtagaaaaggagatgagagtcaccctggccaaactgcttgctgagtctgttacggaagttgagatttttggtaaagcaacttcaattgacccaaatacctacatcacttggattgataaataccaggcccagcttgtggttttgtcagcccagatagcctggtctgagaacgtggagaccgcactgagcagcatgggcggaggtggagatgccgcgcccttgcactctgtgctgagcaatgtggaggtcaccctcaatgtgttagcagactctgtcctcatggagcagcccccactccgaaggcggaagctagaacacttgattacagagttggttcaccagagagatgttacaaggtccttgatcaaaagcaagattgacaacgccaaatcttttgaatggctcagccagatgcgattttactttgaccctaagcaaactgatgtgttacagcagttgtcaattcaaatggcaaatgccaaatttaactatggctttgagtacctgggtgttcaggacaaactggtccagacccccctcactgaccgctgctatttgacaatgacacaagccttggaggccaggctggggggttccccatttggacctgctggaactgggaaaacagagtctgtcaaagctcttggccatcagcttggacggtttgttttagttttcaactgtgatgaaacctttgatttccaggcaatgggccggatctttgtgggcctttgccaggtgggtgcctggggctgctttgacgagttcaaccgcctggaggagcggatgctctcggctgtgtcccagcaggtgcagtgcatacaggaagcactgcgtgaacattccaaccccaactacgacaagacctctgcccccattacttgtgagctgctgaacaaacaagtcaaggtgagcccggacatggccatcttcatcaccatgaaccctggctacgcgggccggtctaaccttcctgacaacttgaagaagctgttccggagcttggccatgaccaagcccgaccggcagttaatcgcccaggtcatgctgtactcacagggtttccgcactgctgaagtgcttgccaacaaaatcgtcccgttttttaaactatgcgatgagcagctctcttcccaaagccattatgacttcggtcttcgggctttgaagagtgtgctggtgagtgcaggcaatgtgaagagagagagaatccagaagataaagagggagaaagaggaacgaggggaagcagttgatgaaggagaaattgctgaaaatctccctgaacaagagattctgatacagagcgtctgtgagacgatggtgccaaagctggtggcagaggacatcccgctgctcttcagcctcctgtcggacgtgttccctggagtccagtatcacaggggtgagatgactgcccttcgagaggagctgaagaaagtgtgtcaggagatgtatttgacatatggagatggagaagaagttggtggaatgtgggttgaaaaggttctccagctctatcagatcacccagatcaatcatggcctgatgatggtggggccctcgggaagtgggaagagcatggcctggcgtgtcctgctgaaggcattggagagactcgagggtgtggaaggtgtggcccatatcatcgaccccaaggccatcagcaaagaccacctctacggaaccctggaccccaacaccagggaatggacagatgggctcttcacacacgtgctgagaaagatcatcgacagcgtgagaggcgagctgcagaagcgccagtggatcgtcttcgatggcgatgtggatccagagtgggttgagaacttgaactcagtgctggatgacaataagctcctaactttgcccaatggagagcgcctcagtcttccacccaangtgagaataatgtttgaggtacaggacttgaaatacgcgaccttggccacagtgtcgcgctgcggcatggtctggttcagtgaggatgtgctgagcaccgacatgatcttcaacaacttcctggccaggctgcgcagcatcccgctggatgaaggggaggatgaggcacagcggcggcgtaagggcaaagaggatgagggggaggaggccgcttcccccatgctgcagatccaaagagatgcagctacgatcatgcaaccgtacttcacgtccaacggcctggtcaccaaggcgctagagcacgccttccagctggagcacatcatggacctaacacgcctgcgctgcctgggctcgctcttctccatgctgcaccaggcctgccgcaacgtggcgcagtataacgccaaccatcccgacttccccatgcagatcgagcagctggagcgctacattcaggtcagggggcatcaggggcttcacagagctcaccactgcgccagaccacaggtctgaggacctctgaaatgctgcacctgtggggatgtgcgctctctcctaggcgaggcagagccttcgttgaggggctaggaaaggtgcagtgggtgtctgtgatgcaagaagactgggaaccactgtctttaggttaactttgctgtaagtgtctttcttttgttgttgaaattttataaaaatcaaagtttaattccctttttaatagcgatatctggtttatgccatactctggtccctgtctggagacagccggctaaaaatgagagcagagctgggtgaatacatcagaagaatcacgaccgtgcctctgcccactgcgcccaacatacccattatcgattatgaggtgtccatcagcggagaatggtctccgtggcaggccaaggtgcctcagattgaagtggagacgcacaaggtggcagcccctgatgtcgtcgtgccaacgctggacacagtccgccacgaagccctcttgtacacttggctggccgaacacaagcccctggtcttgtgtggccctcctgggtctggcaagaccatgacactcttcagcgccctccgggccttgcctgacatggaggtggtgggtctcaacttctccagtgctactactccagagctgcttctgaagacttttgatcactactgcgagtacaggcgcacacctaatggggtggttttggctcctgttcaacttggaaagtggctggtgttgttctgtgatgaaatcaacttgccagatatggataaatatgggacccagagggtcatatccttcatcagacagatggtggagcacggaggcttttaccgtacctcagatcaaacatgggtgaagctggagagaatccagtttgttggggcttgtaatccccccacagaccctggaagaaagcccctctcacacaggttcctgcgccacgtgcctgtcgtgtatgtggattacccgggccccgcctccctcacacagatctacggcaccttcaaccgcgccatgctgaggctcattccatccctgcggacgtatgcagagccgctcactgctgccatggtggagttctacaccatgtctcaggagagattcacccaggatacacaacctcactatatctattcaccccgtgaaatgactaggtgggtgagaggcatctttgaagcgctgagacctctggagaccctgcctgttgaaggcctcattcggatttgggcacatgaagctctgcgtctcttccaagatagactcgtagaggatgaggagaggcgttggactgatgagaacatcgacacggttgctctgaagcacttccctaacatcgacagagagaaggcaatgagccgacccatcttgtacagcaactggctgtcaaaggattacatcccagtagaccaagaagagttaagagattatgtcaaagctaggctgaaggtcttttatgaagaagaacttgatgttccgctggtgctgtttaatgaagtcctagaccacgtgctgaggattgacagaatattccgtcaacctcaaggccacttgcttctgattggtgttagtggagcaggaaaaactaccctgtctcgtttcgtcgcctggatgaacggtttgagtgtgtaccagattaaggtccataggaagtacacaggggaagactttgatgaagatctacggacagtgttgagacgttctggctgtaaaaatgaaaagatagcatttataatggatgaatctaatgtgttagattctggattcctggagcgaatgaatacccttctggccaatggagaggtgcctggtctctttgaaggagacgagtatgccaccttgatgacgcagtgcaaagagggggcacagaaggaaggcctgatgctggactcgcacgaggagctctacaagtggttcactagccaggttatccgcaacctccacgtcgtgttcaccatgaacccgtcctcggagggactcaaggaccgggcagctacatcaccagcacttttcaacaggtgtgtgttgaattggtttggagactggtccaccgaagcactgtatcaggttggcaaagaattcacaagtaagatggatctggagaagccaaattacatcgtgcctgattacatgccagttgtgtatgataagctgccgcagccaccatcccatcgggaagccattgtgaacagctgtgtgtttgttcatcagactcttcaccaggcgaatgctcggctagcaaagcgaggcggcagaacgatggccatcacccctcgccactacctggacttcatcaatcactatgccaacctgttccacgagaagcggagcgagctggaggagcagcagatgcacttgaacgtggggctcaggaagatcaaagagacagtcgaccaggtagaagaactgcgtcgtgacttgaggataaagagccaagagctggaggtgaagaatgcagcagccaatgacaagctgaaaaagatggtgaaagaccagcaggaggctgaaaagaagaaggttatgagccaagaaatccaggaacagctgcataagcagcaggaggtaattgcagacaaacagatgagtgtcaaagaagatcttgataaggtggaacctgccgtcattgaggcccagaatgctgtgaagtcgatcaagaagcagcacctggtggaggtgaggtccatggccaaccctcctgctgctgtgaagctggcgctggagtccatctgcctgctgctgggggaaagcaccacagactggaagcagatccgctccatcatcatgcgggagaacttcatccccaccatcgtcaacttctctgcagaggagatcagtgacgccataagggagaagatgaagaaaaattacatgtccaatccaagttacaattatgaaattgtgaatcgggcttccctggcttgcggccctatggtgaaatgggcaattgcacagcttaactatgcagacatgttaaagagagtggagcccctacgcaatgagctgcagaagctggaagatgacgccaaggacaaccagcagaaggccaacgaggtggagcagatgatccgagacctggaagccagcatcgcccgctacaaggaggaatacgccgtcctgatctcagaggcccaggccatcaaggcagacctggcagctgtcgaggcaaaagtaaaccggagcactgctcttctgaagagcttgtctgctgaacgtgaacgatgggaaaaaacaagtgaaactttcaaaaaccagatgtccaccattgctggggactgtctcttgtcagctgcgttcattgcctacgcgggttactttgaccagcagatgcgtcagaacttgttcactacctggtcccatcacctacagcaagccaacatccagttccgtacagatattgccaggacggaatacctttccaatgctgatgagcgtcttcgctggcaggccagctccttgcctgctgatgacctttgcacagaaaatgccatcatgctgaaacgattcaataggtatccgctgatcattgacccctctggacaggccacagaattcattatgaatgaatataaggatcgtaagatcacacggaccagcttcctggatgacgccttcagaaagaacttagagagtgcactgagattcggtaacccccttctggtccaggatgtggaaagctacgatccagttttgaacccggtgctgaaccgtgaagtgcggcgaacaggggggagagtgctgatcactctcggggaccaggacatagacctgtcgccatcgtttgtcatcttcctgtccacccgggatccaactgtcgagttcccaccagatctctgttcccgggttacttttgtaaacttcacagttacccgtagcagtttacaaagccagtgtctaaatgaagtacttaaagcagaaagacctgatgtggacgagaaacgatctgatcttcttaaacttcaaggggaatttcagctccgtttgcgtcagctggaaaaatctctactacaagctctgaacgaggtgaaagggcgcattttggatgacgacacgatcataaccactctggagaacctgaagagagaggctgcagaggtcaccaggaaagttgaggagacggacattgtcatgcaggaggtggagaccgtgtcccagcagtacctcccgctctccaccgcctgcagcagcatctacttcaccatggagtccctcaagcagatacacttcttgtaccagtactccctccagtttttcctggacatttatcacaacgtcctatacgagaacccgaacctgaagggtgtcaccgaccacacacagcgcctgtccattataacaaaggacctcttccaggtggcgtttaaccgagtggctcgaggcatgctgcatcaggaccacattacctttgccatgctgctggcaagaatcaaactgaagggcaccgtgggggagcccacctacgatgcagaattccagcacttcttgagaggaaatgagattgtcctgagtgctggctccacccccaggatccagggcctgactgtggagcaggcggaggcggtggtgaggctgagctgccttcccgcgtttaaggacttgattgcaaaggttcaggcagacgagcaatttggcatctggctggacagcagctccccggagcagactgtgccctacctctggagtgaagaaacacctgcaacacccattggccaggccatccaccgcctgctcctgatccaggctttccggcccgatcgcctgttggccatggcccacatgtttgtttcaacaaaccttggggagtctttcatgtccatcatggagcagccgctcgacctgacccacattgtgggcacagaggtgaagcccaacactcctgtcttaatgtgctctgtgcctggttatgatgccagtggacatgtcgaggaccttgcagccgagcagaacacgcagatcacttcaattgcaatcggctctgcagaaggctttaaccaagcagataaggcaataaacaccgctgtaaagtcgggcaggtgggtgatgctgaagaatgtgcatctggccccagggtggctgatgcagctggagaagaagttgcattccctgcagccgcatgcctgcttccgactcttcctcaccatggagatcaaccccaaggtgcctgtgaatctgctccgtgcgggccgcatctttgtgttcgagccaccgccaggggtgaaggccaacatgctgaggacgttcagcagcattcccgtctcacggatatgcaagtctcccaacgagcgtgcccgcttgtacttcctgctggcctggtttcatgcgatcatccaagaacgcttacgatacgcaccactggggtggtcaaagaagtatgaatttggagagtctgacctgcggtcagcttgcgatacggtggacacgtggctggatgacacggccaagggcaggcagaacatctcaccggataagatcccgtggtctgcactaaagaccttaatggcccagtccatttatggcgggcgcgtggacaacgagtttgaccagcgtctgctcaacaccttcctggagcgcctgttcacaaccaggagtttcgacagtgagtttaagctggcatgcaaggtcgacggacataaagacattcaaatgccagatggcatcaggcgagaggagtttgtgcagtgggtggagttgctccccgacacccagacgccctcctggctgggcctgcccaacaacgccgagagagtcctccttaccacacagggtgtggacatgatcagtaaaatgctgaagatgcagatgttggaggatgaggacgacctggcctacgcagagactgagaagaagacgaggacagactccacgtccgacgggcgccctgcctggatgcggacactgcacaccaccgcgtccaactggctgcacctcatcccccagacgctgagccacctcaagcgcaccgtggagaatatcaaggatcctttgttcaggttctttgagagagaagtgaagatgggcgcaaagctgcttcaggacgttcgccaggaccttgcagatgtcgtccaggtgtgcgaaggaaagaagaagcagaccaactacttgcgcacgctgatcaacgagctagtgaaagggatcttgcctcggagctggtcccactacacggtgcctgccggcatgaccgtcatccagtgggtgtccgacttcagcgagaggatcaaacagctgcagaacatctcactggcagctgcatctggtggcgccaaggagctaaagaacatccacgtgtgcctgggtggcctgttcgtgcctgaggcgtacatcactgccaccaggcagtatgtggcccaggccaacagctggtccctggaggagctctgcctggaagtcaacgtcaccacctcacagggcgccacccttgacgcttgcagcttcggagtcacgggtttgaaacttcaaggggccacgtgcaacaacaacaagctgtcactgtccaatgccatctcaaccgcccttcccctgacgcagctgcgctgggtcaagcagacaaacaccgagaagaaggccagtgtggtaaccttacctgtctacctgaacttcacccgtgcagacctcatcttcaccgtggacttcgaaattgctacaaaggaggatcctcgcagcttctgatcctcctttgtaggcacgaggcctcgtccagggcagcagagctttgggttctaggtggcttttcagcttgacaagtaatgaagctccatttcaggacttcatcgattccgaaacaagcacagccccccaccccccgccacggaactctactaattattattcacttataatttagctaatttaaaagtacggtaattcagaattgctttgcaactatttttaaaagccctttatttgaaggcccattatttcagaatttgngaaattcacaatttaggt

SEQ ID NO: 462017 - DNA, 14786 bp, Homo sapiens
  misc_feature (7590)..(7590): n is a, c, g, or t
ttcaatgagagaacatttaatgagaggttaaggggcttagaacaacgccgggcacaggctaagcgctcactaaacgttagctctcgccaataacatcactgattcactataaagtttctctggctgtgtgctattcgctgcgtccacagcagtgaagaagacagacgcagcccctgaccaacctcgccaagcccgggcgccgagccaggacgttgagccaagtccccatctcctaggactcgcagtgcggaggctgcgggccccgaccagcgccgagactacaagtcccagaagggcgcgcggcgacatcgccgggcccgccccccgcgcacgcgcggcgccgtgacgctaaggccgcgagcgagcgcgggtggctgcggcggctgcggccggcggggcggggcggggccacctggcagtggctgcctttagggcggagccggctcccgctctcctcagtctgcggtgggctagcggacggtccggcttccggcggccgtttctgtctcttgctggctgtctcgctgagtcgcggccgccttctcatcgctcctggaaggtcccgagcgcgacaccatgtcggagcccgggggcggcggcggcgaggacggctcggccggattggaagtgtcggccgtgcagaatgtggcggacgtgtcggtgctgcagaagcacctgcgcaagctggtgccgctgctgctggaggacggcggcgaggcgccggccgcgctggaggcggcgctggaggagaagagcgccctggagcagatgcgcaagttcctttcggacccgcaggtccacacggtgctggtggagcgctccacgctcaaagaggacgtcggtgatgaaggagaagaagaaaaagaattcatttcctataacatcaacatagacattcattatggggttaaatccaatagcttggcattcattaaacgtactcccgtgattgatgcagataaacccgtgtcttctcagctccgggtccttacactcagtgaagactcgccctacgaaactttgcattctttcattagcaatgcagtggctcctttttttaagtcctacattagagagtctggcaaggcagacagggatggtgataaaatggctccttcagttgaaaagaagattgcagaactcgaaatgggactccttcacttgcagcaaaatattgaaattccggagatcagcctgccgattcatccaatgatcacaaatgttgcaaaacagtgttatgagcgtggagaaaagccaaaagttacagactttggtgataaggttgaagacccaacatttcttaatcagttacaatctggagttaaccgctggatccgagaaattcaaaaagtgaccaaactggatcgagatcctgcatcaggaactgccttacaggaaattagtttttggctaaacttggaacgtgcgttataccgcatccaggagaaacgggagagcccggaagttctcctgactctggatatcttgaaacatggcaagcgcttccatgccaccgtcagttttgacactgacacaggtctaaaacaggctttggaaactgtgaatgactacaatcctctgatgaaagatttccctctgaatgatttgctgtctgccacggagctggacaaaataagacaggcgcttgttgccattttcacacatttgagaaagatccgaaacacaaaatatcctattcagagggcactgcgtttggtggaggcaatttcaagagacttgagttctcaattactcaaagtattgggcactaggaaattgatgcatgttgcttatgaagaatttgaaaaagttatggtagcatgctttgaagtttttcagacttgggatgatgagtatgagaaacttcaggtattgttgagagacatcgtcaaaagaaaaagggaagaaaatctgaagatggtgtggcgtatcaaccctgcccacaggaagctgcaggcccgccttgaccagatgagaaaatttagacgccagcatgaacagctaagagctgttatcgtcagggtcctgaggccacaggtcacggcagttgcacaacagaatcaaggagaggtccctgaaccccaagatatgaaagtggctgaggttctctttgatgctgcagatgcaaatgccattgaggaagtaaaccttgcttatgagaacgtcaaggaagtggatggactggatgtttccaaagagggcacggaagcctgggaggctgctatgaagaggtacgatgagaggatcgacagagtggagacccggatcaccgctcgccttcgggatcagcttggcacagccaagaatgccaacgagatgtttaggattttctccaggtttaatgcactgtttgtcaggcctcacatccgtggggccattcgtgactaccagacccagctgatccagcgcgtgaaagatgacattgagtctcttcacgacaagttcaaggtccagtacccacagagtcaggcttgtaagatgagtcacgttcgtgacttgccccctgtgtcagggtctatcatctgggctaaacagatcgacaggcagctgacggcctacatgaagcgggtggaagatgtccttggcaagggctgggagaatcacgtggaggggcagaagctgaagcaggatggagacagcttccgcatgaagctcaacacgcaggagatctttgatgactgggcaaggaaggtgcagcagcgcaacctcggtgtctcggggcgcattttcaccatcgaaagtactcgggttcggggccgaactggaaatgtgcttaagctgaaagttaactttcttcctgagattatcacactatccaaagaagtccggaacctcaaatggcttggtttccgcgtcccactggcgattgtgaacaaagcccatcaagcaaaccagctttacccgtttgccatctcactgatcgagagcgttcgtacctatgaacggacctgcgagaaggtggaggagcggaacaccatttcccttttggtggctggcttgaaaaaggaagtgcaggccctgatcgcagaaggcattgcgttggtgtgggagtcctacaaacttgacccatatgtacagcgcttagcagagactgtcttcaacttccaagaaaaggtggatgatctgctgatcattgaagaaaaaatagacctagaagtccgttccttggaaacttgtatgtatgaccataagacattctcggaaatcttgaacagagtccagaaagcagtggatgacttaaatctgcactcctattccaatttgcccatctgggtcaacaagcttgacatggagattgaaagaatattgggcgtccgtctgcaagctggcctgagagcttggacgcaggttcttcttggacaagctgaagataaagcagaagttgacatggacacagatgctccacaagttagtcacaagcctggtggagagccaaagatcaaaaatgtcgttcatgagctaagaataaccaatcaggtaatctacttgaatccaccaattgaagagtgcagatacaagctgtatcaggaaatgtttgcctggaagatggttgtactgtctctccccaggatccagagtcagaggtaccaggtgggtgtacattacgaattgactgaggaagagaaattctatcggaatgctttaacacggatgcctgatggccctgttgccctggaagagtcgtattctgctgtcatgggcattgtatctgaagttgaacagtatgtcaaggtttggcttcagtatcagtgtttatgggatatgcaagctgaaaacatctataacagacttggagaagatctcaacaaatggcaggctctcctggtccaaataaggaaggccagaggaacctttgacaatgcagaaaccaagaaagagtttggaccagtagttatagattatggcaaggtacaatctaaggtgaacttgaaatatgactcttggcataaggaggttcttagcaaatttgggcagatgctaggatcaaacatgacggaattccattcccagatctcaaagtcccgccaagagttggagcagcactcagtagacacggccagcacctccgatgcagtgaccttcatcacctatgtgcagtctttgaaacggaagatcaagcagtttgagaagcaagttgagctctaccgcaatggccagcgcttactggaaaagcaaaggttccagttcccaccttcctggctttatattgacaacatcgagggagagtggggagccttcaatgacatcatgcggcgaaaggactctgccattcagcagcaggtggcaaacctgcaaatgaagattgtccaggaggatcgggccgtggaaagccgcaccaccgacctgctgactgactgggagaagaccaagcctgtcacgggcaaccttcgcccagaagaggcacttcaggctctcaccatatatgaggggaagtttggtaggctgaaggacgacagagagaagtgtgcaaaggccaaggaggcgctggaattgacagatactgggcttctcagtggcagtgaagagcgcgtgcaggtggccttagaagaattacaggacctcaaaggcgtttggtcagaactttctaaggtttgggagcaaatcgatcagatgaaggagcaaccctgggtttcagtacagcctcgaaagcttcgacaaaatttggatgccctcctgaaccagctgaaaagcttccctgcccggttgcgacagtatgcgtcctatgagtttgttcagaggcttctgaaaggttacatgaagataaatatgctggtgattgaactgaaatccgaagcacttaaagaccgccattggaaacagctcatgaaaaggcttcacgttaattgggttgtttctgagctaacccttggccaaatctgggatgttgacttgcagaaaaatgaagcgattgtcaaggatgtactgcttgtggcacaaggggagatggctttggaagaatttttgaagcagataagagaagtgtggaatacttatgaactagacttggttaattatcagaacaagtgccgcttgatccgtggctgggatgacctcttcaacaaggtcaaagaacacatcaacagcgtctcggccatgaagctctctccgtattacaaggtttttgaagaggatgctctcagctgggaagataagctgaacaggatcatggctctctttgatgtgtggattgatgtgcagaggcggtgggtctacctggaaggtatcttcacaggcagtgcagatatcaagcacctgctgccagtggaaacccagcggtttcagagcatcagcactgagtttttggctctaatgaaaaaagtgtccaagtctccccttgttatggatgttctgaacatccagggagtacagaggtctctggaaagattggcagacctgctaggaaagatccagaaagcattgggagaatatctggaaagagagcggtcatctttccccaggttctattttgtgggtgatgaagatttgcttgaaatcattggaaacagcaagaatgtcgctaaattacagaaacacttcaagaagatgtttgctggagtttcgagcatcatcctgaacgaggataactctgttgttttgggtatttcatctcgggaaggagaggaggttatgtttaaaactcctgtgtcaattactgaacatcccaaaatcaatgagtggctcacattggtagaaaaggagatgagagtcaccctggccaaactgcttgctgagtctgttacggaagttgagatttttggtaaagcaacttcaattgacccaaatacctacatcacttggattgataaataccaggcccagcttgtggttttgtcagcccagatagcctggtctgagaacgtggagaccgcactgagcagcatgggcggaggtggagatgccgcgcccttgcactctgtgctgagcaatgtggaggtcaccctcaatgtgttagcagactctgtcctcatggagcagcccccactccgaaggcggaagctagaacacttgattacagagttggttcaccagagagatgttacaaggtccttgatcaaaagcaagattgacaacgccaaatcttttgaatggctcagccagatgcgattttactttgaccctaagcaaactgatgtgttacagcagttgtcaattcaaatggcaaatgccaaatttaactatggctttgagtacctgggtgttcaggacaaactggtccagacccccctcactgaccgctgctatttgacaatgacacaagccttggaggccaggctggggggttccccatttggacctgctggaactgggaaaacagagtctgtcaaagctcttggccatcagcttggacggtttgttttagttttcaactgtgatgaaacctttgatttccaggcaatgggccggatctttgtgggcctttgccaggtgggtgcctggggctgctttgacgagttcaaccgcctggaggagcggatgctctcggctgtgtcccagcaggtgcagtgcatacaggaagcactgcgtgaacattccaaccccaactacgacaagacctctgcccccattacttgtgagctgctgaacaaacaagtcaaggtgagcccggacatggccatcttcatcaccatgaaccctggctacgcgggccggtctaaccttcctgacaacttgaagaagctgttccggagcttggccatgaccaagcccgaccggcagttaatcgcccaggtcatgctgtactcacagggtttccgcactgctgaagtgcttgccaacaaaatcgtcccgttttttaaactatgcgatgagcagctctcttcccaaagccattatgacttcggtcttcgggctttgaagagtgtgctggtgagtgcaggcaatgtgaagagagagagaatccagaagataaagagggagaaagaggaacgaggggaagcagttgatgaaggagaaattgctgaaaatctccctgaacaagagattctgatacagagcgtctgtgagacgatggtgccaaagctggtggcagaggacatcccgctgctcttcagcctcctgtcggacgtgttccctggagtccagtatcacaggggtgagatgactgcccttcgagaggagctgaagaaagtgtgtcaggagatgtatttgacatatggagatggagaagaagttggtggaatgtgggttgaaaaggttctccagctctatcagatcacccagatcaatcatggcctgatgatggtggggccctcgggaagtgggaagagcatggcctggcgtgtcctgctgaaggcattggagagactcgagggtgtggaaggtgtggcccatatcatcgaccccaaggccatcagcaaagaccacctctacggaaccctggaccccaacaccagggaatggacagatgggctcttcacacacgtgctgagaaagatcatcgacagcgtgagaggcgagctgcagaagcgccagtggatcgtcttcgatggcgatgtggatccagagtgggttgagaacttgaactcagtgctggatgacaataagctcctaactttgcccaatggagagcgcctcagtcttccacccaangtgagaataatgtttgaggtacaggacttgaaatacgcgaccttggccacagtgtcgcgctgcggcatggtctggttcagtgaggatgtgctgagcaccgacatgatcttcaacaacttcctggccaggctgcgcagcatcccgctggatgaaggggaggatgaggcacagcggcggcgtaagggcaaagaggatgagggggaggaggccgcttcccccatgctgcagatccaaagagatgcagctacgatcatgcaaccgtacttcacgtccaacggcctggtcaccaaggcgctagagcacgccttccagctggagcacatcatggacctaacacgcctgcgctgcctgggctcgctcttctccatgctgcaccaggcctgccgcaacgtggcgcagtataacgccaaccatcccgacttccccatgcagatcgagcagctggagcgctacattcaggtcagggggcatcaggggcttcacagagctcaccactgcgccagaccacaggtctgaggacctctgaaatgctgcacctgtggggatgtgcgctctctcctaggcgaggcagagccttcgttgaggggctaggaaaggtgcagtgggtgtctgtgatgcaagaagactgggaaccactgtctttaggttaactttgctgtaagtgtctttcttttgttgttgaaattttataaaaatcaaagtttaattccctttttaatagcgatatctggtttatgccatactctggtccctgtctggagacagccggctaaaaatgagagcagagctgggtgaatacatcagaagaatcacgaccgtgcctctgcccactgcgcccaacatacccattatcgattatgaggtgtccatcagcggagaatggtctccgtggcaggccaaggtgcctcagattgaagtggagacgcacaaggtggcagcccctgatgtcgtcgtgccaacgctggacacagtccgccacgaagccctcttgtacacttggctggccgaacacaagcccctggtcttgtgtggccctcctgggtctggcaagaccatgacactcttcagcgccctccgggccttgcctgacatggaggtggtgggtctcaacttctccagtgctactactccagagctgcttctgaagacttttgatcactactgcgagtacaggcgcacacctaatggggtggttttggctcctgttcaacttggaaagtggctggtgttgttctgtgatgaaatcaacttgccagatatggataaatatgggacccagagggtcatatccttcatcagacagatggtggagcacggaggcttttaccgtacctcagatcaaacatgggtgaagctggagagaatccagtttgttggggcttgtaatccccccacagaccctggaagaaagcccctctcacacaggttcctgcgccacgtgcctgtcgtgtatgtggattacccgggccccgcctccctcacacagatctacggcaccttcaaccgcgccatgctgaggctcattccatccctgcggacgtatgcagagccgctcactgctgccatggtggagttctacaccatgtctcaggagagattcacccaggatacacaacctcactatatctattcaccccgtgaaatgactaggtgggtgagaggcatctttgaagcgctgagacctctggagaccctgcctgttgaaggcctcattcggatttgggcacatgaagctctgcgtctcttccaagatagactcgtagaggatgaggagaggcgttggactgatgagaacatcgacacggttgctctgaagcacttccctaacatcgacagagagaaggcaatgagccgacccatcttgtacagcaactggctgtcaaaggattacatcccagtagaccaagaagagttaagagattatgtcaaagctaggctgaaggtcttttatgaagaagaacttgatgttccgctggtgctgtttaatgaagtcctagaccacgtgctgaggattgacagaatattccgtcaacctcaaggccacttgcttctgattggtgttagtggagcaggaaaaactaccctgtctcgtttcgtcgcctggatgaacggtttgagtgtgtaccagattaaggtccataggaagtacacaggggaagactttgatgaagatctacggacagtgttgagacgttctggctgtaaaaatgaaaagatagcatttataatggatgaatctaatgtgttagattctggattcctggagcgaatgaatacccttctggccaatggagaggtgcctggtctctttgaaggagacgagtatgccaccttgatgacgcagtgcaaagagggggcacagaaggaaggcctgatgctggactcgcacgaggagctctacaagtggttcactagccaggttatccgcaacctccacgtcgtgttcaccatgaacccgtcctcggagggactcaaggaccgggcagctacatcaccagcacttttcaacaggtgtgtgttgaattggtttggagactggtccaccgaagcactgtatcaggttggcaaagaattcacaagtaagatggatctggagaagccaaattacatcgtgcctgattacatgccagttgtgtatgataagctgccgcagccaccatcccatcgggaagccattgtgaacagctgtgtgtttgttcatcagactcttcaccaggcgaatgctcggctagcaaagcgaggcggcagaacgatggccatcacccctcgccactacctggacttcatcaatcactatgccaacctgttccacgagaagcggagcgagctggaggagcagcagatgcacttgaacgtggggctcaggaagatcaaagagacagtcgaccaggtagaagaactgcgtcgtgacttgaggataaagagccaagagctggaggtgaagaatgcagcagccaatgacaagctgaaaaagatggtgaaagaccagcaggaggctgaaaagaagaaggttatgagccaagaaatccaggaacagctgcataagcagcaggaggtaattgcagacaaacagatgagtgtcaaagaagatcttgataaggtggaacctgccgtcattgaggcccagaatgctgtgaagtcgatcaagaagcagcacctggtggaggtgaggtccatggccaaccctcctgctgctgtgaagctggcgctggagtccatctgcctgctgctgggggaaagcaccacagactggaagcagatccgctccatcatcatgcgggagaacttcatccccaccatcgtcaacttctctgcagaggagatcagtgacgccataagggagaagatgaagaaaaattacatgtccaatccaagttacaattatgaaattgtgaatcgggcttccctggcttgcggccctatggtgaaatgggcaattgcacagcttaactatgcagacatgttaaagagagtggagcccctacgcaatgagctgcagaagctggaagatgacgccaaggacaaccagcagaaggccaacgaggtggagcagatgatccgagacctggaagccagcatcgcccgctacaaggaggaatacgccgtcctgatctcagaggcccaggccatcaaggcagacctggcagctgtcgaggcaaaagtaaaccggagcactgctcttctgaagagcttgtctgctgaacgtgaacgatgggaaaaaacaagtgaaactttcaaaaaccagatgtccaccattgctggggactgtctcttgtcagctgcgttcattgcctacgcgggttactttgaccagcagatgcgtcagaacttgttcactacctggtcccatcacctacagcaagccaacatccagttccgtacagatattgccaggacggaatacctttccaatgctgatgagcgtcttcgctggcaggccagctccttgcctgctgatgacctttgcacagaaaatgccatcatgctgaaacgattcaataggtatccgctgatcattgacccctctggacaggccacagaattcattatgaatgaatataaggatcgtaagatcacacggaccagcttcctggatgacgccttcagaaagaacttagagagtgcactgagattcggtaacccccttctggtccaggatgtggaaagctacgatccagttttgaacccggtgctgaaccgtgaagtgcggcgaacaggggggagagtgctgatcactctcggggaccaggacatagacctgtcgccatcgtttgtcatcttcctgtccacccgggatccaactgtcgagttcccaccagatctctgttcccgggttacttttgtaaacttcacagttacccgtagcagtttacaaagccagtgtctaaatgaagtacttaaagcagaaagacctgatgtggacgagaaacgatctgatcttcttaaacttcaaggggaatttcagctccgtttgcgtcagctggaaaaatctctactacaagctctgaacgaggtgaaagggcgcattttggatgacgacacgatcataaccactctggagaacctgaagagagaggctgcagaggtcaccaggaaagttgaggagacggacattgtcatgcaggaggtggagaccgtgtcccagcagtacctcccgctctccaccgcctgcagcagcatctacttcaccatggagtccctcaagcagatacacttcttgtaccagtactccctccagtttttcctggacatttatcacaacgtcctatacgagaacccgaacctgaagggtgtcaccgaccacacacagcgcctgtccattataacaaaggacctcttccaggtggcgtttaaccgagtggctcgaggcatgctgcatcaggaccacattacctttgccatgctgctggcaagaatcaaactgaagggcaccgtgggggagcccacctacgatgcagaattccagcacttcttgagaggaaatgagattgtcctgagtgctggctccacccccaggatccagggcctgactgtggagcaggcggaggcggtggtgaggctgagctgccttcccgcgtttaaggacttgattgcaaaggttcaggcagacgagcaatttggcatctggctggacagcagctccccggagcagactgtgccctacctctggagtgaagaaacacctgcaacacccattggccaggccatccaccgcctgctcctgatccaggctttccggcccgatcgcctgttggccatggcccacatgtttgtttcaacaaaccttggggagtctttcatgtccatcatggagcagccgctcgacctgacccacattgtgggcacagaggtgaagcccaacactcctgtcttaatgtgctctgtgcctggttatgatgccagtggacatgtcgaggaccttgcagccgagcagaacacgcagatcacttcaattgcaatcggctctgcagaaggctttaaccaagcagataaggcaataaacaccgctgtaaagtcgggcaggtgggtgatgctgaagaatgtgcatctggccccagggtggctgatgcagctggagaagaagttgcattccctgcagccgcatgcctgcttccgactcttcctcaccatggagatcaaccccaaggtgcctgtgaatctgctccgtgcgggccgcatctttgtgttcgagccaccgccaggggtgaaggccaacatgctgaggacgttcagcagcattcccgtctcacggatatgcaagtctcccaacgagcgtgcccgcttgtacttcctgctggcctggtttcatgcgatcatccaagaacgcttacgatacgcaccactggggtggtcaaagaagtatgaatttggagagtctgacctgcggtcagcttgcgatacggtggacacgtggctggatgacacggccaagggcaggcagaacatctcaccggataagatcccgtggtctgcactaaagaccttaatggcccagtccatttatggcgggcgcgtggacaacgagtttgaccagcgtctgctcaacaccttcctggagcgcctgttcacaaccaggagtttcgacagtgagtttaagctggcatgcaaggtcgacggacataaagacattcaaatgccagatggcatcaggcgagaggagtttgtgcagtgggtggagttgctccccgacacccagacgccctcctggctgggcctgcccaacaacgccgagagagtcctccttaccacacagggtgtggacatgatcagtaaaatgctgaagatgcagatgttggaggatgaggacgacctggcctacgcagagactgagaagaagacgaggacagactccacgtccgacgggcgccctgcctggatgcggacactgcacaccaccgcgtccaactggctgcacctcatcccccagacgctgagccacctcaagcgcaccgtggagaatatcaaggatcctttgttcaggttctttgagagagaagtgaagatgggcgcaaagctgcttcaggacgttcgccaggaccttgcagatgtcgtccaggtgtgcgaaggaaagaagaagcagaccaactacttgcgcacgctgatcaacgagctagtgaaagggatcttgcctcggagctggtcccactacacggtgcctgccggcatgaccgtcatccagtgggtgtccgacttcagcgagaggatcaaacagctgcagaacatctcactggcagctgcatctggtggcgccaaggagctaaagaacatccacgtgtgcctgggtggcctgttcgtgcctgaggcgtacatcactgccaccaggcagtatgtggcccaggccaacagctggtccctggaggagctctgcctggaagtcaacgtcaccacctcacagggcgccacccttgacgcttgcagcttcggagtcacggacgagcggggtgtcgcagtcttgtgcacagagtaaacttttctagctgcccctttctgtaatagtgaaagttggtatttaacatttattcatttttaaaatatttggaaggtctgagcttgtgaaaagaaagtggttggtctgaggttggaggaagctgaatggaatctgacggttgggagtggtggaaattggaaggataccaggaggtatttgggaaggccaatggcgtggctcctttgaggaaataaaacactaagcatga

SEQ ID NO: 462018 - DNA, 13340 bp, Homo sapiens
  misc_feature (7590)..(7590): n is a, c, g, or t
ttcaatgagagaacatttaatgagaggttaaggggcttagaacaacgccgggcacaggctaagcgctcactaaacgttagctctcgccaataacatcactgattcactataaagtttctctggctgtgtgctattcgctgcgtccacagcagtgaagaagacagacgcagcccctgaccaacctcgccaagcccgggcgccgagccaggacgttgagccaagtccccatctcctaggactcgcagtgcggaggctgcgggccccgaccagcgccgagactacaagtcccagaagggcgcgcggcgacatcgccgggcccgccccccgcgcacgcgcggcgccgtgacgctaaggccgcgagcgagcgcgggtggctgcggcggctgcggccggcggggcggggcggggccacctggcagtggctgcctttagggcggagccggctcccgctctcctcagtctgcggtgggctagcggacggtccggcttccggcggccgtttctgtctcttgctggctgtctcgctgagtcgcggccgccttctcatcgctcctggaaggtcccgagcgcgacaccatgtcggagcccgggggcggcggcggcgaggacggctcggccggattggaagtgtcggccgtgcagaatgtggcggacgtgtcggtgctgcagaagcacctgcgcaagctggtgccgctgctgctggaggacggcggcgaggcgccggccgcgctggaggcggcgctggaggagaagagcgccctggagcagatgcgcaagttcctttcggacccgcaggtccacacggtgctggtggagcgctccacgctcaaagaggacgtcggtgatgaaggagaagaagaaaaagaattcatttcctataacatcaacatagacattcattatggggttaaatccaatagcttggcattcattaaacgtactcccgtgattgatgcagataaacccgtgtcttctcagctccgggtccttacactcagtgaagactcgccctacgaaactttgcattctttcattagcaatgcagtggctcctttttttaagtcctacattagagagtctggcaaggcagacagggatggtgataaaatggctccttcagttgaaaagaagattgcagaactcgaaatgggactccttcacttgcagcaaaatattgaaattccggagatcagcctgccgattcatccaatgatcacaaatgttgcaaaacagtgttatgagcgtggagaaaagccaaaagttacagactttggtgataaggttgaagacccaacatttcttaatcagttacaatctggagttaaccgctggatccgagaaattcaaaaagtgaccaaactggatcgagatcctgcatcaggaactgccttacaggaaattagtttttggctaaacttggaacgtgcgttataccgcatccaggagaaacgggagagcccggaagttctcctgactctggatatcttgaaacatggcaagcgcttccatgccaccgtcagttttgacactgacacaggtctaaaacaggctttggaaactgtgaatgactacaatcctctgatgaaagatttccctctgaatgatttgctgtctgccacggagctggacaaaataagacaggcgcttgttgccattttcacacatttgagaaagatccgaaacacaaaatatcctattcagagggcactgcgtttggtggaggcaatttcaagagacttgagttctcaattactcaaagtattgggcactaggaaattgatgcatgttgcttatgaagaatttgaaaaagttatggtagcatgctttgaagtttttcagacttgggatgatgagtatgagaaacttcaggtattgttgagagacatcgtcaaaagaaaaagggaagaaaatctgaagatggtgtggcgtatcaaccctgcccacaggaagctgcaggcccgccttgaccagatgagaaaatttagacgccagcatgaacagctaagagctgttatcgtcagggtcctgaggccacaggtcacggcagttgcacaacagaatcaaggagaggtccctgaaccccaagatatgaaagtggctgaggttctctttgatgctgcagatgcaaatgccattgaggaagtaaaccttgcttatgagaacgtcaaggaagtggatggactggatgtttccaaagagggcacggaagcctgggaggctgctatgaagaggtacgatgagaggatcgacagagtggagacccggatcaccgctcgccttcgggatcagcttggcacagccaagaatgccaacgagatgtttaggattttctccaggtttaatgcactgtttgtcaggcctcacatccgtggggccattcgtgactaccagacccagctgatccagcgcgtgaaagatgacattgagtctcttcacgacaagttcaaggtccagtacccacagagtcaggcttgtaagatgagtcacgttcgtgacttgccccctgtgtcagggtctatcatctgggctaaacagatcgacaggcagctgacggcctacatgaagcgggtggaagatgtccttggcaagggctgggagaatcacgtggaggggcagaagctgaagcaggatggagacagcttccgcatgaagctcaacacgcaggagatctttgatgactgggcaaggaaggtgcagcagcgcaacctcggtgtctcggggcgcattttcaccatcgaaagtactcgggttcggggccgaactggaaatgtgcttaagctgaaagttaactttcttcctgagattatcacactatccaaagaagtccggaacctcaaatggcttggtttccgcgtcccactggcgattgtgaacaaagcccatcaagcaaaccagctttacccgtttgccatctcactgatcgagagcgttcgtacctatgaacggacctgcgagaaggtggaggagcggaacaccatttcccttttggtggctggcttgaaaaaggaagtgcaggccctgatcgcagaaggcattgcgttggtgtgggagtcctacaaacttgacccatatgtacagcgcttagcagagactgtcttcaacttccaagaaaaggtggatgatctgctgatcattgaagaaaaaatagacctagaagtccgttccttggaaacttgtatgtatgaccataagacattctcggaaatcttgaacagagtccagaaagcagtggatgacttaaatctgcactcctattccaatttgcccatctgggtcaacaagcttgacatggagattgaaagaatattgggcgtccgtctgcaagctggcctgagagcttggacgcaggttcttcttggacaagctgaagataaagcagaagttgacatggacacagatgctccacaagttagtcacaagcctggtggagagccaaagatcaaaaatgtcgttcatgagctaagaataaccaatcaggtaatctacttgaatccaccaattgaagagtgcagatacaagctgtatcaggaaatgtttgcctggaagatggttgtactgtctctccccaggatccagagtcagaggtaccaggtgggtgtacattacgaattgactgaggaagagaaattctatcggaatgctttaacacggatgcctgatggccctgttgccctggaagagtcgtattctgctgtcatgggcattgtatctgaagttgaacagtatgtcaaggtttggcttcagtatcagtgtttatgggatatgcaagctgaaaacatctataacagacttggagaagatctcaacaaatggcaggctctcctggtccaaataaggaaggccagaggaacctttgacaatgcagaaaccaagaaagagtttggaccagtagttatagattatggcaaggtacaatctaaggtgaacttgaaatatgactcttggcataaggaggttcttagcaaatttgggcagatgctaggatcaaacatgacggaattccattcccagatctcaaagtcccgccaagagttggagcagcactcagtagacacggccagcacctccgatgcagtgaccttcatcacctatgtgcagtctttgaaacggaagatcaagcagtttgagaagcaagttgagctctaccgcaatggccagcgcttactggaaaagcaaaggttccagttcccaccttcctggctttatattgacaacatcgagggagagtggggagccttcaatgacatcatgcggcgaaaggactctgccattcagcagcaggtggcaaacctgcaaatgaagattgtccaggaggatcgggccgtggaaagccgcaccaccgacctgctgactgactgggagaagaccaagcctgtcacgggcaaccttcgcccagaagaggcacttcaggctctcaccatatatgaggggaagtttggtaggctgaaggacgacagagagaagtgtgcaaaggccaaggaggcgctggaattgacagatactgggcttctcagtggcagtgaagagcgcgtgcaggtggccttagaagaattacaggacctcaaaggcgtttggtcagaactttctaaggtttgggagcaaatcgatcagatgaaggagcaaccctgggtttcagtacagcctcgaaagcttcgacaaaatttggatgccctcctgaaccagctgaaaagcttccctgcccggttgcgacagtatgcgtcctatgagtttgttcagaggcttctgaaaggttacatgaagataaatatgctggtgattgaactgaaatccgaagcacttaaagaccgccattggaaacagctcatgaaaaggcttcacgttaattgggttgtttctgagctaacccttggccaaatctgggatgttgacttgcagaaaaatgaagcgattgtcaaggatgtactgcttgtggcacaaggggagatggctttggaagaatttttgaagcagataagagaagtgtggaatacttatgaactagacttggttaattatcagaacaagtgccgcttgatccgtggctgggatgacctcttcaacaaggtcaaagaacacatcaacagcgtctcggccatgaagctctctccgtattacaaggtttttgaagaggatgctctcagctgggaagataagctgaacaggatcatggctctctttgatgtgtggattgatgtgcagaggcggtgggtctacctggaaggtatcttcacaggcagtgcagatatcaagcacctgctgccagtggaaacccagcggtttcagagcatcagcactgagtttttggctctaatgaaaaaagtgtccaagtctccccttgttatggatgttctgaacatccagggagtacagaggtctctggaaagattggcagacctgctaggaaagatccagaaagcattgggagaatatctggaaagagagcggtcatctttccccaggttctattttgtgggtgatgaagatttgcttgaaatcattggaaacagcaagaatgtcgctaaattacagaaacacttcaagaagatgtttgctggagtttcgagcatcatcctgaacgaggataactctgttgttttgggtatttcatctcgggaaggagaggaggttatgtttaaaactcctgtgtcaattactgaacatcccaaaatcaatgagtggctcacattggtagaaaaggagatgagagtcaccctggccaaactgcttgctgagtctgttacggaagttgagatttttggtaaagcaacttcaattgacccaaatacctacatcacttggattgataaataccaggcccagcttgtggttttgtcagcccagatagcctggtctgagaacgtggagaccgcactgagcagcatgggcggaggtggagatgccgcgcccttgcactctgtgctgagcaatgtggaggtcaccctcaatgtgttagcagactctgtcctcatggagcagcccccactccgaaggcggaagctagaacacttgattacagagttggttcaccagagagatgttacaaggtccttgatcaaaagcaagattgacaacgccaaatcttttgaatggctcagccagatgcgattttactttgaccctaagcaaactgatgtgttacagcagttgtcaattcaaatggcaaatgccaaatttaactatggctttgagtacctgggtgttcaggacaaactggtccagacccccctcactgaccgctgctatttgacaatgacacaagccttggaggccaggctggggggttccccatttggacctgctggaactgggaaaacagagtctgtcaaagctcttggccatcagcttggacggtttgttttagttttcaactgtgatgaaacctttgatttccaggcaatgggccggatctttgtgggcctttgccaggtgggtgcctggggctgctttgacgagttcaaccgcctggaggagcggatgctctcggctgtgtcccagcaggtgcagtgcatacaggaagcactgcgtgaacattccaaccccaactacgacaagacctctgcccccattacttgtgagctgctgaacaaacaagtcaaggtgagcccggacatggccatcttcatcaccatgaaccctggctacgcgggccggtctaaccttcctgacaacttgaagaagctgttccggagcttggccatgaccaagcccgaccggcagttaatcgcccaggtcatgctgtactcacagggtttccgcactgctgaagtgcttgccaacaaaatcgtcccgttttttaaactatgcgatgagcagctctcttcccaaagccattatgacttcggtcttcgggctttgaagagtgtgctggtgagtgcaggcaatgtgaagagagagagaatccagaagataaagagggagaaagaggaacgaggggaagcagttgatgaaggagaaattgctgaaaatctccctgaacaagagattctgatacagagcgtctgtgagacgatggtgccaaagctggtggcagaggacatcccgctgctcttcagcctcctgtcggacgtgttccctggagtccagtatcacaggggtgagatgactgcccttcgagaggagctgaagaaagtgtgtcaggagatgtatttgacatatggagatggagaagaagttggtggaatgtgggttgaaaaggttctccagctctatcagatcacccagatcaatcatggcctgatgatggtggggccctcgggaagtgggaagagcatggcctggcgtgtcctgctgaaggcattggagagactcgagggtgtggaaggtgtggcccatatcatcgaccccaaggccatcagcaaagaccacctctacggaaccctggaccccaacaccagggaatggacagatgggctcttcacacacgtgctgagaaagatcatcgacagcgtgagaggcgagctgcagaagcgccagtggatcgtcttcgatggcgatgtggatccagagtgggttgagaacttgaactcagtgctggatgacaataagctcctaactttgcccaatggagagcgcctcagtcttccacccaangtgagaataatgtttgaggtacaggacttgaaatacgcgaccttggccacagtgtcgcgctgcggcatggtctggttcagtgaggatgtgctgagcaccgacatgatcttcaacaacttcctggccaggctgcgcagcatcccgctggatgaaggggaggatgaggcacagcggcggcgtaagggcaaagaggatgagggggaggaggccgcttcccccatgctgcagatccaaagagatgcagctacgatcatgcaaccgtacttcacgtccaacggcctggtcaccaaggcgctagagcacgccttccagctggagcacatcatggacctaacacgcctgcgctgcctgggctcgctcttctccatgctgcaccaggcctgccgcaacgtggcgcagtataacgccaaccatcccgacttccccatgcagatcgagcagctggagcgctacattcaggtcagggggcatcaggggcttcacagagctcaccactgcgccagaccacaggtctgaggacctctgaaatgctgcacctgtggggatgtgcgctctctcctaggcgaggcagagccttcgttgaggggctaggaaaggtgcagtgggtgtctgtgatgcaagaagactgggaaccactgtctttaggttaactttgctgtaagtgtctttcttttgttgttgaaattttataaaaatcaaagtttaattccctttttaatagcgatatctggtttatgccatactctggtccctgtctggagacagccggctaaaaatgagagcagagctgggtgaatacatcagaagaatcacgaccgtgcctctgcccactgcgcccaacatacccattatcgattatgaggtgtccatcagcggagaatggtctccgtggcaggccaaggtgcctcagattgaagtggagacgcacaaggtggcagcccctgatgtcgtcgtgccaacgctggacacagtccgccacgaagccctcttgtacacttggctggccgaacacaagcccctggtcttgtgtggccctcctgggtctggcaagaccatgacactcttcagcgccctccgggccttgcctgacatggaggtggtgggtctcaacttctccagtgctactactccagagctgcttctgaagacttttgatcactactgcgagtacaggcgcacacctaatggggtggttttggctcctgttcaacttggaaagtggctggtgttgttctgtgatgaaatcaacttgccagatatggataaatatgggacccagagggtcatatccttcatcagacagatggtggagcacggaggcttttaccgtacctcagatcaaacatgggtgaagctggagagaatccagtttgttggggcttgtaatccccccacagaccctggaagaaagcccctctcacacaggttcctgcgccacgtgcctgtcgtgtatgtggattacccgggccccgcctccctcacacagatctacggcaccttcaaccgcgccatgctgaggctcattccatccctgcggacgtatgcagagccgctcactgctgccatggtggagttctacaccatgtctcaggagagattcacccaggatacacaacctcactatatctattcaccccgtgaaatgactaggtgggtgagaggcatctttgaagcgctgagacctctggagaccctgcctgttgaaggcctcattcggatttgggcacatgaagctctgcgtctcttccaagatagactcgtagaggatgaggagaggcgttggactgatgagaacatcgacacggttgctctgaagcacttccctaacatcgacagagagaaggcaatgagccgacccatcttgtacagcaactggctgtcaaaggattacatcccagtagaccaagaagagttaagagattatgtcaaagctaggctgaaggtcttttatgaagaagaacttgatgttccgctggtgctgtttaatgaagtcctagaccacgtgctgaggattgacagaatattccgtcaacctcaaggccacttgcttctgattggtgttagtggagcaggaaaaactaccctgtctcgtttcgtcgcctggatgaacggtttgagtgtgtaccagattaaggtccataggaagtacacaggggaagactttgatgaagatctacggacagtgttgagacgttctggctgtaaaaatgaaaagatagcatttataatggatgaatctaatgtgttagattctggattcctggagcgaatgaatacccttctggccaatggagaggtgcctggtctctttgaaggagacgagtatgccaccttgatgacgcagtgcaaagagggggcacagaaggaaggcctgatgctggactcgcacgaggagctctacaagtggttcactagccaggttatccgcaacctccacgtcgtgttcaccatgaacccgtcctcggagggactcaaggaccgggcagctacatcaccagcacttttcaacaggtgtgtgttgaattggtttggagactggtccaccgaagcactgtatcaggttggcaaagaattcacaagtaagatggatctggagaagccaaattacatcgtgcctgattacatgccagttgtgtatgataagctgccgcagccaccatcccatcgggaagccattgtgaacagctgtgtgtttgttcatcagactcttcaccaggcgaatgctcggctagcaaagcgaggcggcagaacgatggccatcacccctcgccactacctggacttcatcaatcactatgccaacctgttccacgagaagcggagcgagctggaggagcagcagatgcacttgaacgtggggctcaggaagatcaaagagacagtcgaccaggtagaagaactgcgtcgtgacttgaggataaagagccaagagctggaggtgaagaatgcagcagccaatgacaagctgaaaaagatggtgaaagaccagcaggaggctgaaaagaagaaggttatgagccaagaaatccaggaacagctgcataagcagcaggaggtaattgcagacaaacagatgagtgtcaaagaagatcttgataaggtggaacctgccgtcattgaggcccagaatgctgtgaagtcgatcaagaagcagcacctggtggaggtgaggtccatggccaaccctcctgctgctgtgaagctggcgctggagtccatctgcctgctgctgggggaaagcaccacagactggaagcagatccgctccatcatcatgcgggagaacttcatccccaccatcgtcaacttctctgcagaggagatcagtgacgccataagggagaagatgaagaaaaattacatgtccaatccaagttacaattatgaaattgtgaatcgggcttccctggcttgcggccctatggtgaaatgggcaattgcacagcttaactatgcagacatgttaaagagagtggagcccctacgcaatgagctgcagaagctggaagatgacgccaaggacaaccagcagaaggccaacgaggtggagcagatgatccgagacctggaagccagcatcgcccgctacaaggaggaatacgccgtcctgatctcagaggcccaggccatcaaggcagacctggcagctgtcgaggcaaaagtaaaccggagcactgctcttctgaagagcttgtctgctgaacgtgaacgatgggaaaaaacaagtgaaactttcaaaaaccagatgtccaccattgctggggactgtctcttgtcagctgcgttcattgcctacgcgggttactttgaccagcagatgcgtcagaacttgttcactacctggtcccatcacctacagcaagccaacatccagttccgtacagatattgccaggacggaatacctttccaatgctgatgagcgtcttcgctggcaggccagctccttgcctgctgatgacctttgcacagaaaatgccatcatgctgaaacgattcaataggtatccgctgatcattgacccctctggacaggccacagaattcattatgaatgaatataaggatcgtaagatcacacggaccagcttcctggatgacgccttcagaaagaacttagagagtgcactgagattcggtaacccccttctggtccaggttggtgttggcctttgaattcttgaaacactgcattcaagagtgaattcctttttgggggctgcctttagttttcaactttgtaagacttcattttgtatcagaaggataaagctttgcggtggttcggataagatcccgtggtctgcactaaagaccttaatggcccagtccatttatggcgggcgcgtggacaacgagtttgaccagcgtctgctcaacaccttcctggagcgcctgttcacaaccaggagtttcgacagtgagtttaagctggcatgcaaggtcgacggacataaagacattcaaatgccagatggcatcaggcgagaggagtttgtgcagtgggtggagttgctccccgacacccagacgccctcctggctgggcctgcccaacaacgccgagagagtcctccttaccacacagggtgtggacatgatcagtaaaatgctgaagatgcagatgttggaggatgaggacgacctggcctacgcagagactgagaagaagacgaggacagactccacgtccgacgggcgccctgcctggatgcggacactgcacaccaccgcgtccaactggctgcacctcatcccccagacgctgagccacctcaagcgcaccgtggagaatatcaaggatcctttgttcaggttctttgagagagaagtgaagatgggcgcaaagctgcttcaggacgttcgccaggaccttgcagatgtcgtccaggtgtgcgaaggaaagaagaagcagaccaactacttgcgcacgctgatcaacgagctagtgaaagggatcttgcctcggagctggtcccactacacggtgcctgccggcatgaccgtcatccagtgggtgtccgacttcagcgagaggatcaaacagctgcagaacatctcactggcagctgcatctggtggcgccaaggagctaaagaacatccacgtgtgcctgggtggcctgttcgtgcctgaggcgtacatcactgccaccaggcagtatgtggcccaggccaacagctggtccctggaggagctctgcctggaagtcaacgtcaccacctcacagggcgccacccttgacgcttgcagcttcggagtcacgggtttgaaacttcaaggggccacgtgcaacaacaacaagctgtcactgtccaatgccatctcaaccgcccttcccctgacgcagctgcgctgggtcaagcagacaaacaccgagaagaaggccagtgtggtaaccttacctgtctacctgaacttcacccgtgcagacctcatcttcaccgtggacttcgaaattgctacaaaggaggatcctcgcagcttctacgagcggggtgtcgcagtcttgtgcacagagtaaacttttctagctgcccctttctgtaatagtgaaagttggtatttaacatttattcatttttaaaatatttggaaggtctgagcttgtgaaaagaaagtggttggtctgaggttggaggaagctgaatggaatctgacggttgggagtggtggaaattggaaggataccaggaggtatttgggaaggccaatggcgtggctcctttgaggaaataaaacactaagcatga

SEQ ID NO: 462019 - DNA, 5234 bp, Homo sapiens
cactgatgccgcaggctatctagaggatcccgtctcatttataatggatgaatctaatgtgttagattctggattcctggagcgaatgaatacccttctggccaatggagaggtgcctggtctctttgaaggagacgagtatgccaccttgatgacgcagtgcaaagagggggcacagaaggaaggcctgatgctggactcgcacgaggagctctacaagtggttcactagccaggttatccgcaacctccacgtcgtgttcaccatgaacccgtcctcggagggactcaaggaccgggcagctacatcaccagcacttttcaacaggtgtgtgttgaattggtttggagactggtccaccgaagcactgtatcaggttggcaaagaattcacaagtaagatggatctggagaagccaaattacatcgtgcctgattacatgccagttgtgtatgataagctgccgcagccaccatcccatcgggaagccattgtgaacagctgtgtgtttgttcatcagactcttcaccaggcgaatgctcggctagcaaagcgaggcggcagaacgatggccatcacccctcgccactacctggacttcatcaatcactatgccaacctgttccacgagaagcggagcgagctggaggagcagcagatgcacttgaacgtggggctcaggaagatcaaagagacagtcgaccaggtagaagaactgcgtcgtgacttgaggataaagagccaagagctggaggtgaagaatgcagcagccaatgacaagctgaaaaagatggtgaaagaccagcaggaggctgaaaagaagaaggttatgagccaagaaatccaggaacagctgcataagcagcaggaggtaattgcagacaaacagatgagtgtcaaagaagatcttgataaggtggaacctgccgtcattgaggcccagaatgctgtgaagtcgatcaagaagcagcacctggtggaggtgaggtccatggccaaccctcctgctgctgtgaagctggcgctggagtccatctgcctgctgctgggggaaagcaccacagactggaagcagatccgctccatcatcatgcgggagaacttcatccccaccatcgtcaacttctctgcagaggagatcagtgacgccataagggagaagatgaagaaaaattacatgtccaatccaagttacaattatgaaattgtgaatcgggcttccctggcttgcggccctatggtgaaatgggcaattgcacagcttaactatgcagacatgttaaagagagtggagcccctacgcaatgagctgcagaagctggaagatgacgccaaggacaaccagcagaaggccaacgaggtggagcagatgatccgagacctggaagccagcatcgcccgctacaaggaggaatacgccgtcctgatctcagaggcccaggccatcaaggcagacctggcagctgtcgaggcaaaagtaaaccggagcactgctcttctgaagagcttgtctgctgaacgtgaacgatgggaaaaaacaagtgaaactttcaaaaaccagatgtccaccattgctggggactgtctcttgtcagctgcgttcattgcctacgcgggttactttgaccagcagatgcgtcagaacttgttcactacctggtcccatcacctacagcaagccaacatccagttccgtacagatattgccaggacggaatacctttccaatgctgatgagcgtcttcgctggcaggccagctccttgcctgctgatgacctttgcacagaaaatgccatcatgctgaaacgattcaataggtatccgctgatcattgacccctctggacaggccacagaattcattatgaatgaatataaggatcgtaagatcacacggaccagcttcctggatgacgccttcagaaagaacttagagagtgcactgagattcggtaacccccttctggtccaggatgtggaaagctacgatccagttttgaacccggtgctgaaccgtgaagtgcggcgaacaggggggagagtgctgatcactctcggggaccaggacatagacctgtcgccatcgtttgtcatcttcctgtccacccgggatccaactgtcgagttcccaccagatctctgttcccgggttacttttgtaaacttcacagttacccgtagcagtttacaaagccagtgtctaaatgaagtacttaaagcagaaagacctgatgtggacgagaaacgatctgatcttcttaaacttcaaggggaatttcagctccgtttgcgtcagctggaaaaatctctactacaagctctgaacgaggtgaaagggcgcattttggatgacgacacgatcataaccactctggagaacctgaagagagaggctgcagaggtcaccaggaaagttgaggagacggacattgtcatgcaggaggtggagaccgtgtcccagcagtacctcccgctctccaccgcctgcagcagcatctacttcaccatggagtccctcaagcagatacacttcttgtaccagtactccctccagtttttcctggacatttatcacaacgtcctatacgagaacccgaacctgaagggtgtcaccgaccacacacagcgcctgtccattataacaaaggacctcttccaggtggcgtttaaccgagtggctcgaggcatgctgcatcaggaccacattacctttgccatgctgctggcaagaatcaaactgaagggcaccgtgggggagcccacctacgatgcagaattccagcacttcttgagaggaaatgagattgtcctgagtgctggctccacccccaggatccagggcctgactgtggagcaggcggaggcggtggtgaggctgagctgccttcccgcgtttaaggacttgattgcaaaggttcaggcagacgagcaatttggcatctggctggacagcagctccccggagcagactgtgccctacctctggagtgaagaaacacctgcaacacccattggccaggccatccaccgcctgctcctgatccaggctttccggcccgatcgcctgttggccatggcccacatgtttgtttcaacaaaccttggggagtctttcatgtccatcatggagcagccgctcgacctgacccacattgtgggcacagaggtgaagcccaacactcctgtcttaatgtgctctgtgcctggttatgatgccagtggacatgtcgaggaccttgcagccgagcagaacacgcagatcacttcaattgcaatcggctctgcagaaggctttaaccaagcagataaggcaataaacaccgctgtaaagtcgggcaggtgggtgatgctgaagaatgtgcatctggccccagggtggctgatgcagctggagaagaagttgcattccctgcagccgcatgcctgcttccgactcttcctcaccatggagatcaaccccaaggtgcctgtgaatctgctccgtgcgggccgcatctttgtgttcgagccaccgccaggggtgaaggccaacatgctgaggacgttcagcagcattcccgtctcacggatatgcaagtctcccaacgagcgtgcccgcttgtacttcctgctggcctggtttcatgcgatcatccaagaacgcttacgatacgcaccactggggtggtcaaagaagtatgaatttggagagtctgacctgcggtcagcttgcgatacggtggacacgtggctggatgacacggccaagggcaggcagaacatctcaccggataagatcccgtggtctgcactaaagaccttaatggcccagtccatttatggcgggcgcgtggacaacgagtttgaccagcgtctgctcaacaccttcctggagcgcctgttcacaaccaggagtttcgacagtgagtttaagctggcatgcaaggtcgacggacataaagacattcaaatgccagatggcatcaggcgagaggagtttgtgcagtgggtggagttgctccccgacacccagacgccctcctggctgggcctgcccaacaacgccgagagagtcctccttaccacacagggtgtggacatgatcagtaaaatgctgaagatgcagatgttggaggatgaggacgacctggcctacgcagagactgagaagaagacgaggacagactccacgtccgacgggcgccctgcctggatgcggacactgcacaccaccgcgtccaactggctgcacctcatcccccagacgctgagccacctcaagcgcaccgtggagaatatcaaggatcctttgttcaggttctttgagagagaagtgaagatgggcgcaaagctgcttcaggacgttcgccaggaccttgcagatgtcgtccaggtgtgcgaaggaaagaagaagcagaccaactacttgcgcacgctgatcaacgagctagtgaaagggatcttgcctcggagctggtcccactacacggtgcctgccggcatgaccgtcatccagtgggtgtccgacttcagcgagaggatcaaacagctgcagaacatctcactggcagctgcatctggtggcgccaaggagctaaagaacatccacgtgtgcctgggtggcctgttcgtgcctgaggcgtacatcactgccaccaggcagtatgtggcccaggccaacagctggtccctggaggagctctgcctggaagtcaacgtcaccacctcacagggcgccacccttgacgcttgcagcttcggagtcacgggtttgaaacttcaaggggccacgtgcaacaacaacaagctgtcactgtccaatgccatctcaaccgcccttcccctgacgcagctgcgctgggtcaagcagacaaacaccgagaagaaggccagtgtggtaaccttacctgtctacctgaacttcacccgtgcagacctcatcttcaccgtggacttcgaaattgctacaaaggaggatcctcgcagcttctacgagcggggtgtcgcagtcttgtgcacagagtaaacttttctagctgcccctttctgtaatagtgaaagttggtatttaacatttattcatttttaaaatatttggaaggtctgagcttgtgaaaagaaagtggttggtctgaggttggaggaagctgaatggaatctgacggttgggagtggtggaaattggaaggataccaggaggtatttgggaaggccaatggcgtggctcctttgaggaaataaaacactaagcatga

SEQ ID NO: 462020 - DNA, 3354 bp, Homo sapiens
atgcttatccagagtaggacagcaacatagcatttgggtgaagataaagttacaaagccctgaccatcaagttccacccgtgtggaatgcaggatgtggaaagctacgatccagttttgaacccggtgctgaaccgtgaagtgcggcgaacaggggggagagtgctgatcactctcggggaccaggacatagacctgtcgccatcgtttgtcatcttcctgtccacccgggatccaactgtcgagttcccaccagatctctgttcccgggttacttttgtaaacttcacagttacccgtagcagtttacaaagccagtgtctaaatgaagtacttaaagcagaaagacctgatgtggacgagaaacgatctgatcttcttaaacttcaaggggaatttcagctccgtttgcgtcagctggaaaaatctctactacaagctctgaacgaggtgaaagggcgcattttggatgacgacacgatcataaccactctggagaacctgaagagagaggctgcagaggtcaccaggaaagttgaggagacggacattgtcatgcaggaggtggagaccgtgtcccagcagtacctcccgctctccaccgcctgcagcagcatctacttcaccatggagtccctcaagcagatacacttcttgtaccagtactccctccagtttttcctggacatttatcacaacgtcctatacgagaacccgaacctgaagggtgtcaccgaccacacacagcgcctgtccattataacaaaggacctcttccaggtggcgtttaaccgagtggctcgaggcatgctgcatcaggaccacattacctttgccatgctgctggcaagaatcaaactgaagggcaccgtgggggagcccacctacgatgcagaattccagcacttcttgagaggaaatgagattgtcctgagtgctggctccacccccaggatccagggcctgactgtggagcaggcggaggcggtggtgaggctgagctgccttcccgcgtttaaggacttgattgcaaaggttcaggcagacgagcaatttggcatctggctggacagcagctccccggagcagactgtgccctacctctggagtgaagaaacacctgcaacacccattggccaggccatccaccgcctgctcctgatccaggctttccggcccgatcgcctgttggccatggcccacatgtttgtttcaacaaaccttggggagtctttcatgtccatcatggagcagccgctcgacctgacccacattgtgggcacagaggtgaagcccaacactcctgtcttaatgtgctctgtgcctggttatgatgccagtggacatgtcgaggaccttgcagccgagcagaacacgcagatcacttcaattgcaatcggctctgcagaaggctttaaccaagcagataaggcaataaacaccgctgtaaagtcgggcaggtgggtgatgctgaagaatgtgcatctggccccagggtggctgatgcagctggagaagaagttgcattccctgcagccgcatgcctgcttccgactcttcctcaccatggagatcaaccccaaggtgcctgtgaatctgctccgtgcgggccgcatctttgtgttcgagccaccgccaggggtgaaggccaacatgctgaggacgttcagcagcattcccgtctcacggatatgcaagtctcccaacgagcgtgcccgcttgtacttcctgctggcctggtttcatgcgatcatccaagaacgcttacgatacgcaccactggggtggtcaaagaagtatgaatttggagagtctgacctgcggtcagcttgcgatacggtggacacgtggctggatgacacggccaagggcaggcagaacatctcaccggataagatcccgtggtctgcactaaagaccttaatggcccagtccatttatggcgggcgcgtggacaacgagtttgaccagcgtctgctcaacaccttcctggagcgcctgttcacaaccaggagtttcgacagtgagtttaagctggcatgcaaggtcgacggacataaagacattcaaatgccagatggcatcaggcgagaggagtttgtgcagtgggtggagttgctccccgacacccagacgccctcctggctgggcctgcccaacaacgccgagagagtcctccttaccacacagggtgtggacatgatcagtaaaatgctgaagatgcagatgttggaggatgaggacgacctggcctacgcagagactgagaagaagacgaggacagactccacgtccgacgggcgccctgcctggatgcggacactgcacaccaccgcgtccaactggctgcacctcatcccccagacgctgagccacctcaagcgcaccgtggagaatatcaaggatcctttgttcaggttctttgagagagaagtgaagatgggcgcaaagctgcttcaggacgttcgccaggaccttgcagatgtcgtccaggtgtgcgaaggaaagaagaagcagaccaactacttgcgcacgctgatcaacgagctagtgaaagggatcttgcctcggagctggtcccactacacggtgcctgccggcatgaccgtcatccagtgggtgtccgacttcagcgagaggatcaaacagctgcagaacatctcactggcagctgcatctggtggcgccaaggagctaaagaacatccacgtgtgcctgggtggcctgttcgtgcctgaggcgtacatcactgccaccaggcagtatgtggcccaggccaacagctggtccctggaggagctctgcctggaagtcaacgtcaccacctcacagggcgccacccttgacgcttgcagcttcggagtcacgggtttgaaacttcaaggggccacgtgcaacaacaacaagctgtcactgtccaatgccatctcaaccgcccttcccctgacgcagctgcgctgggtcaagcagacaaacaccgagaagaaggccagtgtggtaaccttacctgtctacctgaacttcacccgtgcagacctcatcttcaccgtggacttcgaaattgctacaaaggaggatcctcgcagcttctacgagcggggtgtcgcagtcttgtgcacagagtaaacttttctagctgcccctttctgtaatagtgaaagttggtatttaacatttattcatttttaaaatatttggaaggtctgagcttgtgaaaagaaagtggttggtctgaggttggaggaagctgaatggaatctgacggttgggagtggtggaaattggaaggataccaggaggtatttgggaaggccaatggcgtggctcctttgaggaaataaaacactaagcatga

SEQ ID NO: 462021 - DNA, 13906 bp, Homo sapiens
  misc_feature (7590)..(7590): n is a, c, g, or t
ttcaatgagagaacatttaatgagaggttaaggggcttagaacaacgccgggcacaggctaagcgctcactaaacgttagctctcgccaataacatcactgattcactataaagtttctctggctgtgtgctattcgctgcgtccacagcagtgaagaagacagacgcagcccctgaccaacctcgccaagcccgggcgccgagccaggacgttgagccaagtccccatctcctaggactcgcagtgcggaggctgcgggccccgaccagcgccgagactacaagtcccagaagggcgcgcggcgacatcgccgggcccgccccccgcgcacgcgcggcgccgtgacgctaaggccgcgagcgagcgcgggtggctgcggcggctgcggccggcggggcggggcggggccacctggcagtggctgcctttagggcggagccggctcccgctctcctcagtctgcggtgggctagcggacggtccggcttccggcggccgtttctgtctcttgctggctgtctcgctgagtcgcggccgccttctcatcgctcctggaaggtcccgagcgcgacaccatgtcggagcccgggggcggcggcggcgaggacggctcggccggattggaagtgtcggccgtgcagaatgtggcggacgtgtcggtgctgcagaagcacctgcgcaagctggtgccgctgctgctggaggacggcggcgaggcgccggccgcgctggaggcggcgctggaggagaagagcgccctggagcagatgcgcaagttcctttcggacccgcaggtccacacggtgctggtggagcgctccacgctcaaagaggacgtcggtgatgaaggagaagaagaaaaagaattcatttcctataacatcaacatagacattcattatggggttaaatccaatagcttggcattcattaaacgtactcccgtgattgatgcagataaacccgtgtcttctcagctccgggtccttacactcagtgaagactcgccctacgaaactttgcattctttcattagcaatgcagtggctcctttttttaagtcctacattagagagtctggcaaggcagacagggatggtgataaaatggctccttcagttgaaaagaagattgcagaactcgaaatgggactccttcacttgcagcaaaatattgaaattccggagatcagcctgccgattcatccaatgatcacaaatgttgcaaaacagtgttatgagcgtggagaaaagccaaaagttacagactttggtgataaggttgaagacccaacatttcttaatcagttacaatctggagttaaccgctggatccgagaaattcaaaaagtgaccaaactggatcgagatcctgcatcaggaactgccttacaggaaattagtttttggctaaacttggaacgtgcgttataccgcatccaggagaaacgggagagcccggaagttctcctgactctggatatcttgaaacatggcaagcgcttccatgccaccgtcagttttgacactgacacaggtctaaaacaggctttggaaactgtgaatgactacaatcctctgatgaaagatttccctctgaatgatttgctgtctgccacggagctggacaaaataagacaggcgcttgttgccattttcacacatttgagaaagatccgaaacacaaaatatcctattcagagggcactgcgtttggtggaggcaatttcaagagacttgagttctcaattactcaaagtattgggcactaggaaattgatgcatgttgcttatgaagaatttgaaaaagttatggtagcatgctttgaagtttttcagacttgggatgatgagtatgagaaacttcaggtattgttgagagacatcgtcaaaagaaaaagggaagaaaatctgaagatggtgtggcgtatcaaccctgcccacaggaagctgcaggcccgccttgaccagatgagaaaatttagacgccagcatgaacagctaagagctgttatcgtcagggtcctgaggccacaggtcacggcagttgcacaacagaatcaaggagaggtccctgaaccccaagatatgaaagtggctgaggttctctttgatgctgcagatgcaaatgccattgaggaagtaaaccttgcttatgagaacgtcaaggaagtggatggactggatgtttccaaagagggcacggaagcctgggaggctgctatgaagaggtacgatgagaggatcgacagagtggagacccggatcaccgctcgccttcgggatcagcttggcacagccaagaatgccaacgagatgtttaggattttctccaggtttaatgcactgtttgtcaggcctcacatccgtggggccattcgtgactaccagacccagctgatccagcgcgtgaaagatgacattgagtctcttcacgacaagttcaaggtccagtacccacagagtcaggcttgtaagatgagtcacgttcgtgacttgccccctgtgtcagggtctatcatctgggctaaacagatcgacaggcagctgacggcctacatgaagcgggtggaagatgtccttggcaagggctgggagaatcacgtggaggggcagaagctgaagcaggatggagacagcttccgcatgaagctcaacacgcaggagatctttgatgactgggcaaggaaggtgcagcagcgcaacctcggtgtctcggggcgcattttcaccatcgaaagtactcgggttcggggccgaactggaaatgtgcttaagctgaaagttaactttcttcctgagattatcacactatccaaagaagtccggaacctcaaatggcttggtttccgcgtcccactggcgattgtgaacaaagcccatcaagcaaaccagctttacccgtttgccatctcactgatcgagagcgttcgtacctatgaacggacctgcgagaaggtggaggagcggaacaccatttcccttttggtggctggcttgaaaaaggaagtgcaggccctgatcgcagaaggcattgcgttggtgtgggagtcctacaaacttgacccatatgtacagcgcttagcagagactgtcttcaacttccaagaaaaggtggatgatctgctgatcattgaagaaaaaatagacctagaagtccgttccttggaaacttgtatgtatgaccataagacattctcggaaatcttgaacagagtccagaaagcagtggatgacttaaatctgcactcctattccaatttgcccatctgggtcaacaagcttgacatggagattgaaagaatattgggcgtccgtctgcaagctggcctgagagcttggacgcaggttcttcttggacaagctgaagataaagcagaagttgacatggacacagatgctccacaagttagtcacaagcctggtggagagccaaagatcaaaaatgtcgttcatgagctaagaataaccaatcaggtaatctacttgaatccaccaattgaagagtgcagatacaagctgtatcaggaaatgtttgcctggaagatggttgtactgtctctccccaggatccagagtcagaggtaccaggtgggtgtacattacgaattgactgaggaagagaaattctatcggaatgctttaacacggatgcctgatggccctgttgccctggaagagtcgtattctgctgtcatgggcattgtatctgaagttgaacagtatgtcaaggtttggcttcagtatcagtgtttatgggatatgcaagctgaaaacatctataacagacttggagaagatctcaacaaatggcaggctctcctggtccaaataaggaaggccagaggaacctttgacaatgcagaaaccaagaaagagtttggaccagtagttatagattatggcaaggtacaatctaaggtgaacttgaaatatgactcttggcataaggaggttcttagcaaatttgggcagatgctaggatcaaacatgacggaattccattcccagatctcaaagtcccgccaagagttggagcagcactcagtagacacggccagcacctccgatgcagtgaccttcatcacctatgtgcagtctttgaaacggaagatcaagcagtttgagaagcaagttgagctctaccgcaatggccagcgcttactggaaaagcaaaggttccagttcccaccttcctggctttatattgacaacatcgagggagagtggggagccttcaatgacatcatgcggcgaaaggactctgccattcagcagcaggtggcaaacctgcaaatgaagattgtccaggaggatcgggccgtggaaagccgcaccaccgacctgctgactgactgggagaagaccaagcctgtcacgggcaaccttcgcccagaagaggcacttcaggctctcaccatatatgaggggaagtttggtaggctgaaggacgacagagagaagtgtgcaaaggccaaggaggcgctggaattgacagatactgggcttctcagtggcagtgaagagcgcgtgcaggtggccttagaagaattacaggacctcaaaggcgtttggtcagaactttctaaggtttgggagcaaatcgatcagatgaaggagcaaccctgggtttcagtacagcctcgaaagcttcgacaaaatttggatgccctcctgaaccagctgaaaagcttccctgcccggttgcgacagtatgcgtcctatgagtttgttcagaggcttctgaaaggttacatgaagataaatatgctggtgattgaactgaaatccgaagcacttaaagaccgccattggaaacagctcatgaaaaggcttcacgttaattgggttgtttctgagctaacccttggccaaatctgggatgttgacttgcagaaaaatgaagcgattgtcaaggatgtactgcttgtggcacaaggggagatggctttggaagaatttttgaagcagataagagaagtgtggaatacttatgaactagacttggttaattatcagaacaagtgccgcttgatccgtggctgggatgacctcttcaacaaggtcaaagaacacatcaacagcgtctcggccatgaagctctctccgtattacaaggtttttgaagaggatgctctcagctgggaagataagctgaacaggatcatggctctctttgatgtgtggattgatgtgcagaggcggtgggtctacctggaaggtatcttcacaggcagtgcagatatcaagcacctgctgccagtggaaacccagcggtttcagagcatcagcactgagtttttggctctaatgaaaaaagtgtccaagtctccccttgttatggatgttctgaacatccagggagtacagaggtctctggaaagattggcagacctgctaggaaagatccagaaagcattgggagaatatctggaaagagagcggtcatctttccccaggttctattttgtgggtgatgaagatttgcttgaaatcattggaaacagcaagaatgtcgctaaattacagaaacacttcaagaagatgtttgctggagtttcgagcatcatcctgaacgaggataactctgttgttttgggtatttcatctcgggaaggagaggaggttatgtttaaaactcctgtgtcaattactgaacatcccaaaatcaatgagtggctcacattggtagaaaaggagatgagagtcaccctggccaaactgcttgctgagtctgttacggaagttgagatttttggtaaagcaacttcaattgacccaaatacctacatcacttggattgataaataccaggcccagcttgtggttttgtcagcccagatagcctggtctgagaacgtggagaccgcactgagcagcatgggcggaggtggagatgccgcgcccttgcactctgtgctgagcaatgtggaggtcaccctcaatgtgttagcagactctgtcctcatggagcagcccccactccgaaggcggaagctagaacacttgattacagagttggttcaccagagagatgttacaaggtccttgatcaaaagcaagattgacaacgccaaatcttttgaatggctcagccagatgcgattttactttgaccctaagcaaactgatgtgttacagcagttgtcaattcaaatggcaaatgccaaatttaactatggctttgagtacctgggtgttcaggacaaactggtccagacccccctcactgaccgctgctatttgacaatgacacaagccttggaggccaggctggggggttccccatttggacctgctggaactgggaaaacagagtctgtcaaagctcttggccatcagcttggacggtttgttttagttttcaactgtgatgaaacctttgatttccaggcaatgggccggatctttgtgggcctttgccaggtgggtgcctggggctgctttgacgagttcaaccgcctggaggagcggatgctctcggctgtgtcccagcaggtgcagtgcatacaggaagcactgcgtgaacattccaaccccaactacgacaagacctctgcccccattacttgtgagctgctgaacaaacaagtcaaggtgagcccggacatggccatcttcatcaccatgaaccctggctacgcgggccggtctaaccttcctgacaacttgaagaagctgttccggagcttggccatgaccaagcccgaccggcagttaatcgcccaggtcatgctgtactcacagggtttccgcactgctgaagtgcttgccaacaaaatcgtcccgttttttaaactatgcgatgagcagctctcttcccaaagccattatgacttcggtcttcgggctttgaagagtgtgctggtgagtgcaggcaatgtgaagagagagagaatccagaagataaagagggagaaagaggaacgaggggaagcagttgatgaaggagaaattgctgaaaatctccctgaacaagagattctgatacagagcgtctgtgagacgatggtgccaaagctggtggcagaggacatcccgctgctcttcagcctcctgtcggacgtgttccctggagtccagtatcacaggggtgagatgactgcccttcgagaggagctgaagaaagtgtgtcaggagatgtatttgacatatggagatggagaagaagttggtggaatgtgggttgaaaaggttctccagctctatcagatcacccagatcaatcatggcctgatgatggtggggccctcgggaagtgggaagagcatggcctggcgtgtcctgctgaaggcattggagagactcgagggtgtggaaggtgtggcccatatcatcgaccccaaggccatcagcaaagaccacctctacggaaccctggaccccaacaccagggaatggacagatgggctcttcacacacgtgctgagaaagatcatcgacagcgtgagaggcgagctgcagaagcgccagtggatcgtcttcgatggcgatgtggatccagagtgggttgagaacttgaactcagtgctggatgacaataagctcctaactttgcccaatggagagcgcctcagtcttccacccaangtgagaataatgtttgaggtacaggacttgaaatacgcgaccttggccacagtgtcgcgctgcggcatggtctggttcagtgaggatgtgctgagcaccgacatgatcttcaacaacttcctggccaggctgcgcagcatcccgctggatgaaggggaggatgaggcacagcggcggcgtaagggcaaagaggatgagggggaggaggccgcttcccccatgctgcagatccaaagagatgcagctacgatcatgcaaccgtacttcacgtccaacggcctggtcaccaaggcgctagagcacgccttccagctggagcacatcatggacctaacacgcctgcgctgcctgggctcgctcttctccatgctgcaccaggcctgccgcaacgtggcgcagtataacgccaaccatcccgacttccccatgcagatcgagcagctggagcgctacattcaggtcagggggcatcaggggcttcacagagctcaccactgcgccagaccacaggtctgaggacctctgaaatgctgcacctgtggggatgtgcgctctctcctaggcgaggcagagccttcgttgaggggctaggaaaggtgcagtgggtgtctgtgatgcaagaagactgggaaccactgtctttaggttaactttgctgtaagtgtctttcttttgttgttgaaattttataaaaatcaaagtttaattccctttttaatagcgatatctggtttatgccatactctggtccctgtctggagacagccggctaaaaatgagagcagagctgggtgaatacatcagaagaatcacgaccgtgcctctgcccactgcgcccaacatacccattatcgattatgaggtgtccatcagcggagaatggtctccgtggcaggccaaggtgcctcagattgaagtggagacgcacaaggtggcagcccctgatgtcgtcgtgccaacgctggacacagtccgccacgaagccctcttgtacacttggctggccgaacacaagcccctggtcttgtgtggccctcctgggtctggcaagaccatgacactcttcagcgccctccgggccttgcctgacatggaggtggtgggtctcaacttctccagtgctactactccagagctgcttctgaagacttttgatcactactgcgagtacaggcgcacacctaatggggtggttttggctcctgttcaacttggaaagtggctggtgttgttctgtgatgaaatcaacttgccagatatggataaatatgggacccagagggtcatatccttcatcagacagatggtggagcacggaggcttttaccgtacctcagatcaaacatgggtgaagctggagagaatccagtttgttggggcttgtaatccccccacagaccctggaagaaagcccctctcacacaggttcctgcgccacgtgcctgtcgtgtatgtggattacccgggccccgcctccctcacacagatctacggcaccttcaaccgcgccatgctgaggctcattccatccctgcggacgtatgcagagccgctcactgctgccatggtggagttctacaccatgtctcaggagagattcacccaggatacacaacctcactatatctattcaccccgtgaaatgactaggtgggtgagaggcatctttgaagcgctgagacctctggagaccctgcctgttgaaggcctcattcggatttgggcacatgaagctctgcgtctcttccaagatagactcgtagaggatgaggagaggcgttggactgatgagaacatcgacacggttgctctgaagcacttccctaacatcgacagagagaaggcaatgagccgacccatcttgtacagcaactggctgtcaaaggattacatcccagtagaccaagaagagttaagagattatgtcaaagctaggctgaaggtcttttatgaagaagaacttgatgttccgctggtgctgtttaatgaagtcctagaccacgtgctgaggattgacagaatattccgtcaacctcaaggccacttgcttctgattggtgttagtggagcaggaaaaactaccctgtctcgtttcgtcgcctggatgaacggtttgagtgtgtaccagattaaggtccataggaagtacacaggggaagactttgatgaagatctacggacagtgttgagacgttctggctgtaaaaatgaaaagatagcatttataatggatgaatctaatgtgttagattctggattcctggagcgaatgaatacccttctggccaatggagaggtgcctggtctctttgaaggagacgagtatgccaccttgatgacgcagtgcaaagagggggcacagaaggaaggcctgatgctggactcgcacgaggagctctacaagtggttcactagccaggttatccgcaacctccacgtcgtgttcaccatgaacccgtcctcggagggactcaaggaccgggcagctacatcaccagcacttttcaacaggtgtgtgttgaattggtttggagactggtccaccgaagcactgtatcaggttggcaaagaattcacaagtaagatggatctggagaagccaaattacatcgtgcctgattacatgccagttgtgtatgataagctgccgcagccaccatcccatcgggaagccattgtgaacagctgtgtgtttgttcatcagactcttcaccaggcgaatgctcggctagcaaagcgaggcggcagaacgatggccatcacccctcgccactacctggacttcatcaatcactatgccaacctgttccacgagaagcggagcgagctggaggagcagcagatgcacttgaacgtggggctcaggaagatcaaagagacagtcgaccaggtagaagaactgcgtcgtgacttgaggataaagagccaagagctggaggtgaagaatgcagcagccaatgacaagctgaaaaagatggtgaaagaccagcaggaggctgaaaagaagaaggttatgagccaagaaatccaggaacagctgcataagcagcaggaggtaattgcagacaaacagatgagtgtcaaagaagatcttgataaggtggaacctgccgtcattgaggcccagaatgctgtgaagtcgatcaagaagcagcacctggtggaggtgaggtccatggccaaccctcctgctgctgtgaagctggcgctggagtccatctgcctgctgctgggggaaagcaccacagactggaagcagatccgctccatcatcatgcgggagaacttcatccccaccatcgtcaacttctctgcagaggagatcagtgacgccataagggagaagatgaagaaaaattacatgtccaatccaagttacaattatgaaattgtgaatcgggcttccctggcttgcggccctatggtgaaatgggcaattgcacagcttaactatgcagacatgttaaagagagtggagcccctacgcaatgagctgcagaagctggaagatgacgccaaggacaaccagcagaaggccaacgaggtggagcagatgatccgagacctggaagccagcatcgcccgctacaaggaggaatacgccgtcctgatctcagaggcccaggccatcaaggcagacctggcagctgtcgaggcaaaagtaaaccggagcactgctcttctgaagagcttgtctgctgaacgtgaacgatgggaaaaaacaagtgaaactttcaaaaaccagatgtccaccattgctggggactgtctcttgtcagctgcgttcattgcctacgcgggttactttgaccagcagatgcgtcagaacttgttcactacctggtcccatcacctacagcaagccaacatccagttccgtacagatattgccaggacggaatacctttccaatgctgatgagcgtcttcgctggcaggccagctccttgcctgctgatgacctttgcacagaaaatgccatcatgctgaaacgattcaataggtatccgctgatcattgacccctctggacaggccacagaattcattatgaatgaatataaggatcgtaagatcacacggaccagcttcctggatgacgccttcagaaagaacttagagagtgcactgagattcggtaacccccttctggtccaggatgtggaaagctacgatccagttttgaacccggtgctgaaccgtgaagtgcggcgaacaggggggagagtgctgatcactctcggggaccaggacatagacctgtcgccatcgtttgtcatcttcctgtccacccgggatccaactgtcgagttcccaccagatctctgttcccgggttacttttgtaaacttcacagttacccgtagcagtttacaaagccagtgtctaaatgaagtacttaaagcagaaagacctgatgtggacgagaaacgatctgatcttcttaaacttcaaggggaatttcagctccgtttgcgtcagctggaaaaatctctactacaagctctgaacgaggtgaaagggcgcattttggatgacgacacgatcataaccactctggagaacctgaagagagaggctgcagaggtcaccaggaaagttgaggagacggacattgtcatgcaggaggtggagaccgtgtcccagcagtacctcccgctctccaccgcctgcagcagcatctacttcaccatggagtccctcaagcagatacacttcttgtaccagtactccctccagtttttcctggacatttatcacaacgtcctatacgagaacccgaacctgaagggtgtcaccgaccacacacagcgcctgtccattataacaaaggacctcttccaggtggcgtttaaccgagtggctcgaggcatgctgcatcaggaccacattacctttgccatgctgctggcaagaatcaaactgaagggcaccgtgggggagcccacctacgatgcagaattccagcacttcttgagaggaaatgagattgtcctgagtgctggctccacccccaggatccagggcctgactgtggagcaggcggaggcggtggtgaggctgagctgccttcccgcgtttaaggacttgattgcaaaggttcaggcagacgagcaatttggcatctggctggacagcagctccccggagcagactgtgccctacctctggagtgaagaaacacctgcaacacccattggccaggccatccaccgcctgctcctgatccaggctttccggcccgatcgcctgttggccatggcccacatgtttgtttcaacaaaccttggggagtctttcatgtccatcatggagcagccgctcgacctgacccacattgtgggcacagaggtgaagcccaacactcctgtcttaatgtgctctgtgcctggttatgatgccagtggacatgtcgaggaccttgcagccgagcagaacacgcagatcacttcaattgcaatcggctctgcagaaggctttaaccaagcagataaggcaataaacaccgctgtaaagtcgggcaggtgggtgatgctgaagaatgtgcatctggccccagggtggctgatgcagctggagaagaagttgcattccctgcagccgcatgcctgcttccgactcttcctcaccatggagatcaaccccaaggtgcctgtgaatctgctccgtgcgggccgcatctttgtgttcgagccaccgccaggggtgaaggccaacatgctgaggacgttcagcagcattcccgtctcacggatatgcaagtctcccaacgagcgtgcccgcttgtacttcctgctggcctggtttcatgcgatcatccaagaacgcttacgatacgcaccactggggtggtcaaagaagtatgaatttggagagtctgacctgcggtcagcttgcgatacggtggacacgtggctggatgacacggccaagggcaggcagaacatctcaccggataagatcccgtggtctgcactaaagaccttaatggcccagtccatttatggcgggcgcgtggacaacgagtttgaccagcgtctgctcaacaccttcctggagcgcctgttcacaaccaggagtttcgacagtgagtttaagctggcatgcaaggtcgacggacataaagacattcaaatgccagatggcatcaggcgagaggagtttgtgcagtgggtggagttgctccccgacacccagacgccctcctggctgggcctgcccaacaacgccgagagagtcctccttaccacacagggtgtggacatgatcagtaaaatgctgaagatgcagatccgcgatccgtcgggtaagagcgcg

SEQ ID NO: 462022 - DNA, 13722 bp, Homo sapiens
  misc_feature (7590)..(7590): n is a, c, g, or t
ttcaatgagagaacatttaatgagaggttaaggggcttagaacaacgccgggcacaggctaagcgctcactaaacgttagctctcgccaataacatcactgattcactataaagtttctctggctgtgtgctattcgctgcgtccacagcagtgaagaagacagacgcagcccctgaccaacctcgccaagcccgggcgccgagccaggacgttgagccaagtccccatctcctaggactcgcagtgcggaggctgcgggccccgaccagcgccgagactacaagtcccagaagggcgcgcggcgacatcgccgggcccgccccccgcgcacgcgcggcgccgtgacgctaaggccgcgagcgagcgcgggtggctgcggcggctgcggccggcggggcggggcggggccacctggcagtggctgcctttagggcggagccggctcccgctctcctcagtctgcggtgggctagcggacggtccggcttccggcggccgtttctgtctcttgctggctgtctcgctgagtcgcggccgccttctcatcgctcctggaaggtcccgagcgcgacaccatgtcggagcccgggggcggcggcggcgaggacggctcggccggattggaagtgtcggccgtgcagaatgtggcggacgtgtcggtgctgcagaagcacctgcgcaagctggtgccgctgctgctggaggacggcggcgaggcgccggccgcgctggaggcggcgctggaggagaagagcgccctggagcagatgcgcaagttcctttcggacccgcaggtccacacggtgctggtggagcgctccacgctcaaagaggacgtcggtgatgaaggagaagaagaaaaagaattcatttcctataacatcaacatagacattcattatggggttaaatccaatagcttggcattcattaaacgtactcccgtgattgatgcagataaacccgtgtcttctcagctccgggtccttacactcagtgaagactcgccctacgaaactttgcattctttcattagcaatgcagtggctcctttttttaagtcctacattagagagtctggcaaggcagacagggatggtgataaaatggctccttcagttgaaaagaagattgcagaactcgaaatgggactccttcacttgcagcaaaatattgaaattccggagatcagcctgccgattcatccaatgatcacaaatgttgcaaaacagtgttatgagcgtggagaaaagccaaaagttacagactttggtgataaggttgaagacccaacatttcttaatcagttacaatctggagttaaccgctggatccgagaaattcaaaaagtgaccaaactggatcgagatcctgcatcaggaactgccttacaggaaattagtttttggctaaacttggaacgtgcgttataccgcatccaggagaaacgggagagcccggaagttctcctgactctggatatcttgaaacatggcaagcgcttccatgccaccgtcagttttgacactgacacaggtctaaaacaggctttggaaactgtgaatgactacaatcctctgatgaaagatttccctctgaatgatttgctgtctgccacggagctggacaaaataagacaggcgcttgttgccattttcacacatttgagaaagatccgaaacacaaaatatcctattcagagggcactgcgtttggtggaggcaatttcaagagacttgagttctcaattactcaaagtattgggcactaggaaattgatgcatgttgcttatgaagaatttgaaaaagttatggtagcatgctttgaagtttttcagacttgggatgatgagtatgagaaacttcaggtattgttgagagacatcgtcaaaagaaaaagggaagaaaatctgaagatggtgtggcgtatcaaccctgcccacaggaagctgcaggcccgccttgaccagatgagaaaatttagacgccagcatgaacagctaagagctgttatcgtcagggtcctgaggccacaggtcacggcagttgcacaacagaatcaaggagaggtccctgaaccccaagatatgaaagtggctgaggttctctttgatgctgcagatgcaaatgccattgaggaagtaaaccttgcttatgagaacgtcaaggaagtggatggactggatgtttccaaagagggcacggaagcctgggaggctgctatgaagaggtacgatgagaggatcgacagagtggagacccggatcaccgctcgccttcgggatcagcttggcacagccaagaatgccaacgagatgtttaggattttctccaggtttaatgcactgtttgtcaggcctcacatccgtggggccattcgtgactaccagacccagctgatccagcgcgtgaaagatgacattgagtctcttcacgacaagttcaaggtccagtacccacagagtcaggcttgtaagatgagtcacgttcgtgacttgccccctgtgtcagggtctatcatctgggctaaacagatcgacaggcagctgacggcctacatgaagcgggtggaagatgtccttggcaagggctgggagaatcacgtggaggggcagaagctgaagcaggatggagacagcttccgcatgaagctcaacacgcaggagatctttgatgactgggcaaggaaggtgcagcagcgcaacctcggtgtctcggggcgcattttcaccatcgaaagtactcgggttcggggccgaactggaaatgtgcttaagctgaaagttaactttcttcctgagattatcacactatccaaagaagtccggaacctcaaatggcttggtttccgcgtcccactggcgattgtgaacaaagcccatcaagcaaaccagctttacccgtttgccatctcactgatcgagagcgttcgtacctatgaacggacctgcgagaaggtggaggagcggaacaccatttcccttttggtggctggcttgaaaaaggaagtgcaggccctgatcgcagaaggcattgcgttggtgtgggagtcctacaaacttgacccatatgtacagcgcttagcagagactgtcttcaacttccaagaaaaggtggatgatctgctgatcattgaagaaaaaatagacctagaagtccgttccttggaaacttgtatgtatgaccataagacattctcggaaatcttgaacagagtccagaaagcagtggatgacttaaatctgcactcctattccaatttgcccatctgggtcaacaagcttgacatggagattgaaagaatattgggcgtccgtctgcaagctggcctgagagcttggacgcaggttcttcttggacaagctgaagataaagcagaagttgacatggacacagatgctccacaagttagtcacaagcctggtggagagccaaagatcaaaaatgtcgttcatgagctaagaataaccaatcaggtaatctacttgaatccaccaattgaagagtgcagatacaagctgtatcaggaaatgtttgcctggaagatggttgtactgtctctccccaggatccagagtcagaggtaccaggtgggtgtacattacgaattgactgaggaagagaaattctatcggaatgctttaacacggatgcctgatggccctgttgccctggaagagtcgtattctgctgtcatgggcattgtatctgaagttgaacagtatgtcaaggtttggcttcagtatcagtgtttatgggatatgcaagctgaaaacatctataacagacttggagaagatctcaacaaatggcaggctctcctggtccaaataaggaaggccagaggaacctttgacaatgcagaaaccaagaaagagtttggaccagtagttatagattatggcaaggtacaatctaaggtgaacttgaaatatgactcttggcataaggaggttcttagcaaatttgggcagatgctaggatcaaacatgacggaattccattcccagatctcaaagtcccgccaagagttggagcagcactcagtagacacggccagcacctccgatgcagtgaccttcatcacctatgtgcagtctttgaaacggaagatcaagcagtttgagaagcaagttgagctctaccgcaatggccagcgcttactggaaaagcaaaggttccagttcccaccttcctggctttatattgacaacatcgagggagagtggggagccttcaatgacatcatgcggcgaaaggactctgccattcagcagcaggtggcaaacctgcaaatgaagattgtccaggaggatcgggccgtggaaagccgcaccaccgacctgctgactgactgggagaagaccaagcctgtcacgggcaaccttcgcccagaagaggcacttcaggctctcaccatatatgaggggaagtttggtaggctgaaggacgacagagagaagtgtgcaaaggccaaggaggcgctggaattgacagatactgggcttctcagtggcagtgaagagcgcgtgcaggtggccttagaagaattacaggacctcaaaggcgtttggtcagaactttctaaggtttgggagcaaatcgatcagatgaaggagcaaccctgggtttcagtacagcctcgaaagcttcgacaaaatttggatgccctcctgaaccagctgaaaagcttccctgcccggttgcgacagtatgcgtcctatgagtttgttcagaggcttctgaaaggttacatgaagataaatatgctggtgattgaactgaaatccgaagcacttaaagaccgccattggaaacagctcatgaaaaggcttcacgttaattgggttgtttctgagctaacccttggccaaatctgggatgttgacttgcagaaaaatgaagcgattgtcaaggatgtactgcttgtggcacaaggggagatggctttggaagaatttttgaagcagataagagaagtgtggaatacttatgaactagacttggttaattatcagaacaagtgccgcttgatccgtggctgggatgacctcttcaacaaggtcaaagaacacatcaacagcgtctcggccatgaagctctctccgtattacaaggtttttgaagaggatgctctcagctgggaagataagctgaacaggatcatggctctctttgatgtgtggattgatgtgcagaggcggtgggtctacctggaaggtatcttcacaggcagtgcagatatcaagcacctgctgccagtggaaacccagcggtttcagagcatcagcactgagtttttggctctaatgaaaaaagtgtccaagtctccccttgttatggatgttctgaacatccagggagtacagaggtctctggaaagattggcagacctgctaggaaagatccagaaagcattgggagaatatctggaaagagagcggtcatctttccccaggttctattttgtgggtgatgaagatttgcttgaaatcattggaaacagcaagaatgtcgctaaattacagaaacacttcaagaagatgtttgctggagtttcgagcatcatcctgaacgaggataactctgttgttttgggtatttcatctcgggaaggagaggaggttatgtttaaaactcctgtgtcaattactgaacatcccaaaatcaatgagtggctcacattggtagaaaaggagatgagagtcaccctggccaaactgcttgctgagtctgttacggaagttgagatttttggtaaagcaacttcaattgacccaaatacctacatcacttggattgataaataccaggcccagcttgtggttttgtcagcccagatagcctggtctgagaacgtggagaccgcactgagcagcatgggcggaggtggagatgccgcgcccttgcactctgtgctgagcaatgtggaggtcaccctcaatgtgttagcagactctgtcctcatggagcagcccccactccgaaggcggaagctagaacacttgattacagagttggttcaccagagagatgttacaaggtccttgatcaaaagcaagattgacaacgccaaatcttttgaatggctcagccagatgcgattttactttgaccctaagcaaactgatgtgttacagcagttgtcaattcaaatggcaaatgccaaatttaactatggctttgagtacctgggtgttcaggacaaactggtccagacccccctcactgaccgctgctatttgacaatgacacaagccttggaggccaggctggggggttccccatttggacctgctggaactgggaaaacagagtctgtcaaagctcttggccatcagcttggacggtttgttttagttttcaactgtgatgaaacctttgatttccaggcaatgggccggatctttgtgggcctttgccaggtgggtgcctggggctgctttgacgagttcaaccgcctggaggagcggatgctctcggctgtgtcccagcaggtgcagtgcatacaggaagcactgcgtgaacattccaaccccaactacgacaagacctctgcccccattacttgtgagctgctgaacaaacaagtcaaggtgagcccggacatggccatcttcatcaccatgaaccctggctacgcgggccggtctaaccttcctgacaacttgaagaagctgttccggagcttggccatgaccaagcccgaccggcagttaatcgcccaggtcatgctgtactcacagggtttccgcactgctgaagtgcttgccaacaaaatcgtcccgttttttaaactatgcgatgagcagctctcttcccaaagccattatgacttcggtcttcgggctttgaagagtgtgctggtgagtgcaggcaatgtgaagagagagagaatccagaagataaagagggagaaagaggaacgaggggaagcagttgatgaaggagaaattgctgaaaatctccctgaacaagagattctgatacagagcgtctgtgagacgatggtgccaaagctggtggcagaggacatcccgctgctcttcagcctcctgtcggacgtgttccctggagtccagtatcacaggggtgagatgactgcccttcgagaggagctgaagaaagtgtgtcaggagatgtatttgacatatggagatggagaagaagttggtggaatgtgggttgaaaaggttctccagctctatcagatcacccagatcaatcatggcctgatgatggtggggccctcgggaagtgggaagagcatggcctggcgtgtcctgctgaaggcattggagagactcgagggtgtggaaggtgtggcccatatcatcgaccccaaggccatcagcaaagaccacctctacggaaccctggaccccaacaccagggaatggacagatgggctcttcacacacgtgctgagaaagatcatcgacagcgtgagaggcgagctgcagaagcgccagtggatcgtcttcgatggcgatgtggatccagagtgggttgagaacttgaactcagtgctggatgacaataagctcctaactttgcccaatggagagcgcctcagtcttccacccaangtgagaataatgtttgaggtacaggacttgaaatacgcgaccttggccacagtgtcgcgctgcggcatggtctggttcagtgaggatgtgctgagcaccgacatgatcttcaacaacttcctggccaggctgcgcagcatcccgctggatgaaggggaggatgaggcacagcggcggcgtaagggcaaagaggatgagggggaggaggccgcttcccccatgctgcagatccaaagagatgcagctacgatcatgcaaccgtacttcacgtccaacggcctggtcaccaaggcgctagagcacgccttccagctggagcacatcatggacctaacacgcctgcgctgcctgggctcgctcttctccatgctgcaccaggcctgccgcaacgtggcgcagtataacgccaaccatcccgacttccccatgcagatcgagcagctggagcgctacattcaggtcagggggcatcaggggcttcacagagctcaccactgcgccagaccacaggtctgaggacctctgaaatgctgcacctgtggggatgtgcgctctctcctaggcgaggcagagccttcgttgaggggctaggaaaggtgcagtgggtgtctgtgatgcaagaagactgggaaccactgtctttaggttaactttgctgtaagtgtctttcttttgttgttgaaattttataaaaatcaaagtttaattccctttttaatagcgatatctggtttatgccatactctggtccctgtctggagacagccggctaaaaatgagagcagagctgggtgaatacatcagaagaatcacgaccgtgcctctgcccactgcgcccaacatacccattatcgattatgaggtgtccatcagcggagaatggtctccgtggcaggccaaggtgcctcagattgaagtggagacgcacaaggtggcagcccctgatgtcgtcgtgccaacgctggacacagtccgccacgaagccctcttgtacacttggctggccgaacacaagcccctggtcttgtgtggccctcctgggtctggcaagaccatgacactcttcagcgccctccgggccttgcctgacatggaggtggtgggtctcaacttctccagtgctactactccagagctgcttctgaagacttttgatcactactgcgagtacaggcgcacacctaatggggtggttttggctcctgttcaacttggaaagtggctggtgttgttctgtgatgaaatcaacttgccagatatggataaatatgggacccagagggtcatatccttcatcagacagatggtggagcacggaggcttttaccgtacctcagatcaaacatgggtgaagctggagagaatccagtttgttggggcttgtaatccccccacagaccctggaagaaagcccctctcacacaggttcctgcgccacgtgcctgtcgtgtatgtggattacccgggccccgcctccctcacacagatctacggcaccttcaaccgcgccatgctgaggctcattccatccctgcggacgtatgcagagccgctcactgctgccatggtggagttctacaccatgtctcaggagagattcacccaggatacacaacctcactatatctattcaccccgtgaaatgactaggtgggtgagaggcatctttgaagcgctgagacctctggagaccctgcctgttgaaggcctcattcggatttgggcacatgaagctctgcgtctcttccaagatagactcgtagaggatgaggagaggcgttggactgatgagaacatcgacacggttgctctgaagcacttccctaacatcgacagagagaaggcaatgagccgacccatcttgtacagcaactggctgtcaaaggattacatcccagtagaccaagaagagttaagagattatgtcaaagctaggctgaaggtcttttatgaagaagaacttgatgttccgctggtgctgtttaatgaagtcctagaccacgtgctgaggattgacagaatattccgtcaacctcaaggccacttgcttctgattggtgttagtggagcaggaaaaactaccctgtctcgtttcgtcgcctggatgaacggtttgagtgtgtaccagattaaggtccataggaagtacacaggggaagactttgatgaagatctacggacagtgttgagacgttctggctgtaaaaatgaaaagatagcatttataatggatgaatctaatgtgttagattctggattcctggagcgaatgaatacccttctggccaatggagaggtgcctggtctctttgaaggagacgagtatgccaccttgatgacgcagtgcaaagagggggcacagaaggaaggcctgatgctggactcgcacgaggagctctacaagtggttcactagccaggttatccgcaacctccacgtcgtgttcaccatgaacccgtcctcggagggactcaaggaccgggcagctacatcaccagcacttttcaacaggtgtgtgttgaattggtttggagactggtccaccgaagcactgtatcaggttggcaaagaattcacaagtaagatggatctggagaagccaaattacatcgtgcctgattacatgccagttgtgtatgataagctgccgcagccaccatcccatcgggaagccattgtgaacagctgtgtgtttgttcatcagactcttcaccaggcgaatgctcggctagcaaagcgaggcggcagaacgatggccatcacccctcgccactacctggacttcatcaatcactatgccaacctgttccacgagaagcggagcgagctggaggagcagcagatgcacttgaacgtggggctcaggaagatcaaagagacagtcgaccaggtagaagaactgcgtcgtgacttgaggataaagagccaagagctggaggtgaagaatgcagcagccaatgacaagctgaaaaagatggtgaaagaccagcaggaggctgaaaagaagaaggttatgagccaagaaatccaggaacagctgcataagcagcaggaggtaattgcagacaaacagatgagtgtcaaagaagatcttgataaggtggaacctgccgtcattgaggcccagaatgctgtgaagtcgatcaagaagcagcacctggtggaggtgaggtccatggccaaccctcctgctgctgtgaagctggcgctggagtccatctgcctgctgctgggggaaagcaccacagactggaagcagatccgctccatcatcatgcgggagaacttcatccccaccatcgtcaacttctctgcagaggagatcagtgacgccataagggagaagatgaagaaaaattacatgtccaatccaagttacaattatgaaattgtgaatcgggcttccctggcttgcggccctatggtgaaatgggcaattgcacagcttaactatgcagacatgttaaagagagtggagcccctacgcaatgagctgcagaagctggaagatgacgccaaggacaaccagcagaaggccaacgaggtggagcagatgatccgagacctggaagccagcatcgcccgctacaaggaggaatacgccgtcctgatctcagaggcccaggccatcaaggcagacctggcagctgtcgaggcaaaagtaaaccggagcactgctcttctgaagagcttgtctgctgaacgtgaacgatgggaaaaaacaagtgaaactttcaaaaaccagatgtccaccattgctggggactgtctcttgtcagctgcgttcattgcctacgcgggttactttgaccagcagatgcgtcagaacttgttcactacctggtcccatcacctacagcaagccaacatccagttccgtacagatattgccaggacggaatacctttccaatgctgatgagcgtcttcgctggcaggccagctccttgcctgctgatgacctttgcacagaaaatgccatcatgctgaaacgattcaataggtatccgctgatcattgacccctctggacaggccacagaattcattatgaatgaatataaggatcgtaagatcacacggaccagcttcctggatgacgccttcagaaagaacttagagagtgcactgagattcggtaacccccttctggtccaggatgtggaaagctacgatccagttttgaacccggtgctgaaccgtgaagtgcggcgaacaggggggagagtgctgatcactctcggggaccaggacatagacctgtcgccatcgtttgtcatcttcctgtccacccgggatccaactgtcgagttcccaccagatctctgttcccgggttacttttgtaaacttcacagttacccgtagcagtttacaaagccagtgtctaaatgaagtacttaaagcagaaagacctgatgtggacgagaaacgatctgatcttcttaaacttcaaggggaatttcagctccgtttgcgtcagctggaaaaatctctactacaagctctgaacgaggtgaaagggcgcattttggatgacgacacgatcataaccactctggagaacctgaagagagaggctgcagaggtcaccaggaaagttgaggagacggacattgtcatgcaggaggtggagaccgtgtcccagcagtacctcccgctctccaccgcctgcagcagcatctacttcaccatggagtccctcaagcagatacacttcttgtaccagtactccctccagtttttcctggacatttatcacaacgtcctatacgagaacccgaacctgaagggtgtcaccgaccacacacagcgcctgtccattataacaaaggacctcttccaggtggcgtttaaccgagtggctcgaggcatgctgcatcaggaccacattacctttgccatgctgctggcaagaatcaaactgaagggcaccgtgggggagcccacctacgatgcagaattccagcacttcttgagaggaaatgagattgtcctgagtgctggctccacccccaggatccagggcctgactgtggagcaggcggaggcggtggtgaggctgagctgccttcccgcgtttaaggacttgattgcaaaggttcaggcagacgagcaatttggcatctggctggacagcagctccccggagcagactgtgccctacctctggagtgaagaaacacctgcaacacccattggccaggccatccaccgcctgctcctgatccaggctttccggcccgatcgcctgttggccatggcccacatgtttgtttcaacaaaccttggggagtctttcatgtccatcatggagcagccgctcgacctgacccacattgtgggcacagaggtgaagcccaacactcctgtcttaatgtgctctgtgcctggttatgatgccagtggacatgtcgaggaccttgcagccgagcagaacacgcagatcacttcaattgcaatcggctctgcagaaggctttaaccaagcagataaggcaataaacaccgctgtaaagtcgggcaggtgggtgatgctgaagaatgtgcatctggccccagggtggctgatgcagctggagaagaagttgcattccctgcagccgcatgcctgcttccgactcttcctcaccatggagatcaaccccaaggtgcctgtgaatctgctccgtgcgggccgcatctttgtgttcgagccaccgccaggggtgaaggccaacatgctgaggacgttcagcagcattcccgtctcacggatatgcaaggtaagtaccttgtcctcctggtatgctttccccatagaagctaaagcccagtcccatcaccaaatgcagaagtgggtccctgggcccccggaagtgccgtgtggtgaactgcacagctgcttttgcttttcagctgtaggtaaaatttccttccatggccgggcaccgtggctcacactggtaatcctagcactttggaaggtcgaggtgggaggatcacttgagcccaggagttcaagactgtctgggcaggccaggagtggtggctcacgcctgtaatccctgcactttgggaggctgaggtgggcagatcacttgaggtcaggagttcaagaccagcatggccaacatggtgaaactccgtctctact

SEQ ID NO: 462023 - DNA, 1895 bp, Homo sapiens
gtgtggtggatggatggggtcctcgtagatgtcgtagcctgacaggtcagtgaacgactgtgtgcattggccgtcgtcgcataccggcttgcgagtcttcctcaccatggagatcaaccccaaggtgcctgtgaatctgctccgtgcgggccgcatctttgtgttcgagccaccgccaggggtgaaggccaacatgctgaggacgttcagcagcattcccgtctcacggatatgcaagtctcccaacgagcgtgcccgcttgtacttcctgctggcctggtttcatgcgatcatccaagaacgcttacgatacgcaccactggggtggtcaaagaagtatgaatttggagagtctgacctgcggtcagcttgcgatacggtggacacgtggctggatgacacggccaagggcaggcagaacatctcaccggataagatcccgtggtctgcactaaagaccttaatggcccagtccatttatggcgggcgcgtggacaacgagtttgaccagcgtctgctcaacaccttcctggagcgcctgttcacaaccaggagtttcgacagtgagtttaagctggcatgcaaggtcgacggacataaagacattcaaatgccagatggcatcaggcgagaggagtttgtgcagtgggtggagttgctccccgacacccagacgccctcctggctgggcctgcccaacaacgccgagagagtcctccttaccacacagggtgtggacatgatcagtaaaatgctgaagatgcagatgttggaggatgaggacgacctggcctacgcagagactgagaagaagacgaggacagactccacgtccgacgggcgccctgcctggatgcggacactgcacaccaccgcgtccaactggctgcacctcatcccccagacgctgagccacctcaagcgcaccgtggagaatatcaaggatcctttgttcaggttctttgagagagaagtgaagatgggcgcaaagctgcttcaggacgttcgccaggaccttgcagatgtcgtccaggtgtgcgaaggaaagaagaagcagaccaactacttgcgcacgctgatcaacgagctagtgaaagggatcttgcctcggagctggtcccactacacggtgcctgccggcatgaccgtcatccagtgggtgtccgacttcagcgagaggatcaaacagctgcagaacatctcactggcagctgcatctggtggcgccaaggagctaaagaacatccacgtgtgcctgggtggcctgttcgtgcctgaggcgtacatcactgccaccaggcagtatgtggcccaggccaacagctggtccctggaggagctctgcctggaagtcaacgtcaccacctcacagggcgccacccttgacgcttgcagcttcggagtcacgggtttgaaacttcaaggggccacgtgcaacaacaacaagctgtcactgtccaatgccatctcaaccgcccttcccctgacgcagctgcgctgggtcaagcagacaaacaccgagaagaaggccagtgtggtaaccttacctgtctacctgaacttcacccgtgcagacctcatcttcaccgtggacttcgaaattgctacaaaggaggatcctcgcagcttctacgagcggggtgtcgcagtcttgtgcacagagtaaacttttctagctgcccctttctgtaatagtgaaagttggtatttaacatttattcatttttaaaatatttggaaggtctgagcttgtgaaaagaaagtggttggtctgaggttggaggaagctgaatggaatctgacggttgggagtggtggaaattggaaggataccaggaggtatttgggaaggccaatggcgtggctcctttgaggaaataaaacactaagcatga

SEQ ID NO: 462024 - DNA, 1962 bp, Homo sapiens
tgaggccagcaagggccaagtttttggtttgtgtttttttttagcattaagcatgtaagctttattggtaaacctgaaaacgtctccggaaaccactctcgggtggtggtaacagcctatcaatcagggtctctcatcagggactcggctaaccgtgatcctgtgctttccccattcggtgtttcaaccttctcttctgtggcctcatcctcaggtatccgctgatcattgacccctctggacaggccacagaattcattatgaatgaatataaggatcgtaagatcacacggaccagcttcctggatgacgccttcagaaagaacttagagagtgcactgagattcggtaacccccttctggtccaggttggtgttggcctttgaattcttgaaacactgcattcaagagtgaattcctttttgggggctgcctttagttttcaactttgtaagacttcattttgtatcagaaggataaagctttgcggtggttcggataagatcccgtggtctgcactaaagaccttaatggcccagtccatttatggcgggcgcgtggacaacgagtttgaccagcgtctgctcaacaccttcctggagcgcctgttcacaaccaggagtttcgacagtgagtttaagctggcatgcaaggtcgacggacataaagacattcaaatgccagatggcatcaggcgagaggagtttgtgcagtgggtggagttgctccccgacacccagacgccctcctggctgggcctgcccaacaacgccgagagagtcctccttaccacacagggtgtggacatgatcagtaaaatgctgaagatgcagatgttggaggatgaggacgacctggcctacgcagagactgagaagaagacgaggacagactccacgtccgacgggcgccctgcctggatgcggacactgcacaccaccgcgtccaactggctgcacctcatcccccagacgctgagccacctcaagcgcaccgtggagaatatcaaggatcctttgttcaggttctttgagagagaagtgaagatgggcgcaaagctgcttcaggacgttcgccaggaccttgcagatgtcgtccaggtgtgcgaaggaaagaagaagcagaccaactacttgcgcacgctgatcaacgagctagtgaaagggatcttgcctcggagctggtcccactacacggtgcctgccggcatgaccgtcatccagtgggtgtccgacttcagcgagaggatcaaacagctgcagaacatctcactggcagctgcatctggtggcgccaaggagctaaagaacatccacgtgtgcctgggtggcctgttcgtgcctgaggcgtacatcactgccaccaggcagtatgtggcccaggccaacagctggtccctggaggagctctgcctggaagtcaacgtcaccacctcacagggcgccacccttgacgcttgcagcttcggagtcacgggtttgaaacttcaaggggccacgtgcaacaacaacaagctgtcactgtccaatgccatctcaaccgcccttcccctgacgcagctgcgctgggtcaagcagacaaacaccgagaagaaggccagtgtggtaaccttacctgtctacctgaacttcacccgtgcagacctcatcttcaccgtggacttcgaaattgctacaaaggaggatcctcgcagcttctacgagcggggtgtcgcagtcttgtgcacagagtaaacttttctagctgcccctttctgtaatagtgaaagttggtatttaacatttattcatttttaaaatatttggaaggtctgagcttgtgaaaagaaagtggttggtctgaggttggaggaagctgaatggaatctgacggttgggagtggtggaaattggaaggataccaggaggtatttgggaaggccaatggcgtggctcctttgaggaaataaaacactaagcatga

SEQ ID NO: 462025 - DNA, 11724 bp, Homo sapiens
  misc_feature (7590)..(7590): n is a, c, g, or t
ttcaatgagagaacatttaatgagaggttaaggggcttagaacaacgccgggcacaggctaagcgctcactaaacgttagctctcgccaataacatcactgattcactataaagtttctctggctgtgtgctattcgctgcgtccacagcagtgaagaagacagacgcagcccctgaccaacctcgccaagcccgggcgccgagccaggacgttgagccaagtccccatctcctaggactcgcagtgcggaggctgcgggccccgaccagcgccgagactacaagtcccagaagggcgcgcggcgacatcgccgggcccgccccccgcgcacgcgcggcgccgtgacgctaaggccgcgagcgagcgcgggtggctgcggcggctgcggccggcggggcggggcggggccacctggcagtggctgcctttagggcggagccggctcccgctctcctcagtctgcggtgggctagcggacggtccggcttccggcggccgtttctgtctcttgctggctgtctcgctgagtcgcggccgccttctcatcgctcctggaaggtcccgagcgcgacaccatgtcggagcccgggggcggcggcggcgaggacggctcggccggattggaagtgtcggccgtgcagaatgtggcggacgtgtcggtgctgcagaagcacctgcgcaagctggtgccgctgctgctggaggacggcggcgaggcgccggccgcgctggaggcggcgctggaggagaagagcgccctggagcagatgcgcaagttcctttcggacccgcaggtccacacggtgctggtggagcgctccacgctcaaagaggacgtcggtgatgaaggagaagaagaaaaagaattcatttcctataacatcaacatagacattcattatggggttaaatccaatagcttggcattcattaaacgtactcccgtgattgatgcagataaacccgtgtcttctcagctccgggtccttacactcagtgaagactcgccctacgaaactttgcattctttcattagcaatgcagtggctcctttttttaagtcctacattagagagtctggcaaggcagacagggatggtgataaaatggctccttcagttgaaaagaagattgcagaactcgaaatgggactccttcacttgcagcaaaatattgaaattccggagatcagcctgccgattcatccaatgatcacaaatgttgcaaaacagtgttatgagcgtggagaaaagccaaaagttacagactttggtgataaggttgaagacccaacatttcttaatcagttacaatctggagttaaccgctggatccgagaaattcaaaaagtgaccaaactggatcgagatcctgcatcaggaactgccttacaggaaattagtttttggctaaacttggaacgtgcgttataccgcatccaggagaaacgggagagcccggaagttctcctgactctggatatcttgaaacatggcaagcgcttccatgccaccgtcagttttgacactgacacaggtctaaaacaggctttggaaactgtgaatgactacaatcctctgatgaaagatttccctctgaatgatttgctgtctgccacggagctggacaaaataagacaggcgcttgttgccattttcacacatttgagaaagatccgaaacacaaaatatcctattcagagggcactgcgtttggtggaggcaatttcaagagacttgagttctcaattactcaaagtattgggcactaggaaattgatgcatgttgcttatgaagaatttgaaaaagttatggtagcatgctttgaagtttttcagacttgggatgatgagtatgagaaacttcaggtattgttgagagacatcgtcaaaagaaaaagggaagaaaatctgaagatggtgtggcgtatcaaccctgcccacaggaagctgcaggcccgccttgaccagatgagaaaatttagacgccagcatgaacagctaagagctgttatcgtcagggtcctgaggccacaggtcacggcagttgcacaacagaatcaaggagaggtccctgaaccccaagatatgaaagtggctgaggttctctttgatgctgcagatgcaaatgccattgaggaagtaaaccttgcttatgagaacgtcaaggaagtggatggactggatgtttccaaagagggcacggaagcctgggaggctgctatgaagaggtacgatgagaggatcgacagagtggagacccggatcaccgctcgccttcgggatcagcttggcacagccaagaatgccaacgagatgtttaggattttctccaggtttaatgcactgtttgtcaggcctcacatccgtggggccattcgtgactaccagacccagctgatccagcgcgtgaaagatgacattgagtctcttcacgacaagttcaaggtccagtacccacagagtcaggcttgtaagatgagtcacgttcgtgacttgccccctgtgtcagggtctatcatctgggctaaacagatcgacaggcagctgacggcctacatgaagcgggtggaagatgtccttggcaagggctgggagaatcacgtggaggggcagaagctgaagcaggatggagacagcttccgcatgaagctcaacacgcaggagatctttgatgactgggcaaggaaggtgcagcagcgcaacctcggtgtctcggggcgcattttcaccatcgaaagtactcgggttcggggccgaactggaaatgtgcttaagctgaaagttaactttcttcctgagattatcacactatccaaagaagtccggaacctcaaatggcttggtttccgcgtcccactggcgattgtgaacaaagcccatcaagcaaaccagctttacccgtttgccatctcactgatcgagagcgttcgtacctatgaacggacctgcgagaaggtggaggagcggaacaccatttcccttttggtggctggcttgaaaaaggaagtgcaggccctgatcgcagaaggcattgcgttggtgtgggagtcctacaaacttgacccatatgtacagcgcttagcagagactgtcttcaacttccaagaaaaggtggatgatctgctgatcattgaagaaaaaatagacctagaagtccgttccttggaaacttgtatgtatgaccataagacattctcggaaatcttgaacagagtccagaaagcagtggatgacttaaatctgcactcctattccaatttgcccatctgggtcaacaagcttgacatggagattgaaagaatattgggcgtccgtctgcaagctggcctgagagcttggacgcaggttcttcttggacaagctgaagataaagcagaagttgacatggacacagatgctccacaagttagtcacaagcctggtggagagccaaagatcaaaaatgtcgttcatgagctaagaataaccaatcaggtaatctacttgaatccaccaattgaagagtgcagatacaagctgtatcaggaaatgtttgcctggaagatggttgtactgtctctccccaggatccagagtcagaggtaccaggtgggtgtacattacgaattgactgaggaagagaaattctatcggaatgctttaacacggatgcctgatggccctgttgccctggaagagtcgtattctgctgtcatgggcattgtatctgaagttgaacagtatgtcaaggtttggcttcagtatcagtgtttatgggatatgcaagctgaaaacatctataacagacttggagaagatctcaacaaatggcaggctctcctggtccaaataaggaaggccagaggaacctttgacaatgcagaaaccaagaaagagtttggaccagtagttatagattatggcaaggtacaatctaaggtgaacttgaaatatgactcttggcataaggaggttcttagcaaatttgggcagatgctaggatcaaacatgacggaattccattcccagatctcaaagtcccgccaagagttggagcagcactcagtagacacggccagcacctccgatgcagtgaccttcatcacctatgtgcagtctttgaaacggaagatcaagcagtttgagaagcaagttgagctctaccgcaatggccagcgcttactggaaaagcaaaggttccagttcccaccttcctggctttatattgacaacatcgagggagagtggggagccttcaatgacatcatgcggcgaaaggactctgccattcagcagcaggtggcaaacctgcaaatgaagattgtccaggaggatcgggccgtggaaagccgcaccaccgacctgctgactgactgggagaagaccaagcctgtcacgggcaaccttcgcccagaagaggcacttcaggctctcaccatatatgaggggaagtttggtaggctgaaggacgacagagagaagtgtgcaaaggccaaggaggcgctggaattgacagatactgggcttctcagtggcagtgaagagcgcgtgcaggtggccttagaagaattacaggacctcaaaggcgtttggtcagaactttctaaggtttgggagcaaatcgatcagatgaaggagcaaccctgggtttcagtacagcctcgaaagcttcgacaaaatttggatgccctcctgaaccagctgaaaagcttccctgcccggttgcgacagtatgcgtcctatgagtttgttcagaggcttctgaaaggttacatgaagataaatatgctggtgattgaactgaaatccgaagcacttaaagaccgccattggaaacagctcatgaaaaggcttcacgttaattgggttgtttctgagctaacccttggccaaatctgggatgttgacttgcagaaaaatgaagcgattgtcaaggatgtactgcttgtggcacaaggggagatggctttggaagaatttttgaagcagataagagaagtgtggaatacttatgaactagacttggttaattatcagaacaagtgccgcttgatccgtggctgggatgacctcttcaacaaggtcaaagaacacatcaacagcgtctcggccatgaagctctctccgtattacaaggtttttgaagaggatgctctcagctgggaagataagctgaacaggatcatggctctctttgatgtgtggattgatgtgcagaggcggtgggtctacctggaaggtatcttcacaggcagtgcagatatcaagcacctgctgccagtggaaacccagcggtttcagagcatcagcactgagtttttggctctaatgaaaaaagtgtccaagtctccccttgttatggatgttctgaacatccagggagtacagaggtctctggaaagattggcagacctgctaggaaagatccagaaagcattgggagaatatctggaaagagagcggtcatctttccccaggttctattttgtgggtgatgaagatttgcttgaaatcattggaaacagcaagaatgtcgctaaattacagaaacacttcaagaagatgtttgctggagtttcgagcatcatcctgaacgaggataactctgttgttttgggtatttcatctcgggaaggagaggaggttatgtttaaaactcctgtgtcaattactgaacatcccaaaatcaatgagtggctcacattggtagaaaaggagatgagagtcaccctggccaaactgcttgctgagtctgttacggaagttgagatttttggtaaagcaacttcaattgacccaaatacctacatcacttggattgataaataccaggcccagcttgtggttttgtcagcccagatagcctggtctgagaacgtggagaccgcactgagcagcatgggcggaggtggagatgccgcgcccttgcactctgtgctgagcaatgtggaggtcaccctcaatgtgttagcagactctgtcctcatggagcagcccccactccgaaggcggaagctagaacacttgattacagagttggttcaccagagagatgttacaaggtccttgatcaaaagcaagattgacaacgccaaatcttttgaatggctcagccagatgcgattttactttgaccctaagcaaactgatgtgttacagcagttgtcaattcaaatggcaaatgccaaatttaactatggctttgagtacctgggtgttcaggacaaactggtccagacccccctcactgaccgctgctatttgacaatgacacaagccttggaggccaggctggggggttccccatttggacctgctggaactgggaaaacagagtctgtcaaagctcttggccatcagcttggacggtttgttttagttttcaactgtgatgaaacctttgatttccaggcaatgggccggatctttgtgggcctttgccaggtgggtgcctggggctgctttgacgagttcaaccgcctggaggagcggatgctctcggctgtgtcccagcaggtgcagtgcatacaggaagcactgcgtgaacattccaaccccaactacgacaagacctctgcccccattacttgtgagctgctgaacaaacaagtcaaggtgagcccggacatggccatcttcatcaccatgaaccctggctacgcgggccggtctaaccttcctgacaacttgaagaagctgttccggagcttggccatgaccaagcccgaccggcagttaatcgcccaggtcatgctgtactcacagggtttccgcactgctgaagtgcttgccaacaaaatcgtcccgttttttaaactatgcgatgagcagctctcttcccaaagccattatgacttcggtcttcgggctttgaagagtgtgctggtgagtgcaggcaatgtgaagagagagagaatccagaagataaagagggagaaagaggaacgaggggaagcagttgatgaaggagaaattgctgaaaatctccctgaacaagagattctgatacagagcgtctgtgagacgatggtgccaaagctggtggcagaggacatcccgctgctcttcagcctcctgtcggacgtgttccctggagtccagtatcacaggggtgagatgactgcccttcgagaggagctgaagaaagtgtgtcaggagatgtatttgacatatggagatggagaagaagttggtggaatgtgggttgaaaaggttctccagctctatcagatcacccagatcaatcatggcctgatgatggtggggccctcgggaagtgggaagagcatggcctggcgtgtcctgctgaaggcattggagagactcgagggtgtggaaggtgtggcccatatcatcgaccccaaggccatcagcaaagaccacctctacggaaccctggaccccaacaccagggaatggacagatgggctcttcacacacgtgctgagaaagatcatcgacagcgtgagaggcgagctgcagaagcgccagtggatcgtcttcgatggcgatgtggatccagagtgggttgagaacttgaactcagtgctggatgacaataagctcctaactttgcccaatggagagcgcctcagtcttccacccaangtgagaataatgtttgaggtacaggacttgaaatacgcgaccttggccacagtgtcgcgctgcggcatggtctggttcagtgaggatgtgctgagcaccgacatgatcttcaacaacttcctggccaggctgcgcagcatcccgctggatgaaggggaggatgaggcacagcggcggcgtaagggcaaagaggatgagggggaggaggccgcttcccccatgctgcagatccaaagagatgcagctacgatcatgcaaccgtacttcacgtccaacggcctggtcaccaaggcgctagagcacgccttccagctggagcacatcatggacctaacacgcctgcgctgcctgggctcgctcttctccatgctgcaccaggcctgccgcaacgtggcgcagtataacgccaaccatcccgacttccccatgcagatcgagcagctggagcgctacattcaggtcagggggcatcaggggcttcacagagctcaccactgcgccagaccacaggtctgaggacctctgaaatgctgcacctgtggggatgtgcgctctctcctaggcgaggcagagccttcgttgaggggctaggaaaggtgcagtgggtgtctgtgatgcaagaagactgggaaccactgtctttaggttaactttgctgtaagtgtctttcttttgttgttgaaattttataaaaatcaaagtttaattccctttttaatagcgatatctggtttatgccatactctggtccctgtctggagacagccggctaaaaatgagagcagagctgggtgaatacatcagaagaatcacgaccgtgcctctgcccactgcgcccaacatacccattatcgattatgaggtgtccatcagcggagaatggtctccgtggcaggccaaggtgcctcagattgaagtggagacgcacaaggtggcagcccctgatgtcgtcgtgccaacgctggacacagtccgccacgaagccctcttgtacacttggctggccgaacacaagcccctggtcttgtgtggccctcctgggtctggcaagaccatgacactcttcagcgccctccgggccttgcctgacatggaggtggtgggtctcaacttctccagtgctactactccagagctgcttctgaagacttttgatcactactgcgagtacaggcgcacacctaatggggtggttttggctcctgttcaacttggaaagtggctggtgttgttctgtgatgaaatcaacttgccagatatggataaatatgggacccagagggtcatatccttcatcagacagatggtggagcacggaggcttttaccgtacctcagatcaaacatgggtgaagctggagagaatccagtttgttggggcttgtaatccccccacagaccctggaagaaagcccctctcacacaggttcctgcgccacgtgcctgtcgtgtatgtggattacccgggccccgcctccctcacacagatctacggcaccttcaaccgcgccatgctgaggctcattccatccctgcggacgtatgcagagccgctcactgctgccatggtggagttctacaccatgtctcaggagagattcacccaggatacacaacctcactatatctattcaccccgtgaaatgactaggtgggtgagaggcatctttgaagcgctgagacctctggagaccctgcctgttgaaggcctcattcggatttgggcacatgaagctctgcgtctcttccaagatagactcgtagaggatgaggagaggcgttggactgatgagaacatcgacacggttgctctgaagcacttccctaacatcgacagagagaaggcaatgagccgacccatcttgtacagcaactggctgtcaaaggattacatcccagtagaccaagaagagttaagagattatgtcaaagctaggctgaaggtcttttatgaagaagaacttgatgttccgctggtgctgtttaatgaagtcctagaccacgtgctgaggattgacagaatattccgtcaacctcaaggccacttgcttctgattggtgttagtggagcaggaaaaactaccctgtctcgtttcgtcgcctggatgaacggtttgagtgtgtaccagattaaggtccataggaagtacacaggggaagactttgatgaagatctacggacagtgttgagacgttctggctgtaaaaatgaaaagatagcatttataatggatgaatctaatgtgttagattctggattcctggagcgaatgaatacccttctggccaatggagaggtgcctggtctctttgaaggagacgagtatgccaccttgatgacgcagtgcaaagagggggcacagaaggaaggcctgatgctggactcgcacgaggagctctacaagtggttcactagccaggttatccgcaacctccacgtcgtgttcaccatgaacccgtcctcggagggactcaaggaccgggcagctacatcaccagcacttttcaacaggtgtgtgttgaattggtttggagactggtccaccgaagcactgtatcaggttggcaaagaattcacaagtaagatggatctggagaagccaaattacatcgtgcctgattacatgccagttgtgtatgataagctgccgcagccaccatcccatcgggaagccattgtgaacagctgtgtgtttgttcatcagactcttcaccaggcgaatgctcggctagcaaagcgaggcggcagaacgatggccatcacccctcgccactacctggacttcatcaatcactatgccaacctgttccacgagaagcggagcgagctggaggagcagcagatgcacttgaacgtggggctcaggaagatcaaagagacagtcgaccaggtagaagaactgcgtcgtgacttgaggataaagagccaagagctggaggtgaagaatgcagcagccaatgacaagctgaaaaagatggtgaaagaccagcaggaggctgaaaagaagaaggttatgagccaagaaatccaggaacagctgcataagcagcaggaggtaattgcagacaaacagatgagtgtcaaagaagatcttgataaggtggaacctgccgtcattgaggcccagaatgctgtgaagtcgatcaagaagcagcacctggtggaggtgaggtccatggccaaccctcctgctgctgtgaagctggcgctggagtccatctgcctgctgctgggggaaagcaccacagactggaagcagatccgctccatcatcatgcgggagaacttcatccccaccatcgtcaacttctctgcagaggagatcagtgacgccataagggagaagatgaagaaaaattacatgtccaatccaagttacaattatgaaattgtgaatcgggcttccctggcttgcggccctatggtgaaatgggcaattgcacagcttaactatgcagacatgttaaagagagtggagcccctacgcaatgagctgcagaagctggaagatgacgccaaggacaaccagcagaaggccaacgaggtggagcagatgatccgagacctggaagccagcatcgcccgctacaaggaggaatacgccgtcctgatctcagaggcccaggccatcaaggcagacctggcagctgtcgaggcaaaagtaaaccggagcactgctcttctgaagagcttgtctgctgaacgtgaacgatgggaaaaaacaagtgaaactttcaaaaaccagatgtccaccattgctggggactgtctcttgtcagctgcgttcattgcctacgcgggttactttgaccagcagatgcgtcagaacttgttcactacctggtcccatcacctacagcaagccaacatccagttccgtacagatattgccaggacggaatacctttccaatgctgatgagcgtcttcgctggcaggccagctccttgcctgctgatgacctttgcacagaaaatgccatcatgctgaaacgattcaataggtatgagctcgggtgccaaggagaggcatgggaggaatgtgggtggtgatcttgaatttttttcaaaatacacccttgtttgaagagaggaatagaaaatggggcgtgggcatacagtgctggcagcttggt

SEQ ID NO: 462026 - DNA, 11138 bp, Homo sapiens
  misc_feature (7590)..(7590): n is a, c, g, or t
  misc_feature (10055)..(10055): n is a, c, g, or t
ttcaatgagagaacatttaatgagaggttaaggggcttagaacaacgccgggcacaggctaagcgctcactaaacgttagctctcgccaataacatcactgattcactataaagtttctctggctgtgtgctattcgctgcgtccacagcagtgaagaagacagacgcagcccctgaccaacctcgccaagcccgggcgccgagccaggacgttgagccaagtccccatctcctaggactcgcagtgcggaggctgcgggccccgaccagcgccgagactacaagtcccagaagggcgcgcggcgacatcgccgggcccgccccccgcgcacgcgcggcgccgtgacgctaaggccgcgagcgagcgcgggtggctgcggcggctgcggccggcggggcggggcggggccacctggcagtggctgcctttagggcggagccggctcccgctctcctcagtctgcggtgggctagcggacggtccggcttccggcggccgtttctgtctcttgctggctgtctcgctgagtcgcggccgccttctcatcgctcctggaaggtcccgagcgcgacaccatgtcggagcccgggggcggcggcggcgaggacggctcggccggattggaagtgtcggccgtgcagaatgtggcggacgtgtcggtgctgcagaagcacctgcgcaagctggtgccgctgctgctggaggacggcggcgaggcgccggccgcgctggaggcggcgctggaggagaagagcgccctggagcagatgcgcaagttcctttcggacccgcaggtccacacggtgctggtggagcgctccacgctcaaagaggacgtcggtgatgaaggagaagaagaaaaagaattcatttcctataacatcaacatagacattcattatggggttaaatccaatagcttggcattcattaaacgtactcccgtgattgatgcagataaacccgtgtcttctcagctccgggtccttacactcagtgaagactcgccctacgaaactttgcattctttcattagcaatgcagtggctcctttttttaagtcctacattagagagtctggcaaggcagacagggatggtgataaaatggctccttcagttgaaaagaagattgcagaactcgaaatgggactccttcacttgcagcaaaatattgaaattccggagatcagcctgccgattcatccaatgatcacaaatgttgcaaaacagtgttatgagcgtggagaaaagccaaaagttacagactttggtgataaggttgaagacccaacatttcttaatcagttacaatctggagttaaccgctggatccgagaaattcaaaaagtgaccaaactggatcgagatcctgcatcaggaactgccttacaggaaattagtttttggctaaacttggaacgtgcgttataccgcatccaggagaaacgggagagcccggaagttctcctgactctggatatcttgaaacatggcaagcgcttccatgccaccgtcagttttgacactgacacaggtctaaaacaggctttggaaactgtgaatgactacaatcctctgatgaaagatttccctctgaatgatttgctgtctgccacggagctggacaaaataagacaggcgcttgttgccattttcacacatttgagaaagatccgaaacacaaaatatcctattcagagggcactgcgtttggtggaggcaatttcaagagacttgagttctcaattactcaaagtattgggcactaggaaattgatgcatgttgcttatgaagaatttgaaaaagttatggtagcatgctttgaagtttttcagacttgggatgatgagtatgagaaacttcaggtattgttgagagacatcgtcaaaagaaaaagggaagaaaatctgaagatggtgtggcgtatcaaccctgcccacaggaagctgcaggcccgccttgaccagatgagaaaatttagacgccagcatgaacagctaagagctgttatcgtcagggtcctgaggccacaggtcacggcagttgcacaacagaatcaaggagaggtccctgaaccccaagatatgaaagtggctgaggttctctttgatgctgcagatgcaaatgccattgaggaagtaaaccttgcttatgagaacgtcaaggaagtggatggactggatgtttccaaagagggcacggaagcctgggaggctgctatgaagaggtacgatgagaggatcgacagagtggagacccggatcaccgctcgccttcgggatcagcttggcacagccaagaatgccaacgagatgtttaggattttctccaggtttaatgcactgtttgtcaggcctcacatccgtggggccattcgtgactaccagacccagctgatccagcgcgtgaaagatgacattgagtctcttcacgacaagttcaaggtccagtacccacagagtcaggcttgtaagatgagtcacgttcgtgacttgccccctgtgtcagggtctatcatctgggctaaacagatcgacaggcagctgacggcctacatgaagcgggtggaagatgtccttggcaagggctgggagaatcacgtggaggggcagaagctgaagcaggatggagacagcttccgcatgaagctcaacacgcaggagatctttgatgactgggcaaggaaggtgcagcagcgcaacctcggtgtctcggggcgcattttcaccatcgaaagtactcgggttcggggccgaactggaaatgtgcttaagctgaaagttaactttcttcctgagattatcacactatccaaagaagtccggaacctcaaatggcttggtttccgcgtcccactggcgattgtgaacaaagcccatcaagcaaaccagctttacccgtttgccatctcactgatcgagagcgttcgtacctatgaacggacctgcgagaaggtggaggagcggaacaccatttcccttttggtggctggcttgaaaaaggaagtgcaggccctgatcgcagaaggcattgcgttggtgtgggagtcctacaaacttgacccatatgtacagcgcttagcagagactgtcttcaacttccaagaaaaggtggatgatctgctgatcattgaagaaaaaatagacctagaagtccgttccttggaaacttgtatgtatgaccataagacattctcggaaatcttgaacagagtccagaaagcagtggatgacttaaatctgcactcctattccaatttgcccatctgggtcaacaagcttgacatggagattgaaagaatattgggcgtccgtctgcaagctggcctgagagcttggacgcaggttcttcttggacaagctgaagataaagcagaagttgacatggacacagatgctccacaagttagtcacaagcctggtggagagccaaagatcaaaaatgtcgttcatgagctaagaataaccaatcaggtaatctacttgaatccaccaattgaagagtgcagatacaagctgtatcaggaaatgtttgcctggaagatggttgtactgtctctccccaggatccagagtcagaggtaccaggtgggtgtacattacgaattgactgaggaagagaaattctatcggaatgctttaacacggatgcctgatggccctgttgccctggaagagtcgtattctgctgtcatgggcattgtatctgaagttgaacagtatgtcaaggtttggcttcagtatcagtgtttatgggatatgcaagctgaaaacatctataacagacttggagaagatctcaacaaatggcaggctctcctggtccaaataaggaaggccagaggaacctttgacaatgcagaaaccaagaaagagtttggaccagtagttatagattatggcaaggtacaatctaaggtgaacttgaaatatgactcttggcataaggaggttcttagcaaatttgggcagatgctaggatcaaacatgacggaattccattcccagatctcaaagtcccgccaagagttggagcagcactcagtagacacggccagcacctccgatgcagtgaccttcatcacctatgtgcagtctttgaaacggaagatcaagcagtttgagaagcaagttgagctctaccgcaatggccagcgcttactggaaaagcaaaggttccagttcccaccttcctggctttatattgacaacatcgagggagagtggggagccttcaatgacatcatgcggcgaaaggactctgccattcagcagcaggtggcaaacctgcaaatgaagattgtccaggaggatcgggccgtggaaagccgcaccaccgacctgctgactgactgggagaagaccaagcctgtcacgggcaaccttcgcccagaagaggcacttcaggctctcaccatatatgaggggaagtttggtaggctgaaggacgacagagagaagtgtgcaaaggccaaggaggcgctggaattgacagatactgggcttctcagtggcagtgaagagcgcgtgcaggtggccttagaagaattacaggacctcaaaggcgtttggtcagaactttctaaggtttgggagcaaatcgatcagatgaaggagcaaccctgggtttcagtacagcctcgaaagcttcgacaaaatttggatgccctcctgaaccagctgaaaagcttccctgcccggttgcgacagtatgcgtcctatgagtttgttcagaggcttctgaaaggttacatgaagataaatatgctggtgattgaactgaaatccgaagcacttaaagaccgccattggaaacagctcatgaaaaggcttcacgttaattgggttgtttctgagctaacccttggccaaatctgggatgttgacttgcagaaaaatgaagcgattgtcaaggatgtactgcttgtggcacaaggggagatggctttggaagaatttttgaagcagataagagaagtgtggaatacttatgaactagacttggttaattatcagaacaagtgccgcttgatccgtggctgggatgacctcttcaacaaggtcaaagaacacatcaacagcgtctcggccatgaagctctctccgtattacaaggtttttgaagaggatgctctcagctgggaagataagctgaacaggatcatggctctctttgatgtgtggattgatgtgcagaggcggtgggtctacctggaaggtatcttcacaggcagtgcagatatcaagcacctgctgccagtggaaacccagcggtttcagagcatcagcactgagtttttggctctaatgaaaaaagtgtccaagtctccccttgttatggatgttctgaacatccagggagtacagaggtctctggaaagattggcagacctgctaggaaagatccagaaagcattgggagaatatctggaaagagagcggtcatctttccccaggttctattttgtgggtgatgaagatttgcttgaaatcattggaaacagcaagaatgtcgctaaattacagaaacacttcaagaagatgtttgctggagtttcgagcatcatcctgaacgaggataactctgttgttttgggtatttcatctcgggaaggagaggaggttatgtttaaaactcctgtgtcaattactgaacatcccaaaatcaatgagtggctcacattggtagaaaaggagatgagagtcaccctggccaaactgcttgctgagtctgttacggaagttgagatttttggtaaagcaacttcaattgacccaaatacctacatcacttggattgataaataccaggcccagcttgtggttttgtcagcccagatagcctggtctgagaacgtggagaccgcactgagcagcatgggcggaggtggagatgccgcgcccttgcactctgtgctgagcaatgtggaggtcaccctcaatgtgttagcagactctgtcctcatggagcagcccccactccgaaggcggaagctagaacacttgattacagagttggttcaccagagagatgttacaaggtccttgatcaaaagcaagattgacaacgccaaatcttttgaatggctcagccagatgcgattttactttgaccctaagcaaactgatgtgttacagcagttgtcaattcaaatggcaaatgccaaatttaactatggctttgagtacctgggtgttcaggacaaactggtccagacccccctcactgaccgctgctatttgacaatgacacaagccttggaggccaggctggggggttccccatttggacctgctggaactgggaaaacagagtctgtcaaagctcttggccatcagcttggacggtttgttttagttttcaactgtgatgaaacctttgatttccaggcaatgggccggatctttgtgggcctttgccaggtgggtgcctggggctgctttgacgagttcaaccgcctggaggagcggatgctctcggctgtgtcccagcaggtgcagtgcatacaggaagcactgcgtgaacattccaaccccaactacgacaagacctctgcccccattacttgtgagctgctgaacaaacaagtcaaggtgagcccggacatggccatcttcatcaccatgaaccctggctacgcgggccggtctaaccttcctgacaacttgaagaagctgttccggagcttggccatgaccaagcccgaccggcagttaatcgcccaggtcatgctgtactcacagggtttccgcactgctgaagtgcttgccaacaaaatcgtcccgttttttaaactatgcgatgagcagctctcttcccaaagccattatgacttcggtcttcgggctttgaagagtgtgctggtgagtgcaggcaatgtgaagagagagagaatccagaagataaagagggagaaagaggaacgaggggaagcagttgatgaaggagaaattgctgaaaatctccctgaacaagagattctgatacagagcgtctgtgagacgatggtgccaaagctggtggcagaggacatcccgctgctcttcagcctcctgtcggacgtgttccctggagtccagtatcacaggggtgagatgactgcccttcgagaggagctgaagaaagtgtgtcaggagatgtatttgacatatggagatggagaagaagttggtggaatgtgggttgaaaaggttctccagctctatcagatcacccagatcaatcatggcctgatgatggtggggccctcgggaagtgggaagagcatggcctggcgtgtcctgctgaaggcattggagagactcgagggtgtggaaggtgtggcccatatcatcgaccccaaggccatcagcaaagaccacctctacggaaccctggaccccaacaccagggaatggacagatgggctcttcacacacgtgctgagaaagatcatcgacagcgtgagaggcgagctgcagaagcgccagtggatcgtcttcgatggcgatgtggatccagagtgggttgagaacttgaactcagtgctggatgacaataagctcctaactttgcccaatggagagcgcctcagtcttccacccaangtgagaataatgtttgaggtacaggacttgaaatacgcgaccttggccacagtgtcgcgctgcggcatggtctggttcagtgaggatgtgctgagcaccgacatgatcttcaacaacttcctggccaggctgcgcagcatcccgctggatgaaggggaggatgaggcacagcggcggcgtaagggcaaagaggatgagggggaggaggccgcttcccccatgctgcagatccaaagagatgcagctacgatcatgcaaccgtacttcacgtccaacggcctggtcaccaaggcgctagagcacgccttccagctggagcacatcatggacctaacacgcctgcgctgcctgggctcgctcttctccatgctgcaccaggcctgccgcaacgtggcgcagtataacgccaaccatcccgacttccccatgcagatcgagcagctggagcgctacattcaggtcagggggcatcaggggcttcacagagctcaccactgcgccagaccacaggtctgaggacctctgaaatgctgcacctgtggggatgtgcgctctctcctaggcgaggcagagccttcgttgaggggctaggaaaggtgcagtgggtgtctgtgatgcaagaagactgggaaccactgtctttaggttaactttgctgtaagtgtctttcttttgttgttgaaattttataaaaatcaaagtttaattccctttttaatagcgatatctggtttatgccatactctggtccctgtctggagacagccggctaaaaatgagagcagagctgggtgaatacatcagaagaatcacgaccgtgcctctgcccactgcgcccaacatacccattatcgattatgaggtgtccatcagcggagaatggtctccgtggcaggccaaggtgcctcagattgaagtggagacgcacaaggtggcagcccctgatgtcgtcgtgccaacgctggacacagtccgccacgaagccctcttgtacacttggctggccgaacacaagcccctggtcttgtgtggccctcctgggtctggcaagaccatgacactcttcagcgccctccgggccttgcctgacatggaggtggtgggtctcaacttctccagtgctactactccagagctgcttctgaagacttttgatcactactgcgagtacaggcgcacacctaatggggtggttttggctcctgttcaacttggaaagtggctggtgttgttctgtgatgaaatcaacttgccagatatggataaatatgggacccagagggtcatatccttcatcagacagatggtggagcacggaggcttttaccgtacctcagatcaaacatgggtgaagctggagagaatccagtttgttggggcttgtaatccccccacagaccctggaagaaagcccctctcacacaggttcctgcgccacgtgcctgtcgtgtatgtggattacccgggccccgcctccctcacacagatctacggcaccttcaaccgcgccatgctgaggctcattccatccctgcggacgtatgcagagccgctcactgctgccatggtggagttctacaccatgtctcaggagagattcacccaggatacacaacctcactatatctattcaccccgtgaaatgactaggtgggtgagaggcatctttgaagcgctgagacctctggagaccctgcctgttgaaggcctcattcggatttgggcacatgaagctctgcgtctcttccaagatagactcgtagaggatgaggagaggcgttggactgatgagaacatcgacacggttgctctgaagcacttccctaacatcgacagagagaaggcaatgagccgacccatcttgtacagcaactggctgtcaaaggtagcaaactcgcatcatttcagacatacttctttttctgccatccctttctaacactaacgaattctaacgaattatcttctactcaaaaatatctttaggctgggtatggtgtctcacacctgtaatcccagcactttgggaggctgaggcaggaggatcacttgatcccaggagtttgagaccagcctgggcaacatagtaagactccacctctacaaaaaaatttgaaaatttagccaggcaaggtaactcacgcctatggtcccagcaacttgggaggcttgagcccaggaagtcacagtgagctgtggtcacaccaccatactgcagcctgggtaaaagagcaaaaccctgtttcaaaaaatacttcagaaaacaaaatatcagccgggcgcggtggctcatgcctgtaatcccagcactttgggaggctgaggcggtggatcacctgaggtcgggagttcgagaccagcctgacctacatggagaaaccccatctctactaaaaatacaaaattagctgggcgtggtgacgcatgtctgtaatcccagctatttaggaggctgaggcaggagnatctttggaacccgggaggcagaagttgcggtgagctgagatcgcgccattgcactgcagcctcagcaacaagagcgaaactctgtctcaaagaaaaaaaaaatacagcgaggtgcaatggcacacgcctgtaatcccagcactttgggaggccaaggcaggcagatcacttgaggtcaggggttcgagaccagcctggacaacatgctgaaactccatctctactaaaaagacaaaaattagccaggcatggtggcatgtgcctgtaatcccagctactcaggagtctgagaatcgcttgaacccgggagacagaggttgcagtgagccaaggtcacgccactgcatctagcctgggcgacagagggagactctgtctcaaaaaaaaaaaaaaattgccaggtatggtggcgtgtgcctatagtcccagctacttgagaggcaggagaatcacttgaacccaggaggcagaggttgcagtgagctgagatcaggccactgcactctagcctgggtgacagagtgagaccctgtctcaaggaaaaaaaaaaaaaaaaaaagatgtatctttgaaactcttaatcacatttctaattgagtttgtgtattgagtgagcagtgggtccgttttcagttctttccttatggacacccattatcccagcaaagtttattaaataataatttactctgcagtatctgtctgtcatcatagtttccctgtgtgcataggtatccgttagttgttctctgtgctaaaaccacatggtcctgattatggtaataagtctgtttaatagggcaggcccaggccaggtgcggtggctcacgcctgtaatcccagcactttgggaggccgagaccggcagatcacaaggtcaagagatcaagaccatcctggccaacgtggtgaaacccgtctgtactaaaaatacaaaaattacctgggcatggtggtacgtgcctgtagtcccagctacttgggaggctgaggcaggagaattgcttgaacccaggaggcggaggttgcagtgagctgagatcgtgccacagcactccagcctggtgacagagcgaggctac

SEQ ID NO: 462027 - DNA, 1187 bp, Homo sapiens
gcgactgtgggactgtggcccaggtgtggacatgatcagtaaaatgctgaagatgcagatgttggaggatgaggacgacctggcctacgcagagactgagaagaagacgaggacagactccacgtccgacgggcgccctgcctggatgcggacactgcacaccaccgcgtccaactggctgcacctcatcccccagacgctgagccacctcaagcgcaccgtggagaatatcaaggatcctttgttcaggttctttgagagagaagtgaagatgggcgcaaagctgcttcaggacgttcgccaggaccttgcagatgtcgtccaggtgtgcgaaggaaagaagaagcagaccaactacttgcgcacgctgatcaacgagctagtgaaagggatcttgcctcggagctggtcccactacacggtgcctgccggcatgaccgtcatccagtgggtgtccgacttcagcgagaggatcaaacagctgcagaacatctcactggcagctgcatctggtggcgccaaggagctaaagaacatccacgtgtgcctgggtggcctgttcgtgcctgaggcgtacatcactgccaccaggcagtatgtggcccaggccaacagctggtccctggaggagctctgcctggaagtcaacgtcaccacctcacagggcgccacccttgacgcttgcagcttcggagtcacgggtttgaaacttcaaggggccacgtgcaacaacaacaagctgtcactgtccaatgccatctcaaccgcccttcccctgacgcagctgcgctgggtcaagcagacaaacaccgagaagaaggccagtgtggtaaccttacctgtctacctgaacttcacccgtgcagacctcatcttcaccgtggacttcgaaattgctacaaaggaggatcctcgcagcttctacgagcggggtgtcgcagtcttgtgcacagagtaaacttttctagctgcccctttctgtaatagtgaaagttggtatttaacatttattcatttttaaaatatttggaaggtctgagcttgtgaaaagaaagtggttggtctgaggttggaggaagctgaatggaatctgacggttgggagtggtggaaattggaaggataccaggaggtatttgggaaggccaatggcgtggctcctttgaggaaataaaacactaagcatga

SEQ ID NO: 462028 - DNA, 975 bp, Homo sapiens
ttcacccttttgaacgattttaggatcctttgttcaggttctttgagagagaagtgaagatgggcgcaaagctgcttcaggacgttcgccaggaccttgcagatgtcgtccaggtgtgcgaaggaaagaagaagcagaccaactacttgcgcacgctgatcaacgagctagtgaaagggatcttgcctcggagctggtcccactacacggtgcctgccggcatgaccgtcatccagtgggtgtccgacttcagcgagaggatcaaacagctgcagaacatctcactggcagctgcatctggtggcgccaaggagctaaagaacatccacgtgtgcctgggtggcctgttcgtgcctgaggcgtacatcactgccaccaggcagtatgtggcccaggccaacagctggtccctggaggagctctgcctggaagtcaacgtcaccacctcacagggcgccacccttgacgcttgcagcttcggagtcacgggtttgaaacttcaaggggccacgtgcaacaacaacaagctgtcactgtccaatgccatctcaaccgcccttcccctgacgcagctgcgctgggtcaagcagacaaacaccgagaagaaggccagtgtggtaaccttacctgtctacctgaacttcacccgtgcagacctcatcttcaccgtggacttcgaaattgctacaaaggaggatcctcgcagcttctacgagcggggtgtcgcagtcttgtgcacagagtaaacttttctagctgcccctttctgtaatagtgaaagttggtatttaacatttattcatttttaaaatatttggaaggtctgagcttgtgaaaagaaagtggttggtctgaggttggaggaagctgaatggaatctgacggttgggagtggtggaaattggaaggataccaggaggtatttgggaaggccaatggcgtggctcctttgaggaaataaaacactaagcatga

SEQ ID NO: 462029 - DNA, 9182 bp, Homo sapiens
  misc_feature (7590)..(7590): n is a, c, g, or t
  misc_feature (9129)..(9129): n is a, c, g, or t
  misc_feature (9137)..(9137): n is a, c, g, or t
  misc_feature (9140)..(9140): n is a, c, g, or t
  misc_feature (9143)..(9143): n is a, c, g, or t
  misc_feature (9164)..(9164): n is a, c, g, or t
ttcaatgagagaacatttaatgagaggttaaggggcttagaacaacgccgggcacaggctaagcgctcactaaacgttagctctcgccaataacatcactgattcactataaagtttctctggctgtgtgctattcgctgcgtccacagcagtgaagaagacagacgcagcccctgaccaacctcgccaagcccgggcgccgagccaggacgttgagccaagtccccatctcctaggactcgcagtgcggaggctgcgggccccgaccagcgccgagactacaagtcccagaagggcgcgcggcgacatcgccgggcccgccccccgcgcacgcgcggcgccgtgacgctaaggccgcgagcgagcgcgggtggctgcggcggctgcggccggcggggcggggcggggccacctggcagtggctgcctttagggcggagccggctcccgctctcctcagtctgcggtgggctagcggacggtccggcttccggcggccgtttctgtctcttgctggctgtctcgctgagtcgcggccgccttctcatcgctcctggaaggtcccgagcgcgacaccatgtcggagcccgggggcggcggcggcgaggacggctcggccggattggaagtgtcggccgtgcagaatgtggcggacgtgtcggtgctgcagaagcacctgcgcaagctggtgccgctgctgctggaggacggcggcgaggcgccggccgcgctggaggcggcgctggaggagaagagcgccctggagcagatgcgcaagttcctttcggacccgcaggtccacacggtgctggtggagcgctccacgctcaaagaggacgtcggtgatgaaggagaagaagaaaaagaattcatttcctataacatcaacatagacattcattatggggttaaatccaatagcttggcattcattaaacgtactcccgtgattgatgcagataaacccgtgtcttctcagctccgggtccttacactcagtgaagactcgccctacgaaactttgcattctttcattagcaatgcagtggctcctttttttaagtcctacattagagagtctggcaaggcagacagggatggtgataaaatggctccttcagttgaaaagaagattgcagaactcgaaatgggactccttcacttgcagcaaaatattgaaattccggagatcagcctgccgattcatccaatgatcacaaatgttgcaaaacagtgttatgagcgtggagaaaagccaaaagttacagactttggtgataaggttgaagacccaacatttcttaatcagttacaatctggagttaaccgctggatccgagaaattcaaaaagtgaccaaactggatcgagatcctgcatcaggaactgccttacaggaaattagtttttggctaaacttggaacgtgcgttataccgcatccaggagaaacgggagagcccggaagttctcctgactctggatatcttgaaacatggcaagcgcttccatgccaccgtcagttttgacactgacacaggtctaaaacaggctttggaaactgtgaatgactacaatcctctgatgaaagatttccctctgaatgatttgctgtctgccacggagctggacaaaataagacaggcgcttgttgccattttcacacatttgagaaagatccgaaacacaaaatatcctattcagagggcactgcgtttggtggaggcaatttcaagagacttgagttctcaattactcaaagtattgggcactaggaaattgatgcatgttgcttatgaagaatttgaaaaagttatggtagcatgctttgaagtttttcagacttgggatgatgagtatgagaaacttcaggtattgttgagagacatcgtcaaaagaaaaagggaagaaaatctgaagatggtgtggcgtatcaaccctgcccacaggaagctgcaggcccgccttgaccagatgagaaaatttagacgccagcatgaacagctaagagctgttatcgtcagggtcctgaggccacaggtcacggcagttgcacaacagaatcaaggagaggtccctgaaccccaagatatgaaagtggctgaggttctctttgatgctgcagatgcaaatgccattgaggaagtaaaccttgcttatgagaacgtcaaggaagtggatggactggatgtttccaaagagggcacggaagcctgggaggctgctatgaagaggtacgatgagaggatcgacagagtggagacccggatcaccgctcgccttcgggatcagcttggcacagccaagaatgccaacgagatgtttaggattttctccaggtttaatgcactgtttgtcaggcctcacatccgtggggccattcgtgactaccagacccagctgatccagcgcgtgaaagatgacattgagtctcttcacgacaagttcaaggtccagtacccacagagtcaggcttgtaagatgagtcacgttcgtgacttgccccctgtgtcagggtctatcatctgggctaaacagatcgacaggcagctgacggcctacatgaagcgggtggaagatgtccttggcaagggctgggagaatcacgtggaggggcagaagctgaagcaggatggagacagcttccgcatgaagctcaacacgcaggagatctttgatgactgggcaaggaaggtgcagcagcgcaacctcggtgtctcggggcgcattttcaccatcgaaagtactcgggttcggggccgaactggaaatgtgcttaagctgaaagttaactttcttcctgagattatcacactatccaaagaagtccggaacctcaaatggcttggtttccgcgtcccactggcgattgtgaacaaagcccatcaagcaaaccagctttacccgtttgccatctcactgatcgagagcgttcgtacctatgaacggacctgcgagaaggtggaggagcggaacaccatttcccttttggtggctggcttgaaaaaggaagtgcaggccctgatcgcagaaggcattgcgttggtgtgggagtcctacaaacttgacccatatgtacagcgcttagcagagactgtcttcaacttccaagaaaaggtggatgatctgctgatcattgaagaaaaaatagacctagaagtccgttccttggaaacttgtatgtatgaccataagacattctcggaaatcttgaacagagtccagaaagcagtggatgacttaaatctgcactcctattccaatttgcccatctgggtcaacaagcttgacatggagattgaaagaatattgggcgtccgtctgcaagctggcctgagagcttggacgcaggttcttcttggacaagctgaagataaagcagaagttgacatggacacagatgctccacaagttagtcacaagcctggtggagagccaaagatcaaaaatgtcgttcatgagctaagaataaccaatcaggtaatctacttgaatccaccaattgaagagtgcagatacaagctgtatcaggaaatgtttgcctggaagatggttgtactgtctctccccaggatccagagtcagaggtaccaggtgggtgtacattacgaattgactgaggaagagaaattctatcggaatgctttaacacggatgcctgatggccctgttgccctggaagagtcgtattctgctgtcatgggcattgtatctgaagttgaacagtatgtcaaggtttggcttcagtatcagtgtttatgggatatgcaagctgaaaacatctataacagacttggagaagatctcaacaaatggcaggctctcctggtccaaataaggaaggccagaggaacctttgacaatgcagaaaccaagaaagagtttggaccagtagttatagattatggcaaggtacaatctaaggtgaacttgaaatatgactcttggcataaggaggttcttagcaaatttgggcagatgctaggatcaaacatgacggaattccattcccagatctcaaagtcccgccaagagttggagcagcactcagtagacacggccagcacctccgatgcagtgaccttcatcacctatgtgcagtctttgaaacggaagatcaagcagtttgagaagcaagttgagctctaccgcaatggccagcgcttactggaaaagcaaaggttccagttcccaccttcctggctttatattgacaacatcgagggagagtggggagccttcaatgacatcatgcggcgaaaggactctgccattcagcagcaggtggcaaacctgcaaatgaagattgtccaggaggatcgggccgtggaaagccgcaccaccgacctgctgactgactgggagaagaccaagcctgtcacgggcaaccttcgcccagaagaggcacttcaggctctcaccatatatgaggggaagtttggtaggctgaaggacgacagagagaagtgtgcaaaggccaaggaggcgctggaattgacagatactgggcttctcagtggcagtgaagagcgcgtgcaggtggccttagaagaattacaggacctcaaaggcgtttggtcagaactttctaaggtttgggagcaaatcgatcagatgaaggagcaaccctgggtttcagtacagcctcgaaagcttcgacaaaatttggatgccctcctgaaccagctgaaaagcttccctgcccggttgcgacagtatgcgtcctatgagtttgttcagaggcttctgaaaggttacatgaagataaatatgctggtgattgaactgaaatccgaagcacttaaagaccgccattggaaacagctcatgaaaaggcttcacgttaattgggttgtttctgagctaacccttggccaaatctgggatgttgacttgcagaaaaatgaagcgattgtcaaggatgtactgcttgtggcacaaggggagatggctttggaagaatttttgaagcagataagagaagtgtggaatacttatgaactagacttggttaattatcagaacaagtgccgcttgatccgtggctgggatgacctcttcaacaaggtcaaagaacacatcaacagcgtctcggccatgaagctctctccgtattacaaggtttttgaagaggatgctctcagctgggaagataagctgaacaggatcatggctctctttgatgtgtggattgatgtgcagaggcggtgggtctacctggaaggtatcttcacaggcagtgcagatatcaagcacctgctgccagtggaaacccagcggtttcagagcatcagcactgagtttttggctctaatgaaaaaagtgtccaagtctccccttgttatggatgttctgaacatccagggagtacagaggtctctggaaagattggcagacctgctaggaaagatccagaaagcattgggagaatatctggaaagagagcggtcatctttccccaggttctattttgtgggtgatgaagatttgcttgaaatcattggaaacagcaagaatgtcgctaaattacagaaacacttcaagaagatgtttgctggagtttcgagcatcatcctgaacgaggataactctgttgttttgggtatttcatctcgggaaggagaggaggttatgtttaaaactcctgtgtcaattactgaacatcccaaaatcaatgagtggctcacattggtagaaaaggagatgagagtcaccctggccaaactgcttgctgagtctgttacggaagttgagatttttggtaaagcaacttcaattgacccaaatacctacatcacttggattgataaataccaggcccagcttgtggttttgtcagcccagatagcctggtctgagaacgtggagaccgcactgagcagcatgggcggaggtggagatgccgcgcccttgcactctgtgctgagcaatgtggaggtcaccctcaatgtgttagcagactctgtcctcatggagcagcccccactccgaaggcggaagctagaacacttgattacagagttggttcaccagagagatgttacaaggtccttgatcaaaagcaagattgacaacgccaaatcttttgaatggctcagccagatgcgattttactttgaccctaagcaaactgatgtgttacagcagttgtcaattcaaatggcaaatgccaaatttaactatggctttgagtacctgggtgttcaggacaaactggtccagacccccctcactgaccgctgctatttgacaatgacacaagccttggaggccaggctggggggttccccatttggacctgctggaactgggaaaacagagtctgtcaaagctcttggccatcagcttggacggtttgttttagttttcaactgtgatgaaacctttgatttccaggcaatgggccggatctttgtgggcctttgccaggtgggtgcctggggctgctttgacgagttcaaccgcctggaggagcggatgctctcggctgtgtcccagcaggtgcagtgcatacaggaagcactgcgtgaacattccaaccccaactacgacaagacctctgcccccattacttgtgagctgctgaacaaacaagtcaaggtgagcccggacatggccatcttcatcaccatgaaccctggctacgcgggccggtctaaccttcctgacaacttgaagaagctgttccggagcttggccatgaccaagcccgaccggcagttaatcgcccaggtcatgctgtactcacagggtttccgcactgctgaagtgcttgccaacaaaatcgtcccgttttttaaactatgcgatgagcagctctcttcccaaagccattatgacttcggtcttcgggctttgaagagtgtgctggtgagtgcaggcaatgtgaagagagagagaatccagaagataaagagggagaaagaggaacgaggggaagcagttgatgaaggagaaattgctgaaaatctccctgaacaagagattctgatacagagcgtctgtgagacgatggtgccaaagctggtggcagaggacatcccgctgctcttcagcctcctgtcggacgtgttccctggagtccagtatcacaggggtgagatgactgcccttcgagaggagctgaagaaagtgtgtcaggagatgtatttgacatatggagatggagaagaagttggtggaatgtgggttgaaaaggttctccagctctatcagatcacccagatcaatcatggcctgatgatggtggggccctcgggaagtgggaagagcatggcctggcgtgtcctgctgaaggcattggagagactcgagggtgtggaaggtgtggcccatatcatcgaccccaaggccatcagcaaagaccacctctacggaaccctggaccccaacaccagggaatggacagatgggctcttcacacacgtgctgagaaagatcatcgacagcgtgagaggcgagctgcagaagcgccagtggatcgtcttcgatggcgatgtggatccagagtgggttgagaacttgaactcagtgctggatgacaataagctcctaactttgcccaatggagagcgcctcagtcttccacccaangtgagaataatgtttgaggtacaggacttgaaatacgcgaccttggccacagtgtcgcgctgcggcatggtctggttcagtgaggatgtgctgagcaccgacatgatcttcaacaacttcctggccaggctgcgcagcatcccgctggatgaaggggaggatgaggcacagcggcggcgtaagggcaaagaggatgagggggaggaggccgcttcccccatgctgcagatccaaagagatgcagctacgatcatgcaaccgtacttcacgtccaacggcctggtcaccaaggcgctagagcacgccttccagctggagcacatcatggacctaacacgcctgcgctgcctgggctcgctcttctccatgctgcaccaggcctgccgcaacgtggcgcagtataacgccaaccatcccgacttccccatgcagatcgagcagctggagcgctacattcaggtcagggggcatcaggggcttcacagagctcaccactgcgccagaccacaggtctgaggacctctgaaatgctgcacctgtggggatgtgcgctctctcctaggcgaggcagagccttcgttgaggggctaggaaaggtgcagtgggtgtctgtgatgcaagaagactgggaaccactgtctttaggttaactttgctgtaagtgtctttcttttgttgttgaaattttataaaaatcaaagtttaattccctttttaatagcgatatctggtttatgccatactctggtccctgtctggagacagccggctaaaaatgagagcagagctgggtgaatacatcagaagaatcacgaccgtgcctctgcccactgcgcccaacatacccattatcgattatgaggtgtccatcagcggagaatggtctccgtggcaggccaaggtgcctcagattgaagtggagacgcacaaggtggcagcccctgatgtcgtcgtgccaacgctggacacagtccgccacgaagccctcttgtacacttggctggccgaacacaagcccctggtcttgtgtggccctcctgggtctggcaagaccatgacactcttcagcgccctccgggccttgcctgacatggaggtggtgggtctcaacttctccagtgctactactccagagctgcttctgaagacttttgatcactactgcgagtacaggcgcacacctaatggggtggttttggctcctgttcaacttggaaagtggctggtgttgttctgtgatgaaatcaacttgccagatatggataaatatgggacccagagggtcatatccttcatcagacagatggtggagcacggaggcttttaccgtacctcagatcaaacatgggtgaagctggagagaatccagtttgttggggcttgtaatccccccacagaccctggaagaaagcccctctcacacaggttcctgcgccacgtgcctgtcgtgtatgtggattacccgggccccgcctccctcacacagatctacggcaccttcaaccgcgccatgctgaggctcattccatccctgcgtanataaccanacncgntcatactgtctcctcagtgtnaaacgacaccaccagtca

SEQ ID NO: 462030 - DNA, 9122 bp, Homo sapiens
  misc_feature (7590)..(7590): n is a, c, g, or t
  misc_feature (9069)..(9069): n is a, c, g, or t
  misc_feature (9077)..(9077): n is a, c, g, or t
  misc_feature (9080)..(9080): n is a, c, g, or t
  misc_feature (9083)..(9083): n is a, c, g, or t
  misc_feature (9104)..(9104): n is a, c, g, or t
ttcaatgagagaacatttaatgagaggttaaggggcttagaacaacgccgggcacaggctaagcgctcactaaacgttagctctcgccaataacatcactgattcactataaagtttctctggctgtgtgctattcgctgcgtccacagcagtgaagaagacagacgcagcccctgaccaacctcgccaagcccgggcgccgagccaggacgttgagccaagtccccatctcctaggactcgcagtgcggaggctgcgggccccgaccagcgccgagactacaagtcccagaagggcgcgcggcgacatcgccgggcccgccccccgcgcacgcgcggcgccgtgacgctaaggccgcgagcgagcgcgggtggctgcggcggctgcggccggcggggcggggcggggccacctggcagtggctgcctttagggcggagccggctcccgctctcctcagtctgcggtgggctagcggacggtccggcttccggcggccgtttctgtctcttgctggctgtctcgctgagtcgcggccgccttctcatcgctcctggaaggtcccgagcgcgacaccatgtcggagcccgggggcggcggcggcgaggacggctcggccggattggaagtgtcggccgtgcagaatgtggcggacgtgtcggtgctgcagaagcacctgcgcaagctggtgccgctgctgctggaggacggcggcgaggcgccggccgcgctggaggcggcgctggaggagaagagcgccctggagcagatgcgcaagttcctttcggacccgcaggtccacacggtgctggtggagcgctccacgctcaaagaggacgtcggtgatgaaggagaagaagaaaaagaattcatttcctataacatcaacatagacattcattatggggttaaatccaatagcttggcattcattaaacgtactcccgtgattgatgcagataaacccgtgtcttctcagctccgggtccttacactcagtgaagactcgccctacgaaactttgcattctttcattagcaatgcagtggctcctttttttaagtcctacattagagagtctggcaaggcagacagggatggtgataaaatggctccttcagttgaaaagaagattgcagaactcgaaatgggactccttcacttgcagcaaaatattgaaattccggagatcagcctgccgattcatccaatgatcacaaatgttgcaaaacagtgttatgagcgtggagaaaagccaaaagttacagactttggtgataaggttgaagacccaacatttcttaatcagttacaatctggagttaaccgctggatccgagaaattcaaaaagtgaccaaactggatcgagatcctgcatcaggaactgccttacaggaaattagtttttggctaaacttggaacgtgcgttataccgcatccaggagaaacgggagagcccggaagttctcctgactctggatatcttgaaacatggcaagcgcttccatgccaccgtcagttttgacactgacacaggtctaaaacaggctttggaaactgtgaatgactacaatcctctgatgaaagatttccctctgaatgatttgctgtctgccacggagctggacaaaataagacaggcgcttgttgccattttcacacatttgagaaagatccgaaacacaaaatatcctattcagagggcactgcgtttggtggaggcaatttcaagagacttgagttctcaattactcaaagtattgggcactaggaaattgatgcatgttgcttatgaagaatttgaaaaagttatggtagcatgctttgaagtttttcagacttgggatgatgagtatgagaaacttcaggtattgttgagagacatcgtcaaaagaaaaagggaagaaaatctgaagatggtgtggcgtatcaaccctgcccacaggaagctgcaggcccgccttgaccagatgagaaaatttagacgccagcatgaacagctaagagctgttatcgtcagggtcctgaggccacaggtcacggcagttgcacaacagaatcaaggagaggtccctgaaccccaagatatgaaagtggctgaggttctctttgatgctgcagatgcaaatgccattgaggaagtaaaccttgcttatgagaacgtcaaggaagtggatggactggatgtttccaaagagggcacggaagcctgggaggctgctatgaagaggtacgatgagaggatcgacagagtggagacccggatcaccgctcgccttcgggatcagcttggcacagccaagaatgccaacgagatgtttaggattttctccaggtttaatgcactgtttgtcaggcctcacatccgtggggccattcgtgactaccagacccagctgatccagcgcgtgaaagatgacattgagtctcttcacgacaagttcaaggtccagtacccacagagtcaggcttgtaagatgagtcacgttcgtgacttgccccctgtgtcagggtctatcatctgggctaaacagatcgacaggcagctgacggcctacatgaagcgggtggaagatgtccttggcaagggctgggagaatcacgtggaggggcagaagctgaagcaggatggagacagcttccgcatgaagctcaacacgcaggagatctttgatgactgggcaaggaaggtgcagcagcgcaacctcggtgtctcggggcgcattttcaccatcgaaagtactcgggttcggggccgaactggaaatgtgcttaagctgaaagttaactttcttcctgagattatcacactatccaaagaagtccggaacctcaaatggcttggtttccgcgtcccactggcgattgtgaacaaagcccatcaagcaaaccagctttacccgtttgccatctcactgatcgagagcgttcgtacctatgaacggacctgcgagaaggtggaggagcggaacaccatttcccttttggtggctggcttgaaaaaggaagtgcaggccctgatcgcagaaggcattgcgttggtgtgggagtcctacaaacttgacccatatgtacagcgcttagcagagactgtcttcaacttccaagaaaaggtggatgatctgctgatcattgaagaaaaaatagacctagaagtccgttccttggaaacttgtatgtatgaccataagacattctcggaaatcttgaacagagtccagaaagcagtggatgacttaaatctgcactcctattccaatttgcccatctgggtcaacaagcttgacatggagattgaaagaatattgggcgtccgtctgcaagctggcctgagagcttggacgcaggttcttcttggacaagctgaagataaagcagaagttgacatggacacagatgctccacaagttagtcacaagcctggtggagagccaaagatcaaaaatgtcgttcatgagctaagaataaccaatcaggtaatctacttgaatccaccaattgaagagtgcagatacaagctgtatcaggaaatgtttgcctggaagatggttgtactgtctctccccaggatccagagtcagaggtaccaggtgggtgtacattacgaattgactgaggaagagaaattctatcggaatgctttaacacggatgcctgatggccctgttgccctggaagagtcgtattctgctgtcatgggcattgtatctgaagttgaacagtatgtcaaggtttggcttcagtatcagtgtttatgggatatgcaagctgaaaacatctataacagacttggagaagatctcaacaaatggcaggctctcctggtccaaataaggaaggccagaggaacctttgacaatgcagaaaccaagaaagagtttggaccagtagttatagattatggcaaggtacaatctaaggtgaacttgaaatatgactcttggcataaggaggttcttagcaaatttgggcagatgctaggatcaaacatgacggaattccattcccagatctcaaagtcccgccaagagttggagcagcactcagtagacacggccagcacctccgatgcagtgaccttcatcacctatgtgcagtctttgaaacggaagatcaagcagtttgagaagcaagttgagctctaccgcaatggccagcgcttactggaaaagcaaaggttccagttcccaccttcctggctttatattgacaacatcgagggagagtggggagccttcaatgacatcatgcggcgaaaggactctgccattcagcagcaggtggcaaacctgcaaatgaagattgtccaggaggatcgggccgtggaaagccgcaccaccgacctgctgactgactgggagaagaccaagcctgtcacgggcaaccttcgcccagaagaggcacttcaggctctcaccatatatgaggggaagtttggtaggctgaaggacgacagagagaagtgtgcaaaggccaaggaggcgctggaattgacagatactgggcttctcagtggcagtgaagagcgcgtgcaggtggccttagaagaattacaggacctcaaaggcgtttggtcagaactttctaaggtttgggagcaaatcgatcagatgaaggagcaaccctgggtttcagtacagcctcgaaagcttcgacaaaatttggatgccctcctgaaccagctgaaaagcttccctgcccggttgcgacagtatgcgtcctatgagtttgttcagaggcttctgaaaggttacatgaagataaatatgctggtgattgaactgaaatccgaagcacttaaagaccgccattggaaacagctcatgaaaaggcttcacgttaattgggttgtttctgagctaacccttggccaaatctgggatgttgacttgcagaaaaatgaagcgattgtcaaggatgtactgcttgtggcacaaggggagatggctttggaagaatttttgaagcagataagagaagtgtggaatacttatgaactagacttggttaattatcagaacaagtgccgcttgatccgtggctgggatgacctcttcaacaaggtcaaagaacacatcaacagcgtctcggccatgaagctctctccgtattacaaggtttttgaagaggatgctctcagctgggaagataagctgaacaggatcatggctctctttgatgtgtggattgatgtgcagaggcggtgggtctacctggaaggtatcttcacaggcagtgcagatatcaagcacctgctgccagtggaaacccagcggtttcagagcatcagcactgagtttttggctctaatgaaaaaagtgtccaagtctccccttgttatggatgttctgaacatccagggagtacagaggtctctggaaagattggcagacctgctaggaaagatccagaaagcattgggagaatatctggaaagagagcggtcatctttccccaggttctattttgtgggtgatgaagatttgcttgaaatcattggaaacagcaagaatgtcgctaaattacagaaacacttcaagaagatgtttgctggagtttcgagcatcatcctgaacgaggataactctgttgttttgggtatttcatctcgggaaggagaggaggttatgtttaaaactcctgtgtcaattactgaacatcccaaaatcaatgagtggctcacattggtagaaaaggagatgagagtcaccctggccaaactgcttgctgagtctgttacggaagttgagatttttggtaaagcaacttcaattgacccaaatacctacatcacttggattgataaataccaggcccagcttgtggttttgtcagcccagatagcctggtctgagaacgtggagaccgcactgagcagcatgggcggaggtggagatgccgcgcccttgcactctgtgctgagcaatgtggaggtcaccctcaatgtgttagcagactctgtcctcatggagcagcccccactccgaaggcggaagctagaacacttgattacagagttggttcaccagagagatgttacaaggtccttgatcaaaagcaagattgacaacgccaaatcttttgaatggctcagccagatgcgattttactttgaccctaagcaaactgatgtgttacagcagttgtcaattcaaatggcaaatgccaaatttaactatggctttgagtacctgggtgttcaggacaaactggtccagacccccctcactgaccgctgctatttgacaatgacacaagccttggaggccaggctggggggttccccatttggacctgctggaactgggaaaacagagtctgtcaaagctcttggccatcagcttggacggtttgttttagttttcaactgtgatgaaacctttgatttccaggcaatgggccggatctttgtgggcctttgccaggtgggtgcctggggctgctttgacgagttcaaccgcctggaggagcggatgctctcggctgtgtcccagcaggtgcagtgcatacaggaagcactgcgtgaacattccaaccccaactacgacaagacctctgcccccattacttgtgagctgctgaacaaacaagtcaaggtgagcccggacatggccatcttcatcaccatgaaccctggctacgcgggccggtctaaccttcctgacaacttgaagaagctgttccggagcttggccatgaccaagcccgaccggcagttaatcgcccaggtcatgctgtactcacagggtttccgcactgctgaagtgcttgccaacaaaatcgtcccgttttttaaactatgcgatgagcagctctcttcccaaagccattatgacttcggtcttcgggctttgaagagtgtgctggtgagtgcaggcaatgtgaagagagagagaatccagaagataaagagggagaaagaggaacgaggggaagcagttgatgaaggagaaattgctgaaaatctccctgaacaagagattctgatacagagcgtctgtgagacgatggtgccaaagctggtggcagaggacatcccgctgctcttcagcctcctgtcggacgtgttccctggagtccagtatcacaggggtgagatgactgcccttcgagaggagctgaagaaagtgtgtcaggagatgtatttgacatatggagatggagaagaagttggtggaatgtgggttgaaaaggttctccagctctatcagatcacccagatcaatcatggcctgatgatggtggggccctcgggaagtgggaagagcatggcctggcgtgtcctgctgaaggcattggagagactcgagggtgtggaaggtgtggcccatatcatcgaccccaaggccatcagcaaagaccacctctacggaaccctggaccccaacaccagggaatggacagatgggctcttcacacacgtgctgagaaagatcatcgacagcgtgagaggcgagctgcagaagcgccagtggatcgtcttcgatggcgatgtggatccagagtgggttgagaacttgaactcagtgctggatgacaataagctcctaactttgcccaatggagagcgcctcagtcttccacccaangtgagaataatgtttgaggtacaggacttgaaatacgcgaccttggccacagtgtcgcgctgcggcatggtctggttcagtgaggatgtgctgagcaccgacatgatcttcaacaacttcctggccaggctgcgcagcatcccgctggatgaaggggaggatgaggcacagcggcggcgtaagggcaaagaggatgagggggaggaggccgcttcccccatgctgcagatccaaagagatgcagctacgatcatgcaaccgtacttcacgtccaacggcctggtcaccaaggcgctagagcacgccttccagctggagcacatcatggacctaacacgcctgcgctgcctgggctcgctcttctccatgctgcaccaggcctgccgcaacgtggcgcagtataacgccaaccatcccgacttccccatgcagatcgagcagctggagcgctacattcaggtcagggggcatcaggggcttcacagagctcaccactgcgccagaccacaggtctgaggacctctgaaatgctgcacctgtggggatgtgcgctctctcctaggcgaggcagagccttcgttgaggggctaggaaaggtgcagtgggtgtctgtgatgcaagaagactgggaaccactgtctttaggttaactttgctgtaagtgtctttcttttgttgttgaaattttataaaaatcaaagtttaattccctttttaatagcgatatctggtttatgccatactctggtccctgtctggagacagccggctaaaaatgagagcagagctgggtgaatacatcagaagaatcacgaccgtgcctctgcccactgcgcccaacatacccattatcgattatgaggtgtccatcagcggagaatggtctccgtggcaggccaaggtgcctcagattgaagtggagacgcacaaggtggcagcccctgatgtcgtcgtgccaacgctggacacagtccgccacgaagccctcttgtacacttggctggccgaacacaagcccctggtcttgtgtggccctcctgggtctggcaagaccatgacactcttcagcgccctccgggccttgcctgacatggaggtggtgggtctcaacttctccagtgctactactccagagctgcttctgaagacttttgatcactactgcgagtacaggcgcacacctaatggggtggttttggctcctgttcaacttggaaagtggctggtgttgttctgtgatgaaatcaacttgccagatatggataaatatgggacccagagggtcatatccttcatcagacagatggtggagcacggaggcttttaccgtacctcagatcaaacatgggtgaagctggagagaatccagtttgttggggcttgtaatccccccacagaccctggaagaaagcccctctcacacagatctacggcacctgctaacgcaccatgctgaggcacatttcattccctccgtanataaccanacncgntcatactgtctcctcagtgtnaaacgacaccaccagtca

SEQ ID NO: 462031 - DNA, 8746 bp, Homo sapiens
  misc_feature (7590)..(7590): n is a, c, g, or t
ttcaatgagagaacatttaatgagaggttaaggggcttagaacaacgccgggcacaggctaagcgctcactaaacgttagctctcgccaataacatcactgattcactataaagtttctctggctgtgtgctattcgctgcgtccacagcagtgaagaagacagacgcagcccctgaccaacctcgccaagcccgggcgccgagccaggacgttgagccaagtccccatctcctaggactcgcagtgcggaggctgcgggccccgaccagcgccgagactacaagtcccagaagggcgcgcggcgacatcgccgggcccgccccccgcgcacgcgcggcgccgtgacgctaaggccgcgagcgagcgcgggtggctgcggcggctgcggccggcggggcggggcggggccacctggcagtggctgcctttagggcggagccggctcccgctctcctcagtctgcggtgggctagcggacggtccggcttccggcggccgtttctgtctcttgctggctgtctcgctgagtcgcggccgccttctcatcgctcctggaaggtcccgagcgcgacaccatgtcggagcccgggggcggcggcggcgaggacggctcggccggattggaagtgtcggccgtgcagaatgtggcggacgtgtcggtgctgcagaagcacctgcgcaagctggtgccgctgctgctggaggacggcggcgaggcgccggccgcgctggaggcggcgctggaggagaagagcgccctggagcagatgcgcaagttcctttcggacccgcaggtccacacggtgctggtggagcgctccacgctcaaagaggacgtcggtgatgaaggagaagaagaaaaagaattcatttcctataacatcaacatagacattcattatggggttaaatccaatagcttggcattcattaaacgtactcccgtgattgatgcagataaacccgtgtcttctcagctccgggtccttacactcagtgaagactcgccctacgaaactttgcattctttcattagcaatgcagtggctcctttttttaagtcctacattagagagtctggcaaggcagacagggatggtgataaaatggctccttcagttgaaaagaagattgcagaactcgaaatgggactccttcacttgcagcaaaatattgaaattccggagatcagcctgccgattcatccaatgatcacaaatgttgcaaaacagtgttatgagcgtggagaaaagccaaaagttacagactttggtgataaggttgaagacccaacatttcttaatcagttacaatctggagttaaccgctggatccgagaaattcaaaaagtgaccaaactggatcgagatcctgcatcaggaactgccttacaggaaattagtttttggctaaacttggaacgtgcgttataccgcatccaggagaaacgggagagcccggaagttctcctgactctggatatcttgaaacatggcaagcgcttccatgccaccgtcagttttgacactgacacaggtctaaaacaggctttggaaactgtgaatgactacaatcctctgatgaaagatttccctctgaatgatttgctgtctgccacggagctggacaaaataagacaggcgcttgttgccattttcacacatttgagaaagatccgaaacacaaaatatcctattcagagggcactgcgtttggtggaggcaatttcaagagacttgagttctcaattactcaaagtattgggcactaggaaattgatgcatgttgcttatgaagaatttgaaaaagttatggtagcatgctttgaagtttttcagacttgggatgatgagtatgagaaacttcaggtattgttgagagacatcgtcaaaagaaaaagggaagaaaatctgaagatggtgtggcgtatcaaccctgcccacaggaagctgcaggcccgccttgaccagatgagaaaatttagacgccagcatgaacagctaagagctgttatcgtcagggtcctgaggccacaggtcacggcagttgcacaacagaatcaaggagaggtccctgaaccccaagatatgaaagtggctgaggttctctttgatgctgcagatgcaaatgccattgaggaagtaaaccttgcttatgagaacgtcaaggaagtggatggactggatgtttccaaagagggcacggaagcctgggaggctgctatgaagaggtacgatgagaggatcgacagagtggagacccggatcaccgctcgccttcgggatcagcttggcacagccaagaatgccaacgagatgtttaggattttctccaggtttaatgcactgtttgtcaggcctcacatccgtggggccattcgtgactaccagacccagctgatccagcgcgtgaaagatgacattgagtctcttcacgacaagttcaaggtccagtacccacagagtcaggcttgtaagatgagtcacgttcgtgacttgccccctgtgtcagggtctatcatctgggctaaacagatcgacaggcagctgacggcctacatgaagcgggtggaagatgtccttggcaagggctgggagaatcacgtggaggggcagaagctgaagcaggatggagacagcttccgcatgaagctcaacacgcaggagatctttgatgactgggcaaggaaggtgcagcagcgcaacctcggtgtctcggggcgcattttcaccatcgaaagtactcgggttcggggccgaactggaaatgtgcttaagctgaaagttaactttcttcctgagattatcacactatccaaagaagtccggaacctcaaatggcttggtttccgcgtcccactggcgattgtgaacaaagcccatcaagcaaaccagctttacccgtttgccatctcactgatcgagagcgttcgtacctatgaacggacctgcgagaaggtggaggagcggaacaccatttcccttttggtggctggcttgaaaaaggaagtgcaggccctgatcgcagaaggcattgcgttggtgtgggagtcctacaaacttgacccatatgtacagcgcttagcagagactgtcttcaacttccaagaaaaggtggatgatctgctgatcattgaagaaaaaatagacctagaagtccgttccttggaaacttgtatgtatgaccataagacattctcggaaatcttgaacagagtccagaaagcagtggatgacttaaatctgcactcctattccaatttgcccatctgggtcaacaagcttgacatggagattgaaagaatattgggcgtccgtctgcaagctggcctgagagcttggacgcaggttcttcttggacaagctgaagataaagcagaagttgacatggacacagatgctccacaagttagtcacaagcctggtggagagccaaagatcaaaaatgtcgttcatgagctaagaataaccaatcaggtaatctacttgaatccaccaattgaagagtgcagatacaagctgtatcaggaaatgtttgcctggaagatggttgtactgtctctccccaggatccagagtcagaggtaccaggtgggtgtacattacgaattgactgaggaagagaaattctatcggaatgctttaacacggatgcctgatggccctgttgccctggaagagtcgtattctgctgtcatgggcattgtatctgaagttgaacagtatgtcaaggtttggcttcagtatcagtgtttatgggatatgcaagctgaaaacatctataacagacttggagaagatctcaacaaatggcaggctctcctggtccaaataaggaaggccagaggaacctttgacaatgcagaaaccaagaaagagtttggaccagtagttatagattatggcaaggtacaatctaaggtgaacttgaaatatgactcttggcataaggaggttcttagcaaatttgggcagatgctaggatcaaacatgacggaattccattcccagatctcaaagtcccgccaagagttggagcagcactcagtagacacggccagcacctccgatgcagtgaccttcatcacctatgtgcagtctttgaaacggaagatcaagcagtttgagaagcaagttgagctctaccgcaatggccagcgcttactggaaaagcaaaggttccagttcccaccttcctggctttatattgacaacatcgagggagagtggggagccttcaatgacatcatgcggcgaaaggactctgccattcagcagcaggtggcaaacctgcaaatgaagattgtccaggaggatcgggccgtggaaagccgcaccaccgacctgctgactgactgggagaagaccaagcctgtcacgggcaaccttcgcccagaagaggcacttcaggctctcaccatatatgaggggaagtttggtaggctgaaggacgacagagagaagtgtgcaaaggccaaggaggcgctggaattgacagatactgggcttctcagtggcagtgaagagcgcgtgcaggtggccttagaagaattacaggacctcaaaggcgtttggtcagaactttctaaggtttgggagcaaatcgatcagatgaaggagcaaccctgggtttcagtacagcctcgaaagcttcgacaaaatttggatgccctcctgaaccagctgaaaagcttccctgcccggttgcgacagtatgcgtcctatgagtttgttcagaggcttctgaaaggttacatgaagataaatatgctggtgattgaactgaaatccgaagcacttaaagaccgccattggaaacagctcatgaaaaggcttcacgttaattgggttgtttctgagctaacccttggccaaatctgggatgttgacttgcagaaaaatgaagcgattgtcaaggatgtactgcttgtggcacaaggggagatggctttggaagaatttttgaagcagataagagaagtgtggaatacttatgaactagacttggttaattatcagaacaagtgccgcttgatccgtggctgggatgacctcttcaacaaggtcaaagaacacatcaacagcgtctcggccatgaagctctctccgtattacaaggtttttgaagaggatgctctcagctgggaagataagctgaacaggatcatggctctctttgatgtgtggattgatgtgcagaggcggtgggtctacctggaaggtatcttcacaggcagtgcagatatcaagcacctgctgccagtggaaacccagcggtttcagagcatcagcactgagtttttggctctaatgaaaaaagtgtccaagtctccccttgttatggatgttctgaacatccagggagtacagaggtctctggaaagattggcagacctgctaggaaagatccagaaagcattgggagaatatctggaaagagagcggtcatctttccccaggttctattttgtgggtgatgaagatttgcttgaaatcattggaaacagcaagaatgtcgctaaattacagaaacacttcaagaagatgtttgctggagtttcgagcatcatcctgaacgaggataactctgttgttttgggtatttcatctcgggaaggagaggaggttatgtttaaaactcctgtgtcaattactgaacatcccaaaatcaatgagtggctcacattggtagaaaaggagatgagagtcaccctggccaaactgcttgctgagtctgttacggaagttgagatttttggtaaagcaacttcaattgacccaaatacctacatcacttggattgataaataccaggcccagcttgtggttttgtcagcccagatagcctggtctgagaacgtggagaccgcactgagcagcatgggcggaggtggagatgccgcgcccttgcactctgtgctgagcaatgtggaggtcaccctcaatgtgttagcagactctgtcctcatggagcagcccccactccgaaggcggaagctagaacacttgattacagagttggttcaccagagagatgttacaaggtccttgatcaaaagcaagattgacaacgccaaatcttttgaatggctcagccagatgcgattttactttgaccctaagcaaactgatgtgttacagcagttgtcaattcaaatggcaaatgccaaatttaactatggctttgagtacctgggtgttcaggacaaactggtccagacccccctcactgaccgctgctatttgacaatgacacaagccttggaggccaggctggggggttccccatttggacctgctggaactgggaaaacagagtctgtcaaagctcttggccatcagcttggacggtttgttttagttttcaactgtgatgaaacctttgatttccaggcaatgggccggatctttgtgggcctttgccaggtgggtgcctggggctgctttgacgagttcaaccgcctggaggagcggatgctctcggctgtgtcccagcaggtgcagtgcatacaggaagcactgcgtgaacattccaaccccaactacgacaagacctctgcccccattacttgtgagctgctgaacaaacaagtcaaggtgagcccggacatggccatcttcatcaccatgaaccctggctacgcgggccggtctaaccttcctgacaacttgaagaagctgttccggagcttggccatgaccaagcccgaccggcagttaatcgcccaggtcatgctgtactcacagggtttccgcactgctgaagtgcttgccaacaaaatcgtcccgttttttaaactatgcgatgagcagctctcttcccaaagccattatgacttcggtcttcgggctttgaagagtgtgctggtgagtgcaggcaatgtgaagagagagagaatccagaagataaagagggagaaagaggaacgaggggaagcagttgatgaaggagaaattgctgaaaatctccctgaacaagagattctgatacagagcgtctgtgagacgatggtgccaaagctggtggcagaggacatcccgctgctcttcagcctcctgtcggacgtgttccctggagtccagtatcacaggggtgagatgactgcccttcgagaggagctgaagaaagtgtgtcaggagatgtatttgacatatggagatggagaagaagttggtggaatgtgggttgaaaaggttctccagctctatcagatcacccagatcaatcatggcctgatgatggtggggccctcgggaagtgggaagagcatggcctggcgtgtcctgctgaaggcattggagagactcgagggtgtggaaggtgtggcccatatcatcgaccccaaggccatcagcaaagaccacctctacggaaccctggaccccaacaccagggaatggacagatgggctcttcacacacgtgctgagaaagatcatcgacagcgtgagaggcgagctgcagaagcgccagtggatcgtcttcgatggcgatgtggatccagagtgggttgagaacttgaactcagtgctggatgacaataagctcctaactttgcccaatggagagcgcctcagtcttccacccaangtgagaataatgtttgaggtacaggacttgaaatacgcgaccttggccacagtgtcgcgctgcggcatggtctggttcagtgaggatgtgctgagcaccgacatgatcttcaacaacttcctggccaggctgcgcagcatcccgctggatgaaggggaggatgaggcacagcggcggcgtaagggcaaagaggatgagggggaggaggccgcttcccccatgctgcagatccaaagagatgcagctacgatcatgcaaccgtacttcacgtccaacggcctggtcaccaaggcgctagagcacgccttccagctggagcacatcatggacctaacacgcctgcgctgcctgggctcgctcttctccatgctgcaccaggcctgccgcaacgtggcgcagtataacgccaaccatcccgacttccccatgcagatcgagcagctggagcgctacattcaggtcagggggcatcaggggcttcacagagctcaccactgcgccagaccacaggtctgaggacctctgaaatgctgcacctgtggggatgtgcgctctctcctaggcgaggcagagccttcgttgaggggctaggaaaggtgcagtgggtgtctgtgatgcaagaagactgggaaccactgtctttaggttaactttgctgtaagtgtctttcttttgttgttgaaattttataaaaatcaaagtttaattccctttttaatagcgatatctggtttatgccatactctggtccctgtctggagacagccggctaaaaatgagagcagagctgggtgaatacatcagaagaatcacgaccgtgcctctgcccactgcgcccaacatacccattatcgattatgaggtgtccatcagcggagaatggtctccgtggcaggccaaggtgcctcagattgaagtggagacgcacaaggtggcagcccctgatgtcgtcgtgccaacgctggacacagtccgccacgaagccctcttgtacacttggctggccgaacacaagcccctggtcttgtgtggccctcctgggtctggcaagaccatgacactcttcagcgccctccgggccttgcctgacatggaggtggtgggtctctacttctctttgctactacatcgtctaccgctgttctgtactcacccc

SEQ ID NO: 462032 - DNA, 6981 bp, Homo sapiens
ttcaatgagagaacatttaatgagaggttaaggggcttagaacaacgccgggcacaggctaagcgctcactaaacgttagctctcgccaataacatcactgattcactataaagtttctctggctgtgtgctattcgctgcgtccacagcagtgaagaagacagacgcagcccctgaccaacctcgccaagcccgggcgccgagccaggacgttgagccaagtccccatctcctaggactcgcagtgcggaggctgcgggccccgaccagcgccgagactacaagtcccagaagggcgcgcggcgacatcgccgggcccgccccccgcgcacgcgcggcgccgtgacgctaaggccgcgagcgagcgcgggtggctgcggcggctgcggccggcggggcggggcggggccacctggcagtggctgcctttagggcggagccggctcccgctctcctcagtctgcggtgggctagcggacggtccggcttccggcggccgtttctgtctcttgctggctgtctcgctgagtcgcggccgccttctcatcgctcctggaaggtcccgagcgcgacaccatgtcggagcccgggggcggcggcggcgaggacggctcggccggattggaagtgtcggccgtgcagaatgtggcggacgtgtcggtgctgcagaagcacctgcgcaagctggtgccgctgctgctggaggacggcggcgaggcgccggccgcgctggaggcggcgctggaggagaagagcgccctggagcagatgcgcaagttcctttcggacccgcaggtccacacggtgctggtggagcgctccacgctcaaagaggacgtcggtgatgaaggagaagaagaaaaagaattcatttcctataacatcaacatagacattcattatggggttaaatccaatagcttggcattcattaaacgtactcccgtgattgatgcagataaacccgtgtcttctcagctccgggtccttacactcagtgaagactcgccctacgaaactttgcattctttcattagcaatgcagtggctcctttttttaagtcctacattagagagtctggcaaggcagacagggatggtgataaaatggctccttcagttgaaaagaagattgcagaactcgaaatgggactccttcacttgcagcaaaatattgaaattccggagatcagcctgccgattcatccaatgatcacaaatgttgcaaaacagtgttatgagcgtggagaaaagccaaaagttacagactttggtgataaggttgaagacccaacatttcttaatcagttacaatctggagttaaccgctggatccgagaaattcaaaaagtgaccaaactggatcgagatcctgcatcaggaactgccttacaggaaattagtttttggctaaacttggaacgtgcgttataccgcatccaggagaaacgggagagcccggaagttctcctgactctggatatcttgaaacatggcaagcgcttccatgccaccgtcagttttgacactgacacaggtctaaaacaggctttggaaactgtgaatgactacaatcctctgatgaaagatttccctctgaatgatttgctgtctgccacggagctggacaaaataagacaggcgcttgttgccattttcacacatttgagaaagatccgaaacacaaaatatcctattcagagggcactgcgtttggtggaggcaatttcaagagacttgagttctcaattactcaaagtattgggcactaggaaattgatgcatgttgcttatgaagaatttgaaaaagttatggtagcatgctttgaagtttttcagacttgggatgatgagtatgagaaacttcaggtattgttgagagacatcgtcaaaagaaaaagggaagaaaatctgaagatggtgtggcgtatcaaccctgcccacaggaagctgcaggcccgccttgaccagatgagaaaatttagacgccagcatgaacagctaagagctgttatcgtcagggtcctgaggccacaggtcacggcagttgcacaacagaatcaaggagaggtccctgaaccccaagatatgaaagtggctgaggttctctttgatgctgcagatgcaaatgccattgaggaagtaaaccttgcttatgagaacgtcaaggaagtggatggactggatgtttccaaagagggcacggaagcctgggaggctgctatgaagaggtacgatgagaggatcgacagagtggagacccggatcaccgctcgccttcgggatcagcttggcacagccaagaatgccaacgagatgtttaggattttctccaggtttaatgcactgtttgtcaggcctcacatccgtggggccattcgtgactaccagacccagctgatccagcgcgtgaaagatgacattgagtctcttcacgacaagttcaaggtccagtacccacagagtcaggcttgtaagatgagtcacgttcgtgacttgccccctgtgtcagggtctatcatctgggctaaacagatcgacaggcagctgacggcctacatgaagcgggtggaagatgtccttggcaagggctgggagaatcacgtggaggggcagaagctgaagcaggatggagacagcttccgcatgaagctcaacacgcaggagatctttgatgactgggcaaggaaggtgcagcagcgcaacctcggtgtctcggggcgcattttcaccatcgaaagtactcgggttcggggccgaactggaaatgtgcttaagctgaaagttaactttcttcctgagattatcacactatccaaagaagtccggaacctcaaatggcttggtttccgcgtcccactggcgattgtgaacaaagcccatcaagcaaaccagctttacccgtttgccatctcactgatcgagagcgttcgtacctatgaacggacctgcgagaaggtggaggagcggaacaccatttcccttttggtggctggcttgaaaaaggaagtgcaggccctgatcgcagaaggcattgcgttggtgtgggagtcctacaaacttgacccatatgtacagcgcttagcagagactgtcttcaacttccaagaaaaggtggatgatctgctgatcattgaagaaaaaatagacctagaagtccgttccttggaaacttgtatgtatgaccataagacattctcggaaatcttgaacagagtccagaaagcagtggatgacttaaatctgcactcctattccaatttgcccatctgggtcaacaagcttgacatggagattgaaagaatattgggcgtccgtctgcaagctggcctgagagcttggacgcaggttcttcttggacaagctgaagataaagcagaagttgacatggacacagatgctccacaagttagtcacaagcctggtggagagccaaagatcaaaaatgtcgttcatgagctaagaataaccaatcaggtaatctacttgaatccaccaattgaagagtgcagatacaagctgtatcaggaaatgtttgcctggaagatggttgtactgtctctccccaggatccagagtcagaggtaccaggtgggtgtacattacgaattgactgaggaagagaaattctatcggaatgctttaacacggatgcctgatggccctgttgccctggaagagtcgtattctgctgtcatgggcattgtatctgaagttgaacagtatgtcaaggtttggcttcagtatcagtgtttatgggatatgcaagctgaaaacatctataacagacttggagaagatctcaacaaatggcaggctctcctggtccaaataaggaaggccagaggaacctttgacaatgcagaaaccaagaaagagtttggaccagtagttatagattatggcaaggtacaatctaaggtgaacttgaaatatgactcttggcataaggaggttcttagcaaatttgggcagatgctaggatcaaacatgacggaattccattcccagatctcaaagtcccgccaagagttggagcagcactcagtagacacggccagcacctccgatgcagtgaccttcatcacctatgtgcagtctttgaaacggaagatcaagcagtttgagaagcaagttgagctctaccgcaatggccagcgcttactggaaaagcaaaggttccagttcccaccttcctggctttatattgacaacatcgagggagagtggggagccttcaatgacatcatgcggcgaaaggactctgccattcagcagcaggtggcaaacctgcaaatgaagattgtccaggaggatcgggccgtggaaagccgcaccaccgacctgctgactgactgggagaagaccaagcctgtcacgggcaaccttcgcccagaagaggcacttcaggctctcaccatatatgaggggaagtttggtaggctgaaggacgacagagagaagtgtgcaaaggccaaggaggcgctggaattgacagatactgggcttctcagtggcagtgaagagcgcgtgcaggtggccttagaagaattacaggacctcaaaggcgtttggtcagaactttctaaggtttgggagcaaatcgatcagatgaaggagcaaccctgggtttcagtacagcctcgaaagcttcgacaaaatttggatgccctcctgaaccagctgaaaagcttccctgcccggttgcgacagtatgcgtcctatgagtttgttcagaggcttctgaaaggttacatgaagataaatatgctggtgattgaactgaaatccgaagcacttaaagaccgccattggaaacagctcatgaaaaggcttcacgttaattgggttgtttctgagctaacccttggccaaatctgggatgttgacttgcagaaaaatgaagcgattgtcaaggatgtactgcttgtggcacaaggggagatggctttggaagaatttttgaagcagataagagaagtgtggaatacttatgaactagacttggttaattatcagaacaagtgccgcttgatccgtggctgggatgacctcttcaacaaggtcaaagaacacatcaacagcgtctcggccatgaagctctctccgtattacaaggtttttgaagaggatgctctcagctgggaagataagctgaacaggatcatggctctctttgatgtgtggattgatgtgcagaggcggtgggtctacctggaaggtatcttcacaggcagtgcagatatcaagcacctgctgccagtggaaacccagcggtttcagagcatcagcactgagtttttggctctaatgaaaaaagtgtccaagtctccccttgttatggatgttctgaacatccagggagtacagaggtctctggaaagattggcagacctgctaggaaagatccagaaagcattgggagaatatctggaaagagagcggtcatctttccccaggttctattttgtgggtgatgaagatttgcttgaaatcattggaaacagcaagaatgtcgctaaattacagaaacacttcaagaagatgtttgctggagtttcgagcatcatcctgaacgaggataactctgttgttttgggtatttcatctcgggaaggagaggaggttatgtttaaaactcctgtgtcaattactgaacatcccaaaatcaatgagtggctcacattggtagaaaaggagatgagagtcaccctggccaaactgcttgctgagtctgttacggaagttgagatttttggtaaagcaacttcaattgacccaaatacctacatcacttggattgataaataccaggcccagcttgtggttttgtcagcccagatagcctggtctgagaacgtggagaccgcactgagcagcatgggcggaggtggagatgccgcgcccttgcactctgtgctgagcaatgtggaggtcaccctcaatgtgttagcagactctgtcctcatggagcagcccccactccgaaggcggaagctagaacacttgattacagagttggttcaccagagagatgttacaaggtccttgatcaaaagcaagattgacaacgccaaatcttttgaatggctcagccagatgcgattttactttgaccctaagcaaactgatgtgttacagcagttgtcaattcaaatggcaaatgccaaatttaactatggctttgagtacctgggtgttcaggacaaactggtccagacccccctcactgaccgctgctatttgacaatgacacaagccttggaggccaggctggggggttccccatttggacctgctggaactgggaaaacagagtctgtcaaagctcttggccatcagcttggacggtttgttttagttttcaactgtgatgaaacctttgatttccaggcaatgggccggatctttgtgggcctttgccaggtgggtgcctggggctgctttgacgagttcaaccgcctggaggagcggatgctctcggctgtgtcccagcaggtgcagtgcatacaggaagcactgcgtgaacattccaaccccaactacgacaagacctctgcccccattacttgtgagctgctgaacaaacaagtcaaggtgagcccggacatggccatcttcatcaccatgaaccctggctacgcgggccggtctaaccttcctgacaacttgaagaagctgttccggagcttggccatgaccaagcccgaccggcagttaatcgcccaggtcatgctgtactcacagggtttccgcactgctgaagtgcttgccaacaaaatcgtcccgttttttaaactatgcgatgagcagctctcttcccaaagccattatgacttcggtcttcgggctttgaagagtgtgctggtgagtgcaggcaatgtgaagagagagagaatccagaagataaagagggagaaagaggaataggttagcgttgtgcaagaggtcatgcgttgtgccacatgaggtctgcggggt

SEQ ID NO: 462033 - DNA, 449 bp, Homo sapiens
  misc_feature (5)..(5): n is a, c, g, or t
  misc_feature (19)..(19): n is a, c, g, or t
atacnactcggcaacggcngccaccggcgctcagctggaatttcccgtgcgctgggtcaagcagacaaacaccgagaagaaggccagtgtggtaaccttacctgtctacctgaacttcacccgtgcagacctcatcttcaccgtggacttcgaaattgctacaaaggaggatcctcgcagcttctacgagcggggtgtcgcagtcttgtgcacagagtaaacttttctagctgcccctttctgtaatagtgaaagttggtatttaacatttattcatttttaaaatatttggaaggtctgagcttgtgaaaagaaagtggttggtctgaggttggaggaagctgaatggaatctgacggttgggagtggtggaaattggaaggataccaggaggtatttgggaaggccaatggcgtggctcctttgaggaaataaaacactaagcatga

SEQ ID NO: 462034 - DNA, 391 bp, Homo sapiens
ctagaggatccctgtcttacttacccagatgtggtaaccttacctgtctacctgaacttcacccgtgcagacctcatcttcaccgtggacttcgaaattgctacaaaggaggatcctcgcagcttctacgagcggggtgtcgcagtcttgtgcacagagtaaacttttctagctgcccctttctgtaatagtgaaagttggtatttaacatttattcatttttaaaatatttggaaggtctgagcttgtgaaaagaaagtggttggtctgaggttggaggaagctgaatggaatctgacggttgggagtggtggaaattggaaggataccaggaggtatttgggaaggccaatggcgtggctcctttgaggaaataaaacactaagcatga

SEQ ID NO: 462035 - DNA, 1339 bp, Homo sapiens
ttcaatgagagaacatttaatgagaggttaaggggcttagaacaacgccgggcacaggctaagcgctcactaaacgttagctctcgccaataacatcactgattcactataaagtttctctggctgtgtgctattcgctgcgtccacagcagtgaagaagacagacgcagcccctgaccaacctcgccaagcccgggcgccgagccaggacgttgagccaagtccccatctcctaggactcgcagtgcggaggctgcgggccccgaccagcgccgagactacaagtcccagaagggcgcgcggcgacatcgccgggcccgccccccgcgcacgcgcggcgccgtgacgctaaggccgcgagcgagcgcgggtggctgcggcggctgcggccggcggggcggggcggggccacctggcagtggctgcctttagggcggagccggctcccgctctcctcagtctgcggtgggctagcggacggtccggcttccggcggccgtttctgtctcttgctggctgtctcgctgagtcgcggccgccttctcatcgctcctggaaggtcccgagcgcgacaccatgtcggagcccgggggcggcggcggcgaggacggctcggccggattggaagtgtcggccgtgcagaatgtggcggacgtgtcggtgctgcagaagcacctgcgcaagctggtgccgctgctgctggaggacggcggcgaggcgccggccgcgctggaggcggcgctggaggagaagagcgccctggagcagatgcgcaagttcctttcggacccgcaggtccacacggtgctggtggagcgctccacgctcaaaggtgcggggccgcggagggcagggtcgccagagccaggcctcgcggaatgcagggcctgccaggtcctccggggtcgcagatgtccccgggatgggaggagcccggcagctgcagatgacccctggatgggcagagcccggcggccgcagacgtcccgccggccgggtccccagggccgcagacgccccgcagaggccggcgcggcgcccggggctcgccctcgccacacccactgcccggcccggagcccccagggcgccccgctcctggtcgcggggaggggaaaggggtccccgtctgccgtcacccaaaacaatggggtcgctttgtctgctcgggcctctcaagatggccgagttgggtggagacagcgtctccctgggctgagagcgggcgaggccgcatccctgcctccagtgtcacatgagcttttcggtttcgatttgtgtccaagccaagtggccttcgggagggatgtgtcgggggcagacccgcggagctgggggc

SEQ ID NO: 462036 - DNA, 566 bp, Homo sapiens
tgaggccagcaagggccaagtttttggtttgtgtttttttttagcattaagcatgtaagctttattggtaaacctgaaaacgtctccggaaaccactctcgggtggtggtaacagcctatcaatcagggtctctcatcagggactcggctaaccgtgatcctgtgctttccccattcggtgtttcaaccttctcttctgtggcctcatcctcaggtatccgctgatcattgacccctctggacaggccacagaattcattatgaatgaatataaggatcgtaagatcacacggaccagcttcctggatgacgccttcagaaagaacttagagagtgcactgagattcggtaacccccttctggtccaggttggtgttggcctttgaattcttgaaacactgcattcaagagtgaattcctttttgggggctgcctttagttttcaactttgtaagacttcattttgtatcagaaggataaagctttgcggtggttctgtaatagataaattcaacagaatcattatttgcatttaaaattctattcagtggtcgggcgaggtggct

SEQ ID NO: 462037 - DNA, 427 bp, Homo sapiens
tctaaaaatcagcaaatggcacctttgtcctatggatacatccaggtagtaaggtgttctcacaggcgtgtacagagggctcacggaaggcacagcagatgtggctgaatttcctgatatgagctgatcctgaaatgctgagcatttgctgagtgggtactttgggaagaacagtccaggcaggggagggcgtctctgagtccatgcttccacacagcacccacccctctgtacctgtttcagcacccattggccaggccatccaccgcctgctcctgatccaggctttccggcccgatcgcctgttggccatggcccacatgtttgtttcaacaaaccttggggagtctttcatgtccatcatggagcagccgctcgacctgacccacattgtgggcacagaggtaatgtcctggtacagcccggg

SEQ ID NO: 462038 - DNA, 312 bp, Homo sapiens
caaggccaaaattgttttctgaggttaagtcacagagtttcctgaagagtgagaagatgtaactattttctgaaaggcgaatgctcggctagcaaagcgaggcggcagaacgatggccatcacccctcgccactacctggacttcatcaatcactatgccaacctgttccacgagaagcggagcgagctggaggagcagcagatgcacttgaacgtggggctcaggaagatcaaagagacagtcgaccaggtgcgtcacaggcacaaattcctcacgggagtgagctgcagtgaggacccctttccatataa

SEQ ID NO: 462039 - DNA, 629 bp, Homo sapiens
caagaccagcctgaccaacatggagaaaccccgtctctactaaaaataggaaattagctgggcgtggtggtgcatacctgtaatcccagctgctcaggaggctgaggcaggagaatcactagaacctgggaggcagaggttgcagtgagctgagatcgcaccactgcactccagcctaggcgacagagctagactcagtctcaaataaatagtaaatatattcttaatctttatggggataaagaaattaggacttgtgagacattttaaaggtaatatcctgctttttaaggaatgctagcattttgtaagatcttcataatcatttaagagatcagctacttaccctattccagagggtttaatacagaaaagtctctcatttcttagctcttctaagcagctagctgtcctttctctcattggagttggagctcctggctgttttggttcattctcaccatgctttgctctatcttctcccacccatcgaccctcatccactcctgctgccactcagctgtgaagtcgatcaagaagcagcacctggtggaggtgaggtccatggccaaccctcctgctgctgtgaagctggcgctggagtccatctgcctgctgctgggggaaag

SEQ ID NO: 462040 - DNA, 319 bp, Homo sapiens
ggtcccttgtgcaggtagtgaatgcccacatattgataacatgcatctttctggtttgaattcagataagagaagtgtggaatacttatgaactagacttggttaattatcagaacaagtgccgcttgatccgtggctgggatgacctcttcaacaaggtcaaagaacacatcaacagcgtctcggccatgaagctctctccgtattacaaggtgctgttgctggggaagctttccctccccaccagtggtctcccacgctttcactgtaatgccttttcactgacagttactaggtacctgttttttattgtattttt

SEQ ID NO: 462041 - DNA, 4188 bp, Homo sapiens
ttcaatgagagaacatttaatgagaggttaaggggcttagaacaacgccgggcacaggctaagcgctcactaaacgttagctctcgccaataacatcactgattcactataaagtttctctggctgtgtgctattcgctgcgtccacagcagtgaagaagacagacgcagcccctgaccaacctcgccaagcccgggcgccgagccaggacgttgagccaagtccccatctcctaggactcgcagtgcggaggctgcgggccccgaccagcgccgagactacaagtcccagaagggcgcgcggcgacatcgccgggcccgccccccgcgcacgcgcggcgccgtgacgctaaggccgcgagcgagcgcgggtggctgcggcggctgcggccggcggggcggggcggggccacctggcagtggctgcctttagggcggagccggctcccgctctcctcagtctgcggtgggctagcggacggtccggcttccggcggccgtttctgtctcttgctggctgtctcgctgagtcgcggccgccttctcatcgctcctggaaggtcccgagcgcgacaccatgtcggagcccgggggcggcggcggcgaggacggctcggccggattggaagtgtcggccgtgcagaatgtggcggacgtgtcggtgctgcagaagcacctgcgcaagctggtgccgctgctgctggaggacggcggcgaggcgccggccgcgctggaggcggcgctggaggagaagagcgccctggagcagatgcgcaagttcctttcggacccgcaggtccacacggtgctggtggagcgctccacgctcaaagaggacgtcggtgatgaaggagaagaagaaaaagaattcatttcctataacatcaacatagacattcattatggggttaaatccaatagcttggcattcattaaacgtactcccgtgattgatgcagataaacccgtgtcttctcagctccgggtccttacactcagtgaagactcgccctacgaaactttgcattctttcattagcaatgcagtggctcctttttttaagtcctacattagagagtctggcaaggcagacagggatggtgataaaatggctccttcagttgaaaagaagattgcagaactcgaaatgggactccttcacttgcagcaaaatattgaaattccggagatcagcctgccgattcatccaatgatcacaaatgttgcaaaacagtgttatgagcgtggagaaaagccaaaagttacagactttggtgataaggttgaagacccaacatttcttaatcagttacaatctggagttaaccgctggatccgagaaattcaaaaagtgaccaaactggatcgagatcctgcatcaggaactgccttacaggaaattagtttttggctaaacttggaacgtgcgttataccgcatccaggagaaacgggagagcccggaagttctcctgactctggatatcttgaaacatggcaagcgcttccatgccaccgtcagttttgacactgacacaggtctaaaacaggctttggaaactgtgaatgactacaatcctctgatgaaagatttccctctgaatgatttgctgtctgccacggagctggacaaaataagacaggcgcttgttgccattttcacacatttgagaaagatccgaaacacaaaatatcctattcagagggcactgcgtttggtggaggcaatttcaagagacttgagttctcaattactcaaagtattgggcactaggaaattgatgcatgttgcttatgaagaatttgaaaaagttatggtagcatgctttgaagtttttcagacttgggatgatgagtatgagaaacttcaggtattgttgagagacatcgtcaaaagaaaaagggaagaaaatctgaagatggtgtggcgtatcaaccctgcccacaggaagctgcaggcccgccttgaccagatgagaaaatttagacgccagcatgaacagctaagagctgttatcgtcagggtcctgaggccacaggtcacggcagttgcacaacagaatcaaggagaggtccctgaaccccaagatatgaaagtggctgaggttctctttgatgctgcagatgcaaatgccattgaggaagtaaaccttgcttatgagaacgtcaaggaagtggatggactggatgtttccaaagagggcacggaagcctgggaggctgctatgaagaggtacgatgagaggatcgacagagtggagacccggatcaccgctcgccttcgggatcagcttggcacagccaagaatgccaacgagatgtttaggattttctccaggtttaatgcactgtttgtcaggcctcacatccgtggggccattcgtgactaccagacccagctgatccagcgcgtgaaagatgacattgagtctcttcacgacaagttcaaggtccagtacccacagagtcaggcttgtaagatgagtcacgttcgtgacttgccccctgtgtcagggtctatcatctgggctaaacagatcgacaggcagctgacggcctacatgaagcgggtggaagatgtccttggcaagggctgggagaatcacgtggaggggcagaagctgaagcaggatggagacagcttccgcatgaagctcaacacgcaggagatctttgatgactgggcaaggaaggtgcagcagcgcaacctcggtgtctcggggcgcattttcaccatcgaaagtactcgggttcggggccgaactggaaatgtgcttaagctgaaagttaactttcttcctgagattatcacactatccaaagaagtccggaacctcaaatggcttggtttccgcgtcccactggcgattgtgaacaaagcccatcaagcaaaccagctttacccgtttgccatctcactgatcgagagcgttcgtacctatgaacggacctgcgagaaggtggaggagcggaacaccatttcccttttggtggctggcttgaaaaaggaagtgcaggccctgatcgcagaaggcattgcgttggtgtgggagtcctacaaacttgacccatatgtacagcgcttagcagagactgtcttcaacttccaagaaaaggtatgctctcatgtaatcctcaggtgtcctggtaacgaatgaagcacagtaatagcgagctcagttaaaacactagttctcccgaagaaggcatgcatggttgatgcagcatacggccatgtgagctgcaagggaggaggaccctttgtactcaccgggctatttaatggtgctgggttttagggaggccattaagtaacaacctgagtttagaaacaggtggagagctaaaggacacaggagtccaacagagagcagaatgcagttttattgctgctacagctgaaagcagagcaggctctaggtctcagccacgaaggccttacccagagcctgcggctgccagcggaccagatgcatacgacagcgaggctggctccccaggcacaggaggagcttaacagagcacgtttacttccttctcccagatttacccatcagaggccacctctcccattgagtgggagtaagggaagagaagctggggaggctccatgcattttcctttcctctgcaaggacatgcgagtggggattagtgttctcaccccagcagctaggattagctacttatggaagaactgtgcctggagcatttgtcaatgtataatatttgagaagaatgttatgtgagaataaaggaacagagtgtgagtgggtgttttaaatattaaatatttcttccttcaggtggatgatctgctgatcattgaagaaaaaatagacctagaagtccgttccttggaaacttgtatgtatgaccataagacattctcggaaatcttgaacagagtccagaaagcagtggatgacttaaatctgcactcctattccaatttgcccatctgggtcaacaagcttgacatggagattgaaagaatattgggcgtccgtctgcaagctggcctgagagcttggacgcaggttcttcttggacaagctgaagataaagcagaagttgacatggacacagatgctccacaagttagtcacaagcctggtggagagccaaagatcaaagtgagtgcttctgtggcattctatttactaataagtgaaataacaaaactctctc

SEQ ID NO: 462042 - DNA, 575 bp, Homo sapiens
caaagtgcactcttctatatctaccagacgagctacttaagaacagctaaaagagcacacccgtctatgtagcaaaatagtgggaagatttataggtagaggcgacaaacctaccgagcctggtgatagctggatgtccaagatagaatcttagttcaactttaaatttgcccacagaaccctctaaatccccttgtaaatttaactgttagtccaaagaggaacagctctttggacactaggaaaaaaccttgtagatatagaagagtgcacttttgcaaaagtgcactcttctatatctacgagtgcatctttgaagcgctgagacctctggagaccctgcctgttgaaggcctcattcggatttgggcacatgaagctctgcgtctcttccaagatagactcgtagaggatgaggagaggcgttggactgatgagaacatcgacacggttgctctgaagcacttccctaacatcgacagagagaaggcaatgagccgacccatcttgtacagcaactggctgtcaaaggattacaaccagtagtatagaagagtgcactttttaatcctgag

SEQ ID NO: 462043 - DNA, 14746 bp, Homo sapiens
  misc_feature (7590)..(7590): n is a, c, g, or t
ttcaatgagagaacatttaatgagaggttaaggggcttagaacaacgccgggcacaggctaagcgctcactaaacgttagctctcgccaataacatcactgattcactataaagtttctctggctgtgtgctattcgctgcgtccacagcagtgaagaagacagacgcagcccctgaccaacctcgccaagcccgggcgccgagccaggacgttgagccaagtccccatctcctaggactcgcagtgcggaggctgcgggccccgaccagcgccgagactacaagtcccagaagggcgcgcggcgacatcgccgggcccgccccccgcgcacgcgcggcgccgtgacgctaaggccgcgagcgagcgcgggtggctgcggcggctgcggccggcggggcggggcggggccacctggcagtggctgcctttagggcggagccggctcccgctctcctcagtctgcggtgggctagcggacggtccggcttccggcggccgtttctgtctcttgctggctgtctcgctgagtcgcggccgccttctcatcgctcctggaaggtcccgagcgcgacaccatgtcggagcccgggggcggcggcggcgaggacggctcggccggattggaagtgtcggccgtgcagaatgtggcggacgtgtcggtgctgcagaagcacctgcgcaagctggtgccgctgctgctggaggacggcggcgaggcgccggccgcgctggaggcggcgctggaggagaagagcgccctggagcagatgcgcaagttcctttcggacccgcaggtccacacggtgctggtggagcgctccacgctcaaagaggacgtcggtgatgaaggagaagaagaaaaagaattcatttcctataacatcaacatagacattcattatggggttaaatccaatagcttggcattcattaaacgtactcccgtgattgatgcagataaacccgtgtcttctcagctccgggtccttacactcagtgaagactcgccctacgaaactttgcattctttcattagcaatgcagtggctcctttttttaagtcctacattagagagtctggcaaggcagacagggatggtgataaaatggctccttcagttgaaaagaagattgcagaactcgaaatgggactccttcacttgcagcaaaatattgaaattccggagatcagcctgccgattcatccaatgatcacaaatgttgcaaaacagtgttatgagcgtggagaaaagccaaaagttacagactttggtgataaggttgaagacccaacatttcttaatcagttacaatctggagttaaccgctggatccgagaaattcaaaaagtgaccaaactggatcgagatcctgcatcaggaactgccttacaggaaattagtttttggctaaacttggaacgtgcgttataccgcatccaggagaaacgggagagcccggaagttctcctgactctggatatcttgaaacatggcaagcgcttccatgccaccgtcagttttgacactgacacaggtctaaaacaggctttggaaactgtgaatgactacaatcctctgatgaaagatttccctctgaatgatttgctgtctgccacggagctggacaaaataagacaggcgcttgttgccattttcacacatttgagaaagatccgaaacacaaaatatcctattcagagggcactgcgtttggtggaggcaatttcaagagacttgagttctcaattactcaaagtattgggcactaggaaattgatgcatgttgcttatgaagaatttgaaaaagttatggtagcatgctttgaagtttttcagacttgggatgatgagtatgagaaacttcaggtattgttgagagacatcgtcaaaagaaaaagggaagaaaatctgaagatggtgtggcgtatcaaccctgcccacaggaagctgcaggcccgccttgaccagatgagaaaatttagacgccagcatgaacagctaagagctgttatcgtcagggtcctgaggccacaggtcacggcagttgcacaacagaatcaaggagaggtccctgaaccccaagatatgaaagtggctgaggttctctttgatgctgcagatgcaaatgccattgaggaagtaaaccttgcttatgagaacgtcaaggaagtggatggactggatgtttccaaagagggcacggaagcctgggaggctgctatgaagaggtacgatgagaggatcgacagagtggagacccggatcaccgctcgccttcgggatcagcttggcacagccaagaatgccaacgagatgtttaggattttctccaggtttaatgcactgtttgtcaggcctcacatccgtggggccattcgtgactaccagacccagctgatccagcgcgtgaaagatgacattgagtctcttcacgacaagttcaaggtccagtacccacagagtcaggcttgtaagatgagtcacgttcgtgacttgccccctgtgtcagggtctatcatctgggctaaacagatcgacaggcagctgacggcctacatgaagcgggtggaagatgtccttggcaagggctgggagaatcacgtggaggggcagaagctgaagcaggatggagacagcttccgcatgaagctcaacacgcaggagatctttgatgactgggcaaggaaggtgcagcagcgcaacctcggtgtctcggggcgcattttcaccatcgaaagtactcgggttcggggccgaactggaaatgtgcttaagctgaaagttaactttcttcctgagattatcacactatccaaagaagtccggaacctcaaatggcttggtttccgcgtcccactggcgattgtgaacaaagcccatcaagcaaaccagctttacccgtttgccatctcactgatcgagagcgttcgtacctatgaacggacctgcgagaaggtggaggagcggaacaccatttcccttttggtggctggcttgaaaaaggaagtgcaggccctgatcgcagaaggcattgcgttggtgtgggagtcctacaaacttgacccatatgtacagcgcttagcagagactgtcttcaacttccaagaaaaggtggatgatctgctgatcattgaagaaaaaatagacctagaagtccgttccttggaaacttgtatgtatgaccataagacattctcggaaatcttgaacagagtccagaaagcagtggatgacttaaatctgcactcctattccaatttgcccatctgggtcaacaagcttgacatggagattgaaagaatattgggcgtccgtctgcaagctggcctgagagcttggacgcaggttcttcttggacaagctgaagataaagcagaagttgacatggacacagatgctccacaagttagtcacaagcctggtggagagccaaagatcaaaaatgtcgttcatgagctaagaataaccaatcaggtaatctacttgaatccaccaattgaagagtgcagatacaagctgtatcaggaaatgtttgcctggaagatggttgtactgtctctccccaggatccagagtcagaggtaccaggtgggtgtacattacgaattgactgaggaagagaaattctatcggaatgctttaacacggatgcctgatggccctgttgccctggaagagtcgtattctgctgtcatgggcattgtatctgaagttgaacagtatgtcaaggtttggcttcagtatcagtgtttatgggatatgcaagctgaaaacatctataacagacttggagaagatctcaacaaatggcaggctctcctggtccaaataaggaaggccagaggaacctttgacaatgcagaaaccaagaaagagtttggaccagtagttatagattatggcaaggtacaatctaaggtgaacttgaaatatgactcttggcataaggaggttcttagcaaatttgggcagatgctaggatcaaacatgacggaattccattcccagatctcaaagtcccgccaagagttggagcagcactcagtagacacggccagcacctccgatgcagtgaccttcatcacctatgtgcagtctttgaaacggaagatcaagcagtttgagaagcaagttgagctctaccgcaatggccagcgcttactggaaaagcaaaggttccagttcccaccttcctggctttatattgacaacatcgagggagagtggggagccttcaatgacatcatgcggcgaaaggactctgccattcagcagcaggtggcaaacctgcaaatgaagattgtccaggaggatcgggccgtggaaagccgcaccaccgacctgctgactgactgggagaagaccaagcctgtcacgggcaaccttcgcccagaagaggcacttcaggctctcaccatatatgaggggaagtttggtaggctgaaggacgacagagagaagtgtgcaaaggccaaggaggcgctggaattgacagatactgggcttctcagtggcagtgaagagcgcgtgcaggtggccttagaagaattacaggacctcaaaggcgtttggtcagaactttctaaggtttgggagcaaatcgatcagatgaaggagcaaccctgggtttcagtacagcctcgaaagcttcgacaaaatttggatgccctcctgaaccagctgaaaagcttccctgcccggttgcgacagtatgcgtcctatgagtttgttcagaggcttctgaaaggttacatgaagataaatatgctggtgattgaactgaaatccgaagcacttaaagaccgccattggaaacagctcatgaaaaggcttcacgttaattgggttgtttctgagctaacccttggccaaatctgggatgttgacttgcagaaaaatgaagcgattgtcaaggatgtactgcttgtggcacaaggggagatggctttggaagaatttttgaagcagataagagaagtgtggaatacttatgaactagacttggttaattatcagaacaagtgccgcttgatccgtggctgggatgacctcttcaacaaggtcaaagaacacatcaacagcgtctcggccatgaagctctctccgtattacaaggtttttgaagaggatgctctcagctgggaagataagctgaacaggatcatggctctctttgatgtgtggattgatgtgcagaggcggtgggtctacctggaaggtatcttcacaggcagtgcagatatcaagcacctgctgccagtggaaacccagcggtttcagagcatcagcactgagtttttggctctaatgaaaaaagtgtccaagtctccccttgttatggatgttctgaacatccagggagtacagaggtctctggaaagattggcagacctgctaggaaagatccagaaagcattgggagaatatctggaaagagagcggtcatctttccccaggttctattttgtgggtgatgaagatttgcttgaaatcattggaaacagcaagaatgtcgctaaattacagaaacacttcaagaagatgtttgctggagtttcgagcatcatcctgaacgaggataactctgttgttttgggtatttcatctcgggaaggagaggaggttatgtttaaaactcctgtgtcaattactgaacatcccaaaatcaatgagtggctcacattggtagaaaaggagatgagagtcaccctggccaaactgcttgctgagtctgttacggaagttgagatttttggtaaagcaacttcaattgacccaaatacctacatcacttggattgataaataccaggcccagcttgtggttttgtcagcccagatagcctggtctgagaacgtggagaccgcactgagcagcatgggcggaggtggagatgccgcgcccttgcactctgtgctgagcaatgtggaggtcaccctcaatgtgttagcagactctgtcctcatggagcagcccccactccgaaggcggaagctagaacacttgattacagagttggttcaccagagagatgttacaaggtccttgatcaaaagcaagattgacaacgccaaatcttttgaatggctcagccagatgcgattttactttgaccctaagcaaactgatgtgttacagcagttgtcaattcaaatggcaaatgccaaatttaactatggctttgagtacctgggtgttcaggacaaactggtccagacccccctcactgaccgctgctatttgacaatgacacaagccttggaggccaggctggggggttccccatttggacctgctggaactgggaaaacagagtctgtcaaagctcttggccatcagcttggacggtttgttttagttttcaactgtgatgaaacctttgatttccaggcaatgggccggatctttgtgggcctttgccaggtgggtgcctggggctgctttgacgagttcaaccgcctggaggagcggatgctctcggctgtgtcccagcaggtgcagtgcatacaggaagcactgcgtgaacattccaaccccaactacgacaagacctctgcccccattacttgtgagctgctgaacaaacaagtcaaggtgagcccggacatggccatcttcatcaccatgaaccctggctacgcgggccggtctaaccttcctgacaacttgaagaagctgttccggagcttggccatgaccaagcccgaccggcagttaatcgcccaggtcatgctgtactcacagggtttccgcactgctgaagtgcttgccaacaaaatcgtcccgttttttaaactatgcgatgagcagctctcttcccaaagccattatgacttcggtcttcgggctttgaagagtgtgctggtgagtgcaggcaatgtgaagagagagagaatccagaagataaagagggagaaagaggaacgaggggaagcagttgatgaaggagaaattgctgaaaatctccctgaacaagagattctgatacagagcgtctgtgagacgatggtgccaaagctggtggcagaggacatcccgctgctcttcagcctcctgtcggacgtgttccctggagtccagtatcacaggggtgagatgactgcccttcgagaggagctgaagaaagtgtgtcaggagatgtatttgacatatggagatggagaagaagttggtggaatgtgggttgaaaaggttctccagctctatcagatcacccagatcaatcatggcctgatgatggtggggccctcgggaagtgggaagagcatggcctggcgtgtcctgctgaaggcattggagagactcgagggtgtggaaggtgtggcccatatcatcgaccccaaggccatcagcaaagaccacctctacggaaccctggaccccaacaccagggaatggacagatgggctcttcacacacgtgctgagaaagatcatcgacagcgtgagaggcgagctgcagaagcgccagtggatcgtcttcgatggcgatgtggatccagagtgggttgagaacttgaactcagtgctggatgacaataagctcctaactttgcccaatggagagcgcctcagtcttccacccaangtgagaataatgtttgaggtacaggacttgaaatacgcgaccttggccacagtgtcgcgctgcggcatggtctggttcagtgaggatgtgctgagcaccgacatgatcttcaacaacttcctggccaggctgcgcagcatcccgctggatgaaggggaggatgaggcacagcggcggcgtaagggcaaagaggatgagggggaggaggccgcttcccccatgctgcagatccaaagagatgcagctacgatcatgcaaccgtacttcacgtccaacggcctggtcaccaaggcgctagagcacgccttccagctggagcacatcatggacctaacacgcctgcgctgcctgggctcgctcttctccatgctgcaccaggcctgccgcaacgtggcgcagtataacgccaaccatcccgacttccccatgcagatcgagcagctggagcgctacattcagcgatatctggtttatgccatactctggtccctgtctggagacagccggctaaaaatgagagcagagctgggtgaatacatcagaagaatcacgaccgtgcctctgcccactgcgcccaacatacccattatcgattatgaggtgtccatcagcggagaatggtctccgtggcaggccaaggtgcctcagattgaagtggagacgcacaaggtggcagcccctgatgtcgtcgtgccaacgctggacacagtccgccacgaagccctcttgtacacttggctggccgaacacaagcccctggtcttgtgtggccctcctgggtctggcaagaccatgacactcttcagcgccctccgggccttgcctgacatggaggtggtgggtctcaacttctccagtgctactactccagagctgcttctgaagacttttgatcactactgcgagtacaggcgcacacctaatggggtggttttggctcctgttcaacttggaaagtggctggtgttgttctgtgatgaaatcaacttgccagatatggataaatatgggacccagagggtcatatccttcatcagacagatggtggagcacggaggcttttaccgtacctcagatcaaacatgggtgaagctggagagaatccagtttgttggggcttgtaatccccccacagaccctggaagaaagcccctctcacacaggttcctgcgccacgtgcctgtcgtgtatgtggattacccgggccccgcctccctcacacagatctacggcaccttcaaccgcgccatgctgaggctcattccatccctgcggacgtatgcagagccgctcactgctgccatggtggagttctacaccatgtctcaggagagattcacccaggatacacaacctcactatatctattcaccccgtgaaatgactaggtgggtgagaggcatctttgaagcgctgagacctctggagaccctgcctgttgaaggcctcattcggatttgggcacatgaagctctgcgtctcttccaagatagactcgtagaggatgaggagaggcgttggactgatgagaacatcgacacggttgctctgaagcacttccctaacatcgacagagagaaggcaatgagccgacccatcttgtacagcaactggctgtcaaaggattacatcccagtagaccaagaagagttaagagattatgtcaaagctaggctgaaggtcttttatgaagaagaacttgatgttccgctggtgctgtttaatgaagtcctagaccacgtgctgaggattgacagaatattccgtcaacctcaaggccacttgcttctgattggtgttagtggagcaggaaaaactaccctgtctcgtttcgtcgcctggatgaacggtttgagtgtgtaccagattaaggtccataggaagtacacaggggaagactttgatgaagatctacggacagtgttgagacgttctggctgtaaaaatgaaaagatagcatttataatggatgaatctaatgtgttagattctggattcctggagcgaatgaatacccttctggccaatggagaggtgcctggtctctttgaaggagacgagtatgccaccttgatgacgcagtgcaaagagggggcacagaaggaaggcctgatgctggactcgcacgaggagctctacaagtggttcactagccaggttatccgcaacctccacgtcgtgttcaccatgaacccgtcctcggagggactcaaggaccgggcagctacatcaccagcacttttcaacaggtgtgtgttgaattggtttggagactggtccaccgaagcactgtatcaggttggcaaagaattcacaagtaagatggatctggagaagccaaattacatcgtgcctgattacatgccagttgtgtatgataagctgccgcagccaccatcccatcgggaagccattgtgaacagctgtgtgtttgttcatcagactcttcaccaggcgaatgctcggctagcaaagcgaggcggcagaacgatggccatcacccctcgccactacctggacttcatcaatcactatgccaacctgttccacgagaagcggagcgagctggaggagcagcagatgcacttgaacgtggggctcaggaagatcaaagagacagtcgaccaggtagaagaactgcgtcgtgacttgaggataaagagccaagagctggaggtgaagaatgcagcagccaatgacaagctgaaaaagatggtgaaagaccagcaggaggctgaaaagaagaaggttatgagccaagaaatccaggaacagctgcataagcagcaggaggtaattgcagacaaacagatgagtgtcaaagaagatcttgataaggtggaacctgccgtcattgaggcccagaatgctgtgaagtcgatcaagaagcagcacctggtggaggtgaggtccatggccaaccctcctgctgctgtgaagctggcgctggagtccatctgcctgctgctgggggaaagcaccacagactggaagcagatccgctccatcatcatgcgggagaacttcatccccaccatcgtcaacttctctgcagaggagatcagtgacgccataagggagaagatgaagaaaaattacatgtccaatccaagttacaattatgaaattgtgaatcgggcttccctggcttgcggccctatggtgaaatgggcaattgcacagcttaactatgcagacatgttaaagagagtggagcccctacgcaatgagctgcagaagctggaagatgacgccaaggacaaccagcagaaggccaacgaggtggagcagatgatccgagacctggaagccagcatcgcccgctacaaggaggaatacgccgtcctgatctcagaggcccaggccatcaaggcagacctggcagctgtcgaggcaaaagtaaaccggagcactgctcttctgaagagcttgtctgctgaacgtgaacgatgggaaaaaacaagtgaaactttcaaaaaccagatgtccaccattgctggggactgtctcttgtcagctgcgttcattgcctacgcgggttactttgaccagcagatgcgtcagaacttgttcactacctggtcccatcacctacagcaagccaacatccagttccgtacagatattgccaggacggaatacctttccaatgctgatgagcgtcttcgctggcaggccagctccttgcctgctgatgacctttgcacagaaaatgccatcatgctgaaacgattcaataggtatccgctgatcattgacccctctggacaggccacagaattcattatgaatgaatataaggatcgtaagatcacacggaccagcttcctggatgacgccttcagaaagaacttagagagtgcactgagattcggtaacccccttctggtccaggatgtggaaagctacgatccagttttgaacccggtgctgaaccgtgaagtgcggcgaacaggggggagagtgctgatcactctcggggaccaggacatagacctgtcgccatcgtttgtcatcttcctgtccacccgggatccaactgtcgagttcccaccagatctctgttcccgggttacttttgtaaacttcacagttacccgtagcagtttacaaagccagtgtctaaatgaagtacttaaagcagaaagacctgatgtggacgagaaacgatctgatcttcttaaacttcaaggggaatttcagctccgtttgcgtcagctggaaaaatctctactacaagctctgaacgaggtgaaagggcgcattttggatgacgacacgatcataaccactctggagaacctgaagagagaggctgcagaggtcaccaggaaagttgaggagacggacattgtcatgcaggaggtggagaccgtgtcccagcagtacctcccgctctccaccgcctgcagcagcatctacttcaccatggagtccctcaagcagatacacttcttgtaccagtactccctccagtttttcctggacatttatcacaacgtcctatacgagaacccgaacctgaagggtgtcaccgaccacacacagcgcctgtccattataacaaaggacctcttccaggtggcgtttaaccgagtggctcgaggcatgctgcatcaggaccacattacctttgccatgctgctggcaagaatcaaactgaagggcaccgtgggggagcccacctacgatgcagaattccagcacttcttgagaggaaatgagattgtcctgagtgctggctccacccccaggatccagggcctgactgtggagcaggcggaggcggtggtgaggctgagctgccttcccgcgtttaaggacttgattgcaaaggttcaggcagacgagcaatttggcatctggctggacagcagctccccggagcagactgtgccctacctctggagtgaagaaacacctgcaacacccattggccaggccatccaccgcctgctcctgatccaggctttccggcccgatcgcctgttggccatggcccacatgtttgtttcaacaaaccttggggagtctttcatgtccatcatggagcagccgctcgacctgacccacattgtgggcacagaggtgaagcccaacactcctgtcttaatgtgctctgtgcctggttatgatgccagtggacatgtcgaggaccttgcagccgagcagaacacgcagatcacttcaattgcaatcggctctgcagaaggctttaaccaagcagataaggcaataaacaccgctgtaaagtcgggcaggtgggtgatgctgaagaatgtgcatctggccccagggtggctgatgcagctggagaagaagttgcattccctgcagccgcatgcctgcttccgactcttcctcaccatggagatcaaccccaaggtgcctgtgaatctgctccgtgcgggccgcatctttgtgttcgagccaccgccaggggtgaaggccaacatgctgaggacgttcagcagcattcccgtctcacggatatgcaagtctcccaacgagcgtgcccgcttgtacttcctgctggcctggtttcatgcgatcatccaagaacgcttacgatacgcaccactggggtggtcaaagaagtatgaatttggagagtctgacctgcggtcagcttgcgatacggtggacacgtggctggatgacacggccaagggcaggcagaacatctcaccggataagatcccgtggtctgcactaaagaccttaatggcccagtccatttatggcgggcgcgtggacaacgagtttgaccagcgtctgctcaacaccttcctggagcgcctgttcacaaccaggagtttcgacagtgagtttaagctggcatgcaaggtcgacggacataaagacattcaaatgccagatggcatcaggcgagaggagtttgtgcagtgggtggagttgctccccgacacccagacgccctcctggctgggcctgcccaacaacgccgagagagtcctccttaccacacagggtgtggacatgatcagtaaaatgctgaagatgcagatgttggaggatgaggacgacctggcctacgcagagactgagaagaagacgaggacagactccacgtccgacgggcgccctgcctggatgcggacactgcacaccaccgcgtccaactggctgcacctcatcccccagacgctgagccacctcaagcgcaccgtggagaatatcaaggatcctttgttcaggttctttgagagagaagtgaagatgggcgcaaagctgcttcaggacgttcgccaggaccttgcagatgtcgtccaggtgtgcgaaggaaagaagaagcagaccaactacttgcgcacgctgatcaacgagctagtgaaagggatcttgcctcggagctggtcccactacacggtgcctgccggcatgaccgtcatccagtgggtgtccgacttcagcgagaggatcaaacagctgcagaacatctcactggcagctgcatctggtggcgccaaggagctaaagaacatccacgtgtgcctgggtggcctgttcgtgcctgaggcgtacatcactgccaccaggcagtatgtggcccaggccaacagctggtccctggaggagctctgcctggaagtcaacgtcaccacctcacagggcgccacccttgacgcttgcagcttcggagtcacgggtttgaaacttcaaggggccacgtgcaacaacaacaagctgtcactgtccaatgccatctcaaccgcccttcccctgacgcagctgcgctgggtcaagcagacaaacaccgagaagaaggccagtgtggtaaccttacctgtctacctgaacttcacccgtgcagacctcatcttcaccgtggacttcgaaattgctacaaaggaggatcctcgcagcttctacgagcggggtgtcgcagtcttgtgcacagagtaaacttttctagctgcccctttctgtaatagtgaaagttggtatttaacatttattcatttttaaaatatttggaaggtctgagcttgtgaaaagaaagtggttggtctgaggttggaggaagctgaatggaatctgacggttgggagtggtggaaattggaaggataccaggaggtatttgggaaggccaatggcgtggctcctttgaggaaataaaacactaagcatga

SEQ ID NO: 462044 - DNA, 15142 bp, Homo sapiens
  misc_feature (7590)..(7590): n is a, c, g, or t
ttcaatgagagaacatttaatgagaggttaaggggcttagaacaacgccgggcacaggctaagcgctcactaaacgttagctctcgccaataacatcactgattcactataaagtttctctggctgtgtgctattcgctgcgtccacagcagtgaagaagacagacgcagcccctgaccaacctcgccaagcccgggcgccgagccaggacgttgagccaagtccccatctcctaggactcgcagtgcggaggctgcgggccccgaccagcgccgagactacaagtcccagaagggcgcgcggcgacatcgccgggcccgccccccgcgcacgcgcggcgccgtgacgctaaggccgcgagcgagcgcgggtggctgcggcggctgcggccggcggggcggggcggggccacctggcagtggctgcctttagggcggagccggctcccgctctcctcagtctgcggtgggctagcggacggtccggcttccggcggccgtttctgtctcttgctggctgtctcgctgagtcgcggccgccttctcatcgctcctggaaggtcccgagcgcgacaccatgtcggagcccgggggcggcggcggcgaggacggctcggccggattggaagtgtcggccgtgcagaatgtggcggacgtgtcggtgctgcagaagcacctgcgcaagctggtgccgctgctgctggaggacggcggcgaggcgccggccgcgctggaggcggcgctggaggagaagagcgccctggagcagatgcgcaagttcctttcggacccgcaggtccacacggtgctggtggagcgctccacgctcaaagaggacgtcggtgatgaaggagaagaagaaaaagaattcatttcctataacatcaacatagacattcattatggggttaaatccaatagcttggcattcattaaacgtactcccgtgattgatgcagataaacccgtgtcttctcagctccgggtccttacactcagtgaagactcgccctacgaaactttgcattctttcattagcaatgcagtggctcctttttttaagtcctacattagagagtctggcaaggcagacagggatggtgataaaatggctccttcagttgaaaagaagattgcagaactcgaaatgggactccttcacttgcagcaaaatattgaaattccggagatcagcctgccgattcatccaatgatcacaaatgttgcaaaacagtgttatgagcgtggagaaaagccaaaagttacagactttggtgataaggttgaagacccaacatttcttaatcagttacaatctggagttaaccgctggatccgagaaattcaaaaagtgaccaaactggatcgagatcctgcatcaggaactgccttacaggaaattagtttttggctaaacttggaacgtgcgttataccgcatccaggagaaacgggagagcccggaagttctcctgactctggatatcttgaaacatggcaagcgcttccatgccaccgtcagttttgacactgacacaggtctaaaacaggctttggaaactgtgaatgactacaatcctctgatgaaagatttccctctgaatgatttgctgtctgccacggagctggacaaaataagacaggcgcttgttgccattttcacacatttgagaaagatccgaaacacaaaatatcctattcagagggcactgcgtttggtggaggcaatttcaagagacttgagttctcaattactcaaagtattgggcactaggaaattgatgcatgttgcttatgaagaatttgaaaaagttatggtagcatgctttgaagtttttcagacttgggatgatgagtatgagaaacttcaggtattgttgagagacatcgtcaaaagaaaaagggaagaaaatctgaagatggtgtggcgtatcaaccctgcccacaggaagctgcaggcccgccttgaccagatgagaaaatttagacgccagcatgaacagctaagagctgttatcgtcagggtcctgaggccacaggtcacggcagttgcacaacagaatcaaggagaggtccctgaaccccaagatatgaaagtggctgaggttctctttgatgctgcagatgcaaatgccattgaggaagtaaaccttgcttatgagaacgtcaaggaagtggatggactggatgtttccaaagagggcacggaagcctgggaggctgctatgaagaggtacgatgagaggatcgacagagtggagacccggatcaccgctcgccttcgggatcagcttggcacagccaagaatgccaacgagatgtttaggattttctccaggtttaatgcactgtttgtcaggcctcacatccgtggggccattcgtgactaccagacccagctgatccagcgcgtgaaagatgacattgagtctcttcacgacaagttcaaggtccagtacccacagagtcaggcttgtaagatgagtcacgttcgtgacttgccccctgtgtcagggtctatcatctgggctaaacagatcgacaggcagctgacggcctacatgaagcgggtggaagatgtccttggcaagggctgggagaatcacgtggaggggcagaagctgaagcaggatggagacagcttccgcatgaagctcaacacgcaggagatctttgatgactgggcaaggaaggtgcagcagcgcaacctcggtgtctcggggcgcattttcaccatcgaaagtactcgggttcggggccgaactggaaatgtgcttaagctgaaagttaactttcttcctgagattatcacactatccaaagaagtccggaacctcaaatggcttggtttccgcgtcccactggcgattgtgaacaaagcccatcaagcaaaccagctttacccgtttgccatctcactgatcgagagcgttcgtacctatgaacggacctgcgagaaggtggaggagcggaacaccatttcccttttggtggctggcttgaaaaaggaagtgcaggccctgatcgcagaaggcattgcgttggtgtgggagtcctacaaacttgacccatatgtacagcgcttagcagagactgtcttcaacttccaagaaaaggtggatgatctgctgatcattgaagaaaaaatagacctagaagtccgttccttggaaacttgtatgtatgaccataagacattctcggaaatcttgaacagagtccagaaagcagtggatgacttaaatctgcactcctattccaatttgcccatctgggtcaacaagcttgacatggagattgaaagaatattgggcgtccgtctgcaagctggcctgagagcttggacgcaggttcttcttggacaagctgaagataaagcagaagttgacatggacacagatgctccacaagttagtcacaagcctggtggagagccaaagatcaaaaatgtcgttcatgagctaagaataaccaatcaggtaatctacttgaatccaccaattgaagagtgcagatacaagctgtatcaggaaatgtttgcctggaagatggttgtactgtctctccccaggatccagagtcagaggtaccaggtgggtgtacattacgaattgactgaggaagagaaattctatcggaatgctttaacacggatgcctgatggccctgttgccctggaagagtcgtattctgctgtcatgggcattgtatctgaagttgaacagtatgtcaaggtttggcttcagtatcagtgtttatgggatatgcaagctgaaaacatctataacagacttggagaagatctcaacaaatggcaggctctcctggtccaaataaggaaggccagaggaacctttgacaatgcagaaaccaagaaagagtttggaccagtagttatagattatggcaaggtacaatctaaggtgaacttgaaatatgactcttggcataaggaggttcttagcaaatttgggcagatgctaggatcaaacatgacggaattccattcccagatctcaaagtcccgccaagagttggagcagcactcagtagacacggccagcacctccgatgcagtgaccttcatcacctatgtgcagtctttgaaacggaagatcaagcagtttgagaagcaagttgagctctaccgcaatggccagcgcttactggaaaagcaaaggttccagttcccaccttcctggctttatattgacaacatcgagggagagtggggagccttcaatgacatcatgcggcgaaaggactctgccattcagcagcaggtggcaaacctgcaaatgaagattgtccaggaggatcgggccgtggaaagccgcaccaccgacctgctgactgactgggagaagaccaagcctgtcacgggcaaccttcgcccagaagaggcacttcaggctctcaccatatatgaggggaagtttggtaggctgaaggacgacagagagaagtgtgcaaaggccaaggaggcgctggaattgacagatactgggcttctcagtggcagtgaagagcgcgtgcaggtggccttagaagaattacaggacctcaaaggcgtttggtcagaactttctaaggtttgggagcaaatcgatcagatgaaggagcaaccctgggtttcagtacagcctcgaaagcttcgacaaaatttggatgccctcctgaaccagctgaaaagcttccctgcccggttgcgacagtatgcgtcctatgagtttgttcagaggcttctgaaaggttacatgaagataaatatgctggtgattgaactgaaatccgaagcacttaaagaccgccattggaaacagctcatgaaaaggcttcacgttaattgggttgtttctgagctaacccttggccaaatctgggatgttgacttgcagaaaaatgaagcgattgtcaaggatgtactgcttgtggcacaaggggagatggctttggaagaatttttgaagcagataagagaagtgtggaatacttatgaactagacttggttaattatcagaacaagtgccgcttgatccgtggctgggatgacctcttcaacaaggtcaaagaacacatcaacagcgtctcggccatgaagctctctccgtattacaaggtttttgaagaggatgctctcagctgggaagataagctgaacaggatcatggctctctttgatgtgtggattgatgtgcagaggcggtgggtctacctggaaggtatcttcacaggcagtgcagatatcaagcacctgctgccagtggaaacccagcggtttcagagcatcagcactgagtttttggctctaatgaaaaaagtgtccaagtctccccttgttatggatgttctgaacatccagggagtacagaggtctctggaaagattggcagacctgctaggaaagatccagaaagcattgggagaatatctggaaagagagcggtcatctttccccaggttctattttgtgggtgatgaagatttgcttgaaatcattggaaacagcaagaatgtcgctaaattacagaaacacttcaagaagatgtttgctggagtttcgagcatcatcctgaacgaggataactctgttgttttgggtatttcatctcgggaaggagaggaggttatgtttaaaactcctgtgtcaattactgaacatcccaaaatcaatgagtggctcacattggtagaaaaggagatgagagtcaccctggccaaactgcttgctgagtctgttacggaagttgagatttttggtaaagcaacttcaattgacccaaatacctacatcacttggattgataaataccaggcccagcttgtggttttgtcagcccagatagcctggtctgagaacgtggagaccgcactgagcagcatgggcggaggtggagatgccgcgcccttgcactctgtgctgagcaatgtggaggtcaccctcaatgtgttagcagactctgtcctcatggagcagcccccactccgaaggcggaagctagaacacttgattacagagttggttcaccagagagatgttacaaggtccttgatcaaaagcaagattgacaacgccaaatcttttgaatggctcagccagatgcgattttactttgaccctaagcaaactgatgtgttacagcagttgtcaattcaaatggcaaatgccaaatttaactatggctttgagtacctgggtgttcaggacaaactggtccagacccccctcactgaccgctgctatttgacaatgacacaagccttggaggccaggctggggggttccccatttggacctgctggaactgggaaaacagagtctgtcaaagctcttggccatcagcttggacggtttgttttagttttcaactgtgatgaaacctttgatttccaggcaatgggccggatctttgtgggcctttgccaggtgggtgcctggggctgctttgacgagttcaaccgcctggaggagcggatgctctcggctgtgtcccagcaggtgcagtgcatacaggaagcactgcgtgaacattccaaccccaactacgacaagacctctgcccccattacttgtgagctgctgaacaaacaagtcaaggtgagcccggacatggccatcttcatcaccatgaaccctggctacgcgggccggtctaaccttcctgacaacttgaagaagctgttccggagcttggccatgaccaagcccgaccggcagttaatcgcccaggtcatgctgtactcacagggtttccgcactgctgaagtgcttgccaacaaaatcgtcccgttttttaaactatgcgatgagcagctctcttcccaaagccattatgacttcggtcttcgggctttgaagagtgtgctggtgagtgcaggcaatgtgaagagagagagaatccagaagataaagagggagaaagaggaacgaggggaagcagttgatgaaggagaaattgctgaaaatctccctgaacaagagattctgatacagagcgtctgtgagacgatggtgccaaagctggtggcagaggacatcccgctgctcttcagcctcctgtcggacgtgttccctggagtccagtatcacaggggtgagatgactgcccttcgagaggagctgaagaaagtgtgtcaggagatgtatttgacatatggagatggagaagaagttggtggaatgtgggttgaaaaggttctccagctctatcagatcacccagatcaatcatggcctgatgatggtggggccctcgggaagtgggaagagcatggcctggcgtgtcctgctgaaggcattggagagactcgagggtgtggaaggtgtggcccatatcatcgaccccaaggccatcagcaaagaccacctctacggaaccctggaccccaacaccagggaatggacagatgggctcttcacacacgtgctgagaaagatcatcgacagcgtgagaggcgagctgcagaagcgccagtggatcgtcttcgatggcgatgtggatccagagtgggttgagaacttgaactcagtgctggatgacaataagctcctaactttgcccaatggagagcgcctcagtcttccacccaangtgagaataatgtttgaggtacaggacttgaaatacgcgaccttggccacagtgtcgcgctgcggcatggtctggttcagtgaggatgtgctgagcaccgacatgatcttcaacaacttcctggccaggctgcgcagcatcccgctggatgaaggggaggatgaggcacagcggcggcgtaagggcaaagaggatgagggggaggaggccgcttcccccatgctgcagatccaaagagatgcagctacgatcatgcaaccgtacttcacgtccaacggcctggtcaccaaggcgctagagcacgccttccagctggagcacatcatggacctaacacgcctgcgctgcctgggctcgctcttctccatgctgcaccaggcctgccgcaacgtggcgcagtataacgccaaccatcccgacttccccatgcagatcgagcagctggagcgctacattcaggtcagggggcatcaggggcttcacagagctcaccactgcgccagaccacaggtctgaggacctctgaaatgctgcacctgtggggatgtgcgctctctcctaggcgaggcagagccttcgttgaggggctaggaaaggtgcagtgggtgtctgtgatgcaagaagactgggaaccactgtctttaggttaactttgctgtaagtgtctttcttttgttgttgaaattttataaaaatcaaagtttaattccctttttaatagcgatatctggtttatgccatactctggtccctgtctggagacagccggctaaaaatgagagcagagctgggtgaatacatcagaagaatcacgaccgtgcctctgcccactgcgcccaacatacccattatcgattatgaggtgtccatcagcggagaatggtctccgtggcaggccaaggtgcctcagattgaagtggagacgcacaaggtggcagcccctgatgtcgtcgtgccaacgctggacacagtccgccacgaagccctcttgtacacttggctggccgaacacaagcccctggtcttgtgtggccctcctgggtctggcaagaccatgacactcttcagcgccctccgggccttgcctgacatggaggtggtgggtctcaacttctccagtgctactactccagagctgcttctgaagacttttgatcactactgcgagtacaggcgcacacctaatggggtggttttggctcctgttcaacttggaaagtggctggtgttgttctgtgatgaaatcaacttgccagatatggataaatatgggacccagagggtcatatccttcatcagacagatggtggagcacggaggcttttaccgtacctcagatcaaacatgggtgaagctggagagaatccagtttgttggggcttgtaatccccccacagaccctggaagaaagcccctctcacacaggttcctgcgccacgtgcctgtcgtgtatgtggattacccgggccccgcctccctcacacagatctacggcaccttcaaccgcgccatgctgaggctcattccatccctgcggacgtatgcagagccgctcactgctgccatggtggagttctacaccatgtctcaggagagattcacccaggatacacaacctcactatatctattcaccccgtgaaatgactaggtgggtgagaggcatctttgaagcgctgagacctctggagaccctgcctgttgaaggcctcattcggatttgggcacatgaagctctgcgtctcttccaagatagactcgtagaggatgaggagaggcgttggactgatgagaacatcgacacggttgctctgaagcacttccctaacatcgacagagagaaggcaatgagccgacccatcttgtacagcaactggctgtcaaaggattacatcccagtagaccaagaagagttaagagattatgtcaaagctaggctgaaggtcttttatgaagaagaacttgatgttccgctggtgctgtttaatgaagtcctagaccacgtgctgaggattgacagaatattccgtcaacctcaaggccacttgcttctgattggtgttagtggagcaggaaaaactaccctgtctcgtttcgtcgcctggatgaacggtttgagtgtgtaccagattaaggtccataggaagtacacaggggaagactttgatgaagatctacggacagtgttgagacgttctggctgtaaaaatgaaaagatagcatttataatggatgaatctaatgtgttagattctggattcctggagcgaatgaatacccttctggccaatggagaggtgcctggtctctttgaaggagacgagtatgccaccttgatgacgcagtgcaaagagggggcacagaaggaaggcctgatgctggactcgcacgaggagctctacaagtggttcactagccaggttatccgcaacctccacgtcgtgttcaccatgaacccgtcctcggagggactcaaggaccgggcagctacatcaccagcacttttcaacaggtgtgtgttgaattggtttggagactggtccaccgaagcactgtatcaggttggcaaagaattcacaagtaagatggatctggagaagccaaattacatcgtgcctgattacatgccagttgtgtatgataagctgccgcagccaccatcccatcgggaagccattgtgaacagctgtgtgtttgttcatcagactcttcaccaggcgaatgctcggctagcaaagcgaggcggcagaacgatggccatcacccctcgccactacctggacttcatcaatcactatgccaacctgttccacgagaagcggagcgagctggaggagcagcagatgcacttgaacgtggggctcaggaagatcaaagagacagtcgaccaggtagaagaactgcgtcgtgacttgaggataaagagccaagagctggaggtgaagaatgcagcagccaatgacaagctgaaaaagatggtgaaagaccagcaggaggctgaaaagaagaaggttatgagccaagaaatccaggaacagctgcataagcagcaggaggtaattgcagacaaacagatgagtgtcaaagaagatcttgataaggtggaacctgccgtcattgaggcccagaatgctgtgaagtcgatcaagaagcagcacctggtggaggtgaggtccatggccaaccctcctgctgctgtgaagctggcgctggagtccatctgcctgctgctgggggaaagcaccacagactggaagcagatccgctccatcatcatgcgggagaacttcatccccaccatcgtcaacttctctgcagaggagatcagtgacgccataagggagaagatgaagaaaaattacatgtccaatccaagttacaattatgaaattgtgaatcgggcttccctggcttgcggccctatggtgaaatgggcaattgcacagcttaactatgcagacatgttaaagagagtggagcccctacgcaatgagctgcagaagctggaagatgacgccaaggacaaccagcagaaggccaacgaggtggagcagatgatccgagacctggaagccagcatcgcccgctacaaggaggaatacgccgtcctgatctcagaggcccaggccatcaaggcagacctggcagctgtcgaggcaaaagtaaaccggagcactgctcttctgaagagcttgtctgctgaacgtgaacgatgggaaaaaacaagtgaaactttcaaaaaccagatgtccaccattgctggggactgtctcttgtcagctgcgttcattgcctacgcgggttactttgaccagcagatgcgtcagaacttgttcactacctggtcccatcacctacagcaagccaacatccagttccgtacagatattgccaggacggaatacctttccaatgctgatgagcgtcttcgctggcaggccagctccttgcctgctgatgacctttgcacagaaaatgccatcatgctgaaacgattcaataggtatccgctgatcattgacccctctggacaggccacagaattcattatgaatgaatataaggatcgtaagatcacacggaccagcttcctggatgacgccttcagaaagaacttagagagtgcactgagattcggtaacccccttctggtccaggatgtggaaagctacgatccagttttgaacccggtgctgaaccgtgaagtgcggcgaacaggggggagagtgctgatcactctcggggaccaggacatagacctgtcgccatcgtttgtcatcttcctgtccacccgggatccaactgtcgagttcccaccagatctctgttcccgggttacttttgtaaacttcacagttacccgtagcagtttacaaagccagtgtctaaatgaagtacttaaagcagaaagacctgatgtggacgagaaacgatctgatcttcttaaacttcaaggggaatttcagctccgtttgcgtcagctggaaaaatctctactacaagctctgaacgaggtgaaagggcgcattttggatgacgacacgatcataaccactctggagaacctgaagagagaggctgcagaggtcaccaggaaagttgaggagacggacattgtcatgcaggaggtggagaccgtgtcccagcagtacctcccgctctccaccgcctgcagcagcatctacttcaccatggagtccctcaagcagatacacttcttgtaccagtactccctccagtttttcctggacatttatcacaacgtcctatacgagaacccgaacctgaagggtgtcaccgaccacacacagcgcctgtccattataacaaaggacctcttccaggtggcgtttaaccgagtggctcgaggcatgctgcatcaggaccacattacctttgccatgctgctggcaagaatcaaactgaagggcaccgtgggggagcccacctacgatgcagaattccagcacttcttgagaggaaatgagattgtcctgagtgctggctccacccccaggatccagggcctgactgtggagcaggcggaggcggtggtgaggctgagctgccttcccgcgtttaaggacttgattgcaaaggttcaggcagacgagcaatttggcatctggctggacagcagctccccggagcagactgtgccctacctctggagtgaagaaacacctgcaacacccattggccaggccatccaccgcctgctcctgatccaggctttccggcccgatcgcctgttggccatggcccacatgtttgtttcaacaaaccttggggagtctttcatgtccatcatggagcagccgctcgacctgacccacattgtgggcacagaggtgaagcccaacactcctgtcttaatgtgctctgtgcctggttatgatgccagtggacatgtcgaggaccttgcagccgagcagaacacgcagatcacttcaattgcaatcggctctgcagaaggctttaaccaagcagataaggcaataaacaccgctgtaaagtcgggcaggtgggtgatgctgaagaatgtgcatctggccccagggtggctgatgcagctggagaagaagttgcattccctgcagccgcatgcctgcttccgactcttcctcaccatggagatcaaccccaaggtgcctgtgaatctgctccgtgcgggccgcatctttgtgttcgagccaccgccaggggtgaaggccaacatgctgaggacgttcagcagcattcccgtctcacggatatgcaagtctcccaacgagcgtgcccgcttgtacttcctgctggcctggtttcatgcgatcatccaagaacgcttacgatacgcaccactggggtggtcaaagaagtatgaatttggagagtctgacctgcggtcagcttgcgatacggtggacacgtggctggatgacacggccaagggcaggcagaacatctcaccggataagatcccgtggtctgcactaaagaccttaatggcccagtccatttatggcgggcgcgtggacaacgagtttgaccagcgtctgctcaacaccttcctggagcgcctgttcacaaccaggagtttcgacagtgagtttaagctggcatgcaaggtcgacggacataaagacattcaaatgccagatggcatcaggcgagaggagtttgtgcagtgggtggagttgctccccgacacccagacgccctcctggctgggcctgcccaacaacgccgagagagtcctccttaccacacagggtgtggacatgatcagtaaaatgctgaagatgcagatgttggaggatgaggacgacctggcctacgcagagactgagaagaagacgaggacagactccacgtccgacgggcgccctgcctggatgcggacactgcacaccaccgcgtccaactggctgcacctcatcccccagacgctgagccacctcaagcgcaccgtggagaatatcaaggatcctttgttcaggttctttgagagagaagtgaagatgggcgcaaagctgcttcaggacgttcgccaggaccttgcagatgtcgtccaggtgtgcgaaggaaagaagaagcagaccaactacttgcgcacgctgatcaacgagctagtgaaagggatcttgcctcggagctggtcccactacacggtgcctgccggcatgaccgtcatccagtgggtgtccgacttcagcgagaggatcaaacagctgcagaacatctcactggcagctgcatctggtggcgccaaggagctaaagaacatccacgtgtgcctgggtggcctgttcgtgcctgaggcgtacatcactgccaccaggcagtatgtggcccaggccaacagctggtccctggaggagctctgcctggaagtcaacgtcaccacctcacagggcgccacccttgacgcttgcagcttcggagtcacgggtttgaaacttcaaggggccacgtgcaacaacaacaagctgtcactgtccaatgccatctcaaccgcccttcccctgacgcagctgcgctgggtcaagcagacaaacaccgagaagaaggccagtgtggtaaccttacctgtctacctgaacttcacccgtgcagacctcatcttcaccgtggacttcgaaattgctacaaaggaggatcctcgcagcttctacgagcggggtgtcgcagtcttgtgcacagagtaaacttttctagctgcccctttctgtaatagtgaaagttggtatttaacatttattcatttttaaaatatttggaaggtctgagcttgtgaaaagaaagtggttggtctgaggttggaggaagctgaatggaatctgacggttgggagtggtggaaattggaaggataccaggaggtatttgggaaggccaatggcgtggctcctttgaggaaataaaacactaagcatgaaaacacaacacaaaaacaacaaaacaccaccccacatgcatcccacacccaacaacatacacacgaaacaaacaaccaacaaccacaaacagcgccgcccccacccaccacaccgccgccaacacaaaccacca

SEQ ID NO: 462045 - DNA, 10813 bp, Homo sapiens
  misc_feature (3395)..(3395): n is a, c, g, or t
gaggacctcggaaatacacagcggagggagagtggggagccttcaatgacatcatgcggcgaaaggactctgccattcagcagcaggtggcaaacctgcaaatgaagattgtccaggaggatcgggccgtggaaagccgcaccaccgacctgctgactgactgggagaagaccaagcctgtcacgggcaaccttcgcccagaagaggcacttcaggctctcaccatatatgaggggaagtttggtaggctgaaggacgacagagagaagtgtgcaaaggccaaggaggcgctggaattgacagatactgggcttctcagtggcagtgaagagcgcgtgcaggtggccttagaagaattacaggacctcaaaggcgtttggtcagaactttctaaggtttgggagcaaatcgatcagatgaaggagcaaccctgggtttcagtacagcctcgaaagcttcgacaaaatttggatgccctcctgaaccagctgaaaagcttccctgcccggttgcgacagtatgcgtcctatgagtttgttcagaggcttctgaaaggttacatgaagataaatatgctggtgattgaactgaaatccgaagcacttaaagaccgccattggaaacagctcatgaaaaggcttcacgttaattgggttgtttctgagctaacccttggccaaatctgggatgttgacttgcagaaaaatgaagcgattgtcaaggatgtactgcttgtggcacaaggggagatggctttggaagaatttttgaagcagataagagaagtgtggaatacttatgaactagacttggttaattatcagaacaagtgccgcttgatccgtggctgggatgacctcttcaacaaggtcaaagaacacatcaacagcgtctcggccatgaagctctctccgtattacaaggtttttgaagaggatgctctcagctgggaagataagctgaacaggatcatggctctctttgatgtgtggattgatgtgcagaggcggtgggtctacctggaaggtatcttcacaggcagtgcagatatcaagcacctgctgccagtggaaacccagcggtttcagagcatcagcactgagtttttggctctaatgaaaaaagtgtccaagtctccccttgttatggatgttctgaacatccagggagtacagaggtctctggaaagattggcagacctgctaggaaagatccagaaagcattgggagaatatctggaaagagagcggtcatctttccccaggttctattttgtgggtgatgaagatttgcttgaaatcattggaaacagcaagaatgtcgctaaattacagaaacacttcaagaagatgtttgctggagtttcgagcatcatcctgaacgaggataactctgttgttttgggtatttcatctcgggaaggagaggaggttatgtttaaaactcctgtgtcaattactgaacatcccaaaatcaatgagtggctcacattggtagaaaaggagatgagagtcaccctggccaaactgcttgctgagtctgttacggaagttgagatttttggtaaagcaacttcaattgacccaaatacctacatcacttggattgataaataccaggcccagcttgtggttttgtcagcccagatagcctggtctgagaacgtggagaccgcactgagcagcatgggcggaggtggagatgccgcgcccttgcactctgtgctgagcaatgtggaggtcaccctcaatgtgttagcagactctgtcctcatggagcagcccccactccgaaggcggaagctagaacacttgattacagagttggttcaccagagagatgttacaaggtccttgatcaaaagcaagattgacaacgccaaatcttttgaatggctcagccagatgcgattttactttgaccctaagcaaactgatgtgttacagcagttgtcaattcaaatggcaaatgccaaatttaactatggctttgagtacctgggtgttcaggacaaactggtccagacccccctcactgaccgctgctatttgacaatgacacaagccttggaggccaggctggggggttccccatttggacctgctggaactgggaaaacagagtctgtcaaagctcttggccatcagcttggacggtttgttttagttttcaactgtgatgaaacctttgatttccaggcaatgggccggatctttgtgggcctttgccaggtgggtgcctggggctgctttgacgagttcaaccgcctggaggagcggatgctctcggctgtgtcccagcaggtgcagtgcatacaggaagcactgcgtgaacattccaaccccaactacgacaagacctctgcccccattacttgtgagctgctgaacaaacaagtcaaggtgagcccggacatggccatcttcatcaccatgaaccctggctacgcgggccggtctaaccttcctgacaacttgaagaagctgttccggagcttggccatgaccaagcccgaccggcagttaatcgcccaggtcatgctgtactcacagggtttccgcactgctgaagtgcttgccaacaaaatcgtcccgttttttaaactatgcgatgagcagctctcttcccaaagccattatgacttcggtcttcgggctttgaagagtgtgctggtgagtgcaggcaatgtgaagagagagagaatccagaagataaagagggagaaagaggaacgaggggaagcagttgatgaaggagaaattgctgaaaatctccctgaacaagagattctgatacagagcgtctgtgagacgatggtgccaaagctggtggcagaggacatcccgctgctcttcagcctcctgtcggacgtgttccctggagtccagtatcacaggggtgagatgactgcccttcgagaggagctgaagaaagtgtgtcaggagatgtatttgacatatggagatggagaagaagttggtggaatgtgggttgaaaaggttctccagctctatcagatcacccagatcaatcatggcctgatgatggtggggccctcgggaagtgggaagagcatggcctggcgtgtcctgctgaaggcattggagagactcgagggtgtggaaggtgtggcccatatcatcgaccccaaggccatcagcaaagaccacctctacggaaccctggaccccaacaccagggaatggacagatgggctcttcacacacgtgctgagaaagatcatcgacagcgtgagaggcgagctgcagaagcgccagtggatcgtcttcgatggcgatgtggatccagagtgggttgagaacttgaactcagtgctggatgacaataagctcctaactttgcccaatggagagcgcctcagtcttccacccaangtgagaataatgtttgaggtacaggacttgaaatacgcgaccttggccacagtgtcgcgctgcggcatggtctggttcagtgaggatgtgctgagcaccgacatgatcttcaacaacttcctggccaggctgcgcagcatcccgctggatgaaggggaggatgaggcacagcggcggcgtaagggcaaagaggatgagggggaggaggccgcttcccccatgctgcagatccaaagagatgcagctacgatcatgcaaccgtacttcacgtccaacggcctggtcaccaaggcgctagagcacgccttccagctggagcacatcatggacctaacacgcctgcgctgcctgggctcgctcttctccatgctgcaccaggcctgccgcaacgtggcgcagtataacgccaaccatcccgacttccccatgcagatcgagcagctggagcgctacattcaggtcagggggcatcaggggcttcacagagctcaccactgcgccagaccacaggtctgaggacctctgaaatgctgcacctgtggggatgtgcgctctctcctaggcgaggcagagccttcgttgaggggctaggaaaggtgcagtgggtgtctgtgatgcaagaagactgggaaccactgtctttaggttaactttgctgtaagtgtctttcttttgttgttgaaattttataaaaatcaaagtttaattccctttttaatagcgatatctggtttatgccatactctggtccctgtctggagacagccggctaaaaatgagagcagagctgggtgaatacatcagaagaatcacgaccgtgcctctgcccactgcgcccaacatacccattatcgattatgaggtgtccatcagcggagaatggtctccgtggcaggccaaggtgcctcagattgaagtggagacgcacaaggtggcagcccctgatgtcgtcgtgccaacgctggacacagtccgccacgaagccctcttgtacacttggctggccgaacacaagcccctggtcttgtgtggccctcctgggtctggcaagaccatgacactcttcagcgccctccgggccttgcctgacatggaggtggtgggtctcaacttctccagtgctactactccagagctgcttctgaagacttttgatcactactgcgagtacaggcgcacacctaatggggtggttttggctcctgttcaacttggaaagtggctggtgttgttctgtgatgaaatcaacttgccagatatggataaatatgggacccagagggtcatatccttcatcagacagatggtggagcacggaggcttttaccgtacctcagatcaaacatgggtgaagctggagagaatccagtttgttggggcttgtaatccccccacagaccctggaagaaagcccctctcacacaggttcctgcgccacgtgcctgtcgtgtatgtggattacccgggccccgcctccctcacacagatctacggcaccttcaaccgcgccatgctgaggctcattccatccctgcggacgtatgcagagccgctcactgctgccatggtggagttctacaccatgtctcaggagagattcacccaggatacacaacctcactatatctattcaccccgtgaaatgactaggtgggtgagaggcatctttgaagcgctgagacctctggagaccctgcctgttgaaggcctcattcggatttgggcacatgaagctctgcgtctcttccaagatagactcgtagaggatgaggagaggcgttggactgatgagaacatcgacacggttgctctgaagcacttccctaacatcgacagagagaaggcaatgagccgacccatcttgtacagcaactggctgtcaaaggattacatcccagtagaccaagaagagttaagagattatgtcaaagctaggctgaaggtcttttatgaagaagaacttgatgttccgctggtgctgtttaatgaagtcctagaccacgtgctgaggattgacagaatattccgtcaacctcaaggccacttgcttctgattggtgttagtggagcaggaaaaactaccctgtctcgtttcgtcgcctggatgaacggtttgagtgtgtaccagattaaggtccataggaagtacacaggggaagactttgatgaagatctacggacagtgttgagacgttctggctgtaaaaatgaaaagatagcatttataatggatgaatctaatgtgttagattctggattcctggagcgaatgaatacccttctggccaatggagaggtgcctggtctctttgaaggagacgagtatgccaccttgatgacgcagtgcaaagagggggcacagaaggaaggcctgatgctggactcgcacgaggagctctacaagtggttcactagccaggttatccgcaacctccacgtcgtgttcaccatgaacccgtcctcggagggactcaaggaccgggcagctacatcaccagcacttttcaacaggtgtgtgttgaattggtttggagactggtccaccgaagcactgtatcaggttggcaaagaattcacaagtaagatggatctggagaagccaaattacatcgtgcctgattacatgccagttgtgtatgataagctgccgcagccaccatcccatcgggaagccattgtgaacagctgtgtgtttgttcatcagactcttcaccaggcgaatgctcggctagcaaagcgaggcggcagaacgatggccatcacccctcgccactacctggacttcatcaatcactatgccaacctgttccacgagaagcggagcgagctggaggagcagcagatgcacttgaacgtggggctcaggaagatcaaagagacagtcgaccaggtagaagaactgcgtcgtgacttgaggataaagagccaagagctggaggtgaagaatgcagcagccaatgacaagctgaaaaagatggtgaaagaccagcaggaggctgaaaagaagaaggttatgagccaagaaatccaggaacagctgcataagcagcaggaggtaattgcagacaaacagatgagtgtcaaagaagatcttgataaggtggaacctgccgtcattgaggcccagaatgctgtgaagtcgatcaagaagcagcacctggtggaggtgaggtccatggccaaccctcctgctgctgtgaagctggcgctggagtccatctgcctgctgctgggggaaagcaccacagactggaagcagatccgctccatcatcatgcgggagaacttcatccccaccatcgtcaacttctctgcagaggagatcagtgacgccataagggagaagatgaagaaaaattacatgtccaatccaagttacaattatgaaattgtgaatcgggcttccctggcttgcggccctatggtgaaatgggcaattgcacagcttaactatgcagacatgttaaagagagtggagcccctacgcaatgagctgcagaagctggaagatgacgccaaggacaaccagcagaaggccaacgaggtggagcagatgatccgagacctggaagccagcatcgcccgctacaaggaggaatacgccgtcctgatctcagaggcccaggccatcaaggcagacctggcagctgtcgaggcaaaagtaaaccggagcactgctcttctgaagagcttgtctgctgaacgtgaacgatgggaaaaaacaagtgaaactttcaaaaaccagatgtccaccattgctggggactgtctcttgtcagctgcgttcattgcctacgcgggttactttgaccagcagatgcgtcagaacttgttcactacctggtcccatcacctacagcaagccaacatccagttccgtacagatattgccaggacggaatacctttccaatgctgatgagcgtcttcgctggcaggccagctccttgcctgctgatgacctttgcacagaaaatgccatcatgctgaaacgattcaataggtatccgctgatcattgacccctctggacaggccacagaattcattatgaatgaatataaggatcgtaagatcacacggaccagcttcctggatgacgccttcagaaagaacttagagagtgcactgagattcggtaacccccttctggtccaggatgtggaaagctacgatccagttttgaacccggtgctgaaccgtgaagtgcggcgaacaggggggagagtgctgatcactctcggggaccaggacatagacctgtcgccatcgtttgtcatcttcctgtccacccgggatccaactgtcgagttcccaccagatctctgttcccgggttacttttgtaaacttcacagttacccgtagcagtttacaaagccagtgtctaaatgaagtacttaaagcagaaagacctgatgtggacgagaaacgatctgatcttcttaaacttcaaggggaatttcagctccgtttgcgtcagctggaaaaatctctactacaagctctgaacgaggtgaaagggcgcattttggatgacgacacgatcataaccactctggagaacctgaagagagaggctgcagaggtcaccaggaaagttgaggagacggacattgtcatgcaggaggtggagaccgtgtcccagcagtacctcccgctctccaccgcctgcagcagcatctacttcaccatggagtccctcaagcagatacacttcttgtaccagtactccctccagtttttcctggacatttatcacaacgtcctatacgagaacccgaacctgaagggtgtcaccgaccacacacagcgcctgtccattataacaaaggacctcttccaggtggcgtttaaccgagtggctcgaggcatgctgcatcaggaccacattacctttgccatgctgctggcaagaatcaaactgaagggcaccgtgggggagcccacctacgatgcagaattccagcacttcttgagaggaaatgagattgtcctgagtgctggctccacccccaggatccagggcctgactgtggagcaggcggaggcggtggtgaggctgagctgccttcccgcgtttaaggacttgattgcaaaggttcaggcagacgagcaatttggcatctggctggacagcagctccccggagcagactgtgccctacctctggagtgaagaaacacctgcaacacccattggccaggccatccaccgcctgctcctgatccaggctttccggcccgatcgcctgttggccatggcccacatgtttgtttcaacaaaccttggggagtctttcatgtccatcatggagcagccgctcgacctgacccacattgtgggcacagaggtgaagcccaacactcctgtcttaatgtgctctgtgcctggttatgatgccagtggacatgtcgaggaccttgcagccgagcagaacacgcagatcacttcaattgcaatcggctctgcagaaggctttaaccaagcagataaggcaataaacaccgctgtaaagtcgggcaggtgggtgatgctgaagaatgtgcatctggccccagggtggctgatgcagctggagaagaagttgcattccctgcagccgcatgcctgcttccgactcttcctcaccatggagatcaaccccaaggtgcctgtgaatctgctccgtgcgggccgcatctttgtgttcgagccaccgccaggggtgaaggccaacatgctgaggacgttcagcagcattcccgtctcacggatatgcaagtctcccaacgagcgtgcccgcttgtacttcctgctggcctggtttcatgcgatcatccaagaacgcttacgatacgcaccactggggtggtcaaagaagtatgaatttggagagtctgacctgcggtcagcttgcgatacggtggacacgtggctggatgacacggccaagggcaggcagaacatctcaccggataagatcccgtggtctgcactaaagaccttaatggcccagtccatttatggcgggcgcgtggacaacgagtttgaccagcgtctgctcaacaccttcctggagcgcctgttcacaaccaggagtttcgacagtgagtttaagctggcatgcaaggtcgacggacataaagacattcaaatgccagatggcatcaggcgagaggagtttgtgcagtgggtggagttgctccccgacacccagacgccctcctggctgggcctgcccaacaacgccgagagagtcctccttaccacacagggtgtggacatgatcagtaaaatgctgaagatgcagatgttggaggatgaggacgacctggcctacgcagagactgagaagaagacgaggacagactccacgtccgacgggcgccctgcctggatgcggacactgcacaccaccgcgtccaactggctgcacctcatcccccagacgctgagccacctcaagcgcaccgtggagaatatcaaggatcctttgttcaggttctttgagagagaagtgaagatgggcgcaaagctgcttcaggacgttcgccaggaccttgcagatgtcgtccaggtgtgcgaaggaaagaagaagcagaccaactacttgcgcacgctgatcaacgagctagtgaaagggatcttgcctcggagctggtcccactacacggtgcctgccggcatgaccgtcatccagtgggtgtccgacttcagcgagaggatcaaacagctgcagaacatctcactggcagctgcatctggtggcgccaaggagctaaagaacatccacgtgtgcctgggtggcctgttcgtgcctgaggcgtacatcactgccaccaggcagtatgtggcccaggccaacagctggtccctggaggagctctgcctggaagtcaacgtcaccacctcacagggcgccacccttgacgcttgcagcttcggagtcacgggtttgaaacttcaaggggccacgtgcaacaacaacaagctgtcactgtccaatgccatctcaaccgcccttcccctgacgcagctgcgctgggtcaagcagacaaacaccgagaagaaggccagtgtggtaaccttacctgtctacctgaacttcacccgtgcagacctcatcttcaccgtggacttcgaaattgctacaaaggaggatcctcgcagcttctacgagcggggtgtcgcagtcttgtgcacagagtaaacttttctagctgcccctttctgtaatagtgaaagttggtatttaacatttattcatttttaaaatatttggaaggtctgagcttgtgaaaagaaagtggttggtctgaggttggaggaagctgaatggaatctgacggttgggagtggtggaaattggaaggataccaggaggtatttgggaaggccaatggcgtggctcctttgaggaaataaaacactaagcatga

SEQ ID NO: 462046 - DNA, 15041 bp, Homo sapiens
  misc_feature (7590)..(7590): n is a, c, g, or t
ttcaatgagagaacatttaatgagaggttaaggggcttagaacaacgccgggcacaggctaagcgctcactaaacgttagctctcgccaataacatcactgattcactataaagtttctctggctgtgtgctattcgctgcgtccacagcagtgaagaagacagacgcagcccctgaccaacctcgccaagcccgggcgccgagccaggacgttgagccaagtccccatctcctaggactcgcagtgcggaggctgcgggccccgaccagcgccgagactacaagtcccagaagggcgcgcggcgacatcgccgggcccgccccccgcgcacgcgcggcgccgtgacgctaaggccgcgagcgagcgcgggtggctgcggcggctgcggccggcggggcggggcggggccacctggcagtggctgcctttagggcggagccggctcccgctctcctcagtctgcggtgggctagcggacggtccggcttccggcggccgtttctgtctcttgctggctgtctcgctgagtcgcggccgccttctcatcgctcctggaaggtcccgagcgcgacaccatgtcggagcccgggggcggcggcggcgaggacggctcggccggattggaagtgtcggccgtgcagaatgtggcggacgtgtcggtgctgcagaagcacctgcgcaagctggtgccgctgctgctggaggacggcggcgaggcgccggccgcgctggaggcggcgctggaggagaagagcgccctggagcagatgcgcaagttcctttcggacccgcaggtccacacggtgctggtggagcgctccacgctcaaagaggacgtcggtgatgaaggagaagaagaaaaagaattcatttcctataacatcaacatagacattcattatggggttaaatccaatagcttggcattcattaaacgtactcccgtgattgatgcagataaacccgtgtcttctcagctccgggtccttacactcagtgaagactcgccctacgaaactttgcattctttcattagcaatgcagtggctcctttttttaagtcctacattagagagtctggcaaggcagacagggatggtgataaaatggctccttcagttgaaaagaagattgcagaactcgaaatgggactccttcacttgcagcaaaatattgaaattccggagatcagcctgccgattcatccaatgatcacaaatgttgcaaaacagtgttatgagcgtggagaaaagccaaaagttacagactttggtgataaggttgaagacccaacatttcttaatcagttacaatctggagttaaccgctggatccgagaaattcaaaaagtgaccaaactggatcgagatcctgcatcaggaactgccttacaggaaattagtttttggctaaacttggaacgtgcgttataccgcatccaggagaaacgggagagcccggaagttctcctgactctggatatcttgaaacatggcaagcgcttccatgccaccgtcagttttgacactgacacaggtctaaaacaggctttggaaactgtgaatgactacaatcctctgatgaaagatttccctctgaatgatttgctgtctgccacggagctggacaaaataagacaggcgcttgttgccattttcacacatttgagaaagatccgaaacacaaaatatcctattcagagggcactgcgtttggtggaggcaatttcaagagacttgagttctcaattactcaaagtattgggcactaggaaattgatgcatgttgcttatgaagaatttgaaaaagttatggtagcatgctttgaagtttttcagacttgggatgatgagtatgagaaacttcaggtattgttgagagacatcgtcaaaagaaaaagggaagaaaatctgaagatggtgtggcgtatcaaccctgcccacaggaagctgcaggcccgccttgaccagatgagaaaatttagacgccagcatgaacagctaagagctgttatcgtcagggtcctgaggccacaggtcacggcagttgcacaacagaatcaaggagaggtccctgaaccccaagatatgaaagtggctgaggttctctttgatgctgcagatgcaaatgccattgaggaagtaaaccttgcttatgagaacgtcaaggaagtggatggactggatgtttccaaagagggcacggaagcctgggaggctgctatgaagaggtacgatgagaggatcgacagagtggagacccggatcaccgctcgccttcgggatcagcttggcacagccaagaatgccaacgagatgtttaggattttctccaggtttaatgcactgtttgtcaggcctcacatccgtggggccattcgtgactaccagacccagctgatccagcgcgtgaaagatgacattgagtctcttcacgacaagttcaaggtccagtacccacagagtcaggcttgtaagatgagtcacgttcgtgacttgccccctgtgtcagggtctatcatctgggctaaacagatcgacaggcagctgacggcctacatgaagcgggtggaagatgtccttggcaagggctgggagaatcacgtggaggggcagaagctgaagcaggatggagacagcttccgcatgaagctcaacacgcaggagatctttgatgactgggcaaggaaggtgcagcagcgcaacctcggtgtctcggggcgcattttcaccatcgaaagtactcgggttcggggccgaactggaaatgtgcttaagctgaaagttaactttcttcctgagattatcacactatccaaagaagtccggaacctcaaatggcttggtttccgcgtcccactggcgattgtgaacaaagcccatcaagcaaaccagctttacccgtttgccatctcactgatcgagagcgttcgtacctatgaacggacctgcgagaaggtggaggagcggaacaccatttcccttttggtggctggcttgaaaaaggaagtgcaggccctgatcgcagaaggcattgcgttggtgtgggagtcctacaaacttgacccatatgtacagcgcttagcagagactgtcttcaacttccaagaaaaggtggatgatctgctgatcattgaagaaaaaatagacctagaagtccgttccttggaaacttgtatgtatgaccataagacattctcggaaatcttgaacagagtccagaaagcagtggatgacttaaatctgcactcctattccaatttgcccatctgggtcaacaagcttgacatggagattgaaagaatattgggcgtccgtctgcaagctggcctgagagcttggacgcaggttcttcttggacaagctgaagataaagcagaagttgacatggacacagatgctccacaagttagtcacaagcctggtggagagccaaagatcaaaaatgtcgttcatgagctaagaataaccaatcaggtaatctacttgaatccaccaattgaagagtgcagatacaagctgtatcaggaaatgtttgcctggaagatggttgtactgtctctccccaggatccagagtcagaggtaccaggtgggtgtacattacgaattgactgaggaagagaaattctatcggaatgctttaacacggatgcctgatggccctgttgccctggaagagtcgtattctgctgtcatgggcattgtatctgaagttgaacagtatgtcaaggtttggcttcagtatcagtgtttatgggatatgcaagctgaaaacatctataacagacttggagaagatctcaacaaatggcaggctctcctggtccaaataaggaaggccagaggaacctttgacaatgcagaaaccaagaaagagtttggaccagtagttatagattatggcaaggtacaatctaaggtgaacttgaaatatgactcttggcataaggaggttcttagcaaatttgggcagatgctaggatcaaacatgacggaattccattcccagatctcaaagtcccgccaagagttggagcagcactcagtagacacggccagcacctccgatgcagtgaccttcatcacctatgtgcagtctttgaaacggaagatcaagcagtttgagaagcaagttgagctctaccgcaatggccagcgcttactggaaaagcaaaggttccagttcccaccttcctggctttatattgacaacatcgagggagagtggggagccttcaatgacatcatgcggcgaaaggactctgccattcagcagcaggtggcaaacctgcaaatgaagattgtccaggaggatcgggccgtggaaagccgcaccaccgacctgctgactgactgggagaagaccaagcctgtcacgggcaaccttcgcccagaagaggcacttcaggctctcaccatatatgaggggaagtttggtaggctgaaggacgacagagagaagtgtgcaaaggccaaggaggcgctggaattgacagatactgggcttctcagtggcagtgaagagcgcgtgcaggtggccttagaagaattacaggacctcaaaggcgtttggtcagaactttctaaggtttgggagcaaatcgatcagatgaaggagcaaccctgggtttcagtacagcctcgaaagcttcgacaaaatttggatgccctcctgaaccagctgaaaagcttccctgcccggttgcgacagtatgcgtcctatgagtttgttcagaggcttctgaaaggttacatgaagataaatatgctggtgattgaactgaaatccgaagcacttaaagaccgccattggaaacagctcatgaaaaggcttcacgttaattgggttgtttctgagctaacccttggccaaatctgggatgttgacttgcagaaaaatgaagcgattgtcaaggatgtactgcttgtggcacaaggggagatggctttggaagaatttttgaagcagataagagaagtgtggaatacttatgaactagacttggttaattatcagaacaagtgccgcttgatccgtggctgggatgacctcttcaacaaggtcaaagaacacatcaacagcgtctcggccatgaagctctctccgtattacaaggtttttgaagaggatgctctcagctgggaagataagctgaacaggatcatggctctctttgatgtgtggattgatgtgcagaggcggtgggtctacctggaaggtatcttcacaggcagtgcagatatcaagcacctgctgccagtggaaacccagcggtttcagagcatcagcactgagtttttggctctaatgaaaaaagtgtccaagtctccccttgttatggatgttctgaacatccagggagtacagaggtctctggaaagattggcagacctgctaggaaagatccagaaagcattgggagaatatctggaaagagagcggtcatctttccccaggttctattttgtgggtgatgaagatttgcttgaaatcattggaaacagcaagaatgtcgctaaattacagaaacacttcaagaagatgtttgctggagtttcgagcatcatcctgaacgaggataactctgttgttttgggtatttcatctcgggaaggagaggaggttatgtttaaaactcctgtgtcaattactgaacatcccaaaatcaatgagtggctcacattggtagaaaaggagatgagagtcaccctggccaaactgcttgctgagtctgttacggaagttgagatttttggtaaagcaacttcaattgacccaaatacctacatcacttggattgataaataccaggcccagcttgtggttttgtcagcccagatagcctggtctgagaacgtggagaccgcactgagcagcatgggcggaggtggagatgccgcgcccttgcactctgtgctgagcaatgtggaggtcaccctcaatgtgttagcagactctgtcctcatggagcagcccccactccgaaggcggaagctagaacacttgattacagagttggttcaccagagagatgttacaaggtccttgatcaaaagcaagattgacaacgccaaatcttttgaatggctcagccagatgcgattttactttgaccctaagcaaactgatgtgttacagcagttgtcaattcaaatggcaaatgccaaatttaactatggctttgagtacctgggtgttcaggacaaactggtccagacccccctcactgaccgctgctatttgacaatgacacaagccttggaggccaggctggggggttccccatttggacctgctggaactgggaaaacagagtctgtcaaagctcttggccatcagcttggacggtttgttttagttttcaactgtgatgaaacctttgatttccaggcaatgggccggatctttgtgggcctttgccaggtgggtgcctggggctgctttgacgagttcaaccgcctggaggagcggatgctctcggctgtgtcccagcaggtgcagtgcatacaggaagcactgcgtgaacattccaaccccaactacgacaagacctctgcccccattacttgtgagctgctgaacaaacaagtcaaggtgagcccggacatggccatcttcatcaccatgaaccctggctacgcgggccggtctaaccttcctgacaacttgaagaagctgttccggagcttggccatgaccaagcccgaccggcagttaatcgcccaggtcatgctgtactcacagggtttccgcactgctgaagtgcttgccaacaaaatcgtcccgttttttaaactatgcgatgagcagctctcttcccaaagccattatgacttcggtcttcgggctttgaagagtgtgctggtgagtgcaggcaatgtgaagagagagagaatccagaagataaagagggagaaagaggaacgaggggaagcagttgatgaaggagaaattgctgaaaatctccctgaacaagagattctgatacagagcgtctgtgagacgatggtgccaaagctggtggcagaggacatcccgctgctcttcagcctcctgtcggacgtgttccctggagtccagtatcacaggggtgagatgactgcccttcgagaggagctgaagaaagtgtgtcaggagatgtatttgacatatggagatggagaagaagttggtggaatgtgggttgaaaaggttctccagctctatcagatcacccagatcaatcatggcctgatgatggtggggccctcgggaagtgggaagagcatggcctggcgtgtcctgctgaaggcattggagagactcgagggtgtggaaggtgtggcccatatcatcgaccccaaggccatcagcaaagaccacctctacggaaccctggaccccaacaccagggaatggacagatgggctcttcacacacgtgctgagaaagatcatcgacagcgtgagaggcgagctgcagaagcgccagtggatcgtcttcgatggcgatgtggatccagagtgggttgagaacttgaactcagtgctggatgacaataagctcctaactttgcccaatggagagcgcctcagtcttccacccaangtgagaataatgtttgaggtacaggacttgaaatacgcgaccttggccacagtgtcgcgctgcggcatggtctggttcagtgaggatgtgctgagcaccgacatgatcttcaacaacttcctggccaggctgcgcagcatcccgctggatgaaggggaggatgaggcacagcggcggcgtaagggcaaagaggatgagggggaggaggccgcttcccccatgctgcagatccaaagagatgcagctacgatcatgcaaccgtacttcacgtccaacggcctggtcaccaaggcgctagagcacgccttccagctggagcacatcatggacctaacacgcctgcgctgcctgggctcgctcttctccatgctgcaccaggcctgccgcaacgtggcgcagtataacgccaaccatcccgacttccccatgcagatcgagcagctggagcgctacattcaggtcagggggcatcaggggcttcacagagctcaccactgcgccagaccacaggtctgaggacctctgaaatgctgcacctgtggggatgtgcgctctctcctaggcgaggcagagccttcgttgaggggctaggaaaggtgcagtgggtgtctgtgatgcaagaagactgggaaccactgtctttaggttaactttgctgtaagtgtctttcttttgttgttgaaattttataaaaatcaaagtttaattccctttttaatagcgatatctggtttatgccatactctggtccctgtctggagacagccggctaaaaatgagagcagagctgggtgaatacatcagaagaatcacgaccgtgcctctgcccactgcgcccaacatacccattatcgattatgaggtgtccatcagcggagaatggtctccgtggcaggccaaggtgcctcagattgaagtggagacgcacaaggtggcagcccctgatgtcgtcgtgccaacgctggacacagtccgccacgaagccctcttgtacacttggctggccgaacacaagcccctggtcttgtgtggccctcctgggtctggcaagaccatgacactcttcagcgccctccgggccttgcctgacatggaggtggtgggtctcaacttctccagtgctactactccagagctgcttctgaagacttttgatcactactgcgagtacaggcgcacacctaatggggtggttttggctcctgttcaacttggaaagtggctggtgttgttctgtgatgaaatcaacttgccagatatggataaatatgggacccagagggtcatatccttcatcagacagatggtggagcacggaggcttttaccgtacctcagatcaaacatgggtgaagctggagagaatccagtttgttggggcttgtaatccccccacagaccctggaagaaagcccctctcacacaggttcctgcgccacgtgcctgtcgtgtatgtggattacccgggccccgcctccctcacacagatctacggcaccttcaaccgcgccatgctgaggctcattccatccctgcggacgtatgcagagccgctcactgctgccatggtggagttctacaccatgtctcaggagagattcacccaggatacacaacctcactatatctattcaccccgtgaaatgactaggtgggtgagaggcatctttgaagcgctgagacctctggagaccctgcctgttgaaggcctcattcggatttgggcacatgaagctctgcgtctcttccaagatagactcgtagaggatgaggagaggcgttggactgatgagaacatcgacacggttgctctgaagcacttccctaacatcgacagagagaaggcaatgagccgacccatcttgtacagcaactggctgtcaaaggattacatcccagtagaccaagaagagttaagagattatgtcaaagctaggctgaaggtcttttatgaagaagaacttgatgttccgctggtgctgtttaatgaagtcctagaccacgtgctgaggattgacagaatattccgtcaacctcaaggccacttgcttctgattggtgttagtggagcaggaaaaactaccctgtctcgtttcgtcgcctggatgaacggtttgagtgtgtaccagattaaggtccataggaagtacacaggggaagactttgatgaagatctacggacagtgttgagacgttctggctgtaaaaatgaaaagatagcatttataatggatgaatctaatgtgttagattctggattcctggagcgaatgaatacccttctggccaatggagaggtgcctggtctctttgaaggagacgagtatgccaccttgatgacgcagtgcaaagagggggcacagaaggaaggcctgatgctggactcgcacgaggagctctacaagtggttcactagccaggttatccgcaacctccacgtcgtgttcaccatgaacccgtcctcggagggactcaaggaccgggcagctacatcaccagcacttttcaacaggtgtgtgttgaattggtttggagactggtccaccgaagcactgtatcaggttggcaaagaattcacaagtaagatggatctggagaagccaaattacatcgtgcctgattacatgccagttgtgtatgataagctgccgcagccaccatcccatcgggaagccattgtgaacagctgtgtgtttgttcatcagactcttcaccaggcgaatgctcggctagcaaagcgaggcggcagaacgatggccatcacccctcgccactacctggacttcatcaatcactatgccaacctgttccacgagaagcggagcgagctggaggagcagcagatgcacttgaacgtggggctcaggaagatcaaagagacagtcgaccaggtagaagaactgcgtcgtgacttgaggataaagagccaagagctggaggtgaagaatgcagcagccaatgacaagctgaaaaagatggtgaaagaccagcaggaggctgaaaagaagaaggttatgagccaagaaatccaggaacagctgcataagcagcaggaggtaattgcagacaaacagatgagtgtcaaagaagatcttgataaggtggaacctgccgtcattgaggcccagaatgctgtgaagtcgatcaagaagcagcacctggtggaggtgaggtccatggccaaccctcctgctgctgtgaagctggcgctggagtccatctgcctgctgctgggggaaagcaccacagactggaagcagatccgctccatcatcatgcgggagaacttcatccccaccatcgtcaacttctctgcagaggagatcagtgacgccataagggagaagatgaagaaaaattacatgtccaatccaagttacaattatgaaattgtgaatcgggcttccctggcttgcggccctatggtgaaatgggcaattgcacagcttaactatgcagacatgttaaagagagtggagcccctacgcaatgagctgcagaagctggaagatgacgccaaggacaaccagcagaaggccaacgaggtggagcagatgatccgagacctggaagccagcatcgcccgctacaaggaggaatacgccgtcctgatctcagaggcccaggccatcaaggcagacctggcagctgtcgaggcaaaagtaaaccggagcactgctcttctgaagagcttgtctgctgaacgtgaacgatgggaaaaaacaagtgaaactttcaaaaaccagatgtccaccattgctggggactgtctcttgtcagctgcgttcattgcctacgcgggttactttgaccagcagatgcgtcagaacttgttcactacctggtcccatcacctacagcaagccaacatccagttccgtacagatattgccaggacggaatacctttccaatgctgatgagcgtcttcgctggcaggccagctccttgcctgctgatgacctttgcacagaaaatgccatcatgctgaaacgattcaataggtatccgctgatcattgacccctctggacaggccacagaattcattatgaatgaatataaggatcgtaagatcacacggaccagcttcctggatgacgccttcagaaagaacttagagagtgcactgagattcggtaacccccttctggtccaggatgtggaaagctacgatccagttttgaacccggtgctgaaccgtgaagtgcggcgaacaggggggagagtgctgatcactctcggggaccaggacatagacctgtcgccatcgtttgtcatcttcctgtccacccgggatccaactgtcgagttcccaccagatctctgttcccgggttacttttgtaaacttcacagttacccgtagcagtttacaaagccagtgtctaaatgaagtacttaaagcagaaagacctgatgtggacgagaaacgatctgatcttcttaaacttcaaggggaatttcagctccgtttgcgtcagctggaaaaatctctactacaagctctgaacgaggtgaaagggcgcattttggatgacgacacgatcataaccactctggagaacctgaagagagaggctgcagaggtcaccaggaaagttgaggagacggacattgtcatgcaggaggtggagaccgtgtcccagcagtacctcccgctctccaccgcctgcagcagcatctacttcaccatggagtccctcaagcagatacacttcttgtaccagtactccctccagtttttcctggacatttatcacaacgtcctatacgagaacccgaacctgaagggtgtcaccgaccacacacagcgcctgtccattataacaaaggacctcttccaggtggcgtttaaccgagtggctcgaggcatgctgcatcaggaccacattacctttgccatgctgctggcaagaatcaaactgaagggcaccgtgggggagcccacctacgatgcagaattccagcacttcttgagaggaaatgagattgtcctgagtgctggctccacccccaggatccagggcctgactgtggagcaggcggaggcggtggtgaggctgagctgccttcccgcgtttaaggacttgattgcaaaggttcaggcagacgagcaatttggcatctggctggacagcagctccccggagcagactgtgccctacctctggagtgaagaaacacctgcaacacccattggccaggccatccaccgcctgctcctgatccaggctttccggcccgatcgcctgttggccatggcccacatgtttgtttcaacaaaccttggggagtctttcatgtccatcatggagcagccgctcgacctgacccacattgtgggcacagaggtgaagcccaacactcctgtcttaatgtgctctgtgcctggttatgatgccagtggacatgtcgaggaccttgcagccgagcagaacacgcagatcacttcaattgcaatcggctctgcagaaggctttaaccaagcagataaggcaataaacaccgctgtaaagtcgggcaggtgggtgatgctgaagaatgtgcatctggccccagggtggctgatgcagctggagaagaagttgcattccctgcagccgcatgcctgcttccgactcttcctcaccatggagatcaaccccaaggtgcctgtgaatctgctccgtgcgggccgcatctttgtgttcgagccaccgccaggggtgaaggccaacatgctgaggacgttcagcagcattcccgtctcacggatatgcaagtctcccaacgagcgtgcccgcttgtacttcctgctggcctggtttcatgcgatcatccaagaacgcttacgatacgcaccactggggtggtcaaagaagtatgaatttggagagtctgacctgcggtcagcttgcgatacggtggacacgtggctggatgacacggccaagggcaggcagaacatctcaccggataagatcccgtggtctgcactaaagaccttaatggcccagtccatttatggcgggcgcgtggacaacgagtttgaccagcgtctgctcaacaccttcctggagcgcctgttcacaaccaggagtttcgacagtgagtttaagctggcatgcaaggtcgacggacataaagacattcaaatgccagatggcatcaggcgagaggagtttgtgcagtgggtggagttgctccccgacacccagacgccctcctggctgggcctgcccaacaacgccgagagagtcctccttaccacacagggtgtggacatgatcagtaaaatgctgaagatgcagatgttggaggatgaggacgacctggcctacgcagagactgagaagaagacgaggacagactccacgtccgacgggcgccctgcctggatgcggacactgcacaccaccgcgtccaactggctgcacctcatcccccagacgctgagccacctcaagcgcaccgtggagaatatcaaggatcctttgttcaggttctttgagagagaagtgaagatgggcgcaaagctgcttcaggacgttcgccaggaccttgcagatgtcgtccaggtgtgcgaaggaaagaagaagcagaccaactacttgcgcacgctgatcaacgagctagtgaaagggatcttgcctcggagctggtcccactacacggtgcctgccggcatgaccgtcatccagtgggtgtccgacttcagcgagaggatcaaacagctgcagaacatctcactggcagctgcatctggtggcgccaaggagctaaagaacatccacgtgtgcctgggtggcctgttcgtgcctgaggcgtacatcactgccaccaggcagtatgtggcccaggccaacagctggtccctggaggagctctgcctggaagtcaacgtcaccacctcacagggcgccacccttgacgcttgcagcttcggagtcacgggtttgaaacttcaaggggccacgtgcaacaacaacaagctgtcactgtccaatgccatctcaaccgcccttcccctgacgcagctgcgctgggtcaagcagacaaacaccgagaagaaggccagtgtggtaaccttacctgtctacctgaacttcacccgtgcagacctcatcttcaccgtggacttcgaaattgctacaaaggaggatcctcgcagcttctacgagcggggtgtcgcagtcttgtgcacagagtaaacttttctagctgcccctttctgtaatagtgaaagttggtatttaacatttattcatttttaaaatatttggaaggtctgagcttgtgaaaagaaagtggttggtctgaggttggaggaagctgaatggaatctgacggttgggagtggtggaaattggaaggataccaggaggtatttgggaaggccaatggcgtggctcctttgaggaaataaaacactaagcatgaaaaaaaaaaaagtcgacgcggccgcgaatttag

SEQ ID NO: 462047 - DNA, 14884 bp, Homo sapiens
  misc_feature (7590)..(7590): n is a, c, g, or t
ttcaatgagagaacatttaatgagaggttaaggggcttagaacaacgccgggcacaggctaagcgctcactaaacgttagctctcgccaataacatcactgattcactataaagtttctctggctgtgtgctattcgctgcgtccacagcagtgaagaagacagacgcagcccctgaccaacctcgccaagcccgggcgccgagccaggacgttgagccaagtccccatctcctaggactcgcagtgcggaggctgcgggccccgaccagcgccgagactacaagtcccagaagggcgcgcggcgacatcgccgggcccgccccccgcgcacgcgcggcgccgtgacgctaaggccgcgagcgagcgcgggtggctgcggcggctgcggccggcggggcggggcggggccacctggcagtggctgcctttagggcggagccggctcccgctctcctcagtctgcggtgggctagcggacggtccggcttccggcggccgtttctgtctcttgctggctgtctcgctgagtcgcggccgccttctcatcgctcctggaaggtcccgagcgcgacaccatgtcggagcccgggggcggcggcggcgaggacggctcggccggattggaagtgtcggccgtgcagaatgtggcggacgtgtcggtgctgcagaagcacctgcgcaagctggtgccgctgctgctggaggacggcggcgaggcgccggccgcgctggaggcggcgctggaggagaagagcgccctggagcagatgcgcaagttcctttcggacccgcaggtccacacggtgctggtggagcgctccacgctcaaagaggacgtcggtgatgaaggagaagaagaaaaagaattcatttcctataacatcaacatagacattcattatggggttaaatccaatagcttggcattcattaaacgtactcccgtgattgatgcagataaacccgtgtcttctcagctccgggtccttacactcagtgaagactcgccctacgaaactttgcattctttcattagcaatgcagtggctcctttttttaagtcctacattagagagtctggcaaggcagacagggatggtgataaaatggctccttcagttgaaaagaagattgcagaactcgaaatgggactccttcacttgcagcaaaatattgaaattccggagatcagcctgccgattcatccaatgatcacaaatgttgcaaaacagtgttatgagcgtggagaaaagccaaaagttacagactttggtgataaggttgaagacccaacatttcttaatcagttacaatctggagttaaccgctggatccgagaaattcaaaaagtgaccaaactggatcgagatcctgcatcaggaactgccttacaggaaattagtttttggctaaacttggaacgtgcgttataccgcatccaggagaaacgggagagcccggaagttctcctgactctggatatcttgaaacatggcaagcgcttccatgccaccgtcagttttgacactgacacaggtctaaaacaggctttggaaactgtgaatgactacaatcctctgatgaaagatttccctctgaatgatttgctgtctgccacggagctggacaaaataagacaggcgcttgttgccattttcacacatttgagaaagatccgaaacacaaaatatcctattcagagggcactgcgtttggtggaggcaatttcaagagacttgagttctcaattactcaaagtattgggcactaggaaattgatgcatgttgcttatgaagaatttgaaaaagttatggtagcatgctttgaagtttttcagacttgggatgatgagtatgagaaacttcaggtattgttgagagacatcgtcaaaagaaaaagggaagaaaatctgaagatggtgtggcgtatcaaccctgcccacaggaagctgcaggcccgccttgaccagatgagaaaatttagacgccagcatgaacagctaagagctgttatcgtcagggtcctgaggccacaggtcacggcagttgcacaacagaatcaaggagaggtccctgaaccccaagatatgaaagtggctgaggttctctttgatgctgcagatgcaaatgccattgaggaagtaaaccttgcttatgagaacgtcaaggaagtggatggactggatgtttccaaagagggcacggaagcctgggaggctgctatgaagaggtacgatgagaggatcgacagagtggagacccggatcaccgctcgccttcgggatcagcttggcacagccaagaatgccaacgagatgtttaggattttctccaggtttaatgcactgtttgtcaggcctcacatccgtggggccattcgtgactaccagacccagctgatccagcgcgtgaaagatgacattgagtctcttcacgacaagttcaaggtccagtacccacagagtcaggcttgtaagatgagtcacgttcgtgacttgccccctgtgtcagggtctatcatctgggctaaacagatcgacaggcagctgacggcctacatgaagcgggtggaagatgtccttggcaagggctgggagaatcacgtggaggggcagaagctgaagcaggatggagacagcttccgcatgaagctcaacacgcaggagatctttgatgactgggcaaggaaggtgcagcagcgcaacctcggtgtctcggggcgcattttcaccatcgaaagtactcgggttcggggccgaactggaaatgtgcttaagctgaaagttaactttcttcctgagattatcacactatccaaagaagtccggaacctcaaatggcttggtttccgcgtcccactggcgattgtgaacaaagcccatcaagcaaaccagctttacccgtttgccatctcactgatcgagagcgttcgtacctatgaacggacctgcgagaaggtggaggagcggaacaccatttcccttttggtggctggcttgaaaaaggaagtgcaggccctgatcgcagaaggcattgcgttggtgtgggagtcctacaaacttgacccatatgtacagcgcttagcagagactgtcttcaacttccaagaaaaggtggatgatctgctgatcattgaagaaaaaatagacctagaagtccgttccttggaaacttgtatgtatgaccataagacattctcggaaatcttgaacagagtccagaaagcagtggatgacttaaatctgcactcctattccaatttgcccatctgggtcaacaagcttgacatggagattgaaagaatattgggcgtccgtctgcaagctggcctgagagcttggacgcaggttcttcttggacaagctgaagataaagcagaagttgacatggacacagatgctccacaagttagtcacaagcctggtggagagccaaagatcaaaaatgtcgttcatgagctaagaataaccaatcaggtaatctacttgaatccaccaattgaagagtgcagatacaagctgtatcaggaaatgtttgcctggaagatggttgtactgtctctccccaggatccagagtcagaggtaccaggtgggtgtacattacgaattgactgaggaagagaaattctatcggaatgctttaacacggatgcctgatggccctgttgccctggaagagtcgtattctgctgtcatgggcattgtatctgaagttgaacagtatgtcaaggtttggcttcagtatcagtgtttatgggatatgcaagctgaaaacatctataacagacttggagaagatctcaacaaatggcaggctctcctggtccaaataaggaaggccagaggaacctttgacaatgcagaaaccaagaaagagtttggaccagtagttatagattatggcaaggtacaatctaaggtgaacttgaaatatgactcttggcataaggaggttcttagcaaatttgggcagatgctaggatcaaacatgacggaattccattcccagatctcaaagtcccgccaagagttggagcagcactcagtagacacggccagcacctccgatgcagtgaccttcatcacctatgtgcagtctttgaaacggaagatcaagcagtttgagaagcaagttgagctctaccgcaatggccagcgcttactggaaaagcaaaggttccagttcccaccttcctggctttatattgacaacatcgagggagagtggggagccttcaatgacatcatgcggcgaaaggactctgccattcagcagcaggtggcaaacctgcaaatgaagattgtccaggaggatcgggccgtggaaagccgcaccaccgacctgctgactgactgggagaagaccaagcctgtcacgggcaaccttcgcccagaagaggcacttcaggctctcaccatatatgaggggaagtttggtaggctgaaggacgacagagagaagtgtgcaaaggccaaggaggcgctggaattgacagatactgggcttctcagtggcagtgaagagcgcgtgcaggtggccttagaagaattacaggacctcaaaggcgtttggtcagaactttctaaggtttgggagcaaatcgatcagatgaaggagcaaccctgggtttcagtacagcctcgaaagcttcgacaaaatttggatgccctcctgaaccagctgaaaagcttccctgcccggttgcgacagtatgcgtcctatgagtttgttcagaggcttctgaaaggttacatgaagataaatatgctggtgattgaactgaaatccgaagcacttaaagaccgccattggaaacagctcatgaaaaggcttcacgttaattgggttgtttctgagctaacccttggccaaatctgggatgttgacttgcagaaaaatgaagcgattgtcaaggatgtactgcttgtggcacaaggggagatggctttggaagaatttttgaagcagataagagaagtgtggaatacttatgaactagacttggttaattatcagaacaagtgccgcttgatccgtggctgggatgacctcttcaacaaggtcaaagaacacatcaacagcgtctcggccatgaagctctctccgtattacaaggtttttgaagaggatgctctcagctgggaagataagctgaacaggatcatggctctctttgatgtgtggattgatgtgcagaggcggtgggtctacctggaaggtatcttcacaggcagtgcagatatcaagcacctgctgccagtggaaacccagcggtttcagagcatcagcactgagtttttggctctaatgaaaaaagtgtccaagtctccccttgttatggatgttctgaacatccagggagtacagaggtctctggaaagattggcagacctgctaggaaagatccagaaagcattgggagaatatctggaaagagagcggtcatctttccccaggttctattttgtgggtgatgaagatttgcttgaaatcattggaaacagcaagaatgtcgctaaattacagaaacacttcaagaagatgtttgctggagtttcgagcatcatcctgaacgaggataactctgttgttttgggtatttcatctcgggaaggagaggaggttatgtttaaaactcctgtgtcaattactgaacatcccaaaatcaatgagtggctcacattggtagaaaaggagatgagagtcaccctggccaaactgcttgctgagtctgttacggaagttgagatttttggtaaagcaacttcaattgacccaaatacctacatcacttggattgataaataccaggcccagcttgtggttttgtcagcccagatagcctggtctgagaacgtggagaccgcactgagcagcatgggcggaggtggagatgccgcgcccttgcactctgtgctgagcaatgtggaggtcaccctcaatgtgttagcagactctgtcctcatggagcagcccccactccgaaggcggaagctagaacacttgattacagagttggttcaccagagagatgttacaaggtccttgatcaaaagcaagattgacaacgccaaatcttttgaatggctcagccagatgcgattttactttgaccctaagcaaactgatgtgttacagcagttgtcaattcaaatggcaaatgccaaatttaactatggctttgagtacctgggtgttcaggacaaactggtccagacccccctcactgaccgctgctatttgacaatgacacaagccttggaggccaggctggggggttccccatttggacctgctggaactgggaaaacagagtctgtcaaagctcttggccatcagcttggacggtttgttttagttttcaactgtgatgaaacctttgatttccaggcaatgggccggatctttgtgggcctttgccaggtgggtgcctggggctgctttgacgagttcaaccgcctggaggagcggatgctctcggctgtgtcccagcaggtgcagtgcatacaggaagcactgcgtgaacattccaaccccaactacgacaagacctctgcccccattacttgtgagctgctgaacaaacaagtcaaggtgagcccggacatggccatcttcatcaccatgaaccctggctacgcgggccggtctaaccttcctgacaacttgaagaagctgttccggagcttggccatgaccaagcccgaccggcagttaatcgcccaggtcatgctgtactcacagggtttccgcactgctgaagtgcttgccaacaaaatcgtcccgttttttaaactatgcgatgagcagctctcttcccaaagccattatgacttcggtcttcgggctttgaagagtgtgctggtgagtgcaggcaatgtgaagagagagagaatccagaagataaagagggagaaagaggaacgaggggaagcagttgatgaaggagaaattgctgaaaatctccctgaacaagagattctgatacagagcgtctgtgagacgatggtgccaaagctggtggcagaggacatcccgctgctcttcagcctcctgtcggacgtgttccctggagtccagtatcacaggggtgagatgactgcccttcgagaggagctgaagaaagtgtgtcaggagatgtatttgacatatggagatggagaagaagttggtggaatgtgggttgaaaaggttctccagctctatcagatcacccagatcaatcatggcctgatgatggtggggccctcgggaagtgggaagagcatggcctggcgtgtcctgctgaaggcattggagagactcgagggtgtggaaggtgtggcccatatcatcgaccccaaggccatcagcaaagaccacctctacggaaccctggaccccaacaccagggaatggacagatgggctcttcacacacgtgctgagaaagatcatcgacagcgtgagaggcgagctgcagaagcgccagtggatcgtcttcgatggcgatgtggatccagagtgggttgagaacttgaactcagtgctggatgacaataagctcctaactttgcccaatggagagcgcctcagtcttccacccaangtgagaataatgtttgaggtacaggacttgaaatacgcgaccttggccacagtgtcgcgctgcggcatggtctggttcagtgaggatgtgctgagcaccgacatgatcttcaacaacttcctggccaggctgcgcagcatcccgctggatgaaggggaggatgaggcacagcggcggcgtaagggcaaagaggatgagggggaggaggccgcttcccccatgctgcagatccaaagagatgcagctacgatcatgcaaccgtacttcacgtccaacggcctggtcaccaaggcgctagagcacgccttccagctggagcacatcatggacctaacacgcctgcgctgcctgggctcgctcttctccatgctgcaccaggcctgccgcaacgtggcgcagtataacgccaaccatcccgacttccccatgcagatcgagcagctggagcgctacattcaggtcagggggcatcaggggcttcacagagctcaccactgcgccagaccacaggtctgaggacctctgaaatgctgcacctgtggggatgtgcgctctctcctaggcgaggcagagccttcgttgaggggctaggaaaggtgcagtgggtgtctgtgatgcaagaagactgggaaccactgtctttaggttaactttgctgtaagtgtctttcttttgttgttgaaattttataaaaatcaaagtttaattccctttttaatagcgatatctggtttatgccatactctggtccctgtctggagacagccggctaaaaatgagagcagagctgggtgaatacatcagaagaatcacgaccgtgcctctgcccactgcgcccaacatacccattatcgattatgaggtgtccatcagcggagaatggtctccgtggcaggccaaggtgcctcagattgaagtggagacgcacaaggtggcagcccctgatgtcgtcgtgccaacgctggacacagtccgccacgaagccctcttgtacacttggctggccgaacacaagcccctggtcttgtgtggccctcctgggtctggcaagaccatgacactcttcagcgccctccgggccttgcctgacatggaggtggtgggtctcaacttctccagtgctactactccagagctgcttctgaagacttttgatcactactgcgagtacaggcgcacacctaatggggtggttttggctcctgttcaacttggaaagtggctggtgttgttctgtgatgaaatcaacttgccagatatggataaatatgggacccagagggtcatatccttcatcagacagatggtggagcacggaggcttttaccgtacctcagatcaaacatgggtgaagctggagagaatccagtttgttggggcttgtaatccccccacagaccctggaagaaagcccctctcacacaggttcctgcgccacgtgcctgtcgtgtatgtggattacccgggccccgcctccctcacacagatctacggcaccttcaaccgcgccatgctgaggctcattccatccctgcggacgtatgcagagccgctcactgctgccatggtggagttctacaccatgtctcaggagagattcacccaggatacacaacctcactatatctattcaccccgtgaaatgactaggtgggtgagaggcatctttgaagcgctgagacctctggagaccctgcctgttgaaggcctcattcggatttgggcacatgaagctctgcgtctcttccaagatagactcgtagaggatgaggagaggcgttggactgatgagaacatcgacacggttgctctgaagcacttccctaacatcgacagagagaaggcaatgagccgacccatcttgtacagcaactggctgtcaaaggattacatcccagtagaccaagaagagttaagagattatgtcaaagctaggctgaaggtcttttatgaagaagaacttgatgttccgctggtgctgtttaatgaagtcctagaccacgtgctgaggattgacagaatattccgtcaacctcaaggccacttgcttctgattggtgttagtggagcaggaaaaactaccctgtctcgtttcgtcgcctggatgaacggtttgagtgtgtaccagattaaggtccataggaagtacacaggggaagactttgatgaagatctacggacagtgttgagacgttctggctgtaaaaatgaaaagatagcatttataatggatgaatctaatgtgttagattctggattcctggagcgaatgaatacccttctggccaatggagaggtgcctggtctctttgaaggagacgagtatgccaccttgatgacgcagtgcaaagagggggcacagaaggaaggcctgatgctggactcgcacgaggagctctacaagtggttcactagccaggttatccgcaacctccacgtcgtgttcaccatgaacccgtcctcggagggactcaaggaccgggcagctacatcaccagcacttttcaacaggtgtgtgttgaattggtttggagactggtccaccgaagcactgtatcaggttggcaaagaattcacaagtaagatggatctggagaagccaaattacatcgtgcctgattacatgccagttgtgtatgataagctgccgcagccaccatcccatcgggaagccattgtgaacagctgtgtgtttgttcatcagactcttcaccaggcgaatgctcggctagcaaagcgaggcggcagaacgatggccatcacccctcgccactacctggacttcatcaatcactatgccaacctgttccacgagaagcggagcgagctggaggagcagcagatgcacttgaacgtggggctcaggaagatcaaagagacagtcgaccaggtagaagaactgcgtcgtgacttgaggataaagagccaagagctggaggtgaagaatgcagcagccaatgacaagctgaaaaagatggtgaaagaccagcaggaggctgaaaagaagaaggttatgagccaagaaatccaggaacagctgcataagcagcaggaggtaattgcagacaaacagatgagtgtcaaagaagatcttgataaggtggaacctgccgtcattgaggcccagaatgctgtgaagtcgatcaagaagcagcacctggtggaggtgaggtccatggccaaccctcctgctgctgtgaagctggcgctggagtccatctgcctgctgctgggggaaagcaccacagactggaagcagatccgctccatcatcatgcgggagaacttcatccccaccatcgtcaacttctctgcagaggagatcagtgacgccataagggagaagatgaagaaaaattacatgtccaatccaagttacaattatgaaattgtgaatcgggcttccctggcttgcggccctatggtgaaatgggcaattgcacagcttaactatgcagacatgttaaagagagtggagcccctacgcaatgagctgcagaagctggaagatgacgccaaggacaaccagcagaaggccaacgaggtggagcagatgatccgagacctggaagccagcatcgcccgctacaaggaggaatacgccgtcctgatctcagaggcccaggccatcaaggcagacctggcagctgtcgaggcaaaagtaaaccggagcactgctcttctgaagagcttgtctgctgaacgtgaacgatgggaaaaaacaagtgaaactttcaaaaaccagatgtccaccattgctggggactgtctcttgtcagctgcgttcattgcctacgcgggttactttgaccagcagatgcgtcagaacttgttcactacctggtcccatcacctacagcaagccaacatccagttccgtacagatattgccaggacggaatacctttccaatgctgatgagcgtcttcgctggcaggccagctccttgcctgctgatgacctttgcacagaaaatgccatcatgctgaaacgattcaataggtatccgctgatcattgacccctctggacaggccacagaattcattatgaatgaatataaggatcgtaagatcacacggaccagcttcctggatgacgccttcagaaagaacttagagagtgcactgagattcggtaacccccttctggtccaggatgtggaaagctacgatccagttttgaacccggtgctgaaccgtgaagtgcggcgaacaggggggagagtgctgatcactctcggggaccaggacatagacctgtcgccatcgtttgtcatcttcctgtccacccgggatccaactgtcgagttcccaccagatctctgttcccgggttacttttgtaaacttcacagttacccgtagcagtttacaaagccagtgtctaaatgaagtacttaaagcagaaagacctgatgtggacgagaaacgatctgatcttcttaaacttcaaggggaatttcagctccgtttgcgtcagctggaaaaatctctactacaagctctgaacgaggtgaaagggcgcattttggatgacgacacgatcataaccactctggagaacctgaagagagaggctgcagaggtcaccaggaaagttgaggagacggacattgtcatgcaggaggtggagaccgtgtcccagcagtacctcccgctctccaccgcctgcagcagcatctacttcaccatggagtccctcaagcagatacacttcttgtaccagtactccctccagtttttcctggacatttatcacaacgtcctatacgagaacccgaacctgaagggtgtcaccgaccacacacagcgcctgtccattataacaaaggacctcttccaggtggcgtttaaccgagtggctcgaggcatgctgcatcaggaccacattacctttgccatgctgctggcaagaatcaaactgaagggcaccgtgggggagcccacctacgatgcagaattccagcacttcttgagaggaaatgagattgtcctgagtgctggctccacccccaggatccagggcctgactgtggagcaggcggaggcggtggtgaggctgagctgccttcccgcgtttaaggacttgattgcaaaggttcaggcagacgagcaatttggcatctggctggacagcagctccccggagcagactgtgccctacctctggagtgaagaaacacctgcaacacccattggccaggccatccaccgcctgctcctgatccaggctttccggcccgatcgcctgttggccatggcccacatgtttgtttcaacaaaccttggggagtctttcatgtccatcatggagcagccgctcgacctgacccacattgtgggcacagaggtgaagcccaacactcctgtcttaatgtgctctgtgcctggttatgatgccagtggacatgtcgaggaccttgcagccgagcagaacacgcagatcacttcaattgcaatcggctctgcagaaggctttaaccaagcagataaggcaataaacaccgctgtaaagtcgggcaggtgggtgatgctgaagaatgtgcatctggccccagggtggctgatgcagctggagaagaagttgcattccctgcagccgcatgcctgcttccgactcttcctcaccatggagatcaaccccaaggtgcctgtgaatctgctccgtgcgggccgcatctttgtgttcgagccaccgccaggggtgaaggccaacatgctgaggacgttcagcagcattcccgtctcacggatatgcaagtctcccaacgagcgtgcccgcttgtacttcctgctggcctggtttcatgcgatcatccaagaacgcttacgatacgcaccactggggtggtcaaagaagtatgaatttggagagtctgacctgcggtcagcttgcgatacggtggacacgtggctggatgacacggccaagggcaggcagaacatctcaccggataagatcccgtggtctgcactaaagaccttaatggcccagtccatttatggcgggcgcgtggacaacgagtttgaccagcgtctgctcaacaccttcctggagcgcctgttcacaaccaggagtttcgacagtgagtttaagctggcatgcaaggtcgacggacataaagacattcaaatgccagatggcatcaggcgagaggagtttgtgcagtgggtggagttgctccccgacacccagacgccctcctggctgggcctgcccaacaacgccgagagagtcctccttaccacacagggtgtggacatgatcagtaaaatgctgaagatgcagatgttggaggatgaggacgacctggcctacgcagagactgagaagaagacgaggacagactccacgtccgacgggcgccctgcctggatgcggacactgcacaccaccgcgtccaactggctgcacctcatcccccagacgctgagccacctcaagcgcaccgtggagaatatcaaggatcctttgttcaggttctttgagagagaagtgaagatgggcgcaaagctgcttcaggacgttcgccaggaccttgcagatgtcgtccaggtgtgcgaaggaaagaagaagcagaccaactacttgcgcacgctgatcaacgagctagtgaaagggatcttgcctcggagctggtcccactacacggtgcctgccggcatgaccgtcatccagtgggtgtccgacttcagcgagaggatcaaacagctgcagaacatctcactggcagctgcatctggtggcgccaaggagctaaagaacatccacgtgtgcctgggtggcctgttcgtgcctgaggcgtacatcactgccaccaggcagtatgtggcccaggccaacagctggtccctggaggagctctgcctggaagtcaacgtcaccacctcacagggcgccacccttgacgcttgcagcttcggagtcacgggtttgaaacttcaaggggccacgtgcaacaacaacaagctgtcactgtccaatgccatctcaaccgcccttcccctgacgcagctgcgctgggtcaagcagacaaacaccgagaagaaggccagtgtgagtaaacttttctagctgcccctttctgtaatagtgaaagttggtatttaacatttattcatttttaaaatatttggaaggtctgagcttgtgaaaagaaagtggttggtctgaggttggaggaagctgaatggaatctgacggttgggagtggtggaaattggaaggataccaggaggtatttgggaaggccaatggcgtggctcctttgaggaaataaaacactaagcatga

SEQ ID NO: 462048 - DNA, 14820 bp, Homo sapiens
  misc_feature (7590)..(7590): n is a, c, g, or t
ttcaatgagagaacatttaatgagaggttaaggggcttagaacaacgccgggcacaggctaagcgctcactaaacgttagctctcgccaataacatcactgattcactataaagtttctctggctgtgtgctattcgctgcgtccacagcagtgaagaagacagacgcagcccctgaccaacctcgccaagcccgggcgccgagccaggacgttgagccaagtccccatctcctaggactcgcagtgcggaggctgcgggccccgaccagcgccgagactacaagtcccagaagggcgcgcggcgacatcgccgggcccgccccccgcgcacgcgcggcgccgtgacgctaaggccgcgagcgagcgcgggtggctgcggcggctgcggccggcggggcggggcggggccacctggcagtggctgcctttagggcggagccggctcccgctctcctcagtctgcggtgggctagcggacggtccggcttccggcggccgtttctgtctcttgctggctgtctcgctgagtcgcggccgccttctcatcgctcctggaaggtcccgagcgcgacaccatgtcggagcccgggggcggcggcggcgaggacggctcggccggattggaagtgtcggccgtgcagaatgtggcggacgtgtcggtgctgcagaagcacctgcgcaagctggtgccgctgctgctggaggacggcggcgaggcgccggccgcgctggaggcggcgctggaggagaagagcgccctggagcagatgcgcaagttcctttcggacccgcaggtccacacggtgctggtggagcgctccacgctcaaagaggacgtcggtgatgaaggagaagaagaaaaagaattcatttcctataacatcaacatagacattcattatggggttaaatccaatagcttggcattcattaaacgtactcccgtgattgatgcagataaacccgtgtcttctcagctccgggtccttacactcagtgaagactcgccctacgaaactttgcattctttcattagcaatgcagtggctcctttttttaagtcctacattagagagtctggcaaggcagacagggatggtgataaaatggctccttcagttgaaaagaagattgcagaactcgaaatgggactccttcacttgcagcaaaatattgaaattccggagatcagcctgccgattcatccaatgatcacaaatgttgcaaaacagtgttatgagcgtggagaaaagccaaaagttacagactttggtgataaggttgaagacccaacatttcttaatcagttacaatctggagttaaccgctggatccgagaaattcaaaaagtgaccaaactggatcgagatcctgcatcaggaactgccttacaggaaattagtttttggctaaacttggaacgtgcgttataccgcatccaggagaaacgggagagcccggaagttctcctgactctggatatcttgaaacatggcaagcgcttccatgccaccgtcagttttgacactgacacaggtctaaaacaggctttggaaactgtgaatgactacaatcctctgatgaaagatttccctctgaatgatttgctgtctgccacggagctggacaaaataagacaggcgcttgttgccattttcacacatttgagaaagatccgaaacacaaaatatcctattcagagggcactgcgtttggtggaggcaatttcaagagacttgagttctcaattactcaaagtattgggcactaggaaattgatgcatgttgcttatgaagaatttgaaaaagttatggtagcatgctttgaagtttttcagacttgggatgatgagtatgagaaacttcaggtattgttgagagacatcgtcaaaagaaaaagggaagaaaatctgaagatggtgtggcgtatcaaccctgcccacaggaagctgcaggcccgccttgaccagatgagaaaatttagacgccagcatgaacagctaagagctgttatcgtcagggtcctgaggccacaggtcacggcagttgcacaacagaatcaaggagaggtccctgaaccccaagatatgaaagtggctgaggttctctttgatgctgcagatgcaaatgccattgaggaagtaaaccttgcttatgagaacgtcaaggaagtggatggactggatgtttccaaagagggcacggaagcctgggaggctgctatgaagaggtacgatgagaggatcgacagagtggagacccggatcaccgctcgccttcgggatcagcttggcacagccaagaatgccaacgagatgtttaggattttctccaggtttaatgcactgtttgtcaggcctcacatccgtggggccattcgtgactaccagacccagctgatccagcgcgtgaaagatgacattgagtctcttcacgacaagttcaaggtccagtacccacagagtcaggcttgtaagatgagtcacgttcgtgacttgccccctgtgtcagggtctatcatctgggctaaacagatcgacaggcagctgacggcctacatgaagcgggtggaagatgtccttggcaagggctgggagaatcacgtggaggggcagaagctgaagcaggatggagacagcttccgcatgaagctcaacacgcaggagatctttgatgactgggcaaggaaggtgcagcagcgcaacctcggtgtctcggggcgcattttcaccatcgaaagtactcgggttcggggccgaactggaaatgtgcttaagctgaaagttaactttcttcctgagattatcacactatccaaagaagtccggaacctcaaatggcttggtttccgcgtcccactggcgattgtgaacaaagcccatcaagcaaaccagctttacccgtttgccatctcactgatcgagagcgttcgtacctatgaacggacctgcgagaaggtggaggagcggaacaccatttcccttttggtggctggcttgaaaaaggaagtgcaggccctgatcgcagaaggcattgcgttggtgtgggagtcctacaaacttgacccatatgtacagcgcttagcagagactgtcttcaacttccaagaaaaggtggatgatctgctgatcattgaagaaaaaatagacctagaagtccgttccttggaaacttgtatgtatgaccataagacattctcggaaatcttgaacagagtccagaaagcagtggatgacttaaatctgcactcctattccaatttgcccatctgggtcaacaagcttgacatggagattgaaagaatattgggcgtccgtctgcaagctggcctgagagcttggacgcaggttcttcttggacaagctgaagataaagcagaagttgacatggacacagatgctccacaagttagtcacaagcctggtggagagccaaagatcaaaaatgtcgttcatgagctaagaataaccaatcaggtaatctacttgaatccaccaattgaagagtgcagatacaagctgtatcaggaaatgtttgcctggaagatggttgtactgtctctccccaggatccagagtcagaggtaccaggtgggtgtacattacgaattgactgaggaagagaaattctatcggaatgctttaacacggatgcctgatggccctgttgccctggaagagtcgtattctgctgtcatgggcattgtatctgaagttgaacagtatgtcaaggtttggcttcagtatcagtgtttatgggatatgcaagctgaaaacatctataacagacttggagaagatctcaacaaatggcaggctctcctggtccaaataaggaaggccagaggaacctttgacaatgcagaaaccaagaaagagtttggaccagtagttatagattatggcaaggtacaatctaaggtgaacttgaaatatgactcttggcataaggaggttcttagcaaatttgggcagatgctaggatcaaacatgacggaattccattcccagatctcaaagtcccgccaagagttggagcagcactcagtagacacggccagcacctccgatgcagtgaccttcatcacctatgtgcagtctttgaaacggaagatcaagcagtttgagaagcaagttgagctctaccgcaatggccagcgcttactggaaaagcaaaggttccagttcccaccttcctggctttatattgacaacatcgagggagagtggggagccttcaatgacatcatgcggcgaaaggactctgccattcagcagcaggtggcaaacctgcaaatgaagattgtccaggaggatcgggccgtggaaagccgcaccaccgacctgctgactgactgggagaagaccaagcctgtcacgggcaaccttcgcccagaagaggcacttcaggctctcaccatatatgaggggaagtttggtaggctgaaggacgacagagagaagtgtgcaaaggccaaggaggcgctggaattgacagatactgggcttctcagtggcagtgaagagcgcgtgcaggtggccttagaagaattacaggacctcaaaggcgtttggtcagaactttctaaggtttgggagcaaatcgatcagatgaaggagcaaccctgggtttcagtacagcctcgaaagcttcgacaaaatttggatgccctcctgaaccagctgaaaagcttccctgcccggttgcgacagtatgcgtcctatgagtttgttcagaggcttctgaaaggttacatgaagataaatatgctggtgattgaactgaaatccgaagcacttaaagaccgccattggaaacagctcatgaaaaggcttcacgttaattgggttgtttctgagctaacccttggccaaatctgggatgttgacttgcagaaaaatgaagcgattgtcaaggatgtactgcttgtggcacaaggggagatggctttggaagaatttttgaagcagataagagaagtgtggaatacttatgaactagacttggttaattatcagaacaagtgccgcttgatccgtggctgggatgacctcttcaacaaggtcaaagaacacatcaacagcgtctcggccatgaagctctctccgtattacaaggtttttgaagaggatgctctcagctgggaagataagctgaacaggatcatggctctctttgatgtgtggattgatgtgcagaggcggtgggtctacctggaaggtatcttcacaggcagtgcagatatcaagcacctgctgccagtggaaacccagcggtttcagagcatcagcactgagtttttggctctaatgaaaaaagtgtccaagtctccccttgttatggatgttctgaacatccagggagtacagaggtctctggaaagattggcagacctgctaggaaagatccagaaagcattgggagaatatctggaaagagagcggtcatctttccccaggttctattttgtgggtgatgaagatttgcttgaaatcattggaaacagcaagaatgtcgctaaattacagaaacacttcaagaagatgtttgctggagtttcgagcatcatcctgaacgaggataactctgttgttttgggtatttcatctcgggaaggagaggaggttatgtttaaaactcctgtgtcaattactgaacatcccaaaatcaatgagtggctcacattggtagaaaaggagatgagagtcaccctggccaaactgcttgctgagtctgttacggaagttgagatttttggtaaagcaacttcaattgacccaaatacctacatcacttggattgataaataccaggcccagcttgtggttttgtcagcccagatagcctggtctgagaacgtggagaccgcactgagcagcatgggcggaggtggagatgccgcgcccttgcactctgtgctgagcaatgtggaggtcaccctcaatgtgttagcagactctgtcctcatggagcagcccccactccgaaggcggaagctagaacacttgattacagagttggttcaccagagagatgttacaaggtccttgatcaaaagcaagattgacaacgccaaatcttttgaatggctcagccagatgcgattttactttgaccctaagcaaactgatgtgttacagcagttgtcaattcaaatggcaaatgccaaatttaactatggctttgagtacctgggtgttcaggacaaactggtccagacccccctcactgaccgctgctatttgacaatgacacaagccttggaggccaggctggggggttccccatttggacctgctggaactgggaaaacagagtctgtcaaagctcttggccatcagcttggacggtttgttttagttttcaactgtgatgaaacctttgatttccaggcaatgggccggatctttgtgggcctttgccaggtgggtgcctggggctgctttgacgagttcaaccgcctggaggagcggatgctctcggctgtgtcccagcaggtgcagtgcatacaggaagcactgcgtgaacattccaaccccaactacgacaagacctctgcccccattacttgtgagctgctgaacaaacaagtcaaggtgagcccggacatggccatcttcatcaccatgaaccctggctacgcgggccggtctaaccttcctgacaacttgaagaagctgttccggagcttggccatgaccaagcccgaccggcagttaatcgcccaggtcatgctgtactcacagggtttccgcactgctgaagtgcttgccaacaaaatcgtcccgttttttaaactatgcgatgagcagctctcttcccaaagccattatgacttcggtcttcgggctttgaagagtgtgctggtgagtgcaggcaatgtgaagagagagagaatccagaagataaagagggagaaagaggaacgaggggaagcagttgatgaaggagaaattgctgaaaatctccctgaacaagagattctgatacagagcgtctgtgagacgatggtgccaaagctggtggcagaggacatcccgctgctcttcagcctcctgtcggacgtgttccctggagtccagtatcacaggggtgagatgactgcccttcgagaggagctgaagaaagtgtgtcaggagatgtatttgacatatggagatggagaagaagttggtggaatgtgggttgaaaaggttctccagctctatcagatcacccagatcaatcatggcctgatgatggtggggccctcgggaagtgggaagagcatggcctggcgtgtcctgctgaaggcattggagagactcgagggtgtggaaggtgtggcccatatcatcgaccccaaggccatcagcaaagaccacctctacggaaccctggaccccaacaccagggaatggacagatgggctcttcacacacgtgctgagaaagatcatcgacagcgtgagaggcgagctgcagaagcgccagtggatcgtcttcgatggcgatgtggatccagagtgggttgagaacttgaactcagtgctggatgacaataagctcctaactttgcccaatggagagcgcctcagtcttccacccaangtgagaataatgtttgaggtacaggacttgaaatacgcgaccttggccacagtgtcgcgctgcggcatggtctggttcagtgaggatgtgctgagcaccgacatgatcttcaacaacttcctggccaggctgcgcagcatcccgctggatgaaggggaggatgaggcacagcggcggcgtaagggcaaagaggatgagggggaggaggccgcttcccccatgctgcagatccaaagagatgcagctacgatcatgcaaccgtacttcacgtccaacggcctggtcaccaaggcgctagagcacgccttccagctggagcacatcatggacctaacacgcctgcgctgcctgggctcgctcttctccatgctgcaccaggcctgccgcaacgtggcgcagtataacgccaaccatcccgacttccccatgcagatcgagcagctggagcgctacattcaggtcagggggcatcaggggcttcacagagctcaccactgcgccagaccacaggtctgaggacctctgaaatgctgcacctgtggggatgtgcgctctctcctaggcgaggcagagccttcgttgaggggctaggaaaggtgcagtgggtgtctgtgatgcaagaagactgggaaccactgtctttaggttaactttgctgtaagtgtctttcttttgttgttgaaattttataaaaatcaaagtttaattccctttttaatagcgatatctggtttatgccatactctggtccctgtctggagacagccggctaaaaatgagagcagagctgggtgaatacatcagaagaatcacgaccgtgcctctgcccactgcgcccaacatacccattatcgattatgaggtgtccatcagcggagaatggtctccgtggcaggccaaggtgcctcagattgaagtggagacgcacaaggtggcagcccctgatgtcgtcgtgccaacgctggacacagtccgccacgaagccctcttgtacacttggctggccgaacacaagcccctggtcttgtgtggccctcctgggtctggcaagaccatgacactcttcagcgccctccgggccttgcctgacatggaggtggtgggtctcaacttctccagtgctactactccagagctgcttctgaagacttttgatcactactgcgagtacaggcgcacacctaatggggtggttttggctcctgttcaacttggaaagtggctggtgttgttctgtgatgaaatcaacttgccagatatggataaatatgggacccagagggtcatatccttcatcagacagatggtggagcacggaggcttttaccgtacctcagatcaaacatgggtgaagctggagagaatccagtttgttggggcttgtaatccccccacagaccctggaagaaagcccctctcacacaggttcctgcgccacgtgcctgtcgtgtatgtggattacccgggccccgcctccctcacacagatctacggcaccttcaaccgcgccatgctgaggctcattccatccctgcggacgtatgcagagccgctcactgctgccatggtggagttctacaccatgtctcaggagagattcacccaggatacacaacctcactatatctattcaccccgtgaaatgactaggtgggtgagaggcatctttgaagcgctgagacctctggagaccctgcctgttgaaggcctcattcggatttgggcacatgaagctctgcgtctcttccaagatagactcgtagaggatgaggagaggcgttggactgatgagaacatcgacacggttgctctgaagcacttccctaacatcgacagagagaaggcaatgagccgacccatcttgtacagcaactggctgtcaaaggattacatcccagtagaccaagaagagttaagagattatgtcaaagctaggctgaaggtcttttatgaagaagaacttgatgttccgctggtgctgtttaatgaagtcctagaccacgtgctgaggattgacagaatattccgtcaacctcaaggccacttgcttctgattggtgttagtggagcaggaaaaactaccctgtctcgtttcgtcgcctggatgaacggtttgagtgtgtaccagattaaggtccataggaagtacacaggggaagactttgatgaagatctacggacagtgttgagacgttctggctgtaaaaatgaaaagatagcatttataatggatgaatctaatgtgttagattctggattcctggagcgaatgaatacccttctggccaatggagaggtgcctggtctctttgaaggagacgagtatgccaccttgatgacgcagtgcaaagagggggcacagaaggaaggcctgatgctggactcgcacgaggagctctacaagtggttcactagccaggttatccgcaacctccacgtcgtgttcaccatgaacccgtcctcggagggactcaaggaccgggcagctacatcaccagcacttttcaacaggtgtgtgttgaattggtttggagactggtccaccgaagcactgtatcaggttggcaaagaattcacaagtaagatggatctggagaagccaaattacatcgtgcctgattacatgccagttgtgtatgataagctgccgcagccaccatcccatcgggaagccattgtgaacagctgtgtgtttgttcatcagactcttcaccaggcgaatgctcggctagcaaagcgaggcggcagaacgatggccatcacccctcgccactacctggacttcatcaatcactatgccaacctgttccacgagaagcggagcgagctggaggagcagcagatgcacttgaacgtggggctcaggaagatcaaagagacagtcgaccaggtagaagaactgcgtcgtgacttgaggataaagagccaagagctggaggtgaagaatgcagcagccaatgacaagctgaaaaagatggtgaaagaccagcaggaggctgaaaagaagaaggttatgagccaagaaatccaggaacagctgcataagcagcaggaggtaattgcagacaaacagatgagtgtcaaagaagatcttgataaggtggaacctgccgtcattgaggcccagaatgctgtgaagtcgatcaagaagcagcacctggtggaggtgaggtccatggccaaccctcctgctgctgtgaagctggcgctggagtccatctgcctgctgctgggggaaagcaccacagactggaagcagatccgctccatcatcatgcgggagaacttcatccccaccatcgtcaacttctctgcagaggagatcagtgacgccataagggagaagatgaagaaaaattacatgtccaatccaagttacaattatgaaattgtgaatcgggcttccctggcttgcggccctatggtgaaatgggcaattgcacagcttaactatgcagacatgttaaagagagtggagcccctacgcaatgagctgcagaagctggaagatgacgccaaggacaaccagcagaaggccaacgaggtggagcagatgatccgagacctggaagccagcatcgcccgctacaaggaggaatacgccgtcctgatctcagaggcccaggccatcaaggcagacctggcagctgtcgaggcaaaagtaaaccggagcactgctcttctgaagagcttgtctgctgaacgtgaacgatgggaaaaaacaagtgaaactttcaaaaaccagatgtccaccattgctggggactgtctcttgtcagctgcgttcattgcctacgcgggttactttgaccagcagatgcgtcagaacttgttcactacctggtcccatcacctacagcaagccaacatccagttccgtacagatattgccaggacggaatacctttccaatgctgatgagcgtcttcgctggcaggccagctccttgcctgctgatgacctttgcacagaaaatgccatcatgctgaaacgattcaataggtatccgctgatcattgacccctctggacaggccacagaattcattatgaatgaatataaggatcgtaagatcacacggaccagcttcctggatgacgccttcagaaagaacttagagagtgcactgagattcggtaacccccttctggtccaggatgtggaaagctacgatccagttttgaacccggtgctgaaccgtgaagtgcggcgaacaggggggagagtgctgatcactctcggggaccaggacatagacctgtcgccatcgtttgtcatcttcctgtccacccgggatccaactgtcgagttcccaccagatctctgttcccgggttacttttgtaaacttcacagttacccgtagcagtttacaaagccagtgtctaaatgaagtacttaaagcagaaagacctgatgtggacgagaaacgatctgatcttcttaaacttcaaggggaatttcagctccgtttgcgtcagctggaaaaatctctactacaagctctgaacgaggtgaaagggcgcattttggatgacgacacgatcataaccactctggagaacctgaagagagaggctgcagaggtcaccaggaaagttgaggagacggacattgtcatgcaggaggtggagaccgtgtcccagcagtacctcccgctctccaccgcctgcagcagcatctacttcaccatggagtccctcaagcagatacacttcttgtaccagtactccctccagtttttcctggacatttatcacaacgtcctatacgagaacccgaacctgaagggtgtcaccgaccacacacagcgcctgtccattataacaaaggacctcttccaggtggcgtttaaccgagtggctcgaggcatgctgcatcaggaccacattacctttgccatgctgctggcaagaatcaaactgaagggcaccgtgggggagcccacctacgatgcagaattccagcacttcttgagaggaaatgagattgtcctgagtgctggctccacccccaggatccagggcctgactgtggagcaggcggaggcggtggtgaggctgagctgccttcccgcgtttaaggacttgattgcaaaggttcaggcagacgagcaatttggcatctggctggacagcagctccccggagcagactgtgccctacctctggagtgaagaaacacctgcaacacccattggccaggccatccaccgcctgctcctgatccaggctttccggcccgatcgcctgttggccatggcccacatgtttgtttcaacaaaccttggggagtctttcatgtccatcatggagcagccgctcgacctgacccacattgtgggcacagaggtgaagcccaacactcctgtcttaatgtgctctgtgcctggttatgatgccagtggacatgtcgaggaccttgcagccgagcagaacacgcagatcacttcaattgcaatcggctctgcagaaggctttaaccaagcagataaggcaataaacaccgctgtaaagtcgggcaggtgggtgatgctgaagaatgtgcatctggccccagggtggctgatgcagctggagaagaagttgcattccctgcagccgcatgcctgcttccgactcttcctcaccatggagatcaaccccaaggtgcctgtgaatctgctccgtgcgggccgcatctttgtgttcgagccaccgccaggggtgaaggccaacatgctgaggacgttcagcagcattcccgtctcacggatatgcaagtctcccaacgagcgtgcccgcttgtacttcctgctggcctggtttcatgcgatcatccaagaacgcttacgatacgcaccactggggtggtcaaagaagtatgaatttggagagtctgacctgcggtcagcttgcgatacggtggacacgtggctggatgacacggccaagggcaggcagaacatctcaccggataagatcccgtggtctgcactaaagaccttaatggcccagtccatttatggcgggcgcgtggacaacgagtttgaccagcgtctgctcaacaccttcctggagcgcctgttcacaaccaggagtttcgacagtgagtttaagctggcatgcaaggtcgacggacataaagacattcaaatgccagatggcatcaggcgagaggagtttgtgcagtgggtggagttgctccccgacacccagacgccctcctggctgggcctgcccaacaacgccgagagagtcctccttaccacacagggtgtggacatgatcagtaaaatgctgaagatgcagatgttggaggatgaggacgacctggcctacgcagagactgagaagaagacgaggacagactccacgtccgacgggcgccctgcctggatgcggacactgcacaccaccgcgtccaactggctgcacctcatcccccagacgctgagccacctcaagcgcaccgtggagaatatcaaggatcctttgttcaggttctttgagagagaagtgaagatgggcgcaaagctgcttcaggacgttcgccaggaccttgcagatgtcgtccaggtgtgcgaaggaaagaagaagcagaccaactacttgcgcacgctgatcaacgagctagtgaaagggatcttgcctcggagctggtcccactacacggtgcctgccggcatgaccgtcatccagtgggtgtccgacttcagcgagaggatcaaacagctgcagaacatctcactggcagctgcatctggtggcgccaaggagctaaagaacatccacgtgtgcctgggtggcctgttcgtgcctgaggcgtacatcactgccaccaggcagtatgtggcccaggccaacagctggtccctggaggagctctgcctggaagtcaacgtcaccacctcacagggcgccacccttgacgcttgcagcttcggagtcacgggtttgaaacttcaaggggccacgtgcaacaacaacaagctgtcactgtccaatgccatctcaaccgcccttcccctgacgcagccgcccctgagttgcagctcgcccctgagttagcagctcgcccctgagttagcagctcgcccctgagttagcagctcgcccctgagttgcagctcgcccctgagttgcagctcgccccctgagttgcagctcgcacctgagttgcagctcgcccctgagttgcagctcgccctgagttacagctcgccctgagttagcagctcgccaaagttgga

SEQ ID NO: 462049 - DNA, 5570 bp, Homo sapiens
gcacatgctgctctccccacagactcgtagaggatgaggagaggcgttggactgatgagaacatcgacacggttgctctgaagcacttccctaacatcgacagagagaaggcaatgagccgacccatcttgtacagcaactggctgtcaaaggattacatcccagtagaccaagaagagttaagagattatgtcaaagctaggctgaaggtcttttatgaagaagaacttgatgttccgctggtgctgtttaatgaagtcctagaccacgtgctgaggattgacaggtccataggaagtacacaggggaagactttgatgaagatctacggacagtgttgagacgttctggctgtaaaaatgaaaagatagcatttataatggatgaatctaatgtgttagattctggattcctggagcgaatgaatacccttctggccaatggagaggtgcctggtctctttgaaggagacgagtatgccaccttgatgacgcagtgcaaagagggggcacagaaggaaggcctgatgctggactcgcacgaggagctctacaagtggttcactagccaggttatccgcaacctccacgtcgtgttcaccatgaacccgtcctcggagggactcaaggaccgggcagctacatcaccagcacttttcaacaggtgtgtgttgaattggtttggagactggtccaccgaagcactgtatcaggttggcaaagaattcacaagtaagatggatctggagaagccaaattacatcgtgcctgattacatgccagttgtgtatgataagctgccgcagccaccatcccatcgggaagccattgtgaacagctgtgtgtttgttcatcagactcttcaccaggcgaatgctcggctagcaaagcgaggcggcagaacgatggccatcacccctcgccactacctggacttcatcaatcactatgccaacctgttccacgagaagcggagcgagctggaggagcagcagatgcacttgaacgtggggctcaggaagatcaaagagacagtcgaccaggtagaagaactgcgtcgtgacttgaggataaagagccaagagctggaggtgaagaatgcagcagccaatgacaagctgaaaaagatggtgaaagaccagcaggaggctgaaaagaagaaggttatgagccaagaaatccaggaacagctgcataagcagcaggaggtaattgcagacaaacagatgagtgtcaaagaagatcttgataaggtggaacctgccgtcattgaggcccagaatgctgtgaagtcgatcaagaagcagcacctggtggaggtgaggtccatggccaaccctcctgctgctgtgaagctggcgctggagtccatctgcctgctgctgggggaaagcaccacagactggaagcagatccgctccatcatcatgcgggagaacttcatccccaccatcgtcaacttctctgcagaggagatcagtgacgccataagggagaagatgaagaaaaattacatgtccaatccaagttacaattatgaaattgtgaatcgggcttccctggcttgcggccctatggtgaaatgggcaattgcacagcttaactatgcagacatgttaaagagagtggagcccctacgcaatgagctgcagaagctggaagatgacgccaaggacaaccagcagaaggccaacgaggtggagcagatgatccgagacctggaagccagcatcgcccgctacaaggaggaatacgccgtcctgatctcagaggcccaggccatcaaggcagacctggcagctgtcgaggcaaaagtaaaccggagcactgctcttctgaagagcttgtctgctgaacgtgaacgatgggaaaaaacaagtgaaactttcaaaaaccagatgtccaccattgctggggactgtctcttgtcagctgcgttcattgcctacgcgggttactttgaccagcagatgcgtcagaacttgttcactacctggtcccatcacctacagcaagccaacatccagttccgtacagatattgccaggacggaatacctttccaatgctgatgagcgtcttcgctggcaggccagctccttgcctgctgatgacctttgcacagaaaatgccatcatgctgaaacgattcaataggtatccgctgatcattgacccctctggacaggccacagaattcattatgaatgaatataaggatcgtaagatcacacggaccagcttcctggatgacgccttcagaaagaacttagagagtgcactgagattcggtaacccccttctggtccaggatgtggaaagctacgatccagttttgaacccggtgctgaaccgtgaagtgcggcgaacaggggggagagtgctgatcactctcggggaccaggacatagacctgtcgccatcgtttgtcatcttcctgtccacccgggatccaactgtcgagttcccaccagatctctgttcccgggttacttttgtaaacttcacagttacccgtagcagtttacaaagccagtgtctaaatgaagtacttaaagcagaaagacctgatgtggacgagaaacgatctgatcttcttaaacttcaaggggaatttcagctccgtttgcgtcagctggaaaaatctctactacaagctctgaacgaggtgaaagggcgcattttggatgacgacacgatcataaccactctggagaacctgaagagagaggctgcagaggtcaccaggaaagttgaggagacggacattgtcatgcaggaggtggagaccgtgtcccagcagtacctcccgctctccaccgcctgcagcagcatctacttcaccatggagtccctcaagcagatacacttcttgtaccagtactccctccagtttttcctggacatttatcacaacgtcctatacgagaacccgaacctgaagggtgtcaccgaccacacacagcgcctgtccattataacaaaggacctcttccaggtggcgtttaaccgagtggctcgaggcatgctgcatcaggaccacattacctttgccatgctgctggcaagaatcaaactgaagggcaccgtgggggagcccacctacgatgcagaattccagcacttcttgagaggaaatgagattgtcctgagtgctggctccacccccaggatccagggcctgactgtggagcaggcggaggcggtggtgaggctgagctgccttcccgcgtttaaggacttgattgcaaaggttcaggcagacgagcaatttggcatctggctggacagcagctccccggagcagactgtgccctacctctggagtgaagaaacacctgcaacacccattggccaggccatccaccgcctgctcctgatccaggctttccggcccgatcgcctgttggccatggcccacatgtttgtttcaacaaaccttggggagtctttcatgtccatcatggagcagccgctcgacctgacccacattgtgggcacagaggtgaagcccaacactcctgtcttaatgtgctctgtgcctggttatgatgccagtggacatgtcgaggaccttgcagccgagcagaacacgcagatcacttcaattgcaatcggctctgcagaaggctttaaccaagcagataaggcaataaacaccgctgtaaagtcgggcaggtgggtgatgctgaagaatgtgcatctggccccagggtggctgatgcagctggagaagaagttgcattccctgcagccgcatgcctgcttccgactcttcctcaccatggagatcaaccccaaggtgcctgtgaatctgctccgtgcgggccgcatctttgtgttcgagccaccgccaggggtgaaggccaacatgctgaggacgttcagcagcattcccgtctcacggatatgcaagtctcccaacgagcgtgcccgcttgtacttcctgctggcctggtttcatgcgatcatccaagaacgcttacgatacgcaccactggggtggtcaaagaagtatgaatttggagagtctgacctgcggtcagcttgcgatacggtggacacgtggctggatgacacggccaagggcaggcagaacatctcaccggataagatcccgtggtctgcactaaagaccttaatggcccagtccatttatggcgggcgcgtggacaacgagtttgaccagcgtctgctcaacaccttcctggagcgcctgttcacaaccaggagtttcgacagtgagtttaagctggcatgcaaggtcgacggacataaagacattcaaatgccagatggcatcaggcgagaggagtttgtgcagtgggtggagttgctccccgacacccagacgccctcctggctgggcctgcccaacaacgccgagagagtcctccttaccacacagggtgtggacatgatcagtaaaatgctgaagatgcagatgttggaggatgaggacgacctggcctacgcagagactgagaagaagacgaggacagactccacgtccgacgggcgccctgcctggatgcggacactgcacaccaccgcgtccaactggctgcacctcatcccccagacgctgagccacctcaagcgcaccgtggagaatatcaaggatcctttgttcaggttctttgagagagaagtgaagatgggcgcaaagctgcttcaggacgttcgccaggaccttgcagatgtcgtccaggtgtgcgaaggaaagaagaagcagaccaactacttgcgcacgctgatcaacgagctagtgaaagggatcttgcctcggagctggtcccactacacggtgcctgccggcatgaccgtcatccagtgggtgtccgacttcagcgagaggatcaaacagctgcagaacatctcactggcagctgcatctggtggcgccaaggagctaaagaacatccacgtgtgcctgggtggcctgttcgtgcctgaggcgtacatcactgccaccaggcagtatgtggcccaggccaacagctggtccctggaggagctctgcctggaagtcaacgtcaccacctcacagggcgccacccttgacgcttgcagcttcggagtcacgggtttgaaacttcaaggggccacgtgcaacaacaacaagctgtcactgtccaatgccatctcaaccgcccttcccctgacgcagctgcgctgggtcaagcagacaaacaccgagaagaaggccagtgtggtaaccttacctgtctacctgaacttcacccgtgcagacctcatcttcaccgtggacttcgaaattgctacaaaggaggatcctcgcagcttctacgagcggggtgtcgcagtcttgtgcacagagtaaacttttctagctgcccctttctgtaatagtgaaagttggtatttaacatttattcatttttaaaatatttggaaggtctgagcttgtgaaaagaaagtggttggtctgaggttggaggaagctgaatggaatctgacggttgggagtggtggaaattggaaggataccaggaggtatttgggaaggccaatggcgtggctcctttgaggaaataaaacactaagcatga

SEQ ID NO: 462050 - DNA, 3235 bp, Homo sapiens
  misc_feature (31)..(31): n is a, c, g, or t
aaaaagattacggctaggtacgaggctgggntgtgggggagagtgctgatcactctcggggaccaggacatagacctgtcgccatcgtttgtcatcttcctgtccacccgggatccaactgtcgagttcccaccagatctctgttcccgggttacttttgtaaacttcacagttacccgtagcagtttacaaagccagtgtctaaatgaagtacttaaagcagaaagacctgatgtggacgagaaacgatctgatcttcttaaacttcaaggggaatttcagctccgtttgcgtcagctggaaaaatctctactacaagctctgaacgaggtgaaagggcgcattttggatgacgacacgatcataaccactctggagaacctgaagagagaggctgcagaggtcaccaggaaagttgaggagacggacattgtcatgcaggaggtggagaccgtgtcccagcagtacctcccgctctccaccgcctgcagcagcatctacttcaccatggagtccctcaagcagatacacttcttgtaccagtactccctccagtttttcctggacatttatcacaacgtcctatacgagaacccgaacctgaagggtgtcaccgaccacacacagcgcctgtccattataacaaaggacctcttccaggtggcgtttaaccgagtggctcgaggcatgctgcatcaggaccacattacctttgccatgctgctggcaagaatcaaactgaagggcaccgtgggggagcccacctacgatgcagaattccagcacttcttgagaggaaatgagattgtcctgagtgctggctccacccccaggatccagggcctgactgtggagcaggcggaggcggtggtgaggctgagctgccttcccgcgtttaaggacttgattgcaaaggttcaggcagacgagcaatttggcatctggctggacagcagctccccggagcagactgtgccctacctctggagtgaagaaacacctgcaacacccattggccaggccatccaccgcctgctcctgatccaggctttccggcccgatcgcctgttggccatggcccacatgtttgtttcaacaaaccttggggagtctttcatgtccatcatggagcagccgctcgacctgacccacattgtgggcacagaggtgaagcccaacactcctgtcttaatgtgctctgtgcctggttatgatgccagtggacatgtcgaggaccttgcagccgagcagaacacgcagatcacttcaattgcaatcggctctgcagaaggctttaaccaagcagataaggcaataaacaccgctgtaaagtcgggcaggtgggtgatgctgaagaatgtgcatctggccccagggtggctgatgcagctggagaagaagttgcattccctgcagccgcatgcctgcttccgactcttcctcaccatggagatcaaccccaaggtgcctgtgaatctgctccgtgcgggccgcatctttgtgttcgagccaccgccaggggtgaaggccaacatgctgaggacgttcagcagcattcccgtctcacggatatgcaagtctcccaacgagcgtgcccgcttgtacttcctgctggcctggtttcatgcgatcatccaagaacgcttacgatacgcaccactggggtggtcaaagaagtatgaatttggagagtctgacctgcggtcagcttgcgatacggtggacacgtggctggatgacacggccaagggcaggcagaacatctcaccggataagatcccgtggtctgcactaaagaccttaatggcccagtccatttatggcgggcgcgtggacaacgagtttgaccagcgtctgctcaacaccttcctggagcgcctgttcacaaccaggagtttcgacagtgagtttaagctggcatgcaaggtcgacggacataaagacattcaaatgccagatggcatcaggcgagaggagtttgtgcagtgggtggagttgctccccgacacccagacgccctcctggctgggcctgcccaacaacgccgagagagtcctccttaccacacagggtgtggacatgatcagtaaaatgctgaagatgcagatgttggaggatgaggacgacctggcctacgcagagactgagaagaagacgaggacagactccacgtccgacgggcgccctgcctggatgcggacactgcacaccaccgcgtccaactggctgcacctcatcccccagacgctgagccacctcaagcgcaccgtggagaatatcaaggatcctttgttcaggttctttgagagagaagtgaagatgggcgcaaagctgcttcaggacgttcgccaggaccttgcagatgtcgtccaggtgtgcgaaggaaagaagaagcagaccaactacttgcgcacgctgatcaacgagctagtgaaagggatcttgcctcggagctggtcccactacacggtgcctgccggcatgaccgtcatccagtgggtgtccgacttcagcgagaggatcaaacagctgcagaacatctcactggcagctgcatctggtggcgccaaggagctaaagaacatccacgtgtgcctgggtggcctgttcgtgcctgaggcgtacatcactgccaccaggcagtatgtggcccaggccaacagctggtccctggaggagctctgcctggaagtcaacgtcaccacctcacagggcgccacccttgacgcttgcagcttcggagtcacgggtttgaaacttcaaggggccacgtgcaacaacaacaagctgtcactgtccaatgccatctcaaccgcccttcccctgacgcagctgcgctgggtcaagcagacaaacaccgagaagaaggccagtgtggtaaccttacctgtctacctgaacttcacccgtgcagacctcatcttcaccgtggacttcgaaattgctacaaaggaggatcctcgcagcttctacgagcggggtgtcgcagtcttgtgcacagagtaaacttttctagctgcccctttctgtaatagtgaaagttggtatttaacatttattcatttttaaaatatttggaaggtctgagcttgtgaaaagaaagtggttggtctgaggttggaggaagctgaatggaatctgacggttgggagtggtggaaattggaaggataccaggaggtatttgggaaggccaatggcgtggctcctttgaggaaataaaacactaagcatga

SEQ ID NO: 462051 - DNA, 13685 bp, Homo sapiens
  misc_feature (7590)..(7590): n is a, c, g, or t
ttcaatgagagaacatttaatgagaggttaaggggcttagaacaacgccgggcacaggctaagcgctcactaaacgttagctctcgccaataacatcactgattcactataaagtttctctggctgtgtgctattcgctgcgtccacagcagtgaagaagacagacgcagcccctgaccaacctcgccaagcccgggcgccgagccaggacgttgagccaagtccccatctcctaggactcgcagtgcggaggctgcgggccccgaccagcgccgagactacaagtcccagaagggcgcgcggcgacatcgccgggcccgccccccgcgcacgcgcggcgccgtgacgctaaggccgcgagcgagcgcgggtggctgcggcggctgcggccggcggggcggggcggggccacctggcagtggctgcctttagggcggagccggctcccgctctcctcagtctgcggtgggctagcggacggtccggcttccggcggccgtttctgtctcttgctggctgtctcgctgagtcgcggccgccttctcatcgctcctggaaggtcccgagcgcgacaccatgtcggagcccgggggcggcggcggcgaggacggctcggccggattggaagtgtcggccgtgcagaatgtggcggacgtgtcggtgctgcagaagcacctgcgcaagctggtgccgctgctgctggaggacggcggcgaggcgccggccgcgctggaggcggcgctggaggagaagagcgccctggagcagatgcgcaagttcctttcggacccgcaggtccacacggtgctggtggagcgctccacgctcaaagaggacgtcggtgatgaaggagaagaagaaaaagaattcatttcctataacatcaacatagacattcattatggggttaaatccaatagcttggcattcattaaacgtactcccgtgattgatgcagataaacccgtgtcttctcagctccgggtccttacactcagtgaagactcgccctacgaaactttgcattctttcattagcaatgcagtggctcctttttttaagtcctacattagagagtctggcaaggcagacagggatggtgataaaatggctccttcagttgaaaagaagattgcagaactcgaaatgggactccttcacttgcagcaaaatattgaaattccggagatcagcctgccgattcatccaatgatcacaaatgttgcaaaacagtgttatgagcgtggagaaaagccaaaagttacagactttggtgataaggttgaagacccaacatttcttaatcagttacaatctggagttaaccgctggatccgagaaattcaaaaagtgaccaaactggatcgagatcctgcatcaggaactgccttacaggaaattagtttttggctaaacttggaacgtgcgttataccgcatccaggagaaacgggagagcccggaagttctcctgactctggatatcttgaaacatggcaagcgcttccatgccaccgtcagttttgacactgacacaggtctaaaacaggctttggaaactgtgaatgactacaatcctctgatgaaagatttccctctgaatgatttgctgtctgccacggagctggacaaaataagacaggcgcttgttgccattttcacacatttgagaaagatccgaaacacaaaatatcctattcagagggcactgcgtttggtggaggcaatttcaagagacttgagttctcaattactcaaagtattgggcactaggaaattgatgcatgttgcttatgaagaatttgaaaaagttatggtagcatgctttgaagtttttcagacttgggatgatgagtatgagaaacttcaggtattgttgagagacatcgtcaaaagaaaaagggaagaaaatctgaagatggtgtggcgtatcaaccctgcccacaggaagctgcaggcccgccttgaccagatgagaaaatttagacgccagcatgaacagctaagagctgttatcgtcagggtcctgaggccacaggtcacggcagttgcacaacagaatcaaggagaggtccctgaaccccaagatatgaaagtggctgaggttctctttgatgctgcagatgcaaatgccattgaggaagtaaaccttgcttatgagaacgtcaaggaagtggatggactggatgtttccaaagagggcacggaagcctgggaggctgctatgaagaggtacgatgagaggatcgacagagtggagacccggatcaccgctcgccttcgggatcagcttggcacagccaagaatgccaacgagatgtttaggattttctccaggtttaatgcactgtttgtcaggcctcacatccgtggggccattcgtgactaccagacccagctgatccagcgcgtgaaagatgacattgagtctcttcacgacaagttcaaggtccagtacccacagagtcaggcttgtaagatgagtcacgttcgtgacttgccccctgtgtcagggtctatcatctgggctaaacagatcgacaggcagctgacggcctacatgaagcgggtggaagatgtccttggcaagggctgggagaatcacgtggaggggcagaagctgaagcaggatggagacagcttccgcatgaagctcaacacgcaggagatctttgatgactgggcaaggaaggtgcagcagcgcaacctcggtgtctcggggcgcattttcaccatcgaaagtactcgggttcggggccgaactggaaatgtgcttaagctgaaagttaactttcttcctgagattatcacactatccaaagaagtccggaacctcaaatggcttggtttccgcgtcccactggcgattgtgaacaaagcccatcaagcaaaccagctttacccgtttgccatctcactgatcgagagcgttcgtacctatgaacggacctgcgagaaggtggaggagcggaacaccatttcccttttggtggctggcttgaaaaaggaagtgcaggccctgatcgcagaaggcattgcgttggtgtgggagtcctacaaacttgacccatatgtacagcgcttagcagagactgtcttcaacttccaagaaaaggtggatgatctgctgatcattgaagaaaaaatagacctagaagtccgttccttggaaacttgtatgtatgaccataagacattctcggaaatcttgaacagagtccagaaagcagtggatgacttaaatctgcactcctattccaatttgcccatctgggtcaacaagcttgacatggagattgaaagaatattgggcgtccgtctgcaagctggcctgagagcttggacgcaggttcttcttggacaagctgaagataaagcagaagttgacatggacacagatgctccacaagttagtcacaagcctggtggagagccaaagatcaaaaatgtcgttcatgagctaagaataaccaatcaggtaatctacttgaatccaccaattgaagagtgcagatacaagctgtatcaggaaatgtttgcctggaagatggttgtactgtctctccccaggatccagagtcagaggtaccaggtgggtgtacattacgaattgactgaggaagagaaattctatcggaatgctttaacacggatgcctgatggccctgttgccctggaagagtcgtattctgctgtcatgggcattgtatctgaagttgaacagtatgtcaaggtttggcttcagtatcagtgtttatgggatatgcaagctgaaaacatctataacagacttggagaagatctcaacaaatggcaggctctcctggtccaaataaggaaggccagaggaacctttgacaatgcagaaaccaagaaagagtttggaccagtagttatagattatggcaaggtacaatctaaggtgaacttgaaatatgactcttggcataaggaggttcttagcaaatttgggcagatgctaggatcaaacatgacggaattccattcccagatctcaaagtcccgccaagagttggagcagcactcagtagacacggccagcacctccgatgcagtgaccttcatcacctatgtgcagtctttgaaacggaagatcaagcagtttgagaagcaagttgagctctaccgcaatggccagcgcttactggaaaagcaaaggttccagttcccaccttcctggctttatattgacaacatcgagggagagtggggagccttcaatgacatcatgcggcgaaaggactctgccattcagcagcaggtggcaaacctgcaaatgaagattgtccaggaggatcgggccgtggaaagccgcaccaccgacctgctgactgactgggagaagaccaagcctgtcacgggcaaccttcgcccagaagaggcacttcaggctctcaccatatatgaggggaagtttggtaggctgaaggacgacagagagaagtgtgcaaaggccaaggaggcgctggaattgacagatactgggcttctcagtggcagtgaagagcgcgtgcaggtggccttagaagaattacaggacctcaaaggcgtttggtcagaactttctaaggtttgggagcaaatcgatcagatgaaggagcaaccctgggtttcagtacagcctcgaaagcttcgacaaaatttggatgccctcctgaaccagctgaaaagcttccctgcccggttgcgacagtatgcgtcctatgagtttgttcagaggcttctgaaaggttacatgaagataaatatgctggtgattgaactgaaatccgaagcacttaaagaccgccattggaaacagctcatgaaaaggcttcacgttaattgggttgtttctgagctaacccttggccaaatctgggatgttgacttgcagaaaaatgaagcgattgtcaaggatgtactgcttgtggcacaaggggagatggctttggaagaatttttgaagcagataagagaagtgtggaatacttatgaactagacttggttaattatcagaacaagtgccgcttgatccgtggctgggatgacctcttcaacaaggtcaaagaacacatcaacagcgtctcggccatgaagctctctccgtattacaaggtttttgaagaggatgctctcagctgggaagataagctgaacaggatcatggctctctttgatgtgtggattgatgtgcagaggcggtgggtctacctggaaggtatcttcacaggcagtgcagatatcaagcacctgctgccagtggaaacccagcggtttcagagcatcagcactgagtttttggctctaatgaaaaaagtgtccaagtctccccttgttatggatgttctgaacatccagggagtacagaggtctctggaaagattggcagacctgctaggaaagatccagaaagcattgggagaatatctggaaagagagcggtcatctttccccaggttctattttgtgggtgatgaagatttgcttgaaatcattggaaacagcaagaatgtcgctaaattacagaaacacttcaagaagatgtttgctggagtttcgagcatcatcctgaacgaggataactctgttgttttgggtatttcatctcgggaaggagaggaggttatgtttaaaactcctgtgtcaattactgaacatcccaaaatcaatgagtggctcacattggtagaaaaggagatgagagtcaccctggccaaactgcttgctgagtctgttacggaagttgagatttttggtaaagcaacttcaattgacccaaatacctacatcacttggattgataaataccaggcccagcttgtggttttgtcagcccagatagcctggtctgagaacgtggagaccgcactgagcagcatgggcggaggtggagatgccgcgcccttgcactctgtgctgagcaatgtggaggtcaccctcaatgtgttagcagactctgtcctcatggagcagcccccactccgaaggcggaagctagaacacttgattacagagttggttcaccagagagatgttacaaggtccttgatcaaaagcaagattgacaacgccaaatcttttgaatggctcagccagatgcgattttactttgaccctaagcaaactgatgtgttacagcagttgtcaattcaaatggcaaatgccaaatttaactatggctttgagtacctgggtgttcaggacaaactggtccagacccccctcactgaccgctgctatttgacaatgacacaagccttggaggccaggctggggggttccccatttggacctgctggaactgggaaaacagagtctgtcaaagctcttggccatcagcttggacggtttgttttagttttcaactgtgatgaaacctttgatttccaggcaatgggccggatctttgtgggcctttgccaggtgggtgcctggggctgctttgacgagttcaaccgcctggaggagcggatgctctcggctgtgtcccagcaggtgcagtgcatacaggaagcactgcgtgaacattccaaccccaactacgacaagacctctgcccccattacttgtgagctgctgaacaaacaagtcaaggtgagcccggacatggccatcttcatcaccatgaaccctggctacgcgggccggtctaaccttcctgacaacttgaagaagctgttccggagcttggccatgaccaagcccgaccggcagttaatcgcccaggtcatgctgtactcacagggtttccgcactgctgaagtgcttgccaacaaaatcgtcccgttttttaaactatgcgatgagcagctctcttcccaaagccattatgacttcggtcttcgggctttgaagagtgtgctggtgagtgcaggcaatgtgaagagagagagaatccagaagataaagagggagaaagaggaacgaggggaagcagttgatgaaggagaaattgctgaaaatctccctgaacaagagattctgatacagagcgtctgtgagacgatggtgccaaagctggtggcagaggacatcccgctgctcttcagcctcctgtcggacgtgttccctggagtccagtatcacaggggtgagatgactgcccttcgagaggagctgaagaaagtgtgtcaggagatgtatttgacatatggagatggagaagaagttggtggaatgtgggttgaaaaggttctccagctctatcagatcacccagatcaatcatggcctgatgatggtggggccctcgggaagtgggaagagcatggcctggcgtgtcctgctgaaggcattggagagactcgagggtgtggaaggtgtggcccatatcatcgaccccaaggccatcagcaaagaccacctctacggaaccctggaccccaacaccagggaatggacagatgggctcttcacacacgtgctgagaaagatcatcgacagcgtgagaggcgagctgcagaagcgccagtggatcgtcttcgatggcgatgtggatccagagtgggttgagaacttgaactcagtgctggatgacaataagctcctaactttgcccaatggagagcgcctcagtcttccacccaangtgagaataatgtttgaggtacaggacttgaaatacgcgaccttggccacagtgtcgcgctgcggcatggtctggttcagtgaggatgtgctgagcaccgacatgatcttcaacaacttcctggccaggctgcgcagcatcccgctggatgaaggggaggatgaggcacagcggcggcgtaagggcaaagaggatgagggggaggaggccgcttcccccatgctgcagatccaaagagatgcagctacgatcatgcaaccgtacttcacgtccaacggcctggtcaccaaggcgctagagcacgccttccagctggagcacatcatggacctaacacgcctgcgctgcctgggctcgctcttctccatgctgcaccaggcctgccgcaacgtggcgcagtataacgccaaccatcccgacttccccatgcagatcgagcagctggagcgctacattcaggtcagggggcatcaggggcttcacagagctcaccactgcgccagaccacaggtctgaggacctctgaaatgctgcacctgtggggatgtgcgctctctcctaggcgaggcagagccttcgttgaggggctaggaaaggtgcagtgggtgtctgtgatgcaagaagactgggaaccactgtctttaggttaactttgctgtaagtgtctttcttttgttgttgaaattttataaaaatcaaagtttaattccctttttaatagcgatatctggtttatgccatactctggtccctgtctggagacagccggctaaaaatgagagcagagctgggtgaatacatcagaagaatcacgaccgtgcctctgcccactgcgcccaacatacccattatcgattatgaggtgtccatcagcggagaatggtctccgtggcaggccaaggtgcctcagattgaagtggagacgcacaaggtggcagcccctgatgtcgtcgtgccaacgctggacacagtccgccacgaagccctcttgtacacttggctggccgaacacaagcccctggtcttgtgtggccctcctgggtctggcaagaccatgacactcttcagcgccctccgggccttgcctgacatggaggtggtgggtctcaacttctccagtgctactactccagagctgcttctgaagacttttgatcactactgcgagtacaggcgcacacctaatggggtggttttggctcctgttcaacttggaaagtggctggtgttgttctgtgatgaaatcaacttgccagatatggataaatatgggacccagagggtcatatccttcatcagacagatggtggagcacggaggcttttaccgtacctcagatcaaacatgggtgaagctggagagaatccagtttgttggggcttgtaatccccccacagaccctggaagaaagcccctctcacacaggttcctgcgccacgtgcctgtcgtgtatgtggattacccgggccccgcctccctcacacagatctacggcaccttcaaccgcgccatgctgaggctcattccatccctgcggacgtatgcagagccgctcactgctgccatggtggagttctacaccatgtctcaggagagattcacccaggatacacaacctcactatatctattcaccccgtgaaatgactaggtgggtgagaggcatctttgaagcgctgagacctctggagaccctgcctgttgaaggcctcattcggatttgggcacatgaagctctgcgtctcttccaagatagactcgtagaggatgaggagaggcgttggactgatgagaacatcgacacggttgctctgaagcacttccctaacatcgacagagagaaggcaatgagccgacccatcttgtacagcaactggctgtcaaaggattacatcccagtagaccaagaagagttaagagattatgtcaaagctaggctgaaggtcttttatgaagaagaacttgatgttccgctggtgctgtttaatgaagtcctagaccacgtgctgaggattgacagaatattccgtcaacctcaaggccacttgcttctgattggtgttagtggagcaggaaaaactaccctgtctcgtttcgtcgcctggatgaacggtttgagtgtgtaccagattaaggtccataggaagtacacaggggaagactttgatgaagatctacggacagtgttgagacgttctggctgtaaaaatgaaaagatagcatttataatggatgaatctaatgtgttagattctggattcctggagcgaatgaatacccttctggccaatggagaggtgcctggtctctttgaaggagacgagtatgccaccttgatgacgcagtgcaaagagggggcacagaaggaaggcctgatgctggactcgcacgaggagctctacaagtggttcactagccaggttatccgcaacctccacgtcgtgttcaccatgaacccgtcctcggagggactcaaggaccgggcagctacatcaccagcacttttcaacaggtgtgtgttgaattggtttggagactggtccaccgaagcactgtatcaggttggcaaagaattcacaagtaagatggatctggagaagccaaattacatcgtgcctgattacatgccagttgtgtatgataagctgccgcagccaccatcccatcgggaagccattgtgaacagctgtgtgtttgttcatcagactcttcaccaggcgaatgctcggctagcaaagcgaggcggcagaacgatggccatcacccctcgccactacctggacttcatcaatcactatgccaacctgttccacgagaagcggagcgagctggaggagcagcagatgcacttgaacgtggggctcaggaagatcaaagagacagtcgaccaggtagaagaactgcgtcgtgacttgaggataaagagccaagagctggaggtgaagaatgcagcagccaatgacaagctgaaaaagatggtgaaagaccagcaggaggctgaaaagaagaaggttatgagccaagaaatccaggaacagctgcataagcagcaggaggtaattgcagacaaacagatgagtgtcaaagaagatcttgataaggtggaacctgccgtcattgaggcccagaatgctgtgaagtcgatcaagaagcagcacctggtggaggtgaggtccatggccaaccctcctgctgctgtgaagctggcgctggagtccatctgcctgctgctgggggaaagcaccacagactggaagcagatccgctccatcatcatgcgggagaacttcatccccaccatcgtcaacttctctgcagaggagatcagtgacgccataagggagaagatgaagaaaaattacatgtccaatccaagttacaattatgaaattgtgaatcgggcttccctggcttgcggccctatggtgaaatgggcaattgcacagcttaactatgcagacatgttaaagagagtggagcccctacgcaatgagctgcagaagctggaagatgacgccaaggacaaccagcagaaggccaacgaggtggagcagatgatccgagacctggaagccagcatcgcccgctacaaggaggaatacgccgtcctgatctcagaggcccaggccatcaaggcagacctggcagctgtcgaggcaaaagtaaaccggagcactgctcttctgaagagcttgtctgctgaacgtgaacgatgggaaaaaacaagtgaaactttcaaaaaccagatgtccaccattgctggggactgtctcttgtcagctgcgttcattgcctacgcgggttactttgaccagcagatgcgtcagaacttgttcactacctggtcccatcacctacagcaagccaacatccagttccgtacagatattgccaggacggaatacctttccaatgctgatgagcgtcttcgctggcaggccagctccttgcctgctgatgacctttgcacagaaaatgccatcatgctgaaacgattcaataggtatccgctgatcattgacccctctggacaggccacagaattcattatgaatgaatataaggatcgtaagatcacacggaccagcttcctggatgacgccttcagaaagaacttagagagtgcactgagattcggtaacccccttctggtccaggatgtggaaagctacgatccagttttgaacccggtgctgaaccgtgaagtgcggcgaacaggggggagagtgctgatcactctcggggaccaggacatagacctgtcgccatcgtttgtcatcttcctgtccacccgggatccaactgtcgagttcccaccagatctctgttcccgggttacttttgtaaacttcacagttacccgtagcagtttacaaagccagtgtctaaatgaagtacttaaagcagaaagacctgatgtggacgagaaacgatctgatcttcttaaacttcaaggggaatttcagctccgtttgcgtcagctggaaaaatctctactacaagctctgaacgaggtgaaagggcgcattttggatgacgacacgatcataaccactctggagaacctgaagagagaggctgcagaggtcaccaggaaagttgaggagacggacattgtcatgcaggaggtggagaccgtgtcccagcagtacctcccgctctccaccgcctgcagcagcatctacttcaccatggagtccctcaagcagatacacttcttgtaccagtactccctccagtttttcctggacatttatcacaacgtcctatacgagaacccgaacctgaagggtgtcaccgaccacacacagcgcctgtccattataacaaaggacctcttccaggtggcgtttaaccgagtggctcgaggcatgctgcatcaggaccacattacctttgccatgctgctggcaagaatcaaactgaagggcaccgtgggggagcccacctacgatgcagaattccagcacttcttgagaggaaatgagattgtcctgagtgctggctccacccccaggatccagggcctgactgtggagcaggcggaggcggtggtgaggctgagctgccttcccgcgtttaaggacttgattgcaaaggttcaggcagacgagcaatttggcatctggctggacagcagctccccggagcagactgtgccctacctctggagtgaagaaacacctgcaacacccattggccaggccatccaccgcctgctcctgatccaggctttccggcccgatcgcctgttggccatggcccacatgtttgtttcaacaaaccttggggagtctttcatgtccatcatggagcagccgctcgacctgacccacattgtgggcacagaggtgaagcccaacactcctgtcttaatgtgctctgtgcctggttatgatgccagtggacatgtcgaggaccttgcagccgagcagaacacgcagatcacttcaattgcaatcggctctgcagaaggctttaaccaagcagataaggcaataaacaccgctgtaaagtcgggcaggtgggtgatgctgaagaatgtgcatctggccccagggtggctgatgcagctggagaagaagttgcattccctgcagccgcatgcctgcttccgactcttcctcaccatggagatcaaccccaaggtgcctgtgaatctgctccgtgcgggccgcatctttgtgttcgagccaccgccaggggtgaaggccaacatgctgaggacgttcagcagcattcccgtctcacggatatgcaagtctcccaacgagcgtgcccgcttgtacttcctgctggcctggtttcatgcgatcatccaagaacgcttacgatacgcaccactggggtggtcaaagaagtatgaatttggagagtctgacctgcggtcagcttgcgatacggtggacacgtggctggatgacacggccaagggcaggcagaacatctcaccggataagatcccgtggtctgcactaaagaccttaatggcccagtccatttatggcgggcgcgtggacaacgagtttgaccagcgtctgctcaacaccttcccgacacgttccacttaggcgggatcctctagatcaccgaggc

SEQ ID NO: 462052 - DNA, 2031 bp, Homo sapiens
ggtgacccctgaggttacttatgtctgagtgcttccctgcggagtagaacacgcagatcacttcaattgcaatcggctctgcagaaggctttaaccaagcagataaggcaataaacaccgctgtaaagtcgggcaggtgggtgatgctgaagaatgtgcatctggccccagggtggctgatgcagctggagaagaagttgcattccctgcagccgcatgcctgcttccgactcttcctcaccatggagatcaaccccaaggtgcctgtgaatctgctccgtgcgggccgcatctttgtgttcgagccaccgccaggggtgaaggccaacatgctgaggacgttcagcagcattcccgtctcacggatatgcaagtctcccaacgagcgtgcccgcttgtacttcctgctggcctggtttcatgcgatcatccaagaacgcttacgatacgcaccactggggtggtcaaagaagtatgaatttggagagtctgacctgcggtcagcttgcgatacggtggacacgtggctggatgacacggccaagggcaggcagaacatctcaccggataagatcccgtggtctgcactaaagaccttaatggcccagtccatttatggcgggcgcgtggacaacgagtttgaccagcgtctgctcaacaccttcctggagcgcctgttcacaaccaggagtttcgacagtgagtttaagctggcatgcaaggtcgacggacataaagacattcaaatgccagatggcatcaggcgagaggagtttgtgcagtgggtggagttgctccccgacacccagacgccctcctggctgggcctgcccaacaacgccgagagagtcctccttaccacacagggtgtggacatgatcagtaaaatgctgaagatgcagatgttggaggatgaggacgacctggcctacgcagagactgagaagaagacgaggacagactccacgtccgacgggcgccctgcctggatgcggacactgcacaccaccgcgtccaactggctgcacctcatcccccagacgctgagccacctcaagcgcaccgtggagaatatcaaggatcctttgttcaggttctttgagagagaagtgaagatgggcgcaaagctgcttcaggacgttcgccaggaccttgcagatgtcgtccaggtgtgcgaaggaaagaagaagcagaccaactacttgcgcacgctgatcaacgagctagtgaaagggatcttgcctcggagctggtcccactacacggtgcctgccggcatgaccgtcatccagtgggtgtccgacttcagcgagaggatcaaacagctgcagaacatctcactggcagctgcatctggtggcgccaaggagctaaagaacatccacgtgtgcctgggtggcctgttcgtgcctgaggcgtacatcactgccaccaggcagtatgtggcccaggccaacagctggtccctggaggagctctgcctggaagtcaacgtcaccacctcacagggcgccacccttgacgcttgcagcttcggagtcacgggtttgaaacttcaaggggccacgtgcaacaacaacaagctgtcactgtccaatgccatctcaaccgcccttcccctgacgcagctgcgctgggtcaagcagacaaacaccgagaagaaggccagtgtggtaaccttacctgtctacctgaacttcacccgtgcagacctcatcttcaccgtggacttcgaaattgctacaaaggaggatcctcgcagcttctacgagcggggtgtcgcagtcttgtgcacagagtaaacttttctagctgcccctttctgtaatagtgaaagttggtatttaacatttattcatttttaaaatatttggaaggtctgagcttgtgaaaagaaagtggttggtctgaggttggaggaagctgaatggaatctgacggttgggagtggtggaaattggaaggataccaggaggtatttgggaaggccaatggcgtggctcctttgaggaaataaaacactaagcatga

SEQ ID NO: 462053 - DNA, 11955 bp, Homo sapiens
  misc_feature (7590)..(7590): n is a, c, g, or t
ttcaatgagagaacatttaatgagaggttaaggggcttagaacaacgccgggcacaggctaagcgctcactaaacgttagctctcgccaataacatcactgattcactataaagtttctctggctgtgtgctattcgctgcgtccacagcagtgaagaagacagacgcagcccctgaccaacctcgccaagcccgggcgccgagccaggacgttgagccaagtccccatctcctaggactcgcagtgcggaggctgcgggccccgaccagcgccgagactacaagtcccagaagggcgcgcggcgacatcgccgggcccgccccccgcgcacgcgcggcgccgtgacgctaaggccgcgagcgagcgcgggtggctgcggcggctgcggccggcggggcggggcggggccacctggcagtggctgcctttagggcggagccggctcccgctctcctcagtctgcggtgggctagcggacggtccggcttccggcggccgtttctgtctcttgctggctgtctcgctgagtcgcggccgccttctcatcgctcctggaaggtcccgagcgcgacaccatgtcggagcccgggggcggcggcggcgaggacggctcggccggattggaagtgtcggccgtgcagaatgtggcggacgtgtcggtgctgcagaagcacctgcgcaagctggtgccgctgctgctggaggacggcggcgaggcgccggccgcgctggaggcggcgctggaggagaagagcgccctggagcagatgcgcaagttcctttcggacccgcaggtccacacggtgctggtggagcgctccacgctcaaagaggacgtcggtgatgaaggagaagaagaaaaagaattcatttcctataacatcaacatagacattcattatggggttaaatccaatagcttggcattcattaaacgtactcccgtgattgatgcagataaacccgtgtcttctcagctccgggtccttacactcagtgaagactcgccctacgaaactttgcattctttcattagcaatgcagtggctcctttttttaagtcctacattagagagtctggcaaggcagacagggatggtgataaaatggctccttcagttgaaaagaagattgcagaactcgaaatgggactccttcacttgcagcaaaatattgaaattccggagatcagcctgccgattcatccaatgatcacaaatgttgcaaaacagtgttatgagcgtggagaaaagccaaaagttacagactttggtgataaggttgaagacccaacatttcttaatcagttacaatctggagttaaccgctggatccgagaaattcaaaaagtgaccaaactggatcgagatcctgcatcaggaactgccttacaggaaattagtttttggctaaacttggaacgtgcgttataccgcatccaggagaaacgggagagcccggaagttctcctgactctggatatcttgaaacatggcaagcgcttccatgccaccgtcagttttgacactgacacaggtctaaaacaggctttggaaactgtgaatgactacaatcctctgatgaaagatttccctctgaatgatttgctgtctgccacggagctggacaaaataagacaggcgcttgttgccattttcacacatttgagaaagatccgaaacacaaaatatcctattcagagggcactgcgtttggtggaggcaatttcaagagacttgagttctcaattactcaaagtattgggcactaggaaattgatgcatgttgcttatgaagaatttgaaaaagttatggtagcatgctttgaagtttttcagacttgggatgatgagtatgagaaacttcaggtattgttgagagacatcgtcaaaagaaaaagggaagaaaatctgaagatggtgtggcgtatcaaccctgcccacaggaagctgcaggcccgccttgaccagatgagaaaatttagacgccagcatgaacagctaagagctgttatcgtcagggtcctgaggccacaggtcacggcagttgcacaacagaatcaaggagaggtccctgaaccccaagatatgaaagtggctgaggttctctttgatgctgcagatgcaaatgccattgaggaagtaaaccttgcttatgagaacgtcaaggaagtggatggactggatgtttccaaagagggcacggaagcctgggaggctgctatgaagaggtacgatgagaggatcgacagagtggagacccggatcaccgctcgccttcgggatcagcttggcacagccaagaatgccaacgagatgtttaggattttctccaggtttaatgcactgtttgtcaggcctcacatccgtggggccattcgtgactaccagacccagctgatccagcgcgtgaaagatgacattgagtctcttcacgacaagttcaaggtccagtacccacagagtcaggcttgtaagatgagtcacgttcgtgacttgccccctgtgtcagggtctatcatctgggctaaacagatcgacaggcagctgacggcctacatgaagcgggtggaagatgtccttggcaagggctgggagaatcacgtggaggggcagaagctgaagcaggatggagacagcttccgcatgaagctcaacacgcaggagatctttgatgactgggcaaggaaggtgcagcagcgcaacctcggtgtctcggggcgcattttcaccatcgaaagtactcgggttcggggccgaactggaaatgtgcttaagctgaaagttaactttcttcctgagattatcacactatccaaagaagtccggaacctcaaatggcttggtttccgcgtcccactggcgattgtgaacaaagcccatcaagcaaaccagctttacccgtttgccatctcactgatcgagagcgttcgtacctatgaacggacctgcgagaaggtggaggagcggaacaccatttcccttttggtggctggcttgaaaaaggaagtgcaggccctgatcgcagaaggcattgcgttggtgtgggagtcctacaaacttgacccatatgtacagcgcttagcagagactgtcttcaacttccaagaaaaggtggatgatctgctgatcattgaagaaaaaatagacctagaagtccgttccttggaaacttgtatgtatgaccataagacattctcggaaatcttgaacagagtccagaaagcagtggatgacttaaatctgcactcctattccaatttgcccatctgggtcaacaagcttgacatggagattgaaagaatattgggcgtccgtctgcaagctggcctgagagcttggacgcaggttcttcttggacaagctgaagataaagcagaagttgacatggacacagatgctccacaagttagtcacaagcctggtggagagccaaagatcaaaaatgtcgttcatgagctaagaataaccaatcaggtaatctacttgaatccaccaattgaagagtgcagatacaagctgtatcaggaaatgtttgcctggaagatggttgtactgtctctccccaggatccagagtcagaggtaccaggtgggtgtacattacgaattgactgaggaagagaaattctatcggaatgctttaacacggatgcctgatggccctgttgccctggaagagtcgtattctgctgtcatgggcattgtatctgaagttgaacagtatgtcaaggtttggcttcagtatcagtgtttatgggatatgcaagctgaaaacatctataacagacttggagaagatctcaacaaatggcaggctctcctggtccaaataaggaaggccagaggaacctttgacaatgcagaaaccaagaaagagtttggaccagtagttatagattatggcaaggtacaatctaaggtgaacttgaaatatgactcttggcataaggaggttcttagcaaatttgggcagatgctaggatcaaacatgacggaattccattcccagatctcaaagtcccgccaagagttggagcagcactcagtagacacggccagcacctccgatgcagtgaccttcatcacctatgtgcagtctttgaaacggaagatcaagcagtttgagaagcaagttgagctctaccgcaatggccagcgcttactggaaaagcaaaggttccagttcccaccttcctggctttatattgacaacatcgagggagagtggggagccttcaatgacatcatgcggcgaaaggactctgccattcagcagcaggtggcaaacctgcaaatgaagattgtccaggaggatcgggccgtggaaagccgcaccaccgacctgctgactgactgggagaagaccaagcctgtcacgggcaaccttcgcccagaagaggcacttcaggctctcaccatatatgaggggaagtttggtaggctgaaggacgacagagagaagtgtgcaaaggccaaggaggcgctggaattgacagatactgggcttctcagtggcagtgaagagcgcgtgcaggtggccttagaagaattacaggacctcaaaggcgtttggtcagaactttctaaggtttgggagcaaatcgatcagatgaaggagcaaccctgggtttcagtacagcctcgaaagcttcgacaaaatttggatgccctcctgaaccagctgaaaagcttccctgcccggttgcgacagtatgcgtcctatgagtttgttcagaggcttctgaaaggttacatgaagataaatatgctggtgattgaactgaaatccgaagcacttaaagaccgccattggaaacagctcatgaaaaggcttcacgttaattgggttgtttctgagctaacccttggccaaatctgggatgttgacttgcagaaaaatgaagcgattgtcaaggatgtactgcttgtggcacaaggggagatggctttggaagaatttttgaagcagataagagaagtgtggaatacttatgaactagacttggttaattatcagaacaagtgccgcttgatccgtggctgggatgacctcttcaacaaggtcaaagaacacatcaacagcgtctcggccatgaagctctctccgtattacaaggtttttgaagaggatgctctcagctgggaagataagctgaacaggatcatggctctctttgatgtgtggattgatgtgcagaggcggtgggtctacctggaaggtatcttcacaggcagtgcagatatcaagcacctgctgccagtggaaacccagcggtttcagagcatcagcactgagtttttggctctaatgaaaaaagtgtccaagtctccccttgttatggatgttctgaacatccagggagtacagaggtctctggaaagattggcagacctgctaggaaagatccagaaagcattgggagaatatctggaaagagagcggtcatctttccccaggttctattttgtgggtgatgaagatttgcttgaaatcattggaaacagcaagaatgtcgctaaattacagaaacacttcaagaagatgtttgctggagtttcgagcatcatcctgaacgaggataactctgttgttttgggtatttcatctcgggaaggagaggaggttatgtttaaaactcctgtgtcaattactgaacatcccaaaatcaatgagtggctcacattggtagaaaaggagatgagagtcaccctggccaaactgcttgctgagtctgttacggaagttgagatttttggtaaagcaacttcaattgacccaaatacctacatcacttggattgataaataccaggcccagcttgtggttttgtcagcccagatagcctggtctgagaacgtggagaccgcactgagcagcatgggcggaggtggagatgccgcgcccttgcactctgtgctgagcaatgtggaggtcaccctcaatgtgttagcagactctgtcctcatggagcagcccccactccgaaggcggaagctagaacacttgattacagagttggttcaccagagagatgttacaaggtccttgatcaaaagcaagattgacaacgccaaatcttttgaatggctcagccagatgcgattttactttgaccctaagcaaactgatgtgttacagcagttgtcaattcaaatggcaaatgccaaatttaactatggctttgagtacctgggtgttcaggacaaactggtccagacccccctcactgaccgctgctatttgacaatgacacaagccttggaggccaggctggggggttccccatttggacctgctggaactgggaaaacagagtctgtcaaagctcttggccatcagcttggacggtttgttttagttttcaactgtgatgaaacctttgatttccaggcaatgggccggatctttgtgggcctttgccaggtgggtgcctggggctgctttgacgagttcaaccgcctggaggagcggatgctctcggctgtgtcccagcaggtgcagtgcatacaggaagcactgcgtgaacattccaaccccaactacgacaagacctctgcccccattacttgtgagctgctgaacaaacaagtcaaggtgagcccggacatggccatcttcatcaccatgaaccctggctacgcgggccggtctaaccttcctgacaacttgaagaagctgttccggagcttggccatgaccaagcccgaccggcagttaatcgcccaggtcatgctgtactcacagggtttccgcactgctgaagtgcttgccaacaaaatcgtcccgttttttaaactatgcgatgagcagctctcttcccaaagccattatgacttcggtcttcgggctttgaagagtgtgctggtgagtgcaggcaatgtgaagagagagagaatccagaagataaagagggagaaagaggaacgaggggaagcagttgatgaaggagaaattgctgaaaatctccctgaacaagagattctgatacagagcgtctgtgagacgatggtgccaaagctggtggcagaggacatcccgctgctcttcagcctcctgtcggacgtgttccctggagtccagtatcacaggggtgagatgactgcccttcgagaggagctgaagaaagtgtgtcaggagatgtatttgacatatggagatggagaagaagttggtggaatgtgggttgaaaaggttctccagctctatcagatcacccagatcaatcatggcctgatgatggtggggccctcgggaagtgggaagagcatggcctggcgtgtcctgctgaaggcattggagagactcgagggtgtggaaggtgtggcccatatcatcgaccccaaggccatcagcaaagaccacctctacggaaccctggaccccaacaccagggaatggacagatgggctcttcacacacgtgctgagaaagatcatcgacagcgtgagaggcgagctgcagaagcgccagtggatcgtcttcgatggcgatgtggatccagagtgggttgagaacttgaactcagtgctggatgacaataagctcctaactttgcccaatggagagcgcctcagtcttccacccaangtgagaataatgtttgaggtacaggacttgaaatacgcgaccttggccacagtgtcgcgctgcggcatggtctggttcagtgaggatgtgctgagcaccgacatgatcttcaacaacttcctggccaggctgcgcagcatcccgctggatgaaggggaggatgaggcacagcggcggcgtaagggcaaagaggatgagggggaggaggccgcttcccccatgctgcagatccaaagagatgcagctacgatcatgcaaccgtacttcacgtccaacggcctggtcaccaaggcgctagagcacgccttccagctggagcacatcatggacctaacacgcctgcgctgcctgggctcgctcttctccatgctgcaccaggcctgccgcaacgtggcgcagtataacgccaaccatcccgacttccccatgcagatcgagcagctggagcgctacattcaggtcagggggcatcaggggcttcacagagctcaccactgcgccagaccacaggtctgaggacctctgaaatgctgcacctgtggggatgtgcgctctctcctaggcgaggcagagccttcgttgaggggctaggaaaggtgcagtgggtgtctgtgatgcaagaagactgggaaccactgtctttaggttaactttgctgtaagtgtctttcttttgttgttgaaattttataaaaatcaaagtttaattccctttttaatagcgatatctggtttatgccatactctggtccctgtctggagacagccggctaaaaatgagagcagagctgggtgaatacatcagaagaatcacgaccgtgcctctgcccactgcgcccaacatacccattatcgattatgaggtgtccatcagcggagaatggtctccgtggcaggccaaggtgcctcagattgaagtggagacgcacaaggtggcagcccctgatgtcgtcgtgccaacgctggacacagtccgccacgaagccctcttgtacacttggctggccgaacacaagcccctggtcttgtgtggccctcctgggtctggcaagaccatgacactcttcagcgccctccgggccttgcctgacatggaggtggtgggtctcaacttctccagtgctactactccagagctgcttctgaagacttttgatcactactgcgagtacaggcgcacacctaatggggtggttttggctcctgttcaacttggaaagtggctggtgttgttctgtgatgaaatcaacttgccagatatggataaatatgggacccagagggtcatatccttcatcagacagatggtggagcacggaggcttttaccgtacctcagatcaaacatgggtgaagctggagagaatccagtttgttggggcttgtaatccccccacagaccctggaagaaagcccctctcacacaggttcctgcgccacgtgcctgtcgtgtatgtggattacccgggccccgcctccctcacacagatctacggcaccttcaaccgcgccatgctgaggctcattccatccctgcggacgtatgcagagccgctcactgctgccatggtggagttctacaccatgtctcaggagagattcacccaggatacacaacctcactatatctattcaccccgtgaaatgactaggtgggtgagaggcatctttgaagcgctgagacctctggagaccctgcctgttgaaggcctcattcggatttgggcacatgaagctctgcgtctcttccaagatagactcgtagaggatgaggagaggcgttggactgatgagaacatcgacacggttgctctgaagcacttccctaacatcgacagagagaaggcaatgagccgacccatcttgtacagcaactggctgtcaaaggattacatcccagtagaccaagaagagttaagagattatgtcaaagctaggctgaaggtcttttatgaagaagaacttgatgttccgctggtgctgtttaatgaagtcctagaccacgtgctgaggattgacagaatattccgtcaacctcaaggccacttgcttctgattggtgttagtggagcaggaaaaactaccctgtctcgtttcgtcgcctggatgaacggtttgagtgtgtaccagattaaggtccataggaagtacacaggggaagactttgatgaagatctacggacagtgttgagacgttctggctgtaaaaatgaaaagatagcatttataatggatgaatctaatgtgttagattctggattcctggagcgaatgaatacccttctggccaatggagaggtgcctggtctctttgaaggagacgagtatgccaccttgatgacgcagtgcaaagagggggcacagaaggaaggcctgatgctggactcgcacgaggagctctacaagtggttcactagccaggttatccgcaacctccacgtcgtgttcaccatgaacccgtcctcggagggactcaaggaccgggcagctacatcaccagcacttttcaacaggtgtgtgttgaattggtttggagactggtccaccgaagcactgtatcaggttggcaaagaattcacaagtaagatggatctggagaagccaaattacatcgtgcctgattacatgccagttgtgtatgataagctgccgcagccaccatcccatcgggaagccattgtgaacagctgtgtgtttgttcatcagactcttcaccaggcgaatgctcggctagcaaagcgaggcggcagaacgatggccatcacccctcgccactacctggacttcatcaatcactatgccaacctgttccacgagaagcggagcgagctggaggagcagcagatgcacttgaacgtggggctcaggaagatcaaagagacagtcgaccaggtagaagaactgcgtcgtgacttgaggataaagagccaagagctggaggtgaagaatgcagcagccaatgacaagctgaaaaagatggtgaaagaccagcaggaggctgaaaagaagaaggttatgagccaagaaatccaggaacagctgcataagcagcaggaggtaattgcagacaaacagatgagtgtcaaagaagatcttgataaggtggaacctgccgtcattgaggcccagaatgctgtgaagtcgatcaagaagcagcacctggtggaggtgaggtccatggccaaccctcctgctgctgtgaagctggcgctggagtccatctgcctgctgctgggggaaagcaccacagactggaagcagatccgctccatcatcatgcgggagaacttcatccccaccatcgtcaacttctctgcagaggagatcagtgacgccataagggagaagatgaagaaaaattacatgtccaatccaagttacaattatgaaattgtgaatcgggcttccctggcttgcggccctatggtgaaatgggcaattgcacagcttaactatgcagacatgttaaagagagtggagcccctacgcaatgagctgcagaagctggaagatgacgccaaggacaaccagcagaaggccaacgaggtggagcagatgatccgagacctggaagccagcatcgcccgctacaaggaggaatacgccgtcctgatctcagaggcccaggccatcaaggcagacctggcagctgtcgaggcaaaagtaaaccggagcactgctcttctgaagagcttgtctgctgaacgtgaacgatgggaaaaaacaagtgaaactttcaaaaaccagatgtccaccattgctggggactgtctcttgtcagctgcgttcattgcctacgcgggttactttgaccagcagatgcgtcagaacttgttcactacctggtcccatcacctacagcaagccaacatccagttccgtacagatattgccaggacggaatacctttccaatgctgatgagcgtcttcgctggcaggccagctccttgcctgctgatgacctttgcacagaaaatgccatcatgctgaaacgattcaataggtatccgctgatcattgacccctctggacaggccacagaattcattatgaatgaatataaggatcgtaagatcacacggaccagcttcctggatgacgccttcagaaagaacttagagagtgcactgagattcggtaacccccttctggtccaggatgtggaaagctacgatccagttttgaacccggtgctgaaccgtgaagtgcggcgaacaggggggagagtgctgatcactctcggggaccaggacatagacctgtcgccatcgtttgtcatcttcctgtccacccgggatccaactctcgagttcccaaccacgattctctgttcctctggacactgttataactttaccatgcgtcc

SEQ ID NO: 462054 - DNA, 11653 bp, Homo sapiens
  misc_feature (7590)..(7590): n is a, c, g, or t
ttcaatgagagaacatttaatgagaggttaaggggcttagaacaacgccgggcacaggctaagcgctcactaaacgttagctctcgccaataacatcactgattcactataaagtttctctggctgtgtgctattcgctgcgtccacagcagtgaagaagacagacgcagcccctgaccaacctcgccaagcccgggcgccgagccaggacgttgagccaagtccccatctcctaggactcgcagtgcggaggctgcgggccccgaccagcgccgagactacaagtcccagaagggcgcgcggcgacatcgccgggcccgccccccgcgcacgcgcggcgccgtgacgctaaggccgcgagcgagcgcgggtggctgcggcggctgcggccggcggggcggggcggggccacctggcagtggctgcctttagggcggagccggctcccgctctcctcagtctgcggtgggctagcggacggtccggcttccggcggccgtttctgtctcttgctggctgtctcgctgagtcgcggccgccttctcatcgctcctggaaggtcccgagcgcgacaccatgtcggagcccgggggcggcggcggcgaggacggctcggccggattggaagtgtcggccgtgcagaatgtggcggacgtgtcggtgctgcagaagcacctgcgcaagctggtgccgctgctgctggaggacggcggcgaggcgccggccgcgctggaggcggcgctggaggagaagagcgccctggagcagatgcgcaagttcctttcggacccgcaggtccacacggtgctggtggagcgctccacgctcaaagaggacgtcggtgatgaaggagaagaagaaaaagaattcatttcctataacatcaacatagacattcattatggggttaaatccaatagcttggcattcattaaacgtactcccgtgattgatgcagataaacccgtgtcttctcagctccgggtccttacactcagtgaagactcgccctacgaaactttgcattctttcattagcaatgcagtggctcctttttttaagtcctacattagagagtctggcaaggcagacagggatggtgataaaatggctccttcagttgaaaagaagattgcagaactcgaaatgggactccttcacttgcagcaaaatattgaaattccggagatcagcctgccgattcatccaatgatcacaaatgttgcaaaacagtgttatgagcgtggagaaaagccaaaagttacagactttggtgataaggttgaagacccaacatttcttaatcagttacaatctggagttaaccgctggatccgagaaattcaaaaagtgaccaaactggatcgagatcctgcatcaggaactgccttacaggaaattagtttttggctaaacttggaacgtgcgttataccgcatccaggagaaacgggagagcccggaagttctcctgactctggatatcttgaaacatggcaagcgcttccatgccaccgtcagttttgacactgacacaggtctaaaacaggctttggaaactgtgaatgactacaatcctctgatgaaagatttccctctgaatgatttgctgtctgccacggagctggacaaaataagacaggcgcttgttgccattttcacacatttgagaaagatccgaaacacaaaatatcctattcagagggcactgcgtttggtggaggcaatttcaagagacttgagttctcaattactcaaagtattgggcactaggaaattgatgcatgttgcttatgaagaatttgaaaaagttatggtagcatgctttgaagtttttcagacttgggatgatgagtatgagaaacttcaggtattgttgagagacatcgtcaaaagaaaaagggaagaaaatctgaagatggtgtggcgtatcaaccctgcccacaggaagctgcaggcccgccttgaccagatgagaaaatttagacgccagcatgaacagctaagagctgttatcgtcagggtcctgaggccacaggtcacggcagttgcacaacagaatcaaggagaggtccctgaaccccaagatatgaaagtggctgaggttctctttgatgctgcagatgcaaatgccattgaggaagtaaaccttgcttatgagaacgtcaaggaagtggatggactggatgtttccaaagagggcacggaagcctgggaggctgctatgaagaggtacgatgagaggatcgacagagtggagacccggatcaccgctcgccttcgggatcagcttggcacagccaagaatgccaacgagatgtttaggattttctccaggtttaatgcactgtttgtcaggcctcacatccgtggggccattcgtgactaccagacccagctgatccagcgcgtgaaagatgacattgagtctcttcacgacaagttcaaggtccagtacccacagagtcaggcttgtaagatgagtcacgttcgtgacttgccccctgtgtcagggtctatcatctgggctaaacagatcgacaggcagctgacggcctacatgaagcgggtggaagatgtccttggcaagggctgggagaatcacgtggaggggcagaagctgaagcaggatggagacagcttccgcatgaagctcaacacgcaggagatctttgatgactgggcaaggaaggtgcagcagcgcaacctcggtgtctcggggcgcattttcaccatcgaaagtactcgggttcggggccgaactggaaatgtgcttaagctgaaagttaactttcttcctgagattatcacactatccaaagaagtccggaacctcaaatggcttggtttccgcgtcccactggcgattgtgaacaaagcccatcaagcaaaccagctttacccgtttgccatctcactgatcgagagcgttcgtacctatgaacggacctgcgagaaggtggaggagcggaacaccatttcccttttggtggctggcttgaaaaaggaagtgcaggccctgatcgcagaaggcattgcgttggtgtgggagtcctacaaacttgacccatatgtacagcgcttagcagagactgtcttcaacttccaagaaaaggtggatgatctgctgatcattgaagaaaaaatagacctagaagtccgttccttggaaacttgtatgtatgaccataagacattctcggaaatcttgaacagagtccagaaagcagtggatgacttaaatctgcactcctattccaatttgcccatctgggtcaacaagcttgacatggagattgaaagaatattgggcgtccgtctgcaagctggcctgagagcttggacgcaggttcttcttggacaagctgaagataaagcagaagttgacatggacacagatgctccacaagttagtcacaagcctggtggagagccaaagatcaaaaatgtcgttcatgagctaagaataaccaatcaggtaatctacttgaatccaccaattgaagagtgcagatacaagctgtatcaggaaatgtttgcctggaagatggttgtactgtctctccccaggatccagagtcagaggtaccaggtgggtgtacattacgaattgactgaggaagagaaattctatcggaatgctttaacacggatgcctgatggccctgttgccctggaagagtcgtattctgctgtcatgggcattgtatctgaagttgaacagtatgtcaaggtttggcttcagtatcagtgtttatgggatatgcaagctgaaaacatctataacagacttggagaagatctcaacaaatggcaggctctcctggtccaaataaggaaggccagaggaacctttgacaatgcagaaaccaagaaagagtttggaccagtagttatagattatggcaaggtacaatctaaggtgaacttgaaatatgactcttggcataaggaggttcttagcaaatttgggcagatgctaggatcaaacatgacggaattccattcccagatctcaaagtcccgccaagagttggagcagcactcagtagacacggccagcacctccgatgcagtgaccttcatcacctatgtgcagtctttgaaacggaagatcaagcagtttgagaagcaagttgagctctaccgcaatggccagcgcttactggaaaagcaaaggttccagttcccaccttcctggctttatattgacaacatcgagggagagtggggagccttcaatgacatcatgcggcgaaaggactctgccattcagcagcaggtggcaaacctgcaaatgaagattgtccaggaggatcgggccgtggaaagccgcaccaccgacctgctgactgactgggagaagaccaagcctgtcacgggcaaccttcgcccagaagaggcacttcaggctctcaccatatatgaggggaagtttggtaggctgaaggacgacagagagaagtgtgcaaaggccaaggaggcgctggaattgacagatactgggcttctcagtggcagtgaagagcgcgtgcaggtggccttagaagaattacaggacctcaaaggcgtttggtcagaactttctaaggtttgggagcaaatcgatcagatgaaggagcaaccctgggtttcagtacagcctcgaaagcttcgacaaaatttggatgccctcctgaaccagctgaaaagcttccctgcccggttgcgacagtatgcgtcctatgagtttgttcagaggcttctgaaaggttacatgaagataaatatgctggtgattgaactgaaatccgaagcacttaaagaccgccattggaaacagctcatgaaaaggcttcacgttaattgggttgtttctgagctaacccttggccaaatctgggatgttgacttgcagaaaaatgaagcgattgtcaaggatgtactgcttgtggcacaaggggagatggctttggaagaatttttgaagcagataagagaagtgtggaatacttatgaactagacttggttaattatcagaacaagtgccgcttgatccgtggctgggatgacctcttcaacaaggtcaaagaacacatcaacagcgtctcggccatgaagctctctccgtattacaaggtttttgaagaggatgctctcagctgggaagataagctgaacaggatcatggctctctttgatgtgtggattgatgtgcagaggcggtgggtctacctggaaggtatcttcacaggcagtgcagatatcaagcacctgctgccagtggaaacccagcggtttcagagcatcagcactgagtttttggctctaatgaaaaaagtgtccaagtctccccttgttatggatgttctgaacatccagggagtacagaggtctctggaaagattggcagacctgctaggaaagatccagaaagcattgggagaatatctggaaagagagcggtcatctttccccaggttctattttgtgggtgatgaagatttgcttgaaatcattggaaacagcaagaatgtcgctaaattacagaaacacttcaagaagatgtttgctggagtttcgagcatcatcctgaacgaggataactctgttgttttgggtatttcatctcgggaaggagaggaggttatgtttaaaactcctgtgtcaattactgaacatcccaaaatcaatgagtggctcacattggtagaaaaggagatgagagtcaccctggccaaactgcttgctgagtctgttacggaagttgagatttttggtaaagcaacttcaattgacccaaatacctacatcacttggattgataaataccaggcccagcttgtggttttgtcagcccagatagcctggtctgagaacgtggagaccgcactgagcagcatgggcggaggtggagatgccgcgcccttgcactctgtgctgagcaatgtggaggtcaccctcaatgtgttagcagactctgtcctcatggagcagcccccactccgaaggcggaagctagaacacttgattacagagttggttcaccagagagatgttacaaggtccttgatcaaaagcaagattgacaacgccaaatcttttgaatggctcagccagatgcgattttactttgaccctaagcaaactgatgtgttacagcagttgtcaattcaaatggcaaatgccaaatttaactatggctttgagtacctgggtgttcaggacaaactggtccagacccccctcactgaccgctgctatttgacaatgacacaagccttggaggccaggctggggggttccccatttggacctgctggaactgggaaaacagagtctgtcaaagctcttggccatcagcttggacggtttgttttagttttcaactgtgatgaaacctttgatttccaggcaatgggccggatctttgtgggcctttgccaggtgggtgcctggggctgctttgacgagttcaaccgcctggaggagcggatgctctcggctgtgtcccagcaggtgcagtgcatacaggaagcactgcgtgaacattccaaccccaactacgacaagacctctgcccccattacttgtgagctgctgaacaaacaagtcaaggtgagcccggacatggccatcttcatcaccatgaaccctggctacgcgggccggtctaaccttcctgacaacttgaagaagctgttccggagcttggccatgaccaagcccgaccggcagttaatcgcccaggtcatgctgtactcacagggtttccgcactgctgaagtgcttgccaacaaaatcgtcccgttttttaaactatgcgatgagcagctctcttcccaaagccattatgacttcggtcttcgggctttgaagagtgtgctggtgagtgcaggcaatgtgaagagagagagaatccagaagataaagagggagaaagaggaacgaggggaagcagttgatgaaggagaaattgctgaaaatctccctgaacaagagattctgatacagagcgtctgtgagacgatggtgccaaagctggtggcagaggacatcccgctgctcttcagcctcctgtcggacgtgttccctggagtccagtatcacaggggtgagatgactgcccttcgagaggagctgaagaaagtgtgtcaggagatgtatttgacatatggagatggagaagaagttggtggaatgtgggttgaaaaggttctccagctctatcagatcacccagatcaatcatggcctgatgatggtggggccctcgggaagtgggaagagcatggcctggcgtgtcctgctgaaggcattggagagactcgagggtgtggaaggtgtggcccatatcatcgaccccaaggccatcagcaaagaccacctctacggaaccctggaccccaacaccagggaatggacagatgggctcttcacacacgtgctgagaaagatcatcgacagcgtgagaggcgagctgcagaagcgccagtggatcgtcttcgatggcgatgtggatccagagtgggttgagaacttgaactcagtgctggatgacaataagctcctaactttgcccaatggagagcgcctcagtcttccacccaangtgagaataatgtttgaggtacaggacttgaaatacgcgaccttggccacagtgtcgcgctgcggcatggtctggttcagtgaggatgtgctgagcaccgacatgatcttcaacaacttcctggccaggctgcgcagcatcccgctggatgaaggggaggatgaggcacagcggcggcgtaagggcaaagaggatgagggggaggaggccgcttcccccatgctgcagatccaaagagatgcagctacgatcatgcaaccgtacttcacgtccaacggcctggtcaccaaggcgctagagcacgccttccagctggagcacatcatggacctaacacgcctgcgctgcctgggctcgctcttctccatgctgcaccaggcctgccgcaacgtggcgcagtataacgccaaccatcccgacttccccatgcagatcgagcagctggagcgctacattcaggtcagggggcatcaggggcttcacagagctcaccactgcgccagaccacaggtctgaggacctctgaaatgctgcacctgtggggatgtgcgctctctcctaggcgaggcagagccttcgttgaggggctaggaaaggtgcagtgggtgtctgtgatgcaagaagactgggaaccactgtctttaggttaactttgctgtaagtgtctttcttttgttgttgaaattttataaaaatcaaagtttaattccctttttaatagcgatatctggtttatgccatactctggtccctgtctggagacagccggctaaaaatgagagcagagctgggtgaatacatcagaagaatcacgaccgtgcctctgcccactgcgcccaacatacccattatcgattatgaggtgtccatcagcggagaatggtctccgtggcaggccaaggtgcctcagattgaagtggagacgcacaaggtggcagcccctgatgtcgtcgtgccaacgctggacacagtccgccacgaagccctcttgtacacttggctggccgaacacaagcccctggtcttgtgtggccctcctgggtctggcaagaccatgacactcttcagcgccctccgggccttgcctgacatggaggtggtgggtctcaacttctccagtgctactactccagagctgcttctgaagacttttgatcactactgcgagtacaggcgcacacctaatggggtggttttggctcctgttcaacttggaaagtggctggtgttgttctgtgatgaaatcaacttgccagatatggataaatatgggacccagagggtcatatccttcatcagacagatggtggagcacggaggcttttaccgtacctcagatcaaacatgggtgaagctggagagaatccagtttgttggggcttgtaatccccccacagaccctggaagaaagcccctctcacacaggttcctgcgccacgtgcctgtcgtgtatgtggattacccgggccccgcctccctcacacagatctacggcaccttcaaccgcgccatgctgaggctcattccatccctgcggacgtatgcagagccgctcactgctgccatggtggagttctacaccatgtctcaggagagattcacccaggatacacaacctcactatatctattcaccccgtgaaatgactaggtgggtgagaggcatctttgaagcgctgagacctctggagaccctgcctgttgaaggcctcattcggatttgggcacatgaagctctgcgtctcttccaagatagactcgtagaggatgaggagaggcgttggactgatgagaacatcgacacggttgctctgaagcacttccctaacatcgacagagagaaggcaatgagccgacccatcttgtacagcaactggctgtcaaaggattacatcccagtagaccaagaagagttaagagattatgtcaaagctaggctgaaggtcttttatgaagaagaacttgatgttccgctggtgctgtttaatgaagtcctagaccacgtgctgaggattgacagaatattccgtcaacctcaaggccacttgcttctgattggtgttagtggagcaggaaaaactaccctgtctcgtttcgtcgcctggatgaacggtttgagtgtgtaccagattaaggtccataggaagtacacaggggaagactttgatgaagatctacggacagtgttgagacgttctggctgtaaaaatgaaaagatagcatttataatggatgaatctaatgtgttagattctggattcctggagcgaatgaatacccttctggccaatggagaggtgcctggtctctttgaaggagacgagtatgccaccttgatgacgcagtgcaaagagggggcacagaaggaaggcctgatgctggactcgcacgaggagctctacaagtggttcactagccaggttatccgcaacctccacgtcgtgttcaccatgaacccgtcctcggagggactcaaggaccgggcagctacatcaccagcacttttcaacaggtgtgtgttgaattggtttggagactggtccaccgaagcactgtatcaggttggcaaagaattcacaagtaagatggatctggagaagccaaattacatcgtgcctgattacatgccagttgtgtatgataagctgccgcagccaccatcccatcgggaagccattgtgaacagctgtgtgtttgttcatcagactcttcaccaggcgaatgctcggctagcaaagcgaggcggcagaacgatggccatcacccctcgccactacctggacttcatcaatcactatgccaacctgttccacgagaagcggagcgagctggaggagcagcagatgcacttgaacgtggggctcaggaagatcaaagagacagtcgaccaggtagaagaactgcgtcgtgacttgaggataaagagccaagagctggaggtgaagaatgcagcagccaatgacaagctgaaaaagatggtgaaagaccagcaggaggctgaaaagaagaaggttatgagccaagaaatccaggaacagctgcataagcagcaggaggtaattgcagacaaacagatgagtgtcaaagaagatcttgataaggtggaacctgccgtcattgaggcccagaatgctgtgaagtcgatcaagaagcagcacctggtggaggtgaggtccatggccaaccctcctgctgctgtgaagctggcgctggagtccatctgcctgctgctgggggaaagcaccacagactggaagcagatccgctccatcatcatgcgggagaacttcatccccaccatcgtcaacttctctgcagaggagatcagtgacgccataagggagaagatgaagaaaaattacatgtccaatccaagttacaattatgaaattgtgaatcgggcttccctggcttgcggccctatggtgaaatgggcaattgcacagcttaactatgcagacatgttaaagagagtggagcccctacgcaatgagctgcagaagctggaagatgacgccaaggacaaccagcagaaggccaacgaggtggagcagatgatccgagacctggaagccagcatcgcccgctacaaggaggaatacgccgtcctgatctcagaggcccaggccatcaaggcagacctggcagctgtcgaggcaaaagtaaaccggagcactgctcttctgaagagcttgtctgctgaacgtgaacgatgggaaaaaacaagtgaaactttcaaaaaccagatgtccaccattgctggggactgtctcttgtcagctgcgttcattgcctacgcgggttactttgaccagcagatgcgtcagaacttgttcactacctggtcccatcacctacagcaagccaacatccagttccgtacagatattgccaggacggaatacctttccaatgctgatgagcgtcttcgctggcaggccagctccttgcctgctgatgacctttgcacagaaaatgccatcatgctgaaacgattcaatagatataggatttgaaggtaagtcaaataggcgaataaaaaagcagaagtataaagcgttgat

SEQ ID NO: 462055 - DNA, 1259 bp, Homo sapiens
  misc_feature (7)..(7): n is a, c, g, or t
  misc_feature (11)..(11): n is a, c, g, or t
  misc_feature (27)..(27): n is a, c, g, or t
ccccccncctnttagtgttggcaggtnactagatcaagagccctcctggctgggcctgcccaacaacgccgagagagtcctccttaccacacagggtgtggacatgatcagtaaaatgctgaagatgcagatgttggaggatgaggacgacctggcctacgcagagactgagaagaagacgaggacagactccacgtccgacgggcgccctgcctggatgcggacactgcacaccaccgcgtccaactggctgcacctcatcccccagacgctgagccacctcaagcgcaccgtggagaatatcaaggatcctttgttcaggttctttgagagagaagtgaagatgggcgcaaagctgcttcaggacgttcgccaggaccttgcagatgtcgtccaggtgtgcgaaggaaagaagaagcagaccaactacttgcgcacgctgatcaacgagctagtgaaagggatcttgcctcggagctggtcccactacacggtgcctgccggcatgaccgtcatccagtgggtgtccgacttcagcgagaggatcaaacagctgcagaacatctcactggcagctgcatctggtggcgccaaggagctaaagaacatccacgtgtgcctgggtggcctgttcgtgcctgaggcgtacatcactgccaccaggcagtatgtggcccaggccaacagctggtccctggaggagctctgcctggaagtcaacgtcaccacctcacagggcgccacccttgacgcttgcagcttcggagtcacgggtttgaaacttcaaggggccacgtgcaacaacaacaagctgtcactgtccaatgccatctcaaccgcccttcccctgacgcagctgcgctgggtcaagcagacaaacaccgagaagaaggccagtgtggtaaccttacctgtctacctgaacttcacccgtgcagacctcatcttcaccgtggacttcgaaattgctacaaaggaggatcctcgcagcttctacgagcggggtgtcgcagtcttgtgcacagagtaaacttttctagctgcccctttctgtaatagtgaaagttggtatttaacatttattcatttttaaaatatttggaaggtctgagcttgtgaaaagaaagtggttggtctgaggttggaggaagctgaatggaatctgacggttgggagtggtggaaattggaaggataccaggaggtatttgggaaggccaatggcgtggctcctttgaggaaataaaacactaagcatga

SEQ ID NO: 462056 - DNA, 9218 bp, Homo sapiens
  misc_feature (7590)..(7590): n is a, c, g, or t
ttcaatgagagaacatttaatgagaggttaaggggcttagaacaacgccgggcacaggctaagcgctcactaaacgttagctctcgccaataacatcactgattcactataaagtttctctggctgtgtgctattcgctgcgtccacagcagtgaagaagacagacgcagcccctgaccaacctcgccaagcccgggcgccgagccaggacgttgagccaagtccccatctcctaggactcgcagtgcggaggctgcgggccccgaccagcgccgagactacaagtcccagaagggcgcgcggcgacatcgccgggcccgccccccgcgcacgcgcggcgccgtgacgctaaggccgcgagcgagcgcgggtggctgcggcggctgcggccggcggggcggggcggggccacctggcagtggctgcctttagggcggagccggctcccgctctcctcagtctgcggtgggctagcggacggtccggcttccggcggccgtttctgtctcttgctggctgtctcgctgagtcgcggccgccttctcatcgctcctggaaggtcccgagcgcgacaccatgtcggagcccgggggcggcggcggcgaggacggctcggccggattggaagtgtcggccgtgcagaatgtggcggacgtgtcggtgctgcagaagcacctgcgcaagctggtgccgctgctgctggaggacggcggcgaggcgccggccgcgctggaggcggcgctggaggagaagagcgccctggagcagatgcgcaagttcctttcggacccgcaggtccacacggtgctggtggagcgctccacgctcaaagaggacgtcggtgatgaaggagaagaagaaaaagaattcatttcctataacatcaacatagacattcattatggggttaaatccaatagcttggcattcattaaacgtactcccgtgattgatgcagataaacccgtgtcttctcagctccgggtccttacactcagtgaagactcgccctacgaaactttgcattctttcattagcaatgcagtggctcctttttttaagtcctacattagagagtctggcaaggcagacagggatggtgataaaatggctccttcagttgaaaagaagattgcagaactcgaaatgggactccttcacttgcagcaaaatattgaaattccggagatcagcctgccgattcatccaatgatcacaaatgttgcaaaacagtgttatgagcgtggagaaaagccaaaagttacagactttggtgataaggttgaagacccaacatttcttaatcagttacaatctggagttaaccgctggatccgagaaattcaaaaagtgaccaaactggatcgagatcctgcatcaggaactgccttacaggaaattagtttttggctaaacttggaacgtgcgttataccgcatccaggagaaacgggagagcccggaagttctcctgactctggatatcttgaaacatggcaagcgcttccatgccaccgtcagttttgacactgacacaggtctaaaacaggctttggaaactgtgaatgactacaatcctctgatgaaagatttccctctgaatgatttgctgtctgccacggagctggacaaaataagacaggcgcttgttgccattttcacacatttgagaaagatccgaaacacaaaatatcctattcagagggcactgcgtttggtggaggcaatttcaagagacttgagttctcaattactcaaagtattgggcactaggaaattgatgcatgttgcttatgaagaatttgaaaaagttatggtagcatgctttgaagtttttcagacttgggatgatgagtatgagaaacttcaggtattgttgagagacatcgtcaaaagaaaaagggaagaaaatctgaagatggtgtggcgtatcaaccctgcccacaggaagctgcaggcccgccttgaccagatgagaaaatttagacgccagcatgaacagctaagagctgttatcgtcagggtcctgaggccacaggtcacggcagttgcacaacagaatcaaggagaggtccctgaaccccaagatatgaaagtggctgaggttctctttgatgctgcagatgcaaatgccattgaggaagtaaaccttgcttatgagaacgtcaaggaagtggatggactggatgtttccaaagagggcacggaagcctgggaggctgctatgaagaggtacgatgagaggatcgacagagtggagacccggatcaccgctcgccttcgggatcagcttggcacagccaagaatgccaacgagatgtttaggattttctccaggtttaatgcactgtttgtcaggcctcacatccgtggggccattcgtgactaccagacccagctgatccagcgcgtgaaagatgacattgagtctcttcacgacaagttcaaggtccagtacccacagagtcaggcttgtaagatgagtcacgttcgtgacttgccccctgtgtcagggtctatcatctgggctaaacagatcgacaggcagctgacggcctacatgaagcgggtggaagatgtccttggcaagggctgggagaatcacgtggaggggcagaagctgaagcaggatggagacagcttccgcatgaagctcaacacgcaggagatctttgatgactgggcaaggaaggtgcagcagcgcaacctcggtgtctcggggcgcattttcaccatcgaaagtactcgggttcggggccgaactggaaatgtgcttaagctgaaagttaactttcttcctgagattatcacactatccaaagaagtccggaacctcaaatggcttggtttccgcgtcccactggcgattgtgaacaaagcccatcaagcaaaccagctttacccgtttgccatctcactgatcgagagcgttcgtacctatgaacggacctgcgagaaggtggaggagcggaacaccatttcccttttggtggctggcttgaaaaaggaagtgcaggccctgatcgcagaaggcattgcgttggtgtgggagtcctacaaacttgacccatatgtacagcgcttagcagagactgtcttcaacttccaagaaaaggtggatgatctgctgatcattgaagaaaaaatagacctagaagtccgttccttggaaacttgtatgtatgaccataagacattctcggaaatcttgaacagagtccagaaagcagtggatgacttaaatctgcactcctattccaatttgcccatctgggtcaacaagcttgacatggagattgaaagaatattgggcgtccgtctgcaagctggcctgagagcttggacgcaggttcttcttggacaagctgaagataaagcagaagttgacatggacacagatgctccacaagttagtcacaagcctggtggagagccaaagatcaaaaatgtcgttcatgagctaagaataaccaatcaggtaatctacttgaatccaccaattgaagagtgcagatacaagctgtatcaggaaatgtttgcctggaagatggttgtactgtctctccccaggatccagagtcagaggtaccaggtgggtgtacattacgaattgactgaggaagagaaattctatcggaatgctttaacacggatgcctgatggccctgttgccctggaagagtcgtattctgctgtcatgggcattgtatctgaagttgaacagtatgtcaaggtttggcttcagtatcagtgtttatgggatatgcaagctgaaaacatctataacagacttggagaagatctcaacaaatggcaggctctcctggtccaaataaggaaggccagaggaacctttgacaatgcagaaaccaagaaagagtttggaccagtagttatagattatggcaaggtacaatctaaggtgaacttgaaatatgactcttggcataaggaggttcttagcaaatttgggcagatgctaggatcaaacatgacggaattccattcccagatctcaaagtcccgccaagagttggagcagcactcagtagacacggccagcacctccgatgcagtgaccttcatcacctatgtgcagtctttgaaacggaagatcaagcagtttgagaagcaagttgagctctaccgcaatggccagcgcttactggaaaagcaaaggttccagttcccaccttcctggctttatattgacaacatcgagggagagtggggagccttcaatgacatcatgcggcgaaaggactctgccattcagcagcaggtggcaaacctgcaaatgaagattgtccaggaggatcgggccgtggaaagccgcaccaccgacctgctgactgactgggagaagaccaagcctgtcacgggcaaccttcgcccagaagaggcacttcaggctctcaccatatatgaggggaagtttggtaggctgaaggacgacagagagaagtgtgcaaaggccaaggaggcgctggaattgacagatactgggcttctcagtggcagtgaagagcgcgtgcaggtggccttagaagaattacaggacctcaaaggcgtttggtcagaactttctaaggtttgggagcaaatcgatcagatgaaggagcaaccctgggtttcagtacagcctcgaaagcttcgacaaaatttggatgccctcctgaaccagctgaaaagcttccctgcccggttgcgacagtatgcgtcctatgagtttgttcagaggcttctgaaaggttacatgaagataaatatgctggtgattgaactgaaatccgaagcacttaaagaccgccattggaaacagctcatgaaaaggcttcacgttaattgggttgtttctgagctaacccttggccaaatctgggatgttgacttgcagaaaaatgaagcgattgtcaaggatgtactgcttgtggcacaaggggagatggctttggaagaatttttgaagcagataagagaagtgtggaatacttatgaactagacttggttaattatcagaacaagtgccgcttgatccgtggctgggatgacctcttcaacaaggtcaaagaacacatcaacagcgtctcggccatgaagctctctccgtattacaaggtttttgaagaggatgctctcagctgggaagataagctgaacaggatcatggctctctttgatgtgtggattgatgtgcagaggcggtgggtctacctggaaggtatcttcacaggcagtgcagatatcaagcacctgctgccagtggaaacccagcggtttcagagcatcagcactgagtttttggctctaatgaaaaaagtgtccaagtctccccttgttatggatgttctgaacatccagggagtacagaggtctctggaaagattggcagacctgctaggaaagatccagaaagcattgggagaatatctggaaagagagcggtcatctttccccaggttctattttgtgggtgatgaagatttgcttgaaatcattggaaacagcaagaatgtcgctaaattacagaaacacttcaagaagatgtttgctggagtttcgagcatcatcctgaacgaggataactctgttgttttgggtatttcatctcgggaaggagaggaggttatgtttaaaactcctgtgtcaattactgaacatcccaaaatcaatgagtggctcacattggtagaaaaggagatgagagtcaccctggccaaactgcttgctgagtctgttacggaagttgagatttttggtaaagcaacttcaattgacccaaatacctacatcacttggattgataaataccaggcccagcttgtggttttgtcagcccagatagcctggtctgagaacgtggagaccgcactgagcagcatgggcggaggtggagatgccgcgcccttgcactctgtgctgagcaatgtggaggtcaccctcaatgtgttagcagactctgtcctcatggagcagcccccactccgaaggcggaagctagaacacttgattacagagttggttcaccagagagatgttacaaggtccttgatcaaaagcaagattgacaacgccaaatcttttgaatggctcagccagatgcgattttactttgaccctaagcaaactgatgtgttacagcagttgtcaattcaaatggcaaatgccaaatttaactatggctttgagtacctgggtgttcaggacaaactggtccagacccccctcactgaccgctgctatttgacaatgacacaagccttggaggccaggctggggggttccccatttggacctgctggaactgggaaaacagagtctgtcaaagctcttggccatcagcttggacggtttgttttagttttcaactgtgatgaaacctttgatttccaggcaatgggccggatctttgtgggcctttgccaggtgggtgcctggggctgctttgacgagttcaaccgcctggaggagcggatgctctcggctgtgtcccagcaggtgcagtgcatacaggaagcactgcgtgaacattccaaccccaactacgacaagacctctgcccccattacttgtgagctgctgaacaaacaagtcaaggtgagcccggacatggccatcttcatcaccatgaaccctggctacgcgggccggtctaaccttcctgacaacttgaagaagctgttccggagcttggccatgaccaagcccgaccggcagttaatcgcccaggtcatgctgtactcacagggtttccgcactgctgaagtgcttgccaacaaaatcgtcccgttttttaaactatgcgatgagcagctctcttcccaaagccattatgacttcggtcttcgggctttgaagagtgtgctggtgagtgcaggcaatgtgaagagagagagaatccagaagataaagagggagaaagaggaacgaggggaagcagttgatgaaggagaaattgctgaaaatctccctgaacaagagattctgatacagagcgtctgtgagacgatggtgccaaagctggtggcagaggacatcccgctgctcttcagcctcctgtcggacgtgttccctggagtccagtatcacaggggtgagatgactgcccttcgagaggagctgaagaaagtgtgtcaggagatgtatttgacatatggagatggagaagaagttggtggaatgtgggttgaaaaggttctccagctctatcagatcacccagatcaatcatggcctgatgatggtggggccctcgggaagtgggaagagcatggcctggcgtgtcctgctgaaggcattggagagactcgagggtgtggaaggtgtggcccatatcatcgaccccaaggccatcagcaaagaccacctctacggaaccctggaccccaacaccagggaatggacagatgggctcttcacacacgtgctgagaaagatcatcgacagcgtgagaggcgagctgcagaagcgccagtggatcgtcttcgatggcgatgtggatccagagtgggttgagaacttgaactcagtgctggatgacaataagctcctaactttgcccaatggagagcgcctcagtcttccacccaangtgagaataatgtttgaggtacaggacttgaaatacgcgaccttggccacagtgtcgcgctgcggcatggtctggttcagtgaggatgtgctgagcaccgacatgatcttcaacaacttcctggccaggctgcgcagcatcccgctggatgaaggggaggatgaggcacagcggcggcgtaagggcaaagaggatgagggggaggaggccgcttcccccatgctgcagatccaaagagatgcagctacgatcatgcaaccgtacttcacgtccaacggcctggtcaccaaggcgctagagcacgccttccagctggagcacatcatggacctaacacgcctgcgctgcctgggctcgctcttctccatgctgcaccaggcctgccgcaacgtggcgcagtataacgccaaccatcccgacttccccatgcagatcgagcagctggagcgctacattcaggtcagggggcatcaggggcttcacagagctcaccactgcgccagaccacaggtctgaggacctctgaaatgctgcacctgtggggatgtgcgctctctcctaggcgaggcagagccttcgttgaggggctaggaaaggtgcagtgggtgtctgtgatgcaagaagactgggaaccactgtctttaggttaactttgctgtaagtgtctttcttttgttgttgaaattttataaaaatcaaagtttaattccctttttaatagcgatatctggtttatgccatactctggtccctgtctggagacagccggctaaaaatgagagcagagctgggtgaatacatcagaagaatcacgaccgtgcctctgcccactgcgcccaacatacccattatcgattatgaggtgtccatcagcggagaatggtctccgtggcaggccaaggtgcctcagattgaagtggagacgcacaaggtggcagcccctgatgtcgtcgtgccaacgctggacacagtccgccacgaagccctcttgtacacttggctggccgaacacaagcccctggtcttgtgtggccctcctgggtctggcaagaccatgacactcttcagcgccctccgggccttgcctgacatggaggtggtgggtctcaacttctccagtgctactactccagagctgcttctgaagacttttgatcactactgcgagtacaggcgcacacctaatggggtggttttggctcctgttcaacttggaaagtggctggtgttgttctgtgatgaaatcaacttgccagatatggataaatatgggacccagagggtcatatccttcatcagacagatggtggagcacggaggcttttaccgtacctcagatcaaacatgggtgaagctggagagaatccagtttgttggggcttgtaatccccccacagaccctggaagaaagcccctctcacacaggttcctgcgccacgtgcctgtcgtgtatgtggattacccgggccccgcctccctcacacagatctacggcaccttcaaccgcgccatgctgaggctcattccatccctgcggacgtatgcagagccgctcactgctgccatggtggagttctacaccatgtctcagcaagtagacgagttcaccccagtatacaaccgcctcc

SEQ ID NO: 462057 - DNA, 9055 bp, Homo sapiens
  misc_feature (7590)..(7590): n is a, c, g, or t
ttcaatgagagaacatttaatgagaggttaaggggcttagaacaacgccgggcacaggctaagcgctcactaaacgttagctctcgccaataacatcactgattcactataaagtttctctggctgtgtgctattcgctgcgtccacagcagtgaagaagacagacgcagcccctgaccaacctcgccaagcccgggcgccgagccaggacgttgagccaagtccccatctcctaggactcgcagtgcggaggctgcgggccccgaccagcgccgagactacaagtcccagaagggcgcgcggcgacatcgccgggcccgccccccgcgcacgcgcggcgccgtgacgctaaggccgcgagcgagcgcgggtggctgcggcggctgcggccggcggggcggggcggggccacctggcagtggctgcctttagggcggagccggctcccgctctcctcagtctgcggtgggctagcggacggtccggcttccggcggccgtttctgtctcttgctggctgtctcgctgagtcgcggccgccttctcatcgctcctggaaggtcccgagcgcgacaccatgtcggagcccgggggcggcggcggcgaggacggctcggccggattggaagtgtcggccgtgcagaatgtggcggacgtgtcggtgctgcagaagcacctgcgcaagctggtgccgctgctgctggaggacggcggcgaggcgccggccgcgctggaggcggcgctggaggagaagagcgccctggagcagatgcgcaagttcctttcggacccgcaggtccacacggtgctggtggagcgctccacgctcaaagaggacgtcggtgatgaaggagaagaagaaaaagaattcatttcctataacatcaacatagacattcattatggggttaaatccaatagcttggcattcattaaacgtactcccgtgattgatgcagataaacccgtgtcttctcagctccgggtccttacactcagtgaagactcgccctacgaaactttgcattctttcattagcaatgcagtggctcctttttttaagtcctacattagagagtctggcaaggcagacagggatggtgataaaatggctccttcagttgaaaagaagattgcagaactcgaaatgggactccttcacttgcagcaaaatattgaaattccggagatcagcctgccgattcatccaatgatcacaaatgttgcaaaacagtgttatgagcgtggagaaaagccaaaagttacagactttggtgataaggttgaagacccaacatttcttaatcagttacaatctggagttaaccgctggatccgagaaattcaaaaagtgaccaaactggatcgagatcctgcatcaggaactgccttacaggaaattagtttttggctaaacttggaacgtgcgttataccgcatccaggagaaacgggagagcccggaagttctcctgactctggatatcttgaaacatggcaagcgcttccatgccaccgtcagttttgacactgacacaggtctaaaacaggctttggaaactgtgaatgactacaatcctctgatgaaagatttccctctgaatgatttgctgtctgccacggagctggacaaaataagacaggcgcttgttgccattttcacacatttgagaaagatccgaaacacaaaatatcctattcagagggcactgcgtttggtggaggcaatttcaagagacttgagttctcaattactcaaagtattgggcactaggaaattgatgcatgttgcttatgaagaatttgaaaaagttatggtagcatgctttgaagtttttcagacttgggatgatgagtatgagaaacttcaggtattgttgagagacatcgtcaaaagaaaaagggaagaaaatctgaagatggtgtggcgtatcaaccctgcccacaggaagctgcaggcccgccttgaccagatgagaaaatttagacgccagcatgaacagctaagagctgttatcgtcagggtcctgaggccacaggtcacggcagttgcacaacagaatcaaggagaggtccctgaaccccaagatatgaaagtggctgaggttctctttgatgctgcagatgcaaatgccattgaggaagtaaaccttgcttatgagaacgtcaaggaagtggatggactggatgtttccaaagagggcacggaagcctgggaggctgctatgaagaggtacgatgagaggatcgacagagtggagacccggatcaccgctcgccttcgggatcagcttggcacagccaagaatgccaacgagatgtttaggattttctccaggtttaatgcactgtttgtcaggcctcacatccgtggggccattcgtgactaccagacccagctgatccagcgcgtgaaagatgacattgagtctcttcacgacaagttcaaggtccagtacccacagagtcaggcttgtaagatgagtcacgttcgtgacttgccccctgtgtcagggtctatcatctgggctaaacagatcgacaggcagctgacggcctacatgaagcgggtggaagatgtccttggcaagggctgggagaatcacgtggaggggcagaagctgaagcaggatggagacagcttccgcatgaagctcaacacgcaggagatctttgatgactgggcaaggaaggtgcagcagcgcaacctcggtgtctcggggcgcattttcaccatcgaaagtactcgggttcggggccgaactggaaatgtgcttaagctgaaagttaactttcttcctgagattatcacactatccaaagaagtccggaacctcaaatggcttggtttccgcgtcccactggcgattgtgaacaaagcccatcaagcaaaccagctttacccgtttgccatctcactgatcgagagcgttcgtacctatgaacggacctgcgagaaggtggaggagcggaacaccatttcccttttggtggctggcttgaaaaaggaagtgcaggccctgatcgcagaaggcattgcgttggtgtgggagtcctacaaacttgacccatatgtacagcgcttagcagagactgtcttcaacttccaagaaaaggtggatgatctgctgatcattgaagaaaaaatagacctagaagtccgttccttggaaacttgtatgtatgaccataagacattctcggaaatcttgaacagagtccagaaagcagtggatgacttaaatctgcactcctattccaatttgcccatctgggtcaacaagcttgacatggagattgaaagaatattgggcgtccgtctgcaagctggcctgagagcttggacgcaggttcttcttggacaagctgaagataaagcagaagttgacatggacacagatgctccacaagttagtcacaagcctggtggagagccaaagatcaaaaatgtcgttcatgagctaagaataaccaatcaggtaatctacttgaatccaccaattgaagagtgcagatacaagctgtatcaggaaatgtttgcctggaagatggttgtactgtctctccccaggatccagagtcagaggtaccaggtgggtgtacattacgaattgactgaggaagagaaattctatcggaatgctttaacacggatgcctgatggccctgttgccctggaagagtcgtattctgctgtcatgggcattgtatctgaagttgaacagtatgtcaaggtttggcttcagtatcagtgtttatgggatatgcaagctgaaaacatctataacagacttggagaagatctcaacaaatggcaggctctcctggtccaaataaggaaggccagaggaacctttgacaatgcagaaaccaagaaagagtttggaccagtagttatagattatggcaaggtacaatctaaggtgaacttgaaatatgactcttggcataaggaggttcttagcaaatttgggcagatgctaggatcaaacatgacggaattccattcccagatctcaaagtcccgccaagagttggagcagcactcagtagacacggccagcacctccgatgcagtgaccttcatcacctatgtgcagtctttgaaacggaagatcaagcagtttgagaagcaagttgagctctaccgcaatggccagcgcttactggaaaagcaaaggttccagttcccaccttcctggctttatattgacaacatcgagggagagtggggagccttcaatgacatcatgcggcgaaaggactctgccattcagcagcaggtggcaaacctgcaaatgaagattgtccaggaggatcgggccgtggaaagccgcaccaccgacctgctgactgactgggagaagaccaagcctgtcacgggcaaccttcgcccagaagaggcacttcaggctctcaccatatatgaggggaagtttggtaggctgaaggacgacagagagaagtgtgcaaaggccaaggaggcgctggaattgacagatactgggcttctcagtggcagtgaagagcgcgtgcaggtggccttagaagaattacaggacctcaaaggcgtttggtcagaactttctaaggtttgggagcaaatcgatcagatgaaggagcaaccctgggtttcagtacagcctcgaaagcttcgacaaaatttggatgccctcctgaaccagctgaaaagcttccctgcccggttgcgacagtatgcgtcctatgagtttgttcagaggcttctgaaaggttacatgaagataaatatgctggtgattgaactgaaatccgaagcacttaaagaccgccattggaaacagctcatgaaaaggcttcacgttaattgggttgtttctgagctaacccttggccaaatctgggatgttgacttgcagaaaaatgaagcgattgtcaaggatgtactgcttgtggcacaaggggagatggctttggaagaatttttgaagcagataagagaagtgtggaatacttatgaactagacttggttaattatcagaacaagtgccgcttgatccgtggctgggatgacctcttcaacaaggtcaaagaacacatcaacagcgtctcggccatgaagctctctccgtattacaaggtttttgaagaggatgctctcagctgggaagataagctgaacaggatcatggctctctttgatgtgtggattgatgtgcagaggcggtgggtctacctggaaggtatcttcacaggcagtgcagatatcaagcacctgctgccagtggaaacccagcggtttcagagcatcagcactgagtttttggctctaatgaaaaaagtgtccaagtctccccttgttatggatgttctgaacatccagggagtacagaggtctctggaaagattggcagacctgctaggaaagatccagaaagcattgggagaatatctggaaagagagcggtcatctttccccaggttctattttgtgggtgatgaagatttgcttgaaatcattggaaacagcaagaatgtcgctaaattacagaaacacttcaagaagatgtttgctggagtttcgagcatcatcctgaacgaggataactctgttgttttgggtatttcatctcgggaaggagaggaggttatgtttaaaactcctgtgtcaattactgaacatcccaaaatcaatgagtggctcacattggtagaaaaggagatgagagtcaccctggccaaactgcttgctgagtctgttacggaagttgagatttttggtaaagcaacttcaattgacccaaatacctacatcacttggattgataaataccaggcccagcttgtggttttgtcagcccagatagcctggtctgagaacgtggagaccgcactgagcagcatgggcggaggtggagatgccgcgcccttgcactctgtgctgagcaatgtggaggtcaccctcaatgtgttagcagactctgtcctcatggagcagcccccactccgaaggcggaagctagaacacttgattacagagttggttcaccagagagatgttacaaggtccttgatcaaaagcaagattgacaacgccaaatcttttgaatggctcagccagatgcgattttactttgaccctaagcaaactgatgtgttacagcagttgtcaattcaaatggcaaatgccaaatttaactatggctttgagtacctgggtgttcaggacaaactggtccagacccccctcactgaccgctgctatttgacaatgacacaagccttggaggccaggctggggggttccccatttggacctgctggaactgggaaaacagagtctgtcaaagctcttggccatcagcttggacggtttgttttagttttcaactgtgatgaaacctttgatttccaggcaatgggccggatctttgtgggcctttgccaggtgggtgcctggggctgctttgacgagttcaaccgcctggaggagcggatgctctcggctgtgtcccagcaggtgcagtgcatacaggaagcactgcgtgaacattccaaccccaactacgacaagacctctgcccccattacttgtgagctgctgaacaaacaagtcaaggtgagcccggacatggccatcttcatcaccatgaaccctggctacgcgggccggtctaaccttcctgacaacttgaagaagctgttccggagcttggccatgaccaagcccgaccggcagttaatcgcccaggtcatgctgtactcacagggtttccgcactgctgaagtgcttgccaacaaaatcgtcccgttttttaaactatgcgatgagcagctctcttcccaaagccattatgacttcggtcttcgggctttgaagagtgtgctggtgagtgcaggcaatgtgaagagagagagaatccagaagataaagagggagaaagaggaacgaggggaagcagttgatgaaggagaaattgctgaaaatctccctgaacaagagattctgatacagagcgtctgtgagacgatggtgccaaagctggtggcagaggacatcccgctgctcttcagcctcctgtcggacgtgttccctggagtccagtatcacaggggtgagatgactgcccttcgagaggagctgaagaaagtgtgtcaggagatgtatttgacatatggagatggagaagaagttggtggaatgtgggttgaaaaggttctccagctctatcagatcacccagatcaatcatggcctgatgatggtggggccctcgggaagtgggaagagcatggcctggcgtgtcctgctgaaggcattggagagactcgagggtgtggaaggtgtggcccatatcatcgaccccaaggccatcagcaaagaccacctctacggaaccctggaccccaacaccagggaatggacagatgggctcttcacacacgtgctgagaaagatcatcgacagcgtgagaggcgagctgcagaagcgccagtggatcgtcttcgatggcgatgtggatccagagtgggttgagaacttgaactcagtgctggatgacaataagctcctaactttgcccaatggagagcgcctcagtcttccacccaangtgagaataatgtttgaggtacaggacttgaaatacgcgaccttggccacagtgtcgcgctgcggcatggtctggttcagtgaggatgtgctgagcaccgacatgatcttcaacaacttcctggccaggctgcgcagcatcccgctggatgaaggggaggatgaggcacagcggcggcgtaagggcaaagaggatgagggggaggaggccgcttcccccatgctgcagatccaaagagatgcagctacgatcatgcaaccgtacttcacgtccaacggcctggtcaccaaggcgctagagcacgccttccagctggagcacatcatggacctaacacgcctgcgctgcctgggctcgctcttctccatgctgcaccaggcctgccgcaacgtggcgcagtataacgccaaccatcccgacttccccatgcagatcgagcagctggagcgctacattcaggtcagggggcatcaggggcttcacagagctcaccactgcgccagaccacaggtctgaggacctctgaaatgctgcacctgtggggatgtgcgctctctcctaggcgaggcagagccttcgttgaggggctaggaaaggtgcagtgggtgtctgtgatgcaagaagactgggaaccactgtctttaggttaactttgctgtaagtgtctttcttttgttgttgaaattttataaaaatcaaagtttaattccctttttaatagcgatatctggtttatgccatactctggtccctgtctggagacagccggctaaaaatgagagcagagctgggtgaatacatcagaagaatcacgaccgtgcctctgcccactgcgcccaacatacccattatcgattatgaggtgtccatcagcggagaatggtctccgtggcaggccaaggtgcctcagattgaagtggagacgcacaaggtggcagcccctgatgtcgtcgtgccaacgctggacacagtccgccacgaagccctcttgtacacttggctggccgaacacaagcccctggtcttgtgtggccctcctgggtctggcaagaccatgacactcttcagcgccctccgggccttgcctgacatggaggtggtgggtctcaacttctccagtgctactactccagagctgcttctgaagacttttgatcactactgcgagtacaggcgcacacctaatggggtggttttggctcctgttcaacttggaaagtggctggtgttgttctgtgatgaaatcaacttgccagatatggataaatatgggacccagagggtcatatccttcatcagacagatggtggagcacggaggcttttaccgtacctcagatcaaacatgggtgaagctggagagaatccagtttgttggggcttgtaatccccccacagaccctggaagaaagcccctctcacacaggtcctgcgcacggggatctctaagtcgactgcagcatcag

SEQ ID NO: 462058 - DNA, 8846 bp, Homo sapiens
  misc_feature (7590)..(7590): n is a, c, g, or t
ttcaatgagagaacatttaatgagaggttaaggggcttagaacaacgccgggcacaggctaagcgctcactaaacgttagctctcgccaataacatcactgattcactataaagtttctctggctgtgtgctattcgctgcgtccacagcagtgaagaagacagacgcagcccctgaccaacctcgccaagcccgggcgccgagccaggacgttgagccaagtccccatctcctaggactcgcagtgcggaggctgcgggccccgaccagcgccgagactacaagtcccagaagggcgcgcggcgacatcgccgggcccgccccccgcgcacgcgcggcgccgtgacgctaaggccgcgagcgagcgcgggtggctgcggcggctgcggccggcggggcggggcggggccacctggcagtggctgcctttagggcggagccggctcccgctctcctcagtctgcggtgggctagcggacggtccggcttccggcggccgtttctgtctcttgctggctgtctcgctgagtcgcggccgccttctcatcgctcctggaaggtcccgagcgcgacaccatgtcggagcccgggggcggcggcggcgaggacggctcggccggattggaagtgtcggccgtgcagaatgtggcggacgtgtcggtgctgcagaagcacctgcgcaagctggtgccgctgctgctggaggacggcggcgaggcgccggccgcgctggaggcggcgctggaggagaagagcgccctggagcagatgcgcaagttcctttcggacccgcaggtccacacggtgctggtggagcgctccacgctcaaagaggacgtcggtgatgaaggagaagaagaaaaagaattcatttcctataacatcaacatagacattcattatggggttaaatccaatagcttggcattcattaaacgtactcccgtgattgatgcagataaacccgtgtcttctcagctccgggtccttacactcagtgaagactcgccctacgaaactttgcattctttcattagcaatgcagtggctcctttttttaagtcctacattagagagtctggcaaggcagacagggatggtgataaaatggctccttcagttgaaaagaagattgcagaactcgaaatgggactccttcacttgcagcaaaatattgaaattccggagatcagcctgccgattcatccaatgatcacaaatgttgcaaaacagtgttatgagcgtggagaaaagccaaaagttacagactttggtgataaggttgaagacccaacatttcttaatcagttacaatctggagttaaccgctggatccgagaaattcaaaaagtgaccaaactggatcgagatcctgcatcaggaactgccttacaggaaattagtttttggctaaacttggaacgtgcgttataccgcatccaggagaaacgggagagcccggaagttctcctgactctggatatcttgaaacatggcaagcgcttccatgccaccgtcagttttgacactgacacaggtctaaaacaggctttggaaactgtgaatgactacaatcctctgatgaaagatttccctctgaatgatttgctgtctgccacggagctggacaaaataagacaggcgcttgttgccattttcacacatttgagaaagatccgaaacacaaaatatcctattcagagggcactgcgtttggtggaggcaatttcaagagacttgagttctcaattactcaaagtattgggcactaggaaattgatgcatgttgcttatgaagaatttgaaaaagttatggtagcatgctttgaagtttttcagacttgggatgatgagtatgagaaacttcaggtattgttgagagacatcgtcaaaagaaaaagggaagaaaatctgaagatggtgtggcgtatcaaccctgcccacaggaagctgcaggcccgccttgaccagatgagaaaatttagacgccagcatgaacagctaagagctgttatcgtcagggtcctgaggccacaggtcacggcagttgcacaacagaatcaaggagaggtccctgaaccccaagatatgaaagtggctgaggttctctttgatgctgcagatgcaaatgccattgaggaagtaaaccttgcttatgagaacgtcaaggaagtggatggactggatgtttccaaagagggcacggaagcctgggaggctgctatgaagaggtacgatgagaggatcgacagagtggagacccggatcaccgctcgccttcgggatcagcttggcacagccaagaatgccaacgagatgtttaggattttctccaggtttaatgcactgtttgtcaggcctcacatccgtggggccattcgtgactaccagacccagctgatccagcgcgtgaaagatgacattgagtctcttcacgacaagttcaaggtccagtacccacagagtcaggcttgtaagatgagtcacgttcgtgacttgccccctgtgtcagggtctatcatctgggctaaacagatcgacaggcagctgacggcctacatgaagcgggtggaagatgtccttggcaagggctgggagaatcacgtggaggggcagaagctgaagcaggatggagacagcttccgcatgaagctcaacacgcaggagatctttgatgactgggcaaggaaggtgcagcagcgcaacctcggtgtctcggggcgcattttcaccatcgaaagtactcgggttcggggccgaactggaaatgtgcttaagctgaaagttaactttcttcctgagattatcacactatccaaagaagtccggaacctcaaatggcttggtttccgcgtcccactggcgattgtgaacaaagcccatcaagcaaaccagctttacccgtttgccatctcactgatcgagagcgttcgtacctatgaacggacctgcgagaaggtggaggagcggaacaccatttcccttttggtggctggcttgaaaaaggaagtgcaggccctgatcgcagaaggcattgcgttggtgtgggagtcctacaaacttgacccatatgtacagcgcttagcagagactgtcttcaacttccaagaaaaggtggatgatctgctgatcattgaagaaaaaatagacctagaagtccgttccttggaaacttgtatgtatgaccataagacattctcggaaatcttgaacagagtccagaaagcagtggatgacttaaatctgcactcctattccaatttgcccatctgggtcaacaagcttgacatggagattgaaagaatattgggcgtccgtctgcaagctggcctgagagcttggacgcaggttcttcttggacaagctgaagataaagcagaagttgacatggacacagatgctccacaagttagtcacaagcctggtggagagccaaagatcaaaaatgtcgttcatgagctaagaataaccaatcaggtaatctacttgaatccaccaattgaagagtgcagatacaagctgtatcaggaaatgtttgcctggaagatggttgtactgtctctccccaggatccagagtcagaggtaccaggtgggtgtacattacgaattgactgaggaagagaaattctatcggaatgctttaacacggatgcctgatggccctgttgccctggaagagtcgtattctgctgtcatgggcattgtatctgaagttgaacagtatgtcaaggtttggcttcagtatcagtgtttatgggatatgcaagctgaaaacatctataacagacttggagaagatctcaacaaatggcaggctctcctggtccaaataaggaaggccagaggaacctttgacaatgcagaaaccaagaaagagtttggaccagtagttatagattatggcaaggtacaatctaaggtgaacttgaaatatgactcttggcataaggaggttcttagcaaatttgggcagatgctaggatcaaacatgacggaattccattcccagatctcaaagtcccgccaagagttggagcagcactcagtagacacggccagcacctccgatgcagtgaccttcatcacctatgtgcagtctttgaaacggaagatcaagcagtttgagaagcaagttgagctctaccgcaatggccagcgcttactggaaaagcaaaggttccagttcccaccttcctggctttatattgacaacatcgagggagagtggggagccttcaatgacatcatgcggcgaaaggactctgccattcagcagcaggtggcaaacctgcaaatgaagattgtccaggaggatcgggccgtggaaagccgcaccaccgacctgctgactgactgggagaagaccaagcctgtcacgggcaaccttcgcccagaagaggcacttcaggctctcaccatatatgaggggaagtttggtaggctgaaggacgacagagagaagtgtgcaaaggccaaggaggcgctggaattgacagatactgggcttctcagtggcagtgaagagcgcgtgcaggtggccttagaagaattacaggacctcaaaggcgtttggtcagaactttctaaggtttgggagcaaatcgatcagatgaaggagcaaccctgggtttcagtacagcctcgaaagcttcgacaaaatttggatgccctcctgaaccagctgaaaagcttccctgcccggttgcgacagtatgcgtcctatgagtttgttcagaggcttctgaaaggttacatgaagataaatatgctggtgattgaactgaaatccgaagcacttaaagaccgccattggaaacagctcatgaaaaggcttcacgttaattgggttgtttctgagctaacccttggccaaatctgggatgttgacttgcagaaaaatgaagcgattgtcaaggatgtactgcttgtggcacaaggggagatggctttggaagaatttttgaagcagataagagaagtgtggaatacttatgaactagacttggttaattatcagaacaagtgccgcttgatccgtggctgggatgacctcttcaacaaggtcaaagaacacatcaacagcgtctcggccatgaagctctctccgtattacaaggtttttgaagaggatgctctcagctgggaagataagctgaacaggatcatggctctctttgatgtgtggattgatgtgcagaggcggtgggtctacctggaaggtatcttcacaggcagtgcagatatcaagcacctgctgccagtggaaacccagcggtttcagagcatcagcactgagtttttggctctaatgaaaaaagtgtccaagtctccccttgttatggatgttctgaacatccagggagtacagaggtctctggaaagattggcagacctgctaggaaagatccagaaagcattgggagaatatctggaaagagagcggtcatctttccccaggttctattttgtgggtgatgaagatttgcttgaaatcattggaaacagcaagaatgtcgctaaattacagaaacacttcaagaagatgtttgctggagtttcgagcatcatcctgaacgaggataactctgttgttttgggtatttcatctcgggaaggagaggaggttatgtttaaaactcctgtgtcaattactgaacatcccaaaatcaatgagtggctcacattggtagaaaaggagatgagagtcaccctggccaaactgcttgctgagtctgttacggaagttgagatttttggtaaagcaacttcaattgacccaaatacctacatcacttggattgataaataccaggcccagcttgtggttttgtcagcccagatagcctggtctgagaacgtggagaccgcactgagcagcatgggcggaggtggagatgccgcgcccttgcactctgtgctgagcaatgtggaggtcaccctcaatgtgttagcagactctgtcctcatggagcagcccccactccgaaggcggaagctagaacacttgattacagagttggttcaccagagagatgttacaaggtccttgatcaaaagcaagattgacaacgccaaatcttttgaatggctcagccagatgcgattttactttgaccctaagcaaactgatgtgttacagcagttgtcaattcaaatggcaaatgccaaatttaactatggctttgagtacctgggtgttcaggacaaactggtccagacccccctcactgaccgctgctatttgacaatgacacaagccttggaggccaggctggggggttccccatttggacctgctggaactgggaaaacagagtctgtcaaagctcttggccatcagcttggacggtttgttttagttttcaactgtgatgaaacctttgatttccaggcaatgggccggatctttgtgggcctttgccaggtgggtgcctggggctgctttgacgagttcaaccgcctggaggagcggatgctctcggctgtgtcccagcaggtgcagtgcatacaggaagcactgcgtgaacattccaaccccaactacgacaagacctctgcccccattacttgtgagctgctgaacaaacaagtcaaggtgagcccggacatggccatcttcatcaccatgaaccctggctacgcgggccggtctaaccttcctgacaacttgaagaagctgttccggagcttggccatgaccaagcccgaccggcagttaatcgcccaggtcatgctgtactcacagggtttccgcactgctgaagtgcttgccaacaaaatcgtcccgttttttaaactatgcgatgagcagctctcttcccaaagccattatgacttcggtcttcgggctttgaagagtgtgctggtgagtgcaggcaatgtgaagagagagagaatccagaagataaagagggagaaagaggaacgaggggaagcagttgatgaaggagaaattgctgaaaatctccctgaacaagagattctgatacagagcgtctgtgagacgatggtgccaaagctggtggcagaggacatcccgctgctcttcagcctcctgtcggacgtgttccctggagtccagtatcacaggggtgagatgactgcccttcgagaggagctgaagaaagtgtgtcaggagatgtatttgacatatggagatggagaagaagttggtggaatgtgggttgaaaaggttctccagctctatcagatcacccagatcaatcatggcctgatgatggtggggccctcgggaagtgggaagagcatggcctggcgtgtcctgctgaaggcattggagagactcgagggtgtggaaggtgtggcccatatcatcgaccccaaggccatcagcaaagaccacctctacggaaccctggaccccaacaccagggaatggacagatgggctcttcacacacgtgctgagaaagatcatcgacagcgtgagaggcgagctgcagaagcgccagtggatcgtcttcgatggcgatgtggatccagagtgggttgagaacttgaactcagtgctggatgacaataagctcctaactttgcccaatggagagcgcctcagtcttccacccaangtgagaataatgtttgaggtacaggacttgaaatacgcgaccttggccacagtgtcgcgctgcggcatggtctggttcagtgaggatgtgctgagcaccgacatgatcttcaacaacttcctggccaggctgcgcagcatcccgctggatgaaggggaggatgaggcacagcggcggcgtaagggcaaagaggatgagggggaggaggccgcttcccccatgctgcagatccaaagagatgcagctacgatcatgcaaccgtacttcacgtccaacggcctggtcaccaaggcgctagagcacgccttccagctggagcacatcatggacctaacacgcctgcgctgcctgggctcgctcttctccatgctgcaccaggcctgccgcaacgtggcgcagtataacgccaaccatcccgacttccccatgcagatcgagcagctggagcgctacattcaggtcagggggcatcaggggcttcacagagctcaccactgcgccagaccacaggtctgaggacctctgaaatgctgcacctgtggggatgtgcgctctctcctaggcgaggcagagccttcgttgaggggctaggaaaggtgcagtgggtgtctgtgatgcaagaagactgggaaccactgtctttaggttaactttgctgtaagtgtctttcttttgttgttgaaattttataaaaatcaaagtttaattccctttttaatagcgatatctggtttatgccatactctggtccctgtctggagacagccggctaaaaatgagagcagagctgggtgaatacatcagaagaatcacgaccgtgcctctgcccactgcgcccaacatacccattatcgattatgaggtgtccatcagcggagaatggtctccgtggcaggccaaggtgcctcagattgaagtggagacgcacaaggtggcagcccctgatgtcgtcgtgccaacgctggacacagtccgccacgaagccctcttgtacacttggctggccgaacacaagcccctggtcttgtgtggccctcctgggtctggcaagaccatgacactcttcagcgccctccgggccttgcctgacatggaggtggtgggtctcaacttctccagtgctactactccagagctgcttctgaagacttttgatcactactgcgagtacaggcgcacacctaatggggtggttttggctcctgcccgattataacagtgccctcagtgttccgctgcacgctcatactgttccc

SEQ ID NO: 462059 - DNA, 1669 bp, Homo sapiens
ttcaatgagagaacatttaatgagaggttaaggggcttagaacaacgccgggcacaggctaagcgctcactaaacgttagctctcgccaataacatcactgattcactataaagtttctctggctgtgtgctattcgctgcgtccacagcagtgaagaagacagacgcagcccctgaccaacctcgccaagcccgggcgccgagccaggacgttgagccaagtccccatctcctaggactcgcagtgcggaggctgcgggccccgaccagcgccgagactacaagtcccagaagggcgcgcggcgacatcgccgggcccgccccccgcgcacgcgcggcgccgtgacgctaaggccgcgagcgagcgcgggtggctgcggcggctgcggccggcggggcggggcggggccacctggcagtggctgcctttagggcggagccggctcccgctctcctcagtctgcggtgggctagcggacggtccggcttccggcggccgtttctgtctcttgctggctgtctcgctgagtcgcggccgccttctcatcgctcctggaaggtcccgagcgcgacaccatgtcggagcccgggggcggcggcggcgaggacggctcggccggattggaagtgtcggccgtgcagaatgtggcggacgtgtcggtgctgcagaagcacctgcgcaagctggtgccgctgctgctggaggacggcggcgaggcgccggccgcgctggaggcggcgctggaggagaagagcgccctggagcagatgcgcaagttcctttcggacccgcaggtccacacggtgctggtggagcgctccacgctcaaagaggacgtcggtgatgaaggagaagaagaaaaagaattcatttcctataacatcaacatagacattcattatggggttaaatccaatagcttggcattcattaaacgtactcccgtgattgatgcagataaacccgtgtcttctcagctccgggtccttacactcagtgaagactcgccctacgaaactttgcattctttcattagcaatgcagtggctcctttttttaagtcctacattagagagtctggcaaggcagacagggatggtgataaaatggctccttcagttgaaaagaagattgcagaactcgaaatgggactccttcacttgcagcaaaatattgaaattccggagatcagcctgccgattcatccaatgatcacaaatgttgcaaaacagtgttatgagcgtggagaaaagccaaaagttacagactttggtgataaggttgaagacccaacatttcttaatcagttacaatctggagttaaccgctggatccgagaaattcaaaaagtgaccaaactggatcgagatcctgcatcaggaactgccttacaggaaattagtttttggctaaacttggaacgtgcgttataccgcatccaggagaaacgggagagcccggaagttctcctgactctggatatcttgaaacatggcaagcgcttccatgccaccgtcagttttgacactgacacaggtctaaaacaggctttggaaactgtgaatgactacaatcctctgatgaaagatttccctctgaatgatttgctgtctgccacggagctggacagcaaatcattcagagggaaatctttccctcatgccgaat

SEQ ID NO: 462060 - DNA, 448 bp, Homo sapiens
tggtcactctaagatccacacgtaacgcttcattcacgccttccctgacgcagctgcgtggtagcagacacacgagagaggcagtgtgtagtaaccttacctgtctacctgaacttcacccgtgcagacctcatcttcaccgtggacttcgaaattgctacaaaggaggatcctcgcagcttctacgagcggggtgtcgcagtcttgtgcacagagtaaacttttctagctgcccctttctgtaatagtgaaagttggtatttaacatttattcatttttaaaatatttggaaggtctgagcttgtgaaaagaaagtggttggtctgaggttggaggaagctgaatggaatctgacggttgggagtggtggaaattggaaggataccaggaggtatttgggaaggccaatggcgtggctcctttgaggaaataaaacactaagcatga

SEQ ID NO: 462061 - DNA, 455 bp, Homo sapiens
cagcaacatagcatttgggtgaagataaagttacaaagccctgaccatcaagttccacccgtgtggaatgcaggatgtggaaagctacgatccagttttgaacccggtgctgaaccgtgaagtgcggcgaacaggggggagagtgctgatcactctcggggaccaggacatagacctgtcgccatcgtttgtcatcttcctgtccacccgggatccaactgtaaggaatgggacccttccccagggaaatctggcaggatgtggttttgaaactggattaagacagactgttctgttacctattttggcaggtcgagttcccaccagatctctgttcccgggttacttttgtaaacttcacagttacccgtagcagtttacaaagccagtgtctaaatgaagtacttaaagcagaaagacctgatgtggacgagaaacgatctgatcttcttaaa

SEQ ID NO: 462062 - DNA, 2359 bp, Homo sapiens
atccctagccttagtgccatcccccaggctttttccaggatgggattttatgtgattgtttcgaataggccaccttctctcttctaggcactgtcactgggcttctccccaccccatagatccacagcccccaggtccggtccgccctctaggagaggtgctgtccggtgaggcataaaatcccgggattctggctggaggcagctcctgagactgccggcatgaaggggagccgtgccctcctgctggtggccctcaccctgttctgcatctgccggatggccacaggggaggacaacgatgagtttttcatggacttcctgcaaacactactggtggggaccccagaggagctctatgaggggaccttgggcaagtacaatgtcaacgaagatgccaaggcagcaatgactgaactcaagtcctgcagagatggcctgcagccaatgcacaaggcggagctggtcaagctgctggtgcaagtgctgggcagtcaggacggtgcctaagtggacctcagacatggctcagccataggacctgccacacaagcagccgtggacacaacgcccactaccacctcccacatggaaatgtatcctcaaaccgtttaatcaataaagcctcttccgcagctcaggctcctgtctctgcccccacagaggggcacacaaatggggacatcaggaacacactcgaggccacagccacacacacagacccacatacagaggatcccactcaaggagcacacgtgcaaaagtccccacagagggacacacaaatggggacatcaggaacacagggccacagccacacacacagacccacatacagaggatcctactcaaggagcacacgtgcgaaagtcccccacagagggacacacaaatggggacatcaggaacacagggccacagccacacacacagacccacatacagaggatcccactcaaggagcacacgtgcgaaagtccccacagaggggcacacaagtggggacatcaggaacacagggccacagccacacacacagacccacacacagaggatcccactcaaggagcacacgtgcgaaagtccccacagaggggcacacaaatggggacatcaggaacacagggccacagccacacacacagacccacatacagaggatcccactcaagaagcacaagtgcgaaagtccccacagaggggcacacaaatggggacatcaggaacacactcggggccacagccacacacacagacccacatacagaggatcccactcaaggagcacacgtgcaaaagtccccacagaggggcacacaagtggggacatcaggaacacagggccacagccacacacacagacccacatacagaggatcccactcaaggaacacacgtgtgaaagtccccacagaggtacacacagggtccacacaggagcaggcacaccacaggcaagacccaaaatggaaatccaggcagacgccacgcaggcaggtggacagagcacagagccagacaacactgcgtgacaggggagagcagtggaaccagaattcaggttacggtcacggtgacagccggaaaggaaattccagcatggatgccgaccgcaccaacccaaaactatgacccgagtcctaacccaccctaacccggccaaaaccgaacacccaaccctgactaaatgcgaaacgctgacccggacctggacctggacctagtacgaacccaagcctgaaccctaacccctaacccctaatcctgatcctagaccctaaccccgaccctaaaccctgaccctgaccctgaagggggacatagaggaaagagattgagaggtttgcatattcaatgacatacattttcttcgttagtcgatgttagaaagcaaaggcttttatctcgagaaatttctgacctaaagaatgatgtacaataaactgtattcaacaattgatcaacattttctaacaaggtggaatgaaaatataaagtgtggggattgctactagtcctaatacactaatctgtggttaggaaggtttatttttttccctccaaacctaagcagtacatgtcttaaattaccttccaaaacgtaagactcttggagcctcagacgggctggcgttagtcaatactccacggctgtttgttggatgagtggacaacagcatggtcgacaggtcctggtgcaaaatgtcttgggctgcctcagtttgaatcctgcttctgccatcgaccagccgtgtgattctgtaaaagtattttaacctctctgggccttagtttccccatctgtaacttgagggcctacctcaaatgggtccctggtgaagagtaacaagactatatcc

SEQ ID NO: 462063 - DNA, 2471 bp, Homo sapiens
gctggcaggagaggcccctctgatggccgacatcaccacctgggctatcatcacccctcagctgtgcagtgggaccctcctgcctgctgacgtggctgctggcgcccgtgccagcgtgaaccccaaacctgtccgtgtttctgcgggcgacgccaccggggacatccctagcttgaccccctttcctggcagtgacactgtcgacatttcctcattctctttccctgtgtctgcccctgtctccacgtggatgccctggataagattcacccgtttaagaaacaccttgcatgccgcctcccgccgcctcgcagtgggcgtgactcgaggtggacgcgcatttacgacaccatcgcccctaggatcggactgcgctgcggagggttctgggaaaggtagtcccacacctcgagtcgactacttccgtttccggtgggcgcgtcaccttgattgcttcttaggcagtggtgaggcgtcttagagacgtgcatctccatgcggttgtactgtcaggccatgggaattaggatcggctctataggaccagtgtgaagggacaacgtgcggcggagggtcgaagcccacggatttccatgagctcggcctggcttccttcttggaattgttcgtttctcggagataattgtataaaagaaggagaaataaccccacatctcttgacactagagctccaggtcccctgaccatgggaagcagtcacgctctggacagtaaaggtggagacaggaacttgtcagagcttggagagtttccggaatgaaaaaggcctggatcttctgcgtctccagcttaggaaaaccagagaataaatacagttgctgctgctcgcagaaaacctagcagaagagaccatggagactttgacctcaaggcatgagaaaagagctcttcattctcaagcctcagccatttcccaagatagggaggagaagatcatgtctcaggagccattgagcttcaaggacgtggctgtggtcttcactgaggaggagctagagctgctggactctacccagaggcagctgtaccaagatgtgatgcaggagaatttcaggaacctactctcagtgggtgagaggaatcctctgggagacaagaatggaaaggatacggagtatattcaagatgaagaattaaggttcttttcacacaaagagctctcctcatgcaaaatctgggaagaggtggcaggtgaattacctgggagccaagactgtagagtaaatctgcaaggaaaagacttccagttctcagaagatgctgctccccatcaagggtgggaaggagcatctacgccgtgttttccaattgagaattccctggacagtctacaaggggatgggcttatcggtctagaaaatcaacagtttccagcctggagagctataagaccaatccccattcaaggatcttgggcaaaagcgtttgtgaaccagttaggggatgttcaagaaagatgtaaaaatctcgacacagaagacacagtatataaatgtaactgggatgatgacagcttttgctggatatcttgtcatgttgatcacagattccctgaaatagacaagccgtgtggttgcaataaatgcagaaaagactgcattaaaaactctgtacttcatcgcattaaccctggagagaatggcttgaaaagtaacgaatacagaaatggcttcagggacgatgcagaccttcccccgcatccaagagtacctttgaaagagaaactctgtcaatatgatgagtttagtgagggcttgaggcacagtgcccatcttaacagacatcaaagagttcccacaggagagaaatctgttaagagtcttgagcgtggtcggggcgtcagacagaacacgcacatacgtaaccaccccagagcccctgtgggagacatgccctatagatgtgatgtctgtggaaaggggttcaggtataaatcggttcttcttattcatcaaggggtgcacacaggaaggagaccctataaatgtgaggagtgtgggaaggcatttggtcgaagttcaaacctgcttgtccatcagagggtccacactggagagaaaccatataaatgcagcgagtgtgggaagggcttcagttacagctcagtgcttcaagtccatcagaggctgcacacaggggagaagccctacacctgcagcgagtgtggcaaaggcttctgtgccaagtctgcactgcacaaacaccagcacattcaccctggagaaaagccctacagctgtggcgagtgtggaaagggattcagctgcagctcccacctcagcagtcatcagaagacacacaccggcgagaggccctaccagtgtgacaagtgtggcaaaggtttcagtcacaactcgtaccttcaagctcaccagagagttcacatggggcagcatctgtacaaatgtaacgtgtgtggtaagagtttcagttacagctcagggcttctc

SEQ ID NO: 462064 - DNA, 3489 bp, Homo sapiens
tcacttctcacaatgtcccttgagtacctgaccctatacccgctggttattctaggttatattagcacacaagccatgccccctcttttctctttgggataccaccagtgccgctggaactatgaagatgagcaggatgtaaaagcagtggatgcagggtttgatgagcatgacattccttatgatgccatgtggctggacatagagcacactgagggcaagaggtacttcacctgggacaaaaacagattcccaaaccccaagaggatgcaagagctgctcaggagcaaaaagcgtaagcttgtggtcatcagtgatccccacatcaagattgatcctgactactcagtatatgtgaaggccaaagatcagggcttctttgtgaagaatcaggaaggggaagactttgaaggggtgtgttggccaggtctctcctcttacctggatttcaccaatcccaaggtcagagagtggtattcaagtctttttgctttccctgtttatcagggatctacggacatcctcttcctttggaatgacatgaatgagccttctgtctttagagggccagagcaaaccatgcagaagaatgccattcatcatggcaattgggagcacagagagctccacaacatctacggtttttatcatcaaatggctactgcagaaggactgataaaacgatctaaagggaaggagagaccctttgttcttacacgttctttctttgctggatcacaaaagtatggtgccgtgtggacaggcgacaacacagcagaatggagcaacttgaaaatttctatcccaatgttactcactctcagcattactgggatctctttttgcggagctgacataggcgggttcattgggaatccagagacagagctgctagtgcgttggtaccaggctggagcctaccagcccttcttccgtggccatgccaccatgaacaccaagcgacgagagccctggctctttggggaggaacacacccgactcatccgagaagccatcagagagcgctatggcctcctgccatattggtattctctgttctaccatgcacacgtggcttcccaacctgtcatgaggcctctgtgggtagagttccctgatgaactaaagacttttgatatggaagatgaatacatgctggggagtgcattattggttcatccagtcacagaaccaaaagccaccacagttgatgtgtttcttccaggatcaaatgaggttcccctgccaagtagaaacctgaggaaaaggttaaatgcaacaactgctgagtaaatgccctgccagatatttttgctgagaatttctcaagttgattccagcaaagtggtgggttcccattaagaggaactggctccctttccgacttagtcacagagttttattcgtgatctatcatcattccaaacacgtcgttgtctggtatgactataagacatttgctcattgggaaggagggtgtactgtaaagatcccagtagccttggacactattccagtgtttcagcgaggtggaagtgtgataccaataaagacaactgtaggaaaatccacaggctggatgactgaatcctcctatggactccgggttgctctaagcactaagggttcttcagtgggtgagttatatcttgatgatggccattcattccaatacctccaccagaagcaatttttgcacaggaagttttcattctgttccagtgttctgatcaatagttttgctgaccagaggggtcattatcccagcaagtgtgtggtggagaagatcttggtcttaggcttcaggaaggagccatcttctgtgactacccactcatctgatggtaaagatcagcctgtggcttttacgtattgtgccaaaacatccatcctgagcctggagaagctctcactcaacattgccactgactgggaggtccgcatcatatgacaaagaactgcccctggtgatgtgagcagggacctgcctgcccctttcaacctttcccctcaccttttttgagatttttgctgcaatctgtttgccttccctgaatcaaaataatctttcattcgtcaccattatactaatgaacaatagatttcatgtttcaaaatttcagattttacatgttaagatgtactaacaatattccttgtatcaaacatctccttttctccctgatacatagccctgagacatttatagcgttcaggagtcttctattgcttccattccttcagcagggctgcgtgggtctgttttaacgtgggccaagcctacctgggcagcccatttgccagggcttgcctcaggccatgcagcattggcgctctggctgcagcagctgagttgctcaaggccagtgtccaagtggacagcagcctctggtactccccccagttatcttccacccacatggactgggcagagcagccctcttctgtgtgcactgcatacgctgcagccgtgggagttattctcccctagagatcgacttggcagcacgaaggattcttttctctttcatgcttctcaggctcaatagtttctaattaatcttaaaatccatgtcttttacattgtttttttaattaagtgctgtttactaaccaaataatatttataacatgagtaagctataattaataacaatgaaataaatacccatgtacccaccactggacttcagaagtagaactcatgactgggactaggatgaggcaagggagaccctggccttgggcacaaaatgtaagggatgccaaaaaaatacagtaatcaaagtaagtaatatttcaatccaatatttttaaaaatcagaattaatgcaaaaaaaaccatgatgaacaaaatattaaaatttaaaataaagacaggattagtattactgagttttccttttgtcccaggctctaatatggcttggcatggggcagaacattacaacataccagtcgtgtcatggtgcccaaggctccacagacctcagtggctccctgctgcctgccacagcatctgttttagcagcctcgactcctcagcactcctcagcacacacctcttcttatcaggcttcctccacttagcaacttgctaacggccacctctgtgccttctgatccctgggcgccaatatcctcctgcccttaccatccttccaggcccaacttaaatcccactttcccatgaagcctaactgcgtgaacacccctacccccatacccattagcagtgattttgcccttccccgtaatgctgtcccacttataactgtgctctacttagcattctcagggatcataccttaatgttttcagtatgtctgcgttctcctactagattgtatgtccctcaagagcatgttctgtttctcttctgtctgacagagcactattatacctgactttcagtaactgttagctgtgattagttagctggtggatttaattgattaaaaaattacgattgaatgtatttccatctga

SEQ ID NO: 462065 - DNA, 243 bp, Homo sapiens
tacattcaatcgtaattttttaatcaattaaatccaccagctaactaatcacagctaacagttactgaaagtcagtatgtctgcgttctcctactagattgtatgtccctcaagagcatgttctgtttctcttctgtctgacagagcactattatacctgactttcagtaactgttagctgtgattagttagctggtggatttaattgattaaaaaattacgattgaatgtatttccatctga

SEQ ID NO: 462066 - DNA, 372 bp, Homo sapiens
gaactggctccctttccgacttagtcacagagttttattcgtgatctatcatcattccaaacacgtcgttgtgagtgtgtattatgttccttcagcactatttcctggactgttctgtgattgtttctcttgcttcacaaacctgccgtataaaggatgtggtaatccctggaggtgaacttgcaaaatagactccagggctgccagaaagtgtactgagctagaagaaagaaaaagatgtttgctttcattctgcttctgatgatatcttaagaatttatcccatcaaattactttagagaccttattggtacttcagcaactaaacccccttgatagataacaaccttatctttgaattgtgctttgttt

SEQ ID NO: 462067 - DNA, 324 bp, Homo sapiens
tgtgataccaataaagacaactgtaggaaaatccacaggctggatgactgaatcctcctatggactccgggttgctctaagcactaaggtatttggtaaatctgttactcattttgtttctactctttctttacagtgatagccttttgagtgtgtgacactacgtaaaagtggtgagctcctgacatttatctagaaatcaaggtttgaatcatttctgaatcattgttcagcttgtctgccttccttggaattgttcttaagggaacctttgagatctaggaatgacagaaatgttcctcttgggcactgtgagtgttggtg

SEQ ID NO: 462068 - DNA, 1662 bp, Homo sapiens
tcacttctcacaatgtcccttgagtacctgaccctatacccgctggttattctaggttatattagcacacaagccatgccccctcttttctctttgggataccaccagtgccgctggaactatgaagatgagcaggatgtaaaagcagtggatgcagggtttgatgagcatgacattccttatgatgccatgtggctggacatagagcacactgagggcaagaggtacttcacctgggacaaaaacagattcccaaaccccaagaggatgcaagagctgctcaggagcaaaaagcgtaagcttgtggtcatcagtgatccccacatcaagattgatcctgactactcagtatatgtgaaggccaaagatcagggcttctttgtgaagaatcaggaaggggaagactttgaaggggtgtgttggccaggtctctcctcttacctggatttcaccaatcccaaggtcagagagtggtattcaagtctttttgctttccctgtttatcagggatctacggacatcctcttcctttggaatgacatgaatgagccttctgtctttagagggccagagcaaaccatgcagaagaatgccattcatcatggcaattgggagcacagagagctccacaacatctacggtttttatcatcaaatggctactgcagaaggactgataaaacgatctaaagggaaggagagaccctttgttcttacacgttctttctttgctggatcacaaaagtatggtgccgtgtggacaggcgacaacacagcagaatggagcaacttgaaaatttctatcccaatgttactcactctcagcattactgggatctctttttgcggagctgacataggcgggttcattgggaatccagagacagagctgctagtgcgttggtaccaggctggagcctaccagcccttcttccgtggccatgccaccatgaacaccaagcgacgagagccctggctctttggggaggaacacacccgactcatccgagaagccatcagagagcgctatggcctcctgccatattggtattctctgttctaccatgcacacgtggcttcccaacctgtcatgaggcctctgtgggtagagttccctgatgaactaaagacttttgatatggaagatgaatacatgctggggagtgcattattggttcatccagtcacagaaccaaaagccaccacagttgatgtgtttcttccaggatcaaatgaggtctggtatgactataagacatttgctcattgggaaggagggtgtactgtaaagatcccagtagccttggacactattccagtgtttcagcgaggtggaagtgtgataccaataaagacaactgtaggaaaatccacaggctggatgactgaatcctcctatggactccgggttgctctaagcactaagggttcttcagtgggtgagttatatcttgatgatggccattcattccaatacctccaccagaagcaatttttgcacaggaagttttcattctgttccagtgttctgatcaatagttttgctgaccagaggggtcattatcccagcaagtgtgtggtggagaagatcttggtcttaggcttcaggaaggagccatcttctgtgactacccactcatctggtgagaaagcagtccattct

SEQ ID NO: 462069 - DNA, 1744 bp, Homo sapiens
cattatatcattccagggatatcactttggaagcgccttctcagcgcttcgaggttgggctgagccccacgtgcggcattccgtccgcgtcgatggccctatttgtggtgccctgtccttgtcctccaagccgggggccgtttctccttcagagcccgtctcactcagtccctggtttcactggtatcagttctggcttctctctagtcttagaagccagccaccctccctagactgcaccatcccttgatgggagtttgcctttctttgcctctgaggatatttaaatgtggccaggctgggccgaaatacctctgaaggaactgtgcattcgttcataagctttgtagcgtcacaaaactctgaccagtatttttgattgaattctgaatatttctgagcttttgtgtgattccgtggttacggcttccagtgtcattcagtggacgtgttccagcagcaactcacacggactcttaacgtacacgccactcacatgcactcgtaacgtgcacaccactcacagactcgtaacgtgcacgccactcacagactcgtaacgtgcacgccactcacagactcgtaacgtgcacgccactcacacggactcgtaacgtgcacgccactcacagactcgtaacatgcacgccagtcacagactcgtaacgtgcacgccagtcacagactcgtaacgtgcacgccactcacacggactcgtaacgtgcacgccactcacacggactcgtaacgtgcacgccactcacagggactcgtaacgtgcacgccactcacacggactcttaacgtgcacgccactcacagactcgtaacgtacacgccactcacagactcgtaacgtacacgccactcacacagactcgtaacgtacacgccactcacacggactcttaacgtgcacggcactcacagggactcttaacgtacacgccactcacactgactcgtaaggtgcccgccgctcgcactggctcgtaaggtgcccgccgctcacacggactcgtcacatgcacacggcactgtgcgctcggcagtttttactaaacagtgtggcgcaaaaatttgccgtgtcgctatggtctttgggccgaacacgagtggcttccttgggcccaagttggtttctgcttatgcagacagtcacgcggcccaacacggcccgtcccggcacacctcgtcttaggaggagccgttcctcggggaagcccctgagtgctcctcagaagccagccctggggaaggggggagctggggtgcagacggcgggggctgcagcctcggggaaggggggagctggggtgcagacggcgggggctgcagctcgaggtaaggaaggtgtgctacagcagcagacggcaggggctgcagcatggggaagggggttgtgctggggtgcagacggcgggggctgcacctggggagcggggagggctggggtgcagacggcgggggctgcagtcagctgtccgtctcttcgagtctccggtgcggccagcctcaggttccccccggcggcactggccctgcgctcactgtggccgggcgaggacccgtcttgcatcggtggccacagcaagtccgccgtgtggtcactgcactgcctgttccgtgtttgactcccagcagctggggaaggtcttctgtgtctttgggagaccagcagtgagtgattgctccgatgcgccatgaccctgtgctaagttcttatttatttatttatttgttt

SEQ ID NO: 462070 - DNA, 2588 bp, Homo sapiens
gcagggaaaatcatgaatcagtgcctggaaggtgaccctgtggcctgtgaggatgttgctgtgaacttcacccaggaggagtgggctttgctggatatttcgcagaggaaactctacagggaagtgatgctggaaactttcaggaacctgacctctatagggaaaaagtggaaagaccagaacattgaatatgagtaccaaaaccccaggagaaacttcaggagtctcatagaagggaatgtcaatgaaattaaagaagacagtcattgtggagaaacttttacccaggttccagatgacaggctgaacttccaggagaagaaagcttctcctgaagcaaaatcatgtgataactttgtatgtggagaagttggcataggtaactcatcttttaatatgaacatcagaggtgacattgggcacaaggcatacgagtatcaggactatgcaccaaagccatataagtgtcaacaacctaagaaagccttcagatatcacccctcctttagaacacaagaaaggaatcacaccggagagaaaccctatgcttgtaaagaatgtggaaaaacctttatttcccattcaggcattcgaagacgcatggtaatgcacagtggggatggaccttataaatattatatcttatccatgaaagaactcacactggagagaaaccgtatgaatgtaaacaatgtgttaaatcctttagttattctgctacccatcgaatacatgaaagaactcacactggagaaaagccttatgaatgtcagcaatgtgggaaagcattccatagttccagttcttttcaagcacataaaagaacccacactgggggaaagccatatgaatgtaaacaatgtggcaaatccttcagttggtgtcattcctttcaaatacatgaaagaactcacactggggagaagccctgtgaatgtagcaaatgtaataaagcattccgtagttacagatcctatcttagacataaaaggagtcacacgggagagaagccttatcaatgtaaggaatgtagaaaagcattcacgtatcccagttcccttcgtagacatgaaaggacccactctgcgaaaaaaccttatgaatgtaagcagtgtgggaaagcattatcttataagttttcaaacacacctaagaatgcgctctggagaaagaccttataaatttcctttcaatatcatgaaaggactcacactggagagaaaccctatgagtgtaagcaatgtgggaaagccttcagatgtgccccacaccttcgaaggcatggtaggactcactggagagaaaccctatgagtgtaaggaatgtgggaaagccttcagatctgcctcacaccttcaaattcatgaaaggacacaaacacacataagaatacactctggagaaagaccttataaatgtaagacatgtgggaaaggcttttattctcccaagtcatttcaaagacatgaaaaaactcacactgcagagaaaccctatgaatgcaagcaatgtggtaaagccttcagtagttccagttcctttccgtaccatgaaaggactcacactggagagaaaccctatgagtgtaagcaatgtgggaaagccttcagatctgcctcaatccttcaaatgcatgctgggactcaccctgaagagaagccctacgagtgtaagcaatgtgggaaagccttcagatctgccccacaccttcgaatccatggtagaactcacactggagagaaaccctatgagtgtaaggaatgtgggaaagccttcagatctgccaagaaccttcgaattcatgaaaggacacaaacacacgtaagaatgcactctgtagaaagaccttataaatgtaagatatgtgggaaaggcttttattctgccaagtcatttcaaatacatgaaaaatcttacactggagggaaaccctatgagtgtaagcaatgtggcctccagctgcccagaacagctgcagagagtgtggattctgagaagctgcagggccctggaaagcaggagacccacgtgcagcttttgtctctctattgcctgcgccgtgtcctggactgctcacgggagttctgcaggagacgccggaatatctggaagctgaaaaatgcttgtgccctctgtctcttgccttggcacctgggtggcttgctgcccacaaccctgtgtctaaaaatacaaaaatcagctgcgcatggtggtgggtaccagtaatcccagctactccggaggctgaggcaggaggatcgcttgaacccgggagatgaaggttacagtgttatgaaagaccttggcggaggaaaacaaccccaggaagcctcgagaaataaatggaaagaccagaatattgaagatcactacagaaatctaagggtcaggcatggtggctcacacctgtaatcccagcactttgggaagcagaggcagttggatcacttgaacctgggaggcgttctggagatcaggagttcgagaccagcctgaccaaaatggagaaaccctgtctctactaaaaatacaaaacttagccaggcatggtggcctgtgcctgtaatctcagctaatcaggaagctga

SEQ ID NO: 462071 - DNA, 919 bp, Homo sapiens
gaaagagacaattgtctacacgggcagtgtagaacgggcacccggtgagtgctcagggatgaccctcctcagcaggtgcccagaggccaacatcgcccaccccgtagccactgtccccaagtcagcctgcagggaagagagcagctcccctggggctgaggctgagtgcaaatctgctggccctgctctacagcacgcagggtctctgccagtgcaccccatctgctgcttcctgggagtggtggctacttcctcaaaaggagggtggatctgctctcctgtgcactccccctacccccgagggacttgtggagccctggccacatcctcccagggggctgcggaggaggtcgggtcactcttgatcccagttcccagtgaaaactggaggttgccatcacctaaccacacatgcaataaagtcttctgcctgctgcttacagcccccgagaaccttctccgagagaataaaacctttgactgctgctcttcctgagtggattttgtttgtgtcttctgatgaactgtgatgtcccgtctatcattttcccaggctcaaggatccaccaaaagttgacgcctcttttggggaggctctgcagtgccttcttctcaccaggctccccgggaagcttgtgaacttggcttgcaccctaagcagccagagaccagtttcatggaagacttttccacggacccgggagaaggggaaaggatgatgcggagatgattcaagcccattacatttattgtgtactttatttctattattatttcactgtaatatataatgaaataattataccattcaccataatgtagaataagtaggaacactgagcttgttttcctgcaactagatggtcccatctgggggtgatgggagacagtgacagatcatcaggcattagatttcata

SEQ ID NO: 462072 - DNA, 930 bp, Homo sapiens
  misc_feature (1)..(1): n is a, c, g, or t
  misc_feature (6)..(9): n is a, c, g, or t
  misc_feature (11)..(11): n is a, c, g, or t
ngccannnnangcccagcagccccacctgtgcagtggttcagcacagtggtagtgttgagcatggcaggggtagcagtcaacgtgtacgtgccatggctgaccaccctggccatgcaccccggggtccccgaaggccctggggtctccgagcccggcccccgggagctgtgtgcctttgtgagcggggcggccgcccacatgctgcgggccctgcagccccggcgcacccggccccccaagaggcggcccaaccacagaaggtttctgcacaaccagatctgcaggcagttcaccaagattgaggctgccacccagcgcctggccctctccatcctgtcccaggaggcacctccccagagaccctcgctccaaaagccacccccaccgcctccatcccccttcctgggagtggcctgtgctgtggcccccactgaggctccccatgccagcgccagcctgagtctcgctgccctggacacctctaccctcgacctctttgacaacattgcgctcaccccagagtgtgcctcaatgccatgggacccctcctctggttctgatgctcccctgccagcgccgggtctgtcccatcgcgacctgggccagctggacctgaggcaggtcccacatttctgcggccccctgccccttccccagcatgccctgggggaagaggctgatctcgtggctcccgactggggttgggtggactgctgggaggtgcctcgtgcctgggattctcaggggatccccgagggttgggggaccagctccccatgaggccaatcacaacccagcccagaacccaggacaagccagaggcccctccacgacggctctacagccctctccaggagcccccaacctgtccactcccttcctggcagcccctgggaaaataaaccaacccagacccccacttcagacca

SEQ ID NO: 462073 - DNA, 966 bp, Homo sapiens
gcggcgcgggagcctctgcagagaacgcgagagatgaagatgggcagacggattcatttagagctgcggaacaggacgccctctgatgtgaaagaacttgtcctggacaacaaaaacctcaagagcttagaccttttcaattgcgaggtaaccaacctgaacgactaccgagaaaatgtgttcaagctcctcctgcaactcacatatcttgacggctatgaccgggacgacaaggaggcccctaacttggatgctgagggctacgtggagggcctggatgaggaggaggaggatgaggatgaggaggagtatgacgaagatgctcaggtagtggaggacgaggaggaggaggaaggtgaagaggaggacgtgagtggagaggaggaggaggatgaaaaaggttataacgatggagaggttgatgatgaggaagatgaagaagagctccgtgaagaagaaaggggtcagaagcgaaaaggagaacctgaagatgagggagaagatgatgactaagtggaataacctattttgaaaaattcctattgtgatttgactgtttttacccatatcccctcccccgctccaatcctgccccctgaaacttatttttttttctgattgtgaaataaacagccatgttgctcacacaaagcctgtttggtggtctcttcacacggacgtgcatgaaatttggtgctgtgacatggatcgggggacctcccttgggagatcaatcccccgtcctcctgctctttgctccgtgagaaagatccacctacgacctcaggtcctcagacctaccagcccaagaaacatctcaccaatttcaaatccgatcttctcggcttagcagctgaagactgacactgcccgatcgcctcggaagccccctagaccatcacggacgccgagctttgggtaactctcacagtggaaggttaagtccgtcccgttcttaatcaatac

SEQ ID NO: 462074 - DNA, 1144 bp, Homo sapiens
gcggcgcgggagcctctgcagagaacgcgagagatgaagatgggcagacggattcatttagagctgcggaacaggacgccctctgatgtgaaagaacttgtcctggacaacaaaaacctcaagagcttagaccttttcaattgcgaggtaaccaacctgaacgactaccgagaaaatgtgttcaagctcctcctgcaactcacatatcttgacggctatgaccgggacgacaaggaggcccctaacttggatgctgagggctacgtggagggcctggatgaggaggaggaggatgaggatgaggaggagtatgacgaagatgctcaggtagtggaggacgaggaggaggaggaaggtgaagaggaggacgtgagtggagaggaggaggaggatgaaaaaggttataacgatggagaggttgatgatgaggaagatgaagaagagctccgtgaagaagaaaggggtcagaagcgaaaaggagaacctgaagatgagggagaagatgatgactaagtggaataacctattttgaaaaattcctattgtgatttgactgtttttacccatatcccctcccccgctccaatcctgccccctgaaacttatttttttttctgattgtgaaataaacagccatgttgctcacacaaagcctgtttggtggtctcttcacacggacgtgcatgaaatttggtgctgtgacatggatcgggggacctcccttgggagatcaatcccccgtcctcctgctctttgctccgtgagaaagatccacctacgacctcaggtcctcagacctaccagcccaagaaacatctcaccaatttcaaatccgatcttctcggcttagcagctgaagactgacactgcccgatcgcctcggaagccccctagaccatcacggacgccgagctttgggtaactctcacagtggaagaatattttcaatccatggatgtggaactcacagatgtggaggacggactatagatacaaactggttagtgcctcacatgctgaacagaacgaatgcaagataacataacttcatagtatgtgagctcttctcagatagtttattaaaaagacatacatagatgctttccttaatatatttaacaaccccaaggctagtctgtcaaat

SEQ ID NO: 462075 - DNA, 2679 bp, Homo sapiens
cggctgtaaccccacagcgcctagcgcagtgcccggcacatagttggtgctccataaacatttgtcaaatggtggaggaacaacgaccactgtgcccccaggaagtcaatgtcatgaacaccccccacccactgcacaaacaggaaaaagcccctgcccacaagaaccccgtctgctttctgcgcagcccggcggcgcacagcagaactacccgaaaaccttcccctacttttcctctcttctcctcggtgacctggttcctctcccagtaccaaatccaggccctcggcacaaagagggttaggcggctgccccaggaggcctgcccagccacattcctgaatgtgggggccgagatctctatcaccctggagcctgcccagccgagcgaaggggacaacgtcacgctggtcgtccatgggctttcgggggaactgctcgcctacagctggtatgcggggcccacactcagcgtgtcatacctggtggccagctacatcgtgagcacaggcgatgagactcctggcccggcccacacggggcgggaggctgtgcgccccgatggcagcctggacatccagggcatcctgccccggcactcaggcacctacatcctgcagaccttcaacaggcagttgcagaccgaggtgggctacggacacgtgcaggtccatgagatcctggcccagcccacagtcttggccaacagcacagcgctggtggaacgtcgagacaccctgcgccttatgtgcagcagccccagccccaccgccgaggtccgctggttcttcaacggtggggccctgcccgtcgctctccgcctgggcctgtcccctgacggccgggtgctggccaggcatggcatccgccgggaggaggccggcgcctatcagtgtgaggtgtggaacccggtcagtgtcagccgcagcgagcccatcaacctgaccgtgtactttggcccagagcgtgtggccatcctccaggattccaccacccgcacaggctgcaccatcaaagttgacttcaacacgtccctcaccctgtggtgcgtgtccaggtcctgcccagagcccgagtatgtgtggaccttcaacgggcaggccctaaagaacggccaagaccacctcaacatcagcagcatgacagccgcccaggaggggacgtacacatgtattgcgaagaacaccaagaccctgctatctggatctgcctcagtcgtggtcaagctctctgctgcagcagttgccacgatgatcgtgcccgtgcccaccaagccaacggagggccaggacgtaacactgaccgtgcagggctaccccaaggacctgctggtctacgcctggtaccgcgggcctgcctccgagcccaaccggctgctcagccagctgccgtcaggaacctggattgcaggccccgcgcacacaggccgggaggtgggcttccccaactgctcgctgttggtgcagaagctgaacctcacagacactggccgctacacactcaagaccgtcacagtgcagggcaagactgagacactggaagtggagctgcaggtggcccccctggggtaacagcgtgaccctggagacgtccagagagaagagctcttcgcaccatcctctggtcctcgccctctgagtgggaaccactcccccacagcgaggatgccaggctgtggtcctgctgttctcctgcctccaccctagagctagagccacagggccccactccctcgctgagctgttggggagccaccgaggccataaacgtcctggttaatgcacacgtgtgtcagcctctccttccaccaccgctagccccgccatttcctggtggccgcactcatttcctttcccccccaagacttttctcagtctgggtgtgcacgtgcaggaggatgggcccagatcaccgtgctccacaccccactgctggatgccagggccttgtgcccctcccgcagtgctccaggttatatgtgagagtcctgctccccagctggccaaggactgcccctcttggagcaccagcattctgtgggacatggctctcccctacactgcacctcattttgtcacctggccccgaaacagggctgcttgtgctcaggaaatgaccatattttgcaagaagtcttccatcaccttctggtagtcctcacccatttaatcaaagacacaactttgtcctgggattccccgcatgtctctccaacattatctgcccaaccctgacaatatctccttccttctgcagccacaggaaaggccctgtggatggatgaatgcaagcggggcagaggtagaggccaggagtggagagctgggaagtgggggccagaatgagtgtgttttctaactcgtctcattagtgggagccacaggccccacccagccgcaatgccccactggaaacaggttcttggcattggtcaggagtggtgatggccgagtcgaggcttagaatagaaagacaggtttgggcagagacgagaaaggcccttttggggatgattgtgttgagttggggtgatgggtggtgaaagacctccagaatgagggttataaaacctggatcaaaatcctgcatttgccacggattcactagagcctcagtttgcccatcagtaaaaaggtgtggacttgaggtggaccagacttttccaaaccatttttaaaa

SEQ ID NO: 462076 - DNA, 1251 bp, Homo sapiens
cagctgctgttcctgggagccccagcaggtggcactatgaccctgaccatcctcgcaggccccatccagaatgtgtgggcacaataactttaaggtcaggaatgactacactgatgagaagctagaaggcacaaaggaggagggaggcagaacccagaaggcctccctcctgcgatcagacccaggcaccacctgcttctccagccactgcccaggacaccacttccccctgagagttggcaaatccgtcgttttggttaccacctcatggagattcagcccctctggaaaagtccagacacctcacccccctaacctggatggaccacgcagagccaataggaatacttttctgtggacgtgccatgttggaatcccagatctccctgccctgccagcccctgccagcttcctggggacccaactgaccctgaagaaagcctctgatgggcctagaacagagaaggtgacccaggaccttgcccagcctttctggacaactggaagacagttacgcttcgtcctccacctctccctccaacaaaaggatcttagcaagtgttggagaggtgctgaagtcgtattaggaccaaccagactttttctttgaggatactcagaaggagtgaaggagaatggaacagggggtgtgaataaatgagctttctccatgtgtgattcaaagtggtttaacccatgcctcaccttctagaacacccgtggccctctctagccatgagaagtgtcaccactagccatcaaaatgctcccaaaagtccaacctttgaccaaactacatttcagattttcatttcagattttcttaaattctggagaaaaaagaaaataaagtaaaagaataaatattttggttatgccatgtactctgatttgggattcagaaatatgatttctggccaggtgtggtggctcatgcctgtaatcccagccctttgagaggggaggatctcctgagcccaagagttggagatcagcctgggcagtgtaggaagaagacaccatctctaaaaataataaaaagttaggcaggtgcggtggtgcatgtctgtggtctcagccactcaggaggctgaagtgggaggattgcttgagcccgggaggtcgaggctgcagtaagccgtgtttgtgccattgaactgtagcccaggcgacagagcgagacctcatctcaaaaaaaagaaaggaaatatgatttcccacattaccacacctgctgatgtgcatagcaaa

SEQ ID NO: 462077 - DNA, 1118 bp, Homo sapiens
ccacgcgtcgcccacgcgtccgttcttccccaggtctgcgagcctcgaaggcttctttcagacagcagaccccttagaagcgcaaggctgctttctgacaaagaatcaagtgttcctttcaaccagccaagggactggttttctcgctgaccctttgacagctccagccggtccctccattcgaggtccctgacttcctgcaacagactgagatggccttctgagcttttccagggctgacgaccaccttcttgataccttcccctctctcgttctgaatccgtgcccaccagacggactctggctcttgttgcccagactggggtgcaatggcgcaatcttggctcaccataacctccgcctcctgggttcaagcgattctcctgcgtcagcctcccaaatggggccgtctagttgcaggaaaacaagctcagggctcccactgattctacatgatggttccccgtgagcatcgccgcagcgaccgcccacagcaccagctgctgatggctcacacctcctggggctgcaaggcctgtccctggctctggcagcgagatgacagggctgttgccccggcaggggttgctgtggcagctgccagagtggcccgggccatggatgagggccaggatatggaaagcagaggcagaaatgagcccagaggccacagggcccagctctcaggctcccacggtgaagcccagagggaaacgcactcgcaggtggctgtagaccttggggactccagcctcgttcatttaagctcccacaatgttccaggccctatgcggcttgcaaggggcagagagacacagaatgacagccgacatggcactctattgggggaggtatcacagccaagaaatggaggcctggggatgttaaatgccatggcccaggcagcatccgtcctcatgaagccaccttatcagtgtgtgttcttcatcaactccggtggtgggggagttgtggtggggataagaacctgcgtgtgactgctcttggaaagttggaagttcatctcctgcctcggcccctctccttcgctccacccagcccctctggcctctgccatttctccatcccacccagtgtgctctaaccccagagccttc

SEQ ID NO: 462078 - DNA, 2686 bp, Homo sapiens
gaagcggatctcgcggggctactggcgctctcgggtgagtctccgtctttcgggttcaagcctgcgcctcgcgggccacaggttcccacgctccgctgtcgggttttggggtcgccctgtaggttaaaaccccgaacctgctcattcctctcgcggcgtggccctaagacgttcccagtcccgtcgctccgagagggtctagagatctgcgtccatttcggattaaaatcgttctgaagtgggtactggccccgacctttttgctttagcccacacaatatgacctcggggaggatgcgaggaagatgaactgtgatgatccacttcttcttaatgaatgactgacttacctgagaaagaaactcagaggaagaggaaagaaagaagaggagggaatggctctttctcagggactgtttacattcaaggatgtggccatagaattctctcaagaggagtgggagtgcctggaccctgcccagagggccttgtacagggacgtgatgttggagaactacaggaacctgctttctctcgatgaggataacatccctccagaagatgctttctactctatccgggaacttagggagaccttagtcttcctgattccatattcttctaagatttgcctctgaaagttgcttttgaaatacacattccggatgggcgtggtgcctcacgcctataatcccagcactttgggaggccgaggtgggcagatcacctgaggtcgggagttcgagaccagcctgactaacatggaaaaaccccgtctctactaaaaatacaaaaattagccgggtgtgttggcgcatgcctgtaataccagctgctcgggaggctgaggcaggagagttgcttgaacccgagaggcagaggttgtggtgagccgagatcacgccattgcactccagcctgggcaacaagagcaaaactccatctcgaaaaaaaaaaaaagaaaaagaaaagtacacattcctagagtctgaaatttcctctctttctgctgtgataacccaccaataggcgatggacaacttttggtggactctcccatggaagaggtttccttggtgacagaacattcttgaaagagaacattaattaatctgtcacagtatcattctgctacatagaggtgcctcttgaagccactgagtagagtagcctgcatgtcccagtatgctgagagagaatcaggacagccggagggataagtgcttctgaccttctggtttctgtggagtttccagtgtctcccaagggcagtgtgacaacgctggttagatatatgctgatcatcctcttggagccagcagtacaaggtgtaggagtttctcctgggaagagcattctccaagttctcaacctcatatctgcgaacatgttgaccaaactgttgctcataccacattattcatcccatacgtgcagttgtacatttttcttcaatatttctgttggatttacaagcaagggattatcaccaaaggaaaataataaagaggaattataccatctggtgatattagaaagaaaggaaagccatggcatcaacaattttgacctcaaggaagtctgggaaaatatgcctaagtttgacagcctgtgggactatgatgtaaaaaattacaaaggaatgcctttgacctgtaacaaaaatctcactcacagaaaagatcaacaacataataaatcctcaatacatttctctttaaagcagagtgtttctataagagatagtgcacaccagtatttcatccatgacaagccatttataaggaatttgttaaaactgaaaaataacataaggtatgccggaaacaaatacgtgaagtgttttgaaaataaaattggattaagcttacaggcacagctggctgaactacagagatttcaaactggggagaaaatgtatgaatgtaatccagttgagaagtctatcaatagttcctcagtttcaccacttcctccttgtgtcaaaaacatttgtaataaatataggaagattttgaaataccctttattacatacacagtatgggagaacacacattagagaaaaatcatacaagtgtaatgactgtggaaaggcttttagcaaaagttcgaacctcactaatcatcagagaattcactctggacagagaccttacaaatgtaacgagtgtggcaaagcctttaaccagtgttcgaacctcactaggcatcagagagtccatacaggagagaaaccatatcaatgtaatatatgtggcaaggtctgtagtcaaaattcaaatcttgcaagtcatcagaggatgcatactggagagaaaccttacaaatgtaatgaatgtggcctcgggagcatgatccacgagttgctgccctggagccgcacaattttgtagctttcttggcagaaccaggtactcaaagggttgcgcacagcagggagtagagatgactcttgagttttccctgcctaaggatggatgcatatagctgaggggtgccagctgtctgggtagagcctgccccctgagcaagtggggccccaagctgacctcaccctcaatatgtgcagccttttatagcacagtcatgggtcacctaatgatgaggatgtgtgctgagaaatttgttgatttcatcattgtgctaacgtcatagggtgtacttacacaaagctacatgggatc

SEQ ID NO: 462079 - DNA, 787 bp, Homo sapiens
gttttatatctacagtgtgtggggccatgagatgaatgaatattgttttattatatatatttttttctgcttcatatactttcatgatgttttatatgttttaccagaagatttcttccttgagtatttatgtctgagtattagtttcctcaaaacatatataacctccaaaactttgttaaaggatagtattagttattccttttacttctgtttcctgtaactttatatcaactcttagcttatactttttaaaaatagactttctattttttagcaattttatgttcacagcaaactagatttcctgtatactctgttcccccacacgtgcacagcgtcttcccccattatcaccatcccccatcacagtggtacatttgttaaaattgataaacctacattgacacatcattatcacccaaagtccatagtcgatgttggggttcactctatgtatatgctttgggtttgggcaaatatataatagacatatatcctccataatagtatcttacagaataattacactgccctaaaaaatctgtgctctgtctgttcatctctccctccccccagcacctggcaaccactgatctctttactgtctccatagatttgcctttttcagaatgtcatatagttggaaccatatagtatatggccttttcagattggcttctttcacttaataatatgcatttcaatttctagggctgggcgtggtggctcacgcctgtaatcccagcactttgggaggccgaggccggcggatcacgaggtcagg

SEQ ID NO: 462080 - DNA, 597 bp, Homo sapiens
aaatagctaattttatgttatgtaatttcatctcagtttaaaaaaaataaaattagggatatataagttgcttgcattaactcacataaatcagtgaatatgtacacctcttttctgccattttgtgtgaaaataagaaattttcctgtgtccacttggtgaagtgtgtttttatttcagggactgtttacattcaaggatgtggccatagaattctctcaagaggagtgggagtgcctggaccctgcccagagggccttgtacagggacgtgatgttggagaactacaggaacctgctttctctcgatgaggataacatccctccagaagatggtaaccacccttgtacatctttacatttttccttgtgagtctcttgggaggccctgatgtgcttgtctgaatccgatccctgttctaaaaggggagattgaaactttttgattgagagtggaaaggcttcataatgtagcatatagactttaaacttcccctttcttcagaagttctgcgcataatcaggtttgacgagtggtggttccagaatatcagtacttacaaaaccttatggaaaacgttttaaagtgtctggtatc

SEQ ID NO: 462081 - DNA, 571 bp, Homo sapiens
gttttatatctacagtgtgtggggccatgagatgaatgaatattgttttattatatatatttttttctgcttcatatactttcatgatgttttatatgttttaccagaagatttcttccttgagtatttatgtctgagtattagtttcctcaaaacatatataacctccaaaactttgttaaaggatagtattagttattccttttacttctgtttcctgtaactttatatcaactcttagcttatactttttaaaaatagactttctattttttagcaattttatgttcacagcaaactagatttcctgtatactctgttcccccacacgtgcacagcgtcttcccccattatcaccatcccccatcacagtggtacatttgttaaaattgataatgatatgtaggttcgtcagttgttaacaaatgtatctctctgttgggggctattgataatggggaaggctgtgcatgtgtgggagtaggaggtgtatgggacatctctgtaccttctaatcaattttgctatgaacttaaaactgctctaaaaataaagtttaataaaaaaaaaa

SEQ ID NO: 462082 - DNA, 1522 bp, Homo sapiens
gaagcggatctcgcggggctactggcgctctcgggtgagtctccgtctttcgggttcaagcctgcgcctcgcgggccacaggttcccacgctccgctgtcgggttttggggtcgccctgtaggttaaaaccccgaacctgctcattcctctcgcggcgtggccctaagacgttcccagtcccgtcgctccgagagggtctagagatctgcgtccatttcggattaaaatcgttctgaagtgggtactggccccgacctttttgctttagcccacacaatatgacctcggggaggatgcgaggaagatgaactgtgatgatccacttcttcttaatgaatgactgacttacctgagaaagaaactcagaggaagaggaaagaaagaagaggagggaatggctctttctcagggactgtttacattcaaggatgtggccatagaattctctcaagaggagtgggagtgcctggaccctgcccagagggccttgtacagggacgtgatgttggagaactacaggaacctgctttctctcgatgaggataacatccctccagaagatgctttctactctatccgggaacttagggagaccttagtcttcctgattccatattcttctaagatttgcctctgaaagttgcttttgaaatacacattccggatgggcgtggtgcctcacgcctataatcccagcactttgggaggccgaggtgggcagatcacctgaggtcgggagttcgagaccagcctgactaacatggaaaaaccccgtctctactaaaaatacaaaaattagccgggtgtgttggcgcatgcctgtaataccagctgctcgggaggctgaggcaggagagttgcttgaacccgagaggcagaggttgtggtgagccgagatcacgccattgcactccagcctgggcaacaagagcaaaactccatctcgaaaaaaaaaaaaagaaaaagaaaagtacacattcctagagtctgaaatttcctctctttctgctgtgataacccaccaataggcgatggacaacttttggtggactctcccatggaagaggtttccttggtgacagaacattcttgaaagagaacattaattaatctgtcacagtatcattctgacctacattgacacatcattatcacccaaagtccatagtcgatgttggggttcactctatgtatatgctttgggtttgggcaaatatataatagacatatatcctccataatagtatcttacagaataattacactgccctaaaaaatctgtgctctgtctgttcatctctccctccccccagcacctggcaaccactgatctctttactgtctccatagatttgcctttttcagaatgtcatatagttggaaccatatagtatatggccttttcagattggcttctttcacttaataatatgcatttcaatttctagggctgggcgtggtggctcacgcctgtaatcccagcactttgggaggccgaggccggcggatcacgaggtcagg

SEQ ID NO: 462083 - DNA, 1561 bp, Homo sapiens
gaagcggatctcgcggggctactggcgctctcggcccacacaatatgacctcggggaggatgcgaggaagatgaactgtgatgatccacttcttcttaatgaatgactgacttacctgagaaagaaactcagaggaagaggaaagaaagaagaggagggaatggctctttctcagggactgtttacattcaaggatgtggccatagaattctctcaagaggagtgggagtgcctggaccctgcccagagggccttgtacagggacgtgatgttggagaactacaggaacctgctttctctcgatgaggataacatccctccagaagatgatatttctgttggatttacaagcaagggattatcaccaaaggaaaataataaagaggaattataccatctggtgatattagaaagaaaggaaagccatggcatcaacaattttgacctcaaggaagtctgggaaaatatgcctaagtttgacagcctgtgggactatgatgtaaaaaattacaaaggaatgcctttgacctgtaacaaaaatctcactcacagaaaagatcaacaacataataaatcctcaatacatttctctttaaagcagagtgtttctataagagatagtgcacaccagtatttcatccatgacaagccatttataaggaatttgttaaaactgaaaaataacataaggtatgccggaaacaaatacgtgaagtgttttgaaaataaaattggattaagcttacaggcacagctggctgaactacagagatttcaaactggggagaaaatgtatgaatgtaatccagttgagaagtctatcaatagttcctcagtttcaccacttcctccttgtgtcaaaaacatttgtaataaatataggaagattttgaaataccctttattacatacacagtatgggagaacacacattagagaaaaatcatacaagtgtaatgactgtggaaaggcttttagcaaaagttcgaacctcactaatcatcagagaattcactctggacagagaccttacaaatgtaacgagtgtggcaaagcctttaaccagtgttcgaacctcactaggcatcagagagtccatacaggagagaaaccatatcaatgtaatatatgtggcaaggtctgtagtcaaaattcaaatcttgcaagtcatcagaggatgcatactggagagaaaccttacaaatgtaatgaatgtggcctcgggagcatgatccacgagttgctgccctggagccgcacaattttgtagctttcttggcagaaccaggtactcaaagggttgcgcacagcagggagtagagatgactcttgagttttccctgcctaaggatggatgcatatagctgaggggtgccagctgtctgggtagagcctgccccctgagcaagtggggccccaagctgacctcaccctcaatatgtgcagccttttatagcacagtcatgggtcacctaatgatgaggatgtgtgctgagaaatttgttgatttcatcattgtgctaacgtcatagggtgtacttacacaaagctacatgggatc

SEQ ID NO: 462084 - DNA, 721 bp, Homo sapiens
atccgacccttttattttactcccgtaccttttatttctctcccttttctagctttctactctatccgggaacttagggagaccttagtcttcctgattccatattcttctaagatttgcctctgaaagttgcttttgaaatacacattccggatgggcgtggtgcctcacgcctataatcccagcactttgggaggccgaggtgggcagatcacctgaggtcgggagttcgagaccagcctgactaacatggaaaaaccccgtctctactaaaaatacaaaaattagccgggtgtgttggcgcatgcctgtaataccagctgctcgggaggctgaggcaggagagttgcttgaacccgagaggcagaggttgtggtgagccgagatcacgccattgcactccagcctgggcaacaagagcaaaactccatctcgaaaaaaaaaaaaagaaaaagaaaagtacacattcctagagtctgaaatttcctctctttctgctgtgataacccaccaataggcgatggacaacttttggtggactctcccatggaagaggtttccttggtgacagaacattcttgaaagagaacattaattaatctgtcacagtatcattctgctacatagaggtgcctcttgaagccactgagtagagtagcctgcatgtcccagtatgctgagagtctccgtcgaactgggatcctctagatcaccgagctgc

SEQ ID NO: 462085 - DNA, 1003 bp, Homo sapiens
aaatagctaattttatgttatgtaatttcatctcagtttaaaaaaaataaaattagggatatataagttgcttgcattaactcacataaatcagtgaatatgtacacctcttttctgccattttgtgtgaaaataagaaattttcctgtgtccacttggtgaagtgtgtttttatttcagggactgtttacattcaaggatgtggccatagaattctctcaagaggagtgggagtgcctggaccctgcccagagggccttgtacagggacgtgatgttggagaactacaggaacctgctttctctcgatgaggataacatccctccagaagatgctttctactctatccgggaacttagggagaccttagtcttcctgattccatattcttctaagatttgcctctgaaagttgcttttgaaatacacattccggatgggcgtggtgcctcacgcctataatcccagcactttgggaggccgaggtgggcagatcacctgaggtcgggagttcgagaccagcctgactaacatggaaaaaccccgtctctactaaaaatacaaaaattagccgggtgtgttggcgcatgcctgtaataccagctgctcgggaggctgaggcaggagagttgcttgaacccgagaggcagaggttgtggtgagccgagatcacgccattgcactccagcctgggcaacaagagcaaaactccatctcgaaaaaaaaaaaaagaaaaagaaaagtacacattcctagagtctgaaatttcctctctttctgctgtgataacccaccaataggcgatggacaacttttggtggactctcccatggaagaggtttccttggtgacagaacattcttgaaagagaacattaattaatctgtcacagtatcattctgctacatagaggtgcctcttgaagccactgagtagagtagcctgcatgtcccagtatgctgagagtctccgtcgaactgggatcctctagatcaccgagctgc

SEQ ID NO: 462086 - DNA, 827 bp, Homo sapiens
gaagcggatctcgcggggctactggcgctctcgggtgagtctccgtctttcgggttcaagcctgcgcctcgcgggccacaggttcccacgctccgctgtcgggttttggggtcgccctgtaggttaaaaccccgaacctgctcattcctctcgcggcgtggccctaagacgttcccagtcccgtcgctccgagagggtctagagatctgcgtccatttcggattaaaatcgttctgaagtgggtactggccccgacctttttgctttagcccacacaatatgacctcggggaggatgcgaggaagatgaactgtgatgatccacttcttcttaatgaatgactgacttacctgagaaagaaactcagaggaagaggaaagaaagaagaggagggaatggctctttctcagggactgtttacattcaaggatgtggccatagaattctctcaagaggagtgggagtgcctggaccctgcccagagggccttgtacagggacgtgatgttggagaactacaggaacctgctttctctcgatgaggataacatccctccagaagatggtaaccacccttgtacatctttacatttttccttgtgagtctcttgggaggccctgatgtgcttgtctgaatccgatccctgttctaaaaggggagattgaaactttttgattgagagtggaaaggcttcataatgtagcatatagactttaaacttcccctttcttcagaagttctgcgcataatcaggtttgacgagtggtggttccagaatatcagtacttacaaaaccttatggaaaacgttttaaagtgtctggtatc

SEQ ID NO: 462087 - DNA, 1233 bp, Homo sapiens
gaagcggatctcgcggggctactggcgctctcgggtgagtctccgtctttcgggttcaagcctgcgcctcgcgggccacaggttcccacgctccgctgtcgggttttggggtcgccctgtaggttaaaaccccgaacctgctcattcctctcgcggcgtggccctaagacgttcccagtcccgtcgctccgagagggtctagagatctgcgtccatttcggattaaaatcgttctgaagtgggtactggccccgacctttttgctttagcccacacaatatgacctcggggaggatgcgaggaagatgaactgtgatgatccacttcttcttaatgaatgactgacttacctgagaaagaaactcagaggaagaggaaagaaagaagaggagggaatggctctttctcagggactgtttacattcaaggatgtggccatagaattctctcaagaggagtgggagtgcctggaccctgcccagagggccttgtacagggacgtgatgttggagaactacaggaacctgctttctctcgatgaggataacatccctccagaagatgctttctactctatccgggaacttagggagaccttagtcttcctgattccatattcttctaagatttgcctctgaaagttgcttttgaaatacacattccggatgggcgtggtgcctcacgcctataatcccagcactttgggaggccgaggtgggcagatcacctgaggtcgggagttcgagaccagcctgactaacatggaaaaaccccgtctctactaaaaatacaaaaattagccgggtgtgttggcgcatgcctgtaataccagctgctcgggaggctgaggcaggagagttgcttgaacccgagaggcagaggttgtggtgagccgagatcacgccattgcactccagcctgggcaacaagagcaaaactccatctcgaaaaaaaaaaaaagaaaaagaaaagtacacattcctagagtctgaaatttcctctctttctgctgtgataacccaccaataggcgatggacaacttttggtggactctcccatggaagaggtttccttggtgacagaacattcttgaaagagaacattaattaatctgtcacagtatcattctgctacatagaggtgcctcttgaagccactgagtagagtagcctgcatgtcccagtatgctgagagtctccgtcgaactgggatcctctagatcaccgagctgc

SEQ ID NO: 462088 - DNA, 1016 bp, Homo sapiens
gaagcggatctcgcggggctactggcgctctcgggtgagtctccgtctttcgggttcaagcctgcgcctcgcgggccacaggttcccacgctccgctgtcgggttttggggtcgccctgtaggttaaaaccccgaacctgctcattcctctcgcggcgtggccctaagacgttcccagtcccgtcgctccgagagggtctagagatctgcgtccatttcggattaaaatcgttctgaacccacacaatatgacctcggggaggatgcgaggaagatgaactgtgatgatccacttcttcttaatgaatgactgacttacctgagaaagaaactcagaggaagaggaaagaaagaagaggagggaatggctctttctcagggactgtttacattcaaggatgtggccatagaattctctcaagaggagtgggagtgcctggaccctgcccagagggccttgtacagggacgtgatgttggagaactacaggaacctgctttctctcgatgaggataacatccctccagaagatgatatttctgttggatttacaagcaagggattatcaccaaaggaaaataataaagaggaattataccatctggtgatattagaaagaaaggaaagccatggcatcaacaattttgacctcaaggaagtctgggaaaatatgcctaagtttgacagcctgtgggactatgatgtaaaaaattacaaaggaatgcctttgacctgtaacaaaaatctcactcacagaaaagatcaacaacataataaatcctcaatacatttctctttaacaaaaaaaaaaaagaacgaaagaaaaacaatgcagcaaggagaaagaacggagaacacacaagacaaaagagaacacgatacaaaaaagacaacacagaagaaacagagccgagacaacaacagcacaaacacaaacgagggaggcgagacaaactaacacagcaggcggccccctgaggaacaccaccagcagcaaagaaaggcacgccaagagg

SEQ ID NO: 462089 - DNA, 1600 bp, Homo sapiens
aaatagctaattttatgttatgtaatttcatctcagtttaaaaaaaataaaattagggatatataagttgcttgcattaactcacataaatcagtgaatatgtacacctcttttctgccattttgtgtgaaaataagaaattttcctgtgtccacttggtgaagtgtgtttttatttcagggactgtttacattcaaggatgtggccatagaattctctcaagaggagtgggagtgcctggaccctgcccagagggccttgtacagggacgtgatgttggagaactacaggaacctgctttctctcgatgaggataacatccctccagaagatggtaaccacccttgtacatctttacatttttccttatatttctgttggatttacaagcaagggattatcaccaaaggaaaataataaagaggaattataccatctggtgatattagaaagaaaggaaagccatggcatcaacaattttgacctcaaggaagtctgggaaaatatgcctaagtttgacagcctgtgggactatgatgtaaaaaattacaaaggaatgcctttgacctgtaacaaaaatctcactcacagaaaagatcaacaacataataaatcctcaatacatttctctttaaagcagagtgtttctataagagatagtgcacaccagtatttcatccatgacaagccatttataaggaatttgttaaaactgaaaaataacataaggtatgccggaaacaaatacgtgaagtgttttgaaaataaaattggattaagcttacaggcacagctggctgaactacagagatttcaaactggggagaaaatgtatgaatgtaatccagttgagaagtctatcaatagttcctcagtttcaccacttcctccttgtgtcaaaaacatttgtaataaatataggaagattttgaaataccctttattacatacacagtatgggagaacacacattagagaaaaatcatacaagtgtaatgactgtggaaaggcttttagcaaaagttcgaacctcactaatcatcagagaattcactctggacagagaccttacaaatgtaacgagtgtggcaaagcctttaaccagtgttcgaacctcactaggcatcagagagtccatacaggagagaaaccatatcaatgtaatatatgtggcaaggtctgtagtcaaaattcaaatcttgcaagtcatcagaggatgcatactggagagaaaccttacaaatgtaatgaatgtggcctcgggagcatgatccacgagttgctgccctggagccgcacaattttgtagctttcttggcagaaccaggtactcaaagggttgcgcacagcagggagtagagatgactcttgagttttccctgcctaaggatggatgcatatagctgaggggtgccagctgtctgggtagagcctgccccctgagcaagtggggccccaagctgacctcaccctcaatatgtgcagccttttatagcacagtcatgggtcacctaatgatgaggatgtgtgctgagaaatttgttgatttcatcattgtgctaacgtcatagggtgtacttacacaaagctacatgggatc

SEQ ID NO: 462090 - DNA, 2570 bp, Homo sapiens
  misc_feature (3)..(4): n is a, c, g, or t
  misc_feature (11)..(11): n is a, c, g, or t
ctnncctcccngactggttatgcaagagcaggcatgagtgtggtttttgtgggtgcatgcgcggcaggcctggggcctggccgcctgctgcctcacctgcaaggaggggcctcccagaaactcccttccccaatgcccagccgccccaccttgccagacttagctgaccagccagcaaggacgcccgctgcctcccacctgccctcctgccctccttcaccagccaagcccagcctgagccagcacctgcctttatgaccatgttcaagggactgagcaaaggctcccaggggaaggggtcccccaaggactccccagccaaggggtcccccaaaggctcccccagcaagcacagctgaatgccacccaggagctgaccctgctcatctcccacatgcaagccagcgccgaccaggtggagcgggacatcctggagacgcagaagaggctgcagcaggaccggctgaacagtgagcagagccaggccctgcagcaccagcaggagacgggcagcagcctgaaggaggccgaggtgctgctcaaggacctcttcctggacgtggacaaggcccggcggctcaagcacccgcaggctgaggagactgagaaggacatcgagcagctgcacgagcgggtgacccaggagtgtgcggagtactgtgccctgtacgagaagatggtgctgccgccccgacgtgggatccaaggtcgactgggcacacgtgctggagcagaaacagaagctggtctgcgcaggccagtatgggccgggcatggcggagctggaggaacagatcgcggagctcaacatcgtgcagaaggagatcaacgaccaaggagagcagctgcggagcctggtggggccggtggcacagagggcggcgtcgtggcgcgggcagagcctgggcagcctgtacacgcactgcagggctgcacgtggcagctgagcgccctggcggagcagcagcgccgcatcctgcagcaggactggagcgacctcatggccgaccctgcgggcgtgcggcgggaatacgaggtcggctggcagagggccatcctggtcctcaccgccgctccccacccgactcgcccccagcacttcaagcagcacgagctgctgagccaggagcagagcgtaaaccagctggaggaggacggcaagcgcatggtggagctgcggcaccccgcggtggggcccatccaggcccaccaggaggccctgaagatggagtggcagaacttcctgaacctgtgcatctgccaggagacccagctccagcacgtggaggactacagccgggtgagccctcgggcagcggcagggcggcagggcggcagggcgggagctcttgccgcacgtgcagagagagaggaacttccagtgcccgctatggagccacagcccacagcatggggaagtccccatccagaggcagtgctgcagctagaggtagctccagagtcctccgggccctgcaccgatacagccaaagaccagcaaagcgacaagctgccagacctcatgccacctgctgtagccactgggctcagccctggagctgagagcatcgctggagatagacgtggcagagaagaggttgcgagcatggccccagccagcagctcccacgctgcccctagtcctgggcatggagcgagccttggtgtcagagaccagggtgtgcagtctgagctcctctaccttactaaagagaggcctcttttatttaccagagccacagccctgctgcctcaggaccttttcattctgccggtgctggggctgtctatctgcaagctggaggtgttgagagcaggaaaaggaggctgtgaggaagggttcgggcagctcctcctgctctcagaggtggcctcctcctccaggcatggaggtctgtccactactgggcttctgggctatttgcccctgatttgctccctggtacgggctcttcttaacaggcaggcaaggggtgcggggaccaggtgagggcttcaaagggtacagtaccaaatcttccaaactcagcacttgtgccctggggtctccaaactgtcttctgccctagaatttattcatactgttaaattaccagtttatgcaaatgatatgtaaataaagctcaattttttgaaacttcatgcctttttgaactctctaatgttagatggtgtttttgaggctatctgaaaatctctgatagttgtgtcttttgttgtggttgtttgtgtgattgagttaccaccaccaaatcaactgttattggaaacatttcaggtatggcttttagaagacctggacctactcttgcctgttttgaccctccagtttattgtggaaggaagtatcatgtggtttcatgtctccggcagatcaatcactttcctccatccatagcagggaggagtcatggcaccccagagggatgaaatacttctccccaagtatttcttattctgtctcttcctctctctcattccctgctccacatctctttctgtctccttttccagttctctctccctcctcatctcactgcatgccactgttcaggctcctggggctccac

SEQ ID NO: 462091 - DNA, 1325 bp, Homo sapiens
agcaaactgaggcacagagagagcatctgagctgaaccacagtcctagacatccccatgtgcttgtcttttccctgccatgtgccatgaagcctgagagttgccttatctgccaagcaacccaacagcaccaggagaaagagcagccgtggtggccacagactgttgtaacaggctcccaaaccagcaccccacttcgagtcccctccctcaccccacctctgcccaccccagaatggtctttccaaatgactaatctggtgaggtcactgccctgccaagagcctctccatggcttctttgtaaatcaaggttcaagtccagacctcagtgtcttcatctataaaaacgacactgggacaagaaaaagcgagatgcggaaagctgtgtgtggccacccacttgtgaacatcgagaagtcagaggcagaacaacctcggacttgagagccctcatcttcccacaccccaacttcagcaagcctccagtgaccccagacaagtcactcgggcaagtcgcgtaactcctctgagtgttcccttccccatctgaagtggatcctaatagcacctgcttcggagggttgtcatgaggatcagaaaaaacgatgcattttttttttttttttttttttggaagcaaggagttaaaatttaaacacagtgtctcctcttagcaacgcccttgacaacctgcaacaccgacaaagtgtcttcaatccaaactgccttcttttacaaagcttccagctacaaatccaagctgacagctgaatatcaccttcaaaacgacaagtttaagctgggagactgtggtcctggagctgttggtgtgtatctctgctattacttgggaagagaagacttcagaacaaagccaacacaaaggaaaaccgaggcaaggtgcagacagattgctgacaacatcatctgagcccctggtgtggctgggcctgaagcaacatccacctctgttctttccagttacaagaggcaacaaatccccatttctgcctaaaccttaggttgggtttctgtcttttgcaataaaaagtattgtttaatggtatctgaagcctgtctttccaattcactaatgaaagctttcttccttcccagggaaatgtctgggggaaagactggcattaggttgaaagaaatggtgagacttcctgctggctggtcccaattccctcactcctggagatatctttaagaattacagtgccggccgggcgcagtggctcacgcctgtaggtatttcagaaaatattttttagtaccagtgcgagaataatcttcatattttggatgaggtgctcttagt

SEQ ID NO: 462092 - DNA, 966 bp, Homo sapiens
agcaaactgaggcacagagagagcatctgagctgaaccacagtcctagacatccccatgtgcttgtcttttccctgccatgtgccatgaagcctgagagttgccttatctgccaagcaacccaacagcaccaggagaaagagcagccgtggtggccacagactgttgtaacaggctcccaaaccagcaccccacttcgagtcccctccctcaccccacctctgcccaccccagaatggtctttccaaatgactaatctggtgaggtcactgccctgccaagagcctctccatggcttctttgtaaatcaaggttcaagtccagacctcagtgtcttcatctataaaaacgacactgggacaagaaaaagcgagatgcggaaagctgtgtgtggccacccacttgtgaacatcgagaagtcagaggcagaacaacctcggacttgagagccctcatcttcccacaccccaacttcagcaagcctccagtgaccccagacaagtcactcgggcaagtcgcgtaactcctctgagtgttcccttccccatctgaagtggatcctaatagcacctgcttcggagggttgtcatgaggatcagaaaaaacgatgcattttttttttttttttttttttggaagcaaggagttaaaatttaaacacagtgtctcctcttagcaacgcccttgacaacctgcaacaccgacaaagtgtcttcaatccaaactgccttcttttacaaagcttccagctacaaatccaagctgacagctgaatatcaccttcaaaacgacaagtttaagtgagttattatttgtaaaggccttataagagtgtctagcacatagtaagtgctatacaagtatttgaggtttacttttattcacttaatttattataaatataaattcattcaaatgccgtgggaattagcaatgaatgaatcttctttatgctggtgtacttgtc

SEQ ID NO: 462093 - DNA, 2079 bp, Homo sapiens
atgtcccaggtgcaggcgaagttttgttcatgtgttcctggaggatttttcccgtggcaagcgcttctccatcctccagcatctcaggcctggctggccactcagtattccttgtccctggcctcgcagcccacccgggaagccacagtgaccagccaccaggtgtgccatcacggaggaagtccaggttggagaggtggtctccttctgtgagcaggtccacctctccacccactgaggcccctttctgcctgtgacagccccacctcaagggccatgcacagccatcagctccagctgccagcatgctactgccatgccccgagtgtccatctgggccccggttcatgacctgttgtctttctgtatctactttctgcagcccctcactgaggaggcctcctgggtttgtccagtgcctgctattaaagctttgctccaagttcaatgcctcgtgtgatctgccctacacaacttggggcccctctcctccccagcccttctcctgtgtgcctgcctcctgccgccgccaccatgaccaccaccatccaccagttcacctcctccagctccatcaagggctcctccggcctgggagtggctcatcccgcacctcctgccggctgtctggcggcctgggtgccggctcctgcaggctgggatctgctggtggcctgggcagtgccctccggggtagcagctattccagctgctactgctttggctctggcggtggctatggcagcagctttgggggcgttgatgggctgctggccggaggtgagaaggccaccatgcagaacctcaatgaccgcctggcctcctacctggacaagatgcgcgccctggaggaggccaacactgagctggaggtgaagatccgtgactggtaccagaggcaggccccggggcccgcccgtgactacagccagtactacaggacaatcgaggagctgcagaacaagatcctcacagccaccttgaacaatgccaacatcctgctacagattgacaatgcccatctggctgctgctgacttctgcaccaagtttgagacagagcaggccctgcgcctgagtgtggaggccgccatcaatggcctgcgcagggtgctggatgggctgaccttggccagagccgacctggagatgcagattgagaacctcaaggaggagctggcctacctgaagaagaaccacgaggaggagataaacgccctgcgaggccaggtgggcggtgagatcaatgtggagatggacgctgccccaggcatggacctgagccgcatcctgaacgagatgcgtgagtacactgacagtaaggccacagccaggtgtcttggaggtgcccactcctcagcaagctgcgtggaccacagggtcacacgctgcatcaacagacctggagctgagctcaagctgggatctggggggtgggtggggaggctcacaccaccctgtcctgtgtcctgtctgcagacagaggaactgaaacgcgaggtggctaccaacagcgaactggtccagagcggcaagagcaagatttcggagctctggcgcaccatgcaggccttggagatcgagctgcagtcccagctcagcatgaaagcatccctggagggcaacctggcggagacagagagccgctactgcatgcagctgtcccagatccaggggctgatcggcagtgtggaggagcagctggcccagcttcgctgcgagacggagcagcagaaccagcagtacaagatcctgctggacgtgaagacgcggctggagcaggagatcgccacctaccaccgcctgctagagggcgaggatgcccagctgctttgtcctggctcagtggggctctacttttccttcctcctgccctgaagcctgtggctctggcttgtccacccggagctgggggccctgcagaagccccctctctcccctcagcttctctgcccccctcctcagcccccctaagctgcctcttgccttcccagcctgagttggctggggagcttgtaaaacagccccaccagcaggcttatcctgagcggtgctgatgcgggagttggagcagggctgc

SEQ ID NO: 462094 - DNA, 2672 bp, Homo sapiens
gggggataggctaggtacgaggcgggttatcgacgggcactccgcagggtcgcgcgcaccttcacccctcttgctgcttttgtctggcacaaccttctcaggccctccgcgaggccggccctttttttctttcactttccccacccggagagccaggtgccgagaactaggacctcgtccccttctctatcccttcccctgatccatctcgtctctgttctccttcccttttccgttcccgaagccggaaggagccgaggtacccacggaaaaagtcgaagctgtccccggagagtgaggccttcacgaagcggtggcggaaggagccgaagttctctgatcggaggcgtgagcaagtggcatctccggaaagagccgaaacacggactcgagcttaatcccaggaggggcccgagggcgagatccggaaatctccggaaagagccgaaggccgggacggttaggattgtcggaagtggccgattgcttggacagggccggcggagaagatcggagcaagtccgtggaagaagccaaagactgggacggattgaattgttggaagaacccgaactcgcagaggggactgggcgcagtggcacacgaggacacacggaaacctccgaacggtgaggagataatctcggaaaagttacggaaacctgggaagtcggcgaaaccctacgttcgggtgttttcggaagcagccgaagcggccgcctgcttcgccttcgtccagtatccggagatagccgaggcgcttcggagccaggctcggggggaggggcaagctcgcgggcgggcgggcgggtgagggggcggagcccgggcggggcggggagggctgccggaggcttgattaggtaggaggtggcgaagcgcggcggcggccggaagtagccgaagccagcggcggaagtagccgaagcggctggagcgggcggcaaggcgaggcgaaagctgcacagggccctacgcggccgcctcagcatgtcggacttcgacgagttcgagcggcagctcaacgagaataaacaagagcgggacaaggagaaccggcatcggaagcgcagccacagccgctctcggagccgggaccgcaaacgccggagccggagccgcgaccggcgcaaccgggaccagcggagcgcctcccgggacaggcgacgacgcagcaaacctttgaccagaggcgctaaagaggagcacggtggactgatgtgagcttctcttcctgccccttcctccctgatgtccactcccttcaccttcctcacgcccgtgcaccctgtcccgcccatttccagccctggcccaagcactgggaagagtccacttaccttgaaaccagcacccctttcccaggccctgccccagaccctctccttccctggagagagtggagcttacctggttgcggggagggtgaaagggtgcctgggagggggctcgcaggcccactgttgtcgttccccccgccacgagaagaagaagaaggtccgtaaatactgggacgtgccacccccaggctttgagcacatcaccccaatgcagtacaaggccatgcaagattccagccactgctcttctccccaccatgaccctgacggtctggctgtgaccccaacgccggtgcccgtggtcgggagccagatgaccagacaagcccggcgcctctacgtgggcaacatcccctttggcatcactgagaatcccgagatcaaagagttgtttccatttctctttaaagtgaaatattgtggggctgagatccctcgtagcaacaaaaagtttgctaccatcgaggccatgatggatttcttcaacgcccagatgcgcctgggggggctgacccaggcccctggcaacccagtgttggctgtgcagattaaccaggacaagaattttgcctttttggagttccgctcagtggacgagactacccaggctatggcctttgatggcatcatcttccagggccagtcactaaagatccgcaggcctcacgactaccagccgcttcctggcatgtcagagaacccctccgtctatgtgcctgggattggcgctgtcctaagtgccctccatggacggcagttctacgacacagggattggcgctgtcctaagtgccctccatgcacggcagttctacgacacagggattggcgctgtcctaagtgccctccatggacggcagttctacgacacagggattggcgctgtcctaagtgccctccatggacggcagttctacgacacagggattggcgctgtcctaagtgccctccatggacggcagttctacgacacagggattggcgctgtcctaagtgccctccatgcacggcagactgtccaggttttgggagataacctggtactggaattgaagtcctcctcttctctacccataggagttgtgtccactgtggtccccgactctgcccacaagctgttcatcgggggcttacccaactacctgaacgatgaccaggtcaaagagctgctgacatcctttgggcccctcaaggccttcaacctggtcaaggacagtgccacggggctctccaagggctacgccttctgtgagtacgtggacatcaacgtcacggatcaggggacggggcgggaggcggccaacctgagataagtaccatgttgaaaattaaa

SEQ ID NO: 462095 - DNA, 1799 bp, Homo sapiens
atccaacagaatctggtccgttatgacacagaagtgaagggcctgctcaagctcacaggcccagtgagagagtgagctgggagctttctaccgtactctgttaccttcctgggtacacataagctctaaaacagaagtgtaactctagaggaaggaacaaaatatgaatccaagagttcaggtctatgttttgcatcattaatatgcaaattacttcatatatttataacataaattctgtgtgtcccagtgatgacagctaataagatactcattactggtccaaaactggaaagaaaatccgttggcccaggtgaagaagtccagtgaatgcgggaccgaggccctctggtggaggaacggaggaagtctccgccccgaaggaggccaggcaggatgaggcaacaccagccactgggtgcgtattcccaattaagcctttgaagcaaatacaagtttttctcaaactgtttccagtttattcctggagagagtttaagattcagaagcaaattcttcctcaatctgggaagcatctgcttgtaaacaaagaagccacagtaaccacagagctgagaaggcctgaagctacaacccattgcaatgaatgcggcacccagaagggtgcccgccccaccacagatcaatcggacagcaagaagaggtgaaacaggcacatcttaaagtgcccaaatgtaaaagcatgattcccaggaaatcctgtcttccaaacatgtttaaatcacataatcataattttattcaactaatcgcttccactgttgccatgagagcagaaaaggaaaaatgttcaagtacacggataatcagaacaaaaaaaagaggaagttaacttgcaagaattctattccaaatgctatgagataacccaatttgagagaggcaaacaaaacccacacgattgctttcatatcttcaaactgttagttaattcttaaaatgttgagatcaattaaacatctaagaaggaactgttgcttaaaactccactcaaaatgaagataagagagccaaggaatctcccaatctccctgttttgagggtttccacaaatccctgacattaggtcatttattccatttcaacacccttgcctgagagagtgcaatgatgtcagaattcattatggtaaactattctcaaaacaaatgttcctgccagcattcactcagcgggcactctggcaagctgtcagaacttggggttcatctcctgcactttacttcacaagcttcctgagctgggtgcatttccttccacttggaatcgttcccaacagctcggctgggaccaaggaggaaagggcctgcaggtccccggagcaccagctgctcgcgtgcacaaggcctaagaatgaaaagtggccagactgctctgacagcccagccagaagagcaactcgcctgcccttcacctgtcccctccactcccctaagctccgagtctctgagaaacaggaagtaagaacagtaaaaaactttctctggggccttgtggtcaccctcctgggaaatgatgtgacatctcctaagagtgctggtgcccctgacgggggcaggggaacagtctccagccacggctttggggtggggcacggacagatgaccgcgtgtctggcaggtgtgaatcctgactgctccatcacacttagcacagtgagcgtgtggagactgttctgagttcatcaagaagggccagatcacactaaaaaatgtgaactcaaaagtgaaccaccaaagctttatgagcccataacacaaagctggagaggaaagctc

SEQ ID NO: 462096 - DNA, 1321 bp, Homo sapiens
aatcctcccactagacactcccgcatggtagctggagcagcaaacaactgcttagggatttgaagccaggtgtcctaacttcctccatgggcgctcagcctggggaacctcagaacacttgctctaggatccagacactgtttaggagggtcaagaccttactcatcaaagccccgcctcccccccaacctccgcctccacccccatcctggaaccctggctgtacacacgtgtatgggtacgcgtttggccacatgcatgacaacaaccttgaacatctcccgtcacagcaggtactggacacaggagagcagctgatggtccccgtggaagtcctggaagtggataacaaggaggccttgtggaagtttctactctcaggagctatggccggggcggtgtctcgcacgggcacggcacctctggacagagccaaggtgtacatgcaggtctactcctccaagacgaacttcaccaacctgctgggggggctacagagcatggtccaggagggcggcttccgctccctgtggcggggcaacggcatcaacgtgctcaagattgctcctgagtatgccatcaagttctccgtattcgagcagtgcaagaattacttctgtggaatacaagggtccccgcccttccaggagcgtctccttgctggctccctggctgtggccatctcccagaccctcatcaaccccatggagaacttttttctattctccaccctctccttaatcctctctgcttaatccaccactcctcccatctaacatctaccatactttttacatttcatacataatccaaactatttatctctcatatttattttatactatatctattatatatctcatcatttttttctacatatcattttatttttacaccactttatatattaccatccctattacactatttcacctcatctacattataacctctttttcattaatttctcctctcattatatctaacccacacccatcattttctacattctcatccctcatcaacatcatttatttccatcacaaatcaataccttctatttacaccccatccaacactatctattattttccatctaccctctattatttactactcttccatcatcaaccaattcatcaacaaatcactatttattttcaatcctacaatctatttaactacttttttttaaacaaactactccactcttcttcttttctatctcacccaccactccctctattccttcttcccctccatccacactatccctcccatccactctaatccatctaatctctctatactactcctctcc

SEQ ID NO: 462097 - DNA, 1980 bp, Homo sapiens
cctgtttacgaaggagacgtgaggaaaaaagatagaacactgaggttcagagaggctaaggagctgccggaagtcatacaacgtattatgaccgcagccaaagggcctgacgcctgccttcattcaggccccagcaaagcctggggaagggctggccgagcggacttccaaaactcccaggttgtaagcgggccttgctgcggagagcgggacctgcgggctgcccggacgtcggacgccgtccggcttccatccgacagactggccccagttttatggtgccccgtggccacgaaggacaaaaggaaaggacgcacacagaagcagagtctgtatgacatgaagggtttggcaaagccccctgcaaggtctgtttcccgtcttctgctcctcttcacacacaagcgtgtgtgccacattcacactcctacacccacaactacggatctaacacacagtccccaaacatacactctgccaatgaatcaagacttacctggaaggctatgtcattaaaatcactggaattatattaaaattctaaaataggccagcaactgctggtagtgatgcctctgaagtggactaacggaaaacagcgcgtgacagaggacaacgtcttaaaaaacgctgattcttcaagtaactgtactccttggaatggtcaacccagtcccatctgtccttgattacttaatttgcagtcaccggggagttcaaaatgacttttccacagtgaagatggaagcacacctgggcagcagaacgagtgatgtgggctcagctcacagaccttctcacacagggatgtaacaggcggcagaaagaaggaattctccctccccgcgagaaggcttgggaaggacagtctccatgttccgggagactctggactttaaggaagattccttcctgctctagcttatcttttttagcttttttttaaagtattttttttgctgattaactccactctgccaatagtgtgtcctctcaaaggactccaagttcccacagtgcatatgtatccaattttattgctttgcacttgatatacggctttgtaactgctcaaggcatatttttgtgaacattatgtttctgtctcccatactctactctaagcttcttaacaataaaaatcatgccctgcccctgcttgggatttttaactatgactgcattaaatctataaattaattttaaagaaatgacatctttacaatattttgtatttctagccaggaacagtctgtttctccattaatgcaaagttttggtctccaagcaatcggttctgtgtttttgtttgtaggctcaattttaaaccacattttgtaaaggcacttctcaaaaggcaaagataaaaacactgaagctcttaagagcgcctgtctggctgccaagccattgttctactcaaatgtcgaatgaaaagggagaaacagaatgatgattgtatttgaattgcttccaaggaaaagtaacctccagcaaaactctaggcccactttgctagaaatcctggcacgtcggcaacagaaatggaggcagaaaattgcatctttcagaaagcagagtatcaaacaggaaaagccacaaggagtgaggtgctgtgaggttcccgtggtgcaggatccattttatcctttctacttcttcctgctgaaaatgagattatttaaaacaatttaaaagacaattttccctgcaaggggccttttggaaatgagtcaaagtcaaatcccttgttttacgtaaaattaacgtatgacatttcaaagttaccaaactaaaaaaaaggaaaataaatataaacacattccaaaacttaaaaatgaaggagatttcagacagtccctcctggtaaaatgtgaaattgcaccccagctgcagtagctactgtaaatatccaaggaatcagttttaagtgtttggggatcccagggatccctgcaaagcactcaggattttaacatt

SEQ ID NO: 462098 - DNA, 1160 bp, Homo sapiens
  misc_feature (2)..(2): n is a, c, g, or t
  misc_feature (5)..(5): n is a, c, g, or t
  misc_feature (7)..(9): n is a, c, g, or t
  misc_feature (11)..(11): n is a, c, g, or t
  misc_feature (13)..(13): n is a, c, g, or t
  misc_feature (15)..(15): n is a, c, g, or t
gngtngnnnangncnggggcttctggtgggcactgacctgcaatctctgtccccaggctctcggctgagcaaaatctattcccagtccaccctgtcactgtccactgtggccaacgaggcccacaataacctcggggtgaagaggcccacgtctcgccgcctgcctggaagccgcgaacgggactgggaaaatggcagcaatgcctcctccccagcgtcagtgcccgagtacacaggtccacggctgtacaaagaacccagcgccaagtccaacaagttcatcatccacaatgccctatcacactgctgcctggcgggcaaggtgaacgaaccgcagaagaatcgcattctggaggaaattgagaaaagcaaggccaaccacttcctgatcctctttcgcgactcgagctgccagttccgggcgctctacacgctgtcgggggagacagaggactgtcgcggctggcagggtatgggccccggaccgtcacgcccgccatggtggaaggcatctacaagtacaactcggaccgcaagcgcttcacccagatccccgccaagaccatgtccatgagcgtcgatgccttcaccatccagggacacctctggcagggcaagaaacccaccactcccaagaagggcggcggcacccccaaatagccccacccgggcggtccacgggccgggccctgctgtgctgcggccgccatcccctggaggacagtcagtcggtattcctgggtcctgtctgtccccaaccgtgtctgggtggggctggagtctccaccctctgactttgagtccagtcctgctgtgggggctgagctgggaggttcagggactcagggctcagctcagtccccttgtctgtcctcccccacttcttgaataaaataatttaaagagaagttgaaccttgtccccccctccgaggctggccggggtcccacactccctggctgtgtttttagtctcctgttctttctcaaaccaactcctgtcttcaacccccataatcccctaatgcagcttcagccagggcactcccagcccccagccagggctgtttcgaagctgcctctgaactgatctctcaggctcgaggtgtcccactggcccttcctgtggccttggccacccccgcttgctggattctcctg

SEQ ID NO: 462099 - DNA, 3116 bp, Homo sapiens
ccgccaaccgttttcttcctcatcccgcacccttttcttcccatgtctgccttagtcttcttcccaccctcttctcctctccccatcgccttcttcccaccctcttctcctctccccatcgccttcttcccaccctcttctcctctcccaatcgtcttctttcccagcctcttctccattttcttgccgcctccatatccccaccttcttctcgcagcagcgtcttcctgccgcgcttttctctcccctcaccatcttctcttcctcttccccaccgtcctctccccacgccctcttctcctcactgtcttctccccgcgccttccccacaaccgttttctcccccgttttcttcccctcacaccgttttcttcccatgtcctcccaccgtctcgcagcagcgtctgtcagtcgcaatcttcttcccactttcttctctccccctcccatcgtcttttttccccagcctcttattctccgccatcttcttcccctccccaccttctcgcagcagcgacttcctgccgcgtttttctctccccgcaccctcttctcccctcttccactccccaccgtcttcgcccccgatcgtcttcttgcccacccccttctcgcgctctccaactgcctttcacctagaagcgctccacgcgtgcgcccgcctgtgtccctgcgcctggtgtgtctgtgcgcccagccagccccatgagctgggcccctgagctccgccccaacagccaacaggagacccagaaggtcatgggaacatacagagacctacagggaagacggccatgggacaagggaggcagagtctggagttacgctgcctacagtcacggaatgccaaggacagctggaaaccaccagaagctaagaaggagattttacctgaaagcctctcaaagaaatcaatcatactcacacctcctttttgaatttctggcctcgtgaatggtgaaaaaataaatttctgtcgtcttaagccccacggtttgtagtcatttgttctgttcctagccttaggaaactaacacagcatgctaagggaaaagaagaaaattctgcataaaatgtcattttactttttaaaacaactactgttgacagtaaatgagtattcttccaagattcatatgcagaacatatatgcagcccggaacattttttgggacccatggcataagtgattatgatcgataaaatccaaatattaacctgccaaaagagttattttatcttttgcagtcatttaaaggtaataagcagaggtcatgagccctataaaaattaatctattcatttgttgtcacttgatacttacgatccgttgacatatttaggttttaattctttgtacagattatgcttcatactggctacaggtggatgatgcccacctggctgccgatgacttctgcaccaagtgaggctgggtctctggagctgccccaggggctggacaagctgaccctgcctggagccaacctggagatgcagcctgagaacctcaaggaggacctggtctacctgaagaagaaccatgaggagaaggttctaggtcccagggactccaacccaaggatagagatccaaggtcctgccggggcggtcaggaggtcttacatgccctgtcctgtggcttccttctcagctgagctctgtgctgctctaagctgggggagcctactccctgagaagcaggacacccggaaggtggacaaggatgtcagtgtgaagatggacactgtgcctggagtgaacctgagctgcatcctgaatgagatgcgtgaccaggacaagaaactggtggagaagagctgcaaggatgcccagggctggttcttcagcgtggaacagcccctttcctgtgccccacttgtgaaagtctccataaacccctgtggcccactctgccttccagagagaggggctgaactgcaaggtggccaccaacacagaggccctgcagagcggcaggatggagatgtggagctctacatctctgtgcagaacctgagccgtcccagctcagcaaggacccagctggcccagctgcaggggctcatcagaagcatggaacagcagctgtgcgagctctgctgtgatgcagagcaccaggaccacgagcaccaggtccttctggacgtgaagacgcggctggagcaggagatcgccacctacagccgcttgctagaggttgaggacgcccactgagtgtgtcctggagtctccatgcttagtcacacgttgcagctttttgctccccgaaaatggtgaagtccatctatagtctaacgacagtctctcctgctttaattgggtctatttgttgggtcctctgggacatggaaaaaccacttgctcagcttctccttgtaaattcctggtgagtgcctccaggcctactgctgtgctgtttctttttcttcttcctgctgcactgaacccctgccctttcattcttgggcctgtgctaatttctgtgcattcccaactgtgatttttcaccaatttaggggaacctcctctgccagggcctgcttctccccagcagtgcttgcaggggcctgggctggctggcatccctgggtcgatgggtgctcctctccctgcaggctggccactcagtactccttgtccctggcctcgcagcccacccgggaagccacagtgaccagccaccaggtgtgccatcgtggaggaagtccaggttggagaggtggtcttctgtaagcaggtccatctctccacccactgaggcccctttctgcctgtgacagccccacctcgagggtcatggcacagccatcagctgcagctcccagcatgctactgccacgccccgagtgtccgtctgggcactggtccatgacctgttgtctttctgtatctactttctgcagcccctcactgaggaggcctcctgggtttgtccagtgcctgctattaaagctttgctccaagttcaatgcctcgtgtgatctggtctgttcattggtttggggcagtgtgggctgagggactgggataggtggagagtttattgagtgtttgggtattggcttgtcacctgccaatctgttctgcccactccatccaggcctggggctcct

SEQ ID NO: 462100 - DNA, 456 bp, Homo sapiens
gcattcccaactgtgatttttcaccaatttaggggaacctcctctgccagggcctgcttctccccagcagtgcttgcaggggcctgggctggctggcatccctgggtcgatgggtgctcctctccctgcaggctggccactcagtactccttgtccctggcctcgcagcccacccgggaaggtaagaagctgccctgtcctgctgtgtggaccccaaggcggcggagaggctgaggacccttctgtgtgggagactggggggaccacagactcgggcaggtggggggaagagctcctgcctgatgttccctgtgcctccctcctccatcgcctgcagccacagtgaccagccaccaggtgtgccatcgtggaggaagtccaggttggagaggtggtcttctgtaagcaggtccatctctccacccactgaggcccctttctgcctgtgacagcccc

SEQ ID NO: 462101 - DNA, 3208 bp, Homo sapiens
ccgccaaccgttttcttcctcatcccgcacccttttcttcccatgtctgccttagtcttcttcccaccctcttctcctctccccatcgccttcttcccaccctcttctcctctccccatcgccttcttcccaccctcttctcctctcccaatcgtcttctttcccagcctcttctccattttcttgccgcctccatatccccaccttcttctcgcagcagcgtcttcctgccgcgcttttctctcccctcaccatcttctcttcctcttccccaccgtcctctccccacgccctcttctcctcactgtcttctccccgcgccttccccacaaccgttttctcccccgttttcttcccctcacaccgttttcttcccatgtcctcccaccgtctcgcagcagcgtctgtcagtcgcaatcttcttcccactttcttctctccccctcccatcgtcttttttccccagcctcttattctccgccatcttcttcccctccccaccttctcgcagcagcgacttcctgccgcgtttttctctccccgcaccctcttctcccctcttccactccccaccgtcttcgcccccgatcgtcttcttgcccacccccttctcgcgctctccaactgcctttcacctagaagcgctccacgcgtgcgcccgcctgtgtccctgcgcctggtgtgtctgtgcgcccagccagccccatgagctgggcccctgagctccgccccaacagccaacaggagacccaggagagtcgctgccagggccatcacggctgccgccgcccccgcccccgccgctacctcagaactgaacagtgttggctgcgggcgaaaggcagaaggtcatgggaacatacagagacctacagggaagacggccatgggacaagggaggcagagtctggagttacgctgcctacagtcacggaatgccaaggacagctggaaaccaccagaagctaagaaggagattttacctgaaagcctctcaaagaaatcaatcatactcacacctcctttttgaatttctggcctcgtgaatggtgaaaaaataaatttctgtcgtcttaagccccacggtttgtagtcatttgttctgttcctagccttaggaaactaacacagcatgctaagggaaaagaagaaaattctgcataaaatgtcattttactttttaaaacaactactgttgacagtaaatgagtattcttccaagattcatatgcagaacatatatgcagcccggaacattttttgggacccatggcataagtgattatgatcgataaaatccaaatattaacctgccaaaagagttattttatcttttgcagtcatttaaaggtaataagcagaggtcatgagccctataaaaattaatctattcatttgttgtcacttgatacttacgatccgttgacatatttaggttttaattctttgtacagattatgcttcatactggctacaggtggatgatgcccacctggctgccgatgacttctgcaccaagtgaggctgggtctctggagctgccccaggggctggacaagctgaccctgcctggagccaacctggagatgcagcctgagaacctcaaggaggacctggtctacctgaagaagaaccatgaggagaaggttctaggtcccagggactccaacccaaggatagagatccaaggtcctgccggggcggtcaggaggtcttacatgccctgtcctgtggcttccttctcagctgagctctgtgctgctctaagctgggggagcctactccctgagaagcaggacacccggaaggtggacaaggatgtcagtgtgaagatggacactgtgcctggagtgaacctgagctgcatcctgaatgagatgcgtgaccaggacaagaaactggtggagaagagctgcaaggatgcccagggctggttcttcagcgtggaacagcccctttcctgtgccccacttgtgaaagtctccataaacccctgtggcccactctgccttccagagagaggggctgaactgcaaggtggccaccaacacagaggccctgcagagcggcaggatggagatgtggagctctacatctctgtgcagaacctgagccgtcccagctcagcaaggacccagctggcccagctgcaggggctcatcagaagcatggaacagcagctgtgcgagctctgctgtgatgcagagcaccaggaccacgagcaccaggtccttctggacgtgaagacgcggctggagcaggagatcgccacctacagccgcttgctagaggttgaggacgcccactgagtgtgtcctggagtctccatgcttagtcacacgttgcagctttttgctccccgaaaatggtgaagtccatctatagtctaacgacagtctctcctgctttaattgggtctatttgttgggtcctctgggacatggaaaaaccacttgctcagcttctccttgtaaattcctggtgagtgcctccaggcctactgctgtgctgtttctttttcttcttcctgctgcactgaacccctgccctttcattcttgggcctgtgctaatttctgtgcattcccaactgtgatttttcaccaatttaggggaacctcctctgccagggcctgcttctccccagcagtgcttgcaggggcctgggctggctggcatccctgggtcgatgggtgctcctctccctgcaggctggccactcagtactccttgtccctggcctcgcagcccacccgggaagccacagtgaccagccaccaggtgtgccatcgtggaggaagtccaggttggagaggtggtcttctgtaagcaggtccatctctccacccactgaggcccctttctgcctgtgacagccccacctcgagggtcatggcacagccatcagctgcagctcccagcatgctactgccacgccccgagtgtccgtctgggcactggtccatgacctgttgtctttctgtatctactttctgcagcccctcactgaggaggcctcctgggtttgtccagtgcctgctattaaagctttgctccaagttcaatgcctcgtgtgatctggtctgttcattggtttggggcagtgtgggctgagggactgggataggtggagagtttattgagtgtttgggtattggcttgtcacctgccaatctgttctgcccactccatccaggcctggggctcct

SEQ ID NO: 462102 - DNA, 2628 bp, Homo sapiens
gctctgtcaactctccatgctattttataataatcaacactaatgaaaagaaagggggctttataacagaggcagaactcattatgttctaaaaaatacacgcatgtttcccatgttgaatagtgtcccgcagaaagtcatgtccagctggaacccaggaatgttaaactatttggaaacagggtctctgcagataacacttggttaagacaaggtcacaatgcattagggtgggctgtaaagccaatggctgtgtcctttcaggaaggtcatgggaacatacagagacctacagggaagacggccatgggacaagggaggcagagtctggagttacgctgcctacagtcacggaatgccaaggacagctggaaaccaccagaagctaagaaggagattttacctgaaagcctctcaaagaaatcaatcatactcacacctcctttttgaatttctggcctcgtgaatggtgaaaaaataaatttctgtcgtcttaagccccacggtttgtagtcatttgttctgttcctagccttaggaaactaacacagcatgctaagggaaaagaagaaaattctgcataaaatgtcattttactttttaaaacaactactgttgacagtaaatgagtattcttccaagattcatatgcagaacatatatgcagcccggaacattttttgggacccatggcataagtgattatgatcgataaaatccaaatattaacctgccaaaagagttattttatcttttgcagtcatttaaaggtaataagcagaggtcatgagccctataaaaattaatctattcatttgttgtcacttgatacttacgatccgttgacatatttaggttttaattctttgtacagattatgcttcatactggctacaggtggatgatgcccacctggctgccgatgacttctgcaccaagtgaggctgggtctctggagctgccccaggggctggacaagctgaccctgcctggagccaacctggagatgcagcctgagaacctcaaggaggacctggtctacctgaagaagaaccatgaggagaaggttctaggtcccagggactccaacccaaggatagagatccaaggtcctgccggggcggtcaggaggtcttacatgccctgtcctgtggcttccttctcagctgagctctgtgctgctctaagctgggggagcctactccctgagaagcaggacacccggaaggtggacaaggatgtcagtgtgaagatggacactgtgcctggagtgaacctgagctgcatcctgaatgagatgcgtgaccaggacaagaaactggtggagaagagctgcaaggatgcccagggctggttcttcagcgtggaacagcccctttcctgtgccccacttgtgaaagtctccataaacccctgtggcccactctgccttccagagagaggggctgaactgcaaggtggccaccaacacagaggccctgcagagcggcaggatggagatgtggagctctacatctctgtgcagaacctgagccgtcccagctcagcaaggacccagctggcccagctgcaggggctcatcagaagcatggaacagcagctgtgcgagctctgctgtgatgcagagcaccaggaccacgagcaccaggtccttctggacgtgaagacgcggctggagcaggagatcgccacctacagccgcttgctagaggttgaggacgcccactgagtgtgtcctggagtctccatgcttagtcacacgttgcagctttttgctccccgaaaatggtgaagtccatctatagtctaacgacagtctctcctgctttaattgggtctatttgttgggtcctctgggacatggaaaaaccacttgctcagcttctccttgtaaattcctggtgagtgcctccaggcctactgctgtgctgtttctttttcttcttcctgctgcactgaacccctgccctttcattcttgggcctgtgctaatttctgtgcattcccaactgtgatttttcaccaatttaggggaacctcctctgccagggcctgcttctccccagcagtgcttgcaggggcctgggctggctggcatccctgggtcgatgggtgctcctctccctgcaggctggccactcagtactccttgtccctggcctcgcagcccacccgggaagccacagtgaccagccaccaggtgtgccatcgtggaggaagtccaggttggagaggtggtcttctgtaagcaggtccatctctccacccactgaggcccctttctgcctgtgacagccccacctcgagggtcatggcacagccatcagctgcagctcccagcatgctactgccacgccccgagtgtccgtctgggcactggtccatgacctgttgtctttctgtatctactttctgcagcccctcactgaggaggcctcctgggtttgtccagtgcctgctattaaagctttgctccaagttcaatgcctcgtgtgatctggtctgttcattggtttggggcagtgtgggctgagggactgggataggtggagagtttattgagtgtttgggtattggcttgtcacctgccaatctgttctgcccactccatccaggcctggggctcct

SEQ ID NO: 462103 - DNA, 636 bp, Homo sapiens
ttctaatagttgctgtttgttgcacagaatggacaaatcatagtttatatagtcatgcagtatttatgagaatgttgactcttacttgggtagataaggtacttaaagaaaatgtaattaatagttgatgttgttaaatcttggctggagagttgtttaagggtgttcataaatgagtaaatgaatgaatgaacaaacacatgaataaaacaagagagggcaaacatgggacaaaggtgatcatatctcattgtcgtaaattctttttatgtagcttcagcatccgtttttaacctaagtttaactttctcattccagaagcaggcttagtcacccttgacacagtttgcagttatccacctcctccaagttcttaatatgttagatccagataactgccttgtacagccacctccaggatactgcctccctaaaaaacagctagatacactgaccccacagcctatgtggaccacacagatatactggcttgctctaaatgcaccagtgagaactctctgcaggaaacctgcttgggaaatgccatagcctgcaatacaggctttccccttcccgctggccctgtgaggcatgcaggatctgtaagtaataaactgcttctgttgtttcatttca

SEQ ID NO: 462104 - DNA, 782 bp, Homo sapiens
aaccagagacagccaagcatgtaccaatgatggcaatgtgttcctcactccccagctttataaatatataattgataaatcagtattgtatgtatttgtattgtatttaaattgtacagtgtgacattttgatatacatatatattgtgaaatgattaccataatcaagcgaattaacatacccatcacctcatgtagttccgtttttccatgtgtgcagtgagaatacttaaggtctactcttttagcaaatttcaagcatgaaatacattattgttaactatagtcaccgtactctgcattgggttaccagaacttactcctaactgcatcttactcctaagtttgcatcctctcactaagatctccagattcctctcactcctgacccctagtaactacctttctagtctctgcttctgtgaggttattccaaaacaaaagccaggttctaggctgttgaggctgagggtaggaagtgtatcaacaggtatacagaatagtcactggtcttgggctaaatggtgacttcaagtgtagtggctgcatagtcaaaaatgaattagatgagtacaaaagtgacgaaatgaaagaatgtcaagaatggaccacaaagacagtgttttatgacctaaagattaagatttatccatttgtgtacaattgtggactatataaaataaaacaagactttgacctcagtggataagaagtatttggatgtactaatcaatatttttggtctgggtcagtggtgggttcatctgtgtttgttgtattta

SEQ ID NO: 462105 - DNA, 456 bp, Homo sapiens
aaatctaggttttttcatcctttttaatatcagccttgtgttccacagaatggaggctccagagtgaaattaatgacactttgtcgatgaagatcttgattgtgacctctgtggaaaatgagccatgaaccaaccaataagcaggcttagtcacccttgacacagtttgcagttatccacctcctccaagttcttaatatgttagatccagataactgccttgtacagccacctccaggatactgcctccctaaaaaacagctagatacactgaccccacagcctatgtggaccacacagatatactggcttgctctaaatgcaccagtgagaactctctgcaggaaacctgcttgggaaatgccatagcctgcaatacaggctttccccttcccgctggccctgtgaggcatgcaggatctgtaagtaataaactgcttctgttgtttcatttca

SEQ ID NO: 462106 - DNA, 400 bp, Homo sapiens
cttcattctgcagctgaggctcactgcccccagtgggcagtgggtccagggggtttctgaggacagggcatgacccagccctgctgcccccaagatggcacctggcttggaggggtgaggggccctgttagtctgactttgaagaagaccagccttccagactcgcttggtgccctgacaggagccctgggtcccccagtgttgcctgggtctgactttgcctcagtgaaaactgcctcgaattctttcttgcaccgatgggcagatgggcagtgtcggaggatcgtgtcatctgtcccgtggcgctggttggcttggtcaagtcagtgttcaaactatctcctgctctttcaaggggatctggggctctagaaggtaagtatggctacacatttagggg

SEQ ID NO: 462107 - DNA, 2393 bp, Homo sapiens
  misc_feature (1798)..(1798): n is a, c, g, or t
  misc_feature (1905)..(1905): n is a, c, g, or t
agatgggctctgactgtcaacatgaccttcctctcccaggtcctcagtttccccatgtctgcagggagggtttcggtggtggtcttctcactgtgctcctgtagctctggggttcctaagaggtgcctgcgggggtccctgggaaacagtaatgagaggaggtggctggcccaacaggtggagctcagggacacccattgctgccttagttccaccagctgctcctataaattgggaagaggaatccgaggccttgggacctacacccaccctcacacccgggcccacgctcactttaataacccggactgggcaaggactaagtccagccagagcgtcagcctcgctggcgtcctcactggccatggccctgcagccttgctcttcagttcctggaagcctcctgcccttggtggacaaccattttgctctctagcaaatggatagaaaagtttattgaattggtggcggcaggtgtaagtaattgctgagatttgggtttggggagtgggctcacgagtgtttatgacattattataaatgaatatatgagtgcataaattagcaaaataaaagggggcttttctggaccaatgatgagacagtgtttatgaacaaaagatcatgattaatccagttctgcacaaaacactgaggtccattagaagacaataggtcttggctgtttcattccttttaagagctgtttaatattccacggtatgtatgcaccattgttgattacactcttctactgttgaaaatcccagctgaaagtgctctgggggaggagaagctttggtcacagtcctagccgtcagggtgggtcacagattcataggtgttcattaaattattttttaaaaaagaatacataaaaatggtgcttaatgcagatcagtgaggaagcgtgtcacaaatcgaggttttaattaatacgattctgctcaactaatgcccgataaaaaagatctaagctgtttccattttttgttgctgttaccaacgacactgcagtgagcattcttgcagctaaatctgtaaacacatcctcgactgttcctttaccccagcttcttagagatggggtggtgggttaaattgtttgcaaaagtttattttcattgagtgatctttctaaaatggcattttgaccttgttactgtcttgctttaaagcctccatctgacttcctggagcttccgggacggggtccaaaaaataaggccttatcctggcatggaagaccctttagggtctgttcttggaacttgccagcctcagcccctccccactggtgtttacctgctaggcgcacctcacccccacggggctacctgtttctctcagcgggctccctacttcttaggctttgcgcggccgtgccttttcagccagtttctccccggccttaaagagcaggcttgaaatatccctgttggggagcccaaagttagatgggccccacgaaacactgtgttcagaagcccaccgaagccctgaccctggaagtgggatgcctcattgacatttttttcccaattaaagggaatgttttgcatttttctagaattgatgaaactggtcaactgttactcaccctccttcctttgtccctttctaggagccctgggtcccccagtgttgcctgggtctgactttgcctcagtgaaaactgcctcgaattctttcttgcaccgatgggcagatgggcagtgtcggaggatcgtgtcatctgtcccgtggcgctgggtaagtctgcagtgttgtaaagctgcaaacacccttctgggtgggngctcaggctggcacccccccactgccccagcctgcgctataccacgttcccctgatgcttgccttgtgccgggccccagaacccagtgtcatggggttcacagcgcngggagtagcgtctcagtgttgtgagttcctggggatgaaggttcggggtaatgaattacagctttggaaatggcctgatttcccattatggctccctccttgcccagaggtaaaacgggtctggtccccagaacaggaggaggacatgtgatgactggagtaacgatgaggggctctggggaaggacagggctgagagcaagtgctgggacctttgggaccgagtcatattctaaaaagagcacaggctttgggggagaggagctgtgaggccaaggcagcattcccctggggagcttgtcaggagtaacaggagccactggcagtgtttgggcttttggtccctttttttctctcccaggggaagggagaaggaggcattgcaggaagccagccaccctgagcacagacccagctacagaacagacttgagctgcgtgtccttggcaaatccccaagtgtttctgtgccttggtttcctgatattaa

SEQ ID NO: 462108 - DNA, 2405 bp, Homo sapiens
agatgggctctgactgtcaacatgaccttcctctcccaggtcctcagtttccccatgtctgcagggagggtttcggtggtggtcttctcactgtgctcctgtagctctggggttcctaagaggtgcctgcgggggtccctgggaaacagtaatgagaggaggtggctggcccaacaggtggagctcagggacacccattgctgccttagttccaccagctgctcctataaattgggaagaggaatccgaggccttgggacctacacccaccctcacacccgggcccacgctcactttaataacccggactgggcaaggactaagtccagccagagcgtcagcctcgctggcgtcctcactggccatggccctgcagccttgctcttcagttcctggaagcctcctgcccttggtggacaaccattttgctctctagcaaatggatagaaaagtttattgaattggtggcggcaggtgtaagtaattgctgagatttgggtttggggagtgggctcacgagtgtttatgacattattataaatgaatatatgagtgcataaattagcaaaataaaagggggcttttctggaccaatgatgagacagtgtttatgaacaaaagatcatgattaatccagttctgcacaaaacactgaggtccattagaagacaataggtcttggctgtttcattccttttaagagctgtttaatattccacggtatgtatgcaccattgttgattacactcttctactgttgaaaatcccagctgaaagtgctctgggggaggagaagctttggtcacagtcctagccgtcagggtgggtcacagattcataggtgttcattaaattattttttaaaaaagaatacataaaaatggtgcttaatgcagatcagtgaggaagcgtgtcacaaatcgaggttttaattaatacgattctgctcaactaatgcccgataaaaaagatctaagctgtttccattttttgttgctgttaccaacgacactgcagtgagcattcttgcagctaaatctgtaaacacatcctcgactgttcctttaccccagcttcttagagatggggtggtgggttaaattgtttgcaaaagtttattttcattgagtgatctttctaaaatggcattttgaccttgttactgtcttgctttaaagcctccatctgacttcctggagcttccgggacggggtccaaaaaataaggccttatcctggcatggaagaccctttagggtctgttcttggaacttgccagcctcagcccctccccactggtgtttacctgctaggcgcacctcacccccacggggctacctgtttctctcagcgggctccctacttcttaggctttgcgcggccgtgccttttcagccagtttctccccggccttaaagagcaggcttgaaatatccctgttggggagcccaaagttagatgggccccacgaaacactgtgttcagaagcccaccgaagccctgaccctggaagtgggatgcctcattgacatttttttcccaattaaagggaatgttttgcatttttctagaattgatgaaactggtcaactgttactcaccctccttcctttgtccctttctaggagccctgggtcccccagtgttgcctgggtctgactttgcctcagtgaaaactgcctcgaattctttcttgcaccgatgggcagatgggcagtgtcggaggatcgtgtcatctgtcccgtggcgctggttggcttggtcaagtcagtgttcaaactatctcctgctctttcaaggggatctggggctctagaagattagaggacttggagaggttagtgacttgctcgaggtcggctaggaagcaagacccaggattccaactcaggtctgtgtgattcctctgcaaaatggagaggtggaaggatggatgtcaggtctgatggatggatggatgcctacatcaagatacatgcatagatggagagatggctggctacctcatgaatgctggactgttgtgagaatcaaacgagataatgtatgctgaggcatgctgtgaacactacgtgctgggtacaggagaatggaggctccagagtgaaattaatgacactttgtcgatgaagatcttgattgtgacctctgtggaaaatgagccatgaaccaaccaatgataagtctacttttcttccacgtaacaaccacaggatagatgacattcattttctaagaaacaaaatcttggcagttagatccgtggggtaaagaatatagatactaatgtaagttaacacctcaagttcatgtccttggtttggatgctttgttcaggagtgtttagtggtatttcaaaggaatcaatatctataacaaattaaaataaccaggaatggaccagtg

SEQ ID NO: 462109 - DNA, 1250 bp, Homo sapiens
ccaccatctatgtagcattccaatattcttgattgactcataaatttcttttacagttggcttggtcaagtcagtgttcaaactatctcctgctctttcaaggggatctggggctctagaagattagaggacttggagaggttagtgacttgctcgaggtcggctaggaagcaagacccaggattccaactcaggtctgtgtgattcctctgcaaaatggagaggtggaaggatggatgtcaggtctgatggatggatggatgcctacatcaagatacatgcatagatggagagatggctggctacctcatgaatgctggactgttgtgagaatcaaacgagataatgtatgctgaggcatgctgtgaacactacgtgctgggtacaggagaatggaggctccagagtgaaattaatgacactttgtcgatgaagatcttgattgtgacctctgtggaaaatgagccatgaaccaaccaatatgaaaaataaaagaaatctacatggatcccactttggacaaagtgcgtgtcaacagttgcatgaaatggtatttcacttcttgattattgtttgtttttattctttttttagaaaaaatgaataaatgatcaaattattttgggggtaattaaataaaagaaagaacacaagtgagtcagtaaatgcttaaattaaggtagatcttggatcattgcttcatggcacactctcagaaatgctcaaatatggtgccttaaaaaaattaatgaggtttgggtgttgatgtggttagggagtatacagatagatagttgttagtggttacatttattactcttgcattgggtggatttaagggttcattatattaagaattaaacagtaagtaaattcatacataaaaggtatggttattcttgagtcaataatgagaatgtgttaggaaccaaggtttatgattaatctaaaataatttctaaaagaagttaagtctttgctgtttcgttctttctaaaatgtgtattttccttcacacaatgaacatgccacagctaattattcgataacaataaagacattggtgttttgcctctgtggttaaggagctcagagtctgttgtagataatagttaaagttcatgtcctgggtttaggtggcttgttcatcactaaattatgttagaagaataaaccgctaaatatatacatatataaaaagcataccatacaagaaccaataatggaagtgaaccaaggtttatgattag

SEQ ID NO: 462110 - DNA, 184 bp, Homo sapiens
gcccccaagatggcacctggcttggaggggtgaggggccctgttagtctgactttgaagaagaccagccttccagactcgcttggtgccctgacaggtatgtgtgctcttctctctcccacctaacagccccttttgggagacagggtctgagaggagtcagggtcgtataaccttaacacagt

SEQ ID NO: 462111 - DNA, 2946 bp, Homo sapiens
agatgggctctgactgtcaacatgaccttcctctcccaggtcctcagtttccccatgtctgcagggagggtttcggtggtggtcttctcactgtgctcctgtagctctggggttcctaagaggtgcctgcgggggtccctgggaaacagtaatgagaggaggtggctggcccaacaggtggagctcagggacacccattgctgccttagttccaccagctgctcctataaattgggaagaggaatccgaggccttgggacctacacccaccctcacacccgggcccacgctcactttaataacccggactgggcaaggactaagtccagccagagcgtcagcctcgctggcgtcctcactggccatggccctgcagccttgctcttcagttcctggaagcctcctgcccttggtggacaaccattttgctctctagcaaatggatagaaaagtttattgaattggtggcggcaggtgtaagtaattgctgagatttgggtttggggagtgggctcacgagtgtttatgacattattataaatgaatatatgagtgcataaattagcaaaataaaagggggcttttctggaccaatgatgagacagtgtttatgaacaaaagatcatgattaatccagttctgcacaaaacactgaggtccattagaagacaataggtcttggctgtttcattccttttaagagctgtttaatattccacggtatgtatgcaccattgttgattacactcttctactgttgaaaatcccagctgaaagtgctctgggggaggagaagctttggtcacagtcctagccgtcagggtgggtcacagattcataggtgttcattaaattattttttaaaaaagaatacataaaaatggtgcttaatgcagatcagtgaggaagcgtgtcacaaatcgaggttttaattaatacgattctgctcaactaatgcccgataaaaaagatctaagctgtttccattttttgttgctgttaccaacgacactgcagtgagcattcttgcagctaaatctgtaaacacatcctcgactgttcctttaccccagcttcttagagatggggtggtgggttaaattgtttgcaaaagtttattttcattgagtgatctttctaaaatggcattttgaccttgttactgtcttgctttaaagcctccatctgacttcctggagcttccgggacggggtccaaaaaataaggccttatcctggcatggaagaccctttagggtctgttcttggaacttgccagcctcagcccctccccactggtgtttacctgctaggcgcacctcacccccacggggctacctgtttctctcagcgggctccctacttcttaggctttgcgcggccgtgccttttcagccagtttctccccggccttaaagagcaggcttgaaatatccctgttggggagcccaaagttagatgggccccacgaaacactgtgttcagaagcccaccgaagccctgaccctggaagtgggatgcctcattgacatttttttcccaattaaagggaatgttttgcatttttctagaattgatgaaactggtcaactgttactcaccctccttcctttgtccctttctaggagccctgggtcccccagtgttgcctgggtctgactttgcctcagtgaaaactgcctcgaattctttcttgcaccgatgggcagatgggcagtgtcggaggatcgtgtcatctgtcccgtggcgctggttggcttggtcaagtcagtgttcaaactatctcctgctctttcaaggggatctggggctctagaagattagaggacttggagaggttagtgacttgctcgaggtcggctaggaagcaagacccaggattccaactcaggtctgtgtgattcctctgcaaaatggagaggtggaaggatggatgtcaggtctgatggatggatggatgcctacatcaagatacatgcatagatggagagatggctggctacctcatgaatgctggactgttgtgagaatcaaacgagataatgtatgctgaggcatgctgtgaacactacgtgctgggtacaggagaatggaggctccagagtgaaattaatgacactttgtcgatgaagatcttgattgtgacctctgtggaaaatgagccatgaaccaaccaatatgaaaaataaaagaaatctacatggatcccactttggacaaagtgcgtgtcaacagttgcatgaaatggtatttcacttcttgattattgtttgtttttattctttttttagaaaaaatgaataaatgatcaaattattttgggggtaattaaataaaagaaagaacacaagtgagtcagtaaatgcttaaattaaggtagatcttggatcattgcttcatggcacactctcagaaatgctcaaatatggtgccttaaaaaaattaatgaggtttgggtgttgatgtggttagggagtatacagatagatagttgttagtggttacatttattactcttgcattgggtggatttaagggttcattatattaagaattaaacagtaagtaaattcatacataaaaggtatggttattcttgagtcaataatgagaatgtgttaggaaccaaggtttatgattaatctaaaataatttctaaaagaagttaagtctttgctgtttcgttctttctaaaatgtgtattttccttcacacaatgaacatgccacagctaattattcgataacaataaagacattggtgttttgcctctgtggttaaggagctcagagtctgttgtagataatagttaaagttcatgtcctgggtttaggtggcttgttcatcactaaattatgttagaagaataaaccgctaaatatatacatatataaaaagcataccatacaagaaccaataatggaagtgaaccaaggtttatgattag

SEQ ID NO: 462112 - DNA, 2495 bp, Homo sapiens
agatgggctctgactgtcaacatgaccttcctctcccaggtcctcagtttccccatgtctgcagggagggtttcggtggtggtcttctcactgtgctcctgtagctctggggttcctaagaggtgcctgcgggggtccctgggaaacagtaatgagaggaggtggctggcccaacaggtggagctcagggacacccattgctgccttagttccaccagctgctcctataaattgggaagaggaatccgaggccttgggacctacacccaccctcacacccgggcccacgctcactttaataacccggactgggcaaggactaagtccagccagagcgtcagcctcgctggcgtcctcactggccatggccctgcagccttgctcttcagttcctggaagcctcctgcccttggtggacaaccattttgctctctagcaaatggatagaaaagtttattgaattggtggcggcaggtgtaagtaattgctgagatttgggtttggggagtgggctcacgagtgtttatgacattattataaatgaatatatgagtgcataaattagcaaaataaaagggggcttttctggaccaatgatgagacagtgtttatgaacaaaagatcatgattaatccagttctgcacaaaacactgaggtccattagaagacaataggtcttggctgtttcattccttttaagagctgtttaatattccacggtatgtatgcaccattgttgattacactcttctactgttgaaaatcccagctgaaagtgctctgggggaggagaagctttggtcacagtcctagccgtcagggtgggtcacagattcataggtgttcattaaattattttttaaaaaagaatacataaaaatggtgcttaatgcagatcagtgaggaagcgtgtcacaaatcgaggttttaattaatacgattctgctcaactaatgcccgataaaaaagatctaagctgtttccattttttgttgctgttaccaacgacactgcagtgagcattcttgcagctaaatctgtaaacacatcctcgactgttcctttaccccagcttcttagagatggggtggtgggttaaattgtttgcaaaagtttattttcattgagtgatctttctaaaatggcattttgaccttgttactgtcttgctttaaagcctccatctgacttcctggagcttccgggacggggtccaaaaaataaggccttatcctggcatggaagaccctttagggtctgttcttggaacttgccagcctcagcccctccccactggtgtttacctgctaggcgcacctcacccccacggggctacctgtttctctcagcgggctccctacttcttaggctttgcgcggccgtgccttttcagccagtttctccccggccttaaagagcaggcttgaaatatccctgttggggagcccaaagttagatgggccccacgaaacactgtgttcagaagcccaccgaagccctgaccctggaagtgggatgcctcattgacatttttttcccaattaaagggaatgttttgcatttttctagaattgatgaaactggtcaactgttactcaccctccttcctttgtccctttctaggagccctgggtcccccagtgttgcctgggtctgactttgcctcagtgaaaactgcctcgaattctttcttgcaccgatgggcagatgggcagtgtcggaggatcgtgtcatctgtcccgtggcgctggttggcttggtcaagtcagtgttcaaactatctcctgctctttcaaggggatctggggctctagaagattagaggacttggagaggttagtgacttgctcgaggtcggctaggaagcaagacccaggattccaactcaggtctgtgtgattcctctgcaaaatggagaggtggaaggatggatgtcaggtctgatggatggatggatgcctacatcaagatacatgcatagatggagagatggctggctacctcatgaatgctggactgttgtgagaatcaaacgagataatgtatgctgaggcatgctgtgaacactacgtgctgggtacaggagaatggaggctccagagtgaaattaatgacactttgtcgatgaagatcttgattgtgacctctgtggaaaatgagccatgaaccaaccaataagcaggcttagtcacccttgacacagtttgcagttatccacctcctccaagttcttaatatgttagatccagataactgccttgtacagccacctccaggatactgcctccctaaaaaacagctagatacactgaccccacagcctatgtggaccacacagatatactggcttgctctaaatgcaccagtgagaactctctgcaggaaacctgcttgggaaatgccatagcctgcaatacaggctttccccttcccgctggccctgtgaggcatgcaggatctgtaagtaataaactgcttctgttgtttcatttca

SEQ ID NO: 462113 - DNA, 2275 bp, Homo sapiens
acaaaagtcccttcagttcagccggctgcaggggaagtcccggcgcccgcgaaaccaccctcccgtgcagccgagcccagccgctctccggccgccgtcccccgccactggccccgtatgccccgcgggcgcatgtgacgaggggcccgtggactgcgcacccggcccaaggccactggactcccgggcgccgcgctgccgctccgcaagcgcccgctgcgccgcccttccccggagcccgccgctccccgcgggcgctgcgggccttgtcgtccccctggaccctctgcgcggcggctgcgacctgccggcggtccccgggcccccccacggcctggcccgccggaggcgctttactaccccggagccttactgcctttgtaccccactcgggccatgggctccccgtttcctctggtgaacctgcctacacccctataccccatgatgtgccccatggaacaccccctttctgctgacatcgccatggccacccgtgcagatgaggacggagacacgcctctccatattgctgtggtgcagggtaacctgccagctgtgcaccggctggtcaacctcttccagcaggggggccgggagctcgacatctacaacaacctacggcagacaccgctccacctggctgtgatcaccacattaccgtctgtggtccggctcctggtgacagctggtgccagccccatggcgctggaccgccatggccagacggccgctcacctggcgtgcgagcaccgcagcccgacctgcctgcgagccctgctggacagcgcagctccgggcacgttggacctggaggcccgcaattatgacgggctcaccgccctgcacgtggcagtgaacaccgagtgccaagaaaccgtgcagctcttgctagagcgcggtgccgacatcgacgcagtggacattaagagcggccgctccccgctcatccacgccgtggaaaacaacagccttagcatggtgcagctgctgctgcagcacggcgccaacgtgaacgcgcaaatgtactccggcagctccgccctgcactcagcgtccggccgccggctcctcccgctggtgcgcacgctggtccgcagcggcgctgacagcagcctcaagaactgccacaacgacacgccgctcatggtggcgcgcagccgcagggtcatcgacatcctgagggggaaggccacccggcctgcttccacctcccagccagacccctcccctgaccggagcgccaacacctcccccgagagcagcagccgcctcagctccaatggtcttctctccgcatcaccatcctcctcaccctcccagtctccccccagggacccccctggattccccatggctcctcccaatttcttccttccttccccatctccacccgccttcctgccctttgctggggtcctccgaggccctggccggccggtgcccccctccccagctccaggaggcagctgagggggatgggggggcagatcttggactcatgaggaggggcccccctgccctgtggggtcaacccttctggaaactgtgaagatctcactctgccccccccccatcttcgggaccaggatttgcacagaagcacatgcacctacccatacaccccctcttctgagcacagatgttcccccatctcgctccctcccaggactctgaccccagcattctcaggcaccagtccctgtccggaatgccacccacatcttccatttccatgtcccctcccagagctggtggacccagggaacagccactcccctccactctctaccagataactgaggaggggagaggtgggccgtaacgggcacggatcacgatgtaaattattaagcattttggttggatttcttttgtaataaactatttttgtaccatatcccttgggtgcatgggcctctttcatgagatggacctggcggaagtgccttcgtgtgtgtgcacacccgtgcactgaatccagttgactcccagagtgatgttggcaccctgttggattccgtagtgaccctgggcatgtgtgtttctgtagtgtgggggtcctggtgataacccacagctgacttcagccccaatcgtctctggctgtccgagtgcgtggtgcttgggagtgttcctaacattgagatctggggtgatgctgtgattgttgccctgtgactgcctcacatggcgtgagacagttttacttagtggttccatggggcccctctaatggaccacatctgtggttttgttgttgttttttttgggg

SEQ ID NO: 462114 - DNA, 1900 bp, Homo sapiens
acaaaagtcccttcagttcagccggctgcaggggaagtcccggcgcccgcgaaaccaccctcccgtgcagccgagcccagccgctctccggccgccgtcccccgccactggccccgtatgccccgcgggcgcatgtgacgaggggcccgtggactgcgcacccggcccaaggccactggactcccgggcgccgcgctgccgctccgcaagcgcccgctgcgccgcccttccccggagcccgccgctccccgcgggcgctgcgggccttgtcgtccccctggaccctctgcgcggcggctgcgacctgccggcggtccccgggcccccccacggcctggcccgccggaggcgctttactaccccggagccttactgcctttgtaccccactcgggccatgggctccccgtttcctctggtgaacctgcctacacccctataccccatgatgtgccccatggaacaccccctttctgctgacatcgccatggccacccgtgcagatgaggacggagacacgcctctccatattgctgtggtgcagggtaacctgccagctgtgcaccggctggtcaacctcttccagcaggggggccgggagctcgacatctacaacaacctacggcagacaccgctccacctggctgtgatcaccacattaccgtctgtggtccggctcctggtgacagctggtgccagccccatggcgctggaccgccatggccagacggccgctcacctggcgtgcgagcaccgcagcccgacctgcctgcgagccctgctggacagcgcagctccgggcacgttggacctggaggcccgcaattatgacgggctcaccgccctgcacgtggcagtgaacaccgagtgccaagaaaccgtgcagctcttgctagagcgcggtgccgacatcgacgcagtggacattaagagcggccgctccccgctcatccacgccgtggaaaacaacagccttagcatggtgcagctgctgctgcagcacggcgccaacgtgaacgcgcaaatgtactccggcagctccgccctgcactcagcgtccggccgccggctcctcccgctggtgcgcacgctggtccgcagcggcgctgacagcagcctcaagaactgccacaacgacacgccgctcatggtggcgcgcagccgcagggtcatcgacatcctgagggggaaggccacccggcctgcttccacctcccagccagacccctcccctgaccggagcgccaacacctcccccgagagcagcagccgcctcagctccaatggtcttctctccgcatcaccatcctcctcaccctcccagtctccccccagggacccccctggattccccatggctcctcccaatttcttccttccttccccatctccacccgccttcctgccctttgctggggtcctccgaggccctggccggccggtgcccccctccccagctccaggaggcagctgagggggatgggggggcagatcttggactcatgaggaggggcccccctgccctgtggggtcaacccttctggaaactgtgaagatctcactctgccccccccccatcttcgggaccaggatttgcacagaagcacatgcacctacccatacaccccctcttctgagcacagatgttcccccatctcgctccctcccaggactctgaccccagcattctcaggcaccagtccctgtccggaatgccacccacatcttccatttccatgtcccctcccagagctggtggacccagggaacagccactcccctccactctctaccagataactgaggaggggagaggtgggccgtaacgggcacggatcacgatgtaaattattaagcattttggttggatttcttttgtaataaactatttttgtaccata

SEQ ID NO: 462115 - DNA, 1460 bp, Homo sapiens
acaaaagtcccttcagttcagccggctgcaggggaagtcccggcgcccgcgaaaccaccctcccgtgcagccgagcccagccgctctccggccgccgtcccccgccactggccccgtatgccccgcgggcgcatgtgacgaggggcccgtggactgcgcacccggcccaaggccactggactcccgggcgccgcgctgccgctccgcaagcgcccgctgcgccgcccttccccggagcccgccgctccccgcgggcgctgcgggccttgtcgtccccctggaccctctgcgcggcggctgcgacctgccggcggtccccgggcccccccacggcctggcccgccggaggcgctttactaccccggagccttactgcctttgtaccccactcgggccatgggctccccgtttcctctggtgaacctgcctacacccctataccccatgatgtgccccatggaacaccccctttctgctgacatcgccatggccacccgtgcagatgaggacggagacacgcctctccatattgctgtggtgcagggtaacctgccagctgtgcaccggctggtcaacctcttccagcaggggggccgggagctcgacatctacaacaacctacggcagacaccgctccacctggctgtgatcaccacattaccgtctgtggtccggctcctggtgacagctggtgccagccccatggcgctggaccgccatggccagacggccgctcacctggcgtgcgagcaccgcagcccgacctgcctgcgagccctgctggacagcgcagctccgggcacgttggacctggaggcccgcaattatgacgggctcaccgccctgcacgtggcagtgaacaccgagtgccaagaaaccgtgcagctcttgctagagcgcggtgccgacatcgacgcagtggacattaagagcggccgctccccgctcatccacgccgtggaaaacaacagccttagcatggtgcagctgctgctgcagcacggcgccaacgtgaacgcgcaaatgtactccggcagctccgccctgcactcagcgtccggccgccggctcctcccgctggtgcgcacgctggtccgcagcggcgctgacagcagcctcaagaactgccacaacgacacgccgctcatggtggcgcgcagccgcagggtcatcgacatcctgagggggaaggccacccggcctgcttccacctcccagccagacccctcccctgaccggagcgccaacacctcccccgagagcagcagccgcctcagctccaatggtcttctctccgcatcacaatgccacacagcccccgtgatgtctctgactttatttgctgtgaccccgacccactgttcacatcccttcagtcatgtgggccttgcttcccattccctgaatgtgccaggcatgctccacctcatgcctctgcacctgcagttctctctcactga

SEQ ID NO: 462116 - DNA, 2887 bp, Homo sapiens
tgtacgacaaaactgcagctctgggaagtcagctggccaggtcccgctgctgaactgtactaagtgctgatgtgccagcgctatgatttatttctgggaagcccagcgggggaacctcacagagcgagtgaagacgcttttcctggctgagaacagcgtgaagctcaagaacttgactggctacacggcctacatggtcagcgtggccgccttcaacgccgctggggatgggcctcggagcacccccacccaaggccagacccagcaagcagcccccagcgctcccagctcggtcaagttcagtgagctgaccacaacctcagtgaatgtgtcctgggaagccccgcagttccccaatggcatcctggagggctacaggctggtgtacgagccctgcagccccgtggatggagtcagcaagatcgtgaccgtggacgtgaaggggaacagccccctgtggctgaaggtgaaggacctggcggagggggtgacctacaggttccgcatcagagccaagaccttcacctacgggccggagatcgaagccaacgtcaccacgggccccggagaaggtgccccaggaccgcctggcgtgcccatcatcgtgcggtacagctctgccatcgccattcactggtccagcggagacccgggcaaagggcccatcacccgctacgtcatcgaggccagaccttcagacgagggactatgggacatcctcatcaaagacatccccaaggaggtgagctcctacacgttcagcatggacatcctgaagccgggcgtgagctatgacttccgggtcatcgcggtcaacgactatggtttcggcacccccagcagcccctcccagtctgtgccagcccagaaagccaaccccttctatgaggagtggtggttcttggtggtcattgccctggtcggcctcatcttcatcctgcttctggtcttcgtgctcatcatccggggccagagcaagaagtacgccaagaagacagactcggggaacagtgccaagtctggagccctaggccacagcgagatgatgagcttggatgaaagcagcttccctgccctggaactcaacaacaggcggctctccgtcaagaactctttctgccgaaagaacggcctgtacaccaggtctccccccaggcccagcccaggcagcctgcactactcggatgaggatgtcaccaaatacaacgacctcatccctgcagagagcagcagcctgacggagaagccctcagaaatctccgactctcagggaagtgacagcgagtacgaggtcgactcaaaccaccagaaggcccactcctttgtcaaccactacatcagtgaccccacatactacaactcgtggcggcgacagcagaagggcatctcgagggcacaggcctacagctacacggagagcgactcgggtgagccagaccacaccaccgtcaccaacagcaccagcacccagcagggcagcctctttcggcccaaggccagtcggaactccaacgccccagaacccccctaaccccccaagtcagcagagcaccctctaccgtccccccagcagcctggccccaggctcccgggctcccatagcaggattttcatcatttgtttgacatcagaagaggaaaaagcagaaagagaaatggcaccaaactcctccttcacccctcctctcactgcctgccagaaaacaaaaacaccaagaaaccaagtcaacttttcacctcctgagtttatttttccagagattccagggccagcaaagccggcgttcagaaggagggagaaaaccgtgagaggatgtgtgtggccagcagctcttcagctttgagatggtggggttcactgctcccttgggaattacacggagctggggaagtggaacctctactgcccatctcccctgctcaacttctccaccaagcatttggtttatttagaaaaaggaagaaaaacaaaaaacaaaaaactaaagggtgagaatttgcttagcgccttccttgttcctgcatattttttaaaatattgaatccaaggaagagagcccaagggtaggggagaaaccccccacaactgacccctgcctccctgtgctggaattgactttcctgagcatggacaaggaaaggtgaagtctggggagcagaggtgtaaataaggcgactggccttggcactgtgggatgattaggtttaacgcattgtgggcaagataagaatgacactttgactgttctctttcttccaatccaggttccatccgtcctctctttaaaggggtagtcagcttcccaaggctggggagtggggcacagctgagggatctccctctgggcagacacgtcactctccactggatagatcctcaccacacacacacacacacacacatctcccatgcacttacaaggaacagggtctagggatcctctccagaacaaactcatctgggccctcctagccagacagcacactcactttcagatctgtgtccctctcactgccacccggcagcctcctaagcacagaggcacaggagcccagaggggtggcccaagtccctggtccagaggctggaatacccagagtttgctcagtcagcctagcacccagtttacaggcaaaaaggcaaagacaccctaacccccagtaacagcttccaggctgggctccgcctggccagggcggggaggggaaggggcaggtcaggaagctcagtccaaagtggacccagcatttgaattgcacgcccagcaggggcaggtcagatgggaccaagtgacaagaatagctgatgggagggaatgcttttacacacacacacacacacacacacacacatacacatacacaatctgctccaaggagtgttctgc

SEQ ID NO: 462117 - DNA, 3193 bp, Homo sapiens
tgtacgacaaaactgcagctctgggaagtcagctggccaggtcccgctgctgaactgtactaagtgctgatgtgccagcgctatgatttatttctgggaagcccagcgggggaacctcacagagcgagtgaagacgcttttcctggctgagaacagcgtgaagctcaagaacttgactggctacacggcctacatggtcagcgtggccgccttcaacgccgctggggatgggcctcggagcacccccacccaaggccagacccagcaagcagcccccagcgctcccagctcggtcaagttcagtgagctgaccacaacctcagtgaatgtgtcctgggaagccccgcagttccccaatggcatcctggagggctacaggctggtgtacgagccctgcagccccgtggatggagtcagcaagatcgtgaccgtggacgtgaaggggaacagccccctgtggctgaaggtgaaggacctggcggagggggtgacctacaggttccgcatcagagccaagaccttcacctacgggccggagatcgaagccaacgtcaccacgggccccggagaaggtgccccaggaccgcctggcgtgcccatcatcgtgcggtacagctctgccatcgccattcactggtccagcggagacccgggcaaagggcccatcacccgctacgtcatcgaggccagaccttcagacgagggactatgggacatcctcatcaaagacatccccaaggaggtgagctcctacacgttcagcatggacatcctgaagccgggcgtgagctatgacttccgggtcatcgcggtcaacgactatggtttcggcacccccagcagcccctcccagtctgtgccagcccagaaagccaaccccttctatgaggagtggtggttcttggtggtcattgccctggtcggcctcatcttcatcctgcttctggtcttcgtgctcatcatccggggccagagcaagaagtacgccaagaagacagactcggggaacagtgccaagtctggagccctaggccacagcgagatgatgagcttggatgaaagcagcttccctgccctggaactcaacaacaggcggctctccgtcaagaactctttctgccgaaagaacggcctgtacaccaggtctccccccaggcccagcccaggcagcctgcactactcggatgaggatgtcaccaaatacaacgacctcatccctgcagagagcagcagcctgacggagaagccctcagaaatctccgactctcagggaagtgacagcgagtacgaggtcgactcaaaccaccagaaggcccactcctttgtcaaccactacatcagtgaccccacatactacaactcgtggcggcgacagcagaagggcatctcgagggcacaggcctacagctacacggagagcgactcgggtgagccagaccacaccaccgtcaccaacagcaccagcacccagcagggcagcctctttcggcccaaggccagtcggaactccaacgccccagaacccccctaaccccccaagtcagcagagcaccctctaccgtccccccagcagcctggccccaggctcccgggctcccatagcaggattttcatcatttgtttgacatcagaagaggaaaaagcagaaagagaaatggcaccaaactcctccttcacccctcctctcactgcctgccagaaaacaaaaacaccaagaaaccaagtcaacttttcacctcctgagtttatttttccagagattccagggccagcaaagccggcgttcagaaggagggagaaaaccgtgagaggatgtgtgtggccagcagctcttcagctttgagatggtggggttcactgctcccttgggaattacacggagctggggaagtggctgtgtcactgctatggacacggagtggggcgggcatctggagagagagagggagcggaggctaaggactggaggccgccaggcaggcgtggccgagggaagaaaaagcttctggatgtccagccagctgcccccttccagcccctccaggacccctggacccactgccgctgctctctgcaaaaagaatgggcatcccggaggccacgcctatcttctctctctgctcctccttccctccatgcaccatcactgtggctggcaggcatcggacagcctcatccagaccccctgccctgtcttggcaacctctactgcccatctcccctgctcaacttctccaccaagcatttggtttatttagaaaaaggaagaaaaacaaaaaacaaaaaactaaagggtgagaatttgcttagcgccttccttgttcctgcatattttttaaaatattgaatccaaggaagagagcccaagggtaggggagaaaccccccacaactgacccctgcctccctgtgctggaattgactttcctgagcatggacaaggaaaggtgaagtctggggagcagaggtgtaaataaggcgactggccttggcactgtgggatgattaggtttaacgcattgtgggcaagataagaatgacactttgactgttctctttcttccaatccaggttccatccgtcctctctttaaaggggtagtcagcttcccaaggctggggagtggggcacagctgagggatctccctctgggcagacacgtcactctccactggatagatcctcaccacacacacacacacacacacatctcccatgcacttacaaggaacagggtctagggatcctctccagaacaaactcatctgggccctcctagccagacagcacactcactttcagatctgtgtccctctcactgccacccggcagcctcctaagcacagaggcacaggagcccagaggggtggcccaagtccctggtccagaggctggaatacccagagtttgctcagtcagcctagcacccagtttacaggcaaaaaggcaaagacaccctaacccccagtaacagcttccaggctgggctccgcctggccagggcggggaggggaaggggcaggtcaggaagctcagtccaaagtggacccagcatttgaattgcacgcccagcaggggcaggtcagatgggaccaagtgacaagaatagctgatgggagggaatgcttttacacacacacacacacacacacacacacatacacatacacaatctgctccaaggagtgttctgc

SEQ ID NO: 462118 - DNA, 3409 bp, Homo sapiens
  misc_feature (3)..(4): n is a, c, g, or t
  misc_feature (7)..(9): n is a, c, g, or t
ccnntgnnncagatgaagtctccatgagctacagggcctggtgcatccagggtgatctagtaattgcagaacagcaagtactagctctccctccccttccacagctctgggtgtgggagggggttgtccagcctccagcagcatggggagggccttggtcagcctctgggtgccagcagggcaggggcggagtcctggggaatgaaggttttatagggctcctgggggaggctccccagccccaagcttaccacctgcacccggagagctgtgtcaccatgtgggtcccggttgtcttcctcaccctgtccgtgacgtggattggtgctgcacccctcatcctgtctcggattgtgggaggctgggagtgcgagaagcattcccaaccctggcaggtgcttgtggcctctcgtggcagggcagtctgcggcggtgttctggtgcacccccagtgggtcctcacagctgcccactgcatcaggaagtgagtaggggcctggggtctggggagcaggtgtctgtgtcccagaggaataacagctgggcattttccccaggataacctctaaggccagccttgggactgggggagagagggaaagttctggttcaggtcacatggggaggcagggttggggctggaccaccctccccatggctgcctgggtctccatctgtgtccctctatgtctctttgtgtcgctttcattatgtctcttggtaactggcttcggttgtgtctctccgtgtgactattttgttctctctctccctctcttctctgtcttcagtctccatatctccccctctctctgtccttctctggtccctctctagccagtgtgtctcaccctgtatctctctgccaggctctgtctctcggtctctgtctcacctgtgccttctccctactgagcacacgcatgggatgggcctggggggaccctgagaaaaggaagggctttggctgggcgcggtggctcacacctgtaatcccagcactttgggaggccaaggcaggtagatcacctgaggacatccctccactcttgggagacacagagaagggctggttccagctggagctgggaggggcaattgagggaggaggaaggagaagggggaaggaaaacaggtttctgtatctgcccttcaccctctcacactgctgtttcccaactcgttgtctgtatttttggcctgaactgtgtcttccccaaccctgtgtttttctcactgtttctttttctcttttggagcctcctccttgctcctctgtcccttctctctttccttatcatcctcgctcctcattcctgcgtctgcttcctccccagcaaaagcgtgatcttgctgggtcggcacagcctgtttcatcctgaagacacaggccaggtatttcaggtcagccacagcttcccacacccgctgtacgatatgagcctcctgaagaatcgattcctcaggccaggtgatgactccagccacgacctcatgctgctccgcctgtcagagcctgccgagctcacggatgctgtgaaggtcatggacctgcccacccaggagccagcactggggaccacctgctacgcctcaggctggggcagcattgaaccagaggagtggggtccagcccacaacagtgtttttgcctggcccgtagtcttgaccccaaagaaacttcagtgtgtggacctccatgttatttccaatgacgtgtgtgcgcaagttcaccctcagaaggtgaccaagttcatgctgtgtgctggacgctggacagggggcaaaagcacctgctcgggtgattctgggggcccacttgtctgtaatggtgtgcttcaaggtatcacgtcatggggcagtgaaccatgtgccctgcccgaaaggccttccctgtacaccaaggtggtgcattaccggaagtggatcaaggacaccatccatctgcactatgcgggcgaggccggcgccatgacgtcatgtagctgcgactatccctgcagcgcgcctctcccgtcacgtcccaaccatggagctgtggacgtgcgtcccctggtggatgtggcctgcgtggtgccaggccggggcctggtgtgccaacagggcaagggcggggtcctggagaatgaaggctttatagggctcctcagggaggccccccagccccaaactcaccacctggccgtggacacctgtgtcagcatgtgggacctggttctctccatcgccttgtctgtggggtgcactggtgccgtgcccctcatccagtctcggattgtgggaggctgggagtgtgagaagcattcccaaccctggcaggtggctgtgtacagtcatggatgggcacactgtgggggtgtcctggtgcacccccagtgggtgctcacagctgcccattgcctaaagaagaatagccaggtctggctgggtcggcacaacctgtttgagcctgaagacacaggccagagggtccctgtcagccacagcttcccacacccgctctacaatatgagccttctgaagcatcaaagccttagaccagatgaagactccagccatgacctcatgctgcttcgcctgtcagagcctgccaagatcacagatgttgtgaaggtcctgggcctgccacccaggagccagcactggggaccacctgctacgcctcaggctggggcagcatcgaaccagaggagttcttgcgccccaggagtcttcagtgtgtgagcctccatctcctgtccaatgacatgtgtgctagagcttactctgagaaggtgacagagttcatgttgtgtgctgggctctggacaggtggtaaagacacttgtggggtgagtcatccctactcccaacatctggaggggaaagggtgattctgggggtccacttgtctgtaatggtgtgcttcaaggtatcacatcatggggccctgagccatgtgccctgcctgaaaagcctgctgtgtacaccaaggtggtgcattactggaagtggatcaaggacaccatcgcagccaacccctgagtgcccctgtcccacccctacctctagtaaatttaagtccacctcacgttctggcatcacttggcctttctggatgctggacacctgaagcttggaactcacctggccgaagctcgagcctcctgagtcctactgacctgtgctttctggtgtggagtccagggctgctaggaaaaggaatgggcagacacaggtgtatgccaatgtttctgaaatgggtataatttcgtcctctccttcggaacactggctgtctctgaagacttctcgctcagtttcagtgaggacacacacaaagacgtgggtgaccatgttgtttgtggggtgcagagatgggaggggtggggcccaccctggaagagtggacagtgacacaaggtggaca

SEQ ID NO: 462119 - DNA, 3372 bp, Homo sapiens
  misc_feature (3)..(4): n is a, c, g, or t
  misc_feature (7)..(9): n is a, c, g, or t
ccnntgnnncagatgaagtctccatgagctacagggcctggtgcatccagggtgatctagtaattgcagaacagcaagtactagctctccctccccttccacagctctgggtgtgggagggggttgtccagcctccagcagcatggggagggccttggtcagcctctgggtgccagcagggcaggggcggagtcctggggaatgaaggttttatagggctcctgggggaggctccccagccccaagcttaccacctgcacccggagagctgtgtcaccatgtgggtcccggttgtcttcctcaccctgtccgtgacgtggattggtgctgcacccctcatcctgtctcggattgtgggaggctgggagtgcgagaagcattcccaaccctggcaggtgcttgtggcctctcgtggcagggcagtctgcggcggtgttctggtgcacccccagtgggtcctcacagctgcccactgcatcaggaagtgagtaggggcctggggtctggggagcaggtgtctgtgtcccagaggaataacagctgggcattttccccaggataacctctaaggccagccttgggactgggggagagagggaaagttctggttcaggtcacatggggaggcagggttggggctggaccaccctccccatggctgcctgggtctccatctgtgtccctctatgtctctttgtgtcgctttcattatgtctcttggtaactggcttcggttgtgtctctccgtgtgactattttgttctctctctccctctcttctctgtcttcagtctccatatctccccctctctctgtccttctctggtccctctctagccagtgtgtctcaccctgtatctctctgccaggctctgtctctcggtctctgtctcacctgtgccttctccctactgagcacacgcatgggatgggcctggggggaccctgagaaaaggaagggctttggctgggcgcggtggctcacacctgtaatcccagcactttgggaggccaaggcaggtagatcacctgaggacatccctccactcttgggagacacagagaagggctggttccagctggagctgggaggggcaattgagggaggaggaaggagaagggggaaggaaaacaggtttctgtatctgcccttcaccctctcacactgctgtttcccaactcgttgtctgtatttttggcctgaactgtgtcttccccaaccctgtgtttttctcactgtttctttttctcttttggagcctcctccttgctcctctgtcccttctctctttccttatcatcctcgctcctcattcctgcgtctgcttcctccccagcaaaagcgtgatcttgctgggtcggcacagcctgtttcatcctgaagacacaggccaggtatttcaggtcagccacagcttcccacacccgctgtacgatatgagcctcctgaagaatcgattcctcaggccaggtgatgactccagccacgacctcatgctgctccgcctgtcagagcctgccgagctcacggatgctgtgaaggtcatggacctgcccacccaggagccagcactggggaccacctgctacgcctcaggctggggcagcattgaaccagaggagtggggtccagcccacaacagtgtttttgcctggcccgtagtcttgaccccaaagaaacttcagtgtgtggacctccatgttatttccaatgacgtgtgtgcgcaagttcaccctcagaaggtgaccaagttcatgctgtgtgctggacgctggacagggggcaaaagcacctgctcgggtgattctgggggcccacttgtctgtaatggtgtgcttcaaggtatcacgtcatggggcagtgaaccatgtgccctgcccgaaaggccttccctgtacaccaaggtggtgcattaccggaagtggatcaaggacaccatccatctgcactatgcgggcgaggccggcgccatgacgtcatgtagctgcgactatccctgcagcgcgcctctcccgtcacgtcccaaccatggagctgtggacgtgcgtcccctggtggatgtggcctgcgtggtgccaggccggggcctggtgtgccaacagggcaagggcggggtcctggagaatgaaggctttatagggctcctcagggaggccccccagccccaaactcaccacctggccgtggacacctgtgtcagcatgtgggacctggttctctccatcgccttgtctgtggggtgcactggtgccgtgcccctcatccagtctcggattgtgggaggctgggagtgtgagaagcattcccaaccctggcaggtggctgtgtacagtcatggatgggcacactgtgggggtgtcctggtgcacccccagtgggtgctcacagctgcccattgcctaaagaagaatagccaggtctggctgggtcggcacaacctgtttgagcctgaagacacaggccagagggtccctgtcagccacagcttcccacacccgctctacaatatgagccttctgaagcatcaaagccttagaccagatgaagactccagccatgacctcatgctgcttcgcctgtcagagcctgccaagatcacagatgttgtgaaggtcctgggcctgccacccaggagccagcactggggaccacctgctacgcctcaggctggggcagcatcgaaccagaggagttcttgcgccccaggagtcttcagtgtgtgagcctccatctcctgtccaatgacatgtgtgctagagcttactctgagaaggtgacagagttcatgttgtgtgctgggctctggacaggtggtaaagacacttgtgggggtgattctgggggtccacttgtctgtaatggtgtgcttcaaggtatcacatcatggggccctgagccatgtgccctgcctgaaaagcctgctgtgtacaccaaggtggtgcattactggaagtggatcaaggacaccatcgcagccaacccctgagtgcccctgtcccacccctacctctagtaaatttaagtccacctcacgttctggcatcacttggcctttctggatgctggacacctgaagcttggaactcacctggccgaagctcgagcctcctgagtcctactgacctgtgctttctggtgtggagtccagggctgctaggaaaaggaatgggcagacacaggtgtatgccaatgtttctgaaatgggtataatttcgtcctctccttcggaacactggctgtctctgaagacttctcgctcagtttcagtgaggacacacacaaagacgtgggtgaccatgttgtttgtggggtgcagagatgggaggggtggggcccaccctggaagagtggacagtgacacaaggtggaca

SEQ ID NO: 462120 - DNA, 411 bp, Homo sapiens
aggccaagactggagccttgttccctctgttggactccctgcccatattcttgtgggagtgggttctggagacatttctgtctgttcctgagagctgggaattgctctcagtcatctgcctgcgcggttctgagagatggagttgcctaggcagttattggggccaatctttctcactgtgtctctcctcctttacccttagggtgattctgggggtccacttgtctgtaatggtgtgcttcaaggtatcacatcatggggccctgagccatgtgccctgcctgaaaagcctgctgtgtacaccaaggtggtgcattactggaagtggatcaaggacaccatcgcagccaacccctgagtgcccctgtcccacccctacctctagtaaatttaagtccacctcacgttctg

SEQ ID NO: 462121 - DNA, 3212 bp, Homo sapiens
  misc_feature (3)..(4): n is a, c, g, or t
  misc_feature (7)..(9): n is a, c, g, or t
ccnntgnnncagatgaagtctccatgagctacagggcctggtgcatccagggtgatctagtaattgcagaacagcaagtactagctctccctccccttccacagctctgggtgtgggagggggttgtccagcctccagcagcatggggagggccttggtcagcctctgggtgccagcagggcaggggcggagtcctggggaatgaaggttttatagggctcctgggggaggctccccagccccaagcttaccacctgcacccggagagctgtgtcaccatgtgggtcccggttgtcttcctcaccctgtccgtgacgtggattggtgctgcacccctcatcctgtctcggattgtgggaggctgggagtgcgagaagcattcccaaccctggcaggtgcttgtggcctctcgtggcagggcagtctgcggcggtgttctggtgcacccccagtgggtcctcacagctgcccactgcatcaggaagtgagtaggggcctggggtctggggagcaggtgtctgtgtcccagaggaataacagctgggcattttccccaggataacctctaaggccagccttgggactgggggagagagggaaagttctggttcaggtcacatggggaggcagggttggggctggaccaccctccccatggctgcctgggtctccatctgtgtccctctatgtctctttgtgtcgctttcattatgtctcttggtaactggcttcggttgtgtctctccgtgtgactattttgttctctctctccctctcttctctgtcttcagtctccatatctccccctctctctgtccttctctggtccctctctagccagtgtgtctcaccctgtatctctctgccaggctctgtctctcggtctctgtctcacctgtgccttctccctactgagcacacgcatgggatgggcctggggggaccctgagaaaaggaagggctttggctgggcgcggtggctcacacctgtaatcccagcactttgggaggccaaggcaggtagatcacctgaggacatccctccactcttgggagacacagagaagggctggttccagctggagctgggaggggcaattgagggaggaggaaggagaagggggaaggaaaacaggtttctgtatctgcccttcaccctctcacactgctgtttcccaactcgttgtctgtatttttggcctgaactgtgtcttccccaaccctgtgtttttctcactgtttctttttctcttttggagcctcctccttgctcctctgtcccttctctctttccttatcatcctcgctcctcattcctgcgtctgcttcctccccagcaaaagcgtgatcttgctgggtcggcacagcctgtttcatcctgaagacacaggccaggtatttcaggtcagccacagcttcccacacccgctgtacgatatgagcctcctgaagaatcgattcctcaggccaggtgatgactccagccacgacctcatgctgctccgcctgtcagagcctgccgagctcacggatgctgtgaaggtcatggacctgcccacccaggagccagcactggggaccacctgctacgcctcaggctggggcagcattgaaccagaggagtggggtccagcccacaacagtgtttttgcctggcccgtagtcttgaccccaaagaaacttcagtgtgtggacctccatgttatttccaatgacgtgtgtgcgcaagttcaccctcagaaggtgaccaagttcatgctgtgtgctggacgctggacagggggcaaaagcacctgctcgggtgattctgggggcccacttgtctgtaatggtgtgcttcaaggtatcacgtcatggggcagtgaaccatgtgccctgcccgaaaggccttccctgtacaccaaggtggtgcattaccggaagtggatcaaggacaccatccatctgcactatgcgggcgaggccggcgccatgacgtcatgtagctgcgactatccctgcagcgcgcctctcccgtcacgtcccaaccatggagctgtggacgtgcgtcccctggtggatgtggcctgcgtggtgccaggccggggcctggtgtgccaacagggcaagggcggggtcctggagaatgaaggctttatagggctcctcagggaggccccccagccccaaactcaccacctggccgtggacacctgtgtcagcatgtgggacctggttctctccatcgccttgtctgtggggtgcactggaatagccaggtctggctgggtcggcacaacctgtttgagcctgaagacacaggccagagggtccctgtcagccacagcttcccacacccgctctacaatatgagccttctgaagcatcaaagccttagaccagatgaagactccagccatgacctcatgctgcttcgcctgtcagagcctgccaagatcacagatgttgtgaaggtcctgggcctgccacccaggagccagcactggggaccacctgctacgcctcaggctggggcagcatcgaaccagaggagttcttgcgccccaggagtcttcagtgtgtgagcctccatctcctgtccaatgacatgtgtgctagagcttactctgagaaggtgacagagttcatgttgtgtgctgggctctggacaggtggtaaagacacttgtgggggtgattctgggggtccacttgtctgtaatggtgtgcttcaaggtatcacatcatggggccctgagccatgtgccctgcctgaaaagcctgctgtgtacaccaaggtggtgcattactggaagtggatcaaggacaccatcgcagccaacccctgagtgcccctgtcccacccctacctctagtaaatttaagtccacctcacgttctggcatcacttggcctttctggatgctggacacctgaagcttggaactcacctggccgaagctcgagcctcctgagtcctactgacctgtgctttctggtgtggagtccagggctgctaggaaaaggaatgggcagacacaggtgtatgccaatgtttctgaaatgggtataatttcgtcctctccttcggaacactggctgtctctgaagacttctcgctcagtttcagtgaggacacacacaaagacgtgggtgaccatgttgtttgtggggtgcagagatgggaggggtggggcccaccctggaagagtggacagtgacacaaggtggaca

SEQ ID NO: 462122 - DNA, 815 bp, Homo sapiens
ctatgttccaataacattttatttacagacaacttctgggttggtgagcagatcgaggtaccaggaaggtggtgcgtgccctgccccccaccccaacacttgaccccacgcatcctcatgcagctcttccgtttggctgttcctaagtcgtatcttttgtaataaaccagtaaaagaaaaaaaaccaccaaaaagccacatctttatttacaaaagcaaacgcaggctgggtttggcccatggactgtagtttgctgactcctgaatatcatatatgaccctcttggccagccatgggctcctaggcaaaactctgaagaaaacaggaagggaggaagggagggagggaggaagggagggaggaagggaggggaaggaaaggaaggaaggaaaggaaataaggaaagaaaaaaagaaagagagaaagaaaaagaaaggaaagaaggaaaggaaaggaagagaagaaaggaagaaaggaaaagaaaagcaaggaaggaaagaaagagaaaaagaagcagcagaagaaaagaaaaagaaaaagagaaggaggggctgacatcctacccctaggcggaacttcactttgccgaaacacaggtggcattctgctacacaaggcttgtcagatggaacagcacgctggagggggttgtgcaagaggctcactgggacatgggccacaactctaagaggtgagggactctggctttagtcaccagagaaaaatccagtactttctggaacactcaccagccttaccctgcaaagataggaaagcacagggaaggcggaagactgtgtttcattcaaactgt

SEQ ID NO: 462123 - DNA, 1769 bp, Homo sapiens
cctgctgtgacaacacagcccttgtcccacgcagcctaagtgcagggagcatgatgaagtcaggcagccagtcggcacccatgccagccccctacgtcctccgaagacccgagggccaggccagtgtccctcatctacaaggtccagggtccatggagaactccttgtctggctgtcttgagacagcagcccgggccctgtccggcccccggaaggcagggctgcgctcctccaggatgcctgaggtgcagctggagagggagctgctgtcccgtgtggggaggggccgccacggcgtacgggggagcctgggtgatggtgccagcggcgccctcatcgccatggtaaccaccctccccctcctcggggtcccactcctccttgtccatgatgctgaggacgtcacccagcatggagggccccaggtcgatgtgggacatggcattcttgacaaacagggccgagtccgcagggagcccagcatgtcacgctgctcccgctcccccctggtcaccgactgtgaccgcttgctgccccggaacttcctggacaggagactgcgtttggaagatgaagaagagggctgttcgtccaaggactcgccgtcgggctcgccagccttgctattgaggaaggaggtgtccccaaaggcgtctccggcccggccaacgtgcatggtgtggcggaagtcgcccagcggggcgctgatcatctcggccgtgaggtccgctcgggaacggcgcttggagtgcaccgagctggacaccagttgcttgaggattggcatcttgctggatgggcggggaggcattcagagtagaggagtgattttgcaaatctggttagagttccagtagcctcggacacactttccctgaaacttgagagagacagaacctttcttgcagaagacaatgcctcccctgcccctgcaagccaggatgctgccagagtaaacatgaccacatttaaggacgcgaagacaacttctgggttggtgagcagatcgaggtaccaggaaggtggtgcgtgccctgccccccaccccaacacttgaccccacgcatcctcatgcagctcttccgtttggctgttcctaagtcgtatcttttgtaataaaccagtaaaagaaaaaaaaccaccaaaaagccacatctttatttacaaaagcaaacgcaggctgggtttggcccatggactgtagtttgctgactcctgaatatcatatatgaccctcttggccagccatgggctcctaggcaaaactctgaagaaaacaggaagggaggaagggagggagggaggaagggagggaggaagggaggggaaggaaaggaaggaaggaaaggaaataaggaaagaaaaaaagaaagagagaaagaaaaagaaaggaaagaaggaaaggaaaggaagagaagaaaggaagaaaggaaaagaaaagcaaggaaggaaagaaagagaaaaagaagcagcagaagaaaagaaaaagaaaaagagaaggaggggctgacatcctacccctaggcggaacttcactttgccgaaacacaggtggcattctgctacacaaggcttgtcagatggaacagcacgctggagggggttgtgcaagaggctcactgggacatgggccacaactctaagaggtgagggactctggctttagtcaccagagaaaaatccagtactttctggaacactcaccagccttaccctgcaaagataggaaagcacagggaaggcggaagactgtgtttcattcaaactgt

SEQ ID NO: 462124 - DNA, 1856 bp, Homo sapiens
cctgctgtgacaacacagcccttgtcccacgcagcctaagtgcagggagcatgatgaagtcaggcagccagtcggcacccatgccagccccctacgtcctccgaagacccgagggccaggccagtgtccctcatctacaaggtccagggtccatggagaactccttgtctggctgtcttgagacagcagcccgggccctgtccggcccccggaaggcagggctgcgctcctccaggatgcctgaggtgcagctggagagggagctgctgtcccgtgtggggaggggccgccacggcgtacgggggagcctgggtgatggtgccagcggcgccctcatcgccatggtaaccaccctccccctcctcggggtcccactcctccttgtccatgatgctgaggacgtcacccagcatggagggccccaggtcgatgtgggacatggcattcttgacaaacagggccgagtccgcagggagcccagcatgtcacgctgctcccgctcccccctggtcaccgactgtgaccgcttgctgccccggaacttcctggacaggagactgcgtttggaagatgaagaagagggctgttcgtccaaggactcgccgtcgggctcgccagccttgctattgaggaaggaggtgtccccaaaggcgtctccggcccggccaacgtgcatggtgtggcggaagtcgcccagcggggcgctgatcatctcggccgtgaggtccgctcgggaacggcgcttggagtgcaccgagctggacaccagttgcttgaggattggcatcttgctggatgggcggggaggcattcagagtagaggagtgattttgcaaatctggttagagttccagtagcctcggacacactttccctgaaacttgagagagacagaacctttcttgcagaagacaatgcctcccctgcccctgcaagccaggatgctgccagagtaaacatgaccacatttaaggacgcgaaggtaaatccagcaattccaggcagcaagccagggaagagatggagtctatgagttggctcctatgaacagtcagcctggagatgtgctacaacttctgggttggtgagcagatcgaggtaccaggaaggtggtgcgtgccctgccccccaccccaacacttgaccccacgcatcctcatgcagctcttccgtttggctgttcctaagtcgtatcttttgtaataaaccagtaaaagaaaaaaaaccaccaaaaagccacatctttatttacaaaagcaaacgcaggctgggtttggcccatggactgtagtttgctgactcctgaatatcatatatgaccctcttggccagccatgggctcctaggcaaaactctgaagaaaacaggaagggaggaagggagggagggaggaagggagggaggaagggaggggaaggaaaggaaggaaggaaaggaaataaggaaagaaaaaaagaaagagagaaagaaaaagaaaggaaagaaggaaaggaaaggaagagaagaaaggaagaaaggaaaagaaaagcaaggaaggaaagaaagagaaaaagaagcagcagaagaaaagaaaaagaaaaagagaaggaggggctgacatcctacccctaggcggaacttcactttgccgaaacacaggtggcattctgctacacaaggcttgtcagatggaacagcacgctggagggggttgtgcaagaggctcactgggacatgggccacaactctaagaggtgagggactctggctttagtcaccagagaaaaatccagtactttctggaacactcaccagccttaccctgcaaagataggaaagcacagggaaggcggaagactgtgtttcattcaaactgt

SEQ ID NO: 462125 - DNA, 2611 bp, Homo sapiens
gttacagatcatacttaaggccaataacacaagccccatctgagacagccacagatgcagcctctctctttgccctacaagctttcttaagaagccgggaccggtcacatcaaaaattctataacatgatgaccaaaacacaaatgtttattcgcttcattgaagaatgttcttttgttagtgacaaagatgcaagcctggcattttttgatgattgtgtagataaagtggatatggacaagagcggtgaagtacgacttatagaactggatgaatctttcaaaagtgaacacactgtttttgtaacaccacctgagatcccccacctacccaatggtgaagaaccccctttacagtacagctataatggatttccagttcttaggaacaatttatttgaaagacctgaaggatttctacaagcaaagaagaacaaattgccttcaaaatcaagcatgagccactgtgccctgccacaattattgtttaaaatgcattattttattctagatttatgtacatggtgacatctgtgtttcggtacaattttgaacttgtatttcaggtatgctaccgcattcttatgcaactctgtggacaatatgatcagccagtgcttgcagttcgagtgctttttgaaatgcagaaagctggtattgaccccaatgccattacttatggttattataataaggctgttttggaaagtacctggccttcaagaagtcgtagtggctattttctttggacaaaagtaagaaatgttgttttaggagtaacacagttcaaaagagctttaaagaagcatgcacacttatcacaaacaactctctcaggtggccagtctgatcttggatataattcattatctaaagatgaagttagaagaggggatacatctactgaagacattcaagaagaaaaagataaaaaagggagtgattgtagttccttgtcagagagtgagagtacaaaaggaagtgctgattgccttcctaagctcagttatcaaaattcttccagtatcgttcgcctcactggtacaagtaacaacagtgctggtaaaatatcaggagaaagcatggaaagcacacctgagctgctcttaatatcatctcttgaagatacaaatgaaacacgaaacattcaaagtagatgcttcaggaaaagacataaaagtgacaatgaaactaatttgcagcagcaagtggtctggggaaatagaaaccgtaatcttagtggaggggtactgatgggatttatgctcaatagaattaaccaggaagcaacccctggagatatagttgaaaaattgggagctgatgcaaaaattctttcaaatgttatctcaaaaagcacgagaccaaatactcttgatattgggaagccacctttaagatcaaaaagagacagtctagaaaaggaatctagtgatgatgatacaccttttgatggttctaactatttggcagataaagtggattctcctgttatttttgacttagaagacttagacagtgaaacagatgtatcaaaagcaggatgtgttgctacacaaaatcccaagaggattcaacgtatgaacagcagcttttcagtaaaaccttttgaaaaaactgatgtcgcaacaggatttgatcccctctctcttttggttgctgagactgaacagcagcaaaaagaagaagaggaggaggatgaagatgatagcaaaagcatttcaacaccatctgctaggcgtgatttagctgaagaaattgtgatgtatatgaataacatgagcagtcctttgacaagtcgtacaccaagcattgatttacaacgggcatgtgatgataaattaaataagaaaagtccaccattggtcaaggcatgcagaagatctagtctgcctcctaattctcctaagccagtgagacttaccaaatctaaaagttacacaaaaagtgaggagaaaccaagggatagactttggtcttctccagccttctcacctacttgcccatttagggaagaatctcaggatacattaacccactcatcaccttcatttaacttagatacactactagtacctaaactagatgttctaagaaacagtatgttcactgctggaaaaggagttgcagagaaagcaagcaaatggtattcaagattcaccatgtacaccacatcatctaaggatcaaagttctgatcgtaccagtctttcttcagtgggagcccaggattctgaatctacctctttaacagatgaagatgtctgccatgagttggaaggacctatctcctctcaagagaccagtgctacttcagggactaagagaattgatctcagccgaataagcctggaaagttctgcatccttggaaggttattttgcattcccactgccagtatatgagaatacctatttccccacagccttgtcaacaaactatgttggcacacttggatttttaccatctgataggtgattagccccactcccttcttttcttttttaacatacaagaacagttcattgtctaagcaaataacactaaacttacagcctgattcatatttattaaaatgaatattctatactgtagattagttagatacaaaag

SEQ ID NO: 462126 - DNA, 1726 bp, Homo sapiens
actcagtcaaacagtgtctggaatggacctccggcaaacttcagcagacgtgcagcagaggggcctgactgttagaacgaaaactaacacggaaaggaatagcatcaacatcaacaaaaaggacgtccacacaaaaaccctatccgaaggtcaccaacatcgaagagcaaaggaaaatcaagaagatctgggcctgtgggaagagaaatttggaaaatttgtggatatcaaagctaatgaaacaaaactcagtatcctggtctctacaggcccttcttctattggtttggatttctccttgcatggatttgagcatctttatgggatcccacaacatgcagaatcacaccaacttaaaaatactggtgatggagatgcttaccgtctttataacctggatgtctatggataccaaatatatgataaaatgggcatttatggttcagtaccttatctcctggcccacaaactgggcagaactataggtattttctggctgaatgcctcggaaacactggtggagatcaatacagagcctgcagtagagtacacactgacccagatgggcccagttgctgctaaacaaaaggtcagatctcgcactcatgtgcactggatgtcagagagtggcatcattgatgtttttctgctgacaggacctacaccttctgatgtcttcaaacagtactcacaccttacagagaaaggctgcagtaagcactgttcatgctgctgctctcccgcctagacaacagagcgagaccctatctctaaaaacaacagcaacaacaacaacaaaattaatgtaatagtgacatggaaaaaatacagctggatgcttaaaatgaatttggacagagtagctccaaaagttctgtgacagcctacctcttttacagacattggagaaaaatagctctcagtctgaggaagatactgagaaaaggaaagaagttgaaagcatcttgaagaaaaattcagattggatatgggattggacaagttggccagaaaatattccccacaaggagttcctctttaaagcacctgaagcacgtagctacccagcatggaatttaaagcctgatgaggaaagggggcattttctcagcagaatttccaaagggttttgctgctgtctcatctggtggccatgggattggggatctatattggaaggcatctgacaacttctaccagcaccttttgatgaataatttgaatccagctttgtgcgtatagtggggatttctatctgagcttgtgacacagctaactcaggagctgttatggtccttggttggctgtttcacttgtttttatttgttctgtaaatactgctttcctaatttagtaaaatgaaagaatagacactaaaatcacactgacctatacttatacctatagaatcagttaataaggttatcagactgattaatatctactgtaacaatttggcagtgagttttctttggatattagtataaatatgtaagtatcgttttaatatattagtcatgatatagtattttaaaaattatctgtaacctgaattctgttaaaacactttatattccaaaagaatgaatgacagtgatattaaaatcactacattaaagggtttgcccagaataaatattgtggccttacttacactactgtggaaaatattatgtttaatttaaataaatgcaggttgtctactaagactacacttaactatggt

SEQ ID NO: 462127 - DNA, 812 bp, Homo sapiens
aaaaagcaaagagcatggctaacagagataccggagaaaatttaacacgagagaatctctcctctccagcccttctcctgtgtgcctgcctcctgccgccgccaccatgaccacctccatccgccagttcacctcctccagctccatcaagggctcctccggcctggggggcggctcgtcccgcacctcctgccggctgtctggcggcctgggtgccggctcctgcaggctgggatctgctggcggcctgggcagcaccctcgggggtagcagctactccagctgctacagctttggctctggtggtggctatggcagcagctttgggggtgttgatgggctgctggctggaggtgagaaggccaccatgcagaacctcaatgaccgcctggcctcctacctggacaaggtgcgtgccctggaggaggccaacactgagctggaggtgaagatccgtgactggtaccagaggcaggccccggggcccgcccgtgactacagccagtactacaggacaattgaggagctgcagaacaagatacctcacagcacacacgtggaacaaagaccaacatacactgctacagataagaccaatgacccgaacaggctgctagatgactaccgcacacaagtatgagacagaagcagagccctgacagccagaatgtggaggccgacactcgacggcctgacgcagggagactggactgagcatgaacctggccagagacgaccaggagaatgcagaaagagaaccgtcaacggcggagcaggacacaatagaagacgaaccacacagaggagaagaa

SEQ ID NO: 462128 - DNA, 1541 bp, Homo sapiens
tataggctagtacgagctgggtttgctcactctcctctccagcccttctcctgtgtgcctgcctcctgccgccgccaccatgaccacctccatccgccagttcacctcctccagctccatcaagggctcctccggcctggggggcggctcgtcccgcacctcctgccggctgtctggcggcctgggtgccggctcctgcaggctgggatctgctggcggcctgggcagcaccctcgggggtagcagctactccagctgctacagctttggctctggtggtggctatggcagcagctttgggggtgttgatgggctgctggctggaggtgagaaggccaccatgcagaacctcaatgaccgcctggcctcctacctggacaaggtgcgtgccctggaggaggccaacactgagctggaggtgaagatccgtgactggtaccagaggcaggccccggggcccgcccgtgactacagccagtactacaggacaattgaggagctgcagaacaaggaagatctgttcagaactctggtgtgggctcagccacccccatccgatgacctgactactctcccatctccgctgatcctcacagccaccgtggacaatgccaacatcctgctacagattgacaatgcccgtctggctgctgatgacttccgcaccaagtttgagacagagcaggccctgcgcctgagtgtggaggccgacatcaatggcctgcgcagggtgctggatgagctgaccctggccagagccgacctggagatgcacattgagaacctcaaggaggagctggcctacctgaagaagaaccacgaggtgaggtggctggggcagaaggtcaaagatgctgaggagtgggtggcagagccctggggctgggccatggctgaggccgtgcgagagagcacagcaggcgcactgggattagtcaccttagagggcttccctgtctgcggagccctgatccttggggagatgaacgccccgcgaggccaggtgggcggtgagatcaatgtggagatgggcgctgccccaggtgtggacctgagccgcatcctgaacgagatgcgtgagcagtatgagaagatggcagagaagaaccgcaaggatgccgaggattggttcttcagcaagacagaggagctgaaccgcgaggtggctaccaacagtgagctggtccagagcggcaagagcgagatttcggagctccggtgcaccatgcaggccttggagatcgagctgcagtcccagctcagcatgaaagcatccctggagggcaacctggcggagacagagaaccgctactgcatgcagctgtcccagatccagggactgatcggcagtgtggaggagcggctggcccagcttctctgcgagatggagcagcagaaccaggagtacaagatcctcctggacatgaagatgcggctggagctggagatcaccacctaccaccgcctgctggagggcgaggatgcccagtgagtgggggagcctggggtcagggctgggggcctcttggcaggggtggggc

SEQ ID NO: 462129 - DNA, 1547 bp, Homo sapiens
ttttgaggatcttattcggcatgcggtctgtagacctctcctctccagcccttctcctgtgtgcctgcctcctgccgccgccaccatgaccacctccatccgccagttcacctcctccagctccatcaagggctcctccggcctggggggcggctcgtcccgcacctcctgccggctgtctggcggcctgggtgccggctcctgcaggctgggatctgctggcggcctgggcagcaccctcgggggtagcagctactccagctgctacagctttggctctggtggtggctatggcagcagctttgggggtgttgatgggctgctggctggaggtgagaaggccaccatgcagaacctcaatgaccgcctggcctcctacctggacaaggtgcgtgccctggaggaggccaacactgagctggaggtgaagatccgtgactggtaccagaggcaggccccggggcccgcccgtgactacagccagtactacaggacaattgaggagctgcagaacaaggaagatctgttcagaactctggtgtgggctcagccacccccatccgatgacctgactactctcccatctccgctgatcctcacagccaccgtggacaatgccaacatcctgctacagattgacaatgcccgtctggctgctgatgacttccgcaccaagtttgagacagagcaggccctgcgcctgagtgtggaggccgacatcaatggcctgcgcagggtgctggatgagctgaccctggccagagccgacctggagatgcacattgagaacctcaaggaggagctggcctacctgaagaagaaccacgaggtgaggtggctggggcagaaggtcaaagatgctgaggagtgggtggcagagccctggggctgggccatggctgaggccgtgcgagagagcacagcaggcgcactgggattagtcaccttagagggcttccctgtctgcggagccctgatccttggggagatgaacgccccgcgaggccaggtgggcggtgagatcaatgtggagatgggcgctgccccaggtgtggacctgagccgcatcctgaacgagatgcgtgagcagtatgagaagatggcagagaagaaccgcaaggatgccgaggattggttcttcagcaagacagaggagctgaaccgcgaggtggctaccaacagtgagctggtccagagcggcaagagcgagatttcggagctccggtgcaccatgcaggccttggagatcgagctgcagtcccagctcagcatgaaagcatccctggagggcaacctggcggagacagagaaccgctactgcatgcagctgtcccagatccagggactgatcggcagtgtggaggagcggctggcccagcttctctgcgagatggagcagcagaaccaggagtacaagatcctcctggacatgaagatgcggctggagctggagatcaccacctaccaccgcctgctggagggcgaggatgcccagtgagtgggggagcctggggtcagggctgggggcctcttggcaggggtggggc

SEQ ID NO: 462130 - DNA, 1428 bp, Homo sapiens
tctaggtagcgaggccgggtgttgctcctgccgccgccaccatgaccacctccatccgccagttcacctcctccagctccatcaagggctcctccggcctggggggcggctcgtcccgcacctcctgccggctgtctggcggcctgggtgccggctcctgcaggctgggatctgctggcggcctgggcagcaccctcgggggtagcagctactccagctgctacagctttggctctggtggtggctatggcagcagctttgggggtgttgatgggctgctggctggaggtgagaaggccaccatgcagaacctcaatgaccgcctggcctcctacctggacaaggtgcgtgccctggaggaggccaacactgagctggaggtgaagatccgtgactggtaccagaggcaggccccggggcccgcccgtgactacagccagtactacaggacaattgaggagctgcagaacaagatcctcacagccaccgtggacaatgccaacatcctgctacagattgacaatgcccgtctggctgctgatgacttccgcaccaagtttgagacagagcaggccctgcgcctgagtgtggaggccgacatcaatggcctgcgcagggtgctggatgagctgaccctggccagagccgacctggagatgcacattgagaacctcaaggaggagctggcctacctgaagaagaaccacgaggtgaggtggctggggcagaaggtcaaagatgctgaggagtgggtggcagagccctggggctgggccatggctgaggccgtgcgagagagcacagcaggcgcactgggattagtcaccttagagggcttccctgtctgcggagccctgatccttggggagatgaacgccccgcgaggccaggtgggcggtgagatcaatgtggagatgggcgctgccccaggtgtggacctgagccgcatcctgaacgagatgcgtgagcagtatgagaagatggcagagaagaaccgcaaggatgccgaggattggttcttcagcaagacagaggagctgaaccgcgaggtggctaccaacagtgagctggtccagagcggcaagagcgagatttcggagctccggtgcaccatgcaggccttggagatcgagctgcagtcccagctcagcatgaaagcatccctggagggcaacctggcggagacagagaaccgctactgcatgcagctgtcccagatccagggactgatcggcagtgtggaggagcggctggcccagcttctctgcgagatggagcagcagaaccaggagtacaagatcctcctggacatgaagatgcggctggagctggagatcaccacctaccaccgcctgctggagggcgaggatgcccagtgagtgggggagcctggggtcagggctgggggcctcttggcaggggtggggc

SEQ ID NO: 462131 - DNA, 796 bp, Homo sapiens
  misc_feature (751)..(751): n is a, c, g, or t
  misc_feature (779)..(779): n is a, c, g, or t
aaggctagtgggcggtgttatcggcgaggctctcctctccagcccttctcctgtgtgcctgcctcctgccgccgccaccatgaccacctccatccgccagttcacctcctccagctccatcaagggctcctccggcctggggggcggctcgtcccgcacctcctgccggctgtctggcggcctgggtgccggctcctgcaggctgggatctgctggcggcctgggcagcaccctcgggggtagcagctactccagctgctacagctttggctctggtggtggctatggcagcagctttgggggtgttgatgggctgctggctggaggtgagaaggccaccatgcagaacctcaatgaccgcctggcctcctacctggacaaggtgcgtgccctggaggaggccaacactgagctggaggtgaagatccgtgactggtaccagaggcaggccccggggcccgcccgtgactacagccagtactacaggacaattgaggagctgcagaacaagatcctcacagccaccgtggacaatgccaacatcctgctacagattgacaatgcccgtctggctgctgatgacttccgcaccaagtttgagacagagcaggccctgcgcctgagtgtggaggccgacatcaatggcctgcgcagggtgctggatgagctgaccctggccagagccgacctggagatgcacattgagaacctcaaagggaaggaacctgggcctaaccttgaaagaaagaanccacgaagggaagggaagattgaaacgncccctgccaaagggcca

SEQ ID NO: 462132 - DNA, 1554 bp, Homo sapiens
actataggcttaggtagaggctgcgtgttaatcggccgaggcctctcctctccagcccttctcctgtgtgcctgcctcctgccgccgccaccatgaccacctccatccgccagttcacctcctccagctccatcaagggctcctccggcctggggggcggctcgtcccgcacctcctgccggctgtctggcggcctgggtgccggctcctgcaggctgggatctgctggcggcctgggcagcaccctcgggggtagcagctactccagctgctacagctttggctctggtggtggctatggcagcagctttgggggtgttgatgggctgctggctggaggtgagaaggccaccatgcagaacctcaatgaccgcctggcctcctacctggacaaggtgcgtgccctggaggaggccaacactgagctggaggtgaagatccgtgactggtaccagaggcaggccccggggcccgcccgtgactacagccagtactacaggacaattgaggagctgcagaacaaggaagatctgttcagaactctggtgtgggctcagccacccccatccgatgacctgactactctcccatctccgctgatcctcacagccaccgtggacaatgccaacatcctgctacagattgacaatgcccgtctggctgctgatgacttccgcaccaagtttgagacagagcaggccctgcgcctgagtgtggaggccgacatcaatggcctgcgcagggtgctggatgagctgaccctggccagagccgacctggagatgcacattgagaacctcaaggaggagctggcctacctgaagaagaaccacgaggtgaggtggctggggcagaaggtcaaagatgctgaggagtgggtggcagagccctggggctgggccatggctgaggccgtgcgagagagcacagcaggcgcactgggattagtcaccttagagggcttccctgtctgcggagccctgatccttggggagatgaacgccccgcgaggccaggtgggcggtgagatcaatgtggagatgggcgctgccccaggtgtggacctgagccgcatcctgaacgagatgcgtgagcagtatgagaagatggcagagaagaaccgcaaggatgccgaggattggttcttcagcaagacagaggagctgaaccgcgaggtggctaccaacagtgagctggtccagagcggcaagagcgagatttcggagctccggtgcaccatgcaggccttggagatcgagctgcagtcccagctcagcatgaaagcatccctggagggcaacctggcggagacagagaaccgctactgcatgcagctgtcccagatccagggactgatcggcagtgtggaggagcggctggcccagcttctctgcgagatggagcagcagaaccaggagtacaagatcctcctggacatgaagatgcggctggagctggagatcaccacctaccaccgcctgctggagggcgaggatgcccagtgagtgggggagcctggggtcagggctgggggcctcttggcaggggtggggc

SEQ ID NO: 462133 - DNA, 1182 bp, Homo sapiens
gagactgagatgggaggatcactatggtgttcagggttgagactctccaatctcacacgtcccgatgtcacattcagacaccacatgtggcgggccacaccagggtctgtatctgccctatgcccctgcctgtcccctctaccagaatgccctttccccgttgccatggccaccattctggtctctccgacaaccccctctcggagttccagtggcttctcccccctctggctcagaggcccaggaaagagagagaagaccaaccaaggggtggctggagtcccaaggccatgaactttcaggaaaatgtgaccctggccatggccttgttcaccatcctgacctccatctatttcttcaacaaggctcagcagtgagaagacacaggacctccccgcacaagagccctgcctctccctctgccatcgctctgaggccagataaatgagaggcagagaatatcattgcaggatcctgctttttaaaaaatgctccatgccaagggcagcggctcacacatgtaatctcaacacttcgggaggctgaagcagaaagattgcttgaggccaggaattcaagaccagcctgggcaacatagcaagattctgtctctacaaaaaaaaatttaatgagggcatgatggcacatgcctgtcgtcccagctacttgggaggctgaggcaggaggattgctcgaggctgcagggagctatgaccatgccactctactcccgcctggtcaacaaagcaagaacctgactcaaaaaaaaaaattgctctaaagtttattattggaacagttaggaaatttgaatatggcctgtttattagataataccaatggtaaagttcttgagggagataataatattataattttacagggaaaatgctcttgttcttagaagatacaggctgaagaattaataggtaaaatatcgtgacgtcctacctgcgccgactttaacacagttcaacatttttgggaggtacctctgagcattgtgccccttgcagcacagtgggtatgctgagggctccctccctgggtttcccagacctcatgtccccgtcttgtctgctcatcatactggagaaaaaaaaaaaaaacttatatttttaagcctctaaacatggaaggtttttgttacacagcaaaaggtaactgatacatctgcattcc

SEQ ID NO: 462134 - DNA, 3519 bp, Homo sapiens
cagcaagtatgcgggttcaccgcaggttaattgggaataatgggtttcattccaaaccatgagaaatgatatttcagagagagagagagagaaactgactctgttctccctcactgagtgtcaggaccatcccttccctgcacatttggctctgctggtcccggccaagtctctcgagtctagacatctgggcctgggcttttgttgggcagacggtggagggtcggaggctgggggctgaagccagggagatcaggtggctcaattgcatcattttcccttctgaaatcagactgggcagcctggcgtttaatccttcagcgaatgtgtattgagtggctgcgtcaggcaggacgctgcggtctgtgcacctccgtgaaaccacatggtgctgaacagaagctgcctggggtgatggaggcagcatcgaccagatagtgcagtctaacagaaataaaatgctagccccacatgcgagcacatgtgggattttaaatcttccagcagccactttaaaaaagtaaaaagaaacagtttgagaagctaccagccgtcccagggaagatgtcaagtaggcagctggcgatatggatctggagctcaggggccacaatggacctccaccccaccccacccctgcaaatccaacaaccctgcccccaggtagacaaccttctctcatctgcccactcaacaccatttgcttagggatgggactggaaggagggaggtttggcggcttgggtgagaggcagaaggaactggaagggggcacggacagggtgcacagccacagaggaaagaaggctccaaaccaaggggctggcaggagtcttgactcagggagcagcatcttctccctcctctcgggggccgggctctgccgtgtcctgacacagggagtggtggccgagcacagggccaccactggatccccagctgtggctgtctttaagaacaggcctgggacgtgcaagctgttgatacccgtcaccagggcccagattggaacccagagccagccagtggggggatgaggggagctgcatttggggagggcccactgttgcccaggtgcttaatatgcacgagcccgtgtgaccctgtctgcctccctgccagccaaacatacctgtgtcagaggcctcccatggcttagcaagcttctggcttgcctcccgttcttcctaccctattgagtccctgtatgtattacggcaaatttagaaatttgtgggcacgccacagaattagaacactggggaagcatggtttggacttggtgcaagcgtcctgccttctacatagggtgattcagtgtattgagggaataaggaatgggtggttcacatttctgaatttcctactgagttggaaggtatgcagaaaaaacctttctgtagtttcaacacctgttaccaaaacgcttttgcaattgtgcccttttcctttcctgcccagggaagtggagtatgatgaataggatcaaatttctctggatttatcaggattttgtgtgacttcaggatcattgttcctaaaggcctgtccttgttcaggagtgggtatgaagggagggaaattaagctgaataagttatcagaagctagccctaaaagctgcttttcaggagaggggaagaaaaaaccgcactggctttggttgaaatgcgccggtgaggactgagcctgactggcaccggggagtgtgatcggctgttttggccacctttcaattaactgaaggctccagttaattggggtttggctacattttctcttgacactggtgctcagggtggcctgtgccctgctgggcctgacttagtgacatggctcaagtccccctgacttcctcctcataacctgccttgcctctctgaagcctaaatgccttggtcggcattcttccacggaaccctcagaagaaactacgctgacatgttaagctttttaatttagcacacacagtgcgtacatgcccccagacaaaacagaattgattgataattctcttaatggaagcacaggcttcagttgctccagaaatagatcgttacctcggccaccttttgtaattttctccctcccatttttttttttttttatcctactgtggtctaaaaatatgatgtttcatttcatccttctttcataatccactaaatgccagggcatttcttttcagacctttaatttatagcatgtttgttcagtttcacttcattaattaatgctcttcccaggctcccatgacagagtctttgtgtaatgctctcttacagtaagcaggtgcttttatccttaatgaacaatttcctggaaaacactgaaatacacaacgactaatcaggccaggcacacagtgactctgggacttatgtaccattttccaaattaaacctggggagatgagggacagattttgatcggccacagtactgttttttagtgggtctttcctttgggagggcatatagggtgctcaagttctggaaggtgggtgagcttcttgctcctccaggaaattagagttcagaggaattgtttgattgcaaatgcatgtggctgtgagatggttgtcagacacagcctaggccagaaatgcagccaaattggcctctggtccagacttggaatcatcactagcttagactgcaagtcagcagggcctgggctgggccaaattgcaaacttactgaaattcaccttcagttcctttcttcccttctggcagacttgccccacccccgggaggcagtccttatcaggcccaggaccctaatatactcattccccctgtgcacccccagtagtatctgtactgcatcccatacgccccatcagagaggacaatgccaaacccagccatgctgatattttccctggggctatgctgttcacaggcccttctcataacctgtgtctctttggcatctcaaccttgggagtcaggtttattactaaccccattttgcagaagaggaagctgggagcccgggaggttaaatgaccatccttaggccatgcagttgtttatataaatgtgatcataatgttcatgctgctttgtaacctgcgtttttcacataataagactttagggtcatcttcccacccagcaaagccgatccaggccggagcagaagccctggacaggaggagggatcgtttgctatgatgccagtgtcccttaagcaacctggcggcattttcctttaacaccaggtgccaggcataagaggcccttgagtgttagaatagacaagtgcatgcagactctcaggacacagcttgacatgcaccaggcctttcttcagacttggtgttgagggaggggagcagagtttcctaagccgctatcatcaggaacaccgctcttagagctgtgtcactgggaagagttccatgggaaatattgggtgaaataaaaagtcaaatggtctctttattttgggtcttctcagagtctaagctatgctaaaatgcttagactgaatatttaggatgaggacatagc

SEQ ID NO: 462135 - DNA, 843 bp, Homo sapiens
ctctccctgggcctgggctgggtgacagaagcctgtctcctccactgacctggactccgcctggccaggctgtcccctgagacacagccgagtgcacattcggccatgggccagcggctgctccacagccagaggatgcctgcatgtggctgctgtagagtggctgtggccgcccccagagcccacagcaagggcagggctccttgccagctgacccacccaggaggccttaccactgcttgtaacaccattcttctccaccctggtttcactgatgaggaaactgaggcctatgaggagatcagaagtgccctgtggccactccaggcttcaacatgggaccgtggcgccaaagctcagcccagccacgcacagggcttctctgctgtagcgaagcctttggattctccagtgagaaggttctgtaggctcctagaaaaagcacgggagaccatgggcagtcatagttcacatctgtcatctgggaaaaattataattctgttctcttacactctcaaaatcatcacggtttgatgtgaaactggtaagctctgagcggggttgggagtgcatcaatgcgttatctggctgtggtagcagatgagttatgcaaaatatttccgctggggaaagtgggtgagggcatatggaattctgtttgtgttaattcttgcaacagtgtgcaaatctacaattatctcaaaattaaaagtttttaaaaaattatcctggttaaaaaaatatattacatggtcaccctaatttcaacagcatcctgtctgactcctctaattttcatctgtctttcctattccttttacacagcaactaatgtcatgtgc

SEQ ID NO: 462136 - DNA, 858 bp, Homo sapiens
tcattgctgtggaggagacggttatgggctggggcctgggtcttccgccccttcctggcagaccaggagcttcagttgctctctgtgaagttcttctttgcaggagcctgacacagacgacagccccagatgttcttgctactcaccccgaccttgcggtcttacccttctggctgaacaagagacaaacagctcctctccacttggctgtgtgcggcttaacgaatgcgtatgaagaccgtataaataattcacatcactcaagaggtggcgagctgaacaagtcccttctgggttctggcaaaaacccgttcagaactccgtgtgacatgtgcagtcaccttgcccggatttctctcggtgggaagcgacgtctgcaagagaggggacggcggctgggctggatggctgcctttgagtccgtcctgcggtgaggctggggaaggcccattccacgcgagccttggcttcagccctgaggtgcctgccagcccccgtggcagaccccggccctgccaatttcagcccccttggtgattctgttccagcgctcgccaaaagcagaatccgtgtataatgaacaagtttcatgttcaacattttaagtgtctatttatgagtcccagtaattagccctttgtctgcaattctggcgatgatgattagaattccatctcacgttatgaatgctgctccccaaacttgtccttctcgcctggagaatcccaagcaggtgaacaagaataactgtttctccaattacgggacattataagttgtttccttcattctgattgaatgcacccacgtcgcttgccacatttggaccaataacagatcccagaagaaaaccatgcc

SEQ ID NO: 462137 - DNA, 434 bp, Homo sapiens
ttcctctctccagaggacctttcctgcctaggactcatgattgtcccctccctgctgttgcctagtttcctggtattaaggagaatcaactctctggataaacgtggtaaatatggcccatagtcccatctttttacaggcattttttacacctggagcagccagaggacgcatgcatggctcttcggaaggtaatttagggatcacccatgtaagtttcctaaggatttctttaacatggttcttctgattcagtccggccaattaaatctaaatccacccctgaaagccatctggtgtggataacaagcccacaaattgagcagtcagctttttgtgccctttaggcttgggacaaccacgggatctaaaaggggctggaactagaggtcttgagctcctgttcctaaaatcatcttcatcctatatctgca

SEQ ID NO: 462138 - DNA, 883 bp, Homo sapiens
gtataattgaccatggatatccgagtcagtattgttctgagcttctggattgttgaagtctgctgggctgtggtggaacgtagtctcctgggctcttcagagccactggccagagcgtctccccatttccttgctgtgtaccatgcagttgcctccctggccactccccctggtatctggatgatgtctgccacagaccttttctatggggacccctttgcctttccaggtgggccatttgggaaggatttggaccgaccccagtgggctctccctggtgacacgaaccttttgctgtggctgactctaaggttaaggtggtcccagccccaccctttgcagcaggagacagcccatctctctgggtctctagcattcctggatctgctgggtgtctgtatttacaaagagaaggggccactcgtgtgtgagcagcaccgagggacagaggtaccttgcctgcttgtgtcccctccaagtccttctgatattttcctttccagctgttgcctagtttcctggtattaaggagaatcaactctctggataaacgtggtaaatatggcccatagtcccatctttttacaggcattttttacacctggagcagccagaggacgcatgcatggctcttcggaaggtaatttagggatcacccatgtaagtttcctaaggatttctttaacatggttcttctgattcagtccggccaattaaatctaaatccacccctgaaagccatctggtgtggataacaagcccacaaattgagcagtcagctttttgtgccctttaggcttgggacaaccacgggatctaaaaggggctggaactagaggtcttgagctcctgttcctaaaatcatcttcatcctatatctgca

SEQ ID NO: 462139 - DNA, 973 bp, Homo sapiens
gtataattgaccatggatatccgagtcagtattgttctgagcttctggattgttgaagtctgctgggctgtggtggaacgtagtctcctgggctcttcagagccactggccagagcgtctccccatttccttgctgtgtaccatgcagttgcctccctggccactccccctggtatctggatgatgtctgccacagaccttttctatggggacccctttgcctttccaggtgggccatttgggaaggatttggaccgaccccagtgggctctccctggtgacacgaaccttttgctgtggctgactctaaggttaaggtggtcccagccccaccctttgcagcaggagacagcccatctctctgggtctctagcattcctggatctgctgggtgtctgtatttacaaagagaaggggccactcgtgtgtgagcagcaccgagggacagaggtaccttgcctgcttgtgtcccctccaagtccttctgatattttcctttccagctgttgcctagtttcctggtattaaggagaatcaactctctggataaacgtggtaaatatggcccatagtcccatctttttacaggcattttttacacctggagcagccagaggacgcatgcatggctcttcggaagccttctcctgccacggcatgcacccacacatgcgagcctcccgggtactgtcatcctgaattctgagaccatccagcacttcctttagttttgccctggtgctgttgacttttgtttactgaagagtgtgctggaggcaggacaagggacatggaaggctgcaatttaagagtctaaaaggttttagaatcctgaaggaggtttaacaagctgaattgaagaataatacctttctcaactggagagaatttacatgattgcattattgttaaaattaacatctcatctattaaaagcatttgtagattatctttgtaccttcactttctttgt

SEQ ID NO: 462140 - DNA, 513 bp, Homo sapiens
tgtaacttcacatgcagccaacatgctgcaagtcccaactggcccctgcaccccactcttgcagaacgtcccccacaagtcctcactgcccgagggcatccgccctggcacggtgctgagaattcgcggcttggttcctcccaatgccagcaggttccatgtaaacctgctgtgcggggaggagcagggctccgatgccgccctgcatttcaacccccggctggacacgtcggaggtggtcttcaacagcaaggagcaaggctcctggggccgcgaggagcgcgggccgggcgttcctttccagcgcgggcagcccttcgaggtgctcatcatcgcgtcagacgacggcttcaaggccgtggttggggacgcccagtaccaccacttccgccaccgcctgccgctggcgcgcgtgcgcctggtggaggtgggcggggacgtgcagctggactccgtgaggatcttctgagcagaagcccaggcgggcccggggccttggctggcaaataaagc

SEQ ID NO: 462141 - DNA, 576 bp, Homo sapiens
tgtaacttcacatgcagccaacatgctgcaagtcccaactggcccctgcaccccactcttgcagaacgtcccccacaagtcctcactgcccgagggcatccgccctggcacggtgctgagaattcgcggcttggttcctcccaatgccagcaggttccatgtaaacctgctgtgcggggaggagcagggctccgatgccgccctgcatttcaacccccggctggacacgtcggaggtggtcttcaacagcaaggagcaaggctcctggggccgcgaggagcgcgggccgggcgttcctttccagcgcgggcagcccttcgaggtgctcatcatcgcgtcagacgacggcttcaaggtgcgtctctgcgacaggggccacgggcctccggaatcctcaccaccgaccctcccctgcacggccgtggttggggacgcccagtaccaccacttccgccaccgcctgccgctggcgcgcgtgcgcctggtggaggtgggcggggacgtgcagctggactccgtgaggatcttctgagcagaagcccaggcgggcccggggccttggctggcaaataaagc

SEQ ID NO: 462142 - DNA, 3277 bp, Homo sapiens
agcagtaaacaagtcatgaaaatgaataagattctacataaacttggaagtcagatttgtgtcttaaaggttgagtggcagttcatccaacaaacccgaaaggaaatcccaggcttgggagacagcatgtacaaagacatagatgtaagaagaacttccttcctgaagtccgttgctgcttttgagaactgttcaggccatttctgctcgagtgacccatggcaatccacgctcaccactacctatatctggacccacgtgtgtaaaggttgtatccaggatgtgatttcaaaggtccaacaaatatccctttcctctcagggtactttaaacattcactatcaaactaactcactggatactggttccagtcttgctactgagagaggccacttgtacttcccagaccatctgggaagtatagaaactcctgatggaagcagtacagattactccaaaacacactggaatgagattacgggccctagaatcttcttctgggcaaagggtaacaattcagagatgggcagtccaaagctggtggctctgcttcctccatggaaggaaggtagagcccagaccctggtcctctctgccatccccgacatgtggctcccatctctgggcccaaggcagctgagccagctcttgtcattccctgaaggggctctgggatatgatggggaaagagctatgcagagtagtgagtacaaccttttagcatctctagaagaggcagtattgtggaagcagttccaatggtaactatctgaatggtgccaggacagtgtaaatagcattaggaccagtattgggttagagctggcattagcagacacacgagtatattttcttagaactgaaaggcatcttagagctcatctattccaatcacctctttatataatcaagaaaatttgagaacaccatctatttatttatctttagggcaaaggattgaaaagaagttcacaacaaaaaagtttgaacacaagcaaacctgaaacagatgcagggtagtagatcttaagggtgcgttgctcactccagggcctgctgccacccagatggctggcaaacaccaggactccgaacacaacaggattcagggattcagacaggagtcttgctctaccaattattataggatcttagatgcctttccagtaaagctaacaaaaaacaaaacaaaataaaaccatatccaaaatactaaacagctgtctccaagatcagaaggcatcagaaaagaccctcaagagttgtctaatcccagaggaagatcttaagtggggatgtgctcacagcagaaaccttggaaatttcagggagtgaaattttattgtcagaactttcaataaaagtgtagccacagatcctgggagcattaaataaaaattaccaacaagctgtcttacctgtgtgcactccactgaaaggaagggcaaacatgagcaaggagctcttgtacatcagtcaaaattctgacagctaccctgtgaagtttgacgggctgccatgtgctagactacctaagatactcttaactgaaccataaaaagacaaataaattagtaattgtatccctcctgtcaatgtcctttttcgtgaacttctcaaggtgttggttaacattgtctggaatgatttatcaatatattcttagctttcttaggaaacacagatagacttgattttttccaaattgttttttgaattgatttaagaaaatgatacagatattgccaattgctgggcctctctttttcactccctgctctgcttcctccgattattaaatcaaaccaataagattaacataatctttcttagaattgactgttctttttaaatagatcccatgatagacatgtgtaaaaatcaataacaggcccctcatttgtcaaagctaatgactaaactcattttgaagttcaatagtggttactggagagtggccacacattatatgtctaatcctgtatgtctcgacacttattctgcagaacagagaaaaaggctttgttgcttgaggcacagtataaaagctggtgtctccattgtatttgtacatattcacatttcctccaaactatgacaattgttgattgtccaagctaatacattaaaggaaataaaaggaaaaataaatctggtaaatttgtaacactccccaccccaccttttaaccaattcaattaattgtaatggattttaaaaactgcttgagggtgggggagagagaggaggaaaaggaatccacaggaacaataactgaagtggagtgatatattcctgatgggagctggagaactgttctttataatagcttctcaggggagaagccgcccttttccagcaggaggtgtcctgggaatagcagagccactgccattccattcttttgatgaacagaaaccttatcagtgtaattccccttgagagctgaagggagaaggaaggagtttaaagatttgaaaaatttgggttgtgaggggtggaaagcccagactccagcttgttcatttggaatatttcttgtgagggggaaggtattctgccaaatttagggtcctttcagagctcacagattctgacagctgatctaagttcagtgcatgagtttatccttgccaggggagagagggagcagtaagtgaaaagaacgttttatgaattaaatgcaaaatataaaaaccaaaatgcttgcctccaatatatcacaatatgctaatactttcagttgcagctatgcaatgaggatgtcaaagcattagtcattaaataataagtcgcatcaataattttgactttagaataaaacacagatacctttgatttgcacctcgtttgactttttaattatttttagaagctcgaaatatctcttggctttttttctctcattgtgacaagactatgaggttggaaaaatcaaggaagcaggtgaaatgtactctctcatatcatggttgtgtggtatctatgaggcaaaatattcttttttttctatccataaaattgccaaagccttaattatttggtgacataagatgagtaatctaaagccagtccatgttcaatattaggctgtttggggatacaaaaaaatctgggttataatgaaaagcactgtcatttcatgaatacctctcacatgaattgcacatgtgtatttttttcatttatattgttttctccaatggctttatccaacaacagtttgtttcatgaccatgtcacgtgttcagtgcaggtccgtgtggtggttctgctc

SEQ ID NO: 462143 - DNA, 3937 bp, Homo sapiens
  misc_feature (2)..(2): n is a, c, g, or t
  misc_feature (7)..(7): n is a, c, g, or t
gncctgngccaggaagaggttctggcggggcctccgcctgaggccacgcccctgggacctgtcccgtgtccacgtgaaagcggagcggagcattcaccatcccctccctgaaacagcggtccccaatgtgctccacaggcagggccgagctgggcaagggggagcccagcccctgcacgggccgccctgagcggcggggacgcaggaagacctcgccggctccaccagcccctaccccagatgcggggcctcagaccagcgatgacctggagcccccgccccacggttgccaggaggcggacaggggcagctcctggggggctaccgccccgaggccattccgccagaacttgagcgacttgggaaggtgcagtgccctgcccttgaagaagaacctgtgtcctggaggcagcagcctgggagctcctcctccgaggacaccgcagagaagagtgactctggcggtgcagcgctggctttcccatccgcggaggagagctgtggggctggtggggacatgggacgccgatgtggacatcagggactacattgggaaaagggcctcccagcatgtgagtcagagcatcacagaagagattgagaccctgatgggagtcctggacaaggacgatggggagagcaccgccagcagcgggggtggggacccagagcagccactggaagagaaggagtaggaacgctctcttaaagtccacttatcctattccttcaaattaagaccaaagtccaatgtatttaggtaaaaaataatttcttttagaaaatgctaagagattcatcataccttgacctgtgccccatttccctcctccacctgtctgacctggcattcctatttcgggagaccagaagtggggggaagagaagggatgactgtttctttgctttcaccattcctgcatgccatgcaaaggaaggaatattgcacttttaaatatccgttttattaagtaagtggttactctttcaaggacaaaaaaatgcaaattgttacaaaactggtagtatttgtaagtgcaagcactacatgctgccttgttcttttaccaattgcatttgcattttaaggtactactggtacagccatggtggagaacagtttggaggttcctctaaacactgaaaatagaggtgccaaatgatccagcaatcccactgttggatatataccccagaaataagaaatgagtatatcgaagaaattatctgcactcccatgttggttgcaccactgttgacaatagctaagatttggaagcaacctaagtgtccatcaacagattaatgtattaaagaaaatgtggtagatacacacagtggagtattattcagccctaaaaaagaatgggattcagtcatttgcaacaacatggaaggaactgggtatcattatgttaagggaaataagccaagcacggaaaggcagacattgcatgttctcacttatttgtgggatctaaaaatcaaaacaattgaactcatggacacagtaagtactagggggctgggggggggagacagggcacgggtaatgggtacaaaaataggcagaaggaatgaataagacatactatttgatagcacaacagggggactctagtcaataattgtacatttaaaaataactaaaagaatctaattggattgtaacacaaaggaaacatgcttaaagggatggatacccactctccatgatgtgattagttcatgctgcatggctgtatcaaaacatctcatgcaccccataactatatatgcttattatatactcacaaaattgcttgaaaataaaaataaaggaactactgaaggtcaggtcagagtggaaatgtaaaaatactaattagagaataatgtgaatacaacaggaatcctgttggtattctatttatattgtaagcagcagttcaattgttttgtaaaagtaatttcaattttaatcactgaactaaagaaatgggcaacgctgacttccgtaatataggttctacctaaccatctctaacaccgctgtcaaggaggaccagtgttaaggtacattactaacaaccacacaaatttttaaaagaaaagaacactcttagcagcctatggtactttgaaatgaaatattgcctctcattctcacttgtgttgccattccaaaagtttgaatttgctgaggtttatattctgcgtattatataaccattggttctatttggcataaccctattaaatggtgctcagagctgaattatgtacagaaactttctggtttaattagcataaattggtataaatattagtgagcccatacatctgtgatataattaaaccaacttaatgattctcacataaggtgtcaatttattttactaatgcattcataatctatgctttgtagcaacatttttcaaatgtttaaaatgctaaatcttctcaattttccaatcttttcttgaatcaattagatacctataatgtagttactgaatagctgggaaacaaatacacctagttagaaatggcactgctttataaaaggcactagagaaaagatgagactattcctatatttaaatgctgctggcaagtgaattcctttgtatataaatgaaagataccattcattaaaatgaaagacttgttttaagtgtgattcttacatttcattcatttatgatagagtaaatggctttataattactttaaaatttaactcactagtacattaaatctgttcattgcaagattagaatcaactgtgaggggaactaatttaaacaagcccttccttagtcttattgagtctcatatttgccgaaagtacctacagcttgcaggataagggagttcacggaccatagggtgagtgaacccatgcacaaattgcaaactgcccagagctactacatttaggatttttagacctttaattttccaagtcatagaaatttgttacaggttcatcacatctttgtctaaatggcaactgaatttctttaaagataggttaaaaaaaggcataaaactatgaattattatccatttgtgtgcctctatttttgctttagaattatggaaatggaccctgtgaatttgggaaacactgttatgtatacacatgggtgaaaaacaatctaacattgtgtaaattaaaatactttttttgaggttgaaaagcatccatttgttctaaatctatatatattatgtgtatctagtacagaataaggtgtaacttctcattgagtaatcttaggttttacagatatgtaaagctgaagcaactctaaagagtagacacttcagaacaggaaggttctggtcaatgttgagagtagacactttcactgaaggttctggtgaaatgtgggtaactaattgcttgtaatctataatttgctgtatacttaactattaagttaaaatgtcatttaccatgctttttacactaaaagctttaacttttctgagaaaataatattttaaatgttcaattattacttctgaggaaagctacttctagcattctttgtcatgatgtgcttgtgtgcagtaagcagagcattttcagccacttacctctacaatgttcctgtttttcaatttctgatttagattataaaaggcaaatgattaatttaatttgatactcagagttgtgtttacttttaatggacaaatatatgtcagatactttgatgtttattgatatgacaccgtgtggttaaacaatgaaagtatgtccatgtgtttcttatagggtacacttgaaactagtggtgtttatgcagttcacttatgtaacttgaaaatctggtactattgcattcaggactgaaatcttggagtttaggtgtcttgtctctcattttgaaaataagtgaaagttgagaatgtaaaatctataaagttcatttttttaactagg

SEQ ID NO: 462144 - DNA, 753 bp, Homo sapiens
aagaattcggcacgaggcctcgtgccggcacgagggtatctagtacagaataaggtgtaacttctcattgagtaatcttaggttttacagatatgtaaagctgaagcaactctaaagagtagacacttcagaacaggaaggttctggtcaatgttgagagtagacactttcactgaaggttctggtgaaatgtgggtaactaattgcttgtaatctataatttgctgtatacttaactattaagttaaaatgtcatttaccatgctttttacactaaaagctttaacttttctgagaaaataatattttaaatgttcaattattacttctgaggaaagctacttctagcattctttgtcatgatgtgcttgtgtgcagtaagcagagcattttcagccacttacctctacaatgttcctgtttttcaatttctgatttagattataaaaggcaaatgattaatttaatttgatactcagagttgtgtttacttttaatggacaaatatatgtcagatactttgatgtttattgatatgacaccgtgtggttaaacaatgaaagtatgtccatgtgtttcttatagggtacacttgaaactagtggtgtttatgcagttcacttatgtaacttgaaaatctggtactattgcattcaggactgaaatcttggagtttaggtgtcttgtctctcattttgaaaataagtgaaagttgagaatgtaaaatctataaagttcatttttttaactagg

SEQ ID NO: 462145 - DNA, 3804 bp, Homo sapiens
tccccagtgcccacttttttctgttaaaaattaaactgagctactcaggaggctgaggaagaagaagtgctagaaccccggcagtgagccgagatcatgccattgcactgcagcctgggcaacaagagtgaaaaaaaaaacaagttgctttgtggaagaaagtaagtatacacagggagaaagagatctgatgaccaaagcagggaatacgtgtttggagtccacggcatcctgagaacttcttgggaatagagtctaggcccccagtgctgtcactctcacccatcttcttctacacatgtgagatgtttcaggacccagtggcttttaaggatgtggctgtgaacttcacccaggaggagtgggctttgctggatatttcccagaggaaactctacagggaagtgatgctggaaactttcaggaacctgacctctttaggaaaaaggtggaaagaccagaacattgaatatgagcaccaaaaccccaggagaaacttcaggagtctcatagaagaaaaagtcaatgaaattaaagatgacagtcattgtggagaaacttttaccccagttccagatgacagactgaacttccaggagaagaaagcttctcctgaagtaaaatcatgtgaaagctttgtgtgtggagaagttggcctaggtaactcatcttttaatatgaacatcagaggtgacattggacacaaggcatatgagtatcaggaatatggaccaaagccatgtaagtgtcaacaacctaaaaaagccttcagataccgcccctcctttagaacacaagaaagggatcacactggagagaaacccaatgcttgtaaagtatgtggaaaaacctttatttcccattcaagtgttcgaagacacatggtaatgcacagtggggatggaccttataaatattatatcttatccatgaaagaattcacactggagagaaaccatgtgaatgtaaacagtgtggtaaatcctttagttattctgctacccatcgaatacataaaagaactcacactggagaaaagccttatgaatatcaggagtgtgggaaagcatttcatagtcccagatcctatcgtagacatgaaaggattcacatgggagaaaaggcttatcaatgtaaggaatgtggaaaagcattcacgtgtccccgttatgaaaaatctctatgaatgtaagcagtgtgggaaagcattatcctctcttacaagttttcaaacacacgtaagattgcactctggagaaagaccttatgaatgtaagatatgtggaaaagacttttgttctgtgaattcatttcaaagacatgaaaaaattcacagtggagagaaaccctataaatgtaagcagtgtggtaaagccttccctcattccagttcccttcgatatcatgaaaggactcacactggagagaaaccctatgagtgtaagcaatgtgggaaagccttcagatctgcctcacaccttcgagtgcatggtaggactcacactggagagaaaccgtatgaatgtaaggaatgtgggaaagccttcagatatgtgaataaccttcaaagtcatgaaaggacacaaacacacataagaatacactctggagaaagacgttataaatgtaagatatgtgggaaaggcttttattgtcccaaatcatttcaaagacatgaaaaaactcacactggagagaaactctatgaatgcaagcaacgttcagtagttccttcagtagttccagttccttttgatatcatgaaaggactcacactggagagaagccctataaatgcgagcaatgtgggaaagccttcagagctgtgtcaatcctttgaatgcatggtaggactcaccctgaagagaaaccctatgagtgtgagcaatgacggaaagccttcagatctgccccacacctttgaatacgtggtaggacacacaatggagagaagccctatgcatgtaaggaatgtgggaaacccttcggatctgcccagaaccttcgaattcatgaaaggacacaaacacacataatgcactctgtagagagaccttataaatgtaagatatgtgggaggggcttttattctgccaagtcatttcaaatacatgaaaaatcttacactggagagaaaccctatgagtgtaagcaatgtgggaaagcctttgtttccttcacttcctttcgatatcatgaaaggactcacactggagagaacccctatgagtgtaagcaatttgggaaagccttcagatctgtcaaaaatcttcgatttcataaaaggacacacactggagagaaaccctgtgaatgtaagaaatgtagaaaagcattccataatttctcttctttgcaaatacatgaaaggatgcacagaggagagaagctctgtgaatgtaagcattgtgggaaagcattcatatctgccaagatcctttgaatacatgcaagaacacacaatggagagaaaccctatgaatgtaaagaatgcagaaaagcattcagcttgcctacttcctttcatagacatgaaaagactcacactggaaggaaacactatgaatgcaagcaatgtggcaaagctttcacttcttccagttcttttcaatatcatgaaagaacacactagggagaaaccctatcaatgtaagcaatgtgcaaaagcctttatttcttccacttcttttcaatatcatgaaaggactcacatgggagagaaaccctatgagtgtatgccaagtgggaaagccttcatttcttctagttcccttcaatatcatgaaaggactcacactggagagaagccctatgaatataagcaatgtgggaaagccttcagatcagcctcgcaccttcaaatgcatggaaggactcacactggagaaaaaccctatgaatgtaagcagtatgggaaagcgttcagacctgacaagattctttgaatacagataatgaatgtaaacaattaactgtttataataactgtatactaacaaatgatattctttttaaataagaagctataatatcccattggtgtcatgtattagatcagccttatactgttaaattgttattatttggacattgtgagtcagtataaccatgtggataaaatgccagacatctttttattcgaaaattttacttttcatgcttctgtacttacatttttatctcaaccttaatttttctttctttttttttttcccccagaaagaatctcactctgtcacccaggctggagtgcagtggcatgatctcaggtcactgcaacctctgcctccagggagaatggtgtgaacctgtgaggtggagcttgcagtgagccaagatcgcgccattgcactccaacctggacgacagagcaagactccatctcaaaaaaaaaaaaaaaaaaaaaaagacttggccttgtggtgaggggagggcatctgtaaactcctggacctgtttttgccttacttattctctaaagactaaaatatttcctaaaatgtacaggcactgtttaccagaaagtaccttagttaaaacatataaatttgtttatgccttataaagctatattttttcaaattgctttactgagtcataggaggctaataaatttgtgtaaattgtctaaatacaagcctgtcttatatttctctgataatgtgctgctgataatgtgctgctgaggctaactttctctgataatgtgctgctgaggttaacttgtcaacagcctgcttatctcagcagtgtaaagttaacagcaacatggaaaagtttcttttatatattatgcaatggcat

SEQ ID NO: 462146 - DNA, 4856 bp, Homo sapiens
tccccagtgcccacttttttctgttaaaaattaaactgagctactcaggaggctgaggaagaagaagtgctagaaccccggcagtgagccgagatcatgccattgcactgcagcctgggcaacaagagtgaaaaaaaaaacaagttgctttgtggaagaaagtaagtatacacagggagaaagagatctgatgaccaaagcagggaatacgtgtttggagtccacggcatcctgagaacttcttgggaatagagtctaggcccccagtgctgtcactctcacccatcttcttctacacatgtgagatgtttcaggacccagtggcttttaaggatgtggctgtgaacttcacccaggaggagtgggctttgctggatatttcccagaggaaactctacagggaagtgatgctggaaactttcaggaacctgacctctttaggaaaaaggtggaaagaccagaacattgaatatgagcaccaaaaccccaggagaaacttcaggagtctcatagaagaaaaagtcaatgaaattaaagatgacagtcattgtggagaaacttttaccccagttccagatgacagactgaacttccaggagaagaaagcttctcctgaagtaaaatcatgtgaaagctttgtgtgtggagaagttggcctaggtaactcatcttttaatatgaacatcagaggtgacattggacacaaggcatatgagtatcaggaatatggaccaaagccatgtaagtgtcaacaacctaaaaaagccttcagataccgcccctcctttagaacacaagaaagggatcacactggagagaaacccaatgcttgtaaagtatgtggaaaaacctttatttcccattcaagtgttcgaagacacatggtaatgcacagtggggatggaccttataaatattatatcttatccatgaaagaattcacactggagagaaaccatgtgaatgtaaacagtgtggtaaatcctttagttattctgctacccatcgaatacataaaagaactcacactggagaaaagccttatgaatatcaggagtgtgggaaagcatttcatagtcccagatcctatcgtagacatgaaaggattcacatgggagaaaaggcttatcaatgtaaggaatgtggaaaagcattcacgtgtccccgttatgaaaaatctctatgaatgtaagcagtgtgggaaagcattatcctctcttacaagttttcaaacacacgtaagattgcactctggagaaagaccttatgaatgtaagatatgtggaaaagacttttgttctgtgaattcatttcaaagacatgaaaaaattcacagtggagagaaaccctataaatgtaagcagtgtggtaaagccttccctcattccagttcccttcgatatcatgaaaggactcacactggagagaaaccctatgagtgtaagcaatgtgggaaagccttcagatctgcctcacaccttcgagtgcatggtaggactcacactggagagaaaccgtatgaatgtaaggaatgtgggaaagccttcagatatgtgaataaccttcaaagtcatgaaaggacacaaacacacataagaatacactctggagaaagacgttataaatgtaagatatgtgggaaaggcttttattgtcccaaatcatttcaaagacatgaaaaaactcacactggagagaaactctatgaatgcaagcaacgttcagtagttccttcagtagttccagttccttttgatatcatgaaaggactcacactggagagaagccctataaatgcgagcaatgtgggaaagccttcagagctgtgtcaatcctttgaatgcatggtaggactcaccctgaagagaaaccctatgagtgtgagcaatgacggaaagccttcagatctgccccacacctttgaatacgtggtaggacacacaatggagagaagccctatgcatgtaaggaatgtgggaaacccttcggatctgcccagaaccttcgaattcatgaaaggacacaaacacacataatgcactctgtagagagaccttataaatgtaagatatgtgggaggggcttttattctgccaagtcatttcaaatacatgaaaaatcttacactggagagaaaccctatgagtgtaagcaatgtgggaaagcctttgtttccttcacttcctttcgatatcatgaaaggactcacactggagagaacccctatgagtgtaagcaatttgggaaagccttcagatctgtcaaaaatcttcgatttcataaaaggacacacactggagagaaaccctgtgaatgtaagaaatgtagaaaagcattccataatttctcttctttgcaaatacatgaaaggatgcacagaggagagaagctctgtgaatgtaagcattgtgggaaagcattcatatctgccaagatcctttgaatacatgcaagaacacacaatggagagaaaccctatgaatgtaaagaatgcagaaaagcattcagcttgcctacttcctttcatagacatgaaaagactcacactggaaggaaacactatgaatgcaagcaatgtggcaaagctttcacttcttccagttcttttcaatatcatgaaagaacacactagggagaaaccctatcaatgtaagcaatgtgcaaaagcctttatttcttccacttcttttcaatatcatgaaaggactcacatgggagagaaaccctatgagtgtatgccaagtgggaaagccttcatttcttctagttcccttcaatatcatgaaaggactcacactggagagaagccctatgaatataagcaatgtgggaaagccttcagatcagcctcgcaccttcaaatgcatggaaggactcacactggagaaaaaccctatgaatgtaagcagtatgggaaagcgttcagacctgacaagattctttgaatacagataatgaatgtaaacaattaactgtttataataactgtatactaacaaatgatattctttttaaataagaagctataatatcccattggtgtcatgtattagatcagccttatactgttaaattgttattatttggacattgtgagtcagtataaccatgtggataaaatgccagacatctttttattcgaaaattttacttttcatgcttctgtacttacatttttatctcaaccttaatttttctttctttttttttttcccccagaaagaatctcactctgtcacccaggctggagtgcagtggcatgatctcaggtcactgcaacctctgcctccagggttcaagcaattctcctgcctcagtctcctgagtagctgggactacaggcatgcgccaccatgccaggctaattttttgtattttttagtagagacggggtttcaccatattggctaggctggtctcaaactccagacctcatgatttacccacctcggcctcccaaaatgctgggattacagacatgaaccatcatgcccagctgcaaccctaatttttcattcagtcataataccaatagttatctcatgcacctctgagtgccttcttccccaaaaccagcagtgccatacctgctgtcagcaagggtgtaatataccatagtgataaatatgaccaaaagccataaatgactgtgagatgtatgagaattacaagtcacattagtaagaagagaaaaattttggtcatgtttatgatttgaaatacgttttcctctatcacatttaaaaatatagttacaaaatgcccttgtttttgtcctgattcatcatggtcactgaggagcatcgtctcatatgcctggtatgtgacacgtgtctctccaacaataaaagacttggccttggctgggcatggtggctcgcgcctgtgatcccagcactttgggaggccgaggtcaggagttagagaccattctgaccaatatgatcaaaccccgtctctactaaaaatacaaaagttagcagggcgtggtggcatgctcctgtaatcctagctattcaggaggctgacataggagaattgcttgaatataggaagcagaggttgcagtgagccgaggttgcaccattgtactccagcctgggcaacaagagtgaaactctgtcttaaaaaacacaaaaaaagacttggccttagggccgagtgcggtggctcacgcctataatcccagcactttgggaggccgaggcgggcggatcactaggtcaggaaatggagaccatcctggccaacacagtgaaacccagtctctactgaaaaatacaaaaaattagtgaggcgtggtctcaggctcctgcagtcccagctacttgggaggctgaggcaggagaatggtgtgaacctgtgaggtggagcttgcagtgagccaagatcgcgccattgcactccaacctggacgacagagcaagactccatctcaaaaaaaaaaaaaaaaaaaaaaagacttggccttgtggtgaggggagggcatctgtaaactcctggacctgtttttgccttacttattctctaaagactaaaatatttcctaaaatgtacaggcactgtttaccagaaagtaccttagttaaaacatataaatttgtttatgccttataaagctatattttttcaaattgctttactgagtcataggaggctaataaatttgtgtaaattgtctaaatacaagcctgtcttatatttctctgataatgtgctgctgataatgtgctgctgaggctaactttctctgataatgtgctgctgaggttaacttgtcaacagcctgcttatctcagcagtgtaaagttaacagcaacatggaaaagtttcttttatatattatgcaatggcat

SEQ ID NO: 462147 - DNA, 4167 bp, Homo sapiens
tccccagtgcccacttttttctgttaaaaattaaactgagctactcaggaggctgaggaagaagaagtgctagaaccccggcagtgagccgagatcatgccattgcactgcagcctgggcaacaagagtgaaaaaaaaaacaagttgctttgtggaagaaagtaagtatacacagggagaaagagatctgatgaccaaagcagggaatacgtgtttggagtccacggcatcctgagaacttcttgggaatagagtctaggcccccagtgctgtcactctcacccatcttcttctacacatgtgagatgtttcaggacccagtggcttttaaggatgtggctgtgaacttcacccaggaggagtgggctttgctggatatttcccagaggaaactctacagggaagtgatgctggaaactttcaggaacctgacctctttaggaaaaaggtggaaagaccagaacattgaatatgagcaccaaaaccccaggagaaacttcaggagtctcatagaagaaaaagtcaatgaaattaaagatgacagtcattgtggagaaacttttaccccagttccagatgacagactgaacttccaggagaagaaagcttctcctgaagtaaaatcatgtgaaagctttgtgtgtggagaagttggcctaggtaactcatcttttaatatgaacatcagaggtgacattggacacaaggcatatgagtatcaggaatatggaccaaagccatgtaagtgtcaacaacctaaaaaagccttcagataccgcccctcctttagaacacaagaaagggatcacactggagagaaacccaatgcttgtaaagtatgtggaaaaacctttatttcccattcaagtgttcgaagacacatggtaatgcacagtggggatggaccttataaatattatatcttatccatgaaagaattcacactggagagaaaccatgtgaatgtaaacagtgtggtaaatcctttagttattctgctacccatcgaatacataaaagaactcacactggagaaaagccttatgaatatcaggagtgtgggaaagcatttcatagtcccagatcctatcgtagacatgaaaggattcacatgggagaaaaggcttatcaatgtaaggaatgtggaaaagcattcacgtgtccccgttatgaaaaatctctatgaatgtaagcagtgtgggaaagcattatcctctcttacaagttttcaaacacacgtaagattgcactctggagaaagaccttatgaatgtaagatatgtggaaaagacttttgttctgtgaattcatttcaaagacatgaaaaaattcacagtggagagaaaccctataaatgtaagcagtgtggtaaagccttccctcattccagttcccttcgatatcatgaaaggactcacactggagagaaaccctatgagtgtaagcaatgtgggaaagccttcagatctgcctcacaccttcgagtgcatggtaggactcacactggagagaaaccgtatgaatgtaaggaatgtgggaaagccttcagatatgtgaataaccttcaaagtcatgaaaggacacaaacacacataagaatacactctggagaaagacgttataaatgtaagatatgtgggaaaggcttttattgtcccaaatcatttcaaagacatgaaaaaactcacactggagagaaactctatgaatgcaagcaacgttcagtagttccttcagtagttccagttccttttgatatcatgaaaggactcacactggagagaagccctataaatgcgagcaatgtgggaaagccttcagagctgtgtcaatcctttgaatgcatggtaggactcaccctgaagagaaaccctatgagtgtgagcaatgacggaaagccttcagatctgccccacacctttgaatacgtggtaggacacacaatggagagaagccctatgcatgtaaggaatgtgggaaacccttcggatctgcccagaaccttcgaattcatgaaaggacacaaacacacataatgcactctgtagagagaccttataaatgtaagatatgtgggaggggcttttattctgccaagtcatttcaaatacatgaaaaatcttacactggagagaaaccctatgagtgtaagcaatgtgggaaagcctttgtttccttcacttcctttcgatatcatgaaaggactcacactggagagaacccctatgagtgtaagcaatttgggaaagccttcagatctgtcaaaaatcttcgatttcataaaaggacacacactggagagaaaccctgtgaatgtaagaaatgtagaaaagcattccataatttctcttctttgcaaatacatgaaaggatgcacagaggagagaagctctgtgaatgtaagcattgtgggaaagcattcatatctgccaagatcctttgaatacatgcaagaacacacaatggagagaaaccctatgaatgtaaagaatgcagaaaagcattcagcttgcctacttcctttcatagacatgaaaagactcacactggaaggaaacactatgaatgcaagcaatgtggcaaagctttcacttcttccagttcttttcaatatcatgaaagaacacactagggagaaaccctatcaatgtaagcaatgtgcaaaagcctttatttcttccacttcttttcaatatcatgaaaggactcacatgggagagaaaccctatgagtgtatgccaagtgggaaagccttcatttcttctagttcccttcaatatcatgaaaggactcacactggagagaagccctatgaatataagcaatgtgggaaagccttcagatcagcctcgcaccttcaaatgcatggaaggactcacactggagaaaaaccctatgaatgtaagcagtatgggaaagcgttcagacctgacaagattctttgaatacagataatgaatgtaaacaattaactgtttataataactgtatactaacaaatgatattctttttaaataagaagctataatatcccattggtgtcatgtattagatcagccttatactgttaaattgttattatttggacattgtgagtcagtataaccatgtggataaaatgccagacatctttttattcgaaaattttacttttcatgcttctgtacttacatttttatctcaaccttaatttttctttctttttttttttcccccagaaagaatctcactctgtcacccaggctggagtgcagtggcatgatctcaggtcactgcaacctctgcctccagggttcaagcaattctcctgcctcagtctcctgagtagctgggactacaggcatgcgccaccatgccaggctaattttttgtattttttagtagagacggggtttcaccatattggctaggctggtctcaaactccagacctcatgatttacccacctcggcctcccaaaatgctgggattacagacatgaaccatcatgcccagctgcaaccctaatttttcattcagtcataataccaatagttatctcatgcacctctgagtgccttcttccccaaaaccagcagtgccatacctgctgtcagcaagggtgtaatataccatagtgataaatatgaccaaaagccataaatgactgtgagatgtatgagaattacaagtcacattagtaagaagagaaaaattttggtcatgtttatgatttgaaatacgttttcctctatcacatttaaaaatatagttacaaaatgcccttgtttttgtcctgattcatcatggtcactgaggagcatcgtctcatatgcctggtatgtgacacgtgtctctccaacaataaaagactcggcctctcaaagtgctggatttacagacatgagccactgcgcccagcctcaaccctaatttttctttcactcataataccaaaagttatctcatgtatctctgagtaccttcttgcccaaaaccagcagcgccatacctgctgtcagcaagggtgtaatataccatagtgataaatatgaccagaagacataaatgactgtgggatgtatgagaattacaagtcacattggtaagaagataaaaattttcgtcatgtttatgatttgaaatatgtttacttctatcagttttagaaatacagttacaaaatg

SEQ ID NO: 462148 - DNA, 4688 bp, Homo sapiens
tccccagtgcccacttttttctgttaaaaattaaactgagctactcaggaggctgaggaagaagaagtgctagaaccccggcagtgagccgagatcatgccattgcactgcagcctgggcaacaagagtgaaaaaaaaaacaagttgctttgtggaagaaagtaagtatacacagggagaaagagatctgatgaccaaagcagggaatacgtgtttggagtccacggcatcctgagaacttcttgggaatagagtctaggcccccagtgctgtcactctcacccatcttcttctacacatgtgagatgtttcaggacccagtggcttttaaggatgtggctgtgaacttcacccaggaggagtgggctttgctggatatttcccagaggaaactctacagggaagtgatgctggaaactttcaggaacctgacctctttaggaaaaaggtggaaagaccagaacattgaatatgagcaccaaaaccccaggagaaacttcaggagtctcatagaagaaaaagtcaatgaaattaaagatgacagtcattgtggagaaacttttaccccagttccagatgacagactgaacttccaggagaagaaagcttctcctgaagtaaaatcatgtgaaagctttgtgtgtggagaagttggcctaggtaactcatcttttaatatgaacatcagaggtgacattggacacaaggcatatgagtatcaggaatatggaccaaagccatgtaagtgtcaacaacctaaaaaagccttcagataccgcccctcctttagaacacaagaaagggatcacactggagagaaacccaatgcttgtaaagtatgtggaaaaacctttatttcccattcaagtgttcgaagacacatggtaatgcacagtggggatggaccttataaatattatatcttatccatgaaagaattcacactggagagaaaccatgtgaatgtaaacagtgtggtaaatcctttagttattctgctacccatcgaatacataaaagaactcacactggagaaaagccttatgaatatcaggagtgtgggaaagcatttcatagtcccagatcctatcgtagacatgaaaggattcacatgggagaaaaggcttatcaatgtaaggaatgtggaaaagcattcacgtgtccccgttatgaaaaatctctatgaatgtaagcagtgtgggaaagcattatcctctcttacaagttttcaaacacacgtaagattgcactctggagaaagaccttatgaatgtaagatatgtggaaaagacttttgttctgtgaattcatttcaaagacatgaaaaaattcacagtggagagaaaccctataaatgtaagcagtgtggtaaagccttccctcattccagttcccttcgatatcatgaaaggactcacactggagagaaaccctatgagtgtaagcaatgtgggaaagccttcagatctgcctcacaccttcgagtgcatggtaggactcacactggagagaaaccgtatgaatgtaaggaatgtgggaaagccttcagatatgtgaataaccttcaaagtcatgaaaggacacaaacacacataagaatacactctggagaaagacgttataaatgtaagatatgtgggaaaggcttttattgtcccaaatcatttcaaagacatgaaaaaactcacactggagagaaactctatgaatgcaagcaacgttcagtagttccttcagtagttccagttccttttgatatcatgaaaggactcacactggagagaagccctataaatgcgagcaatgtgggaaagccttcagagctgtgtcaatcctttgaatgcatggtaggactcaccctgaagagaaaccctatgagtgtgagcaatgacggaaagccttcagatctgccccacacctttgaatacgtggtaggacacacaatggagagaagccctatgcatgtaaggaatgtgggaaacccttcggatctgcccagaaccttcgaattcatgaaaggacacaaacacacataatgcactctgtagagagaccttataaatgtaagatatgtgggaggggcttttattctgccaagtcatttcaaatacatgaaaaatcttacactggagagaaaccctatgagtgtaagcaatgtgggaaagcctttgtttccttcacttcctttcgatatcatgaaaggactcacactggagagaacccctatgagtgtaagcaatttgggaaagcattcatatctgccaagatcctttgaatacatgcaagaacacacaatggagagaaaccctatgaatgtaaagaatgcagaaaagcattcagcttgcctacttcctttcatagacatgaaaagactcacactggaaggaaacactatgaatgcaagcaatgtggcaaagctttcacttcttccagttcttttcaatatcatgaaagaacacactagggagaaaccctatcaatgtaagcaatgtgcaaaagcctttatttcttccacttcttttcaatatcatgaaaggactcacatgggagagaaaccctatgagtgtatgccaagtgggaaagccttcatttcttctagttcccttcaatatcatgaaaggactcacactggagagaagccctatgaatataagcaatgtgggaaagccttcagatcagcctcgcaccttcaaatgcatggaaggactcacactggagaaaaaccctatgaatgtaagcagtatgggaaagcgttcagacctgacaagattctttgaatacagataatgaatgtaaacaattaactgtttataataactgtatactaacaaatgatattctttttaaataagaagctataatatcccattggtgtcatgtattagatcagccttatactgttaaattgttattatttggacattgtgagtcagtataaccatgtggataaaatgccagacatctttttattcgaaaattttacttttcatgcttctgtacttacatttttatctcaaccttaatttttctttctttttttttttcccccagaaagaatctcactctgtcacccaggctggagtgcagtggcatgatctcaggtcactgcaacctctgcctccagggttcaagcaattctcctgcctcagtctcctgagtagctgggactacaggcatgcgccaccatgccaggctaattttttgtattttttagtagagacggggtttcaccatattggctaggctggtctcaaactccagacctcatgatttacccacctcggcctcccaaaatgctgggattacagacatgaaccatcatgcccagctgcaaccctaatttttcattcagtcataataccaatagttatctcatgcacctctgagtgccttcttccccaaaaccagcagtgccatacctgctgtcagcaagggtgtaatataccatagtgataaatatgaccaaaagccataaatgactgtgagatgtatgagaattacaagtcacattagtaagaagagaaaaattttggtcatgtttatgatttgaaatacgttttcctctatcacatttaaaaatatagttacaaaatgcccttgtttttgtcctgattcatcatggtcactgaggagcatcgtctcatatgcctggtatgtgacacgtgtctctccaacaataaaagacttggccttggctgggcatggtggctcgcgcctgtgatcccagcactttgggaggccgaggtcaggagttagagaccattctgaccaatatgatcaaaccccgtctctactaaaaatacaaaagttagcagggcgtggtggcatgctcctgtaatcctagctattcaggaggctgacataggagaattgcttgaatataggaagcagaggttgcagtgagccgaggttgcaccattgtactccagcctgggcaacaagagtgaaactctgtcttaaaaaacacaaaaaaagacttggccttagggccgagtgcggtggctcacgcctataatcccagcactttgggaggccgaggcgggcggatcactaggtcaggaaatggagaccatcctggccaacacagtgaaacccagtctctactgaaaaatacaaaaaattagtgaggcgtggtctcaggctcctgcagtcccagctacttgggaggctgaggcaggagaatggtgtgaacctgtgaggtggagcttgcagtgagccaagatcgcgccattgcactccaacctggacgacagagcaagactccatctcaaaaaaaaaaaaaaaaaaaaaaagacttggccttgtggtgaggggagggcatctgtaaactcctggacctgtttttgccttacttattctctaaagactaaaatatttcctaaaatgtacaggcactgtttaccagaaagtaccttagttaaaacatataaatttgtttatgccttataaagctatattttttcaaattgctttactgagtcataggaggctaataaatttgtgtaaattgtctaaatacaagcctgtcttatatttctctgataatgtgctgctgataatgtgctgctgaggctaactttctctgataatgtgctgctgaggttaacttgtcaacagcctgcttatctcagcagtgtaaagttaacagcaacatggaaaagtttcttttatatattatgcaatggcat

SEQ ID NO: 462149 - DNA, 1141 bp, Homo sapiens
gcccaagccacaccctgtaagagcctggaaccacatatcatcctatggacaactggcctgaatctccttggggactccaagtggtaagacaggatcttgctacattgcccaagctaatccccaactcctggcctcaagggatcctcccacctcagcctcccgaagtgctgggattacagatgtaagccaccatgcctggcccctagatgcttcaaaaggatgtgacattcacttaaagaggaattctacagttttttgagacagggtctccctctgtcattcagactgtgcagtggcatgatcacagctcattgcaccctctacctccaaggctcaagcaatcctcccacctcagcctcccaagtagctggcattacagcgctggcgtgtatgaactcatcgcaccctcccaaccagcccaggaggtatcagaggagtaaggttggatatcatcagcacaagtctcctaaaggtcaccccactgatgacaggcctggaggcgcgcgaggtcggtcgacgcccttcgcctcccgcaacgccgctgtgcggttgggggcggtgcggtccctctgccgccagcgcagcccgcgagccgtcacttcctgtgggctgggcgagccggctgcgcgcggagaacctgggctggaggtgctagggagctctgggagcctgggctgcacgcagggaagtgctctcggccgccggggtcacaagactccagggcttcacagtgcccaaggcttggtggacatcgagccaccggggaatctttgccatcagcgccgtgttttgatgcccgcggcaaggaacaccacgaaataggtttcctgacactcagtagatcattgtatttgtactatataacattccattacatgaacatgccacatattcttcgtcaactgttgatggacatttgtgttgtttccagtgtgggcgcttatgaatactgtggctatgaactttcttgtacatgtctttgggataaggtgttgatcatgagagcactccctagtcaactttctttcttttttctccctctaatccaatatgattgatatccctaatcaacttcctgcatgctaatctccatctcaggatcagctgcctgggaacacaacctacaacagcttacgttatt

SEQ ID NO: 462150 - DNA, 2713 bp, Homo sapiens
gtggggtgtggggctcgggagcagggctttgtctgattggccttcatggcagcgcactgcactcatacacttctcttcccccagccatgtcggacttccacgtgcatccccaggccaccgtgggtgaggagggtggtgtggcccgcttccagtgccaaatccatgggcttcccaaacccctgatcacttgggagaagaacagagtcccaattgacacggacaatgagaggtacacattgctgcccaagggggtcctgcagatcacaggacttcgagctgaggacggtggcatcttccactgtgtggcctcaaacatcgccagtatccggatcagccacggggccaggctcactgtgtcaggctcgggctctggggcctacaaggagccagccatcctcgtggggcctgagaacctcaccctgacagtgcaccagaccgcggtgcttgagtgtgtcgccacgggcaacccgcgccccattgtgtcctggagccgcctggatggtcgccctatcggggtggagggcatccaggtgctgggcacaggaaacctcatcatctcagacgtgacggtccagcactctggcgtctacgtctgtgcagccaacagacctggcacccgggtgaggagaacggcacagggccggctggtggtgcaagccccagctgagtttgtgcagcatccccagtccatctccaggccagctgggaccacagccatgttcacctgccaagcccagggtgagccaccgcctcatgtcacgtggctgaaaaatggacaggtgctggggccaggaggccacgtcaggctcaagaataacaacagcacactgaccatttctggaatcggtcctgaggatgaagccatttatcagtgtgtggccgagaacagtgcgggctcatcacaggccagtgccaggctgaccgtactgtgggctgaggggctccccgggcctccccgcaatgtgcgggcagtctctgtgtcttccactgaggtgcgtgtgtcctggagtgagccgctggccaacaccaaggagatcatcggctacgtcctgcacatcaggaaggctgctgacccaccggagctggagtatcaggaggcagtcagcaagagcacctttcagcacctggtcagcgacctggagccctccacagcctacagtttctacatcaaggcctacacaccaaggggggccagctcagcctctgtgcccaccctagctagcaccctgggtgaagcccctgccccacccccactgtcagtgcgagtcctgggcagctcctccttgcagctgctgtgggagccttggccccggctggcccagcacgagggcggcttcaagctgttttaccgcccagcaagcaagacctccttcaccggccccatcctgctgcctggaaccgtctcctcctacaacctcagccagctcgaccccactgcagtgtatgaggtgaagctgctcgcctacaaccagcatggagatggcaatgccacagtccgctttgtgtctttgaggggagcatctgagaggacagccttgagcccaccatgtgactgccggaaggaggaggccgccaaccagacgtccaccacaggcatcgtcatcggcatccacatcggggtcacttgcatcatcttctgtgtcctcttcctcctgttcggccaaaggggcagggtcctcctgtgtaaagatgtggaaaaccagctgtcccctccacagggtccccggagccagagggaccctggcattctggccctaaatggggcgagacggggacagcggggccagctgggccgagacgagaaacgtgtggatatgaaggagctggagcagctgttccccccggccagcgcagcagggcagccggaccccagacccacacaggatcctgcagcccccgctccgtgtgaggagacccagctctccgtgctgccacttcaggggtgcggcctgatggaggggaagacgacggaggcgaagaccacagaggccacggctccctgcgccggcctggcggctgccccaccacccccagatggaggccctggcctcctcagtgaaggccaggcttccaggcctgcagcggcccgggttacccagccagctcactcggaacagtagccagtgtctggcaggctccagagggtggacggagcggggcccattctcaggtcaaaagcaagatttctactgtcatgtgggatttggatggtcctgggggctccccagcatttctatcctgactgcctcttgggttgtcaaaacccaaggcagccttgacagggaccccccggccctaacacccatcaggagttggagcagttcctgcaggagcctgttccttccctgggctgacgcccccttgcctctgcctggtacccacatgacttggaactgaactaacatttttctttaaaaagcaaaacttaaaaaaaaaaaaaaagaggagagagatagaggaaggtgaattagactccaaaagatgaccctgctgtagctgggccctgacactgtcaccctccaccgactttgttttctcaggatggatttttgctgttttggctctcagcacctacctcagccggaatgaatgtcctggggggcagtggggcggtggcctcagcccccttaccccacagagcccgaatgcactcctacctcaagtccccttgctggggaccccctctcccttcccacactgttgtccagagtta

SEQ ID NO: 462151 - DNA, 3462 bp, Homo sapiens
gtggggtgtggggctcgggagcagggctttgtctgattggccttcatggcagcgcactgcactcatacacttctcttcccccagccatgtcggacttccacgtgcatccccaggccaccgtgggtgaggagggtggtgtggcccgcttccagtgccaaatccatgggcttcccaaacccctgatcacttgggagaagaacagagtcccaattgacacggacaatgagaggtacacattgctgcccaagggggtcctgcagatcacaggacttcgagctgaggacggtggcatcttccactgtgtggcctcaaacatcgccagtatccggatcagccacggggccaggctcactgtgtcaggctcgggctctggggcctacaaggagccagccatcctcgtggggcctgagaacctcaccctgacagtgcaccagaccgcggtgcttgagtgtgtcgccacgggcaacccgcgccccattgtgtcctggagccgcctggatggtcgccctatcggggtggagggcatccaggtgctgggcacaggaaacctcatcatctcagacgtgacggtccagcactctggcgtctacgtctgtgcagccaacagacctggcacccgggtgaggagaacggcacagggccggctggtggtgcaagccccagctgagtttgtgcagcatccccagtccatctccaggccagctgggaccacagccatgttcacctgccaagcccagggtgagccaccgcctcatgtcacgtggctgaaaaatggacaggtgctggggccaggaggccacgtcaggctcaagaataacaacagcacactgaccatttctggaatcggtcctgaggatgaagccatttatcagtgtgtggccgagaacagtgcgggctcatcacaggccagtgccaggctgaccgtactgtgggctgaggggctccccgggcctccccgcaatgtgcgggcagtctctgtgtcttccactgaggtgcgtgtgtcctggagtgagccgctggccaacaccaaggagatcatcggctacgtcctgcacatcaggaaggctgctgacccaccggagctggagtatcaggaggcagtcagcaagagcacctttcagcacctggtcagcgacctggagccctccacagcctacagtttctacatcaaggcctacacaccaaggggggccagctcagcctctgtgcccaccctagctagcaccctgggtgaaggtgaggcctgggtgtggagcacaaaaccacaggcactcactcagggtatcagagcagaaccaccatgcacacttgttctggttgtgcgctgtgcagggtgcccggccctgaggctgtcagggctgagtctacttggaggaaagggcttctttttctaattcctaggaaggtgctgctttcataagcacatgcccttggccagaggccagagggctgtcaggattttgggggtcggggtcacaggtggaaggtagaaagatagagcttccactgggtcctcacatcgtggcctccttctctacctgcagcccctgccccacccccactgtcagtgcgagtcctgggcagctcctccttgcagctgctgtgggagccttggccccggctggcccagcacgagggcggcttcaagctgttttaccgcccagcaagcaagacctccttcaccggccccatcctgctgcctggaaccgtctcctcctacaacctcagccagctcgaccccactgcagtgtatgaggtgaagctgctcgcctacaaccagcatggagatggcaatgccacagtccgctttgtgtctttgaggggagcatctgagaggacagccttgagcccaccatgtgactgccggaaggaggaggccgccaaccagacgtccaccacaggcatcgtcatcggcatccacatcggggtcacttgcatcatcttctgtgtcctcttcctcctgttcggccaaaggggcagggtcctcctgtgtaaagatgtggaaaaccagctgtcccctccacagggtccccggagccagagggaccctggcattctggccctaaatggggcgagacggggacagcggggccagctgggccgagacgagaaacgtgtggatatgaaggagctggagcagctgttccccccggccagcgcagcagggcagccggaccccagacccacacaggatcctgcagcccccgctccgtgtgaggagacccagctctccgtgctgccacttcaggggtgcggcctgatggaggggaagacgacggaggcgaagaccacagaggccacggctccctgcgccggcctggcggctgccccaccacccccagatggaggccctggcctcctcagtgaaggccaggcttccaggcctgcagcggcccgggttacccagccagctcactcggaacagtagccagtgtctggcaggctccagagggtggacggagcggggcccattctcaggtcaaaagcaagatttctactgtcatgtgggatttggatggtcctgggggctccccagcatttctatcctgactgcctcttgggttgtcaaaacccaaggcagccttgacagggaccccccggccctaacacccatcaggagttggagcagttcctgcaggagcctgttccttccctgggctgacgcccccttgcctctgcctggtacccacatgacttggaactgaactaacatttttctttaaaaagcaaaacttaaaaaaaaaaaaaaagaggagagagatagaggaaggtgaattagactccaaaagatgaccctgctgtagctgggccctgacactgtcaccctccaccgactttgttttctcaggatggatttttgctgttttggctctcagcacctacctcagccggaatgaatgtcctggggggcagtggggcggtgcatccttgatggggatgcccatgaggaacctgggcttgggagggtggcatcagctggccgcctgcctcctgtcctgcaggcccggcccctggaatgtaccatgtgtgggatgggtgtgtgggagggtgagggggtgtgggtgtcccctgcagaggcgccccagcctcaggcacccagccagcctgatccacccctcgacaggggagcatccactgtcagcagccatggccggaagctatttttatacaagagcagccccagccgctcttgtttcccatggtgctgacacttctgaaagggacaaggccagttatcctgcagagtaacccacagtgtggatttgtctcatgtttcctcctgactacttagtcagatatgtttggtgtaaacagctcagagggcaagctgtgtccttttcagtgcattacatctggaggctcccgatgctggcctggcctgattttggttcactgaatttctataaaaccgcagtgtacagttaggagatattattttagaaattaataaaaagtgtgaga

SEQ ID NO: 462152 - DNA, 2279 bp, Homo sapiens
gggaatgtggaatcctgtttgttctctgtgggggtccattctatccctgtgacctgggaagaggatggtcgccctatcggggtggagggcatccaggtgctgggcacaggaaacctcatcatctcagacgtgacggtccagcactctggcgtctacgtctgtgcagccaacagacctggcacccgggtgaggagaacggcacagggccggctggtggtgcaagccccagctgagtttgtgcagcatccccagtccatctccaggccagctgggaccacagccatgttcacctgccaagcccagggtgagccaccgcctcatgtcacgtggctgaaaaatggacaggtgctggggccaggaggccacgtcaggctcaagaataacaacagcacactgaccatttctggaatcggtcctgaggatgaagccatttatcagtgtgtggccgagaacagtgcgggctcatcacaggccagtgccaggctgaccgtactgtgggctgaggggctccccgggcctccccgcaatgtgcgggcagtctctgtgtcttccactgaggtgcgtgtgtcctggagtgagccgctggccaacaccaaggagatcatcggctacgtcctgcacatcaggaaggctgctgacccaccggagctggagtatcaggaggcagtcagcaagagcacctttcagcacctggtcagcgacctggagccctccacagcctacagtttctacatcaaggcctacacaccaaggggggccagctcagcctctgtgcccaccctagctagcaccctgggtgaagcccctgccccacccccactgtcagtgcgagtcctgggcagctcctccttgcagctgctgtgggagccttggccccggctggcccagcacgagggcggcttcaagctgttttaccgcccagcaagcaagacctccttcaccggccccatcctgctgcctggaaccgtctcctcctacaacctcagccagctcgaccccactgcagtgtatgaggtgaagctgctcgcctacaaccagcatggagatggcaatgccacagtccgctttgtgtctttgaggggagcatctgagaggacagccttgagcccaccatgtgactgccggaaggaggaggccgccaaccagacgtccaccacaggcatcgtcatcggcatccacatcggggtcacttgcatcatcttctgtgtcctcttcctcctgttcggccaaaggggcagggtcctcctgtgtaaagatgtggaaaaccagctgtcccctccacagggtccccggagccagagggaccctggcattctggccctaaatggggcgagacggggacagcggggccagctgggccgagacgagaaacgtgtggatatgaaggagctggagcagctgttccccccggccagcgcagcagggcagccggaccccagacccacacaggatcctgcagcccccgctccgtgtgaggagacccagctctccgtgctgccacttcaggggtgcggcctgatggaggggaagacgacggaggcgaagaccacagaggccacggctccctgcgccggcctggcggctgccccaccacccccagatggaggccctggcctcctcagtgaaggccaggcttccaggcctgcagcggcccgggttacccagccagctcactcggaacagtagccagtgtctggcaggctccagagggtggacggagcggggcccattctcaggtcaaaagcaagatttctactgtcatgtgggatttggatggtcctgggggctccccagcatttctatcctgactgcctcttgggttgtcaaaacccaaggcagccttgacagggaccccccggccctaacacccatcaggagttggagcagttcctgcaggagcctgttccttccctgggctgacgcccccttgcctctgcctggtacccacatgacttggaactgaactaacatttttctttaaaaagcaaaacttaaaaaaaaaaaaaaagaggagagagatagaggaaggtgaattagactccaaaagatgaccctgctgtagctgggccctgacactgtcaccctccaccgactttgttttctcaggatggatttttgctgttttggctctcagcacctacctcagccggaatgaatgtcctggggggcagtggggcggtggcctcagcccccttaccccacagagcccgaatgcactcctacctcaagtccccttgctggggaccccctctcccttcccacactgttgtccagagtta

SEQ ID NO: 462153 - DNA, 1030 bp, Homo sapiens
gccatcacgtggtgcaagagttctgagggaccgcaatcctgaagacattgaatggctgtgttcctgctcattgctggaggcactgtcaggggccctgtcctcaaccccgggtctgacacttgcagatcaggcaggacattctggaggaatcatgcccttggaaggatccctgaggagtgactgttgttagattaaaaaacagtggcaaagagcaatacagagagttgccaaaattcacaccgctggtccaggtttgaagcaagcaatctgtacctgcagtccttgtctgtaaccatggcaccctggcttctcacacatctcatcgtggagttccaccatgtgtcaggcatggcactgagcaccttcttttaagaatataatttgtaattatgtagattcttaattctacttcaaaatgccacacagccttcatgtgataaaatgaaacaattgctcaactgatctcctgggatctctactaagatgttggcagcccggccagctggtctggccctggacgtgccttcagggtctggttatgcttcatgacctgcattgtggtcagtgccattttgcagactttgatcacagtgaaacgttccacgggaacttgggccatgagaaacatccttcctaaccacgtgactgcagaaacatccttatcacatcctcctgggcaaaggcccaacagcctgactgcagggacatccttgccatatcctgctgggcagcaagctctaccacccagatccctccctcccagtcccatgattaccccagcctgtgagtggcagttggttctggcactaagctggtttcctcctccccagggttttgctggcaataaagatgttgctgttgaagccaccaacttgatggctgccagctctccaagtgtcacagttggtgaggcatccatggagagatcagcaagcagagagagcaaagggaacatgattaagggaaaagaggagcaataactcttccctttccaaacagattttcagaaatccaaaccagtgaattctgc

SEQ ID NO: 462154 - DNA, 1326 bp, Homo sapiens
agccctagactggaatctaggagaggggtggagccccttatgagctgtcaaccctacaaagtagagctagttattgatggtcaagcactgcttcctcccttcttcaacggcatctctagcatgtatacttcccttaaatccaccttcgtagcatttgctgatggaagaggcacaacagagtccatgccttcacctcctctggccaactctaatcatgaatctcctgtgaatcagctgggaaacatgcagaatatgagattggggccctcattcatactaactggaattttccttggcaatggtagaacagaagcttctccattctttacagatgaatttgctttaagtaagatcttcccagagtacaaaagaaatttattcggaaaatttcaaactaatatggccttctcactggaactggatccaccatcccttttgctcagtgtcgtcttgtttatgttttagatcctttgcaaggtgagctacacctctgagaggagctcctggaaattaccagatacttaatgttgccagctgttacagatggaggtgatgcaccttgatgatgcataagtactgagcctgaatcctacaaatgggaaaaggtgctcatatcagacttatgcattagatatcaaactacaaaatacaagtgcagttgatacctgtttagatgatgtagagcaaggtaacagagtatgtattaaaagcaaaaattcccatgaagctgaaccgttactctctgccaaaacctcccactctcaagttttaagagccaataaaccttgtatctgtacgttcagctttgccttttttttcccaggactgtaaacctctgtcaaggtttaccatgtttcattgattttattttttctagcaccaacataatgctcatatagtaatgaggatgaaataatttatttttttcctgctcatcgtgtcattgtgaatgttctgctatcatacaaaaaaaaccacactttatttaaaaatatttgctgagcaaatataaaccactgtgcatttttctgagcaccagtaagacagccaagtataaaggggtccccaaagaaactctgaccagcctgcacacttggaggagtgtacactggggtggagccttgggaagttcatgctgtttgcagtgggggaggagcctggcctctcctgatctggggtggtaaactgagattcaatctgtgaggcgggaagcatattagcaggactatttctttgctgagagtccctgtttccttttgtttccttttcacccaataaaccctgcccttctcacccttcaaagtgtctgtgagcctaatctttcac

SEQ ID NO: 462155 - DNA, 1390 bp, Homo sapiens
tgtttttgatatgcctgaaatggtgctaggactgggtgcctgcatcgccatggacaccaccaggtacagcaagtggggcggcagctccgaggaggtccccggagcctccacggagcgcgcggcgctgcttgacggccacgacctgctgaggacaaacgcctcgaagcagacggcggcgctgggtgccctgaaggaggaggtcggagactgccacagctgctgctcggggacgcaggcgcagctgcagaccacgcgcgcggagcttggggaggcgcaggcgaagctgatggagcaggagagcgccctgcgggaactgcgtgagcgcgtgacccagggcttggctgaagccggcaggggccgtgaggacgtccgcactgagctgttccgggcgctggaggccgtgaggctccagaacaactcctgcgagccgtgccccacgtcgtggctgtccttcgagggctcctgctactttttctctgtgccaaagacgacgtgggcggcggcgcaggatcactgcgcagatgccagcgcgcacctggtgatcgttgggggcctggatgagcagggcttcctcactcggaacacgcgtggccgtggttactggctgggcctgagggctgtgcgccatctgggcaaggttcagggctaccagtgggtggacggagtctctctcagcttcagccactggaaccagggagagcccaatgacgcttgggggcgcgagaactgtgtcatgatgctgcacacggggctgtggaacgacgcaccgtgtgacagcgagaaggacggctggatctgtgagaaaaggcacaactgctgaccccgcccagtgccctggagccgcgcccattgcagcatgtcgtatcctgggggctgctcacctccctggctcctggagctgattgccaaagagttttttcttcctcatccaccgctgctgagtctcagaaacacttggcccaacatagccctgtccagcccagtgcctgggctctgggacctccatgccgacctcatcctaactccactcacgcagacccaacctaacctccactagctccaaaatccctgctcctgcgtccccgtgatatgcctccacttctctccctaaccaaggttaggtgactgaggactggagctgtttggttttctcgcattttccaccaaactggaagctgtttttgcagcctgaggaagcatcaataaatatttgagaaatgaatccaggatcctggctctggcgagatcttctgtgctttattccggatgtcctagtttaatccgtacgagtgacccctggactctctcagtgacctcttggcctttggtgggtaacttgccctgggccaggagggcttgaaggggaactctcatttataaaaccatcaga

SEQ ID NO: 462156 - DNA, 1960 bp, Homo sapiens
aggggaggactgggcactgcactgagtctgctgcccagagcctggcaccattgggctggctgaggcacactgccaagccagcaggtttgtgcaacagacttggctcccaaaagggaggcccagaaggcccagacaccctcaggaatagggcctggctgaagactgtgattaaggagaacataatgggatggtgagtgcagacgacacacacggcctcagtctatgggaacatctcaaaggagttcgtctgcaaattctagtgcatctaggcagaacacaggaaggaagagaggtgcagacttacgtatggccctggggcacctgccatcccctcgagcctgtatggtccttacccgcccatccccagcttgagttctgggccttctcgccagcacatcgttgggacctggtcaacttcagccaagttgctttggtttctattactttgttaagtcattccttctgcaaaggactgcctggcaggtgtcaaaggcagtggtggccacagaggcggtggagagatggccttcagcggttgccaggctccctatctgagcccagccgtccccttttctgggactatccaagggggtctccaggacggatttcagatcactgtcaatggggccgttctcagctgcagtggaaccaggtttgctgtggactttcagacgggcttcagtggaaacgacattgccttccacttcaaccctcggtttgaagacggagggtatgtggtgtgcaacacgaggcagaaaggaacatgggggcccgaggagaggaagatgcacatgcccttccagaaggggatgccctttgacctctgcttcctggtgcagagctcagatttcaaggaacatggatggagctggaagccgttgcaggagcagaaaaccaaacaccgcaagttctcacttataagtaggagctgaacgatgagaacacatggacacaagcggggaaacaacacacactggggcctggtcggggacggagagcatcaggaagattagctaatggatgctgggcttgataccaaggtgatggtgaacgggagcctcttcgtgcagtacttccaccgcgtgcccttccaccgtgtggacaccatctccgtcaatggctctgtgcagctgtcctacatcagcttccagaatccccgcgcagtccccgttcagcctgccttctccacggtgccgttctcccagcctgtctgtttcccacccaggcccagggggcgcagacaaaaacctcccagcgtgcggcctgccaacccagctcccattacccagacagtcatccacacggtgcagagtgcctctggacagatgttctctcagactcccgccatcccacctatgatgtacccccaccctgcctatccgatgcctttcatcaccaccattccgggagggctgtacccatccaagtccatcatcctgtcaggcactgtcctgcccagtgctcagaggttccacatcaacctgtgctctgggagccacatcgccttccacatgaacccccgttttgatgagaatgctgtggtccgtaacacccagatcaacaactcttgggggtctgaggagcgaagtctgccccgaaaaatgcccttcgtccgaggccagagcttctcggtgtggatcttgtgtgaagctcactgcctcaaggtggccgtggatggtcagcacgtgtttgaatactaccatcgcctgaggaacctgcccaccatcaacaaactggaagtgggtggcgacatccagctgacccacgtgcagacataggcggctccctggccctggggccgggggctggggtgtggggcagtctgggtcctctcatcatccccacttcccaggcccagcctttccaaccgtgcctgggatctgggctttaatgcagaggccatgtccttatctggtcctgcttctggctacagccaccctggaatcgagaaggcagctga

SEQ ID NO: 462157 - DNA, 1774 bp, Homo sapiens
aggggaggactgggcactgcactgagtctgctgcccagagcctggcaccattgggctggctgaggcacactgccaagccagcaggtttgtgcaacagacttggctcccaaaagggaggcccagaaggcccagacaccctcaggaatagggcctggctgaagactgtgattaaggagaacataatgggatggtgagtgcagacgacacacacggcctcagtctatgggaacatctcaaaggagttcgtctgcaaattctagtgcatctaggcagaacacaggaaggaagagaggtgcagacttacgtatggccctggggcacctgccatcccctcgagcctgtatggtccttacccgcccatccccagcttgagttctgggccttctcgccagcacatcgttgggacctggtcaacttcagccaagttgctttggtttctattactttgttaagtcattccttctgcaaaggactgcctggcaggtgtcaaaggcagtggtggccacagaggcggtggagagatggccttcagcggttgccaggctccctatctgagcccagccgtccccttttctgggactatccaagggggtctccaggacggatttcagatcactgtcaatggggccgttctcagctgcagtggaaccaggtttgctgtggactttcagacgggcttcagtggaaacgacattgccttccacttcaaccctcggtttgaagacggagggtatgtggtgtgcaacacgaggcagaaaggaacatgggggcccgaggagaggaagatgcacatgcccttccagaaggggatgccctttgacctctgcttcctggtgcagagctcagatttcaaggtgatggtgaacgggagcctcttcgtgcagtacttccaccgcgtgcccttccaccgtgtggacaccatctccgtcaatggctctgtgcagctgtcctacatcagcttccagaatccccgcgcagtccccgttcagcctgccttctccacggtgccgttctcccagcctgtctgtttcccacccaggcccagggggcgcagacaaaaacctcccagcgtgcggcctgccaacccagctcccattacccagacagtcatccacacggtgcagagtgcctctggacagatgttctctcagactcccgccatcccacctatgatgtacccccaccctgcctatccgatgcctttcatcaccaccattccgggagggctgtacccatccaagtccatcatcctgtcaggcactgtcctgcccagtgctcagaggttccacatcaacctgtgctctgggagccacatcgccttccacatgaacccccgttttgatgagaatgctgtggtccgtaacacccagatcaacaactcttgggggtctgaggagcgaagtctgccccgaaaaatgcccttcgtccgaggccagagcttctcggtgtggatcttgtgtgaagctcactgcctcaaggtggccgtggatggtcagcacgtgtttgaatactaccatcgcctgaggaacctgcccaccatcaacaaactggaagtgggtggcgacatccagctgacccacgtgcagacataggcggctccctggccctggggccgggggctggggtgtggggcagtctgggtcctctcatcatccccacttcccaggcccagcctttccaaccgtgcctgggatctgggctttaatgcagaggccatgtccttatctggtcctgcttctggctacagccaccctggaatcgagaaggcagctga

SEQ ID NO: 462158 - DNA, 768 bp, Homo sapiens
gcttttcctgggcctaggtttgctgtggactttcagacgggcttcagtggaaacgacattgccttccacttcaaccctcggtttgaagacggagggtatgtggtgtgcaacacgaggcagaaaggaacatgggggcccgaggagaggaagatgcacatgcccttccagaaggggatgccctttgacctctgcttcctggtgcagagctcagatttcaaggaacatggatggagctggaagccgttgcaggagcagaaaaccaaacaccgcaagttctcacttataagtaggagctgaacgatgagaacacatggacacaagcggggaaacaacacacactggggcctggtcggggacggagagcatcaggaagattagctaatggatgctgggcttgataccaaggtgaagggttgatctgtgcagcaaaacactgtggcacacatttacctagttaacaaacctgcagatcctatactcataccctggaacttaaaataaaagttgaaggggctgggcacggcggctcacccttataatccaagcactttgggagggtgaggaggacagatggcttgaggtcaggagttcaagacctgcctggccaacatggtgaaatcccgtctctactaaaaatacaaacattagcttggtgtggtggtggatgcctgtaatcccagctactcgggaggctgaggcaggagaatcgcttgaaccactgcactgcagcctggctgacagagtgacactctatctcaaaaaaaaaaa

SEQ ID NO: 462159 - DNA, 857 bp, Homo sapiens
gagcatcatgaacgaccaagctggtatcaataattcgccaaaatgacgaacacaaagggaaagaggagaggcacccgatatatgttctctaggccttttagaaaacatggagttgttcctttggccacatatatgcgaatctataagaaagttgatattgtagacgtcaagggaatgggtactgttcaaaaaggaatgccccacaagtgttaccatggcaaaactggaagagtctacagtgttacccagcatgctgttggcattgttgtaaacaaacaagttaagggcaagattcttgccaagagaattaatgtgcgtattaagcacattaagcactctaagagccaagatagcttcctgaaacgcgtgaaggaaaatgatcagaaaaagaaagaagccaaagagaaaggtacctgggttcaactaaagcgccagcctgctccacccagagaagcacactttgtgagaaccagtgggaaggagcctgagctgctggaacctattccctgtgaattcatggcataataggtgttaaaaaaaataataataataaaggacctctgggctacaaaaaaaaaaaaaaaaaaaaaaagtattcttttgtaggctgactctgatagtttacttaaagcatatttgagaaagcttttcatttctacttccagttgctcaaatcatgtttcagaatttctaaatcatgtacatttgtttttgttctttttgtcccccccttaatcagagtctcatgctgtgatgcataaagtttacagtaattgaaaaagtaacgactaacacccaaggtggtaaataaatcaccaagttcactaattcaaagcactgaacatccatttgtagaa

SEQ ID NO: 462160 - DNA, 4243 bp, Homo sapiens
gaatttaaagtcagcagagattatctagactttactatgaaatatagacaagctgtgcttttaaaaggtttatttaaattactgattataaaagtaatccaagcccatttgtgaaaatttggaaaatgtggaagagtataaagaaaaaaaaaactactcattctatgagcaccgagagataaacgttatcatgttggcgcacttccttctggcctttttctccagatcagaggaagaggaagggtggtgtatcttcatgaaactactaacccaaacccagaacacagccatctcgctactaaagcacccaggaattgtagttttctgtgcaacagagattggggagctaaggctgaggattcagggtgaataacaagtctggtgcttgtctgcagaacagccagctgacttttgaagttgattcctccaacatgatgaagcgtatgtagctcaggaaaaacggcagctggccttaaatcatatagcataagcaaagggctcttccctggactatgtctcatttactatttgaataaacaaaattcaacaacctgaacaataaataaaataaaaagggaatctgctggatccactgaaaagtaatgcttacttattcaaatttattatgccccatttccccatgcattacatttaaacctctgattttttaaaagaataacatcattattgaaaactaatgttatgcttcaaagctctattacttgaactgttcataaatggatttatggctactgctgagttctgtgaaagactgtattgtatgccttctccttcagtttcaccaagactattaataaagatatccctacatcaacatttgccctcctgcagggagctagagccacttgacatccttgtacctcagtttctcattcataacactgggaacagtaattgtcccaacacctcagacttgttggatggatttgatgagctctttgatatacagctgttggatgtaggtgatatggagcaagccctccaaaattttcctgaaggagtactccatagtcactctactgccattataaacatttacctgaaattagtttcccacaaccaccaagctcctaaaaccgcctggacaaaggtcctaaggatcttcacacggcctggtatctccacgctgccaaacttattcagtctttgtatcttgacactgccaagtgactccatctttacattctaagacctcttttgctacatctgaagttcctgaccactcactcattctggaacctttctactttccccagcccctgagacacgactccctcttggtccaccccgattctcattctccagctccttggtgggctgctccttttctttgtgcccctccaacataggggatggatctgctttcatagttttaactactgcatacatctaataagaaccaagagtgtgtctctatctgaatctgtcaaatttgactcacaaacccaaggtgaactggacatcaccatttgtgtcttctacagacacatcaaacccaaaatgtccaaaagggaattgatcctgtccaccctcagtgtctattcttatattcctaatttcagatcacggaaccactgccagaaatctgtgggttatcttcaatgttccctctgtctcaccactcatacacttaaccggcatatggctgctaatttttttaagtatttggcaggttttctcccttctcctcattcttactaccactgccctagttcattccttatctcacttgaactttcacaaaaacctcttacctaatctctctgcctccacctccacattgccctcagagtggtctgcagagagcacaaagccgtccacatcactgaatgcgtcatgagctttccatcaatgattgcataaaaaccacgttctctgacatacatccagccaacttctttggcctcaccttctgcctatcatctccctgaatgtcatgtccacttggcatcatgtcacctatggtttcctatacaggctttccaattgctcaaagtgggtccagccgcaggcactccactcacacctcccaggttagcaggtgaactcctaccatcttccaaattcagctctggctttacctgcaagaagccttctttatcccacgtcacaagctgacctggtttagtgcttcctttcctcatccctcacctgcgctcctatggcaacccatggccaccttcctttgccacttcatttgcccgttcctacaaaacgtggctacttctcatcagtcccttgagggcgggaactgtgttctggttatcttcatgttctcaactgccacacagtaggactcattattaactgaactgagaacatttgtactaaattataagcaaaaagaaacaccccaaatacttaaagaagaacaatgcctggaatagttttgtacaaccagtattctgagataggtatcaatatggacatatatggtatactcatcctcccctggggagtaaagcagcaaacatagataaatcactcatcacaatattcgtttataaccatgaagaaaagcttgacataataaactatagatagtcttcatgcccattaggatggctactgtttctaaaaggtgttggcaatgatgcagagaaattggaacctttgtgcactgttgcttagactgtaaaatggttgtaaccacaatggaaaattgtacagaagcccctcaaaaaattaaatagaaccatcatgtaatccagcaatctcaattctggctatctatcctaaagaattgaaagcagggtctcagaaatatttgtacacccgtgttcatagccacactactcaagagtagccaagaggtggaagcaacgaagagttgttgtttgataggcagacagtttcagttttgcaagacgaaaagttctggaggtctgtttcaaaagccaaactgcccatatatttcttctctaaattggatcttaatctacatgagaaaatgcagaaccagtaaatacaaaaatcgagcattaaataaaattaagtatctcaaacgagaaagtgcctcagaggtggcctttcagcttcaaggacacatttttaaatttagcaaaaccctccattatatggtagaaaaagctgaagttctgactgcttagaatggcctatactttcttttatttagggatgtatagaattgttaagcataatcacaaaattaagctattattaaaatgcaaaaattgaattttggtgttgctccaagtcactgagctttcaccagcatttcgcacagcaaggcggatgcagctgactaaacaccacctcactggtctacacggcccctctgcacatgaataaatcttactagtaaatgcaagcaaaattaaaggcactttttcaatgacagcccgagaagctaaggaaataataagtgtggttattacaaaaccacagaggaatcataaaaatcaaacctccaaatactgtaaaggggaatgagttttttgaggagatagtaagctttttgaaagactgttatcttttcccttttgttaaagttttagacccaaacactgtaaaccgcgcaagaggaggctgtgtctgtgcacatgtgtgtgtgcacacaggggagggagggagatagacagagtgggtgtgccgagttgttaacagttgctggatccagacagaggaatacccaagtgttcattgctctgtactttcaacttttctgtttgaaagtttccgaaagaaaataattttgaagtgaaaaaacaaacagaaggggctcaatcagtgcttgtccaataaagtaaaaaactgttgttttttggttttggttttggctactaagtgaccatctagtggttgagtaagaggactacggaaacttcttatccaataagtgtttaagcttccacctccaggcactgtggtaggtgctgcagatgaagtgatgaacaggcctctgtcctgaccctaccgacccttggccaatgtggagcagatgacaccactggagatgccataaggcatttggatgggaggtgaggaggagctgtgtaaggaaggagaggaacatccatcttttcttggaggaggaggaagggggaaccaaggagcactcaaagatcacatcacaaccagtaaatatttgtgtaataaacgaacaaagtatatgcaagttgaatgatgtcttgaagcacccggctgaatctgtccacgtgtggggacagggtgaaacaatccaagcaaaaacagtagggac

SEQ ID NO: 462161 - DNA, 453 bp, Homo sapiens
gaatttaaagtcagcagagattatctagactttactatgaaatatagacaagctgtgcttttaaaaggtttatttaaattactgattataaaagtaatccaagcccatttgtgaaaatttggaaaatgtggaagagtataaagaaaaaaaaaactactcattctatgagcaccgagagataaacgttatcatgttggcgcacttccttctggcctttttctccagatcagaggaagaggaagggtggtgtatcttcatgaaactactaacccaaacccagaacacagccatctcgctactaaagtctcagagatattgagcttggacttcgaccatgggttctggagtccattcaattcccagccttggccattcctggctgtgtaatttcaaggaaattacctaaacactctgagttttgattctatcatcaataaaatgaaggaaatgcta

SEQ ID NO: 462162 - DNA, 264 bp, Homo sapiens
aagtaagtacgttgtgcgaccccccacccctttattatcagaggaagaggaagggtggtgtatcttcatgaaactactaacccaaacccagaacacagccatctcgctactaaagtctcagagatattgagcttggacttcgaccatgggttctggagtccattcaattcccagccttggccattcctggctgtgtaatttcaaggaaattacctaaacactctgagttttgattctatcatcaataaaatgaaggaaatgcta

SEQ ID NO: 462163 - DNA, 488 bp, Homo sapiens
gaatttaaagtcagcagagattatctagactttactatgaaatatagacaagctgtgcttttaaaaggtttatttaaattactgattataaaagtaatccaagcccatttgtgaaaatttggaaaatgtggaagagtataaagaaaaaaaaaactactcattctatgagcaccgagagataaacgttatcatgttggcgcacttccttctggcctttttctccagatcagaggaagaggaagggtggtgtatcttcatgaaactactaacccaaacccagaacacagccatctcgctactaaagtctcagagatattgagcttggacttcgaccatgggttctggagtccattcaattcccagccttggccattcctggctgtgtaatttcaaggaaattacctaaacactctgagttttgattctatcatcaataaaatgaaggaaatgctaaaaaaaaagagaggggaatggcctcgttggcctca

SEQ ID NO: 462164 - DNA, 1239 bp, Homo sapiens
ctctaccttgatcatggtggccacacaatgggatgtgtttgtctaaattcacggaaatgtacactttttaaaattttttttatttacttatttatttttttgagatggtgtcttgctctgttgcccaggctggagtgcagtggcaccatctcgggtcgctgcaacctctgcctcccaggttcaagcgatcctcctgcctcagcccccatagtagctgggattacaggcatgcgccaccacgcccagctaatttttgtatttttagtagagatggggtttcaccatgttggccaggctggtctcgaactcctgacctcaggtgatccacctgcttcggcattccaaagtgctgggattacaggcgtgagccaccccacccagccaaaactgtacactttaaaaggaagaattttactgtgtataaatgacatctcaatgaagttgatattaaaaacaccaaggctaggtgaggtggctcacgcttctgttcctagcactttgggaggctgaggcagcaggattgcttgagtccaggagttcctactgtgtctagccactgtgccaacccttccttgagttcccaattgggaaacttcccaatgaggaatttgatgcctacagaggttgagtgaccctgtccttaaaaaaaaatttttttttttaattagccaggaacggtggtgcgtgcctgtagtcccaggtactctggaggctgagtcaggaggatcgcttgagccttggaggtcgaggcttcagtgagctgggatcatgcccctatgctccagcctggggacaggttcccacgtgcacactgtaaggcacggtgaaaatcgggacattaacacggctgaatcgctaccatctaatccgaaggcccaaccacattcaccacttgtgccaataatatgttcatttcactgtatgttttgaaatgtgtaccacatgtatatgttatctttacgaaaaaaaaaatagtatgttgaaaccactcgtcacagccaaatgaaataagagctaactcattcaagcaggagccccggaggactaaaagaatccggcctctcccaggcctcctcacctgagcagggctccctcctgactaccgcccacccactccagggcaggacgcgggaagagactgcccagcccgagggtcgcaggggcagaaaaccccaggtcctgaacgcgcctgggccccgcggcgaacctggcgtccccaccagacaccagaatcagatt

SEQ ID NO: 462165 - DNA, 691 bp, Homo sapiens
gatgtgaggagcgcctctgctgggccgcaaccctgtctgggaggtgaggagcgtctctgcccggccgccccgttgagaaagtgaggaaaccctctgcctggcaaccgccccgtctgagaaccaggaacggtggtgcgtgcctgtagtcccaggtactctggaggctgagtcaggaggatcgcttgagccttggaggtcgaggcttcagtgagctgggatcatgcccctatgctccagcctggggacaggttcccacgtgcacactgtaaggcacggtgaaaatcgggacattaacacggctgaatcgctaccatctaatccgaaggcccaaccacattcaccacttgtgccaataatatgttcatttcactgtatgttttgaaatgtgtaccacatgtatatgttatctttacgaaaaaaaaaatagtatgttgaaaccactcgtcacagccaaatgaaataagagctaactcattcaagcaggagccccggaggactaaaagaatccggcctctcccaggcctcctcacctgagcagggctccctcctgactaccgcccacccactccagggcaggacgcgggaagagactgcccagcccgagggtcgcaggggcagaaaaccccaggtcctgaacgcgcctgggccccgcggcgaacctggcgtccccaccagacaccagaatcagatt

SEQ ID NO: 462166 - DNA, 509 bp, Homo sapiens
tgagaaaaaatcgcaaacatgttgcatctccaaatacctaactatgttttccacaaacagggacaggttcccacgtgcacactgtaaggcacggtgaaaatcgggacattaacacggctgaatcgctaccatctaatccgaaggcccaaccacattcaccacttgtgccaataatatgttcatttcactgtatgttttgaaatgtgtaccacatgtatatgttatctttacgaaaaaaaaaatagtatgttgaaaccactcgtcacagccaaatgaaataagagctaactcattcaagcaggagccccggaggactaaaagaatccggcctctcccaggcctcctcacctgagcagggctccctcctgactaccgcccacccactccagggcaggacgcgggaagagactgcccagcccgagggtcgcaggggcagaaaaccccaggtcctgaacgcgcctgggccccgcggcgaacctggcgtccccaccagacaccagaatcagatt

SEQ ID NO: 462167 - DNA, 1912 bp, Homo sapiens
tccatggccgcccccatgctggcattatttccccacctgaccatgaagaggctgaattcgatgttctctaagattttctccagctctgaggtgccacagtttgtgggagctgaatgcacatacacaaacctgaaagtaaccttcgaaaaatgcccccaaagaattatagagaattttgggatccatgtggtcctagccatcagtgaggtgcagagaagaaaccattgctcaactgcattacatccactgatagaacatacactgatacaatatatgccagacccatctgcaaatatacccacacacaacaatcctgcccgatacacaaattactgggagatgacaacccaacacacctacacacacaccaacacaccccaaacatcccctgcacacacaaatataacacaattcctgcactcttaaaaacgggcgggaggcagaggatcagaataagacgcagtggcatgactcttttcacaagctttttatgaacccacaaccaccaatcgaagtcttgattaacttggttgtatttattaaatcatgttcaatatttaataactttgaatatggattgaatatttaatgagattggtggagatctatttgtgtataaacgtcagaagtgccaattgctttgaattgagaattgagtctgtgactcattctcagtagctggtactggagagctctccattctacattttcatggatttatttaaattacaggttatcatcatgacattattacaccattacttattatgatgctccactattataacattattaggctgtcccagaaaatgtggcatttagatactgaatttccttgcatccagtaaaacctggattggggtctcttggtctccttcctccatgtttactaggaaaaggggccaaatatgacactgtgaaatgcatgctgtcttaagccctcaatcctcccacaggtacaagatgatctggaagcaatttctgggttatactttgtccaagactaatttgtccaaaagaagaaactctactttgtggactgaagacaagcaacatgaatttctgaaacttcttttacagaaatatgagaatcggatgcataatgcaattttcagaggcatcatggggattcgtgaaagtccttggaagatttgagattcaggaactcaatgaataaatttaactatccataagtgtggattttacacaagactttgagcatcatgaagacaggaaccatatgctattcatcgtcataccctcagctccttggcaaggtatctggaacacagagagaactctataaagatttgtcaagctgtactgaacaaccccaagcggatgcagattgggtcacaccaaatgtgactgctgattcatgtggtcatttggcaaatattgattgagtgcctatgatgtgccaagcactattcttagccaacgctaagccaaatacacaaaaataatgataaagtgagtgcttgtcaattaggtacaacccaggtattttaccaggctagttaattggtgtgttgagtcaatatgaagactgttttaaacttcagcttttgctataatattatttaagcctagacaggaaattcagggttccaataactcaatgctctctctttcctgggcttcagtgtccacacctacatgatgcacatatactgtagtctcccatgagatattttgacatatgtttatacaggatcctctgaaattccttgcacatttttaaatcttaacaatttgcctagaaacactttacaaattgcattaagtatttcaaggcttagaaaacactattgcacaaaatgcctttgtatttaagatctcatgataaagtccatgtatttatctcatgataaataaagtccaatcagctttcgattcagttgaaattcaa

SEQ ID NO: 462168 - DNA, 2705 bp, Homo sapiens
  misc_feature (1)..(1): n is a, c, g, or t
  misc_feature (3)..(5): n is a, c, g, or t
  misc_feature (11)..(11): n is a, c, g, or t
  misc_feature (14)..(14): n is a, c, g, or t
  misc_feature (1307)..(1307): n is a, c, g, or t
ncnnngcctgnacnaggtactacccatacatacactacccacgaacaaagaaatgcgcgttgttctgtgctgcacatcaccattacagggatgtctccctgggaccaggcagtgtgactgggatgagccattcatcatcagggaagacacaggctacctgggtagtcatggtgtagaatgcctccagcacagtgcccagaagcccctgaatctgggaagaaagctacttccacatcagattggagccagtgctaactcaatcaacttccaattcctaaggcagcagaaagcccagctggagagggaaacttctgctctatctcaccctccctcattcatcctgggagccacattgtgttctgtagaatttgctcaggattcacaatctgagctgataaacttacctggattatcacacccagtatgtcacttgtctgggtccagtcctaggaaatcaatacctaaattcaaaaaatcatcctaagattaatctttgaaagctgcctggctctggggtgggaactgtccaatcaggcgcgcagccagggaggaaggggcggcttccggaatctggcgcggcctttgtctcacttcagccagagcgcggggttagggcttcattgccttgtgtcctctgctccgggagacttcggtgattctgccactcactccgtcgctctgtgacctgctggcattgaatgatttatagctaagactccaggacacccctgaagccgagaaatggaactcttaacattcagggatgtggccatagaattctctccagaagagtggaaatgcctagaccctgcccaacagaatttatatagagatgtgatgttggagaactacagaaacctcgtctccctggagctccacacagaacatcatcaaagaactgatggacacttcatctccctgggtgaggggcaggtgtaccatgctgtcatggccattcctgcctcgattggggtgtgggtgtagagatggtctctataaccagggcccagacatggctgagaaggccttctgccaggactccaccttgatgactcacaggactttgtgccttggctttccctattgagtgacccacagttttaatccaagggaccctgagtctgtttccttccttcagccccaccatttcaccccagcactgttcaggtgtacaatcggctttcacatatttgtaagaatatctaggaaaattatttatattttactttcacttcatgttatgaccatgagtgtttttgcatttgctagggctcattgttttaattggcccccctttatccctctgngtgcggaaataaatcagccctaaatctggatgagacctgcaggtggactccatcagtgcaggcgtggtggggcagcaggaggagcccgtggtgcccaccttccagagctgccacctcttttacctcctcatgttccttcctgtgcacctagagagagttcacccccacccaacagctcctggacctgctgcccaaaaggtaagtgctccatccctccacagcacaagggggactcagccacctattatctgtgtcttgggaaagtcccttcacatttgtgggcttcagtttgcttctttggaactggggttctaagaagcctaacatgatatgattgtttcaagaactaaatgagataagctatggaaagtacttcagacttggccttgtagaaagcactgctgagggaatagattggttattcatattataaaactatttaaaactctagaaaactatagtaagatataagattataaaaatatcaaaactaagatattgacagtaatagaattaacctactcatctatttgcattttaccagattaattttttcttatgtgtgtgtgttctgtgcaattttattacatgtgtaggttcacctaccagaagattaactcgttttcctcttataaccacatccgcttcccttctccccaccatacccactctgattctgattctttgaaaccattaatttctatttctgcaaatttgtcattccaataatgttatataaatgaaatcataacctgtgcaaccttttgtaattggcccttttccttcagcataattccttggagattcatctaaattggtttatgttttagtttgttccttttgttattgctgtgggttttcatgtgtggatgttaccatgaaatactgtgtgtaacccttcactctttcaagaacatatttgttgttttcagtcagtgtgtggctattatgaataaaagtgctatgtacattcatgtactaggtttcatatgaatacatgttttcattactctggaaaatatttccagcatacaattcctggctcatagggtagttacaagtttaattttaatagaaactagcactctgttatccagagtgactatcattttacattcccatcatcaatgaatttctgttttttcaaatcctcttagccatactgactgatatgtattgatatcacattgttttaatgtacatttttctaaaggataataatgttgaactttatttaatgttctcatatgacatctgcctattatctctgatgaaatgtttattcatgtctgcatgttttctaattgtatttgttttcttgcaagttttgagagttctgtttatattctggttactagctcacataggcaataaataagttttttttccacaaagaaa

SEQ ID NO: 462169 - DNA, 1341 bp, Homo sapiens
  misc_feature (1)..(1): n is a, c, g, or t
  misc_feature (3)..(5): n is a, c, g, or t
  misc_feature (11)..(11): n is a, c, g, or t
  misc_feature (14)..(14): n is a, c, g, or t
ncnnngcctgnacnaggtactacccatacatacactacccacgaacaaagaaatgcgcgttgttctgtgctgcacatcaccattacagggatgtctccctgggaccaggcagtgtgactgggatgagccattcatcatcagggaagacacaggctacctgggtagtcatggtgtagaatgcctccagcacagtgcccagaagcccctgaatctgggaagaaagctacttccacatcagattggagccagtgctaactcaatcaacttccaattcctaaggcagcagaaagcccagctggagagggaaacttctgctctatctcaccctccctcattcatcctgggagccacattgtgttctgtagaatttgctcaggattcacaatctgagctgataaacttacctggattatcacacccagtatgtcacttgtctgggtccagtcctaggaaatcaatacctaaattcaaaaaatcatcctaagattaatctttgaaagctgcctggctctggggtgggaactgtccaatcaggcgcgcagccagggaggaaggggcggcttccggaatctggcgcggcctttgtctcacttcagccagagcgcggggttagggcttcattgccttgtgtcctctgctccgggagacttcggtgattctgccactcactccgtcgctctgtgacctgctggcattgaatgatttatagctaagactccaggacacccctgaagccgagaaatgtggaaaagcgagattgtctttgaccatttgctatggacattgtcagggatggtgcagcctgaatgagaatgtctgcggtatttcccgaaataagtatccctcaaggatgatactgtggacctcactcaggaagaatgtgtccttcagggaaagctgcacagagacgtgatgctggagaagcagtcatctggttactttaggtggtttgtgccccaggaagtagtgtgttgatttgaagccctaaaaaaaatattttccacactcaagagtgacttatccagaccgattttacctaagaaacaagcctgaaggaggagagagaagaaagaagagtcagaactagcactttcccagcatgaatgagagatcctttcgcttcacgtctttgccagcatttggtgttgtcagtgttctagattttggccattatagtacatgacttcaggctcctatgtgcagaagtcctcaacccccaggctgcagaccagtacctgtccatggcctgttaggaaactggccgcacagcaggaggtgaaatgattattgcagtttcgaggggagatgatgtcacaagatctcgaacccatatctcagaac

SEQ ID NO: 462170 - DNA, 1461 bp, Homo sapiens
  misc_feature (1)..(1): n is a, c, g, or t
  misc_feature (3)..(5): n is a, c, g, or t
  misc_feature (11)..(11): n is a, c, g, or t
  misc_feature (14)..(14): n is a, c, g, or t
ncnnngcctgnacnaggtactacccatacatacactacccacgaacaaagaaatgcgcgttgttctgtgctgcacatcaccattacagggatgtctccctgggaccaggcagtgtgactgggatgagccattcatcatcagggaagacacaggctacctgggtagtcatggtgtagaatgcctccagcacagtgcccagaagcccctgaatctgggaagaaagctacttccacatcagattggagccagtgctaactcaatcaacttccaattcctaaggcagcagaaagcccagctggagagggaaacttctgctctatctcaccctccctcattcatcctgggagccacattgtgttctgtagaatttgctcaggattcacaatctgagctgataaacttacctggattatcacacccagtatgtcacttgtctgggtccagtcctaggaaatcaatacctaaattcaaaaaatcatcctaagattaatctttgaaagctgcctggctctggggtgggaactgtccaatcaggcgcgcagccagggaggaaggggcggcttccggaatctggcgcggcctttgtctcacttcagccagagcgcggggttagggcttcattgccttgtgtcctctgctccgggagacttcggtgattctgccactcactccgtcgctctgtgacctgctggcattgaatgatttatagctaagactccaggacacccctgaagccgagaaatggaactcttaacattcagggatgtggccatagaattctctccagaagagtggaaatgcctagaccctgcccaacagaatttatatagagatgtgatgttggagaactacagaaacctcgtctccctggctgtgtattcttattacaaccaaggcattttaccagagcaaggcatacaagattcattcaaaaaagcaacactgggaagatatgggagctgtggccttgaaaatatatgcttatggaaaaactgggaaagtataggtgaaggtgaaggacaaaaggaatgttataatctatgtagccaatatttgacaactagtcataacaaacatttaactgtgaaaggagacaaagaatatagaatatttcagaagaagcctcagtttctgtcagctgctcctacagaaccatgtattcctatgaataaactatcaacataaatttttgaaatctgtcttttgtaataaaaatcagataaattttaaccatgactcaagatattagtaaacatcatagtactcattttctagaaaactattacaattgtaatgaatgtgaaacaagtattttaccaatcctcaaagcttattttccctgaaaatatccatattcagaaaaagccttacaactctaatgaatgtggtgaaacttctgacccattctcaaagcttactcaacatcaaagaatttatattggagagagctcacaaagatgt

SEQ ID NO: 462171 - DNA, 361 bp, Homo sapiens
aaacacaaaattttgtatgtatgcaattcagctgagacactggggcagcgaactgtcttaaccatcaagagatcaaaaccagggcaggcacagtggctcccagcaccttggcaggctgagacaggaggaccacttgaggccccaggagttcatagtcctgggcaacatagtgtgaccctgtctctacagaatttttaaaaattagccaggcttggtggtatgtgcctatagtcccagctacttgagtagctgatagaggaggatggcttgagcccaggaggttgaggctggaggttgaggtggttgaagcttcagtgagctaattatcgtgcctctgcactccagcctgagtgatggagag

SEQ ID NO: 462172 - DNA, 1495 bp, Homo sapiens
  misc_feature (1)..(1): n is a, c, g, or t
  misc_feature (3)..(5): n is a, c, g, or t
  misc_feature (11)..(11): n is a, c, g, or t
  misc_feature (14)..(14): n is a, c, g, or t
ncnnngcctgnacnaggtactacccatacatacactacccacgaacaaagaaatgcgcgttgttctgtgctgcacatcaccattacagggatgtctccctgggaccaggcagtgtgactgggatgagccattcatcatcagggaagacacaggctacctgggtagtcatggtgtagaatgcctccagcacagtgcccagaagcccctgaatctgggaagaaagctacttccacatcagattggagccagtgctaactcaatcaacttccaattcctaaggcagcagaaagcccagctggagagggaaacttctgctctatctcaccctccctcattcatcctgggagccacattgtgttctgtagaatttgctcaggattcacaatctgagctgataaacttacctggattatcacacccagtatgtcacttgtctgggtccagtcctaggaaatcaatacctaaattcaaaaaatcatcctaagattaatctttgaaagctgcctggctctggggtgggaactgtccaatcaggcgcgcagccagggaggaaggggcggcttccggaatctggcgcggcctttgtctcacttcagccagagcgcggggttagggcttcattgccttgtgtcctctgctccgggagacttcggtgattctgccactcactccgtcgctctgtgacctgctggcattgaatgatttatagctaagactccaggacacccctgaagccgagaaatggaactcttaacattcagggatgtggccatagaattctctccagaagagtggaaatgcctagaccctgcccaacagaatttatatagagatgtgatgttggagaactacagaaacctcgtctccctggattttcaaattatagttcaaagaatgagtgtccaaccttttggcttccccgggtcacattggaagaagaaacattgtcttgggccacacataaaatacacgaacactaatgatagctgatgtgctaaaaagaaaaaaggttcatgcagttttcatgatattcgtcaccacagataagcaaaaagtcctctcattcaaagagctggttggacaccactgattaaaagtatctactcaccttctagattttttaaatgccctgtgtcattaatgagcttagaacattgctaagcaaatattaagccatctattatcttattttttaataactattatcttataattttgtcttatttagtagggagcctgctgggactgtgtcattgagatatatctatatgtataaatgtgtaaagtgatacacatacacatacctatataaatcgtatatgtgtatactcagttcttaatgttgatagttcttagaagctgtaactgtgaagtgtgtttcttgtaggcaacaaatcagtcttttttttttttatccatttagccactctatgtcttttgattggagagtttagtcgatttacattcagtgttgttattgattatataaagattt

SEQ ID NO: 462173 - DNA, 1334 bp, Homo sapiens
  misc_feature (1)..(1): n is a, c, g, or t
  misc_feature (3)..(5): n is a, c, g, or t
  misc_feature (11)..(11): n is a, c, g, or t
  misc_feature (14)..(14): n is a, c, g, or t
ncnnngcctgnacnaggtactacccatacatacactacccacgaacaaagaaatgcgcgttgttctgtgctgcacatcaccattacagggatgtctccctgggaccaggcagtgtgactgggatgagccattcatcatcagggaagacacaggctacctgggtagtcatggtgtagaatgcctccagcacagtgcccagaagcccctgaatctgggaagaaagctacttccacatcagattggagccagtgctaactcaatcaacttccaattcctaaggcagcagaaagcccagctggagagggaaacttctgctctatctcaccctccctcattcatcctgggagccacattgtgttctgtagaatttgctcaggattcacaatctgagctgataaacttacctggattatcacacccagtatgtcacttgtctgggtccagtcctaggaaatcaatacctaaattcaaaaaatcatcctaagattaatctttgaaagctgcctggctctggggtgggaactgtccaatcaggcgcgcagccagggaggaaggggcggcttccggaatctggcgcggcctttgtctcacttcagccagagcgcggggttagggcttcattgccttgtgtcctctgctccgggagacttcggtgattctgccactcactccgtcgctctgtgacctgctggcattgaatgatttatagctaagactccaggacacccctgaagccgagaaatgctgtgtattcttattacaaccaaggcattttaccagagcaaggcatacaagattcattcaaaaaagcaacactgggaagatatgggagctgtggccttgaaaatatatgcttatggaaaaactgggaaagtataggtgaaggtgaaggacaaaaggaatgttataatctatgtagccaatatttgacaactagtcataacaaacatttaactgtgaaaggagacaaagaatatagaatatttcagaagaagcctcagtttctgtcagctgctcctacagaaccatgtattcctatgaataaactatcaacataaatttttgaaatctgtcttttgtaataaaaatcagataaattttaaccatgactcaagatattagtaaacatcatagtactcattttctagaaaactattacaattgtaatgaatgtgaaacaagtattttaccaatcctcaaagcttattttccctgaaaatatccatattcagaaaaagccttacaactctaatgaatgtggtgaaacttctgacccattctcaaagcttactcaacatcaaagaatttatattggagagagctcacaaagatgt

SEQ ID NO: 462174 - DNA, 1093 bp, Homo sapiens
  misc_feature (1)..(1): n is a, c, g, or t
  misc_feature (3)..(5): n is a, c, g, or t
  misc_feature (11)..(11): n is a, c, g, or t
  misc_feature (14)..(14): n is a, c, g, or t
ncnnngcctgnacnaggtactacccatacatacactacccacgaacaaagaaatgcgcgttgttctgtgctgcacatcaccattacagggatgtctccctgggaccaggcagtgtgactgggatgagccattcatcatcagggaagacacaggctacctgggtagtcatggtgtagaatgcctccagcacagtgcccagaagcccctgaatctgggaagaaagctacttccacatcagattggagccagtgctaactcaatcaacttccaattcctaaggcagcagaaagcccagctggagagggaaacttctgctctatctcaccctccctcattcatcctgggagccacattgtgttctgtagaatttgctcaggattcacaatctgagctgataaacttacctggattatcacacccagtatgtcacttgtctgggtccagtcctaggaaatcaatacctaaattcaaaaaatcatcctaagattaatctttgaaagctgcctggctctggggtgggaactgtccaatcaggcgcgcagccagggaggaaggggcggcttccggaatctggcgcggcctttgtctcacttcagccagagcgcggggttagggcttcattgccttgtgtcctctgctccgggagacttcggtgattctgccactcactccgtcgctctgtgacctgctggcattgaatgatttatagctaagactccaggacacccctgaagccgagaaatgtggaaaagcgagattgtctttgaccatttgctatggacattgtcagggatggtgcagcctgaatgagaatgtctgcggtatttcccgaaataagtatccctcaaggatgatactgtggacctcactcaggaagaatgtgtccttcagggaaagctgcacagagacgtgatgctggagaagcagtcatctggttactttaggtggccccaggagttcatagtcctgggcaacatagtgtgaccctgtctctacagaatttttaaaaattagccaggcttggtggtatgtgcctatagtcccagctacttgagtagctgatagaggaggatggcttgagcccaggaggttg

SEQ ID NO: 462175 - DNA, 1654 bp, Homo sapiens
aaatgctataccggttaaactccgccattttgcctcttagtgctcatgcttgagcccgcttgcccaactcctgagatgtcatcgggaagctgctgatcagcaattacagaaccagtggctttggttgggcactggaagtacataaagaagaagacatacatgctgtctcagggtgatcgtgggtctctagccaggagtcagatgacatcaccaccatcacaagctggtgatgccagagagcaagcagtcaccgtctatgaactagaaagctgattcaccagacaccgaatctgccagcaccttggtcttggacttcccagcctccagaactaggaaatgttccaacacatctgaggaaacacatgccttcccagactggcctgttgctgtttcccaggagctgcattctggaaggtggaccatcaggtggaagaagtattcttcagagagctgccttcccaagggaatggtgacagcttgcgcttgccggggagtcctgctgccttccgaggtgtgaagggaaggcatgcactgtgcatatgctgtaccatacagttttgcctacaactgcttgtagcttcattgtagctgtgaatgctccgttcctctccttttcacccctgaagattcgcgaacatgcaggattgagctgtgcgaggcatagcattccccacatggtagacgaaggcggatgtgggtctgatggctctactgccgtccacccgggaggatggacgtgtgttccgggatatcagagcttgcggctgaccagcccacatgtccatgcagccctcccgctggctgtgtcgacattttgggtgtcactgaaggattttactggtgcagactttacaaaggcaaaattgtttctcaaggaagtggacatgaaagatctaaaatcagggctgcttaaaaaaagcaagcacagattaatgacctatctacatcctacacggttttaggactgcgcctagatgggcttaaagaccctagcctaaaaactgtaaatgtgcttccgtctttgccctgtaggacaagaaagccttacgggcttgcttctaactgtgagaggaggagaggccaggaagggagagggagaaaaggaggagaacaggagacgagaaggaggggagagtgaggagaggaggagagaggcttgtcaaaatctttttagtgcacaaaactaattttgttcatcttggatttggtgagctgggtaatattctgtgcacggctcctaaatgaattattaaatgtcaactcaagatggcttaactaaaatactcaatttaataaccaaaagtatctaaggtaacaacaacaattttgcaggtgattgtagagttgtcaagtcaaaccattatagacaagcatttggggttttcacataatctccttccacatctcatcttctgtcactaaatacccactctgatcgagccagaaaaccttttttttttttctaaaatataaagcaaaacaagatctcagtcacaaccaccaaatctttattaatgcattccttgtgctacttctgaatattaataaaaattaataattaattttgcctttggcattgcaagatatactagttttaattagtgtactgtactcctatacaattaaaaaataattgatgtccatgcttattggc

SEQ ID NO: 462176 - DNA, 2571 bp, Homo sapiens
cgcctctccctccgggcggggcccctttcggtccaacggcaggacctgggggctgtggccgggggcggccgttgacctggtgaccgcggcgccgccccagaccgggggcgcagtcccactcgctccgagccccggtcccccaagcctccctcccgggtacctggggccgcgcccgccctgcgcccagctccgccctccgtcggcccaggcctgacagagcccggcagccatgagtgccaacccccggtgggacatcagcagggcgctgggggtggccaagctcttccacctggtgtgcggggtgcgggaagcctgcgtgaccccgttcctgaccctttacctgaggcagctgggcttggccgcgccctgggtgggcaccctaatgggaaccaagcacctaatcgctgccttctgggctcccgtctgtgccttcctggccaaaagctaccggaaaaggagagcgcttctgatcggctccctgctcggctcggtgggggccagcctgctgatggtcctggtcccaccggtagacaaaaatcgggtgcacttcccttgtaatggaagcagcggcctgaccagcacagacgcactcccgggggtcacgctacctgtgaacatcacctcggcccaagagtctgcctccagccacccagccaagaggactgcagaggtggaaatgcctggcttcagaaacccacctggtgaaagtgaccgagaaactttccgtgatctgcacgtctacttagcgccctccgttgaaggagctaggaccacatcccaagctctcctccatcctgtcacttcggggctgaaagatcatccctgggaagttacttttgaggtggtcaagacagccctccccttgcttcctggggggaaagggcccgggaatccagccaatttgtcagggaccaaggggaaagcctgggcttttgacctgtccttggaggcgttgcggcggacttttatcctctccttggggtccgtggcgttctgggagctgctgacagcgcctctggagcaggtggcagatgacagcctttatgagttcctggattttgtggatgccactgaccgatacagaagcctgtgggtctggaggttgctgggcatgtcggcaggcgtgtgtggcatcacagccttggtggggcagctggactgcttcctgatgaccagtggcccccgaggtgtggtccacttctatgggtactcggtggtcagcaccctggccttactggtgagcattgcctttcccattcccatctgtcagcagtgggagcccagctacaaaagggtcaaagcactgtccattgtggggggtgacccccacctcattctcctcgcctccaccactgttttggtaggagccatcgtcagtactgtccagaactttctgttctggcacatgaaggaccatgggagcggcgagctggtcatgggtttctcggtcgccctcagcttgctgggggaaattctgcttcatccgttcaaagctacattgcttaggaaactgtccaggacgggcctggtggggctggggctgagctgcctcgctgggcagctgctgtactactctttcctctggagctggtggtccgtcctccccattcagatcttgagtgccattagcaacagagctttgtggtgggctgtgggggcctcagtagaggacctggccactccccgcatggagagggctctgagtgccttgttccgaggccacttttacgggagtggctgtagcctgggcagctttgtcgggggcttcgtggtgatgcgcttcagcctggctgtgctctaccaggcctgctgtgtggccctgttgctctggttggccttgctcctgtccatacagcggaggctgccccgagagcggaaaatcaagtactcgaagctgctgtccatggaggtgctgttgaattcagcaatggctgaagcgatcaaatcaaactgtcagtgccaggaagaccatggggacctgcaggattcagttggcagagagggcagctgacttggatgaatcatggcattcccaggggtcataaaggcattagcctgcttctgtgaaagccatgctgtgggcagaagtcaggcctatatcaaaagctcaaagccccaaccttctaaatacatggttggtttttctggcatggccagcccccatcttgagtcattccattagcataaattgtgtaaggtcccatcatgagtcacctcattagcataaactcaagtgtggttgacaggccaaccaccagtaaaaaagacactcttcgacttggaaaattccaaggatttagagcctatctcccaggaactggggacaaaggccaaattctttattacacaggataattaatttgaaaatcagcaatgatcttaagtgcattaatagtttcttccttttcattgctgagtagtattccattgcatggatataccacgatttatccattcatttatattgtattatattaccatacatttcaattccaaacatgtaattgctttcagtttttgatgattacaaataaaacttttatgaatattcatatctaagtctttgtgtga

SEQ ID NO: 462177 - DNA, 4243 bp, Homo sapiens
ggggaatggagcagcctgtgcaccctgccaggttctgatctccacggtcccagctactgactggacgccatcacaaccttaccaatcttcagaatacactcctttccatccgacgaaatgatagaaccctctgaagactcatttgagacgatgatggagcataagaatccatcatcaaaacaaatggagtcctccgagggctcatccaacaccaccgaggcgacgtcgggcagtggagtgcggggagaggcagggccagccagcggcccagcccaggaaaagaaggagccccccagtggcccactccaggaaatggaagagctgcccactgatctactccaagacatggaggagccatccagtggcccacgtaaggaaatagaggatccacccaatgacctactccaagacctggaggagtcatgcaacggttcacaccaggcaaggggggatccactcagtggagcatctgataggatgaaagaagcatcagtcaacccatcgggagcccgagaagaacaagaggctcacactgacctgaaggaatcgggaagggaggagactcctcaagagcaaaaccagaccgagcactcaaccgcagaacttatggccatggtgaggtccatcatctcgctgtacttccgaatgcaagacctcaaagagcaacagagagtagcagaagagatcttgatcaaagggatcaatgcaggccaactgcccgccccaaagcacttctctggcgatcgcagagaattccacgagttcatcgtactctgccaactgaccttacagagctacccaagaatgttctataacgaccgtctgagagttggctatgtcatcaatcacctgtccggcttggcattagaatgggccaaagctctactgcaggaaaacagccccctgatcggagacttcccagccttcctggaggccatgtccgaagtgtttgagtaccgccaggcactgcgtgtggcagaagaggccatgttcaccatcaggcagggcggccgctctgccactgagtacatcgatgagttccagagcctggtacccatcttgggctggccagatgaagtcctgcaggcccacttgtgccaggggctcaacgaggagatcaggcactatctattccgggtccctcagccggattccctagacagtctgattgtgctcatcctgcaaatagaagagaagctggcagagagaagagctatgctcaggctgccccccgaggcccgcccccggaacctgacctggatcgactcacctgctccagagaggtggatggtcagcagctggttgcccagcgaagtccatccggacatcaatcgcgcccacctcttcctgctgctcatggtgagagtgaacccctaccacagcgtcgcggtccaggccctggtggattcgggagctgacggcaacttcatggatgagaagttcgcccaagagcactacgtcgagctctacgagaagccgtacccacagccggtccaatccgtggacggctcgctgattggcaacgagcctgtctggctctacacggagcccctggtgtgtatccaccagaaccaccaggagtccatcgaatttgacatcgtaccttcaccgaacttctctgtggtcctaggcatccgctggctccgagtccacgcccccgaagtcgactggatcaaaggccgctgcaccttccactctccctactgcctgaagaactgcttccgcccgcccccgccatgcattgccctagagaggcacggcatgagcctgctacccggactgccacacccatactcagacctggccgacgtgtttaacccgaaggaagcagatgatgagacttccgaccagccaagctcagacggatccgatgatctttctgaatcagagccctctgagcttcagcaggctggagacagtgatcacagcgagaccttttacgagtgtccctccaccgcgccttgggaacctgtgggtgccaggatgcaagaaagagccaggctacaggaggaatactgggacctgcaggacatgctgaccaacagacaggactacatacagatgattccggaactgtttgaccagttacacggagccgagtggttcacaaaactggagctgcgtgggaccattgtggaggaaagcgtgaacgggcaccgcaccgaagatgtgtggaaagcagcgtttggtttggagcttgaagagatgaagagctaccagccgtttgcgctctccccagaccctatcatacctcagaacgtgattcacttcatcctaaaggacatgctagggttctttgtgctttcttatggccaggaagtcctgatctactcaatgagtcaggaggagcacctccaccacgtccgccaagtcctggtccgcttccgccatcacaacgtctactgctccctggacaagagccagttccaccgccaaaccgtggaattcctgggcttcgtcgtcacccccaaaggggtgaaactgaacaagaacgtcatgaccatcataacagggtaccctacccctggctccaagctatctctgcgaaacttcatcgaattcgtcttcccctaccgccacttcgtggagcgcttcagcatcatcgcagagcccctggtgcggcagctgctgagctcctaccagttctactggggagtcgaggagcaagaggccttcgagtgcctgaagagggctttccgcaaggcgcctctcctccaccaccccaagccccagaacccattctacttggaaaccggcgtcaccggcacggccctgcacgcctccctgatccaaatcgacgaccaaaccggcaagagagcctgctgcgctttctactcccgcaacatctcccctatcgaggttgagtactctcaagcggagatgaagattcttccaatacgggctgccttcatggtgtggtgccgctacctggagaacaccgaggagcccatcatgatccttctcaacacagaggatctagcctctctgaataatgacaggctcaccgtacttctccccgggcattgggtcttcttcttctcccacttcaactttgacgtcatggagctgccagaacaagacggcggccgagctctgccacctgtgagaaacctccggtggaggagagccttccagaggaacactgccgccaggcaaaccctgctgctggcctcaaggggattccccagggatccatcgacggaatccggggaagaagagaatgaagaacaggatgagctcaatgaacagatcctacggcaagagctgctggccatgatacccatcgaccagatcctcaacagcttcctcgcccacttcagcatggcccagatcagggccgtcattctgcacttcttccgaggcctcctgtactggaagaacaccctagccctggcagccatcctcgtgctactgcgcgtgaggcaatgcctctcgctgcggccggcacccgccatgcgggtggctcggccccagccccagcgctccctacgactcatcctggattcgtccctcatcgcaggcagcagcatcacgacagccatcacccagctgctcacccagatgcccgctctcgtaggtgcaaacaccatcccagcccaggagctggctgagctgttcctgggccctggccgctggcagcgaaatgctctgcactcccaggcccaccgaggcctgcagttcacccctggcttctggctgacgctgtgtgagttcttcggtgtcagagtcaccccccaggagggccacctccctgccctgcgtcagaaccgctacctggagctgcacgtcgttggtgatgaggatgtcgtcttgcgagaagccctgcaagacgacctgcaacgttaccgtcagtgtggcctgcatgacggcctgcaagacacctcgcaggacaagcaggacaacgacgtgcaggaggccccacccagccacacagcagccacccacccaccccgcccacgccacctgatggatccccaggtcctggaattccttggtagccgcctgctccacatccacagtgcagatggccagctgcacctgctcagccgggagcaggcagccagggccctgagccagttcctgaccctgatctacaggcgggccctgcccatccccgcctgggagagccagcccagggagcaggcaaggctagaagagctgcctgatgaggacgaagatgctaacctcgactgaagacgcctccctgtctccagcaaagagtcccctctatttctcaccccaa

SEQ ID NO: 462178 - DNA, 1259 bp, Homo sapiens
gcgccttttaaatgaccccaggcgtggggtacatggtcccctgcaccacggcgtctgcggcacatggctcaacaactgaagccccaagaccaagtgtcctgctttgtgcggaagagtgcagggaggccgcatgaccccggtgttcgagtgccgcagcccaaatgaggaccacatctaccaggaggagatgctggagatggctcggaagggggtgctgcctgcggtgcccacagcctattcctgcctgcctggcaagcccaagagccagaagcacttccatgacgatatctttggtgctgtatttccctacgaggcaaagaaggacagggcggcggtgcagcccagcagcctggagatgtcagcgctctgagggcccacaggaggggttaaagctgccagcacagaacttaacgatggagccagctctgcattatccgaggtcacagggcctggggagatggaggaaagtgatatcccccagcctcacgtcttatttctcacctcgttccccatcaagccctttacttgacctcctaccaagtagcaccctggattgatcggagcctcctctctcaagctggggcctccctggtcccttggagacgaaatcttcaatgccaggcctggcaagtgggtgaaagatggaacccgctgctgagtgcaccacttcaagtgaccaccaggaagtgccgtcacaccactgtgtatttaactgccatgggtacaattatttatgcctctgtttaaaaaacgaacaccctagtctgttcctaatggccccttgggtcttctctgtatgattccctgatggagatatttacatgagttgaattttactttaatcacactgtatgtgtgtttgttgggtgggctggtgggggatgttttgtagggaatgtggccctcagttatagagtggggagctggtgggtgtcgcagcctggacagatgccccacagagggacaccccaggcaggccacggctcctctgaaatggctgccaggtgtgacagcagcagatggagcttcgtgctggtccaaagacctgcgcagcagcgtctcaggtggcaggagaaggtgcagtgccaacttcaggctccagacgtgccctgccctgcgtggcagccgtgcatctcagcaacacggccaggagtccgctccggaccagggcttccccgctttcatgtgcgggcctcatctggggtcccgtgaagacagagactctgatctcgcaggtggggtggggtgcgggatgctgc

SEQ ID NO: 462179 - DNA, 2632 bp, Homo sapiens
tgcccctaagtccataagccacagctacacagctgcccaaccattgagccctcataaactcccgtgttagagtttctgacctcagctgcagggagggtatggtatgtgtttcagactctgagcacctgtttgaggccgcgctaatcacccaggcttccgttaaccccacaaaacgcccacctaaccctgctgctctccctctggatccccgcaacccagctgtcccctcagagcccccggccctactgacagccaggctcgcattgctctccttcaaaaagccccccaaccccgctgacccgcccctcaaaagtcgccctcaccctcgccgcgagcaccctcccacttcggtgcccgcgcccctctcaaggccgagccgacgccccctcaccacggctcggggagcagcagccccaggttcccgggagcgccccgccctcgagggcacgcctccttccgggtcacgccctctgccccgcctccgaggcgggatcgcgcatgcgctgctctcctcgcgcggcttcccgcttccggctcccagctgctagctactgtggatctgggggggccggacggaggcatcggaggcggctgcgagagtggcagaggagctggcggagagcggcctgcgggcgatcgggccgaggagaggagaggaggggtcacttgggccccagcctctgctcctcattcaggagcgcccggggcaggaccagggatggaatggaacccaccacaatacccagcaccgtcgtatttcaggcctcccgggagaaccctcacaccccggagcagacagccctccctggcagggagcgtttgggtgcaaaaccgtgagaactatctgtgccatgggttttagtttcttgtataagaactcagttggtgctttcattgcggacgggaacgagaagctttcccctggtccttacatgtttcgttttgttttacgtttttaaatttcaacttttatttgagattgagggggtacatgtacagggagccagttagatgctcgaggggcttctcgggctgcgttctctgttgtcctgtaaataccgactgatctggataacagttgtcaagtcacaaaaaagagaaacacagttaggtagaaacccaaagcaaacccgctctgtgaggctgaggcaggaggatctctctctttttttttttttttttttgagatggagtctcgctctgtcacccaggctggagggcagtggctcaatctcggctcactgcaatctccgtctcccgggttcaagtgattctcctgcctcagcctccccagtaactgggattacaggcgcccaccaccacacccggctaatttttgtatttttagtagagatggggttttgccatgtctctattaaaaggccttttagatagatcgtggagctaatccgacctgaacatcccagtcctggagtattttagcatgaggatagctctctattggtctggaaggttcgcctgatggttgggcctgaagacaggggcctcagggactctcttgtagctccttcagatgggtgcttttgttttgaccaaaaacagaacattctataccgtgatccaatgggcacacgtacaataataggatgcaaagtgttaccaaaccgaactcacctttattgtgtgcgacagactcgggtgctttatttttatttttatttttttgagatggagtctcactcacccaggctggagtgtaatggcatgatcttggctcactgcaacctctgtgtactgagtttaagagattctcctgcctcagcctccccagtaactgggattataggtgcccgccactatgcccagcttattttttatatttttagtagacacgaggtttcaccatgtcagtcaggagttcgagaccagcctggccaacatggtgaaaaccccgtctctactaaaaatgcaaaaattagccgggtgtggtggcgggcacctgtaatcccagctactcaggaggctgaggcaggagaatcgctggaacccaagaggtgggggttgaagcgagccgagattgagccactgtaccccagcctgggtgacagagtgagactgagtctcaaaaaaaaaaaaaaagaaaccaacctctttgctacttgtttgtggcctgtttgctcccagcatgggcaatttcaagcgtctggaattcagtaatgactttgcacagcgaatccactttgccactccttttattccggttccttctgcacatcagggatagagcattgggagttcccagactgcatgagcccagctggttgcatttgaattcttggaaataggctctcccttccagaacaaaccaattagatatagtaggccaggggccagcaaattttttctgttaagagctaggtagaggccgagacgggcggatcacgaggtcaggagattaagaccatcttgactaaaacggtgaaaccccgtctctactgaaaatacaaaaaaactagccgggcgtggtggccgcgcctggagtcccagctactcgggaggctgaggcaggagaatggcgtgaacccaggaggcggagcttgcagtgagccgagaccgcgccactgcactccagcctgggcaacagagcgagactccgtctcaaaaaaaaaaa

SEQ ID NO: 462180 - DNA, 504 bp, Homo sapiens
tttttttttttttgagacagagtctcgctctgttgcccaggctgaagagcaatggcgcgatcttggctcactgcaacctctgtctcccgggatcaagcgatgctcctgctgtagtctcccaagtagctgggattacaggcgtgagccaccgcgcccagcgacctcttccaacttctaaaaggtggccctagggattcctcggcttgtagccatgtcattccacaccctccgtggtcacgtggccttcacctgtgtgtgtgtttcccctctgtatctgtgtctctaaatctccctctcctttctctacacagacaccagtcataggctctagggcccaccctaaatcgaaatttcatcccgagatccttaactaatgacctctgccccaggctctctttccaaagaagtccatattccagggttcttagtggacgtgaattttggtgggacactgttcagcccacttcaggacctcctattatctagcgagtttgtaaacaacaa

SEQ ID NO: 462181 - DNA, 904 bp, Homo sapiens
gagacggtcttgctctgttgcccaggatagaggaagcacagctcactgaagccttgacgtcctgggcgcaagcaatcctcccgctttgtcctcctaagtagctggcactacaggtgtgcgccaccgtgcccggctaattttttattttttgtagagatgaagcctggccaacatggtgaaaaccccgtctctactaaaaatgcaaaaattagccgggtgtggtggcgggcacctgtaatcccagctactcaggaggctgaggcaggagaatcgctggaacccaagaggtgggggttgaagcgagccgagattgagccactgtaccccagcctgggtgacagagtgagactgagtctcaaaaaaaaaaaaaaagaaaccaacctctttgctacttgtttgtggcctgtttgctcccagcatgggcaatttcaagcgtctggaattcagtaatgactttgcacagcgaatccactttgccactccttttattccggttccttctgcacatcagggatagagcattgggagttcccagactgcatgagcccagctggttgcatttgaattcttggaaataggctctcccttccagaacaaaccaattagatatagtaggccaggggccagcaaattttttctgttaagagctaggtagaggccgagacgggcggatcacgaggtcaggagattaagaccatcttgactaaaacggtgaaaccccgtctctactgaaaatacaaaaaaactagccgggcgtggtggccgcgcctggagtcccagctactcgggaggctgaggcaggagaatggcgtgaacccaggaggcggagcttgcagtgagccgagaccgcgccactgcactccagcctgggcaacagagcgagactccgtctcaaaaaaaaaaa

SEQ ID NO: 462182 - DNA, 682 bp, Homo sapiens
atgggcacacgtacaataataggatgcaaagtgttaccaaaccgaactcacctttattgtgtgcgacagactcgggtgctttatttttatttttatttttttgagatggagtctcactcacccaggctggagtgtaatggcatgatcttggctcactgcaacctctgtgtactgagtttaagagattctcctgcctcagcctccccagtaactgggattataggtgcccgccactatgcccagcttattttttatatttttagtagacacgaggtttcaccatgtcagtcaggctggtctcaaactcctgacctcaggcaatccgcccgcctcagcctcccaaagtgcctgggattacaggcgtgagccaccgcgcccagcgacctcttccaacttctaaaaggtggccctagggattcctcggcttgtagccatgtcattccacaccctccgtggtcacgtggccttcacctgtgtgtgtgtttcccctctgtatctgtgtctctaaatctccctctcctttctctacacagacaccagtcataggctctagggcccaccctaaatcgaaatttcatcccgagatccttaactaatgacctctgccccaggctctctttccaaagaagtccatattccagggttcttagtggacgtgaattttggtgggacactgttcagc

SEQ ID NO: 462183 - DNA, 3029 bp, Homo sapiens
agctctaagtcgattacttcgggcacctcctgaggctcagagaaatggctaaagacactctcggaaggaatggagatgtggagctggacctccagaggagcgtgcaggctgtgctccgggagctcagcacccaggcccctgccctgcagagcaaccaaggcatgtggaggtggtccctgcacaagaaggtcgagcgagatcccggtaagagcccagtgctggtccgcattcttctcagagaactggagaaggcggaaagccaggacctccggcatgtcatcattcccttgctgcacactgtaatgtacgtgctcaccaaggccacaggaatcacagaagagctctaccagagaatctatgccttttgcacaaggttactgaccctgcccaccccctactgcacagtcgccttggactgcgcgataaggctgaaaacggagatggctgtcccagggacactgtaccaaaggatggtcattgccgaacagaacttgacgaatgagctgtatccctaccaggagagagtgttcctcttcgtggatcctgagctggtgtctgcgtctgtgtgcagtgctctgctactggagatcgaggcggcccaggcgcagcagacaccagagacctgcatgcgccacgtggtctcccacgccctgcaggcggctctgggggaggcctgtcacgcaggcgctctgcacaggaagctgcaggccagccctcgccgcaccctggagcactatttccacgccgtggtggccgccttggagcagatggccagcgaggccagcccgagccgggagggacacgtagagaggctggaggagatttactgctcgctgctgggtcccgcggcggggcgctgcggtggtgaccttgtccaagagcggccaccaagcattcccctgcccagcccctacatcaccttccacttgtggaccgggaaggaactggtgctcttcctccgcccaagatcccagctgcgcctcagtgctgacttggaggtcttggatctgcagggcctccggccggaccgggagttggcccgggtttctgtgctgtccactgacagcggcattgagcgggaccttcccacgggggctgatgagctgcctgcacccggcagccctgagatggagcgagccgggctgcagcgcaaagggggcatcaagaagcgtgcatggcccctggacttcttgatgcctggcagctgggacgggcccccagggctgcaccggaggacaggccggcccagtggggatggggaaatgctgcccggcgtgtcccggctgcacacagcccgggtacttgtgctcggagatgacaggatgctggggcgcctggcccaggcctaccacagactcaggaaacgggagacccagaagttctgcctcactcccagactcagcctgcagctctactacatccccgtgctggcgcctgagaagcctgcagcatccaggcagccggagctgggagagctggctacgttcctgggccgcgtagacccgtggtaccagagcaacgtcaacacgctgtgccccgccatccacaagctggctgagatggtaggggagggctcgtactttggaccagaccaccgtggaaaagacgaagtaaaatattccttccctccttccctggacacatcccggactgtggaccccttcatcctagacgtcatcacctactacatccgcatgggcacccaacccatctatttccagatctacacagtcaagatctttttcagtgacctgagccaagaccctactgaggacattttcctcattgaactgaaggtgaagatccaagattctaaattccccaaagcgacacagaaggtgaggaatggggaatgcagagcaaagaaagagagaagagatgagaagggcaatgctggggagagggcagagtggcaggagaagggggagccctctcagtcacggaactggagccaggaccaggacttggtgactgccttcaagttgcttgctccctactctagaccctatcagaaccagtctgatgatgccagcaccctcgtttcagggtctagccattgccccctgcctgctgctcctgtcacagaccacacatgtctgaatgtcaacgtgacagaggttgtcaagtcctccaacttggcgggaaagtccttctctacagtgaccaacaccttcaggacgaacaatatccagatccagagccgggaccagaggctgctgacactgtcgctggacaaggacgatcaacgcactttcagggatgtggtcagattcgaggttgctccctgcccagaaccatgttctggggcccagaagtccaaggcaccgtggctcaatttgcatgggcaacaggaggtggaagcaatcaaagccaagcccaagccccttctgatgcccatcaacacattctctggtattgtccagtgagcctgcagggacagcaggcccaggaggaaggatacactaccccaccaactccaaacactcacaccaacagccagagcaaggcccggctccacacggcagctttggccttgaccaggagccagcgagtgcctgggagcacagggagcctaccctggggactgtgatgaggaagggcccacatggaggtctacggatggcccaggcaatgctgtcgctgcttgagaacatacacaccaagcccagcttctcatacaaatgtctactccttcatttagcttcaattcccacttctcccactgtcctctcccacccaagctccccatccagcccttaaaaccagggtgagagaaaaatgtcagactcaataaatgtacactgaagtctttctgctttcatctcatacctggcaatatttatatgttaataggaatcatcagggcagtcctttttataacctattgagtccacttgggccagagattaaagacaccaaaattcttggcttttatgttcaaaaacttacatccaagtgtaaaatagaaagatcaatgacacatcttcagtttcttcatccccagaaataggtatggtgtggggggagag

SEQ ID NO: 462184 - DNA, 2493 bp, Homo sapiens
agctctaagtcgattacttcgggcacctcctgaggctcagagaaatggctaaagacactctcggaaggaatggagatgtggagctggacctccagaggagcgtgcaggctgtgctccgggagctcagcacccaggcccctgccctgcagagcaaccaaggcatgtggaggtggtccctgcacaagaaggtcgagcgagatcccggtaagagcccagtgctggtccgcattcttctcagagaactggagaaggcggaaagccaggacctccggcatgtcatcattcccttgctgcacactgtaatgtacgtgctcaccaaggccacaggaatcacagaagagctctaccagagaatctatgccttttgcacaaggttactgaccctgcccaccccctactgcacagtcgccttggactgcgcgataaggctgaaaacggagatggctgtcccagggacactgtaccaaaggatggtcattgccgaacagaacttgacgaatgagctgtatccctaccaggagagagtgttcctcttcgtggatcctgagctggtgtctgcgtctgtgtgcagtgctctgctactggagatcgaggcggcccaggcgcagcagacaccagagacctgcatgcgccacgtggtctcccacgccctgcaggcggctctgggggaggcctgtcacgcaggcgctctgcacaggaagctgcaggccagccctcgccgcaccctggagcactatttccacgccgtggtggccgccttggagcagatggccagcgaggccagcccgagccgggagggacacgtagagaggctggaggagatttactgctcgctgctgggtcccgcggcggggcgctgcggtggtgaccttgtccaagagcggccaccaagcattcccctgcccagcccctacatcaccttccacttgtggaccgggaaggaactggtgctcttcctccgcccaagatcccagctgcgcctcagtgctgacttggaggtcttggatctgcagggcctccggccggaccgggagttggcccgggtttctgtgctgtccactgacagcggcattgagcgggaccttcccacgggggctgatgagctgcctgcacccggcagccctgagatggagcgagccgggctgcagcgcaaagggggcatcaagaagcgtgcatggcccctggacttcttgatgcctggcagctgggacgggcccccagggctgcaccggaggacaggccggcccagtggggatggggaaatgctgcccggcgtgtcccggctgcacacagcccgggtacttgtgctcggagatgacaggatgctggggcgcctggcccaggcctaccacagactcaggaaacgggagacccagaagttctgcctcactcccagactcagcctgcagctctactacatccccgtgctggcgcctgagaagcctgcagcatccaggcagccggagctgggagagctggctacgttcctgggccgcgtagacccgtggtaccagagcaacgtcaacacgctgtgccccgccatccacaagctggctgagatggtaggggagggctcgtactttggaccagaccaccgtggaaaagacgaagtaaaatattccttccctccttccctggacacatcccggactgtggaccccttcatcctagacgtcatcacctactacatccgcatgggcacccaacccatctatttccagatctacacagtcaagatctttttcagtgacctgagccaagaccctactgaggacattttcctcattgaactgaaggtgaagatccaagattctaaattccccaaagcgacacagaaggtgaggaatggggaatgcagagcaaagaaagagagaagagatgagaagggcaatgctggggagagggcagagtggcaggagaagggggagccctctcagtcacggaactggagccaggaccaggacttggtgactgccttcaagttgcttgctccctactctagaccctatcagaaccagtctgatgatgccagcaccctcgtttcagggtctagccattgccccctgcctgctgctcctgtcacagaccacacatgtctgaatgtcaacgtgacagaggttgtcaagtcctccaacttggcgggaaagtccttctctacagtgaccaacaccttcaggacgaacaatatccagatccagagccgggaccagaggctgctgacactgtcgctggacaaggacgatcaacgcactttcagggatgtggtcagattcgaggttgctccctgcccagaaccatgttctggggcccagaagtccaaggcaccgtggctcaatttgcatgggcaacaggaggtggaagcaatcaaagccaagcccaagccccttctgatgcccatcaacacattctctggtattgtccagtgagcctgcagggacagcagcaggaggaggacagcagcaggaggaggacagcagcaggaggaggtacgag

SEQ ID NO: 462185 - DNA, 572 bp, Homo sapiens
catttgatgctgccagttttattattgttattatgctcattaatattaatactcagccactgtacctatttaagattgaagaggagaaaggcaaggttttgctgaaatcatgatagcaggtgcagggggaagaaagtagcccctactccaccccccggcctcaatctcccgctaacaacagttacagcaccagccttctgcaatcccttccatcatcctcagctgcacagagaccccctgcaacttcctctccaggtggctgtaaatctgggacctagcagtgacaatgggtttggggcgggtgggcatgaggggcttgaaggctccttgaagcgaccttcctagttataatatttgaaaatgtagaataatttatgggtcagattgccaatggttccttctcctttctaaaaaccaattctgaatttgcttcaccatatttttgatgatgtgttttatggcctcacaaactcccagctggttccctcgatgatctcgtctctgtggttactgtcaacaatccacattcgtgttgtggcatatcatcttacagaagcatttaaagcagctca

SEQ ID NO: 462186 - DNA, 3457 bp, Homo sapiens
tttaatgccaaaatctctctcactggcaggacacatcgggtaaatatttctactgcaggagaccacattcatttgatgctgccagttttattattgttattatgctcattaatattaatactcagccactgtacctatttaagattgaagaggagaaaggcaaggttttgctgaaatcatgatagcagtgacaatgggtttggggcgggtgggcatgaggggcttgaaggctccttgaagcgaccttcctagttataatatttgaaaatgtagaataatttatgggtcagattgccaatggttccttctcctttctaaaaaccaattctgaatttgcttcaccatatttttgatgatgtgttttatggcctcacaaactcccagctggttccctcgatgatctcgtctctgtggttactgtcaacaatccacattcgtgttgtggcatatcatcttacagaagcatttaaagcagctcagggcttctttcctctgatgtagattttctccattgttactcaacgaggctctgacatcagcctcctttcagttcaaaagacaggacgtttttctgggagtcaggaactgaatgcagaacttcccgcgggcttcacaaaggaccgccgaaagggacagtcacacactgccatggatgtggtctcctctctgaggagctgggaataacgctgccctcccacaggcgctgctcccaggaggggcgggaaagcatgatgccaaagggcagtttcaaaactgggccccggggagcagcagcgttaggtgtggacaacatgaaaaagcacctaagacccagtgctgtcctgcaatgagacagagacgcggccactgtcccgcacagccccacgggcagaggaggcgctccagaggagggactttgagagacgacgcaatgtgcctgctgtgggaagtcacaagacagctgctattcccgggccgtcagggccaggccagcctggctagctgctgagagggtctgcacagtgactccatgaggttagcaaaatatatatatttttaaagcctagcaacctttcctaaacatttttttttaatcaccaaaacatcacattgtaaggagtttcagattattcccaacatttcccaatgtcaagtcttggacaacatgtctgcaccaaacatgtgcttctaaatagaaaaccgaaagtccctgtcaatcaggaaggtaacactctggagaggaggaggaaaggaagtgagacagtgctggtgtcttttgtcattaggacagtggagatgcggctgcttgacccaagcagcatactggaaggacagctgagagcaaaaacggaaagggagcgtggaggttttcacagcaggacgtgtgtgggcagaaggattctccagtgtccacagcaggatacgtgtgtggagatggattctccagtgtccacggctggacgtgtgtggcaaaaaggattctccagtgtccacggcgggacatgtgtggagatggattctccggtgtccatggcaggacgtgtgcggcgagaaggattctccagtatccacagcaggacgtgtgtgagtagaaggattctccagtgtccacggcaggatgtgtgtggcgagaaggattctccagtgtccacggtgggaagtgtgtggcgagaaggattctccagtgtccacggcgggacgtgtgtggcaagaaggattctccagtatccacggcgggacgtgttgtccacggcaggacgtgtgtggcaaggattctccagtatccacggcgggacgtgtgtgagtagaaggattctccagtgtccacgaaaggacatgtgtggcgagaaggattctccagtgtccacggtgggaagtgtgtggcgagaaggattctccagtatccacagcgggatgtgtgatgtgtatggcgagaaggattctccggtgtccacggcaggacgtgtgtggcaagaaggattctccagtgtccacggcgggacgtgtgtggagatggattctccagtgtccacagcaggacatgtatggcgagaaggattctccggtgtccacggtgggacgtgtgtggcgagaaggattctccagtgtccacggcgggacgtgtgtggcgagaaggattctccagtgtctacggctggggacatgtgtggggaggattctccagtgtccacggcgggacgtgtgtggggagaaggattctccagtgtccacggcgggatgtgtgtgggcagaaggattctccagtgtccacagtgggacacgtgtggcaagaaggattctccagtgtccacagcaggacgtgtgtggggaaaaggattctccagtgtccacagtgggacacgtgtggcaagaaggattctccagtgtccacagcaggacgtgtgtggggagaaggattctccagtgtccacagtgggacgtgtgtggcgagaaggattctccagtgtccacagtgggacacgtgtgtcaagaaggattctccagtgtccacggcgggacgtgtgtgtggaaaaggattctccagtgtccacggcgggatgtgtgtggcgagaaggattctccagtgtctatggctggggacgtatgtggggaggattctcagtgtccacggcgggatgtgtgtggggagaaggattctccagtgtccacggcaggacatgtgtgtgggcagaaggattctccagtgtccacagtgggacgtgtgtgtggaaaaggattctccagtgtccacggcaggacgtgtgtgtggagaaggattctccagtgtccacggcaggacgtgtgtgtggagaaggattctccagtgtccacagagggacgtgtgtggcgagaaggattctccagtgtccacggcaggacttgtgtgggcagaaggattctccagtgtccacagcaggacgtgtatggcgagaaggattctccagtgtccatggcgagacatgtgtggagaaggattctccagtgtccacggcaggacttgtgtgggcagaaggattctccagtgtccacagcaggacgtgtatggcgagaaggattctccagtgtccatggcgggacgtgtgtgggcagaaggattctccagtgtccacagtgggacacgtgtggcaagagggattctccagtgtccacggcgggacgtgtgtgggaagaaggattctctggtgtcgttttcgctggctcctcactcccagctaacaaagtgtttcttcccattgtagctttggctttcagaagtcagccttctttcctccccaaagggagggctttcctcacataaaagaaaattaaggctcccccatatgtgttttgacctggtattatggcatgaaagccacttgcaccttcttacaaagtcttagtgaactacttctgaaaaatggtaataattaaaaagggttaaaaatacacagtagtcagccttttaaaaacattacaagactgacacagcaggcatgtg

SEQ ID NO: 462187 - DNA, 1370 bp, Homo sapiens
gctccagaagtgcctgcaggaaggaatgaaaggacacaggggcgagcgagtctctgagtatgagaagatcgttgacagccctggagcagcaagggtgctctggtgtgcggcttccacccttcccctgatcgcagctgcctctgttgggctagctcctccaaccatagtgcttgatctatttccatttccccgaaccatcgcttggatgatgaagcacatcgcagagtactgcttcatcaccattcaggaattgtacccttttaaatttctatatggaggatttcaacatacagccaagcaacccaaagtgatttctgtatttttcaatccagcccaagagtggattggcaggaagggtgcaggacctaacccaatgacaatgctcgcaggaggagccctccagaaggcaacagccccacaggcctcctcactcagaagtctttgaaggacgcatgtcaagcacaggatgtgtgctttttcctactgtaaacaagcaagtctctaaaaatattcatgagatttttctacgagggaaaaagaataatattccactgaactgaagaccacatatgaaacaggggaaggacgctggaaataaagctccatacatagctcagtactagtagatcagcatgttaactaggttaattcccaactgtcctaccaccaactacctagcacgaggctctcaacaacctgcagccagatcccaggtggtcccaatggctacattcattgaatacagcctgagcaatactctcactccactcttcactcagctgaccctgtattctgtgaattctgccctagctccaaacctcttggtacaaaggaactctctacgtttagttctctcgacaactacctactataagatgaagtttccaggaactcatgtgatcatgagactctgcagtcacttcagggggtcttgttgactggctcggggggctggtgtcaagcccaagcagaagagccctcagagcaagcagccctgcttctgtggattctggatggcatcatcaccaggcgggtccttcagagtactgggagcagcatgcagcccgatagagttggcaaacgtgaatctactagaagattgacatggagatcgacaacaggatggtggacctcatggcccacacggcctctaaggaataagacccccagaccactagccccagcaaaaacacaagaggaagagagaggccctcagctgctggtgagtccctgacgtgtccagttccctgccacactgagaatctcccctccccgcaatttccatgcagaccccctgaaaagggaagggccttggaagccccaccttgtcatctaccatcaataaagtcccctatgctcagccaaaaaaa

SEQ ID NO: 462188 - DNA, 1049 bp, Homo sapiens
aggtagtggtctatcaccatcttcagacctctccttgaagtccctggcatcccagtcatgcctccccccggggaaagggctctcccacagcctccagggcaagaagcccgcagccccctgtctgcccaaagcagaagcagcacagttttcagcccctgcggctccaggcacacccgagatgctgtgtggacccagccagcctggtgcctgccctgggccttcagactgcccctcccgcattgccacactgccacccactccagcaccggtaatgttcacagcttccctggggaaagggctcccccattttcttgaggaagaatccacttcctcctttccccaagtctctgaatccttctctttcttcccccaaccataccagcacacctatgtcccggctcggaccacagccccggagactctgagtgtgggctccctggagacatggctgtggtcacagcaggatttaagcacagacaggtggggtccagagtccctgcgcttaaccactaatctctgctgctctctggaacctctcgtgtgggtggtgggcagccatgagaacaggggaaatgagaagagaccaggccccgccctccacagcaaccccaaagtgtctgccctctcacctcatcacagagctgccagtaccaaggagtttgggagaggggacagttgcacccgcaaaagagaaggaggagatctgaagagcacagtcaagaccacagacacccgtggaggctcccccaagacatctgcttctctgggactggggacctcgctcaggaccgtggggagttggctgaaggacttggggagcccagaagctgccaccgaaccaagccctcttacttcagtcttctcctctatccaggaggtcacccccactttatctcacaccaacaacagggagcagcagctgtgaacaggtggtccccatttgcttctttttgccgtgtccatagaaggcttctatggttctgtggtgtgactttctgtggttggagaggcaatatgtgacaaaggtaagggctctagacctggaatct

SEQ ID NO: 462189 - DNA, 1514 bp, Homo sapiens
tctctgcactcctttgttgctggggtccgttgcgttctgcatccagtccttgctgctccgagaggccccaggtgcctccgccacggctcctgtgacgctgtcacctgcgctgtgacctgctccggagtcataaagaggacgccgggacaccaagaagcagggaaatggacccagtggcctttgaggatgtggctgtgaacttcacccaggaggagtgggccttgttgaatcctttccagaagatctctacagagatgtgatgcaggaaaccttcacgaacctcatctgtatagaaattttatgggagagagactctttgagagtgcagaaggtagtcagtgtggagaaactttcacccaggttccggaagacatgctgaacaagaaaactcttcctggagtaaaatcatgtgaaagtggtacatgtggagaaatcttcatgggatattcatcctttaataggaacatcagaactgacactggacaccaaccacataagtgtcagaaatttttagagaagccatataaacataaacaacgtaggaaagccttgagccatagccactgctttcgaacacatgaaaggcctcacactagagagaaaccttttgattgtaaggaatgtgaaaaatctttcatttctcctgcaagcattcgaagatatatggtaacgcacagtggagatggaccttataaatgtaagttttgtgggaaagccttggattgtctcagtttataccttacccatgaacgaactcacactggagagaaacgatatgaatgtaaacaatgtggtaaagccttcagttggcacagttctgttcgaatccatgaaagaactcacactggggagaagccatatgaatgtaaggagtgtgggaaatcattcaatttttccagttcctttcgcagacatgaaaggacacacacaggagagaagccgtacaaatgtaaggaatgtgggaaagccttcaattgtcccagttcttttcacaggcatgaaaggactcacacaggagaaaaaccctatgaatgtaaactatatgggaaagcattatctcgccttataagctttcgaagacacatgagaatgcacactggagagaggcctcataaatgtaagatatgtgggaaagccttttactctcccagttcatttcaaaggcatgaaagaagtcacactggagagaaaccctacaaatgcaagcaatgtgggaaagccttcacttgttccacttcgtttcaatatcatgaaaggactcacactggagagaaacccgatgggtgtaagcaatgtgggaaagccttcagatctgccaagtacattcgaatacatggaaggactcacactgagtcaaaacctggtaccacaggacagagcagcaatgagtgaccaacccctgactctatgtgcagatgacacatccatccccagattaggtatcaacataagtgaaagtgataatccttgatagtacctgttgtcccaacatagtttttcatagcacctcatct

SEQ ID NO: 462190 - DNA, 349 bp, Homo sapiens
tctctgcactcctttgttgctggggtccgttgcgttctgcatccagtccttgctgctccgagaggccccaggtgcctccgccacggctcctgtgacgctgtcacctgcgctgtgacctgctccggagtcataaagaggacgccgggacaccaagaagcagggaaatgttaaagagtttgttggagcaacagcgattccgagtgagaaacacccggtcatggcttgtgattgaagaaaaggcttttataagttgcatgaggaggcaaacaggattaaatacttgattagttacagtgatgctgtcgccgtatgtggacttgtcaacctgaaataaaagaatcagattcca

SEQ ID NO: 462191 - DNA, 370 bp, Homo sapiens
gtaaagtgcccggcctagcgtccagatacgtggaagaggggctgggtggaaccaacaggatcctgctgtggcgggacccaggcctccgctcgggcgaccccggcgattgggacccgcgtcccccatggcgtggcttggccctcggtccgctcggccgccaggtggggctgggcccgcagctgggaccccgggcgtcctgtcccgtccctacgcggcgactgcggccccggccccggagtcctctctgggcagctccgcgcccgcagcccggcgtcttcccagattgtgcgggggccacgggagggtcatggggggtcggatgtgtcccgcctttcttctgctaaaaattaaactgaggctctgttaacag

SEQ ID NO: 462192 - DNA, 2191 bp, Homo sapiens
aggctttgcagtggctgcttggcttggcagtggtcgcttggcttggcgtggcagtgatcgcttggcttggcatttctggcttagcggtcctcctttcgcagattggaaaccgcgggctatcctgctgggaggttgtggccgaggcagtagctcgctactgatggtctcctggggtggagaaaagcggggaggggctgaggggtctccgaagccggcagtctacgccacgaggaaaaccggtagcgtcaggagccaggaggaccagtggtacttgggctacccgggggaccagtggtcctcgggcttctcctacagctggtggaaaaacagcgtcggcagcgagagcaagcacggtgagggcgccttagaccagccccagcacgatgtccgcctggaagatcttggcgagctccacagagctgcccggtcgggcgacgtccctggggtggagcacgtcttggttcctggagacactggcgtggacaagagggataggaagaagagcattcagcaactagttcctgaatataaggaaaaacagacacctgaaagtcttcctcaaaataacaatccagattggcatcctactaatttgacccttagtgatgagacttgtcagagatccaagaatctgaaagttgatgataaatgtccatctgtatcaccatcaatgcctgaaaatcagtcagcaaccaaagaactgggacagatgaacttaacagaacgagaaaagatggacactggggttgtacttctctcagggaatgatactctccatgacctgtgccaatcacagctaccagaaaacaaagagagcaaagaagagaagacacccaagaaacaaaacaagcaaattaatcttccacttttgcatctgcagaaaacgtctcaagaaccagaaatggctaaggattgtgatagagaggatatacctatatatccagtacttcctcatgtgcaaaaatctgaggaaatgcggattgaacaaggcaaattagagtggaaaaaccaattaaaactcgtcataaatgagttaaagcagaggtttggtgaaatttatgaaaaatacaaaattccggcttgtcctgaggaagagccactacttgataactctacaagaggaacagatgtgaaggatattccctttaatttgacaaataacatacctggttgtgaggaagaagatgcatctgaaatatctgtctcagtggtattcgagacatttcctgaacaaaaagaacccagtctcaaaaatatcatccattcatactaccatccgtactctgggtcccaggaacatgtttgccagtcatcttctaagcttcatttacatgaaaataaattagactgcgacaatgataacaaaccaggcattggacatatttttagtacagataagaactttcataatgatgcaagcactaagaaagcaaggaacccagaagtggttacggttgaaatgaaagaagaccaagagtttgatttgcaaatgacaaaaaatatgaaccaaaatagtgacagtggcagtacaaataactataaaagcctgaaacctaaattagaaaatctgagttctttaccaccagattctgacagaacatcagaagtatatctacatgaagaattacagcaagacatgcaaaagtttaagaatgaggtcaacacattagaagaagagttcctggctttgaagaaagaaaatgttcaacttcataaagaggttgaagaagaaatggagaagcacagaagtaatagcacagaattatcaggaaccctaactgatggtactactgttggcaatgatgatgatggactaaatcagcagattcctaggaaggaaaatggagagcatgacaggtaagcctatagcagcgtttaacaggagacaattggtcaagtgtggtggctcacgcctgtaatccagcaatttgggaggccaaggtgggtgaatcacctgaggtcaggagttcaagaccagcctgaccaacatggataaaccccatctctactaaaaatacaaaattagccaggtgtagtggtgcatgcctgtaatcccagttactcaggaggctgaggcaagagaatcgtttgaacctgggaggcgggggttgtggtgagccatgatcatgccattgcactcgagcctgggcaacaagagtaaaactccatttcaaaaaaaaaaaaaaaagca

SEQ ID NO: 462193 - DNA, 2683 bp, Homo sapiens
  misc_feature (10)..(10): n is a, c, g, or t
ttccctgttncaggcatgtgcttggtacagcctcttcccccaaagctaacatcctcactagaatgtaagcttcatggaggcagggggtttcgttcattgcactactcccagtgcttggaatggtgcctgggactctataagtgctttagatgggtgtctcgctgtgttatccaggctgatctcaaactcctggcttcaagtgatcctcccatattggcctcccaaagtgctgggattacaggtgtgagccacggcaccctgccgaatctttgagtctggacaccagtaggtggtcatggtccagttccttgcccagatgcccacagggacttccagcttccaggctgcaatcacagagaatgaagaaggaaggctgttcgagaaatatgggcagctcttacaggaaagccccccagcctctaacaggccctctctgggcatcgaaggtgccagtggtcttccaaggcccgggatgtgccctggacgtgattgctctcctgggtcttgtcttgctgctctttgcccccgccctcctcctctctacctgatggtgccaggtaaggcttcaggcatggcagaggctgaactgagagccaccctaccttgttcctgtggctccatccccctatccacacccaagagatgagatcctggggcagttggcatctgacagcctggcatcgactcatgccaacagcttggaagctgcagtaattagaaggggagagggagagagggggagagaaggagagcgaaagcaagctctagagagaaaccttctcctgcctgccgcagggcaaactacttcaaacgaattcgtttcgctcttgtgaaactgaagacaatttccttttctgtcataaaacaaattattgctcatcaggagtgctgggctagtctctttcctaagggtgtgctcttgctcttgtgcaggaggaggggaaacattaggggaggggacccagggtgcaaaagggatttccgggagccatcctgagggggagtaggaagagaagctttggatagattcatgctcctctcaggagtgaaacggcgccgtgtcccccttgtcaacctccccgactgaccagggaaagtgtccaagaaggtaccgcttggctccaaccaccaggaccgaaagagcctctgagagggtccaaccctcctccatcctcctgcctccaagccaccctggggaaggctccacctcccccctcaggcacctgttcctgctgttgaggggtgtaattagccctggcagatgaaagggcgtctttgaaagcagcaaataggtaaacaagtggttgaaaaataggaaaaggggaagaaaaaaagagaagctatcatggggtgttttctcccaggtatcagggtcgcaggtagttccaacctcaactgggaacaagtcccaacaggtgcaacccctgtccagatgttgcacaatgcaggcgcgtgcccagagcccaatcccagatcggttctcgggcagaggtccgggttggggatgtatccaaaccagaaatatcctttcaggtctctctccccgagacaaaccccggcagggtctgctcctcccggagccggcttgcaggcgtgttgggggaagccagcgaggttgtttgccgggaaaggacagtttgggacccgggaggggagttccctgcgtctgggccgtggggggagctacaggccgggcgggggtgagtaaggcccagcggacgcaggaggctcagtggcggcggcggcggcggcgatggggaggagggtaattagcagggaggctctcgccacagcacgtccccacaaatgagaggccccgggccccagacaccacacaacaaagcaagaggcaattatttggctccagtgggaggggacagccctttgccggcccactgcagctgagcacccagcctccgttgaggacgcggagggtggggtgcagagacccctctcaccagccccccggcggcaagggcagggccccgagggactcccgctgggttacccttagaggaggtccctgtttgggaaggcagagccgtaggaggccccagcctgattagagccggccctcagccagcccggagcctcccacaaggcatccaggagacctcctggggaccccacagggaagcgagaatgtcctgggaccggggctggagagggcggaaggggctttttgggtcctggagaagccagtggccaacatctgaaccccccttctccagctgtggccacacaactggcaaccgggaggctctcaggcaggtggggaaaccacagaggagggagcaggagccagggagattccagagctctggcctagacctggaattcacacaattgctatgcaaaccaaatgcaaatacatcttcttttatctccccttcaaaaatcgtcaaatcaagcatatttggaagaaggccaggcctgatcagctggaggacccccagcctctgcttgcctccttctccctttccacccacccatccctacaggaaaactaagtcctacaataccttagattcacctgggacccatctgcaaaggactttcccctcttcagatgaaagagcccaaagtacagatggggaaaaagaggccttaagagattaaggtactttcccctgccctaacagcccacctggagaatgacaggcctcctggaagcttctgacaa

SEQ ID NO: 462194 - DNA, 2727 bp, Homo sapiens
tttttgttttttgttgtttaagagacaagattttactctatttcccaggctggagtgcagtggcgccatcatagcttgcagaagcctctaactcctgggctcaagcaatcctcctgactcagccttccaagtagctgggactacaggtgcgccaccacatccagctaatttttaattttttttttttgtagagatgggtgtctcgctgtgttatccaggctgatctcaaactcctggcttcaagtgatcctcccatattggcctcccaaagtgctgggattacaggtgtgagccacggcaccctgccgaatctttgagtctggacaccagtaggtggtcatggtccagttccttgcccagatgcccacagggacttccagcttccaggctgcaatcacagagaatgaagaaggaaggctgttcgagaaatatgggcagctcttacaggaaagccccccagcctctaacaggccctctctgggcatcgaaggtgccagtggtcttccaaggcccgggatgtgccctggacgtgattgctctcctgggtcttgtcttgctgctctttgcccccgccctcctcctctctacctgatggtgccaggtaaggcttcaggcatggcagaggctgaactgagagccaccctaccttgttcctgtggctccatccccctatccacacccaagagatgagatcctggggcagttggcatctgacagcctggcatcgactcatgccaacagcttggaagctgcagtaattagaaggggagagggagagagggggagagaaggagagcgaaagcaagctctagagagaaaccttctcctgcctgccgcagggcaaactacttcaaacgaattcgtttcgctcttgtgaaactgaagacaatttccttttctgtcataaaacaaattattgctcatcaggagtgctgggctagtctctttcctaagggtgtgctcttgctcttgtgcaggaggaggggaaacattaggggaggggacccagggtgcaaaagggatttccgggagccatcctgagggggagtaggaagagaagctttggatagattcatgctcctctcaggagtgaaacggcgccgtgtcccccttgtcaacctccccgactgaccagggaaagtgtccaagaaggtaccgcttggctccaaccaccaggaccgaaagagcctctgagagggtccaaccctcctccatcctcctgcctccaagccaccctggggaaggctccacctcccccctcaggcacctgttcctgctgttgaggggtgtaattagccctggcagatgaaagggcgtctttgaaagcagcaaataggtaaacaagtggttgaaaaataggaaaaggggaagaaaaaaagagaagctatcatggggtgttttctcccaggtatcagggtcgcaggtagttccaacctcaactgggaacaagtcccaacaggtgcaacccctgtccagatgttgcacaatgcaggcgcgtgcccagagcccaatcccagatcggttctcgggcagaggtccgggttggggatgtatccaaaccagaaatatcctttcaggtctctctccccgagacaaaccccggcagggtctgctcctcccggagccggcttgcaggcgtgttgggggaagccagcgaggttgtttgccgggaaaggacagtttgggacccgggaggggagttccctgcgtctgggccgtggggggagctacaggccgggcgggggtgagtaaggcccagcggacgcaggaggctcagtggcggcggcggcggcggcgatggggaggagggtaattagcagggaggctctcgccacagcacgtccccacaaatgagaggccccgggccccagacaccacacaacaaagcaagaggcaattatttggctccagtgggaggggacagccctttgccggcccactgcagctgagcacccagcctccgttgaggacgcggagggtggggtgcagagacccctctcaccagccccccggcggcaagggcagggccccgagggactcccgctgggttacccttagaggaggtccctgtttgggaaggcagagccgtaggaggccccagcctgattagagccggccctcagccagcccggagcctcccacaaggcatccaggagacctcctggggaccccacagggaagcgagaatgtcctgggaccggggctggagagggcggaaggggctttttgggtcctggagaagccagtggccaacatctgaaccccccttctccagctgtggccacacaactggcaaccgggaggctctcaggcaggtggggaaaccacagaggagggagcaggagccagggagattccagagctctggcctagacctggaattcacacaattgctatgcaaaccaaatgcaaatacatcttcttttatctccccttcaaaaatcgtcaaatcaagcatatttggaagaaggccaggcctgatcagctggaggacccccagcctctgcttgcctccttctccctttccacccacccatccctacaggaaaactaagtcctacaataccttagattcacctgggacccatctgcaaaggactttcccctcttcagatgaaagagcccaaagtacagatggggaaaaagaggccttaagagattaaggtactttcccctgccctaacagcccacctggagaatgacaggcctcctggaagcttctgacaa

SEQ ID NO: 462195 - DNA, 1443 bp, Homo sapiens
gacgtcactcatgcttctgctatttcagtcttgactgaagttctccagcagctgattgtaatgaatttgcccaatgttttgatgattggcagagacccactgtctgtgccaccgccctgagaacatcagcagcggcttccttgttccgtgggggcgctctttctgggctccagctggctgaggtgtccgcctttgcatgagccagaaggaagagcatccctggacccctgatagtcttcagtgctctggcctgtgggcactcaccgccttacatggagaccctgcagaggccacccctggtcctcctggtggcccccggcagcaagcgccctcccccacttcccgtgttagtagcagggggcctttggttctgctcccctgccagctctgccatggggccatgtgtgttccggctttatttcatggctcccccagagaagggcggggacgccagatgcagtccatgctggccacagccctgggctccagggaccgggggactctcatgatttctggtaacttcagggaagtggagcctctccaatgttacctgcatagcttgcccaccttcctgctggtgctccccctcttctcatccctgcaggtgtctccccttccactaccatctggaagcctgccctctctgccccactaccatcaggcacctcccaacaccacagagattgtccatgggcagagaacataggtctgcatctcaggtctgctgccaaacagaaacatctgtaaagatgtggatgctgatttttttttttaacagctttattgaggtatcatttgcatgctataaaacacacccattgtaagtgtataattcagtgattttttttcataaatatacaaagctgtaaaaccctaaccacaattcagtttttagaatgttaagaggaagctggttttagactgttgacaggtgaattgaatgtccctggggcccccgtggtatataatcagcccacatggatcagctggtcccagctctgaaggtggagttggagaaactggacagtgagggctgggaaagtgaaggacgggaataactctacccatcaccgagggctcagagggccccgggcctcgctgactgacatgctagacggtggcctcggcaggctgcacacagagggcaacgtgtcagggctgggggacggggagctgggtgcacggatgagtaggtttgacaggggtcccatggtgctctgagagcagaggaggctggcagcggacatccaccagcaggaagatgcagacaccagtgctaggggcagagggatgtatttatgaaatagcattttcagttttaaattgtaaaaatagatgtgtgaagctcttttcgtttctttttaaacaaagaacaaagttggtgtttttttaatttgtatggttgcccggggtggggcatgtgtgtgctttttaactaaatct

SEQ ID NO: 462196 - DNA, 1169 bp, Homo sapiens
agaaatttctggggtttggcttagcaggcccagagggccccggaagacactgagtgatttccctctgtggcgtccgtgagagtcagtgtcactgctgggccctcaccctggtataccaggcaaccaggaagaagggatgcctgctgctgtaagcctgtgccagcaacacagagacccaggccttcagcccaagcggggctctgtgcctccatcggaaacatgaaccagatttccttgtaatgggctccatatttaggcccagcagccttagatgtctggccaataggaaagctatgtccttcctgcacaatttcagccctaagaatctgtgactctccctccctggaggcctagagaacaagaggagggagggcttgaaatcaataaatggattgcacacctgcagggctctgccatttgtcatctgtgagctacgcagccattctggggcttacgctatcctgagctgcgtgtgtttccatggtctcccattatgctccactttgacccctcaaaatattgtttcaacttccaggaggctggatgatggggagagagaggcaaagagagagggagggagcaagggagttggcagaatgagagagggagcatgtccaaaaatgccggctccagccaactgtatcagatgccagctgccaataccaccctggtccctctgagtctgcctggagagtggggagccaccatgggagtccgagaccacggacaggacaacagaaactcactgctggggctcattccctttgggcagccccaggcagttacaaccaggatgactgcgacgctgtggaaggagcttgcagccagtggcccttctgcgtgggcctctgtgcggagcatgggcagaaagaaaggaaccaacgtactcagcaaacagtgctcggtgtatctgctgccaggcccagtgctgaaccctccagtcgcctcctcggtgccccctgccgacccgttgaactctccacggccttgagctgcacccacctcccttaacaggcttgcagggtcctcaccaaagcacagggctgcccctctggagggaaaaagcctcaggtggtgctgctcctgccttcctgtgaagtctttccagtctccccacaagcatgggttgagcacctactgtctcccttcacaaggctaagagctgggga

SEQ ID NO: 462197 - DNA, 2053 bp, Homo sapiens
tgccgtgcgctgagtgtccgcgtcgccctcgccgcagtcgcgggcaccccgctcggcgtcggtgcctgagggaggccgcgatggcggccgaggccctggcggcggaggccgtggcgtcgcgcctggagcggcaggaggaggacatccgctggctgtggtcggaggtcgagcgcctgagggacgagcagctgaactcgccctacagctgccaggcggaggggccgtgcctcacgcgggaggtggcgcagctccgggccgagaactgcgacctgcgccaccgcctgtgcagcctgcggctgtgcctcgccgaggagcggagccgccaggccacgctggagagcgcggagctagaggcggcgcaggaggccggcgcacagcctcctcctagtcaaagccaagacaaggacatgaaaaagaagaaaatgaaggaaagcgaggctgacagcgagtgcaaggggaagtctggaaaacaacgccttaccaagtggctgctgaaattagtcaggaactggctgaaagcacggtaatagccaaagtcaatggtgaactgtgggacctggaccgcccattggaaggggactcttctctagagctgcttacatttgataatgaggaagctcaagctgtgagtatttaaaaaccagacagccaaactttgggtagttatgttgtaaactacattatataagaggccacatattgaagtcacgaatgttgagttttttgggggtttctaagatttaaaatttgattattgatgtttaataaatatttgtggcatgaatgtatacaaatacatttagaatgctttggttattaaatcaatgtgtgtttgaaatgaattgttagtaggccattaaaaatgggtctactttataatttaatatgtataggagaattggaagaaattacaagactcagatatcctttaaatacttaatataattttctataaaataaataccacatttttcacatatgcatgtgatatatgatttctgatatacgttgtcgcctgaacgttgcagtcgcccttcaagctgtccattatcttcatgaaacctaagttatgattagcttaggttacaataattgcaaggcttatgctaaatttctttaaactataagaaccatattataatttctgtttaaaatatgcaaagtataaccattaaatatgtaaacagtacactattaataaaaccatatttaaaagtgattttcagaaagttcagtactgtagactgaattcacaactctccagccatagctagccatgcctcagtttttatgcactactgtctacgtgatatctgcatgtagatattgtacaagaatcttcagtacattcaccatgaaattttcgattttaaccccaaaacttatttcttcctgtttgcctaagtcagtgcattactccaccacatacccaatagctcattccagaaccttggaggttttgtgtgattcctccccgtccctcaactccatctccagtgaggggtaagcccagtagattttacttcctaaaaatatctagaatctgtccattgccactgcctgagaatccgcactcaccttgttatagaaccacccaagaaactgcctacttgctgttttgtcccctgaaattcattcccatcgagctatcaaatgatgtgtgtaaatgtaaatttaatcattttgcttaaaaccctttaatgcatcccattgcatttggagtaaaatgcaagctcctccccaaggcctgcatggtctctggcccttccttacctctctaacctttctcaagctatgctttgtcacatcccctacgtgttagtcacacaggccttcccgagtccccatgaatgcaggacactcaccatttttctatattacagagccctgttcatctccttttaaacacccttctcatcttagaattatgcacgtccaggtttgtttattgcctgtgtcttcgccaataggctgtacctgtgtgggggctgtgactatgtctgtttctttcactattgtatacccagcacagtgtttggctcaacaaatgtgt

SEQ ID NO: 462198 - DNA, 5130 bp, Homo sapiens
tgcccaaagtcaaagcagtggctacccttgagaacgtggctgacacggcaactggcatcgggagaatgtcataggccatgtgccccaggaaataagggccttggaaacaagtgatcagctgagaagggaaagggtccagcatcgcccggacttgcttgtatattctaggggattggcagccctgttcctgagagtgagctgctgatccgtctgttgtgtgcagtatctgagaccacagaagatgcaggactgaagggtggcatgttgctcctgacagcattggaagctctggagagagggcagaggctgaagtctcggaggctccccccgccccagccacaggatggcgcacaggggccatgtgcagctccgctcaaagtatctcaggttccggggcagaatcctggaaaacccaactcggagctgagtctgcaggtggctgcagggcggtgctgctgagtctgcagttaccaccacaaaaggagggcctgaaggcattgccaggagactatggaggactcacggagctctgacacccctcacctggaggaggtggcttccccccaccccccactctgcctgcaccacctttgcctggggcggccaatgcatggcagtggagtcagtaatcgcccttgctcctccccagggtcaaacccactggggtctggggattgaaattctgagaggagtgtaggaggagagtgtcttcccgaagaaaatgtaggaatgcattggcttctatcacaaaaatcctgggaatgttcctgagaagggattttggagatgctcggcctaggactggccctcgggaagatgacccgacctttgtcctgtgcagctgagtgctgaacactggtcagctctggataaagcctgatgtcaccgagctgatggcggggcgtctgcactgaacaccttccagcttggtgggggcacgggaaccagctgtcctcattaaaagtgacctggagtgagatggattcttctgcctatacctccacgtgtgggctccctgaacacccccatcgccatgggctcccaagaagtattgcttctggctgcagggctcactgcaatgctgcgacaggaggtgacaggccaaggccagcaggtgactgctctccccagaggccctgtcagctggaagcagctggtttcacataacagagaccccaggcccaggtcccctggatgcaggaggatttgcggctgcccttttggaagaggtaggctgaccatgagaactggccaaagggtctgctccttcctcctcgcggctctgggggctgcatctcggaatcctgccggccactcctccgctgcaggggtggacatgggaaccaagtggggcctttgggatgtcttcagccctcccacagccactggccagcctgcctgctgtcttcctgcccccctcgctcactcctccttctcctgggctgaaccacacccaaaagcttgatccaggactgggctaggctctgccaccacctgctctgtgacttcgggcaggccaccaattcttctgaaaaacgggagtcactgtgggcaccatcacgcccgggtacaggacgcccagtggctcagctgccccagccaggctgccctgtcctggcctcagcacacctcccacagccactgcaggcagccctggaccttctcctgctgaggccttactgccaatccctctgggagaccagacacaacaggcagcggtctgggtgactcccaggaacctgtcctccctagtggctgaggcagtaggcttggcagcagggactcagtgccctaggaggcagggctcatcccacaagttgccatggtagcccctcctcctgccccttactcatcagccaggctgtaccgacacgggctgcccaggcagggggtggctcgctggacaaagctggccgtgcaggcgctcaggcgtgcagggtagccagtgccccggccaggaatggacagcctccaggacacagtggccctggaccatgggggctgctgccctgccctcagcaggctggttcccagaggctttgggactgagatgtggactctctttgccctttctggacccctgttcctgttccaggtgctgacttttatgatctacatcgtgagcactgtgttctgcgggcacctgggcaaggtggagctggcatcggtgaccctcgcggtggccgtgagtacccagcttggcccagagcagggacgttctctccccaggcttctccaccgggttcccgggtgggcccgtcttgggtggctggtcagggatgggaagacacagcccacgtggctggacagctgccttcacaggtggaacctgagggccggagatggaggcggtctggccctggggcacacagcacatgaggctgctgagcagagcctctgccaccgctgcctgctgggcagcatttcctgaccctggctcagcccagatgcaggggcctctcttcaggcctcacctgacaagctcttgtttcctcctgtgtgtggcgccagtttgtcaatgtctgcggagtttctgtaggagttggtttgtcttcggcatgtgacaccttgatgtctcaggtgggtggcctcctggagctgggcaggaagccaggcaagggcagagccaattccacaggtgccatggagatggcaggtgggaggggcgcagccaggtgatctgggagcaatgggccctggggtcagctgcccctgccctacctccaaggaccacaggctgtcagggaaacagaccctcccctttgaaagagtctgggccaggagaaaggggtggagatggtggagacagttctctgatctcttgcccccagaggaggtcaccaagtagagaaagacaaccggttccccagcctcaatcctaagttcggctgcctacatgcaggcatgtgtcgaaggccaaggggacacagaaggaacctccctgcttgcaggggcctgcagtccagcaggggctgcccaggtggccatggggtcacaaagcggcaaggcctcacctctccctgggggttttagcttcacggtggacctgggctttgtcctggctccacttaacctgccgctgacatgtgatgaagccccatgtgccttcgtcctccttggagctttggaagaacagtggagacagtggtaggcccaggctcaggaaggccgctgtgccattacaggctgcgggcgccaggctgtggtcaccagaggccgccgggtccgccacacaccgctggcgccgctgacagcccgctccccgcgcgggatttaggaatgtcccgggcagtggaaacggctgacgcggggcgggctgttttgcagagcttcggcagccccaacaagaagcacgtgggcgtgatcctgcagcggggagcgctggtcctgctcctctgctgcctcccttgctgggcgctcttcctcaacacccagcacatcctgctgctcttccggcaggacccggacgtgtccagtggtgtggtgggcaactgtgtcaacggtgtggccaactatgccctggtttctgtgctgaacctgggggtcaggggctccgcctatgccaacatcatctcccagtttgcacagaccgtcttcctccttctctacattgtgctgaagaagctgcacctggagacgtgggcaggttggtccagccagtgcctgcaggactggggccccttcttctccctggctgtccccagcatgctcatgatctgtgttgagtggtgggcctatgagatcgggagcttcctcatggggctgctcagtgtggtggatctctctgcccaggctgtcatctacgaggtggccactgtgacctacatggaccctccccgggcctctcgtgcccaccaggtccagaccctgctcagcttacgccaggactcacacacaggtgcccacaacctgacgaccaagggtgatatttcactcacagatattcccttggggctcagcatcggggtctgtgtccgagtggggatggctctgggggctgcggatactgtgcaggccaagcgctcggccgtctcgggcgtgctcagcatagttggcatttccctggtcctgggcaccctgataagcatcctgaaaaatcagctggggcatatttttaccaatgatgaagatgtcattgccctggtgagccaggtcttgccggtttatagtgtctttcacgtgtttgaggccatctgttgtgtctatggcggagttctgagaggaactgggaagcaggcctttggtgccgctgtgaatgccatcacatattacatcatcggcctaccactgggcatccttctgacctttgtggtcagaatgagaatcatgggcctctggctgggcatgctggcctgtgtcttcctggcaactgctgcctttgttgcttatactgcccggctggactggaagcttgctgcagaggaggctaagaaacattcaggccggcagcagcagcagagagcagagagcactgcaaccagacctgggcctgagaaagcagtcctatcttcagtggctacaggcagttcccctggcattaccttgacaacgtattcaaggtctgagtgccacgtggacttcttcaggactccagaggaggcccacgccctttcagctcctaccagcagactatcagtgaaacagctggtcatccgccgtggggctgctctgggggcggcgtcagccacactgatggtggggctcacggtcaggatcctagccaccaggcactagcaaagaagcttggaaatagaaagccaggagtggctgtccccagtatgcaaacacaccacggtctgccctgcaaaaacaccaatggggtctagtgcaggtggacactttgaaccactcctcaaaaaaagaactttggctgattccttgtggtgacactcagaggggtctgaacagacttgacaattctgttctggtcaagctggagttttcttctgtgacttggactgctctacagaagacatcagccaactgcacgagtcagagtccagggattgtcactattattaataatgtaaatggcttcaaatgggacactgcagataaaatcacaaaaaccactgttatattaaagattacacatttcctgggcacagcctgctgctcaagtctgtcata

SEQ ID NO: 462199 - DNA, 4057 bp, Homo sapiens
tgcccaaagtcaaagcagtggctacccttgagaacgtggctgacacggcaactggcatcgggagaatgtcataggccatgtgccccaggaaataagggccttggaaacaagtgatcagctgagaagggaaagggtccagcatcgcccggacttgcttgtatattctaggggattggcagccctgttcctgagagtgagctgctgatccgtctgttgtgtgcagtatctgagaccacagaagatgcaggactgaagggtggcatgttgctcctgacagcattggaagctctggagagagggcagaggctgaagtctcggaggctccccccgccccagccacaggatggcgcacaggggccatgtgcagctccgctcaaagtatctcaggttccggggcagaatcctggaaaacccaactcggagctgagtctgcaggtggctgcagggcggtgctgctgagtctgcagttaccaccacaaaaggagggcctgaaggcattgccaggagactatggaggactcacggagctctgacacccctcacctggaggaggtggcttccccccaccccccactctgcctgcaccacctttgcctggggcggccaatgcatggcagtggagtcagtaatcgcccttgctcctccccagggtcaaacccactggggtctggggattgaaattctgagaggagtgtaggaggagagtgtcttcccgaagaaaatgtaggaatgcattggcttctatcacaaaaatcctgggaatgttcctgagaagggattttggagatgctcggcctaggactggccctcgggaagatgacccgacctttgtcctgtgcagctgagtgctgaacactggtcagctctggataaagcctgatgtcaccgagctgatggcggggcgtctgcactgaacaccttccagcttggtgggggcacgggaaccagctgtcctcattaaaagtgacctggagtgagatggattcttctgcctatacctccacgtgtgggctccctgaacacccccatcgccatgggctcccaagaagtattgcttctggctgcagggctcactgcaatgctgcgacaggaggtgacaggccaaggccagcaggtgactgctctccccagaggccctgtcagctggaagcagctggtttcacataacagagaccccaggcccaggtcccctggatgcaggaggatttgcggctgcccttttggaagaggtaggctgaccatgagaactggccaaagggtctgctccttcctcctcgcggctctgggggctgcatctcggaatcctgccggccactcctccgctgcaggggtggacatgggaaccaagtggggcctttgggatgtcttcagccctcccacagccactggccagcctgcctgctgtcttcctgcccccctcgctcactcctccttctcctgggctgaaccacacccaaaagcttgatccaggactgggctaggctctgccaccacctgctctgtgacttcgggcaggccaccaattcttctgaaaaacgggagtcactgtgggcaccatcacgcccgggtacaggacgcccagtggctcagctgccccagccaggctgccctgtcctggcctcagcacacctcccacagccactgcaggcagccctggaccttctcctgctgaggccttactgccaatccctctgggagaccagacacaacaggcagcggtctgggtgactcccaggaacctgtcctccctagtggctgaggcagtaggcttggcagcagggactcagtgccctaggaggcagggctcatcccacaagttgccatggtagcccctcctcctgccccttactcatcagccaggctgtaccgacacgggctgcccaggcagggggtggctcgctggacaaagctggccgtgcaggcgctcaggcgtgcagggtagccagtgccccggccaggaatggacagcctccaggacacagtggccctggaccatgggggctgctgccctgccctcagcaggctggttcccagaggctttgggactgagatgtggactctctttgccctttctggacccctgttcctgttccaggtgctgacttttatgatctacatcgtgagcactgtgttctgcgggcacctgggcaaggtggagctggcatcggtgaccctcgcggtggcctttgtcaatgtctgcggagtttctgtaggagttggtttgtcttcggcatgtgacaccttgatgtctcagagcttcggcagccccaacaagaagcacgtgggcgtgatcctgcagcggggagcgctggtcctgctcctctgctgcctcccttgctgggcgctcttcctcaacacccagcacatcctgctgctcttccggcaggacccggacgtgtccaggttgacccaggactatgtaatgattttcattccaggacttccggtgatttttctttacaatctgctggcaaaatatttgcaaaatcagaagatcacctggccccaagtcctcagtggtgtggtgggcaactgtgtcaacggtgtggccaactatgccctggtttctgtgctgaacctgggggtcaggggctccgcctatgccaacatcatctcccagtttgcacagaccgtcttcctccttctctacattgtgctgaagaagctgcacctggagacgtgggcaggttggtccagccagtgcctgcaggactggggccccttcttctccctggctgtccccagcatgctcatgatctgtgttgagtggtgggcctatgagatcgggagcttcctcatggggctgctcagtgtggtggatctctctgcccaggctgtcatctacgaggtggccactgtgacctacatgattcccttggggctcagcatcggggtctgtgtccgagtggggatggctctgggggctgcggatactgtgcaggccaagcgctcggccgtctcgggcgtgctcagcatagttggcatttccctggtcctgggcaccctgataagcatcctgaaaaatcagctggggcatatttttaccaatgatgaagatgtcattgccctggtgagccaggtcttgccggtttatagtgtctttcacgtgtttgaggccatctgttgtgtctatggcggagttctgagaggaactgggaagcaggcctttggtgccgctgtgaatgccatcacatattacatcatcggcctaccactgggcatccttctgacctttgtggtcagaatgagaatcatgggcctctggctgggcatgctggcctgtgtcttcctggcaactgctgcctttgttgcttatactgcccggctggactggaagcttgctgcagaggaggctaagaaacattcaggccggcagcagcagcagagagcagagagcactgcaaccagacctgggcctgagaaagcagtcctatcttcagtggctacaggcagttcccctggcattaccttgacaacgtattcaaggtctgagtgccacgtggacttcttcaggactccagaggaggcccacgccctttcagctcctaccagcagactatcagtgaaacagctggtcatccgccgtggggctgctctgggggcggcgtcagccacactgatggtggggctcacggtcaggatcctagccaccaggcactagcaaagaagcttggaaatagaaagccaggagtggctgtccccagtatgcaaacacaccacggtctgccctgcaaaaacaccaatggggtctagtgcaggtggacactttgaaccactcctcaaaaaaagaactttggctgattccttgtggtgacactcagaggggtctgaacagacttgacaattctgttctggtcaagctggagttttcttctgtgacttggactgctctacagaagacatcagccaactgcacgagtcagagtccagggattgtcactattattaataatgtaaatggcttcaaatgggacactgcagataaaatcacaaaaaccactgttatattaaagattacacatttcctgggcacagcctgctgctcaagtctgtcata

SEQ ID NO: 462200 - DNA, 1754 bp, Homo sapiens
tcccgggcttcaggtagcaccttaggcccaaatgtccaccccttgcttagagcgccctcctgagcgcaacaccccgtgccagcggctgcctgctgccgagcccgccactctgccccccacttcatggcccctgcaccgcccctctctgccactctccaccctgccctcgaggtcccggtccccctgcgtccaccagcaaccccttccagtgtgccctgctccccacgctgcagccatcgtttcgagaagcagagctcatccaatcctccacataaacctttccgtggcttcaggttcaatgacaaagtgactctccaagggcccccaaggcccatggcagaacctcctggaataagacattccctccaccctgccctttcctttctctgaccggtccagaccaggtccctcccagacgtcctctccctccctccctgaagcgccctctcacactgtaaacacatgccctgttgaaggtctatggagtaccacggttttcgcatttgtgtgcttcttgttggtgcacccgcactcggcctctgtaccccagatgtacccacactcggcctctgtaccccagatgtacccacactcggcctctgtaccctgatgtacccacacttggcctctgtaccccagatgtacccacactcggcctctgtaccccagatgtacccaccctcagcctctgtaccccagatgtacccacactcggcctctgtaccccgatgtacccacactcggcctctgtaccccgatgtacccacactcggcctccgcaccccagatgcacccacactcagcccctacaacccagatgtacccacacttagtccccccacaccccagatacacccacactcggcctctgtaccccaggtgtactcacactcggccctcataccccaggacttctgagcagagggtcctgggtggcatttcagactgaccatgtctgctgggagagctgttctttttcccacctctgtccccttctcccttccttcttccaggtcccacctcggtggcccaaaccagacatcttcgtcatcctggcctcctccatccgtgcccgtgtttaccggggcaccaagccctgctggttctgcctctgacctcctgtcccaacttttcaccctctgccttccttaagggctttgtcacctcgcactcaggctgccaaactggttccctgcctctgtcatctctctgtccccgtctaatcatttgcctctcctatcactggttacctctgtaatgcaggtttaatcatgcctctccctgcctaaaaccttcccctggctcctattctggaagagtgtcgtagggcagcatgtaaaacgccacgcatgccccgcccagcctgccttttaatcttcatctctggccacactcttctagcactgcctgtctgcccagctcccgcccatgcccccccgccccgcgcagccttctgtcctgtaaccaccttccccacaatatgccatcattccccctgttaatggctctgcccttgcccactgtcctatcctggaatgactttccctcatccttctttcttctaatgacctcctattcatccctcaaaacccagtgcaaaggatcccatgatctcctgccttcaggcaaaatgactcaccttcctcctcaggccaccccagctcccactattggcgatcccatcatcctttgctaacacaccacctcctggatcacctgggctcctctggactggagatctcctctcaaacacc

SEQ ID NO: 462201 - DNA, 428 bp, Homo sapiens
tcccgggcttcaggtagcaccttaggcccaaatgtccaccccttgcttagagcgccctcctgagcgcaacaccccgtgccagcggctgcctgctgccgagcccgccactctgccccccacttcatggcccctgcaccgcccctctctgccactctccaccctgccctcgaggtcccggtccccctgcgtccaccagcaaccccttccagtgtgccctgctccccacgctgcacctggccaacatggtgaaaccccgtctctactaaaaatacaaaaattagccgggcgtgtggcaggcacctttaatctcagctacttgggaggccgaggcaggagaatcacttgaactctggaggcagaggttgcagtgagccgagtttgtatcactgcactccagcctgggcaacagagcaagacaccgtctcaaa

SEQ ID NO: 462202 - DNA, 1249 bp, Homo sapiens
ttaccagaaagagctacacaatggtgaatccttcctctatcactttgagatgtatatttcctatacatcaggagtgtctttctcaagaacgacaagagactgtgtcaccagagctgcgggtctccacatggcactgcagcagttccagcagctctatctgtgggcattggcctggggtcacgaaccatcaggttctggccaatgttgggtttcaccatgtcaagctagtactgagctgtaagacaaagtcctgcatttacttctctctccctccctgccagtggatagagtcactctgcactgtgctgcccaggactgggggagaaaaggtaggagcagtctcttggttgccaaggctgatgctcatctgggtcacatccaaatcccatgctgccaggaccaacacagccctgggtgctcttgtggcccaggctgacatggcctgtctgccagtggggttcactcgtggcctaaggccactgtggaaggctagcagtggtgtgagctggaacacaagaccatggtttggggctgaaggtttctgccttgcactgggtcttccatgggaaacttgtgaatgacgtcatgagacatgtgaatgatgacatgtgaatgagacatgtgaatgatgcctacctaacgtagaagggactctcatgtcagagacagcaataatcaaccacagtggggaaaaaaaaggttaatttgaatttaattacatcaataatactttctcaatcatgaatactgtgattacaaaaataagtgaacattgaatataattatgcctctccatcaatgtcgtccctctttttaaacatacaatttaattatctaattgagtttgaattatttgttataataaacacactgattcagagtaatttacggaagtgctagcaccttagttctttctaaagtgacacttctaatttttatttaatcttcattttgatgtttcaaaaatcattacacatatgggatttctatccagtattgattttctaatgttgagtaaggtgtgagctcctggtaaaagctttgccacattctttacatttgaagaatttctctccagtatggactctctgatgttgagtaaggtgtgagccccagataaaagctttgccacattcttcacatttgaaagacttctctccagtatggattctttgatgtcgagtaaggtgtgagcccctgttaaaggctttgccacattctttacatttgaagtgtttctctccagtat

SEQ ID NO: 462203 - DNA, 1017 bp, Homo sapiens
  misc_feature (4)..(5): n is a, c, g, or t
  misc_feature (9)..(10): n is a, c, g, or t
  misc_feature (12)..(14): n is a, c, g, or t
gganngttnntnnncagatgctggaggagcatgacagaggagaggtggagaaatgaagattcagggaagtctggggcacagcacccccttggcctgagcaaggggagcctacagccattccagctcttcagacacccctttgccatcctctctggagctccaactttggagcatgaaacgataggagctgctgaggtgcagcctggagaccccttgggtgccttggcatctgtccgcttcctcagccgctgggtgctcagccccctgctagccccaggcctttcagagctgatggccttgttccgcttgttctccagacacggtttaggtaatgcacattcttgtgaccctgccacagatgggttttttgccaataacaggaacatgcagaggctgctcagagcagttttggttggtagtgaagttggaggatgtggagcaccgtgacaaccagcagccagtgtctgacctatttagtatccaagtaccacacttatttcactcagctgaagtttttcaaggtttatttatgttgtagcatgtatcagaattttattcctttttatggttgaatcatatcccattgtatgtacatgctgcattttgtgtgtccactcatctgttggtggatagattgtttccatctttggctattgtgaataattctgctatgaacaccaatgtacaagtatctgtttgagtccctattttcaattcttttgagtatacacttaggagtggaattgctgaatcatatggtaactttatgtttatgttctgagaagccacagactgttttccatagcgtctgcaccatttcacattcccaccatcaatgcacaagtattccgatacttctacatcctcactcacacttgttatttttcttaaaaaaaaaaataacagacaacctattggatgtgaaatgatatctcattgtggttttgatagacttgtaggcagaaatcatactgaggagcaccaccaatacaagagtacaccaatacaggagcacca

SEQ ID NO: 462204 - DNA, 1597 bp, Homo sapiens
agccgtggcttatactttgtcgaataccatgaatctgctggcacatttaggctttcttgttcctgagcccctgaccttctacctgctggggatcactcctcagcccctgaccttctacctgctggggatcactcctcagcccctgaccttctacctgctggggatcactccaccacccctgaccttctacctgctggagatcactcctccacccctgaccttctacctgctggggatcactcctcaacccctgaccttctacctgctggggatcactcctccacccctgaccttctacctgctggggatcactcctccgcccctgaccttctacctgctggggatcactcctcagcccctgaccttctacctgctggggatcagtcctcagcccctgaccttctacctgctggggatcactcctcagcccctgaccttctacctgctggggatcactcctccgcccctgaccttctacctgctggggatcactcctcagcctctgaccttctacctgctggggatcactcctcagcccctgaccttctacctgctggggatcactcctcagcccctgaccttctacctgctggggatcactccaccacccctgaccttctacctgctggggatcactccaccacccctgaccttctacctgctggggatcactcctcagcccctgaccttctacctgctggggatcactcctccacccctgaccttctacctgctggggatcactcctcagcccctgaccttctacctgctggggatcactcctccacccctgaccttctacctgctggggatcactcctcagcccctgaccttctacctgctggggatcactcctcagcccctgaccttctacctgctggggatcactcctcagcctctgaccttctacctgctggggatcactcctcagcccctgaccttctacctgctggggatcactcctcagcccctgaccttctacctgctggggatcactccaccacccctgaccttctacctgctggggatcactccaccacccctgaccttctacctactggggatcactcctcagaccctggtacctgctgctctgctctctgtctccatgggtctgtctgctctggaaatgtcatggcaatggaatcacacaggcatgcaggttgccttctgcacctgccttcttccactgagcaaaaggtttcaaaggtgcctcgatgccatcatagacgtggctccttcctgccatttgtgactgtatgatgctccatgtgtgcgaacagactacattttatttcttgtttgatagctgatagacatttggactgcctccacttcccggctctaacactgctgtgaacattaacatacgggtctttgttctcatgtctctcgggcggggcatatggtaattccatgttcaattttttcaggaacgcttagactgttctctagagtggctgcaccctgttccaatcccacccacagtgcatgcaggttccagttcctctgcaacctctttcatgtccaggcctttcatcccgccagtttggtttcattgtactgacaagctcagctggcatcagggaccatgaag

SEQ ID NO: 462205 - DNA, 656 bp, Homo sapiens
ctgggacaagcagtctttggaggatggaactggggttgggaataccttcagggcttggaaccacagtacttctccaccaccaaatatgcagccttcacagtcccaactacctccttacatgctggtgcaaatcgggcgttccactcaggtctgagggtgccaccagccacctgcacacctgcgcatgctcagtggagctcagtggagctcaccggagcagtcgtgtctgccagacaaaagctatggctcttgggaagagagggaagatagcgacacagatccagttactagcaggaagcccagtttgttctcccgattcagtcccaagcatcccaaaggacttcaacttctggggagcaaagggcctccttcacctggttagaaaacctcgagggaagaagaacagcggcattgatgaagaatctggcatccagtgactgtcattctttcctctggttctgacattctccagatgtccatgagcaggagacgaggacagcagcaaactccagcttaacataagatggagaggctgttgggatttctgagggaccagagatcttttggctgcaactcagaggagggtttgggaactggaagtcagaaatcaggagttcgagaccagcctggtgaagccccatctttaccaaaaaaaa

SEQ ID NO: 462206 - DNA, 5791 bp, Homo sapiens
ttttttatttttattttttatttttatttttttggaggcagccttattctgtgtgtgccaccgcgcccggcctgtttttttctttttttaaaattattattattattattattattattattattattattattattatttttatcaataggtttttggggaacaggaggatctagtattggtttacctcacagcgaacgaaaactcagctcactgactatttaatttgtagactatactaatcactgctgatttgtttctatctcatcacagctcccatttactgaatagctacactgggctaggcactgaactaggtgctgtcacatgcattgtcccttatgatctcacagatactttgcagaagagggagtggcgcgtcccactttatattatatagagatgagagaggggaatctctgagggatgtagtaacttgccaaggctacacagctggctgctgacttgagtaaaccaatagataaaaggatatacaaaggaacacagcctacttgtcatgacttcaaccacctaacagccacagcagaaagtgtctctctcctagtgggcttttccgcaggccaagtccagcttatagacccaatcaaaaaagaaactagcaaactttttaatgaggaaagactaatagacaagtcacgagttacctgtgtcaaatgggttcccggttcggaaagccttttcctagtagcccactcgagtgggaacatgtacttatataatgtggagcacacttgtggcaccacagccccccactaccagcttctgaagcagggagagagctttgccgtgcacacttgcaagagcaaatccacgaggaaccctctccttaagtggacggtgggcgagggggccctcaacgagtttgctttctccccagatggcaagttcttagcgtgcgtgagccaggacgggtttctgcgggtgttcaactttgactcagtggagctgcacggtacgatgaaaagctactttgggggcttgctgtgtgtgtgctggagcccggatggcaagtacatcgtgacaggtggggaggacgacttggtgacagtctggtcctttgtagactgccgagtaatagccagaggccacgggcacaagtcctgggtcagtgttgtagcgtttgacccttataccactagtgtagaagaaggtgaccctatggagtttagtggcagcgatgaggacttccaagaccttcttcattttggcagagatcgagcaaatagtacacagtccaggctctccaaacggaactctacagacagccgccccgtaagtgtcacgtatcggtttggttccgtgggccaggacacacagctctgtttatgggaccttacagaagatatccttttccctcaccaacccctctcaagagcaaggacacacacaaatgtcatgaatgccacgagtcctcctgctggaagcaatgggaacagtgttacaacacccgggaactctgtgccgcctcctctgccacggtccaacagccttccacattcagcagtctcaaatgctggcagcaaaagcagtgtcatggacggggccattgcttctggggtcagcaaatttgcaacactttcactacatgaccggaaggagaggcaccacgagaaagatcacaagcgaaatcatagcatgggacacatttctagcaagagcagtgacaaactgaatctagttaccaaaaccaaaacggaccctgctaaaactctgggaacgcccctgtgtcctcgaatggaagatgttcccttgttagagccgctgatatgtaaaaagatagcacatgagagactgactgtactaatatttcttgaagactgtatagtcactgcttgtcaggagggatttatttgcacatggggaaggcctggtaaagtggtaagttttaatccttaatgctgcaccagatctagaacttgaataggtagtgacttttttctttttcgtgggaggggtggggtgtacaatgaatgtgaatgacacttcttattcttaatgtaaatctcaatgcatcagagccataattttggatactgcatgccatgtaattctgaatcatttgataatttaccttagagcatttaaaaaaatataatcaaactaattgccagccaagtcagtcatcctcctgggagtatatagagtcccaaggttagcgctcctgtattagactatttcaattttaggaaaatcatgaccatgtggggaaacaatgactttaaaatgctgaaattaaaatttatgctttaactggaatattttttgcttaactactcaattagaatattgtacacctgatcaatgtgtgttcagcacagatggccatgaattgtcatttatagtccaattttttatcttaatcataaaatgtttaggaatctatgaaatttaactttaggaacaaaacgtttagcagggttgattgatattatttttacattgttctggcaatccacagaaagagaagagccttaatttttaaaacccattttagtcattttatgacaattaaagttgtttaataaacatcttttttcaaagaagcagtttgtagcactttgattgaggttctgtgtactaagatacccgtacctcactcagagcctgacagttcgtgggaactgcgggccgaggacgccaacagcattgcagaagtgcctcttgccacataagcgaagaccttttcttcagatgcactttgcttgtgtgttttcccaacaagggaaaaggagttttttggttttttgccgggggcggggaggtgcggtgggggagggggattgggtcagaaaggcacgtgactcctccgcgctttgtttcgtaaagcctgagactccccgagtcttccgacttctccctgacatggccctcgtttgggcttcgtcccccgcagaggaagcggaagtgcaggtttcccctctccttgttcttggatggcagctgtggttccgggattactcttgggatgctgacgctggccatgtgcgtaggcttcgtcctcagtggctcccaccctagcgcctcagcccaggacctggtggcctgtggcttcctcggcagtgggaggctctgctgctcccccggagaccgcagtctttcaccctcactctctactgctgcaccaggagctgcttttcaaattctggttttcccagtgggtgagatggccccttgaactatgtattccatgtcaagatggtggttatcttacttgttaactcattttgggcatttaggttgtacacctttgtaattaaatatagagacaacgatcacttagaccagtttgcgtagtgaatatgattcagcaaagtgaagacctggtggcttttctttctctgcagtgtaaagaccctggtagctgaagcagcagctccctgtgctcttaacgcagccctcccaggaaagccgggccaggttcccaggcctgcttcccatctgcaaacatgtcacggtggcgccatccaccctgtgcccatcgtgggccttaacgcagtggtttctgttgagtgtgatggcatggccgcgtgctgccacctgggaaccacagcagccttcaggtgcatctctcctggctgtgcctttcacatccctgagcactgctcctaggagtattcgtgtcctctctacctgtggaatacgggcctttgttcctaaaggtgaactgatctaaggtagccatgacagccatccttgtggacagtttccgctttggaggccaaattgggtcatgtggagagattagtgatgaacgctccatgtgcaacttttgcacctacatagttgtaaacgttcagtttcaaatgcttctgaggcattgagtatgcagtttcaaaattcaggacttagtatttggcctaaatagagagtggccgatcccaagtaagtagcatttatggtgacatttctggcgaccttgcagttctgaaggtgttgccctggacagggaagccgtgggggtgtgtgcccgagtaaccaacgtgaccgactggggactctctgatttctcccccttctttaaaattctcagtcgcagtggctgggatgaaagagggattgcaggggtacactgacaggtgacttaggagtcatttgctgataggaaccaggggtgggagaggcaagaggaggaggttatgtttcctttgaaaacaactccgaagtgtgctgtctagtatggaggcctgtgtgtgtctttctccccccacctccagttttaaacactatgatattgtcagttttggatttgaggcttgataacaatctttttcttccagtttttgccaaggagtgtactgtccttaatgtctgtctggtaccttgtctggggccccttcgttgtgtctacgtgccctccccaaggcccctcttgctgggttcagggcccagtggagagcactgtgccagcctggggaggggctgcctttgactgcatgtcctgacccctggctcagcccaggctggcccaggccctgcagggcgacaccactctgtgtccactctgcccctctgactgctgcccctttctttgacagccggcagagcacttctgcaggcaggaggacaggatgcaaggtgttctccaagaccagaactaaaagtgcccaacagcttgagaagagggcactggagagaggggcagggaagcgcccttctcctcggctgtgcttctgagtaatggctcccgcagacctggggagggcctggggaggggtggccgcggtggttcctgatatcaggtgtgtaaggtgcaatgcgtgctgctaaccctaggagaaatttggggaaaatatttgtagttttctcgccaaactttgagcttcctcattgaaatttttcagtctttcagcctaaacgttattatgagcaagaatatcttttctaacctaatctgtggaataaaacacagcatttggcaagaagaggctgttaaatactcagtcagcatcactgttccagcgtgtaccaaaccacagagatgaaaggctcagacgaaagtcaggtgcacgctgcgtggctggagaatcccgctcccacccggcaagggggcgagctggtccctgggcggtgtcagacaccttctgaaggtgccaggccagggccaggggagcttcaactcgccctccttgggttggcctttttcaccagaattcaagaagccagatttgtgctgtgactgcgatggggcaggcttctaaacactactggtggccctggagcctttctctgaggcttttttcttattcagaaggagaattaaaaattcccccagcggcctggagaagggaacctttggaaaagcttgccttcttttaaaagcaaatgcatgtgcaggagtagacactttacaaataaccagtagccttggggtcgaaatttgcttaaatcatggtaaaggatctcatttctcttttgtgctgattgaaccttctagcagtttggaagtgttttcctgtgaacccttagctggggactgagggtaaatgccttaaaaatggaggcatggaaaatcagaaaggagctatcacaatcattcttttctcaaaggcgttcaggaattctgaggaagaaatgcagtgacaggatgggattttaggggcaaggacaccgtccgggcggggcccagggctctccactggctgacttcacccccagggcccagctggcacgtggccaggcagccatttctccccagttcctccacttcctggggttcattttaaataataaattgtaaagtatgaaatgagtgctgaagttgcctgcatac

SEQ ID NO: 462207 - DNA, 972 bp, Homo sapiens
gtctaattttccgctgcgcttcttgttccttcgatgtctactgcagtgggggtctcagtgggaatggactaaggatgcaggaaaagtatgggggtctgagtacaggcagatttcatagaatgattccagcatgcattaagcacattgtttatccaaggtgctgtgctcagagttgtggcgatccagagagaccaggtcgcttccaccttcaaggagtctgcaagttcatgtgcacagccctgtgggagaaggcgatttcaggaagcctagcccaacccctctctcaaacgcctccaaggcactgccacggatgggttccccacccccagacgccatggtgttgggcagatctgcttcttttgctaagatcaagggcaaatgggccactgcttactaagagagcctacaaacgcaaggcagctcccgtcccaggtctgctgcgcttcaagacagcaccaacagcagctgagaccaagaacctactacccagagggcatacttttcactcagacattagaaagcgcattgtagtggcctgatttgtggagtgagaactattatgagaagaaatggaagcccttgaaaggccaaatggaagctcttgacattttcctatccccaatactagcctccaagaaaaattagaagcaatgccacatttctggaggaattttagagattagcattaccattcaagatatgagagatgaagagataaggtctaactgttacctgggctgaacccttggacttctaggctcaagtgattctctcactttccaagtagctgggactacaggcacatgccaccggatatggagctttactggggcagatcaacacggcctcaggcaatccatcagtagagtgagaccaaagaagtttacctttacttagcatatctatatagcaaacctgcacatgtatccctgaacccagaataaaaattaaaaaataaaataaaataaatgt

SEQ ID NO: 462208 - DNA, 3289 bp, Homo sapiens
caacaatacactggaccaagaagggcatatcatcttgcactctatgcatcgttacctgccgaggcttcatttggtgcctgcagaaaaggctgtggaggtgatacaattaaatggccctggtgtccacacttttaccttcccacagactgaattctttgcagtaacagcttatcagaacattcagattactcagctgaaaatagattacaatccatttgccaaaggctttcgggatgatgggctgaataataatccccagagagatggaaaacaaaagaacagctctgaccaagaagggaataatatttccagttcttctggtcatcgggtccgtcttacagaaggtcaggggtcagagatacaaccaggtgatttggatcctttgtcaaggggtcatgaaacatcaggcaagggtttggagaagacttcccttaatataaaacgagactttcttggtttcatggatactgattcagcacttagtgaagttcctcaattgaagcaagagatttctgaatgtcttattgccagcagttttgaagatgactcccgtgtagcctcaccgttagaccagaacggaagcttcaatgttgttattaaagaggaacctctagatgattatgactacgaacttggtgagtgcccagaaggggtcactgtgaaacaggaagagacagatgaagagacggatgtatactcaaatagtgatgatgatcctatactagagaaacagctaaagaggcacaataaagttgacaacccagaagctgaccatctatcttctaaatggcttccaagcagcccatcaggtgttgctaaagctaaaatgttcaaattagacactggaaagatgccagtagtctatctggagccctgtgctgtcaccagaagcacagttaagatttctgaactccccgataacatgctttccacatctcgaaaggataaatcttctatgttggcagaattggaatatttgcctacatacattgaaaattccaatgagactgccttctgcttaggcaaggaatcagaaaatggtcttagaaaacattcaccagatctcagagtggtacaaaaatatcccttactgaaagagcctcagtggaaatatcctgatatatctgacagcattagcacagaaagaatactcgacgattcaaaggattcagttggagactcactttcaggaaaagaggacttgggcagaaagagaacaactatgcttaagattgcaacagccgcaaaggtagtgaatgctaatcagaatgcctctccaaatgtccctggaaaaagaggaaggccacgaaaattgaaactctgtaaggcaggacgaccacctaagaacacaggaaagtctttaatttctacaaagaatacacctgtaagccctgggagtacctttccagatgtgaagcctgatctggaagatgtggatggtgttctctttgtttcctttgaatcaaaggaagctctagacattcatgcagttgatgggacaacagaagaatcttctagtctccaggcatcaaccacaaatgactcaggttacagagcaagaatttcccagttggaaaaggaattgatagaagatttgaagtctttgcggcacaagcaggtgatacatcctggtcttcaagaagtgggcttaaaattgaattcagtggatccaacaatgagcattgatcttaaatacttgggagtacagttacctttggctccagctactagctttcctttttggaaccttacaggaaccaaccctgcctctcctgatgcgggatttccctttgtttctaggacagggaaaaccaatgatttcactaagatcaagggatggaggggaaaatttcatagtgcttctgcatctaggaatgaaggtggaaattcagaaagttcactgaaaaatcgttctgctttctgtagtgataagctagatgaatacttggaaaatgaaggcaagctgatggaaacaagcatgggtttttcttctaatgctcccacatctcctgtggtgtaccagcttcccactaagagtaccagttatgtacgaacacttgatagtgtactaaagaagcaatctactatttccccttctacctcttattctttgaaacctcattctgtaccccctgtctctcgaaaggcaaagtctcaaaacagacaggcaactttcagtggccgaactaaatcatcttataaatccattttaccataccctgtttcaccaaagcagaaatactctcatgtgattctaggagataaggttaccaagaattcttcaggcatcatctcagaaaatcaggcgaataactttgttgtgccaactttggatgaaaatatatttccaaagcagattagtttgcggcaggcacagcagcagcagcaacagcaacagggaagtcgccctccaggcttgtctaaatctcaggtgaagctaatggacctggaagactgtgcactttgggaaggaaaaccaaggacatacatcacagaagagcgagcagatgtatccttaacaactctacttacagctcaagcatccctcaaaactaaacctatccacacaatcataaggaaacgagcccctccctgcaacaatgacttctgtcgactgggttgtgtatgttccagtctagctttggagaagcgccaacctgctcactgccgccgaccagactgcatgtttggttgtacttgtttgaaaagaaaagttgtacttgttaaaggaggatccaaaactaagcattttcagaggaaggctgctcatcgagatccagtattttatgatactctgggagaggaggcaagggaggaggaagaaggaatcagggaggaggaggaacaattgaaagagaaaaagaagagaaagaagctagaatacagtgagtattaattgagagttaaaactgtgccatatcagtttttggaaaagtatggttattttagaataatacaacctaccttaatcccgatcaattatccaataagagctttgagacttcttattatccttacatgctctttctgactggctatctgagatgcacacaaacacacaccttttttaagttgaattgttctctgagaattgcttttttgtgctaaatttaaatcatactgttacttggttttctagaatgcccttgatctttgagtttcttccattttctggattgtgcgcatgtgcacacacacacaggtagacacacgtacgttccttggaaagactatagatgatccatataatgcatcatgttttctaaaggagaagtttgcaaaaagaccc

SEQ ID NO: 462209 - DNA, 680 bp, Homo sapiens
ttctatgactgaattctggaactgaagatcatcagatgttggaactaaatgcagattattttattcgttattaatccttcataaagacttttatttatgtattgtcctattctttttttattaattaccctacaatagggaccagcaaactttttctgtaaagggccaaatagtaaatatttaaggctttgcagaccatacactctctataggagttactgaactctgctgttgtagttcttcagacggtatgtgtatgaattagcctggttgcgttccagtgaaactttatgacacaggctggatttggcccatgggtctcaacctttgttaatctttgcgttagaacattatgtataatttatattgaaaataaatccatccttgatagttttgcccataattgtctgtactaagcattagaatggcagattgtttagagccctggttagattcatgttctgtcctttgaatctgcattagtcctgtgctgttagtacttaaaatcagagagtaatgcagtccagtatatgaccataagttggtggtggtgtagggggatggtttagtggaattacaattttctcctttgactttaggcatccctcaaaactaaacctatccacacaatcataaggaaacgagcccctccctgcaacaatgacttctgtcgactgggt

SEQ ID NO: 462210 - DNA, 408 bp, Homo sapiens
cctggaaaaagaggaaggccacgaaaattgaaactctgtaaggcaggacgaccacctaagaacacaggaaagtctttaatttctacaaagaatacacctgtaagccctgggagtacctttccagatgtgaagcctgatctggaagatgtggatggtgttctctttgtttcctttgaatcaaaggtaagattgtaattttcaggattctttaaggctaattagtcatacttgaattgtatactggcttgtaagtaactcgatttacaatctagttttgtgatatctatttgtgagggtgtatggggggtggagttgggagggaagtgtctccaaaatgtttggtttagttaataggaataacttaagatacttcatttgaatagacttaaaaaagtatgtcttgcttag

SEQ ID NO: 462211 - DNA, 11677 bp, Homo sapiens
caacaatacactggaccaagaagggcatatcatcttgcactctatgcatcgttacctgccgaggcttcatttggtgcctgcagaaaaggctgtggaggtgatacaattaaatggccctggtgtccacacttttaccttcccacagactgaattctttgcagtaacagcttatcagaacattcagattactcagctgaaaatagattacaatccatttgccaaaggctttcgggatgatgggctgaataataatccccagagagatggaaaacaaaagaacagctctgaccaagaagggaataatatttccagttcttctggtcatcgggtccgtcttacagaaggtcaggggtcagagatacaaccaggtgatttggatcctttgtcaaggggtcatgaaacatcaggcaagggtttggagaagacttcccttaatataaaacgagactttcttggtttcatggatactgattcagcacttagtgaagttcctcaattgaagcaagagatttctgaatgtcttattgccagcagttttgaagatgactcccgtgtagcctcaccgttagaccagaacggaagcttcaatgttgttattaaagaggaacctctagatgattatgactacgaacttggtgagtgcccagaaggggtcactgtgaaacaggaagagacagatgaagagacggatgtatactcaaatagtgatgatgatcctatactagagaaacagctaaagaggcacaataaagttgacaacccagaagctgaccatctatcttctaaatggcttccaagcagcccatcaggtgttgctaaagctaaaatgttcaaattagacactggaaagatgccagtagtctatctggagccctgtgctgtcaccagaagcacagttaagatttctgaactccccgataacatgctttccacatctcgaaaggataaatcttctatgttggcagaattggaatatttgcctacatacattgaaaattccaatgagactgccttctgcttaggcaaggaatcagaaaatggtcttagaaaacattcaccagatctcagagtggtacaaaaatatcccttactgaaagagcctcagtggaaatatcctgatatatctgacagcattagcacagaaagaatactcgacgattcaaaggattcagttggagactcactttcaggaaaagaggacttgggcagaaagagaacaactatgcttaagattgcaacagccgcaaaggtagtgaatgctaatcagaatgcctctccaaatgtccctggaaaaagaggaaggccacgaaaattgaaactctgtaaggcaggacgaccacctaagaacacaggaaagtctttaatttctacaaagaatacacctgtaagccctgggagtacctttccagatgtgaagcctgatctggaagatgtggatggtgttctctttgtttcctttgaatcaaaggaagctctagacattcatgcagttgatgggacaacagaagaatcttctagtctccaggcatcaaccacaaatgactcaggttacagagcaagaatttcccagttggaaaaggaattgatagaagatttgaagtctttgcggcacaagcaggtgatacatcctggtcttcaagaagtgggcttaaaattgaattcagtggatccaacaatgagcattgatcttaaatacttgggagtacagttacctttggctccagctactagctttcctttttggaaccttacaggaaccaaccctgcctctcctgatgcgggatttccctttgtttctaggacagggaaaaccaatgatttcactaagatcaagggatggaggggaaaatttcatagtgcttctgcatctaggaatgaaggtggaaattcagaaagttcactgaaaaatcgttctgctttctgtagtgataagctagatgaatacttggaaaatgaaggcaagctgatggaaacaagcatgggtttttcttctaatgctcccacatctcctgtggtgtaccagcttcccactaagagtaccagttatgtacgaacacttgatagtgtactaaagaagcaatctactatttccccttctacctcttattctttgaaacctcattctgtaccccctgtctctcgaaaggcaaagtctcaaaacagacaggcaactttcagtggccgaactaaatcatcttataaatccattttaccataccctgtttcaccaaagcagaaatactctcatgtgattctaggagataaggttaccaagaattcttcaggcatcatctcagaaaatcaggcgaataactttgttgtgccaactttggatgaaaatatatttccaaagcagattagtttgcggcaggcacagcagcagcagcaacagcaacagggaagtcgccctccaggcttgtctaaatctcaggtgaagctaatggacctggaagactgtgcactttgggaaggaaaaccaaggacatacatcacagaagagcgagcagatgtatccttaacaactctacttacagctcaagcatccctcaaaactaaacctatccacacaatcataaggaaacgagcccctccctgcaacaatgacttctgtcgactgggttgtgtatgttccagtctagctttggagaagcgccaacctgctcactgccgccgaccagactgcatgtttggttgtacttgtttgaaaagaaaagttgtacttgttaaaggaggatccaaaactaagcattttcagaggaaggctgctcatcgagatccagtattttatgatactctgggagaggaggcaagggaggaggaagaaggaatcagggaggaggaggaacaattgaaagagaaaaagaagagaaagaagctagaatacactatatgtgagacagagcctgaacagcctgttcgacattacccattatgggtaaaagtagaaggtgaagtagatccagaaccagtttatatccccacgccttctgtcattgagcctatgaaaccattgttattgcctcagccagaagttttatctcctactgtgaagggcaaactgctcactggaattaaatctccacggtcatatactcccaaacccaatcctgtgattcgggaagaggacaaagatccagtctacttgtactttgaaagtatgatgacttgtgctcgagttcgagtatatgagcgaaaaaaagaggaccagagacaaccatcttcctcctcctccccatctccatcatttcagcagcaaacttcatgtcattctagccctgagaaccataataatgcaaagctgatggctgggggctccaccttcgcttgtactgccacctcaacatcagtggtgactccccggaaaaccactaaagaaaagagctggaagtcttcctgcaatgaaggagaatcctcttctacttcttatatgcatcagaggtcacctggtggtcccaccaaactgattgagatcatctcagactgcaactgggaggaagatcggaacaagattttgagcatcttatcccagcacatcaatagcaacatgccacaatcacttaaggtgggcagcttcatcattgagttggcttctcagcgaaagagccggggtgagaagaaccctcctgtttattcttctcgtgtgaaaatctctatgccatcatgtcaagaccaagatgatatggctgagaaatctggatcagagactcctgatggtccattgtcccctgggaaaatggaggatatctctcctgtgcagacagatgccctggattcagtgagggagagattacatggaggcaaaggtctgcctttttatgcagggctttctcctgcagggaagcttgtggcctataaacgtaaacccagttcaagtacatctgggcttatccaggttaatggtaagagttacccgcaggctaagttgctattgggacagatgggggcattgcatccagccaataggctagctgcttatatcacaggcaggttgcgaccctcagtcctggacctctcaaccctcagtactgtcatctccaaggtagcatccaatgccaaggtggctgcatccaggaaaccacgtaccctgttgccttcaacatccaattccaaaatggcatcctcctctggcactgcaacaaatcgccctgggaagaatctgaaggcgtttgtcccagcaaaacggccaattgtaatggtcgtcacacctgtggtttcttctgagccagttcaggtgtgcagccctgtgactgctgctgtcactactaccacccctcaagtgtttttagaaaatactactgctgtgacacctatgactgctatttctgacgtggaaactaaagaaactacttattcttctggtgccaccactacaggggttgttgaggtctctgaaactaataccagcacctctgtaacatctacccagtctacagccactgtgaaccttaccaaaaccactgggataactacccctgtggcttcagttgcttttcctaagtctttggtagcatctccttcaaccataactcttcctgttgcttccactgcttccacctccttagtcgtggtgactgcagctgcatcttcctccatggtgaccacaccaacttcatctctgggctctgttcctattatactctcaggaattaatgggagtccaccagtgagccagagaccagaaaatgctgctcaaattccagtggctactccacaggtctctcctaacacagtgaaacgtgctggacctcgattgttgttgattccagtgcagcagggttctcctactcttagacctgtctcaaacacacaacttcagggacatcggatggtcttgcagcctgttaggagtccaagtggaatgaacttattcaggcaccctaatgggcagattgtccagcttctacctttgcatcagcttcgaggctctaatacccagcccaacttacagcctgtcatgtttcggaacccagggtctgtgatgggaatccggttacctgctccttccaaaccctctgagactccgccatcttccacttcgtcctctgctttctctgtcatgaatcctgtaattcaagctgttgggtcttcttcagcagtgaatgttatcactcaggcaccatcattgctttcctctggagctagttttgtgtctcaggctggtacattgaccctgaggatttctcctcctgaaccacaaagctttgcaagtaaaacaggctctgaaaccaaaataacttatagctcaggaggacagcctgttggtacagccagtcttattcctctccagtctggtagttttgccttgttacagctcccaggacaaaagcctgttcctagctccattcttcagcatgttgcttcccttcagatgaagagagaatctcagaatccagaccagaaagatgaaacaaactcaataaaaagagagcaagaaacgaagaaggttctacagtcagaaggagaggctgtagaccctgaggctaatgtaataaaacaaaactcaggagctgctacctcagaagaaactctgaatgattccttggaagataggggtgatcatttggatgaagaatgccttccagaagaaggttgtgcaactgtcaaaccatctgagcattcctgtatcactgggtcacatacagatcaagattataaagatgttaatgaagaatatggggctaggaatcgtaagagttccaaagaaaaagtggctgttctggaagttaggaccatttctgaaaaagccagtaataagacagtccaaaatttaagtaaagtacagcatcaaaaacttggtgatgtgaaggtggaacagcagaaaggatttgacaatccagaagaaaactcaagtgaatttccagtcacctttaaggaagaaagtaaatttgaattgtcaggaagcaaagttatggagcagcaatctaatctacagccagaggccaaagagaaggaatgtggagactctctggagaaagacagggaaagatggagaaaacatctgaagggccccttaaccaggaaatgtgttggagcttcacaggaatgtaagaaagaggcagacgagcagttaattaaagaaacaaagacatgtcaggaaaattcagatgtgtttcagcaagaacaaggcatctctgacttacttggaaaaagtggaattactgaagatgccagagttttgaaaactgaatgtgattcttggagtaggatttctaatccttcagccttctccattgttcctaggagagctgcaaaaagcagcagagggaatggacattttcagggtcacttactgctacctggagaacagatacaaccaaagcaagagaagaagggtgggagaagcagtgctgacttcactgttttggatttggaagaagatgatgaagatgataatgagaaaactgatgattctattgatgaaattgtggatgttgtttctgactaccagagtgaggaggttgatgatgtagaaaagaataactgtgtagaatacattgaggatgatgaggagcacgtggacattgagactgtagaagagctctcagaggaaattaatgttgctcacctgaagaccacagcggcccacacacagtcattcaaacagccgtcctgtactcacatctctgcagatgaaaaagcagctgaaaggagtcgaaaggctccaccaattcctctaaaactgaagcctgattactggagtgacaaactacagaaagaagcagaagcgtttgcttattatcgccggacacacactgccaatgagcggcggcggcgtggtgaaatgagggatctctttgagaaattaaagatcacattgggattacttcattcttccaaggtttccaaaagtctcattcttactcgagccttcagtgaaattcagggactaacagatcaggcagacaaattgataggacagaaaaatctcctgactcgaaaacggaatattctgatacggaaagtatcgtctctttcaggtaagacagaagaagtggtcctgaagaagctagagtatatttatgcaaaacagcaagcactagaggcacaaaaaagaaaaaagaagatgggatcagatgagtttgacatatctcccagaattagcaaacagcaggaaggatcttctgcatcatctgtagatcttggacagatgtttataaataacaggagggggaaacctttgattctttccagaaaaaaagaccaggccacagaaaatacctcacccttgaacactccacacacctctgccaaccttgtgatgactccgcaagggcaattgctcaccctaaaaggtcccctattctcaggaccagtggtagctgtttctcctgatctcttagaatctgatcttaagcctcaagttgccggtagtgctgtggctctaccagaaaatgacgacttatttatgatgccacgaattgttaatgtgacatcattggccacagagggaggtttggtagatatgggtggcagcaaatatcctcatgaagttcctgatagcaagccatctgaccatctgaaagacaccgtcaggaatgaagataattccttagaggataagggtagaatctcttccagaggaaacagagatggcagagtgacgttgggtccaacgcaggtttttctggcaaacaaagattctggttatccacaaatagttgacgtttccaatatgcagaaagcacaagagttcttacctaaaaagatttctggtgatatgagagggattcagtataaatggaaagagagtgaatcaagaggggagagagtgaagtcaaaggattcttcatttcataaattaaagatgaaagatctcaaggactcaagcatagagatggaactgaggaaagtaacatcagctatagaggaagcagctcttgattccagtgaactgctgactaacatggaagatgaggatgatactgatgagacactgacttcactgctcaatgaaattgcctttcttaatcaacaactaaatgatgactctgttggcctggctgaactacccagctctatggatacagagttcccaggggatgctcggcgggcttttattagtaaggttcctcctggaagcagagcaactttccaggttgagcacttgggaactggtttgaaagagttgcctgatgttcaaggggagagtgactctatcagtcccctcctcttgcacttggaagacgatgacttttctgagaatgaaaaacaacttgcagaaccagcctctgagccagatgtccttaagattgttattgactctgaaataaaggattccctcctttccaacaagaaagctattgatggagggaagaatacttctggcctccctgcagagcccgaaagtgtgtcctcaccccccaccctacacatgaagactggcttggagaacagcaacagcacagacactttgtggaggcctatgccaaagttggcccctctaggtttaaaagtagctaatccttccagtgatgcagatggtcagagtctcaaggtgatgccttgtttggcacctatagctgccaaagttgggtcagttggacacaaaatgaacttaacagggaatgaccaggaaggccgggaaagcaaggtgatgcctacattggcacctgttgtggctaaattgggcaactcgggggcctcaccaagttctgcagggaaatgaacttacttgtccttaagcagaagccaggctgtgaggggaaatagatctcacctcctttctctgcaggcatctgtttgtttgtgtcttagaacttggatccttgacttcaatgatgcagtggataatgatgggagaaagggggtagggtgctgaccctggtataagaagtactctgaaattctgatcatgttaaaatgtgttacctcacttgtggtgctgggtcccctcatcctctctaagaagatgtgatccattactgaacatgaggtgcccctcttacccaaggaatttataacatgactctggctccacagtggtttctagttcttcccccacaagcgaaagagctgtttgcaactttggagttgctgtagactgaactgtagcttgtagctgttgaattaagtccaaaatctaaggaatgcgatggacttgtgcaaagggatccagaagagacactttttagttgatgtttcaagaatagggagagagaggatgggtaccatggaataccaaagtgaaggactttgtgtcattcagtaaaattttcttttttcatatcctaagtagctcccattccctcaccttttcaatcagaattaacaaattcaagccttcagtaaagtagggatgcttttaacttttattattaattattttgagatcttaaaaaaatagtagttctcccttattatttttgtgggcattgaaaagctcatttcacagtaccagagatttttactgggagtatatattttggaggtaggcatagagggagccctaccccttccacaaattacgttactcaagagacagctaaaataaaatgcattatctccccagaccagagacagtggccaaaataaaaaatcatggggctggaaatttcccaaatcaaaccagcctcctggtgcttgaaggtttcattcactattacctgcacaggatgtaaagaaaagtcacagtaggcactctttaccagggaaataaggcagtatttgaatcacaagatatattttttatctgcaaccatggatccaatgatctgtagagctttttcactcattaactgtcaggatatgaaggactgacagtctgtaaagatatttatatttttgtatagttgttttcatagatttctcaaaggctgaagttttcaacctagaagatgagatttgtattgagtatagaaatgatgtttcctatctagtttgtaaataatcatggtgcacttgaggggtctcttggaaactcctagggggtcaagaatcactattctgaaactgtatagactgggatttagctgctgcattttgcctttcttaaataattatattttggaatgtaacccctgttctgtcttcattgacaggatttgcttgtgttgttaaaacactaacacaagagcttccagtgcctgggccgtgcctaggtgatgctatttcttctatatctcctgtcttctttatcccaaatcccactcagcatatcttcagacctaggttgtaagaccaactttggattggatctagccagtgaattattatttccatggttggttccctttctgttaactctggtaatcaacagattgaaaacggtggaagaacttctgaaaattgcagtgggagcaaattcttgttggttttgtgctgcttgcctttctagatctgctcatcagcacttaaccttccctcctctaaaggttactaaagaagcctgaagtaggtaaagagtgctcctcagcttcttatccttccactctttacccagcagatttcattcaatgccttagccaaggagtccagcacctgtctcccctgctaataattgtccttagagatgctagtactttaatccaggtatagcagtttcccgttattttcttgcttgtcgttcccctacatttcctcctgatttcccaagactctctttgtggcttttgagggtcagccaaggagcaggcaagtgagtgaacaatcctcaggaaaagaaggaccattttagcttaacacttccttttttttttttttttttttaagaagaatataggtaaacaggtaatgattcttgattggagataccatttgactcttgatgagagttgtacgaagatggaaatgagggatgattccaggcgttttagggggaaggctgcagataccattctaacccccaagatactgtgttctcaagacctcttagaactaggtgttgtcagggataatttgaggagggcttagtcttcagaacaatcctgcagtcttgacagaaatctaaaatctccaaaaactcctaccctttaaccttaccctagggggaactgatctatgaatattacatgtgtgattatgaaaggtgaagttgagtgagaggagttgaggaacgtggaagacagtgagctctcaccctaacactataagaagcatgatctcaatagaccaataattcacctttttatacatctgtaaataaatggaatgtttttaagaatataattatgtcagatttagcattttcttttatatattaaatatatatatctttccttttctgctttcgaaaagtgactatttttttagaaatctaagaacagaagtttggtgattgaaaggtagaatatataaacctgaaataaagcagttaaaacaattaaagcagaacttggtgttgggaggtttgtgccaacttggagtggagaattctaattccctaagacatatttgagagaggtgccactgaagtggttttatcataggaatcctttccttttctctaagtttctgatatgccatttgggggaggttttcgatgttctaatccttgtagcatgttttacatggaggcttcaaaattgtgtgcaacctgatggcaagtatttgttttagaagtcattctaaaatcattctggtgtcagtatgagcaaggcagttcacctgttaaccttggggagtaaaggtacacaaacacagtcttttagtggtaaaggacagtaggtgttcttaagggaag

SEQ ID NO: 462212 - DNA, 2430 bp, Homo sapiens
ggggagggcgaaggccctgctctcctcggttcccggctccaggcggcgagctgaggttgggagcctggctttcccctccgagagggttcaggtgcctctgccatagcttctgtcgcctgtgctgtgacccgcactggtcgtgggagtcacctgaaaggcaagaaatgggagacaggaattgcagggagaatcatgcatcaatgcctggaaaggtcatcatggaaacctcttgggaatagagtataggcttcccagtgatgttagtcttatccatcctcctctatacatgtgagatgtttcaggattcagtggcctttgaggatgtggctgtgaccttcacccaagaggagtgggctttgctggatccttcccagaaaaatctctgtagagatgtgatgcaagaaaccttcaggaacctggcctctatagggaaaaaatggaaaccccagaacatatatgtagagtacgaaaatctaaggagaaacctaagaattgtgggagagagactctttgaaagtaaagaaggtcatcagcatggagaaattttgacccaggttccagatgacatgctgaagaaaacaactactggagtaaaatcatgcgaaagcagtgtgtatggagaagtaggcagtgctcattcatctcttaataggcacatcagagatgacactggacacaaggcatatgagtatcaagaatatggacagaaaccatataaatgtcaaatactgtaaaaaacctttcaactgtctctcctctgttcagacacatgaaagggctcatagtggaaggaaactctatgtttgtgaggaatgcggaaaaacatttatttcccattcaaaccttcaaagacacaggataatgcaccgtggagatggaccttataagtgtaaattttgtgggaaagccttgatgtttctcagtttgtatcttatccacaaacgaactcacactggagagaaaccatatcaatgtaaacagtgtggtaaagcctttagtcattctagtagccttcgaatacatgaaagaactcacactggggagaagccttataaatgtaatgaatgtgggaaagcattccatagttccacatgccttcatgctcataaaagaactcacactggggagaagccatatgaatgtaaacagtgtgggaaagccttcagctcttcccattcctttcaaatacatgaaagaactcacacgggggagaagccatatgaatgtaaggaatgtggaaaagcattcaagtgtcccagttctgttcgcagacatgaaagaacccactctaggaaaaaaccctatgaatgtaaacattgtgggaaagtattatcttatcttaccagctttcaaaaccacttgggaatgcacactggagagatatctcataaatgtaagatatgtgggaaagccttttattctcccagttcacttcaaacacatgaaaaaactcacactggagagaaaccctataaatgcaaccaatgtggtaaagcctttaattcttccagttccttccgatatcatgaaagaactcacactggagagaaaccttacgagtgtaagcaatgtgggaaagccttcagatctgcctcactccttcaaacacatggtaggactcacacgggagagaaaccctatgcatgtaaggaatgtggaaaaccatttagtaatttctctttctttcaaatacatgaaaggatgcacagagaagagaagccgtatgaatgtaagggttatgggaaaacattcagtttgcccagtttatttcatagacatgaaaggactcacactggaggaaaaacctatgaatgcaagcagtgtggcagatccttcaactgttcgagctcctttcgatatcatggaaggactcacactggagagaaaccctatgaatgcaagcaatgtggaaaagccttcagatctgcctcacagcttcaaattcatggaaggactcacactggagagaaaccttatgaatgtaagcagtgtgggaaagcctttggatctgcctcacaccttcaaatgcatggaaggactcacactggagagaaaccctatgaatgtaagcagtgtgggaagtcttttggatgtgcctcgcgacttcaaatgcatggaaggactcacactggagagaaaccgtataaatgtaagcaatgtgggaaagcttttggatgtccctcaaaccttcgaaggcatggaaggactcacactggagagaaaccctataaatgtaaccaatgtggtaaagtctttagatgttcttcacaacttcaagtgcatggaagggctcactgcatagacaccccataaccccaggctttaggaggctgaggtggggggactgcttaagcccaggagttcaagaccagcctgggcaacatagtgagactctgttataaaaattaaataaataaataaaaagacaac

SEQ ID NO: 462213 - DNA, 2401 bp, Homo sapiens
ggggagggcgaaggccctgctctcctcggttcccggctccaggcggcgagctgaggttgggagcctggctttcccctccgagagggttcaggtgcctctgccatagcttctgtcgcctgtgctgtgacccgcactggtcgtgggagtcacctgaaaggcaagaaatgggagacaggaattgcagggagaatcatgcatcaatgcctggaaaggtttctggaagcctggaagttatgaagtccatgttcaaggtgctgacagatctggtgcctggattcagtggcctttgaggatgtggctgtgaccttcacccaagaggagtgggctttgctggatccttcccagaaaaatctctgtagagatgtgatgcaagaaaccttcaggaacctggcctctatagggaaaaaatggaaaccccagaacatatatgtagagtacgaaaatctaaggagaaacctaagaattgtgggagagagactctttgaaagtaaagaaggtcatcagcatggagaaattttgacccaggttccagatgacatgctgaagaaaacaactactggagtaaaatcatgcgaaagcagtgtgtatggagaagtaggcagtgctcattcatctcttaataggcacatcagagatgacactggacacaaggcatatgagtatcaagaatatggacagaaaccatataaatgtcaaatactgtaaaaaacctttcaactgtctctcctctgttcagacacatgaaagggctcatagtggaaggaaactctatgtttgtgaggaatgcggaaaaacatttatttcccattcaaaccttcaaagacacaggataatgcaccgtggagatggaccttataagtgtaaattttgtgggaaagccttgatgtttctcagtttgtatcttatccacaaacgaactcacactggagagaaaccatatcaatgtaaacagtgtggtaaagcctttagtcattctagtagccttcgaatacatgaaagaactcacactggggagaagccttataaatgtaatgaatgtgggaaagcattccatagttccacatgccttcatgctcataaaagaactcacactggggagaagccatatgaatgtaaacagtgtgggaaagccttcagctcttcccattcctttcaaatacatgaaagaactcacacgggggagaagccatatgaatgtaaggaatgtggaaaagcattcaagtgtcccagttctgttcgcagacatgaaagaacccactctaggaaaaaaccctatgaatgtaaacattgtgggaaagtattatcttatcttaccagctttcaaaaccacttgggaatgcacactggagagatatctcataaatgtaagatatgtgggaaagccttttattctcccagttcacttcaaacacatgaaaaaactcacactggagagaaaccctataaatgcaaccaatgtggtaaagcctttaattcttccagttccttccgatatcatgaaagaactcacactggagagaaaccttacgagtgtaagcaatgtgggaaagccttcagatctgcctcactccttcaaacacatggtaggactcacacgggagagaaaccctatgcatgtaaggaatgtggaaaaccatttagtaatttctctttctttcaaatacatgaaaggatgcacagagaagagaagccgtatgaatgtaagggttatgggaaaacattcagtttgcccagtttatttcatagacatgaaaggactcacactggaggaaaaacctatgaatgcaagcagtgtggcagatccttcaactgttcgagctcctttcgatatcatggaaggactcacactggagagaaaccctatgaatgcaagcaatgtggaaaagccttcagatctgcctcacagcttcaaattcatggaaggactcacactggagagaaaccttatgaatgtaagcagtgtgggaaagcctttggatctgcctcacaccttcaaatgcatggaaggactcacactggagagaaaccctatgaatgtaagcagtgtgggaagtcttttggatgtgcctcgcgacttcaaatgcatggaaggactcacactggagagaaaccgtataaatgtaagcaatgtgggaaagcttttggatgtccctcaaaccttcgaaggcatggaaggactcacactggagagaaaccctataaatgtaaccaatgtggtaaagtctttagatgttcttcacaacttcaagtgcatggaagggctcactgcatagacaccccataaccccaggctttaggaggctgaggtggggggactgcttaagcccaggagttcaagaccagcctgggcaacatagtgagactctgttataaaaattaaataaataaataaaaagacaac

SEQ ID NO: 462214 - DNA, 2342 bp, Homo sapiens
ggggagggcgaaggccctgctctcctcggttcccggctccaggcggcgagctgaggttgggagcctggctttcccctccgagagggttcaggtgcctctgccatagcttctgtcgcctgtgctgtgacccgcactggtcgtgggagtcacctgaaaggcaagaaatgggagacaggaattgcagggagaatcatgcatcaatgcctggaaaggtgattcagtggcctttgaggatgtggctgtgaccttcacccaagaggagtgggctttgctggatccttcccagaaaaatctctgtagagatgtgatgcaagaaaccttcaggaacctggcctctatagggaaaaaatggaaaccccagaacatatatgtagagtacgaaaatctaaggagaaacctaagaattgtgggagagagactctttgaaagtaaagaaggtcatcagcatggagaaattttgacccaggttccagatgacatgctgaagaaaacaactactggagtaaaatcatgcgaaagcagtgtgtatggagaagtaggcagtgctcattcatctcttaataggcacatcagagatgacactggacacaaggcatatgagtatcaagaatatggacagaaaccatataaatgtcaaatactgtaaaaaacctttcaactgtctctcctctgttcagacacatgaaagggctcatagtggaaggaaactctatgtttgtgaggaatgcggaaaaacatttatttcccattcaaaccttcaaagacacaggataatgcaccgtggagatggaccttataagtgtaaattttgtgggaaagccttgatgtttctcagtttgtatcttatccacaaacgaactcacactggagagaaaccatatcaatgtaaacagtgtggtaaagcctttagtcattctagtagccttcgaatacatgaaagaactcacactggggagaagccttataaatgtaatgaatgtgggaaagcattccatagttccacatgccttcatgctcataaaagaactcacactggggagaagccatatgaatgtaaacagtgtgggaaagccttcagctcttcccattcctttcaaatacatgaaagaactcacacgggggagaagccatatgaatgtaaggaatgtggaaaagcattcaagtgtcccagttctgttcgcagacatgaaagaacccactctaggaaaaaaccctatgaatgtaaacattgtgggaaagtattatcttatcttaccagctttcaaaaccacttgggaatgcacactggagagatatctcataaatgtaagatatgtgggaaagccttttattctcccagttcacttcaaacacatgaaaaaactcacactggagagaaaccctataaatgcaaccaatgtggtaaagcctttaattcttccagttccttccgatatcatgaaagaactcacactggagagaaaccttacgagtgtaagcaatgtgggaaagccttcagatctgcctcactccttcaaacacatggtaggactcacacgggagagaaaccctatgcatgtaaggaatgtggaaaaccatttagtaatttctctttctttcaaatacatgaaaggatgcacagagaagagaagccgtatgaatgtaagggttatgggaaaacattcagtttgcccagtttatttcatagacatgaaaggactcacactggaggaaaaacctatgaatgcaagcagtgtggcagatccttcaactgttcgagctcctttcgatatcatggaaggactcacactggagagaaaccctatgaatgcaagcaatgtggaaaagccttcagatctgcctcacagcttcaaattcatggaaggactcacactggagagaaaccttatgaatgtaagcagtgtgggaaagcctttggatctgcctcacaccttcaaatgcatggaaggactcacactggagagaaaccctatgaatgtaagcagtgtgggaagtcttttggatgtgcctcgcgacttcaaatgcatggaaggactcacactggagagaaaccgtataaatgtaagcaatgtgggaaagcttttggatgtccctcaaaccttcgaaggcatggaaggactcacactggagagaaaccctataaatgtaaccaatgtggtaaagtctttagatgttcttcacaacttcaagtgcatggaagggctcactgcatagacaccccataaccccaggctttaggaggctgaggtggggggactgcttaagcccaggagttcaagaccagcctgggcaacatagtgagactctgttataaaaattaaataaataaataaaaagacaac

SEQ ID NO: 462215 - DNA, 543 bp, Homo sapiens
aaaaaccaggctcaccactcactcacccattcccaccgggagccaggcactgggaatacgaaggtgaaggagaggtgcccacgtgcctagaatgctccggagcgagttctctaaagagttccaggtcccacagcctctgccacgctgcctacctgtctccagcaccgggaagctgcctgtcctcacttcctcccagccagaacttgtgaaatgcagtcctggtgggttcgtttatcctcagcatcctgcacaatctgctaggctgacagtgtggcagcttgaagccgccaaaccaaagacgtcaggtcactctggtaggaacaatgtctagagataaggcgtggccagctcaggcctggtcctccacagagttgagaggctaaataaagcctccaaacatctggttccaggccaagcaaagacacaatctctccagtagcactggcctccaagacaacaagcagggctggctctctggctgcgactcaaggctatagggcatgcagccagagagtctccgtcgaactggtacgagctcgatac

SEQ ID NO: 462216 - DNA, 3215 bp, Homo sapiens
aaaaaccaggctcaccactcactcacccattcccaccgggagccaggcactgggaatacgaaggtgaaggagaggtgcccacgtgcctagaatgctccggagcgagttctctaaagagttccaggtcccacagcctctgccacgctgcctacctgtctccagcaccgggaagctgcctgtcctcacttcctcccagccagaacttgtgaaatgcagtcctggtgggttcgtttatcctcagcatcctgcacaatctgctaggctgacagtgtggcagcttgaagccgccaaaccaaagacgtcaggtcactctggtaggaacaatgtctagagataaggcgtggccagctcaggcctggtcctccacagagttgagaggctaaataaagcctccaaacatctggttccaggccaagcaaagacacaatctctccagtagcactggcctccaagacaacaagcagggctggctctctggctgcgactcaaggctatagggcatgcagcgagggtctgaggcttcacagacggtagaagtcagttcacgggccacagctggctgccaggactgacccagtgcttttccttcaaggaagctcagtgacctctggctcttgccctttgcaaacaccctcttgcctcagctcggagacaccaagtccctgtctcctggctgggaagagggtggcccctctcttgcggttgccgtggaaacgggggattcctgcccacccgctccagggaggcggcgaggctcgggctgacaggcgcgccaggtgactcctggcacagccgccggagccctgagctgggctggcctggagggggcggccaccactgccccgaggacaccggtcggggaggcaggcccgcccctctcccccgggaacagctgccggggccgggaccctccgccgagggcttccacccggccgcgcgctctgcgcccgcatcagccatttctcccgcgcaccttcggcagcgccggcccggccccccccagcgcccagggcgtgtcacgctcccaccttcacagccaccaggaagggggaccctgagccggggctggtcggggttcccagctcgcactcctccaggagaaacacatcttcgtcctccagaaccttgtccagcaagcctatcgcctcctcttcctcctccatggcagccggagcccgcggagggcagacaggaagcggggtccacgcagcggcggcgggaggagggaggagggaggaggcgggcgggagggggggcaggtctacacccgcgcgcccggcctggggctcccgacccgggactgcatcccggacctagtccagcccgctccgccgccgccgccgccgcctcgcgcgtcctcgcccggcgaaagggggagcaaggcccgggcagcccctgacgccgtgcccggcccgtggcggaggcgaacccgccgcacagcagcccagcgccctcctccgtgtcccgcccggccccgcagggcccgcccttcccgggctccggggctcgggctcgcgctcgctccgaacacacaggaaacgcgcgtcgcgaggtggagccgcccgtcctctggggttgcggggccgcggctggcggaggcttctgcggcggaggaggagcgaggaggccgcggccgggccggggtggggtggagcggggaggccgcttcccagacgcatcttcattccccgcgcgcggccgagccaggagcccggcgagcaggggcgacccccagagccaccccggagtccccatgcgccggagcccccttccggaggggaggccccggcccgcccagaagccacagccgcgtcccgccgccgctggaggagtcaggctttgcaacagacaggcctgacctgcccccaggcaggagcgcggcgccaccactgtcctgcacaggagcggtgggcgtcccactcacagggaccaggatccccctcctccaagcagcccccctcctccgagcagtccccccactcacggacgctactgacaccagcacccccacctcctctgagcagcccccccactcacagaccagcccccctactcacaggcgctgcagagaccaggacccccacctcctctgagcagcctcccacctactcacaggcactgctgagaccagcacccccacctcctccaagcagcccccccagccaccccaccgcagggagccatcctgcaaggggagtgcacacagaacccaggacaggcaccatctccggccctgcccactcccagccagcttcccctggcttctccaatggttgcagaacccccaactgtgcagggagtgaggccacattctggtccccctggccctagttcccagatgcacatacacctccttccatgggaggaggagtccagaggaggccctgggaaaagctcttttacaacccaacgatggagcaaaggttgcaaacggcacccatgagggtgcggccacaattcctcatttggtgcgggcgggtgaggctgtggcgagggcttgggaacgaccaggcctggcattccccagggcacaagtatgccagctcagggcctggtgacacgaagaagggcctaaaaccccacaggcccctgctgtgttccttcctccactcaagaggacatgaggtgcccttggaagtctgccaggatatcctcgtccccgttccccacacctctacacggcatgagaagcagcccttctcccttccaggccagtggtggcccgctgccagctgcagccctggtgtcttgctgggctctaggtctagcacctgccccggccactgggtctcctcacttggaagcccagccacggcccttccactccacacatctggaccaaaggacccttcctccttctgaaacagcttccccttccgggtttccacttctgttagtgcggccgccatcttacgagtcttccttccctcaacccccacatcccttttaccaagtccttcgggagcctcccgtgactccccgttggctgcgtcagatgtgcccgctggtgccctcagagcccactctacgttcccaatcgtggcacttctattttaacttctttattttcctgttacatcactaacaattctaactctgtagacacacataataaagaaagagaaagtctcctctggttccctctgacagagggagcctctaagagttagttatacatttttccttatttgtgtccacgaataaactatacatat

SEQ ID NO: 462217 - DNA, 2048 bp, Homo sapiens
aggactggttaggaggggcacaggaatgaagcaccccgacagtcaccccgccctctggtgtcctcccaccccgagcccgatcttcccccttcacgcctgccccgggccaatagcctcctaactgcgtcctctctgattgcgtgtgtcgtgctcattacgccctatccgtcgtttcttcgctccacaaacgtttactgagcgccttcaacttgccaggcactaattagactagcgcagagaaacggggataagtactgatgagggtcccagccctcagcgatcggatttcagagggggagataaaggactgcccagaagggtggtgagtggagtagttgatataaacaacgaggtgcgatgaaatacacaggagggctgctaatcacatatggggtgggtgccgagggcccttaattaagggaggcttcctggacgggtgacacccaagcggagtcctgacgacccgcgtcagaagtagtcaggcgaggaggagggtaaaggaatccacgtcccaagcagagaagcagctttccctacacagcacaggacacggtccgcgcacagaagccgcaggagacgcaggcacaggggctggggagaatccttgctgggccctcgccgtccatgcgccgcctccctctgcccggtgtctggtgtcagcctcctgcctggcagaggaactccagcccctgctccccgaagctcctccaggccttctgcttccctgactcggaatgggcccgctgtccagtgggtacaaggctggtctccccgcccactggtgacgacgtaaagatccagctcagcctggtttcccctggtgatgatatcttgcgactcgtctttctccaggaaaacagggaccgctctccgcctacaggtctcttccacagacctatcttgttttcaccccctgtctcttttggttcagtcttttcgctcatacaaacaaggaagtcgcccctagcccagccgcggctccttagctggaggcgggcccgggggtggagtcaaccgcggtggccacgcctcctgggaaagggcagggcatgcaaattcgaaatgaaagcccggaaaccccggaactagaactggtatctcttcaactacctgtgaaaactgatgtgatgaaaaggggaatttgaaggagccattccagaagacagggcgaaaactgaagtgcaatcagggccaagaaaaacagaaatagcaggacctggagttgcataggttgaatagttgaataggctgctctcctcagctggcaggaaacctggcagcctcctggtgcccaaggactgaaaaccttagaagcacctggagttggcagccttggcatggtcaggttggcacctctggaggtgcccaggcttccctggcagcattgtgagcagtggatggtgttgaagggcagccagaggaggaatggaacacatgctccttgctaaccacacggacaaggccacgttcacaggtacacaaaggcaacgcagttgctcaggtgcttcggtatcacagccaagaccccttcgggggaagctagtcggatactgggacccacattccagactactgagccgcggtcgcgccctcggctccgtttctgctccctccaccccacgaggacgggggtggaaggccaccttcgatgggtgcatcctccacgatgacctgctaacaaaggtgcatggatttcagagtctgattggcctacaacagcatttggcttgtggagacagtggttccctgatgaaaaactgccatgatatcagtgcttgagatattttgcagaccctgcacttgatggatcagctggcaccacccagactgattaactggctcatgtgatcttgtggtccccacccaggaacttaatcagcacaaggagacagcttcaactccctatgatttcatccctgaccaatcagcactcctgggctcactggcttccccctacccaccaagttgtccttaaaaagtctgctccccaaatgctcgggtagactgatttgggtaataataaaactccggtctcccacacagccagc

SEQ ID NO: 462218 - DNA, 1740 bp, Homo sapiens
aggactggttaggaggggcacaggaatgaagcaccccgacagtcaccccgccctctggtgtcctcccaccccgagcccgatcttcccccttcacgcctgccccgggccaatagcctcctaactgcgtcctctctgattgcgtgtgtcgtgctcattacgccctatccgtcgtttcttcgctccacaaacgtttactgagcgccttcaacttgccaggcactaattagactagcgcagagaaacggggataagtactgatgagggtcccagccctcagcgatcggatttcagagggggagataaaggactgcccagaagggtggtgagtggagtagttgatataaacaacgaggtgcgatgaaatacacaggagggctgctaatcacatatggggtgggtgccgagggcccttaattaagggaggcttcctggacgggtgacacccaagcggagtcctgacgacccgcgtcagaagtagtcaggcgaggaggagggtaaaggaatccacgtcccaagcagagaagcagctttccctacacagcacaggacacggtccgcgcacagaagccgcaggagacgcaggcacaggggctggggagaatccttgctgggccctcgccgtccatgcgccgcctccctctgcccggtgtctggtgtcagcctcctgcctggcagaggaactccagcccctgctccccgaagctcctccaggccttctgcttccctgactcggaatgggcccgctgtccagtgggtacaaggctggtctccccgcccactggtgacgacgtaaagatccagctcagcctggtttcccctggtgatgatatcttgcgactcgtctttctccaggaaaacagggaccgctctccgcctacaggtctcttccacagacctatcttgttttcaccccctgtctcttttggttcagtcttttcgctcatacaaacaaggaagtcgcccctagcccagccgcggctccttagctggaggcgggcccgggggtggagtcaaccgcggtggccacgcctcctgggaaagggcagggcatgcaaattcgaaatgaaagcccggaaaccccggaactagaactggtatctcttcaactacctgtgaaaactgatgtgatgaaaaggggaatttgaaggagccattccagaagacagggcgaaaactgaagtgcaatcagggccaagaaaaacagaaatagcaggacctggagttgcataggttgaatagttgaataggctgctctcctcagctggcaggaaacctggcagcctcctggtgcccaaggactgaaaaccttagaagcacctggagttggcagccttggcatggtcaggttggcacctctggaggtgcccaggcttccctggcagcattgtgagcagtggatggtgttgaagggcagccagaggaggaatggaacacatgctccttgctaaccacacggacaaggccacgttcacaggtacacaaaggcaacgcagttgctcaggtgcttcggtatcacagccaagaccccttcgggggaagctagtcggatactgggacccacattccagactactgagccgcggtcgcgccctcggctccgtttctgctccctccaccccacgaggtcctccatgataagttgctcccgatccagaagtattgccccagctgcaaagagccctgattctcaaatgtggtcgtgatcatggttactgattggtccataacaagaaagttaaa

SEQ ID NO: 462219 - DNA, 1832 bp, Homo sapiens
aggactggttaggaggggcacaggaatgaagcaccccgacagtcaccccgccctctggtgtcctcccaccccgagcccgatcttcccccttcacgcctgccccgggccaatagcctcctaactgcgtcctctctgattgcgtgtgtcgtgctcattacgccctatccgtcgtttcttcgctccacaaacgtttactgagcgccttcaacttgccaggcactaattagactagcgcagagaaacggggataagtactgatgagggtcccagccctcagcgatcggatttcagagggggagataaaggactgcccagaagggtggtgagtggagtagttgatataaacaacgaggtgcgatgaaatacacaggagggctgctaatcacatatggggtgggtgccgagggcccttaattaagggaggcttcctggacgggtgacacccaagcggagtcctgacgacccgcgtcagaagtagtcaggcgaggaggagggtaaaggaatccacgtcccaagcagagaagcagctttccctacacagcacaggacacggtccgcgcacagaagccgcaggagacgcaggcacaggggctggggagaatccttgctgggccctcgccgtccatgcgccgcctccctctgcccggtgtctggtgtcagcctcctgcctggcagaggaactccagcccctgctccccgaagctcctccaggccttctgcttccctgactcggaatgggcccgctgtccagtgggtacaaggctggtctccccgcccactggtgacgacgtaaagatccagctcagcctggtttcccctggtgatgatatcttgcgactcgtctttctccaggaaaacagggaccgctctccgcctacagatctcttcaactacctgtgaaaactgatgtgatgaaaaggggaatttgaaggagccattccagaagacagggcgaaaactgaagtgcaatcagggccaagaaaaacagaaatagcaggacctggagttgcataggttgaatagttgaataggctgctctcctcagctggcaggaaacctggcagcctcctggtgcccaaggactgaaaaccttagaagcacctggagttggcagccttggcatggtcaggttggcacctctggaggtgcccaggcttccctggcagcattgtgagcagtggatggtgttgaagggcagccagaggaggaatggaacacatgctccttgctaaccacacggacaaggccacgttcacaggtacacaaaggcaacgcagttgctcaggtgcttcggtatcacagccaagaccccttcgggggaagctagtcggatactgggacccacattccagactactgagccgcggtcgcgccctcggctccgtttctgctccctccaccccacgaggacgggggtggaaggccaccttcgatgggtgcatcctccacgatgacctgctaacaaaggtgcatggatttcagagtctgattggcctacaacagcatttggcttgtggagacagtggttccctgatgaaaaactgccatgatatcagtgcttgagatattttgcagaccctgcacttgatggatcagctggcaccacccagactgattaactggctcatgtgatcttgtggtccccacccaggaacttaatcagcacaaggagacagcttcaactccctatgatttcatccctgaccaatcagcactcctgggctcactggcttccccctacccaccaagttgtccttaaaaagtctgctccccaaatgctcgggtagactgatttgggtaataataaaactccggtctcccacacagccagc

SEQ ID NO: 462220 - DNA, 2979 bp, Homo sapiens
aggactggttaggaggggcacaggaatgaagcaccccgacagtcaccccgccctctggtgtcctcccaccccgagcccgatcttcccccttcacgcctgccccgggccaatagcctcctaactgcgtcctctctgattgcgtgtgtcgtgctcattacgccctatccgtcgtttcttcgctccacaaacgtttactgagcgccttcaacttgccaggcactaattagactagcgcagagaaacggggataagtactgatgagggtcccagccctcagcgatcggatttcagagggggagataaaggactgcccagaagggtggtgagtggagtagttgatataaacaacgaggtgcgatgaaatacacaggagggctgctaatcacatatggggtgggtgccgagggcccttaattaagggaggcttcctggacgggtgacacccaagcggagtcctgacgacccgcgtcagaagtagtcaggcgaggaggagggtaaaggaatccacgtcccaagcagagaagcagctttccctacacagcacaggacacggtccgcgcacagaagccgcaggagacgcaggcacaggggctggggagaatccttgctgggccctcgccgtccatgcgccgcctccctctgcccggtgtctggtgtcagcctcctgcctggcagaggaactccagcccctgctccccgaagctcctccaggccttctgcttccctgactcggaatgggcccgctgtccagtgggtacaaggctggtctccccgcccactggtgacgacgtaaagatccagctcagcctggtttcccctggtgatgatatcttgcgactcgtctttctccaggaaaacagggaccgctctccgcctacaggtctcttccacagacctatcttgttttcaccccctgtctcttttggttcagtcttttcgctcatacaaacaaggaagtcgcccctagcccagccgcggctccttagctggaggcgggcccgggggtggagtcaaccgcggtggccacgcctcctgggaaagggcagggcatgcaaattcgaaatgaaagcccggaaaccccggaactagaactggtatctcttcaactacctgtgaaaactgatgtgatgaaaaggggaatttgaaggagccattccagaagacagggcgaaaactgaagtgcaatcagggccaagaaaaacagaaatagcaggacctggagttgcataggttgaatagttgaataggctgctctcctcagctggcaggaaacctggcagcctcctggtgcccaaggactgaaaaccttagaagcacctggagttggcagccttggcatggtcaggttggcacctctggaggtgcccaggcttccctggcagcattgtgagcagtggatggtgttgaagggcagccagaggaggaatggaacacatgctccttgctaaccacacggacaaggccacgttcacaggtacacaaaggcaacgcagttgctcaggtgcttcggtatcacagccaagaccccttcgggggaagctagtcggatactgggacccacattccagactactgagccgcggtcgcgccctcggctccgtttctgctccctccaccccacgaggacgggggtggaaggccaccttcgatgggtgcatcctccacgatgacctgctaacaaaggtgcatggatttcagagtctgattggcctacaacagcatttggcttgtggagacagtggttccctgatgaaaaactgccatgatgtaaggaagagcctgtcagagcgaggctggggtgctgcgtgttggggaggtggaggtgtggcttcccgggagaagctccacccgctggctgagtctggcacataaaccagtctgtgaggggatggatgtgggtgtaatgggggcaattacagtaggaaggagcccacgtggagcctgcattctctgggacagggcattactgcattctctgggacaggctaaggcccagatcctaccttcccaggtggctggatgggtcatagatgtatgaaccggtcccctcattttctgattgccctgtgcttaacgtttctgtacctttactgaggctctttcctccaactccagtgcccagaccccccttctcctgaacatgaatgcctgtccatggaaattcgaccctcgcgctctctttcctgggagtgtgctatggtctcctcgccggtcttccggtttctcggctctggccccctgtggcttgtctgagctctcgcgttcacagggaagtagtggtcgcgctcactgggctaccgccctccctctgcgcgccccctccgggggcagggagcccacgaggcccagcccgatcctaccccctcctgggtcacctcctggacccccgctcctcccgcccagccccccgccccgtgccgccccagccactcggtcctccgggcccaccccagggcgtcggaactggtggttccctcggcggttccaggcccctctcctccttcccgggcagaagcagcttcgcagcgccactcactgagcggagattaccagggcccgtttcccaaggctccgcccagccctcgaacctgtgggagcgagcgctccctcgcctcaacgaaaactcgccggtcgagacggttgagaaatggctagagggacggagacctaagtgcctgtttctgtgtgatccaatgtagcatgtttttttcagttgaataactgattttttttggtctgaggacgatatatttaagtggggttttggaatagaaagatgaaataggagctggttttttccactctgcgcatcgacttggtattgccgtgtttccaaagagggtcaaaacacgttttacaaagaacagatttacttacattcgcgttggtttcattatgtggtgttgtgtatgtgtgtgtgtgtttttgtgttgtataaggaaagtattggtgggtggtattacttctttgcttctaacc

SEQ ID NO: 462221 - DNA, 1954 bp, Homo sapiens
aggactggttaggaggggcacaggaatgaagcaccccgacagtcaccccgccctctggtgtcctcccaccccgagcccgatcttcccccttcacgcctgccccgggccaatagcctcctaactgcgtcctctctgattgcgtgtgtcgtgctcattacgccctatccgtcgtttcttcgctccacaaacgtttactgagcgccttcaacttgccaggcactaattagactagcgcagagaaacggggataagtactgatgagggtcccagccctcagcgatcggatttcagagggggagataaaggactgcccagaagggtggtgagtggagtagttgatataaacaacgaggtgcgatgaaatacacaggagggctgctaatcacatatggggtgggtgccgagggcccttaattaagggaggcttcctggacgggtgacacccaagcggagtcctgacgacccgcgtcagaagtagtcaggcgaggaggagggtaaaggaatccacgtcccaagcagagaagcagctttccctacacagcacaggacacggtccgcgcacagaagccgcaggagacgcaggcacaggggctggggagaatccttgctgggccctcgccgtccatgcgccgcctccctctgcccggtgtctggtgtcagcctcctgcctggcagaggaactccagcccctgctccccgaagctcctccaggccttctgcttccctgactcggaatgggcccgctgtccagtgggtacaaggctggtctccccgcccactggtgacgacgtaaagatccagctcagcctggtttcccctggtgatgatatcttgcgactcgtctttctccaggaaaacagggaccgctctccgcctacagatggagtctcactctgtcgcccaggctggagtgtagtagcgcaatcttggctcactgcaacctcggactcccaggttcaagagattctcctgcatcagcctcccaagtagctgggactacagatctcttcaactacctgtgaaaactgatgtgatgaaaaggggaatttgaaggagccattccagaagacagggcgaaaactgaagtgcaatcagggccaagaaaaacagaaatagcaggacctggagttgcataggttgaatagttgaataggctgctctcctcagctggcaggaaacctggcagcctcctggtgcccaaggactgaaaaccttagaagcacctggagttggcagccttggcatggtcaggttggcacctctggaggtgcccaggcttccctggcagcattgtgagcagtggatggtgttgaagggcagccagaggaggaatggaacacatgctccttgctaaccacacggacaaggccacgttcacaggtacacaaaggcaacgcagttgctcaggtgcttcggtatcacagccaagaccccttcgggggaagctagtcggatactgggacccacattccagactactgagccgcggtcgcgccctcggctccgtttctgctccctccaccccacgaggacgggggtggaaggccaccttcgatgggtgcatcctccacgatgacctgctaacaaaggtgcatggatttcagagtctgattggcctacaacagcatttggcttgtggagacagtggttccctgatgaaaaactgccatgatatcagtgcttgagatattttgcagaccctgcacttgatggatcagctggcaccacccagactgattaactggctcatgtgatcttgtggtccccacccaggaacttaatcagcacaaggagacagcttcaactccctatgatttcatccctgaccaatcagcactcctgggctcactggcttccccctacccaccaagttgtccttaaaaagtctgctccccaaatgctcgggtagactgatttgggtaataataaaactccggtctcccacacagccagc

SEQ ID NO: 462222 - DNA, 885 bp, Homo sapiens
aggaagcggatctcgcaagctccgagcgtcagctgccggttcggtgccatggcgtcccagggtcgtcggcggaggcccctgcggaggccggagacggtggtgccgggggaggcgaccgagacggattccgagcgctctgcgtcctcgtcggaggaggaggagctgtacctgggtccttcgggcccgacgcgcggccgccccacggggctgcgggtggctggggaagccgcggagaccgactcggagccggagccggagccggaaccgacggccgcgccgagggacctgcctccactcgtggtgcagcgggaatcggcggaggaggcctggggcacggaggaggccccggcgcccgcccccgcgcgctcgctcctgcaacttcggctggcggagagccaggcgcggctggaccacgacgtggcggccgccgtgagcggtgtctaccgccgtgcaggccgcgacgtggccgccctggctagtaggctggcggcagcccaggcggcggggctggcggcggcccacagcgtgcgcctggcgcgcggggacctttgtgcgctggccgagcgtctggacatcgtggctggctgccgcctgctgccggacatccgcggcgtgccagggaccgagcctgagaaagacccggggccgcgggcctagccatgattctacttcccaacctgactgcaatttgggggtaggccttgctgcctctgggacctgactctgtctcctgtgtctcttatcaccccccacccccgctcccatcttggtgtcacccatgggggctaatccggtccccttggataatgctttatattggatatagttcaacccctactgcggagaccagggccccactatccttagatctggttcctctcccga

SEQ ID NO: 462223 - DNA, 4435 bp, Homo sapiens
gcagggcgcgcgcgcggcaggcggctcgggagcaggtggaggcgtggcagctgcagccgtgcccctgatcctggaacagctcatggccctgcagcagcagcagatccaccagctgcagctcatcgagcagatccgcagccaggtggccctcatgcagcgcccgccgccgcggccctcactcagccccgcggccgccccgagcgcaccgggcccggcccccagccagctgcccgggctggccgcgctcccgctgtcggccggggcccctgccgccgccatcgcgggctcgggccccgccgccccggccgccttcgagggcgcgcagccgctgtcccggcccgagtctggcgccagcacccccggcggccctgcggagcccagcgcgcccgccgcccccagcgccgcccctgcccccgctgcccccgccccggcgccagcgccgcagagcgcagcctcgtcgcagccgcagagcgcatccacgccgcctgccctggccccggggtccctgctgggtgcggcgcccggcttgccaagtccgcttctacctcagacttccgccagcggcgtcatcttccccaacccgctggtcagcatcgcggccacggccaacgctctggacccgctgtccgcgctcatgaagcaccgcaagggcaagccgcccaatgtgtcggtgttcgagcccaaagccagcgccgaggacccgttcttcaagcacaaatgccgcttctgcgccaaggtcttcggcagcgacagcgcgctccagatccacctgcgctcgcacacaggcgagcggcccttcaagtgcaacatctgcgggaaccgcttctccaccaaaggcaacctgaaggtgcacttccagaggcacaaggagaagtacccccacatccagatgaacccttacccggtccccgagtacctggacaacgtgcccacctgctcgggcatcccctacggcatgtcgctgccccccgagaagcccgtgaccacctggctggacagcaagcccgtgctgcccaccgtgcccacgtccgtggggctgcaactgccgcccactgtccctggcgcgcacggctacgccgactctcccagcgccaccccagccagccgctccccgcagaggccctcgcccgcctccagcgagtgcgcctccttgtccccaggcctcaaccacgtggagtccggcgtgtcggccaccgccgagtccccacagtcgctcctcggcgggccgcccctcactaaagccgagcccgtcagcctgccctgcaccaacgccagggccggggacgctcccgtgggcgcgcaggctagcgctgcacccacatcggtggacggcgcacccacgagcctcggcagccccgggctgcccgccgtctccgagcagttcaaggcccagtttccgttcggggggctgctagactcgatgcaaacgtcggaaacctcgaagctgcagcagctggtggagaacatcgacaagaagatgacggacccgaaccagtgcgtcatctgccaccgggtgctgagctgccagagcgcgctgaagatgcactaccggacgcacacgggggagcggccgttcaagtgcaagatctgcggccgcgccttcaccaccaagggcaacctcaagacgcacttcggcgtgcaccgtgcaaagccgcccctgcgcgtgcagcactcctgccccatctgccagaagaagttcaccaacgccgtggtcctgcagcagcacatccgcatgcacatgggcggccagatccccaacacgccgctgccggagggcttccaggatgccatggactccgagctggcctacgacgacaagaacgcggagactctgagcagctacgatgacgacatggacgagaactccatggaggacgacgctgagctgaaggacgcggccaccgacccggccaagccactcctgtcctacgcggggtcctgcccgccctccccgccctcggtcatctccagcattgccgccctggagaaccagatgaagatgatcgactcggtcatgagctgccagcagctgaccggcctcaagtccgtggagaacgggtccggggagagtgaccgcctgagcaacgactcctcgtcggccgtgggcgacctggagagccgcagcgcgggcagccccgccctgtccgagtcctcgtcctcgcaggccctgtcgccggcccccagcaatggtgagagcttccgctccaagtccccgggcctgggcgccccggaggagccccaggaaatcccgctcaagaccgagaggccggacagcccagccgccgccccgggcagcggaggcgcccctggccgcgcgggcatcaaggaggaggctcccttcagcctgctgttcctgagcagggagcggggtcccagccaaagcactcctagcctgatctccagcgccgcacccaccatgatcaaaatggaagtgaacggtcacggcaaggccatggcgctgggcgagggtcccccgctgcccgcgggcgtccaggtccccgccgggcctcagacagtgatgggcccgggcctggcgcccatgctggcccccccaccgcgccggacgcccaagcagcacaactgccagtcgtgcgggaagaccttctcctcggccagcgccctgcagatccatgagcgcacgcacaccggcgagaagccgttcggctgcaccatctgcggccgggccttcaccactaagggcaacctcaaggtgcacatggggacacacatgtggaataacgcccccgcgagacgcggccgccgcctgtctgtggagaaccccatggctctcctagggggtgatgccctgaagttctctgaaatgttccagaaggacctggcagctcgggcaatgaacgtcgaccccagtttttggaaccagtatgctgcagccatcactaacgggctcgccatgaagaacaacgagatctccgtcatccagaacggcggcatcccccagctccccgtgagtcttgggggcagcgccctcccccctctgggcagcatggccagtgggatggacaaagcacgcactggcagtagcccacccatcgtcagcttggacaaagcgagctcagaaacagcagccagccgcccattcacgcggtttatcgaggataacaaggagattggtatcaactagccagtgactcgctcatctgccctgcccaggcccacgttttgaagttggagcatcaggcctccgacctttcttgcctcggttctcattacactttcacccatagcagaaaacactttgtgcggctgccgagaggtggtcttgtaagcgctgcatggcgctcccttcaacagcaagcctgactgttctcgagaactctgcaatcttttaaataagcttccttcaaaaaaaaaagtgcttggaaaaccgccttaggaacagaaagagctcagaccatgtccacttcctttctcctgaaacctaataatctctccgagggagaaaggggttctctgcggtattccagtgaaactcatttgatggtttcttttgaattagttagacacttgaacggtgttttttagaactcttcatgttaaagacgtggtttagtactcccaatgctgtgtatcatgacactatcttcgtctgtagtatttatgatgttaagataatgcgggtaacagacaatataatagccccgaccttaaacgaagcttttgtactgcagaatacatctggctgtgtgattttttttttaagcaagatttgttttactataaataagtggattatttcaatgcaggcaaaattgtgaagttctgttgggaaagatagcatgcttttcgtgtgcaagtacctgtcagtaataagccttttttttttttttttttaatttaaatgtttgtagctgctatgtggacagttgttttctagtgtggtctgtagcccaataactggggaacgagttacagacaaacatcaccgtaaatgactcacaacattataaacagttgtgagaaaatatttcacattatcaaagctgtacaataaaaaggtaatgtttgtataatgtggttgcaaactcttaatttatactattgcacttttagtattttgtattagggaggtttgtctataatttgaaaatttaaaaaaatgtaaagtattttataaatagtacttcagtttaaggaaaatgggaaaactgttacagttccttgttttgtcttatggtcaaacaatattagaaatctctgccacttgaaaagccaccaagacttgtcagcttttcagtaaagtagggcctgccgtttcttaaattaaaatgatttatttaacttttccacaaagcccactttaaaactgtgaccgccccctaacgaaaccttggtgaattcatcctaggactatgacgtcagtacaagccaggaaggaactaggataaccttctgcaggtctgattttcatgtaagc

SEQ ID NO: 462224 - DNA, 502 bp, Homo sapiens
tgctggcaggtggccctgggatgttctagaattaatgtttctttgtttgagagaaagcaagaggagaggggcacagtcagagagtcccagcagcagaagatgcaaagtgggggacagtagaggtcagaagggagccagggcttgggcaagtgaaggagcaagacccggacccttcgagctccagaacattctctgcgtggccatgtgggttttacaccttaggagaaaattactcgaaagtttgtcaactgaaagaccgcattcattaatttatatttgttggttttgcttattgtattcaataaaacaagatgtttgcatgtagaaatataaagtgcccagaaaagtccacctgtgttttgttgtccgtaagtcgcgcttgggagcggggtggacctctgtctgctgcgctggaagcggagcagctctgcctccgtgtctaggcacttactcgtgggctgtctccgtgtctcgcgcaggtgcacatggggacacacatgtg

SEQ ID NO: 462225 - DNA, 3017 bp, Homo sapiens
atggcagtaaatatatcctggcatcatcatttttaatagctggatgtatattaagttaatcattgccaccccagagattcaggactttgtgaaggtgctgcgttccccacattggacaaatggaaggaaaagcaagaaagccagcaaaaccagggagagccctaaagaggcagttagagaagagtccacagatctggccagctgcctgcagtattcccagcagtttacgggagaattggaacgaactctctttgctctctccacgcagcagaagaacatggacagtgtgagtcctacagcctccctcatcccctggcagcccagcttcccagatggaggagttgaagctggttatgaagcccttgatgctaaccagcagttacagcaggccatggaggagcgggcacagctggaagtacacctggggcaggtaatggggtcactgaaacaactacagatggagaaagatcaacacgctgagaatctgaaaggagagagcgccttgtggtggcagaggatgcgggagatgtcagagcaggtgcacgcgttgagggaggagacggtgcatagcatgagtcgagtacaggagctggagacgatcttggctgaactaaggaaccagatggtcagcaacaggtatctgtgcggagggctctggatcatccgctaccctgaaggatctggaagtaagaggccctgggccatgacccaataccaagaggtaacagtcgccctggactcgagttatataacaatcagtcgacggaataaaaccatcgagtcattgatacccatgctccagcccttgccacacatgtcctggggttgtggcttctcagggaagcactggcctgattggttgtcaggagccccgtatttccactctgactcaggccctaatttgctctttgattctgggcaagccacctctcctccttgggcttgtgtttcccgaggaggaaaagcaagaaagccagcaaaaccggggagccctaaagaggcaattacagaagaggccgaggatctggccagccatctgctgtattcctggcagcatgtgggagagttggagcaggagcagaggaaggcagataggagtcagcctggggctgtgtcggctgctgtgggtgagttggggggtgctgtggggagcgagcactggatgcagagctcggaggccaagtgcctaccctgcccttacctggctgtggccttggtcaacaacagcaataaggagctgaagcaggagaactcagctttggcagagcagcttcaagttgtactgattgacaaggcagggatgcagtgtgacttggaggagctgaaaaagaaactggaactcactgagctcacgcttcaacagttatctagctggtgtgaagcccctgatgctaaccagcagttacagcagcccacagacgaacgggcacagctggaagcacacctggggcaggtgatggagtggctgaagtatctgcaaatggagagagagcagtatgccgagtatctgcatggagagagtgccatgtggtggcagaggatgcgggagatgtcagagcaggtgcacacgttgagggaggagagagtgcacagcatgagtcgagtacaggagctggagacgatcttggctgaactaaggaaccaggtggctgaacccctgcccccggagcctccagcagggccctccgaagtggagcagaagctacaagcagaggctgagcacctgtggaaggagctggagaatctggcaggacagcttcaagcccaagtggaagaaaatgagggcttgagtcacctgaaccaagagcaggaagaggttgctcaggttgttggagcaagaggagaagttgctggagcaagaggagaggttgctggagcaagaggagaggttgctggagcaagaggagaggctactggagctgcaggagagcctgctagagcagaagcggaaggccgcttcctttctcagctgaacccctacccggagcccccagcagggccctccgaggtggaggcgctcaggcataccgtgcggaacgaccgtaccaccatcaggcgcgcgctctcccagaaacacgaactgaagaagtatctgggcgagctgaaggagatggagcgcctggaagcagaaccagtagctacaggcccagttgagtctcatggctctccctggggaagtgccgaagaggagcaggcacagctacatgggcagctgaaggagcaaagggtgcactgccagcgcctgtcttacccggtggccttggcccagaaggagccagaggcagcagcctcagccccagggactgggggcgattctgtgtggggaaacccaccggaccttgcaggggaccatggggaagctgcaggtgagaaagtacgtcacatcataccagagccagaggtcagtgctgaagacgtggaccgggagaatgagtacataagcaggctggctcaggacaaggaggagatgaaggtgaagctgctggagctggtgttgcagcttgtgggcgactgcaacaagtggcatggcagattcctggcagctgcccagaaccctgctgatgagcctgctccatgggacccagccccccaggagattggggctgccaacaagcagggtgatctcccacagtgtggagcctgaacaagaagaggctggggagggttttccccacgacagccccacggcacagcagatcatgcggctgcttcatgagatgcagaacccccaggagcgcccaggcttgggcagcaacccctgcatccccattttttactgagctcaggagagcaagatgaaggtaacaatcatctaaaagccagccactgtcagcaaagcctggagaaatgggaccagagagtctgcccctaccacgtccctgccaccccttcccagttacccctttacccttacagtagcaaaataagacccctatctagtgagggagacaggtgcagatgaggtgaagatcactgtcatctaaaagcaggccaccaaatttaaaaaaaaaaagtta

SEQ ID NO: 462226 - DNA, 920 bp, Homo sapiens
cctcagctcctccttccctacacctgggactcttctgcgcagacttggcttcaaacaaggctcacggttcttcctggcatttgcttttttggcttagcgacactgtcttcagtctcctcacttgtccctttctcctctggcaagcgtaatgctatcaacatttgaaagtggcctgattccctggtgtctggtaaatggccttgctggtgaacttctttaggagaactgcaaagaaactagagcaggggctaaagagagctgctctcttggggctcagatgcccctcctggggccccacctcacactagcatctgttaaggagtgacctttgccaccaattaatgagggtgaggccccattcagttgcaaagaacgtggaattgtaaacaaacttgcaagtggaaagactagttccaggggaaatgtaggagggtagagtgacatggttaagagaatgtggttttttagatgggagatcagagaagacctctctggtaaggagacatttgagtcaaaatctgaagaaggagggagtgagtcatctgagtctgtgaagaattttctaagcaaggcgagcagcaagcacgaaggctctcaggaaggagtgtgcttggtgagttctaagaacaagcaggccagtgtagctggaaagtattatatcaaccaggagctctgggatgcgggactcagccagcccaaggaaggtgaatctggattctttaggccaatcatgaaaattttctactcttgccagtccaggacctacgaactcagcagccttgagcaagtcactggaccattcagaacatctgtttctctcttgtggaatggagataataatacctgtttcacaaggcaattaagaggatcgagtgaaatatgtgaaaatattgtttaaaacttaatctcaaaatgtgacc

SEQ ID NO: 462227 - DNA, 623 bp, Homo sapiens
cctcagctcctccttccctacacctgggactcttctgcgcagacttggcttcaaacaaggctcacggttcttcctggcatttgcttttttggcttagcgacactgtcttcagtctcctcacttgtccctttctcctctggcaagcgtaatgctatcaacatttgaaagtggcctgattccctggtgtctggtaaatggccttgctggtgaacttctttaggagaactgcaaagaaactagagcaggggctaaagagagctgctctcttggggctcagatgcccctcctggggccccacctcacactagcatctgttaaggagtgacctttgccaccaattaatgagggtgaggccccattcagttgcaaagaacgtggaattgtaaacaaacttgcaagtggaaagactagttccaggggaaatgtagcagccctagcaaaccaagagtgagccaccttggaagtagatcctgcagtcccagtcaagccttcggatgactgaaacttcggccaattatctgactgccatcagagaacccaagccagaactacccagctaagctacttttaaattcctgacccacagaaactatgtgaattaataaatgtttcttcttatttta

SEQ ID NO: 462228 - DNA, 3188 bp, Homo sapiens
tgagggcacctggttaatatctaactgcaatctcgcctccagcctggctcgcagttctgtgaacccggtgaggaggctgcacggtgatgacaggtcaccaggcagactcgtgtgtggggtttgtgtgtgggaggagttgtggtctgtgtggtcccctgtcccttctttcttcccaagggtgacccgttcgccttcgagtcttccaaagatgtgggcagcagggtctcaagtccaccactgtgttctctcatcctaactcctcctagggccgacagaaaatcccttggcttccagagccttcctcaggctttctctcctcaattcacagcaactttatgaactccttgtcccccagtttatttttcaaacagaggctagtattttaattgtcattttgtttatacatagcaatatatggctctttgtaaaaggttttgtgtttgtgaacatttcacatgagaggaagcagagaaaaaccaccagacatttcgctgtaaaaaaaatgaatattaataaataaaatctttgttactgtcctcccttcatcatccctagacagagacaccttttgagaatgtctttggattaagtttcctctttggaaacgttacagagtgatgagtccccagcccatcctctatggtttcctggtcctgggtttcagagctgcctggggccaccccaagatgcccacagctgccaagtctcttgtagtgtcaaaagacaagtgtgagccttctgttatgcctggacagggccaccagggggctccttggtctagcagtgacgccagcgtctgggaagacgcccgttgccaggcggtccgtggtctagcggtagcaaaaagtgtcaaggaacacccactacttagcagaccgggaaagggagtctccttttccccgggggagtttagagaagactgctcctccacctcttgtggagggcctgacatcagtcaggactcagtggcatttgaggatgtggctataaacttcacctgtgaggagtgggctttgctgggtccatcacagaagagtctctacagagatgtgatgcaggaaaccatcagaaacctggactgtataggaatgatatggcaaaatcatgatatagaagaagatcagtacaaagatctcagaagaaatctaagatgtcatatggtagagagagcctgtgaaattaaagataatagtcaatgtggaggaccctttacccagactcaagacagtattgtgaacgagaaaatacctggagtagatccatgggaaagcagtgagtgtacagacgtcctcatgggtcgttcatctcttaattgctacgttagagttgacagtgaacacaaaccatgtgagtatcaagaatatggagagaagccatatacacatacacaatgtgggacagctttcagttatcagccctgctttcaaatacatgaaagacctcagcatggaaagaaactctatgattgtaaggaatgtgcaagcttcagttctcttgaaaaccttcaaagacacatggcagcacaccatggagatggacctcgtatatgtaagttgtgtggaaacgcctttatttggcctagtttatttcatatgcttagaagaactcacactgaagagaaaccatatgaatatgagcagtgttctacagcgtttcctgcttatagttccactctaagacatgaaagaacacacagtggagagaaaccctatcaatgtaaacaatgtgggaaagccttcagttgttcctgttacactcaactatatgaaaggactcacactggagaacaatcctatgaatgtaagcaatgtgggaaagcattttatcatcttggaagctttcaaagacacatgatagtgcacactggagatgggcctcataaatgtaagatatgtggaaaaggctttctttctcccagttcagttcgaagacataaaagaactcacactggagagaaaccgtatgaatgtaagtattgtgggaaagcattctctgattgcacaggttttcgaagacacatgataacgcacactggagatggacctcataaatgcaaggtatgtgggaaagcctttgattctcccagtttatgtcgaaggcatgaaacaactcatactggggagaaaccctataaatgtgaatgtgggaaagcctttagtgatttctattactttcgaaatcatgaaactactcacactggagagaagccatataaatgtaaacaatgtggaaaagccttcatttccttcaggtcttccaattacattcgagtacatgaaaagactcacactggagaaaagccctatgaatgtaagcagtgtggaaaagcactttctcatctgaaaagctttcagagacacatgataatgcacactggagatggacctcataaatgtaagatatgtgggaaaagctttgattctcccagttcatttcgaagacatgaaagaattcacactggggagagaccctataagtgtaaactatgtgggaaaggcttcaggtcttccagttacattcaactacatgaaaggactcacactggagagaaaccctatggttgtcagcaatgtgggaaagcattatctgatctctcaagctttcgaagacacatgataacacatactggaaatggacctcataaatgtaagatatgtgggaaaggctttgattatcccagttcagtgcaaagacatgaaagaactcacactggagagaaaccctatgaatgcaaggaatgtggtaaagccttcagtcattcaagttacttacgaatacacgaaagagttcatactggagagaagccgtataaatgtaaggaatgtgggaaaccattccattgtcccagtgcctttcataaacatgaaaggacccacatacgtgtacatgtcagcaacaatgtcaggatctgtggagtttgcgagtataagatctttaagtgttgaaggtttcatctccataattgcagctgctttagctacaaatattataggaagctgttccttctttttctttacatcaccaaaccttccagtggttataggcattttgttatccttcaagtgacctggagcctttgttgcatgacaggattgtacctgaagatcacattctttaacaattggacctactgaatctgtaaaactactagaagaaaacatattgaaaatacttcaggacattggttt

SEQ ID NO: 462229 - DNA, 1022 bp, Homo sapiens
cagataacattcagagtacgagttctcatatccagcatcgtccaagcgggagttgatgtgctctccgagttctagatgagaaagctgcgggctgctggcggtgtggagagtgactgaaggtgcaagctgcatgtcgggggagctggcggtgtggagagtgactgaaggtgcgggctgcatgtcgggggagctggcggtgtgcagagtgactgaaggtgcgggctgcatgtcgggggagctggcggtgtgcagagtgactgaaggtgcgggctgcatgtcgggggagctggcggtgtgcagagtgactgaaggtgcgggctgcatgtcgggggagctggcggtgtgcagagtgactgaaggtgcgggctgcatgtcgggggagctggcggtgtgcacagtgactgaaggtgcaagctgcatgtcgggggagccggcggtgtgcagagtgactgaaggtgcacgctgcatgtcgggggagccggcggtgtggagagtgactgaaggtgcaggctgcatgtcgggggagctggcggtgtggagagtgactgaaggtgcaggctgcatgtcgggggagctggcggtgtggagagtgactgaaggtgcaggctgcatgtcgggggagctggcggtgtgcacagtgactgaaggtgcaggctgcatgtcgggggagctggcggtgtgcagagtgactgaaggtccatgttgcgtgtcgggggagctggcggtgtgcagagtgactgaaggtccatgctgcatatcgggggagtgcattcggagtgttctcatctgtctcatccctgaccacgtgagtacgcaggacacctgtgtctgtgttaagggagttcgttcctaagtgctctcatctgcctacttccatgactgtgtgagtaaaaagggctcaggtcacacacaagaaggaagaaattggaaacccaggaacacatatcagaggaaaccaactgaaaacaaataataaaatgcagacgtacgttctaatggtctaaatacgagacagaatggat

SEQ ID NO: 462230 - DNA, 1565 bp, Homo sapiens
ggtgtcttgcagtgctctgccagctgtggtaaaggggtgtggaaacggaccgtggcgtgcaccaactcacaagggaaatgcgacgcatccacgaggccgagagccgaggaggcctgcgaggactactcaggctgctacgagtggaaaactggggactggtctacgtgctcgtcgacctgcgggaagggcctgcagtcccgggtggtgcagtgcatgcacaaggtcacagggcgccacggcagcgagtgccccgccctctcgaagcctgccccctacagacagtgctaccaggaggtctgcaacgacaggatcaacgccaacaccatcacctccccccgccttgctgctctgacctacaaatgcacacgagaccagtggacggtatattgccgggtcatccgagaaaagaacctctgccaggacatgcggtggtaccagcgctgctgccagacctgcagggacttctatgcaaacaagatgcgccagccaccgccgagctcgtgacacgcagtcccaagggtcgctcaaagctcagactcaggtctgaaagccacccacccgcaagcctaccagccttgtggccacgcccccacccggctgccacaagaatccaactgcatagaacatgagcgtggacttggcgtttgccattagtgcttccgtacttaatatattgttaacagccactggctcactttctacagtgaggagaaagtaggcatgagtcacaaagtaacttcaatttctaggatttcaggtacctcgaagggaagcacctctggcagacaaccgtcaagagagagacatcatttagtgttcctgtcttgactcgcttttgacatttgaatttccagtgcttggtatatcatggaggaaacatccccaaaacgagacatgctagaaaaggctttattctaaaggctttattctgaaagccggcgacaccctggagggaggggcaggtgttggtgagcctctgcccgtggcttctctggggagggccgggctgcttagcccacgtttctcttcatctaccttcttgaccacatgagaaccaggacattgcctccatgcccgtctctgacaacatagtctctaaatcctaggtgttgccttggaagtctcgtgcgtggagtgtaaatctatatatgccagcgaggacagcagtgccacgcagttcataccacccgcatgggaagaatgttccaagagagtctgggtttggggaagcatctaattttcagagctctgctgtccaccgtgtagggaaacagaagggcctctcttcaaggtgctgtgacataagaaacggtaattgcggtgatggggttgcttcctaaggcaaagagatgctgtaccacatcccagtggctttctaccgaccgtggccatttatctgaagatgctgatcacagcagtgatgtttctgtgttaataccctgtactgtccctcgagtactgtacctttgtgcttgcacacgtgtcactaacgcacgtgttaccagagtctcacgaccctacggtgctatttttattggtgcaaaattaaaccctctcagctgacc

SEQ ID NO: 462231 - DNA, 1122 bp, Homo sapiens
ctttccatctccttgctgggctaagaaaaggattctgatcatgatggccaggaagatggcaatgatttcctggtacgctgtagtagttgctgttaacgctgttggtactcttcccccttgtatcatcttagctgtcaccatttctgcacacatcaatctgacagcttccaaccatgaacacctatgtctctttgagcgctttctctatctgagtaaaaacatccgtggggtgctagacaagatcagtgcctgggagactcgggagactcaaaaccgggacatgaacaagagtactctcgaaagaccatatgcaaattccctctctccaacccatcacctaatgcttgttgatgttctcatgggttcagtaagttatatcacagaatccactgtctattcaatggctgcccaatatgaacgtggagttttaatggaacaggtttttgtttgggggccccacttctctagcgttacaggtgtgccttcttctacacataaatctactgatactattactgagctgaatttaggtctgcctgctcagtgcagaaaagccaaacactgacattgagatctgcagcgagagaaaccaatcagcagggcttatctacctattcacaggaattggttcagggacagacctagccgactgctggagccagctcccaggggcttcagagagtccactgcaggcccctctaccgcacgctgggtccagggacatcgcattggtagtttgaaatcagccatgacagggagagagcattgctagacattcatctgtacactacctggatgaacaagacctaatttaggtccatgagacgtgaggagatatttaatcagggtttggagaaaccatggaagaagagtctattcttttgtgtagggagagttataaagaaattggatgtgagactactaaagccattttggccatcaaaggacctaaccagaggacagagttgacacacagagaagagatgctctgaaaggatcaaagaggtctggagtcagagcgctgagggtgtggacttctgaatccacccccaaagcccgtatgcctcttcactcttcagttaaatgagccaataaagtccctgttttaaaaccagtttgaat

SEQ ID NO: 462232 - DNA, 1168 bp, Homo sapiens
gcaagaaatgttaaaagaagtgctttagagagcagggaaattctataggtcagacacttggatctacataaaaaaaggaagaaaccaaaggagaaataagtgaaggcatggaaaccttgttccacacattgcctggtgccctgtccagcgctgcaaggtgcactgcgtctcctctgcccagcaagccacaagcccctccagggtgagaggagagccttcccttcccttggtcctcccttcgacacagggagctggagctggacagccccataggcactcagggcttgaagaagatatctagaaatgtcaaagcagaagagcctcggagataatctgaactatttctgagtttatataagggaaaactgagactggagagaactaacatgtctaatattacaatggaaacttgtaataaaaccacaaattgagtcaagtctcctgattcactatatgagcttcttttgactctaagaaactgtccttcacaaagttcccaagaaagaatggattggccagatcgatagaggaatttctgaggaaactgcacttgtgtttttatatacttggcacttattcatgctaaacagtagtttagtgcagtggtggagaaaagaatccctttgaatgatacctgattaatgtgtgtataaagcacacaggcctataaaatagtgtggaatatgggacaagctatcttgatgccaagccatggaatggacctgtgtaataagtctacactctttcttctgagcctcgagctgcccctggagtttagacaattatcttcctttgaggatttgagaaaagttttcaaattgcgacaatttagggggattttattttttattttattcttatttctcactccttacttcttcctgcacttggaatcgttaacttgtgctgagtgtggccgccaggccatcactgctagaaaggacgagagattcttagcagtagtcagagagcacccgtcgggaccagtccttctaattctcaaaccaaatgaggttgaacaaacccggcccccaccagttggtccttttgttacaactgatgaactgcactaacacatcaccatcacccagaatccatagtttacgtaagggttcgctcttggtgttgtgcattctacgagtttagatcaatgcataatggcatgtat

SEQ ID NO: 462233 - DNA, 439 bp, Homo sapiens
gcaagaaatgttaaaagaagtgctttagagagcagggaaattctataggtcagacacttggatctacataaaaaaaggaagaaaccaaaggagaaataagtgaaggtaaagtaaaaattttatttttcttacaacaaatacatttattcaaaataaaaatagcaaaaatgtatttgattatgtatgtgtttttgtatacatgcatacataatcaatatagtcatgtgtatacagacacatataatcaatatagttatgtgtctcttaacaatgaggatactttttgagaaatgagtcagtaggtgattttgtcattgtgtgaacatcatagtgtgtacttatacaaatctagatagtatagcctactgtacacctaggctatttattatagcttattgcttctaacctacaattctgtacagcaatacagtattataat

SEQ ID NO: 462234 - DNA, 797 bp, Homo sapiens
tgatgtttgagaacctccacctagatttcagaagatgtatggatgcccagacagaagtttgctgtagggggcactgcagaaggcaaatatggggtcagagctcccacacagtgtccctactgggcaccacctagtggagctgtgaaaagacagccaacttcctccagtccccagaatggtagatccactgacagcttacactgtgagcctggaaaagcttccaacactcaacaccagcctgtgaaagcagctgggagggaggctgtagcctgcaaagccacagggctggagctgcccaagaccatggaaaccctcctctttcatcagcgtgacctggataaagaaattatcaatggttctgctgagaatgcaggtgtggatattttaaaccaggctggcaacattctgagagcaagaaagcgcagaggactgaagaatctcaccacaaaccttctggagtctgaaccagcaacgtagcacacaatatactacaaaactccttctcatgtcctctcactccagcacttccattctccccaccaatggccctatttgtttactgccatgttgctgttgcgtttcacaaggttgctgatttcttctccaaagatttgtttcccgggggcctcccagtgttgtagaacctacagtgtatgacttggaggagtcaatgagatttcctctccattctaatcacatataagtctcgcttgttgcccaggctggaatgcagtgcagtggtgtgatctcggctcactgaaacctccggcaacctccacctcccgagttcaagcaat

SEQ ID NO: 462235 - DNA, 1790 bp, Homo sapiens
tctgctctagtcctggagccctaggaaggcttccctggattagaaaactgaggcccagagaaggaaagtagctgccagaggtcacacagctaggattgagggatcagagactgctgcagcccagatgccttcgcagccatggcctggcccatccaacccgctgacctcattcccagctcccctctcttgcaagctccccccttgcctgccacggtcctgggtctccagctgccccagttgaacagggggctgtcccctgcggctctcaaggcgttccggggctggctcagctttgtcagactgggaatctgcccaagtgtccttctgaagggccctccccgcattcgaggctggatctggcagaaaagctggagaggctctgctgcccgctccagggatgacacgtctctgctgggtggggagtccacgtccgcagaaaagggggaggccacgtgtctggacccttcccgcagagcccctgtgccctgcaaggctgcctgccacccccctccttctctccctcctctccccagcagccctggcctgccccctccctctgatctcaagaaatagctggggggtcgggggaggggacactgaagggaagaccaagctaggaaaagctcctctccaccccctcccagcatgtctgggcatttcactccccaccaatgagcctcagtttcctcaactggaaaataagggggatgaacagaaaaagtctctacccatggagttcctcctcccccacaagctggcacatgtggatattggctctgttttgcctttgacccctagtgaaagaaaatactgagctggtagacccctgtggggacaacagatcagagcttggtcaccaatatggacatctaggtctgagcagggcccactccccgggggcgcatcagctccatcccggcaccctttacactggccttctcttcacaaaggaccacaggtcatcctcaagccttcctcccaggctatccttgtccctgaatactaatgtctaaaggtcagcccagctaccagcagtgtgcatgtgatgtgtcccatctccccttcggattggaggaagaagctgtgtccctcccatcagacagacggtctccttaaagattctcctggtctccagcttgggctctgctggaaagaagaggaagtatttagcaagggtgaagatgggttcttacttccctgaggcaaccagagataagaaaagaccagaatatgaatatccagcattccacaaagaatcctacaggcagggatattgcccaatcaccagtgcctcgcatcccagttctatccaagatccaagcttgatatcctcctgaaagacttcctgaatcaggtcaccaacatggacatctgaacttccagaatcaggtcaccgtctttcttctcatctctggatgtatttggagctcatttgtctgacggtttttgaatgctatcttttaaaaataaacttttacaatttgggtttaataattctagatttatagaaaagttgaaaagaaagtacagaaagttcccatatatcccttatccagttctcttaatgttaacctcctacatcatcatggaacatttgccaaaatgaagatgtcaacactggtgctttgctgtgaactaaactccagactttattcggatttcatgaatttttctcctaaggtcccttttccgttccggcattccacccaggatatcacattgcatttggtgtttgtgtctccttggtctcctctggttcttgagagtttctcagtctctccttgtttttc

SEQ ID NO: 462236 - DNA, 3191 bp, Homo sapiens
accgttggctctcgctgcacgcggaggtcaaggtgtcgtccttactgctgtgtgtcgtccgctcctaaaggcccagcttctatggccctgtgacctgcaggtattgggagattcacaactaagtcgccaggacccccggaagcctagaaatgggatcgttgacatttcgggatgtggccatacaattctctctggaggagtggcaatgcctggacactgcacagcagaatttatataggaatgtgatgttagagaactacagaaacctggtcttcctgggtattgctgcccctaagccagacctgatcatttttctggagcaaggaaaagagccctggaatatgaagagacatgagctggtgaaagaaccgccagttatatgttctcattttgctcaagacctttggccagagcagggcagagaagattctttccaaaaagtgatattgagaagatatgaaaaatgtggacatgagaatttacagttaaaaattggttgtaccaatgtggatgagtgtaaggtgcacaaaaaaggttataataagcttaaccagagtttgacaactacacaaagcaaagtatttcaatgtggcaaatatgcaaacatctttcataaatgttcaaattcaaaaagacataagataaggcatactggaaagaaacttttgaaatgtaaagaatatgtcagatcattttgcatgctttcacacctatctcaacataaaagaatttatactagagagaattcctacaaaagtgaagaacatggcaaagcctttaactggtcctcagcccttacttataagagaattcatactggagagaaaccctgcaaatgtgaagaatgtggcaaagcctttagtaagttctcaatccttactaagcataaggtaattcatactggagagaaacattacaaatgtgaagaatgtggcaaagccttcacccggtcctcaagccttattgaacataagagaagtcatgctggagagaaaccctacaaatgtgaagaatgtggcaaagcctttagtaaggcctcaacccttactgcacataagacaattcatgctggagagaaaccctacaaatgtgaagaatgtggcaaagctttcaaccggtcctcaaaccttatggaacataagagaattcatactggagagaagccctgcaaatgtgaagaatgtggcaaagcctttggtaacttctcaacccttactaaacataaggtaattcatactggagagaaaccctacaaatgtgaagaatgtggcaaagccttcagctggccctcaagccttactgaacacaagagaattcatgctggagacaaaccttacaaatgtgaagaatgtggcaaaacctttaagtggtcctcaacacttactaaacataagataattcatactggagagaaaccctacaaatgtgaagaatgtggcaaagcctttactacattttcgagccttactaaacataaagtaattcatactggagagaaacactacaaatgtgaagaatgtggcaaagtcttcagctggtcctcaagccttactacacataaggcaattcatgctggagagaaactctacaaatgtgaagaatgtggcaaagcctttaagtggtcctcaaaccttatggaacataagagaattcatactggagagaaaccctacaaatgtgaagaatgtggcaaagccttcagtaaggttgcaaaccttactaaacataaggtaattcatactggagagaaacaatacaaatgtgaagaatgtggcaaagccttcatctggtcctcaagacttagtgaacataagagaattcatactggagagaaaccctacaaatgtgaagaatgtggcaaagcctttagctgggtctcagtccttaacaaacataagaaaattcatgctggaaagaaattctacaaatgtgaagaatgtggtaaagacttcaaccaatcctcacaccttactactcataagagaattcatactggaggaaaaaccctacaaatgtgaaaaatgtggcaaagctttcaattagttcttaacccttactgaacataagggtatttatacaggagggaaaccctacaaatgtgaagaatgtggcaaattttttaactgttcctcaatccttactaaacataaggtaattcatactggagggaattcctacaattgtgtggaatgtggcaaagcctttaatcagtccttaaggcttactacgtacaagacaactcatactggagagaaaccatacacgtgtgaagaatgtgggaaagcctctaacagatcctcaattcttaacagacataagctaattcatactagagagaaactgcaaacctgaaagatgtgacaaggcttttggcaacacctgaaacttttctgaatataaaagaaatcatactggtgagaaatcctagaaatgtgaagaatgtgacaaagcctttatatggctgtcacacttgattgtaggtttttagcttctttgcaatgggtttgaacatgctcctttagctcagagaagtttgttactaccgaccttcagaagcctaacttctgtcaactcatcaaagtcattctccattcaactttgttccattgctggaaaaatgtagatttttatgccttcttgtaattttttattaaaaaattttaccgtttttacacacattgcctgcaaatccatttttagtagtctcaatacatgttataatggtaactttatgtaattttaactttaatgtaaaacctgtgtggcctatggtggaaggaaatagaaaaagggcataccacttctcgaccttcctttttttcctctgggtcccagcaaccatcatagatgttacccatggatgcaagcatgaccttcccccatgggtccggaggagtttgtcagcaggacacgttatgctcaccttctcacctagctttccatgctgctggttttctaggcccactcagcccaaaaggctctcaaggtaaacactgtataagttcattttatctttacacatatttgcatgtgtatatgtgattttatggacctttagaaatagtattgcatgtgtgtttcctggatgacaccgtgtgttcaatggttagaagagcaggctcagagtacctgtgtaaccttgggcaagtctctcgacttctctgactcatttgttactcagggataataac

SEQ ID NO: 462237 - DNA, 1694 bp, Homo sapiens
ccgggccagtgcgggagccggagcggagccggggccggagcgggcggaatggagcccctgcgcgcgcccgcgctgcgccgcctgctgccgccgctgctgctcctgctgctgtcactgcccccccgcgcccgggccaagtacgtgcggggcaacctcagttccaaggaggtgagcatgccgagccctcctctgcggcccgccggcccccgggggacgcaagggaggcgaggggagcgggtaccgcctcgccccctgccgcccctcctggcggactccgggagcctcgggggagtggggccgagggcgatgggggactgggccagagtcgaggctaaggggagccgtagggtcgcggccagacctgggggttgtaggagggacgttgaggactgggtgttcctgacaagattttgtttcctctcggattacggccgactggacttccgtttccgctaccctgaggccaagtgctgtcagaacatcctcctctattttgatgacccatcccagtggccagccgtgtacaaggcaggggacaaggactgcctggccaaggagtcagtgatccggccggagaacaaccaggtcatcaacctcaccacccagtatgcctggtccggctgtcaggtggtatcagaggagggaacccgctacctgagctgctccagtggccgcagcttccgctcagtgcgtgaacggtggtggtatattgcgctcagcaagtgtgggggtgatggattgcagctggagtatgagatggtcctcaccaatggcaagtccttctggacacgacacttctccgctgatgagtttgggatcctggagacagatgtgaccttcctcctcatcttcatcctcatcttcttcctctcttgttactttggattcctgagcctcctatttttctgcatctactggggtcaatatgccaccgatggcattggcaacgagagtgtgaagatcttggccaagctgctcttctcctccagcttcctcatcttcctgctgatgcttatcctcctggggaagggattcacggtgacacggggccgcatcagccacgcgggctccgtgaagttgtctgtctacatgaccctgtacacgctcacccatgtggtgctgctcatctacgaggcggaattctttgacccaggccaggtactgtacacgtatgagtcgccggccggctacgggctcattggactgcaggtggcggcctacgtgtggttctgctatgctgtgcttgtctcactgcgacactttcctgagaagcagcctttttatgtgcccttctttgctgcctataccctctggttctttgcggttcctgtcatggccctgattgccaatttcggcatccccaagtgggcccgggagaagattgtcaatggcatccagctggggatccacttgtacgcccatggcgtgtttctggttctcctgcctcagcctccggagtagctgggactacaggagcacgccaccatgcccgtagagacggggtttcactatgttggccaggatggtctcgatctcctgacctcatgatccgcccgcctcggcctcccaaagtgctgggattacaggagtgagccactgcgcctggcccccaccacgtctattctttgccctggttcacatcctatctgacattcttggtgacagttctaatattcattaatttattcatcaat

SEQ ID NO: 462238 - DNA, 3890 bp, Homo sapiens
tctttatcctcatcgtcttcacgttgagcaggctaaggtggaagacgacgaggggttggtcttgctgtctcaagtggcagagaagttgctaaccattgtgtggctggactcggccgccactatggtgtgaggcgcgtgttcgggctcttgccgtccccgcacccgcaccgcggctactggcttgcggtccgccgttccacaaccagcccttgggcccccgcccgccacggacatgccgcgcgtctacataggacgcctaagctacaacgtccaggagaaggccatccagcgctttttcagtggctatggccgcctcctcgaagtagacctcaaaaatggctacggcttcgtggagttcgaggactcccgcgacaccgacgacgccctttacgagctgaacagcgaggagctctgcggcgagcgcgtgatcgtagagcacgcccggggcccgcgtcgcaatcgcgacagctacagctacggaagccgccgtggtggaggtggatacagcagtcggagacatctggcagagacaaatacggaccacctgtcgcggagcaaaggtcgatcacgttctcgatcaaaaggcaggaaatctagatcaaagagcaaatctaagcccaagtctgatcggggctcccattcacattctcgaagcagatctaaggatgagtatgagaaatatcgaagcaggtctcgatctcgctcaaagtcaagatcaaggtccaggtcgagttccagggattaactcagaactctcttgttgtctgcacactattatggaacactttcctgcttaggcagttactcttccatgtttatacttggtctcttctgcaagaggaatctcttgaaaacaggggcacacagaaatttgatatgtggccaaattggatgaaaaagatgaggtttaaggaaatggtggcatgaagaccctctcccttctttgtagaattaagataactatgattttatagcttttgagctaacataacttttgtaaagattaagctcatttagtttttgtttgtttgtttgtttgttttaagtatttcagccagatctgctggcagggtttttttgttgttttatttgtttgcttatttttaaattaactgttttgagctttgaatgcttaaggctttagagggagaacccaattttcaattatgttggctttttataaagcttgagttatgtaagatttaaatagaagtttgctaccaagatgattgccttattgaataggtcactattaaattcctttaaatgttgatatctgccatttgtggaaacaacgtaaattctactttagtgtaaacaaggcaagcctcagaccagcaataaattattcagtttggataacattattttgtgctgttaatcaaatttgccaaagtctttatctgcccctttaacaagttgagtaaaaataaaaggtatttaaaaaaaaaaaaggaagttactatattttttcaattgtagaagttttgttagattagtactatgcatttgatgtttttgatgtataaatgctattattttaatttcattttctgattgttgccacaatataggtatatggtatatctcattcatatatatatatatatatatatatatatatatatatatatatgtatatggaatagattttttaaagttgatcttatatccagtgaccttgctaaattcacttatttataattgttcattctttttgactttctgtgtacacagtatgtcatctgtggtaaagtcagttttacatcattctttataatcctcataccacttttttcttgctttattgcactggctaggacctccagaaataggatttgtagacatccttgcctttttcccagaatctaaaggaaaacaaaacattttaccatttgcataatgtcctcaagattcatctatacaaattgatttttagatattaaagcaatttgcattcctggaatagatttcatttggtcattgtgggtaatatttttaatatattattgaattaaatttgtcaaaattttgtataggattttatgtctatgtccatattgtcttctgtgttttctttcttgtaatagccttgtttgactttgtatcagaattatggactcataacatgagttgaggattccctttattttgtttttggttttttgtttgtttttggtcctctggaagagtgtgggtaagatgtgtaagattggtattattggttttggtattattttgccataattttgtgtgtaaaaattaccagagtagcacctgggaaaatttttagctatgtagtcaatgatttgatagacataggattaatcaaattttatatctcttgtgtacattttggtaaattcttttaaaaattatgtccatataatttcaccaaaatatctaattactggttttaaatagtttataatatctgttctatttttaatatctttaggatctaaagtgatgttcccttcttcagtcctggtgttggtaatgtatgtactctgttttcttgattaggttttctaggacttaacatttaattttttttaaaaacccacctacttttatagagctaatttctttttcactaatttatgctcctttattttcttctaaatattttatttggatatgattttctggggttttttttctagcttcttggaatgaaatcttagataagcaatgttcaacaattcttttttgctaataattgtatttaacgctatacgtttctttaaagtacctatttagctgtatcaaatagatttttatcacctttattgagacataaatgatatataacaatttgtacccagtttaactttacattttgataagttttggcaaacttatacacctgtgtagccaccaccacaatcaaacaacattttcctcacccccaaaatttcctgcattctttcccagacaatgcttcccacctctgtctccaagaaatcataaatctagtttttgtcagtatagattagaattatcttttctagactttcatataaatggaatgatacagcatactcttctgtgtctgccttctttctcttaacataaagttttgagatccgttaatatggtgtgtatcagtgtttcattctcttattgctgagtagcatactgttatgttaatatatgaccacaactgattaactcactcgatgatggacagttgtttccagtttggggttatgatgaataaatctgctatgaacagtcatatacaactttttgtgtagacatatatttttttcatttatattgcatcaatttctgggtttggagttgctagttcatatgataaatatatgtaaaactttataagaaactgccaattgttttccaaagtatttgtaccattttacaaccccccaacaatgtatgattgtttgagatggctcttacggttttctgtatctcccattcttctctatctatctgcatcaacctggatactttccacttacctgtatttctgttattatcctgtttttaatctattaaaaccatattttgaattattcattttactcagatgttttatttctggaatcttagtcttctttttatatggattctatttatttgctaaaattcttcattcttttttctcttttgaatatattatttattttaaataatatttatttaaaaatccttgagtgttaactgcaatagatgaattgcttctgggtctgttgctatctggccaattgatgctttcttttcccctgcatgacttctaatatttcatttgatggcaaacattatacttgaaaaaattatagatgttcctgacttatgttcctctaaatagagctaagtcttattttagcagatggttagaataccagtagatcacgctgatc

SEQ ID NO: 462239 - DNA, 1019 bp, Homo sapiens
tttgaacaaagaatcggacaaaatgcacagcaaacaaggaaggaataagcaacaaaagcagcgatttattgaaaatgaaagtacattctacaaggtgggagcaggcctaagcagtggctcaagagccccggttacagaatcttctggggtccaactaccccctagaggtttcccattggccactggtgtccaccccatgcaaatgaagtggtggccctcaatcaatctgattggttgcagaaagcaaccatcagaggctaacatgaagttacaaagttacactcctatgcaaccatctgattggttttggaaagcagccaatcagaggttgaggccctggaaaggaaaacgagatctgagggatccaaagccaggcaacatgcgcaatgtaaatgggcaggatcaattcctgccaacaaaaaccctgcttcatggaagaaggccatgctccatggcatagatatgaacttgttatgatatttctgaagaagaagagactgtaaggaagacctctcctaacttagcaaccattctccattttccaaaagggtaaaccaaggcacagaaagataggcacaaggtaacttatgcatgcagaaggtaacaaacactcgtgcacacacactgaaaatcagaaagagagagagagagagagttgccataattagtacttttgtttagagaagaaaggctgaagcctggagaagttaagcaacatgcttaaatccacacagctagtcagaggcaaagccaagatttgaacgtgggtagtctgaatccaggatcttggccttcacccctctataacatgacaccctcatccctgaaaaaagaaaaagtcaaccgaaagcattgtgaaaagtgtcctctaataaaatggctaattctggcaacaggcccagagaggggatggagaaatccacttagttttactttcatgactgatacatatcttaaaactgagtttcttgctggaagattttttaaatcttattgtaaagacctaggaacttaaaact

SEQ ID NO: 462240 - DNA, 528 bp, Homo sapiens
cggttgctgaaggaaagagctattaccaaaacctatactttctgttttcaattttttcatttcttcttgggttctggggttttttccaggtaacttatgcatgcagaaggtaacaaacactcgtgcacacacactgaaaatcagaaagagagagagagagagagttgccataattagtacttttgtttagagaagaaaggctgaagcctggagaagttaagcaacatgcttaaatccacacagctagtcagaggcaaagccaagatttgaacgtgggtagtctgaatccaggatcttggccttcacccctctataacatgacaccctcatccctgaaaaaagaaaaagtcaaccgaaagcattgtgaaaagtgtcctctaataaaatggctaattctggcaacaggcccagagaggggatggagaaatccacttagttttactttcatgactgatacatatcttaaaactgagtttcttgctggaagattttttaaatcttattgtaaagacctaggaacttaaaact

SEQ ID NO: 462241 - DNA, 1748 bp, Homo sapiens
tgcggaaacatggctcgcgaaggactgcggaccctcgtggttgcaaagaaggcgttgacagaggagcagtaccaggactttgagcccatgcagtccagctctgtggagtccacacacagcacgtacacgtgtgcacacaggcgcctccccctctgtccccagagccgatacactcaagccaagctgagcatgcacgacaggtccctcaaggtggccgcggtagtcgagagcctggagagggagatggaactgctgtgcctcaccggcgtggaggaccagctgcaggcagacgtgcggcccacgctggagatgctgcgcaacgccgggatcaagatatggatgctaacaggcgataaactcgagacagctacctgcattgccaaaagttcacatctcgtgtctagaacacaagatattcatattttcagacaggtaaccagtcggggagaggcacatttggagctgaatgcatttcgaaggaagcatgattgtgcactagtcatatctggggactctctggaggtttgtctaaagtactacgagcatgaatttgtggagctggcctgccagtgccctgccgtggtttgctgccgctgctcacccacccagaaggcccgcattgtgacactgctgcagcagcacacagggagacgcacctgcgccatcggtgatggaggaaatgatgtcagcatgattcaggcagcagactgtgggattgggattgagggaaagcgtacgctcggtcagcaaacactcagcacatgcttggtcaacacacatcagcacgtgctcagcgcacagtcagcacacactcggtacacgctcggtcggcgcacgtcagcacatgctcagcgcacagcacacactcggcacacggtcatcacacgtcagcttgtgcccagcgcacagtcagcacacactcagcacacggtcagcgcacatcagcacgtgctcagcgcacagtcagcacacagcacacactcggtcagcgcacgtcagcatgtgctcagcgcacagtcagcacacacggcacatacgtgcttagtgcacatcagcacatgctcagcacacacttggcacactcgtttagcacactacacatgctcagcacacgggcgggcccacactcagatcacaagggagtccttcaacagggctggcccggactctgcagctctgctgactcctgtgacacctatggagggtaaacaggcctcgctggcggccgacttctccatcacgcagttccggcacataggcaggctgctcatggtgcacgggcggaacagctacaagaggtcggcggcactcggccagttcgtcatgcacaggggccttatcatctccaccatgcaggtgctcgtggaactgacagttgtcttcgtctgtgggctctctctccaggctgtgttttcctcagtcttctacttcgcatccgtccctttgtatcagggcttcctcatggtggggtaagttacactcagaacctgccagctcatccaggggaggacttctattttgaaaaaaaaaaaaaaaaaaaaacaaaaaacgtatatagaagattcttgatacagtcatcatttagaatgaataatactgatgtaaaaacaacattttacttgggtgaacttcaagacagcacctgcacacttgttcctcctgggattttcttattagattttgttttcaagtggaagccatagtttgtgtcaggaactgtgttggatctgagatttttaaagggtccc

SEQ ID NO: 462242 - DNA, 3471 bp, Homo sapiens
tgcagatgtggcatggccaaaaaatcccaggtttgatggaacgaaggagcggggaaaatcccttgagtgaggaagacgctagtgttctcttatatctgtagcaagtctggctgaaatgcaaatatccaataatcagagtacaggaagcacctcgcccttagagaagctgtggctagaatccgtcaagtcagtctggctctgccgggcctgatacccaaggcttccgctgtcactcagaagtgaggggcggggcctagcattccatccaatcagaggtgccggggcagggccctgcccattgtttatccaggcacagagtgggtcgcattcctgtcctcacctttgtccttgcgcagccggtggttgatatccgctgtatccatccccgagagggacctggtacctctacccaggtttctatcgctctgtctcctgcgctgtgcccttctgtagtcacaggagctgtagagaggaccccaggacatctgaaagccaggaaatggaccctgtggcctgtgaggatgttgctgtgaacttcacccaggaggagtgggctttgctggatatttcgcagaggaaactctacagggaagtgatgctggaaactttcaggaacctgacctctatagggaaaaagtggaaagaccagaacattgaatatgagtaccaaaaccccaggagaaacttcaggagtctcatagaagggaatgtcaatgaaattaaagaagacagtcattgtggagaaacttttacccaggttccagatgacaggctgaacttccaggagaagaaagcttctcctgaagcaaaatcatgtgataactttgtatgtggagaagttggcataggtaactcatcttttaatatgaacatcagaggtgacattgggcacaaggcatacgagtatcaggactatgcaccaaagccatataagtgtcaacaacctaagaaagccttcagatatcacccctcctttagaacacaagaaaggaatcacaccggagagaaaccctatgcttgtaaagaatgtggaaaaacctttatttcccattcaggcattcgaagacgcatggtaatgcacagtggggatggaccttataaatattatatcttatccatgaaagaactcacactggagagaaaccgtatgaatgtaaacaatgtgttaaatcctttagttattctgctacccatcgaatacatgaaagaactcacactggagaaaagccttatgaatgtcagcaatgtgggaaagcattccatagttccagttcttttcaagcacataaaagaacccacactgggggaaagccatatgaatgtaaacaatgtggcaaatccttcagttggtgtcattcctttcaaatacatgaaagaactcacactggggagaagccctgtgaatgtagcaaatgtaataaagcattccgtagttacagatcctatcttagacataaaaggagtcacacgggagagaagccttatcaatgtaaggaatgtagaaaagcattcacgtatcccagttcccttcgtagacatgaaaggacccactctgcgaaaaaaccttatgaatgtaagcagtgtgggaaagcattatcttataagttttcaaacacacctaagaatgcgctctggagaaagaccttataaatttcctttcagtatcatgaaaggactcacactggagagaaaccctatgagtgtaagcaatgtgggaaagccttcagatgtgccccacaccttcgaaggcatggtaggactcactggagagaaaccctatgagtgtaaggaatgtgggaaagccttcagatctgcctcacaccttcaaattcatgaaaggacacaaacacacataagaatacactctggagaaagaccttataaatgtaagacatgtgggaaaggcttttattctcccacgtcatttcaaagacatgaaaaaactcacactgcagagaaaccctatgaatgcaagcaatgtggtaaagccttcagtagttccagttccttttggtaccatgaaaggactcacactggagagaaaccctatgagtgtaagcaatgtgggaaagccttcagatctgcctcaatccttcaaatgcatgctgggactcaccctgaagagaagccctacgagtgtaagcaatgtgggaaagccttcagatctgccccacaccttcgaatccatggtagaactcacactggagagaaaccctatgagtgtaaggaatgtgggaaagccttcagatctgccaagaaccttcgaattcatgaaaggacacaaacacacgtaagaatgcactctgtagaaagaccttataaatgtaagatatgtgggaaaggcttttattctgccaagtcatttcaaatacctgaaaaatcttacactggagagaaaccctatgagtgtaagcaatgtggcctccagctgcccagaacagctgcagagagtgtggattctgagaagctgcagggccctggaaagcaggagacccacgtgcaggatgccctatccaatcggggtgctggggcggggccctgccaactgtttaatccgccggaaggagggcgcagcattgccggtcttctcattgcctggctgctagaggaaacccgaagtcgggattctttctttcctgctctgagagggaccaggtccctcctccgtagcttttgtctctctattgcctgcgccgtgtcctggactgctcacgggagttctgcaggagacgccggaatatctggaagctgaaaaatggaaataaatggaaagaccagaatattgaagatcactacagaaatctaagggtcaggcatggtggctcacacctgtaatcccagcactttgggaagcagaggcagttggatcacttgaacctgggaggcgttctggaggtcaggagttcgagaccagcttggccaacatggtgaaaccctgtgtctgctaaaaatacaaaaattagccgggcctcatggcacatgcctgtaatcccagctactctggaggctgaagcaggagaatcgcttgaacctgggaggcggaggttgcagtgagccgagatcacgccactgcttcttgctttaaaagaagagtaaagacaagagtgttggaccagtattgcagttctgtagtatcatttcttataaaaaacaaaacaacaataatttatcaaaattggcatataaagactgacaacattctaataaaggcacaaatttctttttaatacttgtttcaggctctttattctctttataagttaactaatctattttcttcaaacttctgcattagttctttaaaatcacaacacttagcaagctgacttttttaatgtgctcaatacaaatacttgtgaacttttaatatgttgagtgctttcattgtgataactggatctccatttgatattttcatttatataactcatttgcagtctgaaaatttttagtgccagtccctgaatatat

SEQ ID NO: 462243 - DNA, 3224 bp, Homo sapiens
tgcagatgtggcatggccaaaaaatcccaggtttgatggaacgaaggagcggggaaaatcccttgagtgaggaagacgctagtgttctcttatatctgtagcaagtctggctgaaatgcaaatatccaataatcagagtacaggaagcacctcgcccttagagaagctgtggctagaatccgtcaagtcagtctggctctgccgggcctgatacccaaggcttccgctgtcactcagaagtgaggggcggggcctagcattccatccaatcagaggtgccggggcagggccctgcccattgtttatccaggcacagagtgggtcgcattcctgtcctcacctttgtccttgcgcagccggtggttgatatccgctgtatccatccccgagagggacctggtacctctacccaggtttctatcgctctgtctcctgcgctgtgcccttctgtagtcacaggagctgtagagaggaccccaggacatctgaaagccaggaaatggaccctgtggcctgtgaggatgttgctgtgaacttcacccaggaggagtgggctttgctggatatttcgcagaggaaactctacagggaagtgatgctggaaactttcaggaacctgacctctatagggaaaaagtggaaagaccagaacattgaatatgagtaccaaaaccccaggagaaacttcaggagtctcatagaagggaatgtcaatgaaattaaagaagacagtcattgtggagaaacttttacccaggttccagatgacaggctgaacttccaggagaagaaagcttctcctgaagcaaaatcatgtgataactttgtatgtggagaagttggcataggtaactcatcttttaatatgaacatcagaggtgacattgggcacaaggcatacgagtatcaggactatgcaccaaagccatataagtgtcaacaacctaagaaagccttcagatatcacccctcctttagaacacaagaaaggaatcacaccggagagaaaccctatgcttgtaaagaatgtggaaaaacctttatttcccattcaggcattcgaagacgcatggtaatgcacagtggggatggaccttataaatattatatcttatccatgaaagaactcacactggagagaaaccgtatgaatgtaaacaatgtgttaaatcctttagttattctgctacccatcgaatacatgaaagaactcacactggagaaaagccttatgaatgtcagcaatgtgggaaagcattccatagttccagttcttttcaagcacataaaagaacccacactgggggaaagccatatgaatgtaaacaatgtggcaaatccttcagttggtgtcattcctttcaaatacatgaaagaactcacactggggagaagccctgtgaatgtagcaaatgtaataaagcattccgtagttacagatcctatcttagacataaaaggagtcacacgggagagaagccttatcaatgtaaggaatgtagaaaagcattcacgtatcccagttcccttcgtagacatgaaaggacccactctgcgaaaaaaccttatgaatgtaagcagtgtgggaaagcattatcttataagttttcaaacacacctaagaatgcgctctggagaaagaccttataaatttcctttcagtatcatgaaaggactcacactggagagaaaccctatgagtgtaagcaatgtgggaaagccttcagatgtgccccacaccttcgaaggcatggtaggactcactggagagaaaccctatgagtgtaaggaatgtgggaaagccttcagatctgcctcacaccttcaaattcatgaaaggacacaaacacacataagaatacactctggagaaagaccttataaatgtaagacatgtgggaaaggcttttattctcccacgtcatttcaaagacatgaaaaaactcacactgcagagaaaccctatgaatgcaagcaatgtggtaaagccttcagtagttccagttccttttggtaccatgaaaggactcacactggagagaaaccctatgagtgtaagcaatgtgggaaagccttcagatctgcctcaatccttcaaatgcatgctgggactcaccctgaagagaagccctacgagtgtaagcaatgtgggaaagccttcagatctgccccacaccttcgaatccatggtagaactcacactggagagaaaccctatgagtgtaaggaatgtgggaaagccttcagatctgccaagaaccttcgaattcatgaaaggacacaaacacacgtaagaatgcactctgtagaaagaccttataaatgtaagatatgtgggaaaggcttttattctgccaagtcatttcaaatacctgaaaaatcttacactggagagaaaccctatgagtgtaagcaatgtggcctccagctgcccagaacagctgcagagagtgtggattctgagaagctgcagggccctggaaagcaggagacccacgtgcaggatgccctatccaatcggggtgctggggcggggccctgccaactgtttaatccgccggaaggagggcgcagcattgccggtcttctcattgcctggctgctagaggaaacccgaagtcgggattctttctttcctgctctgagagggaccaggtccctcctccgtagcttttgtctctctattgcctgcgccgtgtcctggactgctcacgggagttctgcaggagacgccggaatatctggaagctgaaaaatggaaataaatggaaagaccagaatattgaagatcactacagaaatctaaggtgactcccacgaccagtgcgggtcacagcacaggcgacagaagctatggcagaggcacctgaaccctctcggaggggaaagccaggctcccaacctcagctcgccgcctggagccgggaaccgaggagagcagggccttcgccctccccgatggacactcggcaggccccgcccagcgcccctgattggacgaagcgccgggccccgccccctcagccttttgagtcagggtctcaccctgtggcccaggctgccctccagtgatgccatcatgactcagtgcaacctcaaactcccaggttcaagcgatcttccatcctgacctccaaaagggctggattatacacataagccatgtcacactttatatgtttctagggaagcttttctaagaataaatacattggaactaggtt

SEQ ID NO: 462244 - DNA, 360 bp, Homo sapiens
ccggatccagcgatagattctttaagccagaggtggaagtggcactccttactaatttacctgaaagcactatttcctgagccatggagactgagtatagcaatgatatgtgatctaaagaagttcccactctgcttcttctctgcagtgaagtcctgccagttttgagtcagggtctcaccctgtggcccaggctgccctccagtgatgccatcatgactcagtgcaacctcaaactcccaggttcaagcgatcttccatcctgacctccaaaagggctggattatacacataagccatgtcacactttatatgtttctagggaagcttttctaagaataaatacattggaactaggtt

SEQ ID NO: 462245 - DNA, 3335 bp, Homo sapiens
tgcagatgtggcatggccaaaaaatcccaggtttgatggaacgaaggagcggggaaaatcccttgagtgaggaagacgctagtgttctcttatatctgtagcaagtctggctgaaatgcaaatatccaataatcagagtacaggaagcacctcgcccttagagaagctgtggctagaatccgtcaagtcagtctggctctgccgggcctgatacccaaggcttccgctgtcactcagaagtgaggggcggggcctagcattccatccaatcagaggtgccggggcagggccctgcccattgtttatccaggcacagagtgggtcgcattcctgtcctcacctttgtccttgcgcagccggtggttgatatccgctgtatccatccccgagagggacctggtacctctacccaggtttctatcgctctgtctcctgcgctgtgcccttctgtagtcacaggagctgtagagaggaccccaggacatctgaaagccaggaaatggaccctgtggcctgtgaggatgttgctgtgaacttcacccaggaggagtgggctttgctggatatttcgcagaggaaactctacagggaagtgatgctggaaactttcaggaacctgacctctatagggaaaaagtggaaagaccagaacattgaatatgagtaccaaaaccccaggagaaacttcaggagtctcatagaagggaatgtcaatgaaattaaagaagacagtcattgtggagaaacttttacccaggttccagatgacaggctgaacttccaggagaagaaagcttctcctgaagcaaaatcatgtgataactttgtatgtggagaagttggcataggtaactcatcttttaatatgaacatcagaggtgacattgggcacaaggcatacgagtatcaggactatgcaccaaagccatataagtgtcaacaacctaagaaagccttcagatatcacccctcctttagaacacaagaaaggaatcacaccggagagaaaccctatgcttgtaaagaatgtggaaaaacctttatttcccattcaggcattcgaagacgcatggtaatgcacagtggggatggaccttataaatattatatcttatccatgaaagaactcacactggagagaaaccgtatgaatgtaaacaatgtgttaaatcctttagttattctgctacccatcgaatacatgaaagaactcacactggagaaaagccttatgaatgtcagcaatgtgggaaagcattccatagttccagttcttttcaagcacataaaagaacccacactgggggaaagccatatgaatgtaaacaatgtggcaaatccttcagttggtgtcattcctttcaaatacatgaaagaactcacactggggagaagccctgtgaatgtagcaaatgtaataaagcattccgtagttacagatcctatcttagacataaaaggagtcacacgggagagaagccttatcaatgtaaggaatgtagaaaagcattcacgtatcccagttcccttcgtagacatgaaaggacccactctgcgaaaaaaccttatgaatgtaagcagtgtgggaaagcattatcttataagttttcaaacacacctaagaatgcgctctggagaaagaccttataaatttcctttcagtatcatgaaaggactcacactggagagaaaccctatgagtgtaagcaatgtgggaaagccttcagatgtgccccacaccttcgaaggcatggtaggactcactggagagaaaccctatgagtgtaaggaatgtgggaaagccttcagatctgcctcacaccttcaaattcatgaaaggacacaaacacacataagaatacactctggagaaagaccttataaatgtaagacatgtgggaaaggcttttattctcccacgtcatttcaaagacatgaaaaaactcacactgcagagaaaccctatgaatgcaagcaatgtggtaaagccttcagtagttccagttccttttggtaccatgaaaggactcacactggagagaaaccctatgagtgtaagcaatgtgggaaagccttcagatctgcctcaatccttcaaatgcatgctgggactcaccctgaagagaagccctacgagtgtaagcaatgtgggaaagccttcagatctgccccacaccttcgaatccatggtagaactcacactggagagaaaccctatgagtgtaaggaatgtgggaaagccttcagatctgccaagaaccttcgaattcatgaaaggacacaaacacacgtaagaatgcactctgtagaaagaccttataaatgtaagatatgtgggaaaggcttttattctgccaagtcatttcaaatacctgaaaaatcttacactggagagaaaccctatgagtgtaagcaatgtggcctccagctgcccagaacagctgcagagagtgtggattctgagaagctgcagggccctggaaagcaggagacccacgtgcaggatgccctatccaatcggggtgctggggcggggccctgccaactgtttaatccgccggaaggagggcgcagcattgccggtcttctcattgcctggctgctagaggaaacccgaagtcgggattctttctttcctgctctgagagggaccaggtccctcctccgtagcttttgtctctctattgcctgcgccgtgtcctggactgctcacgggagttctgcaggagacgccggaatatctggaagctgaaaaatggaaataaatggaaagaccagaatattgaagatcactacagaaatctaaggatgaaatcaacagccaatctgggtgccattgagacatctaaagccttactatgagccagatacccaggaagaggttttgggaggatcccaaagactccctggttgcagccatgtcaagactgatgctgaggaggaccccaactgtcacgagcaacaactgcctggggacagatcaagaagctgtcacagatggcagagaaaaacctgagaaaagcgggacaaccagtcacaatgagtaatttaatgatagctatgacagtggtgatcaccattgccatgagtattccttcaacaagggctgacacagagaacaattacacttattgggcatatttatcaatcttggctggcaataatgcctggatgtgatcactctatgacacagttacacatgctttctggtctcagtatttaccataataatctgctcctataattgaggcatactgccctcaaaaaactatttgtaaacaggattggacctggtcagaaaaaatgaacgtacttgtttgggaagattgcattgc

SEQ ID NO: 462246 - DNA, 5180 bp, Homo sapiens
  misc_feature (3434)..(3434): n is a, c, g, or t
ctctctctctttcgggcggagtcgcccaccactgccagcccagcgctggggggacctgctccaggctgtagccgcaggaccccaccaccccccatggctcccctggccttggtgggggtcacactcctcctggcggctcccccatgctccggggcagccaccccaaccccctccctgccgcctcccccggccaatgacagcgacaccagcacagggggctgccaggggtcctaccgctgccagccgggggtgctgctgcccgtgtgggagcccgacgacccgtcgctgggtgacaaggcggcacgggcagtggtgtactttgtggccatggtctacatgtttctgggagtgtccatcatcgccgaccgtttcatggcggccatcgaggtcatcacgtcaaaagagaaggagatcaccatcaccaaggccaacggtgagaccagcgtgggcaccgttcgcatctggaatgagacggtgtccaacctcacgctcatggccctgggctcctccgcacctgagatcctgctgtcagtcatcgaagtctgcggccacaacttccaggcgggtgagctgggcccaggcaccatcgtgggcagcgctgccttcaacatgtttgtggtcatcgccgtgtgcatctacgtcatcccagccggcgagagccgcaagatcaagcacctgagagtcttctttgtcactgcctcttggagcatcttcgcctatgtctggctttatctcatccttgctgttttttcccccggtgtggtccaggtgtgggaggcgctgctgaccctggtcttcttcccggtgtgcgtggtattcgcctggatggccgacaagcggctgctcttctacaagtacgtgtacaagcgctaccgcaccgacccacgcagcggcatcatcataggcgccgagggcgaccccccgaagagcatcgagctggacggcacgttcgtgggcgccgaggccccaggtgagctgggcggcctgggcccgggccccgccgaggcgcgcgagctggacgccagccgccgcgaggtcatccagatcctcaaggacctcaagcagaagcacccggacaaggatctggagcagctggtgggcatcgccaactactacgcgctgctgcaccagcagaagagccgcgccttctaccgcatccaggccacgcggctgatgaccggcgccgggaacgtgctgcgcagacacgcggcggacgcctcgcgcagggcggcgccggccgagggcgcgggcgaggacgaagacgacggcgccagccgcatcttcttcgagcctagcctctaccactgcctggagaactgcggctccgtgctgctgtccgtcacgtgccagggcggcgagggcaacagcaccttctacgtggactaccgcactgaggacggctctgccaaggcgggctccgactacgagtacagcgagggcacgctggtgttcaaaccaggcgagacgcagaaggagctgcgcatcggcatcatcgacgacgacatcttcgaggaggacgagcatttcttcgtgcggctgctgaacctgcgcgtgggcgacgcgcagggcatgttcgagccggacggcggcgggcggcccaaggggcggctggtggcgccgctgctggccaccgtcaccatcctggacgacgaccacgcaggcatcttctccttccaggaccgcctgctgcacgtgagcgagtgcatgggcaccgtggacgtgcgcgtcgtgcgcagctcgggcgcgcgcggcaccgtgcgccttccctaccgcacggtggacggcacggcgcgcggcggcggcgtgcactacgaggacgcgtgcggagagctggagtttggcgacgacgagaccatgaaaactcttcaggtgaagatagttgatgacgaggaatatgagaaaaaggataatttcttcattgagctgggccagccccagtggcttaagcgagggatttcagctctgctactcaatcaaggggatggggacaggaagctaacagccgaggaggaggaggctcggaggatagcagagatgggcaagccagttcttggggagaactgccggctggaggtcatcatcgaggagtcatatgattttaagaacacggtggataaactcatcaagaaaacgaacttggccttggtaattgggacccattcatggagggagcagtttttagaggcaattacggtgagcgcaggggacgaggaggaggaggaggacgggtcccgggaggagcggctgccgtcgtgctttgactacgtgatgcacttcctgacggtgttctggaaggtgctcttcgcctgtgtgccccccaccgagtactgccacggctgggcctgctttggtgtctccatcctggtcatcggcctgctcaccgccctcattggggacctcgcctcccacttcggctgcaccgttggcctcaaggactctgtcaatgctgttgtcttcgttgccctgggcacctccatccctgacacgttcgccagcaaggtggcggcgctgcaggaccagtgcgccgacgcgtccatcggcaacgtgaccggctccaacgcggtgaacgtgttccttggcctgggcgtcgcctggtctgtggccgccgtgtactgggcggtgcagggccgccccttcgaggtgcgcactggcacgctggccttctccgtcacgctcttcaccgtcttcgccttcgtgggcattgccgtgctgctgtaccggcgccggccgcacatcggcggcgagctgggcggcccgcgcggacccaagctcgccaccaccgcgctcttcctgggcctctggctcctgtacatcctcttcgccagcctggaggcgtactgccacatccggggcttctagggcctcgcgcagagactcgtccccaccgcccgcccggggctagggactcggctgcacctgctcttggaccctggtctccttttccccccagactcggcctcctctcctgggactcggcctcccttctccgccccctcccctggctttgattgcccctgttctgtgtccccagtagctcagccttccctcttcctctcgggagcctccccggttcctcccctgcggtgaccccaactccagcccatcctgttggtgaccgtctatatccctggggaaatttccaccccagtcccctccccagggaaccacccccagtaaccatcctggggagtttaaggtctctctccttggtcacccagcctggctttgcccccaaagtctcccttcccctagtgacccccccccacttcaccccatgtcccagagcctcagaacccaccctccctgggggaccctcgaaggaggctgtcagaggccgtctcagctcccagcccttccccccagccctcagggagctccgctcagccccggcggggaggagcgggtgggtgtgcgcgcaaggaggccgcacaccnttccttccaatccctccactcgggttcttgggaggacactcattctccaggctcggagacgaggggagaagtttggggtttcagtcccagggcttagccggaggaagcacattttgaacctgcaacttcagacattccagctcccccactcgccctccactacctctgagagcccagccacgccttggagggaggggcttgtgtgtgtatatagtgtgtttgggggaggggggacgcgggagggtgcatgtcttgggaaaagggggtgacagacaacttttgagagggcagcagactccctcagccatgagaaccagctttggggaggaggccgggaatcaaagcgagtccagttgatctcccctgacaatctggaaggttccttttgccctcagtgccagccaatccgggcaggaccctcgaagaggagaccgagggtcccagaggaccaatgctacaagccagcaaatgctgccacatctctgcctgatggggggtggggatgggtggggggatgggactgggccaagggatctgggtgggcatttttaactttggaggccttccatctgtcggtaggccatctgcattttcttactgttgatgtttcctgcccaaaggacacatttgggcagtgccacccactccttgggcccctaggatgacccaactacccccataactttctgcttcccacaggttttcagcattctatcgtcctgttgtgctcagccccaacatcccagacccgttacccgctacccttctctcccccagctcatcatcagtcgctgtctcttttctgtgatttctgtaaaagttgccataaaactttgaaattctgcctgaaaaacagtcccgtgggaagctgggattcaggaggagggggctaataaggtctctgactgagatttgggcaactgttaaaccaagtaatctgggtttttgcggcccgcggtcgtctgcgggacacacccacatatagcagcagcgccggggtccagccgccaagctcttccactcgccacgcccccatcagtaatgagcttccactagccacgcccccatccgtcagcctagctcttccactagccacacccccatccatcagtcatgggcttccacaagccacgcacctccactctccatgcccccattggtcagtcgtgggtttccactaaccacgcccccattcatcagccaagctcctccacttgctacgcccgcatccgtcaattacgggtttccactaaccacgcccccattcatcagcctagctcttccactaatcacacccccacttatcagtcgtgcttcagccacgccttcctgcttcagtcaggggcttccactagccacgcccccatgcatgagccacaaactgtttctctttatgggcatcctgggaacacaaaagagagacgttcatttgcctgagccaaagagctggggttgatggggtttcctaaataaagcaagtaattttctcagatcctacaggaggaggggtgtgtgtgtgtgtgttgtgccaaaggacacagcctgtgtaaaggtgtgcagagttgggagataatggctttttcagagccctggaaatggttatcatgaacgaggtatggggtgcgtggggagtgaacttgaggacaaatcataagagactttatcagccactctagggagcttggaatatatcctaagagtaaaggggagctttgcaagggatttaagtgggggaaggaggcaggc

SEQ ID NO: 462247 - DNA, 3961 bp, Homo sapiens
  misc_feature (2215)..(2215): n is a, c, g, or t
tattacttgtttaatgcctgtcgaccctcatacttgggagttcttctatggcacctacgtctcctctgggaagcacgtccagactccccccgtacaacacacagccgatgaccgaccctcaccccgctcttccccctccccaccccgccgcagcgagggcacgctggtgttcaaaccaggcgagacgcagaaggagctgcgcatcggcatcatcgacgacgacatcttcgaggaggacgagcatttcttcgtgcggctgctgaacctgcgcgtgggcgacgcgcagggcatgttcgagccggacggcggcgggcggcccaaggggcggctggtggcgccgctgctggccaccgtcaccatcctggacgacgaccacgcaggcatcttctccttccaggaccgcctgctgcacgtgagcgagtgcatgggcaccgtggacgtgcgcgtcgtgcgcagctcgggcgcgcgcggcaccgtgcgccttccctaccgcacggtggacggcacggcgcgcggcggcggcgtgcactacgaggacgcgtgcggagagctggagtttggcgacgacgagaccatgaaaactcttcaggtgaagatagttgatgacgaggaatatgagaaaaaggataatttcttcattgagctgggccagccccagtggcttaagcgagggatttcaggggatggggacaggaagctaacagccgaggaggaggaggctcggaggatagcagagatgggcaagccagttcttggggagaactgccggctggaggtcatcatcgaggagtcatatgattttaagaacacggtggataaactcatcaagaaaacgaacttggccttggtaattgggacccattcatggagggagcagtttttagaggcaattacggtgagcgcaggggacgaggaggaggaggaggacgggtcccgggaggagcggctgccgtcgtgctttgactacgtgatgcacttcctgacggtgttctggaaggtgctcttcgcctgtgtgccccccaccgagtactgccacggctgggcctgctttggtgtctccatcctggtcatcggcctgctcaccgccctcattggggacctcgcctcccacttcggctgcaccgttggcctcaaggactctgtcaatgctgttgtcttcgttgccctgggcacctccatccctggtaacaccctgggagactttggtggggtaggatctcagatgagccaggcaggggcaacacaggatcctgccaaaatgagacacgttcgccagcaaggtggcggcgctgcaggaccagtgcgccgacgcgtccatcggcaacgtgaccggctccaacgcggtgaacgtgttccttggcctgggcgtcgcctggtctgtggccgccgtgtactgggcggtgcagggccgccccttcgaggtgcgcactggcacgctggccttctccgtcacgctcttcaccgtcttcgccttcgtgggcattgccgtgctgctgtaccggcgccggccgcacatcggcggcgagctgggcggcccgcgcggacccaagctcgccaccaccgcgctcttcctgggcctctggctcctgtacatcctcttcgccagcctggaggcgtactgccacatccggggcttctagggcctcgcgcagagactcgtccccaccgcccgcccggggctagggactcggctgcacctgctcttggaccctggtctccttttccccccagactcggcctcctctcctgggactcggcctcccttctccgccccctcccctggctttgattgcccctgttctgtgtccccagtagctcagccttccctcttcctctcgggagcctccccggttcctcccctgcggtgaccccaactccagcccatcctgttggtgaccgtctatatccctggggaaatttccaccccagtcccctccccagggaaccacccccagtaaccatcctggggagtttaaggtctctctccttggtcacccagcctggctttgcccccaaagtctcccttcccctagtgacccccccccacttcaccccatgtcccagagcctcagaacccaccctccctgggggaccctcgaaggaggctgtcagaggccgtctcagctcccagcccttccccccagccctcagggagctccgctcagccccggcggggaggagcgggtgggtgtgcgcgcaaggaggccgcacaccnttccttccaatccctccactcgggttcttgggaggacactcattctccaggctcggagacgaggggagaagtttggggtttcagtcccagggcttagccggaggaagcacattttgaacctgcaacttcagacattccagctcccccactcgccctccactacctctgagagcccagccacgccttggagggaggggcttgtgtgtgtatatagtgtgtttgggggaggggggacgcgggagggtgcatgtcttgggaaaagggggtgacagacaacttttgagagggcagcagactccctcagccatgagaaccagctttggggaggaggccgggaatcaaagcgagtccagttgatctcccctgacaatctggaaggttccttttgccctcagtgccagccaatccgggcaggaccctcgaagaggagaccgagggtcccagaggaccaatgctacaagccagcaaatgctgccacatctctgcctgatggggggtggggatgggtggggggatgggactgggccaagggatctgggtgggcatttttaactttggaggccttccatctgtcggtaggccatctgcattttcttactgttgatgtttcctgcccaaaggacacatttgggcagtgccacccactccttgggcccctaggatgacccaactacccccataactttctgcttcccacaggttttcagcattctatcgtcctgttgtgctcagccccaacatcccagacccgttacccgctacccttctctcccccagctcatcatcagtcgctgtctcttttctgtgatttctgtaaaagttgccataaaactttgaaattctgcctgaaaaacagtcccgtgggaagctgggattcaggaggagggggctaataaggtctctgactgagatttgggcaactgttaaaccaagtaatctgggtttttgcggcccgcggtcgtctgcgggacacacccacatatagcagcagcgccggggtccagccgccaagctcttccactcgccacgcccccatcagtaatgagcttccactagccacgcccccatccgtcagcctagctcttccactagccacacccccatccatcagtcatgggcttccacaagccacgcacctccactctccatgcccccattggtcagtcgtgggtttccactaaccacgcccccattcatcagccaagctcctccacttgctacgcccgcatccgtcaattacgggtttccactaaccacgcccccattcatcagcctagctcttccactaatcacacccccacttatcagtcgtgcttcagccacgccttcctgcttcagtcaggggcttccactagccacgcccccatgcatgagccacaaactgtttctctttatgggcatcctgggaacacaaaagagagacgttcatttgcctgagccaaagagctggggttgatggggtttcctaaataaagcaagtaattttctcagatcctacaggaggaggggtgtgtgtgtgtgtgttgtgccaaaggacacagcctgtgtaaaggtgtgcagagttgggagataatggctttttcagagccctggaaatggttatcatgaacgaggtatggggtgcgtggggagtgaacttgaggacaaatcataagagactttatcagccactctagggagcttggaatatatcctaagagtaaaggggagctttgcaagggatttaagtgggggaaggaggcaggc

SEQ ID NO: 462248 - DNA, 3272 bp, Homo sapiens
  misc_feature (1526)..(1526): n is a, c, g, or t
ctgtaggtgctgctgagataggtcgtggtcgtaagcggatagcagagatgggcaagccagttcttggggagaactgccggctggaggtcatcatcgaggagtcatatgattttaagaacacggtggataaactcatcaagaaaacgaacttggccttggtaattgggacccattcatggagggagcagtttttagaggcaattacggtgagcgcaggggacgaggaggaggaggaggacgggtcccgggaggagcggctgccgtcgtgctttgactacgtgatgcacttcctgacggtgttctggaaggtgctcttcgcctgtgtgccccccaccgagtactgccacggctgggcctgctttggtgtctccatcctggtcatcggcctgctcaccgccctcattggggacctcgcctcccacttcggctgcaccgttggcctcaaggactctgtcaatgctgttgtcttcgttgccctgggcacctccatccctggtaacaccctgggagactttggtggggtaggatctcagatgagccaggcaggggcaacacaggatcctgccaaaatgagacacgttcgccagcaaggtggcggcgctgcaggaccagtgcgccgacgcgtccatcggcaacgtgaccggctccaacgcggtgaacgtgttccttggcctgggcgtcgcctggtctgtggccgccgtgtactgggcggtgcagggccgccccttcgaggtgcgcactggcacgctggccttctccgtcacgctcttcaccgtcttcgccttcgtgggcattgccgtgctgctgtaccggcgccggccgcacatcggcggcgagctgggcggcccgcgcggacccaagctcgccaccaccgcgctcttcctgggcctctggctcctgtacatcctcttcgccagcctggaggcgtactgccacatccggggcttctagggcctcgcgcagagactcgtccccaccgcccgcccggggctagggactcggctgcacctgctcttggaccctggtctccttttccccccagactcggcctcctctcctgggactcggcctcccttctccgccccctcccctggctttgattgcccctgttctgtgtccccagtagctcagccttccctcttcctctcgggagcctccccggttcctcccctgcggtgaccccaactccagcccatcctgttggtgaccgtctatatccctggggaaatttccaccccagtcccctccccagggaaccacccccagtaaccatcctggggagtttaaggtctctctccttggtcacccagcctggctttgcccccaaagtctcccttcccctagtgacccccccccacttcaccccatgtcccagagcctcagaacccaccctccctgggggaccctcgaaggaggctgtcagaggccgtctcagctcccagcccttccccccagccctcagggagctccgctcagccccggcggggaggagcgggtgggtgtgcgcgcaaggaggccgcacaccnttccttccaatccctccactcgggttcttgggaggacactcattctccaggctcggagacgaggggagaagtttggggtttcagtcccagggcttagccggaggaagcacattttgaacctgcaacttcagacattccagctcccccactcgccctccactacctctgagagcccagccacgccttggagggaggggcttgtgtgtgtatatagtgtgtttgggggaggggggacgcgggagggtgcatgtcttgggaaaagggggtgacagacaacttttgagagggcagcagactccctcagccatgagaaccagctttggggaggaggccgggaatcaaagcgagtccagttgatctcccctgacaatctggaaggttccttttgccctcagtgccagccaatccgggcaggaccctcgaagaggagaccgagggtcccagaggaccaatgctacaagccagcaaatgctgccacatctctgcctgatggggggtggggatgggtggggggatgggactgggccaagggatctgggtgggcatttttaactttggaggccttccatctgtcggtaggccatctgcattttcttactgttgatgtttcctgcccaaaggacacatttgggcagtgccacccactccttgggcccctaggatgacccaactacccccataactttctgcttcccacaggttttcagcattctatcgtcctgttgtgctcagccccaacatcccagacccgttacccgctacccttctctcccccagctcatcatcagtcgctgtctcttttctgtgatttctgtaaaagttgccataaaactttgaaattctgcctgaaaaacagtcccgtgggaagctgggattcaggaggagggggctaataaggtctctgactgagatttgggcaactgttaaaccaagtaatctgggtttttgcggcccgcggtcgtctgcgggacacacccacatatagcagcagcgccggggtccagccgccaagctcttccactcgccacgcccccatcagtaatgagcttccactagccacgcccccatccgtcagcctagctcttccactagccacacccccatccatcagtcatgggcttccacaagccacgcacctccactctccatgcccccattggtcagtcgtgggtttccactaaccacgcccccattcatcagccaagctcctccacttgctacgcccgcatccgtcaattacgggtttccactaaccacgcccccattcatcagcctagctcttccactaatcacacccccacttatcagtcgtgcttcagccacgccttcctgcttcagtcaggggcttccactagccacgcccccatgcatgagccacaaactgtttctctttatgggcatcctgggaacacaaaagagagacgttcatttgcctgagccaaagagctggggttgatggggtttcctaaataaagcaagtaattttctcagatcctacaggaggaggggtgtgtgtgtgtgtgttgtgccaaaggacacagcctgtgtaaaggtgtgcagagttgggagataatggctttttcagagccctggaaatggttatcatgaacgaggtatggggtgcgtggggagtgaacttgaggacaaatcataagagactttatcagccactctagggagcttggaatatatcctaagagtaaaggggagctttgcaagggatttaagtgggggaaggaggcaggc

SEQ ID NO: 462249 - DNA, 4356 bp, Homo sapiens
  misc_feature (3513)..(3513): n is a, c, g, or t
ctctctctctttcgggcggagtcgcccaccactgccagcccagcgctggggggacctgctccaggctgtagccgcaggaccccaccaccccccatggctcccctggccttggtgggggtcacactcctcctggcggctcccccatgctccggggcagccaccccaaccccctccctgccgcctcccccggccaatgacagcgacaccagcacagggggctgccaggggtcctaccgctgccagccgggggtgctgctgcccgtgtgggagcccgacgacccgtcgctgggtgacaaggcggcacgggcagtggtgtactttgtggccatggtctacatgtttctgggagtgtccatcatcgccgaccgtttcatggcggccatcgaggtcatcacgtcaaaagagaaggagatcaccatcaccaaggccaacggtgagaccagcgtgggcaccgttcgcatctggaatgagacggtgtccaacctcacgctcatggccctgggctcctccgcacctgagatcctgctgtcagtcatcgaagtctgcggccacaacttccaggcgggtgagctgggcccaggcaccatcgtgggcagcgctgccttcaacatgtttgtggtcatcgccgtgtgcatctacgtcatcccagccggcgagagccgcaagatcaagcacctgagagtcttctttgtcactgcctcttggagcatcttcgcctatgtctggctttatctcatccttgctgttttttcccccggtgtggtccaggtgtgggaggcgctgctgaccctggtcttcttcccggtgtgcgtggtattcgcctggatggccgacaagcggctgctcttctacaagtacgtgtacaagcgctaccgcaccgacccacgcagcggcatcatcataggcgccgagggcgaccccccgaagagcatcgagctggacggcacgttcgtgggcgccgaggccccaggtgagctgggcggcctgggcccgggccccgccgaggcgcgcgagctggacgccagccgccgcgaggtcatccagatcctcaaggacctcaagcagaagcacccggacaaggatctggagcagctggtgggcatcgccaactactacgcgctgctgcaccagcagaagagccgcgccttctaccgcatccaggccacgcggctgatgaccggcgccgggaacgtgctgcgcagacacgcggcggacgcctcgcgcagggcggcgccggccgagggcgcgggcgaggacgaagacgacggcgccagccgcatcttcttcgagcctagcctctaccactgcctggagaactgcggctccgtgctgctgtccgtcacgtgccagggcggcgagggcaacagcaccttctacgtggactaccgcactgaggacggctctgccaaggcgggctccgactacgagtacagcgagggcacgctggtgttcaaaccaggcgagacgcagaaggagctgcgcatcggcatcatcgacgacgacatcttcgaggaggacgagcatttcttcgtgcggctgctgaacctgcgcgtgggcgacgcgcagggcatgttcgagccggacggcggcgggcggcccaaggggcggctggtggcgccgctgctggccaccgtcaccatcctggacgacgaccacgcaggcatcttctccttccaggaccgcctgctgcacgtgagcgagtgcatgggcaccgtggacgtgcgcgtcgtgcgcagctcgggcgcgcgcggcaccgtgcgccttccctaccgcacggtggacggcacggcgcgcggcggcggcgtgcactacgaggacgcgtgcggagagctggagtttggcgacgacgagaccatgaaaactcttcaggtgaagatagttgatgacgaggaatatgagaaaaaggataatttcttcattgagctgggccagccccagtggcttaagcgagggatttcagctctgctactcaatcaaggggatggggacaggaagctaacagccgaggaggaggaggctcggaggatagcagagatgggcaagccagttcttggggagaactgccggctggaggtcatcatcgaggagtcatatgattttaagaacacggtggataaactcatcaagaaaacgaacttggccttggtaattgggacccattcatggagggagcagtttttagaggcaattacggtgagcgcaggggacgaggaggaggaggaggacgggtcccgggaggagcggctgccgtcgtgctttgactacgtgatgcacttcctgacggtgttctggaaggtgctcttcgcctgtgtgccccccaccgagtactgccacggctgggcctgctttggtgtctccatcctggtcatcggcctgctcaccgccctcattggggacctcgcctcccacttcggctgcaccgttggcctcaaggactctgtcaatgctgttgtcttcgttgccctgggcacctccatccctggtaacaccctgggagactttggtggggtaggatctcagatgagccaggcaggggcaacacaggatcctgccaaaatgagacacgttcgccagcaaggtggcggcgctgcaggaccagtgcgccgacgcgtccatcggcaacgtgaccggctccaacgcggtgaacgtgttccttggcctgggcgtcgcctggtctgtggccgccgtgtactgggcggtgcagggccgccccttcgaggtgcgcactggcacgctggccttctccgtcacgctcttcaccgtcttcgccttcgtgggcattgccgtgctgctgtaccggcgccggccgcacatcggcggcgagctgggcggcccgcgcggacccaagctcgccaccaccgcgctcttcctgggcctctggctcctgtacatcctcttcgccagcctggaggcgtactgccacatccggggcttctagggcctcgcgcagagactcgtccccaccgcccgcccggggctagggactcggctgcacctgctcttggaccctggtctccttttccccccagactcggcctcctctcctgggactcggcctcccttctccgccccctcccctggctttgattgcccctgttctgtgtccccagtagctcagccttccctcttcctctcgggagcctccccggttcctcccctgcggtgaccccaactccagcccatcctgttggtgaccgtctatatccctggggaaatttccaccccagtcccctccccagggaaccacccccagtaaccatcctggggagtttaaggtctctctccttggtcacccagcctggctttgcccccaaagtctcccttcccctagtgacccccccccacttcaccccatgtcccagagcctcagaacccaccctccctgggggaccctcgaaggaggctgtcagaggccgtctcagctcccagcccttccccccagccctcagggagctccgctcagccccggcggggaggagcgggtgggtgtgcgcgcaaggaggccgcacaccnttccttccaatccctccactcgggttcttgggaggacactcattctccaggctcggagacgaggggagaagtttggggtttcagtcccagggcttagccggaggaagcacattttgaacctgcaacttcagacattccagctcccccactcgccctccactacctctgagagcccagccacgccttggagggaggggcttgtgtgtgtatatagtgtgtttgggggaggggggacgcgggagggtgcatgtcttgggaaaagggggtgacagacaacttttgagagggcagcagactccctcagccatgagaaccagctttggggaggaggccgggaatcaaagcgagtccagttgatctcccctgacaatctggaaggttccttttgccctcagtgccagccaatccgggcaggaccctcgaagaggagaccgagggtcccagaggaccaatgctacaagccagcaaatgctgccacatctctgcctgatggggggtggggatgggtggggggatgggactgggccaagggatctgggtgggcatttttaactttggaggccttccatctgtcggtaggccatctgcattttcttactgttgatgtttcctgcccaaaggacacatttgggcagtgccacccactccttgggcccctaggatgacccaactacccccataactttctgcttcccacaggttttcagcattctatcgtcctgttgtgctcagccccaacatcccagacccgttacccgctacccttctctcccccagctcatcatcagtcgctgtctcttttctgtgatttctgtaaaagttgccataaaactttgaaattct

SEQ ID NO: 462250 - DNA, 3106 bp, Homo sapiens
  misc_feature (1360)..(1360): n is a, c, g, or t
aggtgcaagggattctgggaaagaagttcattcaatgggacttgctgtcaggaagttagacaaaatggggcctctgtaggcaaggaaggaagtctgagtgtatgccccagctgggtcgtgtgcccacaggggacgaggaggaggaggaggacgggtcccgggaggagcggctgccgtcgtgctttgactacgtgatgcacttcctgacggtgttctggaaggtgctcttcgcctgtgtgccccccaccgagtactgccacggctgggcctgctttggtgtctccatcctggtcatcggcctgctcaccgccctcattggggacctcgcctcccacttcggctgcaccgttggcctcaaggactctgtcaatgctgttgtcttcgttgccctgggcacctccatccctgacacgttcgccagcaaggtggcggcgctgcaggaccagtgcgccgacgcgtccatcggcaacgtgaccggctccaacgcggtgaacgtgttccttggcctgggcgtcgcctggtctgtggccgccgtgtactgggcggtgcagggccgccccttcgaggtgcgcactggcacgctggccttctccgtcacgctcttcaccgtcttcgccttcgtgggcattgccgtgctgctgtaccggcgccggccgcacatcggcggcgagctgggcggcccgcgcggacccaagctcgccaccaccgcgctcttcctgggcctctggctcctgtacatcctcttcgccagcctggaggcgtactgccacatccggggcttctagggcctcgcgcagagactcgtccccaccgcccgcccggggctagggactcggctgcacctgctcttggaccctggtctccttttccccccagactcggcctcctctcctgggactcggcctcccttctccgccccctcccctggctttgattgcccctgttctgtgtccccagtagctcagccttccctcttcctctcgggagcctccccggttcctcccctgcggtgaccccaactccagcccatcctgttggtgaccgtctatatccctggggaaatttccaccccagtcccctccccagggaaccacccccagtaaccatcctggggagtttaaggtctctctccttggtcacccagcctggctttgcccccaaagtctcccttcccctagtgacccccccccacttcaccccatgtcccagagcctcagaacccaccctccctgggggaccctcgaaggaggctgtcagaggccgtctcagctcccagcccttccccccagccctcagggagctccgctcagccccggcggggaggagcgggtgggtgtgcgcgcaaggaggccgcacaccnttccttccaatccctccactcgggttcttgggaggacactcattctccaggctcggagacgaggggagaagtttggggtttcagtcccagggcttagccggaggaagcacattttgaacctgcaacttcagacattccagctcccccactcgccctccactacctctgagagcccagccacgccttggagggaggggcttgtgtgtgtatatagtgtgtttgggggaggggggacgcgggagggtgcatgtcttgggaaaagggggtgacagacaacttttgagagggcagcagactccctcagccatgagaaccagctttggggaggaggccgggaatcaaagcgagtccagttgatctcccctgacaatctggaaggttccttttgccctcagtgccagccaatccgggcaggaccctcgaagaggagaccgagggtcccagaggaccaatgctacaagccagcaaatgctgccacatctctgcctgatggggggtggggatgggtggggggatgggactgggccaagggatctgggtgggcatttttaactttggaggccttccatctgtcggtaggccatctgcattttcttactgttgatgtttcctgcccaaaggacacatttgggcagtgccacccactccttgggcccctaggatgacccaactacccccataactttctgcttcccacaggttttcagcattctatcgtcctgttgtgctcagccccaacatcccagacccgttacccgctacccttctctcccccagctcatcatcagtcgctgtctcttttctgtgatttctgtaaaagttgccataaaactttgaaattctgcctgaaaaacagtcccgtgggaagctgggattcaggaggagggggctaataaggtctctgactgagatttgggcaactgttaaaccaagtaatctgggtttttgcggcccgcggtcgtctgcgggacacacccacatatagcagcagcgccggggtccagccgccaagctcttccactcgccacgcccccatcagtaatgagcttccactagccacgcccccatccgtcagcctagctcttccactagccacacccccatccatcagtcatgggcttccacaagccacgcacctccactctccatgcccccattggtcagtcgtgggtttccactaaccacgcccccattcatcagccaagctcctccacttgctacgcccgcatccgtcaattacgggtttccactaaccacgcccccattcatcagcctagctcttccactaatcacacccccacttatcagtcgtgcttcagccacgccttcctgcttcagtcaggggcttccactagccacgcccccatgcatgagccacaaactgtttctctttatgggcatcctgggaacacaaaagagagacgttcatttgcctgagccaaagagctggggttgatggggtttcctaaataaagcaagtaattttctcagatcctacaggaggaggggtgtgtgtgtgtgtgttgtgccaaaggacacagcctgtgtaaaggtgtgcagagttgggagataatggctttttcagagccctggaaatggttatcatgaacgaggtatggggtgcgtggggagtgaacttgaggacaaatcataagagactttatcagccactctagggagcttggaatatatcctaagagtaaaggggagctttgcaagggatttaagtgggggaaggaggcaggc

SEQ ID NO: 462251 - DNA, 1850 bp, Homo sapiens
ttgctttattgctttatttcaaccccacctaggcccacaggatgcttgtgctaactgagggcacttcatagtcctgaggaccttgggctacttcctgcctccttgatgtcctctccatcccccctcccctaagccaggctattggagatgatggtgtcaccagctgctgggactacccacagggctgggtgtgagggaggagaggtcaccagatcctcaggtgtctcaggaggctgcagcctgggccacagccctgggaatgggctcctttcagactcggcacccatggcctgccctccttctcaggaagacacagaatgggggtaggcacacaaggcctgctgcatgtgcaagggaagtggaagaatcagatccaggtgtggtccctgcagcccctcctgtgcactgtactagtcttggaggggctggtttgtcttaaaaagcacaaggcattgaggacaatcccattttcctcatgataggtctaaacggtaccacctctaggaactgtgcctgtggacagttcctcatcaggatgtctgggaacaccagcaggtgcacctgagtcactgctggtggggagtgacgctcggagagtgtggctggcctgacaccgagtcactctcggctccctttccgagctgccggacccagcacacagcagcacacggcatttcaaagaagggggccctacataactggagcttggataaacaggtctggggactcgctgcaatgggaagagatgatgggcttgggaataggggtgcatgtttccaaaaagtgagtagagatttacacagggcagtcagaatggcatttctcaaagtgtggtctgtagacttcggggaagcacccttaagaccattttaggggtgctgtggggacctcttttccaatgacatatctatgtgatgccagattttcttcatagatgtcaattaaaacaacctgtcgcaagacccagtgcaaaagcgcaaccaaaatctttctaatacaaataaacttaacttctctggccaatccagttctcagatccaaaaagccccgtaaaatcccagaaaataacaagggttggcaagaatgtgaagaaactggaaactttgtgcgctgctggtgggccctgaatccaaaacaagtgttcttacaagagacacagagaaggcagcaatgtgaaggtggaggcagagaagggagtgatgcggccacaaccaccagaagctggaagggagaaagagtgaaatctcccctggaatctctggatggacacggccctgccgacactctcatctcagacttctggcctccaaaccatgagagaatatgtttcggggcacaccaggcaaaagggagaagagatcaaggcaagtggccgggacccctcccttcttccacagctgcagacctcagccaagagcacagctgtgggcaaccaaggacgttattgccagaaatcaacttgctgtctccaccagccctgaagcctctgtgggtgatgaaggaaatgctgacactgtccacgacaaggatgaggcttgaagactccactaagagaaataagctcggaacgagaggacaaataccgcatgaggccacttacgtgagggaccaagagtatctaatcattcaaagtactcaaattcacagagacagagggtaaaatggcagttgctgggactggggaagggggaattcgtgttgggtggggacagggtttcagtttgaggaagatgaaagagttctggagatggaaggtggtaatggttgcacagcaatatgaatgtgcttaatgccactgaactgtgcacctaaaatggttaaaacggtattttatatttgtatattttatc

SEQ ID NO: 462252 - DNA, 2063 bp, Homo sapiens
  misc_feature (3)..(3): n is a, c, g, or t
  misc_feature (6)..(7): n is a, c, g, or t
acntcnnggcgttcccttgggataaagtgtggtcaaaacagctatgtttatcctgaaagcgcaaggcggaggctccaatttgggcccgggctccgccccacgggctgcactgctgccctcggagaggcaaagatagggcaggcgttattagtcccactcacaagtgggaactcttcagctgagggaggcgaagtgacagccccaatgttgcacagatggttctgaggccaaacgaggtcaggaacccagaagccaggatctagtttgacgcagacctgcgggaggcgggcggtaacggatgcgttctccctgacaccggtgccttcgcctctctgcgccctgcaggcgcccccagttccccagcctcccagacctcgcatctgccccggggctcagctcccagggacttccgggagcagctggccccgccccaaggctccttcgggctgcgcgattggcaccgcgggccggggcagggccggagcgccgagccaacgtgatggcgtcaggggccggggcgccgcttcctgttgtcagtggccgagagaccgcatcgtcggctcggaggctgaggggctgccgcggccgggagcgcccctcgcctcgctcctcgctccgcttggtgtcatgtgattctctgagggagcagctgcgtgagtggagatgctttcagtggtggagaatggactggacccccaggctgccatcccggtcatcaagaagaagctggtgggatccgtgaaggccttgcagaagcagtacgtgtccctggacacggtggtcactagtgaagacggagatgccaacaccatgtgcagcgccctggaggccgtatttatccatggcctgcacgccaagcacatccgagctgaggccggaggaaaaaggaagaaaagtgcccaccagaagcctctgccccagcctgtcttctggcccctcctgaaagctgtcacccacaaacacatcatctcagagttggagcacctgacgtttgtcaacatggatgtgggccgctgccgggcatggctgcggctggccctgaacaatggcctgatggagtgctacctgaagctgctgctgcaggagcaggcccgcttgcaactacagcggaaggaatctctggattccatttcccattcttcaggctctgaagacatcgaagtccatcactcgggccataagatacggaggaaccagaagccgactgcctcctccctcagcctggacacggccagttcatcccagctgtcctgcagcctaaactctgatagctgcttactccaagagaatggctccaagagtccagaccattgcgaggagcccatgtcctatgactcagacctgggcacagcaaatgctgaggactcagaccagtctctgcaagaaaaaacaagagctggatctcagaggatgacttctaccggccttcccgggagcaacccctgaagagtgcttcagaccacccaatagcttcttacagggggactccagagtcaaggcctggtctccacaggcatttttctcaagaaccaagaaaaaactgctccctgggggcgttagaccaagcgtgtgtaccttccccaggaagaaggcaagcccaggcagccccatcccaggggcataagagtttccaggtggtacaccggaggcagatgggtaggtgaccaggagggtcccgggtgggtcccatctgcagggaccaggcctttcagaaggcagctgtgaagttctgttttccattgctaaaggggtagtgtgttcccacaagtgttataaaacctcattccagaatgccatcataatcatgttcattcagggaagcatttcaggaaaagtagtatattgtctcaaaactgcctacagaggacaaaaatactgtttcaccagtcaaataggaaaatattttccctgaaaactatgcaatttatgattatagaaaactcttgattccacctgtagctcagagcacatccagccccatgaagccccaggtgttttaaatggtccttccaaacgtgtttaccctcagtagttggtttatgtaacagctctgggtggcttga

SEQ ID NO: 462253 - DNA, 1815 bp, Homo sapiens
  misc_feature (3)..(3): n is a, c, g, or t
  misc_feature (6)..(7): n is a, c, g, or t
acntcnnggcgttcccttgggataaagtgtggtcaaaacagctatgtttatcctgaaagcgcaaggcggaggctccaatttgggcccgggctccgccccacgggctgcactgctgccctcggagaggcaaagatagggcaggcgttattagtcccactcacaagtgggaactcttcagctgagggaggcgaagtgacagccccaatgttgcacagatggttctgaggccaaacgaggtcaggaacccagaagccaggatctagtttgacgcagacctgcgggaggcgggcggtaacggatgcgttctccctgacaccggtgccttcgcctctctgcgccctgcaggcgcccccagttccccagcctcccagacctcgcatctgccccggggctcagctcccagggacttccgggagcagctggccccgccccaaggctccttcgggctgcgcgattggcaccgcgggccggggcagggccggagcgccgagccaacgtgatggcgtcaggggccggggcgccgcttcctgttgtcagtggccgagagaccgcatcgtcggctcggaggctgaggggctgccgcggccgggagcgcccctcgcctcgctcctcgctccgcttggtgtcatgtgattctctgagggagcagctgcgtgagtggagatgctttcagtggtggagaatggactggacccccaggctgccatcccgacacatcatctcagagttggagcacctgacgtttgtcaacatggatgtgggccgctgccgggcatggctgcggctggccctgaacaatggcctgatggagtgctacctgaagctgctgctgcaggagcaggcccgcttgcaactacagcggaaggaatctctggattccatttcccattcttcaggctctgaagacatcgaagtccatcactcgggccataagatacggaggaaccagaagccgactgcctcctccctcagcctggacacggccagttcatcccagctgtcctgcagcctaaactctgatagctgcttactccaagagaatggctccaagagtccagaccattgcgaggagcccatgtcctatgactcagacctgggcacagcaaatgctgaggactcagaccagtctctgcaagaaaaaacaagagctggatctcagaggatgacttctaccggccttcccgggagcaacccctgaagagtgcttcagaccacccaatagcttcttacagggggactccagagtcaaggcctggtctccacaggcatttttctcaagaaccaagaaaaaactgctccctgggggcgttagaccaagcgtgtgtaccttccccaggaagaaggcaagcccaggcagccccatcccaggggcataagagtttccaggtggtacaccggaggcagatgggtaggtgaccaggagggtcccgggtgggtcccatctgcagggaccaggcctttcagaaggcagctgtgaagttctgttttccattgctaaaggggtagtgtgttcccacaagtgttataaaacctcattccagaatgccatcataatcatgttcattcagggaagcatttcaggaaaagtagtatattgtctcaaaactgcctacagaggacaaaaatactgtttcaccagtcaaataggaaaatattttccctgaaaactatgcaatttatgattatagaaaactcttgattccacctgtagctcagagcacatccagccccatgaagccccaggtgttttaaatggtccttccaaacgtgtttaccctcagtagttggtttatgtaacagctctgggtggcttga

SEQ ID NO: 462254 - DNA, 1214 bp, Homo sapiens
  misc_feature (3)..(3): n is a, c, g, or t
  misc_feature (6)..(7): n is a, c, g, or t
acntcnnggcgttcccttgggataaagtgtggtcaaaacagctatgtttatcctgaaagcgcaaggcggaggctccaatttgggcccgggctccgccccacgggctgcactgctgccctcggagaggcaaagatagggcaggcgttattagtcccactcacaagtgggaactcttcagctgagggaggcgaagtgacagccccaatgttgcacagatggttctgaggccaaacgaggtcaggaacccagaagccaggatctagtttgacgcagacctgcgggaggcgggcggtaacggatgcgttctccctgacaccggtgccttcgcctctctgcgccctgcaggcgcccccagttccccagcctcccagacctcgcatctgccccggggctcagctcccagggacttccgggagcagctggccccgccccaaggctccttcgggctgcgcgattggcaccgcgggccggggcagggccggagcgccgagccaacgtgatggcgtcaggggccggggcgccgcttcctgttgtcagtggccgagagaccgcatcgtcggctcggaggctgaggggctgccgcggccgggagcgcccctcgcctcgctcctcgctccgcttggtgtcatgtgattctctgagggagcagctgcgtgagtggagatgctttcagtggtggagaatggactggacccccaggctgccatcccggtcatcaagaagaagctggtgggatccgtgaaggccttgcagaagcaacacatcatctcagagttggagcacctgacgtttgtcaacatggatgtgggccgctgccgggcatggctgcggctggccctgaacaatggcctgatggagtgctacctgaagctgctgctgcaggagcaggcccgcttgcaactacagcggaaggaatctctggattccatttcccattcttcaggctctgaagacatcgaagtccatcactcgggccataagatacggaggaaccagaagccgactgcctcctccctcagcctggacacggccagttcatcccagctgtcctgcagcctaaactctgatagctgcttactccaagagaatggctccaagagtccagaccattgcgaggagcccatgtcctatgactcagacctgggcacagcaaatgctgaggactcagaccagtctctgcaagagagccgcatccccaggcgcccagccccctg

SEQ ID NO: 462255 - DNA, 1012 bp, Homo sapiens
caagggctgtgacagatgagcagtggtctgtctgcaatgagcatgtgctcaagctaacatggataccatcttggtcttcagcctaatcattgcatcctatgatgccaacaagaaagacctcagagatagcagttgccgactggaacagctgcctgggatcttcccaaaagacgtgagaagcatcagagaattgcaaatgcaagaaactcacacagaaaccaaaaggacaacattcattcaaaaccggactatagctaccctgcagtgccttggctctgacagcaaagtaaaagtcaaccttgtatatttggagagaaggccaaaggtcaagcatattttgaagaacctgagaatcattgctgctccccgcagaaacagctctgcctcctcaagctgtcacctaatccccacatccaagtttcagactggatctcttctaaaaggcaaagcttttttaccagggatctcacaatgtaaagtcctgggggcttcatcagagacttttcccaccagtgccccttctataactcctgggaataaagaaggagagaaaactacaagtaccgacacagatgagaacctagagaagagacagaaatggagtattgtggtcaaaattctgattgctgtcaccctgttgctcagtggagttgccattatagtatttgtaatttttgaagtcccatgtccttatcaatgcctaggagccaggaagctgtgccaatgccagtggttgtggagatggcaaaagaagggaggccagccacctgggacagctgaatccaagcctgactctcagccccagaaggaaagtgttctctgtgtggtttatgtcatttgcttaaagaagtgtaattatcgattaacaaagaggcaaaatgaagtgcacttggaattacatggggttttgtacttagccagcccttttcttggtacatgaagaactatacacttgcatccttttttaactttcatatttcctttcaatctctaggttggacaagatgctgcc

SEQ ID NO: 462256 - DNA, 2692 bp, Homo sapiens
gtcctggtagagggcccttcacgtgcacacagctgcatggacgaatggcagccgagttccatccggagagcaggcatagaaacacggggatagttgcagcagctctggcatctgcacccaccctcacctacagcttaggggaaaatgagagcttctcacccagcattcccacaacctgtttgcatggtgagggagaaaaggctgatgaattactaatgaattgtgggggtgattttgatggcactttcttcagcaccaaaagtcagcaaagacttggagtgggacagaaatatagtgaatgctcttttgataagagctttatcgggtacgccttcacctgggaagacggcagtctcagagagagaccttgtggacacagcttctccattgggcccctggtggccgaaggggaccttcattctggcactttcctctacagacacagagcagatgggccccgtccttctcccacttttagtctaaggaccatcaatcaataattcctccaatcaaaaaataaccactcaatattttgttgaatcatctttcagacttaagtatataaatatagatacatatttcataaatgatccacatttatgtaaatattattttactgtgtatagtatattcaatcatttgattttaaaaaatgacctcatttgtatctagctcttcaaggcagaggtcatataatttcagagccactattccttctgtaatcgtcccaggaaaaaatcttgtctccctgacttgaagtcctacatacccactgccccatcacctttgaacgacaagacatcttaatgtccacaattacaactatgagtttgttccagtaaaaaataaaatgggaaaagggaattatgggtgcacataattaagaaaatagggtgattaatatcttttgagaaatttataaataattgatatctagtctggggaaaatctgctcctacaactttctttttccggagagttggctaacagttcacatactttaaggggtgccgcaaaaatctaacttaacgtctgttgatttttattagtctttggtctaagcacttcgccaatgaaggcattcaaaagtctatagctacctttcaaagaccttacttggcaaagctgtagaccaacagtcctcctgaatctttaatccacaatagattttcagactaatattcgaactcgagtacagagacatttcccaccgtccatccaaacaaaatgaagtcagtttgactgtgcaaaatgtcgatgaattcttcagagtaaatcagccttgtcagggtgatgcagaaccatcagctctttgtgacataatataatatgaaatgatattgaacaacatgcgtttggcactaaattgttagcgggttttagctttgacagcagcaagtttattgctttaatcccaaggtcttttaaccctctttgacataaattgaggttggcttttgtgaaaaaatctccactttactctctcttcctttacctaaaactgcttttaacaatttatgctagtacatcagacactcattttgagtgacaaaaagaaaaaaaaaaagaacaaggtctattagaatagaagggaagaaaaggccaacttaggctaagaaggggaaaaaaaggccaacttaggctaggcagtctgtgtctctttcggtagatacgtcacagctttcttgaggtggatatgcattttaagttataataacatgtggctctggctctcacaaataaaacaagcctggacagaagactccggcaaggtggaggacagccattgccagggaacaaaggctcctaatccgaaacagaggccgtttttgcattttgctccagttgaatgtatttccttatatgggttcatgccttcctcctccaccacctacccccctacatttttagagatcaaagatgacttttcttttatagaaatagttttgaaacactgatttacccaagaaaaccatgcaaaattccccttgtgctctttgaaagcctggaagatgctactcaagggtgagaattgtgggcctattacatttaaaatagatgttccttccactcaatgcttgtgagtgggtttgcatttgggttgctttccaagtttttgcatgaatctcctaaatttttacgaaggtgtatatttgaagaagccagggatttcagcccccatccaaactggtgattggctcctaaacttgtttcctgaatcatgccattctggtgtcagagcccccgcgatgccggcagaagccgtgggcctccaccttacagacccaccgtgccgcctccttcccggccgtcacacaggtgggagagcagtgctgacctcctaagcaggagtcagtgctcaaggataatgtctaatcacttagctatgggcaccaagcttgctcctctcaggcccacttccaacccccaggcctgggagtcatgagcagaactgccctaaattatactgcagatcactctagagttccactgtgttcagacaggtcttattctgaattgatgaccagcccctggctcccagctcaatccataggatccactcaaacccaccctctgcaggcactacatttttaccaaatgtgtttttccttccagttcctgtattccagatagcccagagacacaggtaaaccccgtggactccccgtccctaacagcatcgtgagagctg

SEQ ID NO: 462257 - DNA, 2181 bp, Homo sapiens
gtgccgggccgggagcgagcggcggcggcggcggcggcggcaccatgggccgggcccggcgcttccagtggccgctgctgctgctgtgggcggccgcggcggggccaggggcaggacaggaagtacagacagagaacgtgacagtggctgagggtggggtggctgagatcacctgccgtctgcaccagtatgatgggtccatagttgtcatccagaacccagcccggcagaccctcttcttcaatggcacccgtgccttgaaggatgagcgtttccagcttgaggagttctccccacgccgggtgcggatccggctctcagatgcccgcctggaggacgaggggggctatttctgccagctctacacagaagacacccaccaccagattgccacgctcacggtactagtggccccagagaatcctgtggtggaggtccgggagcaggcggtagagggcggcgaggtggagctcagctgcctcgttccgcggtcccgtccggctgccaccctgcgctggtaccgggaccgcaaggagctgaaaggagtgagcagcagccaggaaaatggcaaggtctggagcgtggcaagcacagtacggtttcgtgtggaccgtaaggacgacggtggtatcatcatctgtgaggcgcagaaccaggcgctgccctccggacacagcaagcagacgcagtacgtgctggatgtgcagtactcccccacggcccggattcatgcctcccaagctgtggtgagggagggagacacgctggtgttgacgtgtgctgtcacggggaaccccaggccaaaccagatccgctggaaccgcgggaatgagtctttgccggagagggcggaggccgtgggagagacgctcacgctgccgggtctggtatccgcggataacggcacctacacttgcgaggcgtccaataagcacggccatgcgagggcgctctacgtacttgtggtctacgaccctggtgcggtggtagaggctcagacgtcggttccctatgccattgtgggcggcatcctggcgctgctggtgtttctgatcatatgtgtgctagtgggcatggtctggtgctcggtacggcagaagggttcctatctgacccacgaagccagtggcttggatgaacagggagaagcaagagaagccttcctcaatggcagcgacggacacaagaggaaagaggaattcttcatctgaccctatccccacccaggcctaggcctgggcctgggctgggtcccccccactgccagctgcaaggaaccagcaaagacatttaccagagtctgggatggtgggcttctccccccaccactaacacctcagacgcttgggcagggatgggggtgttggatgcctggatctctgtaagggccagaagtgagggcccagaggtctgggtcccccagggggcaggggccaaaggtccagaccccccaagtccagtgagggcagtagggattgggttgggggaagataactgggggaaggccagggcccctaggctacaaaaccaggtcttgtggggagggggtcagtttctgggaagggtggggggggcagggaaggggaacacagatttctttgggggtcctagaccccatgccagccattgtaagagttccacagagctctgggcacttctttgcaaagccatgtttgcacggtggggggatgggtggggggagggcgtggaaatagggattctgtgtctttgtgtcataactttgatgggggcagtgagggagacagccccaacccttttctccaatcccccttccccaggttcctgggctccccttctctctaccttctcccccaacgtctgtcccatccatatttgtctctctgtccacccactcctgggggggccttccccatctctcctccaggccccccggggagggggaaaggagtttggggaggattcgtggtctttatggttttatatataatatattaaaaaatcaaaagtctgtatgaaaatatcagattgcacccccctctccccattcctggcttttgccccctttttcttgttaaaaaacaaaaaccaaaaaacaaaaaaccacacacacattttgtacggggtggggaggggaatggggagggggtttggcaatctcactaaccaccattaaactgaggagagaccaagtgtttgggg

SEQ ID NO: 462258 - DNA, 1726 bp, Homo sapiens
gtgccgggccgggagcgagcggcggcggcggcggcggcggcaccatgggccgggcccggcgcttccagtggccgctgctgctgctgtgggcggccgcggcggggccaggggcaggacaggaagtacagacagagaacgtgacagtggctgagggtggggtggctgagatcacctgccgtctgcaccagtatgatgggtccatagttgtcatccagaacccagcccggcagaccctcttcttcaatggcacccgtgccttgaaggatgagcgtttccagcttgaggagttctccccacgccgggtgcggatccggctctcagatgcccgcctggaggacgaggggggctatttctgccagctctacacagaagacacccaccaccagattgccacgctcacggtactagtggccccagagaatcctgtggtggaggtccgggagcaggcggtagagggcggcgaggtggagctcagctgcctcgttccgcggtcccgtccggctgccaccctgcgctggtaccgggaccgcaaggagctgaaaggagtgagcagcagccaggaaaatggcaaggtctggagcgtggcaagcacagtacggtttcgtgtggaccgtaaggacgacggtggtatcatcatctgtgaggcgcagaaccaggcgctgccctccggacacagcaagcagacgcagtacgtgctggatgtgcagtactcccccacggcccggattcatgcctcccaagctgtggtgagggagggagacacgctggtgttgacgtgtgctgtcacggggaaccccaggccaaaccagatccgctggaaccgcgggaatgagtctttgccggagagggcggaggccgtgggagagacgctcacgctgccgggtctggtatccgcggataacggcacctacacttgcgaggcgtccaataagcacggccatgcgagggcgctctacgtacttgtggtctacgaccctggtgcggtggtagaggctcagacgtcggttccctatgccattgtgggcggcatcctggcgctgctggtgtttctgatcatatgtgtgctagtgggcatggtctggtgctcggtacggcagaagggttcctatctgacccacgaagccagtggcttggatgaacagggagaagcaagagaagccttcctcaatggcagcgacggacacaagaggaaagaggaattcttcatctgaccctatccccacccaggcctaggcctgggcctgggctgggtcccccccactgccagctgcaaggaaccagcaaagacatttaccagagtctgggatggtgggcttctccccccaccactaacacctcagacgcttgggcagggatgggggtgttggatgcctggatctctgtaagggccagaagtgagggcccagaggtctgggtcccccagggggcaggggccaaaggtccagaccccccaagtccagtgagggggaaaggagtttggggaggattcgtggtctttatggttttatatataatatattaaaaaatcaaaagtctgtatgaaaatatcagattgcacccccctctccccattcctggcttttgccccctttttcttgttaaaaaacaaaaaccaaaaaacaaaaaaccacacacacattttgtacggggtggggaggggaatggggagggggtttggcaatctcactaaccaccattaaactgaggagagaccaagtgtttgggg

SEQ ID NO: 462259 - DNA, 2020 bp, Homo sapiens
gtgccgggccgggagcgagcggcggcggcggcggcggcggcaccatgggccgggcccggcgcttccagtggccgctgctgctgctgtgggcggccgcggcggggccaggggcaggacaggaagtacagacagagaacgtgacagtggctgagggtggggtggctgagatcacctgccgtctgcaccagtatgatgggtccatagttgtcatccagaacccagcccggcagaccctcttcttcaatggcacccgtgccttgaaggatgagcgtttccagcttgaggagttctccccacgccgggtgcggatccggctctcagatgcccgcctggaggacgaggggggctatttctgccagctctacacagaagacacccaccaccagattgccacgctcacggtactagtggccccagagaatcctgtggtggaggtccgggagcaggcggtagagggcggcgaggtggagctcagctgcctcgttccgcggtcccgtccggctgccaccctgcgctggtaccgggaccgcaaggagctgaaaggagtgagcagcagccaggaaaatggcaaggtctggagcgtggcaagcacagtacggtttcgtgtggaccgtaaggacgacggtggtatcatcatctgtgaggcgcagaaccaggcgctgccctccggacacagcaagcagacgcagtacgtgctggatgtgcagtactcccccacggcccggattcatgcctcccaagctgtggtgagggagggagacacgctggtgttgacgtgtgctgtcacggggaaccccaggccaaaccagatccgctggaaccgcgggaatgagtctttgccggagagggcggaggccgtgggagagacgctcacgctgccgggtctggtatccgcggataacggcacctacacttgcgaggcgtccaataagcacggccatgcgagggcgctctacgtacttgtggtctacgaccctggtgcggtggtagaggctcagacgtcggttccctatgccattgtgggcggcatcctggcgctgctggtgtttctgatcatatgtgtgctagtgggcatggtctggtgctcggtacggcagaagggttcctatctgacccacgaagccagtggcttggatgaacagggagaagcaagagaagccttcctcaatggcagcgacggacacaagaggaaagaggaattcttcatctgaccctatccccacccaggcctaggcctgggcctgggctgggtcccccccactgccagctgcaaggaaccagcaaagacatttaccagagtctgggatggtgggcttctccccccaccactaacacctcagacgcttgggcagggatgggggtgttggatgcctggatctctgtaagggccagaagtgagggcccagaggtctgggtcccccagggggcaggggccaaaggtccagaccccccaagtccagtgagggcagtagggattgggttgggggaagataactgggggaaggccagggcccctaggctacaaaaccaggtcttgtggggagggggtcagtttctgggaagggtggggggggcagggaaggggaacacagatttctttgggggtcctagaccccatgccagccattgtaagagttccacagagctctgggcacttctttgcaaagccatgtttgcacggtggggggatgggtggggggagggcgtggaaatagggattctgtgtctttgtgtcataactttgatgggggcagtgagggggaaaggagtttggggaggattcgtggtctttatggttttatatataatatattaaaaaatcaaaagtctgtatgaaaatatcagattgcacccccctctccccattcctggcttttgccccctttttcttgttaaaaaacaaaaaccaaaaaacaaaaaaccacacacacattttgtacggggtggggaggggaatggggagggggtttggcaatctcactaaccaccattaaactgaggagagaccaagtgtttgggg

SEQ ID NO: 462260 - DNA, 1217 bp, Homo sapiens
gtgccgggccgggagcgagcggcggcggcggcggcggcggcaccatgggccgggcccggcgcttccagtggccgctgctgctgctgtgggcggccgcggcggggccaggggcaggacaggaagtacagacagagaacgtgacagtggctgagggtggggtggctgagatcacctgccgtctgcaccagtatgatgggtccatagttgtcatccagaacccagcccggcagaccctcttcttcaatggcacccgtgccttgaaggatgagcgtttccagcttgaggagttctccccacgccgggtgcggatccggctctcagatgcccgcctggaggacgaggggggctatttctgccagctctacacagaagacacccaccaccagattgccacgctcacggtactagtggccccagagaatcctgtggtggaggtccgggagcaggcggtagagggcggcgaggtggagctcagctgcctcgttccgcggtcccgtccggctgccaccctgcgctggtaccgggaccgcaaggagctgaaaggagtgagcagcagccaggaaaatggcaaggtctggagcgtggcaagcacagtacggtttcgtgtggaccgtaaggacgacggtggtatcatcatctgtgaggcgcagaaccaggcgctgccctccggacacagcaagcagacgcagtacgtgctggatgtgcagtactcccccacggcccggattcatgcctcccaagctgtggtgagggagggagacacgctggtgttgacgtgtgctgtcacggggaaccccaggccaaaccagatccgctggaaccgcgggaatgagtctttgccggagagggcggaggccgtgggagagacgctcacgctgccgggtctggtatccgcggataacggcacctacacttgcgaggcgtccaataagcacggccatgcgagggcgctctacgtacttgtggtctacggtgagagcaggctgcggccgactgagggcgggggcggggcgccaggtggcgggggcggggcttgagcaaagaggccacataactcaggggttcggcagccaacagagttctttttgttttgggaccagactggcccgcggggctcaaattcgggttggctgcattctattgcaggtaaccgaacctgtctgcgcctcagtttacccatcagtaaagtggaaataaacaatagcacctatataaca

SEQ ID NO: 462261 - DNA, 1932 bp, Homo sapiens
ctgccacctgggaccctggttccctatggtcgctgggaacaggcagctcgatcgctttgagcccacgttcgtgccttctttaaccccttacttcccttctccctgcggcagtggccccagagaatcctgtggtggaggtccgggagcaggcggtagagggcggcgaggtggagctcagctgcctcgttccgcggtcccgtccggctgccaccctgcgctggtaccgggaccgcaaggagctgaaaggacgacggtggtatcatcatctgtgaggcgcagaaccaggcgctgccctccggacacagcaagcagacgcagtacgtgctggatgtgcagtgtaagtgaccggcgggccaggacccaagggatcccaacgccagccacccgcacccgcgagggtcccccttgtcctgcgtgatggcttggaaactactctctcctcttacttttgcctaacagactcccccacggcccggattcatgcctcccaagctgtggtgagggagggagacacgctggtgttgacgtgtgctgtcacggggaaccccaggccaaaccagatccgctggaaccgcgggaatgagtctttgccggagagggcggaggccgtgggagagacgctcacgctgccgggtctggtatccgcggataacggcacctacacttgcgaggcgtccaataagcacggccatgcgagggcgctctacgtacttgtggtctacgaccctggtgcggtggtagaggctcagacgtcggttccctatgccattgtgggcggcatcctggcgctgctggtgtttctgatcatatgtgtgctagtgggcatggtctggtgctcggtacggcagaagggttcctatctgacccacgaagccagtggcttggatgaacagggagaagcaagagaagccttcctcaatggcagcgacggacacaagaggaaagaggaattcttcatctgaccctatccccacccaggcctaggcctgggcctgggctgggtcccccccactgccagctgcaaggaaccagcaaagacatttaccagagtctgggatggtgggcttctccccccaccactaacacctcagacgcttgggcagggatgggggtgttggatgcctggatctctgtaagggccagaagtgagggcccagaggtctgggtcccccagggggcaggggccaaaggtccagaccccccaagtccagtgagggcagtagggattgggttgggggaagataactgggggaaggccagggcccctaggctacaaaaccaggtcttgtggggagggggtcagtttctgggaagggtggggggggcagggaaggggaacacagatttctttgggggtcctagaccccatgccagccattgtaagagttccacagagctctgggcacttctttgcaaagccatgtttgcacggtggggggatgggtggggggagggcgtggaaatagggattctgtgtctttgtgtcataactttgatgggggcagtgagggagacagccccaacccttttctccaatcccccttccccaggttcctgggctccccttctctctaccttctcccccaacgtctgtcccatccatatttgtctctctgtccacccactcctgggggggccttccccatctctcctccaggccccccggggagggggaaaggagtttggggaggattcgtggtctttatggttttatatataatatattaaaaaatcaaaagtctgtatgaaaatatcagattgcacccccctctccccattcctggcttttgccccctttttcttgttaaaaaacaaaaaccaaaaaacaaaaaaccacacacacattttgtacggggtggggaggggaatggggagggggtttggcaatctcactaaccaccattaaactgaggagagaccaagtgtttgggg

SEQ ID NO: 462262 - DNA, 378 bp, Homo sapiens
catggatttgaataaaacaatttattttcctaattgctgaattcgctgggagcagggcaaggaaatacctccaagagaaaggataagggtggcactttcggtgagcttttggagtcttcctaattctgcttttacctctttctctgccactgtttacctctttctctgcctctccctgtgtgttccgtttctccctcttccttcgcctggcatgtgtcttgtctgtctccctcttcccttatacttctgtccaactcctggatccacaaatatgtcccccctgccccgggggtctgtcaccccctcaggttcctatctgacccacgaagccagtggcttggatgaacagggagaagcaagagaagccttcctcaatgg

SEQ ID NO: 462263 - DNA, 1835 bp, Homo sapiens
ctggcatcattcccattttatagatggggcaactgaggctccgaaaggggcaggacaggaagtacagacagagaacgtgacagtggctgagggtggggtggctgagatcacctgccgtctgcaccagtatgatgggtccatagttgtcatccagaacccagcccggcagaccctcttcttcaatggcacccgtgccttgaaggatgagcgtttccagcttgaggagttctccccacgccgggtgcggatccggctctcagatgcccgcctggaggacgaggggggctatttctgccagctctacacagaagacacccaccaccagattgccacgctcacggtactagtggccccagagaatcctgtggtggaggtccgggagcaggcggtagagggcggcgaggtggagctcagctgcctcgttccgcggtcccgtccggctgccaccctgcgctggtaccgggaccgcaaggagctgaaaggagtgagcagcagccaggaaaatggcaaggtctggagcgtggcaagcacagtacggtttcgtgtggaccgtaaggacgacggtggtatcatcatctgtgaggcgcagaaccaggcgctgccctccggacacagcaagcagacgcagtacgtgctggatgtgcagtactcccccacggcccggattcatgcctcccaagctgtggtgagggagggagacacgctggtgttgacgtgtgctgtcacggggaaccccaggccaaaccagatccgctggaaccgcgggaatgagtctttgccggagagggcggaggccgtgggagagacgctcacgctgccgggtctggtatccgcggataacggcacctacacttgcgaggcgtccaataagcacggccatgcgagggcgctctacgtacttgtggtctacgaccctggtgcggtggtagaggctcagacgtcggttccctatgccattgtgggcggcatcctggcgctgctggtgtttctgatcatatgtgtgctagtgggcatggtctggtgctcggtacggcagaaggggccagaagtgagggcccagaggtctgggtcccccagggggcaggggccaaaggtccagaccccccaagtccagtgagggcagtagggattgggttgggggaagataactgggggaaggccagggcccctaggctacaaaaccaggtcttgtggggagggggtcagtttctgggaagggtggggggggcagggaaggggaacacagatttctttgggggtcctagaccccatgccagccattgtaagagttccacagagctctgggcacttctttgcaaagccatgtttgcacggtggggggatgggtggggggagggcgtggaaatagggattctgtgtctttgtgtcataactttgatgggggcagtgagggagacagccccaacccttttctccaatcccccttccccaggttcctgggctccccttctctctaccttctcccccaacgtctgtcccatccatatttgtctctctgtccacccactcctgggggggccttccccatctctcctccaggccccccggggagggggaaaggagtttggggaggattcgtggtctttatggttttatatataatatattaaaaaatcaaaagtctgtatgaaaatatcagattgcacccccctctccccattcctggcttttgccccctttttcttgttaaaaaacaaaaaccaaaaaacaaaaaaccacacacacattttgtacggggtggggaggggaatggggagggggtttggcaatctcactaaccaccattaaactgaggagagaccaagtgtttgggg

SEQ ID NO: 462264 - DNA, 1165 bp, Homo sapiens
gtgccgggccgggagcgagcggcggcggcggcggcggcggcaccatgggccgggcccggcgcttccagtggccgctgctgctgctgtgggcggccgcggcggggccaggggcaggacaggaagtacagacagagaacgtgacagtggctgagggtggggtggctgagatcacctgccgtctgcaccagtatgatgggtccatagttgtcatccagaacccagcccggcagaccctcttcttcaatggcacccgtgccttgaaggatgagcgtttccagcttgaggagttctccccacgccgggtgcggatccggctctcagatgcccgcctggaggacgaggggggctatttctgccagctctacacagaagacacccaccaccagattgccacgctcacggtactagtggccccagagaatcctgtggtggaggtccgggagcaggcggtagagggcggcgaggtggagctcagctgcctcgttccgcggtcccgtccggctgccaccctgcgctggtaccgggaccgcaaggagctgaaaggagtgagcagcagccaggaaaatggcaaggtctggagcgtggcaagcacagtacggtttcgtgtggaccgtaaggacgacggtggtatcatcatctgtgaggcgcagaaccaggcgctgccctccggacacagcaagcagacgcagtacgtgctggatgtgcagtactcccccacggcccggattcatgcctcccaagctgtggtgagggagggagacacgctggtgttgacgtgtgctgtcacggggaaccccaggccaaaccagatccgctggaaccgcgggaatgagtctttgccggagagggcggaggccgtgggagagacgctcacgctgccgggtctggtatccgcggataacggcacctacacttgcgaggcgtccaataagcacggccatgcgagggcgctctacgtacttgtggtctacggtgagagcaggctgcggccgactgagggcgggggcggggcgccaggtggcgggggcggggcttgagcaaagaggccacataactcaggggctcaaattcgggttggctgcattctattgcaggtaaccgaacctgtctgcgcctcagtttacccatcagtaaagtggaaataaacaatagcacctatataaca

SEQ ID NO: 462265 - DNA, 1043 bp, Homo sapiens
gtgccgggccgggagcgagcggcggcggcggcggcggcggcaccatgggccgggcccggcgcttccagtggccgctgctgctgctgtgggcggccgcggcggggccaggggcaggacaggaagtacagacagagaacgtgacagtggctgagggtggggtggctgagatcacctgccgtctgcaccagtatgatgggtccatagttgtcatccagaacccagcccggcagaccctcttcttcaatggcacccgtgccttgaaggatgagcgtttccagcttgaggagttctccccacgccgggtgcggatccggctctcagatgcccgcctggaggacgaggggggctatttctgccagctctacacagaagacacccaccaccagattgccacgctcacggtactagtggccccagagaatcctgtggtggaggtccgggagcaggcggtagagggcggcgaggtggagctcagctgcctcgttccgcggtcccgtccggctgccaccctgcgctggtaccgggaccgcaaggagctgaaaggagtgagcagcagccaggaaaatggcaaggtctggagcgtggcaagcacagtacggtttcgtgtggaccgtaaggacgacggtggtatcatcatctgtgaggcgcagaaccaggcgctgccctccggacacagcaagcagacgcagtacgtgctggatgtgcagtactcccccacggcccggattcatgcctcccaagctgtggtgagggagggagacacgctggtgttgacgtgtgctgtcacggggaaccccaggccaaaccagatccgctggaaccgcgggaatgagtctttgccggagagggcggaggccgtgggagagacgctcacgctgccgggtctggtatccgcggataacggcacctacacttgcgaggcgtccaataagcacggccatgcgagggcgctctacgtacttgtggtctacggtaaccgaacctgtctgcgcctcagtttacccatcagtaaagtggaaataaacaatagcacctatataaca

SEQ ID NO: 462266 - DNA, 1371 bp, Homo sapiens
gctctggcttctgaactggcagggatggaactaggttccacatcgggggacctgcgctactcagtatgtctttgcaagactccactctttccagagaggggaaaccagagggagagattatggctgctgtgtttttctcagttggacgcctgagccctgaagttacccagccagatgaagatcttcaccttcaggcagaagaaacacaattggtaaaggaatcggtgacatttaaggatgtggctatagacttcacattggaggagtggaggttgatggaccctacacagaggaacctgcacaaggatgtgatgctagagaattacaggaatctggtctccctggggcttgcagtttccaaaccagacatgatatctcatttggagaatgggaaaggaccatgggtgacggtgagagaaatttcaagaattccctatcctgggtctcattctatcacccaggctggaatgcagtggtgtgatcatagctcactgcagtctcaaactcctgggctcaagtgatcctcctgcctcatcctcctacatagctgggagtagaggcacacaccaccacacctaagatttttattttttgtagaggaaggggtctcactatgttgaccaagctgttctcgaactcctgggctcaagctatcctcccacctcgtcctcccaaattgctgggatttcaggtgtgagtcaccatgcctgacattacttggcttttaaaaacattactgtttttagtcctttttcttgtatgtttgagttttattactttctgttctttattattttattccattcttagagcttaatttgtggatcttttctaacctcttgaattaggtacttagatcgttgattttcagctgttcttcttttctaattgtttagggctatcagaactatatcacacttttttatgtagcatcttcataatttttgagtggaaaatattttataatttctattgtgatatcttttatccttgggttatttttaaatgtttttcttaattttgtgccatttgggaattttctagcaatcttgttgactttaattctactatggtcagacaggatgctctgaattatgtcagtctttgcagaattttgtaaacattttgtgctcttgaaaaaatgtacagcctataggtattgagtattgagtacaatttctagatgtgtcaggagattaagtttgttaattatgttaaaatctgtatacttacagcttattctatcaattgagaaagattttttaaagtctgctagtgagactatacatttgcttcctatttagttcatttaatttttttctttctgtatttgaagctgtgttattatgtaaatacaaagttataattgtt

SEQ ID NO: 462267 - DNA, 1248 bp, Homo sapiens
  misc_feature (986)..(987): n is a, c, g, or t
  misc_feature (990)..(991): n is a, c, g, or t
  misc_feature (997)..(997): n is a, c, g, or t
  misc_feature (1000)..(1001): n is a, c, g, or t
taagttctgattcagtgatcaattaaatgggtggcagaagttactggaaagagacctctcttcccctggatggcatcgtgtgaagacatgtgacttgcagtcactgtggacatttgtgaccacaaagacccatgaaactggatgatgaagccaaatctaataccacagaaggcagagcaaggagagggggagaggctggccttggtgacattgtttgaatctagtcttctctgaatcagtcccaccttagcccttctcaatcatgattatggcatccagctgcatccatgtcactgcaaaggatatgatttcatcggaaagaaagtatttgaaagagctttgttcaggtcatgctaactatcatgtcatgaggacactcacgcagcctatggagaggtccacatggtgaggaactgagacctctggccaacagctttgtaagtccatcatctcaaatctccaaccccaatctagccttcagatgactgtagcccaaccaacatcgtgactgcaatctcatgagagaccactcattgcaaacctgatcctggattcctgaccctcagatactatgagataataaatgtttttagctgctaagtttgggggtaatttgttatgcagcaatagataattaatatgggaactgcttaatgttgttgtaatggagatgctggctaggtgtttctaaaatgtttacatgggagatggattgggagggtgcaattggctccctgcaaatccatcactactggaaaacaatttatacacgtttttaccaagggtggatcaatattactcggggtgcctttaggttagcgctttacatgggatcatctgaagtcacaagtaattctcgaggggcgctgttgatacaaattccatcagtactacatggactccattgcactaaccacggatgcgccctgttcacagctttacccggacatttagccctggttcttaacactgaagagttaacaggnntgnnggaganganngttttagggcaaaggagagaaatgataaagggaagggaaaaagagatcaggtggccagagcagctcagcatcttccaattccttgcaaaggcaatttgttctccattgttgctgagaccaagggcagaatgtccaggaccttgggctgacacagaatttgctagggaaacttgggttcaccaaaaaagaacagaaattttactgccacctgcacctcaccttccaggggaagttttgttatgtggaa

SEQ ID NO: 462268 - DNA, 982 bp, Homo sapiens
attaaggagtttggggaagtcgcagagctgcagcggaaaggcaggggtctgagactacttttgagaagagaaacaacgcaaaacgatcgctggagggccagagcctgggtcgaaggtgccctagcttttatgacctggttaattgtgtctcctttttatttttatttttttccttaccactactactactactacttttatttttttttaaccgatacactttggagagaagaagcagacacaggttcccacggcgtctgacgctgcggagcaagtccagagccagctggactcgcagcctctggcccggcggcaccaactcctcactgggtcattttgagcgcgctgtgcccaccttttctgttgcgtgtggacgtggggaggatcttctaagtccctccaacgaaggcaagtgtgagactctggccctttatttgtaagaagcaagccttcagattgcagaagtgtcgcgcgggtcgccgtgcgttgcgcgagtgggaagatggaggaggccggcacgctgctttcgtggacgcaagtgaaccgggcgtgaaggcagggtgcgagctctgcccttggcccagccctgcgtgggcgccgtcccagattccgggcggtgcggggtgcagagatctggagagacttgcgggctccccagcgcaggctgctctgggatttcgttggaagatccggcagagccttggaggagagggcccgggaggctgtgtgtgcagcggaaacttgtacgaatgcccccacagcggaaatggtgcgcacgagtaatttctgcggtgcacccttttaaaaattgacaagtgaacaagatcaattttttaagaaagcaaaggtagaaaacaaaaggcgtgcgacttcttgactggcttgttcccgcctttcttccttctctatactcagatcagaaacttttctttaattgctcttattcagtgcgacaacttttaataaaagcatttgcatttta

SEQ ID NO: 462269 - DNA, 503 bp, Homo sapiens
ccgagcggccgccaggatgtgcccccggccccgtcgtcgccgcgcccgcgcccctcgccccagtacgtcttttttcgtttcctaaatttcttatttttgtccttgcaagtggtcctgtctggtgtgaaccgtcagcacagatggcctcctggagcttccccgagtcgttcgctgggggaagcgggcggtgagcggccagcccgggcgctccgcaggccgcgagctcccggcagggctggtggcgggggtccgcctgggggaggaatccccgcctgctccatcggacccggcctggcgcggctcgcggcgctcggcgggctcccttccattctagaatcttcccgcttgcttcccagcccgcgttcttccgcctgcctttaattgtgtaagtttgacgaagtcagagctttgggttccaggaaaagcgcaggagggtcatagaggaagggagggcgcaggttggagtcaggtccaaacagtccctatcgccacttttgaaaaaa

SEQ ID NO: 462270 - DNA, 677 bp, Homo sapiens
ccgagcggccgccaggatgtgcccccggccccgtcgtcgccgcgcccgcgcccctcgccccagtgtggacgtggggaggatcttctaagtccctccaacgaaggcaagtgtgagactctggccctttatttgtaagaagcaagccttcagattgcagaagtgtcgcgcgggtcgccgtgcgttgcgcgagtgggaagatggaggaggccggcacgctgctttcgtggacgcaagtgaaccgggcgtgaaggcagggtgcgagctctgcccttggcccagccctgcgtgggcgccgtcccagattccgggcggtgcggggtgcagagatctggagagacttgcgggctccccagcgcaggctgctctgggatttcgttggaagatccggcagagccttggaggagagggcccgggaggctgtgtgtgcagcggaaacttgtacgaatgcccccacagcggaaatggtgcgcacgagtaatttctgcggtgcacccttttaaaaattgacaagtgaacaagatcaattttttaagaaagcaaaggtagaaaacaaaaggcgtgcgacttcttgactggcttgttcccgcctttcttccttctctatactcagatcagaaacttttctttaattgctcttattcagtgcgacaacttttaataaaagcatttgcatttta

SEQ ID NO: 462271 - DNA, 4209 bp, Homo sapiens
ccgagcggccgccaggatgtgcccccggccccgtcgtcgccgcgcccgcgcccctcgccccagtacgtcttttttcgtttcctaaatttcttatttttgtccttgcaagtggtcctgtctggtgtgaaccgtcagcacagatggcctcctggagcttccccgagtcgttcgctgggggaagcgggcggtgagcggccagcccgggcgctccgcaggccgcgagctcccggcagggctggtggcgggggtccgcctgggggaggaatccccgcctgctccatcggacccggcctggcgcggctcgcggcgctcggcgggctcccttccattctagaatcttcccgcttgcttcccagcccgcgttcttccgcctgcctttaattgtgtgtggacgtggggaggatcttctaagtccctccaacgaaggcaagtgtgagactctggccctttatttgtaagaagcaagccttcagattgcagaagtgtcgcgcgggtcgccgtgcgttgcgcgagtgggaagatggaggaggccggcacgctgctttcgtggacgcaagtgaaccgggcgtgaaggcagggtgcgagctctgcccttggcccagccctgcgtgggcgccgtcccagattccgggcggtgcggggtgcagagatctggagagacttgcgggctccccagcgcaggctgctctgggatttcgttggaagatccggcagagccttggaggagagggcccgggaggctgtgtgtgcagcggaaacttgtacgaatgcccccacagcggaaatggtgcgcacgagtaatttctgcggtgcacccttttaaaaattgacaagtgaacaagatcaattttttaagaaagcaaaggtagaaaacaaaaggcgtgcgacttcttgactggcttgttcccgcctttcttccttctctatactcagatcagaaacttttctttaattgctcttattcagtgcgacaacttttaataaaagcatttgcattttaagcctgagttgcaaccatagatttattgcgaagtgacaacgtgtctatggaatattttcgcagatgagacaggacatgcgctctagtcgtgcccagattaaagcgacgctgggccatgtgcctgtgtagtgcagactcggaggggcacacacatactcgtcaccacatgaccactgtctattaatattgtcatacctaaacactcgcaaaaacaaaagttgcttttcttccctgtaattaaatctaatttgttaattgtctttcctcttgcaatgttgttttcatcttgaggtgacacattattattttgtctaatattatttacaaattaatgctgtatattttacattagtgaaacatataattaggtgtttggttcaatcggtatcattcagataaaacaaagcctatctgcaagattgattggaagtggagtagttggttctaatttaccatcacagtcacagtttattgaagctacctggccccagattcacagaagctagttttacctaaggtgcatttgatgctttgtttacaagtgtttattttccccaaccacttaatgcaaaaaaaaaaaaacaccttcaaatattagggctttcatttcattttctgtcttctttcattcctccccccacccaaagttcctttcttctattctctggccacctctctccgtttcctcccctacccccaacttttgttttaggttcttagagttaaattcagcatgatttggtgcctctaatgctgtgacaagtgactgctaattggttctcacttgagcaaagatattaccatactaatattattattgcgctcggtctccggacccaccccgggaggcccaggggttgggggagaaacaaaaagggctccacgcactgtctcccgttagagacagagtgagcccacagcctcctgctcgttggaagtgccacgcgtcctcggcgctcaagctggccctgcgctcccgggagcgccggcggagaggggcgcacgccgggtgggctcgccggcgtggaggggccgggctggcccggaggcgcacatcaaaggccgcccgtgcaatgcatgcgcgtttccctcaattaacggcatttcctgccccctcgcttcccttcatccgccccgccccccccgcgccagtccgggctgcttgagcgcggggacgagccttttcccgcgcgcccgtccgtgcgagtgcgcgcgtgcgcgtgcgcgtgcgaagggtcccaggggcgctccggatttgcccaggggaggctgcgagggtcgccgggccccgaggccccgtcgaggccgagtttcgggcgcgttttggggagagcgaggcttaagggtgcggcgggtggaacgcagggaggaccccagtttctgtctcctcgaacgttccctgtgtccgcacccacaggcttcgactctggccttaaggcgcggctgcctgcgggaccccacgtgcagggaggggcgcccgggcaccctcattccacacgccccggcgcgggctgttcccaccgcatatccgcgacctcagacgtcgcgcgccaaatgggggcggggaggtgactgtggaaagaatgtggccacaggcgcggggacggcagcacggggaccccgccccccaagtttcctcattagcgaggccgcgagggttgggggcggacgggggaccccctggctccgggctccactccgacggcaggacgggtcctcgctccccccgctcccgtcggtcccgtcccagggcggtgccagggctctgagcgggtcccagcggggctcgggcaccctcgggtgggcggcgtcaggcccgaggcccgtgtcccgctggctcccggcggtgggctgtgtccccgcggcgccctctcgggaggaggactggcccccgcccccgcccaggtctctaacccctcggaggtcaccgggtctggccccgcctcaccacgcgggggccacttggatggccgcagccagaggacgggcctgggcgaaaccccacagctgatttcagaaccgcgtctctcgccaaaggcgtcccgcgggggctgagcggggcgcagacccgaggcctcctggacggcccagcccctcgcaggtccccgcggtcctctctcggcctgcggggcggggactgtggaaggggagcgcgcgcggggagctcctggcgtgagaaatgccgcgtccatgtctccgctcgcggcccctctgcgtccgagacaaacccgcgtggggagccccgtgctctggccgtgtgcgcgcccgacgcggggacgccccctgcgcacttttcctggccgtagagctccccggccctgcacaacgagttcaaagaagtttcagaaagcggcacaacttcgatgctaccgtttccatcgttcttggctttctcatgatcacaaatgtcatttgtcttggctccaagctctgcaaaagtgcagggctgaattccgcaggaggctgcgtttgtggggaggcgctcaccacaaggtccttgaccgctgagcaggggacaaagagggccgagtgtgggggcgggggtggctcccgctcgcgttccgggatgggcgtcttctctgtgaccgattgcactgagctgttggcccacagatcccattcgggctgtcctggcaggacactgatgtatgctgtgggctggtgcagcccagggcacagcagtcagttccatggagtcgtggacaagtgtggggagagggggccgttctcaggaaatgcttcaaccagtggcaccgtcacggctgagcagttctgccgcccgggccacaggctggccattgggttgacgccaggtagaggagggccgtggataacgagaagactgggaagcaggctcaggagggtgtgggagggcaccctgacttgtttccagagagatctggtgctggtgggttcagcagccaagagagacagggttgaaaacaagattcagggtgttggtaccccgtctcggggcgccagcccagcccagcccatttctctaagttgccatggggtggagtgaatgtgctgtcatctcttccattccttgagtattttatatctttcctctgtttgttaataaggttcttctattccttgagtcatgtattttatatctttcctctgtttgttaataaggttcttccattccttgaattatgtattttatatctttcctctgtctgttaataaggttctttgaaaag

SEQ ID NO: 462272 - DNA, 1000 bp, Homo sapiens
ccgagcggccgccaggatgtgcccccggccccgtcgtcgccgcgcccgcgcccctcgccccagtacgtcttttttcgtttcctaaatttcttatttttgtccttgcaagtggtcctgtctggtgtgaaccgtcagcacagatggcctcctggagcttccccgagtcgttcgctgggggaagcgggcggtgagcggccagcccgggcgctccgcaggccgcgagctcccggcagggctggtggcgggggtccgcctgggggaggaatccccgcctgctccatcggacccggcctggcgcggctcgcggcgctcggcgggctcccttccattctagaatcttcccgcttgcttcccagcccgcgttcttccgcctgcctttaattgtgtgtggacgtggggaggatcttctaagtccctccaacgaaggcaagtgtgagactctggccctttatttgtaagaagcaagccttcagattgcagaagtgtcgcgcgggtcgccgtgcgttgcgcgagtgggaagatggaggaggccggcacgctgctttcgtggacgcaagtgaaccgggcgtgaaggcagggtgcgagctctgcccttggcccagccctgcgtgggcgccgtcccagattccgggcggtgcggggtgcagagatctggagagacttgcgggctccccagcgcaggctgctctgggatttcgttggaagatccggcagagccttggaggagagggcccgggaggctgtgtgtgcagcggaaacttgtacgaatgcccccacagcggaaatggtgcgcacgagtaatttctgcggtgcacccttttaaaaattgacaagtgaacaagatcaattttttaagaaagcaaaggtagaaaacaaaaggcgtgcgacttcttgactggcttgttcccgcctttcttccttctctatactcagatcagaaacttttctttaattgctcttattcagtgcgacaacttttaataaaagcatttgcatttta

SEQ ID NO: 462273 - DNA, 1913 bp, Homo sapiens
gaagccgccgcgtacagtgtgacctttagacaattctgtctcacaggatggacgtggtagaggtcgcgggtagttggtgggcacaagagcgagaggacatcattatgaaatacgaaaaggcccttgcaaccctttaccttggacccctcaccaaggctccctctgggctacagggacaccaagctgggctgccagaggacaaggggcctaagccttttcgaagctacaacaacaacgtcgatcatttggggattgtacatgagacggagctgcctcctctgactgcgcgggaggcgaagcaaattcggcgggagatcagccgaaagagcaagtgggtggatatgctgggagactgggagaaatacaaaagcagcagaaagctcatagatcgagcgtacaagggaatgcccatgaacatccggggcccgatgtggtcagtcctcctgaacattgaggaaatgaagttgaaaaaccccggaagataccagatcatgaaggagaagggcaagaggtcatctgagcacatccagcgcatcgaccgggacataagcgggacattaaggaagcatatgttcttcagggatcgatacggaaccaagcagcgggaactactccacatcctcctggcatatgaggagtataacccggaggtgggctactgcagggacctgagccacatcgccgccttgttcctcctctatcttcctgaggaggatgcattctgggcactggtgcagctgctggccagtgagaggcactccctgcagggatttcacagcccaaatggcgggaccgtccaggggctccaagaccaacaggagcatgtggtagccacgtcacaacccaagaccatggggcatcaggacaagaaagatctatgtgggcagtgttccccgttaggctgcctcatccggatattgattgacgggatctctctcgggctcaccctgcgcctgtgggacgtgtatctggtagaaggcgaacaggcgttgatgccgataacaagaatcgcctttaaggttcagcagaagcgcctcacgaagacgtccaggtgtggcccgtgggcacgtttttgcaaccggttcgttgatacctgggccagggatgaggacactgtgctcaagcatcttagggcctctatgaagaaactaacaagaaagcagggggacctgccacccccagccaaacccgagcaagggtcgtcggcatccaggcctgtgccggcttcacgtggcgggaagaccctctgcaagggggacaggcaggcccctccaggcccaccagcccggttcccgcggcccatttggtcagcttccccgccacgggcacctcgttcttccacaccctgtcctggtggggctgtccgggaagacacctaccctgtgggcactcagggtgtgcccagcccggccctggctcagggaggacctcagggttcctggagattcctgcagtggaactccatgccccgcctcccaacggacctggacgtagaggggccttggttccgccattatgatttcagacagagctgctgggtccgtgccatatcccaggaggaccagctggccccctgctggcaggctgaacaccctgcggagcgggtgtgagatcggctttcgctgcacccagcactgattccgaccagggcacccccttcagagctagggacgaacagcatgaaagagttcaatgaggaaggagaggaagtggagcatatgcttagtttccaagctggaaaagtggcccatggttaaccaagactagatgtaaaagcacaggtggccgcgggtccagacttgctttcactgtactgtaaaaaaaaaaaaaggcacaatgtagaaaggaaactctcttcaatgaatggtgttggggaaagtgcatgaaaaagaatgaaattgcacacttgtttt

SEQ ID NO: 462274 - DNA, 852 bp, Homo sapiens
aattaaaaactgtacgttttgatggcagatttctggatgacagcattgcaaaaagtaaatgatccaaatgtgcacactttccagcagaattccagatttggaacttgatccaaaggaaataaatagagaaatttcaaggccatctcatcagaagcacaattattactaaagtctcctaatgagcatctgggagcaacttgatacatgctttctgcttgttcaagcaagagggagattcttgaacattgggaggcgttgagcctgggatgagatttgggctggaagactctgagtacaatgccctggaaaggagatggaacccatgtgaggctcaggacaatctacctgtctggctggttcttatcccctctgagtatcagaggagcagacgcctgcaaatgttgtcctctgggatccagacaaaagacctaatattggctgaagctgccaccgctgcttctgctggagggactcctttgggatccctgagtgatcttgtctctagcacctggtcaaagtacgctgaggggacacagaagagccgccaattccccagagccacccatgactgtcagccctccaggccagccgtgctcacggtgcatggccctggaccctgggagagcctgatgtgggtgtcccatgagtcagcatggacccagtcccgtcactggagaaacagatccgacagccatgactcaggaatgcggatgttctgtcccaggagcaccgcagagaaaatcatgttgaaaccttgatgttattgacagaaaagaacacattgctcaatggagtgtgagtcaaataactatgaacttaaaaatatagtagtccttccttatgaaagctttc

SEQ ID NO: 462275 - DNA, 2109 bp, Homo sapiens
tgctgtcggagtcacaggatggcggctgtcgtcctgcccccaactgccggggcccagaggtcctccgtgtctgatcgggcggctcttgggacttgggacttaggcatttgggtgtctgtggatgtcacctgtgtggtgaatgtgctggagcttttgaattctcccttcagttctttctgtgaacctgataaaaacacacgagaaggacacacagagggcggagagctggttaatgagctcctgaaaagctggctaaagggcttggtgacctttgaggatgtggccgtggagttcacccaggaggagtgggcattgctggaccctgcccaaaggacactgtacagggacgtgatgctggagaactgcaggaacctggcctcactggggaaccaagttgataaacctaggctgatctcccagctggagcaagaagataaagtgatgacagaagagagaggaattctctcaggtacctgtccagatgtggagaatccatttaaagccaaagggttaactcctaagctgcatgtttttcgaaaagaacaatctagaaatatgaaaatggagaggaatcatcttggagcaacactcaacgaatgtaatcagtgttttaaagtcttcagcacaaaatcttcccttacacggcacaggaagattcatactggagaaagaccctatggctgcagtgaatgtgggaaatcctacagcagtagatcttaccttgctgttcataagagaatccacaatggggagaaaccctatgaatgcaatgactgtgggaaaaccttcagcagcagatcttaccttactgttcataagagaatccacaatggggagaaaccctacgaatgcagtgactgtgggaaaaccttcagcaattcctcatacctcagaccgcacttgagaattcacactggagaaaaaccgtacaaatgtaaccagtgttttcgtgagttccgcactcagtcaatcttcacaaggcacaagagagttcatacgggggagggtcattatgtatgtaatcagtgtggaaaggctttcggcacgaggtcatctctttcttcgcactatagcattcatacaggggagtacccttacgaatgccacgattgtgggagaaccttcaggaggaggtcgaatctgacacagcacataagaactcatactggagaaaaaccctacacatgtaatgagtgtgggaaatcctttaccaatagcttttctcttacaattcacaggagaatacataatggagagaaatcctatgagtgcagtgattgtggaaaatcctttaatgttctctcatccgttaagaaacacatgagaactcacactggaaaaaaaccctatgaatgtaattattgcgggaaatccttcacaagtaactcctacctttctgtgcatacgagaatgcataataggcaaatgtgaattcaataactgtgggaaaagcattcattgatctttcatgcctcagataacatgagcaaactctaacaagatgtatgaatcacctgctactgtgtaacaaattaccccccaaaattttgtggcttcaaacaaaaacacttgttatctcaaaatttttgtaggtcaggaattcagaaacaacatagctctatagttcttcaggatatctcaagaggttacagtccagatgtcagcagaactgtaatcatccagaattgttactggtgaagggaccacttccaaatggcttacaagcccgacaagtgcatgctagctgtttccaagggacctgcgcttccaaatcacgtaggcctctcaacagggctgagtttctttatggaagcaacttctccccaaagccagtgatctaaaggagccaacacagaaagcataatgtcttttatgacctagcttcagtgagatatgttttcatgtccctgttacattggtcatacacaccaatcctgatacaatgtggaagaacaccacaggaggtatgaacagtagacatttggaaccatctggaaaacttgccatgaaatcagtggaggaaagccttcagctgaccctcatttttttttttttaagacaatgtctcactcttgcactccagcctgggcgacagagactccatctcaa

SEQ ID NO: 462276 - DNA, 1291 bp, Homo sapiens
acctggatacttcaggtgcctgtgcaggatttgcatgctgttatggttcttttcgatgagatcctccaatcacgctgcttccacccccagtggcaacggcctttgggtcccttctcgtcgtatgggagctctgttttcactcaattaaatcttgcaactgcacactcttctagtccgtgtttgaaccggctggagctgagctttcactcgctgcccaccactgctgatcgctgccatcgcagacccgtgctgacttccacccctcagggttcggtagggtgtccgctggcttctgatccagccaggcgctgcccattgctgctcccaattgggctagaggctcgccattgttcctgggtggctaagtgcctggaacttcaggattctccattgttctggcattgctgcccaccagcagaggatcaggctgacatcttcaggaggcatatggaggtaatggttaactttgctacagtgaagaccaaggtaaattgggtgcactgaagagaaaaacctgaccacttctgcagctgtgcatctggagtctgagttgtactgcgacattagctcttttgactagatgtgatgacagactgtctttggtccattctcttttattgccttggaagagaataaatgaggagtagttctcacccattgcagctgaggcatcacacctgtaatgggattaacaagatgataatatatcttttgccaagaccacatactagcagctattactaacaaagaaaagactgcttctgtaatacaacaataaatttattgaactaaaagttgagactgacatctgggcacattgggctcctcatgcctctgaataaacagacaaacaaatgagttactataccagcagaggggtacaagcaattttccagtcttgaccctttatctgttgaccaagctaaggcagaaaccagctaaattctggatttaatcttgagcagcaaaaaagatcagcttttgaagtggatctgcttttattcttggcaaaagttcagcggagaccaaccagagtggtgaccaaagttcttcaacatcaagccacatgtactacaaggaattacggatagtgcttaatctaaaattaagaaatgtccacattctcccctaaaaagttattggattcaagaatgaaaacaagagaagcatatttgtctcaaatccaaactacagacaccagaaagacaaaccaggagtttccgcgaaagttggttgccggataatcctctgcacacatggtgtttgtggcctaatcatggccacaggttac

SEQ ID NO: 462277 - DNA, 2045 bp, Homo sapiens
cgaattccgagctcggtaacccgcaggtggttgtgggtaggggcggcaggcactgctgaggccactgcgcggctcaacgtgtttgcaaagccagaggccactgaggtctcccccaacaaagggacactgtctgtgatggaggactctgcccaggagatcgccacctgcaacagccggaacgggaacccggcccccaagatcacgtggtatcgcaacgggcagcgcctggaggtgcccgtagagatgaacccagagggctacatgaccagccgcacggtccgggaggcctcgggcctgctctccctcaccagcaccctctacctgcggctccgcaaggatgaccgagacgccagcttccactgcgccgcccactacagcctgcccgagggccgccacggccgcctggacagccccaccttccacctcaccctgcactatcccacggagcacgtgcagttctgggtgggcagcccgtccaccccagcaggctgggtacgcgagggtgacactgtccagctgctctgccggggggacggcagccccagcccggagtatacgcttttccgccttcaggatgagcaggaggaagtgctgaatgtgaatctcgaggggaacttgaccctggagggagtgacccggggccagagcgggacctatggctgcagagtggaggattacgacgcggcagatgacgtgcagctctccaagacgctggagctgcgcgtggcctatctggaccccctggagctcagcgaggggaaggtgctttccttacctctaaacagcagtgcagtcgtgaactgctccgtgcacggcctgcccacccctgccctacgctggaccaaggactccactcccctgggcgatggccccatgctgtcgctcagttctatcaccttcgattccaatggcacctacgtatgtgaggcctccctgcccacagtcccggtcctcagccgcacccagaacttcacgctgctggtccaaggctcgccagagctaaagacagcggaaatagagcccaaggcagatggcagctggagggaaggagacgaagtcacactcatctgctctgcccgcggccatccagaccccaaactcagctggagccaattggggggcagccccgcagagccaatccccggacggcagggttgggtgagcagctctctgaccctgaaagtgaccagcgccctgagccgcgatggcatctcctgtgaagcctccaacccccacgggaacaagcgccatgtcttccacttcggcaccgtgagcccccagacctcccaggctggagtggccgtcatggccgtggccgtcagcgtgggcctcctgctcctcgtcgttgctgtcttctactgcgtgagacgcaaagggggcccctgctgccgccagcggcgggagaagggggctccgccgccaggggagccagggctgagccactcggggtcggagcaaccagagcagaccggccttctcatgggaggtgcctccggaggagccaggggtggcagcgggggcttcggagacgagtgctgagccaagaacctcctagaggctgtccctggacctggagctgcaggcatcagagaaccagccctgctcacgccatgcccgcccccgccttccctcttccctcttccctctccctgcccagccctcccttccttcctctgccggcaaggcagggacccacagtggctgcctgcctccgggagggaaggagagggagggtgggtgggtgggagggggccttcctccagggaatgtgactctcccaggccccagaatagctcctggacccaagcccaaggcccagcctgggacaaggctccgagggtcggctggccggagctatttttacctcccgcctcccctgctggtccccccacctgacgtcttgctgcagagtctgacactggattcccccccctcaccccgcccctggtcccactcctgcccccgccctacctccgccccaccccatcatctgtggacactggagtctggaataaatgctgtttgtcacatcaacaaaaaaaaaa

SEQ ID NO: 462278 - DNA, 2203 bp, Homo sapiens
tgccccgcgcccacagaccgaccgctcgggagctcgcccccgcctagcctcggctgagatgcagggctctgagctccaggtcacaatgcacgacacccggggccgcagtcccccataccagctggactcccaggggcgcctggtgctggctgaggccaggtggcgacgagcgagactacgtgtgcgtggtgagggtaggggcggcaggcactgctgaggccactgcgcggctcaacgtgtttgcaaagccagaggccactgaggtctcccccaacaaagggacactgtctgtgatggaggactctgcccaggagatcgccacctgcaacagccggaacgggaacccggcccccaagatcacgtggtatcgcaacgggcagcgcctggaggtgcccgtagagatgaacccagagggctacatgaccagccgcacggtccgggaggcctcgggcctgctctccctcaccagcaccctctacctgcggctccgcaaggatgaccgagacgccagcttccactgcgccgcccactacagcctgcccgagggccgccacggccgcctggacagccccaccttccacctcaccctgcactatcccacggagcacgtgcagttctgggtgggcagcccgtccaccccagcaggctgggtacgcgagggtgacactgtccagctgctctgccggggggacggcagccccagcccggagtatacgcttttccgccttcaggatgagcaggaggaagtgctgaatgtgaatctcgaggggaacttgaccctggagggagtgacccggggccagagcgggacctatggctgcagagtggaggattacgacgcggcagatgacgtgcagctctccaagacgctggagctgcgcgtggcctatctggaccccctggagctcagcgaggggaaggtgctttccttacctctaaacagcagtgcagtcgtgaactgctccgtgcacggcctgcccacccctgccctacgctggaccaaggactccactcccctgggcgatggccccatgctgtcgctcagttctatcaccttcgattccaatggcacctacgtatgtgaggcctccctgcccacagtcccggtcctcagccgcacccagaacttcacgctgctggtccaaggctcgccagagctaaagacagcggaaatagagcccaaggcagatggcagctggagggaaggagacgaagtcacactcatctgctctgcccgcggccatccagaccccaaactcagctggagccaattggggggcagccccgcagagccaatccccggacggcagggttgggtgagcagctctctgaccctgaaagtgaccagcgccctgagccgcgatggcatctcctgtgaagcctccaacccccacgggaacaagcgccatgtcttccacttcggcaccgtgagcccccagacctcccaggctggagtggccgtcatggccgtggccgtcagcgtgggcctcctgctcctcgtcgttgctgtcttctactgcgtgagacgcaaagggggcccctgctgccgccagcggcgggagaagggggctccgccgccaggggagccagggctgagccactcggggtcggagcaaccagagcagaccggccttctcatgggaggtgcctccggaggagccaggggtggcagcgggggcttcggagacgagtgctgagccaagaacctcctagaggctgtccctggacctggagctgcaggcatcagagaaccagccctgctcacgccatgcccgcccccgccttccctcttccctcttccctctccctgcccagccctcccttccttcctctgccggcaaggcagggacccacagtggctgcctgcctccgggagggaaggagagggagggtgggtgggtgggagggggccttcctccagggaatgtgactctcccaggccccagaatagctcctggacccaagcccaaggcccagcctgggacaaggctccgagggtcggctggccggagctatttttacctcccgcctcccctgctggtccccccacctgacgtcttgctgcagagtctgacactggattcccccccctcaccccgcccctggtcccactcctgcccccgccctacctccgccccaccccatcatctgtggacactggagtctggaataaatgctgtttgtcacatcaacaaaaaaaaaa

SEQ ID NO: 462279 - DNA, 2338 bp, Homo sapiens
gagatcgagccaatgctctccagccaggcgacagagcaagactctatctcaaaaaaaaagaggaaagaaaatgagagacaatcgggagagggagagaccaagaggagaagggatgggaccggaatgagatggagaaaaggagacaggaaaaatcaagaactgatagggaatgggggcaggagaaggtggggagggacagagggggaagactcctgtgtcctaggaaggagagagctgggggacccagaatccttggtccctggaggatggtgctggaggcctggactctttagtctgagtcggggactaggaatttggactcctgggtcctgggagagtcgggagttaggagcccggctcatgagtctgagtggggagaactcctgagagaggagccccgacttcagagtcccagctccaagcccaggccatgcccgtgtctgcctcagatcgccacctgcaacagccggaacgggaacccggcccccaagatcacgtggtatcgcaacgggcagcgcctggaggtgcccgtagagatgaacccagagggctacatgaccagccgcacggtccgggaggcctcgggcctgctctccctcaccagcaccctctacctgcggctccgcaaggatgaccgagacgccagcttccactgcgccgcccactacagcctgcccgagggccgccacggccgcctggacagccccaccttccacctcaccctgcactatcccacggagcacgtgcagttctgggtgggcagcccgtccaccccagcaggctgggtacgcgagggtgacactgtccagctgctctgccggggggacggcagccccagcccggagtatacgcttttccgccttcaggatgagcaggaggaagtgctgaatgtgaatctcgaggggaacttgaccctggagggagtgacccggggccagagcgggacctatggctgcagagtggaggattacgacgcggcagatgacgtgcagctctccaagacgctggagctgcgcgtggcctatctggaccccctggagctcagcgaggggaaggtgctttccttacctctaaacagcagtgcagtcgtgaactgctccgtgcacggcctgcccacccctgccctacgctggaccaaggactccactcccctgggcgatggccccatgctgtcgctcagttctatcaccttcgattccaatggcacctacgtatgtgaggcctccctgcccacagtcccggtcctcagccgcacccagaacttcacgctgctggtccaaggctcgccagagctaaagacagcggaaatagagcccaaggcagatggcagctggagggaaggagacgaagtcacactcatctgctctgcccgcggccatccagaccccaaactcagctggagccaattggggggcagccccgcagagccaatccccggacggcagggttgggtgagcagctctctgaccctgaaagtgaccagcgccctgagccgcgatggcatctcctgtgaagcctccaacccccacgggaacaagcgccatgtcttccacttcggcaccgtgagcccccagacctcccaggctggagtggccgtcatggccgtggccgtcagcgtgggcctcctgctcctcgtcgttgctgtcttctactgcgtgagacgcaaagggggcccctgctgccgccagcggcgggagaagggggctccgccgccaggggagccagggctgagccactcggggtcggagcaaccagagcagaccggccttctcatgggaggtgcctccggaggagccaggggtggcagcgggggcttcggagacgagtgctgagccaagaacctcctagaggctgtccctggacctggagctgcaggcatcagagaaccagccctgctcacgccatgcccgcccccgccttccctcttccctcttccctctccctgcccagccctcccttccttcctctgccggcaaggcagggacccacagtggctgcctgcctccgggagggaaggagagggagggtgggtgggtgggagggggccttcctccagggaatgtgactctcccaggccccagaatagctcctggacccaagcccaaggcccagcctgggacaaggctccgagggtcggctggccggagctatttttacctcccgcctcccctgctggtccccccacctgacgtcttgctgcagagtctgacactggattcccccccctcaccccgcccctggtcccactcctgcccccgccctacctccgccccaccccatcatctgtggacactggagtctggaataaatgctgtttgtcacatcaacaaaaaaaaaa

SEQ ID NO: 462280 - DNA, 1995 bp, Homo sapiens
cgaattccgagctcggtaacccgcaggtggttgtgggtaggggcggcaggcactgctgaggccactgcgcggctcaacgtgtttgcaaagccagaggccactgaggtctcccccaacaaagggacactgtctgtgatggaggactctgcccaggagatcgccacctgcaacagccggaacgggaacccggcccccaagatcacgtggtatcgcaacgggcagcgcctggaggtgcccgtagagatgaacccagagggctacatgaccagccgcacggtccgggaggcctcgggcctgctctccctcaccagcaccctctacctgcggctccgcaaggatgaccgagacgccagcttccactgcgccgcccactacagcctgcccgagggccgccacggccgcctggacagccccaccttccacctcaccctgcactatcccacggagcacgtgcagttctgggtgggcagcccgtccaccccagcaggctgggtacgcgagggtgacactgtccagctgctctgccggggggacggcagccccagcccggagtatacgcttttccgccttcaggatgagcaggaggaagtgctgaatgtgaatctcgaggggaacttgaccctggagggagtgacccggggccagagcgggacctatggctgcagagtggaggattacgacgcggcagatgacgtgcagctctccaagacgctggagctgcgcgtggcctatctggaccccctggagctcagcgaggggaaggtgctttccttacctctaaacagcagtgcagtcgtgaactgctccgtgcacggcctgcccacccctgccctacgctggaccaaggactccactcccctgggcgatggccccatgctgtcgctcagttctatcaccttcgattccaatggcacctacgtatgtgaggcctccctgcccacagtcccggtcctcagccgcacccagaacttcacgctgctggtccaaggctcgccagagctaaagacagcggaaatagagcccaaggcagatggcagctggagggaaggagacgaagtcacactcatctgctctgcccgcggccatccagaccccaaactcagctggagccaattggggggcagccccgcagagccaatccccggacggcagggttgggtgagcagctctctgaccctgaaagtgaccagcgccctgagccgcgatggcatctcctgtgaagcctccaacccccacgggaacaagcgccatgtcttccacttcggcaccgtgagcccccagacctcccaggctggagtggccgtcatggccgtggccgtcagcgtgggcctcctgctcctcgtcgttgctgtcttctactgcgtgagacgcaaagggggcccctgctgccgccagcggcgggagaagggggctccgccgccaggggagccagggctgagccactcggggtcggagcaaccagagcagaccggccttctcatgggaggtgcctccggaggagccaggggtggcagcgggggcttcggagacgagtgctgagccaagaacctcctagaggctgtccctggacctggagctgcaggcatcagagaaccagccctgctcacgccatgcccgcccccgccttccctcttccctcttccctctccctgcccagccctcccttccttcctctgccggcaaggcagggacccacagtggctgcctgcctccgggagggaaggagagggagggtgggtgggtgggagggggccttcctccagggaatgtgactctcccaggccccagaatagctcctggacccaagcccaaggcccagcctgggacaaggctccgagggtcggctggccggagctatttttacctcccgcctcccctgctggtccccccacctgacgtcttgctgcagagtctgacactggattccccccccccatcatctgtggacactggagtctggaataaatgctgtttgtcacatcaacaaaaaaaaaa

SEQ ID NO: 462281 - DNA, 2041 bp, Homo sapiens
  misc_feature (2033)..(2033): n is a, c, g, or t
cgaattccgagctcggtaacccgcaggtggttgtgggtaggggcggcaggcactgctgaggccactgcgcggctcaacgtgtttgcaaagccagaggccactgaggtctcccccaacaaagggacactgtctgtgatggaggactctgcccaggagatcgccacctgcaacagccggaacgggaacccggcccccaagatcacgtggtatcgcaacgggcagcgcctggaggtgcccgtagagatgaacccagagggctacatgaccagccgcacggtccgggaggcctcgggcctgctctccctcaccagcaccctctacctgcggctccgcaaggatgaccgagacgccagcttccactgcgccgcccactacagcctgcccgagggccgccacggccgcctggacagccccaccttccacctcaccctgcactatcccacggagcacgtgcagttctgggtgggcagcccgtccaccccagcaggctgggtacgcgagggtgacactgtccagctgctctgccggggggacggcagccccagcccggagtatacgcttttccgccttcaggatgagcaggaggaagtgctgaatgtgaatctcgaggggaacttgaccctggagggagtgacccggggccagagcgggacctatggctgcagagtggaggattacgacgcggcagatgacgtgcagctctccaagacgctggagctgcgcgtggcctatctggaccccctggagctcagcgaggggaaggtgctttccttacctctaaacagcagtgcagtcgtgaactgctccgtgcacggcctgcccacccctgccctacgctggaccaaggactccactcccctgggcgatggccccatgctgtcgctcagttctatcaccttcgattccaatggcacctacgtatgtgaggcctccctgcccacagtcccggtcctcagccgcacccagaacttcacgctgctggtccaaggctcgccagagctaaagacagcggaaatagagcccaaggcagatggcagctggagggaaggagacgaagtcacactcatctgctctgcccgcggccatccagaccccaaactcagctggagccaattggggggcagccccgcagagccaatccccggacggcagggttgggtgagcagctctctgaccctgaaagtgaccagcgccctgagccgcgatggcatctcctgtgaagcctccaacccccacgggaacaagcgccatgtcttccacttcggcaccgtgagcccccagacctcccaggctggagtggccgtcatggccgtggccgtcagcgtgggcctcctgctcctcgtcgttgctgtcttctactgcgtgagacgcaaagggggcccctgctgccgccagcggcgggagaagggggctccgccgccaggggagccagggctgagccactcggggtcggagcaaccagagcagaccggccttctcatgggaggtgcctccggaggagccaggggtggcagcgggggcttcggagacgagtgctgagccaagaacctcctagaggctgtccctggacctggagctgcaggcatcagagaaccagccctgctcacgccatgcccgcccccgccttccctcttccctcttccctctccctgcccagccctcccttccttcctctgccggcaaggcagggacccacagtggctgcctgcctccgggagggaaggagagggagggtgggtgggtgggagggggccttcctccagggaatgtgactctcccaggccccagaatagctcctggacccaagcccaaggcccagcctgggacaaggctccgagggtcggctggccggagctatttttacctcccgcctcccctgctggtccccccacctgacgtcttgctgcagagtctgacactggattccccccccctcagttcacagtggagactatggagattcagggcaggatccctcaggtacaagaaacaccttccgaagattttgctctccttccttccctccctcttgncaactccc

SEQ ID NO: 462282 - DNA, 1701 bp, Homo sapiens
cgaattccgagctcggtaacccgcaggtggttgtgggtaggggcggcaggcactgctgaggccactgcgcggctcaacgtgtttgcaaagccagaggccactgaggtctcccccaacaaagggacactgtctgtgatggaggactctgcccaggagatcgccacctgcaacagccggaacgggaacccggcccccaagatcacgtggtatcgcaacgggcagcgcctggaggtgcccgtagagatgaacccagagggctacatgaccagccgcacggtccgggaggcctcgggcctgctctccctcaccagcaccctctacctgcggctccgcaaggatgaccgagacgccagcttccactgcgccgcccactacagcctgcccgagggccgccacggccgcctggacagccccaccttccacctcaccctgcactatcccacggagcacgtgcagttctgggtgggcagcccgtccaccccagcaggctgggtacgcgagggtgacactgtccagctgctctgccggggggacggcagccccagcccggagtatacgcttttccgccttcaggatgagcaggaggaagtgctgaatgtgaatctcgaggggaacttgaccctggagggagtgacccggggccagagcgggacctatggctgcagagtggaggattacgacgcggcagatgacgtgcagctctccaagacgctggagctgcgcgtggcctatctggaccccctggagctcagcgaggggaaggtgctttccttacctctaaacagcagtgcagtcgtgaactgctccgtgcacggcctgcccacccctgccctacgctggaccaaggactccactcccctgggcgatggccccatgctgtcgctcagttctatcaccttcgattccaatggcacctacgtatgtgaggcctccctgcccacagtcccggtcctcagccgcacccagaacttcacgctgctggtccaaggctcgccagagctaaagacagcggaaatagagcccaaggcagatggcagctggagggaaggagacgaagtcacactcatctgctctgcccgcggccatccagaccccaaactcagctggagccaattggggggcagccccgcagagccaatccccggacggcagggttgggtgagcagctctctgaccctgaaagtgaccagcgccctgagccgcgatggcatctcctgtgaagcctccaacccccacgggaacaagcgccatgtcttccacttcggcaccgtgagcccccagacctcccaggctggagtggccgtcatggccgtggccgtcagcgtgggcctcctgctcctcgtcgttgctgtcttctactgcgtgagacgcaaagggggcccctgctgccgccagcggcgggagaagggggctccgccgccaggggagccagggctgagccactcggggtcggagcaaccagagcagaccggccttctcatgggaggtgcctccggaggagccaggggtggcagcgggggcttcggagacgagtgctggtccccccacctgacgtcttgctgcagagtctgacactggattcccccccctcaccccgcccctggtcccactcctgcccccgccctacctccgccccaccccatcatctgtggacactggagtctggaataaatgctgtttgtcacatcaacaaaaaaaaaa

SEQ ID NO: 462283 - DNA, 1729 bp, Homo sapiens
actgccaaagcgtagtacccgatgaccgagacgccagcttccactgcgccgcccactacagcctgcccgagggccgccacggccgcctggacagccccaccttccacctcaccctgcactatcccacggagcacgtgcagttctgggtgggcagcccgtccaccccagcaggctgggtacgcgagggtgacactgtccagctgctctgccggggggacggcagccccagcccggagtatacgcttttccgccttcaggatgagcaggaggaagtgctgaatgtgaatctcgaggggaacttgaccctggagggagtgacccggggccagagcgggacctatggctgcagagtggaggattacgacgcggcagatgacgtgcagctctccaagacgctggagctgcgcgtggcctatctggaccccctggagctcagcgaggggaaggtgctttccttacctctaaacagcagtgcagtcgtgaactgctccgtgcacggcctgcccacccctgccctacgctggaccaaggactccactcccctgggcgatggccccatgctgtcgctcagttctatcaccttcgattccaatggcacctacgtatgtgaggcctccctgcccacagtcccggtcctcagccgcacccagaacttcacgctgctggtccaaggctcgccagagctaaagacagcggaaatagagcccaaggcagatggcagctggagggaaggagacgaagtcacactcatctgctctgcccgcggccatccagaccccaaactcagctggagccaattggggggcagccccgcagagccaatccccggacggcagggttgggtgagcagctctctgaccctgaaagtgaccagcgccctgagccgcgatggcatctcctgtgaagcctccaacccccacgggaacaagcgccatgtcttccacttcggcaccgtgagcccccagacctcccaggctggagtggccgtcatggccgtggccgtcagcgtgggcctcctgctcctcgtcgttgctgtcttctactgcgtgagacgcaaagggggcccctgctgccgccagcggcgggagaagggggctccgccgccaggggagccagggctgagccactcggggtcggagcaaccagagcagaccggccttctcatgggaggtgcctccggaggagccaggggtggcagcgggggcttcggagacgagtgctgagccaagaacctcctagaggctgtccctggacctggagctgcaggcatcagagaaccagccctgctcacgccatgcccgcccccgccttccctcttccctcttccctctccctgcccagccctcccttccttcctctgccggcaaggcagggacccacagtggctgcctgcctccgggagggaaggagagggagggtgggtgggtgggagggggccttcctccagggaatgtgactctcccaggccccagaatagctcctggacccaagcccaaggcccagcctgggacaaggctccgagggtcggctggccggagctatttttacctcccgcctcccctgctggtccccccacctgacgtcttgctgcagagtctgacactggattcccccccctcaccccgcccctggtcccactcctgcccccgccctacctccgccccaccccatcatctgtggacactggagtctggaataaatgctgtttgtcacatcaacaaaaaaaaaa

SEQ ID NO: 462284 - DNA, 1327 bp, Homo sapiens
cgaattccgagctcggtaacccgcaggtggttgtgggtaggggcggcaggcactgctgaggccactgcgcggctcaacgtgtttgcaaagccagaggccactgaggtctcccccaacaaagggacactgtctgtgatggaggactctgcccaggagatcgccacctgcaacagccggaacgggaacccggcccccaagatcacgtggtatcgcaacgggcagcgcctggaggtgcccgtagagatgaacccagagggctacatgaccagccgcacggtccgggaggcctcgggcctgctctccctcaccagcaccctctacctgcggctccgcaaggatgaccgagacgccagcttccactgcgccgcccactacagcctgcccgagggccgccacggccgcctggacagccccaccttccacctcaccctgcactatcccacggagcacgtgcagttctgggtgggcagcccgtccaccccagcaggctgggtacgcgagggtgacactgtccagctgctctgccggggggacggcagccccagcccggagtatacgcttttccgccttcaggatgagcaggaggaagtgctgaatgtgaatctcgaggggaacttgaccctggagggagtgacccggggccagagcgggacctatggctgcagagtggaggattacgacgcggcagatgacgtgcagctctccaagacgctggagctgcgcgtggcctatctggaccccctggagctcagcgaggggaaggtgctttccttacctctaaacagcagtgcagtcgtgaactgctccgtgcacggcctgcccacccctgccctacgctggaccaaggactccactcccctgggcgatggccccatgctgtcgctcagttctatcaccttcgattccaatggcacctacgtatgtgaggcctccctgcccacagtcccggtcctcagccgcacccagaacttcacgctgctggtccaaggctcgccagagctaaagacagcggaaatagagcccaaggcagatggcagctggagggaaggagacgaagtcacactcatctgctctgcccgcggccatccagaccccaaactcagctggagccaattggggggcagccccgcagagccaatccccggacggcagggttgggtgagcagctctctgaccctgaaagtgaccagcgccctgagccgcgatggcatctcctgtgaagcctccaacccccacgggaacaagcgccatgtcttccacttcggcaccgtgagcccccacagagagagcgtcgacgctctctctgtggggtatctcactgcccagg

SEQ ID NO: 462285 - DNA, 1417 bp, Homo sapiens
cgaattccgagctcggtaacccgcaggtggttgtgggtaggggcggcaggcactgctgaggccactgcgcggctcaacgtgtttgcaaagccagaggccactgaggtctcccccaacaaagggacactgtctgtgatggaggactctgcccaggagatcgccacctgcaacagccggaacgggaacccggcccccaagatcacgtggtatcgcaacgggcagcgcctggaggtgcccgtagagatgaacccagagggctacatgaccagccgcacggtccgggaggcctcgggcctgctctccctcaccagcaccctctacctgcggctccgcaaggatgaccgagacgccagcttccactgcgccgcccactacagcctgcccgagggccgccacggccgcctggacagccccaccttccacctcaccctgcactatcccacggagcacgtgcagttctgggtgggcagcccgtccaccccagcaggctgggtacgcgagggtgacactgtccagctgctctgccggggggacggcagccccagcccggagtatacgcttttccgccttcaggatgagcaggaggaagtgctgaatgtgaatctcgaggggaacttgaccctggagggagtgacccggggccagagcgggacctatggctgcagagtggaggattacgacgcggcagatgacgtgcagctctccaagacgctggagctgcgcgtggcctatctggaccccctggagctcagcgaggggaaggtgctttccttacctctaaacagcagtgcagtcgtgaactgctccgtgcacggcctgcccacccctgccctacgctggaccaaggactccactcccctgggcgatggccccatgctgtcgctcagttctatcaccttcgattccaatggcacctacgtatgtgaggcctccctgcccacagtcccggtcctcagccgcacccagaacttcacgctgctggtccaaggttcagggggcagggagggggtgggcttggatggggacagtgtggggtgtgggacctggacaaacaggacgagttcctgagtccctggctggggactccatcttctgctcgatgcctctcttctctctctctctcctctcccttcactttcttcccatccccaccacccacaggctcgccagagctaaagacagcggaaatagagcccaaggcagatggcagctggagggaaggagacgaagtcacactcatctgctctgcccgcggccatccagaccccaaactcagctggagccaattggggggcagcgtaagggaccttcctctccaccctgagccccctctcactcatccaagtatcacacccccatcatctgtggacactggagtctggaataaatgctgtttgtcacatcaacaaaaaaaaaa

SEQ ID NO: 462286 - DNA, 1451 bp, Homo sapiens
acttaggctaggtacgaggctggtgtgaatcggcagagggtggagggccagagcgggacctatggctgcagagtggaggattacgacgcggcagatgacgtgcagctctccaagacgctggagctgcgcgtggcctatctggaccccctggagctcagcgaggggaaggtgctttccttacctctaaacagcagtgcagtcgtgaactgctccgtgcacggcctgcccacccctgccctacgctggaccaaggactccactcccctgggcgatggccccatgctgtcgctcagttctatcaccttcgattccaatggcacctacgtatgtgaggcctccctgcccacagtcccggtcctcagccgcacccagaacttcacgctgctggtccaaggctcgccagagctaaagacagcggaaatagagcccaaggcagatggcagctggagggaaggagacgaagtcacactcatctgctctgcccgcggccatccagaccccaaactcagctggagccaattggggggcagccccgcagagccaatccccggacggcagggttgggtgagcagctctctgaccctgaaagtgaccagcgccctgagccgcgatggcatctcctgtgaagcctccaacccccacgggaacaagcgccatgtcttccacttcggcaccgtgagcccccagacctcccaggctggagtggccgtcatggccgtggccgtcagcgtgggcctcctgctcctcgtcgttgctgtcttctactgcgtgagacgcaaagggggcccctgctgccgccagcggcgggagaagggggctccgccgccaggggagccagggctgagccactcggggtcggagcaaccagagcagaccggccttctcatgggaggtgcctccggaggagccaggggtggcagcgggggcttcggagacgagtgctgagccaagaacctcctagaggctgtccctggacctggagctgcaggcatcagagaaccagccctgctcacgccatgcccgcccccgccttccctcttccctcttccctctccctgcccagccctcccttccttcctctgccggcaaggcagggacccacagtggctgcctgcctccgggagggaaggagagggagggtgggtgggtgggagggggccttcctccagggaatgtgactctcccaggccccagaatagctcctggacccaagcccaaggcccagcctgggacaaggctccgagggtcggctggccggagctatttttacctcccgcctcccctgctggtccccccacctgacgtcttgctgcagagtctgacactggattcccccccctcaccccgcccctggtcccactcctgcccccgccctacctccgccccaccccatcatctgtggacactggagtctggaataaatgctgtttgtcacatcaacaaaaaaaaaa

SEQ ID NO: 462287 - DNA, 1543 bp, Homo sapiens
gccctgaaaggggaaagactgtgcaagctgccggtctagcttcggaaacgatacgtattgtacgatagttacgaacgatacgtactgtcgtttccttcctacctcgtcctcaccccaccccgagtgaaacttttcgagtgtgaaccttacttttttcccgttctcctcaaggcagtttgaacgacacaggtttggaaggaatagttaactctccagtattactggaacatctggaccccctggagctcagcgaggggaaggtgctttccttacctctaaacagcagtgcagtcgtgaactgctccgtgcacggcctgcccacccctgccctacgctggaccaaggactccactcccctgggcgatggccccatgctgtcgctcagttctatcaccttcgattccaatggcacctacgtatgtgaggcctccctgcccacagtcccggtcctcagccgcacccagaacttcacgctgctggtccaaggctcgccagagctaaagacagcggaaatagagcccaaggcagatggcagctggagggaaggagacgaagtcacactcatctgctctgcccgcggccatccagaccccaaactcagctggagccaattggggggcagccccgcagagccaatccccggacggcagggttgggtgagcagctctctgaccctgaaagtgaccagcgccctgagccgcgatggcatctcctgtgaagcctccaacccccacgggaacaagcgccatgtcttccacttcggcaccgtgagcccccagacctcccaggctggagtggccgtcatggccgtggccgtcagcgtgggcctcctgctcctcgtcgttgctgtcttctactgcgtgagacgcaaagggggcccctgctgccgccagcggcgggagaagggggctccgccgccaggggagccagggctgagccactcggggtcggagcaaccagagcagaccggccttctcatgggaggtgcctccggaggagccaggggtggcagcgggggcttcggagacgagtgctgagccaagaacctcctagaggctgtccctggacctggagctgcaggcatcagagaaccagccctgctcacgccatgcccgcccccgccttccctcttccctcttccctctccctgcccagccctcccttccttcctctgccggcaaggcagggacccacagtggctgcctgcctccgggagggaaggagagggagggtgggtgggtgggagggggccttcctccagggaatgtgactctcccaggccccagaatagctcctggacccaagcccaaggcccagcctgggacaaggctccgagggtcggctggccggagctatttttacctcccgcctcccctgctggtccccccacctgacgtcttgctgcagagtctgacactggattcccccccctcaccccgcccctggtcccactcctgcccccgccctacctccgccccaccccatcatctgtggacactggagtctggaataaatgctgtttgtcacatcaacaaaaaaaaaa

SEQ ID NO: 462288 - DNA, 709 bp, Homo sapiens
  misc_feature (37)..(38): n is a, c, g, or t
  misc_feature (51)..(51): n is a, c, g, or t
ctctcgctccttgtggtcattttttatagctgaaacnnaggggggcccttnttccacccaccgcgggaaaagggggctcgccgccaggggagccagggctgagccactcggggtcggagcaaccagagcagaccggccttctcatgggaggtgcctccggaggagccaggggtggcagcgggggcttcggagacgagtgctgagccaagaacctcctagaggctgtccctggacctggagctgcaggcatcagagaaccagccctgctcacgccatgcccgcccccgccttccctcttccctcttccctctccctgcccagccctcccttccttcctctgccggcaaggcagggacccacagtggctgcctgcctccgggagggaaggagagggagggtgggtgggtgggagggggccttcctccagggaatgtgactctcccaggccccagaatagctcctggacccaagcccaaggcccagcctgggacaaggctccgagggtcggctggccggagctatttttacctcccgcctcccctgctggtccccccacctgacgtcttgctgcagagtctgacactggattcccccccctcaccccgcccctggtcccactcctgcccccgccctacctccgccccaccccatcatctgtggacactggagtctggaataaatgctgtttgtcacatcaacaaaaaaaaaa

SEQ ID NO: 462289 - DNA, 782 bp, Homo sapiens
gagatcgagccaatgctctccagccaggcgacagagcaagactctatctcaaaaaaaaagaggaaagaaaatgagagacaatcgggagagggagagaccaagaggagaagggatgggaccggaatgagatggagaaaaggagacaggaaaaatcaagaactgatagggaatgggggcaggagaaggtggggagggacagagggggaagactcctgtgtcctaggaaggagagagctgggggacccagaatccttggtccctggaggatggtgctggaggcctggactctttagtctgagtcggggactaggaatttggactcctgggtcctgggagagtcgggagttaggagcccggctcatgagtctgagtggggagaactcctgagagaggagccccgacttcagagtcccagctccaagcccaggccatgcccgtgtctgcctcagatcgccacctgcaacagccggaacgggaacccggcccccaagatcacgtggtatcgcaacgggcagcgcctggaggtgcccgtagagatgaacccagagggctacatgaccagccgcacggtccgggaggcctcgggcctgctctccctcaccagcaccctctacctgcggctccgcaaggatgaccgagacgccagcttccactgcgccgcccactacagcctgcccgagggccgccacggccgcctggacagccccaccttccacctcaccctgcactgtgagtctgtgctggcctttgacctctgacctcaggctccacacctcatgagg

SEQ ID NO: 462290 - DNA, 1686 bp, Homo sapiens
accgcccctggagagcccctaattgagtgggtggcggtctgggacgagtgacagactgtcccccactgcagatctggaccccctggagctcagcgaggggaaggtgctttccttacctctaaacagcagtgcagtcgtgaactgctccgtgcacggcctgcccacccctgccctacgctggaccaaggactccactcccctgggcgatggccccatgctgtcgctcagttctatcaccttcgattccaatggcacctacgtatgtgaggcctccctgcccacagtcccggtcctcagccgcacccagaacttcacgctgctggtccaaggctcgccagagctaaagacagcggaaatagagcccaaggcagatggcagctggagggaaggagacgaagtcacactcatctgctctgcccgcggccatccagaccccaaactcagctggagccaattggggggcagccccgcagagccaatccccggacggcagggttgggtgagcagctctctgaccctgaaagtgaccagcgccctgagccgcgatggcatctcctgtgaagcctccaacccccacgggaacaagcgccatgtcttccacttcggcaccgtgagcccccagacctcccaggctggagtggccgtcatggccgtggccgtcagcgtgggcctcctgctcctcgtcgttgctgtcttctactgcgtgagacgcaaagggggcccctgctgccgccagcggcgggagaagggggctccgtgagtggcctgctatctgcaatgaccaccatagcttaaccccatccccaccctcaaccccaagctcaacccataacctcaaccacatcttatcctccaccccacatcccaccacatccacctccatccccaacccatcctcatccccaactacagccccaaacccagccccagactaatccacagccatccccaactcatcctcatccccaactgcagccccaaacccaacccagggccatccccaaacccatccccaagccaaactcaacaccatccccttccctaatcacctctcctgcccctagctcagcctcatccccaactccatgcctgtctccaatcccaaccctgcccccaatctcccctcaactccaatccataacccccttcaaaccatcctcaactaagctcctctccagccctggccacatccccatcctcccccaacctccagccccaacacccatcatccccctgagctcacccttaactccaatttatcctccaagcctatctctcaccatccagccctcacctagccatttcccaaccctagtcctccaccgtcccgaagccaacttcacccatgtccccatccccaatcttgtccccattcctgactccaaatccaacccctaagcctccccaagctcctcctcatctaaccttgtctccagccccaaccacatggccgtcctcacctccaatccgtaaccatcccagaccgatcccaaagccaactccagctacattcccacctccaaccccaatagcatctgcatccccatgcccaaccctaaccccagtgccattaccagcccctaccccatccctatgccatccccacccagcacacccccatcctcacctccatccccagccgcatcctagtcccacccacccccatcctcagttcctccccctgcc

SEQ ID NO: 462291 - DNA, 2007 bp, Homo sapiens
tggtgtggtaggggcggagcgatgtgagcactggcggtcacgtgttgcaaagccagaggccactgaggtctcccccaacaaagggacactgtctgtgatggaggactctgcccaggagatcgccacctgcaacagccggaacgggaacccggcccccaagatcacgtggtatcgcaacgggcagcgcctggaggtgcccgtagagatgaacccagagggctacatgaccagccgcacggtccgggaggcctcgggcctgctctccctcaccagcaccctctacctgcggctccgcaaggatgaccgagacgccagcttccactgcgccgcccactacagcctgcccgagggccgccacggccgcctggacagccccaccttccacctcaccctgcactatcccacggagcacgtgcagttctgggtgggcagcccgtccaccccagcaggctgggtacgcgagggtgacactgtccagctgctctgccggggggacggcagccccagcccggagtatacgcttttccgccttcaggatgagcaggaggaagtgctgaatgtgaatctcgaggggaacttgaccctggagggagtgacccggggccagagcgggacctatggctgcagagtggaggattacgacgcggcagatgacgtgcagctctccaagacgctggagctgcgcgtggcctatctggaccccctggagctcagcgaggggaaggtgctttccttacctctaaacagcagtgcagtcgtgaactgctccgtgcacggcctgcccacccctgccctacgctggaccaaggactccactcccctgggcgatggccccatgctgtcgctcagttctatcaccttcgattccaatggcacctacgtatgtgaggcctccctgcccacagtcccggtcctcagccgcacccagaacttcacgctgctggtccaaggctcgccagagctaaagacagcggaaatagagcccaaggcagatggcagctggagggaaggagacgaagtcacactcatctgctctgcccgcggccatccagaccccaaactcagctggagccaattggggggcagccccgcagagccaatccccggacggcagggttgggtgagcagctctctgaccctgaaagtgaccagcgccctgagccgcgatggcatctcctgtgaagcctccaacccccacgggaacaagcgccatgtcttccacttcggcaccgtgagcccccagacctcccaggctggagtggccgtcatggccgtggccgtcagcgtgggcctcctgctcctcgtcgttgctgtcttctactgcgtgagacgcaaagggggcccctgctgccgccagcggcgggagaagggggctccgccgccaggggagccagggctgagccactcggggtcggagcaaccagagcagaccggccttctcatgggaggtgcctccggaggagccaggggtggcagcgggggcttcggagacgagtgctgagccaagaacctcctagaggctgtccctggacctggagctgcaggcatcagagaaccagccctgctcacgccatgcccgcccccgccttccctcttccctcttccctctccctgcccagccctcccttccttcctctgccggcaaggcagggacccacagtggctgcctgcctccgggagggaaggagagggagggtgggtgggtgggagggggccttcctccagggaatgtgactctcccaggccccagaatagctcctggacccaagcccaaggcccagcctgggacaaggctccgagggtcggctggccggagctatttttacctcccgcctcccctgctggtccccccacctgacgtcttgctgcagagtctgacactggattcccccccctcaccccgcccctggtcccactcctgcccccgccctacctccgccccaccccatcatctgtggacactggagtctggaataaatgctgtttgtcacatcaacaaaaaaaaaa

SEQ ID NO: 462292 - DNA, 1939 bp, Homo sapiens
  misc_feature (7)..(7): n is a, c, g, or t
  misc_feature (10)..(12): n is a, c, g, or t
  misc_feature (16)..(16): n is a, c, g, or t
  misc_feature (18)..(18): n is a, c, g, or t
  misc_feature (21)..(21): n is a, c, g, or t
cccggtncgnnnggangncantgtctgtgatggaggactctgcccaggagatcgccacctgcaacagccggaacgggaacccggcccccaagatcacgtggtatcgcaacgggcagcgcctggaggtgcccgtagagatgaacccagagggctacatgaccagccgcacggtccgggaggcctcgggcctgctctccctcaccagcaccctctacctgcggctccgcaaggatgaccgagacgccagcttccactgcgccgcccactacagcctgcccgagggccgccacggccgcctggacagccccaccttccacctcaccctgcactatcccacggagcacgtgcagttctgggtgggcagcccgtccaccccagcaggctgggtacgcgagggtgacactgtccagctgctctgccggggggacggcagccccagcccggagtatacgcttttccgccttcaggatgagcaggaggaagtgctgaatgtgaatctcgaggggaacttgaccctggagggagtgacccggggccagagcgggacctatggctgcagagtggaggattacgacgcggcagatgacgtgcagctctccaagacgctggagctgcgcgtggcctatctggaccccctggagctcagcgaggggaaggtgctttccttacctctaaacagcagtgcagtcgtgaactgctccgtgcacggcctgcccacccctgccctacgctggaccaaggactccactcccctgggcgatggccccatgctgtcgctcagttctatcaccttcgattccaatggcacctacgtatgtgaggcctccctgcccacagtcccggtcctcagccgcacccagaacttcacgctgctggtccaaggctcgccagagctaaagacagcggaaatagagcccaaggcagatggcagctggagggaaggagacgaagtcacactcatctgctctgcccgcggccatccagaccccaaactcagctggagccaattggggggcagccccgcagagccaatccccggacggcagggttgggtgagcagctctctgaccctgaaagtgaccagcgccctgagccgcgatggcatctcctgtgaagcctccaacccccacgggaacaagcgccatgtcttccacttcggcaccgtgagcccccagacctcccaggctggagtggccgtcatggccgtggccgtcagcgtgggcctcctgctcctcgtcgttgctgtcttctactgcgtgagacgcaaagggggcccctgctgccgccagcggcgggagaagggggctccgccgccaggggagccagggctgagccactcggggtcggagcaaccagagcagaccggccttctcatgggaggtgcctccggaggagccaggggtggcagcgggggcttcggagacgagtgctgagccaagaacctcctagaggctgtccctggacctggagctgcaggcatcagagaaccagccctgctcacgccatgcccgcccccgccttccctcttccctcttccctctccctgcccagccctcccttccttcctctgccggcaaggcagggacccacagtggctgcctgcctccgggagggaaggagagggagggtgggtgggtgggagggggccttcctccagggaatgtgactctcccaggccccagaatagctcctggacccaagcccaaggcccagcctgggacaaggctccgagggtcggctggccggagctatttttacctcccgcctcccctgctggtccccccacctgacgtcttgctgcagagtctgacactggattcccccccctcaccccgcccctggtcccactcctgcccccgccctacctccgccccaccccatcatctgtggacactggagtctggaataaatgctgtttgtcacatcaacaaaaaaaaaa

SEQ ID NO: 462293 - DNA, 2281 bp, Homo sapiens
  misc_feature (1956)..(1956): n is a, c, g, or t
  misc_feature (1958)..(1958): n is a, c, g, or t
cgaattccgagctcggtaacccgcaggtggttgtgggtaggggcggcaggcactgctgaggccactgcgcggctcaacgtgtttgcaaagccagaggccactgaggtctcccccaacaaagggacactgtctgtgatggaggactctgcccaggagatcgccacctgcaacagccggaacgggaacccggcccccaagatcacgtggtatcgcaacgggcagcgcctggaggtgcccgtagagatgaacccagagggctacatgaccagccgcacggtccgggaggcctcgggcctgctctccctcaccagcaccctctacctgcggctccgcaaggatgaccgagacgccagcttccactgcgccgcccactacagcctgcccgagggccgccacggccgcctggacagccccaccttccacctcaccctgcactatcccacggagcacgtgcagttctgggtgggcagcccgtccaccccagcaggctgggtacgcgagggtgacactgtccagctgctctgccggggggacggcagccccagcccggagtatacgcttttccgccttcaggatgagcaggaggaagtgctgaatgtgaatctcgaggggaacttgaccctggagggagtgacccggggccagagcgggacctatggctgcagagtggaggattacgacgcggcagatgacgtgcagctctccaagacgctggagctgcgcgtggcctatctggaccccctggagctcagcgaggggaaggtgctttccttacctctaaacagcagtgcagtcgtgaactgctccgtgcacggcctgcccacccctgccctacgctggaccaaggactccactcccctgggcgatggccccatgctgtcgctcagttctatcaccttcgattccaatggcacctacgtatgtgaggcctccctgcccacagtcccggtcctcagccgcacccagaacttcacgctgctggtccaaggctcgccagagctaaagacagcggaaatagagcccaaggcagatggcagctggagggaaggagacgaagtcacactcatctgctctgcccgcggccatccagaccccaaactcagctggagccaattggggggcagccccgcagagccaatccccggacggcagggttgggtgagcagctctctgaccctgaaagtgaccagcgccctgagccgcgatggcatctcctgtgaagcctccaacccccacgggaacaagcgccatgtcttccacttcggcaccgtgagcccccagacctcccaggctggagtggccgtcatggccgtggccgtcagcgtgggcctcctgctcctcgtcgttgctgtcttctactgcgtgagacgcaaagggggcccctgctgccgccagcggcgggagaagggggctccgccgccaggggagccagggctgagccactcggggtcggagcaaccagagcagaccggccttctcatgggaggtgcctccggaggagccaggggtggcagcgggggcttcggagacgagtgctgagccaagaacctcctagaggctgtccctggacctggagctgcaggcatcagagaaccagccctgctcacgccatgcccgcccccgccttccctcttccctcttccctctccctgcccagccctcccttccttcctctgccggcaaggcagggacccacagtggctgcctgcctccgggagggaaggagagggagggtgggtgggtgggagggggccttcctccagggaatgtgactctcccaggccccagaatagctcctggacccaagcccaaggcccagcctgggacaaggctccgagggtcggctggccggagctatttttacctcccgcctcccctgctggtccccccacctgacgtcttgctgcagagtctgacactggattcccccccctttccgcttccctttttcttatncnctagcccacactttttagaatgaggtctgtcatatacttgattacatatgaaatctcagatgccaattttgtttaatgtgtcatatcttttgtttttccccctcccttctaatcccccaaaggacctatttgagctgttccccaattcatctgcttattttggaccatgaatctgccagagtgatattttctgttatttctcctccaaatttttccctgatgtttccaataaagatttacttgggtggcccttaaggtggcatcaggatgctcttatgtccttccagaattagcatacacttcactccgctccccttcatctc

SEQ ID NO: 462294 - DNA, 2345 bp, Homo sapiens
cgaattccgagctcggtaacccgcaggtggttgtgggtaggggcggcaggcactgctgaggccactgcgcggctcaacgtgtttgcaaagccagaggccactgaggtctcccccaacaaagggacactgtctgtgatggaggactctgcccaggagatcgccacctgcaacagccggaacgggaacccggcccccaagatcacgtggtatcgcaacgggcagcgcctggaggtgcccgtagagatgaacccagagggctacatgaccagccgcacggtccgggaggcctcgggcctgctctccctcaccagcaccctctacctgcggctccgcaaggatgaccgagacgccagcttccactgcgccgcccactacagcctgcccgagggccgccacggccgcctggacagccccaccttccacctcaccctgcactatcccacggagcacgtgcagttctgggtgggcagcccgtccaccccagcaggctgggtacgcgagggtgacactgtccagctgctctgccggggggacggcagccccagcccggagtatacgcttttccgccttcaggatgagcaggaggaagtgctgaatgtgaatctcgaggggaacttgaccctggagggagtgacccggggccagagcgggacctatggctgcagagtggaggattacgacgcggcagatgacgtgcagctctccaagacgctggagctgcgcgtggcctatctggaccccctggagctcagcgaggggaaggtgctttccttacctctaaacagcagtgcagtcgtgaactgctccgtgcacggcctgcccacccctgccctacgctggaccaaggactccactcccctgggcgatggccccatgctgtcgctcagttctatcaccttcgattccaatggcacctacgtatgtgaggcctccctgcccacagtcccggtcctcagccgcacccagaacttcacgctgctggtccaaggctcgccagagctaaagacagcggaaatagagcccaaggcagatggcagctggagggaaggagacgaagtcacactcatctgctctgcccgcggccatccagaccccaaactcagctggagccaattggggggcagccccgcagagccaatccccggacggcagggttgggtgagcagctctctgaccctgaaagtgaccagcgccctgagccgcgatggcatctcctgtgaagcctccaacccccacgggaacaagcgccatgtcttccacttcggcaccgtgagcccccagacctcccaggctggagtggccgtcatggccgtggccgtcagcgtgggcctcctgctcctcgtcgttgctgtcttctactgcgtgagacgcaaagggggcccctgctgccgccagcggcgggagaagggggctccgtgagtggcctgctatctgcaatgaccaccatagcttaaccccatccccaccctcaaccccaagctcaacccataacctcaaccacatcttatcctccaccccacatcccaccacatccacctccatccccaacccatcctcatccccaactacagccccaaacccagccccagactaatccacagccatccccaactcatcctcatccccaactgcagccccaaacccaacccagggccatccccaaacccatccccaagccaaactcaacaccatccccttccctaatcacctctcctgcccctagctcagcctcatccccaactccatgcctgtctccaatcccaaccctgcccccaatctcccctcaactccaatccataacccccttcaaaccatcctcaactaagctcctctccagccctggccacatccccatcctcccccaacctccagccccaacacccatcatccccctgagctcacccttaactccaatttatcctccaagcctatctctcaccatccagccctcacctagccatttcccaaccctagtcctccaccgtcccgaagccaacttcacccatgtccccatccccaatcttgtccccattcctgactccaaatccaacccctaagcctccccaagctcctcctcatctaaccttgtctccagccccaaccacatggccgtcctcacctccaatccgtaaccatcccagaccgatcccaaagccaactccagctacattcccacctccaaccccaatagcatctgcatccccatgcccaaccctaaccccagtgccattaccagcccctaccccatccctatgccatccccacccagcacacccccatcctcacctccatccccagccgcatcctagtcccacccacccccatcctcagttcctccccctgcc

SEQ ID NO: 462295 - DNA, 1908 bp, Homo sapiens
cgaattccgagctcggtaacccgcaggtggttgtgggtaggggcggcaggcactgctgaggccactgcgcggctcaacgtgtttgcaaagccagaggccactgaggtctcccccaacaaagggacactgtctgtgatggaggactctgcccaggagatcgccacctgcaacagccggaacgggaacccggcccccaagatcacgtggtatcgcaacgggcagcgcctggaggtgcccgtagagatgaacccagagggctacatgaccagccgcacggtccgggaggcctcgggcctgctctccctcaccagcaccctctacctgcggctccgcaaggatgaccgagacgccagcttccactgcgccgcccactacagcctgcccgagggccgccacggccgcctggacagccccaccttccacctcaccctgcactgatgagcaggaggaagtgctgaatgtgaatctcgaggggaacttgaccctggagggagtgacccggggccagagcgggacctatggctgcagagtggaggattacgacgcggcagatgacgtgcagctctccaagacgctggagctgcgcgtggcctatctggaccccctggagctcagcgaggggaaggtgctttccttacctctaaacagcagtgcagtcgtgaactgctccgtgcacggcctgcccacccctgccctacgctggaccaaggactccactcccctgggcgatggccccatgctgtcgctcagttctatcaccttcgattccaatggcacctacgtatgtgaggcctccctgcccacagtcccggtcctcagccgcacccagaacttcacgctgctggtccaaggctcgccagagctaaagacagcggaaatagagcccaaggcagatggcagctggagggaaggagacgaagtcacactcatctgctctgcccgcggccatccagaccccaaactcagctggagccaattggggggcagccccgcagagccaatccccggacggcagggttgggtgagcagctctctgaccctgaaagtgaccagcgccctgagccgcgatggcatctcctgtgaagcctccaacccccacgggaacaagcgccatgtcttccacttcggcaccgtgagcccccagacctcccaggctggagtggccgtcatggccgtggccgtcagcgtgggcctcctgctcctcgtcgttgctgtcttctactgcgtgagacgcaaagggggcccctgctgccgccagcggcgggagaagggggctccgccgccaggggagccagggctgagccactcggggtcggagcaaccagagcagaccggccttctcatgggaggtgcctccggaggagccaggggtggcagcgggggcttcggagacgagtgctgagccaagaacctcctagaggctgtccctggacctggagctgcaggcatcagagaaccagccctgctcacgccatgcccgcccccgccttccctcttccctcttccctctccctgcccagccctcccttccttcctctgccggcaaggcagggacccacagtggctgcctgcctccgggagggaaggagagggagggtgggtgggtgggagggggccttcctccagggaatgtgactctcccaggccccagaatagctcctggacccaagcccaaggcccagcctgggacaaggctccgagggtcggctggccggagctatttttacctcccgcctcccctgctggtccccccacctgacgtcttgctgcagagtctgacactggattcccccccctcaccccgcccctggtcccactcctgcccccgccctacctccgccccaccccatcatctgtggacactggagtctggaataaatgctgtttgtcacatcaacaaaaaaaaaa

SEQ ID NO: 462296 - DNA, 2015 bp, Homo sapiens
  misc_feature (7)..(7): n is a, c, g, or t
  misc_feature (10)..(12): n is a, c, g, or t
  misc_feature (16)..(16): n is a, c, g, or t
  misc_feature (18)..(18): n is a, c, g, or t
  misc_feature (21)..(21): n is a, c, g, or t
cccggtncgnnnggangncantgtctgtgatggaggactctgcccaggagatcgccacctgcaacagccggaacgggaacccggcccccaagatcacgtggtatcgcaacgggcagcgcctggaggtgcccgtagagatgaacccagagggctacatgaccagccgcacggtccgggaggcctcgggcctgctctccctcaccagcaccctctacctgcggctccgcaaggatgaccgagacgccagcttccactgcgccgcccactacatgtgcatgcctcgaggagccggactacgtgaccagactgagacgagccacacatgcattcacgacctcaccgctgtgacttatcccagcggtagtcacgtagcagttcgtgggtgtgtggcatgacctcgtccatccccgagcagagctgggatacgcggaggtgtgcacactgctccagactggctgctgcccggtgggggaccggcgatgacccgagtcccgagagtaatatcgctatttcgcgcgcattacaggactgatgcaaggcatggatgagcaggaggaagtgctgaatgtgaatctcgaggggaacttgaccctggagggagtgacccggggccagagcgggacctatggctgcagagtggaggattacgacgcggcagatgacgtgcagctctccaagacgctggagctgcgcgtggcctatctggaccccctggagctcagcgaggggaaggtgctttccttacctctaaacagcagtgcagtcgtgaactgctccgtgcacggcctgcccacccctgccctacgctggaccaaggactccactcccctgggcgatggccccatgctgtcgctcagttctatcaccttcgattccaatggcacctacgtatgtgaggcctccctgcccacagtcccggtcctcagccgcacccagaacttcacgctgctggtccaaggctcgccagagctaaagacagcggaaatagagcccaaggcagatggcagctggagggaaggagacgaagtcacactcatctgctctgcccgcggccatccagaccccaaactcagctggagccaattggggggcagccccgcagagccaatccccggacggcagggttgggtgagcagctctctgaccctgaaagtgaccagcgccctgagccgcgatggcatctcctgtgaagcctccaacccccacgggaacaagcgccatgtcttccacttcggcaccgtgagcccccagacctcccaggctggagtggccgtcatggccgtggccgtcagcgtgggcctcctgctcctcgtcgttgctgtcttctactgcgtgagacgcaaagggggcccctgctgccgccagcggcgggagaagggggctccgccgccaggggagccagggctgagccactcggggtcggagcaaccagagcagaccggccttctcatgggaggtgcctccggaggagccaggggtggcagcgggggcttcggagacgagtgctgagccaagaacctcctagaggctgtccctggacctggagctgcaggcatcagagaaccagccctgctcacgccatgcccgcccccgccttccctcttccctcttccctctccctgcccagccctcccttccttcctctgccggcaaggcagggacccacagtggctgcctgcctccgggagggaaggagagggagggtgggtgggtgggagggggccttcctccagggaatgtgactctcccaggccccagaatagctcctggacccaagcccaaggcccagcctgggacaaggctccgagggtcggctggccggagctatttttacctcccgcctcccctgctggtccccccacctgacgtcttgctgcagagtctgacactggattcccccccctcaccccgcccctggtcccactcctgcccccgccctacctccgccccaccccatcatctgtggacactggagtctggaataaatgctgtttgtcacatcaacaaaaaaaaaa

SEQ ID NO: 462297 - DNA, 1438 bp, Homo sapiens
tctagatggatcccctttcgattgtgggactgggccagagcgggacctatggctgcagagtggaggattacgacgcggcagatgacgtgcagctctccaagacgctggagctgcgcgtggcctatctggaccccctggagctcagcgaggggaaggtgctttccttacctctaaacagcagtgcagtcgtgaactgctccgtgcacggcctgcccacccctgccctacgctggaccaaggactccactcccctgggcgatggccccatgctgtcgctcagttctatcaccttcgattccaatggcacctacgtatgtgaggcctccctgcccacagtcccggtcctcagccgcacccagaacttcacgctgctggtccaaggctcgccagagctaaagacagcggaaatagagcccaaggcagatggcagctggagggaaggagacgaagtcacactcatctgctctgcccgcggccatccagaccccaaactcagctggagccaattggggggcagccccgcagagccaatccccggacggcagggttgggtgagcagctctctgaccctgaaagtgaccagcgccctgagccgcgatggcatctcctgtgaagcctccaacccccacgggaacaagcgccatgtcttccacttcggcaccgtgagcccccagacctcccaggctggagtggccgtcatggccgtggccgtcagcgtgggcctcctgctcctcgtcgttgctgtcttctactgcgtgagacgcaaagggggcccctgctgccgccagcggcgggagaagggggctccgccgccaggggagccagggctgagccactcggggtcggagcaaccagagcagaccggccttctcatgggaggtgcctccggaggagccaggggtggcagcgggggcttcggagacgagtgctgagccaagaacctcctagaggctgtccctggacctggagctgcaggcatcagagaaccagccctgctcacgccatgcccgcccccgccttccctcttccctcttccctctccctgcccagccctcccttccttcctctgccggcaaggcagggacccacagtggctgcctgcctccgggagggaaggagagggagggtgggtgggtgggagggggccttcctccagggaatgtgactctcccaggccccagaatagctcctggacccaagcccaaggcccagcctgggacaaggctccgagggtcggctggccggagctatttttacctcccgcctcccctgctggtccccccacctgacgtcttgctgcagagtctgacactggattcccccccctcaccccgcccctggtcccactcctgcccccgccctacctccgccccaccccatcatctgtggacactggagtctggaataaatgctgtttgtcacatcaacaaaaaaaaaa

SEQ ID NO: 462298 - DNA, 1227 bp, Homo sapiens
ggctggtacaggcctgggagtaagggatgactccactcccctgggcgatggccccatgctgtcgctcagttctatcaccttcgattccaatggcacctacgtatgtgaggcctccctgcccacagtcccggtcctcagccgcacccagaacttcacgctgctggtccaaggctcgccagagctaaagacagcggaaatagagcccaaggcagatggcagctggagggaaggagacgaagtcacactcatctgctctgcccgcggccatccagaccccaaactcagctggagccaattggggggcagccccgcagagccaatccccggacggcagggttgggtgagcagctctctgaccctgaaagtgaccagcgccctgagccgcgatggcatctcctgtgaagcctccaacccccacgggaacaagcgccatgtcttccacttcggcaccgtgagcccccagacctcccaggctggagtggccgtcatggccgtggccgtcagcgtgggcctcctgctcctcgtcgttgctgtcttctactgcgtgagacgcaaagggggcccctgctgccgccagcggcgggagaagggggctccgccgccaggggagccagggctgagccactcggggtcggagcaaccagagcagaccggccttctcatgggaggtgcctccggaggagccaggggtggcagcgggggcttcggagacgagtgctgagccaagaacctcctagaggctgtccctggacctggagctgcaggcatcagagaaccagccctgctcacgccatgcccgcccccgccttccctcttccctcttccctctccctgcccagccctcccttccttcctctgccggcaaggcagggacccacagtggctgcctgcctccgggagggaaggagagggagggtgggtgggtgggagggggccttcctccagggaatgtgactctcccaggccccagaatagctcctggacccaagcccaaggcccagcctgggacaaggctccgagggtcggctggccggagctatttttacctcccgcctcccctgctggtccccccacctgacgtcttgctgcagagtctgacactggattcccccccctcaccccgcccctggtcccactcctgcccccgccctacctccgccccaccccatcatctgtggacactggagtctggaataaatgctgtttgtcacatcaacaaaaaaaaaa

SEQ ID NO: 462299 - DNA, 487 bp, Homo sapiens
cgaattccgagctcggtaacccgcaggtggttgtgggtaggggcggcaggcactgctgaggccactgcgcggctcaacgtgtttgcaaagccagaggccactgaggtctcccccaacaaagggacactgtctgtgatggaggactctgcccaggagatcgccacctgcaacagccggaacgggaacccggcccccaagatcacgtggtatcgcaacgggcagcgcctggaggtgcccgtagagatgaacccagagggctacatgaccagccgcacggtccgggaggcctcgggcctgctctccctcaccagcaccctctacctgcggctccgcaaggatgaccgagacgccagcttccactgcgccgcccactacagcctgcccgagggccgccacggccgcctggacagccccaccttccacctcaccctgcactatctcacggaacagctacagatctatgattgcgcagtcgagcacgtacacc

SEQ ID NO: 462300 - DNA, 4712 bp, Homo sapiens
cggggactggagcatgggacggcgcgcctgaaggagcaggaaggggaaggaggcctgggaccccgaaaagagaaggggagagcgaggggacgagagcggaggaggaagatgcaactgactcgctgctgcttcgtgttcctggtgcagggtagcctctatctggtcatctgtggccaggatgatggtcctcccggctcagaggaccctgagcgtgatgaccacgagggccagccccggccccgggtgcctcggaagcggggccacatctcacctaagtcccgccccatggccaattccactctcctagggctgctggccccgcctggggaggcttggggcattcttgggcagccccccaaccgcccgaaccacagccccccaccctcagccaaggtgaagaaaatctttggctggggcgacttctactccaacatcaagacggtggccctgaacctgctcgtcacagggaagattgtggaccatggcaatgggaccttcagcgtccacttccaacacaatgccacaggccagggaaacatctccatcagcctcgtgccccccagtaaagctgtagagttccaccaggaacagcagatcttcatcgaagccaaggcctccaaaatcttcaactgccggatggagtgggagaaggtagaacggggccgccggacctcgctttgcacccacgacccagccaagatctgctcccgagaccacgctcagagctcagccacctggagctgctcccagcccttcaaagtcgtctgtgtctacatcgccttctacagcacggactatcggctggtccagaaggtgtgcccagattacaactaccatagtgataccccctactacccatctgggtgacccggggcaggccacagaggccaggccagggctggaaggacaggcctgcccatgcaggagaccatctggacaccgggcagggaaggggttgggcctcaggcagggaggggggtggagacgaggagatgccaagtggggccagggccaagtctcaagtggcagagaaagggtcccaagtgctggtcccaacctgaagctgtggagtgactagatcacaggagcactggaggaggagtgggctctctgtgcagcctcacagggctttgccacggagccacagagagatgctgggtccccgaggcctgtgggcaggccgatcagtgtggccccagatcaagtcatgggaggaagctaagcccttggttcttgccatcctgaggaaagatagcaacagggagggggagatttcatcagtgtggacagcctgtcaacttaggatggatggctgagagggcttcctaggagccagtcagcagggtggggtggggccagaggagctctccagccctgcctagtgggcgccctgagccccttgtcgtgtgctgagcatggcatgaggctgaagtggcaaccctggggtctttgatgtcttgacagattgaccatctgtctccagccaggccacccctttccaaaattccctcttctgccagtactccccctgtaccacccattgctgatggcacacccatccttaagctaagacaggacgattgtggtcctcccacactaaggccacagcccatccgcgtgctgtgtgtccctcttccaccccaacccctgctggctcctctgggagcatccatgtcccggagaggggtccctcaacagtcagcctcacctgtcagaccggggttctcccggatctggatggcgccgccctctcagcagcgggcacgggtggggcggggccgggccgcagagcatgtgctggatctgttctgtgtgtctgtctgtgggtggggggaggggagggaagtcttgtgaaaccgctgattgctgacttttgtgtgaagaatcgtgttcttggagcaggaaataaagcttgccccggggcactggagtcagagttgtccaaggaaagggcctcaggcatcccttggtccaggaagaatttctctgatggccgcaggacatttgcttgagacccaagtggcagggatccaaccgcccttggcgctgatgtttgctgagggctcagggcttccctctccagccccggttccaagctgtctgatcccccacgaggaaacttgagcaaacaccctgggctcggtgctggaggagggcgtagcatcttcaagaacagctcagggagggagagctagcaggtagaatgggccaatgagggtgttccttggtgtcctccctgaactgccatctgcagacccagcagggtcctagccccgtcattttgctgcgtggccttggccatgtccattctcctctctggctttctttctttgtttcttcctctatgacatgaagggcttgcccagaccaggggttctcaaacgcggatcacccagagggtttgttaacacacagatttctgggtcctacccacatttctaattcagcaggcctgggtggggcctaagaattagaatttctaacgagtgcccaggtctatgctgatgctgctgctccagggcccatgctgggagacccactcaaaggaccttgaagttcatctctggctatggctccgcaggagggggagacacctcggatgtgatttcccagctgtaatttccatctgcttctcctggggaaggggcctttcagagaatcggggctattgtattggattttcaatctgaccacatgccagtgaaggaacaggctggagtggggtgtggacacagggcctgcgtcagtcactcccctcctgcagctagtaagaggcctcagaatggccagctgccagtggcaccttgtctgggagttagttgggccctttgggactctgtgaagggaagacactaccaaggtcacagtgccttctggaggtcattctaagtcggctctcttgggagggcagcactcagggccctttgggccctcttgaggagaggagagtcctggcagtaaggtaagatgggcttgccaccccccacctttcgcccctgcccaccagcgctccgcgcaaactggtcccctcatactgcagcgcagagttgggtggggctgagaagccatctggttacagcccaccttgtaggaaatgacccagcttgtttcccccacatcatgcttccaggggccgtctctcctgagtggagatgtgagacacacacccctcctccagaccaccctccgctccccaccctggaggcttgagactgctggcactggagcagcccaccaatggacacccaccgtgtgccgttcagcctcccacagtgctgtggagactgcaggaaggaggaggaagcaatggggccagaggccctgggcgccctccccacctcccctggctgaactctcagcaggcactgggggcactttgacccccctcctgctcctctcctcctgtggagagccagatgctggcgacagctggagggcccggccttcctggcacacagttctgcctgcaccagggatggattcattttaataacttcatttcaccctcatgcacactgccgcctcatccctcctttccaccttccccagtagcctggctgctctcctcagctaggacttcgctaacagatttcctcccaaaccttaattctttggaatagccctctggtccctactgttcttgccagatacttctgtgcccgcttggtcctcacaagggcaaggggtccatccaacttcctctggctaagaagacgtcacctctgccccattggcgagcagtgtccccatggtgatgcccccccaccatcacgacgaagtgcgctggcctcccactcttgccatgcacacactcacaggagattcctctgaagaaacctgtccccactctgcccagaccccaaagggccaggtcctactcacaggaggggtgaccaggtgctgggatcatcgagtgagtatgtgcaggagggattgtagagacacaatgaaacagttgctctgtgttgggaagtgatccagtgtcatcgctgggagtgggagacagaaatgttacttccaaagattccgagtcctgtggtactcccaggccacctggtcaggtggtcccaagggacaagctaggtcctcctgaactgcagaggctgccaataaactggcaacacaggtgttgcaggaagatatagctgggtcctcatcctgggtctgtaatttattagacgtgtggctttggacaaatgacataatttcccagagcctccttagataaaaaactagggctttgcttaccttggcgtattgttaggaaaattaaatgagttgctcaataaatgttacttcctcctgtctttttttttctaagatgggttgttgttaaccttggccttgctcctggtgtggacaggggaaagggtcccaggctggaggtaggagacctaggttcctatcctggttccaccccatcatgcatgtggcaaagatttctaattgtcccataatacccattttccctttctccatagtaatgggattctctgattttagctgggcatgtggctgcctgaaataactactgcatttctcagcctccctagatgtagtcatgtgactaagatctggccagtgacatttaagccaaaggtttaggtggcaccttccagaaattgtcagacagctgatgtgcactcttcgtccctttgttccaccctctatcctgcagcctggaataggtacgagactgctgccatcttaga

SEQ ID NO: 462301 - DNA, 1922 bp, Homo sapiens
cggggactggagcatgggacggcgcgcctgaaggagcaggaaggggaaggaggcctgggaccccgaaaagagaaggggagagcgaggggacgagagcggaggaggaagatgcaactgactcgctgctgcttcgtgttcctggtgcagggtagcctctatctggtcatctgtggccaggatgatggtcctcccggctcagaggaccctgagcgtgatgaccacgagggccagccccggccccgggtgcctcggaagcggggccacatctcacctaagtcccgccccatggccaattccactctcctagggctgctggccccgcctggggaggcttggggcattcttgggcagccccccaaccgcccgaaccacagccccccaccctcagccaaggtgaagaaaatctttggctggggcgacttctactccaacatcaagacggtggccctgaacctgctcgtcacagggaagattgtggaccatggcaatgggaccttcagcgtccacttccaacacaatgccacaggccagggaaacatctccatcagcctcgtgccccccagtaaagctgtagagttccaccaggaacagcagatcttcatcgaagccaaggcctccaaaatcttcaactgccggatggagtgggagaaggtagaacggggccgccggacctcgctttgcacccacgacccagccaagatctgctcccgagaccacgctcagagctcagccacctggagctgctcccagcccttcaaagtcgtctgtgtctacatcgccttctacagcacggactatcggctggtccagaaggtgtgcccagattacaactaccatagtgataccccctactacccatctgggtgacccggggcaggccacagaggccaggccagggctggaaggacaggcctgcccatgcaggagaccatctggacaccgggcagggaaggggttgggcctcaggcagggaggggggtggagacgaggagatgccaagtggggccagggccaagtctcaagtggcagagaaagggtcccaagtgctggtcccaacctgaagctgtggagtgactagatcacaggagcactggaggaggagtgggctctctgtgcagcctcacagggctttgccacggagccacagagagatgctgggtccccgaggcctgtgggcaggccgatcagtgtggccccagatcaagtcatgggaggaagctaagcccttggttcttgccatcctgaggaaagatagcaacagggagggggagatttcatcagtgtggacagcctgtcaacttaggatggatggctgagagggcttcctaggagccagtcagcagggtggggtggggccagaggagctctccagccctgcctagtgggcgccctgagccccttgtcgtgtgctgagcatggcatgaggctgaagtggcaaccctggggtctttgatgtcttgacagattgaccatctgtctccagccaggccacccctttccaaaattccctcttctgccagtactccccctgtaccacccattgctgatggcacacccatccttaagctaagacaggacgattgtggtcctcccacactaaggccacagcccatccgcgtgctgtgtgtccctcttccaccccaacccctgctggctcctctgggagcatccatgtcccggagaggggtccctcaacagtcagcctcacctgtcagaccggggttctcccggatctggatggcgccgccctctcagcagcgggcacgggtggggcggggccgggccgcagagcatgtgctggatctgttctgtgtgtctgtctgtgggtggggggaggggagggaagtcttgtgaaaccgctgattgctgacttttgtgtgaagaatcgtgttcttggagcaggaaataaagcttgccccggg

SEQ ID NO: 462302 - DNA, 5799 bp, Homo sapiens
cggggactggagcatgggacggcgcgcctgaaggagcaggaaggggaaggaggcctgggaccccgaaaagagaaggggagagcgaggggacgagagcggaggaggaagatgcaactgactcgctgctgcttcgtgttcctggtgcagggtagcctctatctggtcatctgtggccaggatgatggtcctcccggctcagaggaccctgagcgtgatgaccacgagggccagccccggccccgggtgcctcggaagcggggccacatctcacctaagtcccgccccatggccaattccactctcctagggctgctggccccgcctggggaggcttggggcattcttgggcagccccccaaccgcccgaaccacagccccccaccctcagccaaggtgaagaaaatctttggctggggcgacttctactccaacatcaagacggtggccctgaacctgctcgtcacagggaagattgtggaccatggcaatgggaccttcagcgtccacttccaacacaatgccacaggccagggaaacatctccatcagcctcgtgccccccagtaaagctgtagagttccaccaggaacagcagatcttcatcgaagccaaggcctccaaaatcttcaactgccggatggagtgggagaaggtagaacggggccgccggacctcgctttgcacccacgacccagccaagatctgctcccgagaccacgctcagagctcagccacctggagctgctcccagcccttcaaagtcgtctgtgtctacatcgccttctacagcacggactatcggctggtccagaaggtgtgcccagattacaactaccatagtgataccccctactacccatctgggtgacccggggcaggccacagaggccaggccagggctggaaggacaggcctgcccatgcaggagaccatctggacaccgggcagggaaggggttgggcctcaggcagggaggggggtggagacgaggagatgccaagtggggccagggccaagtctcaagtggcagagaaagggtcccaagtgctggtcccaacctgaagctgtggagtgactagatcacaggagcactggaggaggagtgggctctctgtgcagcctcacagggctttgccacggagccacagagagatgctgggtccccgaggcctgtgggcaggccgatcagtgtggccccagatcaagtcatgggaggaagctaagcccttggttcttgccatcctgaggaaagatagcaacagggagggggagatttcatcagtgtggacagcctgtcaacttaggatggatggctgagagggcttcctaggagccagtcagcagggtggggtggggccagaggagctctccagccctgcctagtgggcgccctgagccccttgtcgtgtgctgagcatggcatgaggctgaagtggcaaccctggggtctttgatgtcttgacagattgaccatctgtctccagccaggccacccctttccaaaattccctcttctgccagtactccccctgtaccacccattgctgatggcacacccatccttaagctaagacaggacgattgtggtcctcccacactaaggccacagcccatccgcgtgctgtgtgtccctcttccaccccaacccctgctggctcctctgggagcatccatgtcccggagaggggtccctcaacagtcagcctcacctgtcagaccggggttctcccggatctggatggcgccgccctctcagcagcgggcacgggtggggcggggccgggccgcagagcatgtgctggatctgttctgtgtgtctgtctgtgggtggggggaggggagggaagtcttgtgaaaccgctgattgctgacttttgtgtgaagaatcgtgttcttggagcaggaaataaagcttgccccggggcactggagtcagagttgtccaaggaaagggcctcaggcatcccttggtccaggaagaatttctctgatggccgcaggacatttgcttgagacccaagtggcagggatccaaccgcccttggcgctgatgtttgctgagggctcagggcttccctctccagccccggttccaagctgtctgatcccccacgaggaaacttgagcaaacaccctgggctcggtgctggaggagggcgtagcatcttcaagaacagctcagggagggagagctagcaggtagaatgggccaatgagggtgttccttggtgtcctccctgaactgccatctgcagacccagcagggtcctagccccgtcattttgctgcgtggccttggccatgtccattctcctctctggctttctttctttgtttcttcctctatgacatgaagggcttgcccagaccaggggttctcaaacgcggatcacccagagggtttgttaacacacagatttctgggtcctacccacatttctaattcagcaggcctgggtggggcctaagaattagaatttctaacgagtgcccaggtctatgctgatgctgctgctccagggcccatgctgggagacccactcaaaggaccttgaagttcatctctggctatggctccgcaggagggggagacacctcggatgtgatttcccagctgtaatttccatctgcttctcctggggaaggggcctttcagagaatcggggctattgtattggattttcaatctgaccacatgccagtgaaggaacaggctggagtggggtgtggacacagggcctgcgtcagtcactcccctcctgcagctagtaagaggcctcagaatggccagctgccagtggcaccttgtctgggagttagttgggccctttgggactctgtgaagggaagacactaccaaggtcacagtgccttctggaggtcattctaagtcggctctcttgggagggcagcactcagggccctttgggccctcttgaggagaggagagtcctggcagtaaggtaagatgggcttgccaccccccacctttcgcccctgcccaccagcgctccgcgcaaactggtcccctcatactgcagcgcagagttgggtggggctgagaagccatctggttacagcccaccttgtaggaaatgacccagcttgtttcccccacatcatgcttccaggggccgtctctcctgagtggagatgtgagacacacacccctcctccagaccaccctccgctccccaccctggaggcttgagactgctggcactggagcagcccaccaatggacacccaccgtgtgccgttcagcctcccacagtgctgtggagactgcaggaaggaggaggaagcaatggggccagaggccctgggcgccctccccacctcccctggctgaactctcagcaggcactgggggcactttgacccccctcctgctcctctcctcctgtggagagccagatgctggcgacagctggagggcccggccttcctggcacacagttctgcctgcaccagggatggattcattttaataacttcatttcaccctcatgcacactgccgcctcatccctcctttccaccttccccagtagcctggctgctctcctcagctaggacttcgctaacagatttcctcccaaaccttaattctttggaatagccctctggtccctactgttcttgccagatacttctgtgcccgcttggtcctcacaagggcaaggggtccatccaacttcctctggctaagaagacgtcacctctgccccattggcgagcagtgtccccatggtgatgcccccccaccatcacgacgaagtgcgctggcctcccactcttgccatgcacacactcacaggagattcctctgaagaaacctgtccccactctgcccagaccccaaagggccaggtcctactcacactccaacccgttgaccttccccatccactgcccttcaaggcagtctgaaatgccctcagaccgtttagcggtcccgtggtcctccaccctaacccctcagcccagctgggggctgccgggggccttgtctcctccatcagtggagcctctgggacaagtttaccaggctgggggttctttaaggacacagcttggatctccccatcaggctggggaacacctagggccgggggccatgcctccctcatcagactgaggacaccctgatgtcaggggctggatggccccttagactgggggtccctgagggcagaagctatgcctcccctcatcagactggagtctccctgagggcaagaactgtgctatggatgggagggggacagcttgccttttcctaggcatcagagcacctggaggctgcctctgcccttcagctttgctcaaaggcgctgtctgggtctcagcattcctttctcaagtagggtgaatctcctagcactctgtgaagctaataagggggattacccgttaggtcaactggtagcaatgcccgagtctccttctcgatgaagcttaaggcaaaagcaaatgaatatctaggtcccttcccccccttccccccttccctttcctgggatgagcaagcgggaactgagtcaccctgttccccatccttggcaggaatgctggtgaccttgcattgtggcagattcaggtggcgaggcccattgctcgagatgcacctggtgggtgggtggcagggatcctgggggagtgtttatggggacggaggcagctgaagggcagggaggggtgaccaggtgctgggatcatcgagtgagtatgtgcaggagggattgtagagacacaatgaaacagttgctctgtgttgggaagtgatccagtgtcatcgctgggagtgggagacagaaatgttacttccaaagattccgagtcctgtggtactgccaggagaaccgggggctggggtgatgggtaaggagaggcaccattagccccgccaggcagaggcaagatggggtgggggcggcacctgccaattatgccaaagtcttggagtggcagctggcaccatcaccaaggcacaaatgccagcagagacctggcactcacctgggttgtgattccatagggcccctgtctcctgttggtctcccaggctcaaaggctgacctgataattcaagtgaaggatgcctagttcaaggcctcccagttcctcatcccaggccacctggtcaggtggtcccaagggacaagctaggtcctcctgaactgcagaggctgccaataaactggcaacacaggtgttgcaggaagatatagctgggtcctcatcctgggtctgtaatttattagacgtgtggctttggacaaatgacataatttcccagagcctccttagataaaaaactagggctttgcttaccttggcgtattgttaggaaaattaaatgagttgctcaataaatgttacttcctcctgtctttttttttctaagatgggttgttgttaaccttggccttgctcctggtgtggacaggggaaagggtcccaggctggaggtaggagacctaggttcctatcctggttccaccccatcatgcatgtggcaaagatttctaattgtcccataatacccattttccctttctccatagtaatgggattctctgattttagctgggcatgtggctgcctgaaataactactgcatttctcagcctccctagatgtagtcatgtgactaagatctggccagtgacatttaagccaaaggtttaggtggcaccttccagaaattgtcagacagctgatgtgcactcttcgtccctttgttccaccctctatcctgcagcctggaataggtacgagactgctgccatcttaga

SEQ ID NO: 462303 - DNA, 3771 bp, Homo sapiens
cggggactggagcatgggacggcgcgcctgaaggagcaggaaggggaaggaggcctgggaccccgaaaagagaaggggagagcgaggggacgagagcggaggaggaagatgcaactgactcgctgctgcttcgtgttcctggtgcagggtagcctctatctggtcatctgtggccaggatgatggtcctcccggctcagaggaccctgagcgtgatgaccacgagggccagccccggccccgggtgcctcggaagcggggccacatctcacctaagtcccgccccatggccaattccactctcctagggctgctggccccgcctggggaggcttggggcattcttgggcagccccccaaccgcccgaaccacagccccccaccctcagccaaggtgaagaaaatctttggctggggcgacttctactccaacatcaagacggtggccctgaacctgctcgtcacagggaagattgtggaccatggcaatgggaccttcagcgtccacttccaacacaatgccacaggccagggaaacatctccatcagcctcgtgccccccagtaaagctgtagagttccaccaggaacagcagatcttcatcgaagccaaggcctccaaaatcttcaactgccggatggagtgggagaaggtagaacggggccgccggacctcgctttgcacccacgacccagccaagatctgctcccgagaccacgctcagagctcagccacctggagctgctcccagcccttcaaagtcgtctgtgtctacatcgccttctacagcacggactatcggctggtccagaaggtgtgcccagattacaactaccatagtgataccccctactacccatctgggtgacccggggcaggccacagaggccaggccagggctggaaggacaggcctgcccatgcaggagaccatctggacaccgggcagggaaggggttgggcctcaggcagggaggggggtggagacgaggagatgccaagtggggccagggccaagtctcaagtggcagagaaagggtcccaagtgctggtcccaacctgaagctgtggagtgactagatcacaggagcactggaggaggagtgggctctctgtgcagcctcacagggctttgccacggagccacagagagatgctgggtccccgaggcctgtgggcaggccgatcagtgtggccccagatcaagtcatgggaggaagctaagcccttggttcttgccatcctgaggaaagatagcaacagggagggggagatttcatcagtgtggacagcctgtcaacttaggatggatggctgagagggcttcctaggagccagtcagcagggtggggtggggccagaggagctctccagccctgcctagtgggcgccctgagccccttgtcgtgtgctgagcatggcatgaggctgaagtggcaaccctggggtctttgatgtcttgacagattgaccatctgtctccagccaggccacccctttccaaaattccctcttctgccagtactccccctgtaccacccattgctgatggcacacccatccttaagctaagacaggacgattgtggtcctcccacactaaggccacagcccatccgcgtgctgtgtgtccctcttccaccccaacccctgctggctcctctgggagcatccatgtcccggagaggggtccctcaacagtcagcctcacctgtcagaccggggttctcccggatctggatggcgccgccctctcagcagcgggcacgggtggggcggggccgggccgcagagcatgtgctggatctgttctgtgtgtctgtctgtgggtggggggaggggagggaagtcttgtgaaaccgctgattgctgacttttgtgtgaagaatcgtgttcttggagcaggaaataaagcttgccccggggcactggagtcagagttgtccaaggaaagggcctcaggcatcccttggtccaggaagaatttctctgatggccgcaggacatttgcttgagacccaagtggcagggatccaaccgcccttggcgctgatgtttgctgagggctcagggcttccctctccagccccggttccaagctgtctgatcccccacgaggaaacttgagcaaacaccctgggctcggtgctggaggagggcgtagcatcttcaagaacagctcagggagggagagctagcaggtagaatgggccaatgagggtgttccttggtgtcctccctgaactgccatctgcagacccagcagggtcctagccccgtcattttgctgcgtggccttggccatgtccattctcctctctggctttctttctttgtttcttcctctatgacatgaagggcttgcccagaccaggggttctcaaacgcggatcacccagagggtttgttaacacacagatttctgggtcctacccacatttctaattcagcaggcctgggtggggcctaagaattagaatttctaacgagtgcccaggtctatgctgatgctgctgctccagggcccatgctgggagacccactcaaaggaccttgaagttcatctctggctatggctccgcaggagggggagacacctcggatgtgatttcccagctgtaatttccatctgcttctcctggggaaggggcctttcagagaatcggggctattgtattggattttcaatctgaccacatgccagtgaaggaacaggctggagtggggtgtggacacagggcctgcgtcagtcactcccctcctgcagctagtaagaggcctcagaatggccagctgccagtggcaccttgtctgggagttagttgggccctttgggactctgtgaagggaagacactaccaaggtcacagtgccttctggaggtcattctaagtcggctctcttgggagggcagcactcagggccctttgggccctcttgaggagaggagagtcctggcagtaaggtaagatgggcttgccaccccccacctttcgcccctgcccaccagcgctccgcgcaaactggtcccctcatactgcagcgcagagttgggtggggctgagaagccatctggttacagcccaccttgtaggaaatgacccagcttgtttcccccacatcatggtcccaagggacaagctaggtcctcctgaactgcagaggctgccaataaactggcaacacaggtgttgcaggaagatatagctgggtcctcatcctgggtctgtaatttattagacgtgtggctttggacaaatgacataatttcccagagcctccttagataaaaaactagggctttgcttaccttggcgtattgttaggaaaattaaatgagttgctcaataaatgttacttcctcctgtctttttttttctaagatgggttgttgttaaccttggccttgctcctggtgtggacaggggaaagggtcccaggctggaggtaggagacctaggttcctatcctggttccaccccatcatgcatgtggcaaagatttctaattgtcccataatacccattttccctttctccatagtaatgggattctctgattttagctgggcatgtggctgcctgaaataactactgcatttctcagcctccctagatgtagtcatgtgactaagatctggccagtgacatttaagccaaaggtttaggtggcaccttccagaaattgtcagacagctgatgtgcactcttcgtccctttgttccaccctctatcctgcagcctggaataggtacgagactgctgccatcttaga

SEQ ID NO: 462304 - DNA, 1442 bp, Homo sapiens
acgaggccagtaagttgttgaaaagatgattgtgaatctgcaaaagagaatctctagcctggcagatagtaaacactcattaaatgtaaatggcagagtccagattttgcccaaacctgtaaagttcaaagcaaaacagaaagttggccatagatcttatgaagagagccaagctcgacagtttgggtcaagaaagaagtggtcccaagatttctccaaacctccttatcctttcctttttcataagggttacctaaaccccagagagcaagataaggtaggaggatgcatccacaaccttgccttggcgtcatggaagcagagtacacttccccaattcaataaacttgtcttatccagtggaataagaacagtacttggaaattcctgtgctgtatgatctgctgccagttacttcagatttgaaacacagtgccttattaaggactaaatgaatgattgtctatggattttggtggaccagatataacgaatacttaagcactgtccatccattgccaacccattgtcctcatcccacacttgacgtgggttgctataacagaataccatagactgggtggcttataaacaacaaaagtttatttctcacagttctggagcctgggaagtccaaatattagcagagtcagtgtctgttaagggctcgtttcctcttcattgacttccatcttctccctgcatgctcacatggtggaaggagctagagatctctcttaagcttctcttatgagagtactgatcctattcatgaaagctccagtcagtatctaatcacgtaccaatggctccagcttctaacaccattacattgggagttaggatttcagcataggaatttgaggagacacattcagtccgtaacagtctccccagccatttttgcttccaaccctctcccctcaattttttttctttccttttcttttgttttcaatagagacatgggctcactctgtcacccaggctggagtacagcggtggaatcacaacacactgcaacatcaaactcctggtctcaagcaatctgcccacctcagcctcccaaatctccaggattacagctactggagatatctaagttttcataagagatcatcagaagaaaatgaagatccaggctctctttcagctgagaaaacgcatccacaaaattccaaagaatacctggtgagattaaagaaaatgtttctcaagcacgaaaagtgtaagaattgacatagtaaatatgcaggcactcattgatcacttaagaaataaaaattgaaaaataatgccatgaaattatttgcattccccattcttttttaaaaaaatgaaatcattgtactttacaattttttaactcaatatataagataaacatactagacaatattattttagaaatcagagttgaataagttacccatattacagaa

SEQ ID NO: 462305 - DNA, 1436 bp, Homo sapiens
acgaggccagtaagttgttgaaaagatgattgtgaatctgcaaaagagaatctctagcctggcagatagtaaacactcattaaatgtaaatggcagagtccagattttgcccaaacctgtaaagttcaaagcaaaacagaaagttggccatagatcttatgaagagagccaagctcgacagtttgggtcaagaaagaagtggtcccaagatttctccaaacctccttatcctttcctttttcataagggttacctaaaccccagagagcaagataaggtaggaggatgcatccacaaccttgccttggcgtcatggaagcagagtacacttccccaattcaataaacttgtcttatccagtggaataagaacagtacttggaaattcctgtgctgtatgatctgctgccagttacttcagatttgaaacacagtgccttattaaggactaaatgaatgattgtctatggattttggtggaccagatataacgaatacttaagcactgtccatccattgccaacccattgtcctcatcccacacttgacgtgggttgctataacagaataccatagactgggtggcttataaacaacaaaagtttatttctcacagttctggagcctgggaagtccaaatattagcagagtcagtgtctgttaagggctcgtttcctcttcattgacttccatcttctccctgcatgctcacatggtggaaggagctagagatctctcttaagcttctcttatgagagtactgatcctattcatgaaagctccagtcagtatctaatcacgtaccaatggctccagcttctaacaccattacattgggagttaggatttcagcataggaatttgaggagacacattcagtccgtaacagtctccccagccatttttgcttccaaccctctcccctcaattttttttctttccttttcttttgttttcaatagagacatgggctcactctgtcacccaggctggagtacagcggtggaatcacaacacactgcaacatcaaactcctggtctcaagcaatctgcccacctcagcctcccaaatctccaggattacagctgtgagccaccatgcccagccttcccctcaaattttgtactgtctacaatgttcagccaccactactgtctgcgtatccttgtttcagaagactcataccacttctacataggcttgctcagttcagttactttcatactaaatttaacagcaattcctctagttctttaaaatgtggaatatacacacctctgactgatttccagtgaacatgcagatttttctgtatttttttaatctactggatgtttaaacgggattttaaaagacagagagggaattatttgtgttcctttcattttgccaaaagtcttgctattgtttttttataattttgattgtaaacctcc

SEQ ID NO: 462306 - DNA, 1272 bp, Homo sapiens
acgaggccagtaagttgttgaaaagatgattgtgaatctgcaaaagagaatctctagcctggcagatagtaaacactcattaaatgtaaatggcagagtccagattttgcccaaacctgtaaagttcaaagcaaaacagaaagttggccatagatcttatgaagagagccaagctcgacagtttgggtcaagaaagaagtggtcccaagatttctccaaacctccttatcctttcctttttcataagggttacctaaaccccagagagcaagataaggtaggaggatgcatccacaaccttgccttggcgtcatggaagcagagtacacttccccaattcaataaacttgtcttatccagtggaataagaacagtacttggaaattcctgtgctgtatgatctgctgccagttacttcagatttgaaacacagtgccttattaaggactaaatgaatgattgtctatggattttggtggaccagatataacgaatacttaagcactgtccatccattgccaacccattgtcctcatcccacacttgacgtgggttgctataacagaataccatagactgggtggcttataaacaacaaaagtttatttctcacagttctggagcctgggaagtccaaatattagcagagtcagtgtctgttaagggctcgtttcctcttcattgacttccatcttctccctgcatgctcacatggtggaaggagctagagatctctcttaagcttctcttatgagagtactgatcctattcatgaaagctccagtcagtatctaatcacgtaccaatggctccagcttctaacaccattacattgggagttaggatttcagcataggaatttgaggagacacattcagtccgtaacagtctccccagccatttttgcttccaaccctctcccctcaattttttttctttccttttcttttgttttcaatagagacatgggctcactctgtcacccaggtgtctgcgtatccttgtttcagaagactcataccacttctacataggcttgctcagttcagttactttcatactaaatttaacagcaattcctctagttctttaaaatgtggaatatacacacctctgactgatttccagtgaacatgcagatttttctgtatttttttaatctactggatgtttaaacgggattttaaaagacagagagggaattatttgtgttcctttcattttgccaaaagtcttgctattgtttttttataattttgattgtaaacctcc

SEQ ID NO: 462307 - DNA, 3454 bp, Homo sapiens
atccctggaggagaagggagcccacagtccccggagagttcctggaagaggcccctgtgtgtccgatgaggtcacaaagcccctccaccagaggctcctcccccagacccctgctgtccaccctggcagggccatggcggaggcccgagtctcccagcctggggcatctccacgctctgtaacgctgagctccaggcacccgtgaagccccacgggtcaaggctggtgggccggggctgggaggcctgcacgcctgggttctgggtccctaaaccagtacccatccaccacagccaccatgatctggcttcgaaacaggaggtgccttgagccgctccagggcaccccgaagtgggtccctgttctgggggagctgcaaaagaccctccagaagggcgagtacctgcccctccgtccgctgcccatgttcgagagtaactttgttcaggtgacccatcaagggggcccagtgttcgtgaatcacagaaccaaccggctggccatgggcgtggccgcctccctgccaggcctggtgttgcctgacatcttgctgatcggccagcccgccgaggacagggactgctccggcctcgtgctgaccaggatgatcccctggacctcgtccacctctgcgtccatgacctctctgcctggcgcctgaagctgcgcctggtctcgggccgccagtactacctggccctggacgcccctgacaacgaggtgggcttcctgttccactgctgggtccgcctcatcaacctgcttcaggagccggctcccacctggacccccaggaccacgcgcacggcccccctggatatgccgctggccgaagcgcctgcctccacctggcacctgcaggaccagcccatcagcagacatgcagtcagggttgctgagcgcaactttccgcataagacggtggctgctcagagacagaggaaggccaaggcgctcaagcgcagtttcaagtctcaggccgtgggcgactctgtgcccctcatctggtcgcagctggagcatgctgacgtcaggaagaaacctgcagaaaagaagtcccactcagacccccgccccgacagaactcacacccaaatccgcttgcctggccagggacatgtggttgagagcccttcacactgtgtctcagctgacagccctgatggcttctttctgggctcctgcagctccctggacccgtgcctgtggcatcaggacacggaagacctcatggactctgggggcagcactttctgtacctgcttcatcgtggaaacccccacctggattggctcctccccagaaggccccagctgcgtcagctcctccccggaaggccccagctgtacctgctccatcccagaaggccccagccgtacctgctccatcccagaaggccccagccatacctgctccatcccggaaggcctcagctgcatggcgctgagcccgcctgcctcacgggggaagctccctggcgattttgacgtgttgccaacaggaattcctggaagagccgtgctggagagaagccagtctggagggaaaccggagccggtggtgacggtgcgcacccaggagacagacgtggtggagatgacgactcaggccaagtccccggagtcgcccttcaccgtgaccaagaaggagtccaaggacatcctgattagccaaaccaaggaggtgaccctggaggccttcaggggccaggggaagttggaggactgggcccactgggcgaagcttgaagagaggtccccggacctgcctggcgtgagatccaaggagttggagcagcggaagagatgggtcaaggccaaggaactggccgtcgagggcccctcccaggagcacagcaggcccttctctgtggaagcgctcaccctcaccaagctcatgatcacggccaactccaaagagcagccctcgaaatccgctttggtctcacttccctcctggctcttggcgactccgcaggcgtcggccacgtcaatgatggcttcagtgccctcccgccccggccagctgtccttactggaggggaagccagtggtggtcagagagcagccagagtcgcacacctgggtgaaggagggcaagcggccatggggcgagatgaaggagcagccatggggcgagatgaaggagccaccctgggaccccaaggggccacccaaggtgccctttcgctccaagcccacctctgccagtctgaagagggaaggaatctcccaggcgcctatccccctgaccgcctcaccgtgggaggacttacggccatcgcccctctcggagaccctcatctcaaagatggaggccacagccagggcgtcccagcagcccaagagggtgtcgcaggagcccatgaggatgccagcccagcaccccctggccactgtggggaagcggaatgttgaaagccgcttggggggatttgccccctctggtagataccagaactatggatatgcctttatatattggggggcgggggggggcgggggcgagcccgtggagccgcccaacttcgcagagattaaagcttgagcctgagactcagcgagtcgcacctcggtgcctgtgtgcacgcgcaggcccccgagggggcgtcgggggagcaaggggtggggtgggggcgcccctaccagccccgcggtgcacgacggctcccattggctggggctcgggcgtcctagccaatccggccgcggggtgcgtttctcctgacccgggtgggaccgcaccccgcggactcagaagcgagcggcaccccgggaccatcccacagcagatccagtggccgccaacgtcaggctggagttgcctccttcgtggatgttggatgtggaagcccaggagccccccaaggggaaatggtcgacgccgcccttcgacccgcgcttccccagccagaaccagatccgtaactgctaccagaacttcctggactaccaccgctgcctcaagaccaggacccgccgcgggaagagcacgcagccctgcgagtactatttccgcgtgtaccactcgctgtgccccatcagctgggtggagagctggaacgagcagatcaagaacgggattttcgccggcaaaatctgactgccccagcgcggcttcctctgaagatgcagtgatcctgcatctttttgtctcgcggagccccgggtctcggttatccacccctacctcccagtgtctaagccacgaataatgggtgaccctagacaagcttcttgacctgtgtgagcccgaggttccccaaggcaaaccaagatggctcagggccccattatcagaggaggacacaccctagatgagccatcccccaggatgacgccacctctgagatcttggtctcctggctccgtctctgaccacaacccaagaatggggtgagggcacagggtgtggactcaactacaggagggcttcctgttcatgcaacgtcccc

SEQ ID NO: 462308 - DNA, 3853 bp, Homo sapiens
atccctggaggagaagggagcccacagtccccggagagttcctggaagaggcccctgtgtgtccgatgaggtcacaaagcccctccaccagaggctcctcccccagacccctgctgtccaccctggcagggccatggcggaggcccgagtctcccagcctggggcatctccacgctctgtaacgctgagctccaggcacccgtgaagccccacgggtcaaggctggtgggccggggctgggaggcctgcacgcctgggttctgggtccctaaaccagtacccatccaccacagccaccatgatctggcttcgaaacaggaggtgccttgagccgctccagggcaccccgaagtgggtccctgttctgggggagctgcaaaagaccctccagaagggcgagtacctgcccctccgtccgctgcccatgttcgagagtaactttgttcaggtgacccatcaagggggcccagtgttcgtgaatcacagaaccaaccggctggccatgggcgtggccgcctccctgccaggcctggtgttgcctgacatcttgctgatcggccagcccgccgaggacagggactgctccggcctcgtgctgaccaggatgatcccctggacctcgtccacctctgcgtccatgacctctctgcctggcgcctgaagctgcgcctggtctcgggccgccagtactacctggccctggacgcccctgacaacgaggtgggcttcctgttccactgctgggtccgcctcatcaacctgcttcaggagccggctcccacctggacccccaggaccacgcgcacggcccccctggatatgccgctggccgaagcgcctgcctccacctggcacctgcaggaccagcccatcagcagacatgcagtcagggttgctgagcgcaactttccgcataagacggtggctgctcagagacagaggaaggccaaggcgctcaagcgcagtttcaagtctcaggccgtgggcgactctgtgcccctcatctggtcgcagctggagcatgctgacgtcaggaagaaacctgcagaaaagaagtcccactcagacccccgccccgacagaactcacacccaaatccgcttgcctggccagggacatgtggttgagagcccttcacactgtgtctcagctgacagccctgatggcttctttctgggctcctgcagctccctggacccgtgcctgtggcatcaggacacggaagacctcatggactctgggggcagcactttctgtacctgcttcatcgtggaaacccccacctggattggctcctccccagaaggccccagctgcgtcagctcctccccggaaggccccagctgtacctgctccatcccagaaggccccagccgtacctgctccatcccagaaggccccagccatacctgctccatcccggaaggcctcagctgcatggcgctgagcccgcctgcctcacgggggaagctccctggcgattttgacgtgttgccaacaggaattcctggaagagccgtgctggagagaagccagtctggagggaaaccggagccggtggtgacggtgcgcacccaggagacagacgtggtggagatgacgactcaggccaagtccccggagtcgcccttcaccgtgaccaagaaggagtccaaggacatcctgattagccaaaccaaggaggtgaccctggaggccttcaggggccaggggaagttggaggactgggcccactgggcgaagcttgaagagaggtccccggacctgcctggcgtgagatccaaggagttggagcagcggaagagatgggtcaaggccaaggaactggccgtcgagggcccctcccaggagcacagcaggcccttctctgtggaagcgctcaccctcaccaagctcatgatcacggccaactccaaagagcagccctcgaaatccgctttggtctcacttccctcctggctcttggcgactccgcaggcgtcggccacgtcaatgatggcttcagtgccctcccgccccggccagctgtccttactggaggggaagccagtggtggtcagagagcagccagagtcgcacacctgggtgaaggagggcaagcggccatggggcgagatgaaggagcagccatggggcgagatgaaggagccaccctgggaccccaaggggccacccaaggtgccctttcgctccaagcccacctctgccagtctgaagagggaaggaatctcccaggcgcctatccccctgaccgcctcaccgtgggaggacttacggccatcgcccctctcggagaccctcatctcaaagatggaggccacagccagggcgtcccagcagcccaagagggtgtcgcaggagcccatgaggatgccagcccagcaccccctggccactgtggggaagcggaatgttgaaagccgcttggggggatttgccccctctggtagataccagaactatggatatgcctttatatattggggggcgggggggggcgggggcgagcccgtggagccgcccaacttcgcagagattaaagcttgagcctgagactcagcgagtcgcacctcggtgcctgtgtgcacgcgcaggcccccgagggggcgtcgggggagcaaggggtggggtgggggcgcccctaccagccccgcggtgcacgacggctcccattggctggggctcgggcgtcctagccaatccggccgcggggtgcgtttctcctgacccgggtgggaccgcaccccgcggactcagaagcgagcggcaccccgggaccatcccacagcagatccagtggccgccaacgtcaggctggagttgcctccttcgtggatgttggatgtggaagcccaggagccccccaaggggaaatggtcgacgccgcccttcgacccgcgcttccccagccagaaccagatccgtaactgctaccagaacttcctggactaccaccgctgcctcaagaccaggacccgccgcgggaagagcacgcagccctgcgagtactatttccgcgtgtaccactcgctgtgccccatcagctgggtggagagctggaacgagcagatcaagaacgggattttcgccggcaaaatctgactgccccagcgcggcttcctctgaagatgcagtgatcctgcatctttttgtctcgcggagccccgggtctcggttatccacccctacctcccagtgtctaagccacgaataatgccaccagccttcgagttccttgtttcccttgctctggtctccacgtgtatgatggggttctcaggcccaggcttcgaccagaggaccctctgccaccaccgtttcttcctgtccttgagctaccttggtgaactcatgaccccaggcccctgctccaccaggatgtcccccaggtcctgccagctgggaagtgccagcatgaacgcctccaacttcgtggaagccagggtcccctgcagctgagggacgccaagcagacacacctgccctccccagccagctcctgtctgtatgggcgagatgactgagagcgcccacgtccctaaggctgtcctgaccctccatgctgcgacaaggacagggaatggtcggtcactatgggcctggtgtctcccctcccccaccacccggtgctgcccagctcaagccagaagctgactttggccgccatggggacatcaggcaaggtctggagacatttttggttggggcagaggcatgctcctggcatcgagtgggtggagaccagagaagccgctcaacatcctgcaatgcatgggacaggccctgcctagaaacaccagctcagcatggcagcagtgcggaggccaggaaaccctgatcgccagtttctaac

SEQ ID NO: 462309 - DNA, 1387 bp, Homo sapiens
atgatggtcatcgttatcttcatcatgacgggcttcacagtctccagggtcccccccacccccatgatggtcatcgtcatcatcttcatcatgatgggcttcacagtatccagggcctgcaccacccccacgatggtcatcatcatcatcatgacgagctccacagtatccagggcctgcaccactcccacgatggtcatcgtcatcatcatcatcaccatgatgggctccacagtatccaggacctccaccacccccacgatggtcattatcatcatcacgatgctggggcttcacagtctccagggtccccaccactcccatgatgtatccagggcctacaccacccccacgatggtcatcgtcatcatcgtgacgggctccacagtatccagggcctccaccacccccacgatggtcatcatcatcatcacgatgctggggcttcacagtctccagggtccccatcacacccacgatggtcattgtcatcataatgatgggctccacagtatccagggcctgtaccacccccacgatggtcatcatcatcatcatgatgctggggcttcacagtctccagggtccccaccacccccacgatgggttctcaccacccccacgatggtcatcatcatcatcatgatggtcttcacagtctccagggcctgcacctacccccatgatggtcatcattattgtcttcgctgtggaggggctttgcagtgtttcgatggtggtcatctcatcgccatcaccatctcatcctgagtacctcccttgtgcgagctgtgtgctttgttctttgccagcatgaccttgtttgatagactcaaagtgtttaaacttatgtaattcattaaaaacgagttgtgtttctccctattttctattttgtacatgaacaaaaatgtattctgttgccttggaagcttagaaggaagactgctgggcctcagctttggttgctctattgatatttggaggaaagtgcatggcggttggtcatcgggggaaagtttaaagtggaaatcacattccgtggctttgaatgtctctgttgaatgctcaggcccatcacaacagaggcactggcctgagaggaaaaacatgatttagctacattttattctcctggactttagctgttaaaaccatccttttctcctatctttctgatattaattgatatatctaaaaactgttctacattatttcttgctgctgagagaaatggcagtgaatttaatgaaaacagagtggcaggttctaaattgtggcagcttgctggacctgtggacccttcccacttaacgctgttagctgaaatgtaaagtgaagctatatttatggaagaaatttaagtttgacaagaaaagaacaaata

SEQ ID NO: 462310 - DNA, 6345 bp, Homo sapiens
tccaagatggtggcgctaggagccgcgacccagtgatagcggccgtggaggggcccccgaccgagcgggaggttgggggtagcctggaggtgagaccccgctgcgttcacagagctggcggccgcggcgcctgcgtccaccggcaagcgaggagtggagcagagctcatatgcctatggggagaggcctgggggaccgcaggaggatgtaggcgccgggtgcgcatgactgggccttcttgctctcggtcggcttcttggtctcggcgtgccccattcccggccctgtcccgctactcttgcctgttccagttccctcctgtgggtaccgctaacggcatcttcccgaggcccagaatccaccgtcaggcataaattgattattcctcgcccacatctgtgccagattctgaagacaggaataagatgaaggaatggaaatcaaagatggaaatttctgaagaaaagaagtcagcaagggctgcatccgaaaaactccaaagacaaatcacccaggaatgtgagttagttgaaaccagtaattctgaggacagattattgaagcactgggtaagccctttaaaggatgcaatgagacatctcccttcccaagagagcggtatcagggaaatgcatattatcccccagaaagccattgtgggagagattggccatggatgtaatgaaggagaaaaaatactttctgcaggagaaagctcccatagatatgaggttagtggccaaaacttcaaacagaagtcaggattaactgaacatcagaaaattcataatataaataagacctatgaatgtaaggaatgtgaaaaaaccttcaacaggagttcaaacctgatcatacatcagagaattcatacaggaaataagccatatgtgtgtaatgaatgtgggaaagactctaatcaaagttcaaatcttattatacatcagagaattcatacaggaaagaaaccttatatatgtcatgaatgtggaaaagacttcaatcagagctccaatctggtgagacataagcaaattcacagtggtgggaatccctatgagtgcaaagagtgtgggaaggcttttaagggaagctcaaaccttgtcctgcaccagagaatccacagtagggggaagccatatttatgcaataaatgtgggaaggctttcagtcaaagcacagatcttattatacatcacagaattcacactggagagaaaccctatgaatgttatgactgtggacagatgttcagtcaaagttcacaccttgtcccacatcagagaattcacactggagagaaacccctcaaatgtaatgaatgtgaaaaagccttcaggcagcattctcaccttactgaacaccagagactccacagtggagagaaaccctatgaatgtcacagatgtgggaagaccttcagtgggcgcacagcttttcttaaacatcagagattgcatgctggagagaaaattgaagaatgtgagaaaaccttcagcaaggatgaggagcttagggaagagcagagaattcaccaggaagagaaagcttattggtgtaatcagtgtggtaggaatttccagggcacctcagacctcatcagacatcaggtaactcatacaggagagaaaccatatgaatgtaaagaatgtgggaaaactttcaatcagagctcagaccttctgagacatcatagaattcacagtggagaaaaaccttgtgtatgtagcaaatgtgggaaatcttttaggggcagctcagatcttattagacaccatcgtgttcatactggagagaaaccctatgaatgtagtgaatgtgggaaagcctttagccagaggtcacaccttgttacacaccagaaaatccatactggagagaagccctatcagtgcactgaatgtgggaaagccttcaggcggcgttcactccttattcaacatcggagaattcatagtggtgagaaaccctatgaatgtaaggaatgtgggaagctcttcatttggcgcacagctttcctcaaacatcagagcctgcatactggagagaaacttgaatgtgagaaaaccttcagccaggatgaggagcttaggggagagcagaaaattcaccaggaagcgaaagcttattggtgtaatcagtgtggtagggctttccagggcagctcagacctcatcagacatcaggtaactcatacaagagagaaaccatatgaatgcaaagaatgtgggaaaactttcaatcagagctcagaccttctgagacatcatagaattcacagtggagaaaaaccttatgtatgcaacaaatgtgggaaatcttttaggggtagctcagatcttattaaacaccatcgtattcatactggagagaaaccctatgaatgtagtgaatgtgggaaagccttcagccagaggtcacaccttgctacacaccagaaaatccatactggagagaaaccctatcagtgcagtgaatgtgggaatgccttcaggcggcgttccctccttattcaacatcggagacttcatagtggtgagaaaccctatgaatgtaaggaatgtgggaaactcttcatgtggcacacggctttcctcaaacatcagagactgcatgctggagagaaacttgaagaatgtgagaaaaccttcagcaaggatgaggagcttagaaaagagcagagaactcaccaggaaaagaaagtttattggtgtaatcagtgtagtaggaccttccagggcagctcagatctcatcagacatcaggtaactcatacaagagagaaaccatatgaatgtaaagaatgtgggaaaactcaatcagagctcagaccttctgagacatcatagaattcacagtggagaaaaaccttacgtatgcaataaatgtggggaatcttttaggagcagctcagatcttattaaacaccatcgtgttcatactggagagaaacctcatgaatgtagtgaatgtgggaaagtctttagccagaggtcccaccttgtcacacaccagaaaatccacactggagagaagccctatcagtgcactgaatgtgaaaaagccttcaggcggcgttcactccttattcaacgtcggagaattcatagtggtgagaaaccctatgaatgtaaggaatgtgggaaactcttcatgtggcacacagctttcctcaaacatcagagactgcatgctggagagaaacttgaagaacgtgagaaaaccttcagcaaggatgaggagcttaggggagagcagaaaattcaccaagaagagaaagcttattggtgtaatcagtgtggtagggctttccagggcagctcagacctcatcggacatcaggtaactcatacaggagagaaaccatatgaatgtaaagaatgtgggaaaactttcaatcagagctcagaccttctgagacatcatagaattcacagtggagaaaaaccttatgtatgcaacaaatgtgggaaatcttttaggggcagctcagatcttattagacaccatcgtgttcatactggagagaaaccctatgaatgccctgaatgttggaaggccttcagtcagaactcacaccttgtcagtcatcaaagaattcataccagagagaaaccctttgaatgtagcaactgtggtaaggccttcagtgggtggacagcttttcttaagcaccagaaacttcacattggaaaggaatttgaagactgtaagagtctacaaacaggacctattctaataggtagcagaaacctaatgaatgcagtaaaactaggaaaagtctgatggagaccacatcttattgcactacaaatgagttttattagaaaaaaaccatgggaaggtgggaaagcagagaaaatacctactggatttttcaaacgtaagtataatcaagtggaaaagccaaaagctcttggacataatcaccttttttttttctgtctcagaactgacactagaatatggtcccaacgatacaattttttaaattatttattttttaacatacaaagagatgaggtctcactatgttgcccaggctggacttgaactcttgggctcaagcactcctccctcctcagcctcccaaagggttgggattaccggcatgagccactgcaccagccccaggggtctaattacttgagaatgttttaagggatgtctatcattattaaaatcattataaatcactttggcaacaaccccaaaactaaattattcatggaaagagccatttcaatcttgacttcctagtcgagtgacaagtttaaatgtgggaaaaaaccctgtgaaagtaatgagtgtaggccaggtgcggtggctcgtacctgtaatccagcactttgggaagccaaggtgggcagatcacgaggtcacgagttgatcatgaggagttactatgcccagccaacatactaaaaccccgtctctactaaaaataacaaaaattagccaggcatggtggggcacgcctgtagtcccaggtacttgcgaggctagggcaggagaatcacttgaacctgggaggtggaggttgcggtgagccaagatcatgccactgcactccagcctgggcaacaagtgcgaaactccatctcaaaaaaaaaaaaaagtctaactcttctgcttgtctttacaatgctgtacagtgagagctaatgtttataaggataaacaggatacttacagggatttgaaggtaatttaattcagtggtttccaactttttaatcaccaaggccttctttttactcccctatgtcctgtgtcttaaaagattatgtttaccaaactgcatttattaaagaattatattttgctacataaaggcatgtacaacacaaatcatgcttctgactggcaccatgtaggcagacctaggtactaaaattccagcccaaagcaaataatttaccattttcattagtctttttattccttttgtgggcaaacatatcgtctatgttaggctttttgaaatattaactatgacttgtaaactccagattaaaaactaaccaattcatctttgatggagcttgaatcaaactaagggtattggacttttgaaagattgaaatttttgttacagtatggaatgtttttaactgaatgttgaaataaaagttatttaagaattacttagtgactgtttagtatgtgccaggggccgtaattagatggggctgaagaaagatagtcattgttgaatcttcttcaggtagaccaggtcctccttgaggttctcaggctgcatctccaggttggctccggccagggtcagcttgtccagcccctggtgcagctccagagacccagcctcgcttggtgcagaagtcattggcagccaggtgggcatcatccacctgtagccagcacttctccattctgccaacgtctccggcctggtgagtctggatgtgagcgcatcccagggggcccaaggcacagagagagagaggaacggggtggagggagggaagtgtgtgcaggggccaggagcgccaggctgctcgggcttcccggcccctgcagcccgccaggagctgtggccaaggcagaggcctgccctgctgctgctggcgctgtcacctccctgtggtcctgccttctgggtccttgagggcctcctgtcatctggaactggaaataagttagtgaagcgacgttttgtgaatatttattggcctttgcgtctttgtcttcattttcagtgctggcttttctgttgggtcatttgtgttcttatgttgatttgaagaatttaaaaaggtattctataaattaatcctttatggggtcatttctagtgcagatagttgtttcttagtctggtcattgtaccgtaattttatttcacatttctttcttgctggtaaataagaatctaattgattttatatattgattttgtatcttgttacctggtttaattcacatattcataggcatcatttttggattgtggtgggtttttcatgtacttatgtacatgtagttatgtacttatgtacttaaatacttaacgtacttacatacttatgtagttagtgtcagccacatataataacacctatattgcttaaatgttggttcttacacctttatttttctttattttcttcttttattgtccccatcacacctcctgaacacggtgtgtctggttctgattccagggaacaggtttcagtgatcctgtattccttatgtagtttattataatttcattttagacaaacaatgagattaaggaagctgccttcttttacatatgctaagagttatttatgactaattgttgaatttgaataaatgcttttttttacatatactgta

SEQ ID NO: 462311 - DNA, 1440 bp, Homo sapiens
taggggtgctacaagttgaccactgcagcagtaaagatgactctgaagaatggcgtgggttggttcctttcaaatgcacttgagcagcggtctccaaccacagggccacagagctggagctggatctaccatgaaagacttgtgaatccaggaagagagactgactgggcaacatgttattcaggtgggaacatccagttgcaggaaaacaagcttaacacgcccactgattctacattatgctcctacctcccggcagcctctccaggcccagaactttctccagtcagcctctacagaccaagctcatgactcacaatggcctatttaggcccataccctacgtcacggcagcctccgcagatgaggctactgcctcacaacagcctccacaggcacagctccatcgttacaatggcctctttagacccagctcctgcctcccagccttctctccaggccctgaactttctcaagtcgacctcaccaggcccagctcatgcatcttggtggcccctccaggcccagcctctgcctcccgtcagcctctacagtcccaacgtctgcctcacagcagattcttcacgcccagcatctacctcactgtggaccccccaagccaagctcccaacctttcagcagcttctacacacccagctcccgcctgccagtggcctcttcaggcccatggggctcattcctgacaacggcctttccaggcccagtttttcccttccggcggcctctccgggcccagaacctcctcaagtcagcctctccagacccacttgcaccctccgggcgttctctccgggcccagctcttcttcctggttgggtctccaggcccgattcctgcctctcaacaacctctttggactcagtgcctacccatctcctggcggccttggtcggcccacagcttcctcaagccaagctccccaggcccaggtcaggcctcacggtggcctctccaggatgagctcctgccctccgatggcatctccaggccccaaatggtctccggtcggtgggctcctccacgccaaggttgggcctcccggcgactgccgcaggcccaagttgtcctgaagtcgggctctcccggccctgcctcccagcaagtaagcaagctcttttggctcaactcctgcccagctcccaaccgcctttgtaggccccgaactttctccagccaagctctgagggcccacctcctgcctcctggtggcctgtacagttctagcactggttggagaacagcctctgcaggccccgccttgcctcccaggggcctctccaggccaagctcttgcacccacggcggcctcccggggcaagtccctgcctgcctcccagcagcccgcgtgcgcccagctcctccctcacggtggcctgttgatgccaactcatgcctctggaccctgcacagagcgtgacg

SEQ ID NO: 462312 - DNA, 2257 bp, Homo sapiens
gggcgactactactactaaattcgcgggcggatcaatcttcctgtgccatccaggctggagtgcagtgatgtgatcatagctcactatagctttggccttctgagatcaagcaatcctcccatctcaacctcccaagtagctgggactacacacgcatgtcacccatgcccagatcatttttgtagagtcagagtttcaccgtggtggccaggttggccatgttggccagatggggtcttcttttgttgcccaggctggccacaaattcctgggctcgagtgatcctcccacctcgtccttgtagagatgagatttagttatgtcgtccaggctgatctcaaactcctgggctaaatcgattgtctcacctcagcctctcaagtatgttatgaaggttatatgttaggaagggtcccaggaggtaaacccacacagatgggatttgggcataggtttggtttcccagggggcagtgctgagctctttgccagtgggaaatgggatgctggtgatttccagtaggtgacctcacagtgactcaagctaccacttactgttgattgtgacgaaatgccagctgaggcacatgccttgggagctaagtggttgctgcccttgaccactgtgaagactggtgtgggaagggtcgttttggatgcacttgagcaggggtccccaacccctgagccatggagccgcaaggagccacacagcaggaggtgggaacatccagttgcaggaaaacaagcttaacacgcccactgattctacattatgggtctccctctgttgtccaaggctggagtgtagtagtgctatcgcagctgactgcagcctcaaccttccaggctgaagcgatcctcccacctcaacctcccacgtggctgagactacaggtgcttgccactatgcccaactaacatttggaattttcgtatacgtggattctagaggggtgacagcgaaacgtgggaccatccagttgcaggaaaacaagcttgacacgcccactaattctacattatgctcctacctcccggcagcctctccaggcccagaactttctccagtcagcctctacagaccaagctcatgactcacaatggcctatttaggcccataccctacgtcacggcagcctccgcagatgaggctactgcctcacaacagcctccacaggcacagctccatcgttacaatggcctctttagacccagctcctgcctcccagccttctctccaggccctgaactttctcaagtcgacctcaccaggcccagctcatgcttctttgcagcctctccaggcccagctcatgcatcttggtggcccctccaggcccagcctctgcctcccgtcagcctctacagtcccaacgtctgcctcacagcagattcttcacgcccagcatctacctcactgtggaccccccaagccaagctcccaacctttcagcagcttctacacacccagctcccgcctgccagtggcctcttcaggcccatggggctcattcctgacaacggcctttccaggcccagtttttcccttccggcggcctctccgggcccagaacctcctcaagtcagcctctccagacccacttgcaccctccgggcgttctctccgggcccagctcttcttcctggttgggtctccaggcccgattcctgcctctcaacaacctctttggactcagtgcctacccatctcctggcggccttggtcggcccacagcttcctcaagccaagctccccaggcccaggtcaggcctcacggtggcctctccaggatgagctcctgccctccgatggcatctccaggccccaaatggtctccggtcggtgggctcctccacgccaaggttgggcctcccggcgactgccgcaggcccaagttgtcctgaagtcgggctctcccggccctgcctcccagcaagtaagcaagctcttttggctcaactcctgcccagctcccaaccgcctttgtaggccccgaactttctccagccaagctctgagggcccacctcctgcctcctggtggcctgtacagttctagcactggttggagaacagcctctgcaggccccgccttgcctcccaggggcctctccaggccaagctcttgcacccacggcggcctcccggggcaagtccctgcctgcctcccagcagcccgcgtgcgcccagctcctccctcacggtggcctgttgatgccaactcatgcctctggaccctgcacagagcgtgacg

SEQ ID NO: 462313 - DNA, 1689 bp, Homo sapiens
taggggtgctacaagttgaccactgcagcagtaaagatgactctgaagaatggcgtgggttggttcctttcaaatgcacttgagcagcggtctccaaccacagggccacagagctggagctggatctaccatgaaagacttgtgaatccaggaagagagactgactgggcaacatgttattcaggtgggaacatccagttgcaggaaaacaagcttaacacgcccactgattctacattatgggtctccctctgttgtccaaggctggagtgtagtagtgctatcgcagctgactgcagcctcaaccttccaggctgaagcgatcctcccacctcaacctcccacgtggctgagactacaggtgcttgccactatgcccaactaacatttggaattttcgtatacgtggattctagaggggtgacagcgaaacgtgggaccatccagttgcaggaaaacaagcttgacacgcccactaattctacattatgctcctacctcccggcagcctctccaggcccagaactttctccagtcagcctctacagaccaagctcatgactcacaatggcctatttaggcccataccctacgtcacggcagcctccgcagatgaggctactgcctcacaacagcctccacaggcacagctccatcgttacaatggcctctttagacccagctcctgcctcccagccttctctccaggccctgaactttctcaagtcgacctcaccaggcccagctcatgcatcttggtggcccctccaggcccagcctctgcctcccgtcagcctctacagtcccaacgtctgcctcacagcagattcttcacgcccagcatctacctcactgtggaccccccaagccaagctcccaacctttcagcagcttctacacacccagctcccgcctgccagtggcctcttcaggcccatggggctcattcctgacaacggcctttccaggcccagtttttcccttccggcggcctctccgggcccagaacctcctcaagtcagcctctccagacccacttgcaccctccgggcgttctctccgggcccagctcttcttcctggttgggtctccaggcccgattcctgcctctcaacaacctctttggactcagtgcctacccatctcctggcggccttggtcggcccacagcttcctcaagccaagctccccaggcccaggtcaggcctcacggtggcctctccaggatgagctcctgccctccgatggcatctccaggccccaaatggtctccggtcggtgggctcctccacgccaaggttgggcctcccggcgactgccgcaggcccaagttgtcctgaagtcgggctctcccggccctgcctcccagcaagtaagcaagctcttttggctcaactcctgcccagctcccaaccgcctttgtaggccccgaactttctccagccaagctctgagggcccacctcctgcctcctggtggcctgtacagttctagcactggttggagaacagcctctgcaggccccgccttgcctcccaggggcctctccaggccaagctcttgcacccacggcggcctcccggggcaagtccctgcctgcctcccagcagcccgcgtgcgcccagctcctccctcacggtggcctgttgatgccaactcatgcctctggaccctgcacagagcgtgacg

SEQ ID NO: 462314 - DNA, 2225 bp, Homo sapiens
gggcgactactactactaaattcgcgggcggatcaatcttcctgtgccatccaggctggagtgcagtgatgtgatcatagctcactatagctttggccttctgagatcaagcaatcctcccatctcaacctcccaagtagctgggactacacacgcatgtcacccatgcccagatcatttttgtagagtcagagtttcaccgtggtggccaggttggccatgttggccagatggggtcttcttttgttgcccaggctggccacaaattcctgggctcgagtgatcctcccacctcgtccttgtagagatgagatttagttatgtcgtccaggctgatctcaaactcctgggctaaatcgattgtctcacctcagcctctcaagtatgttatgaaggttatatgttaggaagggtcccaggaggtaaacccacacagatgggatttgggcataggtttggtttcccagggggcagtgctgagctctttgccagtgggaaatgggatgctggtgatttccagtaggtgacctcacagtgactcaagctaccacttactgttgattgtgacgaaatgccagctgaggcacatgccttgggagctaagtggttgctgcccttgaccactgtgaagactggtgtgggaagggtcgttttggatgcacttgagcaggggtccccaacccctgagccatggagccgcaaggagccacacagcaggaggtgggaacatccagttgcaggaaaacaagcttaacacgcccactgattctacattatgggtctccctctgttgtccaaggctggagtgtagtagtgctatcgcagctgactgcagcctcaaccttccaggctgaagcgatcctcccacctcaacctcccacgtggctgagactacaggtgcttgccactatgcccaactaacatttggaattttcgtatacgtggattctagaggggtgacagcgaaacgtgggaccatccagttgcaggaaaacaagcttgacacgcccactaattctacattatgctcctacctcccggcagcctctccaggcccagaactttctccagtcagcctctacagaccaagctcatgactcacaatggcctatttaggcccataccctacgtcacggcagcctccgcagatgaggctactgcctcacaacagcctccacaggcacagctccatcgttacaatggcctctttagacccagctcctgcctcccagccttctctccaggccctgaactttctcaagtcgacctcaccaggcccagctcatgcatcttggtggcccctccaggcccagcctctgcctcccgtcagcctctacagtcccaacgtctgcctcacagcagattcttcacgcccagcatctacctcactgtggaccccccaagccaagctcccaacctttcagcagcttctacacacccagctcccgcctgccagtggcctcttcaggcccatggggctcattcctgacaacggcctttccaggcccagtttttcccttccggcggcctctccgggcccagaacctcctcaagtcagcctctccagacccacttgcaccctccgggcgttctctccgggcccagctcttcttcctggttgggtctccaggcccgattcctgcctctcaacaacctctttggactcagtgcctacccatctcctggcggccttggtcggcccacagcttcctcaagccaagctccccaggcccaggtcaggcctcacggtggcctctccaggatgagctcctgccctccgatggcatctccaggccccaaatggtctccggtcggtgggctcctccacgccaaggttgggcctcccggcgactgccgcaggcccaagttgtcctgaagtcgggctctcccggccctgcctcccagcaagtaagcaagctcttttggctcaactcctgcccagctcccaaccgcctttgtaggccccgaactttctccagccaagctctgagggcccacctcctgcctcctggtggcctgtacagttctagcactggttggagaacagcctctgcaggccccgccttgcctcccaggggcctctccaggccaagctcttgcacccacggcggcctcccggggcaagtccctgcctgcctcccagcagcccgcgtgcgcccagctcctccctcacggtggcctgttgatgccaactcatgcctctggaccctgcacagagcgtgacg

SEQ ID NO: 462315 - DNA, 1403 bp, Homo sapiens
cagagtccaaacagtgcccagagtccaaacagtgcccagagtccaaacagtgcccagagtccaaacagtgcccaggtgcttgccactatgcccaactaacatttggaattttcgtatacgtggattctagaggggtgacagcgaaacgtgggaccatccagttgcaggaaaacaagcttgacacgcccactaattctacattatgctcctacctcccggcagcctctccaggcccagaactttctccagtcagcctctacagaccaagctcatgactcacaatggcctatttaggcccataccctacgtcacggcagcctccgcagatgaggctactgcctcacaacagcctccacaggcacagctccatcgttacaatggcctctttagacccagctcctgcctcccagccttctctccaggccctgaactttctcaagtcgacctcaccaggcccagctcatgcatcttggtggcccctccaggcccagcctctgcctcccgtcagcctctacagtcccaacgtctgcctcacagcagattcttcacgcccagcatctacctcactgtggaccccccaagccaagctcccaacctttcagcagcttctacacacccagctcccgcctgccagtggcctcttcaggcccatggggctcattcctgacaacggcctttccaggcccagtttttcccttccggcggcctctccgggcccagaacctcctcaagtcagcctctccagacccacttgcaccctccgggcgttctctccgggcccagctcttcttcctggttgggtctccaggcccgattcctgcctctcaacaacctctttggactcagtgcctacccatctcctggcggccttggtcggcccacagcttcctcaagccaagctccccaggcccaggtcaggcctcacggtggcctctccaggatgagctcctgccctccgatggcatctccaggccccaaatggtctccggtcggtgggctcctccacgccaaggttgggcctcccggcgactgccgcaggcccaagttgtcctgaagtcgggctctcccggccctgcctcccagcaagtaagcaagctcttttggctcaactcctgcccagctcccaaccgcctttgtaggccccgaactttctccagccaagctctgagggcccacctcctgcctcctggtggcctgtacagttctagcactggttggagaacagcctctgcaggccccgccttgcctcccaggggcctctccaggccaagctcttgcacccacggcggcctcccggggcaagtccctgcctgcctcccagcagcccgcgtgcgcccagctcctccctcacggtggcctgttgatgccaactcatgcctctggaccctgcacagagcgtgacg

SEQ ID NO: 462316 - DNA, 1053 bp, Homo sapiens
catcatgacaggaattaattccagcaagaattatcagtggatagccaggcgcagtggcttacgcctgtaatcccagcactttgggaggccgaggcaggcggatcacgagcatgagccaccgcacctggcccgggaagtctatatttaaaaagaaagtggtatctgagttaggtggctgtcatctgtaatcccagcattttgggaggtcaaggctgaaggataggttgagctcaggagttctggaccagcctggaacatagtgagacaccccccaatctctacaaaaaaaaaattcttaattctaatgttcaaacgttgttttaggctgggcgcagtggcctgtaatcccaacactttgggaggctgaggcaggcatatcacttgaggtcaggagttcaagaccagcctagccaacatggtgaaaccccatctctactaaaaatacaaaaattagctgggcatggtggcaggtgtctgtaatcccagttactcaggaggctgaggcaggagaatcgcttgaagccaggaggtggaggttgctgtgagccaagatcatgccactgaactttagcctgggcgacaaaacaagactgtctcaaaaaaaaaaaaaaagaaagacatcagaggacgcttataaaagtgagacatgagacagagagaaaagcccaaggaggttccttatttaatgttttcaatcttctcccaatgcatggagcagctcctgcctcttagaacatgggccatgcttctgagtgcctgctgttccaaagtctgccatccagagggacagacagacattaaaacaaagtagcagaacagctttggcaaggtgccctaggaatttataatacagtaactaatccagtctagaaagctcaaaatacactttctctcctggaattgacccagagctaaagccaccaattgaccaaatgcctgctaacagtgcccatgtttaaagtccaagatcccccaggtgacagattaattagtgactctctcatgcaaaccttggatagaaacattctacttcaactatccaggctccttatc

SEQ ID NO: 462317 - DNA, 3035 bp, Homo sapiens
gtcatccgcgggcggtcaggaggccgtgggggaagaggaggatctggaagagatggaggacctgcgggagttaggatggggggcgggttctgcaggacagctcgcctccctgaggcttcccaatgttcctaggatgacggcgacccctgagagcctcttccccactggggacgaactggactccagccagctccagatggagtccgatgaggtggacaccctgaaggagggagaggacccagccgaccggatgcacccgtttctggccatctatgagcttcagtctctgaaagtgcaccccttggtgggaacctgcactctgtattctgtccgcttgactcacggcgacttttcctggacaaccaagaagaaataccgtcattttcaggagctgcatcgggacctcctgagacacaaagtcttgatgagtctgctccctctggctcggaaccagagcacccagcctcccagctcttacctgaccttcatccatcctttccacagatttgccgttgcctattctccagcccgagatgcaggcaacagagagatgccctctctaccccgggcaggtcctgagggctccaccagacatgcagccagcaaacagaaatacctggagaattacctcaaccgtctcttgaccatgtctttctatcgcaactaccatgccatgacagagttcctggaagtcagtcagctgtcctttatcccggacttgggccgcaaaggactggaggggatgatccggaagcgctcaggtggccaccgtgttcctggcctcacctgctgtggccgagaccaagtttgttatcgctggtccaagaggtggctggtggtgaaggactccttcctgctgtacatgtgcctcgagacaggtgccatctcatttgttcagctctttgaccctggctttgaggtgcaagtggggaaaaggagcacggaggcacggcacggcgtgcggatcgatacctcccacaggtccttgattctcaagtgcagcagctaccggcaggcacggtggtgggcccaagagatcactgagctggcacagggcccaggcagagacttcctacagctgcaccggcatgacagctacgccccaccccggcctgggaccttggcccggtggtttgtgaatggggcaggttactttgctgctgtggcagatgccatccttcgagctcaagaggagattttcatcacagactggtggttgagtcctgaggtttacctgaagcgtccggcccattcagatgactggagactggacattatgctcaagaggaaggcggaggagggtgtccgtgtgtctattctgctgtttaaagaagtggaattggccttgggcatcaacagtggctatagcaagagggcgctgatgctgctgcaccccaacataaaggtgatgcgtcacccagaccaagtgacgttgtgggcccatcatgagaagctcctggtggtggaccaagtggtagcattcctggggggactggaccttgcctatggccgctgggatgacctgcactaccgactgactgaccttggagactcctctgaatcagctgcctcccagcctcccaccccgcgcccagactcaccagccaccccagacctctctcacaaccaattcttctggctgggcaaggactacagcaatcttatcaccaaggactgggtgcagctggaccggcctttcgaagatttcattgacagggagacgacccctcggatgccatggcgggacgttggggtggtcgtccatggcctaccggcccgggaccttgcccggcacttcatccagcgctggaacttcaccaagaccaccaaggccaagtacaagactcccacatacccctacctgcttcccaagtctaccagcacggccaatcagctccccttcacacttccaggagggcagtgcaccaccgtacaggaggaggatgttgtagtgagctgagatcacgccactgcactccagcctgggcaacagagtgagactccatctcaaaaataaaataaaaggccaggcgcagtggcttacgcctgtaatcccagcactttgggaggccgaggcaggcggatcacgagcatgagccaccgcacctggcccgggaagtctatatttaaaaagaaagtggtatctgagttaggtggctgtcatctgtaatcccagcattttgggaggtcaaggctgaaggataggttgagctcaggagttctggaccagcctggaacatagtgagacaccccccaatctctacaaaaaaaaaattcttaattctaatgttcaaacgttgttttaggctgggcgcagtggcctgtaatcccaacactttgggaggctgaggcaggcatatcacttgaggtcaggagttcaagaccagcctagccaacatggtgaaaccccatctctactaaaaatacaaaaattagctgggcatggtggcaggtgtctgtaatcccagttactcaggaggctgaggcaggagaatcgcttgaagccaggaggtggaggttgctgtgagccaagatcatgccactgaactttagcctgggcgacaaaacaagactgtctcaaaaaaaaaaaaaaagaaagacatcagaggacgcttataaaagtgagacatgagacagagagaaaagcccaaggaggttccttatttaatgttttcaatcttctcccaatgcatggagcagctcctgcctcttagaacatgggccatgcttctgagtgcctgctgttccaaagtctgccatccagagggacagacagacattaaaacaaagtagcagaacagctttggcaaggtgccctaggaatttataatacagtaactaatccagtctagaaagctcaaaatacactttctctcctggaattgacccagagctaaagccaccaattgaccaaatgcctgctaacagtgcccatgtttaaagtccaagatcccccaggtgacagattaattagtgactctctcatgcaaaccttggatagaaacattctacttcaactatccaggctccttatc

SEQ ID NO: 462318 - DNA, 2158 bp, Homo sapiens
tgggtggtggagaaaattccccgaccccttgcgcttcccaggaaatgctcggaacttctttacgtttttcaaacgcagctggctctgaaactgctccagtgtctgaaagtgacggatgcgcctcatttctatggcctgccgtcccttgagcggaccttacgagggatggctaacctcactgcgtttccgggatggagctcacactctcctctcacaaagcctctagatatctgtgtgaagtacttgtcaggtctccttgaggtcattacttctttttatgtggagcgtggaggaaatgctatgtccttcatgggaaaaggtgttacaaagagcacaattctttgcttgcttcacttatcccatgagatgatggcccaggctgggagcttggagtggatgtcactttggttcttgcctttgggtagtcatagtgaagaacatattcctactcaacaaggattggcttggttgattccattatgggttgatcgggacccagaggtgagattcacttcactgggattaggatcagcactgaccacccttgaaacgggctgtgtggccttagcaaacagttgtcagaacatttccggtgggctctggggaactgtggtgaacattcttctggaccagtcagaatgtagtatggtgcgccgggaggcggcatttattcttcagaatctccttgtaattccaatgcctacagaaattataaaggattatacttggcagggtccctgtgttcatgatgaggactctggcctatcgctcattggaaaacctgcccttcaggctcttttatatcactgccatttttatgaacatttgaatcagatggtaaagcattgttacctaggacggtgtatgtttgatttgaatttttctgcttttgatagaaattcagaaagcaatgatttaaatgggagaaagaagcaagcctctcctcgcaaacaaggccagccagctttctcaagaggattttctttttctgatcgtcacagcattgcagatgctaccctcatacagacatgtgtccaggaactcagagccctgctgccttcatcacctccagctgaacacactcaggctcagtgccactggagaacaccacggttcagcagatggtttttatgcttctttcaaacctggccttgtcgcatgactgtaaaggagtaattcagaagagtaacttcttacagaacttcctctctctagcattgccaaaaggaggaaataaacatctaagtaatctgactattctttggttgaagttactcctgaatatatcatctggagaagatgggcaacaaatgattctgaggcttgatggctgtctagacttactaacagagatgagcaaatacaagcacaagagcagccctttattgcctcttcttatctttcataatgtttgcttcagtcctgcaaataaacccaagatcctggctaatgaaaaagtcattactgtgcttgctgcctgtctggaaagtgagaatcaaaatgctcagaggattggagcagctgccctttgggctctgatttacaattatcagaaggcaaaaacagctttgaaaagcccatcagtaaaaagaagagtggatgaagcatactccttagcaaagaaaactccttaattcttcctgagtgccatgggatgctacaccttgaagctgacagtcatcaacaggggagctaaagttgaagccagctgtgtgtagcagctgttacctgaagacgtgctacctctctacaaagtgttgatccccttctttcccatgagagagagaactggtgatactccaacaccgtccagttgtggcagctctccagaagtaatagcagctgacaactttctgtgccttttcctttctgttgaaaaggcatagaaagttctgggaacataaacatttttacccttttctatgccatttattttgtaaaaatcctatttaacagttatttaataaaacaatatttttagaaactaaaaattgactaataattgctgcttacagacttttatcagtctcatgaatattaattttaggagttgaaataagacactgtgtcctggttgtttctctctttttttaaattttaactgatgtaaaatttggctctgtcagtgcaaatccttattttcaaaactttctgttat

SEQ ID NO: 462319 - DNA, 460 bp, Homo sapiens
gaacttttaaaaaatatatgttcatttttagaaaaagtcattactgtgcttgctgcctgtctggaaagtgagaatcaaaatgctcagaggattggagcagctgccctttgggctctgatttacaattatcagaaggtcagttttaaaaatcattgttacacctggggagcaaacaacaaggtataacccaggtataaactcttaggatacatccaaaggtgtcaagagttacagcaaaagaaaaaagacaaaattaaagatccatgttccctttgctgattcatacaattagtaaaccatcagttgaaatctttttatttaatcatttcaacagaatgtctcagtttaggaagaggatctctggaactgacttttttcctctttaattttaaattggatttactttattattgcaattttagtatagattgtttcttctaaaagacgtatcaagggaaaa

SEQ ID NO: 462320 - DNA, 2202 bp, Homo sapiens
tttttgttactccatctcttctttcagcaatgtgcagcctcttggacaacctcttgacgattgctcccagagacactgcaaaggcttttcgacaagctcatctcatagaacttctctgtagcattgcagatgctaccctcatacagacatgtgtccaggaactcagagccctgctgccttcatcacctccagctgaacacactcaggctcaggtttcctttctcctggaatacctatcctctttgtccaggcttctgcagtcatgtttattggtggagcctgaccttgtgattcaggatgagcttgtgaaacctcttatcaccaatatcattggaattctcaccatatgtaccaaagatgtattagataaagagttaatatcagctttttatcacacatggacacatttatttaatcttctggccatgctcctgaggaaagctggtgccatcacactcccgtctgttaccgtggccctggccaagcactggacagcggcgattgatatgttctgcacatgtgcaggcttgtctgccacgtgtcctgccctgtatactgccagcttgcaattcctttctgttctcttgaccgaagaagcaaaagggcatctccaggctaagagcaaaacacatttatgctgtagtccaacagtggcttcacttcttgatgactctcaggaaaatcagaaatctctagaacaacttagtgatgtaatccttcagtgctatgaagggaaatcctccaaagatatcctgaaaagagtagctgcaaatgcattgatgtcactgctggctgtcagtagaagagcacagaaacatgctttgaaagccaatcttatagacaattgcatggagcagatgaaacacataaatgcacaactgaacctagattctctgaggcctgggaaagcagcattgaaaaaaaaggaggatggtgttattaaagagttaagcattgccatgcagctcctaagaaactgtctttatcaaaatgaggaatgtaaagaagcagctcttgaagctcaccttgtccctgtcttgcactctctctggccttggattttgatggatgattcattgatgcaaatttctctgcagctcctttgtgtctatactgcaaattttccaaatggttgcagttctctttgttggtcaagttgtggacaacaccctgttcaagctacacatagaggagccgtgagcaactctctgatgctgtgtatcctaaagttggcttcccagatgccactggagaacaccacggttcagcagatggtttttatgcttctttcaaacctggccttgtcgcatgactgtaaaggagtaattcagaagagtaacttcttacagaacttcctctctctagcattgccaaaaggaggaaataaacatctaagtaatctgactattctttggttgaagttactcctgaatatatcatctggagaagatgggcaacaaatgattctgaggcttgatggctgtctagacttactaacagagatgagcaaatacaagcacaagagcagccctttattgcctcttcttatctttcataatgtttgcttcagtcctgcaaataaacccaagatcctggctaatgaaaaagtcattactgtgcttgctgcctgtctggaaagtgagaatcaaaatgctcagaggattggagcagctgccctttgggctctgatttacaattatcagaaggcaaaaacagctttgaaaagcccatcagtaaaaagaagagtggatgaagcatactccttagcaaagaaaactttcccaaactcagaagcaaaccctctaaatgcctattatttgaaatgtcttgaaaacctcgtgcagctccttaattcttcctgagtgccatgggatgctacaccttgaagctgacagtcatcaacaggggagctaaagttgaagccagctgtgtgtagcagctgttacctgaagacgtgctacctctctacaaagtgttgatccccttctttcccatgagagagagaactggtgatactccaacaccgtccagttgtggcagctctccagaagtaatagcagctgacaactttctgtgccttttcctttctgttgaaaaggcatagaaagttctgggaacataaacatttttacccttttctatgccatttattttgtaaaaatcctatttaacagttatttaataaaacaatatttttagaaa

SEQ ID NO: 462321 - DNA, 1565 bp, Homo sapiens
ggggaatgtgtccccagaaggagaaaggaggaaattgatgacagttctcctgttcagcagttttacaaggacccattttaataagtgctatgaagggaaatcctccaaagatatcctgaaaagagtagctgcaaatgcattgatgtcactgctggctgtcagtagaagagcacagaaacatgctttgaaagccaatcttatagacaattgcatggagcagatgaaacacataaatgcacaactgaacctagattctctgaggcctgggaaagcagcattgaaaaaaaaggaggatggtgttattaaagagttaagcattgccatgcagctcctaagaaactgtctttatcaaaatgaggaatgtaaagaagcagctcttgaagctcaccttgtccctgtcttgcactctctctggccttggattttgatggatgattcattgatgcaaatttctctgcagctcctttgtgtctatactgcaaattttccaaatggttgcagttctctttgttggtcaagttgtggacaacaccctgttcaagctacacatagaggagccgtgagcaactctctgatgctgtgtatcctaaagttggcttcccagatgccactggagaacaccacggttcagcagatggtttttatgcttctttcaaacctggccttgtcgcatgactgtaaaggagtaattcagaagagtaacttcttacagaacttcctctctctagcattgccaaaaggaggaaataaacatctaagtaatctgactattctttggttgaagttactcctgaatatatcatctggagaagatgggcaacaaatgattctgaggcttgatggctgtctagacttactaacagagatgagcaaatacaagcacaagagcagccctttattgcctcttcttatctttcataatgtttgcttcagtcctgcaaataaacccaagatcctggctaatgaaaaagtcattactgtgcttgctgcctgtctggaaagtgagaatcaaaatgctcagaggattggagcagctgccctttgggctctgatttacaattatcagaaggcaaaaacagctttgaaaagcccatcagtaaaaagaagagtggatgaagcatactccttagcaaagaaaactttcccaaactcagaagcaaaccctctaaatgcctattatttgaaatgtcttgaaaacctcgtgcagctccttaattcttcctgagtgccatgggatgctacaccttgaagctgacagtcatcaacaggggagctaaagttgaagccagctgtgtgtagcagctgttacctgaagacgtgctacctctctacaaagtgttgatccccttctttcccatgagagagagaactggtgatactccaacaccgtccagttgtggcagctctccagaagtaatagcagctgacaactttctgtgccttttcctttctgttgaaaaggcatagaaagttctgggaacataaacatttttacccttttctatgccatttattttgtaaaaatcctatttaacagttatttaataaaacaatatttttagaaa

SEQ ID NO: 462322 - DNA, 2404 bp, Homo sapiens
tttttgttactccatctcttctttcagcaatgtgcagcctcttggacaacctcttgacgattgctcccagagacactgcaaaggcttttcgacaagctcatctcatagaacttctctgtagcattgcagatgctaccctcatacagacatgtgtccaggaactcagagccctgctgccttcatcacctccagctgaacacactcaggctcaggtttcctttctcctggaatacctatcctctttgtccaggcttctgcagtcatgtttattggtggagcctgaccttgtgattcaggatgagcttgtgaaacctcttatcaccaatatcattggaattctcaccatatgtaccaaagatgtattagataaagagttaatatcagctttttatcacacatggacacatttatttaatcttctggccatgctcctgaggaaagctggtgccatcacactcccgtctgttaccgtggccctggccaagcactggacagcggcgattgatatgttctgcacatgtgcaggcttgtctgccacgtgtcctgccctgtatactgccagcttgcaattcctttctgttctcttgaccgaagaagcaaaagggcatctccaggctaagagcaaaacacatttatgctgtagtccaacagtggcttcacttcttgatgactctcaggaaaatcagaaatctctagaacaacttagtgatgtaatccttcagtgctatgaagggaaatcctccaaagatatcctgaaaagagtagctgcaaatgcattgatgtcactgctggctgtcagtagaagagcacagaaacatgctttgaaagccaatcttatagacaattgcatggagcagatgaaacacataaatgcacaactgaacctagattctctgaggcctgggaaagcagcattgaaaaaaaaggaggatggtgttattaaagagttaagcattgccatgcagctcctaagaaactgtctttatcaaaatgaggaatgtaaagaagcagctcttgaagctcaccttgtccctgtcttgcactctctctggccttggattttgatggatgattcattgatgcaaatttctctgcagctcctttgtgtctatactgcaaattttccaaatggttgcagttctctttgttggtcaagttgtggacaacaccctgttcaagctacacatagaggagccgtgagcaactctctgatgctgtgtatcctaaagttggcttcccagatgccactggagaacaccacggttcagcagatggtttttatgcttctttcaaacctggccttgtcgcatgactgtaaaggagtaattcagaagagtaacttcttacagaacttcctctctctagcattgccaaaaggaggaaataaacatctaagtaatctgactattctttggttgaagttactcctgaatatatcatctggagaagatgggcaacaaatgattctgaggcttgatggctgtctagacttactaacagagatgagcaaatacaagcacaagagcagccctttattgcctcttcttatctttcataatgtttgcttcagtcctgcaaataaacccaagatcctggctaatgaaaaagtcattactgtgcttgctgcctgtctggaaagtgagaatcaaaatgctcagaggattggagcagctgccctttgggctctgatttacaattatcagaaggcaaaaacagctttgaaaagcccatcagtaaaaagaagagtggatgaagcatactccttagcaaagaaaactttcccaaactcagaagcaaaccctctaaatgcctattatttgaaatgtcttgaaaacctcgtgcagctccttaattcttcctgagtgccatgggatgctacaccttgaagctgacagtcatcaacaggggagctaaagttgaagccagctgtgtgtagcagctgttacctgaagacgtgctacctctctacaaagtgttgatccccttctttcccatgagagagagaactggtgatactccaacaccgtccagttgtggcagctctccagaagtaatagcagctgacaactttctgtgccttttcctttctgttgaaaaggcatagaaagttctgggaacataaacatttttacccttttctatgccatttattttgtaaaaatcctatttaacagttatttaataaaacaatatttttagaaaaaaaaaaaaaaaaaaaaacaagaaaaaggggggggcataaaatatcctggaggggacaaattagcgtaccagttttgagaaggggccatgggggggaaaagcgggaggggtaaaggggctggaacgatcgggcttgaggccctcggggacatggaccacggaaacggaacatatgttgtgagttcgggatgggttatacagg

SEQ ID NO: 462323 - DNA, 1881 bp, Homo sapiens
tttttgttactccatctcttctttcagcaatgtgcagcctcttggacaacctcttgacgattgctcccagagacactgcaaaggcttttcgacaagctcatctcatagaacttctctgtagcattgcagatgctaccctcatacagacatgtgtccaggaactcagagccctgctgccttcatcacctccagctgaacacactcaggctcaggtttcctttctcctggaatacctatcctctttgtccaggcttctgcagtcatgtttattggtggagcctgaccttgtgattcaggatgagcttgtgaaacctcttatcaccaatatcattggaattctcaccatatgtaccaaagatgtattagataaagagttaatatcagctttttatcacacatggacacatttatttaatcttctggccatgctcctgaggaaagctggtgccatcacactcccgtctgttaccgtggccctggccaagcactggacagcggcgattgatatgttctgcacatgtgcaggcttgtctgccacgtgtcctgccctgtatactgccagcttgcaattcctttctgttctcttgaccgaagaagcaaaagggcatctccaggctaagagcaaaacacatttatgctgtagtccaacagtggcttcacttcttgatgactctcaggaaaatcagaaatctctagaacaacttagtgatgtaatccttcagtgctatgaagggaaatcctccaaagatatcctgaaaagagtagctgcaaatgcattgatgtcactgctggctgtcagtagaagagcacagaaacatgctttgaaagccaatcttatagacaattgcatggagcagatgaaacacataaatgcacaactgaacctagattctctgaggcctgggaaagcagcattgaaaaaaaaggaggatggtgttattaaagagttaagcattgccatgcagctcctaagaaactgtctttatcaaaatgaggaatgtaaagaagcagctcttgaagctcaccttgtccctgtcttgcactctctctggccttggattttgatggatgattcattgatgcaaatttctctgcagctcctttgtgtctatactgcaaattttccaaatggttgcagttctctttgttggtcaagttgtggacaacaccctgttcaagctacacatagaggagccgtgagcaactctctgatgctgtgtatcctaaagttggcttcccagatgccactggagaacaccacggttcagcagatggtttttatgcttctttcaaacctggccttgtcgcatgactgtaaaggagtaattcagaaggccaagataaattgcagaagttgagagcatttataagaattgagtctccttttcctctactgtttcttctccctgaactcctcagaagatactttgttatcaccacataaatagaaagttcggtctttctaaggaaatggaaagatcaatcttaccaaggaaagatgttttcagtggcacgttggagccagcctcctactgactcatgagtgtcatcttaaatttgcaggaattttataaaaattccagttgatgttacattgttattttgaaatcagccacagtgggcatatcacaccacgtaattcagcgaactgtacaaatcttggatcttttctaccctcaccacaatcagttgtttatttaccagcacatggctggatattttcttcatgtatatgttcatgtatgtcatatatgtatatatatttgaatatattttcttcatatatgtattcatatacatgcatcacttccaaaatgagacattctcttgaactggatatatgtgattagcatccataagaatgagagattctgcatatgt

SEQ ID NO: 462324 - DNA, 450 bp, Homo sapiens
gacaagttatctcccatttctaaaattctgttcctttacacaggcctttatttagatgttttctttagcaactattaaaaaccctagtatgtttattttattctttttttaaaaataaacctggtgtcttaaagtgctttagtgagataattaggccctcagtgaggacagtatatctattaggttgactgtagacaccaacattagcctccattgctaatttgcagttcacaggttaatggcctagtcattttgttagacagatatgctttgccacttagtgtcttcaaaaactaaacagggaaactgagaagacattgtgataggctgttatttttgaaggttgcagttctctttgttggtcaagttgtggacaacaccctgttcaagctacacatagaggagccgtgagcaactctctgatgctgtgtatcctaaagttggcttccc

SEQ ID NO: 462325 - DNA, 328 bp, Homo sapiens
gttaatttaaaaaaatattgattttgtaacttgtttattttttaaaaaatgcaaaatattctggaatgctattacatcaagaacttagagctttaaattatatataaatcctgttcatatgtatttgtttatgtgtgtgcctcctaagtatagtaccaagtttcataaactagtatttctgtactcttatttttctatctcagctttcccaaactcagaagcaaaccctctaaatgcctattatttgaaatgtcttgaaaacctcgtgcagctccttaattcttcctgagtgccatgggatgctacaccttgaagctgacagtcatca

SEQ ID NO: 462326 - DNA, 346 bp, Homo sapiens
cctgagtgccatgggatgctacaccttgaagctgacagtcatcaacaggggagctaaagttgaagccagctgtgtgtagcagctgttacctgaagacgtgctacctctctacaaagtgttgatccccttctttcccatgagagagagaactggtgatactccaacaccgtccagttgtggcagctctccagaagtaatagcagctgacaactttctgtgccttttcctttctgttgaaaaggcatagaaagttctgggaacataaacatttttacccttttctatgccatttattttgtaaaaatcctatttaacagttatttaataaaacaatatttttagaaac

SEQ ID NO: 462327 - DNA, 997 bp, Homo sapiens
aattaggtaggtacgggctggggcgaatcggccgaggtgccactggagaacaccacggttcagcagatggtttttatgcttctttcaaacctggccttgtcgcatgactgtaaaggagtaattcagaagagtaacttcttacagaacttcctctctctagcattgccaaaaggaggaaataaacatctaagtaatctgactattctttggttgaagttactcctgaatatatcatctggagaagatgggcaacaaatgattctgaggcttgatggctgtctagacttactaacagagatgagcaaatacaagcacaagagcagccctttattgcctcttcttatctttcataatgtttgcttcagtcctgcaaataaacccaagatcctggctaatgaaaaagtcattactgtgcttgctgcctgtctggaaagtgagaatcaaaatgctcagaggattggagcagctgccctttgggctctgatttacaattatcagaaggcaaaaacagctttgaaaagcccatcagtaaaaagaagagtggatgaagcatactccttagcaaagaaaactttcccaaactcagaagcaaaccctctaaatgcctattatttgaaatgtcttgaaaacctcgtgcagctccttaattcttcctgagtgccatgggatgctacaccttgaagctgacagtcatcaacaggggagctaaagttgaagccagctgtgtgtagcagctgttacctgaagacgtgctacctctctacaaagtgttgatccccttctttcccatgagagagagaactggtgatactccaacaccgtccagttgtggcagctctccagaagtaatagcagctgacaactttctgtgccttttcctttctgttgaaaaggcatagaaagttctgggaacataaacatttttacccttttctatgccatttattttgtaaaaatcctatttaacagttatttaataaaacaatatttttagaaa

SEQ ID NO: 462328 - DNA, 912 bp, Homo sapiens
acgcgtccgcggacgcgtggtgccactggagaacaccacggttcagcagatggtttttatgcttctttcaaacctggccttgtcgcatgactgtaaaggagtaattcagaagagtaacttcttacagaacttcctctctctagcattgccaaaaggaggaaataaacatctaagtaatctgactattctttggttgaagttactcctgaatatatcatctggagaagatgggcaacaaatgattctgaggcttgatggctgtctagacttactaacagagatgagcaaatacaagcacaagagcagccctttattgcctcttcttatctttcataatgtttgcttcagtcctgcaaataaacccaagatcctggctaatgaaaaagtcattactgtgcttgctgcctgtctggaaagtgagaatcaaaatgctcagaggattggagcagctgccctttgggctctgatttacaattatcagaaggcaaaaacagctttgaaaagcccatcagtaaaaagaagagtggatgaagcatactccttagcaaagaaaactccttaattcttcctgagtgccatgggatgctacaccttgaagctgacagtcatcaacaggggagctaaagttgaagccagctgtgtgtagcagctgttacctgaagacgtgctacctctctacaaagtgttgatccccttctttcccatgagagagagaactggtgatactccaacaccgtccagttgtggcagctctccagaagtaatagcagctgacaactttctgtgccttttcctttctgttgaaaaggcatagaaagttctgggaacataaacatttttacccttttctatgccatttattttgtaaaaatcctatttaacagttatttaataaaacaatatttttagaaa

SEQ ID NO: 462329 - DNA, 1650 bp, Homo sapiens
aagcttactagaccatgcgtttggaggcgtcgggaccagtaaggtatagtagaactagtggtcataagctggtgtgtctctagtgagatcgcatggtctctgactgagtgcttggattctctacacaataaataaacgcgcacggcggccatccgagcggtacttgagcggaatccagcatggagttctgcatggtcatgacgtggcatctatctgcagtggagtccaacgcgaggtcggtatcaaattacagccccgcacactgtgctttgaaagccaatcttatagacaattgcatggagcagatgaaacacataaatgcacaactgaacctagattctctgaggcctgggaaagcagcattgaaaaaaaaggaggatggtgttattaaagagttaagcattgccatgcagctcctaagaaactgtctttatcaaaatgaggaatgtaaagaagcagctcttgaagctcaccttgtccctgtcttgcactctctctggccttggattttgatggatgattcattgatgcaaatttctctgcagctcctttgtgtctatactgcaaattttccaaatggttgcagttctctttgttggtcaagttgtggacaacaccctgttcaagctacacatagaggagccgtgagcaactctctgatgctgtgtatcctaaagttggcttcccagatgccactggagaacaccacggttcagcagatggtttttatgcttctttcaaacctggccttgtcgcatgactgtaaaggagtaattcagaagagtaacttcttacagaacttcctctctctagcattgccaaaaggaggaaataaacatctaagtaatctgactattctttggttgaagttactcctgaatatatcatctggagaagatgggcaacaaatgattctgaggcttgatggctgtctagacttactaacagagatgagcaaatacaagcacaagagcagccctttattgcctcttcttatctttcataatgtttgcttcagtcctgcaaataaacccaagatcctggctaatgaaaaagtcattactgtgcttgctgcctgtctggaaagtgagaatcaaaatgctcagaggattggagcagctgccctttgggctctgatttacaattatcagaaggcaaaaacagctttgaaaagcccatcagtaaaaagaagagtggatgaagcatactccttagcaaagaaaactttcccaaactcagaagcaaaccctctaaatgcctattatttgaaatgtcttgaaaacctcgtgcagctccttaattcttcctgagtgccatgggatgctacaccttgaagctgacagtcatcaacaggggagctaaagttgaagccagctgtgtgtagcagctgttacctgaagacgtgctacctctctacaaagtgttgatccccttctttcccatgagagagagaactggtgatactccaacaccgtccagttgtggcagctctccagaagtaatagcagctgacaactttctgtgccttttcctttctgttgaaaaggcatagaaagttctgggaacataaacatttttacccttttctatgccatttattttgtaaaaatcctatttaacagttatttaataaaacaatatttttagaaa

SEQ ID NO: 462330 - DNA, 2336 bp, Homo sapiens
tttttgttactccatctcttctttcagcaatgtgcagcctcttggacaacctcttgacgattgctcccagagacactgcaaaggcttttcgacaagctcatctcatagaacttctctgtagcattgcagatgctaccctcatacagacatgtgtccaggaactcagagccctgctgccttcatcacctccagctgaacacactcaggctcaggtttcctttctcctggaatacctatcctctttgtccaggcttctgcagtcatgtttattggtggagcctgaccttgtgattcaggatgagcttgtgaaacctcttatcaccaatatcattggaattctcaccatatgtaccaaagatgtattagataaagagttaatatcagctttttatcacacatggacacatttatttaatcttctggccatgctcctgaggaaagctggtgccatcacactcccgtctgttaccgtggccctggccaagcactggacagcggcgattgatatgttctgcacatgtgcaggcttgtctgccacgtgtcctgccctgtatactgccagcttgcaattcctttctgttctcttgaccgaagaagcaaaagggcatctccaggctaagagcaaaacacatttatgctgtagtccaacagtggcttcacttcttgatgactctcaggaaaatcagaaatctctagaacaacttagtgatgtaatccttcagtgctatgaagggaaatcctccaaagatatcctgaaaagagtagctgcaaatgcattgatgtcactgctggctgtcagtagaagagcacagaaacatgctttgaaagccaatcttatagacaattgcatggagcagatgaaacacataaatgcacaactgaacctagattctctgaggcctgggaaagcagcattgaaaaaaaaggaggatggtgttattaaagagttaagcattgccatgcagctcctaagaaactgtctttatcaaaatgaggaatgtaaagaagcagctcttgaagctcaccttgtccctgtcttgcactctctctggccttggattttgatggatgattcattgatgcaaatttctctgcagctcctttgtgtctatactgcaaattttccaaatggttgcagttctctttgttggtcaagttgtggacaacaccctgttcaagctacacatagaggagccgtgagcaactctctgatgctgtgtatcctaaagttggcttcccagatgccactggagaacaccacggttcagcagatggtttttatgcttctttcaaacctggccttgtcgcatgactgtaaaggagtaattcagaagagtaacttcttacagaacttcctctctctagcattgccaaaaggaggaaataaacatctaagtaatctgactattctttggttgaagttactcctgaatatatcatctggagaagatgggcaacaaatgattctgaggcttgatggctgtctagacttactaacagagatgagcaaatacaagcacaagagcagccctttattgcctcttcttatctttcataatgtttgcttcagtcctgcaaataaacccaagatcctggctaatgaaaaagtcattactgtgcttgctgcctgtctggaaagtgagaatcaaaatgctcagaggattggagcagctgccctttgggctctgatttacaattatcagaaggcaaaaacagctttgaaaagcccatcagtaaaaagaagagtggatgaagcatactccttagcaaagaaaactccttaattcttcctgagtgccatgggatgctacaccttgaagctgacagtcatcaacaggggagctaaagttgaagccagctgtgtgtagcagctgttacctgaagacgtgctacctctctacaaagtgttgatccccttctttcccatgagagagagaactggtgatactccaacaccgtccagttgtggcagctctccagaagtaatagcagctgacaactttctgtgccttttcctttctgttgaaaaggcatagaaagttctgggaacataaacatttttacccttttctatgccatttattttgtaaaaatcctatttaacagttatttaataaaacaatatttttagaaaaaaaaaaaaaaaaaaaaacaagaaaaaggggggggcataaaatatcctggaggggacaaattagcgtaccagttttgagaaggggccatgggggggaaaagcgggaggggtaaaggggctggaacgatcgggcttgaggccctcggggacatggaccacggaaacggaacatatgttgtgagttcgggatgggttatacagg

SEQ ID NO: 462331 - DNA, 1076 bp, Homo sapiens
cagggttccaccatgttttctgtgcacgagcaatctgcccaccttggcctcccaaagccaaagggaagctggcaggatctatctgatggagcgatttggcaactctggagtctatgggaggcctgctgctgccagggggaagcctggaagatacattgtaatcagtgccagttcccattagctctttgtttcccacccccaccctctctgtgcccccctcaggccagagtcacagcggtggaaaggcttctaaggagagcactctcacatctggacccagccaattggagagatgttgatgtgggcttatggccacagattgtaactattctgccttgccccctgcctgcaaagggcattgtgacacacctctgtgaacatcacaaaggtgatgtgactctcttccaaaatgggattgtggccaggtgcagtggctcatgcctgtaatcccagcactttgggaggctgagtcgaggggatcatctgaggtcaggagttcgaggccagcctggccaacatggtgaaatcccgtctctattaaaaatacaaaaattagccaggtgtggtggtgcacacttgtaatcccagctacttgggaggctgaggcaggagaatcacttgaacccttgaggcagaggttgcagtgagctgagatcacgccattgcactccagcctgggcaacgagagtgaaactctgtctcaaaaaacaaaaaacaaaaaaagctccaaaaaaccaaaatgagattgtgacatatcactggaccgagcaccttggtgatgtgactatcctctcttgcttgagtttcacatattattgttactgtgacatacctctgtgacaaacagctatgggaaagattgtggcatattactgaactaagcaacctagtgacgtgtctcttctgactggggcttgcccacagagacaactgtgacatagcactgagcccaggacccaggtgatgtgactctgctgcctgtttccaacattcatgagaggatggtaactatcccttgccaagaactcaggtgatttgactgtcctgccttgttgctgccctcagagaagattgtg

SEQ ID NO: 462332 - DNA, 601 bp, Homo sapiens
ccattgtgattattacacattgtatgcctacatcaaaatatcccatataccccataaatatatgtacctataaattaacttgtgaattcaacaacaaccatgagtcactcgacgaggagctgcacctcctcatcatatcctgcaggaagttgttttacttcaaaatctgggctttccttgatgttagttttgtggagcggatcctgaagagtcagaaagaacggcagtgtgccctgcgtgtattcaaggcgagaatttatacaaacagatatgagacgaatgaagaggacaagaccctgcaggaaatttacaggaagtacagaaagctgatcgaatcagagcttagctattttgtcatcgtttactctgtgatgtaatgagcactctacagatgaagaaagctgggagcactttgaacttgaaaatcatttctcttagaactacacttgggcactgccggcccttttgctcctctctctcccctccactttttttttttgtcagctccatgacaacatgaccagctcagcaaaggctgagactgcccatgacctgaaggctccaggtggctttaaagcgctatgtttaccaactatcccgg

SEQ ID NO: 462333 - DNA, 812 bp, Homo sapiens
gaaaccagctgctgaaagctggcggggtgggtctcagacttcaggtggcataataaaataagaaggaatgactcatgctgggacaccgatggcccgtgaaaacatcatgctaggtgaagggagccggagatgaaaggccacattcggatgtctgcctgagccccaccccgaatgccagcccttcttccctgagctcacccagccccagctccaggactgagagccccaggaagcttggagaggtgtgagagagacaggtgtccagcctcagccccgatccttcacctgcagagcccggcatgtggggctacctgtcgctgatgcctgtcttcctagctgtctgggctatctctggcgtctggatcgtttttgccattgcagtgaccaacaggactgtggacctcagtaaaggctttccctacatcagcatctgcggatccttcccccctcagagctgcatcttcagccaggtgctcaatatgggagctgctctggccgcgtggatctgcattgtccgttaccaccagctccgggactggggcgtcagaaggtggcctaaccagctgatcctatggacgggtcttctgtgtgccctgggcacctccgtggtaggcaatttccaggtgagacccagtcggcgcccagggtctgtcccggccggcgtctggaactacaactcccagcatgccccgtggccataggcttattgtctcgggggctggttcccgcccggccctcctgggacttgtatttttctctggccagtggccttggaccggctggattcctttgctctctgagtggggcactac

SEQ ID NO: 462334 - DNA, 1633 bp, Homo sapiens
tgagctccagaaagttctattttgggtcagagatctcaattataaattaatgacagctatgagctctctccctgggatatttcctggctggcatctgagctatgtcgatgtgaaggacaactcccgcgacgagaccttccacttccagtgtgactgctggctctccaagagtgagggtgacgggcagacggtccgcgactttgcctgtgccaacaacaagatctgtgatgagctggaagagaccacctacgagatcgtcatagaaacgggcaacggaggcgaaaccagggagaacgtctggctcatcctggagggcaggaagaaccgatccaaagagtttctcatggaaaattcttctaggcagcgggcctttaggaaggggaccacagacacgtttgagtttgacagcatctacttgggggacattgcctccctctgtgtgggccaccttgccagggaagaccggtttatccccaagagagaacttgcctggcatgtcaagaccatcaccatcaccgagatggagtacggcaatgtgtacttctttaactgtgactgcctcatccccctcaagaggaagaggaagtacttcaaggtattcgaggttaccaagacgacagagagctttgccagcaaggtccagagcctggtgcccgtcaagtacgaagtcatcgtgacaacaggctatgagccaggggcaggcactgatgccaacgtcttcgtgaccatctttggggccaacggagacacaggcaagcgggagctgaagcagaaaatgcgcaacctcttcgagcggggcagcacagaccgcttcttcctggagacgctggagctggtagtgaccaggctgggacttgctgcagagtgtggatgagaaattgagtcttcacccaggggatagaagtggagaagcagaggccatcaagatggtgtattttaagcaaaaactaattaacacttttccccaaaaaagctaggctaattaaattattaccaaccatatcctataaagaactcatcttagcatctgcttgctaagaagtgtatacttttccccagtttcaataaacccagtggcaagtggagaaaaacctcaggaagaagtgttttgccgggggatttatgagcctgtgaaaagtagataattctttccatcactttacagagaacgcattggcaagtgcctgctggttatcccagcctgtgctaacacagtcaggactggacacaaaggtgatagggatggcacctgcaacagcctggtcactggcactctaaggccgggagagaaagcagggtcattgaggttatttggtgattatcacctgtggctctctgtgggcaaggtttggactgagagctgagaggggcttgggaacaaagtgaagacctggtctttaccctcaaggggaatgtgaccttgatggagaggcagcaggagaactgtacatttgagtacccacacagattcacacatgcacacacactctccctgatcggcagtcacaaagtcacagcaagacttcgcagagctcagcacctaacttctgattttcctgtagagaaaaggacagcaacaaggatagacagtttgtgctgaaatgccacctctcctctggccaagcctctcatt

SEQ ID NO: 462335 - DNA, 1837 bp, Homo sapiens
ccgcaaatcaccactcaacataaaatcacaactcctccgggggctgcggggagacggccccacccccttcccgcgggggcgggggcgcgggcgcgggcgcgggcggccgtactcggaggaatacggcggcggcggcggcggggctgggcggtttcccgccgcgggtgaatgagtccgactgcgctgccgccgccgccgccgcccgcatcgaagctccggccgcgtcccccgcgccagccccgggagcctgcgcgccgagacccctgcgtgtctgcgaacagacctccggcctcgggccatcaccccgggcagacgctgcagcccctgtccgggcctcttgcctgccgcccccatgagaaaaaccaacatgtggttcttggagcggcttcgggggtctggggaaaacggtgctgcccggggcgtggggagtgaggcgggggacaaggcctccaaggggcccctgtacagcaatgtgttgacgcccgacaagatccccgactttttcatcccccccaagctgccctcgggccccgcggagggcgagggacaggccgcgctgggcccctccacgtcggaacagaacctggcctctgcggccccccgccagaccccacggagcccccggctgcctgccaagctggcagccgagagcaagagcctgctgaaggcagccacccggcacgtgatccagatcgagagtgccgaggactggctgtccgaggaggccactgacgccgacccccaggcccagggtgccatgtccctgccctcggtgcccaaggcccagacgtcctacggcttcgccatgctggctgagagcccccacacgaggcgcaaggagtctctgttccacagtgagcacggggctctggcccaggtgggctccccaggggccgggcgccgccgggcagctgccaaggccaacgggggtgatgggggccccagggaggctggcggggccctcatgagccccggccgctacttcagtggcggggagagcgacacagggtcctcggccgagtcctcccccttcgggtcccctctgctgtcccgctccgtgtctctgctcaaaggtttcgcccaggacagccaggccaaggtgagccagctccggcactccgtgggccgccacggctccctgtctgcggacgacagcaccccggacgccagccccgggagccggcgccgcctgacccgccgggcacccccggaacctggccccgagtcgggccaggcgcgtggggagcacacggtccacgtgggccctcggggcagcgtgcggctgctggccgagtacgaggccggccaggcccgcctgcgggtgcacctgctggccgccgagggcctctacgaccgcctgtgcgacgcccgcagcatcaactgctgcgtgggcctgtgcctggtgccgggcaagctgcagaagcagcgcagcaccatcgtgaagaacagccgccgccccgtcttcaacgaggatttcttcttcgacggcctggggcccgccagcgtccggaaactggccctcaggatcaaggtggtgaacaagggcagcagcctcaagcgggacacgctgctcggggagaaggagctgcccctgacctccctgctccccttcctccccagccactcatcgctaggctgcacgggtgtgtgcgtgtgcgtgccaggtgagcgcctgcaggcactcgagtatagctgcctgtgtgctggcgtgtgcacgtgtaagcacaacgaatctactgtttgcacctccagcatccctggcgccacagagcgctcggccccagtgggtgctgtgcggtgaaggaggcaggcacacctgccagcagtctctcctttc

SEQ ID NO: 462336 - DNA, 446 bp, Homo sapiens
agcagttatacagactcaaaagagcgcaactagggttgccacacacgccaagtggaggagaagagcctgctgtgtgcgcgcacctgacagtcaccggcttctctttacgtttccaataggaagcgcacactacgctgtgggaacaaaaacaccaggtgtctgctatggccaaggcagataaggtctttctctccaacaggatccagagatgagccactggtactaacacccaacggctgatgaatacgtctgctgagggacacgttctacaaaacaatgaagtttgctgcatcaactgcattttcctttcatgaaaaatttctctgtaccatgcagtggtgtttgacagcatgttacccacagtagaattactttcaaaatctgagtcaatcttctcaaaccctgccgctgctttatcaactaagtatgcactactgtaaatcttt

SEQ ID NO: 462337 - DNA, 898 bp, Homo sapiens
cttcgtaacttccgtgttggttggaaataggttcattctttgttttgaaaaggagtcaagcgcagtggtgagaaggggaagaggagagcaggcggttccagtgcgacccaacggcagccagaggccgccctgccccgccgggccagaagcggactcggtgcagacatgcagctctctccgtggaatgtgcatgtgcacggagtagagacgggatttcaccatgttagccaagatggtctccatctcctgaccttagttaactaccacactcaaaagaggcaagtaagatcaaatttagtgaggagttcaggcagcgatggagactttggcactgagggccagagcgtgaagtctccctgccaggatctcattagtatacatgagaggtgcatatctcagggactacctgcagcggtgctcgctatccttgaccaagctggagaacaagagttgtctttacttgtgtttccttttagcgcaactagggttgccacacacgccaagtggaggagaagagcctgctgtgtgcgcgcacctgacagtcaccggcttctctttacgtttccaataggaagcgcacactacgctgtgggaacaaaaacaccaggtgtctgctatggccaaggcagataaggtctttctctccaacaggatccagagatgagccactggtactaacacccaacggctgatgaatacgtctgctgagggacacgttctacaaaacaatgaagtttgctgcatcaactgcattttcctttcatgaaaaatttctctgtaccatgcagtggtgtttgacagcatgttacccacagtagaattactttcaaaatctgagtcaatcttctcaaaccctgccgctgctttatcaactaagtatgcactactgtaaatcttt

SEQ ID NO: 462338 - DNA, 2119 bp, Homo sapiens
agtgggcagaggcaagaggctagcggctggaccacttgtgctggagtggtaaagaactatcatgaatccatttactgaaagtgtccatttctgaactcaccctaaagaggacaaacaccgcaaagtagttaaaagtcaggcattcgcgtcggacgtctgggtttgaattctgccctggcttgactggaaacgcttcccctatttcttccgtagcggaccgggagagcttactggcgctctgcgaaccggctggaaagaaacaccgagtcactcgtacagactcttggtcgcagaacttggctttccgctattggtcctccagaaccgcttgaaacaactggccccagctggcgcatcagaccgcagtgaggaatgccgcggggcgggtggcgaaggcagggtctgcccgccagtggattcccgggtgtcccgcgtggagcaggcttgcccagctgggaagcccatcaaacctcagtcttggcccacagtgggagagagaccagtgggtcccagacggaggccctcgcccgcttttggcgacctccactggcgtgaataaaagcacccctctcttaccctcagaaactgtgggtagcaaggtataaaacggagtctgggaccggtaagtcccaaggtgagcccgtatacagctctgccatctctgaggggttatgcagattctgagcaggtgtcaggggctcatgtcagaggagtgcgggcggactacagccctggcggccgggaggactcgcaaaggcgccggggaagagggactggtgagccccgagggagcgggggacgaggactcgtgctcctcctcggccccgctgtccccgtcgtcctcgccccggtccatggcctcgggctccggctgccctcctggcaagtgtgtgtgcaacagttgcggcctggagatcgtggacaaataccttctcaaggtgaatgacctatgctggcatgtccggtgtctctcctgcagtgtttgcagaacctccctaggaaggcacaccagctgttatattaaagacaaagacattttctgcaaacttgattatttcagaaggtatggaactcgctgctctcgatgtgggagacacatccattctactgactgggtccggagagccaaggggaatgtctatcacttggcatgctttgcctgcttttcctgcaaaaggcaactttccacaggagaggagtttgctttggtggaagagaaagtcctctgcagagtacattatgactgcatgctggataatttaaaaagagaagtagaaaatgggaatgggattagtgtggaaggtgccctcctcacagagcaagatgttaaccatccaaaaccagcaaaaagagctcggaccagctttacagcagatcagcttcaggttatgcaagcacaatttgctcaggacaacaacccagatgcacagacactccagaaattggcagaaaggacaggcttgagcagacgtgtgatacaggtgtggtttcagaattgtagagcacgccacaagaaacacgtcagtcctaatcactcatcctccaccccagtcacagcagtcccaccctccaggctgtctccacccatgttagaagaaatggcttattctgcctacgtgccccaagatggaacgatgttaactgcgctgcatagttatatggatgctcattcaccaacaactcttggactccagcccttgttaccccattcaatgacacaactgccaataagtcatacctaattcttttttcagggatagacttgattaaggatataaatttgtcatttattatgtataaaataccattgaaaagatattactgttaattttttatttaacacctaaagcatttccaacatcactttgctgcccaggtatgtatctatagttggcctgcaagacacttttattaattcttcattttttgtaaaacttatgtttacaagaagaaaacaaatcaaaacattttttgtattgtctggaaatagttcactctagtgtgtatctgttaatttatttgtcatcaaaagagcactttgcctaaaagaaaggactgacaagtgtgcaaaatgtttacaatcttttgtgaaattgtagtttatcattagtttgtatct

SEQ ID NO: 462339 - DNA, 1508 bp, Homo sapiens
aaaagctcacttaacctgagacatggagactgtaatttgggagatgaagcctcgagcctaaggcgctctcaggtccattgtcaggggctcatgtcagaggagtgcgggcggactacagccctggcggccgggaggactcgcaaaggcgccggggaagagggactggtgagccccgagggagcgggggacgaggactcgtgctcctcctcggccccgctgtccccgtcgtcctcgccccggtccatggcctcgggctccggctgccctcctggcaagtgtgtgtgcaacagttgcggcctggagatcgtggacaaataccttctcaaggtgaatgacctatgctggcatgtccggtgtctctcctgcagtgtttgcagaacctccctaggaaggcacaccagctgttatattaaagacaaagacattttctgcaaacttgattatttcagaaggtatggaactcgctgctctcgatgtgggagacacatccattctactgactgggtccggagagccaaggggaatgtctatcacttggcatgctttgcctgcttttcctgcaaaaggcaactttccacaggagaggagtttgctttggtggaagagaaagtcctctgcagagtacattatgactgcatgctggataatttaaaaagagaagtagaaaatgggaatgggattagtgtggaaggtgccctcctcacagagcaagatgttaaccatccaaaaccagcaaaaagagctcggaccagctttacagcagatcagcttcaggttatgcaagcacaatttgctcaggacaacaacccagatgcacagacactccagaaattggcagaaaggacaggcttgagcagacgtgtgatacaggtgtggtttcagaattgtagagcacgccacaagaaacacgtcagtcctaatcactcatcctccaccccagtcacagcagtcccaccctccaggctgtctccacccatgttagaagaaatggcttattctgcctacgtgccccaagatggaacgatgttaactgcgctgcatagttatatggatgctcattcaccaacaactcttggactccagcccttgttaccccattcaatgacacaactgccaataagtcatacctaattcttttttcagggatagacttgattaaggatataaatttgtcatttattatgtataaaataccattgaaaagatattactgttaattttttatttaacacctaaagcatttccaacatcactttgctgcccaggtatgtatctatagttggcctgcaagacacttttattaattcttcattttttgtaaaacttatgtttacaagaagaaaacaaatcaaaacattttttgtattgtctggaaatagttcactctagtgtgtatctgttaatttatttgtcatcaaaagagcactttgcctaaaagaaaggactgacaagtgtgcaaaatgtttacaatcttttgtgaaattgtagtttatcattagtttgtatct

SEQ ID NO: 462340 - DNA, 3786 bp, Homo sapiens
ctccggcagcgcccagccccgccctccggccgctccccgcggtccctccagaccctctggccgccgcctcctcttggaaccccgtgcgccccccgcgccccgcgccccggacgccatgaagcagctgtgtctgtgcgcagccgcctccttcgcgagtcaagactggggcaagagtgacgagaggctgctacaagccgtggaaaacaacgatgcacctcgggtggccgccctcatcgcccgcaaggggctggtgcccacgaagctagaccccgagggcaagtccgcgttccacctggcggccatgcggggtgcggccagctgtctggaggtgatgatagctcatggcagcaatgtcatgagcgcggacggggcaggttacaatgccctccacctggccgccaaatacgggcacccacagtgcttgaagcaactactgcaggcttcctgcgtggtggacgtcgtggacagcagcgggtggactgccctacaccatgcagcggctggtggctgtctctcctgctcagaggtgctctgctcctttaaggcacatctaaacccccaagatcggtcaggcgcaacacccctcattatagcagctcagatgtgtcacacagacctgtgccgtctcctactgcagcaaggggctgccgcgaacgatcaggacctgcaaggcaggacggccctgatgctggcctgtgagggggccagccccgaaacagtggaggtcctgctgcagggcggagcccagccgggcatcaccgatgcgctggggcaggacgcggctcactatggcgccctggcgggggacaaactcatcctgcaccttctgcaagaggcggcccagcgcccctccccacccagcgccctcacagaggatgattcaggcgaggcgtcatctcagaactctatgtccagccatggaaagcagggggcccccaagaagcggaaggcgcctccacctcccgccagcattcccatgccggatgatcgagatgcctatgaggagatcgtgaggctgcggcaggagaggggccgcctcctgcagaagatccggggcctggaacagcacaaggaacagaggcagcaggagtccccggaggccagctccctgcacatcctggagagacaggtgcaagagctacagcagttgctggtggagagacaagaggagaaggagagcctgggacgggaggtggagagtttgcagagccggctgtccctgctggagaacgagcgggagaatactagctatgacgtaaccaccctgcaggatgaggagggtgagctgcctgaccttccaggggccgaggtgctgctgtccagacaactcagtccgtcggcccaggaacacctggcctcgctgcaggaacaggtggctgtgctcaccagacagaaccaggaactgatggagaaggtccagatcctggagaactttgagaaggacgagacacagatggaagtggaagctttggcagaggtcatccctcttgccctctatgactctctccgggccgagtttgaccagctacgcaggcagcacgctgaggccctgcaggccctgaggcagcaggagacacgagaggtccccagagaagagggggcagcctgtggggagagtgaggttgctggagccacggccaccaaaaacgggccaacccacatggagctaaatggctcagtggctccagaaaccaaagttaacggagccgagaccatagatgaggaggctgcaggagatgaaaccatggaagccaggactatggaagctgaggccacgggagccgaggccacgggagctgaggccacaggagccaaggtcacagaaacaaaacccacaggggctgaggtcagagaaatggagaccacagaagaagaagcaaacatggaaactaagcccacaggagctcaggccacagacacagagaccacgggagtggaggccatgggggtggaggccacaaaaacaaaagcagaggaagcagaaatgcaggcctacggagtgggtgctgggcaagcagagcccccagtcacagggaccacaaacatggaggccacgggctctagggccacagggatggaatccacaggagtcagtgccacaggtgtggagaacccaggggtagaggccacggtcccggggatctctgctggccccatcctacatcctggtgccgcagaggcctcggaaaagcttcaagtagagctggagaccaggatccgtggcttggaggaggctctccggcagcgggagcgggaggcagctgcggagctggaggcggccctggggaagtgcgaggccgcggaggccgaggcaggccggctgcgagagcgtgtccgcgaggccgagggcagcggggccagcgggggcggtggcggtgacaccacacagctgcgggcggccctggagcaggcccgggaggacctccgagaccgggactcccgcctgcgggagctggaggcggcctcggcctgcctggatgaggctcgggccagccggctgctggcggaggaggaggcgcggggcctgcgggccgagctggcccagcgggaggaggcgcggctggagcagagccgggagctggaggttctgcgggagcagctggccacggccagggccacgggggagcagcagcgcacggcggccgcggaactgggccgggcacgggacgccgctgaggcccgagtggctgagctgcctgcggcctgcgaggaggcgcggcagggcctggccgagctgcgggaggcctccgaggccctccgccagtccgtggtgccggcctctgagcaccgccggctgcaggaggaggccctggagctgcggggccgggcagccagtctggagcaggaggtggtggccacgggcaaggaggccgcccggctgcgcgcggagctggagcgggagcgtgtgtgcagcgtggcgctctcggagcacgaacgcatcgtgggcaccctgcaggccaacgtggcccagctggaggggcagctggaggagctgggacggcggcatgagaagaccagcgcagaggtcttccaggtgcagcgtgaggccctgttcatgaagagtgagcgacacgcagccgaggcacagctggccacagcagagcagcagctacgggggctacggaccgaggcggaaagggctcgccaggcccagagccgggcccaggaggctctggacaaggccaaggagaaggacaagaagatcacagaactctccaaagaagtcttcaatcttaaggaagccttgaaggagcagccggccgccctcgccacccctgaggtggaggctctccgtgaccaggtgaaggatttacagcagcagctgcaggaagctgccagggaccactccagcgtggtggctttgtacagaagccacctcctatatgccattcagggccagatggatgaagatgtgcagcggattctcagccagattctgcagatgcagagactccaggctcagggccgctgagaaaggccaggcccagtggctacactgaccacacccacgcagggacctcacccccctgcaggccccttgcagaccggcttcacttggcttcacttggccctatccaggcccatgcacttggagaccagcctggttccctgcccgaccacccccagctggctccatcaccccacctggtctctgcacgcacacactggtcagtctggacccgggccgtgactgcccctcccccaccaccggagactgtgattccctgtgtcctccacatccagacgccagcccaggaataaaggcattctgtgcacagggccaac

SEQ ID NO: 462341 - DNA, 3674 bp, Homo sapiens
ccaactatgaagactctcagggcgcgatttaagaagacagagagtcaagactggggcaagagtgacgagaggctgctacaagccgtggaaaacaacgatgcacctcgggtggccgccctcatcgcccgcaaggggctggtgcccacgaagctagaccccgagggcaagtccgcgttccacctggcggccatgcggggtgcggccagctgtctggaggtgatgatagctcatggcagcaatgtcatgagcgcggacggggcaggttacaatgccctccacctggccgccaaatacgggcacccacagtgcttgaagcaactactgcaggcttcctgcgtggtggacgtcgtggacagcagcgggtggactgccctacaccatgcagcggctggtggctgtctctcctgctcagaggtgctctgctcctttaaggcacatctaaacccccaagatcggtcaggcgcaacacccctcattatagcagctcagatgtgtcacacagacctgtgccgtctcctactgcagcaaggggctgccgcgaacgatcaggacctgcaaggcaggacggccctgatgctggcctgtgagggggccagccccgaaacagtggaggtcctgctgcagggcggagcccagccgggcatcaccgatgcgctggggcaggacgcggctcactatggcgccctggcgggggacaaactcatcctgcaccttctgcaagaggcggcccagcgcccctccccacccagcgccctcacagaggatgattcaggcgaggcgtcatctcagaactctatgtccagccatggaaagcagggggcccccaagaagcggaaggcgcctccacctcccgccagcattcccatgccggatgatcgagatgcctatgaggagatcgtgaggctgcggcaggagaggggccgcctcctgcagaagatccggggcctggaacagcacaaggaacagaggcagcaggagtccccggaggccagctccctgcacatcctggagagacaggtgcaagagctacagcagttgctggtggagagacaagaggagaaggagagcctgggacgggaggtggagagtttgcagagccggctgtccctgctggagaacgagcgggagaatactagctatgacgtaaccaccctgcaggatgaggagggtgagctgcctgaccttccaggggccgaggtgctgctgtccagacaactcagtccgtcggcccaggaacacctggcctcgctgcaggaacaggtggctgtgctcaccagacagaaccaggaactgatggagaaggtccagatcctggagaactttgagaaggacgagacacagatggaagtggaagctttggcagaggtcatccctcttgccctctatgactctctccgggccgagtttgaccagctacgcaggcagcacgctgaggccctgcaggccctgaggcagcaggagacacgagaggtccccagagaagagggggcagcctgtggggagagtgaggttgctggagccacggccaccaaaaacgggccaacccacatggagctaaatggctcagtggctccagaaaccaaagttaacggagccgagaccatagatgaggaggctgcaggagatgaaaccatggaagccaggactatggaagctgaggccacgggagccgaggccacgggagctgaggccacaggagccaaggtcacagaaacaaaacccacaggggctgaggtcagagaaatggagaccacagaagaagaagcaaacatggaaactaagcccacaggagctcaggccacagacacagagaccacgggagtggaggccatgggggtggaggccacaaaaacaaaagcagaggaagcagaaatgcaggcctacggagtgggtgctgggcaagcagagcccccagtcacagggaccacaaacatggaggccacgggctctagggccacagggatggaatccacaggagtcagtgccacaggtgtggagaacccaggggtagaggccacggtcccggggatctctgctggccccatcctacatcctggtgccgcagaggcctcggaaaagcttcaagtagagctggagaccaggatccgtggcttggaggaggctctccggcagcgggagcgggaggcagctgcggagctggaggcggccctggggaagtgcgaggccgcggaggccgaggcaggccggctgcgagagcgtgtccgcgaggccgagggcagcggggccagcgggggcggtggcggtgacaccacacagctgcgggcggccctggagcaggcccgggaggacctccgagaccgggactcccgcctgcgggagctggaggcggcctcggcctgcctggatgaggctcgggccagccggctgctggcggaggaggaggcgcggggcctgcgggccgagctggcccagcgggaggaggcgcggctggagcagagccgggagctggaggttctgcgggagcagctggccacggccagggccacgggggagcagcagcgcacggcggccgcggaactgggccgggcacgggacgccgctgaggcccgagtggctgagctgcctgcggcctgcgaggaggcgcggcagggcctggccgagctgcgggaggcctccgaggccctccgccagtccgtggtgccggcctctgagcaccgccggctgcaggaggaggccctggagctgcggggccgggcagccagtctggagcaggaggtggtggccacgggcaaggaggccgcccggctgcgcgcggagctggagcgggagcgtgtgtgcagcgtggcgctctcggagcacgaacgcatcgtgggcaccctgcaggccaacgtggcccagctggaggggcagctggaggagctgggacggcggcatgagaagaccagcgcagaggtcttccaggtgcagcgtgaggccctgttcatgaagagtgagcgacacgcagccgaggcacagctggccacagcagagcagcagctacgggggctacggaccgaggcggaaagggctcgccaggcccagagccgggcccaggaggctctggacaaggccaaggagaaggacaagaagatcacagaactctccaaagaagtcttcaatcttaaggaagccttgaaggagcagccggccgccctcgccacccctgaggtggaggctctccgtgaccaggtgaaggatttacagcagcagctgcaggaagctgccagggaccactccagcgtggtggctttgtacagaagccacctcctatatgccattcagggccagatggatgaagatgtgcagcggattctcagccagattctgcagatgcagagactccaggctcagggccgctgagaaaggccaggcccagtggctacactgaccacacccacgcagggacctcacccccctgcaggccccttgcagaccggcttcacttggcttcacttggccctatccaggcccatgcacttggagaccagcctggttccctgcccgaccacccccagctggctccatcaccccacctggtctctgcacgcacacactggtcagtctggacccgggccgtgactgcccctcccccaccaccggagactgtgattccctgtgtcctccacatccagacgccagcccaggaataaaggcattctgtgcacagggccaac

SEQ ID NO: 462342 - DNA, 2909 bp, Homo sapiens
gctcagcctaactcccagaactggaactctatgtccagccatggaaagcagggggcccccaagaagcggaaggcgcctccacctcccgccagcattcccatgccggatgatcgagatgcctatgaggagatcgtgaggctgcggcaggagaggggccgcctcctgcagaagatccggggcctggaacagcacaaggaacagaggcagcaggagtccccggaggccagctccctgcacatcctggagagacaggtgcaagagctacagcagttgctggtggagagacaagaggagaaggagagcctgggacgggaggtggagagtttgcagagccggctgtccctgctggagaacgagcgggagaatactagctatgacgtaaccaccctgcaggatgaggagggtgagctgcctgaccttccaggggccgaggtgctgctgtccagacaactcagtccgtcggcccaggaacacctggcctcgctgcaggaacaggtggctgtgctcaccagacagaaccaggaactgatggagaaggtccagatcctggagaactttgagaaggacgagacacagatggaagtggaagctttggcagaggtcatccctcttgccctctatgactctctccgggccgagtttgaccagctacgcaggcagcacgctgaggccctgcaggccctgaggcagcaggagacacgagaggtccccagagaagagggggcagcctgtggggagagtgaggttgctggagccacggccaccaaaaacgggccaacccacatggagctaaatggctcagtggctccagaaaccaaagttaacggagccgagaccatagatgaggaggctgcaggagatgaaaccatggaagccaggactatggaagctgaggccacgggagccgaggccacgggagctgaggccacaggagccaaggtcacagaaacaaaacccacaggggctgaggtcagagaaatggagaccacagaagaagaagcaaacatggaaactaagcccacaggagctcaggccacagacacagagaccacgggagtggaggccatgggggtggaggccacaaaaacaaaagcagaggaagcagaaatgcaggcctacggagtgggtgctgggcaagcagagcccccagtcacagggaccacaaacatggaggccacgggctctagggccacagggatggaatccacaggagtcagtgccacaggtgtggagaacccaggggtagaggccacggtcccggggatctctgctggccccatcctacatcctggtgccgcagaggcctcggaaaagcttcaagtagagctggagaccaggatccgtggcttggaggaggctctccggcagcgggagcgggaggcagctgcggagctggaggcggccctggggaagtgcgaggccgcggaggccgaggcaggccggctgcgagagcgtgtccgcgaggccgagggcagcggggccagcgggggcggtggcggtgacaccacacagctgcgggcggccctggagcaggcccgggaggacctccgagaccgggactcccgcctgcgggagctggaggcggcctcggcctgcctggatgaggctcgggccagccggctgctggcggaggaggaggcgcggggcctgcgggccgagctggcccagcgggaggaggcgcggctggagcagagccgggagctggaggttctgcgggagcagctggccacggccagggccacgggggagcagcagcgcacggcggccgcggaactgggccgggcacgggacgccgctgaggcccgagtggctgagctgcctgcggcctgcgaggaggcgcggcagggcctggccgagctgcgggaggcctccgaggccctccgccagtccgtggtgccggcctctgagcaccgccggctgcaggaggaggccctggagctgcggggccgggcagccagtctggagcaggaggtggtggccacgggcaaggaggccgcccggctgcgcgcggagctggagcgggagcgtgtgtgcagcgtggcgctctcggagcacgaacgcatcgtgggcaccctgcaggccaacgtggcccagctggaggggcagctggaggagctgggacggcggcatgagaagaccagcgcagaggtcttccaggtgcagcgtgaggccctgttcatgaagagtgagcgacacgcagccgaggcacagctggccacagcagagcagcagctacgggggctacggaccgaggcggaaagggctcgccaggcccagagccgggcccaggaggctctggacaaggccaaggagaaggacaagaagatcacagaactctccaaagaagtcttcaatcttaaggaagccttgaaggagcagccggccgccctcgccacccctgaggtggaggctctccgtgaccaggtgaaggatttacagcagcagctgcaggaagctgccagggaccactccagcgtggtggctttgtacagaagccacctcctatatgccattcagggccagatggatgaagatgtgcagcggattctcagccagattctgcagatgcagagactccaggctcagggccgctgagaaaggccaggcccagtggctacactgaccacacccacgcagggacctcacccccctgcaggccccttgcagaccggcttcacttggcttcacttggccctatccaggcccatgcacttggagaccagcctggttccctgcccgaccacccccagctggctccatcaccccacctggtctctgcacgcacacactggtcagtctggacccgggccgtgactgcccctcccccaccaccggagactgtgattccctgtgtcctccacatccagacgccagcccaggaataaaggcattctgtgcacagggccaac

SEQ ID NO: 462343 - DNA, 3755 bp, Homo sapiens
ctccggcagcgcccagccccgccctccggccgctccccgcggtccctccagaccctctggccgccgcctcctcttggaaccccgtgcgccccccgcgccccgcgccccggacgccatgaagcagctgtgtctgtgcgcagccgcctccttcgcgagtcaagactggggcaagagtgacgagaggctgctacaagccgtggaaaacaacgatgcacctcgggtggccgccctcatcgcccgcaaggggctggtgcccacgaagctagaccccgagggcaagtccgcgttccacctggcggccatgcggggtgcggccagctgtctggaggtgatgatagctcatggcagcaatgtcatgagcgcggacggggcaggttacaatgccctccacctggccgccaaatacgggcacccacagtgcttgaagcaactactgcagagacagggtctcactgtgttggcccagcggctggtggctgtctctcctgctcagaggtgctctgctcctttaaggcacatctaaacccccaagatcggtcaggcgcaacacccctcattatagcagctcagatgtgtcacacagacctgtgccgtctcctactgcagcaaggggctgccgcgaacgatcaggacctgcaaggcaggacggccctgatgctggcctgtgagggggccagccccgaaacagtggaggtcctgctgcagggcggagcccagccgggcatcaccgatgcgctggggcaggacgcggctcactatggcgccctggcgggggacaaactcatcctgcaccttctgcaagaggcggcccagcgcccctccccacccagcgccctcacagaggatgattcaggcgaggcgtcatctcagaactctatgtccagccatggaaagcagggggcccccaagaagcggaaggcgcctccacctcccgccagcattcccatgccggatgatcgagatgcctatgaggagatcgtgaggctgcggcaggagaggggccgcctcctgcagaagatccggggcctggaacagcacaaggaacagaggcagcaggagtccccggaggccagctccctgcacatcctggagagacaggtgcaagagctacagcagttgctggtggagagacaagaggagaaggagagcctgggacgggaggtggagagtttgcagagccggctgtccctgctggagaacgagcgggagaatactagctatgacgtaaccaccctgcaggatgaggagggtgagctgcctgaccttccaggggccgaggtgctgctgtccagacaactcagtccgtcggcccaggaacacctggcctcgctgcaggaacaggtggctgtgctcaccagacagaaccaggaactgatggagaaggtccagatcctggagaactttgagaaggacgagacacagatggaagtggaagctttggcagaggtcatccctcttgccctctatgactctctccgggccgagtttgaccagctacgcaggcagcacgctgaggccctgcaggccctgaggcagcaggagacacgagaggtccccagagaagagggggcagcctgtggggagagtgaggttgctggagccacggccaccaaaaacgggccaacccacatggagctaaatggctcagtggctccagaaaccaaagttaacggagccgagaccatagatgaggaggctgcaggagatgaaaccatggaagccaggactatggaagctgaggccacgggagccgaggccacgggagctgaggccacaggagccaaggtcacagaaacaaaacccacaggggctgaggtcagagaaatggagaccacagaagaagaagcaaacatggaaactaagcccacaggagctcaggccacagacacagagaccacgggagtggaggccatgggggtggaggccacaaaaacaaaagcagaggaagcagaaatgcaggcctacggagtgggtgctgggcaagcagagcccccagtcacagggaccacaaacatggaggccacgggctctagggccacagggatggaatccacaggagtcagtgccacaggtgtggagaacccaggggtagaggccacggtcccggggatctctgctggccccatcctacatcctggtgccgcagaggcctcggaaaagcttcaagtagagctggagaccaggatccgtggcttggaggaggctctccggcagcgggagcgggaggcagctgcggagctggaggcggccctggggaagtgcgaggccgcggaggccgaggcaggccggctgcgagagcgtgtccgcgaggccgagggcagcggggccagcgggggcggtggcggtgacaccacacagctgcgggcggccctggagcaggcccgggaggacctccgagaccgggactcccgcctgcgggagctggaggcggcctcggcctgcctggatgaggctcgggccagccggctgctggcggaggaggaggcgcggggcctgcgggccgagctggcccagcgggaggaggcgcggctggagcagagccgggagctggaggttctgcgggagcagctggccacggccagggccacgggggagcagcagcgcacggcggccgcggaactgggccgggcacgggacgccgctgaggcccgagtggctgagctgcctgcggcctgcgaggaggcgcggcagggcctggccgagctgcgggaggcctccgaggccctccgccagtccgtggtgccggcctctgagcaccgccggctgcaggaggaggccctggagctgcggggccgggcagccagtctggagcaggaggtggtggccacgggcaaggaggccgcccggctgcgcgcggagctggagcgggagcgtgtgtgcagcgtggcgctctcggagcacgaacgcatcgtgggcaccctgcaggccaacgtggcccagctggaggggcagctggaggagctgggacggcggcatgagaagaccagcgcagaggtcttccaggtgcagcgtgaggccctgttcatgaagagtgagcgacacgcagccgaggcacagctggccacagcagagcagcagctacgggggctacggaccgaggcggaaagggctcgccaggcccagagccgggcccaggaggctctggacaaggccaaggagaaggacaagaagatcacagaactctccaaagaagtcttcaatcttaaggaagccttgaaggagcagccggccgccctcgccacccctgaggtggaggctctccgtgaccaggtgaaggatttacagcagcagctgcaggaagctgccagggaccactccagcgtggtggctttgtacagaagccacctcctatatgccattcagggccagatggatgaagatgtgcagcggattctcagccagattctgcagatgcagagactccaggctcagggccgctgagaaaggccaggcccagtggctacactgaccacacccacgcagggacctcacccccctgcaggccccttgcagaccggcttcacttggcttcacttggccctatccaggcccatgcacttggagaccagcctggttccctgcccgaccacccccagctggctccatcaccccacctggtctctgcacgcacacactggtcagtctggacccgggccgtgactgcccctcccccaccaccggagactgtgattccctgtgtcctccacatccagacgccagcccaggaataaaggcattctgtgcacagggccaac

SEQ ID NO: 462344 - DNA, 589 bp, Homo sapiens
ccaactatgaagactctcagggcgcgatttaagaagacagagagtcaagactggggcaagagtgacgagaggctgctacaagccgtggaaaacaacgatgcacctcgggtggccgccctcatcgcccgcaaggggctggtgcccacgaagctagaccccgagggcaagtccgcgttccacctggcggccatgcggggtgcggccagctgtctggaggtgatgatagctcatggcagcaatgtcatgagcgcggacggggcaggttacaatgccctccacctggccgccaaatacgggcacccacagtgcttgaagcaactactgcaggcttcctgcgtggtggacgtcgtggacagcagcgggtggactgccctacaccatgcagcggctggtggctgtctctcctgctcagaggtgctctgctcctttaaggcacatctaaacccccaagatcggtcaggcgcaacacccctcattatagcagctcagatgtgtcacacagacctgtgccgtctcctactgcagcaaggggctgccgcgaacgatcaggacctgcaaggcaggtgagcatctcccctcccagccagtc

SEQ ID NO: 462345 - DNA, 1114 bp, Homo sapiens
aaagaaagatcatgtgggaatatttgactccgtacagtgtagtaattcctcttatgatggactcccctgaaaaattcatacagaacaagatcttcatccttgaagccatcattctcagtaaactaacacaggaacagaaaaccaaacacctcatgttccaaacaccacatgttcccactcgtaagtgggagttgaacaatgagaacacatggacacagggaggggaacatcacacactggggcctgtcaaggggtggaggaatattactagtgtaccatgttcatatatttcagacaccttcttagagacattgagattcctgacttggggttaccaatgccttgtggcctcagctgatagaatggacaaagtagaatgctcactctagaaatccatgggtggagtcgccagacctcatctggagttggtatctgggagagccaggagcgttattacgagctggtgtagaccagacaacctgaagactggttggagtggcagatgaaagcctgggaggcagcacgccatctggagctgtcgaaaaacacagatgaattagagcagagaaaactgtggagaacatatgctggatggaatcgaaatgctccatatactggaaaaactgttcctcaggatcaacaacaatgttaaacatggtccatttaatttaacattttcattcctgaactcctgtacttccttattgttcatttcaacacaattacattagtatttcagtcttaaaagccggcccccaaacagcaagacaaatgaatatgcagcacattcccacctgtacttctgtttatctaattgaaaacatggagggaatttagtgaagcaaatattaaagtacctttttcatttaactctttgttcaacagaccaaacaattgaacactgaagcagtccagatctcatattcttccccccgatatcatccattgctgccttaatcacaccactacatgtgaacacaatggctttcttttcctttctttttttttttggaggaagggaagttagctaaaattgtatttttctggaatgataaataaacatgaatggctgaatacagtgtattccagccttaatgctcacccatgaaaatat

SEQ ID NO: 462346 - DNA, 1275 bp, Homo sapiens
agcgggaaccgaggtgggggcttggtgaaggcacaccaggaagagcaggctgcgcctcaccctccagtggagacagagggcagacattctctttggagcacacctcaggctaaatggcaaaaccccaatctcaagtgaacatcatggaactaggggattgtctcacttctccagtggattgaggcagtgctccctctgttctctatgaaatgacggtgtggacaggggatgtggttggcgggggcactgactccaacatcttcatgaccctctacggcatcaacgggagcacagaggagatgcagctggacaaaaagaaagccaggtttgagcgggagcagaacgacaccttcatcatggagatcctagacattgctccattcaccaagatgcggatccggattgatggcctgggcagtcggccggagtggttcctggagaggatcctactgaagaacatgaacactggagacctgaccatgttctactatggagactggctgtcccagcggaagggcaagaagaccctggtgtgtgaaatgtgtgccgttatcgatgaggaagaaatgatggagtggacctcctacaccgtcgcagttaagaccagcgacatcctgggagcaggcactgatgccaacgtgttcatcatcatcttcggggagaacggggatagtgggacactggccctgaagcagtcggcaaactggaacaagtttgagcggaacaacacggacacattcaacttccctgacatgctgagcttgggccacctctgcaagctgagggtctggcacgacaacaaaggtagctcccactcaaggccagagccatttacaatatgagtgttttattcatgagggatgcttgacaagatggtccagattactatgcattccaaccccaattcacatcaataaaaggtagagagttgcggatccaagatcagagctcatctctgcttcctgcctgcaactccatcttatccaaatctgaactccacctaattaacccctttcttccctggatggcttcccctgttgctcccataccttctgtctcagcctgtttctcgggatgaaccttccagagtcctttcagccattcctgcctccatactgtacccttccttccaaaccatctaggaaagtaaaggctcatatatttgagaagaagattcaaaaagtaaaatcccaagatgtggtatgtcaattccctactccatagtttcctggacataaatttaatagaagaaacatgaggcctcatttgcttctc

SEQ ID NO: 462347 - DNA, 1253 bp, Homo sapiens
agcgggaaccgaggtgggggcttggtgaaggcacaccaggaagagcaggctgcgcctcaccctccagtggagacagagggcagacattctctttggagcacacctcaggctaaatggcaaaaccccaatctcaagtgaacatcatggaactaggggattgtctcacttctccagtggattgaggcagtgctccctctgttctctatgaaatgacggtgtggacaggggatgtggttggcgggggcactgactccaacatcttcatgaccctctacggcatcaacgggagcacagaggagatgcagctggacaaaaagaaagccaggtttgagcgggagcagaacgacaccttcatcatggagatcctagacattgctccattcaccaagatgcggatccggattgatggcctgggcagtcggccggagtggttcctggagaggatcctactgaagaacatgaacactggagacctgaccatgttctactatggagactggctgtcccagcggaagggcaagaagaccctggtgtgtgaaatgtgtgccgttatcgatgaggaagaaatgatggagtggacctcctacaccgtcgcagagcaggcactgatgccaacgtgttcatcatcatcttcggggagaacggggatagtgggacactggccctgaagcagtcggcaaactggaacaagtttgagcggaacaacacggacacattcaacttccctgacatgctgagcttgggccacctctgcaagctgagggtctggcacgacaacaaaggtagctcccactcaaggccagagccatttacaatatgagtgttttattcatgagggatgcttgacaagatggtccagattactatgcattccaaccccaattcacatcaataaaaggtagagagttgcggatccaagatcagagctcatctctgcttcctgcctgcaactccatcttatccaaatctgaactccacctaattaacccctttcttccctggatggcttcccctgttgctcccataccttctgtctcagcctgtttctcgggatgaaccttccagagtcctttcagccattcctgcctccatactgtacccttccttccaaaccatctaggaaagtaaaggctcatatatttgagaagaagattcaaaaagtaaaatcccaagatgtggtatgtcaattccctactccatagtttcctggacataaatttaatagaagaaacatgaggcctcatttgcttctc

SEQ ID NO: 462348 - DNA, 1200 bp, Homo sapiens
cagcagtagagtggtgataggaaagatggcatctgggatactgtgaatctctgagtctcacggtgcagccaatggtgtccacacaataccctccttaactgaaaaagcctggagggcaagaggttctctatgaaatgacggtgtggacaggggatgtggttggcgggggcactgactccaacatcttcatgaccctctacggcatcaacgggagcacagaggagatgcagctggacaaaaagaaagccaggtttgagcgggagcagaacgacaccttcatcatggagatcctagacattgctccattcaccaagatgcggatccggattgatggcctgggcagtcggccggagtggttcctggagaggatcctactgaagaacatgaacactggagacctgaccatgttctactatggagactggctgtcccagcggaagggcaagaagaccctggtgtgtgaaatgtgtgccgttatcgatgaggaagaaatgatggagtggacctcctacaccgtcgcagttaagaccagcgacatcctgggagcaggcactgatgccaacgtgttcatcatcatcttcggggagaacggggatagtgggacactggccctgaagcagtcggcaaactggaacaagtttgagcggaacaacacggacacattcaacttccctgacatgctgagcttgggccacctctgcaagctgagggtctggcacgacaacaaaggtagctcccactcaaggccagagccatttacaatatgagtgttttattcatgagggatgcttgacaagatggtccagattactatgcattccaaccccaattcacatcaataaaaggtagagagttgcggatccaagatcagagctcatctctgcttcctgcctgcaactccatcttatccaaatctgaactccacctaattaacccctttcttccctggatggcttcccctgttgctcccataccttctgtctcagcctgtttctcgggatgaaccttccagagtcctttcagccattcctgcctccatactgtacccttccttccaaaccatctaggaaagtaaaggctcatatatttgagaagaagattcaaaaagtaaaatcccaagatgtggtatgtcaattccctactccatagtttcctggacataaatttaatagaagaaacatgaggcctcatttgcttctc

SEQ ID NO: 462349 - DNA, 1234 bp, Homo sapiens
cagcatccgtttcacctgcagttgaagatccgtgaggtgcccagaagatcatgcagtcatcagtcccacggagcagcctgcgaggctgaggctcctcccactggaccgccccccaactggcaccactgctgcccctgcccctactctcagcctcacgtgactctcgggcagaagcagtggtggggcagccagggcagcgtcaagagtctgagccagctgcaggacaagttcgagcatcttaaaatgattcaacaggaggagataaggaagctcgaggaagagaaaaaacaactggaaggagaaatcatagatttttataaaatgaaagctgcctctgaagcactgcagactcagctgagcaccgatacaaagaaagacaaacatccatggtctaggaactttgttacgttaacacagcaagtgagtgttgcagcctggatccaaaaatcaggcctggtcgacctcaaagtccagattattgacctttctaccataatgtatggagttctcataattttagccacagcccagttggctggaccaatggatggagagaatcactcagtggtatctgagtttttgtttctgggactcactcattcatgggagatccagctcctcctcctagtgttttcctctgtgctctatgtggcaagcattactggaaacatcctcattgtgttttctgtgaccactgaccctcacttacactcccccatgtactttctactggtcagtctctccttcattgacttaggagcctgctctgtcacttctcccaagatgatttatgacctgttcagaaagcgcaaagtcatctcctttggaggctgcatcgctcaaatcttcttcatccacgtcattggtggtgtggagatggtgctgctcatagccatggcctttgacagttatgtctactctagaccctgtttgcctgggtatcaccagcagaggctggagaacagccaagattgctgcctgtttcttcctctggaagttttgtcccagaggggcacccaccagatgccagccagagctctcctgtatgaggtgcctgttggcacctactgggaggtgtctcccagtcaggatacacgggggtcagggacccacttgaggaggcagtctgacccttatcagagctcgaatactgtgcagggagatctgctgctctcttcagagccatcaggcttttcaaagatgctttaagtctgctgaagctgtgcccacagcc

SEQ ID NO: 462350 - DNA, 2214 bp, Homo sapiens
ggccctcctctgccctcccaggccgcgccccgcgcccgggccccggcgatggtgacacatgcggcggcggcgcgccagcggcaggaccatggttgagcgcgccagcaagttcgtgctggtggtggcgggcccggtgtgcttcatgctcatcttgtaccagtacgcgggcccaggactgagcctgggcgcgcccggcggcggcgcgccgcccgacgacctggacctgttccccacgcccgacccccactacgagaagaagcactacttcccggtccgcgagctggagcgctcgctgcgcttcgacatgaagggcgacgacgtgatcgtcttcctgcacatccagaagacgggcggcaccaccttcggccgccacctcgtgcagaacgtacgcctcgaggtgccgtgcgactgccggcccggccagaagaagtgcacctgctaccggcccaaccgccgcgagacttggctcttctcccgcttctccaccggctggagctgcgggctgcacgccgactggaccgagctcaccaactgcgtgcccggcgtgctggaccgccgcgactccgccgcgctgcgcacgcccaggaagttctactacatcaccctgctacgagaccccgtgtcccgctacctgagcgagtggcggcatgtgcagaggggtgccacgtggaagacgtcgttgcacatgtgtgatgggcgcacgcccacgcctgaggggctgccgccctgctacgagggcacggactggtcgggctgcacgctacaggagttcatggactgcccgtacaacctggccaacaaccgccaggtgcgcatgctggccgacctgagcctggtgggctgctacaacctgtccttcatccccgagggcaagcgggcccagctgctgctcgagagcgccaagaagaacctgcggggcatggccttcttcggcctgaccgagttccagcgcaagacgcagtacctgttcgagcggacgttcaacctcaagttcatccggcccttcatgcagtacaacagcacgcgggcgggcggcgtggaggtggatgaggacaccatccggcgcatcgaggagctcaacgacctggacatgcagctgtatgactacgccaaggacctcttccagcagcactaccagtacaagcggcagctggagcgcagggagcagcgcctgaggagccgcgaggagcgtctgctgcaccgggccaaggaggcgctgccgcgggaggacgccgacgagccgggccgcgtgcccaccgaggactacatgagccacatcattgagaagtggtagtggcggtggtggccacggggaggcctcttggggtgtgtgggggataaaacaggacagacgacaggtccacccaagactgtcaagggatgagcatcccaaacctgctccacagaggtagctgcgtcctgaaaaaaaacacagcagggacatagtggggctgggcagggatggggcttgagaaatcaacaggtgcagcccagtgggtcagaggaaagcgtgctcgaaggatgccatggtcagggcagagcctccagagcaggtgttgtgcctggagctgctctcctggcctccttggatttatcgcaaaaactgaaggtttgcgtgagagacgaggacagcggaaagtggacctgccaggccgggagtgtgtccctcaccaactatgcacacagcactcgctcttagctcctctgtccgggctactaggagtgagaccagcttctggcaactgccccagctccaggccatcccatagctcctcctcttctggctgcccccaatgccccgaggcctggggagcccccagctcacccatctgtagctccctcaaagtcagggcccaccccatctgaggcagagaagactcgagtccagcccccaggaagcctgctcccctctctggcccatggtcctgcttcatgctttgggtcaggaggccaaagctgatgttcaggccccacccactccctacagtcctcagaccaaggagggtttgggtagtaggcccgagctgcatttccggccttccgtgggccaactggcagcccaggagtggggaggctttggccaggcatgctgccacttgtgccgccgggctgaggtgtccagaggcggcggcagctggcagtgccctcagcccccaagtgtccagcctggcacttcccattcaggccacctgctttgggtcaacagttcctttg

SEQ ID NO: 462351 - DNA, 1462 bp, Homo sapiens
ttgtcacagtaggtacaggacatgggtctattagatcttagacactacagtccgtacatgccaatccattcccagaagacctcccctccccaccccagtgtcactgagccacttcctccagcacagccccacggagggaggcccttttgtgtcttgcccatcacctggctggccagatctgctcagctcttccctgactcaagaaaaacaagagagcttcattagtccgttttcatgctgctattaaaaactgcctgagactgggtaatttataaaggaaagaggtttaatgactcacagttcagcatggttagggaggcctcaggaaacttacaatcatggcagaaggcaaaggggaagcaagacacctccttcacaaggcagcaggaagaagtgcagagcccaagaggaagagcgccttataaaaccatcaggtctcgtgagaactcactcactatcacgagaacagcatggggaagctgccctcatgattcaattacctccacctggtctctcctgtgacacatggggatataaggattataattcaagatgagacttgggtggggacacaaatcctaaccatatcaagtgctctgtggtcccagataagccaagaaaccttcgtggaggaggccacccccacccttggcctccagacccagtgggatgcctaggaggaaactgaggcccaggagcctggagatgtgtctgctccaggtcacactgtgggctgtaggggtccggaacccagacatgtggactgcgccaggctctagccaatgactcctccaaaccactgcacctccccagccctccagagttctcatctgaaaaacggggcatcaggtctgaaggtcttcaatgccccttctggctgggatatcagagttttgggacctctctctccaggtcctcatgagtccagcaggagctctggcaggtccagggtcccctccttccctctgctgccactgctcagcacccaaccctttttaaaattagctctcaaaatacctcatcccggaacaagcgtgcaaaaggagacagggcaggattccaaaccagctgcaaggctccctctcggtgtccttccccacttcggcatgtctgtgcgtgcatgctggcttctgtgcatgcatgctggcttctgtgcatgggtttacatgaaactctgtatttattattcctaagataaagtttattgtatttattattcctaaatatttatacatttataatatttatatattatatattcacatatttgtaatatttatgttagttacattacatataatatttatattatatattacgtatgtataatatgtatattatatatttacatatttataatatgtatattatatatttacatatttatacaatttatatattatgtatttatatattgtatatttatatatttataatatgtaaatatttttatattatattt

SEQ ID NO: 462352 - DNA, 810 bp, Homo sapiens
ggccaacgctggttctatccctgcttgttgcttttttttttccctccgcttcttgcgacggagactgctgtccaggaagtgcgcagtagtgattctagagaggctggaagctctcctggcgacgctggggccgcgaagggctcacgtaatgactcctactcctggtgagcgcaggcgttgcggaactcaccgtcccacaggacgtgtttccgggggtacattaattgtggctggacgcagtggcgcggcagtttaattctccggcggctgcagattgacgggacgagatggtcctggcagggctcatcaggaaactcggtcatcagctggccgagatcagggagcgcgctctcaagagtattctctgcaagattgagcacaacttaatctgctacgctgatctcattcaggagaggcaactttttcttcatttgctggaatggttcaatttcccgtccgttccgatgaaggaagaggttctgaacctgttaagcagattggttaagtatcccccagcagtccaacatttggttgacgttggtgcagtagagttcttatctaagcttcggtctaatgtggagccaaatctgcaggctgaaattgatggcattctggatggactttttcttcttccttcggaagttcctgcactatcttctgcctcataccaaaccaatcaaactgaattgtcaaaaaaccctgaaatcttaacaggatattttccccaagacaaaagtaatttccagcagatggaagtgccgccacgaccagtggtaaatcagactgtgaagtgcttgaagttttctacat

SEQ ID NO: 462353 - DNA, 1211 bp, Homo sapiens
ggccaacgctggttctatccctgcttgttgcttttttttttccctccgcttcttgcgacggagactgctgtccaggaagtgcgcagtagtgattctagagaggctggaagctctcctggcgacgctggggccgcgaagggctcacgtaatgactcctactcctggtgagcgcaggcgttgcggaactcaccgtcccacaggacgtgtttccgggggtacattaattgtggctggacgcagtggcgcggcagtttaattctccggcggctgcagattgacgggacgagatggtcctggcagggctcatcaggaaactcggtcatcagctggccgagatcagggagcgcgctctcaagagtattctctgcaagattgagcacaacttaatctgctacgctgatctcattcaggagaggcaactttttcttcatttgctggaatggttcaatttcccgtccgttccgatgaaggaagaggttctgaacctgttaagcagattggttaagtatcccccagcagtccaacatttggttgacgttggtgcagtagagttcttatctaagcttcggtctaatgtggagccaaatctgcaggctgaaattgatggcattctggatggactttttcttcttccttcggaagttcctgcactatcttctgcctcataccaaaccaatcaaactgaattgtcaaaaaaccctgaaatcttaacaggatattttccccaagacaaaagtaatttccagcagatggaagtgccgccacgaccagtgggtgtgtatatgtcgggaagtaaatcctgttgacttgggaagttgaaaattaatgtacttttttcgttattgtgaagatgtatttttaccaaacttgaatgtttcagcaccaaactatcattaaatgttttagttgtttcaagttagtttaggatatcgagtagaaatgataaaattttgtgttattctaaccatatttgaacaactgtgtagatggatggtattaatggcagtagtacctcatctaagaggaatcatacagtatttgtccttttgtgtctggtttatttgtaatgttttcaagcttcatccacattgtagcttgtatcagaacttcattcctttatatggctgaataatattcctttgcatgtatatcccacattttattcatctatgcatttgtcgatggacatgtgggttgtacccacatttggc

SEQ ID NO: 462354 - DNA, 1031 bp, Homo sapiens
aactcaggggcggagtttcatgatcccggaaccggtggtagtgtttgggtttgaggagagcacgacccagccctctggggtggggtctagcggcgtcagcgaccaatcgcgccgaggtctagtggggcggggctccccgggggcggggcctgtgccagttccgggccgcctgggggcgtggccgggcctgtacagcagcctgggccatgtcggcgccgccggccctgcagatccgggaggcaaacgcacacctggcagccgtgcaccggcgcgcagcggagctggaggcgcggctggacgcggcggagcgcacggtgcacgcccaagccgagcgcctggccctccacgaccagcagctgcgcgccgccctagacgaactgggtcgcgccaaggaccgtgagattgccacactccaggagcagctgatgacctcagaagccactgtccacagcctgcaggccaccgtgcaccagagggacgagctcattaggcagttgcagccccgggctgagctgctgcaggacatctgccgccgccggccacccctggctgggctgctggatgccctggctgaggctgagcgcctggggcccctgccggccagtgaccccggccacccaccccccggtgggcctggtccaccccttgacaacagcactggggaagaggcggacagggaccacctccagcctgcagtgtttgggaccacagtgtgagcccggaatgcagattacagaatggagacagaaagccactgctgtcagtgtccttgggagtcaccagcaccctgcagggggaccctacggcagagccaaagtcctgtctaagcatcagaacaggctgaacagtcaaaaagttttcaaataggcccacaggccaggtgcagacgtttaacccagacagaagtgttcttgtttgtttttaagctttgaatcagtcacccttgctaaaaacctggcaatgcaaacacaaagatctggatttctggcaagacttggccaagcttgcctggagttcagggcaccctcttt

SEQ ID NO: 462355 - DNA, 891 bp, Homo sapiens
tttctgcttatcaatgactcttgaagttgcaggaattccaggactgtgcggcatttttattggaaaaagacagatattttttaagttgagaaacacttgctcaatgtgcttttcaaatagagaagagaattgcagaaggaaggtaacaaacacccttacagagaaggtgaccttccagccagatcttgaagtcaagggagcaaagactttgaagaggaggagccaagatggccaaataggaacagctccggtctacggctcccagcgtgagagatgcaaaagacgggtgatttctgcatttccatcagagtttcaagtaaaaatgaaaatctcaaccgtgtcattattcatgccaagccttaaacctggatcaagcttttctatctaatgtcactcatcaaagacaattgtaaatccttcatctaccttatcttatctaatactcacaaaaacaaagggtgatatggcagagacagttacagtgctcaccaatgactgcaaaatgtccgcatctcccagcctcacttgcagatagatggggaccatggaactagttcccaccaaagaactatgagtagaaatagcatgtgtctggagccaaagaagttaaaagctgacatgcctcctccatccctcttttctcctgcaataattatcttggcttggaagccacaagagaagatgagctgacagatccacactggaatctacaagagtgaaaaatataatttcattgtgttaaaccactaagatttcagaatttgtctgttataacagcatagcctatcctgtcctgacaaacatagataatatttggaatatgtaataactagtacagaacaggcactaacatattagaatgaatgcaatgaccaatgaatgaacgtcatc

SEQ ID NO: 462356 - DNA, 1876 bp, Homo sapiens
caggttttttgatttgtaggctttatttcccagcactccaaaagtgttcaatgtactaaatctataagcttgctttgaaagaccagcccatgtcttttgattgttgaatgacattcctttgtatggatgtaccacagcctgttttgtgaccgctggtttgctatttgttttaggataggaccatgagactgtggaatattgaagaaattgatgaaattcctttggtaatcaagtacaaaaaggccgtgggcttaaagttgaaacagtgcgaaagatgtgacaggcctttctccatcttcaagagtgacacctcttctgaaatgttcacccaatgcgtgttctgccggatagatacaaggggcttgccagcagatacttcatcgtcatcatcatcatcggaaagggagaactcaccgccgccaaggggaagcaaggatgactgacagccacaggcccctttgagtgactccagcacaggctacctagcatgtaggtttcggggctttgcaggggctttctcttgggcccctcccaggctcagcaggcctgtcagactggggcaggacccaagccctggctggactcagcacagtgccacctcctcagctctcagcttggggagtgaacactttccgttttcatgcagaataaatctaattcctttggaaaacaagcgtgcatgtgcatctgaaaagcagtcttgctatttctaagctttatgtcttggtgctcatcctgtttgattcttggaacacatattagactcacattgtggagtctggagttgccctgtaaggtgacctgtgggggctggcaccagcagttctggagagtttgtcaaatgagtatgacaaggtgtggggccccctctgctgaggtcgcggggcagaatggtccgaagctcaccggggtcacagtcggaccgaggcgggtgtgcgcctcgaccggacgccaggggagccagcagcccggccgcgctggcggggccgggggttctccggagtgggtaggggctcgaccgcactgccctgagtcccaagccctgcaccagcgttccccaaaggcggagcgtcctggctccacctgcctgtgtgaatcggaagctacactacgcgtgcgccacaacaggccgaatgcggcgcggggacccaggcgaccgcggttgccatggtgctggctggccgtgggaggcgagcggcgggctgggaagcagctgtgcgagtccagcgaggagccggtgttcgccccgaggctgcttcctcagggcgggcggtggacgcgctctcccacgccgccttctgtggcgtgggttcctcgcgctagtcttcctggctccaagctgccacttgggggagcccacgcgggtgccgatcctcgacggggccctggagacctgggggtccatcagtatgtccatgtgctggagcggctgctggcaggatcaagaacttccctccaaacgctctctggcttgactattcgcctgatggaacaggcagaaggatagaaattagctctggggggagcggaaacattctgaggccagagcaagctggtgatgagtggggcttggagaaggtggcaggcagggctgttcacaggatcatgcagcttgagctaaaaactttgaagtctgttctggagcattttcagcagtggggatgaaccaatttgcatgttaaaaacgtgagcaatgaattgagaggcaagggaccacatggagggaggcctctgtggaggtccaggagacaggagatggtggctgggaccagggaggtggtcacggtgatggagaaaggaagcccctgctctcatgtctgagccctctgccccaccactgctccctcacctgccccagccagtcagttcccatatt

SEQ ID NO: 462357 - DNA, 3572 bp, Homo sapiens
cacaccttgctccagctgtggggagggggcagctgtctaagcagctgaggatctgaggattgctcttgtgtggcagagaaagagcctaatccactatgttttaggggcatctggccaggctctggcccaggactggagaagctgtgggaagtaggtccgcaggtctgcccaggagccaaatgaaagcaggggtcaggggaaggagcagcggaaggtggtgaaagggcaggggaatgctgcctatcctccaggcacctgtcccctccgcccgccctaggcctgagtccttgttagagacttgttgcccaaagctcttcctctgcctggtgaaaagcccactggggtctttggccccggtcggcctcccctctcctgtctcagagcctcttggctgcagagagcagaagttgggtgtggggttggggggtgctcgggcacagctgctgtgccaccctctggcaacaagtggctgacaggggtgcacccaggtggtggtgagggctcgccaagcctggagcgagagcccaccgttaactgcctacaatgaccatgttaattgggtatacggagaagccacctacagttcccaacgaggagctcagcagaaccaacatcttccttccccaaccttgtccccgagtgggcgcctgggcctacaagttcctgcagactccagggcctccagatgctgggcagctggttaccaacaacgacaaacatcaagtaccctggatccagactgcccgatgcctagaagcctattccatgtgtggtgagtgggagccgtctgtgttcttgagggcttcagcggcagaggggagaccgtccaaggagggcttcagcggcagaggggagaccgtccaaggagggcttcagcggcagaggggagaccgtccaaggagggcttcagcggcagaggggagaccgtccaaggagggcttcagcggcagaggggagaccatccaagggagacttaatcatacagccttccctcactgccagggggtctgggatcttcagctgggatttaacctgggcagccaggtgctcagtgcctgggtcctgtttgcggctgcttgttcgcattccagcttcccttgtgcccgcagtcaggctctacacgtgcgccagcctccgagcgcacgtccccgagtgacccgggcgcttcacgcgcgccctctccggcccgcgggcggccagggacccgcgctgggctccacgcttcccgtggggctgacccctccctcgcgccccgcagcgggccgcagcgattggccgccggcccccttccagccgtcacccctccctccctccgccacccgcgcgcccgcggtccccgctgtcccccgcggttccggcgaggccgcgccgcgctgcgctccgctcccattggctgcgcgcgcctttgtgtggcggcagctgcggccccagcgcctttgaatgtcgagaggggccgggaagggagcctttccatgggccatctgtctccccgccagccgccgccccaccgccgcccgcgccccgcgctccgcctcccgccccggcggctcccgcagccccgccgccgcccgcgcccgcgccccggagccgcgccacaaagggcccgcgcgcagccgccgccgccgccgccgcgcgaggagccaggatggtcctggtccacgtcggctatctcgtgcttccagtgtttggctctgtgcgaaacagagctcagtgaatggtcaactcgctgctgtgtgcgctgtgacccttctgcctccgcatttagctgtattgtgacaccctcttaaccatttcctgtctccatctgaggaaggcattgctatttaagcggcagtatcccctatctcaggccagcctagccatgggggtgagggggagtgggtgtgtgaggaagaaagaggggggctggatgcgatctccttgaaatgccaccccctctctcaatacacaattatctcttattacttggcatttcctcttaaaacgggtgtggaacattacactaggcagaaattcaaaaatgattaagaaggatgttgagcctgaaagtataattatcctgattaaatcattaccatcctcattaataccaccaatctctaaataccattgcaggatgctgattccatgttttgaaattcaaattgctcagctgcctttaaattttatttttaatactaccttctccctcaccccccccaacaaaaaaaaatccaacaacacaaattctgcccatcagttaaagtttactttcacggcaaacatgcccacaggaaattcaagggctgaggggtgagttggtctgtgggtaaaatttcgcagaatgtgataagagttcatgaccttccgatagaggatactaatgcttaactcaacaaggtcctaaaccacaatcttcttgtaaaactattagagagtttgccagcttaaatctgttctttttagtttccattgtagtagtgtaggatgtaggccatttcagaatagatgtagagaaataaccatttttgtatcttcatcttgtttagccgagtacattgcactgtaaatccctgttaagtggattccttttgccttggcttagaggctgcagcacttcatttttcagttatctgggtgactatcagttagcttcttggcagcacccaggcataactgaagattgcacttagttggaggcaaaaaatgttaaacatatgtattaaaaaaatctttgatgaaatgacagttgctgctatcccatagcctctgaaaacttggtgcaccaaggtccctggcttaagtgggagccatggccatagcgtcttaattgtttaattgtacaatgtcaagagcatctttggacatccgccctggccctcagagctgcccctttaacagccggctcccttctgctgctcgccagccagacctgcttgaaaactgaaacaaaacagcagcaataataaaagaataaggcccctactttgagggcccttccaaaataaagtcccaaatagcctccccagactgccatttggcaatctgaaaagaaagagaaaaaagaaaagaaaagaaaaaagaatcccagcaaaatggttttccattaaacaggggtagcgtgttctgctgtgctgaattacttcctgttcttattttgtgggtaattttttctgtatcaaatatccttttggttgtgtatctttttcaccttttcttgtactaaaactaaagcatgatctgtatttttttacatcccccagttgacaatgtacagcgctcggttagagatgttaccctgctgaaacgtactgtggtcgtgtagcccgggccatctgctcattgtacgctgcttttgttctgttgcccttccgaagcatggtgggcccagcctttttttttgtatcgtgtgcatgacgacattgttacacacagaatccactaatactaatatacaatctctcaataaagaactagttttcctatattaacctagtgtgctttttctcttgctgttttcccatttattgtcgtatcctgctgtttagattttccccccttgcttttctatccccaccctcacccacccacca

SEQ ID NO: 462358 - DNA, 2076 bp, Homo sapiens
cctggattagactgaggtggtgccagcaccaggggtggggccgtagctggggcggagcctgataacggaggagggtctccagccccagtgcccaaggcactatgactgtgagatctgagctacttattgtccccgcagtggtgtcagacctgtgcgccacaggggaccatgactgtgagcaggtgtgcatcagctcccccggttcctacacctgcgcctgccacgagggcttcactctgaacagcgacggcaagacctgcaatgtctgcagtggtggtggtggcagctcggccactgacctggtcttcctcattgacggatccaagagtgtgaggccagagaactttgagctggtgaagaagttcatcagtcagatcgtggatacgctggacgtgtcagacaagctggcccaggtggggctggtgcagtactcaagctctgtgcgccaggagttccccctgggtcgcttccacaccaagaaggacatcaaggcggctgtgcggaatatgtcctacatggagaagggcacaatgactggggctgctctcaagtacctcattgacaattccttcactgtgtccagtggggctaggcccggggcccagaaggtgggcattgtcttcactgatggccggagccaggactacattaatgatgctgccaagaaggccaaagacctcggctttaagatgtttgctgtgggtgtgggcaatgccgtggaggatgagctgagggaaatagcctcagagcctgtggcagagcactacttctacacggctgacttcaagaccatcaaccagataggcaagaagttgcagaagaagatctgtgtggaggaagacccgtgtgcctgcgagtccctggtgaaattccaagccaaagtggaggggctgctgcaggccctgaccaggaaacatatcccttcccagagggggctggggctggggaggggcgcaggccagtgttgggggaggcgggggcatggcccaagtgtggtcagttgggcaggcttctcttggcctgcttactgctgatgggctgcattctggcagaataagctgaagccagcttgggtgcacaccctgtcaaaagcagagactcctagaaggtaaacaagaaaatgaggcagaagccaggatctagggactggacacacaccagagtcctggacatgctctgaagaacatggagcccatggatgccccatttctcaggctcatggtgacgtgcctgaccccagtacccactcagaggtggggctgggccccagacagttcccctggctcagccaggactaggtggggaacccagcaggtctaaatctgcaactgagcagggctgggcactcgtggctcacagtaactggctgtgttttttggaaagcaccattctgaggacagtggatggataagttctgacagaggggagaatgcacgctgtagtggggtgttgcaggggcctgagtgcagggccacagccatccctgccctgctctggccaacctgcacctctccttaactctgagtccactggaagctgtgaagggggagctttggtgattttctgaacctattcttgtttaatggagcatttttagtgttactactagattcacacttgagagcatgtctaaaaggcttttacaagaagctcagaccacaccgaaagatcttcctcggaggcagttcaaagaggcagaataacaacacgaacggtacccaagagctacatcagtacaacagcacaaatacacaagcgcgacttaactggggcacagccaccctcgcccccatgacctgactccacctcctacacagttcaccaaaccctttctctctgtccgtccctggggcaggagtttttctgctgtccaaggaggctccttgacacagccacctgagaagttatgactctgctcattcttcctttcttctgagattatccactcccctctcctccccacacaggtggggagggggagaggcagccatgttgatatggactgagaaggctcagcagtgtgtccccaaggaggaggagagggtcattagcggacgccatggcctgggagctggc

SEQ ID NO: 462359 - DNA, 1526 bp, Homo sapiens
cctgggaggcaggcagactgggccaacctcgcccagcctgagagtggcctctgtgcaggaagcttccagttttctggagtacccaggccaggggtttaggacagagtcctctcatccctgcaggactgggtgccgtgggccacattgccagaatgccacattgccagactgaatcagaggctgcagtgagaggctcccagaggtccctcctggggagtggggaatgggctctctggaacgcccacgggctctcagaagagggctccaggggctcagagtgcgggggagttgcgggcatcctcaggggtgcagtggggagaggccacaggaccacagctgcttttcacttgggtatattatgcgatgctgaggtttaggggatggttgattgcatcacccaggtggtgaacaagattcccgatgagtagtttttcagcccttgcctcccaccctctcctgcccctagtagttcctaatgtgacctgcaatgtattccattcagtcagcaccgactgggcaaatcacctaccaggtgtttctgggctcgtccccaaacttccatgggtgaagaaacttggaacaatagcagatgctccccagctggcatgctctgttctcttgggttccatcgtcccctggctggcatttcagaatctcccaatgttagatgaccgaagatgggatatggccagatcctgtcctgggattcaaatggttctgtcagggacaatgctggtgttgaccacctcctggaatactgcaggattctttcagagcaacagccaaatgaagacagccgtgggatcaagccttctgtactaattgtgatgtcactgggaagtgggcttcccctgtggacactggattgctattggacctgagttttcaaggttctggccaacctgggcagctaaggaagctccctgacacagcaaaccatggctgcagtacacaagtgtgctacagcccaatcctggacatatggtcgttaccaaaaccccagtcatcttcttgaaggagccttagtataggaaaccagagagtcaagacccaggtaagctggcccgtgaggcgtggttcccatcgccaggagacaacagccgcgctgaccagctgctggcaatttcttcggtcaccctgcctctcaacttccaaagccccatggttttcgggtttacccacatatgacccttatgtaaatttgcttgtcccaagaacccttaactcatatcgtgtctgtttcctgtgtggttggttattgatatagtttggataaaatgccttggtctttagtatagtttggatattgtcctctccaaatctcatgttaaaataaatgtgacctccaatgttggaggtgaggcctggtaggaggcatttggattattggggcagatccctcatgaatggcttggtgccctcctcgtggtcatgagtgacttctcgctctattagttcaggagtttaaaggagactggcacctccttctccctctctcgtcacatgatgtgcctgctccccctcca

SEQ ID NO: 462360 - DNA, 4033 bp, Homo sapiens
gtcggccctgtccccgcagcctggccggagaggctccaaagaagaagaaaccaaggcccagagagggaggcccaggtgcagggagcaggcgagggaaggatccgtacaggggcccaacactactccaccaaccgaagcccccaaaaggagcccggtgatgctgcgaaggctgtgaacaggggaggcggcactgtgggggctgccggcagccggggctggggagagacatgtggacacgtggcctctatggctcccgcctgccagatcctccgctgggccctcgccctggggctgggcctcatgcttcgaggtcacgcacgccttccggtctcaagatgagttcctgtccagtctggagagctatgagatcgccttccccacccgcgtggaccacaacggggcactgctggccttctcgccacctcctccccggaggcagcgccgcggcacgggggccacagccgagtcccgcctcttctacaaagtggcctcgcccagcacccacttcctgctgaacctgacccgcagctcccgtctactggcagggcacgtctccgtggagtactggacacgggagggcctggcctggcagagggcggcccggccccactgcctctacgctggtcacctgcagggccaggccagcagctcccatgtggccatcagcacctgtggaggcctgcacggcctgatcgtggcagacgaggaagagtacctgattgagcccctgcacggtgggcccaagggttctcggagcccggaggaaagtggaccacatgtggtgtacaagcgttcctctctgcgtcacccccacctggacacagcctgtggagtgagagatgagaaaccgtggaaagggcggccatggtggctgcggaccttgaagccaccgcctgccaggcccctggggaatgaaacagagcgtggccagccaggcctgaagcgatcggtcagccgagagcgctacgtggagaccctggtggtggctgacaagatgatggtggcctatcacgggcgccgggatgtggagcagtatgtcctggccatcatgaacattgttgccaaacttttccaggactcgagtctgggaagcaccgttaacatcctcgtaactcgcctcatcctgctcacggaggaccagcccactctggagatcacccaccatgccgggaagtccctggacagcttctgtaagtggcagaaatccatcgtgaaccacagcggccatggcaatgccattccagagaacggtgtggctaaccatgacacagcagtgctcatcacacgctatgacatctgcatctacaagaacaaaccctgcggcacactaggcctggccccggtgggcggaatgtgtgagcgcgagagaagctgcagcgtcaatgaggacattggcctggccacagcgttcaccattgcccacgagatcgggcacacgtgaggccagggcacacaagagggggaggaggggaggagctgggcgggtccctcagcgcccggcagagccgacacccctttccccagattcggcatgaaccatgacggcgtgggaaacagctgtggggcccgtggtcaggacccagccaagctcatggctgcccacattaccatgaagaccaacccattcgtgtggtcatcctgcagccgtgactacatcaccagctttctagagtgaggatgcacctgggtgtccctcagagcgggtcacactcatggtggggcagggtacacgggagacgatagaaatcagggatgctccctgggacccccatccagctgaggctcctgagctcttgatttgcagccacctagcatgacagttgcttttctctcgaggcagctcgggcctggggctctgcctgaacaaccggccccccagacaggactttgtgtacccgacagtggcaccgggccaagcctacgatgcagatgagcaatgccgctttcagcatggaggaggaagggaggggggcgagcctgagcgggcacctcggcccgcaggaggtctgcagcgagctgtggtgtctgagcaagagcaaccggtgcatcaccaacagcatcccggccgccgagggcacgctgtgccagacgcacaccatcgacaaggggtggtgctacaaacgggtctgtgtcccctttgggtcgcgcccagagggtgtggacggagcctgggggccgtggactccatggggcgactgcagccggacctgtggcggcggcgtgtcctcttctagccgtcactgcgacagccccaggccaaccatcgggggcaagtactgtctgggtgagagaaggcggcaccgctcctgcaacacggatgactgtccccctggctcccaggacttcagagaagtgcagtgttctgaatttgacagcatccctttccgtgggaaattctacaagtggaaaacgtaccggggagggggcgtgaaggcctgctcgctcacgtgcctagcggaaggcttcaacttctacacggagagggcggcagccgtggtggacgggacaccctgccgtccagacacggtggacatttgcgtcagtggcgaatgcaagcacgtgggctgcgaccgagtcctgggctccgacctgcgggaggacaagtgccgagtgtgtggcggtgacggcagtgcctgcgagaccatcgagggcgtcttcagcccagcctcacctggggccgggtacgaggatgtcgtctggattcccaaaggctccgtccacatcttcatccaggatctgaacctctctctcagtcacttggccctgaagggagaccaggagtccctgctgctggaggggctgcctgggaccccccagccccaccgtctgcctctagctgggaccacctttcaactgcgacaggggccagaccaggtccagagcctcgaagccctgggaccgattaatgcatctctcatcgtcatggtgctggcccggaccgagctgcctgccctccgctaccgcttcaatgcccccatcgcccgtgactcgctgcccccctactcctggcactatgcgccctggaccaagtgctcggcccagtgtgcaggcggtagccaggtgcaggcggtggagtgccgcaaccagctggacagctccgcggtcgccccccactactgcagtgcccacagcaagctgcccaaaaggcagcgcgcctgcaacacggagccttgccctccagactgggttgtagggaactggtcgctctgcagccgcagctgcgatgcaggcgtgcgcagccgctcggtcgtgtgccagcgccgcgtctctgccgcggaggagaaggcgctggacgacagcgcatgcccgcagccgcgcccacctgtactggaggcctgccacggccccacttgccctccggagtgggcggccctcgactggtctgaggtcagccgcccccttccttcgcgcccactgggatgcccaggtggggtgtccacggagacgcctctgcgcggtctccaggttagctgtcccctcctcacttcgcactggggcagcaccctgagcacgaaacgccccttccaactgcagtgcacccccagctgcgggccgggcctccgccaccgcgtggtcctttgcaagagcgcagaccaccgcgccacgctgcccccggcgcactgctcacccgccgccaagccaccggccaccatgcgctgcaacttgcgccgctgccccccggcccgctgggtggctggcgagtggggtgagtgctctgcacagtgcggcgtcgggcagcggcagcgctcggtgcgctgcaccagccacacgggccaggcgtcgcacgagtgcacggaggccctgcggccgcccaccacgcagcagtgtgaggccaagtgcgacagcccaacccccggggacggccctgaaggcacctgacccttctgtgcacccaaacttgtgacatttccccagtcactttcataacctgtacctattcatctccacctgtagcacaatttcctgaatatttttcctttaaatcggtttttcaacctcaggcactagtgacattttgagctagatgattgcc

SEQ ID NO: 462361 - DNA, 337 bp, Homo sapiens
cctccagcagtctaagaactgatgcctctaacgaaggaaaggactgcatgtttctgatgaagctaccatgacctaccagatttccaacgcctgccaaaattaatctatttgtctgtggtagaagaggccataccattgtggcccttgaaacttactgtatgatgttttatttagcgaacagttcacatacccaaatggttgtaactgatactgctgaatatattgtaagaacacaagtgttaagtatgtatcctgctttttttgactgtacagtcactgttcagcgaagccctacatcaataaagttctgtcttgtgtagatttctacgaaatgcgg

SEQ ID NO: 462362 - DNA, 4217 bp, Homo sapiens
cgacggcgcggaggccccgggcgcggcgcaggctccaaagaagaagaaaccaaggcccagagagggaggcccaggtgcagggagcaggcgagggaaggatccgtacaggggcccaacactactccaccaaccgaagcccccaaaaggagcccggtgatgctgcgaaggctgtgaacaggggaggcggcactgtgggggctgccggcagccggggctggggagagacatgtggacacgtggcctctatggctcccgcctgccagatcctccgctgggccctcgccctggggctgggcctcatgcttcgaggtcacgcacgccttccggtctcaagatgagttcctgtccagtctggagagctatgagatcgccttccccacccgcgtggaccacaacggggcactgctggccttctcgccacctcctccccggaggcagcgccgcggcacgggggccacagccgagtcccgcctcttctacaaagtggcctcgcccagcacccacttcctgctgaacctgacccgcagctcccgtctactggcagggcacgtctccgtggagtactggacacgggagggcctggcctggcagagggcggcccggccccactgcctctacgctggtcacctgcagggccaggccagcagctcccatgtggccatcagcacctgtggaggcctgcacggcctgatcgtggcagacgaggaagagtacctgattgagcccctgcacggtgggcccaagggttctcggagcccggaggaaagtggaccacatgtggtgtacaagcgttcctctctgcgtcacccccacctggacacagcctgtggagtgagagatgagaaaccgtggaaagggcggccatggtggctgcggaccttgaagccaccgcctgccaggcccctggggaatgaaacagagcgtggccagccaggcctgaagcgatcggtcagccgagagcgctacgtggagaccctggtggtggctgacaagatgatggtggcctatcacgggcgccgggatgtggagcagtatgtcctggccatcatgaacattgttgccaaacttttccaggactcgagtctgggaagcaccgttaacatcctcgtaactcgcctcatcctgctcacggaggaccagcccactctggagatcacccaccatgccgggaagtccctggacagcttctgtaagtggcagaaatccatcgtgaaccacagcggccatggcaatgccattccagagaacggtgtggctaaccatgacacagcagtgctcatcacacgctatgacatctgcatctacaagaacaaaccctgcggcacactaggcctggccccggtgggcggaatgtgtgagcgcgagagaagctgcagcgtcaatgaggacattggcctggccacagcgttcaccattgcccacgagatcgggcacacattcggcatgaaccatgacggcgtgggaaacagctgtggggcccgtggtcaggacccagccaagctcatggctgcccacattaccatgaagaccaacccattcgtgtggtcatcctgcagccgtgactacatcaccagctttctagactcgggcctggggctctgcctgaacaaccggccccccagacaggactttgtgtacccgacagtggcaccgggccaagcctacgatgcagatgagcaatgccgctttcagcatggagtcaaatcgcgtcagtgtaaatacggggaggtctgcagcgagctgtggtgtctgagcaagagcaaccggtgcatcaccaacagcatcccggccgccgagggcacgctgtgccagacgcacaccatcgacaaggggtggtgctacaaacgggtctgtgtcccctttgggtcgcgcccagagggtgtggacggagcctgggggccgtggactccatggggcgactgcagccggacctgtggcggcggcgtgtcctcttctagccgtcactgcgacagccccaggccaaccatcgggggcaagtactgtctgggtgagagaaggcggcaccgctcctgcaacacggatgactgtccccctggctcccaggacttcagagaagtgcagtgttctgaatttgacagcatccctttccgtgggaaattctacaagtggaaaacgtaccggggagggggcgtgaaggcctgctcgctcacgtgcctagcggaaggcttcaacttctacacggagagggcggcagccgtggtggacgggacaccctgccgtccagacacggtggacatttgcgtcagtggcgaatgcaagcacgtgggctgcgaccgagtcctgggctccgacctgcgggaggacaagtgccgagtgtgtggcggtgacggcagtgcctgcgagaccatcgagggcgtcttcagcccagcctcacctggggccgggtacgaggatgtcgtctggattcccaaaggctccgtccacatcttcatccaggatctgaacctctctctcagtcacttggccctgaagggagaccaggagtccctgctgctggaggggctgcctgggaccccccagccccaccgtctgcctctagctgggaccacctttcaactgcgacaggggccagaccaggtccagagcctcgaagccctgggaccgattaatgcatctctcatcgtcatggtgctggcccggaccgagctgcctgccctccgctaccgcttcaatgcccccatcgcccgtgactcgctgcccccctactcctggcactatgcgccctggaccaagtgctcggcccagtgtgcaggcggtagccaggtgcaggcggtggagtgccgcaaccagctggacagctccgcggtcgccccccactactgcagtgcccacagcaagctgcccaaaaggcagcgcgcctgcaacacggagccttgccctccagactgggttgtagggaactggtcgctctgcagccgcagctgcgatgcaggcgtgcgcagccgctcggtcgtgtgccagcgccgcgtctctgccgcggaggagaaggcgctggacgacagcgcatgcccgcagccgcgcccacctgtactggaggcctgccacggccccacttgccctccggagtgggcggccctcgactggtctgagtgcacccccagctgcgggccgggcctccgccaccgcgtggtcctttgcaagagcgcagaccaccgcgccacgctgcccccggcgcactgctcacccgccgccaagccaccggccaccatgcgctgcaacttgcgccgctgccccccggcccgctgggtggctggcgagtggggtgagtgctctgcacagtgcggcgtcgggcagcggcagcgctcggtgcgctgcaccagccacacgggccaggcgtcgcacgagtgcacggaggccctgcggccgcccaccacgcagcagtgtgaggccaagtgcgacagcccaacccccggggacggccctgaagagtgcaaggatgtgaacaaggtcgcctactgccccctggtgctcaaatttcagttctgcagccgagcctacttccgccagatgtgctgcaaaacctgccagggccactagggggcgcgcggcacccggagccacagctggcggggtctccgccgccagccctgcagcgggccggccagagggggccccgggggggcgggaactgggagggaagggtgagacggagccggaagttatttattgggaacccctgcagggccctggctggggggatggagaggggctggctatccccccagagcccctcttcagcatccgccccttccagttcacatagtgagaccccccctccagggtgggtctggggaggggacagctgttcaccccagcaccctttgaacccacccttagggagtccccaacactccccccctcctttgatcggaatatgtactgtgaagagtaggggtggggaggtggtctgccggtgccctgccccccagcactgccctacccctccactccgagctgggggggaatctgtgtctgctatgggaggggggggggtagcaccacctccctgacaccctcccctgacctgactagggggaggatccaccccaacctctgccctgcccgccccaggggcaccccgacatccaggccaccccctcatggtgctacagaccctgccctggggcccacacactcctgccaggaagccctacatcaataaagttctgtcttgtgtagatttctacgaaatgcgg

SEQ ID NO: 462363 - DNA, 4320 bp, Homo sapiens
cgacggcgcggaggccccgggcgcggcgcaggctccaaagaagaagaaaccaaggcccagagagggaggcccaggtgcagggagcaggcgagggaaggatccgtacaggggcccaacactactccaccaaccgaagcccccaaaaggagcccggtgatgctgcgaaggctgtgaacaggggaggcggcactgtgggggctgccggcagccggggctggggagagacatgtggacacgtggcctctatggctcccgcctgccagatcctccgctgggccctcgccctggggctgggcctcatgcttcgaggtcacgcacgccttccggtctcaagatgagttcctgtccagtctggagagctatgagatcgccttccccacccgcgtggaccacaacggggcactgctggccttctcgccacctcctccccggaggcagcgccgcggcacgggggccacagccgagtcccgcctcttctacaaagtggcctcgcccagcacccacttcctgctgaacctgacccgcagctcccgtctactggcagggcacgtctccgtggagtactggacacgggagggcctggcctggcagagggcggcccggccccactgcctctacgctggtcacctgcagggccaggccagcagctcccatgtggccatcagcacctgtggaggcctgcacggcctgatcgtggcagacgaggaagagtacctgattgagcccctgcacggtgggcccaagggttctcggagcccggaggaaagtggaccacatgtggtgtacaagcgttcctctctgcgtcacccccacctggacacagcctgtggagtgagagatgagaaaccgtggaaagggcggccatggtggctgcggaccttgaagccaccgcctgccaggcccctggggaatgaaacagagcgtggccagccaggcctgaagcgatcggtcagccgagagcgctacgtggagaccctggtggtggctgacaagatgatggtggcctatcacgggcgccgggatgtggagcagtatgtcctggccatcatgaacattgttgccaaacttttccaggactcgagtctgggaagcaccgttaacatcctcgtaactcgcctcatcctgctcacggaggaccagcccactctggagatcacccaccatgccgggaagtccctggacagcttctgtaagtggcagaaatccatcgtgaaccacagcggccatggcaatgccattccagagaacggtgtggctaaccatgacacagcagtgctcatcacacgctatgacatctgcatctacaagaacaaaccctgcggcacactaggcctggccccggtgggcggaatgtgtgagcgcgagagaagctgcagcgtcaatgaggacattggcctggccacagcgttcaccattgcccacgagatcgggcacacgtgaggccagggcacacaagagggggaggaggggaggagctgggcgggtccctcagcgcccggcagagccgacacccctttccccagattcggcatgaaccatgacggcgtgggaaacagctgtggggcccgtggtcaggacccagccaagctcatggctgcccacattaccatgaagaccaacccattcgtgtggtcatcctgcagccgtgactacatcaccagctttctagagtgaggatgcacctgggtgtccctcagagcgggtcacactcatggtggggcagggtacacgggagacgatagaaatcagggatgctccctgggacccccatccagctgaggctcctgagctcttgatttgcagccacctagcatgacagttgcttttctctcgaggcagctcgggcctggggctctgcctgaacaaccggccccccagacaggactttgtgtacccgacagtggcaccgggccaagcctacgatgcagatgagcaatgccgctttcagcatggagtcaaatcgcgtcagtgtaaatacggggaggtctgcagcgagctgtggtgtctgagcaagagcaaccggtgcatcaccaacagcatcccggccgccgagggcacgctgtgccagacgcacaccatcgacaaggggtggtgctacaaacgggtctgtgtcccctttgggtcgcgcccagagggtgtggacggagcctgggggccgtggactccatggggcgactgcagccggacctgtggcggcggcgtgtcctcttctagccgtcactgcgacagccccaggccaaccatcgggggcaagtactgtctgggtgagagaaggcggcaccgctcctgcaacacggatgactgtccccctggctcccaggacttcagagaagtgcagtgttctgaatttgacagcatccctttccgtgggaaattctacaagtggaaaacgtaccggggagggggcgtgaaggcctgctcgctcacgtgcctagcggaaggcttcaacttctacacggagagggcggcagccgtggtggacgggacaccctgccgtccagacacggtggacatttgcgtcagtggcgaatgcaagcacgtgggctgcgaccgagtcctgggctccgacctgcgggaggacaagtgccgagtgtgtggcggtgacggcagtgcctgcgagaccatcgagggcgtcttcagcccagcctcacctggggccgggtacgaggatgtcgtctggattcccaaaggctccgtccacatcttcatccaggatctgaacctctctctcagtcacttggccctgaagggagaccaggagtccctgctgctggaggggctgcctgggaccccccagccccaccgtctgcctctagctgggaccacctttcaactgcgacaggggccagaccaggtccagagcctcgaagccctgggaccgattaatgcatctctcatcgtcatggtgctggcccggaccgagctgcctgccctccgctaccgcttcaatgcccccatcgcccgtgactcgctgcccccctactcctggcactatgcgccctggaccaagtgctcggcccagtgtgcaggcggtagccaggtgcaggcggtggagtgccgcaaccagctggacagctccgcggtcgccccccactactgcagtgcccacagcaagctgcccaaaaggcagcgcgcctgcaacacggagccttgccctccagactgggttgtagggaactggtcgctctgcagccgcagctgcgatgcaggcgtgcgcagccgctcggtcgtgtgccagcgccgcgtctctgccgcggaggagaaggcgctggacgacagcgcatgcccgcagccgcgcccacctgtactggaggcctgccacggccccacttgccctccggagtgggcggccctcgactggtctgagtgcacccccagctgcgggccgggcctccgccaccgcgtggtcctttgcaagagcgcagaccaccgcgccacgctgcccccggcgcactgctcacccgccgccaagccaccggccaccatgcgctgcaacttgcgccgctgccccccggcccgctgggtggctggcgagtggggtgagtgctctgcacagtgcggcgtcgggcagcggcagcgctcggtgcgctgcaccagccacacgggccaggcgtcgcacgagtgcacggaggccctgcggccgcccaccacgcagcagtgtgaggccaagtgcgacagcccaacccccggggacggccctgaagggggcgcgcggcacccggagccacagctggcggggtctccgccgccagccctgcagcgggccggccagagggggccccgggggggcgggaactgggagggaagggtgagacggagccggaagttatttattgggaacccccccagagcccctcttcagcatccgccccttccagttcacatagtgagaccccccctccagggtgggtctggggaggggacagctgttcaccccagcaccctttgaacccacccttagggagtccccaacactccccccctcctttgatcggaatatgtactgtgaagagtaggggtggggaggtggtctgccggtgccctgccccccagcactgccctacccctccactccgagctgggggggaatctgtgtctgctatgggaggggggggggtagcaccacctccctgacaccctcccctgacctgactagggggaggatccaccccaacctctgccctgcccgccccaggggcaccccgacatccaggccaccccctcatggtgctacagaccctgccctggggcccacacactcctgccaggaagccctacatcaataaagttctgtcttgtgtagatttctacgaaatgcgg

SEQ ID NO: 462364 - DNA, 462 bp, Homo sapiens
gcccaacccccggggacggccctgaagtgggtgaccagccagggtgcgccaggagggtcctggccagaggcagccacagagggcattgggggtcctgacttcatcctagaacttctggaacctcggaaatgcattgctgtgtctctgccaggccatccttcaccatcccctccctgcaagcatttattaagtgccactgtatgctgagtgtttcaggcacctgacccttctgtgcacccaaacttgtgacatttccccagtcactttcataacctgtacctattcatctccacctgtagcacaatttcctgaatatttttcctttaaatcggtttttcaacctcaggcactagtgacattttgagctagatgattgccgtggggagctgtccagcacattgtagggttttttgtttgtttgtttttcttttttggagagatggggtcttgctgtgttactca

SEQ ID NO: 462365 - DNA, 450 bp, Homo sapiens
gaggtcaggttgccaaacttttccaggactcgagtctgggaagcaccgttaacatcctcgtaactcgcctcatcctgctcacggaggaccaggtgcgggggacttcctccccttccccttccccttcataccagcatgtcctgccgtcccctgggtggtgggtgcccatgcatttccctctgtccatccccagcccactctggagatcacccaccatgccgggaagtccctggacagcttctgtaagtggcagaaatccatcgtgaaccacagcggccatggcaatgccattccagagaacggtgtggctaaccatgacacagcagtgctcatcacacggtgaggggacaggagaggtctaggactggggctgagaaaacagatggtccagggaaccatgagagtccaaacagagatcacttctgctagggtcaggaggagcagagaagt

SEQ ID NO: 462366 - DNA, 720 bp, Homo sapiens
tcagaccccgcctctgcccatcccggagaggctgatatctctggctggggcctggagtggggaacggtgcatggggccgacgagtgtcctccgggctggactcactccttcctgtctccccccacccagtggtgctacaaacgggtctgtgtcccctttgggtcgcgcccagagggtgtggacggagcctgggggccgtggactccatggggcgactgcagccggacctgtggcggcggcgtgtcctcttctagccgtcactgcgacagccccaggccaaccatcgggggcaagtactgtctgggtgagagaaggcggcaccgctcctgcaacacggatgactgtccccctggctcccaggacttcagagaagtgcagtgttctgaatttgacagcatccctttccgtgggaaattctacaagtggaaaacgtaccggggagggggcgtgaaggcctgctcgctcacgtgcctagcggaaggcttcaacttctacacggagagggcggcagccgtggtggacgggacaccctgccgtccagacacggtggacatttgcgtcagtggcgaatgcaagcacgtgggctgcgaccgagtcctgggctccgacctgcgggaggacaagtgccgagtgtgtggcggtgacggcagtgcctgcgagaccatcgagggcgtcttcagcccagcctcacctggggccggtgagagtctccagcttccc

SEQ ID NO: 462367 - DNA, 3606 bp, Homo sapiens
aggctgaagcagtagaatcatttgaacctgggaagtggaggttacagtgagctgagattgcaccgcagcactgcagcctgggcaacagagcgagactccatctcaaaaaacaacaacaacaaatagtaacaacagcaaatattacctattcatgaaaagactgatacatggctgggcatggtggctcacacctgtaatcccagccctatgggaggccaggcaggaggatcacttgaggtcaggagttcaagaccagcctgagcaacataccaagacccccatctttaacaacaacagcaacaaaaaaccctaatagcaggtttagcctaagacccgacacacagtaggtgcctgatgaaagcaagctgttatcattgtttttgcttttcattttctaccctgggctcctcttaagactcggtctctcttgtttcttggaggtcaggttgccaaacttttccaggactcgagtctgggaagcaccgttaacatcctcgtaactcgcctcatcctgctcacggaggaccagcccactctggagatcacccaccatgccgggaagtccctggacagcttctgtaagtggcagaaatccatcgtgaaccacagcggccatggcaatgccattccagagaacggtgtggctaaccatgacacagcagtgctcatcacacgctatgacatctgcatctacaagaacaaaccctgcggcacactaggcctggccccggtgggcggaatgtgtgagcgcgagagaagctgcagcgtcaatgaggacattggcctggccacagcgttcaccattgcccacgagatcgggcacacattcggcatgaaccatgacggcgtgggaaacagctgtggggcccgtggtcaggacccagccaagctcatggctgcccacattaccatgaagaccaacccattcgtgtggtcatcctgcagccgtgactacatcaccagctttctagactcgggcctggggctctgcctgaacaaccggccccccagacaggactttgtgtacccgacagtggcaccgggccaagcctacgatgcagatgagcaatgccgctttcagcatggagtcaaatcgcgtcagtgtaaatacggggaggtctgcagcgagctgtggtgtctgagcaagagcaaccggtgcatcaccaacagcatcccggccgccgagggcacgctgtgccagacgcacaccatcgacaaggggtggtgctacaaacgggtctgtgtcccctttgggtcgcgcccagagggtgtggacggagcctgggggccgtggactccatggggcgactgcagccggacctgtggcggcggcgtgtcctcttctagccgtcactgcgacagccccaggccaaccatcgggggcaagtactgtctgggtgagagaaggcggcaccgctcctgcaacacggatgactgtccccctggctcccaggacttcagagaagtgcagtgttctgaatttgacagcatccctttccgtgggaaattctacaagtggaaaacgtaccggggagggggcgtgaaggcctgctcgctcacgtgcctagcggaaggcttcaacttctacacggagagggcggcagccgtggtggacgggacaccctgccgtccagacacggtggacatttgcgtcagtggcgaatgcaagcacgtgggctgcgaccgagtcctgggctccgacctgcgggaggacaagtgccgagtgtgtggcggtgacggcagtgcctgcgagaccatcgagggcgtcttcagcccagcctcacctggggccgggtacgaggatgtcgtctggattcccaaaggctccgtccacatcttcatccaggatctgaacctctctctcagtcacttggccctgaagggagaccaggagtccctgctgctggaggggctgcctgggaccccccagccccaccgtctgcctctagctgggaccacctttcaactgcgacaggggccagaccaggtccagagcctcgaagccctgggaccgattaatgcatctctcatcgtcatggtgctggcccggaccgagctgcctgccctccgctaccgcttcaatgcccccatcgcccgtgactcgctgcccccctactcctggcactatgcgccctggaccaagtgctcggcccagtgtgcaggcggtagccaggtgcaggcggtggagtgccgcaaccagctggacagctccgcggtcgccccccactactgcagtgcccacagcaagctgcccaaaaggcagcgcgcctgcaacacggagccttgccctccagactgggttgtagggaactggtcgctctgcagccgcagctgcgatgcaggcgtgcgcagccgctcggtcgtgtgccagcgccgcgtctctgccgcggaggagaaggcgctggacgacagcgcatgcccgcagccgcgcccacctgtactggaggcctgccacggccccacttgccctccggagtgggcggccctcgactggtctgagtgcacccccagctgcgggccgggcctccgccaccgcgtggtcctttgcaagagcgcagaccaccgcgccacgctgcccccggcgcactgctcacccgccgccaagccaccggccaccatgcgctgcaacttgcgccgctgccccccggcccgctgggtggctggcgagtggggtgagtgctctgcacagtgcggcgtcgggcagcggcagcgctcggtgcgctgcaccagccacacgggccaggcgtcgcacgagtgcacggaggccctgcggccgcccaccacgcagcagtgtgaggccaagtgcgacagcccaacccccggggacggccctgaagagtgcaaggatgtgaacaaggtcgcctactgccccctggtgctcaaatttcagttctgcagccgagcctacttccgccagatgtgctgcaaaacctgccagggccactagggggcgcgcggcacccggagccacagctggcggggtctccgccgccagccctgcagcgggccggccagagggggccccgggggggcgggaactgggagggaagggtgagacggagccggaagttatttattgggaacccctgcagggccctggctggggggatggagaggggctggctatccccccagagcccctcttcagcatccgccccttccagttcacatagtgagaccccccctccagggtgggtctggggaggggacagctgttcaccccagcaccctttgaacccacccttagggagtccccaacactccccccctcctttgatcggaatatgtactgtgaagagtaggggtggggaggtggtctgccggtgccctgccccccagcactgccctacccctccactccgagctgggggggaatctgtgtctgctatgggaggggggggggtagcaccacctccctgacaccctcccctgacctgactagggggaggatccaccccaacctctgccctgcccgccccaggggcaccccgacatccaggccaccccctcatggtgctacagaccctgccctggggcccacacactcctgccaggaagccctacatcaataaagttctgtcttgtgtagatttctacgaaatgcgg

SEQ ID NO: 462368 - DNA, 4407 bp, Homo sapiens
cgacggcgcggaggccccgggcgcggcgcaggctccaaagaagaagaaaccaaggcccagagagggaggcccaggtgcagggagcaggcgagggaaggatccgtacaggggcccaacactactccaccaaccgaagcccccaaaaggagcccggtgatgctgcgaaggctgtgaacaggggaggcggcactgtgggggctgccggcagccggggctggggagagacatgtggacacgtggcctctatggctcccgcctgccagatcctccgctgggccctcgccctggggctgggcctcatgcttcgaggtcacgcacgccttccggtctcaagatgagttcctgtccagtctggagagctatgagatcgccttccccacccgcgtggaccacaacggggcactgctggccttctcgccacctcctccccggaggcagcgccgcggcacgggggccacagccgagtcccgcctcttctacaaagtggcctcgcccagcacccacttcctgctgaacctgacccgcagctcccgtctactggcagggcacgtctccgtggagtactggacacgggagggcctggcctggcagagggcggcccggccccactgcctctacgctggtcacctgcagggccaggccagcagctcccatgtggccatcagcacctgtggaggcctgcacggcctgatcgtggcagacgaggaagagtacctgattgagcccctgcacggtgggcccaagggttctcggagcccggaggaaagtggaccacatgtggtgtacaagcgttcctctctgcgtcacccccacctggacacagcctgtggagtgagagatgagaaaccgtggaaagggcggccatggtggctgcggaccttgaagccaccgcctgccaggcccctggggaatgaaacagagcgtggccagccaggcctgaagcgatcggtcagccgagagcgctacgtggagaccctggtggtggctgacaagatgatggtggcctatcacgggcgccgggatgtggagcagtatgtcctggccatcatgaacattgttgccaaacttttccaggactcgagtctgggaagcaccgttaacatcctcgtaactcgcctcatcctgctcacggaggaccagcccactctggagatcacccaccatgccgggaagtccctggacagcttctgtaagtggcagaaatccatcgtgaaccacagcggccatggcaatgccattccagagaacggtgtggctaaccatgacacagcagtgctcatcacacgctatgacatctgcatctacaagaacaaaccctgcggcacactaggcctggccccggtgggcggaatgtgtgagcgcgagagaagctgcagcgtcaatgaggacattggcctggccacagcgttcaccattgcccacgagatcgggcacacgtgaggccagggcacacaagagggggaggaggggaggagctgggcgggtccctcagcgcccggcagagccgacacccctttccccagattcggcatgaaccatgacggcgtgggaaacagctgtggggcccgtggtcaggacccagccaagctcatggctgcccacattaccatgaagaccaacccattcgtgtggtcatcctgcagccgtgactacatcaccagctttctagagtgaggatgcacctgggtgtccctcagagcgggtcacactcatggtggggcagggtacacgggagacgatagaaatcagggatgctccctgggacccccatccagctgaggctcctgagctcttgatttgcagccacctagcatgacagttgcttttctctcgaggcagctcgggcctggggctctgcctgaacaaccggccccccagacaggactttgtgtacccgacagtggcaccgggccaagcctacgatgcagatgagcaatgccgctttcagcatggagtcaaatcgcgtcagtgtaaatacggggaggtctgcagcgagctgtggtgtctgagcaagagcaaccggtgcatcaccaacagcatcccggccgccgagggcacgctgtgccagacgcacaccatcgacaaggggtggtgctacaaacgggtctgtgtcccctttgggtcgcgcccagagggtgtggacggagcctgggggccgtggactccatggggcgactgcagccggacctgtggcggcggcgtgtcctcttctagccgtcactgcgacagccccaggccaaccatcgggggcaagtactgtctgggtgagagaaggcggcaccgctcctgcaacacggatgactgtccccctggctcccaggacttcagagaagtgcagtgttctgaatttgacagcatccctttccgtgggaaattctacaagtggaaaacgtaccggggagggggcgtgaaggcctgctcgctcacgtgcctagcggaaggcttcaacttctacacggagagggcggcagccgtggtggacgggacaccctgccgtccagacacggtggacatttgcgtcagtggcgaatgcaagcacgtgggctgcgaccgagtcctgggctccgacctgcgggaggacaagtgccgagtgtgtggcggtgacggcagtgcctgcgagaccatcgagggcgtcttcagcccagcctcacctggggccgggtacgaggatgtcgtctggattcccaaaggctccgtccacatcttcatccaggatctgaacctctctctcagtcacttggccctgaagggagaccaggagtccctgctgctggaggggctgcctgggaccccccagccccaccgtctgcctctagctgggaccacctttcaactgcgacaggggccagaccaggtccagagcctcgaagccctgggaccgattaatgcatctctcatcgtcatggtgctggcccggaccgagctgcctgccctccgctaccgcttcaatgcccccatcgcccgtgactcgctgcccccctactcctggcactatgcgccctggaccaagtgctcggcccagtgtgcaggcggtagccaggtgcaggcggtggagtgccgcaaccagctggacagctccgcggtcgccccccactactgcagtgcccacagcaagctgcccaaaaggcagcgcgcctgcaacacggagccttgccctccagactgggttgtagggaactggtcgctctgcagccgcagctgcgatgcaggcgtgcgcagccgctcggtcgtgtgccagcgccgcgtctctgccgcggaggagaaggcgctggacgacagcgcatgcccgcagccgcgcccacctgtactggaggcctgccacggccccacttgccctccggagtgggcggccctcgactggtctgagtgcacccccagctgcgggccgggcctccgccaccgcgtggtcctttgcaagagcgcagaccaccgcgccacgctgcccccggcccgctgggtggctggcgagtggggtgagtgctctgcacagtgcggcgtcgggcagcggcagcgctcggtgcgctgcaccagccacacgggccaggcgtcgcacgagtgcacggaggccctgcggccgcccaccacgcagcagtgtgaggccaagtgcgacagcccaacccccggggacggccctgaagagtgcaaggatgtgaacaaggtcgcctactgccccctggtgctcaaatttcagttctgcagccgagcctacttccgccagatgtgctgcaaaacctgccagggccactagggggcgcgcggcacccggagccacagctggcggggtctccgccgccagccctgcagcgggccggccagagggggccccgggggggcgggaactgggagggaagggtgagacggagccggaagttatttattgggaacccctgcagggccctggctggggggatggagaggggctggctatccccccagagcccctcttcagcatccgccccttccagttcacatagtgagaccccccctccagggtgggtctggggaggggacagctgttcaccccagcaccctttgaacccacccttagggagtccccaacactccccccctcctttgatcggaatatgtactgtgaagagtaggggtggggaggtggtctgccggtgccctgccccccagcactgccctacccctccactccgagctgggggggaatctgtgtctgctatgggaggggggggggtagcaccacctccctgacaccctcccctgacctgactagggggaggatccaccccaacctctgccctgcccgccccaggggcaccccgacatccaggccaccccctcatggtgctacagaccctgccctggggcccacacactcctgccaggaagccctacatcaataaagttctgtcttgtgtagatttctacgaaatgcgg

SEQ ID NO: 462369 - DNA, 208 bp, Homo sapiens
cggtgtggggagagccggcacgcccttggcttagagcgtgtgaaatcaattttggggttgggaaaaagtggaaggcataagcatagaaatattttaggatattttaggatatgtgaataaagctagactcaaaccatcataataaacatttttttttttttttttttttttttttttttttttttttttttttttttttttttttttt

SEQ ID NO: 462370 - DNA, 3296 bp, Homo sapiens
  misc_feature (1796)..(1796): n is a, c, g, or t
  misc_feature (2225)..(2225): n is a, c, g, or t
gcaatccaccgacctggagttcacggcctccgccctcctggcccagcggcccccacccgaccccacccgaccccacccgacccaggccggttccggtcacgccggaagcacgtggccccccaccctgcggcgttgcccgggagaccagggttgtttaccagcaggacagagcccgggcgcaggcggcggatggagcggaacggctaggggtcttgagaagcaatggccacagaagcccctgtgaatatagcaccacctgagtgtagcactgttgtcagcacagcagttgacagcctcatttggcagccaaactcactaaatatgcacatgataaggcccaagtccgccaagggacggacaagaccgagtctgcagaaatcccagggcgtggaggtgtgcgctcatcatataccatctccgcctccagccattccctatgagttgccaagcagccaaaaaccaggagcctgtgcacccaaatctccaaaccagggagcttctgatgagatccctgagctgcagcagcaagtacccactggggcttcctcttctctcaataagtatccagtccttccttccatcaacagaaagaacctggaggaggaggctgtggaaaccgttgccaaaaaggccagctcactgcaactgagcagtatccgggctctttaccaagacgagacgggcaccatgaagacaagtgaagaagattccagagctcgagcttgtgccgtggagaggaaattcatcgtccgaaccaagaaacagggctcttccagggctggaaatctggaggaaccatcggaccaagaaccaaggttgctgcttgctgttagatcaccaacaggccaaaggtttgtacgccatttccggccaacagatgatttgcaaaccattgttgctgtggccgaacagaaaaacaaaacctcctaccgacactgcagcattgaaacaatggaggtgcccaggaggcgattttctgacctcaccaaatctctgcaagagtgcagaatcccccacaagtctgtgctgggcatctcactggaagatggggaagggtggccctgagtccacagccacccagctgaggtcctgggtctctgagcaaaggagcatgcttgggcgttgtggcctcttaggcagcctgtttcaagtgccatgtggacctggtgcagctgggaagcttgggactctcgtctgcactgcgtgtcctctgaagcagtgaagtctgtgcctatgccgagcgcgctaagaagtctcccttccagctgttccattctctccaccaccagcgtaactggcaagttaccaaggttgttcctgaaacagcagtgatcatgacttctcctttccagagttttgggtccttctgaattaatggtccttttcgaacaccggcttgcctttacagtgaactgtgattctctcgaagccaatgctttcctgtctgtatttgatgcaggattaaacacttcccagagaggattctagtctggtaaataaccacagtgtaggaactatctaactggcatttgtgtttcttgcgagtattttgaagaaacaggccgttgaccccatctttggaagtagccctttaccatgcatggtcagtttcttagggatttactatttgtgtgaggtggcatctaagggaagaatgggttttcttccccaaaacatcagcatttctaaaatagtcctaaagcttgaaagtaagttgcttccatgagcatggattacccagtagctactttttaatagagactgactaggtttacaacttctgggagctactctgngggctgaattcttccaaaaccgagaaaagccagtgcagtctgatttcttttgcttttgtcagtaatggaatcttttgtttttaaaatgtacaaacctataagtttaaacaggtttgtactgacaacctccttggcttatttgggggtggagcaattgttttattccccagtttcagtgcgttgcccacttcaaacatggtgtgtcctttggagctgtgacagaggtgcctgttctgacttagaacctctggaggaggaggggggtgccttggtctcgtgttactttgctgtgcctgtgctgagagaccatgtgcccgagcatctggttgaccggcatgaagtacatcagcctgtcttagcctgagctgctttgaagaccatggggtcttgtgtttccaacttcgaagtgctgatgtggacagtttgccnatgttctcttctattgcaagttcagccagactccatgactcatctgatcccttttatggccaaatcatccttcagagtagggaacactcagacattctgtgcatgttgttcccccaaagcatggtcatcacaaagtcctgagttctggtgtgtgctcccgcctcctgggtatacagagagaaggcaggaatcaggagttccagaagcatatacatgtggctaccccagcaacaagcgcatcctgtgctcagataagctgcatggttgggagtgttttttctcgcacgttgaggcttagtggagatgggcaccactgccatttgctcagaagaaggctggtctggtcctaactgcatcccacactgcccagatcattctagaataggttatttctgaatgttttatagaatttcttaataccatcctggtttggtcagccattcctttgattggaaaggtcagctggggccagtggtgcctcaggcaggcccacacaactggccacctcttcccgttaatgaccacagcagacagaatttgagcccagcacctaaaagtacaggaatttcacttcccaccaggacttgagcacataactctatgtctgatctaggaggctgggggaagagcctcccataaaatcacacctactctgtggtaagaataaaatcccacccacctgggacttggtaatttctccagacaggaaagctttagaaaacttgagtgaaatggagcaagcttgaaggagttagaatcttctgtgcttagggtttgctgctgctggtgagcttagaattttggggttgggaaaaagtggaaggcataagcatagaaatattttaggatattttaggatatgtgaataaagctagactcaaaccatcataataaacattttttttttggacaaaagatgatacgataaaaaccaacttgtgtgaaactgagtcagtggagaagtgcatctcgtattttaacctaaggcttcagctcccacacacgactggacagaggggtgtgttagcctgatcttcagttttctcattgggaaagcacttgttccactgt

SEQ ID NO: 462371 - DNA, 1480 bp, Homo sapiens
gcaatccaccgacctggagttcacggcctccgccctcctggcccagcggcccccacccgaccccacccgaccccacccgacccaggccggttccggtcacgccggaagcacgtggccccccaccctgcggcgttgcccgggagaccagggttgtttaccagcaggacagagcccgggcgcaggcggcggatggagcggaacggctaggggtcttgagaagcaatggccacagaagcccctgtgaatatagcaccacctgagtgtagcactgttgtcagcacagcagttgacagcctcatttggcagccaaactcactaaatatgcacatgataaggcccaagtccgccaagggacggacaagaccgagtctgcagaaatcccagggcgtggaggtgtgcgctcatcatataccatctccgcctccagccattccctatgagttgccaagcagccaaaaaccaggagcctgtgcacccaaatctccaaaccagggagcttctgatgagatccctgagctgcagcagcaagtacccactggggcttcctcttctctcaataagtatccagtccttccttccatcaacagaaagaacctggaggaggaggctgtggaaaccgttgccaaaaaggccagctcactgcaactgagcagtatccgggctctttaccaagacgagacgggcaccatgaagacaagtgaagaagattccagagctcgagcttgtgccgtggagaggaaattcatcgtccgaaccaagaaacagggctcttccagggctggaaatctggaggaaccatcggaccaagaaccaaggttgctgcttgctgttagatcaccaacaggccaaaggtttgtacgccatttccggccaacagatgatttgcaaaccattgttgctgtggccgaacagaaaaacaaaacctcctaccgacactgcagcattgaaacaatggaggtgcccaggaggcgattttctgacctcaccaaatctctgcaagagtgcagaatcccccacaagtctgtgctgggcatctcactggaagatggggaagggtggccctgagtccacagccacccagctgaggtcctgggtctctgagcaaaggagcatgcttgggcgttgtggcctcttaggcagcctgtttcaagtgccatgtggacctggtgcagctgggaagcttgggactctcgtctgcactgcgtgtcctctgaagcagtgaagtctgtgcctatgccgagcgcgctaagaagtctcccttccagctgttccattctctccaccaccagcgtaactggcaagttaccaaggttgttcctgaaacagcagtgatcatgacttctcctttccagagttttgggtccttctgaattaatggtccttttcgaacaccggcttgcctttacagtgaactgtgattctctcgaagccaatgctttcctgtctgtatttgatgcaggattaaacacttcccagagag

SEQ ID NO: 462372 - DNA, 1459 bp, Homo sapiens
ctcccgcggccctaaggtgctggcgggcgtttggcgttgcagctgtgtgggcgctggtgcgtgcgagtagcgctcgaagaaacccaaaggcgtcgtggggctgccgtgtgccccagagagcactgcaggccgggtaggggctaaggctccccgcagtcttctgtgtgtcgtccagtacgcagttgaaatcgttctccaacctggccagtcctccgaggcccttctcaggcgaccagactctgttaacagagtccattgctaaaactcctcgttagtatttaccactcctccagtctgtgttttgaagcagtggttttcaaccactgcccgttttcagaagaaatcatctcaagcgtccgtgtgctgctagaagccgggccgggaggtcttggtgccggactccaccctgcagcccttccctttcgccaccgccctgtgcttagagaaaccttagagtggagcaatgagtcgcccttgactgagtaactcttcggggtcaacttctccttccacgccaaggaaaggattccagggcgatgtttctggaaatagagatctgaccaagccactgctctggtgaaaattcagtgggtccctagcacctagtgcagcggctcctagcctgagtattgccgtctttcggtggggaggggttgggtttttttgtagcatctgttgatctgatctccaacatcctccacgtcaattcccactccacccacatcccttatcctatacgtaagctttccagccacggtgctggcttgggtgggggtgcgtgcggtgctgacaccaaaatggaggtcccgtgtttctgagagtctctttcagagcaatgcaaacctgaaactactcctgccaagaaacgattgcagctcttcccggaaaagttaaagcctttgagaaacaaagctgaggttgaaagtattagtccattttatagatgaagaaatggaggcccagagagatcacgtgacttagccaagtccaccaactaatattgggaagctcagcagggtcctgggggcccacaggaatgtgaataaacacgcttggaaagtctgcagaatttccagtcctagcctcctgctggtgtgaacctgggctcctgtgcctgggaccctgggagggcctaggggatgccaaattccagggtccagaaagagcttgggataaaatgaacatccaaggggagggctttgacctgggctgagtctgcctgtgccgagtctgcctgtgccatccaactggagtctcaagtcctgaggcaggacgtccagatgccccagtgcagggtcctcctgatcaacacctgctcccctgtactcattagcaacctcacccaccctactctcaaagcacacttggctctcatatccaggagctctgcatctgtagattcagcaacagcagatggaaaatattcagaaaataaattggacagttatatttctattga

SEQ ID NO: 462373 - DNA, 2294 bp, Homo sapiens
ctcccgcggccctaaggtgctggcgggcgtttggcgttgcagctgtgtgggcgctggtgcgtgcgagtagcgctcgaagaaacccaaaggcgtcgtggggctgccgtgtgccccagagagcactgcaggccgggtaggggctaaggctccccgcagtcttctgtgtgtcgtccagtacgcagttgaaatcgttctccaacctggccagtcctccgaggcccttctcaggcgaccagactctgttaacagagtccattgctaaaactcctcgttagtatttaccactcctccagtctgtgttttgaagcagtggttttcaaccactgcccgttttcagaagaaatcatctcaagcgtccgtgtgctgctagaagccgggccgggaggtcttggtgccggactccaccctgcagcccttccctttcgccaccgccctgtgcttagagaaaccttagagtggagcaatgagtcgcccttgactgagtaactcttcggggtcaacttctccttccacgccaaggaaaggattccagggcgatgtttctggaaatagagatctgaccaagccactgctctggtgaaaattcagtgggtccctagcacctagtgcagcggctcctagcctgagtattgccgtctttcggtggggaggggttgggtttttttgtagcatctgttgatctgatctccaacatcctccacgtcaattcccactccacccacatcccttatcctatacgtaagctttccagccacggtgctggcttgggtgggggtgcgtgcggtgctgacaccaaaatggaggtcccgtgtttctgagagtctctttcagagcaatgcaaacctgaaactactcctgccaagaaacgattgcagctcttcccggaaaagttaaagcctttgagaaacaaagctgaggttgaaagtattagtccattttatagatgaagaaatggaggcccagagagatcacgtgacttagccaagtccaccaagtgagtagacggagatgacctgacctctggagttctgtctctaacataccctagttctttcttgattgtccataatatacaaacacagtggcctgagaatatttactcccctggtcactatttcttcagctggaaagggaaacaaattagtaacatttgaaaaaacaaaaaccccaacaactaaaaaagtattactaaatgcaatgctgtttgagagaacaaactgtcaacaaaaataatacttaattctctggaagtgaaattaattaaaaattcagaggagataccagaacactagctggtaggattaaataagtgaaggaccagctggagcaacatagcaagacctcatctcctcaaaaacaaaaaagaaaagaaaattaggcgtggtggcatgtacctgtagtcctacttacttgggaggctgagtgtcaagggttggggggagagaggaggatttggaagtaatgactcaggggggtggggtttcttcttggggtgaaatgttggggatggaaatgttctgaatttagcatgctggaccacatcaagttcagaagcttctgaacagcgaaggaaacaatcaatgaagagacccacagaatgagagaaaatatttgcaaaccactcatctgaagctcagataactccataggaaaaaaatcgaataatccgatttaaaaatgggcaaaatatctgaatagacatttctcaaaagaagacacatattctacattgaaaaaaaaaaataaggccgggcgcggtggctcatgcctgtaatcccagcactttgggagactgaggagggcagatcacctgaggattgtgttactcattgtagaaaaaccagtaaccccagcaagcaagctcacccccctggctccacagacctccccagtctcatctctcaagactcctgcccttcacaagatgctctggcgcaccccagccctgtgctccctctcatttggtttcctctgcttggattgcccttctcaccttctttagttggtgtctgctcaccttctaagactcagcccagtccttatctcctccaggaagccttccccaatctcccttccactggctgggttaggtgctgtcccttgggctcctatcaacctgcccctgaaccagaccctttatacagcgtcacctcattgaatctgacaaagtataactcagctcctagttcaaagtaaacatctgccctgccattgatcccgctgaggtaacagaaataaagccagctgtggaggtgtcttctgctttggcctcagcagatcccaagatggaagcc

SEQ ID NO: 462374 - DNA, 488 bp, Homo sapiens
atctctttttcgtttctgatattttaactgggtatttctctccatgacccttggatattctagctagaggatcctgtggggaaagtgccgggcacacagtaggggctcactcttctagacgtgttatctaaaacctggttcatctgtccttccacgcagggcctaggggatgccaaattccagggtccagaaagagcttgggataaaatgaacatccaaggggagggctttgacctgggctgagtctgcctgtgccgagtctgcctgtgccatccaactggagtctcaagtcctgaggcaggacgtccagatgccccagtgcagggtcctcctgatcaacacctgctcccctgtactcattagcaacctcacccaccctactctcaaagcacacttggctctcatatccaggagctctgcatctgtagattcagcaacagcagatggaaaatattcagaaaataaattggacagttatatttctattg

SEQ ID NO: 462375 - DNA, 1464 bp, Homo sapiens
gcctttctgcccgtggacgccgccgaagaagcatcgttaaagtctctcttcaccctgccgtcatgtctaagtcagagtctcctaaagagcccgaacagctgaggaagctcttcattggagggttgagctttgaaacaactgatgagagcctgaggagccattttgagcaatggggaacgctcacggactgtgtggtaatgagagatccaaacaccaagcgctccaggggctttgggtttgtcacatatgccactgtggaggaggtggatgcagctatgaatgcaaggccacacaaggtggatggaagagttgtggaaccaaagagagctgtctccagagaagattctcaaagaccaggtgcccacttaactgtgaaaaagatatttgttggtggcattaaagaagacactgaagaacatcacctaagagattattttgaacagtatggaaaaattgaagtgattgaaatcatgactgaccgaggcagtggcaagaaaaggggctttgcctttgtaacctttgacgaccatgactccgtggataagattgtcattcagaaataccatactgtgaatggccacaactgtgaagttagaaaagccctgtcaaagcaagagatggctagtgcttcatccagccaaagaggtcgaagtggttctggaaactttggtggtggtcgtggaggtggtttcggtgggaatgacaacttcggtcgtggaggaaacttcagtggtcgtggtggctttggtggcagccgtggtggtggtggatatggtggcagtggggatggctataatggatttggtaatgatggaagcaattttggaggtggtggaagctacaatgattttgggaattacaacaatcagtcttcaaattttggacccatgaagggaggaaattttggaggcagaagctctggcccctatggcggtggaggccaatactttgcaaaaccacgaaaccaaggtggctatggcggttccagcagcagcagtagctatggcagtggcagaagattttaattaggaaacaaagcttagcaggagaggagagccagagaagtgacagggaagctacaggttacaacagatttgtgaactcagccaagcacagtggtggcagggcctagctgctacaaagaagacatgttttagacaaatactcatgtgtatgggcaaaaaactcgaggactgtatttgtgactaattgtataacaggttattttagtttctgttctgtggaaagtgtaaagcattccaacaaagggttttaatgtagatttttttttttgcaccccatgctgttgattgctaaatgtaacagtctgatcatccttccatccccaggcactgaccctggttttcacttaggtggctccaggtggcctgtgatccttccccacagcaatacggcattcacattctgattcccttactggacgtcgggcccttcttctctcct

SEQ ID NO: 462376 - DNA, 442 bp, Homo sapiens
aaatactcatgtgtatgggcaaaacatgtcttctttgtagcagctaggccctgccaccactgtgcttggctgagttcacaaatctgttgtaacctgtagcttccctgtcacttctctggctctcctctcctgctacaaagaagacatgttttagacaaatactcatgtgtatgggcaaaaaactcgaggactgtatttgtgactaattgtataacaggttattttagtttctgttctgtggaaagtgtaaagcattccaacaaagggttttaatgtagatttttttttttgcaccccatgctgttgattgctaaatgtaacagtctgatcgtgacgctgaataaatgtcttttttttaaaaaaaaaaaaaaaaaaaaaaaaaaaaaaaaaaaaaaaaaaaaaaaaaaaaaaaaagaaaaaaaaaaaaaaaaagacaaaaaaa

SEQ ID NO: 462377 - DNA, 1445 bp, Homo sapiens
gcctttctgcccgtggacgccgccgaagaagcatcgttaaagtctctcttcaccctgccgtcatgtctaagtcagagtctcctaaagagcccgaacagctgaggaagctcttcattggagggttgagctttgaaacaactgatgagagcctgaggagccattttgagcaatggggaacgctcacggactgtgtggtaatgagagatccaaacaccaagcgctccaggggctttgggtttgtcacatatgccactgtggaggaggtggatgcagctatgaatgcaaggccacacaaggtggatggaagagttgtggaaccaaagagagctgtctccagagaagattctcaaagaccaggtgcccacttaactgtgaaaaagatatttgttggtggcattaaagaagacactgaagaacatcacctaagagattattttgaacagtatggaaaaattgaagtgattgaaatcatgactgaccgaggcagtggcaagaaaaggggctttgcctttgtaacctttgacgaccatgactccgtggataagattgtcattcagaaataccatactgtgaatggccacaactgtgaagttagaaaagccctgtcaaagcaagagatggctagtgcttcatccagccaaagaggtcgaagtggttctggaaactttggtggtggtcgtggaggtggtttcggtgggaatgacaacttcggtcgtggaggaaacttcagtggtcgtggtggctttggtggcagccgtggtggtggtggatatggtggcagtggggatggctataatggatttggtaatgatggaagcaattttggaggtggtggaagctacaatgattttgggaattacaacaatcagtcttcaaattttggacccatgaagggaggaaattttggaggcagaagctctggcccctatggcggtggaggccaatactttgcaaaaccacgaaaccaaggtggctatggcggttccagcagcagcagtagctatggcagtggcagaagattttaattaggaaacaaagcttagcaggagaggagagccagagaagtgacagggaagctacaggttacaacagatttgtgaactcagccaagcacagtggtggcagggcctagctgctacaaagaagacatgttttagacaaatactcatgtgtatgggcaaaaaactcgaggactgtatttgtgactaattgtataacaggttattttagtttctgttctgtggaaagtgtaaagcattccaacaaagggttttaatgtagatttttttttttgcaccccatgctgttgattgctaaatgtaacagtctgatcgtgacgctgaataaatgtcttttttttaaaaaaaaaaaaaaaaaaaaaaaaaaaaaaaaaaaaaaaaaaaaaaaaaaaaaaaaagaaaaaaaaaaaaaaaaagacaaaaaaa

SEQ ID NO: 462378 - DNA, 909 bp, Homo sapiens
gcctttctgcccgtggacgccgccgaagaagcatcgttaaagtctctcttcaccctgccgtcatgtctaagtcagagtctcctaaagagcccgaacagctgaggaagctcttcattggagggttgagctttgaaacaactgatgagagcctgaggagccattttgagcaatggggaacgctcacggactgtgtggtaatgagagatccaaacaccaagcgctccaggggctttgggtttgtcacatatgccactgtggaggaggtggatgcagctatgaatgcaaggccacacaaggtggatggaagagttgtggaaccaaagagagctgtctccagagaagattctcaaagaccaggtgcccacttaactgtgaaaaagatatttgttggtggcattaaagaagacactgaagaacatcacctaagagattattttgaacagtatggaaaaattgaagtgattgaaatcatgactgaccgaggcagtggcaagaaaaggggctttgcctttgtaacctttgacgaccatgactccgtggataagattgtcattcagaaataccatactgtgaatggccacaactgtgaagttagaaaagccctgtcaaagcaagagatggctagtgcttcatccagccaaagaggtcgaagtggttctggaaactttggtggtggtcgtggaggtggtttcggtgggaatgacaacttcggtcgtggaggaaacttcagtggtcgtggtatgtatggtttatgtacatgtagttgtgacttctcaccatcttggctatgaagattgtacagtacgggagctgcattcagaatgtcacttgaagtccaagtccgagttggaacttgaaactttttcttacaggtgactttggtggcagccgtggtggtgatgctcaagc

SEQ ID NO: 462379 - DNA, 1360 bp, Homo sapiens
gcctttctgcccgtggacgccgccgaagaagcatcgttaaagtctctcttcaccctgccgtcatgtctaagtcagagtctcctaaagagcccgaacagctgaggaagctcttcattggagggttgagctttgaaacaactgatgagagcctgaggagccattttgagcaatggggaacgctcacggactgtgtggtaatgagagatccaaacaccaagcgctccaggggctttgggtttgtcacatatgccactgtggaggaggtggatgcagctatgaatgcaaggccacacaaggtggatggaagagttgtggaaccaaagagagctgtctccagagaagattctcaaagaccaggtgcccacttaactgtgaaaaagatatttgttggtggcattaaagaagacactgaagaacatcacctaagagattattttgaacagtatggaaaaattgaagtgattgaaatcatgactgaccgaggcagtggcaagaaaaggggctttgcctttgtaacctttgacgaccatgactccgtggataagattgtcattcagaaataccatactgtgaatggccacaactgtgaagttagaaaagccctgtcaaagcaagagatggctagtgcttcatccagccaaagaggtcgaagtggttctggaaactttggtggtggtcgtggaggtggtttcggtgggaatgacaacttcggtcgtggaggaaacttcagtggtcgtggtggctttggtggcagccgtggtggtggtggatatggtggcagtggggatggctataatggatttggtaatgatggaagcaattttggaggtggtggaagctacaatgattttgggaattacaacaatcagtcttcaaattttggacccatgaagggaggaaattttggaggcagaagctctggcccctatggcggtggaggccaatactttgcaaaaccacgaaaccaaggtggctatggcggttccagcagcagcagtagctatggcagtggcagaagattttaattaggaaacaaagcttagcaggagaggagagccagagaagtgacagggaagctacaggttacaacagatttgtgaactcagccaagcacagtggtggcagggcctagctgctacaaagaagacatgttttagacaaatactcatgtgtatgggcaaaaaactcgaggactgtatttgtgactaattgtataacaggttattttagtttctgttctgtggaaagtgtaaagcattccaacaaagggttttaatgtagatttttttttttgcaccccatgctgttgattgctaaatgtaacagtctgatcgtgacgctgaataaatgtctttttttt

SEQ ID NO: 462380 - DNA, 1552 bp, Homo sapiens
gcctttctgcccgtggacgccgccgaagaagcatcgttaaagtctctcttcaccctgccgtcatgtctaagtcagagtctcctaaagagcccgaacagctgaggaagctcttcattggagggttgagctttgaaacaactgatgagagcctgaggagccattttgagcaatggggaacgctcacggactgtgtggtaatgagagatccaaacaccaagcgctccaggggctttgggtttgtcacatatgccactgtggaggaggtggatgcagctatgaatgcaaggccacacaaggtggatggaagagttgtggaaccaaagagagctgtctccagagaagattctcaaagaccaggtgcccacttaactgtgaaaaagatatttgttggtggcattaaagaagacactgaagaacatcacctaagagattattttgaacagtatggaaaaattgaagtgattgaaatcatgactgaccgaggcagtggcaagaaaaggggctttgcctttgtaacctttgacgaccatgactccgtggataagattgtcattcagaaataccatactgtgaatggccacaactgtgaagttagaaaagccctgtcaaagcaagagatggctagtgcttcatccagccaaagaggtcgaagtggttctggaaactttggtggtggtcgtggaggtggtttcggtgggaatgacaacttcggtcgtggaggaaacttcagtggtcgtggtggctttggtggcagccgtggtggtggtggatatggtggcagtggggatggctataatggatttggtaatgatggaagcaattttggaggtggtggaagctacaatgattttgggaattacaacaatcagtcttcaaattttggacccatgaagggaggaaattttggaggcagaagctctggcccctatggcggtggaggccaatactttgcaaaaccacgaaaccaaggtggctatggcggttccagcagcagcagtagctatggcagtggcagaagattttaattaggaaacaaagcttagcaggagaggagagccagagaagtgacagggaagctacaggttacaacagatttgtgaactcagccaagcacagtggtggcagggcctagctgctacaaagaagacatgttttagacaaatactcatgtgtatgggcaaaaaactcgaggactgtatttgtgactaattgtataacaggttattttagtttctgttctgtggaaagtgtaaagcattccaacaaagggttttaatgtagatttttttttttgcaccccatgctgttgattgctaaatgtaacagtctgatcgtgacgctgaataaatgtcttttttttaatgtgctgtgtaaagttagtctactcttaagccatcttggtaaatttccccaacagtgtgaagttagaattccttcagggtgatgccaggttctatttggaatttatatacaacctgcttgggtggagaagccattgtcttcggaaaccttggtgtagttgaactgatagtactgttgtgacctgaagttc

SEQ ID NO: 462381 - DNA, 1443 bp, Homo sapiens
gcctttctgcccgtggacgccgccgaagaagcatcgttaaagtctctcttcaccctgccgtcatgtctaagtcagagtctcctaaagagcccgaacagctgaggaagctcttcattggagggttgagctttgaaacaactgatgagagcctgaggagccattttgagcaatggggaacgctcacggactgtgtggtaatgagagatccaaacaccaagcgctccaggggctttgggtttgtcacatatgccactgtggaggaggtggatgcagctatgaatgcaaggccacacaaggtggatggaagagttgtggaaccaaagagagctgtctccagagaagattctcaaagaccaggtgcccacttaactgtgaaaaagatatttgttggtggcattaaagaagacactgaagaacatcacctaagagattattttgaacagtatggaaaaattgaagtgattgaaatcatgactgaccgaggcagtggcaagaaaaggggctttgcctttgtaacctttgacgaccatgactccgtggataagattgtcattcagaaataccatactgtggaggtggtttcggtgggaatgacaacttcggtcgtggaggaaacttcagtggtcgtggtggctttggtggcagccgtggtggtggtggatatggtggcagtggggatggctataatggatttggtaatgatggaagcaattttggaggtggtggaagctacaatgattttgggaattacaacaatcagtcttcaaattttggacccatgaagggaggaaattttggaggcagaagctctggcccctatggcggtggaggccaatactttgcaaaaccacgaaaccaaggtggctatggcggttccagcagcagcagtagctatggcagtggcagaagattttaattaggaaacaaagcttagcaggagaggagagccagagaagtgacagggaagctacaggttacaacagatttgtgaactcagccaagcacagtggtggcagggcctagctgctacaaagaagacatgttttagacaaatactcatgtgtatgggcaaaaaactcgaggactgtatttgtgactaattgtataacaggttattttagtttctgttctgtggaaagtgtaaagcattccaacaaagggttttaatgtagatttttttttttgcaccccatgctgttgattgctaaatgtaacagtctgatcgtgacgctgaataaatgtcttttttttaatgtgctgtgtaaagttagtctactcttaagccatcttggtaaatttccccaacagtgtgaagttagaattccttcagggtgatgccaggttctatttggaatttatatacaacctgcttgggtggagaagccattgtcttcggaaaccttggtgtagttgaactgatagtactgttgtgacctgaagttc

SEQ ID NO: 462382 - DNA, 3129 bp, Homo sapiens
tcagaggctgcgagtgtcgctgctgaaggctgtggtggacccggccgggtcgcggattctgagctacatctcgggtttggggttagggttagtggaaaggccacgaggagccgcgggggctcaggagccggtggtgggcgtctgaggagaagtcgccccatgaggaagctcttcagcttcgggagacgcccgggccgggcggtcctgggctccatcgaccacgagtacccgggtcccgcgtaccacaccagggacgcggaactgcggaagatccacagggcggccctcaagggcgacgccgcggaggtggagcgccgcctggcgcgcaggtgccgggacgtggatgcccaggacaggactgttctacatttggcctgtgcccacggccgtgtgcaagtggtcactctcttgctgagcagaaaatgtcagatcgacatctgtgacagactaaacaggacgcctttaatgaaggctgtatattgccaggaagagacgtgttccattattctgctggaacatggcaccagtccaaacattaaggacgtctacagcaacactgctcttcatgatggtaaacattgaggatgtctacggcaacactgctcttcatgatgctgtctatgataaggggacttcactggcaggaagcctgctttcccaccatgcaaatactgaagcactaaacaaggagggaaatacaccacttttgcttgctgtaatttgtaagagacagtaaatggtggcatttttagtgaagaaccaggcaagtgcacctgctgttggtgattagtccattgtttagccagaaatcacacagaaagctagactagttagaagtagcaatgagtgcaagattctttcaggacttttaaagacctttatccccagggatctcagtgttcattttattccaagtataaccttatatataaccttatatgtgagatataaataacgtcacatttttacttgtttttctttctttctttctttcttttttttttagacaaggtctcactatgttgcccacattcctgagctcaactgattctcctgcctcagcctcccaaactgctagacaccatgcctggcctgacttttctaattagttattgggtcttgaaatgtccagtttagcagaaagtcttggattgtcccctggggctatctcctatgccttcatcctttgaatttttcaaaaagctaaggggttccctaagtccaaggaagacaatcttgctttacaagtcagaagatagggggaaaaggccattctaaatattctgtttccattgattcacttgtattgctgccattgtaactggtcctgcgatctggtaatgactaacctttgccaccaggatgcctttactgattcagacctctcactctttgtggtgactcacacacagagttcacagctacagtgatgcctttactgattcagacccttcagtctttgtggtgactcacacacaaagctcacagctacagtgttttttagttcatgtacatatgctcagccgttgttcccagcacactgctctggcagcgaggcctcctggctttacccacacacatagtgagtaaattgaccctcccctaacactaaaaaccttatttgttgcccacctcttagctaggcttagcctagaccttgatgagtcagggcttcactatggtctccaggctgctcttaaactcttggcttggagcagttctccttcctgggccttccaaagtgctgagattacaggtgtgagctactgtgcccagcctacattcagagtcttaaaacacgaaaataaatttgtcagaatagtagaggaaaacatttcagatgtaaaaatcaggatatacactaataaaggtataatggtaacaaaattttgcaaattattagtaaataacaactcacttagcatgttgttgaaaagatactattatgaagtagagaataaagtattactttatatgtttttactatatttttaaattttactttgtttccagcagttttgcttatttattttgcgtggaataatttgtgggtgaccctgagacttttgcatggcttgaacctgctgatatctagtgtctccttaagtggtttgttgaggttttagataattagaagtatttctttaaaatgtaaatattccagtaaacattaagcttcatttaaactctccatttataaaataaaagtatatgttattttgtatccatttttataaagattatagtctttatctaagtgttctaagtcattcattttaactaaacatatggatttgtctgcagaacacgacttaaaagtggcttcagaggaaaagcaagaaacgcttgaaagaagtgaaaataaacagccagagattttcaaagttatagaaaaaagaaggatgtgatatatacaaattgcatattgaagggagatattgccacactcaaacaggaataatacacaataaaaaatgacagtgtcaaaaaggaaaaggaatatattcaggaaattaagagtattagagaaataaatgctaactttgaaaaaagtgcaagactcaatgaggaaatgacaacaaaaacgatgtcccagtattgtcaacagcttaatggcctcaaagctgagaatacaaggctgaattcaaaattggagaaggaagaacaccacacagatggactggaagctgaagttgaattcttccattctaggctggctgctgctataaatgagcacaatgaaagtttagaaacgaaagacctagaacttgttttacagagagcacataatttttccgtacataaaaaaataagttctactgtttctcaactaaaagataaaaatgagttgcttactgaacaattttctaaagctcagatgaagttcaataccttaaaagaataaagtctggagtttagttaatagtaatgtaccaatgttaatttcaacaaatgtaccattgttatgtaaaatgttaacattagaggaaaccaggtgagggttatacaagaactctctgtactatctgcaacctagaataatctaaaactattgccaaataaaagccttttttaaatttttttgttattatactttaagttttagggtacatgtgcacaacgtgcagg

SEQ ID NO: 462383 - DNA, 1459 bp, Homo sapiens
gtcccaatgagatgaaccagtggtcctttaattctgaagttggagttggtgcccctgccatcacaaacaacacgagagccaattgtgagtcagtctcagtagccatcagcctggcagctgcccatcccataaccaaagagctcaatgggctggaggaaatacataaatacatttttgaggctattgctaccatagataatgatttatttgatggatttgtgccaagtaaattgaaaaccttctggaaaggattcaccatcctagatgccattaagaacatttgtgattcatgggagaaggtcaaaatatcaagattaacaggagtttggaagaagttgattctaaccctcatggatgactttgagggattcaagactttaatgaaggaagtcactgcagatgtggtggaaatagcaagagaactagaattagaagtgaagctaaagatgtttggtgcctggaatgctgacctagatctggaaactagcccagatgaaagcaagaatgatgaggccacagtgtccatgaaagtagggtgaggagggtgtccagtggagccagagggagtgccaagagggaggtccttggaacacggaggatccagaaggcccaggagtagaaagcagcgttggcatttgccacagctgagcagccttaactgacacctccttggcaccagcacacaaacaatggcccatggcctgacgtcttccaggatgccctaggcccgtgcccttcacctgttctgcagctgtaagactgtggtgtttgccctccttgattcttccaggtactgccccaccctgttcttctccccattctttgagtgctgagattggccagtcccatgctgagatgagggagctggaggaggggagactggctctcactcctcattgctgcccattgggatgggatgaacttcacagctctggtttcctctgttcttctctcagctgcaggtgatttaagcttgttggatttatataacattgggaaatggtaaactgtgtaaatttgctatgttttccagggacagttatttatggaagggcatttttaactcgagtgctagaagtgttaaatcattataataaattcatgctattcagactttcttacattgtaataaattttttctaagcatgaatgagaagatccatgattcttctaatataccattatgtatttcttctcaaaatgacacagcttactacaagttggagaataatagaaggagatttactgtgttggaggggaaaaaaagcagttgagcagggatgagtctgagaaaggactttggagcagtgatcacaagcagaacttctccctgcctctccgcttgcttagccagatggaaggaacaggcattgaggggttgcatccccttttcaatctcccacctgagcttagggacagcctttgtgcacagaaatggggcaccctagttgccctctgc

SEQ ID NO: 462384 - DNA, 1556 bp, Homo sapiens
gtcccaatgagatgaaccagtggtcctttaattctgaagttggagttggtgcccctgccatcacaaacaacacgagagccaattgtgagtcagtctcagtagccatcagcctggcagctgcccatcccataaccaaagagctcaatgggctggaggaaatacataaatacatttttgaggctattgctaccatagataatgatttatttgatggatttgtgccaagtaaattgaaaaccttctggaaaggattcaccatcctagatgccattaagaacatttgtgattcatgggagaaggtcaaaatatcaagattaacaggagtttggaagaagttgattctaaccctcatggatgactttgagggattcaagactttaatgaaggaagtcactgcagatgtggtggaaatagcaagagaactagaattagaagtgaagctaaagatgtttggtgcctggaatgctgacctagatctggaaactagcccagatgaaagcaagaatgatgaggccacagtgtccatgaaagtagggtgaggagggtgtccagtggagccagagggagtgccaagagggaggtccttggaacacggaggatccagaaggcccaggagtagaaagcagcgttggcatttgtaagaaagtagaagaggtggttggccagaggacaggccctgttcaagatctgaccaggacatcagagctggcctctccctcccttcttccttgcaggccacagctgagcagccttaactgacacctccttggcaccagcacacaaacaatggcccatggcctgacgtcttccaggatgccctaggcccgtgcccttcacctgttctgcagctgtaagactgtggtgtttgccctccttgattcttccaggtactgccccaccctgttcttctccccattctttgagtgctgagattggccagtcccatgctgagatgagggagctggaggaggggagactggctctcactcctcattgctgcccattgggatgggatgaacttcacagctctggtttcctctgttcttctctcagctgcaggtgatttaagcttgttggatttatataacattgggaaatggtaaactgtgtaaatttgctatgttttccagggacagttatttatggaagggcatttttaactcgagtgctagaagtgttaaatcattataataaattcatgctattcagactttcttacattgtaataaattttttctaagcatgaatgagaagatccatgattcttctaatataccattatgtatttcttctcaaaatgacacagcttactacaagttggagaataatagaaggagatttactgtgttggaggggaaaaaaagcagttgagcagggatgagtctgagaaaggactttggagcagtgatcacaagcagaacttctccctgcctctccgcttgcttagccagatggaaggaacaggcattgaggggttgcatccccttttcaatctcccacctgagcttagggacagcctttgtgcacagaaatggggcaccctagttgccctctgc

SEQ ID NO: 462385 - DNA, 6634 bp, Homo sapiens
tcccaggtagcccaggagactctccctttttggaagctacttcagaggaaaaggtgacagtaacactgtggaaatagatggatctggattccagtgtctcgactaccacttgctaattctgggaccttgcagaagtcgcatcacctctctgggctttaggaagggtcctgagacacacctagcacttcacattcactaagtcatgcgtgatcatcaaatcatttgattaattcccttactcttacagctgcctcaggatatggttcagtcatcacctccttcatccagccttctctacctctttgtcttaacattgaaatggccagcgtgttcttctacctgcctgccagacatgcaggcccaaggtaccaggaggcagatgctgacagatgcatctcagtatgcccggcacctccaccacacaagggctgtgctggttgctgtgggaatgctgcagggcacaaaacggataatgctggagggagaagacagcaaacacaaggctcaagaaactccagtatgtaagaagaggacatgcacaatggaagagggaagccaccatgcagaatgtcggggtgcacttttaaatgggacagtcaagggatcatcctggcagctatgtagagcattactataggggtcaagtaccgcagcagggacagcaattagtaggctactgcaagagtccagatgaggaaactgaggcttggcgtctcattgagtgacctacccaaaagttacccaaggagaaatgggctcgcagagatttgaatcctggtctccggccttcctttagacacttggggtgctcccaagtctgcatttggagaggggaacagcattaaagtatcagctggagcttctcagcttgaaatcctaggcctcttccagaggccagatgttcggatggtaccaaggggctctccgctgagtcctaggctgggagcagagagggaggggactctgttaccaaatcccaggctgggcactcccagggagtcccttcctccccacctgcatggcatctggcctccgccagctcctgcctggctgccagatataccagctgtggctcctctccacggagagtctcatttattaattaacactttcggttctagagggcagggcaggactgcctcatcctctgtgcctgatagccctggtagtgaccgaatgagctcaatgttctgccaattccagcaaggtgtcttgagattgttcaacctgtgcaggcagacacatcctcccaccagggcggcagcacggtccggtgactgtggtccattgctgactgttcccaggggccctaacacctacccccctacacatacacttccagtgccagggaagcacactctggcagccagaggaaccctaaggaagagtcatggcagaggctgtcagtaccacctgggcccggccctcaccttttacccacccctactggccatatcaagagggggttgtacctctgatggagattcggctgaatggacagaaaacctgggtcagacagccagcggcttcctggagagccagatatcccaaactgagccatctgggagacagaggggctcagaccagtggacagagaaaggcaggctgagcgtgtccaggaagtgtcagggtctgcatgctactgccaacctatgccagatgaccaatgccctgaagggctccaagggctagcattgtggctgggccccaagctgagtgaaccaggtcccctgactgtacaacctggaggcaatcatcttcgagagaccattgaagccagcctcccatgcccatgaccccgcgtcaatgctcagagcatgagtccatgggccattagtcttcctccacacgcaccagcttcataatgctgttgtgttatgtccttgtcccacttctccactccccctctcaacccctaaactctacctggagctggaaattcagagagtcttccctaagggttccctccatctcctgccttaactggaaccagggtctttcttgaagacacttcctcccctgcagccccccagagatgctgctgtctgctcatttactctgtaagaatcagaggtggggttggtatccatcttactctccattgctcctctttggcctagaaaacagtgcacctttgagggccgtgccattcagctctaccctttctccttgcctcattgtggtagacattattgttgatatcatgatcagcccccagaagcctttggcacctggctgaggtcttctttttcactttaagattttatttcatacttttggcttttttactttgtgcctttatcttgggtgaattcgacatccacaggaactatccatgcaacacgtaggcttctcaggtcctcaatctcatctccaataaccctctctcccacttcccccagtcactcattccctgtctcatcacaagccttgccatgaccccaaactgcagcccccagcatcactaactcaagcgtcctgctctctgaccaatctactctacttctttaaatcttgcatcatggtccttctttagcttcctcaagactttcatcaaccttttcatctttctctcaacctatcagctgtcttcctctgcttctccttttatcttggcatagactctgtggtccatcattttactaacgctcctaccagtactccaaattctcccccaccactttctcttctctacctgtttatcaaaaccccaatcttcaatgaacccaaccctttgctgtcttgtgctgcacacaaaccgacaaaattcatgatcactggcttcctgtgattctccaacgttttttcaccagcttcctcttttgccttccatgactttcaaacattcccagactcttcaaacctcatatgctttactcctgccctctcacgctcatcaggtgacctcaccccttcccagataaaatggaattgatcagaaagtaactctcctacaaatctacctacatcaccacccattctctcccctagccctgcatgagaggaggggtccttcctcctagctcctcctgtgttttgaaccccattgtctcccaccccacattattcattgtttcttctctctcctctgtatccatccacttcatctgaaaaggatctttcttgttgatatttaaacatttatgtctctcccatcttaggataaacctccttggctacaggtctccagttacaggtctctctcctctcctctccccctcttctctcctctcctctccttcactgccaaactgcctgaaagagttgtcaccatgtaatcccttggtataagttattggctaggaatatgggccctggagccagactgcctgcttttgaattccagttccatttctcagcagctgtgtgacatcaggcaaatcacataacctctctgatcttctgtttcctcttgtctataaaatgtaaacacatgtacctacctcaaagaatcattgtgagggttaagggagttaatatacataaagcacttagaacagggcctgcccatagtaagtgttcacttcctatttgccattgtttgctattattattattgctctgattgcttcctctcctccctgctccttcctccacccaataatctgacttttgccctttattctaccgaacagctctggctaaaagtactagtgttcttcttatctcttaacacaaaggacactttccaatcctcttctaattctcagcaagttgacctttccttcctactttaaacattctgtcccttctacctctctgagggttcctttaccagtttcctttgaagttttatcctcctgtcccagacatacatttgggtagcattgtcatgggtaactcactaccctccgtaagacaaggtctccccaattgatattgccaatccaaggctctcctctgacctcaagtcaaaatcctactcaacacttaagagttcccaaccactcttgaaatcaaatacaaccaaaatgaactcatgacttccctcccactccattttcccaaaacaaacctggtcctctttcagatgtcaccaccatctcttcggttttgcaagtcagaaacctggaagccatcatttttctctcctgcttcttcatcccctccaatcattccccaagtgattattacctcctaaagagccctcaccatttctactgcctattctctaattcaagccattctcatctcgtcccactacttgctgactaactggtctcaatgccagatccctctaccaatactaatttccacacagcacccaaaccgatcttttcaaaagacagatccagtttatcttcacctcacagccctgttctcttccaggttgacttcttgagctccaggtgttggaaaaatggctgccacagctccaagcctcacatcctttgcttttgagtcaaactgtctcttatccagaattcccttcaaagtcccatagcatctccatggctgtgatcaaactatgtgcctatcctcaaaccagttattgtggcccaggggatgcaatgtcatgagtggcttagcatgggttatgtgctcactgctgaagttgaggaataaactcccaactacatcacatgtactaaaaaaattggggagggctgtttctgcaaggagagccaatggctgccaaaaacagatggtgtccactacagttgccagtacaaacatgagtcgtggtatatcagtatttctctgactgtgttcagctgaatactaaactctcaaaatcctcttgagtggggaccaaaggagaaaaaatatttttgggtaaatacatttaagaaaacttgaattttattcccctgcctttacagaggcacagtgcatgttagcatattaggagcactgaaatctcctgcagctaagaaacctgtctggctttctttaacccagcatttcctaaacatatttcattgtatatcccttctatagttactatgtgtcccccaaagttcatgtgttggaagcttaaactctaatgcaacagtgttaggaggtggggcctaataagagctgattagattattatcatgagagtgcctttgttataaaaatgagtctgcctcctcttgctctcttgctttcatactctcttgcccttccaccttctgccatgggatgacacggcacaaaggcccttgccagatcctggtgccgtgctcttggatttcccagcctccataactgtgagccaaataaactttggttgttcataaataaccagtctcagtctgctattctgatcctggtgccatgttcttggatttcccagcctccagaactgtgagccaaataaatttgtgttgttcataaataaccagtctcagtctgctattctgcaacacaaagcaacccctttcccttacattcccctatagggatgtttttcaaacatactttgagaaacctccctggatgagaagacttcaaaaagtttgtggaaatgtgaagttaaaagataaaaatgaaaaatataaactttctcaacataaccttcatcaaggtcaagttgcttttgtaagcaatgataccagacatttagtccatctctaaagaactacaggtcctgggaatttgaccatgtcaatacagtcttttttacattattaactgaagaaaaatggataccctttacagatttttttaagattgggaaactaaaagcagtcagaggaagccaaatcaggactgtaaggtggaagcctaatgatttcccattgaaactcttgcaaaattggccctgtttgacaaaaggaatgagcaggaatgttcttatagtggggaaggattctctggtgaagctttctcaggcatttttctgctaaagctttggctatctttctcaaaacactctcataataagcagatgttatcattatttggcccttcagaaaatcaacaagcaaaatactttgagcatcacaaaaaaaatgttgccatgaccttgctcttgactggtccagttttgctttgactggaccacttccacgtcttggtagccattgctttgattgtgctttgtcttcaggattgtactggtaaagccatgtttcatctcctgttacaattcttcaaagaaatgcttcaggatcttcatcccatttgtttaaaattcccattgaaaactctgctcttgtctgcagctgatctggatacaatggttttggcactcaccaagtggaatatttgctcaacttaaattttttagtcagaattgtgtaagctgaactaattaagatgtctatggtgttggctattgtttctgctgttaatcactcgtcctcttcaattagggcatgagcaagattaatgttttcctcacaaattgatatggatggtctgcagctgaggacttcaacttcaacatcatctcatccttcttaaaaccagttacccatttgtaaactgttgatttctttggggtattgtctcctaaactttttgtaaagcattaatgatttcaccattcttccacccaagcttcaccataaatttgatgtttgttcttgcttcaattttagcaaaattcatgttgctttgataggggctcttttcaagctgatgtcttatccttcttagtgcctcaaaatagatcctgttcagacatgttataacaagttagtgc

SEQ ID NO: 462386 - DNA, 1810 bp, Homo sapiens
ttccctaattgctgtctctttgctgccaccttgtgaaggtgcctgcttccctttcgccttgcaccatgattggaagtttcctgaggcctccccagccatgcagaactcgagccctactctcaggcagtgatgctgtcctgaagtgtgaccatcccatggcactctggtacttctcttccattcttggggaagatccttctctgcttaattcaatgcctgacataaggaaactgcctgggggtagccttcaattgaccaaccctcagccctcccagactggcctctatcgctgccagggcaatgatgataccctcatggtacaatacgagatcgacttccaggttgtcaccacccttcatgttacgcacaagagcctggaccaaaagtccctgcagaatgagaccctgatcctggatggcaaggtactcatctttacccactgggacccccggcaggactgtaaccgctgtggggaactgggtgagtgcagacgcctggggtactgctacattgaggagcccgtggaaaaacctatgccctgccagctgtatctgagagatgagaagatgcaattcagccgcatgcggcccgaactgcagccccagtccaccatgccacccatgctgtggctgctgctccactttgctgccccggcactggggttctacttttccatcagctgccccagtggtaagcagtgccaacaggccctactctcaggcaatgatattctcctgtattgcaactcctcgggggcgcactggtactatttattcacacaaggcaagaagggcaggctcaccagcctcaccaatatttccaatatggaaataatgcccgagggcagccttctcattaaagatccattgccctcccagacgggcctctaccactgctggaacaagaatggccgccaagtggtgcagtatgaaattgactttcaggatgtcaccaccctgcatataacacacaaggacctgggtcagaggcccctgcagaacgagaccctgcatttgggcagcaaacagctcatttttacctggtgggagccctggcaggactgcaaccgctgtgaggagccgggcgagtgtaaacgcctggggtaccgctacattgaggagcctctggaggaagccatgccctgctggctctatctgggagaggtgctggtgtggtctagccgcttgcggcctgagctgcaggtggaagcctgccacgtccagtgcaccaataacacacagttaagggtggattacgtcatttttgacaacttcaggctcgatgagaagacagaatttgtgtggctcgactgtcccttaggatccatgtacaggcccgtcaactggcgtgccaacgacacccccctgacgtgggagagccagctctccggccaggacttcaccacctttctggacccctccaccggcggcaggcagctgcaggttttccagccggccgtctacaagtgcttcgtgcagcaggagctcgtggcccagttcaaacccgccgccagtctggagacgctggaggctcagtggagagagaacgatgcccagtggcgggaggcaaggaaggccctgcggggcagggcggactccgtgctcaaggggctgaagctggtgctgctcgtggtcaccgtcctggccctgctgggggcgctgctcaagtgcatccacccttccccgggcaggagaagcacacaggtgctggtggtgaaataaagcgagcccccggtgcacaagcggacccggcctccggttctctcttagccacagccgccccttctgtcacttccgccccggtgccccgt

SEQ ID NO: 462387 - DNA, 964 bp, Homo sapiens
caggcccaggcatggtttccgtttctgggagccaagagccttctcagaagagggggagagagctactgcatggaatcatttgggccctggaggctgatgggtacttgggggagcaatccctggtgaccccaaccagcaagacaagtgccctgtgaaggggaagggactacactgctgctgcctggacctatacacaaggtcccacccctcaccggggccaaagacgtggtttcaggccctggtggatcctttctgttttgctccatccccgtcccctcttgcgcccagcatcgtcctggtcagaacttccgtttaaaccttccttgcctgccgtgcactccgaggggggcgtcactttgccataggccccagggctgaaaatggcgggacatccagtattgggctcacgtgcataagactgtcccagacagcagcacaatcacgttcagccaagtggagtttccgacgcacttgtgtggcagccgcgtgaatgtgagccgatatgcagctgggaggggttgtgggcctcctgcggtgaggggctcctgccaggagctctgagaagcctccacagaatcagccgtcgggctccttcagcagcagctccccttatctgtgccaacgactgggggcctaactcaagggtgccagcccgtcttccgccaatacagactgtgggattctgagagttaggagcctggggtcccctggggtggggtggtcagggtgagcaggtgggctctgtgagcctgtttccccatgccctgactcaccccaatccctgggtgaggacagagctcctgaaggccactgaaggaggtgcagcacactccacctgggtggccttccgcagctcagccctcttcctgccagcaggaagcctctgcctgtgctccttaagttagccatcctcaccccctccgggcagctctgagactgagccagggccactagcagcacccag

SEQ ID NO: 462388 - DNA, 1668 bp, Homo sapiens
cgctgccgtgtaagtcctggaagccgcagacacctggggccaagcaaagcccaggaggcaggatggctgtgagctgtcgcttgccctgcaggtacccctccacccagttcggcagcctcacgggactgcagtctctgatcagcgcgctcttcgcccttctgcagcagccgctgtttctggccatgatgggtcctctccagggagaccctctgtgggtgaacgtggggctgctccttctcagcctgctgggcttctgcctcccgctctacctgatctgctaccggcgccaactggagcggcagctgcagcagaggcaggaggatgacaaactcttcctcaaaatcaacggctcgtccaaccaggaggccttcgtgcgggagccgccagggctgcagctgggccagtgcccaggagccatcctggcgtggggccaggagcttgtccaaggccacaggcccacagcaccccctgccggcgggctccgtggggccctggagctgatgacgggggaggcccgtccgcctggcccaccaacccgcccaccttgactgcccccagaagtgtgtcttgagacctcctgggcgtgcttagaggggtgagttgtgtttggatttttagttattttctcttcagttttattagacttcttttttataaagcaataaatccattttcctccgggctctggcgggaaggagcaggaagggctccctgcccttggggttttgatcagtgaggaggggggcttgggtctgagtctgggtctgggtctgctgccgaaacactgcccccagtccctctcctcactagactctggggtctaggcgtgtctttgtggtcggccttctccaaaccctctaggcctctgtctgcagctgctgctgcctggacctatacacaaggtcccacccctcaccggggccaaagacgtggtttcaggccctggtggatcctttctgttttgctccatccccgtcccctcttgcgcccagcatcgtcctggtcagaacttccgtttaaaccttccttgcctgccgtgcactccgaggggggcgtcactttgccataggccccagggctgaaaatggcgggacatccagtattgggctcacgtgcataagactgtcccagacagcagcacaatcacgttcagccaagtggagtttccgacgcacttgtgtggcagccgcgtgaatgtgagccgatatgcagctgggaggggttgtgggcctcctgcggtgaggggctcctgccaggagctctgagaagcctccacagaatcagccgtcgggctccttcagcagcagctccccttatctgtgccaacgactgggggcctaactcaagggtgccagcccgtcttccgccaatacagactgtgggattctgagagttaggagcctggggtcccctggggtggggtggtcagggtgagcaggtgggctctgtgagcctgtttccccatgccctgactcaccccaatccctgggtgaggacagagctcctgaaggccactgaaggaggtgcagcacactccacctgggtggccttccgcagctcagccctcttcctgccagcaggaagcctctgcctgtgctccttaagttagccatcctcaccccctccgggcagctctgagactgagccagggccactagcagcacccag

SEQ ID NO: 462389 - DNA, 1231 bp, Homo sapiens
tagttttcacccagcgggtgaggaggcagcgaagtcgcgggcccagcgtagcgcgcgcctccgaagggcttggtgcgggcgcgggcgcgggcgcgcggcgccaccgttcccatccaggcttgtcggcggccaccggcggaccgggcttcgagatggcctccccgccgcggtgctccccgacagcccatgacagggaatgcaagttgccgccaccctccgcccccgccagcgagtattgtcccggcaagctgtcctgggggaccatggcgagggccttaggccgcttcaagctgtcgatcccgcacacgcacctgctggccaccctcgaccccctggccttggacagggaaccaccaccgcatctgttgcctgagaagcaccaggtgccggagaaattgatctggggcgaccaggaccctctctccaagatcccatttaaaattctgagtgggcacgagcacgctgtgagcacctgccacttctgtgtggatgacacaaagctcctcagtggctcctatgactgcactgtgaagctgtgggatccggtggacggttctgtggttcgcgattttgagcacaggcccaaagctcctgttgtagagtgcagcatcaccggcgacagcagcagagtcattgccgcatcctatgataagacagtgagggcctgggacctggagacaggcaagctgctgtggaaggtcaggtatgataccttcatcgtctcctgtaagttttctcctgatggtaaatacgtggtctcaggcttcgacgtggatcatggaatctgcataatggacgccgagaacatcaccaccgtttccgtcatcaaagatcatcacacaaggtccatcacgtcatgctgctttgaccccgacagccagagggtggcttctgtctcattggacaggtgcatcaagatctgggatgttacatcccaggccacgctgctcaccatcactaaattcttgaatctgtaggtttatatattttgccaaatttggtaaaatttcagccatttaaaaaaattacttttaaagttgactccatcttgtccagaactgtacgtgcagcatagccattttccccaaacttctgtacaggtgaaatggccttctacgagaagtgggatttatgtgaaatgagagtccatagagatacctctggtttatttatttatttatttatgtatttatttatttagaaattgctatgtctttttttttactttaag

SEQ ID NO: 462390 - DNA, 1034 bp, Homo sapiens
gcaaagaaaggcggccggtcacctggggttaccacaacacagcgccgagatggtggaatccaccagaagtgctttgataatgttggacactattgtgcaggcaatggctgcctccttacccacgctgcataatgggcctctgagtgctaagaagataagcgatactatccttggagtgtcagagacaggataccactcgggacctcaatgcactcactctttcctggaaagggtctttattcacaggaatcccaggaacctggggcaagctttaggtttacttagaggaggaaaaacaaacaaacaaacaaacaaaggagagagaaggagactaaggaacaaagaaagaacagaggaatggagcaaaagaaaagaagggagagaaacaggaaggaacaaaagagaggctgacatacacatcctggacaaagcccctggccgggagttaagtgaagagaagaaggaagcaggtccctgccgccctacttctgggctgagctccatttgctggtgaacggggcttatcttcactctcccctttaaatactgtaacattcagcatcctttcatgtctgtgcttttaaagtaaatctttggacaattaaagatatgaaatggctaaatagagttctgcaggcgttgttctctcctttttaaagttttaatcacacttaatggctctcttcaaaacttgaattttccattttggtgttttgactccattgaaagagtttactaatattctttcaaaagtattctctgttcaaatgagctattcaataaagttttatgccatgctataggattcatgctaaatggaaaataatttaaagggagatcagagttgggggtgccattcctctctataggttttgttagccaaaccgtaatcaccaatattgagtccattaaaagttgctgtgaaggaacaggaattatcatttggatataaggaggaatctttcaaatgcaatttctatacctccttttcttgaagataatttcctgttcaccttgtgattctataaataggc

SEQ ID NO: 462391 - DNA, 918 bp, Homo sapiens
ggatttgctggtgcagtacaactaggcttaatagggagctcgaattcgagctcgaattcaacttctaacgttagaagcttgaattcgcctcgaattcgagctctttcctggaaagggtctttattcacaggaatcccaggaacctggggcaagctttaggtttacttagaggaggaaaaacaaacaaacaaacaaacaaaggagagagaaggagactaaggaacaaagaaagaacagaggaatggagcaaaagaaaagaagggagagaaacaggaaggaacaaaagagaggctgacatacacatcctggacaaagcccctggccgggagttaagtgaagagaagaaggaagcaggtccctgccgccctacttctgggctgagctccatttgctggtgaacggggcttatcttcactctcccctttaaatactgtaacattcagcatcctttcatgtctgtgcttttaaagtaaatctttggacaattaaagatatgaaatggctaaatagagttctgcaggcgttgttctctcctttttaaagttttaatcacacttaatggctctcttcaaaacttgaattttccattttggtgttttgactccattgaaagagtttactaatattctttcaaaagtattctctgttcaaatgagctattcaataaagttttatgccatgctataggattcatgctaaatggaaaataatttaaagggagatcagagttgggggtgccattcctctctataggttttgttagccaaaccgtaatcaccaatattgagtccattaaaagttgctgtgaaggaacaggaattatcatttggatataaggaggaatctttcaaatgcaatttctatacctccttttcttgaagataatttcctgttcaccttgtgattctataaataggc

SEQ ID NO: 462392 - DNA, 288 bp, Homo sapiens
  misc_feature (1)..(1): n is a, c, g, or t
  misc_feature (12)..(12): n is a, c, g, or t
ncccccgggctngcaggaaatcggcacgaggtaagttactatcagtttataaaatattatcacatttgtttaaatgtgactttagatacttttatgccaaaaataaactcacatgagcacatgacagtctgagctctataatcagtgtgcttctgctgtgcagaaatgttagaaacgtattgtctaaatatctttgataattaaaatgtttaatatttaatgaaatttgttgttacttgttttaaatcttttttcttttaataaagatttaaataagaaataactgcc

SEQ ID NO: 462393 - DNA, 2075 bp, Homo sapiens
tttggaaaatgcaataaagtttttaaacagaaatgcctatattatgattgcaatatatggcagaaacttctgcaggtcagcaaaagatgctttcaatctgctgatgagaaatgttttgaaagttgcagttacagatgaagttacatactttgtattattcctggggaaacttctagttgctggaagtataggtgttctggccttcctattcttcacacaaagactgccagtgattgcacaaggaccagcatctttaaattactactgggtacctttgctgacagtcatttttgggtcttacctgattgcacatgggttcttcagcgtctatgcaatgtgtgttgaaacaattttcatctgcttcttggaagatttagaaagaaatgatggttctactgcaagaccttattatgtgagtcaacctttgctgaagattttccaggaggaaaatccacaaactaggaagcagtagaagagcaaactggtcgtcctacagctgtgtgttaccttttctccatctgctgtgtctgtgcaacatttgtttcataagtgctttgtgtttagcaacactgtattcacgaccttgttggcttgcatttgcatgttttataccaaagcttatactgtactatgtgaagccatcagaagtcgcaagggaattgttaataacataaaacatttttatactaagatcatttgttttgtaattcgtttttaaagagtggcttggatgttttgaaaatactactgaatatgttaatattcttttaaatcttagattgaaaaatgatacattacttaaattgatagctcctaatatatttttaaaattacaactaaaagaagacttcttctgcagggaaaattggtcagcaaagtgaaattaaaaattttaaagtttttcccactctcgttggacagtaaatcagtgaaaggactgccccagttgagagtttgctctctttaagtatagaatgtttcctcttaaacaaattgccaatcatccagcctttactacttagccctctgacaaagtgccttactggctatttaatattacccagcttttatgggcaagtttacaaacattgttttttaaaaaattaaaacctgcaatgtttcgtgattaaaacaagtcttattgcatttgtttcactcttagctcactgattggaaaacatttgtcattttgctctgtttgatatcctcactattatggaatacattgtgcagctaaacaatttcccttgcgcctagtggacattcatgaatgtgtactacacgcaagaagaaacaaaccccgaaagaacacttgttggatttctttgtttttttttttactaaaagagaagttttaaaatgaaatgttttctatagtagatctttgaaaatacaataggtataatactgcatttctcagtgttttacaaagatcagaaagagaaacttctaggaattgcaaagggaaactttactcctcgaaagggtgctcacagatgtcatgtactgaatagctcccttttaaatgatcatttattttcatcaaagcctgttctatatatgccacttcattttctaacttttggtatgaaaaaatcagtttacttacagtatgttaattgtattgtactactataaacaggaacataatttccaattcagttttaaataattttaccagtactactaacttttaaggaaattaattcagttggttactcagtgtttgttacagaaagagtccagaaaagtattcaccctaagagaatgtcaatcatataatgataatttgtgaaagctttgagaatcaatcatcagtaagttactatcagtttataaaatattatcacatttgtttaaatgtgactttagatacttttatgccaaaaataaactcacatgagcacatgacagtctgagctctataatcagtgtgcttctgctgtgcagaaatgttagaaacgtattgtctaaatatctttgataattaaaatgtttaatatttaatgaaatttgttgttacttgttttaaatcttttttcttttaataaagatttaaataagaaataactgcc

SEQ ID NO: 462394 - DNA, 1000 bp, Homo sapiens
gagccgggcccgtgtccaagccccgccccaccgccgcgcgctgagacaggccccacccccggctcgtgcagaactccgtactgttctgggtcaagcgcgcggagggcggcttgggccaccgcagagctgggagggaggagctaggagcggctgttttgggggcccggggcagctactgtctgggtgggaccgtgcggtgccggcccagccccggaggtgccggggagcgtcccgtccgcggatccccgcgcacgtggtgccgggcgtcccttcatggtctgtggccggattcgggctcgagcgccaggggcggctgggccagcaccttccgaccggtcgctttttgttcgcggaggccgctgggcgctaggcgtcgttctcggcctcgcaggagctcagaccgccgagcgcacaaggccgcagtgttcctgcaagcggccgccccgcgcggcaagtttggtccctgcacctcagtccctgctgtgtcctgcccctgcggatgctgagactggacgttcctgttttggcccagttctgctggcctctcctgagtggcccctgacacactggtccgcgatcgtgctagtctcttctgtccagggggcccctgggcttgccacactccctggggcgccgcagccgtgtcctgaggaaggaaaccaggagcttgcctgtacccaagacccgcaggaatgcggcccgggccctaaacgtttccaggaaaagtcaccttctggcacaaccctcaccctcacctttgcctttgcaggaggggagtgcgcgtgggcctggatgttcacctggactgggatctagttctcccgcctgctttgccgcgctctagcctcgtccctccagcccctctgcacttccgtctacggggcggaggagagacacaggctgtgctgcagcgtgtctattttttttctatacttttaagttcgcggcaaaattaaggggaaagtacatataccccctgccgtatccgtattatttcttt

SEQ ID NO: 462395 - DNA, 1288 bp, Homo sapiens
caaccagggtgatccagtgaaccctaatggattatattgttaaagctggacacattcaggcactgccttgtggaactgtgagaagagggctaccaccttccagaccccagaatggtagatccacgaacagcttgcattgtgtacctgcaaaagccacagacactcaatgccagcctgtgaaagcagccgggagggcggctgtaccctgcaaagccacaagggtggagctgtccaaggctgaggtagcccacctcttgtatcagcatgaactgaaggttgaagtaaaggagcctgccaaactccaccaaaaccaaaatggcaacgagagtgacttctggtcgtcctcactgctacactctcaccagcgccgtgacagtttacaaatgccagcccaacaggtgaacgcagagaactgcagcttgctggagcggaaacccacaagcaaaagcaacacggggaaccaacattgagcgtgagctggctacattctgttagtttgactaccaagtgaatagttactagcgcatcttacggggcgtttctttctgcatagatagcttttctacagcaaaggatcgttgaaaggtaatcacaaagataaaaaaaaatctcacaagtttgacattagcagactagaataaatgcaagtcagaccttgacagatatctatgacctgatttactgacgatatagaaaattttaaaaagcttagttattttgctaaaacagttttataggccaggcactgtggcttatgcctgtgataccagcgctctgggaggccaaagcaggaggatcgcttgaccccgggagttggtgaccagcctaggcaacaagttacatcaacagctgccaagtgtcttccaccaatcaaccttgacctacaattagaactcttcagttttgtagtggaaaaataaggacattcaaatttcagaatacatccttcgaagaataggatgtgccaggatcaattgctaagctgaaaagctagcagtgaccaaagaacaccaacaaagaaacccagcctccaaaagagaaaagtcattctgacataacagctacagaactgacaagtgttaaggacaaacatattaaaatttttatgctttcagagtctatgatacttcttattaattgaataattgttttgtttagaggaaatctctcatatctcaaaagcctagtctgaacatttttacatgtttctcagggagttgcaagagcttgaaaagaggaaaaatgccattcacaagtgttaaaagcaagtcgtatggtcaaggcatag

SEQ ID NO: 462396 - DNA, 1772 bp, Homo sapiens
ttttcaaatctgctccatgacagacgtcccaatgaccttgagcaagtcccttggcccctgagtctcagttttctgggtgggcttatcctccttcttccctctttacatcactgcctttacctggtggggatgaggccccatggggaaggtgctgatgtggagggaggaagtggagaccgagattcgccatactgcccagggaggctgtgtgagaactgggctgtgtatggtccctaaagcctcaactctgccccagctgggcgatgggtgcccctctctgggcttcctgcctagcttccccttctgcctccagcctggagccttgctttccctggagacaagcccgtggagtcccccaccacactggagggagcacgaccaccacactgctgggcctggcagacaccacatctttggcagggctcctggacgggcatgccttatgctgctctgcagggtcagagtggaaaggggccctttgccctggctggcctgtgccctcacccttgagcccctccccccactccacccctggcctcggatgcggctaatttctcagccatggagccagctgcaccagccctcgagggggtaattttgttgcccctggcaagtgaaaggattatcctcagtgttgattgtccttttttgtaatcctcctgctgttctgttctgttgtgctgtgcaacattttgctacatagactattttatagcagaaagctagaagaatatttattatgaatattaaagcaatagtgcatcaatgaaaaggcggagacattaggaattgtgtaaatgcttagattcacttttggtggattttttgtactttatttataactaataaaaatgaactgcattgctaactacaccttatgcctgctgggtgtttattttggtgtgtacccagggcatgtcggaggaagcctcgccaggcctctgtctttgtccaagataagaggcactatcagttatctatctagctctcaccaacttgccttgttctctctcctttttctcttattttcctcttccctttctgcccctctttcacccttttcttccccccccttcttgtctcttatctatttctttcttgtatctctttatctcttaaagaatctgttctatgactgtggaccaatcatctaattgacctatttcctgaactttagtttgtcctattagtaacatcttgcatgtggtgcatttgttataaatgatgggccaatattgatgcattaaataaagcccatagtttacattaggttaatgaatgtttagattcttagttttcattcaagtgagatgaacccaagtctggagttttccatacctttctctctatgtctcatttgatccatgacctcccccggccagtcctgtgaatgtggcatgacatttctcttctctggctctgccggtgtggatggtagcctaagctccttccagctctaaaatcccacaagtctctatttcaagttcctacctccctctattatccgtttgtctgtttaatctgttaacatttacaatggaggttgatcctgggaggaaaggtctgggctgcttttggggtgaagggagagggtcgaggagagcatttctctttccttggattttgtgtccactcaacacatgaaaatatattcagtcttcctagcctctgctcccgcccctttcccattgcagcacccaggagaaaggttctcagaaaacatccagatggtttcccagaccttatcaatatctacccttctcctctgccca

SEQ ID NO: 462397 - DNA, 433 bp, Homo sapiens
agtgactctacagatctaacctggtatcccacccaatgtcctcactaagttcctctgttcataggatagtaatacaaaacaaattgtaccccaatgcagcagtgtgaaaaaaaaagaaggaaaaaaggccaagattattaaattcttatgttcagactgagaaccagaaagcaaaagagagttaatcattgagttgtgtattagtctgttctctcactgctgataaagacattcctgagactgggtaatttataaaggaaagaggtttcattgactcacagttcgacatggccagcgaggtctcaatcatggtgaaaggcaaaggaggagcaaagtcatgtcttacatggtggcaggcaagagagagggcatgtgctggggaactcccctttatcaaacaatcacattgtgtgagacttactcactatcaatg

SEQ ID NO: 462398 - DNA, 2356 bp, Homo sapiens
taaggggtttgagcgatggtggtgactgaacagacaagccaaacccctgttgcaggtcctgtaaagatttgctttaattttctactcatgttgtccagtcgagtatggccatgtgtgcttctgtctctgatgagaaataataatgataaagatcatgagagcagcaggtaccactctgacaacgaagtgcccttctctgtcctagttattttaaaggagaatggaaagggagcttccttaagggatcctggccctgcagggctgtatggtctcacaggcaagggtgcctatctgctgggagaaaatgctttgtgtgctcatattcatgcaatcgacttggaaaaagagtttttgaagagtcctgctctcacaggacatctggagctcctaacatcccctactccccaacattcctccaggatcaagggcttcttccatgagcatgagttctataaaggaagtcaggaacaagcatgggcttggttggactgtacagttcaagaattagggaatttgaaggagtatggagtggtatgtgctccagataactgacctttgaaggtagtaatgtattatttacatgaaactaaaatccagtgcattctaaatggctgtgatttatcatgaccattttgaaattgggtcctgtggccatatgctaatttgactcaaaggaaattctgtgctgtgtgcttggatttcatgcttaaaaaattcagcaatagtttcaatgctcttttaattaaaataagatgctttataacatttcccacatgatgtggaatgtactctgtagctcatatatgaattaaaacccttagaagatttacattttctggtctggcaaccttcatttttctaatttatgtgtcctgtttgtcctgaaggagttgggaagttgaaatttacagccatcccaaatgagagagttgagattcttgattaaatgagagcttgtttgtgtattcaaatggaaaaatgtgggtggacaaaattaaatttgtagtgggttatctcctgaacagttttctctttcctggtaatttcacactgcccaactatgcacatggtaagtatgggagaaaacttttttgtataataaaactttttagcagtaactgactggaccatggttgggcatctattccaagttattctgatcagcacctgcatctgagactttgtaattggctctatcatattcccagtatgccttttgtgtgtggccattttctgctatgtaaataggaaaactgaaaaatcaggtctgcagaaattgaagaatgaatggggagaagcaaagacaagcaacagagagaaagaattcccagtcattcctggtgcgctgcagtctccagtttctgtgagtttccaagacccagctcatccatgcctttggggtctttgaaagatccctctatctttcaggggtctttgaaaaacccctgtttatttcaaccagctcagatggttgcctgcatgtgggagcaatgaaataacctatattgcttagatttctattttctgattagatggtggctaccatgctatgtgtatattcttaaaacaagcccttgtacataaattagataatattggatggttttggttgagctggtctttggcttaaatgttattgacatttttctgaaaaaatataataaatataggacatgtataatctcacacaagtttgaaactatttaatagactcttaaaacaaaggaagggtgtctatgtagatgtgctgattggttccaggtctaggaatccaggccatttgcagtttgatttgtggagaaggaaaagagactacaatctctcagtggtggtaaggaggcaggatggagtggggaccagaaacgcctctgagatacaatgtcccaaggtccagtgtttttatgattgggaggaagactgctctaaaatctttgacatttgaagattattaataataaatgtcctcactaagttcctctgttcataggatagtaatacaaaacaaattgtaccccaatgcagcagtgtgaaaaaaaaagaaggaaaaaaggccaagattattaaattcttatgttcagactgagaaccagaaagcaaaagagagttaatcattgagttgtgtattagtctgttctctcactgctgataaagacattcctgagactgggtaatttataaaggaaagaggtttcattgactcacagttcgacatggccagcgaggtctcaatcatggtgaaaggcaaaggaggagcaaagtcatgtcttacatggtggcaggcaagagagagggcatgtgctggggaactcccctttatcaaacaatcacattgtgtgagacttactcactatcaatg

SEQ ID NO: 462399 - DNA, 571 bp, Homo sapiens
tctagagcggccgcctactactactaaattcgcggccgcgtcgaccaccagagaattcacactggagaaaagccttatgtttgtcaggaatgcgggaaagccttcacccagagctcatgcctttctattcaccggagagttcacactggggagaagccctacagatgtggtgaatgtgggaaagcctttgcccagaaagcaaatctaacacagcaccagagaattcacacaggggagaagccttactcctgtaatgtgtgtggcaaagcttttgtcctcagtgcccatctcaaccagcacctgagagttcacacccaggagacactttatcagtgtcaacgttgccagaaagcctttcggtgccactcgagcctcagccgccatcagcgtgtacacaacaagcagcaatactgcctgtagccattgggtggcagcagagtcccagaatatgagaccgttactcggatgttgaaagttggaaactatcccattgcaagtttctctccaaataaatgcatctaaagattgatttggaaaaaaaaaaactatttaaaaatataaggctgacgcg

SEQ ID NO: 462400 - DNA, 4719 bp, Homo sapiens
aacccgtcacaacgcgtttccatggcaacctaccgcttgctcttcggaaaaggttaacactccctgacttctagtaaagtgctaaggctgaagaagcaggaggagatgggaaggcgaaagaagtcgcccgcacagccctctgggaaatagagtcctggcgctgccgcggaggatcctgggtgcagccgctcagagaagcttctcgcgcacaggaagtcgctgcgaggaggcgcgtgtgcggggagttgaatctcccgctcccttgaggctggggttgcgtctgttgacgcggccgactacaatcccgagccctgccagccgggaacacggaggggaaggaggaggagcttaaaagaggctactgaaccccagttggccatggctgaggaatttgtgaccctcaaggatgtcggcatggacttcaccttgggagactgggagcagctcgggctggaacagggggacacgttctgggacacagcgttggacaattgccaggacctcttcctgctggaccccccaagacccaacctgacctcccacccagatggcagtgaagatctggagcctctggcaggaggaagcccagaagcaacaagccctgatgtgactgagaccaagaactctcctctgatggaggatttcttcgaagaaggattctcccaggagattatagagatgttatccaaggatggcttctggaactccaatttcggagaagcctgtatagaggacacctggttagatagtttgctaggcgatccagaaagtcttctgaggtctgatattgccaccaacggggaaagtcccacggaatgcaagagtcatgaattaaagagaggactcagtcctgtgtccaccgtttccacgggagaagattccatggtgcataatgtttctgaaaagaccctcacaccagctaagtctaaggaatataggggtgagtttttctcctactccgaccacagccagcaggattctgttcaggaaggggagaaaccatatcaatgtagtgaatgtgggaaaagcttcagtgggagttaccgtcttacccagcactggatcactcatactagggagaaacccactgtccatcaagagtgtgagcaaggttttgaccggaatgcttccctttctgtgtatccgaaaactcacacgggctacaaattctatgtgtgtaatgaatatgggacaacttttagtcagagtacatacctgtggcatcagaaaactcacactggagaaaaaccatgtaagagtcaagatagtgaccacccacccagtcatgacacacagcctggtgagcatcagaaaactcacacagatagtaagtcctacaactgtaacgaatgcggcaaggcttttacccggatcttccaccttactcggcaccagaagatccacactcggaaacgctatgagtgttccaagtgccaggcgaccttcaacttgagaaaacacctcatccaacatcagaaaactcacgctgcaaaaactacctctgagtgtcaggagtgtgggaagatttttaggcacagttcgctgctcattgaacaccaggctcttcatgctggagaggagccttataagtgtaacgaacgtgggaaatccttcaggcataactctaccctaaagatccatcagagggttcacagtggagagaagccttacaaatgcagtgagtgtgggaaggccttccaccggcacactcaccttaatgaacatcggcgaattcatacaggctacagaccccacaaatgtcaggaatgcgtcaggagtttcagccggccctcacatctgatgcgacatcaggccattcacaccgcagaaaagccctatagctgtgctgaatgcaaggagactttcagcgataacaatcgccttgtgcaacaccagaaaatgcacactgtcaaaaccccatatgaatgtcaggagtgcggagaacgcttcatttgcggctcaaccctgaagtgccacgagagtgttcacgccagagaaaaacaaggattttttgtgagtgggaagatcttggatcagaacccagaacagaaagagaagtgctttaagtgtaacaaatgtgagaaaacctttagctgcagcaaatacctaactcagcacgagaggattcacaccaggggagtgaagccctttgaatgtgaccagtgtgggaaagcctttggccaaagtactcggctcattcaccatcaaagaatccactctagagtgaggctgtataaatggggtgagcaagggaaagccatcagcagtgcctcccttatcaaacttcagtccttccacacaaaggagcacccttttaaatgtaacgaatgcggaaagaccttcagccacagtgcacacctctcaaaacatcagttaattcacgctggagagaatccctttaaatgtagtaagtgtgacagagtcttcacccagagaaactaccttgttcagcatgagcgaactcatgccagaaagaagccgttggtgtgtaacgaatgcgggaaaacgttccgtcagagctcatgcctttctaagcatcagagaattcactcaggtgagaagccctatgtatgtgattactgcgggaaggccttcggcctgagtgctgagcttgtccgccaccagagaattcacactggagaaaagccttatgtttgtcaggaatgcgggaaagccttcacccagagctcatgcctttctattcaccggagagttcacactggggagaagccctacagatgtggtgaatgtgggaaagcctttgcccagaaagcaaatctaacacagcaccagagaattcacacaggggagaagccttactcctgtaatgtgtgtggcaaagcttttgtcctcagtgcccatctcaaccagcacctgagagttcacacccaggagacactttatcagtgtcaacgttgccagaaagcctttcggtgccactcgagcctcagccgccatcagcgtgtacacaacaagcagcaatactgcctgtagccattgggtggcagcagagtcccagaatatgagaccgttactcggatgttgaaagttggaaactatcccattgcaagtttctctccaaataaatgcatctaaagattgattagaaagtttgtgcgcatgtttttcattataacaatgaaaacacaaaagtggagaagctgtacaacgtcaggattcagaggtaggctctggagccagtctaccttgagttaaatcccacctctgccatctactacctaagtgaccttgggaaggtcagaaaaatctctcagggcctcggtgtccttatctgtaaaatgggcatcacctacctcagagggcttttctgaggattaaataaataaatgtgaagcacttagaactgatggccagcacatgagggctcaccaagtgtaagccacaaatacacatcagctatagcacaaatatacttgtgttacaagaaaggaattagtaatctgtgtttactgtagttaatgttcttacaatgtatcgcttttaatttaagttttccttttttacagtttttctccagcactttactcttcttaagtgcctggccttttttgtccctttatctctcctggtttttttcttaagccccagaaagccaaaaagaacatgtaaactcttcacctcaactagctacaaccttccactcctaacctcccaagcttctcacttaaagaggactccctatcccacaaacacatgctccctcttcctatgaccttcctccatttaacagtgttggttatgcaataagacacccaatttttcatgggagttgacaccaaaacacagctggattccatcaggaaagctgcattgatcagggtgttaaccgcatatgaaacaacccatatggaagacatacttaggggtcaaacctgtggtgtgtggaagtgaccactgggatgtcatcattcaccatttatccaggatggccgctcaccaggcaatttgctaggctcgggggcgggtagtatccatacactatgcactactgctctgaagcttctggaatcagaaatgaacccattttcatcgacgattgctgttagttgacaagtgacatcttgaaaatgccacattccctcatgtcacaggaagttctgggatcaccaaggattgttggagagtccagtgagatggaaccacacaaccagttccctaccagtgtcttgtcagctctgggtgtttgttccctgccactaagtggctcagtcacacctttgctgaaacacagtagtcttatgaaaagcactggacacatactttgaatacctttcatattttaggtgctgaaaatggtgagggagtgagtgctctgcacccttgggcttttcaactcttgcacctggagttctgctggttaagtttgttaaacttagttgaaactgggaacctgttggctaaccattggggccttacactgtttttcaaatggttgcaacatttaacttctcgcacatggttcccgtcctctggagctctgtcttgtcggggagatgggcatgttgtataccaaaagagtgtacaaagtgttgcagggctgtgacacaatagggactctatggaaaactggcagccattgggtgtgggggcagtctgtaaatcagtcacctgtgttgctgcaggccaaggtagaaacgccctccgtgtgtgcatatttgttggttctctgattaaagttttgagtctaaaaaaaaaagt

SEQ ID NO: 462401 - DNA, 4841 bp, Homo sapiens
aacccgtcacaacgcgtttccatggcaacctaccgcttgctcttcggaaaaggttaacactccctgacttctagtaaagtgctaaggctgaagaagcaggaggagatgggaaggcgaaagaagtcgcccgcacagccctctgggaaatagagtcctggcgctgccgcggaggatcctgggtgcagccgctcagagaagcttctcgcgcacaggaagtcgctgcgaggaggcgcgtgtgcggggagttgaatctcccgctcccttgaggctggggttgcgtctgttgacgcggccgactacaatcccgagggagactcacattgggacttgtcctcctcctcctggacattttgggggctcgtcagcatggacagcgagtcagccatgggtggaagggaggctttctcacagctcccttgtgcttcccacagccctgccagccgggaacacggaggggaaggaggaggagcttaaaagaggctactgaaccccagttggccatggctgaggaatttgtgaccctcaaggatgtcggcatggacttcaccttgggagactgggagcagctcgggctggaacagggggacacgttctgggacacagcgttggacaattgccaggacctcttcctgctggaccccccaagacccaacctgacctcccacccagatggcagtgaagatctggagcctctggcaggaggaagcccagaagcaacaagccctgatgtgactgagaccaagaactctcctctgatggaggatttcttcgaagaaggattctcccaggagattatagagatgttatccaaggatggcttctggaactccaatttcggagaagcctgtatagaggacacctggttagatagtttgctaggcgatccagaaagtcttctgaggtctgatattgccaccaacggggaaagtcccacggaatgcaagagtcatgaattaaagagaggactcagtcctgtgtccaccgtttccacgggagaagattccatggtgcataatgtttctgaaaagaccctcacaccagctaagtctaaggaatataggggtgagtttttctcctactccgaccacagccagcaggattctgttcaggaaggggagaaaccatatcaatgtagtgaatgtgggaaaagcttcagtgggagttaccgtcttacccagcactggatcactcatactagggagaaacccactgtccatcaagagtgtgagcaaggttttgaccggaatgcttccctttctgtgtatccgaaaactcacacgggctacaaattctatgtgtgtaatgaatatgggacaacttttagtcagagtacatacctgtggcatcagaaaactcacactggagaaaaaccatgtaagagtcaagatagtgaccacccacccagtcatgacacacagcctggtgagcatcagaaaactcacacagatagtaagtcctacaactgtaacgaatgcggcaaggcttttacccggatcttccaccttactcggcaccagaagatccacactcggaaacgctatgagtgttccaagtgccaggcgaccttcaacttgagaaaacacctcatccaacatcagaaaactcacgctgcaaaaactacctctgagtgtcaggagtgtgggaagatttttaggcacagttcgctgctcattgaacaccaggctcttcatgctggagaggagccttataagtgtaacgaacgtgggaaatccttcaggcataactctaccctaaagatccatcagagggttcacagtggagagaagccttacaaatgcagtgagtgtgggaaggccttccaccggcacactcaccttaatgaacatcggcgaattcatacaggctacagaccccacaaatgtcaggaatgcgtcaggagtttcagccggccctcacatctgatgcgacatcaggccattcacaccgcagaaaagccctatagctgtgctgaatgcaaggagactttcagcgataacaatcgccttgtgcaacaccagaaaatgcacactgtcaaaaccccatatgaatgtcaggagtgcggagaacgcttcatttgcggctcaaccctgaagtgccacgagagtgttcacgccagagaaaaacaaggattttttgtgagtgggaagatcttggatcagaacccagaacagaaagagaagtgctttaagtgtaacaaatgtgagaaaacctttagctgcagcaaatacctaactcagcacgagaggattcacaccaggggagtgaagccctttgaatgtgaccagtgtgggaaagcctttggccaaagtactcggctcattcaccatcaaagaatccactctagagtgaggctgtataaatggggtgagcaagggaaagccatcagcagtgcctcccttatcaaacttcagtccttccacacaaaggagcacccttttaaatgtaacgaatgcggaaagaccttcagccacagtgcacacctctcaaaacatcagttaattcacgctggagagaatccctttaaatgtagtaagtgtgacagagtcttcacccagagaaactaccttgttcagcatgagcgaactcatgccagaaagaagccgttggtgtgtaacgaatgcgggaaaacgttccgtcagagctcatgcctttctaagcatcagagaattcactcaggtgagaagccctatgtatgtgattactgcgggaaggccttcggcctgagtgctgagcttgtccgccaccagagaattcacactggagaaaagccttatgtttgtcaggaatgcgggaaagccttcacccagagctcatgcctttctattcaccggagagttcacactggggagaagccctacagatgtggtgaatgtgggaaagcctttgcccagaaagcaaatctaacacagcaccagagaattcacacaggggagaagccttactcctgtaatgtgtgtggcaaagcttttgtcctcagtgcccatctcaaccagcacctgagagttcacacccaggagacactttatcagtgtcaacgttgccagaaagcctttcggtgccactcgagcctcagccgccatcagcgtgtacacaacaagcagcaatactgcctgtagccattgggtggcagcagagtcccagaatatgagaccgttactcggatgttgaaagttggaaactatcccattgcaagtttctctccaaataaatgcatctaaagattgattagaaagtttgtgcgcatgtttttcattataacaatgaaaacacaaaagtggagaagctgtacaacgtcaggattcagaggtaggctctggagccagtctaccttgagttaaatcccacctctgccatctactacctaagtgaccttgggaaggtcagaaaaatctctcagggcctcggtgtccttatctgtaaaatgggcatcacctacctcagagggcttttctgaggattaaataaataaatgtgaagcacttagaactgatggccagcacatgagggctcaccaagtgtaagccacaaatacacatcagctatagcacaaatatacttgtgttacaagaaaggaattagtaatctgtgtttactgtagttaatgttcttacaatgtatcgcttttaatttaagttttccttttttacagtttttctccagcactttactcttcttaagtgcctggccttttttgtccctttatctctcctggtttttttcttaagccccagaaagccaaaaagaacatgtaaactcttcacctcaactagctacaaccttccactcctaacctcccaagcttctcacttaaagaggactccctatcccacaaacacatgctccctcttcctatgaccttcctccatttaacagtgttggttatgcaataagacacccaatttttcatgggagttgacaccaaaacacagctggattccatcaggaaagctgcattgatcagggtgttaaccgcatatgaaacaacccatatggaagacatacttaggggtcaaacctgtggtgtgtggaagtgaccactgggatgtcatcattcaccatttatccaggatggccgctcaccaggcaatttgctaggctcgggggcgggtagtatccatacactatgcactactgctctgaagcttctggaatcagaaatgaacccattttcatcgacgattgctgttagttgacaagtgacatcttgaaaatgccacattccctcatgtcacaggaagttctgggatcaccaaggattgttggagagtccagtgagatggaaccacacaaccagttccctaccagtgtcttgtcagctctgggtgtttgttccctgccactaagtggctcagtcacacctttgctgaaacacagtagtcttatgaaaagcactggacacatactttgaatacctttcatattttaggtgctgaaaatggtgagggagtgagtgctctgcacccttgggcttttcaactcttgcacctggagttctgctggttaagtttgttaaacttagttgaaactgggaacctgttggctaaccattggggccttacactgtttttcaaatggttgcaacatttaacttctcgcacatggttcccgtcctctggagctctgtcttgtcggggagatgggcatgttgtataccaaaagagtgtacaaagtgttgcagggctgtgacacaatagggactctatggaaaactggcagccattgggtgtgggggcagtctgtaaatcagtcacctgtgttgctgcaggccaaggtagaaacgccctccgtgtgtgcatatttgttggttctctgattaaagttttgagtctaaaaaaaaaagt

SEQ ID NO: 462402 - DNA, 2145 bp, Homo sapiens
tctagagcggccgcctactactactaaattcgcggccgcgtcgaccaccagagaattcacactggagaaaagccttatgtttgtcaggaatgcgggaaagccttcacccagagctcatgcctttctattcaccggagagttcacactggggagaagccctacagatgtggtgaatgtgggaaagcctttgcccagaaagcaaatctaacacagcaccagagaattcacacaggggagaagccttactcctgtaatgtgtgtggcaaagcttttgtcctcagtgcccatctcaaccagcacctgagagttcacacccaggagacactttatcagtgtcaacgttgccagaaagcctttcggtgccactcgagcctcagccgccatcagcgtgtacacaacaagcagcaatactgcctgtagccattgggtggcagcagagtcccagaatatgagaccgttactcggatgttgaaagttggaaactatcccattgcaagtttctctccaaataaatgcatctaaagattgattagaaagtttgtgcgcatgtttttcattataacaatgaaaacacaaaagtggagaagctgtacaacgtcaggattcagaggtaggctctggagccagtctaccttgagttaaatcccacctctgccatctactacctaagtgaccttgggaaggtcagaaaaatctctcagggcctcggtgtccttatctgtaaaatgggcatcacctacctcagagggcttttctgaggattaaataaataaatgtgaagcacttagaactgatggccagcacatgagggctcaccaagtgtaagccacaaatacacatcagctatagcacaaatatacttgtgttacaagaaaggaattagtaatctgtgtttactgtagttaatgttcttacaatgtatcgcttttaatttaagttttccttttttacagtttttctccagcactttactcttcttaagtgcctggccttttttgtccctttatctctcctggtttttttcttaagccccagaaagccaaaaagaacatgtaaactcttcacctcaactagctacaaccttccactcctaacctcccaagcttctcacttaaagaggactccctatcccacaaacacatgctccctcttcctatgaccttcctccatttaacagtgttggttatgcaataagacacccaatttttcatgggagttgacaccaaaacacagctggattccatcaggaaagctgcattgatcagggtgttaaccgcatatgaaacaacccatatggaagacatacttaggggtcaaacctgtggtgtgtggaagtgaccactgggatgtcatcattcaccatttatccaggatggccgctcaccaggcaatttgctaggctcgggggcgggtagtatccatacactatgcactactgctctgaagcttctggaatcagaaatgaacccattttcatcgacgattgctgttagttgacaagtgacatcttgaaaatgccacattccctcatgtcacaggaagttctgggatcaccaaggattgttggagagtccagtgagatggaaccacacaaccagttccctaccagtgtcttgtcagctctgggtgtttgttccctgccactaagtggctcagtcacacctttgctgaaacacagtagtcttatgaaaagcactggacacatactttgaatacctttcatattttaggtgctgaaaatggtgagggagtgagtgctctgcacccttgggcttttcaactcttgcacctggagttctgctggttaagtttgttaaacttagttgaaactgggaacctgttggctaaccattggggccttacactgtttttcaaatggttgcaacatttaacttctcgcacatggttcccgtcctctggagctctgtcttgtcggggagatgggcatgttgtataccaaaagagtgtacaaagtgttgcagggctgtgacacaatagggactctatggaaaactggcagccattgggtgtgggggcagtctgtaaatcagtcacctgtgttgctgcaggccaaggtagaaacgccctccgtgtgtgcatatttgttggttctctgattaaagttttgagtctaaaaaaaaaagt

SEQ ID NO: 462403 - DNA, 3105 bp, Homo sapiens
aacccgtcacaacgcgtttccatggcaacctaccgcttgctcttcggaaaaggttaacactccctgacttctagtaaagtgctaaggctgaagaagcaggaggagatgggaaggcgaaagaagtcgcccgcacagccctctgggaaatagagtcctggcgctgccgcggaggatcctgggtgcagccgctcagagaagcttctcgcgcacaggaagtcgctgcgaggaggcgcgtgtgcggggagttgaatctcccgctcccttgaggctggggttgcgtctgttgacgcggccgactacaatcccgagccctgccagccgggaacacggaggggaaggaggaggagcttaaaagaggctactgaaccccagttggccatggctgaggaatttgtgaccctcaaggatgtcggcatggacttcaccttgggagactgggagcagctcgggctggaacagggggacacgttctgggacacagcgttggacaattgccaggacctcttcctgctggaccccccaagacccaacctgacctcccacccagatggcagtgaagatctggagcctctggcaggaggaagcccagaagcaacaagccctgatgtgactgagaccaagaactctcctctgatggaggatttcttcgaagaaggattctcccaggagattatagagatgttatccaaggatggcttctggaactccaatttcggagaagcctgtatagaggacacctggttagatagtttgctaggcgatccagaaagtcttctgaggtctgatattgccaccaacggggaaagtcccacggaatgcaagagtcatgaattaaagagaggactcagtcctgtgtccaccgtttccacgggagaagattccatggtgcataatgtttctgaaaagaccctcacaccagctaagtctaaggaatataggggtgagtttttctcctactccgaccacagccagcaggattctgttcaggaaggggagaaaccatatcaatgtagtgaatgtgggaaaagcttcagtgggagttaccgtcttacccagcactggatcactcatactagggagaaacccactgtccatcaagagtgtgagcaaggttttgaccggaatgcttccctttctgtgtatccgaaaactcacacgggctacaaattctatgtgtgtaatgaatatgggacaacttttagtcagagtacatacctgtggcatcagaaaactcacactggagaaaaaccatgtaagagtcaagatagtgaccacccacccagtcatgacacacagcctggtgagcatcagaaaactcacacagatagtaagtcctacaactgtaacgaatgcggcaaggcttttacccggatcttccaccttactcggcaccagaagatccacactcggaaacgctatgagtgttccaagtgccaggcgaccttcaacttgagaaaacacctcatccaacatcagaaaactcacgctgcaaaaactacctctgagtgtcaggagtgtgggaagatttttaggcacagttcgctgctcattgaacaccaggctcttcatgctggagaggagccttataagtgtaacgaacgtgggaaatccttcaggcataactctaccctaaagatccatcagagggttcacagtggagagaagccttacaaatgcagtgagtgtgggaaggccttccaccggcacactcaccttaatgaacatcggcgaattcatacaggctacagaccccacaaatgtcaggaatgcgtcaggagtttcagccggccctcacatctgatgcgacatcaggccattcacaccgcagaaaagccctatagctgtgctgaatgcaaggagactttcagcgataacaatcgccttgtgcaacaccagaaaatgcacactgtcaaaaccccatatgaatgtcaggagtgcggagaacgcttcatttgcggctcaaccctgaagtgccacgagagtgttcacgccagagaaaaacaaggattttttgtgagtgggaagatcttggatcagaacccagaacagaaagagaagtgctttaagtgtaacaaatgtgagaaaacctttagctgcagcaaatacctaactcagcacgagaggattcacaccaggggagtgaagccctttgaatgtgaccagtgtgggaaagcctttggccaaagtactcggctcattcaccatcaaagaatccactctagagtgaggctgtataaatggggtgagcaagggaaagccatcagcagtgcctcccttatcaaacttcagtccttccacacaaaggagcacccttttaaatgtaacgaatgcggaaagaccttcagccacagtgcacacctctcaaaacatcagttaattcacgctggagagaatccctttaaatgtagtaagtgtgacagagtcttcacccagagaaactaccttgttcagcatgagcgaactcatgccagaaagaagccgttggtgtgtaacgaatgcgggaaaacgttccgtcagagctcatgcctttctaagcatcagagaattcactcaggtgagaagccctatgtatgtgattactgcgggaaggccttcggcctgagtgctgagcttgtccgccaccagagaattcacactggagaaaagccttatgtttgtcaggaatgcgggaaagccttcacccagagctcatgcctttctattcaccggagagttcacactggggagaagccctacagatgtggtgaatgtgggaaagcctttgcccagaaagcaaatctaacacagcaccagagaattcacacaggggagaagccttactcctgtaatgtgtgtggcaaagcttttgtcctcagtgcccatctcaaccagcacctgagagttcacacccaggagacactttatcagtgtcaacgttgccagaaagcctttcggtgccactcgagcctcagccgccatcagcgtgtacacaacaagcagcaatactgcctgtagccattgggtggcagcagagtcccagaatatgagaccgttactcggatgttgaaagttggaaactatcccattgcaagtttctctccaaataaatgcatctaaagattgatt

SEQ ID NO: 462404 - DNA, 3103 bp, Homo sapiens
aacccgtcacaacgcgtttccatggcaacctaccgcttgctcttcggaaaaggttaacactccctgacttctagtaaagtgctaaggctgaagaagcaggaggagatgggaaggcgaaagaagtcgcccgcacagccctctgggaaatagagtcctggcgctgccgcggaggatcctgggtgcagccgctcagagaagcttctcgcgcacaggaagtcgctgcgaggaggcgcgtgtgcggggagttgaatctcccgctcccttgaggctggggttgcgtctgttgacgcggccgactacaatcccgagccctgccagccgggaacacggaggggaaggaggaggagcttaaaagaggctactgaaccccagttggccatggctgaggaatttgtgaccctcaaggatgtcggcatggacttcaccttgggagactgggagcagctcgggctggaacagggggacacgttctgggacacagcgttggacaattgccaggacctcttcctgctggaccccccaagacccaacctgacctcccacccagatggcagtgaagatctggagcctctggcaggaggaagcccagaagcaacaagccctgatgtgactgagaccaagaactctcctctgatggaggatttcttcgaagaaggattctcccaggagattatagagatgttatccaaggatggcttctggaactccaatttcggagaagcctgtatagaggacacctggttagatagtttgctaggcgatccagaaagtcttctgaggtctgatattgccaccaacggggaaagtcccacggaatgcaagagtcatgaattaaagagaggactcagtcctgtgtccaccgtttccacgggagaagattccatggtgcataatgtttctgaaaagaccctcacaccagctaagtctaaggaatataggggtgagtttttctcctactccgaccacagccagcaggattctgttcaggaaggggagaaaccatatcaatgtagtgaatgtgggaaaagcttcagtgggagttaccgtcttacccagcactggatcactcatactagggagaaacccactgtccatcaagagtgtgagcaaggttttgaccggaatgcttccctttctgtgtatccgaaaactcacacgggctacaaattctatgtgtgtaatgaatatgggacaacttttagtcagagtacatacctgtggcatcagaaaactcacactggagaaaaaccatgtaagagtcaagatagtgaccacccacccagtcatgacacacagcctggtgagcatcagaaaactcacacagatagtaagtcctacaactgtaacgaatgcggcaaggcttttacccggatcttccaccttactcggcaccagaagatccacactcggaaacgctatgagtgttccaagtgccaggcgaccttcaacttgagaaaacacctcatccaacatcagaaaactcacgctgcaaaaactacctctgagtgtcaggagtgtgggaagatttttaggcacagttcgctgctcattgaacaccaggctcttcatgctggagaggagccttataagtgtaacgaacgtgggaaatccttcaggcataactctaccctaaagatccatcagagggttcacagtggagagaagccttacaaatgcagtgagtgtgggaaggccttccaccggcacactcaccttaatgaacatcggcgaattcatacaggctacagaccccacaaatgtcaggaatgcgtcaggagtttcagccggccctcacatctgatgcgacatcaggccattcacaccgcagaaaagccctatagctgtgctgaatgcaaggagactttcagcgataacaatcgccttgtgcaacaccagaaaatgcacactgtcaaaaccccatatgaatgtcaggagtgcggagaacgcttcatttgcggctcaaccctgaagtgccacgagagtgttcacgccagagaaaaacaaggattttttgtgagtgggaagatcttggatcagaacccagaacagaaagagaagtgctttaagtgtaacaaatgtgagaaaacctttagctgcagcaaatacctaactcagcacgagaggattcacaccaggggagtgaagccctttgaatgtgaccagtgtgggaaagcctttggccaaagtactcggctcattcaccatcaaagaatccactctagagtgaggctgtataaatggggtgagcaagggaaagccatcagcagtgcctcccttatcaaacttcagtccttccacacaaaggagcacccttttaaatgtaacgaatgcggaaagaccttcagccacagtgcacacctctcaaaacatcagttaattcacgctggagagaatccctttaaatgtagtaagtgtgacagagtcttcacccagagaaactaccttgttcagcatgagcgaactcatgccagaaagaagccgttggtgtgtaacgaatgcgggaaaacgttccgtcagagctcatgcctttctaagcatcagagaattcactcaggtgagaagccctatgtatgtgattactgcgggaaggccttcggcctgagtgctgagcttgtccgccaccagagaattcacactggagaaaagccttatgtttgtcaggaatgcgggaaagccttcacccagagctcatgcctttctattcaccggagagttcacactggggagaagccctacagatgtggtgaatgtgggaaagcctttgcccagaaagcaaatctaacacagcaccagagaattcacacaggggagaagccttactcctgtaatgtgtgtggcaaagcttttgtcctcagtgcccatctcaaccagcacctgagagttcacacccaggagacactttatcagtgtcaacgttgccagaaagcctttcggtgccactcgagcctcagccgccatcagcgtgtacacaacaagcaccattgggtgtgggggcagtctgtaaatcagtcacctgtgttgctgcaggccaaggtagaaacgccctccgtgtgtgcatatttgttggttctctgattaaagttttgagtctaaaaaaaaaagt

SEQ ID NO: 462405 - DNA, 831 bp, Homo sapiens
aacccgtcacaacgcgtttccatggcaacctaccgcttgctcttcggaaaaggttaacactccctgacttctagtaaagtgctaaggctgaagaagcaggaggagatgggaaggcgaaagaagtcgcccgcacagccctctgggaaatagagtcctggcgctgccgcggaggatcctgggtgcagccgctcagagaagcttctcgcgcacaggaagtcgctgcgaggaggcgcgtgtgcggggagttgaatctcccgctcccttgaggctggggttgcgtctgttgacgcggccgactacaatcccgagccctgccagccgggaacacggaggggaaggaggaggagcttaaaagaggctactgaaccccagttggccatggctgaggaatttgtgaccctcaaggatgtcggcatggacttcaccttgggagactgggagcagctcgggctggaacagggggacacgttctgggacacagcgttggacaattgccaggacctcttcctgctggaccccccaagacccaacctgacctcccacccagatggcagtgaagatctggagcctctggcaggaggaagcccagaagcaacaagccctggtttctaaggtgataggagataagcctggagctgctcgtggtcaccttgccaccatggggggagaacctgccagaaaatgaaactaaccaaaaaggaagctgagctaagaggagtgaccagattactgacatgtctcttaaacacctggatccatctgttcctgaaggcaaaactgttcaattacataggctaataaattccctttcttccttaaacaaacagaata

SEQ ID NO: 462406 - DNA, 904 bp, Homo sapiens
atcctgaggctgcagccagctttcccacaggtctaccgagacattacaacgctcagcttcaggacttcactctgcttctcgctggcttccatccccttgtcctgggagctggggggatcaggacatttttatagaccctcactctggggtctctctaccttgcccttcagcacagggttatcctggtgcctctccacagctcctcctctttccttccagactcaacaagggtacgccctccactctctcagttggtctctctactttcctgccttgtgctccctgagtgtgttgaccctcattctacttcttttacctcctttccttcaggcccatttttccttcctatccctggggcatagcagatggccacatcagggagtaacttaagcccaggcctgaatgctgccaagagcatctgccctgccatctcccaagccggggttcctccaggtggatcaggttaggtggtgaggattcctggggtattacccatggtagagacgtccccagcatgagaagcagggccctgaaccagagaccacaggaatctcaggctgtaccccatccagtcagtctgcagctcccttcttggctcaccacgctcaggctcgtgtacatgaggcctctgcagcctcctcttcagcacatcagtgttcctcataggtgactaactcatgcacaggctctcacaacttctgctttctgtttctgtcacctcagcatattggctgtttccaaacataggtagccatgcctttactaacaaatatacctccatatcctctagtagtgacacttgagttgcatagttaccacataagcgtctttcccctttaacagcatgccgctcttggaagcagggcttagctgattcaccctgtattcccagctcctgacatca

SEQ ID NO: 462407 - DNA, 4928 bp, Homo sapiens
aacccgtcacaacgcgtttccatggcaacctaccgcttgctcttcggaaaaggttaacactccctgacttctagtaaagtgctaaggctgaagaagcaggaggagatgggaaggcgaaagaagtcgcccgcacagccctctgggaaatagagtcctggcgctgccgcggaggatcctgggtgcagccgctcagagaagcttctcgcgcacaggaagtcgctgcgaggaggcgcgtgtgcggggagttgaatctcccgctcccttgaggctggggttgcgtctgttgacgcggccgactacaatcccgaggtacggagacgctggggctgagggacttgcgggctcggtccttcctgagaggtgacggaatgcaagtgggggcgacttcggcaaaggggagactcacattgggacttgtcctcctcctcctggacattttgggggctcgtcagcatggacagcgagtcagccatgggtggaagggaggctttctcacagctcccttgtgcttcccacagccctgccagccgggaacacggaggggaaggaggaggagcttaaaagaggctactgaaccccagttggccatggctgaggaatttgtgaccctcaaggatgtcggcatggacttcaccttgggagactgggagcagctcgggctggaacagggggacacgttctgggacacagcgttggacaattgccaggacctcttcctgctggaccccccaagacccaacctgacctcccacccagatggcagtgaagatctggagcctctggcaggaggaagcccagaagcaacaagccctgatgtgactgagaccaagaactctcctctgatggaggatttcttcgaagaaggattctcccaggagattatagagatgttatccaaggatggcttctggaactccaatttcggagaagcctgtatagaggacacctggttagatagtttgctaggcgatccagaaagtcttctgaggtctgatattgccaccaacggggaaagtcccacggaatgcaagagtcatgaattaaagagaggactcagtcctgtgtccaccgtttccacgggagaagattccatggtgcataatgtttctgaaaagaccctcacaccagctaagtctaaggaatataggggtgagtttttctcctactccgaccacagccagcaggattctgttcaggaaggggagaaaccatatcaatgtagtgaatgtgggaaaagcttcagtgggagttaccgtcttacccagcactggatcactcatactagggagaaacccactgtccatcaagagtgtgagcaaggttttgaccggaatgcttccctttctgtgtatccgaaaactcacacgggctacaaattctatgtgtgtaatgaatatgggacaacttttagtcagagtacatacctgtggcatcagaaaactcacactggagaaaaaccatgtaagagtcaagatagtgaccacccacccagtcatgacacacagcctggtgagcatcagaaaactcacacagatagtaagtcctacaactgtaacgaatgcggcaaggcttttacccggatcttccaccttactcggcaccagaagatccacactcggaaacgctatgagtgttccaagtgccaggcgaccttcaacttgagaaaacacctcatccaacatcagaaaactcacgctgcaaaaactacctctgagtgtcaggagtgtgggaagatttttaggcacagttcgctgctcattgaacaccaggctcttcatgctggagaggagccttataagtgtaacgaacgtgggaaatccttcaggcataactctaccctaaagatccatcagagggttcacagtggagagaagccttacaaatgcagtgagtgtgggaaggccttccaccggcacactcaccttaatgaacatcggcgaattcatacaggctacagaccccacaaatgtcaggaatgcgtcaggagtttcagccggccctcacatctgatgcgacatcaggccattcacaccgcagaaaagccctatagctgtgctgaatgcaaggagactttcagcgataacaatcgccttgtgcaacaccagaaaatgcacactgtcaaaaccccatatgaatgtcaggagtgcggagaacgcttcatttgcggctcaaccctgaagtgccacgagagtgttcacgccagagaaaaacaaggattttttgtgagtgggaagatcttggatcagaacccagaacagaaagagaagtgctttaagtgtaacaaatgtgagaaaacctttagctgcagcaaatacctaactcagcacgagaggattcacaccaggggagtgaagccctttgaatgtgaccagtgtgggaaagcctttggccaaagtactcggctcattcaccatcaaagaatccactctagagtgaggctgtataaatggggtgagcaagggaaagccatcagcagtgcctcccttatcaaacttcagtccttccacacaaaggagcacccttttaaatgtaacgaatgcggaaagaccttcagccacagtgcacacctctcaaaacatcagttaattcacgctggagagaatccctttaaatgtagtaagtgtgacagagtcttcacccagagaaactaccttgttcagcatgagcgaactcatgccagaaagaagccgttggtgtgtaacgaatgcgggaaaacgttccgtcagagctcatgcctttctaagcatcagagaattcactcaggtgagaagccctatgtatgtgattactgcgggaaggccttcggcctgagtgctgagcttgtccgccaccagagaattcacactggagaaaagccttatgtttgtcaggaatgcgggaaagccttcacccagagctcatgcctttctattcaccggagagttcacactggggagaagccctacagatgtggtgaatgtgggaaagcctttgcccagaaagcaaatctaacacagcaccagagaattcacacaggggagaagccttactcctgtaatgtgtgtggcaaagcttttgtcctcagtgcccatctcaaccagcacctgagagttcacacccaggagacactttatcagtgtcaacgttgccagaaagcctttcggtgccactcgagcctcagccgccatcagcgtgtacacaacaagcagcaatactgcctgtagccattgggtggcagcagagtcccagaatatgagaccgttactcggatgttgaaagttggaaactatcccattgcaagtttctctccaaataaatgcatctaaagattgattagaaagtttgtgcgcatgtttttcattataacaatgaaaacacaaaagtggagaagctgtacaacgtcaggattcagaggtaggctctggagccagtctaccttgagttaaatcccacctctgccatctactacctaagtgaccttgggaaggtcagaaaaatctctcagggcctcggtgtccttatctgtaaaatgggcatcacctacctcagagggcttttctgaggattaaataaataaatgtgaagcacttagaactgatggccagcacatgagggctcaccaagtgtaagccacaaatacacatcagctatagcacaaatatacttgtgttacaagaaaggaattagtaatctgtgtttactgtagttaatgttcttacaatgtatcgcttttaatttaagttttccttttttacagtttttctccagcactttactcttcttaagtgcctggccttttttgtccctttatctctcctggtttttttcttaagccccagaaagccaaaaagaacatgtaaactcttcacctcaactagctacaaccttccactcctaacctcccaagcttctcacttaaagaggactccctatcccacaaacacatgctccctcttcctatgaccttcctccatttaacagtgttggttatgcaataagacacccaatttttcatgggagttgacaccaaaacacagctggattccatcaggaaagctgcattgatcagggtgttaaccgcatatgaaacaacccatatggaagacatacttaggggtcaaacctgtggtgtgtggaagtgaccactgggatgtcatcattcaccatttatccaggatggccgctcaccaggcaatttgctaggctcgggggcgggtagtatccatacactatgcactactgctctgaagcttctggaatcagaaatgaacccattttcatcgacgattgctgttagttgacaagtgacatcttgaaaatgccacattccctcatgtcacaggaagttctgggatcaccaaggattgttggagagtccagtgagatggaaccacacaaccagttccctaccagtgtcttgtcagctctgggtgtttgttccctgccactaagtggctcagtcacacctttgctgaaacacagtagtcttatgaaaagcactggacacatactttgaatacctttcatattttaggtgctgaaaatggtgagggagtgagtgctctgcacccttgggcttttcaactcttgcacctggagttctgctggttaagtttgttaaacttagttgaaactgggaacctgttggctaaccattggggccttacactgtttttcaaatggttgcaacatttaacttctcgcacatggttcccgtcctctggagctctgtcttgtcggggagatgggcatgttgtataccaaaagagtgtacaaagtgttgcagggctgtgacacaatagggactctatggaaaactggcagccattgggtgtgggggcagtctgtaaatcagtcacctgtgttgctgcaggccaaggtagaaacgccctccgtgtgtgcatatttgttggttctctgattaaagttttgagtctaaaaaaaaaagt

SEQ ID NO: 462408 - DNA, 4737 bp, Homo sapiens
aacccgtcacaacgcgtttccatggcaacctaccgcttgctcttcggaaaaggttaacactccctgacttctagtaaagtgctaaggctgaagaagcaggaggagatgggaaggcgaaagaagtcgcccgcacagccctctgggaaatagagtcctggcgctgccgcggaggatcctgggtgcagccgctcagagaagcttctcgcgcacaggaagtcgctgcgaggaggcgcgtgtgcggggagttgaatctcccgctcccttgaggctggggttgcgtctgttgacgcggccgactacaatcccgaggaatttgtgaccctcaaggatgtcggcatggacttcaccttgggagactgggagcagctcgggctggaacagggggacacgttctgggacacagcgttggacaattgccaggacctcttcctgctgggcttttcccaggagagcagccagcctgctgtgtcgccctcttctgcacaccagtgtcacacagtgagacagcagcagggcccagactccagctaagaccccccaagacccaacctgacctcccacccagatggcagtgaagatctggagcctctggcaggaggaagcccagaagcaacaagccctgatgtgactgagaccaagaactctcctctgatggaggatttcttcgaagaaggattctcccaggagattatagagatgttatccaaggatggcttctggaactccaatttcggagaagcctgtatagaggacacctggttagatagtttgctaggcgatccagaaagtcttctgaggtctgatattgccaccaacggggaaagtcccacggaatgcaagagtcatgaattaaagagaggactcagtcctgtgtccaccgtttccacgggagaagattccatggtgcataatgtttctgaaaagaccctcacaccagctaagtctaaggaatataggggtgagtttttctcctactccgaccacagccagcaggattctgttcaggaaggggagaaaccatatcaatgtagtgaatgtgggaaaagcttcagtgggagttaccgtcttacccagcactggatcactcatactagggagaaacccactgtccatcaagagtgtgagcaaggttttgaccggaatgcttccctttctgtgtatccgaaaactcacacgggctacaaattctatgtgtgtaatgaatatgggacaacttttagtcagagtacatacctgtggcatcagaaaactcacactggagaaaaaccatgtaagagtcaagatagtgaccacccacccagtcatgacacacagcctggtgagcatcagaaaactcacacagatagtaagtcctacaactgtaacgaatgcggcaaggcttttacccggatcttccaccttactcggcaccagaagatccacactcggaaacgctatgagtgttccaagtgccaggcgaccttcaacttgagaaaacacctcatccaacatcagaaaactcacgctgcaaaaactacctctgagtgtcaggagtgtgggaagatttttaggcacagttcgctgctcattgaacaccaggctcttcatgctggagaggagccttataagtgtaacgaacgtgggaaatccttcaggcataactctaccctaaagatccatcagagggttcacagtggagagaagccttacaaatgcagtgagtgtgggaaggccttccaccggcacactcaccttaatgaacatcggcgaattcatacaggctacagaccccacaaatgtcaggaatgcgtcaggagtttcagccggccctcacatctgatgcgacatcaggccattcacaccgcagaaaagccctatagctgtgctgaatgcaaggagactttcagcgataacaatcgccttgtgcaacaccagaaaatgcacactgtcaaaaccccatatgaatgtcaggagtgcggagaacgcttcatttgcggctcaaccctgaagtgccacgagagtgttcacgccagagaaaaacaaggattttttgtgagtgggaagatcttggatcagaacccagaacagaaagagaagtgctttaagtgtaacaaatgtgagaaaacctttagctgcagcaaatacctaactcagcacgagaggattcacaccaggggagtgaagccctttgaatgtgaccagtgtgggaaagcctttggccaaagtactcggctcattcaccatcaaagaatccactctagagtgaggctgtataaatggggtgagcaagggaaagccatcagcagtgcctcccttatcaaacttcagtccttccacacaaaggagcacccttttaaatgtaacgaatgcggaaagaccttcagccacagtgcacacctctcaaaacatcagttaattcacgctggagagaatccctttaaatgtagtaagtgtgacagagtcttcacccagagaaactaccttgttcagcatgagcgaactcatgccagaaagaagccgttggtgtgtaacgaatgcgggaaaacgttccgtcagagctcatgcctttctaagcatcagagaattcactcaggtgagaagccctatgtatgtgattactgcgggaaggccttcggcctgagtgctgagcttgtccgccaccagagaattcacactggagaaaagccttatgtttgtcaggaatgcgggaaagccttcacccagagctcatgcctttctattcaccggagagttcacactggggagaagccctacagatgtggtgaatgtgggaaagcctttgcccagaaagcaaatctaacacagcaccagagaattcacacaggggagaagccttactcctgtaatgtgtgtggcaaagcttttgtcctcagtgcccatctcaaccagcacctgagagttcacacccaggagacactttatcagtgtcaacgttgccagaaagcctttcggtgccactcgagcctcagccgccatcagcgtgtacacaacaagcagcaatactgcctgtagccattgggtggcagcagagtcccagaatatgagaccgttactcggatgttgaaagttggaaactatcccattgcaagtttctctccaaataaatgcatctaaagattgattagaaagtttgtgcgcatgtttttcattataacaatgaaaacacaaaagtggagaagctgtacaacgtcaggattcagaggtaggctctggagccagtctaccttgagttaaatcccacctctgccatctactacctaagtgaccttgggaaggtcagaaaaatctctcagggcctcggtgtccttatctgtaaaatgggcatcacctacctcagagggcttttctgaggattaaataaataaatgtgaagcacttagaactgatggccagcacatgagggctcaccaagtgtaagccacaaatacacatcagctatagcacaaatatacttgtgttacaagaaaggaattagtaatctgtgtttactgtagttaatgttcttacaatgtatcgcttttaatttaagttttccttttttacagtttttctccagcactttactcttcttaagtgcctggccttttttgtccctttatctctcctggtttttttcttaagccccagaaagccaaaaagaacatgtaaactcttcacctcaactagctacaaccttccactcctaacctcccaagcttctcacttaaagaggactccctatcccacaaacacatgctccctcttcctatgaccttcctccatttaacagtgttggttatgcaataagacacccaatttttcatgggagttgacaccaaaacacagctggattccatcaggaaagctgcattgatcagggtgttaaccgcatatgaaacaacccatatggaagacatacttaggggtcaaacctgtggtgtgtggaagtgaccactgggatgtcatcattcaccatttatccaggatggccgctcaccaggcaatttgctaggctcgggggcgggtagtatccatacactatgcactactgctctgaagcttctggaatcagaaatgaacccattttcatcgacgattgctgttagttgacaagtgacatcttgaaaatgccacattccctcatgtcacaggaagttctgggatcaccaaggattgttggagagtccagtgagatggaaccacacaaccagttccctaccagtgtcttgtcagctctgggtgtttgttccctgccactaagtggctcagtcacacctttgctgaaacacagtagtcttatgaaaagcactggacacatactttgaatacctttcatattttaggtgctgaaaatggtgagggagtgagtgctctgcacccttgggcttttcaactcttgcacctggagttctgctggttaagtttgttaaacttagttgaaactgggaacctgttggctaaccattggggccttacactgtttttcaaatggttgcaacatttaacttctcgcacatggttcccgtcctctggagctctgtcttgtcggggagatgggcatgttgtataccaaaagagtgtacaaagtgttgcagggctgtgacacaatagggactctatggaaaactggcagccattgggtgtgggggcagtctgtaaatcagtcacctgtgttgctgcaggccaaggtagaaacgccctccgtgtgtgcatatttgttggttctctgattaaagttttgagtctaaaaaaaaaagt

SEQ ID NO: 462409 - DNA, 3112 bp, Homo sapiens
aacccgtcacaacgcgtttccatggcaacctaccgcttgctcttcggaaaaggttaacactccctgacttctagtaaagtgctaaggctgaagaagcaggaggagatgggaaggcgaaagaagtcgcccgcacagccctctgggaaatagagtcctggcgctgccgcggaggatcctgggtgcagccgctcagagaagcttctcgcgcacaggaagtcgctgcgaggaggcgcgtgtgcggggagttgaatctcccgctcccttgaggctggggttgcgtctgttgacgcggccgactacaatcccgagccctgccagccgggaacacggaggggaaggaggaggagcttaaaagaggctactgaaccccagttggccatggctgaggaatttgtgaccctcaaggatgtcggcatggacttcaccttgggagactgggagcagctcgggctggaacagggggacacgttctgggacacagcgttggacaattgccaggacctcttcctgctggaccccccaagacccaacctgacctcccacccagatggcagtgaagatctggagcctctggcaggaggaagcccagaagcaacaagccctgatgtgactgagaccaagaactctcctctgatggaggatttcttcgaagaaggattctcccaggagattatagagatgttatccaaggatggcttctggaactccaatttcggagaagcctgtatagaggacacctggttagatagtttgctaggcgatccagaaagtcttctgaggtctgatattgccaccaacggggaaagtcccacggaatgcaagagtcatgaattaaagagaggactcagtcctgtgtccaccgtttccacgggagaagattccatggtgcataatgtttctgaaaagaccctcacaccagctaagtctaaggaatataggggtgagtttttctcctactccgaccacagccagcaggattctgttcaggaaggggagaaaccatatcaatgtagtgaatgtgggaaaagcttcagtgggagttaccgtcttacccagcactggatcactcatactagggagaaacccactgtccatcaagagtgtgagcaaggttttgaccggaatgcttccctttctgtgtatccgaaaactcacacgggctacaaattctatgtgtgtaatgaatatgggacaacttttagtcagagtacatacctgtggcatcagaaaactcacactggagaaaaaccatgtaagagtcaagatagtgaccacccacccagtcatgacacacagcctggtgagcatcagaaaactcacacagatagtaagtcctacaactgtaacgaatgcggcaaggcttttacccggatcttccaccttactcggcaccagaagatccacactcggaaacgctatgagtgttccaagtgccaggcgaccttcaacttgagaaaacacctcatccaacatcagaaaactcacgctgcaaaaactacctctgagtgtcaggagtgtgggaagatttttaggcacagttcgctgctcattgaacaccaggctcttcatgctggagaggagccttataagtgtaacgaacgtgggaaatccttcaggcataactctaccctaaagatccatcagagggttcacagtggagagaagccttacaaatgcagtgagtgtgggaaggccttccaccggcacactcaccttaatgaacatcggcgaattcatacaggctacagaccccacaaatgtcaggaatgcgtcaggagtttcagccggccctcacatctgatgcgacatcaggccattcacaccgcagaaaagccctatagctgtgctgaatgcaaggagactttcagcgataacaatcgccttgtgcaacaccagaaaatgcacactgtcaaaaccccatatgaatgtcaggagtgcggagaacgcttcatttgcggctcaaccctgaagtgccacgagagtgttcacgccagagaaaaacaaggattttttgtgagtgggaagatcttggatcagaacccagaacagaaagagaagtgctttaagtgtaacaaatgtgagaaaacctttagctgcagcaaatacctaactcagcacgagaggattcacaccaggggagtgaagccctttgaatgtgaccagtgtgggaaagcctttggccaaagtactcggctcattcaccatcaaagaatccactctagagtgaggctgtataaatggggtgagcaagggaaagccatcagcagtgcctcccttatcaaacttcagtccttccacacaaaggagcacccttttaaatgtaacgaatgcggaaagaccttcagccacagtgcacacctctcaaaacatcagttaattcacgctggagagaatccctttaaatgtagtaagtgtgacagagtcttcacccagagaaactaccttgttcagcatgagcgaactcatgccagaaagaagccgttggtgtgtaacgaatgcgggaaaacgttccgtcagagctcatgcctttctaagcatcagagaattcactcaggtgagaagccctatgtatgtgattactgcgggaaggccttcggcctgagtgctgagcttgtccgccaccagagaattcacactggagaaaagccttatgtttgtcaggaatgcgggaaagccttcacccagagctcatgcctttctattcaccggagagttcacactggggagaagccctacagatgtggtgaatgtgggaaagcctttgcccagaaagcaaatctaacacagcaccagagaattcacacaggggagaagccttactcctgtaatgtgtgtggcaaagcttttgtcctcagtgcccatctcaaccagcacctgagagttcacacccaggagacactttatcagtgtcaacgttgccagaaagcctttcggtgccactcgagcctcagccgccatcagcgtgtacacaacaagcagcaatactgcctgtagccattgggtggcagcagagtcccagaatctgtgccctcacaaccccagatgaaagttagtacatatgctggggcatgatgccctgaaatgaatgtgattcaatgatggatccgtaaga

SEQ ID NO: 462410 - DNA, 921 bp, Homo sapiens
ggccaggagttccaaatgcatgtggctgggctggaggcgaggtgttggcagggccaccatgttccttctggaggctccagcacgtagatagtccttcctggcccgttgccagcttctggaggtcacctgtattgcttgactcatggcttctcagtcttcaaagacagcagtggcgttttctccgctgtggcctgtatccctcctggatggtgactctgttcccttccttggggaagcttgtggagggtatggctcaggactgcttgggctctgggaccctgacattttctgtccctggcccatggaggcctcaggcaatgtgtggcccatgggtcagtgaataaatcatgaatggctaaggaagtacgtgcctctccacctggcagatcctgcccattaaagagctgtcacaagtcctttgtatccccagccccagctgtcacagctttgatcaccctggattgtgattgtttggctccctctccatcactggactgggaaccctacaggacaggcatccccagagtcgcccagtgcagcacctcgtccacacacaggagccacgtgcaggataaagcatagaaaagtcaggagagccaggaggttctcactgagtgtctggatggtcctccatgtcctggttgggtgacaatgcttttctctccctgcagaccccccaagacccaacctgacctcccacccagatggcagtgaagatctggagcctctggcaggaggaagcccagaagcaacaagccctggtgagtggatggagaggggccccttgtgtaccttctgtcttccagacctccatcctgaggctgcagccagctttcccacaggtctaccgagacattacaacgctcagcttcaggacttcactctgcttctcgctggcttccatccccttgtcctgggagc

SEQ ID NO: 462411 - DNA, 2463 bp, Homo sapiens
gtgagactcagagaggcagtgacctggccaggggcaggcagctttcctatctaaaagggcaattactccaagcaaccaggaaggccagaaccaggggacaaatttcccaacatgactctgggaaaggccagcccgggcctctcgggatctcaagccctcggcctgtgtgtgtgccagagcttcccacagactcgggaagaagtcaaggaactctcactgcgcccttgtttggacaagacgaggaggcgcactcagagtcagagaccccggggcagagacaggggcaagaagaaggggccaccgagaccccaagagagtcagggagacagacgcaccaaacgaccgacacaaccagggacaggttcaagcaattctcctgcctcagcctcgcgagtagctgggattacagatatccttcgagttggatttcgactgggttctgccagtgggatgtatccatgcgagattctggaactaacatcagagagagtccaagcttctaacttttatcagcggcagtgacaatagtcaagcagcattgatgacaaacggcaagagtttagaaagtaccagtgacgtgcctgatagaatctcaccacaagatggaagccaactcgtcagaagcctggaaagcccacccagcgtgggacctctgtgggtccaggatcttggaatggtatcccatggttcaatcttctggattcaaccacataaatttaccccacccatgtcgtggacccaagcttcctaccatgtatacttagcttaaatgcaagatagtactattttgttcatcttgattggagtgagaaatgaataggtccatgcacatatatttcttttaccacaacaagatgatgaagaaataaatccataatatcgatacttttgtataagttgtgtttacagttgcggtaagaaattttataattgttgatttgctttatataatttctgcttgctttttatgatatttaaaacaaaatctaagcaacaaattttatgtctgattagatttacagaagctgcttaagtgcttagggataatttgttcatcatatttgtaagtctcccttgttaggtgtttgaagtgtttgaattggctaaattaaatttgtaattgtagtttgaaatatctaaaggaattttcttaattaagtgtttaaatgatgttaaaagtttgtgggaatttaatctatcaaatttatgagttaattgaatatgaatcaatgaacaagtaaatgtgatcttgcttttatataaaaactactaagttcataaataaaatacaaagatccataagttgagaggaaaagcaaaagagccagattctaagatctataacttaaaaaaattaaatattgattgaaatgtaagtcattgcaattatccccactagctgaaatctcacatctgagtgcttacacacaaaacaaaatgttaccctgaacatactaaacaaataaaaaaccacgtggtaattactatacacatgctcactgctggaagcattcatactgcactcaaatccaggtgggagaatgcagcgtgtgctacaggtgaatctcggctgttctcttatggggatcaggtctttttcttaattatcttccacggatttttcttcctttacccagagacctggaggccctcccagcccaggtccaattcagatggatacatacttaacatcactaacctattgatttgcttgtttatttacactgcagcacatgtttgttgtggtgcagaaggaaaacctccttcacatcttatactgaataatatcaatgcacagaaacctacccactgattgtttgcttagggttaagttactgggtgattttaaaataataacaatgtttttatttgcttccattaaaacgctttgttttaggcagaagtccttgaaaggttgctagataggtgttaacaatgcttttgagatatttgagttcatttgttgggagttgggtgggcccggaatgccatagactcaaacatttttccttccaacacatcttcgggaacagattcagttgatgtggtggaaattcttgtacttcccttctgggcacagagtgcttctcacagagagaaggaaggctttgcttctctcttgtcactggaacatttaatttcctatttgtttttcatctctgtctgggaaatctccaaggaggacgattgatttgccaagaggtgtcttctattccaaggccttggccaagtcaccatatttacaccatcagaacctcacctagccccttcaacaaaggatgtaattgtagatattgagaaatgattccactctccctgcttgaaggactggctttggggcagctttctgaaggccaagcttcagttcataggatgttaatacatgtctgagcagatgagggtattagttgtgccatccatgttttaacccttgattttacagtgtggaaacttgagggtcac

SEQ ID NO: 462412 - DNA, 2068 bp, Homo sapiens
tcccctccgactgagccccatagaccccctactcaggccagaaggggaaagctgagctcctgctggcccaggcatcagaattcctcagggaggaaaagttgcctatctgttgggtcagatttctgaagactgatgaggcccattttctgacaaacggcaagagtttagaaagtaccagtgacgtgcctgatagaatctcaccacaagatggaagccaactcgtcagaagcctggaaagcccacccagcgtgggacctctgtgggtccaggatcttggaatggtatcccatggttcaatcttctggattcaaccacataaatttaccccacccatgtcgtggacccaagcttcctaccatgtatacttagcttaaatgcaagatagtactattttgttcatcttgattggagtgagaaatgaataggtccatgcacatatatttcttttaccacaacaagatgatgaagaaataaatccataatatcgatacttttgtataagttgtgtttacagttgcggtaagaaattttataattgttgatttgctttatataatttctgcttgctttttatgatatttaaaacaaaatctaagcaacaaattttatgtctgattagatttacagaagctgcttaagtgcttagggataatttgttcatcatatttgtaagtctcccttgttaggtgtttgaagtgtttgaattggctaaattaaatttgtaattgtagtttgaaatatctaaaggaattttcttaattaagtgtttaaatgatgttaaaagtttgtgggaatttaatctatcaaatttatgagttaattgaatatgaatcaatgaacaagtaaatgtgatcttgcttttatataaaaactactaagttcataaataaaatacaaagatccataagttgagaggaaaagcaaaagagccagattctaagatctataacttaaaaaaattaaatattgattgaaatgtaagtcattgcaattatccccactagctgaaatctcacatctgagtgcttacacacaaaacaaaatgttaccctgaacatactaaacaaataaaaaaccacgtggtaattactatacacatgctcactgctggaagcattcatactgcactcaaatccaggtgggagaatgcagcgtgtgctacaggtgaatctcggctgttctcttatggggatcaggtctttttcttaattatcttccacggatttttcttcctttacccagagacctggaggccctcccagcccaggtccaattcagatggatacatacttaacatcactaacctattgatttgcttgtttatttacactgcagcacatgtttgttgtggtgcagaaggaaaacctccttcacatcttatactgaataatatcaatgcacagaaacctacccactgattgtttgcttagggttaagttactgggtgattttaaaataataacaatgtttttatttgcttccattaaaacgctttgttttaggcagaagtccttgaaaggttgctagataggtgttaacaatgcttttgagatatttgagttcatttgttgggagttgggtgggcccggaatgccatagactcaaacatttttccttccaacacatcttcgggaacagattcagttgatgtggtggaaattcttgtacttcccttctgggcacagagtgcttctcacagagagaaggaaggctttgcttctctcttgtcactggaacatttaatttcctatttgtttttcatctctgtctgggaaatctccaaggaggacgattgatttgccaagaggtgtcttctattccaaggccttggccaagtcaccatatttacaccatcagaacctcacctagccccttcaacaaaggatgtaattgtagatattgagaaatgattccactctccctgcttgaaggactggctttggggcagctttctgaaggccaagcttcagttcataggatgttaatacatgtctgagcagatgagggtattagttgtgccatccatgttttaacccttgattttacagtgtggaaacttgagggtcac

SEQ ID NO: 462413 - DNA, 746 bp, Homo sapiens
agcacaaaccagtgcagcggtatgaacctgtatgggtggccattgcattcctcactacccacatttaaaaagaagtcagttttacttaagaaagtttttgataaaggtgtaacaattttttattttattaaatctccacccgtgagttcccatctttttattattctgtccaaaccactggtagcagcccctggtatatccaggacatcagcacatagaaccagtgaaagggtcctccctcatagtgacgcatgtcatagactcagatttatacaaacaaatgctgagcaaaccatgaagagtctctggtattttcaacaatatcatcacagaggaactgtattgatttccttgaacttttcaaatgtagaggagcctttagaaggaagccttgagcatgaggacagacccccctcatccaaccaccacctgactctgtgtgaacctggaactgttagaatgtctgtgctgtgataaaaggtcatctccctacaatgttatgatacagacctcaaacctacaaacatgaggaacttctgcctccaggttaactgcttacccactgtacaagacacgttacacacagtccaggaggcggagcttctgagatatctagaaacagcttagaggcaaaatgacaaaataaagcagcaacaacaaataaaaccaatcttctcgaactggctctcgctttggtctaactagttatgcactacttggataactatatcaagttcccttgagtc

SEQ ID NO: 462414 - DNA, 539 bp, Homo sapiens
cagatggggtttgcaggagcaatggctgtagggacactaagatttcaccctccagaagacagcatcttcctgtgccatggctagatcaccagctacccacagacagcctgaactccaattgtcttcctgcacatgtgcctttaaaggaacttttcaaatgtagaggagcctttagaaggaagccttgagcatgaggacagacccccctcatccaaccaccacctgactctgtgtgaacctggaactgttagaatgtctgtgctgtgataaaaggtcatctccctacaatgttatgatacagacctcaaacctacaaacatgaggaacttctgcctccaggttaactgcttacccactgtacaagacacgttacacacagtccaggaggcggagcttctgagatatctagaaacagcttagaggcaaaatgacaaaataaagcagcaacaacaaataaaaccaatcttctcgaactggctctcgctttggtctaactagttatgcactacttggataactatatcaagttcccttgagtc

SEQ ID NO: 462415 - DNA, 644 bp, Homo sapiens
agcacaaaccagtgcagcggtatgaacctgtatgggtggccattgcattcctcactacccacatttaaaaagaagtcagttttacttaagaaagtttttgataaaggtgtaacaattttttattttattaaatctccacccgtgagttcccatctttttattattctgtccaaaccactggtagcagcccctggtatatccaggacatcagcacatagaaccagtgaaagggtcctccctcatagtgacgcatgtcatagactcagatttatacaaacaaatgctgagcaaaccatgaagagtctctggtattttcaacaatatcatcacagaggaactgtattgatttccttgcacgttcagggtactgggagaggcaacagggatggaggtcccatgtcaggggacttcacagtgtgacgggaatgttcaacctgcacctgttccttgcaccatactccatccagctctccgctcttccagtcatttatgctcctgtcttccgtggaggaagtctggtagtatctccccgggacactggctcaaatttccagccacctgcccaagacagatgggaccaggggccagatgatgtggacaatgatgatgtcacaaagagaagtaagaaataaaggaggcaactt

SEQ ID NO: 462416 - DNA, 4170 bp, Homo sapiens
cagctaagacgctaggaccccctggaagcctagaaacgggagtgttgacatttagggatgtggccatagaattctctctggaggagtggcaatgcctggacaccgcacagcagaatttatataggaatgtgatgttagagaactacagaaacctggtcttcgtgggtattgctgcctctaagccagacctgatcacctgtctggagcaaggaaaagaaccttggaatgtgaagagacatgagatggtagctgaacccccagttgtatgttcttattttgcccgagacctttggccaaagcagggcaaaaaaaattatttccaaaaagtgatactgagaagatataaaaaatgtggatgtgaaaatttacagttaagaaaatactgtaaaagcatggatgagtgtaaggtgcacaaagaatgttacaatggacttaaccagtgtttgacgactacccagaacaaaatatttcaatgtgacaaatatgtgaaagtctttcataaattttcaaattcaaacagacatacgataagacatactggaaagaaatctttcaaatgtaaagaatgtgaaaagtcattttgcatgctttcacacttagctcaacataaaagaattcatagtggagagaaaccctacaaatgtaaagaatgtgggaaagcctataatgagacctcaaacctttctacacataaaagaattcatactggaaagaaaccctacaaatgcgaagagtgtggaaaagcctttaaccggctctcacaccttactacacataagataattcatactggaaagaaaccctacaaatgtgaggagtgtggcaaagcttttaaccaatctgcaaaccttactacacataagagaattcatactggagagaaaccctacaaatgtgaagaatgtggcagagcttttagccagtcctcaacccttactgcacataagataattcatgctggagagaaaccttacaaatgtgaagaatgtggcaaagcttttagccagtcctcaacccttactacacataagataattcatactggagagaaattctacaaatgtgaagaatgtggtaaggcctttagccagttatcccaccttactacacataagagaattcattctggagagaaaccctacaagtgtgaagaatgtggcaaagcttttaaacaatcctcaacccttactacacataagagaattcatgctggagagaaattctacaaatgtgaagtatgtagcaaagcctttagccggttctcacaccttactacacataagagaattcatactggagagaagccctacaaatgtgaagaatgtggcaaagcttttaacctatcgtcacaacttactacacataagataattcatactggagagaaaccctacaaatgtgaagaatgtggcaaagcttttaaccagtcctcaactctttctaaacataaggtaattcatactggagagaagccctacaaatatgaagaatgtggcaaagcttttaaccagtcctcacaccttactacacataagatgattcatactggagagaaaccctacaagtgtgaagaatgtggcaaagcctttaacaactcctctattcttaacagacataagatgattcatactggagagaaactctacaaacctgaaagttgtaacaatgcttgtgacaacattgcaaagatttccaaatataaaagaaattgtgctggtgagaaataatagaaatatgaatgtgacaaagcctttaaatggttatcacactggattgtaggtaaggtaattcattctggagaaaacttctacaagtgtgaatgaacagtgtggcaaaacttacacaatgctcaaaccttattgcacaggaaagcctttatacttgagaacaaatgtacaaatataaagaaagtaaaaaagtgattaatatctgtgcacatcttattcaacatcagagtttatattaatagcattaaaagtgcaattactgtcaaaagagttcaaaaaataagcatttaaagtgctgaagaggatttattttgaagacaaacattacaaatataaacgaagttgtggtaactttacttgtaacacagatcttgttgtattcattctgtattagagcaaaccctgaggcaattgctcaaactttgttcaacatcagagaatttatatcgaagaaaaaccctgtaaatgtaataaatttagaaaaaaacatttattcaaaaactacaggttagaaaattccagagagttcatattaaaatatttttgcatatacagtaaatagaaaaaaatatttaattcaatggtaagtttatgtaaatatcagagaatttatgttagaaatatataaggcaatgacacttcagactttacactgaatcagagttctgagtttagaaagtaatccaaaactaaacttggcagaaaaattatttgtttataactttaaaagagtagaagattttttggagagttacaagtatacttttttttagaaagattacagattttttttaaaagtaaataactctcaaattacttcatacaaataatgttgtaattaactcaaattacttcgtgttaatgttgtaattaactctcaaattacttcatgctaaggaaattagtttttctttttcttcttctttttttttttttttttagatggagtcttgctctatcgcccccccaggctggagtacagtggcacgatctcagctcactgcaacctccgtctccagggttcaagtgattctcctgcctcagcctcccaagtggctgggattacaggcgcaaaccaccatgcgtggctaaattttgtatttttaatagagccagggttttgccatgttggccaggctggtctcgaactcgagactttaggtgatccgcccagcttggcctcccgcaatgctgcaattacaggtgttagccactgcgcctgcctgatgttgtttctttattcctattgtattcatatgtgaaagcatgtgaccaaaagatatgaggattattttttattaggtgagcatttatgacctcttctatgaaagagtaaggacattaaaatgcatgatgaaaatctaagtaaagaggttctttgtgattcacttacagtactgagtgatgcatgaggtaggtgttctgagtaatattctgcattatattgagagacaaatttttagttttagttaaaattaaaaataaattagtatattattttactaattttacttttatgaaaatgcagtacatgttaaaaattttagattatgtgtgaacttaatttcttaattcaacatttttaacagtttaaatattgtgcattcaatcaagtcacattattccacttactttaacctagtccaccttactcaagggtgtaggtaaaaggtggtaacaaggccgggcacggtggctcacgcctgtaatcccagcactttgggaggcaaaggtgggtagatcacctgaggtcgggagttcaagaccagcctgaccaacatggagaaacgccatctctactaaaaatacaaaattagccaggcatggtggcgcatgcctgtaatcccagctactcgggaggctgaggcaggagaatcacttgaacccgggaagcagaggttgcggtgagccgagatcatgccatggcactccgtcctgggtgacaaagtgagactccctctcaaaaaataaataagtaaataaaataaatggtggtaacaatacactatttggtaaaagaatgcactaacatctgtagtactaatcttttttccagtggctttaaactgcaaataaggaatgttgtttctgtaggtaaaatttttatttattttttcccatttaaatttacttttgttagttttttcaggcatataatatttatgttatatatggcatattctgataagaggcatacaatatgtaataatcacattagggtaaatgaggtatccatcacctttagaatttattttttgtattatgaacagttcaattgtacagttttagtttttttaaaatatacgattgttattgactacagggttatttttataataaaaattatatacaagtataaaatttacacatttctgagtcctgaataaataaaaataatttcttgtatatttttctttgaatatgtggcctctctacttgcaaa

SEQ ID NO: 462417 - DNA, 4332 bp, Homo sapiens
aggatcttgaaggaaagatgcagatgaaaatacccaaattcaataatcggttagaactggcggggggaaaagctaagtccactggtccacagaaactgcagtcacctctccccctagggactcaggcccagggagatcagagttctgtccctgagcccctggctggagttgttggagttcctgcagagtggccccacacaggagtgttgacatttagggatgtggccatagaattctctctggaggagtggcaatgcctggacaccgcacagcagaatttatataggaatgtgatgttagagaactacagaaacctggtcttcgtgggtattgctgcctctaagccagacctgatcacctgtctggagcaaggaaaagaaccttggaatgtgaagagacatgagatggtagctgaacccccagttgtatgttcttattttgcccgagacctttggccaaagcagggcaaaaaaaattatttccaaaaagtgatactgagaagatataaaaaatgtggatgtgaaaatttacagttaagaaaatactgtaaaagcatggatgagtgtaaggtgcacaaagaatgttacaatggacttaaccagtgtttgacgactacccagaacaaaatatttcaatgtgacaaatatgtgaaagtctttcataaattttcaaattcaaacagacatacgataagacatactggaaagaaatctttcaaatgtaaagaatgtgaaaagtcattttgcatgctttcacacttagctcaacataaaagaattcatagtggagagaaaccctacaaatgtaaagaatgtgggaaagcctataatgagacctcaaacctttctacacataaaagaattcatactggaaagaaaccctacaaatgcgaagagtgtggaaaagcctttaaccggctctcacaccttactacacataagataattcatactggaaagaaaccctacaaatgtgaggagtgtggcaaagcttttaaccaatctgcaaaccttactacacataagagaattcatactggagagaaaccctacaaatgtgaagaatgtggcagagcttttagccagtcctcaacccttactgcacataagataattcatgctggagagaaaccttacaaatgtgaagaatgtggcaaagcttttagccagtcctcaacccttactacacataagataattcatactggagagaaattctacaaatgtgaagaatgtggtaaggcctttagccagttatcccaccttactacacataagagaattcattctggagagaaaccctacaagtgtgaagaatgtggcaaagcttttaaacaatcctcaacccttactacacataagagaattcatgctggagagaaattctacaaatgtgaagtatgtagcaaagcctttagccggttctcacaccttactacacataagagaattcatactggagagaagccctacaaatgtgaagaatgtggcaaagcttttaacctatcgtcacaacttactacacataagataattcatactggagagaaaccctacaaatgtgaagaatgtggcaaagcttttaaccagtcctcaactctttctaaacataaggtaattcatactggagagaagccctacaaatatgaagaatgtggcaaagcttttaaccagtcctcacaccttactacacataagatgattcatactggagagaaaccctacaagtgtgaagaatgtggcaaagcctttaacaactcctctattcttaacagacataagatgattcatactggagagaaactctacaaacctgaaagttgtaacaatgcttgtgacaacattgcaaagatttccaaatataaaagaaattgtgctggtgagaaataatagaaatatgaatgtgacaaagcctttaaatggttatcacactggattgtaggtaaggtaattcattctggagaaaacttctacaagtgtgaatgaacagtgtggcaaaacttacacaatgctcaaaccttattgcacaggaaagcctttatacttgagaacaaatgtacaaatataaagaaagtaaaaaagtgattaatatctgtgcacatcttattcaacatcagagtttatattaatagcattaaaagtgcaattactgtcaaaagagttcaaaaaataagcatttaaagtgctgaagaggatttattttgaagacaaacattacaaatataaacgaagttgtggtaactttacttgtaacacagatcttgttgtattcattctgtattagagcaaaccctgaggcaattgctcaaactttgttcaacatcagagaatttatatcgaagaaaaaccctgtaaatgtaataaatttagaaaaaaacatttattcaaaaactacaggttagaaaattccagagagttcatattaaaatatttttgcatatacagtaaatagaaaaaaatatttaattcaatggtaagtttatgtaaatatcagagaatttatgttagaaatatataaggcaatgacacttcagactttacactgaatcagagttctgagtttagaaagtaatccaaaactaaacttggcagaaaaattatttgtttataactttaaaagagtagaagattttttggagagttacaagtatacttttttttagaaagattacagattttttttaaaagtaaataactctcaaattacttcatacaaataatgttgtaattaactcaaattacttcgtgttaatgttgtaattaactctcaaattacttcatgctaaggaaattagtttttctttttcttcttctttttttttttttttttagatggagtcttgctctatcgcccccccaggctggagtacagtggcacgatctcagctcactgcaacctccgtctccagggttcaagtgattctcctgcctcagcctcccaagtggctgggattacaggcgcaaaccaccatgcgtggctaaattttgtatttttaatagagccagggttttgccatgttggccaggctggtctcgaactcgagactttaggtgatccgcccagcttggcctcccgcaatgctgcaattacaggtgttagccactgcgcctgcctgatgttgtttctttattcctattgtattcatatgtgaaagcatgtgaccaaaagatatgaggattattttttattaggtgagcatttatgacctcttctatgaaagagtaaggacattaaaatgcatgatgaaaatctaagtaaagaggttctttgtgattcacttacagtactgagtgatgcatgaggtaggtgttctgagtaatattctgcattatattgagagacaaatttttagttttagttaaaattaaaaataaattagtatattattttactaattttacttttatgaaaatgcagtacatgttaaaaattttagattatgtgtgaacttaatttcttaattcaacatttttaacagtttaaatattgtgcattcaatcaagtcacattattccacttactttaacctagtccaccttactcaagggtgtaggtaaaaggtggtaacaaggccgggcacggtggctcacgcctgtaatcccagcactttgggaggcaaaggtgggtagatcacctgaggtcgggagttcaagaccagcctgaccaacatggagaaacgccatctctactaaaaatacaaaattagccaggcatggtggcgcatgcctgtaatcccagctactcgggaggctgaggcaggagaatcacttgaacccgggaagcagaggttgcggtgagccgagatcatgccatggcactccgtcctgggtgacaaagtgagactccctctcaaaaaataaataagtaaataaaataaatggtggtaacaatacactatttggtaaaagaatgcactaacatctgtagtactaatcttttttccagtggctttaaactgcaaataaggaatgttgtttctgtaggtaaaatttttatttattttttcccatttaaatttacttttgttagttttttcaggcatataatatttatgttatatatggcatattctgataagaggcatacaatatgtaataatcacattagggtaaatgaggtatccatcacctttagaatttattttttgtattatgaacagttcaattgtacagttttagtttttttaaaatatacgattgttattgactacagggttatttttataataaaaattatatacaagtataaaatttacacatttctgagtcctgaataaataaaaataatttcttgtatatttttctttgaatatgtggcctctctacttgcaaa

SEQ ID NO: 462418 - DNA, 4089 bp, Homo sapiens
  misc_feature (3051)..(3051): n is a, c, g, or t
  misc_feature (3075)..(3075): n is a, c, g, or t
  misc_feature (3078)..(3078): n is a, c, g, or t
  misc_feature (3088)..(3088): n is a, c, g, or t
  misc_feature (3095)..(3095): n is a, c, g, or t
  misc_feature (3100)..(3101): n is a, c, g, or t
  misc_feature (3109)..(3109): n is a, c, g, or t
  misc_feature (3112)..(3112): n is a, c, g, or t
  misc_feature (3139)..(3139): n is a, c, g, or t
  misc_feature (3151)..(3151): n is a, c, g, or t
  misc_feature (3153)..(3155): n is a, c, g, or t
  misc_feature (3161)..(3161): n is a, c, g, or t
  misc_feature (3163)..(3163): n is a, c, g, or t
  misc_feature (3183)..(3183): n is a, c, g, or t
  misc_feature (3197)..(3197): n is a, c, g, or t
  misc_feature (3200)..(3200): n is a, c, g, or t
  misc_feature (3208)..(3208): n is a, c, g, or t
  misc_feature (3214)..(3214): n is a, c, g, or t
  misc_feature (3219)..(3219): n is a, c, g, or t
  misc_feature (3225)..(3225): n is a, c, g, or t
  misc_feature (3227)..(3227): n is a, c, g, or t
  misc_feature (3232)..(3232): n is a, c, g, or t
gcaacagcctggggccgagaagcgaaacttggtcttctccaccctcgtcgcactccttttccccgagacttggtactgggagataggacgggagtctcctacacgcagtcaacacttgccacgagcggctagacttaggacaggcaagttgccctgccatccttctatcgcccccacccctcctttacttaagggcgatggcagagacgtcctcctcccccttctcctcctctttggtgcctccagccaggaggcgggagcgatccacagcagctgacccagctcaagcactgcctctctcacagccctcaagacacaccatgggccccagaggcaggtttgctacacagcagcgacgacgcaggcggcggccccagcgactcgcaactgcctccctgaccacagcggccaccgcccaacacccccgagaagccatcgccaccaccggcaggagaacctagggtccataaagccatcttcgcgatcgactaaagctacgtcaacaactatggcgggcgacgggcggcgggcagaggcggtgcgggaaggatggggtgtgtacgtcacccccagggcccccatccgagagggaaggggccggctcgcccctcaaaatggcggcagcagcgatgcgcctgcgtacagaactcctccgtcgcgccagggccggcgggaagtgaggttctcggacgagccgccagaagtgtacggcgacttcgagcccctggtggccaaagaaaggtccccggtgggaaaacgaacccggctagaagagttccggtccgattctgcgaaagaggaagtgagagaaagcgcgtactaccttcggtctaggcagcggaggcagccgcgaccccaggaaaccgaggaaatgaagacgcgaaggactacccgccttcagcagcagcactcagagcagcctccgctacagccgtctcctgttacgaccaggagagggctgcgggactctcattcctctgaagaggatgaagcatcttcccaaactgatttaagccaaacgatctcaaagaaaactgtcaggagcatacaagaggctccagtgagtgaagatcttgtaatcaggttacgtcgaccccctctaagatacccaagatatgaagccaccagtgtccaacagaaggtcaatttctctgaagaaggagaaactgaagaagatgatcaagacagctctcacagcagtgtcactactgttaaggccagatccagggattctgatgaatctggagataaaaccaccagatcatctagtcaatatatagaatcattttggcagtcatcacaaagtcaaaacttcacagctcatgataagcaacgttcagtgctaagctcaggatatcaaaaaactccccaggaatgggccccacaaactgcaagaataaggaccaggatgcaaaatgacagcattctgaaatcagagcttggaaaccagtcaccatcaacctccagccgacaagtgactggacaaccccaaaatgcatcttttgtcaagaggaaccggtggtggctacttcctctgatagctgctcttgcctctgggagtttttggttctttagtactcctgaggtagaaaccactgctgttcaagagttccagaaccagatgaatcaacttaagaataagtaccaaggtcaagatgagaagctgtggaaaaggagccaaacattcctggaaaaacatcttaatagctcccatcctcggtctcagcctgctatcttactgctcactgctgcccgagatgctgaagaagcacttaggtgtctgagtgaacaaattgctgatgcctattcttcttttcgtagtgtccgtgccatccggattgatgggacagataaagctactcaagacagtgatactgtcaaactagaggtagaccaagaactgagcaatggatttaagaatggccagaatgcagctgtggtacaccgctttgagtcatttcccgcaggctctactttgatcttctacaaatattgtgaccatgaaaacgcagccttcaaagatgtagccttagtcctgactgtcttattggaggaagagacacttggaacaagtctaggcctaaaggaagttgaagaaaaagtaagagattttcttaaagtcaagttcaccaattctaacacacccaactcctacaatcatatggacccagacaaactgaatggcctctggagccgtatttctcacttagttctgcctgtgcaacctgaaaatgccctgaaaaggggcatctgcttataagaagtgagagagaagaaaaatcatgtcccaagttctgagaattgttcacactttctaaccagagacagaattcagagctctttttgaaagaactagtttctttttaaagaagttaagtgcttacataaacatggaacatataaatcattcattcaacctaattatctgtgatatgagagaatcatttcagtttccattgagagctctgttaaaggtatcttaggagtgcagattatatgcagttccttagagaatctgttttgattctgggctgagttattacaattatggtatgaccagtgagagcgatttgtgtcctttcttatgaaccttcctgattttttaacttagatttctcactaagtttcctgagttattagtaagattgctccctaaatgtaaccagggatttttccattatgttcccttttataccatttaggtgtgagttccttagcttctgcctataggaacataagtaatgaaaggtcatctaggtgtgtgtttggaatttttttcttttgttttttggaaaatggaaagaacaaggcaaggaaggaaaattaatggggaagctgaagggaggaaatgttacagtaatccactgagatgtagtttagtcaaacataggtatatgaactgttaatcttggtggattccgttgggatttgttttttacatctcctttttccttccttgaagaaaaattcttggctgtcccaaggattcttcatgtatattgcaaaatttaatatatttgttcacttgagtcttaagagtaggtcaggccnaggcaggtggatcatgaggtcagnagntcaagaccancctggcnaacanngtgaaacnccntctctactaaaaatacaaaaattagcngggcgtggtggngnnngcctgnantcccagctacttgggaggcngaggcaggagaatngcntgaacccnggaggnggagnttgcantnagccnagaccatgcttattgccctccagtctgggcaacaaaaatgaaactccgtctcaaaaaaaaaaaagtaggtcaattcgtaacagtttattttggacacaccctgaagcttttgttttgaattaagaaatgagtttcaggaattgacaaaccatttgttaaccagctgtcctgggctattgaagaagatttcattttccgcgcatccacttgttgcagtccaagtcctctagtgcaacgccatagcaaatataaagatttactatgcacgtgatacattttatggagtgcctcaagccaagatagtgaatttatatgaagggtgtgaaatgtatttctttactactatagtagtttagttataactttgcatctataattgagctttctcatctgtcaaatgctatggttttcttaaaatgttacaattctagatctatccaccttgtttttttattgtctacaaaccattaaatgtaaatattgtttttagagtcagtcattggctttgtcatttaccctttgagagttccacaagtggtagtagagtggtttaacgtctttcctctagtactaccagtattcataaatgtataccccttactgtaatttgttcctcttagaagtcagatcatctgatttatagaggattatgaaaaccagagtttttgaaaaggcttattttatacatacgtattatatagagaaacaaatgtttttattaaatgtttcattgacccaagtaatttaaaagtaatatgttacctatgtctttcaggaaaaataattatagcagctgatctgtaaatgactttaaaagctattttagtaatttaaataaatttactttcttggtttat

SEQ ID NO: 462419 - DNA, 2342 bp, Homo sapiens
gcaacagcctggggccgagaagcgaaacttggtcttctccaccctcgtcgcactccttttccccgagacttggtactgggagataggacgggagtctcctacacgcagtcaacacttgccacgagcggctagacttaggacaggcaagttgccctgccatccttctatcgcccccacccctcctttacttaagggcgatggcagagacgtcctcctcccccttctcctcctctttggtgcctccagccaggaggcgggagcgatccacagcagctgacccagctcaagcactgcctctctcacagccctcaagacacaccatgggccccagaggcaggtttgctacacagcagcgacgacgcaggcggcggccccagcgactcgcaactgcctccctgaccacagcggccaccgcccaacacccccgagaagccatcgccaccaccggcaggagaacctagggtccataaagccatcttcgcgatcgactaaagctacgtcaacaactatggcgggcgacgggcggcgggcagaggcggtgcgggaaggatggggtgtgtacgtcacccccagggcccccatccgagagggaaggggccggctcgcccctcaaaatggcggcagcagcgatgcgcctgcgtacagaactcctccgtcgcgccagggccggcgggaagtgaggttctcggacgagccgccagaagtgtacggcgacttcgagcccctggtggccaaagaaaggtccccggtgggaaaacgaacccggctagaagagttccggtccgattctgcgaaagaggaagtgagagaaagcgcgtactaccttcggtctaggcagcggaggcagccgcgaccccaggaaaccgaggaaatgaagacgcgaaggactacccgccttcagcagcagcactcagagcagcctccgctacagccgtctcctgttacgaccaggagagggctgcgggactctcattcctctgaaggaccgcggaggtaacagtcccagccgcgagccagggaacgcgcgggggcgggcgcgcgcctcggtggagctcatgcccgcctgggtactaagtactgggattggctaaagggtattcctcagccccctctggacttgtgccgccgtgcaagggccaccctgacccgcagcggggaaggaagcgccgaccggaggagtggaaagatggtcgtgtggagcgacccgggcagggctggggcgctctgcccaacatcgggcatcaatttaggggagtcagagctgcctttttctgcaggccttcacgaggggacagcgaattactgcagggtcggtttcatttcggttccctctaccctgcggatgtttctacagaaaccacttccatttccttctttaacgctcgcgggccagagtccccagctgaggatctaacctgtcagtctttttccctccctcacccaggtgggcagagaggaaggagaaattttgtgagtgggcatttcgagggattgctgagtttagtgaattgaattgagacctcacccatactttcaccgaaatggggtaactcatttttcctgaactgatgttccccagtgtttgataacttgagctgattgctgtttctccagtgtggtggtccctgccaaaaatctgccactttggtggccgtcactgtaacctcaagtagtctggcaaatcagactgacaaagtaacctgaaaaacaagactattaattagagttttcgtctaaatggacaaaagggatgctgacaaagacctaacactgagtcacagatgaagtttcatgttaatcccatgtaaggcacctgtgaggtaaaaatcagcggacctgagtcacaatgggatgacatagtttgtggtagactattgatacgcggaggagtgggttttcagcttagagcacggtgataggctgcaagtttacctgctgactcgtgaagaggatgaagcatcttcccaaactgatttaagccaaacgatctcaaagaaaactgtcaggagcatacaagaggctccaggtaagaatagttaactttttgtttttctccttacctaccaactttttaaatgttcattgaattaaacaatgtaagtatgtgtaaagaaaagacaagggcagacacagcccttttactttccccccaagtgcctcactatcattctctcatgtcataactagctactcagtaaaatttgttcaatgtcaaatgaatgaatatgttatactgccctgtgtttaaaatggattaacttttcttcatggtaaaatcttgacacagtgtgatcagtcttttcagtttaatactgtggtttatcaaatcttaagatgctatc

SEQ ID NO: 462420 - DNA, 5054 bp, Homo sapiens
  misc_feature (4016)..(4016): n is a, c, g, or t
  misc_feature (4040)..(4040): n is a, c, g, or t
  misc_feature (4043)..(4043): n is a, c, g, or t
  misc_feature (4053)..(4053): n is a, c, g, or t
  misc_feature (4060)..(4060): n is a, c, g, or t
  misc_feature (4065)..(4066): n is a, c, g, or t
  misc_feature (4074)..(4074): n is a, c, g, or t
  misc_feature (4077)..(4077): n is a, c, g, or t
  misc_feature (4104)..(4104): n is a, c, g, or t
  misc_feature (4116)..(4116): n is a, c, g, or t
  misc_feature (4118)..(4120): n is a, c, g, or t
  misc_feature (4126)..(4126): n is a, c, g, or t
  misc_feature (4128)..(4128): n is a, c, g, or t
  misc_feature (4148)..(4148): n is a, c, g, or t
  misc_feature (4162)..(4162): n is a, c, g, or t
  misc_feature (4165)..(4165): n is a, c, g, or t
  misc_feature (4173)..(4173): n is a, c, g, or t
  misc_feature (4179)..(4179): n is a, c, g, or t
  misc_feature (4184)..(4184): n is a, c, g, or t
  misc_feature (4190)..(4190): n is a, c, g, or t
  misc_feature (4192)..(4192): n is a, c, g, or t
  misc_feature (4197)..(4197): n is a, c, g, or t
gcaacagcctggggccgagaagcgaaacttggtcttctccaccctcgtcgcactccttttccccgagacttggtactgggagataggacgggagtctcctacacgcagtcaacacttgccacgagcggctagacttaggacaggcaagttgccctgccatccttctatcgcccccacccctcctttacttaagggcgatggcagagacgtcctcctcccccttctcctcctctttggtgcctccagccaggaggcgggagcgatccacagcagctgacccagctcaagcactgcctctctcacagccctcaagacacaccatgggccccagaggcaggtttgctacacagcagcgacgacgcaggcggcggccccagcgactcgcaactgcctccctgaccacagcggccaccgcccaacacccccgagaagccatcgccaccaccggcaggagaacctagggtccataaagccatcttcgcgatcgactaaagctacgtcaacaactatggcgggcgacgggcggcgggcagaggcggtgcgggaaggatggggtgtgtacgtcacccccagggcccccatccgagagggaaggggccggctcgcccctcaaaatggcggcagcagcgatgcgcctgcgtacagaactcctccgtcgcgccagggccggcgggaagtgaggttctcggacgagccgccagaagtgtacggcgacttcgagcccctggtggccaaagaaaggtccccggtgggaaaacgaacccggctagaagagttccggtccgattctgcgaaagaggaagtgagagaaagcgcgtactaccttcggtctaggcagcggaggcagccgcgaccccaggaaaccgaggaaatgaagacgcgaaggactacccgccttcagcagcagcactcagagcagcctccgctacagccgtctcctgttacgaccaggagagggctgcgggactctcattcctctgaaggaccgcggaggtaacagtcccagccgcgagccagggaacgcgcgggggcgggcgcgcgcctcggtggagctcatgcccgcctgggtactaagtactgggattggctaaagggtattcctcagccccctctggacttgtgccgccgtgcaagggccaccctgacccgcagcggggaaggaagcgccgaccggaggagtggaaagatggtcgtgtggagcgacccgggcagggctggggcgctctgcccaacatcgggcatcaatttaggggagtcagagctgcctttttctgcaggccttcacgaggggacagcgaattactgcagggtcggtttcatttcggttccctctaccctgcggatgtttctacagaaaccacttccatttccttctttaacgctcgcgggccagagtccccagctgaggatctaacctgtcagtctttttccctccctcacccaggtgggcagagaggaaggagaaattttgtgagtgggcatttcgagggattgctgagtttagtgaattgaattgagacctcacccatactttcaccgaaatggggtaactcatttttcctgaactgatgttccccagtgtttgataacttgagctgattgctgtttctccagtgtggtggtccctgccaaaaatctgccactttggtggccgtcactgtaacctcaagtagtctggcaaatcagactgacaaagtaacctgaaaaacaagactattaattagagttttcgtctaaatggacaaaagggatgctgacaaagacctaacactgagtcacagatgaagtttcatgttaatcccatgtaaggcacctgtgaggtaaaaatcagcggacctgagtcacaatgggatgacatagtttgtggtagactattgatacgcggaggagtgggttttcagcttagagcacggtgataggctgcaagtttacctgctgactcgtgaagaggatgaagcatcttcccaaactgatttaagccaaacgatctcaaagaaaactgtcaggagcatacaagaggctccagtgagtgaagatcttgtaatcaggttacgtcgaccccctctaagatacccaagatatgaagccaccagtgtccaacagaaggtcaatttctctgaagaaggagaaactgaagaagatgatcaagacagctctcacagcagtgtcactactgttaaggccagatccagggattctgatgaatctggagataaaaccaccagatcatctagtcaatatatagaatcattttggcagtcatcacaaagtcaaaacttcacagctcatgataagcaacgttcagtgctaagctcaggatatcaaaaaactccccaggaatgggccccacaaactgcaagaataaggaccaggatgcaaaatgacagcattctgaaatcagagcttggaaaccagtcaccatcaacctccagccgacaagtgactggacaaccccaaaatgcatcttttgtcaagaggaaccggtggtggctacttcctctgatagctgctcttgcctctgggagtttttggttctttagtactcctgaggtagaaaccactgctgttcaagagttccagaaccagatgaatcaacttaagaataagtaccaaggtcaagatgagaagctgtggaaaaggagccaaacattcctggaaaaacatcttaatagctcccatcctcggtctcagcctgctatcttactgctcactgctgcccgagatgctgaagaagcacttaggtgtctgagtgaacaaattgctgatgcctattcttcttttcgtagtgtccgtgccatccggattgatgggacagataaagctactcaagacagtgatactgtcaaactagaggtagaccaagaactgagcaatggatttaagaatggccagaatgcagctgtggtacaccgctttgagtcatttcccgcaggctctactttgatcttctacaaatattgtgaccatgaaaacgcagccttcaaagatgtagccttagtcctgactgtcttattggaggaagagacacttggaacaagtctaggcctaaaggaagttgaagaaaaagtaagagattttcttaaagtcaagttcaccaattctaacacacccaactcctacaatcatatggacccagacaaactgaatggcctctggagccgtatttctcacttagttctgcctgtgcaacctgaaaatgccctgaaaaggggcatctgcttataagaagtgagagagaagaaaaatcatgtcccaagttctgagaattgttcacactttctaaccagagacagaattcagagctctttttgaaagaactagtttctttttaaagaagttaagtgcttacataaacatggaacatataaatcattcattcaacctaattatctgtgatatgagagaatcatttcagtttccattgagagctctgttaaaggtatcttaggagtgcagattatatgcagttccttagagaatctgttttgattctgggctgagttattacaattatggtatgaccagtgagagcgatttgtgtcctttcttatgaaccttcctgattttttaacttagatttctcactaagtttcctgagttattagtaagattgctccctaaatgtaaccagggatttttccattatgttcccttttataccatttaggtgtgagttccttagcttctgcctataggaacataagtaatgaaaggtcatctaggtgtgtgtttggaatttttttcttttgttttttggaaaatggaaagaacaaggcaaggaaggaaaattaatggggaagctgaagggaggaaatgttacagtaatccactgagatgtagtttagtcaaacataggtatatgaactgttaatcttggtggattccgttgggatttgttttttacatctcctttttccttccttgaagaaaaattcttggctgtcccaaggattcttcatgtatattgcaaaatttaatatatttgttcacttgagtcttaagagtaggtcaggccnaggcaggtggatcatgaggtcagnagntcaagaccancctggcnaacanngtgaaacnccntctctactaaaaatacaaaaattagcngggcgtggtggngnnngcctgnantcccagctacttgggaggcngaggcaggagaatngcntgaacccnggaggnggagnttgcantnagccnagaccatgcttattgccctccagtctgggcaacaaaaatgaaactccgtctcaaaaaaaaaaaagtaggtcaattcgtaacagtttattttggacacaccctgaagcttttgttttgaattaagaaatgagtttcaggaattgacaaaccatttgttaaccagctgtcctgggctattgaagaagatttcattttccgcgcatccacttgttgcagtccaagtcctctagtgcaacgccatagcaaatataaagatttactatgcacgtgatacattttatggagtgcctcaagccaagatagtgaatttatatgaagggtgtgaaatgtatttctttactactatagtagtttagttataactttgcatctataattgagctttctcatctgtcaaatgctatggttttcttaaaatgttacaattctagatctatccaccttgtttttttattgtctacaaaccattaaatgtaaatattgtttttagagtcagtcattggctttgtcatttaccctttgagagttccacaagtggtagtagagtggtttaacgtctttcctctagtactaccagtattcataaatgtataccccttactgtaatttgttcctcttagaagtcagatcatctgatttatagaggattatgaaaaccagagtttttgaaaaggcttattttatacatacgtattatatagagaaacaaatgtttttattaaatgtttcattgacccaagtaatttaaaagtaatatgttacctatgtctttcaggaaaaataattatagcagctgatctgtaaatgactttaaaagctattttagtaatttaaataaatttactttcttggtttat

SEQ ID NO: 462421 - DNA, 4035 bp, Homo sapiens
  misc_feature (2997)..(2997): n is a, c, g, or t
  misc_feature (3021)..(3021): n is a, c, g, or t
  misc_feature (3024)..(3024): n is a, c, g, or t
  misc_feature (3034)..(3034): n is a, c, g, or t
  misc_feature (3041)..(3041): n is a, c, g, or t
  misc_feature (3046)..(3047): n is a, c, g, or t
  misc_feature (3055)..(3055): n is a, c, g, or t
  misc_feature (3058)..(3058): n is a, c, g, or t
  misc_feature (3085)..(3085): n is a, c, g, or t
  misc_feature (3097)..(3097): n is a, c, g, or t
  misc_feature (3099)..(3101): n is a, c, g, or t
  misc_feature (3107)..(3107): n is a, c, g, or t
  misc_feature (3109)..(3109): n is a, c, g, or t
  misc_feature (3129)..(3129): n is a, c, g, or t
  misc_feature (3143)..(3143): n is a, c, g, or t
  misc_feature (3146)..(3146): n is a, c, g, or t
  misc_feature (3154)..(3154): n is a, c, g, or t
  misc_feature (3160)..(3160): n is a, c, g, or t
  misc_feature (3165)..(3165): n is a, c, g, or t
  misc_feature (3171)..(3171): n is a, c, g, or t
  misc_feature (3173)..(3173): n is a, c, g, or t
  misc_feature (3178)..(3178): n is a, c, g, or t
gcaacagcctggggccgagaagcgaaacttggtcttctccaccctcgtcgcactccttttccccgagacttggtactgggagataggacgggagtctcctacacgcagtcaacacttgccacgagcggctagacttaggacaggcaagttgccctgccatccttctatcgcccccacccctcctttacttaagggcgatggcagagacgtcctcctcccccttctcctcctctttggtgcctccagccaggaggcgggagcgatccacagcagctgacccagctcaagcactgcctctctcacagccctcaagacacaccatgggccccagaggcaggtttgctacacagcagcgacgacgcaggcggcggccccagcgactcgcaactgcctccctgaccacagcggccaccgcccaacacccccgagaagccatcgccaccaccggcaggagaacctagggtccataaagccatcttcgcgatcgactaaagctacgtcaacaactatggcgggcgacgggcggcgggcagaggcggtgcgggaaggatggggtgtgtacgtcacccccagggcccccatccgagagggaaggggccggctcgcccctcaaaatggcggcagcagcgatgcgcctgcgtacagaactcctccgtcgcgccagggccggcgggaagtgaggttctcggacgagccgccagaagtgtacggcgacttcgagcccctggtggccaaagaaaggtccccggtgggaaaacgaacccggctagaagagttccggtccgattctgcgaaagaggaagtgagagaaagcgcgtactaccttcggtctaggcagcggaggcagccgcgaccccaggaaaccgaggaaatgaagacgcgaaggactacccgccttcagcagcagcactcagagcagcctccgctacagccgtctcctgttacgaccaggagagggctgcgggactctcattcctctgaagaggatgaagcatcttcccaaactgatttaagccaaacgatctcaaagaaaactgtcaggagcatacaagaggctccagtgagtgaagatcttgtaatcaggttacgtcgaccccctctaagatacccaagatatgaagccaccagtgtccaacagaaggtcaatttctctgaagaaggagaaactgaagaagatgatcaagacagctctcacagcagtgtcactactgttaaggccagatccagggattctgatgaatctggagataaaaccaccagatcatctagtcaatatatagaatcattttggcagtcatcacaaagtcaaaacttcacagctcatgataagcaacgttcagtgctaagctcaggatatcaaaaaactccccaggaatgggccccacaaactgcaagaataaggaccaggatgcaaaatgacagcattctgaaatcagagcttggaaaccagtcaccatcaacctccagccgacaagtgactggacaaccccctcttgcctctgggagtttttggttctttagtactcctgaggtagaaaccactgctgttcaagagttccagaaccagatgaatcaacttaagaataagtaccaaggtcaagatgagaagctgtggaaaaggagccaaacattcctggaaaaacatcttaatagctcccatcctcggtctcagcctgctatcttactgctcactgctgcccgagatgctgaagaagcacttaggtgtctgagtgaacaaattgctgatgcctattcttcttttcgtagtgtccgtgccatccggattgatgggacagataaagctactcaagacagtgatactgtcaaactagaggtagaccaagaactgagcaatggatttaagaatggccagaatgcagctgtggtacaccgctttgagtcatttcccgcaggctctactttgatcttctacaaatattgtgaccatgaaaacgcagccttcaaagatgtagccttagtcctgactgtcttattggaggaagagacacttggaacaagtctaggcctaaaggaagttgaagaaaaagtaagagattttcttaaagtcaagttcaccaattctaacacacccaactcctacaatcatatggacccagacaaactgaatggcctctggagccgtatttctcacttagttctgcctgtgcaacctgaaaatgccctgaaaaggggcatctgcttataagaagtgagagagaagaaaaatcatgtcccaagttctgagaattgttcacactttctaaccagagacagaattcagagctctttttgaaagaactagtttctttttaaagaagttaagtgcttacataaacatggaacatataaatcattcattcaacctaattatctgtgatatgagagaatcatttcagtttccattgagagctctgttaaaggtatcttaggagtgcagattatatgcagttccttagagaatctgttttgattctgggctgagttattacaattatggtatgaccagtgagagcgatttgtgtcctttcttatgaaccttcctgattttttaacttagatttctcactaagtttcctgagttattagtaagattgctccctaaatgtaaccagggatttttccattatgttcccttttataccatttaggtgtgagttccttagcttctgcctataggaacataagtaatgaaaggtcatctaggtgtgtgtttggaatttttttcttttgttttttggaaaatggaaagaacaaggcaaggaaggaaaattaatggggaagctgaagggaggaaatgttacagtaatccactgagatgtagtttagtcaaacataggtatatgaactgttaatcttggtggattccgttgggatttgttttttacatctcctttttccttccttgaagaaaaattcttggctgtcccaaggattcttcatgtatattgcaaaatttaatatatttgttcacttgagtcttaagagtaggtcaggccnaggcaggtggatcatgaggtcagnagntcaagaccancctggcnaacanngtgaaacnccntctctactaaaaatacaaaaattagcngggcgtggtggngnnngcctgnantcccagctacttgggaggcngaggcaggagaatngcntgaacccnggaggnggagnttgcantnagccnagaccatgcttattgccctccagtctgggcaacaaaaatgaaactccgtctcaaaaaaaaaaaagtaggtcaattcgtaacagtttattttggacacaccctgaagcttttgttttgaattaagaaatgagtttcaggaattgacaaaccatttgttaaccagctgtcctgggctattgaagaagatttcattttccgcgcatccacttgttgcagtccaagtcctctagtgcaacgccatagcaaatataaagatttactatgcacgtgatacattttatggagtgcctcaagccaagatagtgaatttatatgaagggtgtgaaatgtatttctttactactatagtagtttagttataactttgcatctataattgagctttctcatctgtcaaatgctatggttttcttaaaatgttacaattctagatctatccaccttgtttttttattgtctacaaaccattaaatgtaaatattgtttttagagtcagtcattggctttgtcatttaccctttgagagttccacaagtggtagtagagtggtttaacgtctttcctctagtactaccagtattcataaatgtataccccttactgtaatttgttcctcttagaagtcagatcatctgatttatagaggattatgaaaaccagagtttttgaaaaggcttattttatacatacgtattatatagagaaacaaatgtttttattaaatgtttcattgacccaagtaatttaaaagtaatatgttacctatgtctttcaggaaaaataattatagcagctgatctgtaaatgactttaaaagctattttagtaatttaaataaatttactttcttggtttat

SEQ ID NO: 462422 - DNA, 1311 bp, Homo sapiens
cgatccaaccaaccctcaaagattcgcaccgcgcggcacgcacccagcaggttccagcgtaaaagctgctccggtcccaagcgcgtctccaaacccctcctttacagcgccgcctccccagccagccccggtgcgcagtggcgaacagcccgcagagcccccaggcttacctgtagcatgtggtgagctcgcctgaagacttcagacacgggtccacgtgtgtcccaacgccaggagcagcagcagcggacccaggctcctgcccagctggcccctggcagctcctccccggctcggaggcggcggcaccatcagggaagctcccggcttcttcccagcgccgagctccgtccggaccaagcgtcctgctcctccgcggccgccgccgccttccctcttcccggcagggggcgccggagagcaggggcgtttgcaccacctgcacggggagcaggggtccggaatattatggggctggggggaaaatgaggctaggagttggggtatcggatgcaaacccagcagagaagcaggtaaagggggtacctgcggtgtccggctggcgcgagggccctgaggttcaagttgtctcgtcgggacgttcacgtccgattgacagacttgctggactcggcttggggctgcgccctcgcctcttccctctccctcctctgggagaagcgcgcagggtggggaaagcgggcggttgtttgcattttgcaccagggtctcacgaccgggaggaggaggagctgattctccaccggggagaagagggagggggaagagaggggttaataagcttccttcctgttgtccatgggtttctaaagcccagggtcaggccagtgttcgtctttcctccattatgtgaggaaggaggagttgaaaggctacaacgggcctctcaaattgttcaaacctgaaatagcgctatttatatagtgtaatcactcttccttaaaacctttagaagaaagttctctggttgtttcattggtcaataaaccatgcgctgtcttcttcataactcgagttcggaacaagtaaggaggtctttctgggagccttacatctccttgtcctgagcggctttaatactgtttccacgccgcgcacatcagagctggaaacgcccccccccatcaaatgagacacgtgggggcaaattaattacaggtgctgctacctgctagtgtatgcagccgcgttgataggtaacaagaaaacggaggaggggggccgtaaatcggctcccttgacggtgaccctaattgtaattcgtgtgtcagcaacttaacactttgttgc

SEQ ID NO: 462423 - DNA, 2101 bp, Homo sapiens
ggaaatgtaaaccactagggctctctcacttaccctttcccagcactaggagcctttcccggctttcaggtgatcacggccagaagggctacctcccttcgctctccttttaaacaggaccacatgaagagtggtcttgccagcaaatctgggaacaaactgcaagttgacgcaggactatctataattcacataggagagacaccttctgagcatgggaagtgtaaaaaattcttcagtgatgtctccatccttgatcttcatcaacaattacactcaggaaagatatcccatacatgtaatgagtacaggaagagattctgttatagctcagctctttgtcttcatcagaaagttcacatgggagagaaacgctataagtgtgatgtgtgtagtaaggcatttagtcagaactcacaactgcaaactcatcagagaatccacactggagagaaaccattcaaatgtgagcagtgtgggaaaagtttcagccgtagatcaggaatgtatgttcattgcaaattacacacaggagaaaaacctcatatttgtgaggaatgtgggaaggccttcattcacaattcccagcttcgggaacatcaaagaatccatactggggagaagccattcaaatgttatatatgtggtaagagcttccatagtagatcaaatcttaataggcattccatggtccacatgcaagagaaatcatttagatgtgatacctgtagtaatagctttggtcagagatcagcacttaatagtcattgcatggaccacacaaaagagaaactatacaaatgtgaagaatgtggaaggagcttcacttgtaggcaagatctttgtaagcatcagatggaccatacaggagacaaaccatataattgtaatgtatgtgggaagggcttcaggtggtcctcatgtctttcaagacatcagcgggtccacaatggagaaacaacattcaagtgcgacggatgtgggaagagattttatatgaattcacagggccattcacatcagagagcctatagagaagaagaactgtataaatgtcagaagtgtgggaagggctacattagtaagtttaatcttgacttgcaccagagggtccacacgggagagagaccttataattgtaaggaatgtggaaagagcttcaggtgggcctcaggtattttgagacataagagactccatactggagaaaaaccattcaaatgtgaagagtgtgggaagaggtttactgagaattcaaaacttcgtttccatcaaagaattcacactggagaaaagccttacaaatgtgaggagtgtggaaagggattcagatgggcctcaactcatctaacccatcaaagactccacagcagagaaaaactattccaatgtgaggattgtgggaagagcagtgagcacagttcatgccttcaagaccaacaaagcgaccacagtggagaaaaaacatccaaatgtgaggactgtgggaagcgctacgagaggcgcttgaatctagatatgattttatcattatttttaaatgatatataattattgtccatatttatgggttacagcatatttcaatacatgtatacaatgtataatgatcaaatcagtgttattagcatatccatcacctcctttatcatttatttgtggatcatttatcatttctttgtgctttgaacgttcaaaaactgctgttctagttatttgaaaataagttattattaattatagtcacctttagtgctgtggaacactagaacttgttcctttcatcatcttactgtactttcatatcttttctataacaaaatagtacactgtttccacaaacttgggaaggctagtatttgggggtggggggcgtggaaatcactaaacaacaaagaaaatctgatgaattggacagcataaaaatattggcataaagatgaacataacataagcaggaatatttaaagcacatactttttatagagtgtctcccctgtaatgtctctggttaaatgaaagggtttcaaatgtgaagacaaccctaaccatactcattatctgtaaaagatgtagcattgtcatggactccttaataaac

SEQ ID NO: 462424 - DNA, 1744 bp, Homo sapiens
acctgcttcatcacaggacgcaccaggagatgacccgtcacgagatgctgctgcatgcatagcaggccctgcagcccggggcccacagcacccctgctaaccaggctcccgtgcagcatttcctgcctatagtcaaagagctctctctagagaagaggaagtccccattgttcaagactacccaaaacaccagccttctctgcacggcacgtcgaggaaagaataactgtgcagtgaacagcactggcccaagtctgcagggcgaggaagaagccaggacataagcaaagacaaatcttactagaaacagaacgaacttgcaggcttcccttcagatgacgatgactgcgagtgaagaggaaatcctctcccagcatctcttcctgctggtggaagctgcaggtcacctgaccacacatgacaagacagtgtgactcagatccagcgtctgccgtgaagtttggtctcagggccctgctcatcaagaaatgtttttgaaaaaggtggaagtaggtagagggacgtgctctgaaccagcgtgaccaaaagacagtgtgttcacggtgcattcatctgattcaattcctgccaaaggcttttgttatttgagaacattatgactaaaccaacagagaggaaggacattctgaatacgggtgagagactgcgcgttggacaatcactgtgagtcccgacccttaccagaaaagtcactcgcagcgtcgtttccaggcataggttaggatcaccatgctctcccacgggccgtatgttgcaatcctgatatgaaaacgtcttctatctccttcaactgcggcaggagcacagctctgcagatttgctggggctctgtggcgcagtggaggcgaggacagaggtggccctgctctgggagatcccttcctaactggggctccctgacggcttcctgcacaggaggggcccgacgccggcgggacaagcagggagcccagatcagccttggaaagctcaggctcaaaccagagctcaatgtggaaattaaaaaacaaaccttgactttgtgttggtttttattcttccacttaaaaagttatttgaagcgtaacgtgagatcctggagaggactgaaatggcatgtcctaggttcatgtttatcctggttataaattgtctttttatgaagttgaaagccatgttgaaattaggtcattttaaaagaatttattaaaagttatgaaaatcgccaaggtgaccatggaaaggaggccagcaggcacgctctgcctcttggggagaatgccaggccccgggccactctcatcccagagggagcagtggcgaccaccccggacctggacacagccagccagggccacggcctcaggccatagccacgaccacgcagagctcacaggcaccccccagcctgcagacctgggggccatcctcggcctgtttctctgccctttctttatctccaattataaagcagcgccaggttttcttgtcagcctctgccatgtctccaaatggcttttcggtgtcaggcccatcaggaaattaactcatcatgcctcatcttccatccaccagtgcctgcccccacaacttcttggctgtaaaccttcgcttgctcctgtattcagaaccgagcccagttctgtgcccaggtcttttttcccctactgacattttcctgaataaaatctgggttttacctgtgcaactactgtccagctctggtttttctgtgatactctgc

SEQ ID NO: 462425 - DNA, 2084 bp, Homo sapiens
acctgcttcatcacaggacgcaccaggagatgacccgtcacgagatgctgctgcatgcatagcaggccctgcagcccggggcccacagcacccctgctaaccaggctcccgtgcagcatttcctgcctatagtcaaagagctctctctagagaagaggaagtccccattgttcaagactacccaaaacaccagccttctctgcacggcacgtcgaggaaagaataactgtgcagtgaacagcactggcccaagtctgcagggcgaggaagaagccaggacataagcaaagacaaatcttactagaaacagaacgaacttgcaggcttcccttcagatgacgatgactgcgagtgaagaggaaatcctctcccagcatctcttcctgctggtggaagctgcaggtcacctgaccacacatgacaagacagtgtgactcagatccagcgtctgccgtgaagtttggtctcagggccctgctcatcaagaaatgtttttgaaaaaggtggaagtaggtagagggacgtgctctgaaccagcgtgaccaaaagacagtgtgttcacggtgcattcatctgattcaattcctgccaaaggcttttgttatttgagaacattatgactaaaccaacagagaggaaggtgagtaagcaaacaggaaaaactgatgacgaattgacaatccatgtatttatccacccatttaaagtaacttgctgagcgcctacctagctgcacaagaagctcagggcctgaagatgaacacgcagaggctgtgtgcaggggcatgagcttacagctggaattagagataaaggaaaaggcacctgagccctgtgacatgcggggggtcaggggaggtgggacatatgtggcctcgtagccagagccccgcctgtttcccaggacattctgaatacgggtgagagactgcgcgttggacaatcactgtgagtcccgacccttaccagaaaagtcactcgcagcgtcgtttccaggcataggttaggatcaccatgctctcccacgggccgtatgttgcaatcctgatatgaaaacgtcttctatctccttcaactgcggcaggagcacaggtgaaagaggggagcccagactgggggtagactgtattcgtgggttatggccctatttacagatcagtcatgatagctctgcagatttgctggggctctgtggcgcagtggaggcgaggacagaggtggccctgctctgggagatcccttcctaactggggctccctgacggcttcctgcacaggaggggcccgacgccggcgggacaagcagggagcccagatcagccttggaaagctcaggctcaaaccagagctcaatgtggaaattaaaaaacaaaccttgactttgtgttggtttttattcttccacttaaaaagttatttgaagcgtaacgtgagatcctggagaggactgaaatggcatgtcctaggttcatgtttatcctggttataaattgtctttttatgaagttgaaagccatgttgaaattaggtcattttaaaagaatttattaaaagttatgaaaatcgccaaggtgaccatggaaaggaggccagcaggcacgctctgcctcttggggagaatgccaggccccgggccactctcatcccagagggagcagtggcgaccaccccggacctggacacagccagccagggccacggcctcaggccatagccacgaccacgcagagctcacaggcaccccccagcctgcagacctgggggccatcctcggcctgtttctctgccctttctttatctccaattataaagcagcgccaggttttcttgtcagcctctgccatgtctccaaatggcttttcggtgtcaggcccatcaggaaattaactcatcatgcctcatcttccatccaccagtgcctgcccccacaacttcttggctgtaaaccttcgcttgctcctgtattcagaaccgagcccagttctgtgcccaggtcttttttcccctactgacattttcctgaataaaatctgggttttacctgtgcaactactgtccagctctggtttttctgtgatactctgc

SEQ ID NO: 462426 - DNA, 1973 bp, Homo sapiens
agtctccccatctgcaaagtggggatgatgagatcacctcccttagagtgttattatgagggtggaggaagaaatacaggtatggtgcttagcacagtggctggcataggttgagtccccggatgatgagaccaggaagggtcatgtcgtcatccctcacctgctccataaacaacagagagcctcagggttgggctccagagggaggagtttgggaagaaatggggtcatgggctggctcctgggatatggacaagaaaggagcttgtctttcctggctctgctggagtcctgccgcggaggcttggttaccatggcgacgggctccatggaaacttgcagccggccttttccaggatgggcctggaccccagcccacctgctgatgcattgcgtcccctggccgcagcatcccgaggaggtgcccgggtggtcactctgctgtctgagcacccacccctccaccttggcaggggcagggagagtcctgaagggcagcaggatgggattctggcatgcagaggccattgagtggcttcaggatcccgcatcaatccaggacacagagacccacaattctctcatatttaggcaaattgagagcaagtctttacatggctgctgctcaatgtcctgcccattctgtttcggtgtcctggtctgttttggtcctggtgctgcattctcttcactctgtttctccctggcccagctattctctgagttctgatctgttcactccaccatgtgcacaccatgccccaggattcttattcccagtttgctggcaaagacactgaggccaagaggatggaggaccctgtccagggtcacacatgtggcagagcaggaaggagaacgtaggcatgtctgactccgaagttgccttgaagagggtaccaccgtgttatttgggaaactcatttgaacccaacagaactcctttcccgggggcccctgaggaggctgtcatcccaactcacgctcacccaaggaagtaccagctggtgatcttggtggcattggcaacggagcctccccagtggcttccagcaagtcactggggccttgcccatgggggaactgacaaggaggaaggtcgcacctgccattggaaaccagagagacagcttctgtgcacccaagagactccttggaggctccaagggagaaatactaccatgggatggttactgtagactgacatggtttgagaatagagagaaaaaaatgtattattaaaaacccaaacagtctgttccacttcccactctgcttctaaggcagaggatggggggtggtggtgtaattcatgtctcagggagataaaattctgcacaacttcctttgctgcacagaacccagtgggagacaagggggacaatggatattccagagcctttgcaggttttccggagctgcggctccacaggggacctggagtgggtggcctttggtggagcaggaatattttgtgggtctccagaggggtcccgtgacttctgatacagaccctctttccagcccttaaaaacactcagcttcattggtaataataacaataaagccagcacacctatgcaataccactgtcatcttgtacatttaggggattaaaaaaaagtaactggtgaggatctagtgaaatgtctctcttatacgctgcaggtggaactgcgaattgggaacccctttgaaagcaactggaaaatatttattgaaagccataaaaatgttcctatttctggaaccagtaatcttatttgaggatctgtcctagggaaataatataaactatggaaaaagtctgtgcacaaagatgtccagttgaatgttatttataagaatgcaaaacaacactgcttcagtgtgcaatgacaagggaaaggtggtgatgggtcaacccaatggtatatgaggtcatcatgagagctgaaacagtgaagccatatctttgcagtcacatgaatctt

SEQ ID NO: 462427 - DNA, 1895 bp, Homo sapiens
ctcccagccccgcagcggccgagctgcagcccgggctcagtctccgccgccgccgtgaacatggagcccccggacgcaccggcccaggcggccggggccccgcggctgctgttgctcgcagtcctgctggcggcgcacccagatgcccaggcggaggtgcgcttgtctgtacccccgctggtggaggtgatgcgaggaaagtctgtcattctggactgcacccctacgggaacccacgaccattatatgctggaatggttccttaccgaccgctcgggagctcgcccccgcctagcctcggctgagatgcagggctctgagctccaggtcacaatgcacgacacccggggccgcagtcccccataccagctggactcccaggggcgcctggtgctggctgaggccaggtggcgacgagcgagactacgtgtgcgtggcactgctgaggccactgcgcggctcaacgtgtttgcaaagccagaggccactgaggtctcccccaacaaagggacactgtctgtgatggaggactctgcccaggagatcgccacctgcaacagccggaacgggaacccggcccccaagatcacgtggtatcgcaacgggcagcgcctggaggtgcccgtagagatgaacccagagggctacatgaccagccgcacggtccgggaggcctcgggcctgctctccctcaccagcaccctctacctgcggctccgcaaggatgaccgagacgccagcttccactgcgccgcccactacagcctgcccgagggccgccacggccgcctggacagccccaccttccacctcaccctgcactatcccacggagcacgtgcagttctgggtgggcagcccgtccaccccagcaggctgggtacgcgagggtgacactgtccagctgctctgccggggggacggcagccccagcccggagtatacgcttttccgccttcaggatgagcaggaggaagtgctgaatgtgaatctcgaggggaacttgaccctggagggagtgacccggggccagagcgggacctatggctgcagagtggaggattacgacgcggcagatgacgtgcagctctccaagacgctggagctgcgcgtggcctacctgaccctcctctgctcagaatctgccatggctccccagtacccttgggagaagcccaggtgtctcaccatggccttcaaggtccacctggccagttccaccattagctagctgatccttctccccagtcaaggctatctcctcatcaccccccaggctcctctggttcctaccttcactgcccatccttcctaccgtctatttctcaccaatcccttgaatcccaggcttctaagaatgattttcagttcattcgcatccaggccctggggaaaggctgtattctcccttggcacttcttacatatcccttcctggggtagaccctgcgccagatgctggggacacatctgtgaacaagacagaccacccctgttatttcagtaggggagacagatggtaaatgctaactaagccctttcgtaacagtagtgtatctacaggtgatatcaccagtgagagagagcaggagaggggattattttaggtggcaggtgttgcagtctgctttcctgagaagcagattctgacttggatgttttcaggcaagaagtttatgggaagtaccctgggttccgcacctcttgggtctagggaggtaaaggaagcaagatttggcaaggtgagaagttggactgaagtctaaggaaggtctcaggctgggtgcagtggttcatgcctataatcccagcactttgagaggctgaggcaggaggattgtatgagcctaggagtttgaggccagcctgggcaacagagggagaccccatttgcaca

SEQ ID NO: 462428 - DNA, 3384 bp, Homo sapiens
gttgtcccccctccacttccgggctgctggggagggggaccgggcggcctctctcctccctcttcccctgccacctgtctcataggcagaagcggccgtgcccagcgcgcagagcggagcgcgccgaagcctgagctcgtgagggggccgaggctgtggggaggtggcagttggacttcggaatctcaaggactccgactcctggcttgttcagagaaggagagccccgactcctggatccctgggagtcccagcggccatggggacgcgaagcagccccgaggaggggaccccgccgccgctggtcccggaatgcgacgtggaggtccagccccagggccatcccgaggagtcccgggaacaggaggcatccgaagtcctggcggaaccttcgagccgcgggggagctgagcagcaggcagaggaagaagaagtgggagaaggcagcagcactgagagcagccgcgacgcgcccgaggctacgcctccgatagctatggcggccacacctcccgcatccacctcttcgcgggaaggggtgcgaggggcggcgcggcgcctgcaaggacagcagctggaggcattgactcgtgtggccctgatggagcagcgagtgaaggagctacagcgccagaggaaggagctgaggatcgagatggaggtggaggtggccttgctgcggggtgagctggctggggagcgagtggccgctcgccgggaggaggagcagctgcgggagctgctggagcagcaggcggcctcggagcagcgcggccgccagcagcggggaacagaggcggctgagccaggaacgggatcgcctagagggtcttcgccagagactccgcaaggcccagggacagctcgactcacagccagaggaccaacgcgagcggcttctgcagggtgtgcaggagatgagggaacaactggatgtggcccaacgtgcctatgaggacctggagttccagcaactggagcgggagagccggcaggaggaggaggatcgggacagccctgggccccaggtgccagaccccaaggtccaggaactccaggccagcatggcgcagcacagacaccggatccgggtcctggaagagcagctcaagtcactgggggagcagatggcagccgagagccgggggttgagccggaagaaggaggaggcccttcaggccctgtcacaggaacggagccggctgctcgagctcaattgccttcagggaacacctggcggggacttctctgagcccaacccggccctcactaagctgctgttcacccagaagacagaccgccagctgctggtgctccaggatgccgtggcccactccgctgccacccctacttcttcctgcctcttttctgtccacagctccctgcagggctccattggcctccagaggactgggagcctgccccggaaaaggggggagagggggagccagagaggatccccccgacctctgtccttccattgtactggtgaggatccccctgttccccacttccttcccacatcagcactcatcctgcagcagaggatggaggaaacccgcacctatgcctgcaggggagaagtggataggctcaggccagggtgtatccagccctgtaacctggtcccctctaccctagaatccctggaggcctcagctctcccgccagcagtgggggactccggcagataccccctctaccagctgctgaactgtggccgtgggaatagctgtggggccatccatccagacattgcccacatggagcggctcctgcagcaggccatggcggagagggagcggctgctcaaggcccgggaaggaacaagaaggggcacggaaggttcctcaggccctgctgttcctgccatcacggccccacccaccccaccccaccctccaggcccgcgaatcttggatctccggcagcatctggagggatggggccacaacccggaaaactgcccacatgtgcaggtgtctgggtgctgctgccgtggacccctggtgaagatgggcggccgcatcaagacctggaggaagcgatggttctgctttgaccgccaagcccgccgcttggcctactatgcggacaaggaagagaccaagctcaaaggtgtcatctacttccaggccattgaggaagtctattatgaccacttacgctgtgccttcaagagccccaacccccgcctgaccttctgcgtcaaaacctacgaacgccttttctacatggtggctccgagccccgaagccatgcgcatttggatggacgtcatcgtgacagccgctgacgaaaaccacgccccctgagtggccccgccctcttggggggaagtcccttcgaggctccgccggcgcggggcgcgggggcgttcctaggccccgcccactgccggaaaacttggacgcaccgctttggaactctcccgggaattccgcaggcgcggcagttcagctggcctgagctgctgcgttctgggttgcaggtgccttgcccccgacgggatcgccggcccctaaggccctgcccggggcaggaggaagattgcaggggcgggaagaaactatttattggtgctcctgtgataccgaattaaatacggaggaaaaacaggaattgctgctgtggtttccagcccaggcatccggggccccttgacccctaggcaggacatctgagttatcggtacctctgggagccacgcgtcccacagccggctctctaggaatggaggccttcaactcttaaggtcatagctgggagaagagggtgagaggcatgtcccccttagtgtttggcagttttgcttttttagtttgtaggcccttctgtttccaccctttctggcctgaccggctgctggaaatttctaggaactcctaggcttcccccctttaggcctttgcctacgttgttccctctgcccttttcttccctttttttcttttatctatttatttttatagagatggggtctcactgtgttgcccaggctggtctccaactcctggacttaagcgatccactcaccttagcctcccaaggtgctgagattacaggtgtgagccaccacgcctggcccccctccttcccttaatcagctgcacctcattcttccagccttagttcagttggcacctccttcaggaagccctcactgactttcctggctgggtcaggcacccccttttgagctctgtcatcccatccctgaggaccctgggtcatcatgggcgatggatctgtgtcctttatgcactgggagctccatgaggcagagccagcattgtcctggtcactgctgttcccagcaccatagagcatgtctcattccatgaaagtggaaaaaaacaaaaaataaaactcgcttccctttca

SEQ ID NO: 462429 - DNA, 3231 bp, Homo sapiens
gttgtcccccctccacttccgggctgctggggagggggaccgggcggcctctctcctccctcttcccctgccacctgtctcataggcagaagcggccgtgcccagcgcgcagagcggagcgcgccgaagcctgagctcgtgagggggccgaggctgtggggaggtggcagttggacttcggaatctcaaggactccgactcctggcttgttcagagaaggagagccccgactcctggatccctgggagtcccagcggccatggggacgcgaagcagccccgaggaggggaccccgccgccgctggtcccggaatgcgacgtggaggtccagccccagggccatcccgaggagtcccgggaacaggaggcatccgaagtcctggcggaaccttcgagccgcgggggagctgagcagcaggcagaggaagaagaagtgggagaaggcagcagcactgagagcagccgcgacgcgcccgaggctacgcctccgatagctatggcggccacacctcccgcatccacctcttcgcgggaaggggtgcgaggggcggcgcggcgcctgcaaggacagcagctggaggcattgactcgtgtggccctgatggagcagcgagtgaaggagctacagcgccagaggaaggagctgaggatcgagatggaggtggaggtggccttgctgcggggtgagctggctggggagcgagtggccgctcgccgggaggaggagcagctgcgggagctgctggagcagcaggcggcctcggagcagcgcggccgccagcagcggggaacagaggcggctgagccaggaacgggatcgcctagagggtcttcgccagagactccgcaaggcccagggacagctcgactcacagccagaggaccaacgcgagcggcttctgcagggtgtgcaggagatgagggaacaactggatgtggcccaacgtgcctatgaggacctggagttccagcaactggagcgggagagccggcaggaggaggaggatcgggacagccctgggccccaggtgccagaccccaaggtccaggaactccaggccagcatggcgcagcacagacaccggatccgggtcctggaagagcagctcaagtcactgggggagcagatggcagccgagagccgggggttgagccggaagaaggaggaggcccttcaggccctgtcacaggaacggagccggctgctcgagctcaattgccttcagggaacacctggcggggacttctctgagcccaacccggccctcactaagctgctgttcacccagaagacagaccgccagctgctggtgctccaggatgccgtggcccactccgctgccacccctacttcttcctgcctcttttctgtccacagctccctgcagggctccattggcctccagaggactgggagcctgccccggaaaaggggggagagggggagccagagaggatccccccgacctctgtccttccattgtactgaatccctggaggcctcagctctcccgccagcagtgggggactccggcagataccccctctaccagctgctgaactgtggccgtgggaatagctgtggggccatccatccagacattgcccacatggagcggctcctgcagcaggccatggcggagagggagcggctgctcaaggcccgggaaggaacaagaaggggcacggaaggttcctcaggccctgctgttcctgccatcacggccccacccaccccaccccaccctccaggcccgcgaatcttggatctccggcagcatctggagggatggggccacaacccggaaaactgcccacatgtgcaggtgtctgggtgctgctgccgtggacccctggtgaagatgggcggccgcatcaagacctggaggaagcgatggttctgctttgaccgccaagcccgccgcttggcctactatgcggacaaggaagagaccaagctcaaaggtgtcatctacttccaggccattgaggaagtctattatgaccacttacgctgtgccttcaagagccccaacccccgcctgaccttctgcgtcaaaacctacgaacgccttttctacatggtggctccgagccccgaagccatgcgcatttggatggacgtcatcgtgacagccgctgacgaaaaccacgccccctgagtggccccgccctcttggggggaagtcccttcgaggctccgccggcgcggggcgcgggggcgttcctaggccccgcccactgccggaaaacttggacgcaccgctttggaactctcccgggaattccgcaggcgcggcagttcagctggcctgagctgctgcgttctgggttgcaggtgccttgcccccgacgggatcgccggcccctaaggccctgcccggggcaggaggaagattgcaggggcgggaagaaactatttattggtgctcctgtgataccgaattaaatacggaggaaaaacaggaattgctgctgtggtttccagcccaggcatccggggccccttgacccctaggcaggacatctgagttatcggtacctctgggagccacgcgtcccacagccggctctctaggaatggaggccttcaactcttaaggtcatagctgggagaagagggtgagaggcatgtcccccttagtgtttggcagttttgcttttttagtttgtaggcccttctgtttccaccctttctggcctgaccggctgctggaaatttctaggaactcctaggcttcccccctttaggcctttgcctacgttgttccctctgcccttttcttccctttttttcttttatctatttatttttatagagatggggtctcactgtgttgcccaggctggtctccaactcctggacttaagcgatccactcaccttagcctcccaaggtgctgagattacaggtgtgagccaccacgcctggcccccctccttcccttaatcagctgcacctcattcttccagccttagttcagttggcacctccttcaggaagccctcactgactttcctggctgggtcaggcacccccttttgagctctgtcatcccatccctgaggaccctgggtcatcatgggcgatggatctgtgtcctttatgcactgggagctccatgaggcagagccagcattgtcctggtcactgctgttcccagcaccatagagcatgtctcattccatgaaagtggaaaaaaacaaaaaataaaactcgcttccctttca

SEQ ID NO: 462430 - DNA, 2787 bp, Homo sapiens
tgggaagcctggccccaactcaagcggaacccgcaaagccggactcccagctttttcctcgggtgggatcagattttaggccctccgctcttcctccctccaaattcaggtccctggagtccatcctcccttcgaatccggtagttcaggccctgggcctcttccttggacctaggcgtccgagcccccagccctggcattctctccgcagatggaggtggaggtggccttgctgcggggtgagctggctggggagcgagtggccgctcgccgggaggaggagcagctgcgggagctgctggagcagcaggcggcctcggagcagcgcggccgccagcagcggggaacagaggcggctgagccaggaacgggatcgcctagagggtcttcgccagagactccgcaaggcccagggacagctcgactcacagccagaggaccaacgcgagcggcttctgcagggtgtgcaggagatgagggaacaactggatgtggcccaacgtgcctatgaggacctggagttccagcaactggagcgggagagccggcaggaggaggaggatcgggacagccctgggccccaggtgccagaccccaaggtccaggaactccaggccagcatggcgcagcacagacaccggatccgggtcctggaagagcagctcaagtcactgggggagcagatggcagccgagagccgggggttgagccggaagaaggaggaggcccttcaggccctgtcacaggaacggagccggctgctcgagctcaattgccttcagggaacacctggcggggacttctctgagcccaacccggccctcactaagctgctgttcacccagaagacagaccgccagctgctggtgctccaggatgccgtggcccactccgctgccacccctacttcttcctgcctcttttctgtccacagctccctgcagggctccattggcctccagaggactgggagcctgccccggaaaaggggggagagggggagccagagaggatccccccgacctctgtccttccattgtactgaatccctggaggcctcagctctcccgccagcagtgggggactccggcagataccccctctaccagctgctgaactgtggccgtgggaatagctgtggggccatccatccagacattgcccacatggagcggctcctgcagcaggccatggcggagagggagcggctgctcaaggcccgggaaggaacaagaaggggcacggaaggttcctcaggccctgctgttcctgccatcacggccccacccaccccaccccaccctccaggcccgcgaatcttggatctccggcagcatctggagggatggggccacaacccggaaaactgcccacatgtgcaggtgtctgggtgctgctgccgtggacccctggtgaagatgggcggccgcatcaagacctggaggaagcgatggttctgctttgaccgccaagcccgccgcttggcctactatgcggacaaggaagagaccaagctcaaaggtgtcatctacttccaggccattgaggaagtctattatgaccacttacgctgtgccttcaagagccccaacccccgcctgaccttctgcgtcaaaacctacgaacgccttttctacatggtggctccgagccccgaagccatgcgcatttggatggacgtcatcgtgacagccgctgacgaaaaccacgccccctgagtggccccgccctcttggggggaagtcccttcgaggctccgccggcgcggggcgcgggggcgttcctaggccccgcccactgccggaaaacttggacgcaccgctttggaactctcccgggaattccgcaggcgcggcagttcagctggcctgagctgctgcgttctgggttgcaggtgccttgcccccgacgggatcgccggcccctaaggccctgcccggggcaggaggaagattgcaggggcgggaagaaactatttattggtgctcctgtgataccgaattaaatacggaggaaaaacaggaattgctgctgtggtttccagcccaggcatccggggccccttgacccctaggcaggacatctgagttatcggtacctctgggagccacgcgtcccacagccggctctctaggaatggaggccttcaactcttaaggtcatagctgggagaagagggtgagaggcatgtcccccttagtgtttggcagttttgcttttttagtttgtaggcccttctgtttccaccctttctggcctgaccggctgctggaaatttctaggaactcctaggcttcccccctttaggcctttgcctacgttgttccctctgcccttttcttccctttttttcttttatctatttatttttatagagatggggtctcactgtgttgcccaggctggtctccaactcctggacttaagcgatccactcaccttagcctcccaaggtgctgagattacaggtgtgagccaccacgcctggcccccctccttcccttaatcagctgcacctcattcttccagccttagttcagttggcacctccttcaggaagccctcactgactttcctggctgggtcaggcacccccttttgagctctgtcatcccatccctgaggaccctgggtcatcatgggcgatggatctgtgtcctttatgcactgggagctccatgaggcagagccagcattgtcctggtcactgctgttcccagcaccatagagcatgtctcattccatgaaagtggaaaaaaacaaaaaataaaactcgcttccctttca

SEQ ID NO: 462431 - DNA, 209 bp, Homo sapiens
tatttcttataaacgggatcatacccctgtgaggtcctttcactcagcacatggacagtagtgttttgatttgtgctgactgggtggtggcttcactgggcagtgctctgacttaggttggagatcaagcctttttcctatgctcatgagccttttgtgttttcagggctccattggcctccagaggactgggagcctgccccggaaaa

SEQ ID NO: 462432 - DNA, 834 bp, Homo sapiens
ggcgtcataagtcctacttttaaatttctcggcctggcacagtggctcacgcctgtaagcccagcactctgggaggccgaagcaggcggatcacgaggtcaagagatcgagaccatcctgacaaacactgtgaaaccctggtctgtactaaaaatacaaaaattagctgggcgtggtggcacacgcctgtagtcccagctactcgggaggctgaggcaggagaatcgcttgaactcgagaggtggaggttgcagtgagccaagattgcgccactgcactccagcctggcgacagagccagactcagtttcaaaaaaaaaagaaaaaaaatttatcttgcccctaatttatcaatagcgctctacatatgataattttaagcacttccttgtgttaattcatttaatccttataacccagtgaggtaggtggcatcatttgggaagacagggaaactgacattcagatacttaagtaccttgtccagtgccacacagactataagtagcaaggctgggttcgcacccagactgtggccggtgtcttttgtctgaattaccctcactttctgcttattccagagccccaacccccgcctgaccttctgcgtcaaaacctacgaacgccttttctacatggtggctccgagccccgaagccatgcgcatttggatggacgtcatcgtgacagccgctgacgaaaaccacgccccctgagtggccccgccctcttggggggaagtcccttcgaggctccgccggcgcggggcgcgggggcgttcctaggccccgcccactgccggaaaacttggacgcaccgctttggaactctcccg

SEQ ID NO: 462433 - DNA, 588 bp, Homo sapiens
tgggaagcctggccccaactcaagcggaacccgcaaagccggactcccagctttttcctcgggtgggatcagattttaggccctccgctcttcctccctccaaattcaggtccctggagtccatcctcccttcgaatccggtagttcaggccctgggcctcttccttggacctaggcgtccgagcccccagccctggcattctctccgcagatggaggtggaggtggccttgctgcggggtgagctggctggggagcgagtggccgctcgccgggaggaggagcagctgcgggagctgctggagcagcagaacaggtctgtttggctcaccgggtcttcatcagcagtgtccttcctggtccatggatgttggtgtgctcctagccacctgcgccccggggttgtccccattccccaaaggaagacatttgggctcctgagagagtgaggggcagatgcccctcctggttttccttctccctccctgggcgagatttttggggctcttcctttgtcccctgtccgtttgctatttaaatgtgggtgtgtaaaaacttccaaactggccggaagcagtggctcacgcct

SEQ ID NO: 462434 - DNA, 3131 bp, Homo sapiens
gttgtcccccctccacttccgggctgctggggagggggaccgggcggcctctctcctccctcttcccctgccacctgtctcataggcagaagcggccgtgcccagcgcgcagagcggagcgcgccgaagcctgagctcgtgagggggccgaggctgtggggaggtggcagttggacttcggaatctcaaggactccgactcctggcttgttcagagaaggagagccccgactcctggatccctgggagtcccagcggccatggggacgcgaagcagccccgaggaggggaccccgccgccgctggtcccggaatgcgacgtggaggtccagccccagggccatcccgaggagtcccgggaacaggaggcatccgaagtcctggcggaaccttcgagccgcgggggagctgagcagcaggcagaggaagaagaagtgggagaaggcagcagcactgagagcagccgcgacgcgcccgaggctacgcctccgatagctatggcggccacacctcccgcatccacctcttcgcgggaaggggtgcgaggggcggcgcggcgcctgcaaggacagcagctggaggcattgactcgtgtggccctgatggagcagcgagtgaaggagctacagcgccagaggaaggagctgaggatcgagatggaggtggaggtggccttgctgcggggtgagctggctggggagcgagtggccgctcgccgggaggaggagcagctgcgggagctgctggagcagcaggcggcctcggagcagcgcggccgccagcagcggggaacagaggcggctgagccaggaacgggatcgcctagagggtcttcgccagagactccgcaaggcccagggacagctcgactcacagccagaggaccaacgcgagcggcttctgcagggtgtgcaggagatgagggaacaactggatgtggcccaacgtgcctatgaggacctggagttccagcaactggagcgggagagccggcaggaggaggaggatcgggacagccctgggccccaggtgccagaccccaaggtccaggaactccaggccagcatggcgcagcacagacaccggatccgggtcctggaagagcagctcaagtcactgggggagcagatggcagccgagagccgggggttgagccggaagaaggaggaggcccttcaggccctgtcacaggaacggagccggctgctcgagctcaattgccttcagggaacacctggcggggacttctctgagcccaacccggccctcactaagctgctgttcacccagaagacagaccgccagctgctggtgctccaggatgccgtggcccactccgctgccacccctacttcttcctgcctcttttctgtccacagctccctgcagaatccctggaggcctcagctctcccgccagcagtgggggactccggcagataccccctctaccagctgctgaactgtggccgtgggaatagctgtggggccatccatccagacattgcccacatggagcggctcctgcagcaggccatggcggagagggagcggctgctcaaggcccgggaaggaacaagaaggggcacggaaggttcctcaggccctgctgttcctgccatcacggccccacccaccccaccccaccctccaggcccgcgaatcttggatctccggcagcatctggagggatggggccacaacccggaaaactgcccacatgtgcaggtgtctgggtgctgctgccgtggacccctggtgaagatgggcggccgcatcaagacctggaggaagcgatggttctgctttgaccgccaagcccgccgcttggcctactatgcggacaaggaagagaccaagctcaaaggtgtcatctacttccaggccattgaggaagtctattatgaccacttacgctgtgccttcaagagccccaacccccgcctgaccttctgcgtcaaaacctacgaacgccttttctacatggtggctccgagccccgaagccatgcgcatttggatggacgtcatcgtgacagccgctgacgaaaaccacgccccctgagtggccccgccctcttggggggaagtcccttcgaggctccgccggcgcggggcgcgggggcgttcctaggccccgcccactgccggaaaacttggacgcaccgctttggaactctcccgggaattccgcaggcgcggcagttcagctggcctgagctgctgcgttctgggttgcaggtgccttgcccccgacgggatcgccggcccctaaggccctgcccggggcaggaggaagattgcaggggcgggaagaaactatttattggtgctcctgtgataccgaattaaatacggaggaaaaacaggaattgctgctgtggtttccagcccaggcatccggggccccttgacccctaggcaggacatctgagttatcggtacctctgggagccacgcgtcccacagccggctctctaggaatggaggccttcaactcttaaggtcatagctgggagaagagggtgagaggcatgtcccccttagtgtttggcagttttgcttttttagtttgtaggcccttctgtttccaccctttctggcctgaccggctgctggaaatttctaggaactcctaggcttcccccctttaggcctttgcctacgttgttccctctgcccttttcttccctttttttcttttatctatttatttttatagagatggggtctcactgtgttgcccaggctggtctccaactcctggacttaagcgatccactcaccttagcctcccaaggtgctgagattacaggtgtgagccaccacgcctggcccccctccttcccttaatcagctgcacctcattcttccagccttagttcagttggcacctccttcaggaagccctcactgactttcctggctgggtcaggcacccccttttgagctctgtcatcccatccctgaggaccctgggtcatcatgggcgatggatctgtgtcctttatgcactgggagctccatgaggcagagccagcattgtcctggtcactgctgttcccagcaccatagagcatgtctcattccatgaaagtggaaaaaaacaaaaaataaaactcgcttccctttca

SEQ ID NO: 462435 - DNA, 1022 bp, Homo sapiens
tggttactgggatgtggtctggtggtgctggttactgcgtaagatgggaatcattgtgcctggaagtattgttgacttacttgtggagtgcgggtcactggcagtcattgaagttcttggatcgttctctaataccctgtttcaagttaactgtttgttggctaatcttcaccagtacccactaccaactcctgcatagatccgctcctccccatgcttgggctctgaatctctatgctcagtcaccccagtcctcctgcaaggacacccacctcaccttactttggttctgccaaatcatgctaggctgcttctccacatggatgtccttcttctcttacttaggttctgacattgggctggtattagaccaccccgatatgtggatgcccttgtcagccaagggatgcttgagccccaacatcccaccccaggaaactcttctgtacagatgctctctttatccccctcagattctgactctgcttgtcattatggtcttagaattgttcaggaggaaaaggaaagtggaaaataaatttaaaaaaaaggagtgaaagttcaaatttcagatgagaaaaaagtgatctctttgagtaaagacattaagtgtatttccttgttaatgaacaaacacattatatttatatacttttttcccaattatatcatataaaataagacaaaccctctgcttcttttgtcttctgcctatcttgcctgatatattgcatttttaatcagtcaacttttggataaatagagaatcataaaaaagtattaatagagaatgactaggaggctgaagttttaaaagttgttttgatttacatcttttcagaaaataatagctcattagttttaatagtagttatttacataagcgtacatcccattaaccgccatcagggctggaaaacatgctgaactgttcatattttcatataattattgaacataatggtttcatttgcatttctaaacagtgatgtttctgtcagccttggaaatagtgtctttac

SEQ ID NO: 462436 - DNA, 1322 bp, Homo sapiens
tgccctgtaaatgacaggatacctatatacatgcgaggacctatgtgatatgcagggatgctcatgtggatgcacggatgtaaaggtcaagaccacagtgacctctggactccagcccctggctaagaatgcaatctacctgtccatgggccagtgtgactcaagatgtcaagggatggtgatcactgagagaccaaagatttcctctgaatttgcctggaatttccaccctcgattgttcactgtcaaaaggaagaacatgataccagcatgtaggcttgtggacttccaaatgctgtcttccaagaacttggagtttaaacatgatcccttggatgatatgtccaaagaagttctcactgaaattccccgcatcgtaaaatgtcaggatgaagtttccatgactactcagagctacatcccagcatcccactttctccctggtaccatctacactctgcccattttaatgatgatttatctccgggctgcttttaaagatgagattattctgggtcagaatcatgaaggatcttgggatgaggacattatcctggattattccagcgggctctgtgtagtcacaatgggtcctggaagagaacacaagagaatagagaattcagtgtgagaagaaggccatgcaacacgagaggcagaatcagagagagaagatgccatgctgatggcttcgaaaatgaaaaaagggtcctgagtcaaagaatacaagtggattctaggagctaggaaagtcaggaaacaggctgtgctctggagcctccataaaaaaccagtcatgtgaacaccttggtgttagcccgtgtgatcatcatcagaggaggaggaaggaagttgagaaggaggaggaaggaagttgagaaggaggaggaaggggagcaaagatgagccgcagccgagatgttgccagctcagggggagtcagattctaggccagatccctggctctgtgccccacagcccaccctttgcatcccccgctccggcacctgtcatgcacacaccacgttatggtgatctctggtccagtctgcaaatatgttgttgcctgacacaaagtaaacagtcgatggatgctgctgtgctcgtcatcgttaagtcatcactatcatcatttgctctggccaactcctggtgtttgctgtcctcttagaagctgtggtatgaattgcacggattgcattcatgcgtcaaccttccctgtgtctacatcccatgcctgtcactttgcagttctcctctctaaagaggcccactctgtttcccaccccttaagtctgggctggctttcacccatagaatgc

SEQ ID NO: 462437 - DNA, 1141 bp, Homo sapiens
gacaaataaaaatggagttatatttgtagtgtcagagcaaaacctcctctatctgcacatcctggggacgaaccgggcagccggagagctgcggccggcccagtcccgctccgcctttgaagggtaaaacccaaggcggggccttggttctggcagaagggacgctatgaccgcagaattcctctccctgctttgcctcgggctgtgtctgggctacgaagatgagaaaaagaatgagaaaccgcccaagccctccctccacgcctggcccagctcggtggttgaagccgagagcaatgtgaccctgaagtgtcaggctcattcccagaatgtgacatttgtgctgcgcaaggtgaacgactctgggtacaagcaggaacagagctcggcagaaaacgaagctgaattccccttcacggacctgaagcctaaggatgctgggaggtacttttgtgcctacaagacaacagcctcccatgagtggtcagaaagcagtgaacacttgcagctggtggtcacagataaacacgatgaacttgaagctccctcaatgaaaacagacaccagaaccatctttgtcgccatcttcagctgcatctccatccttctcctcttcctctcagtcttcatcatctacagatgcagccagcacggttcatcatctgaggaatccaccaagagaaccagccattccaaacttccggagcaggaggctgccgaggcagatttatccaatatggaaagggtatctctctcgacggcagacccccaaggagtgacctatgctgagctaagcaccagcgccctgtctgaggcagcttcagacaccacccaggagcccccaggatctcatgaatatgcggcactgaaagtgtagcaagaagacagccctggccactaaaggaggggggatcgtgctggccaaggttatcggaaatctggagatgcagatactgtgtttccttgctcttcgtccatatcaataaaattaagctgctatcaacataccaaagacctggcagcttacagacaacacatagttatttctcatggttctggaggctggaagtccaagaccaaagcactggtagattcagtgtctgctgagggcttttttcctggttcatagctggcaccttct

SEQ ID NO: 462438 - DNA, 835 bp, Homo sapiens
gaccttgcatgctcccggccgccatgccggccgcgggaattcgattatccccggatctgggtacaagcaggaacagagctcggcagaaaacgaagctgaattccccttcacggacctgaagcctaaggatgctgggaggtacttttgtgcctacaagacaacagcctcccatgagtggtcagaaagcagtgaacacttgcagctggtggtcacagataaacacgatgaacttgaagctccctcaatgaaaacagacaccagaaccatctttgtcgccatcttcagctgcatctccatccttctcctcttcctctcagtcttcatcatctacagatgcagccagcacggttcatcatctgaggaatccaccaagagaaccagccattccaaacttccggagcaggaggctgccgaggcagatttatccaatatggaaagggtatctctctcgacggcagacccccaaggagtgacctatgctgagctaagcaccagcgccctgtctgaggcagcttcagacaccacccaggagcccccaggatctcatgaatatgcggcactgaaagtgtagcaagaagacagccctggccactaaaggaggggggatcgtgctggccaaggttatcggaaatctggagatgcagatactgtgtttccttgctcttcgtccatatcaataaaattaagctgctatcaacataccaaagacctggcagcttacagacaacacatagttatttctcatggttctggaggctggaagtccaagaccaaagcactggtagattcagtgtctgctgagggcttttttcctggttcatagctggcaccttct

SEQ ID NO: 462439 - DNA, 482 bp, Homo sapiens
cactttacagatggggaaacagaagcttggagaagattaaggaaattccccaaagcaataggaagttccagctccgaggtgggagatccaggcttggaagccaggccatctgtctggcttctcttagcttttcggctcgcccctatcagtggatttcaggagccaggctgattccctgacctgctcttccccctccagacaccagaaccatctttgtcgccatcttcagctgcatctccatccttctcctcttcctctcagtcttcatcatctacagatgcagccagcacggtgagctcagagaacgcaaagggagagagggggagtgaaggattttctcggtaggtaaattcctcctgcattttttgtaggttcatcatctgaggaatccaccaagaggtagatgcttggcatagctcatgctccacttattcccatgtcattctcaagggaacccattggcacatccgggattggcaccc

SEQ ID NO: 462440 - DNA, 888 bp, Homo sapiens
  misc_feature (20)..(21): n is a, c, g, or t
  misc_feature (42)..(42): n is a, c, g, or t
  misc_feature (49)..(49): n is a, c, g, or t
  misc_feature (684)..(684): n is a, c, g, or t
ccgaacaacccattaccctnnctttgtgcgacctgcttacanctggctnctgccatccttactcctctatcctctgcagtcttcatcatctacagatgcagccagcacggtgtcatcatgctgagggaatccaccaagagaaccaggcattccaaacttccagagcagaggctgccgaggcagatttatccaatatggaaagggtatctctctcgacggcagacccccaaggagtgacctatgctgagctaagcaccagcgccctgtctgaggcagcttcagacaccacccaggagcccccaggatctcatgaatatgcggcactgaaagtgtagcaagaagacagccctggccactaaaggaggggggatcgtgctggccaaggttatcggaaatctggagatgcagatactgggataacttggtcttggggcgtgtgagtgacgggacgggctccccttacaaaaaacaacaaaccctaaaaataaagtgggctagaagatctaaaagaagaaaactatgaaaacaattaaactttgaggagggagggaagagggaggctagtggctgactgagtgagctaaatcacacacgtaccacttcacctcaaccatcgcttgttgtccgcgccccgcctccaccccgaccccagccatgccgcccaatccacgctggttcctcctnccaccttactaattcatcacccccattctaccgtacccctgtcttctgtctccgctcatttccaccctgccctgcccccccttctggccccgccacgcgccccccacatgtcccctctcctcgacacatatctccgtttccgcggcttgccacttttcccccacacctcccctctatcatttggcctccgtcaaaaccttccac

SEQ ID NO: 462441 - DNA, 1048 bp, Homo sapiens
gacaaataaaaatggagttatatttgtagtgtcagagcaaaacctcctctatctgcacatcctggggacgaaccgggcagccggagagctgcggccggcccagtcccgctccgcctttgaagggtaaaacccaaggcggggccttggttctggcagaagggacgctatgaccgcagaattcctctccctgctttgcctcgggctgtgtctgggctacgaagatgagaaaaagaatgagaaaccgcccaagccctccctccacgcctggcccagctcggtggttgaagccgagagcaatgtgaccctgaagtgtcaggctcattcccagaatgtgacatttgtgctgcgcaaggtgaacgactctgggtacaagcaggaacagagctcggcagaaaacgaagctgaattccccttcacggacctgaagcctaaggatgctgggaggtacttttgtgcctacaagacaacagcctcccatgagtggtcagaaagcagtgaacacttgcagctggtggtcacagataaacacgatgaacttgaagctccctcaatgaaaacaggttcatcatctgaggaatccaccaagagaaccagccattccaaacttccggagcaggaggctgccgaggcagatttatccaatatggaaagggtatctctctcgacggcagacccccaaggagtgacctatgctgagctaagcaccagcgccctgtctgaggcagcttcagacaccacccaggagcccccaggatctcatgaatatgcggcactgaaagtgtagcaagaagacagccctggccactaaaggaggggggatcgtgctggccaaggttatcggaaatctggagatgcagatactgtgtttccttgctcttcgtccatatcaataaaattaagctgctatcaacataccaaagacctggcagcttacagacaacacatagttatttctcatggttctggaggctggaagtccaagaccaaagcactggtagattcagtgtctgctgagggcttttttcctggttcatagctggcaccttct

SEQ ID NO: 462442 - DNA, 1378 bp, Homo sapiens
ggagagtgccttgcagccagagagtcttgaaggagatgtcagggacgcatcttaacagctgttcaccatgaattcactcagtgaagccaacaccaagttcatgttcgacctgttccaacagttcagaaaatcaaaagagaacaacatcttctattcccctatcagcatcacatcagcattagggatggtcctcttaggagccaaagacaacactgcacaacagattaagaaggttcttcactttgatcaagtcacagagaacaccacaggaaaagctgcaacatatcatgttgataggtcaggaaatgttcatcaccagtttcaaaagcttctgactgaattcaacaaatccactgatgcatatgagctgaagatcgccaacaagctcttcggagaaaaaacgtatctatttttacaggaatatttagatgccatcaagaaattttaccagaccagtgtggaatctgttgattttgcaaatgctccagaagaaagtcgaaagaagattaactcctgggtggaaagtcaaacgaatgaaaaaattaaaaacctaattcctgaaggtaatattggcagcaataccacattggttcttgtgaacgcaatctatttcaaagggcagtgggagaagaaatttaataaagaagatactaaagaggaaaaattttggccaaacaagaatacatacaagtccatacagatgatgaggcaatacacatcttttcattttgcctcgctggaggatgtacaggccaaggtcctggaaataccatacaaaggcaaagatctaagcatgattgtgttgctgccaaatgaaatcgatggtctccagaagcttgaagagaaactcactgctgagaaattgatggaatggacaagtttgcagaatatgagagagacacgtgtcgatttacacttacctcggttcaaagtggaagagagctatgacctcaaggacacgttgagaaccatgggaatggtggatatcttcaatggggatgcagacctctcaggcatgaccgggagccgcggtctcgtgctatctggagtcctacacaaggcctttgtggaggttacagaggagggagcagaagctgcagctgccaccgctgtagtaggattcggatcatcacctacttcaactaatgaagagttccatttgttatgtctccttggttttttatgtttgttgttgtcttacctggatgtctgcgtgtttgaagaagcagataattttccagtctttgcagactggctttctctgggaaagtccttcaccagttattccattcagagattctgggcaggcccattgggcaggtttgctgctggagtcctcagtaaggctggcctggtgctgagtcaatgagtggtcagg

SEQ ID NO: 462443 - DNA, 1077 bp, Homo sapiens
gcgcttttccttgctacctgcagaggggtccatacggcgttgttctggattcccgtcgtaacttaaagggaaattttcacaatgtccggagcccttgatgtcctgcaaatgaaggaggaggatgtccttaagttccttgcagcaggaacccacttaggtggcaccaatcttgacttccagatggaacagtacatctataaaaggaaaagtgatggcatctatatcataaatctcaagaggacctgggagaagcttctgctggcagctcgtgcaattgttgccattgaaaaccctgctgatgtcagtgttatatcctccaggaatactggccagagggctgtgctgaagtttgctgctgccactggagccactccaattgctggccgcttcactcctggaaccttcactaaccagatccaggcagccttccgggagccacggcttcttgtggttactgaccccagggctgaccaccagcctctcacggaggcatcttatgttaacctacctaccattgcgctgtgtaacacagattctcctctgcgctatgtggacattgccatcccatgcaacaacaagggagctcactcagtgggtttgatgtggtggatgctggctcgggaagttctgcgcatgcgtggcaccatttcccgtgaacacccatgggaggtcatgcctgatctgtacttctacagagatcctgaagagattgaaaaagaagagcaggctgctgctgagaaggcagtgaccaaggaggaatttcagggtgaatggactgctcccgctcctgagttcactgctactcagcctgaggttgcagactggtctgaaggtgtacaggtgccctctgtgcctattcagcaattccctactgaagactggagcgctcagcctgccacggaagactggccactgaatgggtaggagcaaccactgactggtcttaagctgttcttgcataggctcttaagcagcatggaaaaatggttgatggaaaataaacatcagtttctaaaaaaaaaaaaagttactggcaattttttttctgtatttcaaaaaaaaaaaaaaaaagaacac

SEQ ID NO: 462444 - DNA, 1036 bp, Homo sapiens
gcgcttttccttgctacctgcagaggggtccatacggcgttgttctggattcccgtcgtaacttaaagggaaattttcacaatgtccggagcccttgatgtcctgcaaatgaaggaggaggatgtccttaagttccttgcagcaggaacccacttaggtggcaccaatcttgacttccagatggaacagtacatctataaaaggaaaagtgatggcatctatatcataaatctcaagaggacctgggagaagcttctgctggcagctcgtgcaattgttgccattgaaaaccctgctgatgtcagtgttatatcctccaggaatactggccagagggctgtgctgaagtttgctgctgccactggagccactccaattgctggccgcttcactcctggaaccttcactaaccagatccaggcagccttccgggagccacggcttcttgtggttactgaccccagggctgaccaccagcctctcacggaggcatcttatgttaacctacctaccattgcgctgtgtaacacagattctcctctgcgctatgtggacattgccatcccatgcaacaacaagggagctcactcagtgggtttgatgtggtggatgctggctcgggaagttctgcgcatgcgtggcaccatttcccgtgaacacccatgggaggtcatgcctgatctgtacttctacagagatcctgaagagattgaaaaagaagagcaggctgctgctgagaaggcagtgaccaaggaggaatttcagggtgaatggactgctcccgctcctgagttcactgctactcagcctgaggttgcagactggtctgaaggtgtacaggtgccctctgtgcctattcagcaattccctactgaagactggagcgctcagcctgccacggaagactggtctgcagctcccactgctcaggccactgaatgggtaggagcaaccactgactggtcttaagctgttcttgcataggctcttaagcagcatggaaaaatggttgatggaaaataaacatcagtttcta

SEQ ID NO: 462445 - DNA, 1177 bp, Homo sapiens
  misc_feature (1132)..(1132): n is a, c, g, or t
gcgcttttccttgctacctgcagaggggtccatacggcgttgttctggattcccgtcgtaacttaaagggaaattttcacaatgtccggagcccttgatgtcctgcaaatgaaggaggaggatgtccttaagttccttgcagcaggaacccacttaggtggcaccaatcttgacttccagatggaacagtacatctataaaaggaaaagtgatggcatctatatcataaatctcaagaggacctgggagaagcttctgctggcagctcgtgcaattgttgccattgaaaaccctgctgatgtcagtgttatatcctccaggaatactggccagagggctgtgctgaagtttgctgctgccactggagccactccaattgctggccgcttcactcctggaaccttcactaaccagatccaggcagccttccgggagccacggcttcttgtggttactgaccccagggctgaccaccagcctctcacggaggcatcttatgttaacctacctaccattgcgctgtgtaacacagattctcctctgcgctatgtggacattgccatcccatgcaacaacaagggagctcactcagtgggtttgatgtggtggatgctggctcgggaagttctgcgcatgcgtggcaccatttcccgtgaacacccatgggaggtcatgcctgatctgtacttctacagagatcctgaagagattgaaaaagaagagcaggctgctgctgagaaggcagtgaccaaggaggaatttcagggtgaatggactgctcccgctcctgagttcactgctactcagcctgaggttgcagactggtctgaaggtgtacaggtgccctctgtgcctattcagcaattccctactgaagactggagcgctcagcctgccacggaagactgaggagggcgagttcgaggaggaggctgaggaggaggtggcctagagccttcagtcactggggaaagcagggaagcagtgtgaactctttattcactcccagcctgtcctgtggcctgtcccactgtgtgcacttgctgttttccctgtccacatccatgctgtacagacaccaccattaaagcattttcatagtgaaaaaaaaaataaatgtgtttgtgctaanaaaaatagaaattatatgataaaatagtttgtaaagttgtttttt

SEQ ID NO: 462446 - DNA, 1099 bp, Homo sapiens
gcgcttttccttgctacctgcagaggggtccatacggcgttgttctggattcccgtcgtaacttaaagggaaattttcacaatgtccggagcccttgatgtcctgcaaatgaaggaggaggatgtccttaagttccttgcagcaggaacccacttaggtggcaccaatcttgacttccagatggaacagtacatctataaaaggaaaagtgatggcatctatatcataaatctcaagaggacctgggagaagcttctgctggcagctcgtgcaattgttgccattgaaaaccctgctgatgtcagtgttatatcctccaggaatactggccagagggctgtgctgaagtttgctgctgccactggagccactccaattgctggccgcttcactcctggaaccttcactaaccagatccaggcagccttccgggagccacggcttcttgtggttactgaccccagggctgaccaccagcctctcacggaggcatcttatgttaacctacctaccattgcgctgtgtaacacagattctcctctgcgctatgtggacattgccatcccatgcaacaacaagggagctcactcagtgggtttgatgtggtggatgctggctcgggaagttctgcgcatgcgtggcaccatttcccgtgaacacccatgggaggtcatgcctgatctgtacttctacagagatcctgaagagattgaaaaagaagagcaggctgctgctgagaaggcagtgaccaaggaggaatttcagggtgaatggactgctcccgctcctgagttcactgctactcagcctgaggttgcagactggtctgaaggtgtacaggtgccctctgtgcctattcagcaattccctactgaagactggagcgctcagcctgccacggaagactggtctgcagctcccactgctcaggccactgaatgggtaggagcaaccactgactggtcttaagctgttcttgcataggctcttaagcagcatggaaaaatggttgatggaaaataaacatcagtttctaaaaaaaaaaaaagttactggcaattttttttctgtatttcaaaaaaaaaaaaaaaaagaacac

SEQ ID NO: 462447 - DNA, 1030 bp, Homo sapiens
aaggctaggtacgaggcctggtgttgaatcggccgaggctggattcccgtcgtaacttaaagggaaattttcacaatgtccggagcccttgatgtcctgcaaatgaaggaggaggatgtccttaagttccttgcagcaggaacccacttaggtggcaccaatcttgacttccagatggaacagtacatctataaaaggaaaagtgatggcatctatatcataaatctcaagaggacctgggagaagcttctgctggcagctcgtgcaattgttgccattgaaaaccctgctgatgtcagtgttatatcctccaggaatactggccagagggctgtgctgaagtttgctgctgccactggagccactccaattgctggccgcttcactcctggaaccttcactaaccagatccaggcagccttccgggagccacggcttcttgtggttactgaccccagggctgaccaccagcctctcacggaggcatcttatgttaacctacctaccattgcgctgtgtaacacagattctcctctgcgctatgtggacattgccatcccatgcaacaacaagggagctcactcagtgggtttgatgtggtggatgctggctcgggaagttctgcgcatgcgtggcaccatttcccgtgaacacccatgggaggtcatgcctgatctgtacttctacagagatcctgaagagattgaaaaagaagagcaggctgctgctgagaaggcagtgaccaaggaggaatttcagggtgaatggactgctcccgctcctgagttcactgctactcagcctgaggttgcagactggtctgaaggtgtacaggtgccctctgtgcctattcagcaattccctactgaagactggagcgctcagcctgccacggaagactggtctgcagctcccactgctcaggccactgaatgggtaggagcaaccactgactggtcttaagctgttcttgcataggctcttaagcagcatggaaaaatggttgatggaaaataaacatcagtttcta

SEQ ID NO: 462448 - DNA, 1430 bp, Homo sapiens
  misc_feature (1)..(3): n is a, c, g, or t
  misc_feature (5)..(6): n is a, c, g, or t
nnntnnaggaggcatatggatgaggcggtgtgtctccgcaggtgaagtggagctggaggagtactacccggccttcctggacatggtgcggagcctgctggagggcagcatcgaccccacgcagtacgaggacaccctacgcgagatgttcaccatccatgcctacgtgggcttcaccatggacaagctggtgcagaacattgcgcggcagctgcgttctgacaccttcgcttcagccccctccactttccctccgtgtgcccgaaatgggtccctgcccatcaccatccacagcagtggccactccccaggctgggcacccctcatgggccatggcttcggggacagcaaccttgcttgtgacaccaggagattggaccagatgctgcaccacctcgtgagcgatgacgtctgcctgaaggtggtggagctctacctgaacgagaagaagcggggtgccgctggtgggaacctgtcctcccgctgcgtccgcgctgctagggagaccagctaccagtggaaggctgagcgctgcatggccgacgagaactgcttcaaggtgatgttcctgcagcgcaaagggcaggtgatcatgaccatcgagctcctggacaccgaggaggcccagacggaggaccctgtggaggtccagcacctggctcggtacgtggagcagtatgtggggaccgagggcgcgtccagctcgcccactgagggcttcctcctgaaacctgtgttcctgcagaggaacctcaagaagttccgccgccggtggcagagcgagcaggcgcgggccctgcgcggtgaggccaggagctcctggaagcggctggtgggcgtggagagcgcctgcgacgtggactgccgcttcaagctcagcactcacaagatggtgttcatcgtgaactccgaggactacatgtaccgtcgcgggaccctctgccgggccaagcaggtgcagcccctggtcctgctccgccaccaccagcactttgaggagtggcacagcgctggctggaggacaatgtgacggtggaggcggctagcctggtgcaggactggctgatgggtgaggaggacgaggacatggtaccctgcaagacgctgtgtgagacagtgcacgtgcacggcctgcccgtgacccgctaccgcgtgcagtacagccgccgcccggcctcgccctgaccccgcctcatgggcaccgggcaggcgcctcacagagcacagacgtccctcggccttggtcgtgtcggggccgttttcttgaacgactattcccatccccgcatgcttctagggagcgcctcttttccgttcttgaggaatttctgttctggggcttgtccttcctttgcagctgttttgaatgtagttttccttttctatttatttgcacattaaagttaataattgaatattgacatcaagcc

SEQ ID NO: 462449 - DNA, 1156 bp, Homo sapiens
  misc_feature (1)..(3): n is a, c, g, or t
  misc_feature (5)..(6): n is a, c, g, or t
nnntnnaggaggcatatggatgaggcggtgtgtctccgcaggtgaagtggagctggaggagtactacccggccttcctggacatggtgcggagcctgctggagggcagcatcgaccccacgcagtacgaggacaccctacgcgagatgttcaccatccatgcctacgtgggcttcaccatggacaagctggtgcagaacattgcgcggcagctgcgttctgacaccttcgcttcagccccctccactttccctccgtgtgcccgaaatgggtccctgcccatcaccatccacagcagtggccactccccaggctgggcacccctcatgggccatggcttcggggacagcaaccttgcttgtgacaccaggagattggaccagatgctgcaccacctcgtgagcgatgacgtctgcctgaaggtggtggagctctacctgaacgagaagaagcggggtgccgctggtgggaacctgtcctcccgctgcgtccgcgctgctagggagaccagctaccagtggaaggctgagcgctgcatggccgacgagaactgcttcaaggtgatgttcctgcagcgcaaagggcaggtgatcatgaccatcgagctcctggacaccgaggaggcccagacggaggaccctgtggaggtccagcacctggctcggtacgtggagcagtatgtggggaccgagggcgcgtccagctcgcccactgagggcttcctcctgaaacctgtgttcctgcagaggtaagaggccctgagatgcatgctccgttccttccttcctgggcccagggagtgtcccctttgtcctgacgggggctggaccatggcacactgtctgggagcacttagtaggtgcctgctgtgtgctgaggcaggccctgcccttttgaggcttgtggtttgcagtggagggattagtaaccccaggacggtgaggtgtaggaggggcaaggccaaccccacgatgcgtcagtgggtgaagagtgaatgcccggactggagggagacgctgccagagctggtggggccaggccagaggcgggtggctgtggcaggaccctggaccacctcaggtcgggctaggatggcacctatgggaccagtgggggctgctggtgggtgttcagatctgggggcatttcttgttgct

SEQ ID NO: 462450 - DNA, 2646 bp, Homo sapiens
tgtgatataagattatagtgtcccctcccttcaccaacaatgaatttcatggtggatgaaacagcagcaatcaactcaaacaaggaatcccagcaattggtgcaaaaaacgtatacactggagaagaaagaagcaatggaggaagatgaagcgccccagcacagagatgctgacatagtacagggaaaaggggaggcagcactgtggggagaagcaggagctgttcatgaggctcccttgagggcgtggaagccaacagcagagcagccagaattggcagaagagtttacagaaaaaagggagatccctccaggcatagaaaggggggcagagggagcagcagaagcagaaggggtcagaaggctgggtgaaggggggtcagaccccataggacaagcagcagcaaaagatgctgtgggtctgagtaaagatgaggctcctgaaaagcaagccttgatgctcacagtgcttgagacagacaaagcagcttctgaaggggaacagggtttagagaaggcagtgcttgcaaatgaagcagcagccctgaacttggagcatcttcatgaagtagcagccctgagagaggcagcgacatcggaggagggagaggctgagggtggggtggctgtgagtgatgtcggagaaagtgaagaggaagcatccatagacctagaggacacaggacccatggaggacacagcatcaaagagagaggacggttctgaagaggcaattcttgggggagaggaaccagccaaagagagaaaagaggttatgagaacagaaacacgcttgagccccttcacaggagaggcagaggcaagccggatgcaggtttcggagggcagccctgaggaaggaagccttgcaaaggaagccttcctttgcaaggaagatgtggaaggggaagagatggtgactgaggcagaagctaatagggaagatgataggaaagaaattttacccaaggaattagatttagcaagagagcgaaggaaagctgagaggccaaaaacatctctgaggaaaactgactctgagagagaagaggtgacaagggcaaatgcactcaaggatgaagatgcttttaaagaagagcaaaaacttaaagcggaagaaggggaaacagagacagaagtaagagctgaggaagagacaaaagctcccccaaatgaaatgggatctgatgctgagaacgaagcacctgtggaggcttctgagttgtctgacaatccagggcttctaggagaagattcactaaaagagacagtggttcccatatttgaagcaacgcctggatttgaaaagtcgctggaaaacataacagctctgaggaaagaaggaggaggggaaagactgagtgaagccagagacacagagcacaaagacagagaagagctgtccagcagggagaatagggccctgaaggaagggcaccgccaagatggagagggggccttagcagctcctgaagctgagccagcaggaaaggtgcaggcccctgaggggctgatcccagccacaggccaggcagaggagctagcagccaaagatcacgactcctgcgcaggactggaggggagagctgaagggcaaggaggagtggatgtcgtgctaaggacccaggaagctgttgctgaggaagatcccataatggcagaaaagttcagggaggaagcggtggatgaggacccagaggaggaagaggacaaagagtgcactctggagacagaagcgatgcaggacaggaactcggaaggggacggggacatggaaggagaaggaaacacacaaaagaatgagggcatgggaggaggaagggttgtggctgtggaagttctacacggaggtggtgaaacggcagaaacagccgcagaggagagggaggtgttggcaggttcggagacagccgaggagaaaacaatagcaaataaagcctcctccttttcagatgttgctgaggaagaaacctggcaccaacaggatgagttagtaggaaaaacagcagctgcagggaaggtggtggtagaggaattagcacggagtggggaggaagtgccagcagcagaggagatgacagtgacatatacaacagaggctggggtgggcactccaggagccctggagcggaagacctcagggctaggacaggagcaagaggaagggtcagagggccaggaggcagccactgggagtggcgatgggaggcaggagacaggagcagctgaaaaattccgattaggattatcacgggagggagagagggaattgagtccggagagtctacaggcgatggcaacacttccagtgaagcctgatttcactgaaacccgagagaagcaacagcatatggtgcaaggagaaagcgagactgcagatgtttcccccaacaacgtgcaggtctaggagacttgctggcagacaggtggtgaggtatgcttaaaaggaaggaacaagaagcaccatgaagacagagtttgtttggggggttagtatcctccagaccacaccaggaatccaattattttcaggcaaataacagaagatcctgaaaaacaggtaaaaagtccttgccaccttgtggagacatggatcaagcaaatcaagaatactattaataatgtgaagtttaaatattaatattct

SEQ ID NO: 462451 - DNA, 1859 bp, Homo sapiens
acccccagcggcctcacctgcgtttccctccgcttcagctttgtgatggtcaacagcgtggcgctgaacggggatggctgtggcatctgctctgaaacagaagaagagctcattgaagtttctcacagactgaactgctcccgagaggcacgtggctccagccggtgtggacctgggcctctgctgcccacgtctgcccctgtcctcctgcagcattatcctctgtatcggagaagtgatgctaactgttctggggaagacgctgctcctccagaggaaagggacatcccatttaaggagaactatgacgtgctttcacgggaggcatcacaaaagctgctgtggtggctccagccgcgcctggttctcagtggccacacgcacagcgcctgcgaggtgcaccacgggggccgagtccccgagctcagcgtcccatctttcagttggaggaacagaaacaaccccagtttcatcatgggaacagatgcttagttgagcatcaaggggcaggaagacacctttccctccttgttcctcgctgaccgatgaccctggaactccacggtgcctctctgaatctctgttatggatcccccactatatttgatgggaacccagtgagccaggggccagttttgacagggtagcatcacgcccacagactacaccctctccaagtgctacctcccacgtgaggatgtggttttgatcatctactgtggagtggtgggcttccttgtggtcctcacactcactcactttgggcttctagcctcaccttttctttctggtttgaacttgctcggaaagcgtaagacaagatgaagagcaggcgccattataaatatcaaagcccaagaaatggaactttgggcagagatcatgttagaatcaagtggatgatgagaccaattacaggccgtctctctgcacagcacagaaattctcaatcactgaaatgagtaactgcaaaataaatagttgattgtactgttctcatgctataaaagtggacaggtactctacaacaaatctgttttctcatttttatcaaatatatgtatcatcaaaggttgcatctgtacagtatgtaaatgctattaatgtcgtcactcacatgcacgacagtccttgttcccccaggaagggcctggtggccccagcacacacttgggattatgtgtatacataaataaatattgggctgtttccctcttcctgtgaagtggttctcaaattcctatgtactgtaaagctgtacccttaaaagtacagatgtggccgggcacagtggctcacacctgtaatcccagcactttgggaggctgaggcgggtggatcacttgaggtcaggagttcaagaccagcctggccaacatggtgaaacctcgtctccgctagaaatacaaaaattagccaagcatggtagcaagtgcctataataccagctgaggctgaggcaggagaatcccttgagcccgggaggcggaggttgcagtgagccaagatcatgccactgcactctagcctgggcaacagagtgagactccgtctcaaaaaatatattttaaaaaaaaaaagtacagatgtgatgtgcagaacatattgttttcgtagatttttatacttgatcaattaatggaatcagatttttagataagtgtaattttctctataggagaccacgttgctacatctgttaatgcctgtcagtgatcaaaagaaacttaaaaagtggaatgggatatggcttttggtacctgaaaataaatgctttaataattgtaagccagataaaagttattctttttgtttttttttcttaacagtctggctgttgtttgaattaaactcttaaa

SEQ ID NO: 462452 - DNA, 1771 bp, Homo sapiens
ttttacttcataaaaaggtggaggaaaccctaacattttcaaattcaaagtaaatgaaaacatttgccactgttgttccacataaaagtatctgcagagaaaagcccatggagacgacctggacacatgtatttctagggaacagatgcttagttgagcatcaaggggcaggaagacacctttccctccttgttcctcgctgaccgatgaccctggaactccacggtgcctctctgaatctctgttatggatcccccactatatttgatgggaacccagtgagccaggggccagttttgacaggtcagtgtcccagacattttccactcaggcacacttgggccttacttgtctctcctgctggagcctgggctggtcgggggtgagctgtgcagggagaaggctgggcccccttggtctcaggtgaggagggcccgttccctgcctcacctgagggggacctgagaaggcagtcttccctctgctgtttctaagactgcggtgttcaacctgtgcctggtgctctcagcataactttcccttctcctttccagggtagcatcacgcccacagactacaccctctccaagtgctacctcccacgtgaggatgtggttttgatcatctactgtggagtggtgggcttccttgtggtcctcacactcactcactttgggcttctagcctcaccttttctttctggtttgaacttgctcggaaagcgtaagacaagatgaagagcaggcgccattataaatatcaaagcccaagaaatggaactttgggcagagatcatgttagaatcaagtggatgatgagaccaattacaggccgtctctctgcacagcacagaaattctcaatcactgaaatgagtaactgcaaaataaatagttgattgtactgttctcatgctataaaagtggacaggtactctacaacaaatctgttttctcatttttatcaaatatatgtatcatcaaaggttgcatctgtacagtatgtaaatgctattaatgtcgtcactcacatgcacgacagtccttgttcccccaggaagggcctggtggccccagcacacacttgggattatgtgtatacataaataaatattgggctgtttccctcttcctgtgaagtggttctcaaattcctatgtactgtaaagctgtacccttaaaagtacagatgtggccgggcacagtggctcacacctgtaatcccagcactttgggaggctgaggcgggtggatcacttgaggtcaggagttcaagaccagcctggccaacatggtgaaacctcgtctccgctagaaatacaaaaattagccaagcatggtagcaagtgcctataataccagctgaggctgaggcaggagaatcccttgagcccgggaggcggaggttgcagtgagccaagatcatgccactgcactctagcctgggcaacagagtgagactccgtctcaaaaaatatattttaaaaaaaaaaagtacagatgtgatgtgcagaacatattgttttcgtagatttttatacttgatcaattaatggaatcagatttttagataagtgtaattttctctataggagaccacgttgctacatctgttaatgcctgtcagtgatcaaaagaaacttaaaaagtggaatgggatatggcttttggtacctgaaaataaatgctttaataattgtaagccagataaaagttattctttttgtttttttttcttaacagtctggctgttgtttgaattaaactcttaaa

SEQ ID NO: 462453 - DNA, 662 bp, Homo sapiens
ttttacttcataaaaaggtggaggaaaccctaacattttcaaattcaaagtaaatgaaaacatttgccactgttgttccacataaaagtatctgcagagaaaagcccatggagacgacctggacacatgtatttctagggaacagatgcttagttgagcatcaaggggcaggaagacacctttccctccttgttcctcgctgaccgatgaccctggaactccacggtgcctctctgaatctctgttatggatcccccactatatttgatgggaacccagtgagccaggggccagttttgacaggtcagtgtcccagacattttccactcaggcacacttgggccttacttgtctctcctgctggagcctgggctggtcgggggtgagctgtgcagggagaaggctgggcccccttggtctcaggtgaggagggcccgttccctgcctcacctgagggggacctgagaaggcagtcttccctctgctgtttctaagactgcggtgttcaacctgtgcctggtgctctcagcataactttcccttctcctttccagggtagcatcacgcccacagactacaccctctccaagtgctacctcccacgtgaggatgtggttttgatcatctactgtggagtgcacttggagagtctccgtcgaact

SEQ ID NO: 462454 - DNA, 1011 bp, Homo sapiens
acccccagcggcctcacctgcgtttccctccgcttcagctttgtgatggtcaacagcgtggcgctgaacggggatggctgtggcatctgctctgaaacagaagaagagctcattgaagtttctcacagactgaactgctcccgagaggcacgtggctccagccggtgtggacctgggcctctgctgcccacgtctgcccctgtcctcctgcaggtgagctgggggaggaaagggctcatggcagacagcaggcagcctgtggtttcacgatagccgcctgaactcctctctccaccccggacagcattatcctctgtatcggagaagtgatgctaactgttctggggaagacgctgctcctccagaggaaagggacatcccatttaaggagaactatgacgtgctttcacgggaggcatcacaaaagctgctgtggtggctccagccgcgcctggttctcagtggccacacgcacagcgcctgcgaggtgcaccacgggggccgagtccccgagctcagcgtcccatctttcagttggaggaacagaaacaaccccagtttcatcatggtaacgtgaaagtttatttttgtctgaaagctttcataagtatttaaatcaacacagtaatcaactatttaattgctgcaatcggtcaaaatttacaagagccacacacaaatttctctccctctacacgtagctccatacactgccccttgccaaacacccttccgggaaccaatcagcatgacattcctgggcagttaatgtgagaagcgagggcagggcaccgtccaggtggactttatccttcagggagggccgtatcctctcctcttacactctgtgtgtgtttaattttctaaagaaacaaccatttattcattagctatactcagccatcttctcttattttctaaacatgcccatttgacctggcagagaacgctacagcttttgcaggttgataaaagatgtttcacttaatgaccactgggcgttttaactcc

SEQ ID NO: 462455 - DNA, 1785 bp, Homo sapiens
acccccagcggcctcacctgcgtttccctccgcttcagctttgtgatggtcaacagcgtggcgctgaacggggatggctgtggcatctgctctgaaacagaagaagagctcattgaagtttctcacagactgaactgctcccgagaggcacgtggctccagccggtgtggacctgggcctctgctgcccacgtctgcccctgtcctcctgcaggtgagctgggggaggaaagggctcatggcagacagcaggcagcctgtggtttcacgatagccgcctgaactcctctctccaccccggacagcattatcctctgtatcggagaagtgatgctaactgttctggggaagacgctgctcctccagaggaaagggacatcccatttaaggagaactatgacgtgctttcacgggaggcatcacaaaagctgctgtggtggctccagccgcgcctggttctcagtggccacacgcacagcgcctgcgaggtgcaccacgggggccgagtccccgagctcagcgtcccatctttcagttggaggaacagaaacaaccccagtttcatcatgggtagcatcacgcccacagactacaccctctccaagtgctacctcccacgtgaggatgtggttttgatcatctactgtggagtggtgggcttccttgtggtcctcacactcactcactttgggcttctagcctcaccttttctttctggtttgaacttgctcggaaagcgtaagacaagatgaagagcaggcgccattataaatatcaaagcccaagaaatggaactttgggcagagatcatgttagaatcaagtggatgatgagaccaattacaggccgtctctctgcacagcacagaaattctcaatcactgaaatgagtaactgcaaaataaatagttgattgtactgttctcatgctataaaagtggacaggtactctacaacaaatctgttttctcatttttatcaaatatatgtatcatcaaaggttgcatctgtacagtatgtaaatgctattaatgtcgtcactcacatgcacgacagtccttgttcccccaggaagggcctggtggccccagcacacacttgggattatgtgtatacataaataaatattgggctgtttccctcttcctgtgaagtggttctcaaattcctatgtactgtaaagctgtacccttaaaagtacagatgtggccgggcacagtggctcacacctgtaatcccagcactttgggaggctgaggcgggtggatcacttgaggtcaggagttcaagaccagcctggccaacatggtgaaacctcgtctccgctagaaatacaaaaattagccaagcatggtagcaagtgcctataataccagctgaggctgaggcaggagaatcccttgagcccgggaggcggaggttgcagtgagccaagatcatgccactgcactctagcctgggcaacagagtgagactccgtctcaaaaaatatattttaaaaaaaaaaagtacagatgtgatgtgcagaacatattgttttcgtagatttttatacttgatcaattaatggaatcagatttttagataagtgtaattttctctataggagaccacgttgctacatctgttaatgcctgtcagtgatcaaaagaaacttaaaaagtggaatgggatatggcttttggtacctgaaaataaatgctttaataattgtaagccagataaaagttattctttttgtttttttttcttaacagtctggctgttgtttgaattaaactcttaaa

SEQ ID NO: 462456 - DNA, 591 bp, Homo sapiens
acccccagcggcctcacctgcgtttccctccgcttcagctttgtgatggtcaacagcgtggcgctgaacggggatggctgtggcatctgctctgaaacagaagaagagctcattgaagtttctcacagactgaactgctcccgagaggcacgtggctccagccggtgtggacctgggcctctgctgcccacgtctgcccctgtcctcctgcaggtgagctgggggaggaaagggctcatggcagacagcaggcagcctgtggtttcacgatagccgcctgaactcctctctccaccccggacagcattatcctctgtatcggagaagtgatgctaactgttctggggaagacgctgctcctccagaggaaagggacatcccatttaaggagaactatgacgtgtttcacagtatctcagattttcatttaatcgctttttttttttccagtaaacctacttctgtttcctaccctcaagtcagtaatagtctcagctattctttgtattcagagtttttcaccaacttaaatgtatttagaaatgtgaatggaactgaaaagtcaattttttagggacttaattaaaaatt

SEQ ID NO: 462457 - DNA, 4778 bp, Homo sapiens
tgctgcagggatgttaggatttcttgggcctgggaatccacttctccctccccctggtctctccttgtctctcttcacctctgtctctgactttcctggtctctgtcccaggccccctccccactggcaggaagatcaaagccacctaaggccgtagccccaaacacagattcctgggagccgccgcagggggaatccctgccggaaggttttgcctggagcagagacatagcgtctcacctcccacccctcctgccttcccactgcaccatggctccaggacccttctcctcggccctcctctcgccgccgcccgctgccctgccctttctgctgctgctctgggcgggggcatctcgtggccagccctgccccggccgctgcatctgccagaacgtggcgcccacactgacaatgctgtgcgccaagaccggcttgctctttgtgccgcccgccatcgaccggcgcgtggtggagctgcggctcaccgacaacttcatcgccgccgtgcgccgccgagacttcgccaacatgaccagcctggtgcacctcactctctcccggaacaccatcggccaggtggcagctggcgccttcgccgacctgcgtgccctccgggccctgcacctggacagcaaccgcctggcggaggtgcgcggcgaccagctccgcggcctgggcaacctccgccacctgatccttggaaacaaccagatccgccgggtggagtcggcggcctttgacgccttcctgtccaccgtggaggacctggatctgtcctacaacaacctggaggccctgccgtgggaggcggtgggccagatggtgaacctaaacaccctcacgctggaccacaacctcatcgaccacatcgcggaggggaccttcgtgcagcttcacaagctggtccgtctggacatgacctccaaccgcctgcataaactcccgcccgacgggctcttcctgaggtcgcagggcaccgggcccaagccgcccaccccgctgaccgtcagcttcggcggcaaccccctgcactgcaactgcgagctgctctggctgcggcggctgacccgcgaggacgacttagagacctgcgccacgcccgaacacctcaccgaccgctacttctggtccatccccgaggaggagttcctgtgtgagcccccgctgatcacacggcaggcggggggccgggccctggtggtggaaggccaggcggtgagcctgcgctgccgagcggtgggtgaccccgagccggtggtgcactgggtggcacctgatgggcggctgctggggaactccagccggacccgggtccggggggacgggacgctggatgtgaccatcaccaccttgagggacagtggcaccttcacttgtatcgcctccaatgctgctggggaagcgacggcgcccgtggaggtgtgcgtggtacctctgcctctgatggcacccccgccggctgccccgccgcctctcaccgagcccggctcctctgacatcgccacgccgggcagaccaggtgccaacgattctgcggctgagcgtcggctcgtggcagccgagctcacctcgaactccgtgctcatccgctggccagcccagaggcctgtgcccggaatacgcatgtaccaggttcagtacaacagttccgttgatgactccctcgtctacaggatgatcccgtccaccagtcagaccttcctggtgaatgacctggcggcgggccgtgcctacgacttgtgcgtgctggcggtctacgacgacggggccacagcgctgccggcaacgcgagtggtgggctgtgtacagttcaccaccgctggggatccggcgccctgccgcccgctgagggcccatttcttgggcggcaccatgatcatcgccatcgggggcgtcatcgtcgcctcggtcctcgtcttcatcgttctgctcatgatccgctataaggtgtatggcgacggggacagccgccgcgtcaagggctccaggtcgctcccgcgggtcagccacgtgtgctcgcagaccaacggcgcaggcacaggcgcggcacaggccccggccctgccggcccaggaccactacgaggcgctgcgcgaggtggagtcccaggctgcccccgccgtcgccgtcgaggccaaggccatggaggccgagacggcatccgcggagccggaggtggtccttggacgttctctgggcggctcggccacctcgctgtgcctgctgccatccgaggaaacttccggggaggagtctcgggccgcggtgggccctcgaaggagccgatccggcgccctggagccaccaacctcggcgccccctactctagctctagttcctgggggagccgcggcccggccgaggccgcagcagcgctattcgttcgacggggactacggggcactattccagagccacagttacccgcgccgcgcccggcggacaaagcgccaccggtccacgccgcacctggacggggctggagggggcgcggccggggaggatggagacctggggctgggctccgccagggcgtgcctggctttcaccagcaccgagtggatgctggagagtaccgtgtgagcggcgggcgggcgccgggacgcctgggtgccgcagaccaaacgcccagccgcacggacgctggggcgggactgggagaaagcgcagcgccaagacattggaccagagtggagacgcgcccttgtccccgggagggggcggggcagcctcgggctgcggctcgaggccacgcccccgtgcccagggcggggttcggggaccggctgccggcctcccttcccctatggactcctcgacccccctcctacccctcccctcgcgcgctcgcggacctcgctggagccggtgccttacacagcgaagcgcggggaggggcagggccccctgacactgcagcactgagacacgagccccctcccccagcccgtcacccggggccggggcgaggggcccatttcttgtatctggctggactagatcctattctgtcccgcggcggcctccaaagcctcccaccccaccccacgcacattcctggtccggtcgggtctggcttggggtccccctttctctgtttccctcgtttgtctctatcccgccctcttgtcgtctctctgtagtgcctgtctttccctatttgcctctcctttctctctgtcctgtcgtctcttgtccctcggccctccctggttttgtctagtctccctgtctctcctgatttcttctctttactcattctcccgggcaggtcccactggaaggaccagactctcccaaataaatccccacacgaacaaaatccaaaaccaaatccccctccctaccggagccgggaccctccgccgcagcagaattaaacttttttctgtgtctgaggccctgctgacctgtgtgtgtgtgtgtgtgtgtgtgttgggggagggtgacctagattgcagcataaggactctaagtgagactgaaggaagatgggaagatgactaactggggccggaggagactggcagacaggcttttatcctctgagagacttagaggtggggaataatcacaaaaataaaatgatcataatagctaacgcttagtgaatacttacttactatgtgccaagcacttaagtcatttaattctcacaacaccaggacatatcggtattattatcctgttttccagatgagggaattttggcccagaaaagttaaataactggcccaaggtggtaaaactgggatttaaaaaggcaggcaggccaacttctgagtctctactataggggtgaaaagacagcttccccttcactctctgaaatttcactggaatgggctgacaatagattaacaagagaaaaggaatatggagggtatttaacatgcactaggaaaatcacaggaaagtgattacccaataacccagtgaggtttatatacttatatacctttcttcacaggaggggagatggggaaaggaaggcaattttgaggggtaataaatgattttggggaaaataaatgggtccaggagatagaatttagcttgtaaatgtctctggaatttgagactgacagacagataatttcttgtgacaaagtccgtccaggtgtagacatttctctgtctttttttcctgttaaagataatgaaatgtcagggagaggacagaaggcacttgtgttctttttgatctttaggcagataagaagacataggaggaaagcctcttccagcatctatggatctctaagtgcctttaatttaaaataatcagcataccagggtgccatattttggggtgacattccctgaactcctttaatactcaactagagcactgtactgctgagcagttattgaatattcattccaccctctgagacctcacaactcagtggggtagggtagatctatccttggtcccattttacagacaagaacctgaaccacagagagatgaagtcacttgccgtagtccctccatccccccaatgaataaatagcggagctggaagtttgattgtacccctacactatgctgcctctggggtctgtgtccggaagctggggtatggcccccatgagcttagctgagcttggatatccacagctagcctggtgagctcagggacaagacctcttgtgtcgctctgcctggaatctgagggaccctggcggagggcatggaggatggtgtggggagaggagtttctcaggtgaggctgagggctgtggctggggaaggaaagctggttggggag

SEQ ID NO: 462458 - DNA, 4827 bp, Homo sapiens
tgctgcagggatgttaggatttcttgggcctgggaatccacttctccctccccctggtctctccttgtctctcttcacctctgtctctgactttcctggtctctgtcccaggccccctccccactggcaggaagatcaaagccacctaaggccgtagccccaaacacagattcctgggagccgccgcagggggaatccctgccggaaggttttgcctggagcagagacatagcgtctcacctcccacccctcctgccttcccactgcaccatggctccaggacccttctcctcggccctcctctcgccgccgcccgctgccctgccctttctgctgctgctctgggcgggggcatctcgtggccagccctgccccggccgctgcatctgccagaacgtggcgcccacactgacaatgctgtgcgccaagaccggcttgctctttgtgccgcccgccatcgaccggcgcgtggtggagctgcggctcaccgacaacttcatcgccgccgtgcgccgccgagacttcgccaacatgaccagcctggtgcacctcactctctcccggaacaccatcggccaggtggcagctggcgccttcgccgacctgcgtgccctccgggccctgcacctggacagcaaccgcctggcggaggtgcgcggcgaccagctccgcggcctgggcaacctccgccacctgatccttggaaacaaccagatccgccgggtggagtcggcggcctttgacgccttcctgtccaccgtggaggacctggatctgtcctacaacaacctggaggccctgccgtgggaggcggtgggccagatggtgaacctaaacaccctcacgctggaccacaacctcatcgaccacatcgcggaggggaccttcgtgcagcttcacaagctggtccgtctggacatgacctccaaccgcctgcataaactcccgcccgacgggctcttcctgaggtcgcagggcaccgggcccaagccgcccaccccgctgaccgtcagcttcggcggcaaccccctgcactgcaactgcgagctgctctggctgcggcggctgacccgcgaggacgacttagagacctgcgccacgcccgaacacctcaccgaccgctacttctggtccatccccgaggaggagttcctgtgtgagcccccgctgatcacacggcaggcggggggccgggccctggtggtggaaggccaggcggtgagcctgcgctgccgagcggtgggtgaccccgagccggtggtgcactgggtggcacctgatgggcggctgctggggaactccagccggacccgggtccggggggacgggacgctggatgtgaccatcaccaccttgagggacagtggcaccttcacttgtatcgcctccaatgctgctggggaagcgacggcgcccgtggaggtgtgcgtggtacctctgcctctgatggcacccccgccggctgccccgccgcctctcaccgagcccggctcctctgacatcgccacgccgggcagaccaggtgccaacgattctgcggctgagcgtcggctcgtggcagccgagctcacctcgaactccgtgctcatccgctggccagcccagaggcctgtgcccggaatacgcatgtaccaggttcagtacaacagttccgttgatgactccctcgtctacaggatgatcccgtccaccagtcagaccttcctggtgaatgacctggcggcgggccgtgcctacgacttgtgcgtgctggcggtctacgacgacggggccacagcgctgccggcaacgcgagtggtgggctgtgtacagttcaccaccgctggggatccggcgccctgccgcccgctgagggcccatttcttgggcggcaccatgatcatcgccatcgggggcgtcatcgtcgcctcggtcctcgtcttcatcgttctgctcatgatccgctataaggtgtatggcgacggggacagccgccgcgtcaagggctccaggtcgctcccgcgggtcagccacgtgtgctcgcagaccaacggcgcaggcacaggcgcggcacaggccccggccctgccggcccaggaccactacgaggcgctgcgcgaggtggagtcccaggctgcccccgccgtcgccgtcgaggccaaggccatggaggccgagacggcatccgcggagccggaggtggtccttggacgttctctgggcggctcggccacctcgctgtgcctgctgccatccgaggaaacttccggggaggagtctcgggccgcggtgggccctcgaaggagccgatccggcgccctggagccaccaacctcggcgccccctactctagctctagttcctgggggagccgcggcccggccgaggccgcagcagcgctattcgttcgacggggactacggggcactattccagagccacagttacccgcgccgcgcccggcggacaaagcgccaccggtccacgccgcacctggacggggctggagggggcgcggccggggaggatggagacctggggctgggctccgccagggcgtgcctggctttcaccagcaccgagtggatgctggagagtaccgtgtgagcggcgggcgggcgccgggacgcctgggtgccgcagaccaaacgcccagccgcacggacgctggggcgggactgggagaaagcgcagcgccaagacattggaccagagtggagacgcgcccttgtccccgggagggggcggggcagcctcgggctgcggctcgaggccacgcccccgtgcccagggcggggttcggggaccggctgccggcctcccttcccctatggactcctcgacccccctcctacccctcccctcgcgcgctcgcggacctcgctggagccggtgccttacacagcgaagcgcggggaggggcagggccccctgacactgcagcactgagacacgagccccctcccccagcccgtcacccggggccggggcgaggggcccatttcttgtatctggctggactagatcctattctgtcccgcggcggcctccaaagcctcccaccccaccccacgcacattcctggtccggtcgggtctggcttggggtccccctttctctgtttccctcgtttgtctctatcccgccctcttgtcgtctctctgtagtgcctgtctttccctatttgcctctcctttctctctgtcctgtcgtctcttgtccctcggccctccctggttttgtctagtctccctgtctctcctgatttcttctctttactcattctcccgggcaggtcccactggaaggaccagactctcccaaataaatccccacacgaacaaaatccaaaaccaaatccccctccctaccggagccgggaccctccgccgcagcagaattaaacttttttctgtgtctgaggccctgctgacctgtgtgtgtgtctgtatgtgtgtccgcgtgtagtgtgtgtgtgtgtgtgtgtgtgtgtgtgtgtgtgtgtgtgttgggggagggtgacctagattgcagcataaggactctaagtgagactgaaggaagatgggaagatgactaactggggccggaggagactggcagacaggcttttatcctctgagagacttagaggtggggaataatcacaaaaataaaatgatcataatagctaacgcttagtgaatacttacttactatgtgccaagcacttaagtcatttaattctcacaacaccaggacatatcggtattattatcctgttttccagatgagggaattttggcccagaaaagttaaataactggcccaaggtggtaaaactgggatttaaaaaggcaggcaggccaacttctgagtctctactataggggtgaaaagacagcttccccttcactctctgaaatttcactggaatgggctgacaatagattaacaagagaaaaggaatatggagggtatttaacatgcactaggaaaatcacaggaaagtgattacccaataacccagtgaggtttatatacttatatacctttcttcacaggaggggagatggggaaaggaaggcaattttgaggggtaataaatgattttggggaaaataaatgggtccaggagatagaatttagcttgtaaatgtctctggaatttgagactgacagacagataatttcttgtgacaaagtccgtccaggtgtagacatttctctgtctttttttcctgttaaagataatgaaatgtcagggagaggacagaaggcacttgtgttctttttgatctttaggcagataagaagacataggaggaaagcctcttccagcatctatggatctctaagtgcctttaatttaaaataatcagcataccagggtgccatattttggggtgacattccctgaactcctttaatactcaactagagcactgtactgctgagcagttattgaatattcattccaccctctgagacctcacaactcagtggggtagggtagatctatccttggtcccattttacagacaagaacctgaaccacagagagatgaagtcacttgccgtagtccctccatccccccaatgaataaatagcggagctggaagtttgattgtacccctacactatgctgcctctggggtctgtgtccggaagctggggtatggcccccatgagcttagctgagcttggatatccacagctagcctggtgagctcagggacaagacctcttgtgtcgctctgcctggaatctgagggaccctggcggagggcatggaggatggtgtggggagaggagtttctcaggtgaggctgagggctgtggctggggaaggaaagctggttggggag

SEQ ID NO: 462459 - DNA, 969 bp, Homo sapiens
gcagcaactcctccccaattaccacaatcgtcacctcctggccgctgtcacagccacatgctctcatcctcactgactgaatgacgagaaatgaaagctgaagtggtctacacagcagagagctgtggggtggggtcagccctggccacctcttactttgcgtcttatggtgactctgtgattctccctgggccaccttctgtcttccaggtcctgccctatccttggatccagggataccaccctggcatccccaccacctacagatgggagcttgctccctgttcccgcccccccggggccccctctggccggcccgctgcagggctggcggcggagaccccgccagctgtggctccgggtgccgcgcgccccctagtggccatggcaggttttgcagcacatctggcggaagtaggctcggctgcagaactgaaatttgagcaccagggggcagtctcagctgccctccccgcagggctgcacacacgacctgcagtgcttcctggccagtgactttctgtgccttggtttctttctttttaaatttactttttttttttttttttttttttttttttacagatgttatcttgctatgttgaccaggctggtctccacctcttgagctcaagtgatcctctcacctcagcctcctaagtagttgggactacaggtgtgagcaaaccacgcctgacttctgtgccttagtttcctcaactatcaaagggggcttataatagcaccgatgtcactaggctgttttgaggatttaagagagagagtgtaggggtatttttcagaacattgactattttgtgtgatcatgatgtctgttgatgactatggatggatatgagcttccatctagcggccagtgatttatggcaggaccaggggcgaattaaaagctacagatggattttttttttttttttggtcgcccaggctggagtgcagtggcacaat

SEQ ID NO: 462460 - DNA, 638 bp, Homo sapiens
cctccaggaaaaacaacagcagcagtatttatttgtcggtaccgaaactcgtatgctctcagctcaccgtcatggatgctctatcagaagcaaatggcacatttgcattaaaccttttgaaaaagctaggggaaaacaactcaaacaacttatttttttccccatgagcatatcatcagccttggccatggttttcatgggggcaaagggaaacactgcagctcagatgtctcaggcactttgttttagtaaaatcggaggtgaagatggagatattcatcgaggttttcagtcacttcttgttgcaattaacagaactgacactgaatatgtgcttagaactgccaacgggctctttggagaaaagtcttatgatttcctcacaggttttacagattcctgtggcaaattctaccaagcaacgataaaacagctagactttgtgaatgatacagagaagtccacaacacgtgtaaactcctgggttgctgataaaactaaaggtgaaaatatattgttattctatttcgataatattttaaacagttttatagtcagttctttacaaaactgtcaaatataaaaaggagtccttttttctctaaacaactatgcaaacattaaaacctttctttgga

SEQ ID NO: 462461 - DNA, 711 bp, Homo sapiens
cctccaggaaaaacaacagcagcagtatttatttgtcggtaccgaaactcgtatgctctcagctcaccgtcatggatgctctatcagaagcaaatggcacatttgcattaaaccttttgaaaaagctaggggaaaacaactcaaacaacttatttttttccccatgagcatatcatcagccttggccatggttttcatgggggcaaagggaaacactgcagctcagatgtctcaggcactttgttttagtaaaatcggaggtgaagatggagatattcatcgaggttttcagtcacttcttgttgcaattaacagaactgacactgaatatgtgcttagaactgccaacgggctctttggagaaaagtcttatgatttcctcacaggttttacagattcctgtggcaaattctaccaagcaacgataaaacagctagactttgtgaatgatacagagaagtccacaacacgtgtaaactcctgggttgctgataaaactaaagcctggaaaattattcaaacaagcctgtcacatctggaggagccaggaatcgcctcttcctcttgttactgcaaagcctgccttccacagcccctactggttcactctattcccaaatgcaactctcctgtgaccccgcatggcatgtggtgacctccctccctgtgagcagttgtgactaataaactgccgccaatttcatctgtcca
